United States Patent Application Publication US 2006/0257851 A1 - sequence listing, part 6

SEQ ID NO: 173730 - RNA, 32 nt, Homo Sapiens
auugugucugagcagagcuggguccccccaaa

SEQ ID NO: 173731 - RNA, 32 nt, Homo Sapiens
ugguacccaucugccuucuccaguucauucua

SEQ ID NO: 173732 - RNA, 32 nt, Homo Sapiens
uucauaauguuaccauuuucuuaaauauuauu

SEQ ID NO: 173733 - RNA, 32 nt, Homo Sapiens
gguuuaaacacacagagacacacacacacguu

SEQ ID NO: 173734 - RNA, 32 nt, Homo Sapiens
caccuguaaucccagcacuuucggaggccaag

SEQ ID NO: 173735 - RNA, 32 nt, Homo Sapiens
ugaaugugaugaauguaggaaaacuuuuuacc

SEQ ID NO: 173736 - RNA, 32 nt, Homo Sapiens
ucccaggcuggucuuaaacucccggccucaag

SEQ ID NO: 173737 - RNA, 32 nt, Homo Sapiens
caccuccccccuguggagggccaggcagaggc

SEQ ID NO: 173738 - RNA, 32 nt, Homo Sapiens
accuccggccccaggcaccggggcgccgggac

SEQ ID NO: 173739 - RNA, 32 nt, Homo Sapiens
ugugugagccggccggccgcggcaagccgcau

SEQ ID NO: 173740 - RNA, 32 nt, Homo Sapiens
auuucuuaucuuucuucuuuuauauuuuuugg

SEQ ID NO: 173741 - RNA, 32 nt, Homo Sapiens
augucucuacuguagcuuccaggccguuuccc

SEQ ID NO: 173742 - RNA, 28 nt, Homo Sapiens
auaucgcuggccagcauuauaagcaggu

SEQ ID NO: 173743 - RNA, 32 nt, Homo Sapiens
gcucgagggccaguguggcauucuuacuuaau

SEQ ID NO: 173744 - RNA, 32 nt, Homo Sapiens
augugugcgugugcacacacacuuaaacacgu

SEQ ID NO: 173745 - RNA, 32 nt, Homo Sapiens
gaccuuuuuaguguuaaaucuguaacauuacu

SEQ ID NO: 173746 - RNA, 32 nt, Homo Sapiens
accguauuuuuggaauaaguuuugaauuuagg

SEQ ID NO: 173747 - RNA, 32 nt, Homo Sapiens
ccaucauuugguuuccucuuuggcuuugggga

SEQ ID NO: 173748 - RNA, 32 nt, Homo Sapiens
aauuaacuauacaaugucuguuuauuaaauua

SEQ ID NO: 173749 - RNA, 32 nt, Homo Sapiens
ugggaaggaagauaagaacagaugagucagag

SEQ ID NO: 173750 - RNA, 32 nt, Homo Sapiens
ucucuuugugugcucccagcacuuccuucuuu

SEQ ID NO: 173751 - RNA, 32 nt, Homo Sapiens
uuaggaaaggcugaugaugguauaaaguuugc

SEQ ID NO: 173752 - RNA, 32 nt, Homo Sapiens
aauccaucuguguugauacaauaaaaauucau

SEQ ID NO: 173753 - RNA, 32 nt, Homo Sapiens
accuuccuauuauaaauauauaaagcaugaca

SEQ ID NO: 173754 - RNA, 31 nt, Homo Sapiens
ccuucuuuaaacacucuucagagaaaucugc

SEQ ID NO: 173755 - RNA, 32 nt, Homo Sapiens
caccaguaaaauguacagugcaugcuuuuaaa

SEQ ID NO: 173756 - RNA, 32 nt, Homo Sapiens
gggacacugggagcaagcuggugcuggagcau

SEQ ID NO: 173757 - RNA, 32 nt, Homo Sapiens
auaucguauguuagauuuuugauaaaauuugg

SEQ ID NO: 173758 - RNA, 30 nt, Homo Sapiens
acguggccucuuccgauccuuuucucucag

SEQ ID NO: 173759 - RNA, 32 nt, Homo Sapiens
uguuguuauaaagauuaaacgaguuaaguuug

SEQ ID NO: 173760 - RNA, 32 nt, Homo Sapiens
gccuucagcuggagaaaacauuggguggagac

SEQ ID NO: 173761 - RNA, 32 nt, Homo Sapiens
cacucccagagccugccccagcccuucgagcc

SEQ ID NO: 173762 - RNA, 32 nt, Homo Sapiens
gaugcggagucacauuucaaugguacgaaaag

SEQ ID NO: 173763 - RNA, 32 nt, Homo Sapiens
gcucccuggcccggccggggccgcgcaguuag

SEQ ID NO: 173764 - RNA, 32 nt, Homo Sapiens
aacuaagaacagagcaaugagaaggacccaac

SEQ ID NO: 173765 - RNA, 32 nt, Homo Sapiens
aaugggagugagaacauucacuuuuugaagga

SEQ ID NO: 173766 - RNA, 32 nt, Homo Sapiens
cagcccuucaguuuccucacuguccccaggug

SEQ ID NO: 173767 - RNA, 32 nt, Homo Sapiens
uacauccuacugaccuagaggcucacgggacc

SEQ ID NO: 173768 - RNA, 32 nt, Homo Sapiens
agggguuugcuguuccauggaagagccccugg

SEQ ID NO: 173769 - RNA, 32 nt, Homo Sapiens
agcaggaccaaaaagagaugccaggcagauuu

SEQ ID NO: 173770 - RNA, 32 nt, Homo Sapiens
cuagggcgacugcagagcgaccccaagccggc

SEQ ID NO: 173771 - RNA, 32 nt, Homo Sapiens
aguacuacugucaacauaguguaaaugguucu

SEQ ID NO: 173772 - RNA, 32 nt, Homo Sapiens
uuucaugagcucucuugcugcugguuaccgga

SEQ ID NO: 173773 - RNA, 32 nt, Homo Sapiens
cagcagcccucucucaccccaguguccugaua

SEQ ID NO: 173774 - RNA, 32 nt, Homo Sapiens
uccugaggcuugccuccacuuugaccuggcug

SEQ ID NO: 173775 - RNA, 32 nt, Homo Sapiens
uguuuuaugacccuuggaacuuugaagaguac

SEQ ID NO: 173776 - RNA, 32 nt, Homo Sapiens
ucugucaaggacucagacaccccaacugcaaa

SEQ ID NO: 173777 - RNA, 32 nt, Homo Sapiens
acaggccguucccuuccggacccaggcaggcu

SEQ ID NO: 173778 - RNA, 32 nt, Homo Sapiens
uuagcucccccacuccucccuacaggcccacc

SEQ ID NO: 173779 - RNA, 32 nt, Homo Sapiens
ucuuuucgccaucucucccagcccuggaacag

SEQ ID NO: 173780 - RNA, 32 nt, Homo Sapiens
aaguggugggugaagcaggggaggcuccucua

SEQ ID NO: 173781 - RNA, 32 nt, Homo Sapiens
guggcaauuuuuuccuucaucugugagugaau

SEQ ID NO: 173782 - RNA, 32 nt, Homo Sapiens
augucacuuuucuguuaagaaaacugagcccc

SEQ ID NO: 173783 - RNA, 32 nt, Homo Sapiens
ugcuugggagaauggggcugggacaugcacug

SEQ ID NO: 173784 - RNA, 32 nt, Homo Sapiens
gaccucacaucauauuugguucuccuacugac

SEQ ID NO: 173785 - RNA, 32 nt, Homo Sapiens
gcuacccggcccggagccuggccgacgccggg

SEQ ID NO: 173786 - RNA, 32 nt, Homo Sapiens
aaggacaaaauugaaaaccaaaaacuauguua

SEQ ID NO: 173787 - RNA, 32 nt, Homo Sapiens
auuaaacauaucugauucugaagauaaaacug

SEQ ID NO: 173788 - RNA, 32 nt, Homo Sapiens
accgacgccaccccgcgccccgcccuaggguc

SEQ ID NO: 173789 - RNA, 32 nt, Homo Sapiens
uggacugucaauauucagaaaaccaaaaauaa

SEQ ID NO: 173790 - RNA, 32 nt, Homo Sapiens
ggugauuugcuucauugagaucuugcucccag

SEQ ID NO: 173791 - RNA, 32 nt, Homo Sapiens
uugaaaaguuuaggaaaucauaauguggcaga

SEQ ID NO: 173792 - RNA, 32 nt, Homo Sapiens
cuggguggcugggacagguuggcuaagggacu

SEQ ID NO: 173793 - RNA, 32 nt, Homo Sapiens
uagaagaagacacacauccuggguguacagug

SEQ ID NO: 173794 - RNA, 32 nt, Homo Sapiens
ccuagcuucuggauccaggucuaggcccuuca

SEQ ID NO: 173795 - RNA, 32 nt, Homo Sapiens
cuuccgcugaguuuccucucugccccauuucc

SEQ ID NO: 173796 - RNA, 32 nt, Homo Sapiens
uuuuugagagaaccuuauauuuuauauagucc

SEQ ID NO: 173797 - RNA, 32 nt, Homo Sapiens
ggugucgucacugccguccccggagggccaga

SEQ ID NO: 173798 - RNA, 32 nt, Homo Sapiens
cucucaggcaaccccaccucccccucucccuc

SEQ ID NO: 173799 - RNA, 32 nt, Homo Sapiens
cucacccauaauaaagguugugaauguucaaa

SEQ ID NO: 173800 - RNA, 32 nt, Homo Sapiens
ggaacgaggcucaggcggccaggcccgcgcgg

SEQ ID NO: 173801 - RNA, 32 nt, Homo Sapiens
cuuugggaggcugagguggguagauuacuuga

SEQ ID NO: 173802 - RNA, 32 nt, Homo Sapiens
aaauuagaaaacaaaacgaacucugguugggg

SEQ ID NO: 173803 - RNA, 32 nt, Homo Sapiens
gcagcauccgccgaggcccacccgggccaccc

SEQ ID NO: 173804 - RNA, 30 nt, Homo Sapiens
auugggcugcuaaugguguuggccaaacuc

SEQ ID NO: 173805 - RNA, 32 nt, Homo Sapiens
cuuggaaaaggaagaggaguugccagaaacag

SEQ ID NO: 173806 - RNA, 32 nt, Homo Sapiens
ugauguuagccugauuugggguuucuucaaga

SEQ ID NO: 173807 - RNA, 32 nt, Homo Sapiens
cacuggggcggccacgccucuccggcgggagg

SEQ ID NO: 173808 - RNA, 32 nt, Homo Sapiens
gguugauguuaaggcccuccauuuuggaaagc

SEQ ID NO: 173809 - RNA, 32 nt, Homo Sapiens
uuaagguacugaaaagaaaugaaguugaugua

SEQ ID NO: 173810 - RNA, 32 nt, Homo Sapiens
caaaagccauguauuucagggaccucaggggc

SEQ ID NO: 173811 - RNA, 32 nt, Homo Sapiens
uacacuguucauuuuuaaaauuccuucacacu

SEQ ID NO: 173812 - RNA, 32 nt, Homo Sapiens
gucauucaccagguggcaccacugccgucauu

SEQ ID NO: 173813 - RNA, 32 nt, Homo Sapiens
gcaaauucagauuacuguuugcuggcuaauug

SEQ ID NO: 173814 - RNA, 27 nt, Homo Sapiens
gcuccguccuucugaaacccggaaucc

SEQ ID NO: 173815 - RNA, 32 nt, Homo Sapiens
gcuggugccgggggugcuuuggggggagcugc

SEQ ID NO: 173816 - RNA, 32 nt, Homo Sapiens
cugagucucccucugucaccuaggcuggagug

SEQ ID NO: 173817 - RNA, 32 nt, Homo Sapiens
ucacacuguacucugagguccaaauacugucu

SEQ ID NO: 173818 - RNA, 32 nt, Homo Sapiens
uguuuuacaucauauaccgaaaauuagcucaa

SEQ ID NO: 173819 - RNA, 32 nt, Homo Sapiens
ccggcccugcgguuaaauguuccugaaauaau

SEQ ID NO: 173820 - RNA, 31 nt, Homo Sapiens
uaaguuauuugcucaaggguguaauggucau

SEQ ID NO: 173821 - RNA, 30 nt, Homo Sapiens
ggacggccaggacgcgcgggcucggaggac

SEQ ID NO: 173822 - RNA, 32 nt, Homo Sapiens
uuucucaaaauauuguaaaacuuuugacaaug

SEQ ID NO: 173823 - RNA, 31 nt, Homo Sapiens
aaaauagaauggugguugccaagggcuggga

SEQ ID NO: 173824 - RNA, 32 nt, Homo Sapiens
gaccuuugacauuucagaaaaauguauaucuc

SEQ ID NO: 173825 - RNA, 32 nt, Homo Sapiens
aaggcugcccgcgcggccagccugcaggagga

SEQ ID NO: 173826 - RNA, 32 nt, Homo Sapiens
cagccuuccacccauuucacagauguggacac

SEQ ID NO: 173827 - RNA, 32 nt, Homo Sapiens
agccuuuuuucugcaugauccaggagcacaua

SEQ ID NO: 173828 - RNA, 32 nt, Homo Sapiens
aaguggaagguggaacucuacccugaagucac

SEQ ID NO: 173829 - RNA, 32 nt, Homo Sapiens
gucuucagaguuuccugggaccgcggugggug

SEQ ID NO: 173830 - RNA, 32 nt, Homo Sapiens
ucuugaugauauaauuggaacucuucagccaa

SEQ ID NO: 173831 - RNA, 32 nt, Homo Sapiens
uucaaaaagucuuuuacacugucauguuggac

SEQ ID NO: 173832 - RNA, 32 nt, Homo Sapiens
cgccgaccgaagaggcuggacaugacaccagu

SEQ ID NO: 173833 - RNA, 32 nt, Homo Sapiens
acuguccugcgguuucauggcccuucuuccau

SEQ ID NO: 173834 - RNA, 32 nt, Homo Sapiens
acacgcugugcagcugggaaugagcuuggaaa

SEQ ID NO: 173835 - RNA, 32 nt, Homo Sapiens
gguagaggggaagagauugaacuuugcugacc

SEQ ID NO: 173836 - RNA, 32 nt, Homo Sapiens
aaaggauagcaaacaggaaaaaaaaaaaaaaa

SEQ ID NO: 173837 - RNA, 32 nt, Homo Sapiens
auuugauuccaagagagcuuaggaugacagca

SEQ ID NO: 173838 - RNA, 32 nt, Homo Sapiens
guugugguuuuccaucugauccuuccacucuu

SEQ ID NO: 173839 - RNA, 32 nt, Homo Sapiens
ccucaaaggccccuccccccagccuuccaagc

SEQ ID NO: 173840 - RNA, 32 nt, Homo Sapiens
ccugcucugcuuccugggggcuucagcaagcc

SEQ ID NO: 173841 - RNA, 32 nt, Homo Sapiens
cugccugccucccaggcagcugcugccucaca

SEQ ID NO: 173842 - RNA, 32 nt, Homo Sapiens
aggaaaugggagcacaguacugggaaauggga

SEQ ID NO: 173843 - RNA, 32 nt, Homo Sapiens
guaucuguuguaauaaacauguuaaaacaaaa

SEQ ID NO: 173844 - RNA, 32 nt, Homo Sapiens
aaaacauguuuucuggugcucaucucacaugc

SEQ ID NO: 173845 - RNA, 32 nt, Homo Sapiens
ucucaacucuaauccaucccagcccucuggag

SEQ ID NO: 173846 - RNA, 32 nt, Homo Sapiens
ggggucccaagccaguucccugccccuggucu

SEQ ID NO: 173847 - RNA, 32 nt, Homo Sapiens
uccuuaggccauucuccuucucuuccauggag

SEQ ID NO: 173848 - RNA, 32 nt, Homo Sapiens
caauggaaugaaaaagugacuucauauacgua

SEQ ID NO: 173849 - RNA, 31 nt, Homo Sapiens
ggaagugugugcucaaucuguaugugugcag

SEQ ID NO: 173850 - RNA, 32 nt, Homo Sapiens
aaauugacauuaacaucuguuaacuguaaaca

SEQ ID NO: 173851 - RNA, 32 nt, Homo Sapiens
cagacaagcugagcaccguuguaaccagagaa

SEQ ID NO: 173852 - RNA, 32 nt, Homo Sapiens
agcaaaugagagagccaacgcgcggaaaguuu

SEQ ID NO: 173853 - RNA, 32 nt, Homo Sapiens
gcggaggagauguuguccccagugucccgaga

SEQ ID NO: 173854 - RNA, 32 nt, Homo Sapiens
ccucaccaccucauuguucucaucuggaacug

SEQ ID NO: 173855 - RNA, 32 nt, Homo Sapiens
cagucucaagugaguucuuggccugggccugu

SEQ ID NO: 173856 - RNA, 32 nt, Homo Sapiens
uaaugauaguaacuuuuuucacacuguuaaga

SEQ ID NO: 173857 - RNA, 32 nt, Homo Sapiens
acauaaacauauacaauaaguuaaauaaauuc

SEQ ID NO: 173858 - RNA, 32 nt, Homo Sapiens
uugaggcaaagcauucauccuacaucauaaaa

SEQ ID NO: 173859 - RNA, 32 nt, Homo Sapiens
cgcggguugcgcggccggggaugcuccagcgg

SEQ ID NO: 173860 - RNA, 32 nt, Homo Sapiens
cagagaaggccaccauggcgacacuccucucc

SEQ ID NO: 173861 - RNA, 32 nt, Homo Sapiens
ggccgccgccgccgcugccaugucuccgggga

SEQ ID NO: 173862 - RNA, 32 nt, Homo Sapiens
cuccggcuucuucaguuccccagacgccagga

SEQ ID NO: 173863 - RNA, 32 nt, Homo Sapiens
gacaggggccagaggagauauggggaaggagc

SEQ ID NO: 173864 - RNA, 32 nt, Homo Sapiens
uuuccuccauucucuuucuucaccucuugagu

SEQ ID NO: 173865 - RNA, 32 nt, Homo Sapiens
agucuuguuuuuuauucagauugggaaaucca

SEQ ID NO: 173866 - RNA, 32 nt, Homo Sapiens
cuaaaguuggguccauggccauccagcaccug

SEQ ID NO: 173867 - RNA, 32 nt, Homo Sapiens
acuuucugcaauauucccugacccuucacccc

SEQ ID NO: 173868 - RNA, 31 nt, Homo Sapiens
caagagaaauaaauaaaaugucaucuguuag

SEQ ID NO: 173869 - RNA, 32 nt, Homo Sapiens
ccugcuuccugccaggacguggccucuuccga

SEQ ID NO: 173870 - RNA, 32 nt, Homo Sapiens
ccaauugcuaucuauuuuuuuauccagaggcu

SEQ ID NO: 173871 - RNA, 32 nt, Homo Sapiens
cugggaugcugguggcucuucagaggagcauc

SEQ ID NO: 173872 - RNA, 32 nt, Homo Sapiens
cuuaaaaaugguuuaaauggucaauuuuguua

SEQ ID NO: 173873 - RNA, 32 nt, Homo Sapiens
cccucccuuuucugccuaaaauuucucugccu

SEQ ID NO: 173874 - RNA, 32 nt, Homo Sapiens
aaagucaauguauggaguguauaauacuuuua

SEQ ID NO: 173875 - RNA, 32 nt, Homo Sapiens
cugaaaauaaaacuuugcuauguauuuacucu

SEQ ID NO: 173876 - RNA, 32 nt, Homo Sapiens
cccaucaugccccacacccaucagucaacacu

SEQ ID NO: 173877 - RNA, 32 nt, Homo Sapiens
uaguugaacccuggaaagcuuauguaaccauu

SEQ ID NO: 173878 - RNA, 32 nt, Homo Sapiens
ugugaaaacuaugaaucaggguaugaaauuca

SEQ ID NO: 173879 - RNA, 32 nt, Homo Sapiens
gagguuccgcugccuccaagccggacuuaggg

SEQ ID NO: 173880 - RNA, 32 nt, Homo Sapiens
uuggaccuggaagucauagugaauuugcagcu

SEQ ID NO: 173881 - RNA, 32 nt, Homo Sapiens
cagauuuacuuugaaagaaucaaguaugugaa

SEQ ID NO: 173882 - RNA, 32 nt, Homo Sapiens
ugagaaaaaauauucagaaacaacuuuaauaa

SEQ ID NO: 173883 - RNA, 32 nt, Homo Sapiens
ugaaugaagggacaaaugagaauagaaggcaa

SEQ ID NO: 173884 - RNA, 32 nt, Homo Sapiens
ccuagaguagaguauugaagucguggcaaaga

SEQ ID NO: 173885 - RNA, 32 nt, Homo Sapiens
ucgcgucaugguccuuuuagccagaagagagg

SEQ ID NO: 173886 - RNA, 32 nt, Homo Sapiens
gaggcucuccgagauuggggucgggucacugc

SEQ ID NO: 173887 - RNA, 32 nt, Homo Sapiens
auuaaauucaacaugagauuugggcagggaga

SEQ ID NO: 173888 - RNA, 31 nt, Homo Sapiens
ggugcuccauuaaaguuuuacucuguguugc

SEQ ID NO: 173889 - RNA, 32 nt, Homo Sapiens
aaaaaacuuccuccccugguuuuuuagggaga

SEQ ID NO: 173890 - RNA, 32 nt, Homo Sapiens
caccaaugagagagacaaggaggaaagcaucc

SEQ ID NO: 173891 - RNA, 32 nt, Homo Sapiens
uuuguuuuaagcuaaacaucuaaaacaaauuu

SEQ ID NO: 173892 - RNA, 31 nt, Homo Sapiens
gguucauuuugcauguaauagauuuaucugu

SEQ ID NO: 173893 - RNA, 32 nt, Homo Sapiens
uggaaaaggagacaugaaugucugcaaugaua

SEQ ID NO: 173894 - RNA, 32 nt, Homo Sapiens
caccugcaccugcguccuccccuccccggccc

SEQ ID NO: 173895 - RNA, 32 nt, Homo Sapiens
gacacuugccaugucucauuuauucucacacc

SEQ ID NO: 173896 - RNA, 32 nt, Homo Sapiens
ugguggugguuuuguuucuaugcaaacuggac

SEQ ID NO: 173897 - RNA, 32 nt, Homo Sapiens
gcaguuugcgcggcggcucggcgcuucccugu

SEQ ID NO: 173898 - RNA, 32 nt, Homo Sapiens
acgcccccuccagcccccucgccggugaccuu

SEQ ID NO: 173899 - RNA, 32 nt, Homo Sapiens
ucccgguuauguguagggaacagcagagugau

SEQ ID NO: 173900 - RNA, 32 nt, Homo Sapiens
gacaaggaugaaaaaauaagugaagaauguga

SEQ ID NO: 173901 - RNA, 32 nt, Homo Sapiens
agccacgguggcggcucugggggcagcucuug

SEQ ID NO: 173902 - RNA, 32 nt, Homo Sapiens
uuagcgcuuagugacacgcgggccuuuggugg

SEQ ID NO: 173903 - RNA, 32 nt, Homo Sapiens
auggccccaccugcucuuuccucccccgaggu

SEQ ID NO: 173904 - RNA, 32 nt, Homo Sapiens
cgccugcgcgugggccugggccgcccgucgua

SEQ ID NO: 173905 - RNA, 32 nt, Homo Sapiens
cuucuucuuggcccugcccacccagcaggccg

SEQ ID NO: 173906 - RNA, 32 nt, Homo Sapiens
ccuugcuuagcuugcuuccugucuccuugaua

SEQ ID NO: 173907 - RNA, 32 nt, Homo Sapiens
agcggcggggccagcugcguucugagccuggg

SEQ ID NO: 173908 - RNA, 32 nt, Homo Sapiens
cgcucuccgcggcucugucccgcggaccggug

SEQ ID NO: 173909 - RNA, 32 nt, Homo Sapiens
gcucugggaucuuuaauaucccauggcuaaaa

SEQ ID NO: 173910 - RNA, 32 nt, Homo Sapiens
cacucacaacggacacuuugcuccacacacau

SEQ ID NO: 173911 - RNA, 32 nt, Homo Sapiens
gguuccccuuaacacagagcgccccgcagucu

SEQ ID NO: 173912 - RNA, 32 nt, Homo Sapiens
ccuucagcugucagcuuucuggggcuaacuuc

SEQ ID NO: 173913 - RNA, 32 nt, Homo Sapiens
agauauauuuuguguauaacuuucucuguuag

SEQ ID NO: 173914 - RNA, 32 nt, Homo Sapiens
aggaaaacugaggcccuugggcaccucgacuu

SEQ ID NO: 173915 - RNA, 32 nt, Homo Sapiens
ucgagagacagagagacggagcgcgcuuuccu

SEQ ID NO: 173916 - RNA, 32 nt, Homo Sapiens
aguauuuugaucuauuugauaauuuugugggu

SEQ ID NO: 173917 - RNA, 32 nt, Homo Sapiens
auucccugaaaucgucgucuccugauaaacaa

SEQ ID NO: 173918 - RNA, 32 nt, Homo Sapiens
uuugggcucagguauugagccugauggcccag

SEQ ID NO: 173919 - RNA, 32 nt, Homo Sapiens
guuucuagcauuaaacaaauaaacaaggggag

SEQ ID NO: 173920 - RNA, 32 nt, Homo Sapiens
uuaugugacccuguuauauuucaguguuguga

SEQ ID NO: 173921 - RNA, 32 nt, Homo Sapiens
ugucuccaaauguggggcuguuguguauuguc

SEQ ID NO: 173922 - RNA, 32 nt, Homo Sapiens
cugacgcagacacaaugccauucuccagcagc

SEQ ID NO: 173923 - RNA, 32 nt, Homo Sapiens
acccaaagauguuacgaauuguuaucugaaag

SEQ ID NO: 173924 - RNA, 32 nt, Homo Sapiens
uuuaaaagagcuagugugauaauccuaacucu

SEQ ID NO: 173925 - RNA, 32 nt, Homo Sapiens
uuaaaaaauccaaguaaaagugccaaaacuac

SEQ ID NO: 173926 - RNA, 32 nt, Homo Sapiens
uguucuaauauuaaguagcauaggaggaaaaa

SEQ ID NO: 173927 - RNA, 32 nt, Homo Sapiens
cacacgggagcugugaugagagucacaggggu

SEQ ID NO: 173928 - RNA, 32 nt, Homo Sapiens
aagagucgugguauuuuuuucuuuauuuuuaa

SEQ ID NO: 173929 - RNA, 32 nt, Homo Sapiens
ccaugggcggauaacacugcuuugaaaagaca

SEQ ID NO: 173930 - RNA, 32 nt, Homo Sapiens
cucuuagauacggugucacuuccacauacaag

SEQ ID NO: 173931 - RNA, 32 nt, Homo Sapiens
cgcugugccucaguccuucaccuaccucgcca

SEQ ID NO: 173932 - RNA, 32 nt, Homo Sapiens
cgacaugugaauguuaucuuaugagacucugu

SEQ ID NO: 173933 - RNA, 32 nt, Homo Sapiens
aaauuagcugggugugguggugcaugccugua

SEQ ID NO: 173934 - RNA, 32 nt, Homo Sapiens
aaaucagcuggguaugguggcacgugccugug

SEQ ID NO: 173935 - RNA, 32 nt, Homo Sapiens
gccagggcccugggcaggccuccagcucgguc

SEQ ID NO: 173936 - RNA, 32 nt, Homo Sapiens
gucucuggcucucagcugcccaugccaccucc

SEQ ID NO: 173937 - RNA, 32 nt, Homo Sapiens
ccugucaggacacauggauuuuggcagggcgg

SEQ ID NO: 173938 - RNA, 32 nt, Homo Sapiens
agacaucuguuguaauauuguuuacggaaggg

SEQ ID NO: 173939 - RNA, 32 nt, Homo Sapiens
uuuuuacauguaaaaauaaacuaaacaaaccu

SEQ ID NO: 173940 - RNA, 32 nt, Homo Sapiens
cucuaucguuaugcugcagaucaguuugagcc

SEQ ID NO: 173941 - RNA, 32 nt, Homo Sapiens
guguugugguggccuguuggaggcaaauagau

SEQ ID NO: 173942 - RNA, 32 nt, Homo Sapiens
ggacacuuagguugauuccuuaucuuggcucu

SEQ ID NO: 173943 - RNA, 32 nt, Homo Sapiens
uuagugcuugucagcauuuuuccaugaggacu

SEQ ID NO: 173944 - RNA, 32 nt, Homo Sapiens
guauuuuguuuuuggaugugugaaugugcaua

SEQ ID NO: 173945 - RNA, 32 nt, Homo Sapiens
ggcuaagggacgguugggggcugggagcccug

SEQ ID NO: 173946 - RNA, 32 nt, Homo Sapiens
cagccuaggcaacacuaugugcucuuuucuca

SEQ ID NO: 173947 - RNA, 32 nt, Homo Sapiens
gugcccuguauuuuaucaguacuguugagggg

SEQ ID NO: 173948 - RNA, 32 nt, Homo Sapiens
uuucacugaugcauaauuuucuuauuaauauu

SEQ ID NO: 173949 - RNA, 32 nt, Homo Sapiens
uugaauuugccugagucgagacuuugcacacc

SEQ ID NO: 173950 - RNA, 32 nt, Homo Sapiens
uuuugggccaguagucaaauaauccuagggcc

SEQ ID NO: 173951 - RNA, 32 nt, Homo Sapiens
uguuuccucagcuugaaaugggcuuggcauac

SEQ ID NO: 173952 - RNA, 32 nt, Homo Sapiens
aucuacugauauauuuucuugagguguguaau

SEQ ID NO: 173953 - RNA, 32 nt, Homo Sapiens
uuccucauugguugagucagugaguugcgugu

SEQ ID NO: 173954 - RNA, 32 nt, Homo Sapiens
cggcucccccaggcccgggucuggggccccag

SEQ ID NO: 173955 - RNA, 32 nt, Homo Sapiens
gugagucaggaauuuuuccucuggagacugcc

SEQ ID NO: 173956 - RNA, 32 nt, Homo Sapiens
uguccuccaaauauaaaacuccuuaauagaua

SEQ ID NO: 173957 - RNA, 32 nt, Homo Sapiens
aaacagccggcgggcggcgagacuucgggcag

SEQ ID NO: 173958 - RNA, 29 nt, Homo Sapiens
ucauauauauguauuuaugguccaaaccu

SEQ ID NO: 173959 - RNA, 32 nt, Homo Sapiens
ucucuugaaaggaaagggagagcuguaagcuu

SEQ ID NO: 173960 - RNA, 31 nt, Homo Sapiens
uccgggcaggagguuuuucccgauaucaccc

SEQ ID NO: 173961 - RNA, 32 nt, Homo Sapiens
uuugccucuaaaggccagagaaaaaucacagc

SEQ ID NO: 173962 - RNA, 32 nt, Homo Sapiens
ucugggggccccagcucacgggcccccaacuu

SEQ ID NO: 173963 - RNA, 32 nt, Homo Sapiens
uacauuauuaaacccauuucacacagggagaa

SEQ ID NO: 173964 - RNA, 32 nt, Homo Sapiens
auuggucagacauugauguggagauguaaaca

SEQ ID NO: 173965 - RNA, 32 nt, Homo Sapiens
gguuguuguauacuagcuuuuguauuugaauu

SEQ ID NO: 173966 - RNA, 32 nt, Homo Sapiens
gcgcccgcggcuuuuaaacccgggaaggcgcg

SEQ ID NO: 173967 - RNA, 32 nt, Homo Sapiens
ugauuccacucuggaacucuuuguucaugcca

SEQ ID NO: 173968 - RNA, 32 nt, Homo Sapiens
guggcuuuuguuguuguuguuuuugugauacc

SEQ ID NO: 173969 - RNA, 32 nt, Homo Sapiens
gaugugaggcuggcaacuccccugcccucugu

SEQ ID NO: 173970 - RNA, 32 nt, Homo Sapiens
gcugguguauaaaaaccuggauguaaagcuga

SEQ ID NO: 173971 - RNA, 32 nt, Homo Sapiens
ugagauguuaaauacuuuuuaauauuuguuua

SEQ ID NO: 173972 - RNA, 32 nt, Homo Sapiens
ugaauauacuaaaaaccaucgaauuguacacu

SEQ ID NO: 173973 - RNA, 32 nt, Homo Sapiens
auuugaaagaagagacccuuccugcuuuccuu

SEQ ID NO: 173974 - RNA, 32 nt, Homo Sapiens
gaaagacagagugauaaaucugucaaauuauu

SEQ ID NO: 173975 - RNA, 32 nt, Homo Sapiens
uaaacucacagaagguuuuucuuggagaaaua

SEQ ID NO: 173976 - RNA, 32 nt, Homo Sapiens
aggagggggaggagggagcggagaucucgggg

SEQ ID NO: 173977 - RNA, 32 nt, Homo Sapiens
ccgcauccugacgcccgugcgccugcgcuggg

SEQ ID NO: 173978 - RNA, 32 nt, Homo Sapiens
gcgagcauaugcugcaugaggaccuuucuauc

SEQ ID NO: 173979 - RNA, 32 nt, Homo Sapiens
acuuauaucuaaaagucucaugcugaaguaua

SEQ ID NO: 173980 - RNA, 31 nt, Homo Sapiens
gaugacaccgaagguccaggaguccaggaca

SEQ ID NO: 173981 - RNA, 32 nt, Homo Sapiens
cggaggacaaugcgcccggcgcucggccaccc

SEQ ID NO: 173982 - RNA, 32 nt, Homo Sapiens
acagaagaaguaccuucgagcugagaccugca

SEQ ID NO: 173983 - RNA, 32 nt, Homo Sapiens
gugcaucuagcgccugggaccugagacggcgu

SEQ ID NO: 173984 - RNA, 32 nt, Homo Sapiens
ccaaauguggaaagaacacaaagaagacauaa

SEQ ID NO: 173985 - RNA, 32 nt, Homo Sapiens
caaacuggggcugggccucuaucccuccucug

SEQ ID NO: 173986 - RNA, 32 nt, Homo Sapiens
cucccuaacaccaaagcuuuugaaaggguuuc

SEQ ID NO: 173987 - RNA, 32 nt, Homo Sapiens
cuuagugaaacacaaaauuagaauguucaugu

SEQ ID NO: 173988 - RNA, 32 nt, Homo Sapiens
ggacugugucugucgcccauggccgccgcgcu

SEQ ID NO: 173989 - RNA, 32 nt, Homo Sapiens
aacuuuugauucaaaagcaucuuaccaauaag

SEQ ID NO: 173990 - RNA, 32 nt, Homo Sapiens
cauuaggauacaugaagugggguugaugucau

SEQ ID NO: 173991 - RNA, 32 nt, Homo Sapiens
gccaggaguuuggggaaggaaggggugggaag

SEQ ID NO: 173992 - RNA, 32 nt, Homo Sapiens
ucuauagguccuuuuccugccuccuucacauu

SEQ ID NO: 173993 - RNA, 30 nt, Homo Sapiens
aguguucuggacuacagccuugucuuaugg

SEQ ID NO: 173994 - RNA, 32 nt, Homo Sapiens
aacuccugacuucaagugauccaccugucuua

SEQ ID NO: 173995 - RNA, 32 nt, Homo Sapiens
gaacaaccccgugagauaaguaguuauuaucc

SEQ ID NO: 173996 - RNA, 32 nt, Homo Sapiens
cuaaagguggcgcagaaacaaauaucaguguu

SEQ ID NO: 173997 - RNA, 32 nt, Homo Sapiens
gcccuggaaucagaucauaguucuacaguugu

SEQ ID NO: 173998 - RNA, 32 nt, Homo Sapiens
augugugaaaauguaccaauggcugcgaagcu

SEQ ID NO: 173999 - RNA, 32 nt, Homo Sapiens
agagaagcugucuuaagccuuguucaagaagc

SEQ ID NO: 174000 - RNA, 32 nt, Homo Sapiens
guuaucugcuaaggaaaacugugcucuucgaa

SEQ ID NO: 174001 - RNA, 32 nt, Homo Sapiens
guagacaccguuccucaugcugccgggugggu

SEQ ID NO: 174002 - RNA, 32 nt, Homo Sapiens
aaccuguuccucaucaccaccuaccagauucu

SEQ ID NO: 174003 - RNA, 32 nt, Homo Sapiens
ccugcuccccagcuccuccugccugcacccga

SEQ ID NO: 174004 - RNA, 32 nt, Homo Sapiens
uuuuggggaaauaaaaauguggacugugaaaa

SEQ ID NO: 174005 - RNA, 32 nt, Homo Sapiens
gcuacaaaaaauacagguuuaaaugcuaauaa

SEQ ID NO: 174006 - RNA, 32 nt, Homo Sapiens
uuaaaaguuacuaucaagaaauugaaaggaaa

SEQ ID NO: 174007 - RNA, 32 nt, Homo Sapiens
agaauguaauaacccaguggcuuacuguuuuu

SEQ ID NO: 174008 - RNA, 32 nt, Homo Sapiens
uagaguccaggagcuuccccugccacugccac

SEQ ID NO: 174009 - RNA, 32 nt, Homo Sapiens
caugcaguuauuauuugucaauuaaaaauaaa

SEQ ID NO: 174010 - RNA, 32 nt, Homo Sapiens
gcccagaggcggagggcagucugcucaagguc

SEQ ID NO: 174011 - RNA, 32 nt, Homo Sapiens
aauugaccaucugcuuuuauuaaauuuguuga

SEQ ID NO: 174012 - RNA, 32 nt, Homo Sapiens
gcacaacuucuguggcuacuucucggcuccug

SEQ ID NO: 174013 - RNA, 32 nt, Homo Sapiens
cacaagcuauuuuuggaauauuuuuagaauau

SEQ ID NO: 174014 - RNA, 32 nt, Homo Sapiens
cuggcagagcacaacuggggcuuuuguauaag

SEQ ID NO: 174015 - RNA, 32 nt, Homo Sapiens
auccugcauaucuacuggagccauaugagccc

SEQ ID NO: 174016 - RNA, 32 nt, Homo Sapiens
uuaagacagggaauuuuguguuccauugacuu

SEQ ID NO: 174017 - RNA, 32 nt, Homo Sapiens
cuagguacaacuuuaggccacaggaaagguua

SEQ ID NO: 174018 - RNA, 32 nt, Homo Sapiens
gggggcgcgggaagggacuuggacgcccggcu

SEQ ID NO: 174019 - RNA, 30 nt, Homo Sapiens
gagcauucugacugcaucaauaagggccau

SEQ ID NO: 174020 - RNA, 32 nt, Homo Sapiens
gggauuucgccgcccgcuuucaggcccguuug

SEQ ID NO: 174021 - RNA, 32 nt, Homo Sapiens
ucaacaugguuuacuacuaacauuuuaaaaau

SEQ ID NO: 174022 - RNA, 32 nt, Homo Sapiens
cccaugagaagcugaguggauucagccccacc

SEQ ID NO: 174023 - RNA, 32 nt, Homo Sapiens
gugucagaggaucaucucuggaggaagguggu

SEQ ID NO: 174024 - RNA, 32 nt, Homo Sapiens
uuugaaugaaauuguggcacaaaaucuguuca

SEQ ID NO: 174025 - RNA, 32 nt, Homo Sapiens
gcgccgggacgccugggugccgcagaccaaac

SEQ ID NO: 174026 - RNA, 32 nt, Homo Sapiens
ccgccccuucacagagcgcccggggauuccag

SEQ ID NO: 174027 - RNA, 32 nt, Homo Sapiens
cucuguccuggcucuuggcccgaggaccugug

SEQ ID NO: 174028 - RNA, 32 nt, Homo Sapiens
accaccagcgaguucacacuggagaaagaccu

SEQ ID NO: 174029 - RNA, 28 nt, Homo Sapiens
augaaggggcggcggcccugugcggccu

SEQ ID NO: 174030 - RNA, 32 nt, Homo Sapiens
aaauugaguuucacuauauagcccaggcuagu

SEQ ID NO: 174031 - RNA, 32 nt, Homo Sapiens
uuaaaacugccagcaucucacggcaccuuauu

SEQ ID NO: 174032 - RNA, 32 nt, Homo Sapiens
uguucaauauaggacaccccagcuuguccuug

SEQ ID NO: 174033 - RNA, 32 nt, Homo Sapiens
auaugccguuucugguaccaagugaggggaca

SEQ ID NO: 174034 - RNA, 32 nt, Homo Sapiens
cuccucgaagcuggugggagccaggaacgggu

SEQ ID NO: 174035 - RNA, 32 nt, Homo Sapiens
acauuucacaugcacauuucaaaacaagaugu

SEQ ID NO: 174036 - RNA, 32 nt, Homo Sapiens
ccugcaccaggccccaggcacauggcugcccu

SEQ ID NO: 174037 - RNA, 32 nt, Homo Sapiens
guccggccuucuaagagguaugugucaaccuc

SEQ ID NO: 174038 - RNA, 27 nt, Homo Sapiens
caaccugccaucagcagcccccacccc

SEQ ID NO: 174039 - RNA, 32 nt, Homo Sapiens
ccgccccuauuauucauuguccuaagucuuca

SEQ ID NO: 174040 - RNA, 32 nt, Homo Sapiens
gugguuuccuuccucuucaggcagccaggccc

SEQ ID NO: 174041 - RNA, 32 nt, Homo Sapiens
cuuacccagcguuaauugaauucuugcuuuua

SEQ ID NO: 174042 - RNA, 32 nt, Homo Sapiens
gaccuggagaaugaaaguguccugccucgggg

SEQ ID NO: 174043 - RNA, 32 nt, Homo Sapiens
cucaguuagaaaacaaaaauauucaacagauu

SEQ ID NO: 174044 - RNA, 32 nt, Homo Sapiens
ugggguggccccagggccuggccccacucucc

SEQ ID NO: 174045 - RNA, 30 nt, Homo Sapiens
cgugcagaggcacgggaugagucuggguga

SEQ ID NO: 174046 - RNA, 32 nt, Homo Sapiens
gaagucucaguuucaaaagagcuucuccucau

SEQ ID NO: 174047 - RNA, 32 nt, Homo Sapiens
uuuucuuguauauggauauccaauuguuucac

SEQ ID NO: 174048 - RNA, 32 nt, Homo Sapiens
auaugcuaaaaauuauauauuuuuaacucaca

SEQ ID NO: 174049 - RNA, 32 nt, Homo Sapiens
auuaaagcugcuuuuggguaaaacagguuucc

SEQ ID NO: 174050 - RNA, 32 nt, Homo Sapiens
uucccaagccagcagaccggcccagacagcca

SEQ ID NO: 174051 - RNA, 32 nt, Homo Sapiens
aggagcggcuggcgcucgaggcggcggacguc

SEQ ID NO: 174052 - RNA, 32 nt, Homo Sapiens
ccgagcgcgucgucgcgccccgggagcagacc

SEQ ID NO: 174053 - RNA, 32 nt, Homo Sapiens
ucccaucaccacugcaguuccaucccaaguca

SEQ ID NO: 174054 - RNA, 32 nt, Homo Sapiens
uugcuccaccuucugucuuuucuggggaauag

SEQ ID NO: 174055 - RNA, 32 nt, Homo Sapiens
gguauuuuaguacuuuuuuuuauauuaaaaga

SEQ ID NO: 174056 - RNA, 32 nt, Homo Sapiens
gccacauaaccuuguugauauguuugcuucug

SEQ ID NO: 174057 - RNA, 32 nt, Homo Sapiens
ggcggcggcuccugcuggaugcagcuccuugu

SEQ ID NO: 174058 - RNA, 32 nt, Homo Sapiens
aaaaaauaaaaauuauuauugauuuuauauuu

SEQ ID NO: 174059 - RNA, 32 nt, Homo Sapiens
ucucggcuccugugugucaucagcaucaccua

SEQ ID NO: 174060 - RNA, 31 nt, Homo Sapiens
agugcaaugagcuucaugcugaauacugauu

SEQ ID NO: 174061 - RNA, 32 nt, Homo Sapiens
ccucccccaagcucuccuccagcccuucccag

SEQ ID NO: 174062 - RNA, 32 nt, Homo Sapiens
auuuggugcacuuuucugugucauaccacaau

SEQ ID NO: 174063 - RNA, 32 nt, Homo Sapiens
uuagcagaauuugaggaugagguaaugacuuu

SEQ ID NO: 174064 - RNA, 32 nt, Homo Sapiens
cccaggagccccaggagcccccugccggaacc

SEQ ID NO: 174065 - RNA, 32 nt, Homo Sapiens
gcugcuaauauauacauauauuguauaaaaag

SEQ ID NO: 174066 - RNA, 32 nt, Homo Sapiens
gagucaggagcuuuuauauauaagguacauau

SEQ ID NO: 174067 - RNA, 32 nt, Homo Sapiens
ccucaagugauccucucgccuuggccucccua

SEQ ID NO: 174068 - RNA, 32 nt, Homo Sapiens
cugcucuuggcucggggacgcgggcgggcgcu

SEQ ID NO: 174069 - RNA, 32 nt, Homo Sapiens
aucuugccugcauauuugauauguuacaaacu

SEQ ID NO: 174070 - RNA, 30 nt, Homo Sapiens
cuucaggccaggcgcgguggcucacgccug

SEQ ID NO: 174071 - RNA, 32 nt, Homo Sapiens
gugggaggucagaggagaugggggcuggcucu

SEQ ID NO: 174072 - RNA, 32 nt, Homo Sapiens
uguaacuugagaugucugugguugugggggug

SEQ ID NO: 174073 - RNA, 32 nt, Homo Sapiens
cacccccaaucuuucuucuccuaccuacagcu

SEQ ID NO: 174074 - RNA, 32 nt, Homo Sapiens
uuagagaaaggaagggccaaaacuacgacuug

SEQ ID NO: 174075 - RNA, 32 nt, Homo Sapiens
aucaaggaaugggcuucugacagacauccuga

SEQ ID NO: 174076 - RNA, 32 nt, Homo Sapiens
cugggccccucuauuccuuccuucuccauugg

SEQ ID NO: 174077 - RNA, 32 nt, Homo Sapiens
gccgcuggggacggaggcuuugaucugacccc

SEQ ID NO: 174078 - RNA, 32 nt, Homo Sapiens
accaagguuucagguauccuccugucaccacc

SEQ ID NO: 174079 - RNA, 32 nt, Homo Sapiens
ugccaugggacggaagucugcuuggcaguggc

SEQ ID NO: 174080 - RNA, 32 nt, Homo Sapiens
aucuggagggccgcgggugcaggccgcaguga

SEQ ID NO: 174081 - RNA, 32 nt, Homo Sapiens
uccuuuuuuuuuuuuuuuucugauuugauucu

SEQ ID NO: 174082 - RNA, 32 nt, Homo Sapiens
aguuuccgauuaaacuuuuuagcucaagaaga

SEQ ID NO: 174083 - RNA, 32 nt, Homo Sapiens
accucagaucugccucccaagacccagcuccu

SEQ ID NO: 174084 - RNA, 32 nt, Homo Sapiens
uggcaaaacccuaugacuuuggcaucaucugc

SEQ ID NO: 174085 - RNA, 31 nt, Homo Sapiens
cacaagcaggccugccugccccugagaugcg

SEQ ID NO: 174086 - RNA, 32 nt, Homo Sapiens
uggugucagcaaauagaugauuuuaaagacag

SEQ ID NO: 174087 - RNA, 32 nt, Homo Sapiens
agaggaauauaaauaccugauuucuugucauc

SEQ ID NO: 174088 - RNA, 32 nt, Homo Sapiens
augggaacaaagugaaaauagcaaaugauaag

SEQ ID NO: 174089 - RNA, 32 nt, Homo Sapiens
gguuucaccauacuggcuaggcuggucucgaa

SEQ ID NO: 174090 - RNA, 32 nt, Homo Sapiens
cccuuucugcaggucuggguugccagacguuu

SEQ ID NO: 174091 - RNA, 32 nt, Homo Sapiens
cacaagccuacaugguggcucuggucauauca

SEQ ID NO: 174092 - RNA, 30 nt, Homo Sapiens
cggccaggagguggcgucacaguucagaga

SEQ ID NO: 174093 - RNA, 32 nt, Homo Sapiens
caggcaggaucccuucuccaccuccaaaggcc

SEQ ID NO: 174094 - RNA, 32 nt, Homo Sapiens
guggccagguguggucucgguuaccaaauacg

SEQ ID NO: 174095 - RNA, 32 nt, Homo Sapiens
ccucugugagcggcuccgucccggggccccgg

SEQ ID NO: 174096 - RNA, 32 nt, Homo Sapiens
aauuuuuccugcauguucugugacugaagaag

SEQ ID NO: 174097 - RNA, 32 nt, Homo Sapiens
uuccugcccuguggcccacgggccggccagcu

SEQ ID NO: 174098 - RNA, 32 nt, Homo Sapiens
ccgaaccucccacguugggacucccacguucc

SEQ ID NO: 174099 - RNA, 32 nt, Homo Sapiens
acaguuuucuuacccuuucuuggucuuaauuu

SEQ ID NO: 174100 - RNA, 32 nt, Homo Sapiens
cuuguaagcauuaagugaaugacaaaguagua

SEQ ID NO: 174101 - RNA, 32 nt, Homo Sapiens
agccagggacuuuuuucuuauuuauucauaaa

SEQ ID NO: 174102 - RNA, 31 nt, Homo Sapiens
guccccacaaagauguaacgacauugaugaa

SEQ ID NO: 174103 - RNA, 32 nt, Homo Sapiens
guuguucgggacuuaaagacacuugaccuguu

SEQ ID NO: 174104 - RNA, 32 nt, Homo Sapiens
ugaugucugaccaguccccagguguacgauaa

SEQ ID NO: 174105 - RNA, 32 nt, Homo Sapiens
agguucaucuuaugggaccuuaauuugucuug

SEQ ID NO: 174106 - RNA, 32 nt, Homo Sapiens
ucuguguguuccaaauaaucuuaagcugaguu

SEQ ID NO: 174107 - RNA, 32 nt, Homo Sapiens
uauuacguauaguauaaaguuaccaaaauaaa

SEQ ID NO: 174108 - RNA, 29 nt, Homo Sapiens
cuggaaauagugaugagauggaaauuugg

SEQ ID NO: 174109 - RNA, 30 nt, Homo Sapiens
gcuggagacaguuaugaugagugccggcuu

SEQ ID NO: 174110 - RNA, 32 nt, Homo Sapiens
ggaaaaaaugaggccauuuccaauccagcgga

SEQ ID NO: 174111 - RNA, 32 nt, Homo Sapiens
ggcagggccccggguugggcgcccaccugcug

SEQ ID NO: 174112 - RNA, 32 nt, Homo Sapiens
ucaugcaggggcuuaucugucuggaggcaguu

SEQ ID NO: 174113 - RNA, 32 nt, Homo Sapiens
ugcggccccccggccggaagcaccccaccccu

SEQ ID NO: 174114 - RNA, 32 nt, Homo Sapiens
cuuuuuuuuuuugacuaacaagaauguaacuc

SEQ ID NO: 174115 - RNA, 32 nt, Homo Sapiens
aaaaauaaaaggaaaaguccuugcaccaugua

SEQ ID NO: 174116 - RNA, 30 nt, Homo Sapiens
ccagcguggggcggcugcaguggcggcgug

SEQ ID NO: 174117 - RNA, 31 nt, Homo Sapiens
ccgcgggagcgcagccugagccggggcucca

SEQ ID NO: 174118 - RNA, 32 nt, Homo Sapiens
ucuccaccuuugauccauucugcacagccaag

SEQ ID NO: 174119 - RNA, 32 nt, Homo Sapiens
uucccaggucugggucacuugcgacccuccuc

SEQ ID NO: 174120 - RNA, 32 nt, Homo Sapiens
agccgggaggugacagcagagaggacaaugca

SEQ ID NO: 174121 - RNA, 28 nt, Homo Sapiens
ggagaggggcggccgcgcggaucacuga

SEQ ID NO: 174122 - RNA, 32 nt, Homo Sapiens
uuuauuuuuuaaauuuagcuuuauguggucuu

SEQ ID NO: 174123 - RNA, 32 nt, Homo Sapiens
agcagacguucccgugcaccacugugugccug

SEQ ID NO: 174124 - RNA, 32 nt, Homo Sapiens
uggacgcccugccugcccugcagaggcgguug

SEQ ID NO: 174125 - RNA, 32 nt, Homo Sapiens
gaucucccuuucccccucccccaucucuugac

SEQ ID NO: 174126 - RNA, 32 nt, Homo Sapiens
gcugcgccccccagcccuuccugacgcucagc

SEQ ID NO: 174127 - RNA, 32 nt, Homo Sapiens
ggccgggcacgguggcucacgccuguaauucc

SEQ ID NO: 174128 - RNA, 32 nt, Homo Sapiens
ggaucacaaguggucuuggagagugauugcaa

SEQ ID NO: 174129 - RNA, 32 nt, Homo Sapiens
ugcuauugagggacucagugaugugugugucu

SEQ ID NO: 174130 - RNA, 32 nt, Homo Sapiens
aaauuaguauuuaaggagaguauaaagugcga

SEQ ID NO: 174131 - RNA, 32 nt, Homo Sapiens
ugggaaaacuacugaggacuucuguauauccu

SEQ ID NO: 174132 - RNA, 32 nt, Homo Sapiens
acuaaagaaaucugaggccaggcacaguggcu

SEQ ID NO: 174133 - RNA, 32 nt, Homo Sapiens
cuggagugcgguggcgaucagagcucacugca

SEQ ID NO: 174134 - RNA, 30 nt, Homo Sapiens
guaagagagaagcuggaccuggguggagac

SEQ ID NO: 174135 - RNA, 32 nt, Homo Sapiens
uugagugcagagggcugcgguaggcccuuugc

SEQ ID NO: 174136 - RNA, 32 nt, Homo Sapiens
ccaugcccuaagacauaugguaacacagacug

SEQ ID NO: 174137 - RNA, 29 nt, Homo Sapiens
gugcugauaauuguguauuuucuuugggg

SEQ ID NO: 174138 - RNA, 32 nt, Homo Sapiens
gagcgcgcuuccuuuccuccccgcugccgccc

SEQ ID NO: 174139 - RNA, 32 nt, Homo Sapiens
ugugcuuggccaugccccucacauggacuugg

SEQ ID NO: 174140 - RNA, 32 nt, Homo Sapiens
ugguggggucugaccuggggggauuggaggga

SEQ ID NO: 174141 - RNA, 32 nt, Homo Sapiens
ugcugcccaucccacccagggaucgccaccuc

SEQ ID NO: 174142 - RNA, 32 nt, Homo Sapiens
ccagccccgucgcucucguccauccucagaga

SEQ ID NO: 174143 - RNA, 32 nt, Homo Sapiens
agcucuggcauggcugccccggauguggccga

SEQ ID NO: 174144 - RNA, 32 nt, Homo Sapiens
uaaccaaaauacaugaaaacauggaucugcac

SEQ ID NO: 174145 - RNA, 32 nt, Homo Sapiens
ggggguagguguguccucccccggggcuggag

SEQ ID NO: 174146 - RNA, 32 nt, Homo Sapiens
ugacugcacuuguucucauaguaguaaaaugc

SEQ ID NO: 174147 - RNA, 32 nt, Homo Sapiens
aggaccggggguggagguggugccucuggcag

SEQ ID NO: 174148 - RNA, 32 nt, Homo Sapiens
cccuuauaagagcuaccgaaauucuuccuaug

SEQ ID NO: 174149 - RNA, 32 nt, Homo Sapiens
gauggugaucugcccgagacucccagagggua

SEQ ID NO: 174150 - RNA, 32 nt, Homo Sapiens
gugguggcgggugcuggugggaggacagugcc

SEQ ID NO: 174151 - RNA, 32 nt, Homo Sapiens
ccuaggggaucuuuagauucuuguuuagaacu

SEQ ID NO: 174152 - RNA, 32 nt, Homo Sapiens
cuccaguggaccagcccucucgguuugggaau

SEQ ID NO: 174153 - RNA, 32 nt, Homo Sapiens
aaaguagaaaucaccuacaccagagagccauu

SEQ ID NO: 174154 - RNA, 32 nt, Homo Sapiens
gacccccacccuccucccaggcucacacgcug

SEQ ID NO: 174155 - RNA, 32 nt, Homo Sapiens
augcaucccccggcugcugccaggggcagagc

SEQ ID NO: 174156 - RNA, 32 nt, Homo Sapiens
cagcaccucaccuucuuuucugcaucucugga

SEQ ID NO: 174157 - RNA, 32 nt, Homo Sapiens
caaccaagauggauugccaaacucuucugcuu

SEQ ID NO: 174158 - RNA, 32 nt, Homo Sapiens
gcuguacuauaaauuugugagugaaguuagag

SEQ ID NO: 174159 - RNA, 30 nt, Homo Sapiens
gaaagcagagguggcgggaaggggaaagcu

SEQ ID NO: 174160 - RNA, 32 nt, Homo Sapiens
cuuggcugggcauagugacuagugauucauac

SEQ ID NO: 174161 - RNA, 32 nt, Homo Sapiens
auuuuaauuuugcuuuaauauucaccaucccc

SEQ ID NO: 174162 - RNA, 32 nt, Homo Sapiens
aaaaaaccaccuguuuuccaaggggagagggc

SEQ ID NO: 174163 - RNA, 30 nt, Homo Sapiens
gcugcaaugaggugagccgcagcgaggccu

SEQ ID NO: 174164 - RNA, 32 nt, Homo Sapiens
gccgccgcuucccgggaaccuggcgccgccgg

SEQ ID NO: 174165 - RNA, 32 nt, Homo Sapiens
ggaguaggcaaccagcagucuuccggcaauag

SEQ ID NO: 174166 - RNA, 32 nt, Homo Sapiens
uguuuucuuuugcugggggcaccucccacggg

SEQ ID NO: 174167 - RNA, 32 nt, Homo Sapiens
uacuucuaaaaauuaguauugaguuuaauggu

SEQ ID NO: 174168 - RNA, 32 nt, Homo Sapiens
aucuuucccugacuuaguacauuugaaggauu

SEQ ID NO: 174169 - RNA, 32 nt, Homo Sapiens
guaguauguaaaacccaaacaaguagaaccca

SEQ ID NO: 174170 - RNA, 32 nt, Homo Sapiens
guguaacagaagauacucuuuuuuaugcuccu

SEQ ID NO: 174171 - RNA, 32 nt, Homo Sapiens
gcuucacaucgguguauguggccaucgugguc

SEQ ID NO: 174172 - RNA, 32 nt, Homo Sapiens
gaaguuugccucugguaccaccuugggacuaa

SEQ ID NO: 174173 - RNA, 32 nt, Homo Sapiens
cuacgacuuggcuuucugaaacggaagcauaa

SEQ ID NO: 174174 - RNA, 32 nt, Homo Sapiens
uuugcuuucugaaauaguuacuuuuuaaaaug

SEQ ID NO: 174175 - RNA, 32 nt, Homo Sapiens
cagccagccagcugcagggccucuugcugcuu

SEQ ID NO: 174176 - RNA, 32 nt, Homo Sapiens
gaaaagauuucaggcaaagacuugcaggaaga

SEQ ID NO: 174177 - RNA, 32 nt, Homo Sapiens
uggggccaaaaauaaucagggauuuuaaauug

SEQ ID NO: 174178 - RNA, 32 nt, Homo Sapiens
gucuuaauuccgccuuuuuuuuuucuaauggg

SEQ ID NO: 174179 - RNA, 32 nt, Homo Sapiens
ugauaugucacacaaucuagaaagguagugcu

SEQ ID NO: 174180 - RNA, 32 nt, Homo Sapiens
cucuacccaucccucccucccaauuaggcugc

SEQ ID NO: 174181 - RNA, 32 nt, Homo Sapiens
caccugcuuuauucuuuucuucaccgaaaucg

SEQ ID NO: 174182 - RNA, 32 nt, Homo Sapiens
uguaacuuauauuuuuuaaugcugauguuaac

SEQ ID NO: 174183 - RNA, 32 nt, Homo Sapiens
gacucguaggccgcaccguagggcgagcgugc

SEQ ID NO: 174184 - RNA, 32 nt, Homo Sapiens
ugcaagaaggaccccggagacccggacccucg

SEQ ID NO: 174185 - RNA, 32 nt, Homo Sapiens
ugugauuuauacagggauuaaucaaaucuggc

SEQ ID NO: 174186 - RNA, 32 nt, Homo Sapiens
acuucuugcugcugucucuugaggauacauuc

SEQ ID NO: 174187 - RNA, 32 nt, Homo Sapiens
augaaguguacaaaacaacucuuguaguuuac

SEQ ID NO: 174188 - RNA, 32 nt, Homo Sapiens
aauaauuaaaggaaacuuaugcugaccaaaaa

SEQ ID NO: 174189 - RNA, 32 nt, Homo Sapiens
ugccuccagaaagacagugaagaugugaauca

SEQ ID NO: 174190 - RNA, 32 nt, Homo Sapiens
ugagcugauacagagggaagaggcugggagca

SEQ ID NO: 174191 - RNA, 27 nt, Homo Sapiens
uugacugacuucuucaggcuucuuagc

SEQ ID NO: 174192 - RNA, 32 nt, Homo Sapiens
gugcaucgacguucuccuggggugugugccaa

SEQ ID NO: 174193 - RNA, 32 nt, Homo Sapiens
uaauccuccagccccagcagguccacuccugg

SEQ ID NO: 174194 - RNA, 32 nt, Homo Sapiens
acacuccagaacuuggcaguuguagcauuagu

SEQ ID NO: 174195 - RNA, 32 nt, Homo Sapiens
gcuggagugcagugacgcgauccugacugacu

SEQ ID NO: 174196 - RNA, 32 nt, Homo Sapiens
auauuccuaaacuaugaaaccuuuuuccuagu

SEQ ID NO: 174197 - RNA, 32 nt, Homo Sapiens
ucgacaucccauucggccgccuccaccacauu

SEQ ID NO: 174198 - RNA, 32 nt, Homo Sapiens
acuaaaggcuuuuugggggucacagccacaga

SEQ ID NO: 174199 - RNA, 32 nt, Homo Sapiens
uucuggagaaaguuugccacauauucggacuu

SEQ ID NO: 174200 - RNA, 32 nt, Homo Sapiens
aauauaaacuguguucauuacacugcugauac

SEQ ID NO: 174201 - RNA, 32 nt, Homo Sapiens
ugaacaaagugcaauuaacuguagaacaguuu

SEQ ID NO: 174202 - RNA, 32 nt, Homo Sapiens
agaaaauguaaagcuacagagguuaauguauu

SEQ ID NO: 174203 - RNA, 32 nt, Homo Sapiens
uuugugacugguuuauuucacuuaacuucauc

SEQ ID NO: 174204 - RNA, 32 nt, Homo Sapiens
gcggcggagaucuggaaacaguaucucaccuc

SEQ ID NO: 174205 - RNA, 32 nt, Homo Sapiens
gaacucacauuuuaaucagggauugcauuuau

SEQ ID NO: 174206 - RNA, 32 nt, Homo Sapiens
uuaaagguauaguggaugcuauuuaugaucca

SEQ ID NO: 174207 - RNA, 32 nt, Homo Sapiens
uagaagaaggucggccgggcuugguggcuuau

SEQ ID NO: 174208 - RNA, 32 nt, Homo Sapiens
ccagcgcgccuacggcggccccaaccggccgg

SEQ ID NO: 174209 - RNA, 32 nt, Homo Sapiens
gacccggccccgcuccagaccccccagcucuc

SEQ ID NO: 174210 - RNA, 32 nt, Homo Sapiens
gacucuguagccagaagacuucaauauuaaau

SEQ ID NO: 174211 - RNA, 32 nt, Homo Sapiens
ugggcaccaaggaaacuaacagcuuucucaaa

SEQ ID NO: 174212 - RNA, 32 nt, Homo Sapiens
ucagcaguuccagccccucgcugcugggggcg

SEQ ID NO: 174213 - RNA, 32 nt, Homo Sapiens
cacucagacuuccauaagaguaaauaaaaaug

SEQ ID NO: 174214 - RNA, 32 nt, Homo Sapiens
aucuuaaaaguuugaucaaucauuccaaacca

SEQ ID NO: 174215 - RNA, 32 nt, Homo Sapiens
cgcuccggguccccgggcgggcuuggcacgga

SEQ ID NO: 174216 - RNA, 32 nt, Homo Sapiens
aguguccggccgcgggccggccuuagugacug

SEQ ID NO: 174217 - RNA, 32 nt, Homo Sapiens
cugcaagugucugaaugaagagugcuugucaa

SEQ ID NO: 174218 - RNA, 32 nt, Homo Sapiens
uguggccgccugagcuguccccggggacgccc

SEQ ID NO: 174219 - RNA, 32 nt, Homo Sapiens
aaauuacuggaccuaaacuucugggagccaug

SEQ ID NO: 174220 - RNA, 32 nt, Homo Sapiens
gaguguuggggaggaacagaugcagaucaacc

SEQ ID NO: 174221 - RNA, 32 nt, Homo Sapiens
agaaauuagucacuuaaaaugucccaguguca

SEQ ID NO: 174222 - RNA, 32 nt, Homo Sapiens
auuauuuucuuacuguucuauaucauguacug

SEQ ID NO: 174223 - RNA, 32 nt, Homo Sapiens
ccugcagaugagaaccagccgcggugcccaga

SEQ ID NO: 174224 - RNA, 32 nt, Homo Sapiens
ucugauuucugggucuuaggauuuuaaaagug

SEQ ID NO: 174225 - RNA, 32 nt, Homo Sapiens
aaaugcaucacugugggugugaccucggcgug

SEQ ID NO: 174226 - RNA, 32 nt, Homo Sapiens
uucugugccauugcauuaaagacuucugucau

SEQ ID NO: 174227 - RNA, 32 nt, Homo Sapiens
ccugaccucaggugaucugcccgccucggccu

SEQ ID NO: 174228 - RNA, 29 nt, Homo Sapiens
uuccuugugacuucaucccuccgaucggg

SEQ ID NO: 174229 - RNA, 32 nt, Homo Sapiens
uugugcagugauacugagaaaauacaugaaca

SEQ ID NO: 174230 - RNA, 32 nt, Homo Sapiens
gagccuccggcaaagguuuuucccuccucccc

SEQ ID NO: 174231 - RNA, 32 nt, Homo Sapiens
cugcucccuagugggcucuccuccccaggaua

SEQ ID NO: 174232 - RNA, 32 nt, Homo Sapiens
gcuucucuccugcacgcggugcuugggcucgg

SEQ ID NO: 174233 - RNA, 32 nt, Homo Sapiens
ccugcuuccccuucgccuuccgccaugauugu

SEQ ID NO: 174234 - RNA, 32 nt, Homo Sapiens
uuuuaaagaaaugcacuugccuaugauacugu

SEQ ID NO: 174235 - RNA, 32 nt, Homo Sapiens
agaguggaaaggauugggaugaacuggaggaa

SEQ ID NO: 174236 - RNA, 32 nt, Homo Sapiens
cagauagugucugccuucuggagagcugacca

SEQ ID NO: 174237 - RNA, 32 nt, Homo Sapiens
cgcccguccauauuuauuaauguccucagggu

SEQ ID NO: 174238 - RNA, 32 nt, Homo Sapiens
cuggcugccucccaaagaaagugcuugauuua

SEQ ID NO: 174239 - RNA, 32 nt, Homo Sapiens
aaauuuuuuaaauuauuuauuuucaaaucagu

SEQ ID NO: 174240 - RNA, 32 nt, Homo Sapiens
acuuagcaaaaauaauacagaugucuuccccc

SEQ ID NO: 174241 - RNA, 32 nt, Homo Sapiens
agcccgggcgccuggguccucacgcccaacug

SEQ ID NO: 174242 - RNA, 32 nt, Homo Sapiens
uuuaauuauuuguuuauuuuuaucauuguccc

SEQ ID NO: 174243 - RNA, 32 nt, Homo Sapiens
caugcuggaugaugaucugcugauaaggccuc

SEQ ID NO: 174244 - RNA, 32 nt, Homo Sapiens
cgccauuguacuccagccugggcgaugagcaa

SEQ ID NO: 174245 - RNA, 32 nt, Homo Sapiens
gcugagagaagaaucggguggagcagagagca

SEQ ID NO: 174246 - RNA, 32 nt, Homo Sapiens
guuuccguuucuaucuuccuuuagaaauguuu

SEQ ID NO: 174247 - RNA, 32 nt, Homo Sapiens
acccaggguccugcuuuuuuuaaucuugucuu

SEQ ID NO: 174248 - RNA, 32 nt, Homo Sapiens
auucuauucuuugcagcucaagcaugcaguau

SEQ ID NO: 174249 - RNA, 28 nt, Homo Sapiens
gcauccgggcggccgcuugagaucggcg

SEQ ID NO: 174250 - RNA, 32 nt, Homo Sapiens
agcccuuuaaacacccuuaagccccaggcucc

SEQ ID NO: 174251 - RNA, 32 nt, Homo Sapiens
aauuuuucaagagcuccuugacccugcuuuuu

SEQ ID NO: 174252 - RNA, 32 nt, Homo Sapiens
ccugggaggcggagguugcagggagcugagau

SEQ ID NO: 174253 - RNA, 27 nt, Homo Sapiens
uaugucugcuucuucaguccacacuca

SEQ ID NO: 174254 - RNA, 29 nt, Homo Sapiens
ccuuuugggcuucucaguucaaugaagca

SEQ ID NO: 174255 - RNA, 32 nt, Homo Sapiens
aagcuuccccgguguccccccaucccccuccc

SEQ ID NO: 174256 - RNA, 32 nt, Homo Sapiens
acugagggguagguggggaggggccacgcgga

SEQ ID NO: 174257 - RNA, 32 nt, Homo Sapiens
gaucugauuuuuaauuuuuuuaaauuucaguc

SEQ ID NO: 174258 - RNA, 32 nt, Homo Sapiens
agacuuacuagauucacauaguaucauccuuc

SEQ ID NO: 174259 - RNA, 32 nt, Homo Sapiens
uauuuaaauuaauuauuuaaauguguauauau

SEQ ID NO: 174260 - RNA, 32 nt, Homo Sapiens
cuacuaaaaaauacaaaaauuagccagguaug

SEQ ID NO: 174261 - RNA, 32 nt, Homo Sapiens
cuuccagaccucuagggacaccagggagucau

SEQ ID NO: 174262 - RNA, 32 nt, Homo Sapiens
uuuuguacagaaaagcaagaugaaaggaugug

SEQ ID NO: 174263 - RNA, 32 nt, Homo Sapiens
ccugugucucugucucuuggggaccugaguuu

SEQ ID NO: 174264 - RNA, 32 nt, Homo Sapiens
aucgagaagagcggggagugggggcgaaaagg

SEQ ID NO: 174265 - RNA, 32 nt, Homo Sapiens
uccucaaaacaauagggauguuuuuaauaaac

SEQ ID NO: 174266 - RNA, 32 nt, Homo Sapiens
ggggcggggcggggcgccagccauggacaauc

SEQ ID NO: 174267 - RNA, 32 nt, Homo Sapiens
aggacauuuaugugccagagaaugggaaauaa

SEQ ID NO: 174268 - RNA, 32 nt, Homo Sapiens
aagugauucguguuguacuuuauuuuugugcc

SEQ ID NO: 174269 - RNA, 32 nt, Homo Sapiens
aaaaagacuuuaaaagugaucuacaugaggaa

SEQ ID NO: 174270 - RNA, 32 nt, Homo Sapiens
uguguuuguuuuuucuuauaucugucuugcca

SEQ ID NO: 174271 - RNA, 31 nt, Homo Sapiens
ccaucagcagggcaguccacuccuaccccgg

SEQ ID NO: 174272 - RNA, 32 nt, Homo Sapiens
ggggcuggcuccugcccucccggagccuaugg

SEQ ID NO: 174273 - RNA, 32 nt, Homo Sapiens
aaaaggcuuuuucagggaaaaauauuuuacua

SEQ ID NO: 174274 - RNA, 32 nt, Homo Sapiens
agauuuuuaaacaaacaaaaucaccgaccuug

SEQ ID NO: 174275 - RNA, 32 nt, Homo Sapiens
agcuuuuaauucaaauauagggaauauuuuua

SEQ ID NO: 174276 - RNA, 32 nt, Homo Sapiens
cuucacagaaacaaacaaaaccagccagaaua

SEQ ID NO: 174277 - RNA, 32 nt, Homo Sapiens
gggcugugcaaauaaacuccuuuuagaccugc

SEQ ID NO: 174278 - RNA, 32 nt, Homo Sapiens
ucaugggacuuuggacuugaugagauucugau

SEQ ID NO: 174279 - RNA, 32 nt, Homo Sapiens
ggaagauacuuauguauggaagauuauugcuc

SEQ ID NO: 174280 - RNA, 32 nt, Homo Sapiens
ugggacuguuguuuauucaggcagaugcuuca

SEQ ID NO: 174281 - RNA, 32 nt, Homo Sapiens
agagcugcucuguccccuccagugcccugaag

SEQ ID NO: 174282 - RNA, 32 nt, Homo Sapiens
gauccagcaaccugcuccgugccucccgcgcc

SEQ ID NO: 174283 - RNA, 32 nt, Homo Sapiens
cagggcccacccaggaaaauggauuucaagug

SEQ ID NO: 174284 - RNA, 32 nt, Homo Sapiens
gguuucaccauguuggcugggcuggucucaaa

SEQ ID NO: 174285 - RNA, 32 nt, Homo Sapiens
aggggaccaugccggggugcugccugggcagg

SEQ ID NO: 174286 - RNA, 32 nt, Homo Sapiens
gcuugcuuucuuucuuuuuuuuuuuuuuuuuu

SEQ ID NO: 174287 - RNA, 31 nt, Homo Sapiens
uuaggguuuugugaggauucaguguuuagca

SEQ ID NO: 174288 - RNA, 32 nt, Homo Sapiens
agagacccugccucagaaugggcuuuggacuc

SEQ ID NO: 174289 - RNA, 32 nt, Homo Sapiens
cugcgcccccagccugccccagcccagucccu

SEQ ID NO: 174290 - RNA, 32 nt, Homo Sapiens
ugagguuacauaucaggaacauaugaguugag

SEQ ID NO: 174291 - RNA, 32 nt, Homo Sapiens
ccaugggggucugggcccggccucgccugccc

SEQ ID NO: 174292 - RNA, 32 nt, Homo Sapiens
aaaggaaaaaagacaacgaggaaaaaggaggu

SEQ ID NO: 174293 - RNA, 30 nt, Homo Sapiens
guucguggagguggacugcauagcccagag

SEQ ID NO: 174294 - RNA, 32 nt, Homo Sapiens
ucuaacuccugcuccuucucuuguccuuccaa

SEQ ID NO: 174295 - RNA, 32 nt, Homo Sapiens
cucccgucugggccaggcccuuguaauauuuc

SEQ ID NO: 174296 - RNA, 32 nt, Homo Sapiens
aggccccugacaggaugcugcaguagcaagcu

SEQ ID NO: 174297 - RNA, 32 nt, Homo Sapiens
ugugcgccuccggcccggcccagcgaccuccu

SEQ ID NO: 174298 - RNA, 32 nt, Homo Sapiens
caaguccccgcuccccgcuccccucggcggcc

SEQ ID NO: 174299 - RNA, 32 nt, Homo Sapiens
agaaugagauaaaauguugaucauguauauau

SEQ ID NO: 174300 - RNA, 32 nt, Homo Sapiens
gagcaagguccucccucuaagguguuucuagu

SEQ ID NO: 174301 - RNA, 32 nt, Homo Sapiens
gauuuguuuaaaaggauuuuuaucuuucguga

SEQ ID NO: 174302 - RNA, 32 nt, Homo Sapiens
cauuuuaaaaauugugguaaaauacccauaac

SEQ ID NO: 174303 - RNA, 32 nt, Homo Sapiens
ugccucuuuacuagucuaccuuagugccaucc

SEQ ID NO: 174304 - RNA, 32 nt, Homo Sapiens
caacauuuaaucaaucuuugugccucaacaua

SEQ ID NO: 174305 - RNA, 29 nt, Homo Sapiens
gcugccauaguuccaucuauaaaauggga

SEQ ID NO: 174306 - RNA, 32 nt, Homo Sapiens
gagccccggccugccuggcccugugaaggcca

SEQ ID NO: 174307 - RNA, 32 nt, Homo Sapiens
aagccuaucuucugguuucuuccucuccgcug

SEQ ID NO: 174308 - RNA, 31 nt, Homo Sapiens
agccacaugauguuuuugccaaaugauguga

SEQ ID NO: 174309 - RNA, 32 nt, Homo Sapiens
ccaacuguauuguaaucauugcaguuagguuu

SEQ ID NO: 174310 - RNA, 31 nt, Homo Sapiens
cccaggagggcgggaauguggccggcccuca

SEQ ID NO: 174311 - RNA, 32 nt, Homo Sapiens
aggaggauggggaggcagggcugggggcuuug

SEQ ID NO: 174312 - RNA, 32 nt, Homo Sapiens
ccugaccccacggcugcccugaccccaggagg

SEQ ID NO: 174313 - RNA, 32 nt, Homo Sapiens
guugaugcagcuuuuguugaacaaaaaucgug

SEQ ID NO: 174314 - RNA, 32 nt, Homo Sapiens
gauaagugaggcuggcuccauguauccagaau

SEQ ID NO: 174315 - RNA, 32 nt, Homo Sapiens
cagugggaaggggaaaaauugguguccuguuu

SEQ ID NO: 174316 - RNA, 32 nt, Homo Sapiens
agaugucuagcuauuuuuuaaucuuguuggua

SEQ ID NO: 174317 - RNA, 32 nt, Homo Sapiens
acauccuccuucccagccucaugaaagauuca

SEQ ID NO: 174318 - RNA, 32 nt, Homo Sapiens
ucaccuugaagaaacuuacagguagacuuacc

SEQ ID NO: 174319 - RNA, 32 nt, Homo Sapiens
gugagucugucaugagagcuguccugaaugcc

SEQ ID NO: 174320 - RNA, 32 nt, Homo Sapiens
cuggagggccgcgggugcaggccgcagugaca

SEQ ID NO: 174321 - RNA, 32 nt, Homo Sapiens
gagagugcagagcuaucuguagacuuaggaau

SEQ ID NO: 174322 - RNA, 32 nt, Homo Sapiens
uuacuuuaaauauuauuuuaaauauuuuggaa

SEQ ID NO: 174323 - RNA, 32 nt, Homo Sapiens
cagaaagagggaacaaugaggaccccuccccu

SEQ ID NO: 174324 - RNA, 32 nt, Homo Sapiens
ugaugcauugugcauaugaugcuugagauggu

SEQ ID NO: 174325 - RNA, 32 nt, Homo Sapiens
cuugguguccacgucuugugggccgugggcuu

SEQ ID NO: 174326 - RNA, 32 nt, Homo Sapiens
ccccucggcucuccccgcaggagagcgggcac

SEQ ID NO: 174327 - RNA, 32 nt, Homo Sapiens
aauauaccaaaauaaaaugaaaaauugaguuu

SEQ ID NO: 174328 - RNA, 32 nt, Homo Sapiens
uccauuuuuuaaagacuaaaccaucucacaga

SEQ ID NO: 174329 - RNA, 32 nt, Homo Sapiens
auauuuuauuagccauccaucauggcaguuuc

SEQ ID NO: 174330 - RNA, 30 nt, Homo Sapiens
gggggaccacuugcaguucuacuggaaaau

SEQ ID NO: 174331 - RNA, 32 nt, Homo Sapiens
cuuuauuuacuuuggugacuguuuauaguuuu

SEQ ID NO: 174332 - RNA, 32 nt, Homo Sapiens
agugagccgagacugugcuacugcacuccagc

SEQ ID NO: 174333 - RNA, 32 nt, Homo Sapiens
aggcugagugcaaugccgugaucucggcucac

SEQ ID NO: 174334 - RNA, 31 nt, Homo Sapiens
uugauaacugccagcaaaccauagauuuaag

SEQ ID NO: 174335 - RNA, 32 nt, Homo Sapiens
ucugaugcgcuugcccucucccggccccggga

SEQ ID NO: 174336 - RNA, 32 nt, Homo Sapiens
cuuuuggaaaauuaagaugucuaaaaggagcc

SEQ ID NO: 174337 - RNA, 32 nt, Homo Sapiens
auucauuucagcaaauauuuauugaguccaca

SEQ ID NO: 174338 - RNA, 32 nt, Homo Sapiens
uggugcuagacaaugaauaccagguaauaaua

SEQ ID NO: 174339 - RNA, 32 nt, Homo Sapiens
gguggucagccccagggcucaccugcccuuug

SEQ ID NO: 174340 - RNA, 32 nt, Homo Sapiens
ccuuuccccugcccucccuccccgaaggagcu

SEQ ID NO: 174341 - RNA, 32 nt, Homo Sapiens
ucccaucucaugcagagcucccaccaagagga

SEQ ID NO: 174342 - RNA, 32 nt, Homo Sapiens
ugugauguuaaaucagaaaugagcuauuagcc

SEQ ID NO: 174343 - RNA, 32 nt, Homo Sapiens
ucagccagaaccagcucuguugcucacagcua

SEQ ID NO: 174344 - RNA, 32 nt, Homo Sapiens
uguaguagaugcuauuagcgcuugucagagag

SEQ ID NO: 174345 - RNA, 32 nt, Homo Sapiens
aaaaggcauucugaugauaaauuuagaauuuu

SEQ ID NO: 174346 - RNA, 32 nt, Homo Sapiens
augcucccugucaauucgcuuuccauucuguu

SEQ ID NO: 174347 - RNA, 32 nt, Homo Sapiens
uguuguuaacuuguguuaaaauguuaaauaua

SEQ ID NO: 174348 - RNA, 32 nt, Homo Sapiens
ggcugggcgugguggcucaccccuguaaucgc

SEQ ID NO: 174349 - RNA, 28 nt, Homo Sapiens
agacccuggcuggccaggaugaaguauc

SEQ ID NO: 174350 - RNA, 32 nt, Homo Sapiens
gucgucuccgaagauuuggcaggggcagaaaa

SEQ ID NO: 174351 - RNA, 32 nt, Homo Sapiens
auccaccgcaugcggugcccguggcccgcccc

SEQ ID NO: 174352 - RNA, 32 nt, Homo Sapiens
cucugccuuucugcaauuuagacgucgcaagg

SEQ ID NO: 174353 - RNA, 32 nt, Homo Sapiens
ugucugcccagcugcuccaagccaggcugaug

SEQ ID NO: 174354 - RNA, 32 nt, Homo Sapiens
cccucgcagaacaguaaaacugaagauuauug

SEQ ID NO: 174355 - RNA, 30 nt, Homo Sapiens
gaagaggcgcccgcgcugcgcugcccggag

SEQ ID NO: 174356 - RNA, 30 nt, Homo Sapiens
ccuccagcuccugccccgccggccgcgcac

SEQ ID NO: 174357 - RNA, 29 nt, Homo Sapiens
aaaauaacaauaaaguuuuaaauaaguug

SEQ ID NO: 174358 - RNA, 32 nt, Homo Sapiens
ccaggcugguccgagcugaggacucugcaagu

SEQ ID NO: 174359 - RNA, 32 nt, Homo Sapiens
ccugagguuuauucagaaaacauguccacugc

SEQ ID NO: 174360 - RNA, 32 nt, Homo Sapiens
cuuuuaacagcauuuuaaccgcucuaaaaauu

SEQ ID NO: 174361 - RNA, 32 nt, Homo Sapiens
uugggcccaguucuccuuuucuccggguuuca

SEQ ID NO: 174362 - RNA, 32 nt, Homo Sapiens
aggagguaaccaccccaccuccccguaggagc

SEQ ID NO: 174363 - RNA, 32 nt, Homo Sapiens
guuuugacacuacuccuguuugcccuccugau

SEQ ID NO: 174364 - RNA, 32 nt, Homo Sapiens
uccucggcggccucggagcgcgggugcagcag

SEQ ID NO: 174365 - RNA, 29 nt, Homo Sapiens
ucugcuuaaaguuuuaacuuuuauaccua

SEQ ID NO: 174366 - RNA, 32 nt, Homo Sapiens
gagcuccaugacccucccugugugguggguug

SEQ ID NO: 174367 - RNA, 32 nt, Homo Sapiens
gaagcagccccuuucucaggcuuacugucacc

SEQ ID NO: 174368 - RNA, 32 nt, Homo Sapiens
accuccccaagagcuuccacuugguuuggucc

SEQ ID NO: 174369 - RNA, 32 nt, Homo Sapiens
auguggcaaguuugcagaugucauagaggcua

SEQ ID NO: 174370 - RNA, 32 nt, Homo Sapiens
aaucuugacgaaaagaaaauaacuccugaaaa

SEQ ID NO: 174371 - RNA, 32 nt, Homo Sapiens
cuguucaaaaaauacacuuaauggagauuugg

SEQ ID NO: 174372 - RNA, 32 nt, Homo Sapiens
cugcaacauaucugaaaugugacauuuucuaa

SEQ ID NO: 174373 - RNA, 31 nt, Homo Sapiens
cagcaggggcauuaguuucaggcaaggcagc

SEQ ID NO: 174374 - RNA, 32 nt, Homo Sapiens
aacuuuccaggaagaaaagagggcaaagggaa

SEQ ID NO: 174375 - RNA, 32 nt, Homo Sapiens
agucuuuuggacacuugauucuauucaaucca

SEQ ID NO: 174376 - RNA, 32 nt, Homo Sapiens
aaugcaauauuuuuaauuuauucuacugaaau

SEQ ID NO: 174377 - RNA, 29 nt, Homo Sapiens
cccacguagaugaugucuguaacgcaguu

SEQ ID NO: 174378 - RNA, 32 nt, Homo Sapiens
cucugacagcgucccaccuggcuacgagccca

SEQ ID NO: 174379 - RNA, 32 nt, Homo Sapiens
gaucugugcaugccacuccugggucagacggu

SEQ ID NO: 174380 - RNA, 32 nt, Homo Sapiens
uuuaaucaacuggcaaagugcuuucaugcuuu

SEQ ID NO: 174381 - RNA, 32 nt, Homo Sapiens
uuuuauguaaaaaucaguauguguuuaguuuu

SEQ ID NO: 174382 - RNA, 32 nt, Homo Sapiens
ggcagguucccucucuggugcugcugcuugca

SEQ ID NO: 174383 - RNA, 32 nt, Homo Sapiens
cauuaguuaacagauugcccaaugaagucgau

SEQ ID NO: 174384 - RNA, 32 nt, Homo Sapiens
ucuccaucaucucaucucuggaugcuguggug

SEQ ID NO: 174385 - RNA, 32 nt, Homo Sapiens
cguggauagagcagagccauguugacacaaac

SEQ ID NO: 174386 - RNA, 32 nt, Homo Sapiens
uugauaugagugucuauaucaaugucaguguc

SEQ ID NO: 174387 - RNA, 32 nt, Homo Sapiens
gucaccaagggucagcucagggcuaggaaaaa

SEQ ID NO: 174388 - RNA, 32 nt, Homo Sapiens
caucauccuauucuuuuuugauguauaaauua

SEQ ID NO: 174389 - RNA, 32 nt, Homo Sapiens
ggaaggaaauuugggcaggaaagggaacucac

SEQ ID NO: 174390 - RNA, 32 nt, Homo Sapiens
gagcagaaggccuuggugggggugggggagga

SEQ ID NO: 174391 - RNA, 32 nt, Homo Sapiens
gucuuuggggagaggggagugcauuuagacuu

SEQ ID NO: 174392 - RNA, 32 nt, Homo Sapiens
cagagaaggcuucaggaccugcuuggucagcu

SEQ ID NO: 174393 - RNA, 32 nt, Homo Sapiens
ucccaggcgagccggcccgcggcugccagucu

SEQ ID NO: 174394 - RNA, 32 nt, Homo Sapiens
uaacuucucuccaguggacucccugcuuugcc

SEQ ID NO: 174395 - RNA, 32 nt, Homo Sapiens
ccgagguggcugggagguggcuccucaaacag

SEQ ID NO: 174396 - RNA, 32 nt, Homo Sapiens
cagagccucugggcccccuccucccuccugua

SEQ ID NO: 174397 - RNA, 32 nt, Homo Sapiens
agggguucaguaaaauaaaaauaagaaguaaa

SEQ ID NO: 174398 - RNA, 32 nt, Homo Sapiens
cgcuggacuccggaacacccguggugaccgcc

SEQ ID NO: 174399 - RNA, 32 nt, Homo Sapiens
cugauacccacccugggauggagcccagcgcc

SEQ ID NO: 174400 - RNA, 32 nt, Homo Sapiens
agggcaguucccuccgcagaacaccccaugcg

SEQ ID NO: 174401 - RNA, 32 nt, Homo Sapiens
cucagcagggccagacaaggcucaguggaucu

SEQ ID NO: 174402 - RNA, 32 nt, Homo Sapiens
cuucaguggugacacuuuaauauagaacacau

SEQ ID NO: 174403 - RNA, 32 nt, Homo Sapiens
guugaaaaugcuuuaugauuuuauaaguauau

SEQ ID NO: 174404 - RNA, 32 nt, Homo Sapiens
ucuaguaaaaaacacaacaauuagccuggcgu

SEQ ID NO: 174405 - RNA, 32 nt, Homo Sapiens
uucacuuuuugcaaauaccuccuuccacccuc

SEQ ID NO: 174406 - RNA, 32 nt, Homo Sapiens
uuuuuagguuuaucuuuuuuuuuucauuucuc

SEQ ID NO: 174407 - RNA, 32 nt, Homo Sapiens
ggaauguaggcuccucacgggcgauggcuguc

SEQ ID NO: 174408 - RNA, 32 nt, Homo Sapiens
cuagcauugugggacauuagggcccccggccu

SEQ ID NO: 174409 - RNA, 32 nt, Homo Sapiens
aacccacagaguuuaggcuggugcugccaaaa

SEQ ID NO: 174410 - RNA, 32 nt, Homo Sapiens
ccucacagagacccaauugaccaaaaaagaaa

SEQ ID NO: 174411 - RNA, 32 nt, Homo Sapiens
uggagacuaucagugcacggcccgcaaccagg

SEQ ID NO: 174412 - RNA, 32 nt, Homo Sapiens
uccacaaggagcuuuucaugccccugugccgc

SEQ ID NO: 174413 - RNA, 32 nt, Homo Sapiens
uggcuucaucguaaguuuuagaauccgauaaa

SEQ ID NO: 174414 - RNA, 32 nt, Homo Sapiens
cgcuauggacaccgugaguccaaggcgcugcu

SEQ ID NO: 174415 - RNA, 32 nt, Homo Sapiens
uccuacaucuucuucccaguaaguuuccccuc

SEQ ID NO: 174416 - RNA, 32 nt, Homo Sapiens
cugcaguuagucuucauagaaagcaagcuuuc

SEQ ID NO: 174417 - RNA, 32 nt, Homo Sapiens
uuuauucagaauaguuuuuuccugucaccucc

SEQ ID NO: 174418 - RNA, 32 nt, Homo Sapiens
augauaaaauggaauuuuugcauuauuaaacu

SEQ ID NO: 174419 - RNA, 32 nt, Homo Sapiens
agugcuguuguccuuggccugcagcaggagga

SEQ ID NO: 174420 - RNA, 32 nt, Homo Sapiens
guaaaagaguuaaaaauuguuacuucauguau

SEQ ID NO: 174421 - RNA, 32 nt, Homo Sapiens
gcccacaggacaccagagccgugagaaccgga

SEQ ID NO: 174422 - RNA, 32 nt, Homo Sapiens
uggcuacacuuauacaucaguucugagguagg

SEQ ID NO: 174423 - RNA, 32 nt, Homo Sapiens
gccgcuccggugcuguccagcagccauaggga

SEQ ID NO: 174424 - RNA, 32 nt, Homo Sapiens
auuuuaaaaauguaaaaacaaaacuuucugcu

SEQ ID NO: 174425 - RNA, 29 nt, Homo Sapiens
guguauuggggacagaaaguuguguaaag

SEQ ID NO: 174426 - RNA, 32 nt, Homo Sapiens
aagagaauauaagcaggcugcccgagccagca

SEQ ID NO: 174427 - RNA, 32 nt, Homo Sapiens
uccacuuacugaaguacagagaugaacagaaa

SEQ ID NO: 174428 - RNA, 32 nt, Homo Sapiens
uagcguccugcccugcccucgggggccugugg

SEQ ID NO: 174429 - RNA, 32 nt, Homo Sapiens
ggcuggcgcacgccccgagguccgagaccgcc

SEQ ID NO: 174430 - RNA, 32 nt, Homo Sapiens
uggacgaccccgacugcgacuccaccugggag

SEQ ID NO: 174431 - RNA, 32 nt, Homo Sapiens
gaaaaaguucagcaauggaacuaguuucugca

SEQ ID NO: 174432 - RNA, 32 nt, Homo Sapiens
agauugaggaugaugaggaugacugagagcua

SEQ ID NO: 174433 - RNA, 32 nt, Homo Sapiens
uaugacccagccucagaacccacaugucaucc

SEQ ID NO: 174434 - RNA, 32 nt, Homo Sapiens
uaguggguagcgggucucggguugcggguugc

SEQ ID NO: 174435 - RNA, 32 nt, Homo Sapiens
aagcugcacaauuuaauauauucaagaguggg

SEQ ID NO: 174436 - RNA, 32 nt, Homo Sapiens
cccacaagggaagagguggaggucaggcacgg

SEQ ID NO: 174437 - RNA, 32 nt, Homo Sapiens
gaucccugcccccacguucaccacugacaacc

SEQ ID NO: 174438 - RNA, 32 nt, Homo Sapiens
cgcccggcgcugcuccuccuuccccagcuccg

SEQ ID NO: 174439 - RNA, 32 nt, Homo Sapiens
gcugccauauauauuguaucaaaauaucauua

SEQ ID NO: 174440 - RNA, 30 nt, Homo Sapiens
cagcagcagcccgugcccgggagcggcggc

SEQ ID NO: 174441 - RNA, 32 nt, Homo Sapiens
cugugcuggggguggggggaagcugggggcac

SEQ ID NO: 174442 - RNA, 32 nt, Homo Sapiens
gugggaauuaaggaagugacucauccucuuga

SEQ ID NO: 174443 - RNA, 30 nt, Homo Sapiens
aucggucuggacuguuggccccuggcuggg

SEQ ID NO: 174444 - RNA, 32 nt, Homo Sapiens
agaaaugcuuucagucuacuuuucuuaaaucu

SEQ ID NO: 174445 - RNA, 32 nt, Homo Sapiens
aggagcagccaggugcauggguugcccacuug

SEQ ID NO: 174446 - RNA, 32 nt, Homo Sapiens
cugcagguauugagagauccacagcuaagacg

SEQ ID NO: 174447 - RNA, 32 nt, Homo Sapiens
aaggcgcuuuggggguggaggggguggugcug

SEQ ID NO: 174448 - RNA, 32 nt, Homo Sapiens
ccacuacagguggucacagguuccuguucccc

SEQ ID NO: 174449 - RNA, 31 nt, Homo Sapiens
uuacacagugugaauaaagugcugcggagca

SEQ ID NO: 174450 - RNA, 32 nt, Homo Sapiens
ugcgagccaaccccccucccccacccugcccu

SEQ ID NO: 174451 - RNA, 32 nt, Homo Sapiens
agaguaaaccaggacugcugcccgcacagcuu

SEQ ID NO: 174452 - RNA, 32 nt, Homo Sapiens
aggauugaguuucacuuccucacugacauuuu

SEQ ID NO: 174453 - RNA, 32 nt, Homo Sapiens
uucuugcaaauuuagcacuuggaacauuuaaa

SEQ ID NO: 174454 - RNA, 32 nt, Homo Sapiens
acauugggacugagggaacaucugaaagcuac

SEQ ID NO: 174455 - RNA, 32 nt, Homo Sapiens
gaucccgugggguggggcaggggguggggcuu

SEQ ID NO: 174456 - RNA, 32 nt, Homo Sapiens
gugagaguuuccagccugagaauggcagaagc

SEQ ID NO: 174457 - RNA, 32 nt, Homo Sapiens
auacgacacaugcccaugaugagaaguagaac

SEQ ID NO: 174458 - RNA, 32 nt, Homo Sapiens
ggaugccagauuggagaggucagacaccucgc

SEQ ID NO: 174459 - RNA, 32 nt, Homo Sapiens
cacuuugcacgcugugcugcagacauucuggc

SEQ ID NO: 174460 - RNA, 32 nt, Homo Sapiens
cagcaaacagagcuggcugggaacugggagaa

SEQ ID NO: 174461 - RNA, 32 nt, Homo Sapiens
uggggugaaggggacccaggccugugacagcc

SEQ ID NO: 174462 - RNA, 32 nt, Homo Sapiens
guggacgggaagcucccggcccggcgaacuaa

SEQ ID NO: 174463 - RNA, 32 nt, Homo Sapiens
agcuugccccgccgccccaccggagcgcggaa

SEQ ID NO: 174464 - RNA, 32 nt, Homo Sapiens
acuguuguauaaacuaaucuuugcuuguuuuc

SEQ ID NO: 174465 - RNA, 32 nt, Homo Sapiens
ccggaagauccgaguccauccgcggcggggag

SEQ ID NO: 174466 - RNA, 32 nt, Homo Sapiens
uguuuguauauaaauggugagaauuaaaauaa

SEQ ID NO: 174467 - RNA, 32 nt, Homo Sapiens
gagaggguagaccgggggaggacccgcccuuu

SEQ ID NO: 174468 - RNA, 32 nt, Homo Sapiens
cagcuccaguugcaggcccugcuccagcaucu

SEQ ID NO: 174469 - RNA, 32 nt, Homo Sapiens
aaugguaacuaauguuauaauuaggguuuuuc

SEQ ID NO: 174470 - RNA, 32 nt, Homo Sapiens
cuaugaaugcuauuucuagaaaaagucuagug

SEQ ID NO: 174471 - RNA, 32 nt, Homo Sapiens
auagaagcaauaacucuaacucuauacuguag

SEQ ID NO: 174472 - RNA, 32 nt, Homo Sapiens
auauggcuccaucuucacgggcgcccaggacc

SEQ ID NO: 174473 - RNA, 32 nt, Homo Sapiens
ccuuuuagaggcuaugaagaaaacagcugcau

SEQ ID NO: 174474 - RNA, 32 nt, Homo Sapiens
aaagcacagcuccucccccagcccuugggacc

SEQ ID NO: 174475 - RNA, 32 nt, Homo Sapiens
gcagugcguggccccaagcaucgcggagccug

SEQ ID NO: 174476 - RNA, 32 nt, Homo Sapiens
ucugcuugucuauggaaggcugucuggagggg

SEQ ID NO: 174477 - RNA, 32 nt, Homo Sapiens
gcuguuggucugagggcaguaaucacaggcug

SEQ ID NO: 174478 - RNA, 32 nt, Homo Sapiens
ucuaaguauuuucaugaaauucaccagcaguu

SEQ ID NO: 174479 - RNA, 32 nt, Homo Sapiens
gagccccccucccccugccacccaccuuacug

SEQ ID NO: 174480 - RNA, 28 nt, Homo Sapiens
cgaagguggcggccgagguggcggccga

SEQ ID NO: 174481 - RNA, 32 nt, Homo Sapiens
ucccccugcugcugaagcugcccugcccaugc

SEQ ID NO: 174482 - RNA, 32 nt, Homo Sapiens
caccacccaguuccucccucaguaucacauua

SEQ ID NO: 174483 - RNA, 32 nt, Homo Sapiens
gacuccucaccucgggggcucgggccuugacu

SEQ ID NO: 174484 - RNA, 32 nt, Homo Sapiens
aaugucuaaaagaauaauacgaaguauauaua

SEQ ID NO: 174485 - RNA, 32 nt, Homo Sapiens
ucagugcauuuucauuuuuuuauuaacagcaa

SEQ ID NO: 174486 - RNA, 32 nt, Homo Sapiens
acauaaggaugucaggccuggaccuccugggc

SEQ ID NO: 174487 - RNA, 32 nt, Homo Sapiens
gggacuuccuuccucuguccggagaggcacag

SEQ ID NO: 174488 - RNA, 32 nt, Homo Sapiens
agauagcagcauaucagagcugaucuccucca

SEQ ID NO: 174489 - RNA, 32 nt, Homo Sapiens
gcagcccggcggccucccggcgggagcgagca

SEQ ID NO: 174490 - RNA, 32 nt, Homo Sapiens
ccucagagcucuuaaaugcuuaucucugguac

SEQ ID NO: 174491 - RNA, 32 nt, Homo Sapiens
guucgugguuggggauaggagcucccgucgcg

SEQ ID NO: 174492 - RNA, 32 nt, Homo Sapiens
guggcucccagcugcaugggcuccugcuugug

SEQ ID NO: 174493 - RNA, 32 nt, Homo Sapiens
ccaggcgccuccccaccgggcucucaggacac

SEQ ID NO: 174494 - RNA, 32 nt, Homo Sapiens
acauuccuuucugcaacugcgguggcaccaca

SEQ ID NO: 174495 - RNA, 32 nt, Homo Sapiens
cuuuuaggucaguuccuauuaaaugagcucuu

SEQ ID NO: 174496 - RNA, 32 nt, Homo Sapiens
aaaaaugucgaguuccauugcauuguaaauag

SEQ ID NO: 174497 - RNA, 32 nt, Homo Sapiens
cggcaaaucaucagucccacucugcuagcaaa

SEQ ID NO: 174498 - RNA, 32 nt, Homo Sapiens
ccugccuugggcugcccucccccagaccccug

SEQ ID NO: 174499 - RNA, 32 nt, Homo Sapiens
uuuaaaaaacgacagaauaagguacaaaugua

SEQ ID NO: 174500 - RNA, 32 nt, Homo Sapiens
auagauuacugauuuuccuagucaaaguuaau

SEQ ID NO: 174501 - RNA, 32 nt, Homo Sapiens
uaaugggaaggguaaaucuucagagacacuug

SEQ ID NO: 174502 - RNA, 32 nt, Homo Sapiens
aaaggguacgagagggacccccugccgagccg

SEQ ID NO: 174503 - RNA, 32 nt, Homo Sapiens
cccaguuguugcgccuuuccagacagaaccag

SEQ ID NO: 174504 - RNA, 32 nt, Homo Sapiens
ggucaagaucagcucuggcuaguucucacagg

SEQ ID NO: 174505 - RNA, 32 nt, Homo Sapiens
agucucuuuccacgugaugcuuuuguuugaac

SEQ ID NO: 174506 - RNA, 32 nt, Homo Sapiens
aaguagagagguagaaauagcggcacagagag

SEQ ID NO: 174507 - RNA, 32 nt, Homo Sapiens
gaguaaccacugggaaaauauuucagaugaaa

SEQ ID NO: 174508 - RNA, 32 nt, Homo Sapiens
gggucccggccgccaggccggagcgcgaaugu

SEQ ID NO: 174509 - RNA, 32 nt, Homo Sapiens
aguuaguacgcuugccuuccugucgcccgguu

SEQ ID NO: 174510 - RNA, 32 nt, Homo Sapiens
ugagcucugagaaaugaauucuuuguggcuug

SEQ ID NO: 174511 - RNA, 32 nt, Homo Sapiens
uuugucuuuuagaacacagaccauuuucagga

SEQ ID NO: 174512 - RNA, 32 nt, Homo Sapiens
ggcacgaggcgcccgcggggcuguccgcgguc

SEQ ID NO: 174513 - RNA, 32 nt, Homo Sapiens
gcucuucauucauuggugacaagcccccaccc

SEQ ID NO: 174514 - RNA, 32 nt, Homo Sapiens
uugaguguuuauuguucaguuuauuacguuuc

SEQ ID NO: 174515 - RNA, 32 nt, Homo Sapiens
gcgaccccgcggcgggcgcggagauguggccc

SEQ ID NO: 174516 - RNA, 32 nt, Homo Sapiens
uccgaagucagucugcagaaaauaaauauuua

SEQ ID NO: 174517 - RNA, 32 nt, Homo Sapiens
aguauucugccuuugcagaaacagauuuggug

SEQ ID NO: 174518 - RNA, 32 nt, Homo Sapiens
cuggaaacugugagcccauaaaacaguauuuu

SEQ ID NO: 174519 - RNA, 32 nt, Homo Sapiens
uauuucugugauugcaccuuuguuauggccaa

SEQ ID NO: 174520 - RNA, 32 nt, Homo Sapiens
caaguucaaaauuuaaacaaguucauacaagu

SEQ ID NO: 174521 - RNA, 32 nt, Homo Sapiens
accucaccggcaugcuggccuguggcaggccu

SEQ ID NO: 174522 - RNA, 32 nt, Homo Sapiens
cucuuucauuuuuauauuaagaauuaaacugu

SEQ ID NO: 174523 - RNA, 32 nt, Homo Sapiens
acuuugaaggaguuaagauggaagacuuccuu

SEQ ID NO: 174524 - RNA, 32 nt, Homo Sapiens
cuuaaaaauuaacaaggucauucagaaguaga

SEQ ID NO: 174525 - RNA, 32 nt, Homo Sapiens
uuaaggauagaaccagaggccuugaagggagc

SEQ ID NO: 174526 - RNA, 32 nt, Homo Sapiens
cacagcuaagacgccaggaucccccggaagcc

SEQ ID NO: 174527 - RNA, 32 nt, Homo Sapiens
ugacguuguguccuccuccccuggacaaucuc

SEQ ID NO: 174528 - RNA, 32 nt, Homo Sapiens
ccaaccuguccuuguuaaguuacuugcuucuu

SEQ ID NO: 174529 - RNA, 32 nt, Homo Sapiens
gaguuuucuguuucuuuuucuuacaucaugag

SEQ ID NO: 174530 - RNA, 32 nt, Homo Sapiens
uauuaaagauaucaauacuaagugacaguauc

SEQ ID NO: 174531 - RNA, 32 nt, Homo Sapiens
auguaguguauuaagaagcuuauauuacuaca

SEQ ID NO: 174532 - RNA, 32 nt, Homo Sapiens
uggccaggaacugccaacagcuuuuguucugg

SEQ ID NO: 174533 - RNA, 32 nt, Homo Sapiens
ccccuccccgucugcuagaauguuucucauga

SEQ ID NO: 174534 - RNA, 32 nt, Homo Sapiens
auggagaguuggucaggcugcugcugggagaa

SEQ ID NO: 174535 - RNA, 32 nt, Homo Sapiens
guuccugggaagggcugcgaggccugcccucc

SEQ ID NO: 174536 - RNA, 32 nt, Homo Sapiens
agccgagauugugccacugcacuccagccuag

SEQ ID NO: 174537 - RNA, 32 nt, Homo Sapiens
cuggggcacuguauaguggagcucugagaaga

SEQ ID NO: 174538 - RNA, 32 nt, Homo Sapiens
uuaguuuguaucucaaguacccucuugaggua

SEQ ID NO: 174539 - RNA, 32 nt, Homo Sapiens
cuacaucugcaccugcccuuuuuucauaccac

SEQ ID NO: 174540 - RNA, 32 nt, Homo Sapiens
ggaagugggagcucagggaggaccccgggcag

SEQ ID NO: 174541 - RNA, 32 nt, Homo Sapiens
gcuccauuuuccucucuuucucuuccccuuuc

SEQ ID NO: 174542 - RNA, 32 nt, Homo Sapiens
guugguuccuaucaccucuuguccucaguuuc

SEQ ID NO: 174543 - RNA, 32 nt, Homo Sapiens
acucuggaugauauggaaaacacugccauauu

SEQ ID NO: 174544 - RNA, 32 nt, Homo Sapiens
gagcgcggcgugagcccucccccuugggaucc

SEQ ID NO: 174545 - RNA, 32 nt, Homo Sapiens
uggcaccugggccagcagcauuggcaucaccu

SEQ ID NO: 174546 - RNA, 32 nt, Homo Sapiens
ugaggggaauggggagagagaggaagcgacug

SEQ ID NO: 174547 - RNA, 32 nt, Homo Sapiens
cugacugucccugccaaugcuccagcugucgu

SEQ ID NO: 174548 - RNA, 28 nt, Homo Sapiens
aagaugcagcggguguccgggcugcucu

SEQ ID NO: 174549 - RNA, 32 nt, Homo Sapiens
agcccuuacuugggaaaagggacccccaccag

SEQ ID NO: 174550 - RNA, 32 nt, Homo Sapiens
acgguggcugugcccagaagugccagauggug

SEQ ID NO: 174551 - RNA, 32 nt, Homo Sapiens
cagcuguaaucccagcacuuugagguuggcug

SEQ ID NO: 174552 - RNA, 32 nt, Homo Sapiens
cugcgcccuugaggggccccagcgucugcagg

SEQ ID NO: 174553 - RNA, 32 nt, Homo Sapiens
agccauggcaggugcugaccuggugcuuggcu

SEQ ID NO: 174554 - RNA, 32 nt, Homo Sapiens
gagcacccaagccaggugggugguggcucuua

SEQ ID NO: 174555 - RNA, 32 nt, Homo Sapiens
accaagauggcggcggcagggcggcggcgcgg

SEQ ID NO: 174556 - RNA, 32 nt, Homo Sapiens
accuuggugacuggauucaacuugcuugggag

SEQ ID NO: 174557 - RNA, 32 nt, Homo Sapiens
aggggggccggcgggggaccaauguguuagcc

SEQ ID NO: 174558 - RNA, 32 nt, Homo Sapiens
uggagcagcaaacuuggugaaacuacaucucc

SEQ ID NO: 174559 - RNA, 32 nt, Homo Sapiens
gcagggucaggagaggggcagaacagccgcuc

SEQ ID NO: 174560 - RNA, 32 nt, Homo Sapiens
cauuuacugugucuuugguuugugcuaggccc

SEQ ID NO: 174561 - RNA, 32 nt, Homo Sapiens
gccauagaauucucuuguaugaucguugaccu

SEQ ID NO: 174562 - RNA, 32 nt, Homo Sapiens
uuaaauguugucuacagugcaaaauccauguu

SEQ ID NO: 174563 - RNA, 32 nt, Homo Sapiens
ugauauuuucccuuuuuaaaaaauaccauuga

SEQ ID NO: 174564 - RNA, 32 nt, Homo Sapiens
cagccuggguggcaaagugagacucuggcuca

SEQ ID NO: 174565 - RNA, 32 nt, Homo Sapiens
acccgggaauccaugcacgcauuuuguguugg

SEQ ID NO: 174566 - RNA, 32 nt, Homo Sapiens
agccagccuccuugcuggccauggcuuugcca

SEQ ID NO: 174567 - RNA, 32 nt, Homo Sapiens
acugggcugcagguuggagaggcagcaugaug

SEQ ID NO: 174568 - RNA, 32 nt, Homo Sapiens
aaguccuuccucuggggaagugaaggguacaa

SEQ ID NO: 174569 - RNA, 32 nt, Homo Sapiens
gacucuuccacggugugcugcuuucccuccga

SEQ ID NO: 174570 - RNA, 32 nt, Homo Sapiens
gaucccgagggcauaggccaccccccucgaag

SEQ ID NO: 174571 - RNA, 32 nt, Homo Sapiens
agcaggcgcaggcuccgugaggaggcaaggga

SEQ ID NO: 174572 - RNA, 32 nt, Homo Sapiens
gcccaggcggguggaucaaaggucaggaguuc

SEQ ID NO: 174573 - RNA, 32 nt, Homo Sapiens
gccuguaugugcccucugcccucagggccagc

SEQ ID NO: 174574 - RNA, 32 nt, Homo Sapiens
guuggucugaucuguuugucuguccgcuuuau

SEQ ID NO: 174575 - RNA, 32 nt, Homo Sapiens
cuauuuccugguuaugaauauuaagguuggaa

SEQ ID NO: 174576 - RNA, 32 nt, Homo Sapiens
uccugcccaccgcauacccuggcgccucacuc

SEQ ID NO: 174577 - RNA, 32 nt, Homo Sapiens
gcuguaauuggauuuucuuaauauucauuaaa

SEQ ID NO: 174578 - RNA, 32 nt, Homo Sapiens
aaacacaaauccucacaauaccucugugaggu

SEQ ID NO: 174579 - RNA, 32 nt, Homo Sapiens
uggccugugcugcugcagcugcugauaagccu

SEQ ID NO: 174580 - RNA, 32 nt, Homo Sapiens
ggucauuacuucugagccccagccccaaucca

SEQ ID NO: 174581 - RNA, 32 nt, Homo Sapiens
gaaacagugucugucugcuacuuuauuuuccc

SEQ ID NO: 174582 - RNA, 32 nt, Homo Sapiens
acagccugccagcagcgccucagugcccgagc

SEQ ID NO: 174583 - RNA, 32 nt, Homo Sapiens
auggccauuaaugucuuguaauuuauaacagu

SEQ ID NO: 174584 - RNA, 32 nt, Homo Sapiens
ucagaauucuuuguggaauuguuuaauuuggu

SEQ ID NO: 174585 - RNA, 32 nt, Homo Sapiens
ccgcacgcagucgcgcaguucugccuccgccu

SEQ ID NO: 174586 - RNA, 32 nt, Homo Sapiens
aguauuuuguuuugauuuuuuaacuugcugca

SEQ ID NO: 174587 - RNA, 32 nt, Homo Sapiens
uugaugugcaacagguuucuuuagucaccaac

SEQ ID NO: 174588 - RNA, 32 nt, Homo Sapiens
uucaggggcuccuguccugggccagggccuga

SEQ ID NO: 174589 - RNA, 32 nt, Homo Sapiens
caagucuaucugaaaagucuccagaagucuaa

SEQ ID NO: 174590 - RNA, 32 nt, Homo Sapiens
cagccuccgccccgccaggcccggcccggacu

SEQ ID NO: 174591 - RNA, 32 nt, Homo Sapiens
agccaccuccccacccacauacauuucugcca

SEQ ID NO: 174592 - RNA, 32 nt, Homo Sapiens
cgcagcccgcagcgcuccggcuccuccucucg

SEQ ID NO: 174593 - RNA, 32 nt, Homo Sapiens
gcauaauuuuguuuugauacaaacaaaauuau

SEQ ID NO: 174594 - RNA, 31 nt, Homo Sapiens
ccauccugcaagaaaaagauauuacacugca

SEQ ID NO: 174595 - RNA, 32 nt, Homo Sapiens
ggagccgucgcaggucucgguccaaggggccc

SEQ ID NO: 174596 - RNA, 32 nt, Homo Sapiens
gcuccuguauauauauuuuauugcaugcacug

SEQ ID NO: 174597 - RNA, 32 nt, Homo Sapiens
agaagucuucagcuugucuuguccucuccaca

SEQ ID NO: 174598 - RNA, 32 nt, Homo Sapiens
caacagcaaacacuuacagggugccuaccccg

SEQ ID NO: 174599 - RNA, 29 nt, Homo Sapiens
caaauccguguccgggugcgcucccacuc

SEQ ID NO: 174600 - RNA, 32 nt, Homo Sapiens
uuucagauuuacuguuauguuggcuuuagugu

SEQ ID NO: 174601 - RNA, 32 nt, Homo Sapiens
uuucuucuucucccuuuccaucuuucagcaua

SEQ ID NO: 174602 - RNA, 32 nt, Homo Sapiens
uccuggagggguggagcagcugggggcuggag

SEQ ID NO: 174603 - RNA, 32 nt, Homo Sapiens
gggcauagccucagccccaggccucuguccug

SEQ ID NO: 174604 - RNA, 32 nt, Homo Sapiens
cccagccccguccucccaccaccccagggggc

SEQ ID NO: 174605 - RNA, 32 nt, Homo Sapiens
uggagucuuagaaauuuuuucuuuucaauaag

SEQ ID NO: 174606 - RNA, 32 nt, Homo Sapiens
ugcugaugcccacaggggagccaggcuggcug

SEQ ID NO: 174607 - RNA, 32 nt, Homo Sapiens
aagguaccauucaaagcagggggaaagguagg

SEQ ID NO: 174608 - RNA, 32 nt, Homo Sapiens
ugacuuagcaccagguuccauuagcucuccaa

SEQ ID NO: 174609 - RNA, 32 nt, Homo Sapiens
ucagcgaagggagaggagcuuucagaaaaacc

SEQ ID NO: 174610 - RNA, 32 nt, Homo Sapiens
gugguuuccugaguugcugcugcugcggcggc

SEQ ID NO: 174611 - RNA, 32 nt, Homo Sapiens
cccucugugucugcucucauccauuccucuua

SEQ ID NO: 174612 - RNA, 32 nt, Homo Sapiens
uuggcuugaagaaggagcucaguaaacaucug

SEQ ID NO: 174613 - RNA, 32 nt, Homo Sapiens
ucaacaaaguguggaagacggacuagccuaga

SEQ ID NO: 174614 - RNA, 32 nt, Homo Sapiens
ccuuggugccuggccuggcacacaucaggagu

SEQ ID NO: 174615 - RNA, 32 nt, Homo Sapiens
gggaccggcuccagcacaccccggugucugug

SEQ ID NO: 174616 - RNA, 32 nt, Homo Sapiens
ggcuuuguaaaacuuugaauagauuuuauugu

SEQ ID NO: 174617 - RNA, 32 nt, Homo Sapiens
cgcugggaaggaagaggacagcaagacauggc

SEQ ID NO: 174618 - RNA, 32 nt, Homo Sapiens
ugacagucaagugccaucuggaucuuaaggag

SEQ ID NO: 174619 - RNA, 32 nt, Homo Sapiens
uuuuuucuuuuggcuuuucauauaucacacua

SEQ ID NO: 174620 - RNA, 32 nt, Homo Sapiens
ccaggaaaauuccaucagggauuggaugacca

SEQ ID NO: 174621 - RNA, 32 nt, Homo Sapiens
guuacauauuuagguauacacacacacacaca

SEQ ID NO: 174622 - RNA, 32 nt, Homo Sapiens
cguggagaggggccacgcucugcagccuuggg

SEQ ID NO: 174623 - RNA, 32 nt, Homo Sapiens
gaugcuaggaagaugucccuccccucacugcc

SEQ ID NO: 174624 - RNA, 32 nt, Homo Sapiens
auuuuuaugcacucuucucccacacauacaca

SEQ ID NO: 174625 - RNA, 32 nt, Homo Sapiens
gcggggauggaggcagggaggggggacgaugg

SEQ ID NO: 174626 - RNA, 32 nt, Homo Sapiens
uguacuuuaaaugugacaaauaaaccuuuugg

SEQ ID NO: 174627 - RNA, 32 nt, Homo Sapiens
aucaaggucaacuggcaguuuuauuaccuuug

SEQ ID NO: 174628 - RNA, 32 nt, Homo Sapiens
caugaccccaauucucucuccucaagcucgac

SEQ ID NO: 174629 - RNA, 32 nt, Homo Sapiens
augugaaauuggguagguguggaauaaacuug

SEQ ID NO: 174630 - RNA, 32 nt, Homo Sapiens
aaaugacugauguauuuuuauguaucuacaca

SEQ ID NO: 174631 - RNA, 32 nt, Homo Sapiens
cuggcugaggagccuugaaugccaaguuaaag

SEQ ID NO: 174632 - RNA, 32 nt, Homo Sapiens
uauuuauguguaauuuaacaaacaaauuuuau

SEQ ID NO: 174633 - RNA, 32 nt, Homo Sapiens
aaauuugcgcuccgccagcccggagcauuuag

SEQ ID NO: 174634 - RNA, 32 nt, Homo Sapiens
cuccuggcgaggggagggccuggccuggaccg

SEQ ID NO: 174635 - RNA, 32 nt, Homo Sapiens
aaagauuguaaauccgaaaacuuccauuguag

SEQ ID NO: 174636 - RNA, 32 nt, Homo Sapiens
uguugauuuuggaguuacaacuguggugauag

SEQ ID NO: 174637 - RNA, 32 nt, Homo Sapiens
accacuggacuccagccugggcgacagaguga

SEQ ID NO: 174638 - RNA, 32 nt, Homo Sapiens
ggcaccuccucgccagcucuuccgcuccucuc

SEQ ID NO: 174639 - RNA, 32 nt, Homo Sapiens
uccccaaaaauauguaugugugggcuugcuua

SEQ ID NO: 174640 - RNA, 32 nt, Homo Sapiens
gucaugcaguucuuuucuuuugcuagaaaauu

SEQ ID NO: 174641 - RNA, 32 nt, Homo Sapiens
uugcuuuucuaauuuccuuccauaucccucag

SEQ ID NO: 174642 - RNA, 32 nt, Homo Sapiens
ugcaaaaggcuuuacuucagaaugguuuauuu

SEQ ID NO: 174643 - RNA, 32 nt, Homo Sapiens
accccuccccagugccucuccuggcccuggaa

SEQ ID NO: 174644 - RNA, 32 nt, Homo Sapiens
ugaacucauuuucuauuuuguuauuucuaaaa

SEQ ID NO: 174645 - RNA, 32 nt, Homo Sapiens
ucugggaaaaggagugguuucuggcugaauac

SEQ ID NO: 174646 - RNA, 32 nt, Homo Sapiens
ccgucuaucccuucggccgccgccggcaugag

SEQ ID NO: 174647 - RNA, 32 nt, Homo Sapiens
ggcggcagccucgggggcuccgacuccagcuc

SEQ ID NO: 174648 - RNA, 32 nt, Homo Sapiens
guguuuuaaacagaauaaagauuccaaacacu

SEQ ID NO: 174649 - RNA, 30 nt, Homo Sapiens
gaggaggagaagcuggcggagcuugccagg

SEQ ID NO: 174650 - RNA, 32 nt, Homo Sapiens
uuugcucaaaaagcuuggaaaauacuacacac

SEQ ID NO: 174651 - RNA, 32 nt, Homo Sapiens
agaggggccucaucuuccccagcccuccccac

SEQ ID NO: 174652 - RNA, 32 nt, Homo Sapiens
gcaauacugaagcaggaugaaguaagaggaau

SEQ ID NO: 174653 - RNA, 32 nt, Homo Sapiens
ggucucuccgggucacgaucuuccaaaguucg

SEQ ID NO: 174654 - RNA, 32 nt, Homo Sapiens
cuuuuagagucuuauuugauuauggugggagg

SEQ ID NO: 174655 - RNA, 32 nt, Homo Sapiens
cgucagacaacgacccaccucauccccccagc

SEQ ID NO: 174656 - RNA, 32 nt, Homo Sapiens
ccaucuugccagcagugcccgcccccacccuc

SEQ ID NO: 174657 - RNA, 32 nt, Homo Sapiens
cagccacgacguuuccucuuuccccucuccaa

SEQ ID NO: 174658 - RNA, 32 nt, Homo Sapiens
ucggggcuggugggcgguggcuccugggaagu

SEQ ID NO: 174659 - RNA, 32 nt, Homo Sapiens
gucccauggccugugagcaccggagcgccugg

SEQ ID NO: 174660 - RNA, 32 nt, Homo Sapiens
ccaagaacagcaucuccccagcccucauccua

SEQ ID NO: 174661 - RNA, 32 nt, Homo Sapiens
aguugggaacuaagauugaacucuguggugca

SEQ ID NO: 174662 - RNA, 32 nt, Homo Sapiens
aacggcggagggggcggggaagggagauucgg

SEQ ID NO: 174663 - RNA, 32 nt, Homo Sapiens
cucccacuccccagcgcccccggaccgugcag

SEQ ID NO: 174664 - RNA, 32 nt, Homo Sapiens
gcauucagaacauaaaugcacaaaaucuguac

SEQ ID NO: 174665 - RNA, 32 nt, Homo Sapiens
aucuauauauagagauaucuuugucagcauug

SEQ ID NO: 174666 - RNA, 32 nt, Homo Sapiens
uuucagugauuuccucugaagcagcugcacug

SEQ ID NO: 174667 - RNA, 32 nt, Homo Sapiens
ugcaugguuuuauacuggugacugcuuuggua

SEQ ID NO: 174668 - RNA, 32 nt, Homo Sapiens
gcaagacuuucagucagacguauucccuuaca

SEQ ID NO: 174669 - RNA, 32 nt, Homo Sapiens
cauccuggccuacauggcgaaacccugucucu

SEQ ID NO: 174670 - RNA, 32 nt, Homo Sapiens
agccgaccccccuccaagccccggcccguccc

SEQ ID NO: 174671 - RNA, 32 nt, Homo Sapiens
ucacuuuuaaacaacuagggugcuggaagaac

SEQ ID NO: 174672 - RNA, 32 nt, Homo Sapiens
acuucuguggagggcccgauaguaaccauuug

SEQ ID NO: 174673 - RNA, 32 nt, Homo Sapiens
uguuguaugacagaaggcuuuuccaagcaaac

SEQ ID NO: 174674 - RNA, 32 nt, Homo Sapiens
cauacuacuuugcaucggagguuaagcucauu

SEQ ID NO: 174675 - RNA, 32 nt, Homo Sapiens
ccucccuccgcggcgggcccugcccacaccuc

SEQ ID NO: 174676 - RNA, 32 nt, Homo Sapiens
gauuuuccuucaggaguugaucucuaaugcuu

SEQ ID NO: 174677 - RNA, 32 nt, Homo Sapiens
caaggagugggacucccggcccgggguucgcc

SEQ ID NO: 174678 - RNA, 32 nt, Homo Sapiens
aucauuuacucuucuucauuagcuuugggugc

SEQ ID NO: 174679 - RNA, 32 nt, Homo Sapiens
agcggcggcgggaugcuggcgcugcuggccgc

SEQ ID NO: 174680 - RNA, 32 nt, Homo Sapiens
uguauuuuaaacagucccuuaagguaaaguga

SEQ ID NO: 174681 - RNA, 32 nt, Homo Sapiens
uccuacaaagaaaaaagaagggguagggauuu

SEQ ID NO: 174682 - RNA, 32 nt, Homo Sapiens
aucagguuaaaugugacuaaugcuuuucuuuc

SEQ ID NO: 174683 - RNA, 32 nt, Homo Sapiens
gagcagaaauuccugcccugggugggaggaua

SEQ ID NO: 174684 - RNA, 32 nt, Homo Sapiens
ucgggguugccgggcgcgcucugcaaagggga

SEQ ID NO: 174685 - RNA, 29 nt, Homo Sapiens
cauugugauuuguuccugccccaccuuaa

SEQ ID NO: 174686 - RNA, 32 nt, Homo Sapiens
agucaccuaagcaaucacugggcccagaggag

SEQ ID NO: 174687 - RNA, 32 nt, Homo Sapiens
aauaaauccaaauugugaaugcuuaaaauaua

SEQ ID NO: 174688 - RNA, 32 nt, Homo Sapiens
aucaucuauauguuaaauauccgugccgaucu

SEQ ID NO: 174689 - RNA, 32 nt, Homo Sapiens
uccccucagaaucucgcugucuccuuccaacc

SEQ ID NO: 174690 - RNA, 32 nt, Homo Sapiens
guuugugacaaugacuguugguguggugccua

SEQ ID NO: 174691 - RNA, 32 nt, Homo Sapiens
gggcucccaagccagagucaaggucugacgcc

SEQ ID NO: 174692 - RNA, 32 nt, Homo Sapiens
uccccucuucgccagcucccagguccccacuc

SEQ ID NO: 174693 - RNA, 32 nt, Homo Sapiens
cccuuguuccuccgaaugguucuuccacacuc

SEQ ID NO: 174694 - RNA, 32 nt, Homo Sapiens
uaguagcgugacuugccuuucccuuuaaaaac

SEQ ID NO: 174695 - RNA, 32 nt, Homo Sapiens
caaccugaggacucucuuucuggagguaauug

SEQ ID NO: 174696 - RNA, 32 nt, Homo Sapiens
ccguuguuuuaacagcguuauggagauaaagu

SEQ ID NO: 174697 - RNA, 32 nt, Homo Sapiens
auggaggacagcuuauggaaaaaguuagggcg

SEQ ID NO: 174698 - RNA, 32 nt, Homo Sapiens
uuccucacccucggggagcaacauggcagaua

SEQ ID NO: 174699 - RNA, 32 nt, Homo Sapiens
gggcucugaaguaccaugagccuguagaacug

SEQ ID NO: 174700 - RNA, 32 nt, Homo Sapiens
cgcaggccacggugaccguccaggugcuggcc

SEQ ID NO: 174701 - RNA, 32 nt, Homo Sapiens
uuagcauaucuagacuaccuauuugaaaggaa

SEQ ID NO: 174702 - RNA, 32 nt, Homo Sapiens
aagacaucaaggaucaaggauaaucacuuuga

SEQ ID NO: 174703 - RNA, 32 nt, Homo Sapiens
auuagaagauaaaaucaagcauguaucugccu

SEQ ID NO: 174704 - RNA, 32 nt, Homo Sapiens
cccagugguccugugacugcugaggaccaagg

SEQ ID NO: 174705 - RNA, 32 nt, Homo Sapiens
gauguuuccuacaacuaaaaauaaauuaauaa

SEQ ID NO: 174706 - RNA, 32 nt, Homo Sapiens
auuaauugcagggcugugaucacagccaacac

SEQ ID NO: 174707 - RNA, 32 nt, Homo Sapiens
uuucuccuguuucauuucuccuccgccugcug

SEQ ID NO: 174708 - RNA, 32 nt, Homo Sapiens
caagacaagggccaaccuauuacuucacacac

SEQ ID NO: 174709 - RNA, 32 nt, Homo Sapiens
aucgucuauuggaugugaaaccagagaugccc

SEQ ID NO: 174710 - RNA, 32 nt, Homo Sapiens
uuacguagguaaacgugugccauggugguuug

SEQ ID NO: 174711 - RNA, 32 nt, Homo Sapiens
accgcuucuccucacaccccaguccgcagugc

SEQ ID NO: 174712 - RNA, 32 nt, Homo Sapiens
gaaugcaaugcuuuugagccucuggucuccug

SEQ ID NO: 174713 - RNA, 31 nt, Homo Sapiens
uggaugcuggagaguaccguguggcggcggg

SEQ ID NO: 174714 - RNA, 32 nt, Homo Sapiens
aucuaugucacccaaaucuccuccuuccuccu

SEQ ID NO: 174715 - RNA, 32 nt, Homo Sapiens
uggaugggaaaguuaaauauuggucucuucaa

SEQ ID NO: 174716 - RNA, 32 nt, Homo Sapiens
caagcuuuaacucuaaaauaaauuucuauuuu

SEQ ID NO: 174717 - RNA, 32 nt, Homo Sapiens
aagguagacauggauuugaugaaagugcaaag

SEQ ID NO: 174718 - RNA, 32 nt, Homo Sapiens
gcuaacugcucgcagggugcugcgaggguggg

SEQ ID NO: 174719 - RNA, 32 nt, Homo Sapiens
uuauugucgcggggaagcugcggccgccucgc

SEQ ID NO: 174720 - RNA, 32 nt, Homo Sapiens
gccuggacauccugaaggagaaguggucugcc

SEQ ID NO: 174721 - RNA, 32 nt, Homo Sapiens
cacccucgauaaaggaaguauauucauccaaa

SEQ ID NO: 174722 - RNA, 32 nt, Homo Sapiens
aauggaccaaaggacuuaagaauuugggggga

SEQ ID NO: 174723 - RNA, 32 nt, Homo Sapiens
cccgggcacgcucggcggcgcccaacgaugac

SEQ ID NO: 174724 - RNA, 32 nt, Homo Sapiens
uuaagcccuggcccccugaguuuccuuuucuc

SEQ ID NO: 174725 - RNA, 32 nt, Homo Sapiens
cuucugcuagguuaaacuuuuacuugacaaca

SEQ ID NO: 174726 - RNA, 32 nt, Homo Sapiens
uuugcuuugacuguaaguguagaacaggacgc

SEQ ID NO: 174727 - RNA, 29 nt, Homo Sapiens
cuacucauuuguauguauucaguccuagg

SEQ ID NO: 174728 - RNA, 28 nt, Homo Sapiens
aaacaagaaggcacacauuugagaagau

SEQ ID NO: 174729 - RNA, 32 nt, Homo Sapiens
ccuuguagcuuccacucacuuauucuugcauu

SEQ ID NO: 174730 - RNA, 32 nt, Homo Sapiens
auugcaagauguaauauaucaaagucagggau

SEQ ID NO: 174731 - RNA, 32 nt, Homo Sapiens
cagggaugauucaagccauuccaaaguucaac

SEQ ID NO: 174732 - RNA, 32 nt, Homo Sapiens
aaugaugauaacaaagaaaacaauauacugau

SEQ ID NO: 174733 - RNA, 32 nt, Homo Sapiens
cuucuugggcauugcagacgccggcaaguccc

SEQ ID NO: 174734 - RNA, 32 nt, Homo Sapiens
uauguggccaaggggguuauuuaaacugucag

SEQ ID NO: 174735 - RNA, 32 nt, Homo Sapiens
cggcccgccccgcuccuccuccugccuggcua

SEQ ID NO: 174736 - RNA, 32 nt, Homo Sapiens
aaauuaugcugaaaccuaaucaccagugugau

SEQ ID NO: 174737 - RNA, 32 nt, Homo Sapiens
uuccgguggcggagaccaaggcggcggcggcg

SEQ ID NO: 174738 - RNA, 32 nt, Homo Sapiens
aaaauaauuucaagauucaaaaucucauugac

SEQ ID NO: 174739 - RNA, 32 nt, Homo Sapiens
guuugugaauuuggcuuugcuaccucaauugc

SEQ ID NO: 174740 - RNA, 32 nt, Homo Sapiens
ccaguucuugauaaaaucaugggagagggcag

SEQ ID NO: 174741 - RNA, 32 nt, Homo Sapiens
cccccgcaggccaccaggcauucuggacacgc

SEQ ID NO: 174742 - RNA, 32 nt, Homo Sapiens
uuccugcguaguccgcuuucucuugcugccac

SEQ ID NO: 174743 - RNA, 32 nt, Homo Sapiens
gguucaguuucuccugauacaaaccaaauggc

SEQ ID NO: 174744 - RNA, 32 nt, Homo Sapiens
ggacauggcugauuuuuuuuuauaaaaauugg

SEQ ID NO: 174745 - RNA, 32 nt, Homo Sapiens
aagugagacauuaaacauuuuagugcuaguuu

SEQ ID NO: 174746 - RNA, 32 nt, Homo Sapiens
uguguaugacuaaggaacuaucugaaaaacau

SEQ ID NO: 174747 - RNA, 32 nt, Homo Sapiens
gaucuccaucaaaguuggaaaaccaaggacuc

SEQ ID NO: 174748 - RNA, 32 nt, Homo Sapiens
guuaucaagcuccuuaaauguucgugcugugu

SEQ ID NO: 174749 - RNA, 32 nt, Homo Sapiens
caucuguucuuugguguaaucucucaugguga

SEQ ID NO: 174750 - RNA, 32 nt, Homo Sapiens
ucgccaagggcugauugggagaauaauggaau

SEQ ID NO: 174751 - RNA, 32 nt, Homo Sapiens
cagccucugcccgaggccagugagguggacag

SEQ ID NO: 174752 - RNA, 32 nt, Homo Sapiens
gagccugcccucccgcgccucgucggggcccg

SEQ ID NO: 174753 - RNA, 32 nt, Homo Sapiens
gggugcuggagauuuuacauuuugacaauugu

SEQ ID NO: 174754 - RNA, 32 nt, Homo Sapiens
aauguagggucuugaacagaagagggacauga

SEQ ID NO: 174755 - RNA, 32 nt, Homo Sapiens
ucgggcugacagugagaggaugcagcccggug

SEQ ID NO: 174756 - RNA, 31 nt, Homo Sapiens
ccucauucacugagaaaguggggcuucucac

SEQ ID NO: 174757 - RNA, 32 nt, Homo Sapiens
ucagcagagcagcagcccugcugcugaaggcc

SEQ ID NO: 174758 - RNA, 32 nt, Homo Sapiens
ccaccccaggagccaggcuuccccucagcugg

SEQ ID NO: 174759 - RNA, 32 nt, Homo Sapiens
cacauggagcccagcucucuggcugucuuacc

SEQ ID NO: 174760 - RNA, 32 nt, Homo Sapiens
ucuggaggcagacaaauccugcccugauucug

SEQ ID NO: 174761 - RNA, 32 nt, Homo Sapiens
cgggccggggacgaggccuccugcggacacca

SEQ ID NO: 174762 - RNA, 32 nt, Homo Sapiens
ccgucaguggugcugcucagcggcuugcacgc

SEQ ID NO: 174763 - RNA, 32 nt, Homo Sapiens
cugaaguagauggugacagaacaugagagcca

SEQ ID NO: 174764 - RNA, 30 nt, Homo Sapiens
aggauguggggcgagggcacagcuggggaa

SEQ ID NO: 174765 - RNA, 32 nt, Homo Sapiens
gguaguggccccaaugaagaaccuucagaacc

SEQ ID NO: 174766 - RNA, 32 nt, Homo Sapiens
aauugauacaauaaguuuuuuuuuuuaaggau

SEQ ID NO: 174767 - RNA, 32 nt, Homo Sapiens
caaccacaagguggcagaagaacuccauucuu

SEQ ID NO: 174768 - RNA, 32 nt, Homo Sapiens
ucaacacuuagauuaaauuuagcugguaguuu

SEQ ID NO: 174769 - RNA, 32 nt, Homo Sapiens
gcuccucugcugucagcgccggcagccccucc

SEQ ID NO: 174770 - RNA, 32 nt, Homo Sapiens
gguaguuggaucuagaucuucucuaagaugcu

SEQ ID NO: 174771 - RNA, 32 nt, Homo Sapiens
cguaggagggaguggaggagccggcgaaccgc

SEQ ID NO: 174772 - RNA, 32 nt, Homo Sapiens
aauguaaauaugugauaaaauaauaaaugaca

SEQ ID NO: 174773 - RNA, 32 nt, Homo Sapiens
ucugcugggcccagccccugucccagcucccg

SEQ ID NO: 174774 - RNA, 32 nt, Homo Sapiens
gugagaugaacuuuguaaacuacuuugggaaa

SEQ ID NO: 174775 - RNA, 32 nt, Homo Sapiens
uuuaaaaauaaaucuguaaaaucugaaaaaaa

SEQ ID NO: 174776 - RNA, 32 nt, Homo Sapiens
ugauauuguucuaugagauuucgaugcuaucu

SEQ ID NO: 174777 - RNA, 32 nt, Homo Sapiens
guacccagccagagaagaaaaagaacagugug

SEQ ID NO: 174778 - RNA, 32 nt, Homo Sapiens
cucccaggcucuccucccccagccuuccuccg

SEQ ID NO: 174779 - RNA, 32 nt, Homo Sapiens
agaagccccaaaguucacauuaacucaggcau

SEQ ID NO: 174780 - RNA, 32 nt, Homo Sapiens
uggccucccaggcgcccucccggucccccaca

SEQ ID NO: 174781 - RNA, 32 nt, Homo Sapiens
cggcugcccgacgccaggaccccgcuccaucg

SEQ ID NO: 174782 - RNA, 32 nt, Homo Sapiens
ccaugucaaauuaaucacuggauugacugcuu

SEQ ID NO: 174783 - RNA, 32 nt, Homo Sapiens
uccaaaucuaaagaauauggagguccuggagc

SEQ ID NO: 174784 - RNA, 32 nt, Homo Sapiens
cugaagcacgugcugcagagccaccuuggucu

SEQ ID NO: 174785 - RNA, 30 nt, Homo Sapiens
caccagcuggggccugugggucccggagac

SEQ ID NO: 174786 - RNA, 32 nt, Homo Sapiens
gaacuccccccucccacccaggccgggaccug

SEQ ID NO: 174787 - RNA, 32 nt, Homo Sapiens
gagagcccuagcuucuggauccaggucuaggc

SEQ ID NO: 174788 - RNA, 32 nt, Homo Sapiens
gcugcucgagcccagggcugcuggcgccaaca

SEQ ID NO: 174789 - RNA, 32 nt, Homo Sapiens
cugagaagucagccucuuggcuccucaggcca

SEQ ID NO: 174790 - RNA, 32 nt, Homo Sapiens
uuugggacuuguagcuccacuccggggaacgg

SEQ ID NO: 174791 - RNA, 32 nt, Homo Sapiens
uggaacagcucaugcuggccccaugccugcuu

SEQ ID NO: 174792 - RNA, 32 nt, Homo Sapiens
ugacggccaggcgucuccucccgcugcgguug

SEQ ID NO: 174793 - RNA, 30 nt, Homo Sapiens
caaccaugaaguucuucaucuuuaccugcc

SEQ ID NO: 174794 - RNA, 32 nt, Homo Sapiens
agagacaaagccucuuuuuuaagacuucuugu

SEQ ID NO: 174795 - RNA, 32 nt, Homo Sapiens
cacuuuccucgaaucaucccacuuccucagcc

SEQ ID NO: 174796 - RNA, 32 nt, Homo Sapiens
ugagguugaaauguaugcaguaagguacucag

SEQ ID NO: 174797 - RNA, 32 nt, Homo Sapiens
cuuccaggguucuuguggcuguugucagagca

SEQ ID NO: 174798 - RNA, 31 nt, Homo Sapiens
cagacaaugaauucacaaccucaaacccguu

SEQ ID NO: 174799 - RNA, 32 nt, Homo Sapiens
aguauacuuaggauuuuugacagucuucuuag

SEQ ID NO: 174800 - RNA, 32 nt, Homo Sapiens
cagcaggaaguaaaaauucaccgagaagugug

SEQ ID NO: 174801 - RNA, 32 nt, Homo Sapiens
ugcucauuguuuguuguuguuguuuuuuaauu

SEQ ID NO: 174802 - RNA, 32 nt, Homo Sapiens
auagaggucgacaugagauaccuggcauuuug

SEQ ID NO: 174803 - RNA, 32 nt, Homo Sapiens
cugggcuguaagucagacuugaacccagcuga

SEQ ID NO: 174804 - RNA, 32 nt, Homo Sapiens
uuugugcucauugauauauauuagcuguacuc

SEQ ID NO: 174805 - RNA, 32 nt, Homo Sapiens
gugcuagaggagccagugagggccagcauggg

SEQ ID NO: 174806 - RNA, 32 nt, Homo Sapiens
uaacaccauuucaaaacaaaacuguagaagca

SEQ ID NO: 174807 - RNA, 32 nt, Homo Sapiens
cucuggaggcggaugcaaaaaggaugcagaau

SEQ ID NO: 174808 - RNA, 32 nt, Homo Sapiens
guagguguucugaaacacgaggugaaacauuu

SEQ ID NO: 174809 - RNA, 32 nt, Homo Sapiens
ugagccuugguuucuucagcagugagaugcuc

SEQ ID NO: 174810 - RNA, 32 nt, Homo Sapiens
uuucaccgccgcggcccggguucgauucccgg

SEQ ID NO: 174811 - RNA, 32 nt, Homo Sapiens
uaucuaccucccaccuucuccucaucugugga

SEQ ID NO: 174812 - RNA, 32 nt, Homo Sapiens
ccugcccagcaaccggccccagcagcaggucc

SEQ ID NO: 174813 - RNA, 31 nt, Homo Sapiens
cgcuugaggguagacgccacggccuccgcuc

SEQ ID NO: 174814 - RNA, 32 nt, Homo Sapiens
ccucauucugcugcacgucuagagugggugug

SEQ ID NO: 174815 - RNA, 32 nt, Homo Sapiens
cuugucggacgcccgcgccgcuucaccggcug

SEQ ID NO: 174816 - RNA, 32 nt, Homo Sapiens
uaagaugucuugagagaccaucuccuaucuuu

SEQ ID NO: 174817 - RNA, 32 nt, Homo Sapiens
aauccagaauacuuaguauuuucacaugaaac

SEQ ID NO: 174818 - RNA, 32 nt, Homo Sapiens
ucaagugcccuagggaagaagcaagaaacuuc

SEQ ID NO: 174819 - RNA, 32 nt, Homo Sapiens
agcguggggcccuaccggcguccccugccucc

SEQ ID NO: 174820 - RNA, 32 nt, Homo Sapiens
accugggccccggcauugcccccucugccccu

SEQ ID NO: 174821 - RNA, 32 nt, Homo Sapiens
ugcccaucugcugagcuucucacaucucucag

SEQ ID NO: 174822 - RNA, 32 nt, Homo Sapiens
auuuguucaauuucuuuuuuuuuuuuuuuuga

SEQ ID NO: 174823 - RNA, 32 nt, Homo Sapiens
gaggcugugcgcgcccucccggacccuccacu

SEQ ID NO: 174824 - RNA, 32 nt, Homo Sapiens
uuuguggguggauguuauuaacugucauuguu

SEQ ID NO: 174825 - RNA, 32 nt, Homo Sapiens
uguuguuccccucuauguauccauauguuuuc

SEQ ID NO: 174826 - RNA, 32 nt, Homo Sapiens
ugagcgcgagagggcgggagagcucguggggu

SEQ ID NO: 174827 - RNA, 32 nt, Homo Sapiens
guuacuuaacuuucccuucagaauacaugugg

SEQ ID NO: 174828 - RNA, 32 nt, Homo Sapiens
gugggaccagguggggcaaggcugggagaugc

SEQ ID NO: 174829 - RNA, 32 nt, Homo Sapiens
gauggcaauuucacugauguaaguguugugga

SEQ ID NO: 174830 - RNA, 32 nt, Homo Sapiens
gacuaacuguaaaagagucuugaaaguauuua

SEQ ID NO: 174831 - RNA, 32 nt, Homo Sapiens
aacggugugagacggauucuuugguugauaaa

SEQ ID NO: 174832 - RNA, 32 nt, Homo Sapiens
caauuuagauagauaaacuuuuugccacuaua

SEQ ID NO: 174833 - RNA, 32 nt, Homo Sapiens
cauuuauuugguuuuucuacguuuucaguccc

SEQ ID NO: 174834 - RNA, 32 nt, Homo Sapiens
gucaggcaggaccauaugagaacuggauguug

SEQ ID NO: 174835 - RNA, 32 nt, Homo Sapiens
ccuccuauuaaccugugacaaacaagucucuc

SEQ ID NO: 174836 - RNA, 32 nt, Homo Sapiens
augucuuccuuccuaucuaucugcaaaaugga

SEQ ID NO: 174837 - RNA, 32 nt, Homo Sapiens
ccuucaaauucaacuagagccuuuuuaaaaag

SEQ ID NO: 174838 - RNA, 32 nt, Homo Sapiens
auuccugggcucgagcgguucuccugcgucag

SEQ ID NO: 174839 - RNA, 32 nt, Homo Sapiens
gugcugaguuaaaacucagggauucugugacu

SEQ ID NO: 174840 - RNA, 32 nt, Homo Sapiens
gguagggaauaaaauccuaagacacaaaugca

SEQ ID NO: 174841 - RNA, 32 nt, Homo Sapiens
ugucagggcagggcugggcgcgauggcucaca

SEQ ID NO: 174842 - RNA, 32 nt, Homo Sapiens
cggccggcgauauggcugccgcugugccccgc

SEQ ID NO: 174843 - RNA, 32 nt, Homo Sapiens
agggcuuccuuccugugugcagccuagggacu

SEQ ID NO: 174844 - RNA, 32 nt, Homo Sapiens
acccucguccucugcgccugcggccgcagccc

SEQ ID NO: 174845 - RNA, 32 nt, Homo Sapiens
augcgacccgaccgcgcugaggcuccaggacc

SEQ ID NO: 174846 - RNA, 32 nt, Homo Sapiens
auuaacuacauucaccuuguaaauuacuguau

SEQ ID NO: 174847 - RNA, 28 nt, Homo Sapiens
accauggcauuuuauagcugcugcuggg

SEQ ID NO: 174848 - RNA, 32 nt, Homo Sapiens
uuaaagugcuguuuagauuuauuagaucccau

SEQ ID NO: 174849 - RNA, 32 nt, Homo Sapiens
uguuaucguuuuuauuauaaaacacuucugac

SEQ ID NO: 174850 - RNA, 31 nt, Homo Sapiens
cugagauauaaauaaacuuauaaauauuugu

SEQ ID NO: 174851 - RNA, 32 nt, Homo Sapiens
cagauccugacuuuuccaaagugccuuaaaag

SEQ ID NO: 174852 - RNA, 29 nt, Homo Sapiens
uuauugaauaaaguauauuuuccaaaugu

SEQ ID NO: 174853 - RNA, 32 nt, Homo Sapiens
gccaaagggugucugaugugggguggggcugg

SEQ ID NO: 174854 - RNA, 32 nt, Homo Sapiens
agagggcugggcggggaggagcugcuacugcu

SEQ ID NO: 174855 - RNA, 32 nt, Homo Sapiens
aauuccucccccugccucuccucccugaccca

SEQ ID NO: 174856 - RNA, 31 nt, Homo Sapiens
uggauuaucgggccugugcaagauuguuaac

SEQ ID NO: 174857 - RNA, 32 nt, Homo Sapiens
gggcugggcucgggcuggagggggucaucaag

SEQ ID NO: 174858 - RNA, 32 nt, Homo Sapiens
ugcucauccgcgagcuguggaauaccaaccuc

SEQ ID NO: 174859 - RNA, 32 nt, Homo Sapiens
aagaaggagacgggccacccuacaguccaggc

SEQ ID NO: 174860 - RNA, 32 nt, Homo Sapiens
cgaccgccaacgcgcccagucuacgcuugcgc

SEQ ID NO: 174861 - RNA, 32 nt, Homo Sapiens
gagcagucaacagcauuucuuguuccaagauc

SEQ ID NO: 174862 - RNA, 32 nt, Homo Sapiens
uaagccaggagaggaaggagcggcgggcaggu

SEQ ID NO: 174863 - RNA, 32 nt, Homo Sapiens
uaaggaaucauaaucauuuguauuuauacuua

SEQ ID NO: 174864 - RNA, 32 nt, Homo Sapiens
aguguggcagugaccauggcacuacacggcug

SEQ ID NO: 174865 - RNA, 32 nt, Homo Sapiens
ccagggcgcccggcucagccuucccggaggcc

SEQ ID NO: 174866 - RNA, 27 nt, Homo Sapiens
aucugagccuucuucacuccuuuaccc

SEQ ID NO: 174867 - RNA, 32 nt, Homo Sapiens
aucuuuucaaaaaagcagcuuuugagaacuuc

SEQ ID NO: 174868 - RNA, 32 nt, Homo Sapiens
acaaaaacucaucuuguaauauuuucauuuuu

SEQ ID NO: 174869 - RNA, 32 nt, Homo Sapiens
cagagaaggucuccucugugcuccauccacac

SEQ ID NO: 174870 - RNA, 32 nt, Homo Sapiens
gaaguuggguggcuuaacuucucuaagucuga

SEQ ID NO: 174871 - RNA, 32 nt, Homo Sapiens
aaacugcagaagcucacugccuauaagaggaa

SEQ ID NO: 174872 - RNA, 32 nt, Homo Sapiens
aauaaugcaauaaaaaaugcuuugagauagcu

SEQ ID NO: 174873 - RNA, 32 nt, Homo Sapiens
uauauuuguaagaugacagaugaugcugucaa

SEQ ID NO: 174874 - RNA, 32 nt, Homo Sapiens
gacugggccaggagaagcugaagcuggaggcg

SEQ ID NO: 174875 - RNA, 32 nt, Homo Sapiens
gaugaugggagaagggggaaaccuguguuuuc

SEQ ID NO: 174876 - RNA, 32 nt, Homo Sapiens
ugaagcugaauuugguacgcuggacccucgga

SEQ ID NO: 174877 - RNA, 32 nt, Homo Sapiens
agaaauauuuuugaugaacuuaaaagacaaca

SEQ ID NO: 174878 - RNA, 32 nt, Homo Sapiens
ccggaacaaaaaugagguguguagaacagggu

SEQ ID NO: 174879 - RNA, 32 nt, Homo Sapiens
caaaugauguugauuauguaaggauauacuua

SEQ ID NO: 174880 - RNA, 32 nt, Homo Sapiens
cugugggauccucaaguugguuuucuucugug

SEQ ID NO: 174881 - RNA, 32 nt, Homo Sapiens
acauaaauagagaugcuacagauacaacaaua

SEQ ID NO: 174882 - RNA, 32 nt, Homo Sapiens
gggucucugcugccgccccacccagauggggg

SEQ ID NO: 174883 - RNA, 32 nt, Homo Sapiens
gaauuuauuucucagcucuauaguuuacuaag

SEQ ID NO: 174884 - RNA, 32 nt, Homo Sapiens
uuuaauagggaagaaagagacaguauaacuca

SEQ ID NO: 174885 - RNA, 32 nt, Homo Sapiens
ccagguucucagcauacacuuccaucgcgucu

SEQ ID NO: 174886 - RNA, 32 nt, Homo Sapiens
accuggcuauuuuuuuuuuuuagagacagggu

SEQ ID NO: 174887 - RNA, 32 nt, Homo Sapiens
guguaucaguuugguaauaugcagguaggcau

SEQ ID NO: 174888 - RNA, 32 nt, Homo Sapiens
agcauggaguuaacuaaaggaugugucaggga

SEQ ID NO: 174889 - RNA, 32 nt, Homo Sapiens
auaauucauauuugggaauauggccuuuaaua

SEQ ID NO: 174890 - RNA, 32 nt, Homo Sapiens
cagcagagggaccucccucguccagcgacuuc

SEQ ID NO: 174891 - RNA, 32 nt, Homo Sapiens
cuuggcacugggggcgucaggcugucggaugu

SEQ ID NO: 174892 - RNA, 32 nt, Homo Sapiens
uucagaauaguuuugcaaauuguacacaaaca

SEQ ID NO: 174893 - RNA, 32 nt, Homo Sapiens
auuuuagagucuuccauuuuuuguggaauuag

SEQ ID NO: 174894 - RNA, 32 nt, Homo Sapiens
aaacuauuauuuuuuucuucuucguaaaauuu

SEQ ID NO: 174895 - RNA, 32 nt, Homo Sapiens
augacgcgaugcaugucgaagguccaagggca

SEQ ID NO: 174896 - RNA, 29 nt, Homo Sapiens
ugugcuggaggacagaggagccaccucuu

SEQ ID NO: 174897 - RNA, 32 nt, Homo Sapiens
augauuaaugaaaggugacucaucugucccuu

SEQ ID NO: 174898 - RNA, 32 nt, Homo Sapiens
accucucugugccucagcauccucaucuauaa

SEQ ID NO: 174899 - RNA, 32 nt, Homo Sapiens
cccucugccccaguuuucuccuccucacuagu

SEQ ID NO: 174900 - RNA, 32 nt, Homo Sapiens
ccgccuguggcucaccacggaccccaccaagg

SEQ ID NO: 174901 - RNA, 32 nt, Homo Sapiens
uuccuccucccccuccucccugcaggcccaag

SEQ ID NO: 174902 - RNA, 32 nt, Homo Sapiens
agggaucugcguuggaggaagggacugcucug

SEQ ID NO: 174903 - RNA, 32 nt, Homo Sapiens
acuacauuuuuucuuauugccuugaaaguuaa

SEQ ID NO: 174904 - RNA, 32 nt, Homo Sapiens
gagucuugaagccagagcagcgccaggauguc

SEQ ID NO: 174905 - RNA, 32 nt, Homo Sapiens
ggaaaucccucauggcauuaucauucccuaag

SEQ ID NO: 174906 - RNA, 32 nt, Homo Sapiens
aauuuucauaaauuauuuauccaaaugagaga

SEQ ID NO: 174907 - RNA, 32 nt, Homo Sapiens
cugcuguugucagaaggcagggagggugauga

SEQ ID NO: 174908 - RNA, 32 nt, Homo Sapiens
agggucgugcugcggcagccuggcgcccgaca

SEQ ID NO: 174909 - RNA, 32 nt, Homo Sapiens
ggccgcggaaagaaugcgcgccgcccgugcgc

SEQ ID NO: 174910 - RNA, 32 nt, Homo Sapiens
cggcugcugccaggggcagagccucugugccc

SEQ ID NO: 174911 - RNA, 32 nt, Homo Sapiens
uggacugugggcccuccugcuggagccaggcc

SEQ ID NO: 174912 - RNA, 32 nt, Homo Sapiens
cuucuuagcauuaagaccuuguaaacaaaaau

SEQ ID NO: 174913 - RNA, 32 nt, Homo Sapiens
aggggucagcagaggagagcucugggguuggg

SEQ ID NO: 174914 - RNA, 32 nt, Homo Sapiens
aaagugaccgcucuugcucuugguaaaauaua

SEQ ID NO: 174915 - RNA, 32 nt, Homo Sapiens
gagcccccggagcccucccagcccucaggccu

SEQ ID NO: 174916 - RNA, 32 nt, Homo Sapiens
uggccacacacacacacacacacacacacaca

SEQ ID NO: 174917 - RNA, 32 nt, Homo Sapiens
ccuaaauuaugggaaauccuuuuaaaauguua

SEQ ID NO: 174918 - RNA, 32 nt, Homo Sapiens
auucuuguaccacagacaaaacaaaucuuaug

SEQ ID NO: 174919 - RNA, 31 nt, Homo Sapiens
ugacuguagacugucuuaccauagacugucu

SEQ ID NO: 174920 - RNA, 32 nt, Homo Sapiens
cgcagggcgggggcaaggcccgggccuuggag

SEQ ID NO: 174921 - RNA, 32 nt, Homo Sapiens
uuucugagacgaugucuuaauauucuaugugc

SEQ ID NO: 174922 - RNA, 32 nt, Homo Sapiens
ccacuggugagugucggcacccuugagguggg

SEQ ID NO: 174923 - RNA, 32 nt, Homo Sapiens
uggagagcgggugggugggugugaagggauga

SEQ ID NO: 174924 - RNA, 32 nt, Homo Sapiens
auuagugguuaugauccaaugugucaugagug

SEQ ID NO: 174925 - RNA, 32 nt, Homo Sapiens
gcccucuuuuuucucuagccaagccucaugcu

SEQ ID NO: 174926 - RNA, 32 nt, Homo Sapiens
cucgccugcccccgcccgguuucccccaccca

SEQ ID NO: 174927 - RNA, 31 nt, Homo Sapiens
cucacaauggugcauguuucaaauagaagua

SEQ ID NO: 174928 - RNA, 32 nt, Homo Sapiens
cuuacuugcacugugaucccccuugcuccgcc

SEQ ID NO: 174929 - RNA, 32 nt, Homo Sapiens
ugccccaggaccagaggccugucucccccuuc

SEQ ID NO: 174930 - RNA, 32 nt, Homo Sapiens
uauauucaguuauauuauauuuggcuuuagau

SEQ ID NO: 174931 - RNA, 32 nt, Homo Sapiens
caguugaaggccucgcuuaguuguacuggauu

SEQ ID NO: 174932 - RNA, 32 nt, Homo Sapiens
uugggugggcaauggaaggagggaggagagaa

SEQ ID NO: 174933 - RNA, 32 nt, Homo Sapiens
ucucuguuuuuccuaucugaggucuuucaucu

SEQ ID NO: 174934 - RNA, 32 nt, Homo Sapiens
cuguguaaaaauucuguaucagaauaauaaca

SEQ ID NO: 174935 - RNA, 32 nt, Homo Sapiens
ggugacgaauuuggccgauggcagauguuuug

SEQ ID NO: 174936 - RNA, 31 nt, Homo Sapiens
gaaaugaaauaaaguauuuacagaugaaugu

SEQ ID NO: 174937 - RNA, 32 nt, Homo Sapiens
aucuggugccuggcccagggccugaaacccgc

SEQ ID NO: 174938 - RNA, 32 nt, Homo Sapiens
acgguaaccuagaguguaaacccccuaaauaa

SEQ ID NO: 174939 - RNA, 32 nt, Homo Sapiens
aggcggcggccgccgcgcccgggaaaaugcug

SEQ ID NO: 174940 - RNA, 32 nt, Homo Sapiens
aauuauuuccacagaacaaaauuagauuguuc

SEQ ID NO: 174941 - RNA, 32 nt, Homo Sapiens
gagcagagggaagagcugcugagggggugggc

SEQ ID NO: 174942 - RNA, 32 nt, Homo Sapiens
guccagguggagguugguuuuguaguucugcc

SEQ ID NO: 174943 - RNA, 32 nt, Homo Sapiens
ggagggcaggggcgcgcagagccacgguuugc

SEQ ID NO: 174944 - RNA, 31 nt, Homo Sapiens
cauccccagccccagccccagcccagucccu

SEQ ID NO: 174945 - RNA, 32 nt, Homo Sapiens
uacugaaauaaaaagaggaaaggcuggaagcu

SEQ ID NO: 174946 - RNA, 32 nt, Homo Sapiens
aagaaaaguauuuuuuaugguuauuuagcuga

SEQ ID NO: 174947 - RNA, 32 nt, Homo Sapiens
auauggggucacuuauggugaauaucuuucuu

SEQ ID NO: 174948 - RNA, 32 nt, Homo Sapiens
cuuacacauugaacuguaucauuuucauaucc

SEQ ID NO: 174949 - RNA, 32 nt, Homo Sapiens
auuuuccuugaccuacaaaggaucuguuuugu

SEQ ID NO: 174950 - RNA, 32 nt, Homo Sapiens
ugaccugucccagaaacacgugucccauggug

SEQ ID NO: 174951 - RNA, 32 nt, Homo Sapiens
auacuagugaagccucuuguguuugugugcag

SEQ ID NO: 174952 - RNA, 31 nt, Homo Sapiens
uuuuggaggucaggauuuguauaucagaauu

SEQ ID NO: 174953 - RNA, 32 nt, Homo Sapiens
caguggccuuugcuugcaccuccagcuggaga

SEQ ID NO: 174954 - RNA, 32 nt, Homo Sapiens
cugcuucccccugccauucuccagggcuggac

SEQ ID NO: 174955 - RNA, 32 nt, Homo Sapiens
gacccuccuaacaggagcuggugcaggccccg

SEQ ID NO: 174956 - RNA, 32 nt, Homo Sapiens
ucagaaagaaaaacuuuagaacaaaucucguc

SEQ ID NO: 174957 - RNA, 32 nt, Homo Sapiens
acagggguguugcggagaagggagaguucaag

SEQ ID NO: 174958 - RNA, 32 nt, Homo Sapiens
gaggagggaucuuuuuugcauuuuggagcggc

SEQ ID NO: 174959 - RNA, 32 nt, Homo Sapiens
gagcagaggcggccggucuucccgacucccug

SEQ ID NO: 174960 - RNA, 32 nt, Homo Sapiens
caagucucuaaauauaauaccuuuaaauaaaa

SEQ ID NO: 174961 - RNA, 32 nt, Homo Sapiens
gacaaaacagguuuguuuuuuauuuuacaaca

SEQ ID NO: 174962 - RNA, 30 nt, Homo Sapiens
gccggggcuaaguggccgccggcguccggg

SEQ ID NO: 174963 - RNA, 32 nt, Homo Sapiens
ggauauaaauuccaauaauaaaccaaauguau

SEQ ID NO: 174964 - RNA, 32 nt, Homo Sapiens
aggagaauugaauaauuucuaucaauauguau

SEQ ID NO: 174965 - RNA, 32 nt, Homo Sapiens
uucuauuaaaagacucauccgucaaaaaaaaa

SEQ ID NO: 174966 - RNA, 32 nt, Homo Sapiens
auuccuggaaagauuaaauagaucagaaugaa

SEQ ID NO: 174967 - RNA, 30 nt, Homo Sapiens
uuuuuuaaagagcuugaugagauuugugau

SEQ ID NO: 174968 - RNA, 32 nt, Homo Sapiens
cugcuaauuuuuguauucuuaguggagauggg

SEQ ID NO: 174969 - RNA, 32 nt, Homo Sapiens
cccucaggagggagaacauccgccgaacgaaa

SEQ ID NO: 174970 - RNA, 32 nt, Homo Sapiens
cuguuucagagaaaaacuuaauuauacuuaau

SEQ ID NO: 174971 - RNA, 32 nt, Homo Sapiens
agaucaguaaccaaaaucauaggcuuuuucug

SEQ ID NO: 174972 - RNA, 32 nt, Homo Sapiens
gagagugugguucccuccccccugcccaucaa

SEQ ID NO: 174973 - RNA, 32 nt, Homo Sapiens
acauaagcagaggcugcaggaacuuguguggg

SEQ ID NO: 174974 - RNA, 32 nt, Homo Sapiens
aaaucagauaaaauugccuggggauacauuac

SEQ ID NO: 174975 - RNA, 32 nt, Homo Sapiens
agcgccguuugaccucucccaaggauacacca

SEQ ID NO: 174976 - RNA, 32 nt, Homo Sapiens
ugccagcgacccagcccccugugccuggcccc

SEQ ID NO: 174977 - RNA, 32 nt, Homo Sapiens
caaaugucuguguuaaaacagcucugcugggc

SEQ ID NO: 174978 - RNA, 32 nt, Homo Sapiens
uacucucuauuuccaagggcgugaagaauuuc

SEQ ID NO: 174979 - RNA, 32 nt, Homo Sapiens
aggauuauaagauuucucaauggggaugauua

SEQ ID NO: 174980 - RNA, 32 nt, Homo Sapiens
uugucauacuucucaugguucaugcgcgucuc

SEQ ID NO: 174981 - RNA, 32 nt, Homo Sapiens
agaucaaauuuaugccaauuauaugaaaagau

SEQ ID NO: 174982 - RNA, 32 nt, Homo Sapiens
gcuuuuuucuucuuuuuuuuuaaguuuuaaau

SEQ ID NO: 174983 - RNA, 32 nt, Homo Sapiens
aacacacaaggaauaaaacaaacaaauagaua

SEQ ID NO: 174984 - RNA, 32 nt, Homo Sapiens
cuccgagagaugcucccucuccccucaugcuc

SEQ ID NO: 174985 - RNA, 32 nt, Homo Sapiens
gacaagcaguuauaguuauuuauuuguuaacg

SEQ ID NO: 174986 - RNA, 32 nt, Homo Sapiens
uagcacauuguaaugauauuuggcuuguugau

SEQ ID NO: 174987 - RNA, 32 nt, Homo Sapiens
aggauguguugauuuuaaaauaaagugccuuu

SEQ ID NO: 174988 - RNA, 32 nt, Homo Sapiens
gacuacaggugcccuccaccacgcuuggcuaa

SEQ ID NO: 174989 - RNA, 32 nt, Homo Sapiens
gccagucuuuugcaucccaccugcccaccucc

SEQ ID NO: 174990 - RNA, 32 nt, Homo Sapiens
uuuuuuaaaaaauuauuauuuauuuuugcccu

SEQ ID NO: 174991 - RNA, 32 nt, Homo Sapiens
aacacauccaacaaucaaguuucuaagaaggu

SEQ ID NO: 174992 - RNA, 32 nt, Homo Sapiens
ccaaugagauaaaauauuuacuauuaugcuua

SEQ ID NO: 174993 - RNA, 32 nt, Homo Sapiens
ccaccccccaccagccgcacagauuguacuac

SEQ ID NO: 174994 - RNA, 32 nt, Homo Sapiens
gugauguacgcgguugucacccccaugcugaa

SEQ ID NO: 174995 - RNA, 30 nt, Homo Sapiens
ggagugaauggcggcggcggcugggaugcu

SEQ ID NO: 174996 - RNA, 32 nt, Homo Sapiens
cccccgccaaccccagcuggcccaccucuucc

SEQ ID NO: 174997 - RNA, 32 nt, Homo Sapiens
gacuuugggcucagauaaguagacuuaaguuc

SEQ ID NO: 174998 - RNA, 32 nt, Homo Sapiens
aaauaaugaugaugaaaacuuuuauaaauaau

SEQ ID NO: 174999 - RNA, 32 nt, Homo Sapiens
aacuaaaagugaugggaaaaauacuguauuuu

SEQ ID NO: 175000 - RNA, 32 nt, Homo Sapiens
gaggggaugacaaagaacaguuuuuaagcuau

SEQ ID NO: 175001 - RNA, 32 nt, Homo Sapiens
guuauccccgacgcuuccugugaggaaaccga

SEQ ID NO: 175002 - RNA, 32 nt, Homo Sapiens
aucgguccaaggauuuucugcuuucauuucuu

SEQ ID NO: 175003 - RNA, 32 nt, Homo Sapiens
auuguguaaccuagucucuucucuacauggug

SEQ ID NO: 175004 - RNA, 32 nt, Homo Sapiens
ccaguggggagauuggaaugggauuacuuugg

SEQ ID NO: 175005 - RNA, 32 nt, Homo Sapiens
aaguaaaucuuuuuuucuugaauuuaaucugg

SEQ ID NO: 175006 - RNA, 32 nt, Homo Sapiens
acccccucauucucccucgcucccacuccgcc

SEQ ID NO: 175007 - RNA, 32 nt, Homo Sapiens
aggccgggggaacgugcgagcagaggcgcggc

SEQ ID NO: 175008 - RNA, 32 nt, Homo Sapiens
acucucuuuccacgcacacaauggccauguga

SEQ ID NO: 175009 - RNA, 32 nt, Homo Sapiens
guuaaccacagucgggaaacaagcauagaaau

SEQ ID NO: 175010 - RNA, 32 nt, Homo Sapiens
auguaaggaaauaacaauguaguucucuauua

SEQ ID NO: 175011 - RNA, 32 nt, Homo Sapiens
ccaaaauauuuuauugaacuagguucuaaaca

SEQ ID NO: 175012 - RNA, 32 nt, Homo Sapiens
cucagagcggaagagggaagugaaucaggcgc

SEQ ID NO: 175013 - RNA, 32 nt, Homo Sapiens
acaagagaaaucaacuucgugguuggaugggg

SEQ ID NO: 175014 - RNA, 32 nt, Homo Sapiens
agggucguugcggcggcccccgggcccaguca

SEQ ID NO: 175015 - RNA, 32 nt, Homo Sapiens
ccaauggucugguaaugccuagaguggaaugu

SEQ ID NO: 175016 - RNA, 32 nt, Homo Sapiens
ugagcugcuacacuuaaaaauuaauguuucaa

SEQ ID NO: 175017 - RNA, 32 nt, Homo Sapiens
cccggugcugcggaagaacugaagguugcgau

SEQ ID NO: 175018 - RNA, 32 nt, Homo Sapiens
uacuggaauccauccugcaccuccucaccaug

SEQ ID NO: 175019 - RNA, 32 nt, Homo Sapiens
cgccuccgggccaccccacucccuuccgcuug

SEQ ID NO: 175020 - RNA, 32 nt, Homo Sapiens
guguugacugcgacguugauguuccccaaacc

SEQ ID NO: 175021 - RNA, 32 nt, Homo Sapiens
guuccuggguccaugauggaagaaggaaaagu

SEQ ID NO: 175022 - RNA, 32 nt, Homo Sapiens
uguuuuuuuuuccauagcacaguaaugaaugu

SEQ ID NO: 175023 - RNA, 32 nt, Homo Sapiens
cggaggcacccggcccugggccuuaggcaccu

SEQ ID NO: 175024 - RNA, 32 nt, Homo Sapiens
cccugggccucaguccuccccacccuccuucc

SEQ ID NO: 175025 - RNA, 32 nt, Homo Sapiens
uaucuguuuacuauaguguagcuacuggcuuc

SEQ ID NO: 175026 - RNA, 32 nt, Homo Sapiens
ugugugugcgcgcgcacgcacgccuugagcag

SEQ ID NO: 175027 - RNA, 32 nt, Homo Sapiens
ucaagcccaagcaaauuagucagagcccgccu

SEQ ID NO: 175028 - RNA, 32 nt, Homo Sapiens
agaggucccagccccaggccuggccucgccug

SEQ ID NO: 175029 - RNA, 31 nt, Homo Sapiens
agcugcucauggagaaagugccaggcgagau

SEQ ID NO: 175030 - RNA, 32 nt, Homo Sapiens
gaucuuuugugauuuuacuugauuacagcaug

SEQ ID NO: 175031 - RNA, 32 nt, Homo Sapiens
cucuacuucauggccuuugcauggagaggcug

SEQ ID NO: 175032 - RNA, 32 nt, Homo Sapiens
aaggaaagaagcaccucacagcuccuuucuag

SEQ ID NO: 175033 - RNA, 32 nt, Homo Sapiens
uaaucacgccccagccgcaccggaccuugcgc

SEQ ID NO: 175034 - RNA, 32 nt, Homo Sapiens
agccgggaccccuuccucuccgcgucuccucg

SEQ ID NO: 175035 - RNA, 32 nt, Homo Sapiens
cgcgggcagcgccgccggcguuggaggccucg

SEQ ID NO: 175036 - RNA, 32 nt, Homo Sapiens
agauggcggccuccagggggcugggaauagcc

SEQ ID NO: 175037 - RNA, 32 nt, Homo Sapiens
cacgccaggcccaagagagauucuaugacaua

SEQ ID NO: 175038 - RNA, 32 nt, Homo Sapiens
cagaccgaaccggcgcuccugcccccggggug

SEQ ID NO: 175039 - RNA, 32 nt, Homo Sapiens
gucuuggccgggugcgguggcuccugccuaua

SEQ ID NO: 175040 - RNA, 32 nt, Homo Sapiens
ccuuagcauggaagaggagugggcagccucac

SEQ ID NO: 175041 - RNA, 30 nt, Homo Sapiens
uggagagagaagcgaugguuuugccagagc

SEQ ID NO: 175042 - RNA, 32 nt, Homo Sapiens
caccucccugaacuuccaucugaucgacuuca

SEQ ID NO: 175043 - RNA, 32 nt, Homo Sapiens
cagcuguguuuguuuauaaaugcuguuuauag

SEQ ID NO: 175044 - RNA, 32 nt, Homo Sapiens
aauggcuguaaaaaugacuuaaauguuuauau

SEQ ID NO: 175045 - RNA, 32 nt, Homo Sapiens
ggcacccaccaccacacccagcucauuuuugu

SEQ ID NO: 175046 - RNA, 32 nt, Homo Sapiens
gcagggcuggccugggcugugggaggcagcug

SEQ ID NO: 175047 - RNA, 32 nt, Homo Sapiens
cuucuuucuuuuucuuuuuugcuuucuugucu

SEQ ID NO: 175048 - RNA, 32 nt, Homo Sapiens
cacaaauggaauugugcaaccaccagaaaaac

SEQ ID NO: 175049 - RNA, 32 nt, Homo Sapiens
ggugggacacagagacccccgugccaaauccu

SEQ ID NO: 175050 - RNA, 31 nt, Homo Sapiens
uuaggaccacggagacugaccaccacccuga

SEQ ID NO: 175051 - RNA, 32 nt, Homo Sapiens
uuuuggaggaauaaccuuaaaaaguuaaaaag

SEQ ID NO: 175052 - RNA, 32 nt, Homo Sapiens
uccccagccuguugcuuucucguguaguuguu

SEQ ID NO: 175053 - RNA, 32 nt, Homo Sapiens
ucccccagccccaccgacucucccagaucccc

SEQ ID NO: 175054 - RNA, 32 nt, Homo Sapiens
caguuccccgucugaucugccugugcgccucc

SEQ ID NO: 175055 - RNA, 32 nt, Homo Sapiens
uauauaugaguaauuaaaccagcucaucuuuu

SEQ ID NO: 175056 - RNA, 32 nt, Homo Sapiens
uccaguucuggcugcccgcgggccucuuucca

SEQ ID NO: 175057 - RNA, 32 nt, Homo Sapiens
acaaugugaucauccuuggagagagaugugag

SEQ ID NO: 175058 - RNA, 32 nt, Homo Sapiens
agaaguggauaagagggaggagaucauugagu

SEQ ID NO: 175059 - RNA, 32 nt, Homo Sapiens
gccccucuuccuggcccuggcuccaucucucu

SEQ ID NO: 175060 - RNA, 32 nt, Homo Sapiens
uuaaagccaaacuucuuucuaauauuaucaag

SEQ ID NO: 175061 - RNA, 32 nt, Homo Sapiens
uaugguugaucaguuaaaaaagaauguuacag

SEQ ID NO: 175062 - RNA, 32 nt, Homo Sapiens
acucgucugcaaggggcuggcuccuuggaugc

SEQ ID NO: 175063 - RNA, 32 nt, Homo Sapiens
uguggcaaauuugaaaagcaagauacaaaaua

SEQ ID NO: 175064 - RNA, 32 nt, Homo Sapiens
uucgggagacgcccgggccgggcgguccuggg

SEQ ID NO: 175065 - RNA, 32 nt, Homo Sapiens
uaagggaagauugucaauauuuugugguaaga

SEQ ID NO: 175066 - RNA, 32 nt, Homo Sapiens
uacauuaauguccuuaaauguguuauauagaa

SEQ ID NO: 175067 - RNA, 32 nt, Homo Sapiens
uguccuugaggccccaggaagcucugccgccc

SEQ ID NO: 175068 - RNA, 32 nt, Homo Sapiens
gauucuauuaaaaauaaaugugagagucguua

SEQ ID NO: 175069 - RNA, 32 nt, Homo Sapiens
guauuuguuugaaaucuacuguucggaugcug

SEQ ID NO: 175070 - RNA, 32 nt, Homo Sapiens
caugguguccuguaacucaucucccggggggc

SEQ ID NO: 175071 - RNA, 32 nt, Homo Sapiens
gggacagggucucgcuguguugcaugcgcugg

SEQ ID NO: 175072 - RNA, 32 nt, Homo Sapiens
acacacacauauauauauauaaaguguaacaa

SEQ ID NO: 175073 - RNA, 32 nt, Homo Sapiens
ggcuucuaacaaaaacuacacauauguauucc

SEQ ID NO: 175074 - RNA, 32 nt, Homo Sapiens
gucaaaccuccccauugggcugaugagaaaau

SEQ ID NO: 175075 - RNA, 32 nt, Homo Sapiens
uauccaggagucgggcggagcggcuggggaug

SEQ ID NO: 175076 - RNA, 32 nt, Homo Sapiens
cuggagggggcggccuggggcuggggcugccc

SEQ ID NO: 175077 - RNA, 32 nt, Homo Sapiens
aagacuguucugcaauuugcugccaaaugcau

SEQ ID NO: 175078 - RNA, 32 nt, Homo Sapiens
gggcaguucugguaaacgguccaguuagggag

SEQ ID NO: 175079 - RNA, 30 nt, Homo Sapiens
cugugccuggcgcagcauuauuuugcaguu

SEQ ID NO: 175080 - RNA, 32 nt, Homo Sapiens
gcuuaauugggaauuuggcuuuauggagaaaa

SEQ ID NO: 175081 - RNA, 32 nt, Homo Sapiens
uggcaauagaaagucaaucgaaaacucagaaa

SEQ ID NO: 175082 - RNA, 32 nt, Homo Sapiens
guacaugugggaagaaggaggccgccauccau

SEQ ID NO: 175083 - RNA, 31 nt, Homo Sapiens
ccgcgggagccccagcccaacccgagcccga

SEQ ID NO: 175084 - RNA, 32 nt, Homo Sapiens
aacccucaugcugcaccuucagagccaguccu

SEQ ID NO: 175085 - RNA, 32 nt, Homo Sapiens
aucaacagagugagaccccugucuauauauuu

SEQ ID NO: 175086 - RNA, 32 nt, Homo Sapiens
ggccucccgccagccagccccgacccgcggcu

SEQ ID NO: 175087 - RNA, 32 nt, Homo Sapiens
ggcacccgaacgcgcugcgagccccgggccuc

SEQ ID NO: 175088 - RNA, 32 nt, Homo Sapiens
agcccccaggggagcccucccuggcguccgag

SEQ ID NO: 175089 - RNA, 32 nt, Homo Sapiens
ugcaaaaacaaaaggggagauguuggaggccg

SEQ ID NO: 175090 - RNA, 32 nt, Homo Sapiens
gagcagggggaacacauccaggcagcuggugg

SEQ ID NO: 175091 - RNA, 32 nt, Homo Sapiens
agcgcgcuuccuuuccuccccgcugccgccca

SEQ ID NO: 175092 - RNA, 32 nt, Homo Sapiens
gagaccuucugggauuauuugcugaugguucu

SEQ ID NO: 175093 - RNA, 32 nt, Homo Sapiens
ccugugucgagcucaguccugggagauagggg

SEQ ID NO: 175094 - RNA, 32 nt, Homo Sapiens
uucauagcaacauuauuuguaauagccaaaaa

SEQ ID NO: 175095 - RNA, 32 nt, Homo Sapiens
ucggaggcugcugccccuuccaccucuggaaa

SEQ ID NO: 175096 - RNA, 32 nt, Homo Sapiens
gucuucccgacugaagaauggguaucccacca

SEQ ID NO: 175097 - RNA, 32 nt, Homo Sapiens
ccagagacuuggggucugugggcccccaaaca

SEQ ID NO: 175098 - RNA, 32 nt, Homo Sapiens
guguucagaagcugcugccugagggcagggcc

SEQ ID NO: 175099 - RNA, 32 nt, Homo Sapiens
gcaucuccugucaugcucauuggucagcuuag

SEQ ID NO: 175100 - RNA, 32 nt, Homo Sapiens
aaugaggcagcuugugaggcaagcauucugga

SEQ ID NO: 175101 - RNA, 32 nt, Homo Sapiens
ugcauaaauggcagcuuguuuucuugagccac

SEQ ID NO: 175102 - RNA, 32 nt, Homo Sapiens
gugcggucccugcugagugcgcugcccgggcc

SEQ ID NO: 175103 - RNA, 32 nt, Homo Sapiens
uucuuuuuaaauuguuuguaacuuggaugcug

SEQ ID NO: 175104 - RNA, 31 nt, Homo Sapiens
aagcccugucuguucauucaaggcugguuca

SEQ ID NO: 175105 - RNA, 32 nt, Homo Sapiens
gcacuggcucccucgcccccagccccggggcc

SEQ ID NO: 175106 - RNA, 32 nt, Homo Sapiens
acucaggaccagcucuggagucuccagcccac

SEQ ID NO: 175107 - RNA, 32 nt, Homo Sapiens
uuuuggaggaauaauggaugaaccaucucccu

SEQ ID NO: 175108 - RNA, 32 nt, Homo Sapiens
gagugcacgcgugcgugaguacggagaguaua

SEQ ID NO: 175109 - RNA, 32 nt, Homo Sapiens
uccaggcccgucuguccaucugcccgccugcc

SEQ ID NO: 175110 - RNA, 32 nt, Homo Sapiens
aacuuaaauugagaucuaaauuauuaaacgag

SEQ ID NO: 175111 - RNA, 32 nt, Homo Sapiens
caagaccuuucugcagggaugauaguggaaua

SEQ ID NO: 175112 - RNA, 32 nt, Homo Sapiens
aucguguagguacaggccaaccccaggggccu

SEQ ID NO: 175113 - RNA, 32 nt, Homo Sapiens
agggagagcugugcuccugggugcugaagccu

SEQ ID NO: 175114 - RNA, 32 nt, Homo Sapiens
uaauuaaaaaucagcuagcgguggugaccaag

SEQ ID NO: 175115 - RNA, 32 nt, Homo Sapiens
uacuuaaaucccauuauguacuuuauucagaa

SEQ ID NO: 175116 - RNA, 32 nt, Homo Sapiens
gguggagagcagccucgcuuuggugacgcaca

SEQ ID NO: 175117 - RNA, 32 nt, Homo Sapiens
cucccccuccggcuccuccuccggggagacgc

SEQ ID NO: 175118 - RNA, 32 nt, Homo Sapiens
ucaggggucaggguugcuucccuggagcucug

SEQ ID NO: 175119 - RNA, 32 nt, Homo Sapiens
aacacuuuaguaggugcuauagaggauacaug

SEQ ID NO: 175120 - RNA, 32 nt, Homo Sapiens
gcaugugccacccaccacgccuggguaauuuu

SEQ ID NO: 175121 - RNA, 32 nt, Homo Sapiens
aagggaagaaaaugccaaagauaccucuaguu

SEQ ID NO: 175122 - RNA, 32 nt, Homo Sapiens
cuucaaaguuaauugcaaaagaguucauugca

SEQ ID NO: 175123 - RNA, 32 nt, Homo Sapiens
cauuucuuugcccugggggcugugauauuaac

SEQ ID NO: 175124 - RNA, 32 nt, Homo Sapiens
uagucaggaguaagcucugugcgagagaucug

SEQ ID NO: 175125 - RNA, 32 nt, Homo Sapiens
uauguugugggucuuuugauaauucaugaaua

SEQ ID NO: 175126 - RNA, 32 nt, Homo Sapiens
guuugaaauaugucuuuaaauuuuaaaaaaca

SEQ ID NO: 175127 - RNA, 32 nt, Homo Sapiens
acguauuaccaaagaaaccaaaaacugccuuu

SEQ ID NO: 175128 - RNA, 32 nt, Homo Sapiens
cuuuuggcgucccaguccugccucugcuccug

SEQ ID NO: 175129 - RNA, 32 nt, Homo Sapiens
cgaggggccggagcuccuggcggugccggauc

SEQ ID NO: 175130 - RNA, 26 nt, Homo Sapiens
aauguuccucaucucuagcaguguuc

SEQ ID NO: 175131 - RNA, 32 nt, Homo Sapiens
cagggguugcuguuagacugucaagcagaagu

SEQ ID NO: 175132 - RNA, 32 nt, Homo Sapiens
uauaaugaaccaaaaauuccauguguuggggg

SEQ ID NO: 175133 - RNA, 32 nt, Homo Sapiens
agacaccaugagggaauggaccacgugggagc

SEQ ID NO: 175134 - RNA, 32 nt, Homo Sapiens
aaauucuacuucaaaugaaaucuuuggcagga

SEQ ID NO: 175135 - RNA, 32 nt, Homo Sapiens
cuccccaguccuccccagccuucuucagccuu

SEQ ID NO: 175136 - RNA, 32 nt, Homo Sapiens
ugugauuugaauucugugauauuuucacacug

SEQ ID NO: 175137 - RNA, 32 nt, Homo Sapiens
ccagaggaauuauuauacuaaaaccuuaagaa

SEQ ID NO: 175138 - RNA, 32 nt, Homo Sapiens
ggagcuaaauggcucaguggcuccagaaacca

SEQ ID NO: 175139 - RNA, 32 nt, Homo Sapiens
ucgagaccuuacauguuuuagauagucaugua

SEQ ID NO: 175140 - RNA, 32 nt, Homo Sapiens
agccuuucuaagccauugggaauagaauggcc

SEQ ID NO: 175141 - RNA, 32 nt, Homo Sapiens
gggcuuccugcagcugagaucuaugcaggcca

SEQ ID NO: 175142 - RNA, 32 nt, Homo Sapiens
agcacgauuucucuuuugauaaugcccuuugg

SEQ ID NO: 175143 - RNA, 31 nt, Homo Sapiens
ccacgggagccccggaccccuggucucugua

SEQ ID NO: 175144 - RNA, 32 nt, Homo Sapiens
auggggaaaggggcuuccugcaccacacaugc

SEQ ID NO: 175145 - RNA, 30 nt, Homo Sapiens
cagcugggcaggcggggcccacaguaccug

SEQ ID NO: 175146 - RNA, 32 nt, Homo Sapiens
ggagucgaaagcggcaucuucuccgagagaag

SEQ ID NO: 175147 - RNA, 29 nt, Homo Sapiens
aacaguuggugcuacgagaugcacuuuug

SEQ ID NO: 175148 - RNA, 32 nt, Homo Sapiens
ugacugugaugcacaaauucuuuacguguaag

SEQ ID NO: 175149 - RNA, 32 nt, Homo Sapiens
gggcuugcaaguauguuggaugucuagaguag

SEQ ID NO: 175150 - RNA, 32 nt, Homo Sapiens
cgugagagguugugugaaugugaaaguuugcg

SEQ ID NO: 175151 - RNA, 32 nt, Homo Sapiens
ccauggggcaccuggcggggcgggggucugcc

SEQ ID NO: 175152 - RNA, 32 nt, Homo Sapiens
aggagccuugggccugaguccuggcucccuca

SEQ ID NO: 175153 - RNA, 32 nt, Homo Sapiens
accuccgccucccggguucaagugauucucca

SEQ ID NO: 175154 - RNA, 32 nt, Homo Sapiens
ugaaaccggaagccauuucucaucuucuguaa

SEQ ID NO: 175155 - RNA, 32 nt, Homo Sapiens
gccacucugaaaucacucugaagccaaagcug

SEQ ID NO: 175156 - RNA, 32 nt, Homo Sapiens
auacugcagggccaggacugagccccgcagac

SEQ ID NO: 175157 - RNA, 32 nt, Homo Sapiens
gagcgcuugaguugaguuugaggggaagaugu

SEQ ID NO: 175158 - RNA, 32 nt, Homo Sapiens
uuaagugcuuucauuuucuuuacaguuauuau

SEQ ID NO: 175159 - RNA, 32 nt, Homo Sapiens
ucugguagucaacagccuuuugaaagcuauuu

SEQ ID NO: 175160 - RNA, 29 nt, Homo Sapiens
gaauagaaguguuucagacauaggacuuc

SEQ ID NO: 175161 - RNA, 32 nt, Homo Sapiens
uucauuuccaugaaaaagggacuccaagaggc

SEQ ID NO: 175162 - RNA, 30 nt, Homo Sapiens
uccacccuuucuggugucuauaggaaugca

SEQ ID NO: 175163 - RNA, 32 nt, Homo Sapiens
cucgcgccccagcugccgccgacgacagcggc

SEQ ID NO: 175164 - RNA, 32 nt, Homo Sapiens
gauggcgggccgggcgacuugagauccgcggg

SEQ ID NO: 175165 - RNA, 32 nt, Homo Sapiens
uuuauggaauuccacugagugguaauggauga

SEQ ID NO: 175166 - RNA, 32 nt, Homo Sapiens
cugggguuuccacaggcaguuucagcccaggg

SEQ ID NO: 175167 - RNA, 32 nt, Homo Sapiens
gcaaaucguccuggugcaaaccuuccugaugc

SEQ ID NO: 175168 - RNA, 32 nt, Homo Sapiens
caucuuaucuucugguuauucaucuucaccau

SEQ ID NO: 175169 - RNA, 32 nt, Homo Sapiens
uugccaaauaaucccuaauuuuccacuaaaaa

SEQ ID NO: 175170 - RNA, 32 nt, Homo Sapiens
cccauuucucaacauagcacacuugugcacug

SEQ ID NO: 175171 - RNA, 32 nt, Homo Sapiens
ugcaguggagugaucucggcucacugcaaccu

SEQ ID NO: 175172 - RNA, 32 nt, Homo Sapiens
gcgcccagcccggcccgccgcaguacuguacu

SEQ ID NO: 175173 - RNA, 32 nt, Homo Sapiens
acuauuuucugcauccagugugguugcguuuc

SEQ ID NO: 175174 - RNA, 32 nt, Homo Sapiens
uccauuuucaaauuauuuagaauucuuaugag

SEQ ID NO: 175175 - RNA, 32 nt, Homo Sapiens
cccgcuggccccagcacccagguauaguuagu

SEQ ID NO: 175176 - RNA, 32 nt, Homo Sapiens
aauaaaaaaguacgaguuagacauaugaaaug

SEQ ID NO: 175177 - RNA, 32 nt, Homo Sapiens
agccuuacucccggccccccagcccagucuuc

SEQ ID NO: 175178 - RNA, 32 nt, Homo Sapiens
cuccaccagcaucaccugccuguuaggagaag

SEQ ID NO: 175179 - RNA, 32 nt, Homo Sapiens
uucuugauauuguaauugauuauugauaacug

SEQ ID NO: 175180 - RNA, 32 nt, Homo Sapiens
caaacagaucacaggagucaaagggccuugcu

SEQ ID NO: 175181 - RNA, 32 nt, Homo Sapiens
agagaagacggccccugaaucccauuuggccc

SEQ ID NO: 175182 - RNA, 32 nt, Homo Sapiens
cggagguugcagugagcggagaucugggcacu

SEQ ID NO: 175183 - RNA, 32 nt, Homo Sapiens
agcugggcaugguggcaugcagugguaguccc

SEQ ID NO: 175184 - RNA, 32 nt, Homo Sapiens
ugaacucuuuggagguuuugcauuuuagguaa

SEQ ID NO: 175185 - RNA, 32 nt, Homo Sapiens
uaaaaugugaauggugugugauagguguaaca

SEQ ID NO: 175186 - RNA, 32 nt, Homo Sapiens
cuaguggagcccggcgcggggcccgcugcggc

SEQ ID NO: 175187 - RNA, 32 nt, Homo Sapiens
gcuuuuacagaaauaaaacccaagaguuugau

SEQ ID NO: 175188 - RNA, 32 nt, Homo Sapiens
ugccuggaggucgguuucuuccuggguguuac

SEQ ID NO: 175189 - RNA, 32 nt, Homo Sapiens
guacuuugugagauccauccccugcccgcaaa

SEQ ID NO: 175190 - RNA, 28 nt, Homo Sapiens
aguuggaaagauuauuugaaaugacuaa

SEQ ID NO: 175191 - RNA, 32 nt, Homo Sapiens
uuacuuuuaagucuauacuaaaaugagccaaa

SEQ ID NO: 175192 - RNA, 32 nt, Homo Sapiens
acauaccgcucccgaaccaacuucaccagcaa

SEQ ID NO: 175193 - RNA, 32 nt, Homo Sapiens
gcguguucaugcccccggggccccagggagcg

SEQ ID NO: 175194 - RNA, 32 nt, Homo Sapiens
ccaagccgcggcgguguccgcggcccugccga

SEQ ID NO: 175195 - RNA, 32 nt, Homo Sapiens
aaauggcaaagcggcguccguggccgcccgag

SEQ ID NO: 175196 - RNA, 32 nt, Homo Sapiens
uacuuuggcccacacuauucuuuccaccugca

SEQ ID NO: 175197 - RNA, 32 nt, Homo Sapiens
uucuucugccucaaccucccaaguagcuagac

SEQ ID NO: 175198 - RNA, 31 nt, Homo Sapiens
ggaaccaugggaggccgcgucuuucucgucu

SEQ ID NO: 175199 - RNA, 32 nt, Homo Sapiens
caauacuacagaaugauagaaaaaauaugacu

SEQ ID NO: 175200 - RNA, 32 nt, Homo Sapiens
ccuguccugugucuugggccugugagucaaag

SEQ ID NO: 175201 - RNA, 32 nt, Homo Sapiens
uccacaaaaugaaagcagugaguggccccacu

SEQ ID NO: 175202 - RNA, 32 nt, Homo Sapiens
gaaugaugugaggaaagaaaaguaaaacagaa

SEQ ID NO: 175203 - RNA, 31 nt, Homo Sapiens
uaaauguggcccugccugcucccagguauac

SEQ ID NO: 175204 - RNA, 31 nt, Homo Sapiens
aagauucuugguauuuggauaucuguuagau

SEQ ID NO: 175205 - RNA, 31 nt, Homo Sapiens
gagccugaauacauuuucagagccaaauuac

SEQ ID NO: 175206 - RNA, 32 nt, Homo Sapiens
ggcacgaggccugggcgggcccugcgucaggu

SEQ ID NO: 175207 - RNA, 31 nt, Homo Sapiens
uuccagcuuuugcccauucaguauuauguug

SEQ ID NO: 175208 - RNA, 32 nt, Homo Sapiens
ccaauagacaccucugcccuggccacguucac

SEQ ID NO: 175209 - RNA, 32 nt, Homo Sapiens
ccuccucugugccccaacagcacgcugucuuc

SEQ ID NO: 175210 - RNA, 32 nt, Homo Sapiens
acagcauguuggaaacaaagcaguaauaaagc

SEQ ID NO: 175211 - RNA, 32 nt, Homo Sapiens
auuaaaaaauguuuugguuacuguagccuugu

SEQ ID NO: 175212 - RNA, 32 nt, Homo Sapiens
uuugugcuccuucuacuccccagcagcucuug

SEQ ID NO: 175213 - RNA, 32 nt, Homo Sapiens
cuuccaggcaggucugugugggacagaagccc

SEQ ID NO: 175214 - RNA, 32 nt, Homo Sapiens
ggggucagcuaaaaacaaaacaacacuggaga

SEQ ID NO: 175215 - RNA, 32 nt, Homo Sapiens
ucugggauccugacggcccaggugcugacccu

SEQ ID NO: 175216 - RNA, 32 nt, Homo Sapiens
ucuuagggcuggugcuggcccugcccacgccu

SEQ ID NO: 175217 - RNA, 31 nt, Homo Sapiens
gcccggagagcaguguaaacggccuccuccg

SEQ ID NO: 175218 - RNA, 32 nt, Homo Sapiens
cauaucaucauuccuuuggggaaaauuguuau

SEQ ID NO: 175219 - RNA, 32 nt, Homo Sapiens
aguaaauacacagauaauccaaaauugaugua

SEQ ID NO: 175220 - RNA, 32 nt, Homo Sapiens
agccccuggucccacacagcucugcccuagag

SEQ ID NO: 175221 - RNA, 32 nt, Homo Sapiens
ccgcggagggccugggcggacgcgggaugcug

SEQ ID NO: 175222 - RNA, 32 nt, Homo Sapiens
aaggaaaaacaaaagauuuaaguauucuauau

SEQ ID NO: 175223 - RNA, 32 nt, Homo Sapiens
cugagaggaagugacuuuuuacagaagccacu

SEQ ID NO: 175224 - RNA, 32 nt, Homo Sapiens
guggcgaggggagaggagcugaaggggccgug

SEQ ID NO: 175225 - RNA, 32 nt, Homo Sapiens
cgcggcggcggcagcagcuacagcgaaauggc

SEQ ID NO: 175226 - RNA, 32 nt, Homo Sapiens
cauucaacccaccugcgucucauacucaccuc

SEQ ID NO: 175227 - RNA, 32 nt, Homo Sapiens
ccaccgccacuacugccuuuaccgucuccuaa

SEQ ID NO: 175228 - RNA, 32 nt, Homo Sapiens
gaggaacaaaguguuguggagcagaagaagga

SEQ ID NO: 175229 - RNA, 32 nt, Homo Sapiens
gcugggguggguggaguuugaagacucuuggg

SEQ ID NO: 175230 - RNA, 32 nt, Homo Sapiens
uccccuaagauauuguauuuuacaaaucuccc

SEQ ID NO: 175231 - RNA, 32 nt, Homo Sapiens
aacuuggccgacugaugcucugcgaguuuuua

SEQ ID NO: 175232 - RNA, 32 nt, Homo Sapiens
cagguuuucuuacucugaauuuagaucuccag

SEQ ID NO: 175233 - RNA, 32 nt, Homo Sapiens
cuuacauucuauucccaacuagguucuuauag

SEQ ID NO: 175234 - RNA, 32 nt, Homo Sapiens
aguuugcagcgcccagcuccugcgccuucgcu

SEQ ID NO: 175235 - RNA, 32 nt, Homo Sapiens
aauucguucugcuauuuuacaaugaaaaauaa

SEQ ID NO: 175236 - RNA, 32 nt, Homo Sapiens
gccuccuccccaccccaccucccucacuucac

SEQ ID NO: 175237 - RNA, 32 nt, Homo Sapiens
gugaauugagcaggucugcugcuguuggccuc

SEQ ID NO: 175238 - RNA, 32 nt, Homo Sapiens
cuggcgcgcgcacgcgcacgcgcacgcccacc

SEQ ID NO: 175239 - RNA, 32 nt, Homo Sapiens
aucugcugcuuaggaaacucaaugaaaugaca

SEQ ID NO: 175240 - RNA, 32 nt, Homo Sapiens
agauggggguggaguggaggacacagggaguc

SEQ ID NO: 175241 - RNA, 32 nt, Homo Sapiens
uuccugccugguuuuucucuucucacauuuuu

SEQ ID NO: 175242 - RNA, 32 nt, Homo Sapiens
caaagucauauuuuccgggaaauauuuccagu

SEQ ID NO: 175243 - RNA, 32 nt, Homo Sapiens
cagggccagccgcacagucggaggaagggccg

SEQ ID NO: 175244 - RNA, 32 nt, Homo Sapiens
aacccgugggcccgggggaucccggggggccg

SEQ ID NO: 175245 - RNA, 32 nt, Homo Sapiens
gccgccacuggagccggacgccgagcgggacg

SEQ ID NO: 175246 - RNA, 32 nt, Homo Sapiens
gauucuuguugggagcuuaagaauagauuccu

SEQ ID NO: 175247 - RNA, 32 nt, Homo Sapiens
gccuucaguaccgacguacacuucugaccauu

SEQ ID NO: 175248 - RNA, 32 nt, Homo Sapiens
ugcagaaaugucaauauauuuuaugacauggu

SEQ ID NO: 175249 - RNA, 32 nt, Homo Sapiens
cagcggugcaggucggcuuccagccaacuuug

SEQ ID NO: 175250 - RNA, 32 nt, Homo Sapiens
guaccuucacguggcacucucccuuuaugugu

SEQ ID NO: 175251 - RNA, 32 nt, Homo Sapiens
ggguuccccggccaggccuccuccccucuggg

SEQ ID NO: 175252 - RNA, 29 nt, Homo Sapiens
aaagaacucauuugaaugcuuaauucaau

SEQ ID NO: 175253 - RNA, 32 nt, Homo Sapiens
acaccacgcacaacuucuauuucuucauaauu

SEQ ID NO: 175254 - RNA, 32 nt, Homo Sapiens
cccuggcucugccagcguccccggccacgucu

SEQ ID NO: 175255 - RNA, 32 nt, Homo Sapiens
uuucaauaaagucuuauuuuuguggcuaaaaa

SEQ ID NO: 175256 - RNA, 32 nt, Homo Sapiens
caaggcgcaccucggagaccgaaagcaaccgc

SEQ ID NO: 175257 - RNA, 32 nt, Homo Sapiens
ccucuccaauccacaauuccugaggaaguaga

SEQ ID NO: 175258 - RNA, 32 nt, Homo Sapiens
uaguucacacuguuuucuuaccuuacauugua

SEQ ID NO: 175259 - RNA, 32 nt, Homo Sapiens
ccugucgccgugguuccagccuccggagcucg

SEQ ID NO: 175260 - RNA, 32 nt, Homo Sapiens
cagcccugguccggcaggggcuccucgauccc

SEQ ID NO: 175261 - RNA, 32 nt, Homo Sapiens
cugaggcucugggagggaaagggacuugccua

SEQ ID NO: 175262 - RNA, 32 nt, Homo Sapiens
aauuuuacugacagaagaguuuggaauaguac

SEQ ID NO: 175263 - RNA, 32 nt, Homo Sapiens
cgguggcgacggcaccgcccccgcgucucccu

SEQ ID NO: 175264 - RNA, 32 nt, Homo Sapiens
gagcccacgcgcgccugccgggacaaguggag

SEQ ID NO: 175265 - RNA, 32 nt, Homo Sapiens
gaaaugguugggaaucgcuguuagaacucuag

SEQ ID NO: 175266 - RNA, 32 nt, Homo Sapiens
gaguggaggaggcuggccaaagagacuguggg

SEQ ID NO: 175267 - RNA, 32 nt, Homo Sapiens
cgcucuucaaccccagacuuugacuguauagu

SEQ ID NO: 175268 - RNA, 32 nt, Homo Sapiens
uuacauguucuuccagcuucaaucaguagacc

SEQ ID NO: 175269 - RNA, 32 nt, Homo Sapiens
gggaaggcacgcggguucagagcguggagcag

SEQ ID NO: 175270 - RNA, 32 nt, Homo Sapiens
gcuucuaagcugaccuagugauucugcugagc

SEQ ID NO: 175271 - RNA, 32 nt, Homo Sapiens
cacugcacuccagccugggugacagagugagu

SEQ ID NO: 175272 - RNA, 32 nt, Homo Sapiens
ggaagacaccgacaauggaagaguuggucacc

SEQ ID NO: 175273 - RNA, 32 nt, Homo Sapiens
cacugcacuccagccugggugacugagugaga

SEQ ID NO: 175274 - RNA, 32 nt, Homo Sapiens
uacaggcaugcgccagcacgcccggcuaaguu

SEQ ID NO: 175275 - RNA, 32 nt, Homo Sapiens
uccacacaaguuugauccagaucgguuugaug

SEQ ID NO: 175276 - RNA, 32 nt, Homo Sapiens
ccagggagcugcugucccucuugccgcaggga

SEQ ID NO: 175277 - RNA, 32 nt, Homo Sapiens
ggcuucaaauagaugccgccccugcccgcgcu

SEQ ID NO: 175278 - RNA, 32 nt, Homo Sapiens
uuagaacugggaagagagauggagucacaugg

SEQ ID NO: 175279 - RNA, 32 nt, Homo Sapiens
cucugaagaagcacaaaagaaaauauuaguga

SEQ ID NO: 175280 - RNA, 32 nt, Homo Sapiens
ccuagugcccaucagauacccgcggccgggac

SEQ ID NO: 175281 - RNA, 32 nt, Homo Sapiens
cugcacgcuucucaguguuccccgcgccccgc

SEQ ID NO: 175282 - RNA, 32 nt, Homo Sapiens
uggucagagaguggauuuuguauuuuguauuu

SEQ ID NO: 175283 - RNA, 32 nt, Homo Sapiens
cauucuuuacuuuuauaugacauucuuauacu

SEQ ID NO: 175284 - RNA, 32 nt, Homo Sapiens
ggaagcuugaauuauaaaugugguguuuggcc

SEQ ID NO: 175285 - RNA, 29 nt, Homo Sapiens
aaauccuaaaguuuaugcuuuuccuuucu

SEQ ID NO: 175286 - RNA, 32 nt, Homo Sapiens
uagcuuagcgugucagcgggcgccacagcgga

SEQ ID NO: 175287 - RNA, 32 nt, Homo Sapiens
ucacaaaugaacugaucucuguaucccauuau

SEQ ID NO: 175288 - RNA, 32 nt, Homo Sapiens
cugcgaugaagauaaugaagauaaagacaaug

SEQ ID NO: 175289 - RNA, 32 nt, Homo Sapiens
ccacggcccuagccaaggagccaggucugcaa

SEQ ID NO: 175290 - RNA, 32 nt, Homo Sapiens
agggggcugcgguggccaccgcggcggagccc

SEQ ID NO: 175291 - RNA, 32 nt, Homo Sapiens
auuaaaaauggcaauuuugcccucagaauuac

SEQ ID NO: 175292 - RNA, 28 nt, Homo Sapiens
agaauuaaauauauuuaauuaugauuua

SEQ ID NO: 175293 - RNA, 32 nt, Homo Sapiens
uguguugggcuuuggguauaaaggagggggau

SEQ ID NO: 175294 - RNA, 32 nt, Homo Sapiens
uaugcaagggucaccaguuuagagaucaguca

SEQ ID NO: 175295 - RNA, 31 nt, Homo Sapiens
acaggcccacccugcagcucaggcaccaaga

SEQ ID NO: 175296 - RNA, 32 nt, Homo Sapiens
gcuaucaauuuucagcauugugcuauuuggaa

SEQ ID NO: 175297 - RNA, 32 nt, Homo Sapiens
aagcggaccgucaucgagcagcagccugucuu

SEQ ID NO: 175298 - RNA, 32 nt, Homo Sapiens
ucuguuucucaaaucugagagagacccauuug

SEQ ID NO: 175299 - RNA, 32 nt, Homo Sapiens
ucucuguugucuuuuucuuuuuacuuuuuuaa

SEQ ID NO: 175300 - RNA, 32 nt, Homo Sapiens
auuggguuuuuauugucuaaccacagauagag

SEQ ID NO: 175301 - RNA, 32 nt, Homo Sapiens
uguuagauucccuuuucuucagcaguuucagu

SEQ ID NO: 175302 - RNA, 32 nt, Homo Sapiens
ugucccuguucucuguccucuacuccacucau

SEQ ID NO: 175303 - RNA, 30 nt, Homo Sapiens
cagccgccgggcgaucuccaagcggcgauc

SEQ ID NO: 175304 - RNA, 32 nt, Homo Sapiens
ggagccgagcgcgccgaggccggggccaugga

SEQ ID NO: 175305 - RNA, 32 nt, Homo Sapiens
ggcuugacagcaugagguguugugcauuuguu

SEQ ID NO: 175306 - RNA, 32 nt, Homo Sapiens
cagggaggaggaacggugggggugggcaguca

SEQ ID NO: 175307 - RNA, 32 nt, Homo Sapiens
uuuaagauuucuaugaugaucagaugcugaau

SEQ ID NO: 175308 - RNA, 30 nt, Homo Sapiens
gagggacuggacugacucucuggaauuuuc

SEQ ID NO: 175309 - RNA, 32 nt, Homo Sapiens
guuuuuggaagagccgaguacacaucuugaac

SEQ ID NO: 175310 - RNA, 32 nt, Homo Sapiens
gacccauaccuuucaccuuguucccuuccacc

SEQ ID NO: 175311 - RNA, 32 nt, Homo Sapiens
cccacuggucuuuaaaucaaugucuagaucuc

SEQ ID NO: 175312 - RNA, 32 nt, Homo Sapiens
ggagacuguaacaggcccagguccuugugcag

SEQ ID NO: 175313 - RNA, 32 nt, Homo Sapiens
cacacacgcgcgcgcucgcugggccguccccu

SEQ ID NO: 175314 - RNA, 32 nt, Homo Sapiens
uuguuauuuguuaagcacuuuguaacguggau

SEQ ID NO: 175315 - RNA, 32 nt, Homo Sapiens
uggcuggcucugcagagugauggacagcaggu

SEQ ID NO: 175316 - RNA, 32 nt, Homo Sapiens
gauggagucucucucugucacccagguuggag

SEQ ID NO: 175317 - RNA, 32 nt, Homo Sapiens
gacagagucucacucugucacccaggcgggag

SEQ ID NO: 175318 - RNA, 31 nt, Homo Sapiens
uuugcuuauuugacuuugcuuucuuugcuua

SEQ ID NO: 175319 - RNA, 32 nt, Homo Sapiens
gucccauccgcauggaguuugaaaauaaggaa

SEQ ID NO: 175320 - RNA, 32 nt, Homo Sapiens
uuuaaaaaacucuauuugaaaauuggaggggg

SEQ ID NO: 175321 - RNA, 32 nt, Homo Sapiens
uuagguaaaaggaaaccacagguaguuaaugc

SEQ ID NO: 175322 - RNA, 32 nt, Homo Sapiens
caguguuaccucaugaugucauaauuugcuga

SEQ ID NO: 175323 - RNA, 32 nt, Homo Sapiens
guauauauaaaccagaguuuauuaagaauugg

SEQ ID NO: 175324 - RNA, 32 nt, Homo Sapiens
gugcauacuuuuucauucaaaauggguauucu

SEQ ID NO: 175325 - RNA, 32 nt, Homo Sapiens
cagcgcagggcggccucucccccaccccucag

SEQ ID NO: 175326 - RNA, 32 nt, Homo Sapiens
ucaguugaacuauauggaaacuucuguaccug

SEQ ID NO: 175327 - RNA, 32 nt, Homo Sapiens
gaacuuguuucccuuauccauuuccuuuuuca

SEQ ID NO: 175328 - RNA, 32 nt, Homo Sapiens
auucuuugaaagauuauuguuugucggccugu

SEQ ID NO: 175329 - RNA, 32 nt, Homo Sapiens
gaccggcuggggggcgggaggccacucacucg

SEQ ID NO: 175330 - RNA, 32 nt, Homo Sapiens
augagugaaagauauugugcuuuauuaugaua

SEQ ID NO: 175331 - RNA, 32 nt, Homo Sapiens
gcuuuauucucuucuuuuucuuuauuucgccc

SEQ ID NO: 175332 - RNA, 32 nt, Homo Sapiens
caaaugugcccaccccacuuuccgcuuaacug

SEQ ID NO: 175333 - RNA, 32 nt, Homo Sapiens
uauagaaagugauccgccugccugcagaggcg

SEQ ID NO: 175334 - RNA, 32 nt, Homo Sapiens
uuccauugguguagacuuuagcaccauacuug

SEQ ID NO: 175335 - RNA, 32 nt, Homo Sapiens
uuaguauuuauaaacauguuugaaagauguuc

SEQ ID NO: 175336 - RNA, 32 nt, Homo Sapiens
acagggaaucauaucauaaaacauuuauacac

SEQ ID NO: 175337 - RNA, 32 nt, Homo Sapiens
ccagaucucccucugucuccuuuucucugucu

SEQ ID NO: 175338 - RNA, 32 nt, Homo Sapiens
uccugugcuccucggcgccccagcggcugccc

SEQ ID NO: 175339 - RNA, 32 nt, Homo Sapiens
aaccucggcaguuuucccggugcgggagcuuu

SEQ ID NO: 175340 - RNA, 32 nt, Homo Sapiens
gcggccccagccccucccgcagcccuccuccc

SEQ ID NO: 175341 - RNA, 31 nt, Homo Sapiens
ggaagccuugguaauccagauucggcuagga

SEQ ID NO: 175342 - RNA, 32 nt, Homo Sapiens
gagucaucucaaccauccccuccguggcauca

SEQ ID NO: 175343 - RNA, 32 nt, Homo Sapiens
cuaugaccaucauguggccuagcaggacuccc

SEQ ID NO: 175344 - RNA, 32 nt, Homo Sapiens
ucauacaucuucucuuuccuuguuuuccucua

SEQ ID NO: 175345 - RNA, 32 nt, Homo Sapiens
ucaguccugugcugugagugauauaauuggaa

SEQ ID NO: 175346 - RNA, 32 nt, Homo Sapiens
aaaaugcacuguauuuccugugauauuuauug

SEQ ID NO: 175347 - RNA, 32 nt, Homo Sapiens
uuuuuguuuuaacacaaaguaaaccugugaag

SEQ ID NO: 175348 - RNA, 32 nt, Homo Sapiens
uauaaacuuuacugccgagaaacuuucaguag

SEQ ID NO: 175349 - RNA, 32 nt, Homo Sapiens
ucgguggaggucgauuugagggucugcuguag

SEQ ID NO: 175350 - RNA, 32 nt, Homo Sapiens
acacagaucucugugccuggaaugggacugug

SEQ ID NO: 175351 - RNA, 32 nt, Homo Sapiens
agguuauguuuguguuugggguugucaaguga

SEQ ID NO: 175352 - RNA, 32 nt, Homo Sapiens
agaugcaauuuaauauaauagauuuuuuaaug

SEQ ID NO: 175353 - RNA, 32 nt, Homo Sapiens
cucgugcacaccggugagcggcccuacaggug

SEQ ID NO: 175354 - RNA, 32 nt, Homo Sapiens
ccucauguguuccacucccaauaaaagguuga

SEQ ID NO: 175355 - RNA, 32 nt, Homo Sapiens
acugguugggcauuuuaauucauguuaauaaa

SEQ ID NO: 175356 - RNA, 30 nt, Homo Sapiens
ggcuuagagaagccagcagucugcgaggcu

SEQ ID NO: 175357 - RNA, 32 nt, Homo Sapiens
ugcuuuccgugaugucauuuugaaagaggaca

SEQ ID NO: 175358 - RNA, 32 nt, Homo Sapiens
cugguagacaccuuugcuuucucuacccuccu

SEQ ID NO: 175359 - RNA, 32 nt, Homo Sapiens
gaggugugauuugcuguaucauuugaaccaaa

SEQ ID NO: 175360 - RNA, 32 nt, Homo Sapiens
ccguccccaccgcggcggcccuucucagcccc

SEQ ID NO: 175361 - RNA, 32 nt, Homo Sapiens
ugaguguugugauuggaacugaugaaguaaaa

SEQ ID NO: 175362 - RNA, 32 nt, Homo Sapiens
ugucugucuaucuggugacaagagagagacaa

SEQ ID NO: 175363 - RNA, 32 nt, Homo Sapiens
uaaaacggccccacccuuaucucccuucacug

SEQ ID NO: 175364 - RNA, 30 nt, Homo Sapiens
acgcucuccccggugccgccgccgcugccg

SEQ ID NO: 175365 - RNA, 32 nt, Homo Sapiens
ccgggcuggggcggggcggggggcuuugcagg

SEQ ID NO: 175366 - RNA, 32 nt, Homo Sapiens
cccaagagccugcugucuguauggaggaggug

SEQ ID NO: 175367 - RNA, 32 nt, Homo Sapiens
ucccuuaaauuauuuuuguaaugguagcuuuu

SEQ ID NO: 175368 - RNA, 32 nt, Homo Sapiens
ugcauuagguauauauuuuuugaaguauuuuu

SEQ ID NO: 175369 - RNA, 30 nt, Homo Sapiens
gcaggguuucaccauguuagccaggaugau

SEQ ID NO: 175370 - RNA, 32 nt, Homo Sapiens
ugcccucgcugagaccuccaugggaaaucacc

SEQ ID NO: 175371 - RNA, 32 nt, Homo Sapiens
gaagggacauuuucuucacagugucuuaucaa

SEQ ID NO: 175372 - RNA, 32 nt, Homo Sapiens
aaacaauuugucuacauacuggggauucuaaa

SEQ ID NO: 175373 - RNA, 32 nt, Homo Sapiens
ucaucgcagggcucaugauuuuuuacaaauua

SEQ ID NO: 175374 - RNA, 32 nt, Homo Sapiens
uaugcggagacaaugauaaauaaaacauauaa

SEQ ID NO: 175375 - RNA, 32 nt, Homo Sapiens
accacugcacuccagccugggcgacagagcag

SEQ ID NO: 175376 - RNA, 32 nt, Homo Sapiens
ugucuuuaaaaaugcagguaagcaugugacug

SEQ ID NO: 175377 - RNA, 32 nt, Homo Sapiens
gcggggcgggccgaggcugugcgugcgagucu

SEQ ID NO: 175378 - RNA, 32 nt, Homo Sapiens
gaagcaucaaggauuguuugguauuaaaauuu

SEQ ID NO: 175379 - RNA, 32 nt, Homo Sapiens
ccacucucccccagcacccccaucuccgacug

SEQ ID NO: 175380 - RNA, 32 nt, Homo Sapiens
ggagggaggguggggcaggggucgggggucgg

SEQ ID NO: 175381 - RNA, 32 nt, Homo Sapiens
gacuuuaaaaauuuccagaaggucaggaauuu

SEQ ID NO: 175382 - RNA, 32 nt, Homo Sapiens
uugucuccaugggaaacuugacccaguggcaa

SEQ ID NO: 175383 - RNA, 32 nt, Homo Sapiens
acuaccuuuaucaugugaaccuuuaaaaguua

SEQ ID NO: 175384 - RNA, 32 nt, Homo Sapiens
gcuggacacagagucagcaacacacaagacau

SEQ ID NO: 175385 - RNA, 32 nt, Homo Sapiens
ugcacugcauguccugggguccuucuuugugc

SEQ ID NO: 175386 - RNA, 32 nt, Homo Sapiens
ggaggccgaagcgggggcgggguggaucacuu

SEQ ID NO: 175387 - RNA, 32 nt, Homo Sapiens
uuucaggucacguuuuugauucuuaugcuucu

SEQ ID NO: 175388 - RNA, 32 nt, Homo Sapiens
gcuccugcccacucugcuuccaccccucccug

SEQ ID NO: 175389 - RNA, 32 nt, Homo Sapiens
gaguauauucacccucagagaaggcgugagga

SEQ ID NO: 175390 - RNA, 32 nt, Homo Sapiens
ucuugacuauuauacauaaugcugcuaggaac

SEQ ID NO: 175391 - RNA, 32 nt, Homo Sapiens
cuccuuggugcaggguucccacaaccgaguuc

SEQ ID NO: 175392 - RNA, 32 nt, Homo Sapiens
uguguaaaacagugagugugcaguguguaaau

SEQ ID NO: 175393 - RNA, 32 nt, Homo Sapiens
cuggggugcagggggagcugaguggcaggaca

SEQ ID NO: 175394 - RNA, 32 nt, Homo Sapiens
uuuuaaacucucacuaugggacacuuuaccaa

SEQ ID NO: 175395 - RNA, 32 nt, Homo Sapiens
ugucucuguaaaggcacuuccaaacauuuuga

SEQ ID NO: 175396 - RNA, 32 nt, Homo Sapiens
aauaccacuucauauuuguauagaauccucua

SEQ ID NO: 175397 - RNA, 32 nt, Homo Sapiens
agcaaacugaaaauuacuaugcacuugucaga

SEQ ID NO: 175398 - RNA, 32 nt, Homo Sapiens
ccacccccacacgcacuuuaugagggagaccc

SEQ ID NO: 175399 - RNA, 32 nt, Homo Sapiens
ccauucacuagccccagggauugaggucuugg

SEQ ID NO: 175400 - RNA, 27 nt, Homo Sapiens
guuuucaacuccuccagcccccgugac

SEQ ID NO: 175401 - RNA, 32 nt, Homo Sapiens
aaacccuauaaauguaaaaaauguagaaaaac

SEQ ID NO: 175402 - RNA, 32 nt, Homo Sapiens
gagacgccgagcgggccgagugcggccgagca

SEQ ID NO: 175403 - RNA, 32 nt, Homo Sapiens
ccaguugcacuguaucucuggaagugaugcau

SEQ ID NO: 175404 - RNA, 32 nt, Homo Sapiens
uuuucuuucucuuuuuuuuucuuaaaaugcca

SEQ ID NO: 175405 - RNA, 32 nt, Homo Sapiens
auucacuuagaaugaaguaaccucaagguacc

SEQ ID NO: 175406 - RNA, 32 nt, Homo Sapiens
cuaugacagcagaaacaaaacuucagauuuca

SEQ ID NO: 175407 - RNA, 32 nt, Homo Sapiens
uuaguugaauggaugaaacuuuuuuaaaguuu

SEQ ID NO: 175408 - RNA, 32 nt, Homo Sapiens
guuccugagagaauuuauuugguuagcucaua

SEQ ID NO: 175409 - RNA, 32 nt, Homo Sapiens
uuaagcugugucuacacugguugggaauaaau

SEQ ID NO: 175410 - RNA, 32 nt, Homo Sapiens
gaaaggucaagagcuccuucuuccaaggacca

SEQ ID NO: 175411 - RNA, 32 nt, Homo Sapiens
gauuauugugcuguuuuccaggaaagcugcag

SEQ ID NO: 175412 - RNA, 31 nt, Homo Sapiens
cuuccacugaugcauccuccaaggguagaug

SEQ ID NO: 175413 - RNA, 32 nt, Homo Sapiens
ccggauggcacuuccccaccggauggacaguu

SEQ ID NO: 175414 - RNA, 32 nt, Homo Sapiens
agagcuuuuuaaauuuuucuaauaauaucuua

SEQ ID NO: 175415 - RNA, 32 nt, Homo Sapiens
ggucuccauauguugcccaggcuggucucgaa

SEQ ID NO: 175416 - RNA, 32 nt, Homo Sapiens
cucucacucacacacacacacacacacacaca

SEQ ID NO: 175417 - RNA, 32 nt, Homo Sapiens
uaaauguacuaaaaaucuuuuaacuuuaaguc

SEQ ID NO: 175418 - RNA, 32 nt, Homo Sapiens
auuccuuggaauccgugaggccaagaacccca

SEQ ID NO: 175419 - RNA, 32 nt, Homo Sapiens
gccgaggcggguggaucacgagaucaggagau

SEQ ID NO: 175420 - RNA, 32 nt, Homo Sapiens
ccucgcgcccucuccuucuugugccuugagug

SEQ ID NO: 175421 - RNA, 32 nt, Homo Sapiens
gcuggcucaggcccuccucccccucuccccac

SEQ ID NO: 175422 - RNA, 32 nt, Homo Sapiens
ugcagcaucuccugucccccagccaugucauu

SEQ ID NO: 175423 - RNA, 32 nt, Homo Sapiens
cucgaacucaguacgaugcaaguucuagacac

SEQ ID NO: 175424 - RNA, 32 nt, Homo Sapiens
ugccaggccuggucuuggucuuucccaaacag

SEQ ID NO: 175425 - RNA, 32 nt, Homo Sapiens
uuguguacuucucugagggggcacauauguau

SEQ ID NO: 175426 - RNA, 32 nt, Homo Sapiens
cuggaucauuagauaaaaauggcuuuccaugu

SEQ ID NO: 175427 - RNA, 32 nt, Homo Sapiens
caacuuggggacgccuuaaccagccccucuca

SEQ ID NO: 175428 - RNA, 32 nt, Homo Sapiens
auuacccuuccacagaaugaucugcuuaggcc

SEQ ID NO: 175429 - RNA, 32 nt, Homo Sapiens
cuaauugucacaucaagcaucauuguccccau

SEQ ID NO: 175430 - RNA, 32 nt, Homo Sapiens
cuguagaacaaauggccuucucuuucagcauu

SEQ ID NO: 175431 - RNA, 32 nt, Homo Sapiens
cuuucuccccucagcaccuucaucucugcacc

SEQ ID NO: 175432 - RNA, 32 nt, Homo Sapiens
ucaugauugcuucuauacuccuccuuaauucc

SEQ ID NO: 175433 - RNA, 32 nt, Homo Sapiens
agugcuucccuuagccacucgcuuggccuugc

SEQ ID NO: 175434 - RNA, 32 nt, Homo Sapiens
auuuaucuaucaucuauucaucuaucagcuau

SEQ ID NO: 175435 - RNA, 32 nt, Homo Sapiens
aggagccagguuugugugugucugcaugugug

SEQ ID NO: 175436 - RNA, 32 nt, Homo Sapiens
cauugggaugauaaccugaggacccccacugg

SEQ ID NO: 175437 - RNA, 32 nt, Homo Sapiens
uaccuaaaggucagcaugggcuccaucauaca

SEQ ID NO: 175438 - RNA, 32 nt, Homo Sapiens
gaggcagggcucuguggcccaggccggcagug

SEQ ID NO: 175439 - RNA, 32 nt, Homo Sapiens
uggcaggguauuuuaauauauuuuucaaauuu

SEQ ID NO: 175440 - RNA, 32 nt, Homo Sapiens
agaauccgucuuugcccuucaaggauuuuuca

SEQ ID NO: 175441 - RNA, 32 nt, Homo Sapiens
cgacacacaccuguggucccagcugcucggga

SEQ ID NO: 175442 - RNA, 32 nt, Homo Sapiens
ucaaauauuuuuccuuguugggucuggaaaag

SEQ ID NO: 175443 - RNA, 32 nt, Homo Sapiens
uaagggauucuaugaaguccauagauaggauu

SEQ ID NO: 175444 - RNA, 32 nt, Homo Sapiens
agaaugagcaacauuuguaacuuuacaaugua

SEQ ID NO: 175445 - RNA, 32 nt, Homo Sapiens
aggaccccggcccugcacggacccucacaguc

SEQ ID NO: 175446 - RNA, 32 nt, Homo Sapiens
uuuguggagucuuuuuuuuuuaauuuaauaaa

SEQ ID NO: 175447 - RNA, 32 nt, Homo Sapiens
gaagucagcucuuaucucagguugguaucuuu

SEQ ID NO: 175448 - RNA, 32 nt, Homo Sapiens
accacccccgagcuugccucagggccaagccg

SEQ ID NO: 175449 - RNA, 32 nt, Homo Sapiens
cauuccucagaaugaggacccgaggacagugg

SEQ ID NO: 175450 - RNA, 32 nt, Homo Sapiens
ccuuuaacagagcaccccuuugaaaguuuuau

SEQ ID NO: 175451 - RNA, 32 nt, Homo Sapiens
cgggcuggccaggccgaggccggagcaggcag

SEQ ID NO: 175452 - RNA, 32 nt, Homo Sapiens
aagcucucuuuccuucucugguaaaaaaaaaa

SEQ ID NO: 175453 - RNA, 32 nt, Homo Sapiens
gggugacucacagccgcauuggugacucacuu

SEQ ID NO: 175454 - RNA, 32 nt, Homo Sapiens
acagcacucugaacaggcacagcccucccauc

SEQ ID NO: 175455 - RNA, 32 nt, Homo Sapiens
gcaccuguguccuccccuccccggcccuccca

SEQ ID NO: 175456 - RNA, 32 nt, Homo Sapiens
cggcacuggugccccauuccaucggcacuaac

SEQ ID NO: 175457 - RNA, 32 nt, Homo Sapiens
gguuauuacaaaacagaaaagaacaacagcaa

SEQ ID NO: 175458 - RNA, 32 nt, Homo Sapiens
aucuccugcaagccuuguuaaaacagagauuu

SEQ ID NO: 175459 - RNA, 32 nt, Homo Sapiens
cccagagcgcaggcaggcaggggggucccgcc

SEQ ID NO: 175460 - RNA, 32 nt, Homo Sapiens
ccauccaaaaauaguuaagauuucuaaaauau

SEQ ID NO: 175461 - RNA, 32 nt, Homo Sapiens
aaucuccccugggccccuccccggggaauccu

SEQ ID NO: 175462 - RNA, 32 nt, Homo Sapiens
ccucgucauagggguucucacucugaacuuuc

SEQ ID NO: 175463 - RNA, 32 nt, Homo Sapiens
gacagaugguggcacgcuguuuuuacccagcc

SEQ ID NO: 175464 - RNA, 32 nt, Homo Sapiens
ggaauauuaagccauggaaucuuagaguuaga

SEQ ID NO: 175465 - RNA, 28 nt, Homo Sapiens
agacgugggcggccgcgugguaucuccc

SEQ ID NO: 175466 - RNA, 32 nt, Homo Sapiens
uccucugcccuuuccccuuccuggacaggggu

SEQ ID NO: 175467 - RNA, 32 nt, Homo Sapiens
ggagaccacgugcguugugugcaugcgagcgc

SEQ ID NO: 175468 - RNA, 32 nt, Homo Sapiens
gguuuucaugcaauuugggacagaggaauaaa

SEQ ID NO: 175469 - RNA, 32 nt, Homo Sapiens
acucugcccuaccucccugcacuaaccagcuu

SEQ ID NO: 175470 - RNA, 32 nt, Homo Sapiens
aggaguuuccccacccagugagcuggggcaga

SEQ ID NO: 175471 - RNA, 32 nt, Homo Sapiens
uguuuacaauauagaugacauuuuaaaaaugu

SEQ ID NO: 175472 - RNA, 32 nt, Homo Sapiens
uuaacacguauccuguguucuccggaggcacc

SEQ ID NO: 175473 - RNA, 32 nt, Homo Sapiens
acuaagucuagcacacagcacuugagccagca

SEQ ID NO: 175474 - RNA, 32 nt, Homo Sapiens
ccuggccgcccucagcugcaacuccaauggcu

SEQ ID NO: 175475 - RNA, 32 nt, Homo Sapiens
aaagaugccuguguuuuccucuguggggcccg

SEQ ID NO: 175476 - RNA, 32 nt, Homo Sapiens
accaacagaaaguucuuuauauagccucuggg

SEQ ID NO: 175477 - RNA, 32 nt, Homo Sapiens
cuugaagcaggaagaccccuuaccaaaaauaa

SEQ ID NO: 175478 - RNA, 32 nt, Homo Sapiens
guuuaaaggcacaaggucauggccuuugucau

SEQ ID NO: 175479 - RNA, 32 nt, Homo Sapiens
ucuuuccaucggaaaauuaucaucucaauaag

SEQ ID NO: 175480 - RNA, 32 nt, Homo Sapiens
aguagucuauauauuuuauauaggguggaaga

SEQ ID NO: 175481 - RNA, 32 nt, Homo Sapiens
guugcuuuacacaacacaggccacaugggaaa

SEQ ID NO: 175482 - RNA, 32 nt, Homo Sapiens
cccgccgccgccucuggugacccgggcccuga

SEQ ID NO: 175483 - RNA, 32 nt, Homo Sapiens
ugugugcuccucuggaaggccaagcaggcucu

SEQ ID NO: 175484 - RNA, 32 nt, Homo Sapiens
gaagauggaccggcucuugcucccagcuccua

SEQ ID NO: 175485 - RNA, 32 nt, Homo Sapiens
guccuaaaauucaaaucacuauuugagaaacc

SEQ ID NO: 175486 - RNA, 32 nt, Homo Sapiens
uaaaauccaaaauuaugauaacuguauuucua

SEQ ID NO: 175487 - RNA, 32 nt, Homo Sapiens
agggaaagaaauguuucaggagggauaaagcu

SEQ ID NO: 175488 - RNA, 32 nt, Homo Sapiens
gugucuauuucuuuuucuuuuucuuuuuuuuu

SEQ ID NO: 175489 - RNA, 32 nt, Homo Sapiens
cuugcucuccccagccugccaagcccagcccu

SEQ ID NO: 175490 - RNA, 32 nt, Homo Sapiens
aucuuucauuaaaggcuucucucucaccagca

SEQ ID NO: 175491 - RNA, 32 nt, Homo Sapiens
agcuuagcugugaggguggacacacauaugug

SEQ ID NO: 175492 - RNA, 32 nt, Homo Sapiens
cugccauccacccucauuuucccuuuagcaag

SEQ ID NO: 175493 - RNA, 32 nt, Homo Sapiens
ggaaaggggaugcagagcccugcccagcacca

SEQ ID NO: 175494 - RNA, 32 nt, Homo Sapiens
ugguuuuguuuuuauuuuuuuaucaugaacau

SEQ ID NO: 175495 - RNA, 32 nt, Homo Sapiens
uguuggaggagcuugcuuuaguuagaugucuu

SEQ ID NO: 175496 - RNA, 32 nt, Homo Sapiens
uggagagucaguacucuccuacgaaccuccua

SEQ ID NO: 175497 - RNA, 32 nt, Homo Sapiens
cugagguugguuuuugcagaaaacagucucug

SEQ ID NO: 175498 - RNA, 32 nt, Homo Sapiens
gcaugcugaucauggugagcccauuggcaggg

SEQ ID NO: 175499 - RNA, 32 nt, Homo Sapiens
gcuccaauuuuauugucauuuucaucaauaag

SEQ ID NO: 175500 - RNA, 32 nt, Homo Sapiens
guuuaaugcuaaauuuuguuuucauguauggu

SEQ ID NO: 175501 - RNA, 32 nt, Homo Sapiens
cgccuucggcccgggccucccgggauggccgu

SEQ ID NO: 175502 - RNA, 32 nt, Homo Sapiens
acagaugugccagccgaggcuuggacaaaugc

SEQ ID NO: 175503 - RNA, 32 nt, Homo Sapiens
uguguguccgcaggcgcccgacgcugccgaug

SEQ ID NO: 175504 - RNA, 32 nt, Homo Sapiens
uccacauccugcuccauguccauccugcaaga

SEQ ID NO: 175505 - RNA, 32 nt, Homo Sapiens
cccuacuguguugguggugcugaugaaucugc

SEQ ID NO: 175506 - RNA, 32 nt, Homo Sapiens
gaguaaaacugggaggcauuuaggcuggaaua

SEQ ID NO: 175507 - RNA, 32 nt, Homo Sapiens
ucuuagagaugguaaauggccagaggggacua

SEQ ID NO: 175508 - RNA, 32 nt, Homo Sapiens
ggacuccaaacaagcucacuguguuucuuuuc

SEQ ID NO: 175509 - RNA, 32 nt, Homo Sapiens
ugaugugugucuauuucuuuuucuuuuucuuu

SEQ ID NO: 175510 - RNA, 32 nt, Homo Sapiens
aauggggacuuccaaaacccaagguuggcuau

SEQ ID NO: 175511 - RNA, 32 nt, Homo Sapiens
aggggcugggugagcaggccagcugggcuaug

SEQ ID NO: 175512 - RNA, 32 nt, Homo Sapiens
cccugggagaaccauggaagcaacuagcaaaa

SEQ ID NO: 175513 - RNA, 28 nt, Homo Sapiens
agccugguggucuagauguguuuggagu

SEQ ID NO: 175514 - RNA, 32 nt, Homo Sapiens
uuugagaaaugcuguacuauguuuucucauau

SEQ ID NO: 175515 - RNA, 32 nt, Homo Sapiens
ggagcaggaaguugcuguuucuccucugacca

SEQ ID NO: 175516 - RNA, 32 nt, Homo Sapiens
caucauggacuuccuauuuccuggcauuuuug

SEQ ID NO: 175517 - RNA, 32 nt, Homo Sapiens
ggcuccaggggauguucccaccccuccucccc

SEQ ID NO: 175518 - RNA, 32 nt, Homo Sapiens
gguuaaauccuaaucaucacaacagucucuaa

SEQ ID NO: 175519 - RNA, 32 nt, Homo Sapiens
ugggguggggaugaagccuggggggugggcca

SEQ ID NO: 175520 - RNA, 32 nt, Homo Sapiens
aagucuugcacccguuuguucgaagacaugcc

SEQ ID NO: 175521 - RNA, 32 nt, Homo Sapiens
ccaauagagagguuuucuuaauuaacaaaagg

SEQ ID NO: 175522 - RNA, 32 nt, Homo Sapiens
ccccucccgucuguccucucccagcaacugug

SEQ ID NO: 175523 - RNA, 32 nt, Homo Sapiens
uauaaauugacuucuuuuucuuaguuguaugg

SEQ ID NO: 175524 - RNA, 32 nt, Homo Sapiens
aagacagagcaaagcccccacccagguccccc

SEQ ID NO: 175525 - RNA, 32 nt, Homo Sapiens
uucuucggguugaucuguguggggagaagcgg

SEQ ID NO: 175526 - RNA, 32 nt, Homo Sapiens
gugcccagaaaggagcuuccccugccugccug

SEQ ID NO: 175527 - RNA, 32 nt, Homo Sapiens
acucaguucauuuaugaugugacucuauguac

SEQ ID NO: 175528 - RNA, 32 nt, Homo Sapiens
agcuuggagaacucacugugggcuaggguggu

SEQ ID NO: 175529 - RNA, 32 nt, Homo Sapiens
caaaucaguggccuuauggagacauuugcagc

SEQ ID NO: 175530 - RNA, 32 nt, Homo Sapiens
ggacgccgccgggcgcugggcuggagcugggg

SEQ ID NO: 175531 - RNA, 32 nt, Homo Sapiens
ccgccgcgagcccgcgcgacucgcacgagcau

SEQ ID NO: 175532 - RNA, 32 nt, Homo Sapiens
uaguguuaaaauuuauacaguuauucuuuugg

SEQ ID NO: 175533 - RNA, 31 nt, Homo Sapiens
aagaguaaauaaaaaugaauaugcaguggcu

SEQ ID NO: 175534 - RNA, 32 nt, Homo Sapiens
auguaaacuaaauccgcgucugugaauacguu

SEQ ID NO: 175535 - RNA, 32 nt, Homo Sapiens
ccgaagccuuggcgcggcaggcaggccccuga

SEQ ID NO: 175536 - RNA, 32 nt, Homo Sapiens
caggggugcugagaaggcggcugcugggcaga

SEQ ID NO: 175537 - RNA, 32 nt, Homo Sapiens
ccggggagggcgaaaagggaaccuggccacug

SEQ ID NO: 175538 - RNA, 29 nt, Homo Sapiens
gacuucauuggccagaggacgcuggccuu

SEQ ID NO: 175539 - RNA, 32 nt, Homo Sapiens
ugcuucagacugcuucaugaggagguuaaucu

SEQ ID NO: 175540 - RNA, 32 nt, Homo Sapiens
gugggcccauuuuggggaccaaacagcaagcu

SEQ ID NO: 175541 - RNA, 32 nt, Homo Sapiens
gcaugaaguguggaaugugucacuacgauugu

SEQ ID NO: 175542 - RNA, 32 nt, Homo Sapiens
aauuguccaaaauaaccuaacugcagcagaaa

SEQ ID NO: 175543 - RNA, 32 nt, Homo Sapiens
cgcggauuuggaaggaggcggcugggcagggc

SEQ ID NO: 175544 - RNA, 32 nt, Homo Sapiens
uccauuuccuuccuaagguuuccuuauccccu

SEQ ID NO: 175545 - RNA, 32 nt, Homo Sapiens
uauauaguacauuuauacuaaauguauuccug

SEQ ID NO: 175546 - RNA, 32 nt, Homo Sapiens
uauucucuguucuuucccacaaugagagucaa

SEQ ID NO: 175547 - RNA, 32 nt, Homo Sapiens
cuccuauugccuuccuggcccaggauagaaga

SEQ ID NO: 175548 - RNA, 32 nt, Homo Sapiens
ggcccccaugauucaauuaccucccccugggu

SEQ ID NO: 175549 - RNA, 32 nt, Homo Sapiens
aacgauuuaauacauauaaccaaaccggcagc

SEQ ID NO: 175550 - RNA, 32 nt, Homo Sapiens
uuuuaaugaaaauauaauggcaaccaagagaa

SEQ ID NO: 175551 - RNA, 32 nt, Homo Sapiens
aaauauaauuaaaagaaaaaaguuuagcacug

SEQ ID NO: 175552 - RNA, 32 nt, Homo Sapiens
cugcaugcacuaguguuuggaggguguugugg

SEQ ID NO: 175553 - RNA, 32 nt, Homo Sapiens
cauaccugacuucagaggauuuuauugaaacc

SEQ ID NO: 175554 - RNA, 31 nt, Homo Sapiens
aaacaagaauaaaaaauuauguauuaugcaa

SEQ ID NO: 175555 - RNA, 32 nt, Homo Sapiens
guagagggaaaggagcugcuuucucuucacua

SEQ ID NO: 175556 - RNA, 32 nt, Homo Sapiens
ucgucuuucuuugcuuuuuuaucacagcagaa

SEQ ID NO: 175557 - RNA, 32 nt, Homo Sapiens
gggaaggguggcgcaucucagagcccucgcaa

SEQ ID NO: 175558 - RNA, 32 nt, Homo Sapiens
ccaggaacugagacuagggcuuucucaugagg

SEQ ID NO: 175559 - RNA, 32 nt, Homo Sapiens
gagugucccgcgcagccacaccuggcaacagc

SEQ ID NO: 175560 - RNA, 31 nt, Homo Sapiens
cugaucggccacugccucaccuggcaugcuc

SEQ ID NO: 175561 - RNA, 32 nt, Homo Sapiens
cagcagcagcucaagcgcugcggccgccgccu

SEQ ID NO: 175562 - RNA, 32 nt, Homo Sapiens
auggccaucuucuuucuuccacccacaaacuc

SEQ ID NO: 175563 - RNA, 32 nt, Homo Sapiens
auauuggcaugggcuauuguaacugcucagug

SEQ ID NO: 175564 - RNA, 32 nt, Homo Sapiens
acauaauggagggaaacgagcaaacucuuggc

SEQ ID NO: 175565 - RNA, 32 nt, Homo Sapiens
ccucaaauggcguucuuaccaauagucuauuu

SEQ ID NO: 175566 - RNA, 32 nt, Homo Sapiens
ccuuuauguaaguuuauggccuugaaguguuu

SEQ ID NO: 175567 - RNA, 32 nt, Homo Sapiens
ccugccacggauaccagucagcccuugccagc

SEQ ID NO: 175568 - RNA, 32 nt, Homo Sapiens
uggaggagggaggggaggagcaggugggcugg

SEQ ID NO: 175569 - RNA, 32 nt, Homo Sapiens
cuagaaaacaagauggaaagauauauaaauau

SEQ ID NO: 175570 - RNA, 32 nt, Homo Sapiens
gaggggagccaggggaggaucgcgagggaagc

SEQ ID NO: 175571 - RNA, 32 nt, Homo Sapiens
acucauaucugugaccaguguccgccaccggg

SEQ ID NO: 175572 - RNA, 32 nt, Homo Sapiens
uccugugagcaaugugcugggaaaacuggcag

SEQ ID NO: 175573 - RNA, 32 nt, Homo Sapiens
cugccugucuggagggccauggagaagaggcu

SEQ ID NO: 175574 - RNA, 32 nt, Homo Sapiens
ugcagggccgccagggagaccuggacacaggc

SEQ ID NO: 175575 - RNA, 32 nt, Homo Sapiens
acccguggaagccccagguuggcuguugguuu

SEQ ID NO: 175576 - RNA, 32 nt, Homo Sapiens
uggagcugucggcggccgcgcugcugccccug

SEQ ID NO: 175577 - RNA, 27 nt, Homo Sapiens
aagugugaaauaaaccucucugauggc

SEQ ID NO: 175578 - RNA, 32 nt, Homo Sapiens
ccgcggcagguggacgccgccgguccacaccc

SEQ ID NO: 175579 - RNA, 29 nt, Homo Sapiens
uaaauaaucugugagugaaaguugccauu

SEQ ID NO: 175580 - RNA, 32 nt, Homo Sapiens
auuauucuaaucugaacacaguuaucaggauu

SEQ ID NO: 175581 - RNA, 32 nt, Homo Sapiens
ggcacccagugugggucuccccggccugaggg

SEQ ID NO: 175582 - RNA, 32 nt, Homo Sapiens
aaauaguuuauaaguuuguuaaguacuuauaa

SEQ ID NO: 175583 - RNA, 32 nt, Homo Sapiens
auuuagguuugugagauuaacuuuaggauuuu

SEQ ID NO: 175584 - RNA, 32 nt, Homo Sapiens
gcagcgccggcgggaacugcuucuccugggcc

SEQ ID NO: 175585 - RNA, 32 nt, Homo Sapiens
agauagagacccaaaaaaccgugggaugguuu

SEQ ID NO: 175586 - RNA, 32 nt, Homo Sapiens
gaagacuuuacagauguccucuguaaauagca

SEQ ID NO: 175587 - RNA, 32 nt, Homo Sapiens
aagagauccuuaaauuaugaguuguuggcuua

SEQ ID NO: 175588 - RNA, 32 nt, Homo Sapiens
gcagacuuucuucuccuuuucccucucaccua

SEQ ID NO: 175589 - RNA, 32 nt, Homo Sapiens
uugucauagucaauacagcaaguaaguauaac

SEQ ID NO: 175590 - RNA, 32 nt, Homo Sapiens
gacaagcuccagcugacuuuccguaaacucgc

SEQ ID NO: 175591 - RNA, 32 nt, Homo Sapiens
gagcuccggggcccgcggagcucgcgccaggc

SEQ ID NO: 175592 - RNA, 27 nt, Homo Sapiens
uuaaaauuucuauacagcccccuuccu

SEQ ID NO: 175593 - RNA, 32 nt, Homo Sapiens
cugcucugggugccggguggaagggccugugg

SEQ ID NO: 175594 - RNA, 32 nt, Homo Sapiens
gagagggaguccccggggacaccucggcacgc

SEQ ID NO: 175595 - RNA, 32 nt, Homo Sapiens
guuucuguucucucacaggugauaaacaaugc

SEQ ID NO: 175596 - RNA, 32 nt, Homo Sapiens
cacuucuuucccuguugacuuugcuguuuccc

SEQ ID NO: 175597 - RNA, 32 nt, Homo Sapiens
caguccccaccccugcccccagccccggggug

SEQ ID NO: 175598 - RNA, 32 nt, Homo Sapiens
ccugugucacccacccaccuccuucauuauca

SEQ ID NO: 175599 - RNA, 32 nt, Homo Sapiens
caauucaaaacuaccgugagacaucacuucac

SEQ ID NO: 175600 - RNA, 32 nt, Homo Sapiens
cagcugcgcgucugcgggaauaggugcagcgg

SEQ ID NO: 175601 - RNA, 32 nt, Homo Sapiens
ggacguuacugauacucuguuuagcuugauuu

SEQ ID NO: 175602 - RNA, 32 nt, Homo Sapiens
ucagguuuuuuaaauuuuuucagugagcgugg

SEQ ID NO: 175603 - RNA, 32 nt, Homo Sapiens
caggagagguacuggacgccgcgcacgcacuc

SEQ ID NO: 175604 - RNA, 32 nt, Homo Sapiens
guuuauugaauuauuacccagccuagaguuua

SEQ ID NO: 175605 - RNA, 32 nt, Homo Sapiens
ugacauaggaacuuugagacuccaugagaaag

SEQ ID NO: 175606 - RNA, 32 nt, Homo Sapiens
aauuagccgggcaugguggcgcaugccuguaa

SEQ ID NO: 175607 - RNA, 32 nt, Homo Sapiens
cuugaaagccaaguguuuuguauuuuauagug

SEQ ID NO: 175608 - RNA, 32 nt, Homo Sapiens
gcguuucuaaaauguuuaugggauuugaguug

SEQ ID NO: 175609 - RNA, 32 nt, Homo Sapiens
aauggaccugugagaccuuguuuguccucuuc

SEQ ID NO: 175610 - RNA, 31 nt, Homo Sapiens
auuguucuugguaauugauaccucucuguuu

SEQ ID NO: 175611 - RNA, 32 nt, Homo Sapiens
gugcacaaauaacauuauauauauuauauauc

SEQ ID NO: 175612 - RNA, 32 nt, Homo Sapiens
gggggaguaccuguagcacgccagugcuguuu

SEQ ID NO: 175613 - RNA, 32 nt, Homo Sapiens
gugccuuucaccuugagcaugcuucaggauuu

SEQ ID NO: 175614 - RNA, 32 nt, Homo Sapiens
uccacucuuucugcccucaccugggcaacguu

SEQ ID NO: 175615 - RNA, 32 nt, Homo Sapiens
ccacacugggauaggguggggaggcuggcagc

SEQ ID NO: 175616 - RNA, 32 nt, Homo Sapiens
ccuuucaucuuuuuuucuuaauucauaaaguu

SEQ ID NO: 175617 - RNA, 32 nt, Homo Sapiens
agcacuuaacacuguguagaaacuauuuuuug

SEQ ID NO: 175618 - RNA, 32 nt, Homo Sapiens
agaggaaagauaaguaaguaccauacacaccu

SEQ ID NO: 175619 - RNA, 32 nt, Homo Sapiens
cagcguccuaccaagaccccagcccaacucaa

SEQ ID NO: 175620 - RNA, 32 nt, Homo Sapiens
ucagaaaccagauucaggagcuaacaugcccc

SEQ ID NO: 175621 - RNA, 32 nt, Homo Sapiens
auaauuuaauuugaaggacugcagaacauuau

SEQ ID NO: 175622 - RNA, 32 nt, Homo Sapiens
caaacucgaaaacagcccugcccugugguuag

SEQ ID NO: 175623 - RNA, 32 nt, Homo Sapiens
uuaaaaagauguuuauucuguuugucagguac

SEQ ID NO: 175624 - RNA, 32 nt, Homo Sapiens
agcgcccaacucucagacguuccuccuggugc

SEQ ID NO: 175625 - RNA, 32 nt, Homo Sapiens
cagcugaggaugaauggagaaguaaaaacaac

SEQ ID NO: 175626 - RNA, 32 nt, Homo Sapiens
accuccgccucccggauacuccugccucagcc

SEQ ID NO: 175627 - RNA, 32 nt, Homo Sapiens
accggcccuugacuagauggaugcaguaucuc

SEQ ID NO: 175628 - RNA, 32 nt, Homo Sapiens
aauucggccgcugagagacccuggacacuguu

SEQ ID NO: 175629 - RNA, 32 nt, Homo Sapiens
cccagaaaacaucugucucuacuucggcugca

SEQ ID NO: 175630 - RNA, 32 nt, Homo Sapiens
agggagagguggggccccugcugggguagagc

SEQ ID NO: 175631 - RNA, 32 nt, Homo Sapiens
ugaacacacugcauaaauuugccugguucagu

SEQ ID NO: 175632 - RNA, 32 nt, Homo Sapiens
ugcuucagcugauccuucaacucugugaggug

SEQ ID NO: 175633 - RNA, 32 nt, Homo Sapiens
auuuuuguauuauaaguagacacaggguuuca

SEQ ID NO: 175634 - RNA, 32 nt, Homo Sapiens
accuaugauugucucuaacaaacaggcuacuu

SEQ ID NO: 175635 - RNA, 32 nt, Homo Sapiens
aagggucucaugcugcagccaccauugcaucu

SEQ ID NO: 175636 - RNA, 32 nt, Homo Sapiens
uuccaggagggccaugucugugccucugugua

SEQ ID NO: 175637 - RNA, 30 nt, Homo Sapiens
ugcuuugucugugcugguaguuugugagaa

SEQ ID NO: 175638 - RNA, 32 nt, Homo Sapiens
guacagaggagugaagaaaggcugggaggaau

SEQ ID NO: 175639 - RNA, 32 nt, Homo Sapiens
auguucugaauaccucugagaauagagauuga

SEQ ID NO: 175640 - RNA, 32 nt, Homo Sapiens
accagugucugaugaagggcagagugacccag

SEQ ID NO: 175641 - RNA, 32 nt, Homo Sapiens
gaucagcgcgcacaugggguccuucugcuguc

SEQ ID NO: 175642 - RNA, 32 nt, Homo Sapiens
acuuguacaauuuuugaucuacagcaucacga

SEQ ID NO: 175643 - RNA, 32 nt, Homo Sapiens
uugugccuuucaucagaaagucaaucuucagu

SEQ ID NO: 175644 - RNA, 32 nt, Homo Sapiens
gucaggcuggacgggagggaaugcccccaccu

SEQ ID NO: 175645 - RNA, 32 nt, Homo Sapiens
gaugcgacccugaguucuccccagagccuccu

SEQ ID NO: 175646 - RNA, 32 nt, Homo Sapiens
cggcaccaugccauccucugccuucugugcac

SEQ ID NO: 175647 - RNA, 32 nt, Homo Sapiens
ugugugagauaaaauugcuugucuuucacugg

SEQ ID NO: 175648 - RNA, 32 nt, Homo Sapiens
gagguccguccucacucacugucuuugaggaa

SEQ ID NO: 175649 - RNA, 32 nt, Homo Sapiens
cuacauguuuaaaaucuuggaaaucugcuuga

SEQ ID NO: 175650 - RNA, 32 nt, Homo Sapiens
uuucauucuaugauuauaucacaauuuaucua

SEQ ID NO: 175651 - RNA, 32 nt, Homo Sapiens
auguaagggcuuuuuccgcagaaguauucaga

SEQ ID NO: 175652 - RNA, 32 nt, Homo Sapiens
acuggaggcuggcaugggagaagugcuucugg

SEQ ID NO: 175653 - RNA, 32 nt, Homo Sapiens
ucucuccaggacugccaggcugcuggaggacc

SEQ ID NO: 175654 - RNA, 32 nt, Homo Sapiens
ugcacacagcuuucccagcuuuggugagaaaa

SEQ ID NO: 175655 - RNA, 32 nt, Homo Sapiens
uacauauagauauauauguaauauagaagggu

SEQ ID NO: 175656 - RNA, 32 nt, Homo Sapiens
uagaaaggcaaauuggaucuugguuuuuaaua

SEQ ID NO: 175657 - RNA, 32 nt, Homo Sapiens
gccaaagucaugcaugagacagugaaggaccu

SEQ ID NO: 175658 - RNA, 32 nt, Homo Sapiens
cuccucagccccagcccugccugcccugcccc

SEQ ID NO: 175659 - RNA, 32 nt, Homo Sapiens
gccucugcuccuggccagcagugucagcuccu

SEQ ID NO: 175660 - RNA, 28 nt, Homo Sapiens
ggaguugggugcccgccgagguuaaggc

SEQ ID NO: 175661 - RNA, 32 nt, Homo Sapiens
ggaacagagcucaugcugcugcuccugggugg

SEQ ID NO: 175662 - RNA, 32 nt, Homo Sapiens
aaaauuuauguaauuucauuuaauuuuagcca

SEQ ID NO: 175663 - RNA, 32 nt, Homo Sapiens
uccaugggcgagaugcugcugcuggcgagaug

SEQ ID NO: 175664 - RNA, 32 nt, Homo Sapiens
aaugcugaaaauaaacaaaauccacugaggcu

SEQ ID NO: 175665 - RNA, 32 nt, Homo Sapiens
aagccacaaaaaugccuuaauuugagcucgua

SEQ ID NO: 175666 - RNA, 32 nt, Homo Sapiens
ugcucaaaaauauuuuugagugaaugaaggca

SEQ ID NO: 175667 - RNA, 32 nt, Homo Sapiens
uauuuugaugucaauauagauuacuguaugaa

SEQ ID NO: 175668 - RNA, 30 nt, Homo Sapiens
gguggagagaagcgagcucuggcugugaca

SEQ ID NO: 175669 - RNA, 32 nt, Homo Sapiens
gcgccaguucccuuccauggucucccggcugg

SEQ ID NO: 175670 - RNA, 32 nt, Homo Sapiens
ccacgggcggcacagucacuucugccuguugc

SEQ ID NO: 175671 - RNA, 32 nt, Homo Sapiens
uuugauuuuuuacuuuuagcuuauaccagcug

SEQ ID NO: 175672 - RNA, 32 nt, Homo Sapiens
gcaaguccuacuuauaaaccuauauuaacuuu

SEQ ID NO: 175673 - RNA, 32 nt, Homo Sapiens
aagcuugaaucuacuuuuuuuuuuuuuugaga

SEQ ID NO: 175674 - RNA, 32 nt, Homo Sapiens
uguugcauuuccccauuucuuguuuuuaaaag

SEQ ID NO: 175675 - RNA, 32 nt, Homo Sapiens
cacacacacacacacacacacacacacacagu

SEQ ID NO: 175676 - RNA, 32 nt, Homo Sapiens
ccccaccucccucccccgucagugggaugacu

SEQ ID NO: 175677 - RNA, 32 nt, Homo Sapiens
gccagcuccuucugggguggccggauucugaa

SEQ ID NO: 175678 - RNA, 32 nt, Homo Sapiens
guuuucucugauguauuuaaggugauguauuu

SEQ ID NO: 175679 - RNA, 32 nt, Homo Sapiens
gcaauggggcuuugguuccuggcuucugggag

SEQ ID NO: 175680 - RNA, 32 nt, Homo Sapiens
ccaacguuaccaggaguauaugcugagaggcc

SEQ ID NO: 175681 - RNA, 32 nt, Homo Sapiens
auuagggaucuccugcccuugguccuaagugc

SEQ ID NO: 175682 - RNA, 32 nt, Homo Sapiens
uuauguguaucaucgugcaucaucauguauca

SEQ ID NO: 175683 - RNA, 32 nt, Homo Sapiens
acugggagagaagaggacuuuuuugauuaagu

SEQ ID NO: 175684 - RNA, 32 nt, Homo Sapiens
ucacauugauggacaaggaaucuacucaggcu

SEQ ID NO: 175685 - RNA, 32 nt, Homo Sapiens
acugcuaggagauuuagaaauaauuacuuagu

SEQ ID NO: 175686 - RNA, 32 nt, Homo Sapiens
ccuggccauuugugagaugugcagcuuuguga

SEQ ID NO: 175687 - RNA, 32 nt, Homo Sapiens
aggccgcugcuccgccgggcgccgggccuccu

SEQ ID NO: 175688 - RNA, 32 nt, Homo Sapiens
gacagccugcauguggcucugucugaaugucu

SEQ ID NO: 175689 - RNA, 32 nt, Homo Sapiens
gcacgaggccgcgaugccgcugcucgucgagg

SEQ ID NO: 175690 - RNA, 32 nt, Homo Sapiens
aaagcauuuucugcaaaauaaacgcaauaugc

SEQ ID NO: 175691 - RNA, 32 nt, Homo Sapiens
uuaauaugguccucauuuuucuuuuggugcag

SEQ ID NO: 175692 - RNA, 30 nt, Homo Sapiens
agguugaauauccuacuguguaacagguca

SEQ ID NO: 175693 - RNA, 32 nt, Homo Sapiens
ggccuacaaaagaguccaguccagucacuugu

SEQ ID NO: 175694 - RNA, 32 nt, Homo Sapiens
ggugauucaaggaauuuuauuuaugguccagc

SEQ ID NO: 175695 - RNA, 32 nt, Homo Sapiens
aacugagccugcgggggcaggggggcuugcug

SEQ ID NO: 175696 - RNA, 32 nt, Homo Sapiens
cuaaugucauauuuauucucuuuuguaacugc

SEQ ID NO: 175697 - RNA, 32 nt, Homo Sapiens
cagcucaucucuaaaaagauagaacucccagc

SEQ ID NO: 175698 - RNA, 32 nt, Homo Sapiens
uggagacacacggugcagcaucagggaccuuc

SEQ ID NO: 175699 - RNA, 32 nt, Homo Sapiens
aggcgggcggaucaccugaggucagcaguuca

SEQ ID NO: 175700 - RNA, 32 nt, Homo Sapiens
ggcgcccaggccggcaucccccucgugggugg

SEQ ID NO: 175701 - RNA, 32 nt, Homo Sapiens
gcccccaucccgcacccuuccaccuccuccga

SEQ ID NO: 175702 - RNA, 32 nt, Homo Sapiens
cggaggcugagccggccgcgggcgcgaccgga

SEQ ID NO: 175703 - RNA, 32 nt, Homo Sapiens
gcgggccggccgccgcaccauaggcuccgcgg

SEQ ID NO: 175704 - RNA, 32 nt, Homo Sapiens
uguccccaggccuggcuccccgagggcucaga

SEQ ID NO: 175705 - RNA, 32 nt, Homo Sapiens
agagaugugcaaacagcugggaggaaaagccu

SEQ ID NO: 175706 - RNA, 32 nt, Homo Sapiens
accacucaaaaaacuaaaaaacaaaggaaaug

SEQ ID NO: 175707 - RNA, 32 nt, Homo Sapiens
aucagccggagccccaggagcccaaggggugu

SEQ ID NO: 175708 - RNA, 30 nt, Homo Sapiens
acaguauaaauguaagccuaacuuugcaaa

SEQ ID NO: 175709 - RNA, 32 nt, Homo Sapiens
ggagggggcauugaucuucgaucgcgaagaug

SEQ ID NO: 175710 - RNA, 32 nt, Homo Sapiens
auucucuuaggugucauguucuuuuuucuguc

SEQ ID NO: 175711 - RNA, 32 nt, Homo Sapiens
cccuagcaggcgccagcgguggaggcugaguc

SEQ ID NO: 175712 - RNA, 32 nt, Homo Sapiens
ucccaggagcagcaaaggggccugcugagcuc

SEQ ID NO: 175713 - RNA, 32 nt, Homo Sapiens
gagcccugagugcugugcugcugcuggucucc

SEQ ID NO: 175714 - RNA, 32 nt, Homo Sapiens
ccagcugcaccuguaccagcugcccagcugcc

SEQ ID NO: 175715 - RNA, 32 nt, Homo Sapiens
gccgccgagucccgcuucuccuccaggcacaa

SEQ ID NO: 175716 - RNA, 32 nt, Homo Sapiens
uuuggaauccaccccaggagcccaggagccuu

SEQ ID NO: 175717 - RNA, 32 nt, Homo Sapiens
uguaauuuuuacauucauaauuuuaaugugga

SEQ ID NO: 175718 - RNA, 32 nt, Homo Sapiens
ugcugggccaagggggcagcccuggaggagcc

SEQ ID NO: 175719 - RNA, 32 nt, Homo Sapiens
ucuucuccuaaaacuuuaaaacuugaaguagg

SEQ ID NO: 175720 - RNA, 27 nt, Homo Sapiens
agccucuucuucuucaucccucccagc

SEQ ID NO: 175721 - RNA, 32 nt, Homo Sapiens
uccccccaccuccccaccuacuucagcagguc

SEQ ID NO: 175722 - RNA, 32 nt, Homo Sapiens
uaucuuucuugacuauacugauuucuuauuuu

SEQ ID NO: 175723 - RNA, 32 nt, Homo Sapiens
gggacgggcacugccccagagccccgcaguga

SEQ ID NO: 175724 - RNA, 32 nt, Homo Sapiens
cacugggaugucaucauucaccauuuauccag

SEQ ID NO: 175725 - RNA, 32 nt, Homo Sapiens
ucucucucauuuccuucaaauaaugaucaaug

SEQ ID NO: 175726 - RNA, 32 nt, Homo Sapiens
ugagugagcugccugcccauugcccauggguc

SEQ ID NO: 175727 - RNA, 32 nt, Homo Sapiens
caccaggggaacaauuagcuacauaauuguca

SEQ ID NO: 175728 - RNA, 32 nt, Homo Sapiens
gcauugaaaucgagacuauuuauuuggaauau

SEQ ID NO: 175729 - RNA, 32 nt, Homo Sapiens
gcacaggacagagacacagcaagaugcccagg

SEQ ID NO: 175730 - RNA, 32 nt, Homo Sapiens
cagcagcagcccaaaagguucuccuucuucau

SEQ ID NO: 175731 - RNA, 32 nt, Homo Sapiens
aggcugagagaggugaggcagcugcggaagaa

SEQ ID NO: 175732 - RNA, 32 nt, Homo Sapiens
gcuuagucugcaccucaaccgugcggaaagug

SEQ ID NO: 175733 - RNA, 32 nt, Homo Sapiens
ucuggaacaaggaaaagagcccuggaauauga

SEQ ID NO: 175734 - RNA, 32 nt, Homo Sapiens
aauuacauauuucauucccaauuugugugugu

SEQ ID NO: 175735 - RNA, 32 nt, Homo Sapiens
aaauugcuuuguauuguauauuacaaugauca

SEQ ID NO: 175736 - RNA, 32 nt, Homo Sapiens
caugauacugaaugaaagacaucagaugcaaa

SEQ ID NO: 175737 - RNA, 32 nt, Homo Sapiens
auuauugcaacuauguuuuucuaaaaggaugu

SEQ ID NO: 175738 - RNA, 32 nt, Homo Sapiens
agaagagaagguggcuacagccaggcauaaca

SEQ ID NO: 175739 - RNA, 31 nt, Homo Sapiens
cugaaauuaauaaaaauguuaauuaaucugu

SEQ ID NO: 175740 - RNA, 32 nt, Homo Sapiens
ccucccacccaccgccacaauaaagaucgccc

SEQ ID NO: 175741 - RNA, 32 nt, Homo Sapiens
aucaucagcaaccaugacugaugacugggccc

SEQ ID NO: 175742 - RNA, 32 nt, Homo Sapiens
gagggccaggucgggggcaggcauggagggga

SEQ ID NO: 175743 - RNA, 32 nt, Homo Sapiens
aacugguaugugcaguaggauggauguuugag

SEQ ID NO: 175744 - RNA, 32 nt, Homo Sapiens
uuuaaagaaauauuuuuaaagccacaauuauu

SEQ ID NO: 175745 - RNA, 32 nt, Homo Sapiens
gaggagagggcuuggauagaguugaggagugu

SEQ ID NO: 175746 - RNA, 32 nt, Homo Sapiens
uauuuuuguuuucacuaacaacagauaaggua

SEQ ID NO: 175747 - RNA, 31 nt, Homo Sapiens
aagcccaucaaugauacacuggauaaagaaa

SEQ ID NO: 175748 - RNA, 32 nt, Homo Sapiens
ggcuucaaaaauacucacauggcuauguuuua

SEQ ID NO: 175749 - RNA, 32 nt, Homo Sapiens
gcuaccugucuccaucauuuuguggcacauag

SEQ ID NO: 175750 - RNA, 32 nt, Homo Sapiens
uuuccuuggugucucuccgagaauaagacggg

SEQ ID NO: 175751 - RNA, 32 nt, Homo Sapiens
accucccacccgccucuuggcuccucuccucu

SEQ ID NO: 175752 - RNA, 32 nt, Homo Sapiens
cuggcuuccaccuggcacgugccugcugcuuc

SEQ ID NO: 175753 - RNA, 32 nt, Homo Sapiens
cuuuccuuuguccuguucuaaccuaggaauga

SEQ ID NO: 175754 - RNA, 32 nt, Homo Sapiens
ggccgaauacaucaagcaaugguaacaucuuu

SEQ ID NO: 175755 - RNA, 31 nt, Homo Sapiens
ugcggggugcgguuuguagugcuguugcccu

SEQ ID NO: 175756 - RNA, 32 nt, Homo Sapiens
cgcggcaggaccaugguugagcgcgccagcaa

SEQ ID NO: 175757 - RNA, 32 nt, Homo Sapiens
gggacccuucagaacucucuuugcucacaagu

SEQ ID NO: 175758 - RNA, 32 nt, Homo Sapiens
agaagagaacuaaaaguuauuccaacagagau

SEQ ID NO: 175759 - RNA, 32 nt, Homo Sapiens
augacagcucuccccaggaauccugcugccug

SEQ ID NO: 175760 - RNA, 32 nt, Homo Sapiens
gugugccuguaccucccugacaauguggccug

SEQ ID NO: 175761 - RNA, 32 nt, Homo Sapiens
ucagaccuugagaugugcccccugcccccacu

SEQ ID NO: 175762 - RNA, 32 nt, Homo Sapiens
gcaggguggcaaaauggaaaaggaacaauuuu

SEQ ID NO: 175763 - RNA, 32 nt, Homo Sapiens
cccauggggcucuccuuccgccucucaagauc

SEQ ID NO: 175764 - RNA, 32 nt, Homo Sapiens
aggacaguuuucuccuucugccuuccaggcag

SEQ ID NO: 175765 - RNA, 32 nt, Homo Sapiens
uccugggcgauuguagcgggaccgucacacac

SEQ ID NO: 175766 - RNA, 32 nt, Homo Sapiens
uagcauuuacuuuaaaaaugacaugaggcaga

SEQ ID NO: 175767 - RNA, 32 nt, Homo Sapiens
gauuucucacagcuuuuuguucuguuuuguau

SEQ ID NO: 175768 - RNA, 32 nt, Homo Sapiens
ccugccggccccuccucccgcggccgggaaga

SEQ ID NO: 175769 - RNA, 32 nt, Homo Sapiens
ccuucugaccuccagugccgccggccucaaga

SEQ ID NO: 175770 - RNA, 32 nt, Homo Sapiens
cccuguuugcccgugagccuggggaacuugca

SEQ ID NO: 175771 - RNA, 32 nt, Homo Sapiens
ccauauucauuuccuauuuggagaacuauauu

SEQ ID NO: 175772 - RNA, 32 nt, Homo Sapiens
gaaccaggcuacaagagaaaaagcagaggcca

SEQ ID NO: 175773 - RNA, 32 nt, Homo Sapiens
caugcucucagccuuucucccucccccgucuc

SEQ ID NO: 175774 - RNA, 32 nt, Homo Sapiens
gccuucaggagacacugcuggaccucagcauu

SEQ ID NO: 175775 - RNA, 32 nt, Homo Sapiens
ggcgguuguuguuggcagcuguggcuaaggag

SEQ ID NO: 175776 - RNA, 32 nt, Homo Sapiens
aggccugcaaguuuuccuaggaggaagggaag

SEQ ID NO: 175777 - RNA, 28 nt, Homo Sapiens
gagcagaaagauuaaauaugaucacuuc

SEQ ID NO: 175778 - RNA, 32 nt, Homo Sapiens
uuuggcuugcacggccgaguguguguccucuu

SEQ ID NO: 175779 - RNA, 32 nt, Homo Sapiens
auuacugccccuguccuccccacccugucaug

SEQ ID NO: 175780 - RNA, 32 nt, Homo Sapiens
aauagaauccugaaaauugacccugggaugag

SEQ ID NO: 175781 - RNA, 32 nt, Homo Sapiens
agagaacagaguugggaaaaacaacagguuug

SEQ ID NO: 175782 - RNA, 32 nt, Homo Sapiens
gggcagcauggcugggaucaccaccaucgagg

SEQ ID NO: 175783 - RNA, 32 nt, Homo Sapiens
cuagcaggccaggccucccagugggaaggccu

SEQ ID NO: 175784 - RNA, 32 nt, Homo Sapiens
ugggugucugaguuccaaaaaauguguguugu

SEQ ID NO: 175785 - RNA, 32 nt, Homo Sapiens
gugggcuuuguccuuggggauuuaggaggcgg

SEQ ID NO: 175786 - RNA, 32 nt, Homo Sapiens
guuuaaagggcacuucuguuuguggaguaaag

SEQ ID NO: 175787 - RNA, 32 nt, Homo Sapiens
augagucagacaagcgguggugaggcaggcuc

SEQ ID NO: 175788 - RNA, 32 nt, Homo Sapiens
cagcccuggagaauuugcucaccgagguagga

SEQ ID NO: 175789 - RNA, 32 nt, Homo Sapiens
ucacaguagaugguggacuugggaguuugaug

SEQ ID NO: 175790 - RNA, 32 nt, Homo Sapiens
cuccccugccaccuaucaaugaugccuugguu

SEQ ID NO: 175791 - RNA, 32 nt, Homo Sapiens
uugcugggaacacacacacacacacacacaca

SEQ ID NO: 175792 - RNA, 32 nt, Homo Sapiens
auacacuaauauguauacuaauaaauauacac

SEQ ID NO: 175793 - RNA, 32 nt, Homo Sapiens
caauccucccaucucgccuccuccuauaaagc

SEQ ID NO: 175794 - RNA, 32 nt, Homo Sapiens
aauuagccgggcguggcagggugcgccugagu

SEQ ID NO: 175795 - RNA, 32 nt, Homo Sapiens
cuauuuaaauguuuucuuauacuaguauuuua

SEQ ID NO: 175796 - RNA, 31 nt, Homo Sapiens
ugccggugggucugccugcccgcgcagcaga

SEQ ID NO: 175797 - RNA, 32 nt, Homo Sapiens
cgaggguccucccacacgugcucacccacccg

SEQ ID NO: 175798 - RNA, 32 nt, Homo Sapiens
ucuguaucugucuagcgcacacaccaaaaucc

SEQ ID NO: 175799 - RNA, 32 nt, Homo Sapiens
uuuagagccgagccgcgccgcgccgaugcccu

SEQ ID NO: 175800 - RNA, 32 nt, Homo Sapiens
uauuuuuacaagguuugaaaccugaaaugcag

SEQ ID NO: 175801 - RNA, 32 nt, Homo Sapiens
gggucacuguuuaccuuguuucagggguggga

SEQ ID NO: 175802 - RNA, 32 nt, Homo Sapiens
ccuuugcugugacacuucuucaucucaccccc

SEQ ID NO: 175803 - RNA, 32 nt, Homo Sapiens
uuagucaaggauuuauuucuuuuggaagccca

SEQ ID NO: 175804 - RNA, 32 nt, Homo Sapiens
cuagauuauaaaauuaagccuuagaguaugga

SEQ ID NO: 175805 - RNA, 32 nt, Homo Sapiens
gugucugagaaauaagaaaugcucagucaaua

SEQ ID NO: 175806 - RNA, 32 nt, Homo Sapiens
ugucauccacuacuuggcuauagcuccagaag

SEQ ID NO: 175807 - RNA, 32 nt, Homo Sapiens
ggccaugccggggcacuccgaggccugagacg

SEQ ID NO: 175808 - RNA, 32 nt, Homo Sapiens
gugcugcccccuccccggagggcuggagagag

SEQ ID NO: 175809 - RNA, 32 nt, Homo Sapiens
gggguggcucggcucgggaggcuugggacccc

SEQ ID NO: 175810 - RNA, 32 nt, Homo Sapiens
cggauuuuugcuacuaccgaaaauauguaaau

SEQ ID NO: 175811 - RNA, 32 nt, Homo Sapiens
cucuucccauucuccuuuuaaaucucuuugaa

SEQ ID NO: 175812 - RNA, 32 nt, Homo Sapiens
uaacaguuccagcucuauguguuuccucuaac

SEQ ID NO: 175813 - RNA, 32 nt, Homo Sapiens
ucgaccccgagcucggagccccgcgggccgcg

SEQ ID NO: 175814 - RNA, 32 nt, Homo Sapiens
ucccuccucccuccccauuucauuggcguaac

SEQ ID NO: 175815 - RNA, 32 nt, Homo Sapiens
cucaucgcgggcccacggagcggccccggagg

SEQ ID NO: 175816 - RNA, 32 nt, Homo Sapiens
gcugggguguugcacuuugggggauggagucu

SEQ ID NO: 175817 - RNA, 32 nt, Homo Sapiens
gaugggcauuuggcgagaaggcuggcguuagu

SEQ ID NO: 175818 - RNA, 32 nt, Homo Sapiens
aacaagaaugaaucauuacuguguauguuagg

SEQ ID NO: 175819 - RNA, 32 nt, Homo Sapiens
gcuuaagacaagugcaugcaaaaacuuucaca

SEQ ID NO: 175820 - RNA, 32 nt, Homo Sapiens
uucaucgcaguugcuccggaucuuugcacaca

SEQ ID NO: 175821 - RNA, 32 nt, Homo Sapiens
auauuucuaaucagccauuaugcuggggcauc

SEQ ID NO: 175822 - RNA, 32 nt, Homo Sapiens
acuggcccagagcccuuggaguguugguggag

SEQ ID NO: 175823 - RNA, 32 nt, Homo Sapiens
uuauaaagauaaaaauuuaucaacauuccuua

SEQ ID NO: 175824 - RNA, 32 nt, Homo Sapiens
gcuucccugccagccugaaguccauuuucccc

SEQ ID NO: 175825 - RNA, 32 nt, Homo Sapiens
cugccggggucaucuccugggucaucggacug

SEQ ID NO: 175826 - RNA, 32 nt, Homo Sapiens
ucucuguacauuuaagugaaaagucuuuauaa

SEQ ID NO: 175827 - RNA, 32 nt, Homo Sapiens
ugaaauuucuagagggggucuaucucagaaau

SEQ ID NO: 175828 - RNA, 32 nt, Homo Sapiens
aggcacugucgcgacccagcugcaugcacuua

SEQ ID NO: 175829 - RNA, 32 nt, Homo Sapiens
agggagcgcuccacguugcccagcggcuccgc

SEQ ID NO: 175830 - RNA, 32 nt, Homo Sapiens
guagcugcugcagcugcuggcucagccacgag

SEQ ID NO: 175831 - RNA, 32 nt, Homo Sapiens
accuugcccaaguucaaagcggaggccaguga

SEQ ID NO: 175832 - RNA, 32 nt, Homo Sapiens
cuucccuaaagucuuaaaaauguuauauuagg

SEQ ID NO: 175833 - RNA, 32 nt, Homo Sapiens
ucccagugcauucuaaugugccugcaguacag

SEQ ID NO: 175834 - RNA, 32 nt, Homo Sapiens
uccaagcuuauauccucaaucaccuaaagauc

SEQ ID NO: 175835 - RNA, 32 nt, Homo Sapiens
uuuaacucaaauguauucuuuguuagaauuua

SEQ ID NO: 175836 - RNA, 32 nt, Homo Sapiens
cggcggcuccacggggaguggaacuugcaaga

SEQ ID NO: 175837 - RNA, 32 nt, Homo Sapiens
cucugcccuggccucuccugcucauucuucuu

SEQ ID NO: 175838 - RNA, 32 nt, Homo Sapiens
aggaaaagaaaauaugggauauguaagugugc

SEQ ID NO: 175839 - RNA, 32 nt, Homo Sapiens
ccaggcauccauuuccacagucuugcauuucu

SEQ ID NO: 175840 - RNA, 32 nt, Homo Sapiens
uuucauuggggaucauguccauggagcuccuc

SEQ ID NO: 175841 - RNA, 32 nt, Homo Sapiens
cggguggcuuugcgggcgcucgcgguaaguuu

SEQ ID NO: 175842 - RNA, 32 nt, Homo Sapiens
cccgugacucuuaacagcggcgggccucagac

SEQ ID NO: 175843 - RNA, 27 nt, Homo Sapiens
ccaugucggaggugcugcccuacggcg

SEQ ID NO: 175844 - RNA, 32 nt, Homo Sapiens
gcagugcagcccggcgccggcgacugccugcc

SEQ ID NO: 175845 - RNA, 32 nt, Homo Sapiens
aaauauacaacacuauuguagguagugauaug

SEQ ID NO: 175846 - RNA, 32 nt, Homo Sapiens
gcuccggcgccgggcgacaugccggugcgcuu

SEQ ID NO: 175847 - RNA, 32 nt, Homo Sapiens
aacaacuugucaucuaccuguuuaccucuaac

SEQ ID NO: 175848 - RNA, 32 nt, Homo Sapiens
acugagucggcgccuggcggguguugugacgc

SEQ ID NO: 175849 - RNA, 32 nt, Homo Sapiens
uccaccccaucccagacucccaccccagggau

SEQ ID NO: 175850 - RNA, 27 nt, Homo Sapiens
aguuuuguuuucuucagcguucaccuu

SEQ ID NO: 175851 - RNA, 32 nt, Homo Sapiens
cccgcccgcacugcccuccccccgcagcaggg

SEQ ID NO: 175852 - RNA, 32 nt, Homo Sapiens
uagcgaggaaucugauuccaagcaaaaaccag

SEQ ID NO: 175853 - RNA, 32 nt, Homo Sapiens
gggcaaugguuugggugacucacuuuccccuc

SEQ ID NO: 175854 - RNA, 32 nt, Homo Sapiens
guugccccggugccgggaccgggccggucucu

SEQ ID NO: 175855 - RNA, 32 nt, Homo Sapiens
acgacgguuccacuucuucuguuccaugagcu

SEQ ID NO: 175856 - RNA, 32 nt, Homo Sapiens
ccuuccccugggcuaccauugucccuuuccuc

SEQ ID NO: 175857 - RNA, 32 nt, Homo Sapiens
uuuauuuugcuucauuuuacccuggcaugcua

SEQ ID NO: 175858 - RNA, 32 nt, Homo Sapiens
cuggcgugcucaaacugccaucgccugcuccc

SEQ ID NO: 175859 - RNA, 32 nt, Homo Sapiens
uacccgguaccucggcguagcccgagggaguc

SEQ ID NO: 175860 - RNA, 32 nt, Homo Sapiens
uccuuauuuguauguuuaccauauacuuugau

SEQ ID NO: 175861 - RNA, 31 nt, Homo Sapiens
cccagggccuucaccaccugaccaaaggucu

SEQ ID NO: 175862 - RNA, 32 nt, Homo Sapiens
accuccauuguucuuugcuucugcacaagauc

SEQ ID NO: 175863 - RNA, 32 nt, Homo Sapiens
ggaguccaaaucuauuuguugaccaggaccug

SEQ ID NO: 175864 - RNA, 32 nt, Homo Sapiens
aguugaaaauggugaacauugugauuuuacag

SEQ ID NO: 175865 - RNA, 32 nt, Homo Sapiens
cuaagucuccucugugacucuagcaaaugccg

SEQ ID NO: 175866 - RNA, 32 nt, Homo Sapiens
cugcgcuugugcccccucuccuccuuggcacu

SEQ ID NO: 175867 - RNA, 32 nt, Homo Sapiens
ccgaaggagaggcagucuauggagcgcagcgg

SEQ ID NO: 175868 - RNA, 32 nt, Homo Sapiens
uuuuuuuccucauuuuaacugagaggagaaaa

SEQ ID NO: 175869 - RNA, 32 nt, Homo Sapiens
gauguaaaaugaaauuucauuuguaauuggaa

SEQ ID NO: 175870 - RNA, 32 nt, Homo Sapiens
aaaccaugcuuguuuaaccugcugguaaaauu

SEQ ID NO: 175871 - RNA, 32 nt, Homo Sapiens
gagaggggcuggaggcggggcgagggcgcggc

SEQ ID NO: 175872 - RNA, 32 nt, Homo Sapiens
cuuacgucuguccauccaucuguccgugguca

SEQ ID NO: 175873 - RNA, 32 nt, Homo Sapiens
agcugcggagcgcggcgggcggccccuuggag

SEQ ID NO: 175874 - RNA, 32 nt, Homo Sapiens
gugaagccgggaggggcugccggcgcugacag

SEQ ID NO: 175875 - RNA, 32 nt, Homo Sapiens
gaggcugcgagaucccuaccgcaguagccgcc

SEQ ID NO: 175876 - RNA, 32 nt, Homo Sapiens
uaggcacccagcugccaccucuccauccugcu

SEQ ID NO: 175877 - RNA, 32 nt, Homo Sapiens
gacagagucucacucugucacccaggcuggaa

SEQ ID NO: 175878 - RNA, 32 nt, Homo Sapiens
gacggagucucgcucugucacccaggcuggaa

SEQ ID NO: 175879 - RNA, 32 nt, Homo Sapiens
gauggagucuugcucugucacccaggcuggaa

SEQ ID NO: 175880 - RNA, 32 nt, Homo Sapiens
uuuuguuuagaguuuguacacaaaaucuacaa

SEQ ID NO: 175881 - RNA, 32 nt, Homo Sapiens
uauacauauacaugcauagaaaugaaaugcua

SEQ ID NO: 175882 - RNA, 32 nt, Homo Sapiens
uacaugguugucacacuugauuguagguaaga

SEQ ID NO: 175883 - RNA, 32 nt, Homo Sapiens
cuguggaggagaagaaaagugauucagugauu

SEQ ID NO: 175884 - RNA, 32 nt, Homo Sapiens
agcagcuccgaauugaaugaauugaugggcac

SEQ ID NO: 175885 - RNA, 32 nt, Homo Sapiens
uaucuuuuaaagacauaguucaaaauugcuuu

SEQ ID NO: 175886 - RNA, 32 nt, Homo Sapiens
uuuagcaauggcgguucccggcguggggcucu

SEQ ID NO: 175887 - RNA, 32 nt, Homo Sapiens
ccuuuuugcgauuuagcagugcugauugugua

SEQ ID NO: 175888 - RNA, 32 nt, Homo Sapiens
aggaaaccacaauuugucaaauauguuugcca

SEQ ID NO: 175889 - RNA, 32 nt, Homo Sapiens
aaaugacauuuaugguaaagucugaggguuga

SEQ ID NO: 175890 - RNA, 31 nt, Homo Sapiens
ugugccuuacggagaaaguccgcguguugga

SEQ ID NO: 175891 - RNA, 27 nt, Homo Sapiens
cuaaugucuuucuucagugaaaauggu

SEQ ID NO: 175892 - RNA, 32 nt, Homo Sapiens
ggaaaagugggccuaggguggccacagcuuug

SEQ ID NO: 175893 - RNA, 32 nt, Homo Sapiens
ggcauuggagccaucaugaaaagcaggaaaug

SEQ ID NO: 175894 - RNA, 32 nt, Homo Sapiens
ggaccugaguucccggcccuaucuuacucuuc

SEQ ID NO: 175895 - RNA, 32 nt, Homo Sapiens
ugacuuuucauguaucucuccugccuuccuuc

SEQ ID NO: 175896 - RNA, 32 nt, Homo Sapiens
ugccaggcccucgcuccugggguguccugccg

SEQ ID NO: 175897 - RNA, 32 nt, Homo Sapiens
uguuugguuuucgcuuccugugucaguuugcu

SEQ ID NO: 175898 - RNA, 32 nt, Homo Sapiens
gcuucuccggcggaacccaggcuggaccgcgg

SEQ ID NO: 175899 - RNA, 32 nt, Homo Sapiens
gagcccccgccuuugccugcacuccucuugca

SEQ ID NO: 175900 - RNA, 32 nt, Homo Sapiens
cuugagugcaggugcuggcucugcugugacca

SEQ ID NO: 175901 - RNA, 32 nt, Homo Sapiens
uucugagaaguuaguguuaaggucuuggaaug

SEQ ID NO: 175902 - RNA, 32 nt, Homo Sapiens
agaggaaaagcugugaguuguauuuuggccac

SEQ ID NO: 175903 - RNA, 32 nt, Homo Sapiens
agaacgccauggcuccuccccgcucucuuggc

SEQ ID NO: 175904 - RNA, 32 nt, Homo Sapiens
uccgaacaucagaaggaacaaacucuagacgc

SEQ ID NO: 175905 - RNA, 30 nt, Homo Sapiens
gcgccauggagcaguggcgacagugcggcc

SEQ ID NO: 175906 - RNA, 32 nt, Homo Sapiens
cagccagacauuacagccaaccuugcugauug

SEQ ID NO: 175907 - RNA, 32 nt, Homo Sapiens
uaugugucacugucaauaaaauguaaaauaua

SEQ ID NO: 175908 - RNA, 32 nt, Homo Sapiens
ccaccucggcugcugcagccugcccagcagca

SEQ ID NO: 175909 - RNA, 32 nt, Homo Sapiens
cguuuccgcgguuggcuacucagugucuuggu

SEQ ID NO: 175910 - RNA, 32 nt, Homo Sapiens
auaauguaucaugugacaggcauugggcuaaa

SEQ ID NO: 175911 - RNA, 32 nt, Homo Sapiens
ggcgugcccuccccuucccccaccgccccgcu

SEQ ID NO: 175912 - RNA, 32 nt, Homo Sapiens
gcccugccccggcgccagcagcugcuccugga

SEQ ID NO: 175913 - RNA, 32 nt, Homo Sapiens
uccgcgggcccggcccgcgucagcagcgaccc

SEQ ID NO: 175914 - RNA, 32 nt, Homo Sapiens
uuguuuuggggcuguauuuuugaaauacucua

SEQ ID NO: 175915 - RNA, 29 nt, Homo Sapiens
ugcagaugagguuuauaucucauuuuagc

SEQ ID NO: 175916 - RNA, 32 nt, Homo Sapiens
uuuugauuggcugaaauugacaggaguaucua

SEQ ID NO: 175917 - RNA, 32 nt, Homo Sapiens
gacccgcgucccuccgucccgagcccgcgcgc

SEQ ID NO: 175918 - RNA, 32 nt, Homo Sapiens
ccgagccgagccguggcuuuccggaugaucgg

SEQ ID NO: 175919 - RNA, 32 nt, Homo Sapiens
uggauggcccggccccggggcccguacacagg

SEQ ID NO: 175920 - RNA, 32 nt, Homo Sapiens
ugggguggcagacacgcagaagugcuacuagu

SEQ ID NO: 175921 - RNA, 32 nt, Homo Sapiens
guggucuucucugccgucuacauccuccugug

SEQ ID NO: 175922 - RNA, 32 nt, Homo Sapiens
uacccguuagacaaggauauuuuacuucuucc

SEQ ID NO: 175923 - RNA, 32 nt, Homo Sapiens
agccuagaucccucgcaugcacaguucauagu

SEQ ID NO: 175924 - RNA, 32 nt, Homo Sapiens
aagaaggaacacagaggagaacaaagaaaauu

SEQ ID NO: 175925 - RNA, 32 nt, Homo Sapiens
accagcccgcugagcaggcugccacccccgau

SEQ ID NO: 175926 - RNA, 32 nt, Homo Sapiens
uuauugugguauauaauccuggauuaaaguca

SEQ ID NO: 175927 - RNA, 32 nt, Homo Sapiens
uauuacagagaauuauuuucugagauaaucuu

SEQ ID NO: 175928 - RNA, 32 nt, Homo Sapiens
uuguaaaaauuaacugcuaacuucuauugacc

SEQ ID NO: 175929 - RNA, 32 nt, Homo Sapiens
uggagcucagaauuccacugucaagaaagagc

SEQ ID NO: 175930 - RNA, 27 nt, Homo Sapiens
caauucucuugcuucagccucccaagu

SEQ ID NO: 175931 - RNA, 29 nt, Homo Sapiens
aaaggugugacuugccuuauugaaaugau

SEQ ID NO: 175932 - RNA, 32 nt, Homo Sapiens
ggaguucaaugaggacuuucaguucuuugcuu

SEQ ID NO: 175933 - RNA, 32 nt, Homo Sapiens
cuacggacgcuuuuccuccccuguccccacuc

SEQ ID NO: 175934 - RNA, 32 nt, Homo Sapiens
uucaagcuguuauauuaguuguaaccaguagu

SEQ ID NO: 175935 - RNA, 32 nt, Homo Sapiens
aaugucaguuucuucagauuugugaugaagcu

SEQ ID NO: 175936 - RNA, 31 nt, Homo Sapiens
gcucuggagccccugaaggccaagcuuguca

SEQ ID NO: 175937 - RNA, 32 nt, Homo Sapiens
uuuuuggccauuuuuucuucaucaauuuuuuu

SEQ ID NO: 175938 - RNA, 32 nt, Homo Sapiens
cagaaaagacacaggagagccuguggauuccu

SEQ ID NO: 175939 - RNA, 30 nt, Homo Sapiens
uuccagccagcucccacccaucuuuucuug

SEQ ID NO: 175940 - RNA, 32 nt, Homo Sapiens
gccggggccuagagccagccgcggccgcgcag

SEQ ID NO: 175941 - RNA, 32 nt, Homo Sapiens
uccagaagggaagggaguggagcaggcaguga

SEQ ID NO: 175942 - RNA, 32 nt, Homo Sapiens
uaggauguaauuuuaaugcuucccugcagucc

SEQ ID NO: 175943 - RNA, 32 nt, Homo Sapiens
accacaccuggaagauucuucuucccuuugaa

SEQ ID NO: 175944 - RNA, 32 nt, Homo Sapiens
ccccuucgaggccccaggggucuccaccccag

SEQ ID NO: 175945 - RNA, 32 nt, Homo Sapiens
ccucgguucccuccccgauggucuaccucgaa

SEQ ID NO: 175946 - RNA, 32 nt, Homo Sapiens
ugugccgggaggggcccccaccccuccuuuuu

SEQ ID NO: 175947 - RNA, 32 nt, Homo Sapiens
guccgcccgcggcguugggcgcgcucgccagc

SEQ ID NO: 175948 - RNA, 32 nt, Homo Sapiens
aggauugaauuauuuugaaaucuccugucuuu

SEQ ID NO: 175949 - RNA, 32 nt, Homo Sapiens
cacgucuucuugcugcagccugccccuagaca

SEQ ID NO: 175950 - RNA, 32 nt, Homo Sapiens
aagguaaagcuaccugaggcagugcgcuggag

SEQ ID NO: 175951 - RNA, 32 nt, Homo Sapiens
cucacauacauauauuaauaccucugacucau

SEQ ID NO: 175952 - RNA, 32 nt, Homo Sapiens
uuacuuuuuguaguuauugucaugcucuuuag

SEQ ID NO: 175953 - RNA, 27 nt, Homo Sapiens
ccaugaauggugccggcccuggccccg

SEQ ID NO: 175954 - RNA, 32 nt, Homo Sapiens
cgcggaggucgcgggcggggguccucaggcgg

SEQ ID NO: 175955 - RNA, 32 nt, Homo Sapiens
uauauugcauuucuaaaaaacaucuaccaagg

SEQ ID NO: 175956 - RNA, 32 nt, Homo Sapiens
aucaguacgauacgaagaaaauacaaagagag

SEQ ID NO: 175957 - RNA, 32 nt, Homo Sapiens
caacacucugcaaauaggauguguguggcggg

SEQ ID NO: 175958 - RNA, 27 nt, Homo Sapiens
ucccagccccugcucagccccucccag

SEQ ID NO: 175959 - RNA, 32 nt, Homo Sapiens
ugcaugcaugugcgaguguguacgugugugaa

SEQ ID NO: 175960 - RNA, 32 nt, Homo Sapiens
cacuaacuggguuuaaauuuugacugaugugg

SEQ ID NO: 175961 - RNA, 32 nt, Homo Sapiens
ccguggccccucggccuucucucugcuagagu

SEQ ID NO: 175962 - RNA, 32 nt, Homo Sapiens
auuucugaugugcugcucuuaugugaggacca

SEQ ID NO: 175963 - RNA, 32 nt, Homo Sapiens
uagguaauuacauuagugucaagauaugccau

SEQ ID NO: 175964 - RNA, 32 nt, Homo Sapiens
aagcgauccuccccgcucagccuccugaguag

SEQ ID NO: 175965 - RNA, 32 nt, Homo Sapiens
ggccuccccacuuuuccuggccagagcugggc

SEQ ID NO: 175966 - RNA, 32 nt, Homo Sapiens
gcuaccuuugcugggaucccccuccuccaucc

SEQ ID NO: 175967 - RNA, 32 nt, Homo Sapiens
guuauagaacaaaacgugggcggcauaaagug

SEQ ID NO: 175968 - RNA, 32 nt, Homo Sapiens
agaucccuuguaccuccaaaguacaaauaccu

SEQ ID NO: 175969 - RNA, 32 nt, Homo Sapiens
ugguccacgccagccgcagaccguggcugagc

SEQ ID NO: 175970 - RNA, 32 nt, Homo Sapiens
uuuauuuugguccaaugagucccauucuuuau

SEQ ID NO: 175971 - RNA, 32 nt, Homo Sapiens
aaaauauaaguaaaaagagagaaggcacucuu

SEQ ID NO: 175972 - RNA, 32 nt, Homo Sapiens
agaaccugauugcugagcuagcagaagagaag

SEQ ID NO: 175973 - RNA, 32 nt, Homo Sapiens
agcaggucugaauugaccaaaugcuuaucuac

SEQ ID NO: 175974 - RNA, 32 nt, Homo Sapiens
aaucagugaaauaaauauuuucauuaaucccu

SEQ ID NO: 175975 - RNA, 32 nt, Homo Sapiens
aaguguuugggaggcuuuuucuuauuaaaggu

SEQ ID NO: 175976 - RNA, 32 nt, Homo Sapiens
ccccuccgcccggcagccgccccgucugagaa

SEQ ID NO: 175977 - RNA, 32 nt, Homo Sapiens
cuaaaaauuuauaucuuaaaagaucaaaacau

SEQ ID NO: 175978 - RNA, 31 nt, Homo Sapiens
ggcaggaugaggugcugcaggcacgggccca

SEQ ID NO: 175979 - RNA, 32 nt, Homo Sapiens
aagccagggaaaucuaagugcaacccuaccac

SEQ ID NO: 175980 - RNA, 32 nt, Homo Sapiens
caucuuccggugccuuucacccaaguucgggc

SEQ ID NO: 175981 - RNA, 32 nt, Homo Sapiens
gugagaguuuuaaagguuaaucaaaauuucuc

SEQ ID NO: 175982 - RNA, 32 nt, Homo Sapiens
ccucucccuaaaauguaagcuucucaacaaca

SEQ ID NO: 175983 - RNA, 32 nt, Homo Sapiens
uccucuuuuuucuguuagauuguagcuccuug

SEQ ID NO: 175984 - RNA, 32 nt, Homo Sapiens
uaugcauugguuuaucaauuuacuuguuuauu

SEQ ID NO: 175985 - RNA, 32 nt, Homo Sapiens
acaguuagacugugaaccugcagaccacucca

SEQ ID NO: 175986 - RNA, 32 nt, Homo Sapiens
ggggcucagggugaggguugccuauuguguuc

SEQ ID NO: 175987 - RNA, 32 nt, Homo Sapiens
cucccucccugucucucuggcucucauauaga

SEQ ID NO: 175988 - RNA, 32 nt, Homo Sapiens
ggacugaauagaagcccaaauucauauaaaag

SEQ ID NO: 175989 - RNA, 32 nt, Homo Sapiens
acuucagugucagcgcgcggcggccguggcug

SEQ ID NO: 175990 - RNA, 32 nt, Homo Sapiens
uggacuaggaguuuaagcaggacagugugcgu

SEQ ID NO: 175991 - RNA, 32 nt, Homo Sapiens
uuggaggaucagagggaggggaggcagccaag

SEQ ID NO: 175992 - RNA, 32 nt, Homo Sapiens
aggugaaaguacugaggaagaguugcugagaa

SEQ ID NO: 175993 - RNA, 32 nt, Homo Sapiens
cuaaaaugaugaaauauuuuauguagacauua

SEQ ID NO: 175994 - RNA, 32 nt, Homo Sapiens
uccguguucguaacagaagggaggggaaagcg

SEQ ID NO: 175995 - RNA, 32 nt, Homo Sapiens
auaaauuugguauuucuuaacauauuaucuug

SEQ ID NO: 175996 - RNA, 32 nt, Homo Sapiens
ucauggugguuauguuuugucuauucuuuugc

SEQ ID NO: 175997 - RNA, 32 nt, Homo Sapiens
gggcccucagcacuuuguguuuugacccccag

SEQ ID NO: 175998 - RNA, 32 nt, Homo Sapiens
gucuuaugaacuucagcugcaauggaaagaau

SEQ ID NO: 175999 - RNA, 32 nt, Homo Sapiens
acuaaagaaaagggcugggugcgguggcccac

SEQ ID NO: 176000 - RNA, 32 nt, Homo Sapiens
ucugguucuugcugaccuuguugcccugcaaa

SEQ ID NO: 176001 - RNA, 32 nt, Homo Sapiens
uuuuguuuuuaaaugucuugcugaucuaguuc

SEQ ID NO: 176002 - RNA, 32 nt, Homo Sapiens
ggaaagcgcggacgugcugggcggcugugcuu

SEQ ID NO: 176003 - RNA, 32 nt, Homo Sapiens
ccacaggagguggucugggacucucuugauua

SEQ ID NO: 176004 - RNA, 32 nt, Homo Sapiens
uucaucgccgccgugcgccgccgagacuucgc

SEQ ID NO: 176005 - RNA, 31 nt, Homo Sapiens
ccuugguucucaguauuaucauucuuuauug

SEQ ID NO: 176006 - RNA, 32 nt, Homo Sapiens
cagcagccaggcagacauaacaacaaacuacu

SEQ ID NO: 176007 - RNA, 32 nt, Homo Sapiens
ucccccuaacuguggcccuacaaaucccuagg

SEQ ID NO: 176008 - RNA, 32 nt, Homo Sapiens
uccuuuuccccucuucuacccuccccaagaaa

SEQ ID NO: 176009 - RNA, 32 nt, Homo Sapiens
auuccugaacaaauuuuagaaaaaguuagcau

SEQ ID NO: 176010 - RNA, 32 nt, Homo Sapiens
uggauuaugaacaaaugaaaguuugcugugug

SEQ ID NO: 176011 - RNA, 32 nt, Homo Sapiens
ucaccggccuggggaaggcggggggugcccaa

SEQ ID NO: 176012 - RNA, 32 nt, Homo Sapiens
acucuuaauuuaauuuucuuucugagcuggag

SEQ ID NO: 176013 - RNA, 32 nt, Homo Sapiens
acacgggccccuacaaggggccccuacaagcg

SEQ ID NO: 176014 - RNA, 32 nt, Homo Sapiens
cucucccugcugguuuccuguugggcuuugga

SEQ ID NO: 176015 - RNA, 32 nt, Homo Sapiens
ucuaccacaauuuaugaacuggacuuuauaca

SEQ ID NO: 176016 - RNA, 32 nt, Homo Sapiens
cuugaagagaugguuuugcugcucuccuugag

SEQ ID NO: 176017 - RNA, 32 nt, Homo Sapiens
ggucgggcgugguggcucaugccuguaauccc

SEQ ID NO: 176018 - RNA, 32 nt, Homo Sapiens
uccaaagaaaaguuucaagaaaugcuuuuuga

SEQ ID NO: 176019 - RNA, 32 nt, Homo Sapiens
ccaggagcucccggcuucgggagcauccuucc

SEQ ID NO: 176020 - RNA, 32 nt, Homo Sapiens
uuuggcagcugagaaugcccaaaaagugccag

SEQ ID NO: 176021 - RNA, 32 nt, Homo Sapiens
gggaggguaugcgucagaaaagaaaugacagg

SEQ ID NO: 176022 - RNA, 32 nt, Homo Sapiens
uucacguuuacauuuuaauuauuacaaguugc

SEQ ID NO: 176023 - RNA, 32 nt, Homo Sapiens
ggggugauuucccccauauuugucucauggua

SEQ ID NO: 176024 - RNA, 32 nt, Homo Sapiens
gaaugaccgcccagagcuuucagcugcgugga

SEQ ID NO: 176025 - RNA, 32 nt, Homo Sapiens
gaaaaagguccaaugucuucuugaucuucuuc

SEQ ID NO: 176026 - RNA, 32 nt, Homo Sapiens
acaagaauuggaagacaugaggaaagcugguc

SEQ ID NO: 176027 - RNA, 32 nt, Homo Sapiens
gagaacccauuggcuccagcacgacgccgucu

SEQ ID NO: 176028 - RNA, 32 nt, Homo Sapiens
cccccucgagugccggccugggccugccaggc

SEQ ID NO: 176029 - RNA, 32 nt, Homo Sapiens
cugcggcgggacccgggcacuggcacccggga

SEQ ID NO: 176030 - RNA, 32 nt, Homo Sapiens
ugucagggaccagggcaaaaccaagagcuguu

SEQ ID NO: 176031 - RNA, 32 nt, Homo Sapiens
cuucacaaagggacguaacgcaaguacugcgg

SEQ ID NO: 176032 - RNA, 32 nt, Homo Sapiens
cagcaccaaagguuccucuccucaccccacau

SEQ ID NO: 176033 - RNA, 32 nt, Homo Sapiens
cucuggagcugagcaaacccccugcccaggcu

SEQ ID NO: 176034 - RNA, 32 nt, Homo Sapiens
cucuaggagguagucacugagcuggaccuuaa

SEQ ID NO: 176035 - RNA, 32 nt, Homo Sapiens
cuugagccgggcgagcgcugugggccaagcag

SEQ ID NO: 176036 - RNA, 32 nt, Homo Sapiens
acacacaugagcaccuguauguguuaaugaau

SEQ ID NO: 176037 - RNA, 32 nt, Homo Sapiens
gccagccaggggcauggacagagccuuuuucu

SEQ ID NO: 176038 - RNA, 32 nt, Homo Sapiens
ccggggaaagggagacccccacccucccuuuc

SEQ ID NO: 176039 - RNA, 32 nt, Homo Sapiens
uucugggcccacgaggcagcugucccaugcuc

SEQ ID NO: 176040 - RNA, 32 nt, Homo Sapiens
caaaaauacaauagagaagauacaugagggcu

SEQ ID NO: 176041 - RNA, 32 nt, Homo Sapiens
cgaggaguagccaggcaucuacugcagaugaa

SEQ ID NO: 176042 - RNA, 32 nt, Homo Sapiens
auuugaaaauucucucauuuuacaaugcacuu

SEQ ID NO: 176043 - RNA, 32 nt, Homo Sapiens
aggcauaaccaccucaaucaccucauaccaaa

SEQ ID NO: 176044 - RNA, 32 nt, Homo Sapiens
ucucucucucuuuuuuuuuuuaagaucuuuuu

SEQ ID NO: 176045 - RNA, 32 nt, Homo Sapiens
aaguucccugaaccuuccugucucccagggac

SEQ ID NO: 176046 - RNA, 32 nt, Homo Sapiens
ugggagguggagguuguggugaggcgagauag

SEQ ID NO: 176047 - RNA, 32 nt, Homo Sapiens
uuguugcuucuuauuuuugucuguuaggaaua

SEQ ID NO: 176048 - RNA, 32 nt, Homo Sapiens
augcucagaagaaaagugaauaauucagucau

SEQ ID NO: 176049 - RNA, 32 nt, Homo Sapiens
uccaaggcauugagacuaucuagaagcaaaaa

SEQ ID NO: 176050 - RNA, 32 nt, Homo Sapiens
uccugcuuauuucucaaaaaagagggacagug

SEQ ID NO: 176051 - RNA, 32 nt, Homo Sapiens
guuccuugggucuauuuuuuuaucuuugcacc

SEQ ID NO: 176052 - RNA, 32 nt, Homo Sapiens
ggaacuauauauaagcuagcacaugauuaucc

SEQ ID NO: 176053 - RNA, 32 nt, Homo Sapiens
agaaauaggaauaaguuucauauacuaauuau

SEQ ID NO: 176054 - RNA, 32 nt, Homo Sapiens
acggucugggccgccgaaucuccggccgaaga

SEQ ID NO: 176055 - RNA, 32 nt, Homo Sapiens
uagccccaagcucauggaugacaaaucucugc

SEQ ID NO: 176056 - RNA, 32 nt, Homo Sapiens
aacaaaagaacaagguuugccaggauguccga

SEQ ID NO: 176057 - RNA, 32 nt, Homo Sapiens
auugcuguggaaccucuuuuggaggacguuaa

SEQ ID NO: 176058 - RNA, 32 nt, Homo Sapiens
gcccgcggugauggugguuagcaagaugaaca

SEQ ID NO: 176059 - RNA, 29 nt, Homo Sapiens
guuuuguggggcauauauuuuuugagacc

SEQ ID NO: 176060 - RNA, 32 nt, Homo Sapiens
uuaauugcuuuuuuauuuuucuuauugauuga

SEQ ID NO: 176061 - RNA, 32 nt, Homo Sapiens
auuggcucccuugcuguccccagcuguucccc

SEQ ID NO: 176062 - RNA, 32 nt, Homo Sapiens
gagcuaaaauguuuauugcuguuuugucuuuc

SEQ ID NO: 176063 - RNA, 32 nt, Homo Sapiens
cagcugccuucggcgccgccagccccgccaug

SEQ ID NO: 176064 - RNA, 32 nt, Homo Sapiens
caccugggucaacucuuuuaauuuauauacaa

SEQ ID NO: 176065 - RNA, 32 nt, Homo Sapiens
ccauuucuccccacccuggggcucuucugugg

SEQ ID NO: 176066 - RNA, 32 nt, Homo Sapiens
augcugcuccacgagagccaucuuccccagug

SEQ ID NO: 176067 - RNA, 32 nt, Homo Sapiens
uguuuuuugacaaaucauauuguauucuuuug

SEQ ID NO: 176068 - RNA, 32 nt, Homo Sapiens
auucugucguaaagugaugcuauguugucguu

SEQ ID NO: 176069 - RNA, 32 nt, Homo Sapiens
uugggagugcagccuucucggcacuggagugu

SEQ ID NO: 176070 - RNA, 32 nt, Homo Sapiens
uuaauagccaauuauguccuaauuguauuuug

SEQ ID NO: 176071 - RNA, 32 nt, Homo Sapiens
acuauuuauuuuugucuuaauaaaaugaacaa

SEQ ID NO: 176072 - RNA, 32 nt, Homo Sapiens
gauguagucauuccucauuuuauacacauauc

SEQ ID NO: 176073 - RNA, 32 nt, Homo Sapiens
ccccaaacacugggaugcucuccacugcugug

SEQ ID NO: 176074 - RNA, 32 nt, Homo Sapiens
gccccgaggaggaggguggguggguccuugug

SEQ ID NO: 176075 - RNA, 32 nt, Homo Sapiens
auggcaguguggauggauagggacagaugucc

SEQ ID NO: 176076 - RNA, 32 nt, Homo Sapiens
caggagcagaagggcuguguggcuucagaguc

SEQ ID NO: 176077 - RNA, 32 nt, Homo Sapiens
ggcggccagcccucccagcaguggcuugcuuu

SEQ ID NO: 176078 - RNA, 32 nt, Homo Sapiens
uggguucagcagaugccuccucugccccccug

SEQ ID NO: 176079 - RNA, 32 nt, Homo Sapiens
cccucaucccagaagaggcaucuccauauccc

SEQ ID NO: 176080 - RNA, 32 nt, Homo Sapiens
aguuuaaacaauuuauuaaaaauuuuccaucu

SEQ ID NO: 176081 - RNA, 32 nt, Homo Sapiens
uagcauauccccacccuccacccacuaccucc

SEQ ID NO: 176082 - RNA, 32 nt, Homo Sapiens
ugcuacugguguccuuucuccucagucacaag

SEQ ID NO: 176083 - RNA, 32 nt, Homo Sapiens
gcaaagguuggaggugucuugagugcacuguu

SEQ ID NO: 176084 - RNA, 27 nt, Homo Sapiens
cgauggguaacgccagcuuuggcucca

SEQ ID NO: 176085 - RNA, 32 nt, Homo Sapiens
ggaucuauggauuuuucguguugaugcugcug

SEQ ID NO: 176086 - RNA, 32 nt, Homo Sapiens
caaauauauauuucacaauauuacaaagauaa

SEQ ID NO: 176087 - RNA, 32 nt, Homo Sapiens
ggggcuagggguggaggccaggguuccaagga

SEQ ID NO: 176088 - RNA, 32 nt, Homo Sapiens
uacaccacuuuagacccuauguguagcagguc

SEQ ID NO: 176089 - RNA, 32 nt, Homo Sapiens
gucccccgcgccccgcuuuguagccccccggc

SEQ ID NO: 176090 - RNA, 32 nt, Homo Sapiens
gguccccagcuccgcguaaacugcacgauuuc

SEQ ID NO: 176091 - RNA, 32 nt, Homo Sapiens
ugcugggaggccagguucccaccucaccaccc

SEQ ID NO: 176092 - RNA, 32 nt, Homo Sapiens
uuguaauucacauccacaacccuaagccuuuu

SEQ ID NO: 176093 - RNA, 31 nt, Homo Sapiens
ggcaggaagcagcaccugccccccgcgccag

SEQ ID NO: 176094 - RNA, 32 nt, Homo Sapiens
uuuacucacugcccacuucucaucucugucug

SEQ ID NO: 176095 - RNA, 32 nt, Homo Sapiens
cuccagcccuccccugcccagauagcuggugg

SEQ ID NO: 176096 - RNA, 32 nt, Homo Sapiens
ccuccuaccggggcucucuguuugcugugaca

SEQ ID NO: 176097 - RNA, 32 nt, Homo Sapiens
agaggggagggagaguuugcggccacacacaa

SEQ ID NO: 176098 - RNA, 32 nt, Homo Sapiens
ucaaacaucauucauagaaagcauauuacaua

SEQ ID NO: 176099 - RNA, 32 nt, Homo Sapiens
uaacuuuacuaaguaaucucacagcauuugcc

SEQ ID NO: 176100 - RNA, 32 nt, Homo Sapiens
uccgcggcguucggggaaauggcugcgagacc

SEQ ID NO: 176101 - RNA, 31 nt, Homo Sapiens
auccugaaauaaaaaaggauaaugcaauaaa

SEQ ID NO: 176102 - RNA, 32 nt, Homo Sapiens
uucagguaugugggaagcucugaggagguuca

SEQ ID NO: 176103 - RNA, 32 nt, Homo Sapiens
cccagaaagugcccucuccgcgggggucugcg

SEQ ID NO: 176104 - RNA, 32 nt, Homo Sapiens
gcuuccuuuauaggcggacaguucuugccaua

SEQ ID NO: 176105 - RNA, 32 nt, Homo Sapiens
gggggccgcgucuucggcaaagucuucggggu

SEQ ID NO: 176106 - RNA, 32 nt, Homo Sapiens
uguuuuuguuuuuuauuucuguugagauauag

SEQ ID NO: 176107 - RNA, 31 nt, Homo Sapiens
aaaguucucaaaaugagaaggcagaaaugaa

SEQ ID NO: 176108 - RNA, 32 nt, Homo Sapiens
gaggggcggggcggugccggcaagauggcugc

SEQ ID NO: 176109 - RNA, 32 nt, Homo Sapiens
gacucuuaggaaaaugggugggacaucugugu

SEQ ID NO: 176110 - RNA, 32 nt, Homo Sapiens
accagcaccccgcccagagcagugccgcugcc

SEQ ID NO: 176111 - RNA, 31 nt, Homo Sapiens
ugccauggaaguucagggccauagacugccc

SEQ ID NO: 176112 - RNA, 32 nt, Homo Sapiens
cgcugcgcgggagaggccagcagagggcgcca

SEQ ID NO: 176113 - RNA, 28 nt, Homo Sapiens
accagauguagcuacaggaugaugaaac

SEQ ID NO: 176114 - RNA, 32 nt, Homo Sapiens
ccccgugcugcagcuggagcagaggagcucac

SEQ ID NO: 176115 - RNA, 32 nt, Homo Sapiens
aauguguaguaucuuuuauuuuagucauauuc

SEQ ID NO: 176116 - RNA, 32 nt, Homo Sapiens
cacgccuggccaauuuuguauuuuaguagaga

SEQ ID NO: 176117 - RNA, 32 nt, Homo Sapiens
uuuugugccugcccucccucuuggggaggcca

SEQ ID NO: 176118 - RNA, 32 nt, Homo Sapiens
cuuuugaaguagaugguaaaauuuuugucauc

SEQ ID NO: 176119 - RNA, 32 nt, Homo Sapiens
cuugagcuccccaaaaaccucacccgaggcug

SEQ ID NO: 176120 - RNA, 32 nt, Homo Sapiens
cugcuacucccacuucccaacuccagggaaug

SEQ ID NO: 176121 - RNA, 32 nt, Homo Sapiens
ggcguguggcagccacacacaggcggccaggg

SEQ ID NO: 176122 - RNA, 32 nt, Homo Sapiens
agagugcaucugcucugggggacccaucgcuc

SEQ ID NO: 176123 - RNA, 32 nt, Homo Sapiens
gggugaccuuggauucuggccacagugacuua

SEQ ID NO: 176124 - RNA, 32 nt, Homo Sapiens
uugagacuaugaaagacucauugucuuuguau

SEQ ID NO: 176125 - RNA, 32 nt, Homo Sapiens
cuaacaauuacaugauuugaaaacaguacuca

SEQ ID NO: 176126 - RNA, 32 nt, Homo Sapiens
auggcuuuuacagauagguuaaugacaauugu

SEQ ID NO: 176127 - RNA, 32 nt, Homo Sapiens
cacacagcuuuucaagcauauuucauacagug

SEQ ID NO: 176128 - RNA, 30 nt, Homo Sapiens
caagagaggaaggagaagggucccgugaac

SEQ ID NO: 176129 - RNA, 32 nt, Homo Sapiens
uugcagauauauauuuuuagauuuuuaaauac

SEQ ID NO: 176130 - RNA, 32 nt, Homo Sapiens
uaucuucgguguucuuuuccucucuucuucuu

SEQ ID NO: 176131 - RNA, 32 nt, Homo Sapiens
guguaggccaucuccucugugcccucuggagg

SEQ ID NO: 176132 - RNA, 32 nt, Homo Sapiens
ggagaggaggggcucuggcugcugugugggga

SEQ ID NO: 176133 - RNA, 32 nt, Homo Sapiens
guaacacacacacacauacacacacacacaca

SEQ ID NO: 176134 - RNA, 32 nt, Homo Sapiens
ccagaacauauuuucuguucaaugcaaauaaa

SEQ ID NO: 176135 - RNA, 32 nt, Homo Sapiens
ugaucugagcagagagcuuucagugacccauu

SEQ ID NO: 176136 - RNA, 32 nt, Homo Sapiens
uauaucuagcauuugcaaaggcgacaauaaau

SEQ ID NO: 176137 - RNA, 32 nt, Homo Sapiens
ccugucuccuuggaccucuuugauucuguggu

SEQ ID NO: 176138 - RNA, 32 nt, Homo Sapiens
accaaagucagggagccuggaagccaaacaaa

SEQ ID NO: 176139 - RNA, 32 nt, Homo Sapiens
gucuagcuuaaugacucuaaaccccgucucua

SEQ ID NO: 176140 - RNA, 32 nt, Homo Sapiens
gagcccugagcugcaauggcccgggccugcag

SEQ ID NO: 176141 - RNA, 32 nt, Homo Sapiens
uccuugugucaagcuuccugugauggaaagcg

SEQ ID NO: 176142 - RNA, 32 nt, Homo Sapiens
ggugauuucucacccucuguccuucccccagc

SEQ ID NO: 176143 - RNA, 32 nt, Homo Sapiens
uucaaagagaauaaacacuauuucccuugccu

SEQ ID NO: 176144 - RNA, 32 nt, Homo Sapiens
gccgccgagcagagccgagccgaguccgcccg

SEQ ID NO: 176145 - RNA, 32 nt, Homo Sapiens
ugcaugagcuacgccugccuccccugugcagu

SEQ ID NO: 176146 - RNA, 32 nt, Homo Sapiens
uauccaauuggaaaauaagaugcaguguugua

SEQ ID NO: 176147 - RNA, 32 nt, Homo Sapiens
cuuaacaucuguguuccucaguuucucauggg

SEQ ID NO: 176148 - RNA, 32 nt, Homo Sapiens
ggccagagacuucaagucuaucugaaaagucu

SEQ ID NO: 176149 - RNA, 32 nt, Homo Sapiens
gaggacggccccaggcauugcucugccccggg

SEQ ID NO: 176150 - RNA, 32 nt, Homo Sapiens
cgcccaccuccccuccuccccgcgccgggcau

SEQ ID NO: 176151 - RNA, 32 nt, Homo Sapiens
ucuauauauaucuauaucguauagcuuauagc

SEQ ID NO: 176152 - RNA, 32 nt, Homo Sapiens
guucuucgcugcccguggccgccccgucggag

SEQ ID NO: 176153 - RNA, 32 nt, Homo Sapiens
gcggggcuccauguuuuccccuggccaggagg

SEQ ID NO: 176154 - RNA, 32 nt, Homo Sapiens
ugagucaaaaggaaaaauuuagcuaacacagg

SEQ ID NO: 176155 - RNA, 32 nt, Homo Sapiens
uagcuuccucaauagauugcauguugcuuauu

SEQ ID NO: 176156 - RNA, 32 nt, Homo Sapiens
uuuaaacuaggcauaaacagccaggcauggug

SEQ ID NO: 176157 - RNA, 32 nt, Homo Sapiens
gauucuuuucucccccauuaugccccuauaua

SEQ ID NO: 176158 - RNA, 32 nt, Homo Sapiens
ccagagagccuggugcugcugcugcuguggcg

SEQ ID NO: 176159 - RNA, 32 nt, Homo Sapiens
acucauccuggauuucuaacucuucuuccucg

SEQ ID NO: 176160 - RNA, 32 nt, Homo Sapiens
gaaugcauuuaaaaauauuuucuaugugagaa

SEQ ID NO: 176161 - RNA, 29 nt, Homo Sapiens
gcgugaaggggacaggggacgguagaaac

SEQ ID NO: 176162 - RNA, 32 nt, Homo Sapiens
agcugccuccaaguucucuugagauauuggua

SEQ ID NO: 176163 - RNA, 32 nt, Homo Sapiens
uugcuuugacuucuaaauguuucugcuuccca

SEQ ID NO: 176164 - RNA, 32 nt, Homo Sapiens
uacuuaggcaacacaagaauauuucacuuaga

SEQ ID NO: 176165 - RNA, 32 nt, Homo Sapiens
gggagggaggugguccuccuaucucccuggcu

SEQ ID NO: 176166 - RNA, 32 nt, Homo Sapiens
caccuguuugucuuaagcuauaguguaaaaac

SEQ ID NO: 176167 - RNA, 32 nt, Homo Sapiens
gcaguuuugcaaacagaacacaaccacaauga

SEQ ID NO: 176168 - RNA, 32 nt, Homo Sapiens
ucauagcuagauaagaucuuuuccaaaguuuu

SEQ ID NO: 176169 - RNA, 32 nt, Homo Sapiens
ucagcauccaugaguuuuuggccacgugccaa

SEQ ID NO: 176170 - RNA, 32 nt, Homo Sapiens
guggccuccacuccgggaaagcccucugccca

SEQ ID NO: 176171 - RNA, 32 nt, Homo Sapiens
gcaccuccacgcugccugcgccccgcgccgca

SEQ ID NO: 176172 - RNA, 32 nt, Homo Sapiens
cuccccucuuacugccuguggggagacaggca

SEQ ID NO: 176173 - RNA, 32 nt, Homo Sapiens
acaaggauucccuuucuuccauuuuccaauaa

SEQ ID NO: 176174 - RNA, 32 nt, Homo Sapiens
cgcccccgggguucuccgaugggggagaagcg

SEQ ID NO: 176175 - RNA, 32 nt, Homo Sapiens
accuuccacucuucuuauucucccuaauagcc

SEQ ID NO: 176176 - RNA, 32 nt, Homo Sapiens
cccaccccgcgcgcccgagcagggcgacuguc

SEQ ID NO: 176177 - RNA, 32 nt, Homo Sapiens
ucuaccauguaaggugauuucuuucuuuuugg

SEQ ID NO: 176178 - RNA, 32 nt, Homo Sapiens
auggauaaacugaccaucaucucaggaugucu

SEQ ID NO: 176179 - RNA, 32 nt, Homo Sapiens
guauacaacuaaugcauguuuuauugaauuuu

SEQ ID NO: 176180 - RNA, 32 nt, Homo Sapiens
cuggagaagaucuaggagcuguccaagugguu

SEQ ID NO: 176181 - RNA, 32 nt, Homo Sapiens
agagaaagagccgccgggcgcugccucgccag

SEQ ID NO: 176182 - RNA, 32 nt, Homo Sapiens
aaggccucagggguauugcugcugcccuccuc

SEQ ID NO: 176183 - RNA, 32 nt, Homo Sapiens
gccuaauuuuuguauuuuuagagggguggagu

SEQ ID NO: 176184 - RNA, 32 nt, Homo Sapiens
ucucuccgacgcaagacugucccggcccggau

SEQ ID NO: 176185 - RNA, 32 nt, Homo Sapiens
uaacuuuuauuuuagauucagggguauaugug

SEQ ID NO: 176186 - RNA, 32 nt, Homo Sapiens
aauauacaaaaauuaguuggguguuacggugc

SEQ ID NO: 176187 - RNA, 32 nt, Homo Sapiens
gagaaggaauccaccuucuuacgcuauggcag

SEQ ID NO: 176188 - RNA, 32 nt, Homo Sapiens
ccggcccuggagugcgggcgggggcgacaggg

SEQ ID NO: 176189 - RNA, 32 nt, Homo Sapiens
ucagagccuggcugcuggcggccgggagcgcc

SEQ ID NO: 176190 - RNA, 32 nt, Homo Sapiens
ucaaagcaucacuuccaccauacucuaacugu

SEQ ID NO: 176191 - RNA, 32 nt, Homo Sapiens
ucuuugguguaugcuuuguucuuuccaucuca

SEQ ID NO: 176192 - RNA, 32 nt, Homo Sapiens
gacggagagggugacgggggcugggaaggggc

SEQ ID NO: 176193 - RNA, 32 nt, Homo Sapiens
gagacacccugccuguuagcccugggagaccc

SEQ ID NO: 176194 - RNA, 32 nt, Homo Sapiens
agcggcuccgcggagcucgagcucggcgcgca

SEQ ID NO: 176195 - RNA, 32 nt, Homo Sapiens
uucuuuacucguccccuuucaucggugccugg

SEQ ID NO: 176196 - RNA, 32 nt, Homo Sapiens
cacgcccaccuuggaugggaaaagcaaccugg

SEQ ID NO: 176197 - RNA, 32 nt, Homo Sapiens
uuaagcccuacuuuguccucugcacaaagaug

SEQ ID NO: 176198 - RNA, 32 nt, Homo Sapiens
uuuaaaauuucuauuguugucuauugguaaug

SEQ ID NO: 176199 - RNA, 32 nt, Homo Sapiens
uguauugcauguuuucuuauuaauauauauua

SEQ ID NO: 176200 - RNA, 32 nt, Homo Sapiens
ccgcccugguggacuccucccgcuggaggcgg

SEQ ID NO: 176201 - RNA, 32 nt, Homo Sapiens
guauaggcccuuuuuucuuaaacccagggaua

SEQ ID NO: 176202 - RNA, 32 nt, Homo Sapiens
ugacaauuaugaaaaaauguucaaauucacgu

SEQ ID NO: 176203 - RNA, 32 nt, Homo Sapiens
ucucaugacaacagaagggagguggccgggcu

SEQ ID NO: 176204 - RNA, 32 nt, Homo Sapiens
acaucagccuccaugaggccaagccuuguacc

SEQ ID NO: 176205 - RNA, 32 nt, Homo Sapiens
uccuugccucaaguaauccauccaccuccacc

SEQ ID NO: 176206 - RNA, 32 nt, Homo Sapiens
ccgcuuauauuguacaauguuaaacuucaauu

SEQ ID NO: 176207 - RNA, 32 nt, Homo Sapiens
ugucagggccaaaacucaaaucuccugugaaa

SEQ ID NO: 176208 - RNA, 32 nt, Homo Sapiens
auauuuauuuccugcauugaaaauaguuuaau

SEQ ID NO: 176209 - RNA, 32 nt, Homo Sapiens
gucaaaauguguuuccccuuugaaaggagaag

SEQ ID NO: 176210 - RNA, 32 nt, Homo Sapiens
gggcgauuguuguucuuaauucuucuuauucc

SEQ ID NO: 176211 - RNA, 32 nt, Homo Sapiens
ccuucugcccgccccaucgaggaggccccucg

SEQ ID NO: 176212 - RNA, 32 nt, Homo Sapiens
acuuaaaagcuacuguuuggcaccgauacauu

SEQ ID NO: 176213 - RNA, 32 nt, Homo Sapiens
ugggagauauaguguauuaaugugcuaauggg

SEQ ID NO: 176214 - RNA, 32 nt, Homo Sapiens
gaccaccgcccccgcccuccccacccagcucc

SEQ ID NO: 176215 - RNA, 32 nt, Homo Sapiens
gggcggaggagacagggcuacugcaggcgcag

SEQ ID NO: 176216 - RNA, 32 nt, Homo Sapiens
aaagggagaaaguuuaaaauggaaacagccca

SEQ ID NO: 176217 - RNA, 32 nt, Homo Sapiens
gcaaacuugaguuacuuuugagcguggauacu

SEQ ID NO: 176218 - RNA, 32 nt, Homo Sapiens
guggaggccguccaaggcuuaccuguagaugc

SEQ ID NO: 176219 - RNA, 32 nt, Homo Sapiens
agcagauucuuuuccuucucacaaggggcuca

SEQ ID NO: 176220 - RNA, 32 nt, Homo Sapiens
accuaggaugacuucagugacuagaucagaga

SEQ ID NO: 176221 - RNA, 32 nt, Homo Sapiens
auugcuucuguuuggacaaaauccacaucuua

SEQ ID NO: 176222 - RNA, 32 nt, Homo Sapiens
ggcgcccggaaggacgcgcugcgaccccgugg

SEQ ID NO: 176223 - RNA, 32 nt, Homo Sapiens
agaugugaaauguaagaucaucugaaggagag

SEQ ID NO: 176224 - RNA, 32 nt, Homo Sapiens
cgccgacugcagagccgggaggcuggugguca

SEQ ID NO: 176225 - RNA, 32 nt, Homo Sapiens
acucuuuauuuuuucuguaaguaaguuugguu

SEQ ID NO: 176226 - RNA, 32 nt, Homo Sapiens
cgcgggggcaagagcgccggccuccgagacgg

SEQ ID NO: 176227 - RNA, 32 nt, Homo Sapiens
uccucaguuccugcagcagagccuggaagaca

SEQ ID NO: 176228 - RNA, 32 nt, Homo Sapiens
cgcagaaaacaucguguaaaaugucuuguuaa

SEQ ID NO: 176229 - RNA, 32 nt, Homo Sapiens
auuuaaucaggugauaagugguguaauguagc

SEQ ID NO: 176230 - RNA, 32 nt, Homo Sapiens
ccaucaagcauuaauugacauuagggucaauu

SEQ ID NO: 176231 - RNA, 32 nt, Homo Sapiens
accgagggcgaccuguggauccgcacguacgg

SEQ ID NO: 176232 - RNA, 32 nt, Homo Sapiens
cagcuguccccacgcccccgaccuccacuagg

SEQ ID NO: 176233 - RNA, 32 nt, Homo Sapiens
cuggccacacugggcuccgguccaaggcuaga

SEQ ID NO: 176234 - RNA, 32 nt, Homo Sapiens
ugcccucaagcucccaggauuuagguacccac

SEQ ID NO: 176235 - RNA, 32 nt, Homo Sapiens
ccaucuacuggaccgugagccaauuaaaccuc

SEQ ID NO: 176236 - RNA, 32 nt, Homo Sapiens
cccagucccucggccuggcccgcuaugcccug

SEQ ID NO: 176237 - RNA, 32 nt, Homo Sapiens
aggcuggaggggcucugugacucccauuaaug

SEQ ID NO: 176238 - RNA, 32 nt, Homo Sapiens
caccagcagaagccagcagagaggcaugggac

SEQ ID NO: 176239 - RNA, 32 nt, Homo Sapiens
ugcauuuaguguacaccagucuguaaacuuca

SEQ ID NO: 176240 - RNA, 32 nt, Homo Sapiens
gagggccaggcugaggggaggguagaggguga

SEQ ID NO: 176241 - RNA, 30 nt, Homo Sapiens
ccugaaggcaggcgagccagcugcccagga

SEQ ID NO: 176242 - RNA, 32 nt, Homo Sapiens
ccauuuggccucuggagggggcagaagaaaga

SEQ ID NO: 176243 - RNA, 32 nt, Homo Sapiens
aacacuugcucuucugugauuauugucaugua

SEQ ID NO: 176244 - RNA, 32 nt, Homo Sapiens
gccccagaugaccccagucacuccucucuagg

SEQ ID NO: 176245 - RNA, 32 nt, Homo Sapiens
aucugaggggcgcaggcccaccuucuagucgu

SEQ ID NO: 176246 - RNA, 32 nt, Homo Sapiens
aaauugggugagaggagauagguagcuccaua

SEQ ID NO: 176247 - RNA, 32 nt, Homo Sapiens
gcuagagcggcugaaaugguuguuuggugaug

SEQ ID NO: 176248 - RNA, 32 nt, Homo Sapiens
agagaacaaaccuagucugcaaggcaggaagg

SEQ ID NO: 176249 - RNA, 32 nt, Homo Sapiens
ccgugcugcaugcagaugagauguggcuggaa

SEQ ID NO: 176250 - RNA, 32 nt, Homo Sapiens
cccacccuggaaugccaaugucagcaucaagc

SEQ ID NO: 176251 - RNA, 32 nt, Homo Sapiens
aaaguucauagaguucccaugaacuauaugac

SEQ ID NO: 176252 - RNA, 32 nt, Homo Sapiens
gcuguuuugacaacuuggaccccggguccucu

SEQ ID NO: 176253 - RNA, 32 nt, Homo Sapiens
gcaaauuaauuggcagcagauuuuaggaaaug

SEQ ID NO: 176254 - RNA, 32 nt, Homo Sapiens
ucuauaggaagacaauggaaagcguguaauug

SEQ ID NO: 176255 - RNA, 32 nt, Homo Sapiens
ucucuccucccuccccaaacucacuuggcaua

SEQ ID NO: 176256 - RNA, 32 nt, Homo Sapiens
agaacggggagaugaaguuaugguggaguugg

SEQ ID NO: 176257 - RNA, 32 nt, Homo Sapiens
ccucaguggagucucauuuguuaguuuuuagu

SEQ ID NO: 176258 - RNA, 32 nt, Homo Sapiens
uugagauagcagaaguuucacacaucaaagua

SEQ ID NO: 176259 - RNA, 32 nt, Homo Sapiens
cagcaucccccggcugcccuagggccaggacc

SEQ ID NO: 176260 - RNA, 32 nt, Homo Sapiens
agcuugaacaaaugcagcaacggacggcugcu

SEQ ID NO: 176261 - RNA, 32 nt, Homo Sapiens
cuguguacauaacucuguaaaaacacugaaaa

SEQ ID NO: 176262 - RNA, 32 nt, Homo Sapiens
aaaauauucauauggggaauccugucaggugu

SEQ ID NO: 176263 - RNA, 32 nt, Homo Sapiens
auggaagguccuccccauccccaggcaccucu

SEQ ID NO: 176264 - RNA, 32 nt, Homo Sapiens
cagaaaauguaaaccugaguugacuagagugg

SEQ ID NO: 176265 - RNA, 32 nt, Homo Sapiens
gggcgucgcccgagacaggacggagucaaacc

SEQ ID NO: 176266 - RNA, 32 nt, Homo Sapiens
accuccugcuggcuccuccugcccagcuuccu

SEQ ID NO: 176267 - RNA, 32 nt, Homo Sapiens
aauaagauuuaguuguguuuucucagagccgc

SEQ ID NO: 176268 - RNA, 32 nt, Homo Sapiens
agucagcuaaaggagcugcgucugauucauau

SEQ ID NO: 176269 - RNA, 32 nt, Homo Sapiens
gccuaguuacugucuguaaauccaauacuugc

SEQ ID NO: 176270 - RNA, 32 nt, Homo Sapiens
ugaagaaggggagcugugagaacguggauugu

SEQ ID NO: 176271 - RNA, 31 nt, Homo Sapiens
cccccucauuugaugagcaaaugagcuacuu

SEQ ID NO: 176272 - RNA, 32 nt, Homo Sapiens
ggaaauucauccuuauaugcaagcauuuuguc

SEQ ID NO: 176273 - RNA, 32 nt, Homo Sapiens
aaaacauaaaaagccauuuuggagacagugag

SEQ ID NO: 176274 - RNA, 30 nt, Homo Sapiens
uccuguguaucccccuacaagaaugggcac

SEQ ID NO: 176275 - RNA, 32 nt, Homo Sapiens
uuaaggggcuugccaugguccaaauaugugag

SEQ ID NO: 176276 - RNA, 32 nt, Homo Sapiens
acccuacccaccccacaggaacgaugggaaaa

SEQ ID NO: 176277 - RNA, 32 nt, Homo Sapiens
uaaacaugagaauaaagauacuuuuuacuggg

SEQ ID NO: 176278 - RNA, 32 nt, Homo Sapiens
caccauggugagaggagaggccaccgcacgaa

SEQ ID NO: 176279 - RNA, 32 nt, Homo Sapiens
cauuuagccuguccugucaucaucauggccag

SEQ ID NO: 176280 - RNA, 32 nt, Homo Sapiens
agaggaucucaugguucugaugaugauuaucc

SEQ ID NO: 176281 - RNA, 32 nt, Homo Sapiens
uuuacaaacaauuguguuuucuuuauguuaau

SEQ ID NO: 176282 - RNA, 32 nt, Homo Sapiens
guaaugugccucaauccucuuuccaagcaggc

SEQ ID NO: 176283 - RNA, 32 nt, Homo Sapiens
cccuaguuuccucuccuccagcccagacccag

SEQ ID NO: 176284 - RNA, 32 nt, Homo Sapiens
accugcuuucugaggcuucugcucuucaccuc

SEQ ID NO: 176285 - RNA, 32 nt, Homo Sapiens
agaggggaccucugcagcagaugcuagggggg

SEQ ID NO: 176286 - RNA, 32 nt, Homo Sapiens
cauuuaaaaauauuuguuaucuucuuugccug

SEQ ID NO: 176287 - RNA, 32 nt, Homo Sapiens
gcaucugcgcaggcgcccggcuccuaagucua

SEQ ID NO: 176288 - RNA, 32 nt, Homo Sapiens
ucggcggcgaugucggccgccggugcccgagg

SEQ ID NO: 176289 - RNA, 32 nt, Homo Sapiens
ggagaaaaacgaagccaagagaauaugaaauu

SEQ ID NO: 176290 - RNA, 32 nt, Homo Sapiens
cuggcaccgcuggcgccgcggucucguagcgc

SEQ ID NO: 176291 - RNA, 32 nt, Homo Sapiens
ucucauccuucaucucuccugauuuucaaaca

SEQ ID NO: 176292 - RNA, 32 nt, Homo Sapiens
agguggcucuuacagcucucuggugccagcac

SEQ ID NO: 176293 - RNA, 32 nt, Homo Sapiens
cauccauccgcuugaggcauggcaccgcccug

SEQ ID NO: 176294 - RNA, 32 nt, Homo Sapiens
aggaguuacagaaaacuguuaaauagggaaga

SEQ ID NO: 176295 - RNA, 32 nt, Homo Sapiens
cgcgggugccgagaggucgccgggccacccgc

SEQ ID NO: 176296 - RNA, 32 nt, Homo Sapiens
ucuguuacaggucauucuuuuacuaggcuuag

SEQ ID NO: 176297 - RNA, 32 nt, Homo Sapiens
cucgggagcuggccggggaggggcggauggag

SEQ ID NO: 176298 - RNA, 32 nt, Homo Sapiens
gcucugcucggcuucagucuccaggagacagu

SEQ ID NO: 176299 - RNA, 32 nt, Homo Sapiens
gaggaggacguggggaggagcgugcccgacug

SEQ ID NO: 176300 - RNA, 32 nt, Homo Sapiens
agcagcauccguuuuguuuucucuucuuggga

SEQ ID NO: 176301 - RNA, 32 nt, Homo Sapiens
auuaucagccugccucggucucccaaaguguc

SEQ ID NO: 176302 - RNA, 32 nt, Homo Sapiens
gcgcggacucggcggggaucgcggcggaggcg

SEQ ID NO: 176303 - RNA, 32 nt, Homo Sapiens
agucuuaauguuugucucaucuacuacauggu

SEQ ID NO: 176304 - RNA, 32 nt, Homo Sapiens
uugauggauucccacgcuuccuggacacuggu

SEQ ID NO: 176305 - RNA, 32 nt, Homo Sapiens
cugcaaggagcuuggaaaagcaaguaucugga

SEQ ID NO: 176306 - RNA, 32 nt, Homo Sapiens
ccugagcccgcggcgcugagccagccgggacg

SEQ ID NO: 176307 - RNA, 32 nt, Homo Sapiens
aauaaaaacaauugaagaagacuguugccacu

SEQ ID NO: 176308 - RNA, 32 nt, Homo Sapiens
gugucagcguuuucuuuuuaaaauuuaauuga

SEQ ID NO: 176309 - RNA, 32 nt, Homo Sapiens
uaaacucguuuuuauuuugcacacuuuucuca

SEQ ID NO: 176310 - RNA, 32 nt, Homo Sapiens
caucuuuggccauaguaaaaaaugaucacccc

SEQ ID NO: 176311 - RNA, 32 nt, Homo Sapiens
gcuaccccuguacagcgugaaguuuccuaaga

SEQ ID NO: 176312 - RNA, 32 nt, Homo Sapiens
uccagaugguggcacgaggccuagcacacaag

SEQ ID NO: 176313 - RNA, 32 nt, Homo Sapiens
cuuuugcuuaagauuauguuuaaaugauagag

SEQ ID NO: 176314 - RNA, 32 nt, Homo Sapiens
gcaauuaaacaauaaacugauuuuauuuggga

SEQ ID NO: 176315 - RNA, 32 nt, Homo Sapiens
guauguauguguauauuaaauguauauaucca

SEQ ID NO: 176316 - RNA, 32 nt, Homo Sapiens
uaaauccggccgcgaugaacgcgagcgccgcc

SEQ ID NO: 176317 - RNA, 32 nt, Homo Sapiens
gcccccgucaggacgugcgaaaagcgacggcg

SEQ ID NO: 176318 - RNA, 32 nt, Homo Sapiens
cuggccagaggacauaaauggugcugguagga

SEQ ID NO: 176319 - RNA, 32 nt, Homo Sapiens
aaggcacaaaauuuuguuuaaaacucagaaua

SEQ ID NO: 176320 - RNA, 29 nt, Homo Sapiens
gaagacgcgguccgggucgccccuagcug

SEQ ID NO: 176321 - RNA, 32 nt, Homo Sapiens
aaugagggcccguaacagaaccagugugugua

SEQ ID NO: 176322 - RNA, 32 nt, Homo Sapiens
gcccugguccagggcccucccugcccgccuug

SEQ ID NO: 176323 - RNA, 32 nt, Homo Sapiens
ccccugcaagcacuuuacuuccuguuccuccc

SEQ ID NO: 176324 - RNA, 32 nt, Homo Sapiens
cuccaggcuggggagagaagggugaccaggcg

SEQ ID NO: 176325 - RNA, 32 nt, Homo Sapiens
ugguaacucugcaugaacggacuggauaguaa

SEQ ID NO: 176326 - RNA, 32 nt, Homo Sapiens
uggguccauuuucuuuucauugccuccuuuuc

SEQ ID NO: 176327 - RNA, 32 nt, Homo Sapiens
aagaacaaguaacagcagcggcugggacccca

SEQ ID NO: 176328 - RNA, 32 nt, Homo Sapiens
gugugcucgcucacgcacacaucacacaccuu

SEQ ID NO: 176329 - RNA, 32 nt, Homo Sapiens
gcauuuguaaaaaugagacuuuuucaguggaa

SEQ ID NO: 176330 - RNA, 32 nt, Homo Sapiens
uuccuaaaauauaaucugauaauuaaugguuu

SEQ ID NO: 176331 - RNA, 32 nt, Homo Sapiens
ccuaaaauccuaaaaagauacaccuugcagua

SEQ ID NO: 176332 - RNA, 32 nt, Homo Sapiens
cuuuuuccucaauugauuccaacaaugucuca

SEQ ID NO: 176333 - RNA, 29 nt, Homo Sapiens
gauguguacagguuccugccgacuagugu

SEQ ID NO: 176334 - RNA, 32 nt, Homo Sapiens
cugccgccccucaggacagcgcuguggaugcc

SEQ ID NO: 176335 - RNA, 32 nt, Homo Sapiens
agugauccucuggccugguccuagguuggacu

SEQ ID NO: 176336 - RNA, 32 nt, Homo Sapiens
cacuguacuccagccugggugacagagugaua

SEQ ID NO: 176337 - RNA, 32 nt, Homo Sapiens
ucaucacacccaaagaagagccagccuugcag

SEQ ID NO: 176338 - RNA, 32 nt, Homo Sapiens
gagaaaaauaaagccaugguauuuucauacuu

SEQ ID NO: 176339 - RNA, 32 nt, Homo Sapiens
cugaggcuaggcgcucucaugauccaccugcc

SEQ ID NO: 176340 - RNA, 32 nt, Homo Sapiens
agggugccuuguggccucuuuguggccaauug

SEQ ID NO: 176341 - RNA, 32 nt, Homo Sapiens
guaauaaggagaggguugggggugggcagggc

SEQ ID NO: 176342 - RNA, 32 nt, Homo Sapiens
guauauauuuuuguuaucaggugcaugucugu

SEQ ID NO: 176343 - RNA, 32 nt, Homo Sapiens
guuguuuuaauuaauaggcuuuauuuguaaga

SEQ ID NO: 176344 - RNA, 32 nt, Homo Sapiens
gagggacacacaggcacugcugucugcaacac

SEQ ID NO: 176345 - RNA, 32 nt, Homo Sapiens
ggagugcagggccagauggggacuccauggag

SEQ ID NO: 176346 - RNA, 32 nt, Homo Sapiens
gaggcccagcaucccgcgcagaugacaccauc

SEQ ID NO: 176347 - RNA, 32 nt, Homo Sapiens
guucccuguuuccucagcacgugagccuucac

SEQ ID NO: 176348 - RNA, 32 nt, Homo Sapiens
cugcugcccagcugggcugagggcccugacca

SEQ ID NO: 176349 - RNA, 32 nt, Homo Sapiens
cuugggaucugccaggcugggguguuuucggu

SEQ ID NO: 176350 - RNA, 32 nt, Homo Sapiens
cgcaaccuugugucccgcucuccagaggccag

SEQ ID NO: 176351 - RNA, 32 nt, Homo Sapiens
aaauuacuucuguugaguaaacuuuuuauguc

SEQ ID NO: 176352 - RNA, 32 nt, Homo Sapiens
ugggugauuauauucaugggugaaaaacagcu

SEQ ID NO: 176353 - RNA, 32 nt, Homo Sapiens
uucaccugcagaccucuucaagugacacuaug

SEQ ID NO: 176354 - RNA, 32 nt, Homo Sapiens
ccgagugccugcgauuacaggcgcgcgccgcc

SEQ ID NO: 176355 - RNA, 32 nt, Homo Sapiens
uagcagaauuauccucuucccuguauuauagc

SEQ ID NO: 176356 - RNA, 32 nt, Homo Sapiens
gucuauaaauguuuaucaugcauguauucuag

SEQ ID NO: 176357 - RNA, 32 nt, Homo Sapiens
agucuuuauuuuuaaauuuugcacuaguggaa

SEQ ID NO: 176358 - RNA, 32 nt, Homo Sapiens
uguaaagagggucagggguuagaguuuacuau

SEQ ID NO: 176359 - RNA, 32 nt, Homo Sapiens
acacccaauccccccacccccagccugcccgc

SEQ ID NO: 176360 - RNA, 32 nt, Homo Sapiens
accgugggaagcgaacgccacccccacccgcc

SEQ ID NO: 176361 - RNA, 32 nt, Homo Sapiens
ucggagcuucgugggacccgcggccggcgcgg

SEQ ID NO: 176362 - RNA, 32 nt, Homo Sapiens
guuccucgucuccucccggucugacccguugc

SEQ ID NO: 176363 - RNA, 32 nt, Homo Sapiens
gagggguugggcgcccucugguguuaccaccu

SEQ ID NO: 176364 - RNA, 32 nt, Homo Sapiens
uggauuuuaaacaaaauuuaugucauuuucag

SEQ ID NO: 176365 - RNA, 32 nt, Homo Sapiens
ucuuacuuuuaucagaugaucaacucacguau

SEQ ID NO: 176366 - RNA, 32 nt, Homo Sapiens
cuucguguacugugucucggguccauauauga

SEQ ID NO: 176367 - RNA, 32 nt, Homo Sapiens
aaaugggaauugagucccacucgguaagaguu

SEQ ID NO: 176368 - RNA, 32 nt, Homo Sapiens
gucuguguuuuugucucgcagaauuagagccc

SEQ ID NO: 176369 - RNA, 32 nt, Homo Sapiens
uuuuggguuuucuucccuagcuuauuuugugg

SEQ ID NO: 176370 - RNA, 32 nt, Homo Sapiens
cggaggcgcgcccgaauuccccgcaggggcgc

SEQ ID NO: 176371 - RNA, 32 nt, Homo Sapiens
guuuuuaaauggugagagugugucucuggggg

SEQ ID NO: 176372 - RNA, 32 nt, Homo Sapiens
cacaagaggcggaggcuccagucccugcuggg

SEQ ID NO: 176373 - RNA, 32 nt, Homo Sapiens
auauaaagaaaugugacaaagcuuuuuaagga

SEQ ID NO: 176374 - RNA, 32 nt, Homo Sapiens
uauugacgaccccauggagauuuugaaaagug

SEQ ID NO: 176375 - RNA, 32 nt, Homo Sapiens
agaagaccaaaaaacaaacaaacaaacuuaga

SEQ ID NO: 176376 - RNA, 32 nt, Homo Sapiens
ucccucucuaaaacgugaagacuguuggcagu

SEQ ID NO: 176377 - RNA, 31 nt, Homo Sapiens
gaugacuacaagcagccucuaacuggaucuu

SEQ ID NO: 176378 - RNA, 32 nt, Homo Sapiens
gacucuacauuuucuucaauaauuuuucuuca

SEQ ID NO: 176379 - RNA, 32 nt, Homo Sapiens
auguaggagcugaguucuuaaagacugaagau

SEQ ID NO: 176380 - RNA, 32 nt, Homo Sapiens
ugguguguaccuguaggccuagcugcucagga

SEQ ID NO: 176381 - RNA, 32 nt, Homo Sapiens
cccccuuccccucccccaagacgggcagcuac

SEQ ID NO: 176382 - RNA, 32 nt, Homo Sapiens
gcaauucaagauuauuuuucuaaugugauuug

SEQ ID NO: 176383 - RNA, 32 nt, Homo Sapiens
agacaacuuacaauuuaaauccuuaaaaguua

SEQ ID NO: 176384 - RNA, 32 nt, Homo Sapiens
aggccgucugacgcgcagccagaccccgccac

SEQ ID NO: 176385 - RNA, 32 nt, Homo Sapiens
uguacuuucuaaagaacaaaauguuauguaga

SEQ ID NO: 176386 - RNA, 32 nt, Homo Sapiens
gcuauuaaugucaauuauuuuggugaucaauc

SEQ ID NO: 176387 - RNA, 32 nt, Homo Sapiens
ugcccgggcaggcuucacuguggucacauccg

SEQ ID NO: 176388 - RNA, 32 nt, Homo Sapiens
uuuauuugcauaauuuuaagcuuuugaaauua

SEQ ID NO: 176389 - RNA, 32 nt, Homo Sapiens
agcgccccccgacggacgggaccggcucccug

SEQ ID NO: 176390 - RNA, 32 nt, Homo Sapiens
ugauuuguagucagguaucuuuuguauuugau

SEQ ID NO: 176391 - RNA, 32 nt, Homo Sapiens
auucuuuuuggaaaagagcugggaucccacag

SEQ ID NO: 176392 - RNA, 32 nt, Homo Sapiens
aaaauacaaaaauuagcuggguaugaugaugc

SEQ ID NO: 176393 - RNA, 32 nt, Homo Sapiens
uacccuacuuuucagcagcaaaacgucccgua

SEQ ID NO: 176394 - RNA, 32 nt, Homo Sapiens
cauugugcaauaguuaguuguuuucuuguuca

SEQ ID NO: 176395 - RNA, 32 nt, Homo Sapiens
uuaacaaugcuuaccaauguauggcuuagaag

SEQ ID NO: 176396 - RNA, 31 nt, Homo Sapiens
gcaaugugggagugcacaggaguccaccuaa

SEQ ID NO: 176397 - RNA, 32 nt, Homo Sapiens
acagcucaggccaaauacaggcaugauuucuu

SEQ ID NO: 176398 - RNA, 32 nt, Homo Sapiens
cugcauuuagaaaagagcacaaaaacauaggc

SEQ ID NO: 176399 - RNA, 32 nt, Homo Sapiens
guuacuuugaaguggauuugcauauugaagug

SEQ ID NO: 176400 - RNA, 31 nt, Homo Sapiens
aggcaguugcggguugcaggaguucaggaaa

SEQ ID NO: 176401 - RNA, 32 nt, Homo Sapiens
cuaaaaauuaucccauuuucugaugauuugaa

SEQ ID NO: 176402 - RNA, 32 nt, Homo Sapiens
gcuggcugaagcugccugugcacguuucuucu

SEQ ID NO: 176403 - RNA, 32 nt, Homo Sapiens
ggggaagagaggcacagacacagauaggagaa

SEQ ID NO: 176404 - RNA, 32 nt, Homo Sapiens
gauuccauuguucaucauuuugcaaugcagca

SEQ ID NO: 176405 - RNA, 32 nt, Homo Sapiens
uccccagaccucugcucccagagcucauggcc

SEQ ID NO: 176406 - RNA, 32 nt, Homo Sapiens
cggagacccacccucuaagaccagagccagug

SEQ ID NO: 176407 - RNA, 31 nt, Homo Sapiens
cauuggacaaagaaugagguuagaagacugc

SEQ ID NO: 176408 - RNA, 32 nt, Homo Sapiens
aaaccccacaagugucuucacuguggaaaacc

SEQ ID NO: 176409 - RNA, 31 nt, Homo Sapiens
accccaggucuccgucugccccgccagguac

SEQ ID NO: 176410 - RNA, 32 nt, Homo Sapiens
uaguauggaucuuuuuaaaucaauaagaugcu

SEQ ID NO: 176411 - RNA, 32 nt, Homo Sapiens
aaccagggcugacuucaacaggcccagucaag

SEQ ID NO: 176412 - RNA, 32 nt, Homo Sapiens
auggucucauuaaauugugggauuaugagauu

SEQ ID NO: 176413 - RNA, 32 nt, Homo Sapiens
caagacaacaggcuugccauugaucugcaaca

SEQ ID NO: 176414 - RNA, 32 nt, Homo Sapiens
cuaugggcauuugguggaugauaaugagcagc

SEQ ID NO: 176415 - RNA, 32 nt, Homo Sapiens
gauauuguuauauacauacuaugaaauaugua

SEQ ID NO: 176416 - RNA, 32 nt, Homo Sapiens
uaccccucaccaucauuaccaccaucaccaga

SEQ ID NO: 176417 - RNA, 32 nt, Homo Sapiens
caaguauuuucauuuuaaaagcuuacaugauu

SEQ ID NO: 176418 - RNA, 32 nt, Homo Sapiens
uuuauugguauauuuucuuuuucgucuauaua

SEQ ID NO: 176419 - RNA, 32 nt, Homo Sapiens
ugguggcugggccagcaggggcccucacucuu

SEQ ID NO: 176420 - RNA, 32 nt, Homo Sapiens
ccuggggaaaggggcggccgugggcgcagcuu

SEQ ID NO: 176421 - RNA, 32 nt, Homo Sapiens
cagacgccgggcugcgcgcugggagcugcggu

SEQ ID NO: 176422 - RNA, 32 nt, Homo Sapiens
uagaaugaagguaguuauuccugccuguguug

SEQ ID NO: 176423 - RNA, 32 nt, Homo Sapiens
acgccucgcucuugagaccagccaccaaacca

SEQ ID NO: 176424 - RNA, 32 nt, Homo Sapiens
agacagaaacgaagcccagaacaaagaugaaa

SEQ ID NO: 176425 - RNA, 32 nt, Homo Sapiens
ccagagauucagacuuaauucguuuuagaugg

SEQ ID NO: 176426 - RNA, 32 nt, Homo Sapiens
uucaagccagacucagucagugugauugucac

SEQ ID NO: 176427 - RNA, 32 nt, Homo Sapiens
caccccagaaaagcugcagccugcaggcacca

SEQ ID NO: 176428 - RNA, 32 nt, Homo Sapiens
uuuaaagaugacccaaugugaugucuguaguc

SEQ ID NO: 176429 - RNA, 32 nt, Homo Sapiens
aaagaggcugcggacuugcugcugcugcugcu

SEQ ID NO: 176430 - RNA, 32 nt, Homo Sapiens
uuaguauuugaaagagguuucuuugauguuuu

SEQ ID NO: 176431 - RNA, 32 nt, Homo Sapiens
cuuuuaucaccgauauccuuuuaugaaaugaa

SEQ ID NO: 176432 - RNA, 32 nt, Homo Sapiens
gagcucccucggcaagacccagcggcggcucg

SEQ ID NO: 176433 - RNA, 29 nt, Homo Sapiens
accauuauuuaugagugaaaaguuguagc

SEQ ID NO: 176434 - RNA, 32 nt, Homo Sapiens
ugaaacuagcuaaaccugaauguaccuacuag

SEQ ID NO: 176435 - RNA, 32 nt, Homo Sapiens
ccucaaucugucagggagccccugcccuucac

SEQ ID NO: 176436 - RNA, 32 nt, Homo Sapiens
uguugguuuuuuuuuuuuuuuaaagaaaaguu

SEQ ID NO: 176437 - RNA, 32 nt, Homo Sapiens
uuugcccccucuccuuuuuuuguagacccauu

SEQ ID NO: 176438 - RNA, 32 nt, Homo Sapiens
agcaaaguugguuucuguuuuuuguuuucuuu

SEQ ID NO: 176439 - RNA, 32 nt, Homo Sapiens
uacuaccauaaugaaugcugcauauuaagaga

SEQ ID NO: 176440 - RNA, 32 nt, Homo Sapiens
cagggcagcugggcgaggaagagauaccagug

SEQ ID NO: 176441 - RNA, 32 nt, Homo Sapiens
aacuaaaaaaaauuaugguugguuuuucuuaa

SEQ ID NO: 176442 - RNA, 32 nt, Homo Sapiens
cggacgcgugggccgcgccggacccuuccuuc

SEQ ID NO: 176443 - RNA, 32 nt, Homo Sapiens
gugauguaaaauguacaggcugcguuaugguu

SEQ ID NO: 176444 - RNA, 32 nt, Homo Sapiens
aagguaggaagaaagcagagggaaauauuuca

SEQ ID NO: 176445 - RNA, 32 nt, Homo Sapiens
ccaaaauggaagagggugcaaguccccuccug

SEQ ID NO: 176446 - RNA, 32 nt, Homo Sapiens
uaagcuagaugcaguagaccgaaaccauccaa

SEQ ID NO: 176447 - RNA, 29 nt, Homo Sapiens
gaagaugggaucgcggaacagcagcagug

SEQ ID NO: 176448 - RNA, 32 nt, Homo Sapiens
aacugauaguuacuugcuuguuuuuuaaaaau

SEQ ID NO: 176449 - RNA, 32 nt, Homo Sapiens
ccaauucuaaguuuuucuugaugguaaaucau

SEQ ID NO: 176450 - RNA, 32 nt, Homo Sapiens
gcggccagcuggaacgcuggaucgcagugcgc

SEQ ID NO: 176451 - RNA, 32 nt, Homo Sapiens
gaugacagggaagacgagugggggcagagcug

SEQ ID NO: 176452 - RNA, 32 nt, Homo Sapiens
aacggcgcuccagccaaggcacggggucaggg

SEQ ID NO: 176453 - RNA, 32 nt, Homo Sapiens
gaaugaccugcccuggccccagcccuacucug

SEQ ID NO: 176454 - RNA, 32 nt, Homo Sapiens
uugaaauggcacagucuguguugauccucaua

SEQ ID NO: 176455 - RNA, 32 nt, Homo Sapiens
ggcggugcggccugguccggggaggagaacau

SEQ ID NO: 176456 - RNA, 32 nt, Homo Sapiens
ggugucuguuuauguaacucugacuugcugga

SEQ ID NO: 176457 - RNA, 32 nt, Homo Sapiens
cucaguauaugauacucuguaacauuucuauu

SEQ ID NO: 176458 - RNA, 32 nt, Homo Sapiens
gauggcacagggucacucuacugcacaugacc

SEQ ID NO: 176459 - RNA, 32 nt, Homo Sapiens
gggccuggaagacagagaccuccugccuccgc

SEQ ID NO: 176460 - RNA, 32 nt, Homo Sapiens
acuccaucccgggccccagggaugccagcuca

SEQ ID NO: 176461 - RNA, 32 nt, Homo Sapiens
aaauguccuacugcugcugaggcuugaaccca

SEQ ID NO: 176462 - RNA, 32 nt, Homo Sapiens
acagugcaggcacaaaacuaccucugauacag

SEQ ID NO: 176463 - RNA, 32 nt, Homo Sapiens
ggacauaaaaauuuuugcaaggccucuuuuuu

SEQ ID NO: 176464 - RNA, 32 nt, Homo Sapiens
gugaaaaauccuagggccccagcucucccugu

SEQ ID NO: 176465 - RNA, 32 nt, Homo Sapiens
aguguugugggaaaaggcuaacugugaauuaa

SEQ ID NO: 176466 - RNA, 32 nt, Homo Sapiens
aaggccagcucaaugccugguaucugccccca

SEQ ID NO: 176467 - RNA, 32 nt, Homo Sapiens
uuaaagaccaaaaagaauaaagaaagaaaaga

SEQ ID NO: 176468 - RNA, 32 nt, Homo Sapiens
gccaaauuagguuuuucuuucuuuuuggaaau

SEQ ID NO: 176469 - RNA, 32 nt, Homo Sapiens
ccccaacccugucucacccccauuaucccucc

SEQ ID NO: 176470 - RNA, 32 nt, Homo Sapiens
gacuccaugagccccaggcgcuggucagaaac

SEQ ID NO: 176471 - RNA, 29 nt, Homo Sapiens
uuaugauagggcugauauuuucaacaacg

SEQ ID NO: 176472 - RNA, 32 nt, Homo Sapiens
aauaauugaagagaagcagaggccagcuguuu

SEQ ID NO: 176473 - RNA, 32 nt, Homo Sapiens
auagccguguuuacuuguauuaacuuacaguu

SEQ ID NO: 176474 - RNA, 32 nt, Homo Sapiens
gaauuuauuacaucuaaccauuuugcuuguuc

SEQ ID NO: 176475 - RNA, 32 nt, Homo Sapiens
augggcacggcgguccugcagcagccaucuug

SEQ ID NO: 176476 - RNA, 32 nt, Homo Sapiens
uguccccagucgagcccuccucccuuccccug

SEQ ID NO: 176477 - RNA, 32 nt, Homo Sapiens
gagacugcuuuccagacaccuccggcccacac

SEQ ID NO: 176478 - RNA, 32 nt, Homo Sapiens
uauauacacauaaaggcauauagcuauauaua

SEQ ID NO: 176479 - RNA, 32 nt, Homo Sapiens
gacugacccgccuucgggaccccgcucccagc

SEQ ID NO: 176480 - RNA, 32 nt, Homo Sapiens
auggcccagaagaggaggagcguguggcugag

SEQ ID NO: 176481 - RNA, 32 nt, Homo Sapiens
gaaucgauaggguuaauuuuggagcaguggcu

SEQ ID NO: 176482 - RNA, 32 nt, Homo Sapiens
gucaaggaucauaaguuuuuacugccaguauu

SEQ ID NO: 176483 - RNA, 32 nt, Homo Sapiens
ucacugcaccgagacuccaaggccugcagcag

SEQ ID NO: 176484 - RNA, 32 nt, Homo Sapiens
uuugccaaccuguuaguguacacacacugagg

SEQ ID NO: 176485 - RNA, 32 nt, Homo Sapiens
gggggcggccauggggcugcugucccagggcu

SEQ ID NO: 176486 - RNA, 32 nt, Homo Sapiens
ugccgauuauuuaauuuuuuuauuguaaagua

SEQ ID NO: 176487 - RNA, 32 nt, Homo Sapiens
gccacugccacacgaagcugguggagcucaag

SEQ ID NO: 176488 - RNA, 32 nt, Homo Sapiens
cucuugagaauauuggcugcugauuguugcca

SEQ ID NO: 176489 - RNA, 32 nt, Homo Sapiens
cuccggagacgcccggccuccugaaggguucg

SEQ ID NO: 176490 - RNA, 32 nt, Homo Sapiens
guccucaggaaguuaagcccagacucuucagc

SEQ ID NO: 176491 - RNA, 32 nt, Homo Sapiens
agacuuugagucugugguucaccaccagccca

SEQ ID NO: 176492 - RNA, 32 nt, Homo Sapiens
cugaggucaggagcucgagaccagccuggcca

SEQ ID NO: 176493 - RNA, 32 nt, Homo Sapiens
cugaggucaggaguucgagaccagccugguca

SEQ ID NO: 176494 - RNA, 29 nt, Homo Sapiens
cugcaugugucugcguucacauuucaaag

SEQ ID NO: 176495 - RNA, 32 nt, Homo Sapiens
uaagaauaacuuuauucuuaauuauucaggaa

SEQ ID NO: 176496 - RNA, 32 nt, Homo Sapiens
aauccaugaagaugaggaaaauccagcauaaa

SEQ ID NO: 176497 - RNA, 32 nt, Homo Sapiens
aacagcagcagcagcaccaucaucaccaucac

SEQ ID NO: 176498 - RNA, 32 nt, Homo Sapiens
gguggcagcugccugcccugccaaggaucuug

SEQ ID NO: 176499 - RNA, 32 nt, Homo Sapiens
gcggggaggcgcggagcgcgcgugugguccuu

SEQ ID NO: 176500 - RNA, 32 nt, Homo Sapiens
gggacagcagagguaaccccccugcacccuca

SEQ ID NO: 176501 - RNA, 26 nt, Homo Sapiens
caugcguggggcggcgcggcuggggc

SEQ ID NO: 176502 - RNA, 32 nt, Homo Sapiens
uguuuauuuguaugcaucuauuauuacuuuau

SEQ ID NO: 176503 - RNA, 32 nt, Homo Sapiens
uuuaaccccaagaaagugaaaacuaauauaaa

SEQ ID NO: 176504 - RNA, 32 nt, Homo Sapiens
cacucucccaccccacccaccagcccgcgggc

SEQ ID NO: 176505 - RNA, 32 nt, Homo Sapiens
gauugccugagcucaggaguuugagaccagcc

SEQ ID NO: 176506 - RNA, 32 nt, Homo Sapiens
cgaaacuuguguucuuuauggugucuaacaca

SEQ ID NO: 176507 - RNA, 32 nt, Homo Sapiens
auuauuuuguaucuagauuaucaacaaugggg

SEQ ID NO: 176508 - RNA, 32 nt, Homo Sapiens
gagaacccgucuuuacaggggcacugggcgac

SEQ ID NO: 176509 - RNA, 32 nt, Homo Sapiens
accgcgcccuccccagaccaucagcugaaccc

SEQ ID NO: 176510 - RNA, 32 nt, Homo Sapiens
caucaggguugccuauggggccacggcgacag

SEQ ID NO: 176511 - RNA, 32 nt, Homo Sapiens
aguucccuucaggccuggcagacgggcaguga

SEQ ID NO: 176512 - RNA, 32 nt, Homo Sapiens
uauuuuacaauagaauaauuuagccucaggac

SEQ ID NO: 176513 - RNA, 32 nt, Homo Sapiens
gguaagaacccauuuuaauguuuuaagcaaag

SEQ ID NO: 176514 - RNA, 32 nt, Homo Sapiens
cuacuucauuggcagucaccugcagcuggacc

SEQ ID NO: 176515 - RNA, 32 nt, Homo Sapiens
gaaggugggaugcaagccccuugccaggcuca

SEQ ID NO: 176516 - RNA, 32 nt, Homo Sapiens
cagcguccgcggcugggaaaucggccaucgcu

SEQ ID NO: 176517 - RNA, 32 nt, Homo Sapiens
uuaaaauuacuguauuuauuaugacgauggug

SEQ ID NO: 176518 - RNA, 32 nt, Homo Sapiens
gagaggguaaacuggggcgcgcggguuggagg

SEQ ID NO: 176519 - RNA, 32 nt, Homo Sapiens
cgcaccgccccggcuccccagcccaccgccau

SEQ ID NO: 176520 - RNA, 32 nt, Homo Sapiens
cgucucuucuaaaaauacaaaaauuagcuggg

SEQ ID NO: 176521 - RNA, 32 nt, Homo Sapiens
gcuuuuuauuuauagcauuguuuacucaguca

SEQ ID NO: 176522 - RNA, 32 nt, Homo Sapiens
auuuuguauauucgccugaagaucaucccgca

SEQ ID NO: 176523 - RNA, 32 nt, Homo Sapiens
acuccguuaccccugcccggcgcgccccggcg

SEQ ID NO: 176524 - RNA, 32 nt, Homo Sapiens
auuaaagcauuuuaaucagggaggcucuguga

SEQ ID NO: 176525 - RNA, 32 nt, Homo Sapiens
uaucaaaguuaaaauacuaaggugcauuuucc

SEQ ID NO: 176526 - RNA, 32 nt, Homo Sapiens
uuaauauuaacuuucaacaaccccagaggaug

SEQ ID NO: 176527 - RNA, 32 nt, Homo Sapiens
gagcaggagcagccggguugccccagcgcugg

SEQ ID NO: 176528 - RNA, 32 nt, Homo Sapiens
uuuagguggguuccuauuaggucagauuuuua

SEQ ID NO: 176529 - RNA, 32 nt, Homo Sapiens
accauuuccaaucuagaggaaagcuccccagc

SEQ ID NO: 176530 - RNA, 32 nt, Homo Sapiens
ugccccacauaaauguguucacuaaauguacg

SEQ ID NO: 176531 - RNA, 32 nt, Homo Sapiens
uuaacuuccugccuaucacacgcagccaucag

SEQ ID NO: 176532 - RNA, 32 nt, Homo Sapiens
cuuuggggucgcggccgcagcagcaccgggcg

SEQ ID NO: 176533 - RNA, 32 nt, Homo Sapiens
agaauguggaaaauacagaaaaguauaagcag

SEQ ID NO: 176534 - RNA, 32 nt, Homo Sapiens
gcccuagggugagaagaggcugagagagaagg

SEQ ID NO: 176535 - RNA, 32 nt, Homo Sapiens
ucuuuucuucaauaauucccuccauaguugca

SEQ ID NO: 176536 - RNA, 32 nt, Homo Sapiens
agcuuuuuggaaucuuuguaccaaaauuuuaa

SEQ ID NO: 176537 - RNA, 32 nt, Homo Sapiens
ggcaggggggagaggggguaauggaggccaag

SEQ ID NO: 176538 - RNA, 30 nt, Homo Sapiens
cguugagcugugccuauagaagcucuuuuc

SEQ ID NO: 176539 - RNA, 32 nt, Homo Sapiens
uaaacaguaccaauaucauuauagaaaaaaau

SEQ ID NO: 176540 - RNA, 32 nt, Homo Sapiens
cacaagcucuuccuguugaggaccccuucuac

SEQ ID NO: 176541 - RNA, 32 nt, Homo Sapiens
gggacacugggcgccuccuccucccccuccuc

SEQ ID NO: 176542 - RNA, 32 nt, Homo Sapiens
uggcaccugcccagccccaccucagcccaucu

SEQ ID NO: 176543 - RNA, 32 nt, Homo Sapiens
cgagacagccagcccucuccccugccucgcgg

SEQ ID NO: 176544 - RNA, 32 nt, Homo Sapiens
ucaauaauuuaaaaggauccuaagcucuaagu

SEQ ID NO: 176545 - RNA, 32 nt, Homo Sapiens
gcaccuccacugacagaggcggccccucccac

SEQ ID NO: 176546 - RNA, 32 nt, Homo Sapiens
guaaauacuuuuugaaugaacuaguauaguau

SEQ ID NO: 176547 - RNA, 32 nt, Homo Sapiens
agucgaagaacaccuggggcucggggggugcg

SEQ ID NO: 176548 - RNA, 32 nt, Homo Sapiens
aaagacaugaucuggaaacacacacacacccu

SEQ ID NO: 176549 - RNA, 32 nt, Homo Sapiens
gcauuauauauucuaguuagaucagcucuggu

SEQ ID NO: 176550 - RNA, 32 nt, Homo Sapiens
agaaaugcggcauucauuuuuaaaagaacguc

SEQ ID NO: 176551 - RNA, 30 nt, Homo Sapiens
ugcucggccauugccaccuaugcagaugag

SEQ ID NO: 176552 - RNA, 32 nt, Homo Sapiens
accauccccaccccuacaccacuuccacacag

SEQ ID NO: 176553 - RNA, 32 nt, Homo Sapiens
ggacuucugccuuguugacuagaguggauagu

SEQ ID NO: 176554 - RNA, 32 nt, Homo Sapiens
aaaccagguuggaaguagauggcuucaagcuu

SEQ ID NO: 176555 - RNA, 32 nt, Homo Sapiens
uuuuuuauaacaugaagugcugacauauuuua

SEQ ID NO: 176556 - RNA, 32 nt, Homo Sapiens
caaccgucaccauagugccccagaaacuacug

SEQ ID NO: 176557 - RNA, 32 nt, Homo Sapiens
gcgcucucgcaccuuccacagcacggcauuuu

SEQ ID NO: 176558 - RNA, 32 nt, Homo Sapiens
guuuccuuuucugaagcuguuccuccuuuuaa

SEQ ID NO: 176559 - RNA, 32 nt, Homo Sapiens
cuuuuguguucccgucuuuuugaaauauagac

SEQ ID NO: 176560 - RNA, 32 nt, Homo Sapiens
uauggaggauuauucuaauuucaguggcaagg

SEQ ID NO: 176561 - RNA, 32 nt, Homo Sapiens
agccuagauugugcuacugcacucuagauugg

SEQ ID NO: 176562 - RNA, 32 nt, Homo Sapiens
ccgggccgagcugucgcccgcgccaccuccac

SEQ ID NO: 176563 - RNA, 31 nt, Homo Sapiens
cuucacuggcacugccuucucugccgaugac

SEQ ID NO: 176564 - RNA, 32 nt, Homo Sapiens
gcugcuuggcuucaaggcacccaggauugauu

SEQ ID NO: 176565 - RNA, 32 nt, Homo Sapiens
uugccccagaacugagcagcucuucaccacgc

SEQ ID NO: 176566 - RNA, 32 nt, Homo Sapiens
guauuuuuuguuauauacaacuuuauacuuug

SEQ ID NO: 176567 - RNA, 32 nt, Homo Sapiens
ucuacagaugcauuuuuaagaaucuucuaggc

SEQ ID NO: 176568 - RNA, 32 nt, Homo Sapiens
gcacugcuuguaaauucacauuguuuggaaaa

SEQ ID NO: 176569 - RNA, 32 nt, Homo Sapiens
ugagacccaggacuccuccccacccuccuggc

SEQ ID NO: 176570 - RNA, 32 nt, Homo Sapiens
ggauaucgagccacaaacaacaacaagacauu

SEQ ID NO: 176571 - RNA, 32 nt, Homo Sapiens
ggggcucucugagacucuuuagagcagcuuug

SEQ ID NO: 176572 - RNA, 27 nt, Homo Sapiens
gggugcauccuccucagcccccaggcc

SEQ ID NO: 176573 - RNA, 32 nt, Homo Sapiens
uguuuagggugguuucuaucugucuuguuuuu

SEQ ID NO: 176574 - RNA, 32 nt, Homo Sapiens
uucaucugggaaucauauacuccacucuagcu

SEQ ID NO: 176575 - RNA, 32 nt, Homo Sapiens
uuuaaaaaaugaaacacuuuggauguauuacu

SEQ ID NO: 176576 - RNA, 28 nt, Homo Sapiens
gaagauaagaugagacauuugaaauugu

SEQ ID NO: 176577 - RNA, 32 nt, Homo Sapiens
uucuucauuggcuccuucuuaguggauucucu

SEQ ID NO: 176578 - RNA, 32 nt, Homo Sapiens
cugacuuucugaaggauucagaaagaaccuua

SEQ ID NO: 176579 - RNA, 32 nt, Homo Sapiens
cugugaacagagagacccuuguggguccaugc

SEQ ID NO: 176580 - RNA, 32 nt, Homo Sapiens
uggacugccccuuccucccccaucgcccgccc

SEQ ID NO: 176581 - RNA, 32 nt, Homo Sapiens
cccccucugacagccauccuccugggagccca

SEQ ID NO: 176582 - RNA, 32 nt, Homo Sapiens
uaugcuaaacauauagauucuuaaguuuauua

SEQ ID NO: 176583 - RNA, 32 nt, Homo Sapiens
cccucaccgcggcuggaugggggcucugcacc

SEQ ID NO: 176584 - RNA, 32 nt, Homo Sapiens
uugccacuucugaaugaguagagcaggaaaag

SEQ ID NO: 176585 - RNA, 32 nt, Homo Sapiens
cgagaauccagaugagacacuugucgcaaaca

SEQ ID NO: 176586 - RNA, 32 nt, Homo Sapiens
aacccugcggcgggcuccgggcugcuccgucc

SEQ ID NO: 176587 - RNA, 32 nt, Homo Sapiens
augaggauagaguggccugagagcagugcuug

SEQ ID NO: 176588 - RNA, 32 nt, Homo Sapiens
guaaacacugcaugucuaaucaucucagaguu

SEQ ID NO: 176589 - RNA, 32 nt, Homo Sapiens
gacgcgagccuggaggcagagccccgggaggg

SEQ ID NO: 176590 - RNA, 32 nt, Homo Sapiens
ugcucaggugccuaacgguucugcucagcugc

SEQ ID NO: 176591 - RNA, 32 nt, Homo Sapiens
aggggacagaagcccguggugcccugaggcgc

SEQ ID NO: 176592 - RNA, 32 nt, Homo Sapiens
aauuuguccccacgggcuaguuuaccuguguc

SEQ ID NO: 176593 - RNA, 32 nt, Homo Sapiens
aagaaaugaucaauguuugaggugguuaauau

SEQ ID NO: 176594 - RNA, 32 nt, Homo Sapiens
cugugcaaucaacaaguuuuugaaaggcuuuu

SEQ ID NO: 176595 - RNA, 32 nt, Homo Sapiens
aaugguagccgaguggcacgcgggggcgugug

SEQ ID NO: 176596 - RNA, 32 nt, Homo Sapiens
gauaguccuucaccccugaaaccccguauuua

SEQ ID NO: 176597 - RNA, 32 nt, Homo Sapiens
uaaaagcauuuuccacagauuguuaucaccuu

SEQ ID NO: 176598 - RNA, 32 nt, Homo Sapiens
gcucuaaggcccgaagaacaggugauaucggg

SEQ ID NO: 176599 - RNA, 32 nt, Homo Sapiens
gcagcgcggccgcgcggacccggcaaggcugg

SEQ ID NO: 176600 - RNA, 32 nt, Homo Sapiens
auacugcucuaguuucuuaguacucuguaaug

SEQ ID NO: 176601 - RNA, 32 nt, Homo Sapiens
cccugggcuuucauuuucuccucccagccccc

SEQ ID NO: 176602 - RNA, 32 nt, Homo Sapiens
ucagugugugaggaauuugaauuuagaguuua

SEQ ID NO: 176603 - RNA, 32 nt, Homo Sapiens
gcugcaaugugggccaucugacccugagcauu

SEQ ID NO: 176604 - RNA, 32 nt, Homo Sapiens
ccauguauauaagaacauuacaauauaucuuu

SEQ ID NO: 176605 - RNA, 32 nt, Homo Sapiens
aguaugugccguugcacagacuguguuuauga

SEQ ID NO: 176606 - RNA, 32 nt, Homo Sapiens
aagcaggaaugggauccaaagagacucccacu

SEQ ID NO: 176607 - RNA, 32 nt, Homo Sapiens
cgaggagcaaggcuugccagcaagucagaagg

SEQ ID NO: 176608 - RNA, 32 nt, Homo Sapiens
uuacgguugaauaauuacauuuuuauauauau

SEQ ID NO: 176609 - RNA, 32 nt, Homo Sapiens
cgaugugagccggagagcugcuugcugagcca

SEQ ID NO: 176610 - RNA, 32 nt, Homo Sapiens
cugaaguuaccagcaugccaacaucaacugcu

SEQ ID NO: 176611 - RNA, 30 nt, Homo Sapiens
agaguccuggacuguucguccgggugccag

SEQ ID NO: 176612 - RNA, 32 nt, Homo Sapiens
ccaaaauggaagcugggaaucuggugccauaa

SEQ ID NO: 176613 - RNA, 32 nt, Homo Sapiens
guacuguugaauggagcacacugaugggaagc

SEQ ID NO: 176614 - RNA, 32 nt, Homo Sapiens
uuucuagauagccaggcccaccaagagauauu

SEQ ID NO: 176615 - RNA, 32 nt, Homo Sapiens
cuccacugucuccucugcagaggcggauuucc

SEQ ID NO: 176616 - RNA, 32 nt, Homo Sapiens
aauauguacuccuuaaucugguaaaugugauc

SEQ ID NO: 176617 - RNA, 29 nt, Homo Sapiens
guauguuuguguuucaggucuuggaaucu

SEQ ID NO: 176618 - RNA, 32 nt, Homo Sapiens
ccacucccuggggccgcacccuuaccucagca

SEQ ID NO: 176619 - RNA, 32 nt, Homo Sapiens
uacccuaaauuuucuuuuuuauuuuuauuuuu

SEQ ID NO: 176620 - RNA, 32 nt, Homo Sapiens
auagaaaauucaucuguaaauauucacagucu

SEQ ID NO: 176621 - RNA, 32 nt, Homo Sapiens
ccccauuuccccucaacucuccaggcuucagc

SEQ ID NO: 176622 - RNA, 32 nt, Homo Sapiens
ccgcgggaggucgggcucuuugcagacucuua

SEQ ID NO: 176623 - RNA, 32 nt, Homo Sapiens
uaagugaggacucucuacccuugccguaucua

SEQ ID NO: 176624 - RNA, 32 nt, Homo Sapiens
cgccgccuccccugugugccagcccugugugc

SEQ ID NO: 176625 - RNA, 32 nt, Homo Sapiens
ugguggagagcgugcggcggcugggguugggc

SEQ ID NO: 176626 - RNA, 32 nt, Homo Sapiens
agggucaguggacuuuugugggccuccagcuu

SEQ ID NO: 176627 - RNA, 32 nt, Homo Sapiens
cuucuccucuacagguccucccggcccggccc

SEQ ID NO: 176628 - RNA, 32 nt, Homo Sapiens
cccaggcagggccaccgcaccuccagcaccgg

SEQ ID NO: 176629 - RNA, 32 nt, Homo Sapiens
uggaugucgcaauaauacaaaccaauguaucu

SEQ ID NO: 176630 - RNA, 32 nt, Homo Sapiens
guuauuucccuuuguaauaccuuuaaaaaucc

SEQ ID NO: 176631 - RNA, 32 nt, Homo Sapiens
accucaucaccaucccucuucuuggccccauc

SEQ ID NO: 176632 - RNA, 32 nt, Homo Sapiens
gaggccucuugguuucagggucucucugucuc

SEQ ID NO: 176633 - RNA, 32 nt, Homo Sapiens
ucccaugccuccugccucuccccucccucgau

SEQ ID NO: 176634 - RNA, 32 nt, Homo Sapiens
acgggaguuuuaugugauaauaugagugucug

SEQ ID NO: 176635 - RNA, 32 nt, Homo Sapiens
aguauagcucuuaccuuuauuacugaauuuga

SEQ ID NO: 176636 - RNA, 32 nt, Homo Sapiens
ggcauguuucccugaaguuaaaauaguuuuua

SEQ ID NO: 176637 - RNA, 32 nt, Homo Sapiens
agacaucccaaaggaagugcugauggacugug

SEQ ID NO: 176638 - RNA, 32 nt, Homo Sapiens
aucuauccuaauuauugguucugauuuuuaaa

SEQ ID NO: 176639 - RNA, 32 nt, Homo Sapiens
cagagugaugggagaagaaaaauccaagcuag

SEQ ID NO: 176640 - RNA, 32 nt, Homo Sapiens
aagauucuugucaggaggcacagguuacccaa

SEQ ID NO: 176641 - RNA, 32 nt, Homo Sapiens
ccucccuuguaguccuacuucuuccaacuuuc

SEQ ID NO: 176642 - RNA, 32 nt, Homo Sapiens
guggcauauaaauaaauaaauaaaaagucaca

SEQ ID NO: 176643 - RNA, 32 nt, Homo Sapiens
gcgcggagcagcugcgcucccgagaacgcguc

SEQ ID NO: 176644 - RNA, 32 nt, Homo Sapiens
cuuucuuacuuguagaagauuccaagcaagaa

SEQ ID NO: 176645 - RNA, 32 nt, Homo Sapiens
uuuagcuagacacagagugcugauuggugcgu

SEQ ID NO: 176646 - RNA, 32 nt, Homo Sapiens
ccgccgcacgcccggcagccuccggagacgcg

SEQ ID NO: 176647 - RNA, 32 nt, Homo Sapiens
gucccugcagccucagcccugcagaagaggau

SEQ ID NO: 176648 - RNA, 32 nt, Homo Sapiens
ucacuuagaacaaagccugaguccgagaauau

SEQ ID NO: 176649 - RNA, 32 nt, Homo Sapiens
gaugaaaguggauauggcacauuuucacacac

SEQ ID NO: 176650 - RNA, 32 nt, Homo Sapiens
guugcagucuggagggcgccaacagcagcuac

SEQ ID NO: 176651 - RNA, 32 nt, Homo Sapiens
ccugacauuguuaaacauacugcuugucccgg

SEQ ID NO: 176652 - RNA, 32 nt, Homo Sapiens
agaguggaauuuuccagaggcuacaugaugag

SEQ ID NO: 176653 - RNA, 32 nt, Homo Sapiens
agcucggccuccgcgccgccuacuccggcauc

SEQ ID NO: 176654 - RNA, 32 nt, Homo Sapiens
ccuaacccuuggugcacccccauccaagcugg

SEQ ID NO: 176655 - RNA, 30 nt, Homo Sapiens
uugauucauaauaaacaaaauuacaaaaag

SEQ ID NO: 176656 - RNA, 32 nt, Homo Sapiens
cauuauuuccacucugguggauaaguucaaua

SEQ ID NO: 176657 - RNA, 32 nt, Homo Sapiens
guagugaaagacugguuaaugauaacaaugca

SEQ ID NO: 176658 - RNA, 32 nt, Homo Sapiens
auggucaccauuuucaacaucaucaccaccac

SEQ ID NO: 176659 - RNA, 32 nt, Homo Sapiens
uacauugaagcacagacugcagagcacuuguu

SEQ ID NO: 176660 - RNA, 32 nt, Homo Sapiens
ggcuggccuugaacuccugaccucaggugauc

SEQ ID NO: 176661 - RNA, 32 nt, Homo Sapiens
auuuacaaagauuauuuucuucuuagcaaaga

SEQ ID NO: 176662 - RNA, 32 nt, Homo Sapiens
aaaggaaaaauuuagcuaacacagggguuaca

SEQ ID NO: 176663 - RNA, 32 nt, Homo Sapiens
auacagaaauuugaaauuucaacaagaaaaac

SEQ ID NO: 176664 - RNA, 30 nt, Homo Sapiens
agcguggagaagcuggugaucuaacugaga

SEQ ID NO: 176665 - RNA, 32 nt, Homo Sapiens
guuucauugguuccucuuucuguucccccauu

SEQ ID NO: 176666 - RNA, 30 nt, Homo Sapiens
cgcugagcggggcgcgcggccccgaggaug

SEQ ID NO: 176667 - RNA, 31 nt, Homo Sapiens
gggaggaugaacacagaagagcuggaguuau

SEQ ID NO: 176668 - RNA, 32 nt, Homo Sapiens
aagccgaggcaguggccauggguguggagcuu

SEQ ID NO: 176669 - RNA, 32 nt, Homo Sapiens
uaaaaucagacaaagcacuuuaaauuuauccu

SEQ ID NO: 176670 - RNA, 32 nt, Homo Sapiens
ggcagacccccaccaccauacaugcugucugu

SEQ ID NO: 176671 - RNA, 32 nt, Homo Sapiens
auuucguguacaaaaccuguguaccccucuau

SEQ ID NO: 176672 - RNA, 32 nt, Homo Sapiens
ugucuauguauuaaugcguuggaaagaaagcu

SEQ ID NO: 176673 - RNA, 32 nt, Homo Sapiens
cggcucuggggaaguggcagggggcggcugca

SEQ ID NO: 176674 - RNA, 32 nt, Homo Sapiens
cuuggcgccaccaccuggccccggugguuaaa

SEQ ID NO: 176675 - RNA, 32 nt, Homo Sapiens
ccaccgccuucaaacacaacugcuacaacauu

SEQ ID NO: 176676 - RNA, 32 nt, Homo Sapiens
gcuaacaagacgguuuaucauuuuggaccccu

SEQ ID NO: 176677 - RNA, 32 nt, Homo Sapiens
aagaugcguguguuggcuuacgcacuggcccu

SEQ ID NO: 176678 - RNA, 31 nt, Homo Sapiens
ucaauaauuugugaaauuucaguguuuucua

SEQ ID NO: 176679 - RNA, 32 nt, Homo Sapiens
aauucauguauuaugauuaaaucugaggcaga

SEQ ID NO: 176680 - RNA, 32 nt, Homo Sapiens
caggcuguggagaggaggcgggcggggccggu

SEQ ID NO: 176681 - RNA, 32 nt, Homo Sapiens
cacauuuuuuaaaaaucauuuuauuuugugau

SEQ ID NO: 176682 - RNA, 32 nt, Homo Sapiens
ugaguauuuguguggguucuuaauuuugaagg

SEQ ID NO: 176683 - RNA, 32 nt, Homo Sapiens
ucaacuuauuuucuccuaaacggcguguccac

SEQ ID NO: 176684 - RNA, 32 nt, Homo Sapiens
ggccgagugacaggccgcagccccccgagcac

SEQ ID NO: 176685 - RNA, 32 nt, Homo Sapiens
aaaucuguccaacugagaaguaccuuaucaaa

SEQ ID NO: 176686 - RNA, 32 nt, Homo Sapiens
agacacccagagccccaggcuuucucggcacc

SEQ ID NO: 176687 - RNA, 32 nt, Homo Sapiens
aauccagaaaauucaacaaaugcugaaguuaa

SEQ ID NO: 176688 - RNA, 32 nt, Homo Sapiens
gcugggaggguggaggugugggagcugauggg

SEQ ID NO: 176689 - RNA, 32 nt, Homo Sapiens
uaucauugaagaauaugauggcugaaaacaau

SEQ ID NO: 176690 - RNA, 32 nt, Homo Sapiens
uccgccccgucccacacuacgcccccgcccca

SEQ ID NO: 176691 - RNA, 32 nt, Homo Sapiens
gugaggucaggaguucgagaccagccugacca

SEQ ID NO: 176692 - RNA, 32 nt, Homo Sapiens
aggacuucucccucaccugguguuuuccacug

SEQ ID NO: 176693 - RNA, 30 nt, Homo Sapiens
guagagaauauccuuuccccuuuguuuucc

SEQ ID NO: 176694 - RNA, 32 nt, Homo Sapiens
uuugcggcgcccccaaacuccagccacccguc

SEQ ID NO: 176695 - RNA, 32 nt, Homo Sapiens
uaagucugucagcagagaacccugaccgcacc

SEQ ID NO: 176696 - RNA, 32 nt, Homo Sapiens
uccuaggcccacgcugccccuggccuguguua

SEQ ID NO: 176697 - RNA, 32 nt, Homo Sapiens
uacauaaugcacguguucuggauguauaacau

SEQ ID NO: 176698 - RNA, 32 nt, Homo Sapiens
uugucuuaucuggggaaggaaaguauaacuua

SEQ ID NO: 176699 - RNA, 32 nt, Homo Sapiens
agggcugcgcagguuuccccuuucugcgaaug

SEQ ID NO: 176700 - RNA, 32 nt, Homo Sapiens
agcucaguuuauccuucggagagacaaggaua

SEQ ID NO: 176701 - RNA, 32 nt, Homo Sapiens
ccacaggaaaaaaucgaggaaauauuaguucu

SEQ ID NO: 176702 - RNA, 32 nt, Homo Sapiens
uuuaggugucauuguugccagcaccuuuagug

SEQ ID NO: 176703 - RNA, 32 nt, Homo Sapiens
uggaucuccuucccuucucuugggggccgggg

SEQ ID NO: 176704 - RNA, 32 nt, Homo Sapiens
gcagcugcggggggagccggcggccgcugcug

SEQ ID NO: 176705 - RNA, 32 nt, Homo Sapiens
agagaggggcaggugcugggcggcggcugacg

SEQ ID NO: 176706 - RNA, 32 nt, Homo Sapiens
agagcaaaacgcugugcugcccugcccacccu

SEQ ID NO: 176707 - RNA, 31 nt, Homo Sapiens
ucucugugccucagcauccucaucuauaaau

SEQ ID NO: 176708 - RNA, 32 nt, Homo Sapiens
uccucugagauaaguaggcugguuuaaccauu

SEQ ID NO: 176709 - RNA, 32 nt, Homo Sapiens
ggacacuggccuugcaggcccgagggagcagc

SEQ ID NO: 176710 - RNA, 32 nt, Homo Sapiens
cccucccuugggcuggaccccucucuacagcu

SEQ ID NO: 176711 - RNA, 32 nt, Homo Sapiens
cacuuuaucucuucuuucucuuccucucccuc

SEQ ID NO: 176712 - RNA, 32 nt, Homo Sapiens
ugaauaaaggcacaauuaaaaacugucaaaaa

SEQ ID NO: 176713 - RNA, 32 nt, Homo Sapiens
cgggaagaaaacgucaccuugccauacauucu

SEQ ID NO: 176714 - RNA, 32 nt, Homo Sapiens
cccuaauucccucuccuccugacuccuguaga

SEQ ID NO: 176715 - RNA, 32 nt, Homo Sapiens
ccgccuccaucccaugucccgcccagccccgc

SEQ ID NO: 176716 - RNA, 32 nt, Homo Sapiens
uuucagcaauacugauauucacuuuauuuuuu

SEQ ID NO: 176717 - RNA, 32 nt, Homo Sapiens
aacuacagaaaagacaaacaguagagaacagc

SEQ ID NO: 176718 - RNA, 32 nt, Homo Sapiens
ugaucuucaugacaacugcauaaaauaguuac

SEQ ID NO: 176719 - RNA, 32 nt, Homo Sapiens
agacagaaauuugauagcucgguuagagggga

SEQ ID NO: 176720 - RNA, 32 nt, Homo Sapiens
ggcccguccgucugccgcaccugagcacggcc

SEQ ID NO: 176721 - RNA, 32 nt, Homo Sapiens
cucccaggagucaaaacccuuuguacagcaca

SEQ ID NO: 176722 - RNA, 32 nt, Homo Sapiens
uagccugucccuccaauuuacugcacauaaga

SEQ ID NO: 176723 - RNA, 32 nt, Homo Sapiens
cauuguccaaaauauuuuauucuuuaauggaa

SEQ ID NO: 176724 - RNA, 32 nt, Homo Sapiens
uucacccgccuggaugagacaccucuguggac

SEQ ID NO: 176725 - RNA, 32 nt, Homo Sapiens
uuuggccuuguggaggguguuccuagguagag

SEQ ID NO: 176726 - RNA, 32 nt, Homo Sapiens
uaagugugacuugaaaaauaugccaaaaaaug

SEQ ID NO: 176727 - RNA, 32 nt, Homo Sapiens
gggcgcucgaggcgcgcacggcgcgggacuac

SEQ ID NO: 176728 - RNA, 32 nt, Homo Sapiens
cccaauucuggguauaucagugugucuugcag

SEQ ID NO: 176729 - RNA, 32 nt, Homo Sapiens
cgcagcugccuccucaggauccggucgucggg

SEQ ID NO: 176730 - RNA, 32 nt, Homo Sapiens
ggggcuggggcgggcagccuggauggauaacg

SEQ ID NO: 176731 - RNA, 32 nt, Homo Sapiens
uugauuauguacacagauaucuaaauaaggaa

SEQ ID NO: 176732 - RNA, 32 nt, Homo Sapiens
ggugggauccugaaucacaauaaaaugaucaa

SEQ ID NO: 176733 - RNA, 32 nt, Homo Sapiens
ugccugugaugcacugccacccuuucacuguu

SEQ ID NO: 176734 - RNA, 32 nt, Homo Sapiens
ggagaaguucccugaaccuuccugucucccag

SEQ ID NO: 176735 - RNA, 32 nt, Homo Sapiens
uacucgcggcgccuucauuuccggguccgcca

SEQ ID NO: 176736 - RNA, 32 nt, Homo Sapiens
aaaacagacagagaugauaaauauuuuagcua

SEQ ID NO: 176737 - RNA, 32 nt, Homo Sapiens
gggguccugugcuggaguauaugacagcugcg

SEQ ID NO: 176738 - RNA, 32 nt, Homo Sapiens
uuauacuaaauaagaguauuuuuuguacagaa

SEQ ID NO: 176739 - RNA, 32 nt, Homo Sapiens
gauucuguauuucagagucaguuucuugagua

SEQ ID NO: 176740 - RNA, 32 nt, Homo Sapiens
guuuuauuguaugaaauagaacuuuauauuuu

SEQ ID NO: 176741 - RNA, 32 nt, Homo Sapiens
ggugggugcgccucgggccgcgggacucgcag

SEQ ID NO: 176742 - RNA, 32 nt, Homo Sapiens
auuuauauguauuuuucuuaauuuguaacuuu

SEQ ID NO: 176743 - RNA, 32 nt, Homo Sapiens
ggcagagaauaaaguguucuaugaaauucaga

SEQ ID NO: 176744 - RNA, 32 nt, Homo Sapiens
ccccuggcaaggugcacuuguuuucugguuug

SEQ ID NO: 176745 - RNA, 32 nt, Homo Sapiens
cuugaagcaugucuuucagagcccggcaccac

SEQ ID NO: 176746 - RNA, 32 nt, Homo Sapiens
uuacacagcuggaaacucaaccucgcaucucu

SEQ ID NO: 176747 - RNA, 32 nt, Homo Sapiens
agaaaugagguuucuuaaagcuuauuuuuaua

SEQ ID NO: 176748 - RNA, 32 nt, Homo Sapiens
uacauaaauguacuucuuuaaucuugugauua

SEQ ID NO: 176749 - RNA, 32 nt, Homo Sapiens
aacugugaaugacacaccuugcuguaaaugaa

SEQ ID NO: 176750 - RNA, 32 nt, Homo Sapiens
gcuacaaaaagcaaacaaaaccacacauauug

SEQ ID NO: 176751 - RNA, 32 nt, Homo Sapiens
uaggcccuaagcugaagaagugaggcagugau

SEQ ID NO: 176752 - RNA, 32 nt, Homo Sapiens
cccaugaaauguaaauacuguaucauaaguag

SEQ ID NO: 176753 - RNA, 32 nt, Homo Sapiens
ggugggaacaaggccugguaaaguuguuugug

SEQ ID NO: 176754 - RNA, 32 nt, Homo Sapiens
cuuucccugccaggcccuuugcacugaggaca

SEQ ID NO: 176755 - RNA, 32 nt, Homo Sapiens
ucagguggguggcaagcagaacaugcguaaua

SEQ ID NO: 176756 - RNA, 32 nt, Homo Sapiens
aacagcaugaacuugcuuucugaugcuguuuu

SEQ ID NO: 176757 - RNA, 32 nt, Homo Sapiens
guuuucucaggauaaaugcucuaccccacuuc

SEQ ID NO: 176758 - RNA, 32 nt, Homo Sapiens
gcccggggccgcgggaaggccgaccgacugcc

SEQ ID NO: 176759 - RNA, 32 nt, Homo Sapiens
cugccuggagugggggcgccgggcacuguccc

SEQ ID NO: 176760 - RNA, 32 nt, Homo Sapiens
gcgcgugugugagccucuacacauauauauac

SEQ ID NO: 176761 - RNA, 32 nt, Homo Sapiens
ugccccaguauagggauauuuuuacugucuuu

SEQ ID NO: 176762 - RNA, 32 nt, Homo Sapiens
ggacguggacaucuggggcgccaggcaggcgg

SEQ ID NO: 176763 - RNA, 32 nt, Homo Sapiens
ugacaagaauaauuuuggaauaauuucuauua

SEQ ID NO: 176764 - RNA, 32 nt, Homo Sapiens
agagaguuaugaacacuuaaauuaugauagug

SEQ ID NO: 176765 - RNA, 32 nt, Homo Sapiens
ggggagguucagugaauuguguaggagagguu

SEQ ID NO: 176766 - RNA, 32 nt, Homo Sapiens
cccccucuuugcaggcuuuuccuccucucuag

SEQ ID NO: 176767 - RNA, 32 nt, Homo Sapiens
ggcgugagaaggggcaugugucgggcuacccu

SEQ ID NO: 176768 - RNA, 32 nt, Homo Sapiens
agaagcggggacgaaagccccugcccccagag

SEQ ID NO: 176769 - RNA, 32 nt, Homo Sapiens
acaggacuuccacacccaugcuccucucggca

SEQ ID NO: 176770 - RNA, 32 nt, Homo Sapiens
ucagccuucuucagcccucuucuauuucuuau

SEQ ID NO: 176771 - RNA, 32 nt, Homo Sapiens
ucgagccgccggccggccgugccgguguccgu

SEQ ID NO: 176772 - RNA, 32 nt, Homo Sapiens
agcgcggaucucccggccgccggcgcccagcc

SEQ ID NO: 176773 - RNA, 32 nt, Homo Sapiens
uuuggccuagcgguuuguaggcggugcguccu

SEQ ID NO: 176774 - RNA, 32 nt, Homo Sapiens
ggcuaggugugguggcucaggccuguaauccu

SEQ ID NO: 176775 - RNA, 30 nt, Homo Sapiens
uuauguagguaguggggggaaaugcagaaa

SEQ ID NO: 176776 - RNA, 32 nt, Homo Sapiens
cauccagccaaggaugccagucuugcucacgg

SEQ ID NO: 176777 - RNA, 32 nt, Homo Sapiens
gcaagauggcugccaacucuuggcaauucaua

SEQ ID NO: 176778 - RNA, 32 nt, Homo Sapiens
cuuucuguuguuagauaauuggggucuucccc

SEQ ID NO: 176779 - RNA, 32 nt, Homo Sapiens
ggaaaugccucuuucuuccccagacuccagga

SEQ ID NO: 176780 - RNA, 32 nt, Homo Sapiens
cuggagccacgaugcacggccaggcgcgguga

SEQ ID NO: 176781 - RNA, 32 nt, Homo Sapiens
uagacaccaggccagcucucucuuaucugacu

SEQ ID NO: 176782 - RNA, 32 nt, Homo Sapiens
gagaaacauguugcuuccaggcuugauuucga

SEQ ID NO: 176783 - RNA, 32 nt, Homo Sapiens
gaggaggaaguacugucguggccugaagaaau

SEQ ID NO: 176784 - RNA, 32 nt, Homo Sapiens
gucgugauacuuccagaggaggaauuaaugag

SEQ ID NO: 176785 - RNA, 32 nt, Homo Sapiens
auggaauuucacaggaaagugaagggauacug

SEQ ID NO: 176786 - RNA, 32 nt, Homo Sapiens
aaaauuaauguuucaaaaucucuguuuaagua

SEQ ID NO: 176787 - RNA, 32 nt, Homo Sapiens
gcacugaaacuguguauuaccaagcucacucu

SEQ ID NO: 176788 - RNA, 32 nt, Homo Sapiens
ggcagagcugaaacuuauuccaagcuuucaaa

SEQ ID NO: 176789 - RNA, 32 nt, Homo Sapiens
cuggcugcucaaguacuaccccggccccagca

SEQ ID NO: 176790 - RNA, 32 nt, Homo Sapiens
ccuggccuugguuuccuggacuccccagugug

SEQ ID NO: 176791 - RNA, 32 nt, Homo Sapiens
cagaaaguuuauguggaaaaggauauaaaggg

SEQ ID NO: 176792 - RNA, 32 nt, Homo Sapiens
aaacuaaaaaugaaacacaugugucuguggua

SEQ ID NO: 176793 - RNA, 32 nt, Homo Sapiens
uggcgaaaaaucaacugcccugcuggauuugu

SEQ ID NO: 176794 - RNA, 32 nt, Homo Sapiens
uuuauguucaaucccaggauauagccccaaga

SEQ ID NO: 176795 - RNA, 32 nt, Homo Sapiens
gcccgcauguguuuggcgcugugcuaggggcg

SEQ ID NO: 176796 - RNA, 32 nt, Homo Sapiens
uccuuuuaaaacaauuaauuaauaacgagcac

SEQ ID NO: 176797 - RNA, 30 nt, Homo Sapiens
gcuguguuugugucugcagaagcgcccauc

SEQ ID NO: 176798 - RNA, 32 nt, Homo Sapiens
uccuguccuguccaaugcgggggcacugcaga

SEQ ID NO: 176799 - RNA, 32 nt, Homo Sapiens
auaggaucuuguaauagaaacaucaguccauu

SEQ ID NO: 176800 - RNA, 32 nt, Homo Sapiens
aaugcuuugugaggauuaaaugaauuaagauc

SEQ ID NO: 176801 - RNA, 32 nt, Homo Sapiens
agacauuuuaccauuuagcuacuuuuuauaac

SEQ ID NO: 176802 - RNA, 32 nt, Homo Sapiens
gaugacagcaaccacacaagguuaaggaugaa

SEQ ID NO: 176803 - RNA, 32 nt, Homo Sapiens
acuaaauaaaaaauucaaaccaauucacccag

SEQ ID NO: 176804 - RNA, 32 nt, Homo Sapiens
aagccaagagagccucuuguggaccccgccug

SEQ ID NO: 176805 - RNA, 32 nt, Homo Sapiens
uuguggccggugccccgauccgccgcgcuccg

SEQ ID NO: 176806 - RNA, 32 nt, Homo Sapiens
caccacucaccaggccucuccuccccucugcc

SEQ ID NO: 176807 - RNA, 32 nt, Homo Sapiens
uaauauaaaagcugggauuucuugcccguggg

SEQ ID NO: 176808 - RNA, 32 nt, Homo Sapiens
agaucaguuucacuaucuccaaagcauuugca

SEQ ID NO: 176809 - RNA, 32 nt, Homo Sapiens
cccuccuggugauucugaugcacacuaaauuc

SEQ ID NO: 176810 - RNA, 32 nt, Homo Sapiens
agaugucauuauggcauccuuaauuuuucuuc

SEQ ID NO: 176811 - RNA, 32 nt, Homo Sapiens
ucaccggggcccaagagcucuccaaggcagaa

SEQ ID NO: 176812 - RNA, 32 nt, Homo Sapiens
ugaaacaucugagcuaaauauucagcagacau

SEQ ID NO: 176813 - RNA, 32 nt, Homo Sapiens
guugcuguagcgcgucugggaauuacaccggg

SEQ ID NO: 176814 - RNA, 32 nt, Homo Sapiens
aauugaaaaugcaaauuacugaagagggaggg

SEQ ID NO: 176815 - RNA, 32 nt, Homo Sapiens
uuucucugcacacacacgcacacacacacaca

SEQ ID NO: 176816 - RNA, 32 nt, Homo Sapiens
ucggaguugugagcacucuacugcaagacuua

SEQ ID NO: 176817 - RNA, 32 nt, Homo Sapiens
ccccuucauacccaccaggaugugugcccagc

SEQ ID NO: 176818 - RNA, 32 nt, Homo Sapiens
uggagaagauguuuaaauaguucuguuguaac

SEQ ID NO: 176819 - RNA, 32 nt, Homo Sapiens
agagaggucccccaaagaaaccacugguuuug

SEQ ID NO: 176820 - RNA, 32 nt, Homo Sapiens
auggggcuggaaggaggcucucagauuucccu

SEQ ID NO: 176821 - RNA, 32 nt, Homo Sapiens
aacugcuauaagcaucacuggagugacucaag

SEQ ID NO: 176822 - RNA, 32 nt, Homo Sapiens
cauaagaaucucaaucuuggggcuaaaugccu

SEQ ID NO: 176823 - RNA, 32 nt, Homo Sapiens
aggaagcucugcaacagaugugaucugaucau

SEQ ID NO: 176824 - RNA, 32 nt, Homo Sapiens
aucguuccuggccaccugauaaucucuuugug

SEQ ID NO: 176825 - RNA, 32 nt, Homo Sapiens
cuuucucguuccccggccaucuuagcggcugc

SEQ ID NO: 176826 - RNA, 32 nt, Homo Sapiens
cacuagaagaauuuuucuguugugaaauuaga

SEQ ID NO: 176827 - RNA, 32 nt, Homo Sapiens
acggcagccaucuugguacccugagaagaguc

SEQ ID NO: 176828 - RNA, 32 nt, Homo Sapiens
uccgagaacaauuuauaacuguguuuucaugg

SEQ ID NO: 176829 - RNA, 28 nt, Homo Sapiens
gugggaauggcgaagaugugacauuccu

SEQ ID NO: 176830 - RNA, 32 nt, Homo Sapiens
auucuagagaaaaacuuuaugaagguaucgaa

SEQ ID NO: 176831 - RNA, 32 nt, Homo Sapiens
uaccuggauuaccagggacuaucuuugcugca

SEQ ID NO: 176832 - RNA, 32 nt, Homo Sapiens
gggcuuccagaaggcccgggggucuccgaggu

SEQ ID NO: 176833 - RNA, 32 nt, Homo Sapiens
gccccacuccaucggccccgcuccaucggcac

SEQ ID NO: 176834 - RNA, 32 nt, Homo Sapiens
ucuguggaauggggucaauaccaccuaccuca

SEQ ID NO: 176835 - RNA, 32 nt, Homo Sapiens
aagggccgccccugaccgccccucccacagcg

SEQ ID NO: 176836 - RNA, 32 nt, Homo Sapiens
aagggggaggucggaggagcgggcaccgcggc

SEQ ID NO: 176837 - RNA, 32 nt, Homo Sapiens
aaauggaaagagaugaagauguuccaaggaag

SEQ ID NO: 176838 - RNA, 32 nt, Homo Sapiens
gaaacuugagcuggcauccuccgcugguuugc

SEQ ID NO: 176839 - RNA, 28 nt, Homo Sapiens
auuuuguugucuacuuuguguguuuaac

SEQ ID NO: 176840 - RNA, 32 nt, Homo Sapiens
cauccccaccagcaccggcagcucuuggcaag

SEQ ID NO: 176841 - RNA, 32 nt, Homo Sapiens
ggcuucugcguggugcagcugcgcacguguuu

SEQ ID NO: 176842 - RNA, 32 nt, Homo Sapiens
auuuggaaaguacccaaauaaaugagaagcuu

SEQ ID NO: 176843 - RNA, 32 nt, Homo Sapiens
uuuuguaauucuggcuuucucuaauaaaaaag

SEQ ID NO: 176844 - RNA, 32 nt, Homo Sapiens
uggaagaaguguuuucuggagcagaagauucc

SEQ ID NO: 176845 - RNA, 32 nt, Homo Sapiens
uccuuuucagcagacgcuucccuucccuuccc

SEQ ID NO: 176846 - RNA, 32 nt, Homo Sapiens
ucccaguggcccggcgugcucggcucccacag

SEQ ID NO: 176847 - RNA, 32 nt, Homo Sapiens
gcuaacauuuuuaaguuuuuuuaaacuuucuu

SEQ ID NO: 176848 - RNA, 32 nt, Homo Sapiens
aauaucuugauaauaacuuauguuguucuuau

SEQ ID NO: 176849 - RNA, 32 nt, Homo Sapiens
aaacuauauaaaauuguagacuuaaaagguuu

SEQ ID NO: 176850 - RNA, 32 nt, Homo Sapiens
ggugggaggcccagcccaaaccccgcugcuac

SEQ ID NO: 176851 - RNA, 32 nt, Homo Sapiens
uuuguauuuuguuuugcuuauagaauuacaga

SEQ ID NO: 176852 - RNA, 32 nt, Homo Sapiens
gcagcggagcccaguguccagugaagcgucug

SEQ ID NO: 176853 - RNA, 31 nt, Homo Sapiens
gcgggcauggcggguaccguggugcuggacg

SEQ ID NO: 176854 - RNA, 31 nt, Homo Sapiens
gagaagcaaaauuguaacucagauuugugau

SEQ ID NO: 176855 - RNA, 32 nt, Homo Sapiens
uggagggagacggggaugucacgccgucccgc

SEQ ID NO: 176856 - RNA, 32 nt, Homo Sapiens
auuuuuuuuuucugguuuuguaugagagagag

SEQ ID NO: 176857 - RNA, 32 nt, Homo Sapiens
aagaauaccugaaaaacuuaugagaauauugu

SEQ ID NO: 176858 - RNA, 32 nt, Homo Sapiens
uuaaaaaacuaaaaacuagaggugagaaauuu

SEQ ID NO: 176859 - RNA, 32 nt, Homo Sapiens
guucagacacccuuggggauggcacuccacac

SEQ ID NO: 176860 - RNA, 32 nt, Homo Sapiens
gcgagaacacaagccacgccugcgauggugcu

SEQ ID NO: 176861 - RNA, 32 nt, Homo Sapiens
ugccccagaagccccacgacgauggcggcaau

SEQ ID NO: 176862 - RNA, 32 nt, Homo Sapiens
aucacauuuuuggccaggcacaguggcucaca

SEQ ID NO: 176863 - RNA, 32 nt, Homo Sapiens
uuuuuguagaacugcucuguaccugaauacuu

SEQ ID NO: 176864 - RNA, 32 nt, Homo Sapiens
agaauucugagcaauaggagccagggcuuucc

SEQ ID NO: 176865 - RNA, 32 nt, Homo Sapiens
cucacuugacauugcauuaugaguauucuucc

SEQ ID NO: 176866 - RNA, 32 nt, Homo Sapiens
ggcugucacaaccacagccugaugagaaaagc

SEQ ID NO: 176867 - RNA, 32 nt, Homo Sapiens
gugggcgcugccucuucaucugauggagccag

SEQ ID NO: 176868 - RNA, 32 nt, Homo Sapiens
ccgugccagacuaaguuuuuuuaaaauuuuuu

SEQ ID NO: 176869 - RNA, 32 nt, Homo Sapiens
caacucccaccccaccaaagugucucaguuug

SEQ ID NO: 176870 - RNA, 32 nt, Homo Sapiens
gccuccuuccaugggcguuucuuccaacgugg

SEQ ID NO: 176871 - RNA, 32 nt, Homo Sapiens
aauuccaacucuaugucuggaccuguguuagg

SEQ ID NO: 176872 - RNA, 32 nt, Homo Sapiens
gagccuugccccccucccccagcccccacccc

SEQ ID NO: 176873 - RNA, 32 nt, Homo Sapiens
acagucuucugggguccaaauccaccauuggc

SEQ ID NO: 176874 - RNA, 32 nt, Homo Sapiens
acugcuauacaaauauaaggaaauauuauuua

SEQ ID NO: 176875 - RNA, 32 nt, Homo Sapiens
uuggagguuuuacaugagacacuguccaagag

SEQ ID NO: 176876 - RNA, 32 nt, Homo Sapiens
accugucagaauaaaaaugugguuuguacaua

SEQ ID NO: 176877 - RNA, 32 nt, Homo Sapiens
uggcgcugcagggcugcuggaugaaggacagg

SEQ ID NO: 176878 - RNA, 32 nt, Homo Sapiens
uacagcagcagaccccaccucucccaaggacc

SEQ ID NO: 176879 - RNA, 32 nt, Homo Sapiens
uaaaaacuucucagggaugucuguaaauuuca

SEQ ID NO: 176880 - RNA, 32 nt, Homo Sapiens
ggggaauacuauuguucgauaccugggauuug

SEQ ID NO: 176881 - RNA, 32 nt, Homo Sapiens
cagcaauagacaauaugcguguaaaugagugu

SEQ ID NO: 176882 - RNA, 32 nt, Homo Sapiens
aaccagaccacuuuucuugacuugccuguuuu

SEQ ID NO: 176883 - RNA, 32 nt, Homo Sapiens
aaucuguggcccuggaggaggaacaggagggc

SEQ ID NO: 176884 - RNA, 32 nt, Homo Sapiens
ggggcuugcaugucauugucuaugacagcguc

SEQ ID NO: 176885 - RNA, 32 nt, Homo Sapiens
uugucucaucccauucugcgucaugcuugugu

SEQ ID NO: 176886 - RNA, 32 nt, Homo Sapiens
gcuuucugcccuauauuuuuaaaauacagaau

SEQ ID NO: 176887 - RNA, 32 nt, Homo Sapiens
ucauuacaagcaccauuuuguuuucagaggga

SEQ ID NO: 176888 - RNA, 32 nt, Homo Sapiens
gagagaggagaaugaauaggcacgggacgcca

SEQ ID NO: 176889 - RNA, 32 nt, Homo Sapiens
gccaugcucccugggcucuuccgcgggcgccc

SEQ ID NO: 176890 - RNA, 32 nt, Homo Sapiens
uaagauaacuuuauaauguauuuuaaaaccuu

SEQ ID NO: 176891 - RNA, 32 nt, Homo Sapiens
acuguuaccagguacuuaaugcccuaaagaua

SEQ ID NO: 176892 - RNA, 32 nt, Homo Sapiens
ggccccaacuguggcaucauccucucagcagu

SEQ ID NO: 176893 - RNA, 32 nt, Homo Sapiens
uuuuagaguaaaaauaacgagagaauguuauu

SEQ ID NO: 176894 - RNA, 32 nt, Homo Sapiens
cagcauauauauaaaauacacguguauaugag

SEQ ID NO: 176895 - RNA, 30 nt, Homo Sapiens
uugcgccaugcucaagguucuuaauuacau

SEQ ID NO: 176896 - RNA, 32 nt, Homo Sapiens
cuggggcgccuggccagagccgggguuccagg

SEQ ID NO: 176897 - RNA, 32 nt, Homo Sapiens
gccggugccgccgcccuucucauccgggcauu

SEQ ID NO: 176898 - RNA, 32 nt, Homo Sapiens
aauguauuuccaauguuauaaguuguguuaua

SEQ ID NO: 176899 - RNA, 32 nt, Homo Sapiens
ugcuuugaauuaauauaaaauaaagaaugggg

SEQ ID NO: 176900 - RNA, 32 nt, Homo Sapiens
augaccauggaaggagacaugugacaugggga

SEQ ID NO: 176901 - RNA, 32 nt, Homo Sapiens
gucagugccuggggggaggggaggagcacccc

SEQ ID NO: 176902 - RNA, 32 nt, Homo Sapiens
uaaauagucacaaugaagaugaaaauaaggau

SEQ ID NO: 176903 - RNA, 32 nt, Homo Sapiens
gcagggcgggcauugggaccaguguggagccu

SEQ ID NO: 176904 - RNA, 32 nt, Homo Sapiens
cucuauuuggggaaacaaagcagcugacauug

SEQ ID NO: 176905 - RNA, 32 nt, Homo Sapiens
uaaugugcugaauaagcucagcaacuaaaaac

SEQ ID NO: 176906 - RNA, 32 nt, Homo Sapiens
acuauguggcugucacgugaagugcugguguu

SEQ ID NO: 176907 - RNA, 32 nt, Homo Sapiens
auuucuuugcacugaggccuugcugcugugga

SEQ ID NO: 176908 - RNA, 32 nt, Homo Sapiens
uuuguuaaaaauuugcucuaauaaaacauacc

SEQ ID NO: 176909 - RNA, 32 nt, Homo Sapiens
aaugcaacuucuuuuuauuuucuuuuguaaau

SEQ ID NO: 176910 - RNA, 29 nt, Homo Sapiens
uucagggucuuauucugucacccaggcug

SEQ ID NO: 176911 - RNA, 32 nt, Homo Sapiens
acaucuuggagccgucugucucucccauauga

SEQ ID NO: 176912 - RNA, 32 nt, Homo Sapiens
ggggaaaauaucagggauugacaacuucuaua

SEQ ID NO: 176913 - RNA, 32 nt, Homo Sapiens
aggccgugccccaggccuccccgaaaccaaag

SEQ ID NO: 176914 - RNA, 32 nt, Homo Sapiens
ggaagugaugcuuuuuugccgcgggcccuggg

SEQ ID NO: 176915 - RNA, 31 nt, Homo Sapiens
auuguccucuccagaaaguccuuucuuuauc

SEQ ID NO: 176916 - RNA, 32 nt, Homo Sapiens
agcuccaggacacugaugggaaugaucccaaa

SEQ ID NO: 176917 - RNA, 32 nt, Homo Sapiens
cagacgaccccucuguccucguucccuguccu

SEQ ID NO: 176918 - RNA, 32 nt, Homo Sapiens
cuuaccccacugacgucuuucagaacauucca

SEQ ID NO: 176919 - RNA, 32 nt, Homo Sapiens
gagcgugcaugaagaagaaaguuaugguauuu

SEQ ID NO: 176920 - RNA, 32 nt, Homo Sapiens
acgugcuuugaacugcuuuucuauucauggag

SEQ ID NO: 176921 - RNA, 32 nt, Homo Sapiens
uccucaucaauuuugcacuuuauuuucuuaaa

SEQ ID NO: 176922 - RNA, 32 nt, Homo Sapiens
uucaaaaaagagaaggaaacuuuuuaaauuca

SEQ ID NO: 176923 - RNA, 32 nt, Homo Sapiens
agcucuggaucccagggccagcugcccucugg

SEQ ID NO: 176924 - RNA, 32 nt, Homo Sapiens
gggcagaaaaagaucugggcuuccuaauccga

SEQ ID NO: 176925 - RNA, 32 nt, Homo Sapiens
guugaauguauuaacaucauauggucugaaaa

SEQ ID NO: 176926 - RNA, 32 nt, Homo Sapiens
gcuacgaaaaggaaugcgauucuguggucauu

SEQ ID NO: 176927 - RNA, 32 nt, Homo Sapiens
ugcucagcuugacacugaagcauauuaugcaa

SEQ ID NO: 176928 - RNA, 32 nt, Homo Sapiens
auauguauauauacuccuuauguuaauacuaa

SEQ ID NO: 176929 - RNA, 32 nt, Homo Sapiens
gugagaacggggaggaagucuagacaggaaag

SEQ ID NO: 176930 - RNA, 32 nt, Homo Sapiens
aaccaaacuauuucccaaagugcauggauuuc

SEQ ID NO: 176931 - RNA, 32 nt, Homo Sapiens
ucugcgagugcccgacgccgccucccaagccu

SEQ ID NO: 176932 - RNA, 32 nt, Homo Sapiens
cccauuuuccaauccauccccagccauuuuuu

SEQ ID NO: 176933 - RNA, 32 nt, Homo Sapiens
gaggcaagggcuagauugcagcucccacucag

SEQ ID NO: 176934 - RNA, 32 nt, Homo Sapiens
acuggguugcccuugaggaaggaccuugccau

SEQ ID NO: 176935 - RNA, 32 nt, Homo Sapiens
cucugauuagcagcccucuggaguucagaacu

SEQ ID NO: 176936 - RNA, 32 nt, Homo Sapiens
ccccuccucacaggagacggacaccucagccu

SEQ ID NO: 176937 - RNA, 32 nt, Homo Sapiens
cacccagcagcguggcaugaagggcagggccc

SEQ ID NO: 176938 - RNA, 32 nt, Homo Sapiens
cuaacagagggagagugagaucuuggggcuua

SEQ ID NO: 176939 - RNA, 32 nt, Homo Sapiens
acuuugacuuuuugcauuuaaaacagacacug

SEQ ID NO: 176940 - RNA, 32 nt, Homo Sapiens
ucuuuggcaaaugagagggcuacauuauauca

SEQ ID NO: 176941 - RNA, 32 nt, Homo Sapiens
ccuagcugcuccagucucagccugggcagcuu

SEQ ID NO: 176942 - RNA, 32 nt, Homo Sapiens
auaaaaauauuuauuguguacucuguucuuug

SEQ ID NO: 176943 - RNA, 32 nt, Homo Sapiens
acccagucaaggccauucauggccaugggacc

SEQ ID NO: 176944 - RNA, 32 nt, Homo Sapiens
caucauuggucuuuacuaagugaagugacuuc

SEQ ID NO: 176945 - RNA, 32 nt, Homo Sapiens
agagaauuauauauuucuaacuauauaacccu

SEQ ID NO: 176946 - RNA, 32 nt, Homo Sapiens
gaugcgaucagcccugucuccuccccaccucc

SEQ ID NO: 176947 - RNA, 32 nt, Homo Sapiens
cugagaauggagcuguagccucauggacaaua

SEQ ID NO: 176948 - RNA, 32 nt, Homo Sapiens
aaggugaguaugggaggcaggggccgagacaa

SEQ ID NO: 176949 - RNA, 32 nt, Homo Sapiens
acaccuuuucuuucccaaacaccaagagcagg

SEQ ID NO: 176950 - RNA, 32 nt, Homo Sapiens
acccccuccugccuaaugccucaccuuacagc

SEQ ID NO: 176951 - RNA, 32 nt, Homo Sapiens
ugagaggacuguauauaugauuuuaaaccuaa

SEQ ID NO: 176952 - RNA, 32 nt, Homo Sapiens
cugucggugcccggcgccagccgcggcuuuga

SEQ ID NO: 176953 - RNA, 32 nt, Homo Sapiens
guguuuuggaacauuaauugugagaugggauu

SEQ ID NO: 176954 - RNA, 32 nt, Homo Sapiens
cuccuuucauuuccccauuagcuaaacaauaa

SEQ ID NO: 176955 - RNA, 32 nt, Homo Sapiens
ggcgcgggagcuugcgugcugcugggccugag

SEQ ID NO: 176956 - RNA, 31 nt, Homo Sapiens
gaccuggacuuggagaaccagaggaaaagag

SEQ ID NO: 176957 - RNA, 32 nt, Homo Sapiens
auguguguuucauaaugacuuuuaacugguaa

SEQ ID NO: 176958 - RNA, 32 nt, Homo Sapiens
agcugggcacgguggcucacgccuguaauccc

SEQ ID NO: 176959 - RNA, 32 nt, Homo Sapiens
ggcugggcgcgguggcucacgccuguaauccc

SEQ ID NO: 176960 - RNA, 32 nt, Homo Sapiens
ggccgggcgcgguggcucaugccuguaauccc

SEQ ID NO: 176961 - RNA, 32 nt, Homo Sapiens
agugucagccuggguucuauccuuuggugcag

SEQ ID NO: 176962 - RNA, 32 nt, Homo Sapiens
aaaaggaaaaaguuaccagaguauuguaccca

SEQ ID NO: 176963 - RNA, 32 nt, Homo Sapiens
guuacuucagugauuacacuuuugcucaaauu

SEQ ID NO: 176964 - RNA, 32 nt, Homo Sapiens
cuuagaaaacaauuguaaauguaauaagcaaa

SEQ ID NO: 176965 - RNA, 32 nt, Homo Sapiens
ggccaccugaggcacauccucucugaaacggc

SEQ ID NO: 176966 - RNA, 32 nt, Homo Sapiens
cucggugacuuuggacaccucccccuccucuc

SEQ ID NO: 176967 - RNA, 32 nt, Homo Sapiens
ggacuagaacagagggagccaccuggagagac

SEQ ID NO: 176968 - RNA, 32 nt, Homo Sapiens
gggcaggugauucgucggccccgguggcggcg

SEQ ID NO: 176969 - RNA, 32 nt, Homo Sapiens
guuuuuaguuguuuuucuuagucacucuuagc

SEQ ID NO: 176970 - RNA, 32 nt, Homo Sapiens
gugggggaagucggaugucagagccuuaacac

SEQ ID NO: 176971 - RNA, 32 nt, Homo Sapiens
cugcucaggccgccuagcugccccuuugccag

SEQ ID NO: 176972 - RNA, 32 nt, Homo Sapiens
ccauagagacugucaacguuguccucaugaca

SEQ ID NO: 176973 - RNA, 32 nt, Homo Sapiens
aggggaagcaggggcugcggcagacgccucuc

SEQ ID NO: 176974 - RNA, 32 nt, Homo Sapiens
ccaaguagaaaagaggaugaaguauauccugu

SEQ ID NO: 176975 - RNA, 32 nt, Homo Sapiens
uauuuuuuacuuuugucuuguauauguaugua

SEQ ID NO: 176976 - RNA, 32 nt, Homo Sapiens
acagacucacugaugcagcacuguagcccauc

SEQ ID NO: 176977 - RNA, 32 nt, Homo Sapiens
gcggcggaggcgaccucggcccggcccugcac

SEQ ID NO: 176978 - RNA, 32 nt, Homo Sapiens
accuaaaggccuuuuuuggguacugugugcuu

SEQ ID NO: 176979 - RNA, 32 nt, Homo Sapiens
acuuuagaaaucauguaauccaggcuggggaa

SEQ ID NO: 176980 - RNA, 32 nt, Homo Sapiens
uaugccugguaugugacacgugucucuccaac

SEQ ID NO: 176981 - RNA, 32 nt, Homo Sapiens
acaucuuggguccccaguggcuggggugggca

SEQ ID NO: 176982 - RNA, 32 nt, Homo Sapiens
gauaauggauuaguuuauauaaaccuauguuu

SEQ ID NO: 176983 - RNA, 32 nt, Homo Sapiens
ugccacucccuggccugcccuguuuuuggguc

SEQ ID NO: 176984 - RNA, 32 nt, Homo Sapiens
ccaggaaucuggaagcuauaagccgggcggau

SEQ ID NO: 176985 - RNA, 32 nt, Homo Sapiens
acagaauagauaacccagaaacaaauacauac

SEQ ID NO: 176986 - RNA, 30 nt, Homo Sapiens
aggagcaucucugugacagaagcuugucga

SEQ ID NO: 176987 - RNA, 32 nt, Homo Sapiens
uaaguuccuuuaaauuuaauucagcugaagau

SEQ ID NO: 176988 - RNA, 32 nt, Homo Sapiens
gucuaacuugucuacauggggaccacaguuca

SEQ ID NO: 176989 - RNA, 32 nt, Homo Sapiens
gaauuuuacuugaguugcacuaacauucuaug

SEQ ID NO: 176990 - RNA, 28 nt, Homo Sapiens
agauaaugcuuuuuuauguguuuuuaca

SEQ ID NO: 176991 - RNA, 32 nt, Homo Sapiens
gggucuggagaaaagggaauuuuuguauacug

SEQ ID NO: 176992 - RNA, 32 nt, Homo Sapiens
gaaaaugaagaauuaagaaaacuuuuugaguu

SEQ ID NO: 176993 - RNA, 32 nt, Homo Sapiens
gcccccugucuccuccaucauuugguuuccuc

SEQ ID NO: 176994 - RNA, 32 nt, Homo Sapiens
agggaagagcucgccggggcgccgggccagga

SEQ ID NO: 176995 - RNA, 32 nt, Homo Sapiens
auccuaaaauuuauaugggaaccacaaaagac

SEQ ID NO: 176996 - RNA, 32 nt, Homo Sapiens
cuuuaagagauuaagacaauaugcgcaauccu

SEQ ID NO: 176997 - RNA, 32 nt, Homo Sapiens
aagccgcuucccagacugucagggccaggccu

SEQ ID NO: 176998 - RNA, 32 nt, Homo Sapiens
uuacucguucuuggguuccaauaaaggagaaa

SEQ ID NO: 176999 - RNA, 32 nt, Homo Sapiens
acccgaggcucagccugaggggugugugccca

SEQ ID NO: 177000 - RNA, 32 nt, Homo Sapiens
aguuauauguguuuaaauauuauauuagcuua

SEQ ID NO: 177001 - RNA, 32 nt, Homo Sapiens
ugcagaauucuaugacacucuaauuaugauug

SEQ ID NO: 177002 - RNA, 32 nt, Homo Sapiens
aguuugugagcaugugcuggugugugugaguc

SEQ ID NO: 177003 - RNA, 32 nt, Homo Sapiens
ccugcaacuguuuggagcuggugaccuugggc

SEQ ID NO: 177004 - RNA, 32 nt, Homo Sapiens
gaucugcucccuccugcuucccuuaccagucg

SEQ ID NO: 177005 - RNA, 32 nt, Homo Sapiens
uaucaacuccuauuguucugcacuggaugcau

SEQ ID NO: 177006 - RNA, 32 nt, Homo Sapiens
ggcagccacagugguuucuacuguauguauga

SEQ ID NO: 177007 - RNA, 32 nt, Homo Sapiens
uuugcaaacuggguacaauaaauaagcuggau

SEQ ID NO: 177008 - RNA, 32 nt, Homo Sapiens
agggcgggccccacaggccaccuccacgaggg

SEQ ID NO: 177009 - RNA, 32 nt, Homo Sapiens
aaauguaaugaaaaauaucauggcuggauugc

SEQ ID NO: 177010 - RNA, 32 nt, Homo Sapiens
agauucccccuucuccucuccccuacuggagg

SEQ ID NO: 177011 - RNA, 32 nt, Homo Sapiens
cagcggagggcgggugaggauuuccccauaua

SEQ ID NO: 177012 - RNA, 32 nt, Homo Sapiens
uuuccagugcccaaagguacaugcuuuccgau

SEQ ID NO: 177013 - RNA, 32 nt, Homo Sapiens
cgugaagagccgcucugggccuugaggcugcc

SEQ ID NO: 177014 - RNA, 32 nt, Homo Sapiens
cuuucaguauuugugccugucuaucccacauc

SEQ ID NO: 177015 - RNA, 32 nt, Homo Sapiens
ucaccugaacugugucuaaagcaaguucucuc

SEQ ID NO: 177016 - RNA, 32 nt, Homo Sapiens
uggggugagaggagaaaggaaauguuggcaug

SEQ ID NO: 177017 - RNA, 32 nt, Homo Sapiens
uccuggcacugcaacagcagcugguaccaggc

SEQ ID NO: 177018 - RNA, 32 nt, Homo Sapiens
cccaaagggaaguuccaggagcuccugguggg

SEQ ID NO: 177019 - RNA, 32 nt, Homo Sapiens
uacugaguguauauauuuguuaaaauucauca

SEQ ID NO: 177020 - RNA, 32 nt, Homo Sapiens
gcccugucagguuuggggccugugugcuuccc

SEQ ID NO: 177021 - RNA, 32 nt, Homo Sapiens
caacgggccgacggaagugcgggcucaagacu

SEQ ID NO: 177022 - RNA, 32 nt, Homo Sapiens
cggcccggcucccgccucggccccgauggacg

SEQ ID NO: 177023 - RNA, 32 nt, Homo Sapiens
uuauucuugggucucuguuccacuagccagca

SEQ ID NO: 177024 - RNA, 32 nt, Homo Sapiens
gggucccuggaaagggggagaguugcccuuua

SEQ ID NO: 177025 - RNA, 32 nt, Homo Sapiens
agaagccuggcgggcucuggucaccauguguc

SEQ ID NO: 177026 - RNA, 32 nt, Homo Sapiens
ucuuucuuucucuaguaaauggcacucaauau

SEQ ID NO: 177027 - RNA, 32 nt, Homo Sapiens
cgcccgguacauauuuuuuaaauugaauucua

SEQ ID NO: 177028 - RNA, 32 nt, Homo Sapiens
caggggcccaugcucugcacccggcccucagc

SEQ ID NO: 177029 - RNA, 32 nt, Homo Sapiens
uaacucauuuuucuuagagaacuaaaguaguu

SEQ ID NO: 177030 - RNA, 32 nt, Homo Sapiens
aggcccagaucacccauccuccccugggguca

SEQ ID NO: 177031 - RNA, 32 nt, Homo Sapiens
ccauuaauauucaaaugaagggaucacauuaa

SEQ ID NO: 177032 - RNA, 32 nt, Homo Sapiens
acuuggaaaaggaagaggaguugccagaaaca

SEQ ID NO: 177033 - RNA, 32 nt, Homo Sapiens
cuugguuuguuuuuuucuuaccguguucacca

SEQ ID NO: 177034 - RNA, 32 nt, Homo Sapiens
cccaccucggccucccaaagugccgggauuac

SEQ ID NO: 177035 - RNA, 32 nt, Homo Sapiens
uggcgcuuggguggagcuggggauacauuuga

SEQ ID NO: 177036 - RNA, 32 nt, Homo Sapiens
ggcagcagagccugggcaggugacgggcgggc

SEQ ID NO: 177037 - RNA, 32 nt, Homo Sapiens
gaaggggggaauggcacugccugcgugugcag

SEQ ID NO: 177038 - RNA, 32 nt, Homo Sapiens
ccucccgccacagagccuggggcccccagccu

SEQ ID NO: 177039 - RNA, 32 nt, Homo Sapiens
gaagggugcaggugcuguaugcauugguuuau

SEQ ID NO: 177040 - RNA, 32 nt, Homo Sapiens
ccucagcuggaacauggggcucgagccagacc

SEQ ID NO: 177041 - RNA, 32 nt, Homo Sapiens
uuuggggcucuguauuacuugcuugagccuua

SEQ ID NO: 177042 - RNA, 32 nt, Homo Sapiens
ggggccuucugacggucugaggucuugcuugg

SEQ ID NO: 177043 - RNA, 32 nt, Homo Sapiens
caacuuugauguuugcacuaagauuuuauuug

SEQ ID NO: 177044 - RNA, 32 nt, Homo Sapiens
ggguugaguguuucauuugggaguuauuuggc

SEQ ID NO: 177045 - RNA, 32 nt, Homo Sapiens
ucuuaugaaaauaccuuugugcuuucuaagua

SEQ ID NO: 177046 - RNA, 32 nt, Homo Sapiens
gcuauuacaccugcuguacacacacuuccuca

SEQ ID NO: 177047 - RNA, 32 nt, Homo Sapiens
ucugucacgugguucaccaucaucaggcacca

SEQ ID NO: 177048 - RNA, 32 nt, Homo Sapiens
aaauucacaacacuugaaugacagucuuauuu

SEQ ID NO: 177049 - RNA, 32 nt, Homo Sapiens
aagcugcgccgcagcccgagccgcccggcauc

SEQ ID NO: 177050 - RNA, 32 nt, Homo Sapiens
augucuugaccaauaucaaaaacaagugcuug

SEQ ID NO: 177051 - RNA, 31 nt, Homo Sapiens
ccuucagcagggaccgcaggaacauucacag

SEQ ID NO: 177052 - RNA, 32 nt, Homo Sapiens
augacagcugucuuuggcagucugucauuuuu

SEQ ID NO: 177053 - RNA, 32 nt, Homo Sapiens
aucuugggaaaacagcgucuuccuucuuuauc

SEQ ID NO: 177054 - RNA, 32 nt, Homo Sapiens
gugaggaagauaaggcacacauuuauuuauaa

SEQ ID NO: 177055 - RNA, 32 nt, Homo Sapiens
gacugucuccgccgagcccccggggccaggug

SEQ ID NO: 177056 - RNA, 32 nt, Homo Sapiens
aaccagcauuuuacuacuuguuaccuuuccca

SEQ ID NO: 177057 - RNA, 32 nt, Homo Sapiens
guggggagcgcggcguggaggugccacccggc

SEQ ID NO: 177058 - RNA, 32 nt, Homo Sapiens
aaacauuuacaugcaguauuuuacacacaguu

SEQ ID NO: 177059 - RNA, 32 nt, Homo Sapiens
uugaacugcccuccucuccacccagcugcugc

SEQ ID NO: 177060 - RNA, 32 nt, Homo Sapiens
uaaaaugacagcaaagagacugagagacuguu

SEQ ID NO: 177061 - RNA, 29 nt, Homo Sapiens
cccgcucuuggacagaggaucugggaggu

SEQ ID NO: 177062 - RNA, 32 nt, Homo Sapiens
gaagacagacacccucacggaggaggagcugc

SEQ ID NO: 177063 - RNA, 32 nt, Homo Sapiens
ggagagggauuaaccugugcugccugggaccc

SEQ ID NO: 177064 - RNA, 32 nt, Homo Sapiens
ucaaaagccugauguucgugucccucucauag

SEQ ID NO: 177065 - RNA, 32 nt, Homo Sapiens
auaaagaaaagcuguggaaaagagucuuagag

SEQ ID NO: 177066 - RNA, 32 nt, Homo Sapiens
caucuugcucuucccagcauuccuuagggucu

SEQ ID NO: 177067 - RNA, 32 nt, Homo Sapiens
gccaaaaucaucuuuucauuuauuuugaaauu

SEQ ID NO: 177068 - RNA, 32 nt, Homo Sapiens
uuacauguguccuccccaccaagcccucuauc

SEQ ID NO: 177069 - RNA, 32 nt, Homo Sapiens
uggcagcuugggcuaugcugccacuaacaguu

SEQ ID NO: 177070 - RNA, 32 nt, Homo Sapiens
cacagucucuucucacuacagugucgccgccu

SEQ ID NO: 177071 - RNA, 32 nt, Homo Sapiens
aucccauguauuacaaacaguuggcaaccuug

SEQ ID NO: 177072 - RNA, 32 nt, Homo Sapiens
cucuauucuuggcuucuguugaaacagucaaa

SEQ ID NO: 177073 - RNA, 32 nt, Homo Sapiens
cacaccuggcuaauguuuguauuguuaguaga

SEQ ID NO: 177074 - RNA, 32 nt, Homo Sapiens
uauaucuacaauacauuuuaaagucagaguuc

SEQ ID NO: 177075 - RNA, 32 nt, Homo Sapiens
uguaucaguggacuuuuaaaacuugguacuac

SEQ ID NO: 177076 - RNA, 32 nt, Homo Sapiens
aagaacuccaugagagaagaugccauaaaaua

SEQ ID NO: 177077 - RNA, 32 nt, Homo Sapiens
accugauccaaaugaguaaaguggaccuuaga

SEQ ID NO: 177078 - RNA, 32 nt, Homo Sapiens
gauuuaaaaaucucuguaaaaacguguagugu

SEQ ID NO: 177079 - RNA, 32 nt, Homo Sapiens
cuucuuuuuacagauagggaaauagcacagaa

SEQ ID NO: 177080 - RNA, 32 nt, Homo Sapiens
ccggaagcccguggugaccccuggcgacccgg

SEQ ID NO: 177081 - RNA, 32 nt, Homo Sapiens
aaacugcuccagcuccaagagguuuuucagcu

SEQ ID NO: 177082 - RNA, 29 nt, Homo Sapiens
ggccccgucggacagagggcccagccgug

SEQ ID NO: 177083 - RNA, 32 nt, Homo Sapiens
aaaaucaauuuaauauuuggggcuuuuauuuc

SEQ ID NO: 177084 - RNA, 32 nt, Homo Sapiens
auaauaacuagaacagaagaaaaagaaauccc

SEQ ID NO: 177085 - RNA, 32 nt, Homo Sapiens
cagcccaaccucuccuucuacccacuucuucu

SEQ ID NO: 177086 - RNA, 28 nt, Homo Sapiens
agugaggggcggccucgggcagccgcuc

SEQ ID NO: 177087 - RNA, 29 nt, Homo Sapiens
acacacauauguauaucuauacacacaug

SEQ ID NO: 177088 - RNA, 32 nt, Homo Sapiens
gugggaaaaagaaaacaaaaacuuuccaaauu

SEQ ID NO: 177089 - RNA, 32 nt, Homo Sapiens
gugucaagccccaacagggcacagcagucuuc

SEQ ID NO: 177090 - RNA, 32 nt, Homo Sapiens
caacgcucaagccagcugggacagcgaccgag

SEQ ID NO: 177091 - RNA, 32 nt, Homo Sapiens
uaauagcauuuguauaaauguacaauauucgu

SEQ ID NO: 177092 - RNA, 32 nt, Homo Sapiens
ggucgcgaagcugcgcuaaaccccggccccag

SEQ ID NO: 177093 - RNA, 32 nt, Homo Sapiens
auuuguuuucuucuuuuuguucuuuuugcuua

SEQ ID NO: 177094 - RNA, 32 nt, Homo Sapiens
ccggcgggggucacgaggcuucguaguggagg

SEQ ID NO: 177095 - RNA, 32 nt, Homo Sapiens
agugacuggcagcagagcaagugcagccaggg

SEQ ID NO: 177096 - RNA, 32 nt, Homo Sapiens
cucugauuuaaauaaaccuuucuuguuuuuuu

SEQ ID NO: 177097 - RNA, 32 nt, Homo Sapiens
guucuacauguauauuucucauuuuuaauuuu

SEQ ID NO: 177098 - RNA, 28 nt, Homo Sapiens
uggagggggcggcuccuggagaucaggc

SEQ ID NO: 177099 - RNA, 32 nt, Homo Sapiens
ggaggaggaggcuguggaugacacacuggcca

SEQ ID NO: 177100 - RNA, 32 nt, Homo Sapiens
auccucuuuccacugugagcagagccagaagg

SEQ ID NO: 177101 - RNA, 32 nt, Homo Sapiens
ggucaaggaagaaaaaucaugggacuugccau

SEQ ID NO: 177102 - RNA, 32 nt, Homo Sapiens
gggucagauugugccauaauuguuauuaaaga

SEQ ID NO: 177103 - RNA, 32 nt, Homo Sapiens
ucugccuccaucagccacacacacgcagggac

SEQ ID NO: 177104 - RNA, 32 nt, Homo Sapiens
guacccuuguuaauauuuuaaauuguccaaac

SEQ ID NO: 177105 - RNA, 32 nt, Homo Sapiens
caucaugucauucucuugacuuguggcuuccc

SEQ ID NO: 177106 - RNA, 32 nt, Homo Sapiens
aaacccuagugucaacucuggacuucaguuaa

SEQ ID NO: 177107 - RNA, 32 nt, Homo Sapiens
cgaaugugguaacauuuuucugauuuaucuuu

SEQ ID NO: 177108 - RNA, 32 nt, Homo Sapiens
auccuaacaacaauauuuuuauggagaaggaa

SEQ ID NO: 177109 - RNA, 32 nt, Homo Sapiens
gucggcucucccuggacgugcggccgcggacu

SEQ ID NO: 177110 - RNA, 32 nt, Homo Sapiens
cuggcucuugcuguauccucacuuccugugga

SEQ ID NO: 177111 - RNA, 32 nt, Homo Sapiens
uuuggugaugaggacauggaagggcaggcaga

SEQ ID NO: 177112 - RNA, 32 nt, Homo Sapiens
cuaguuaaggauuaauagcaaaagauauuaaa

SEQ ID NO: 177113 - RNA, 27 nt, Homo Sapiens
auccuguuuccucucagcccccuccac

SEQ ID NO: 177114 - RNA, 32 nt, Homo Sapiens
ccgcuguccuggaguugucaccacugacuggg

SEQ ID NO: 177115 - RNA, 32 nt, Homo Sapiens
uuuuccaucuuuuuuuuuuuuauuggaguccu

SEQ ID NO: 177116 - RNA, 32 nt, Homo Sapiens
ccagaaaggugaugaaugaauaggacugagag

SEQ ID NO: 177117 - RNA, 32 nt, Homo Sapiens
uuuuuuauuacuucuuuuuuuuucgaacuaca

SEQ ID NO: 177118 - RNA, 32 nt, Homo Sapiens
aaaacgacaaccaaugcugacugugucuccau

SEQ ID NO: 177119 - RNA, 32 nt, Homo Sapiens
cuugagcgagagggaggaagggcgcgcgggcc

SEQ ID NO: 177120 - RNA, 32 nt, Homo Sapiens
acuauucuguuccacacccaaugcugcuccac

SEQ ID NO: 177121 - RNA, 32 nt, Homo Sapiens
augagaauuacauuagauuuuguacguaaaac

SEQ ID NO: 177122 - RNA, 32 nt, Homo Sapiens
agcgccuccaucccuccggcccgccccggaga

SEQ ID NO: 177123 - RNA, 32 nt, Homo Sapiens
caauagaaguauuucugaacauaucaaauaua

SEQ ID NO: 177124 - RNA, 31 nt, Homo Sapiens
gaagugggaagagugagccaggcaagaaaga

SEQ ID NO: 177125 - RNA, 30 nt, Homo Sapiens
ggguagggagggaguccgggucccgggcua

SEQ ID NO: 177126 - RNA, 32 nt, Homo Sapiens
ucuccugugggccucugucuucugggaauaaa

SEQ ID NO: 177127 - RNA, 32 nt, Homo Sapiens
ggguagaggauacuauuuccagaauaguguuu

SEQ ID NO: 177128 - RNA, 32 nt, Homo Sapiens
auccauuuuuuguccuucucugccuuucucua

SEQ ID NO: 177129 - RNA, 32 nt, Homo Sapiens
ccauucugcccccggccccgcgcggaggggcg

SEQ ID NO: 177130 - RNA, 32 nt, Homo Sapiens
ccaugggaaggggaauggcggugcauaucauu

SEQ ID NO: 177131 - RNA, 32 nt, Homo Sapiens
gcugaaaacggaauucuuugccggcuggcucc

SEQ ID NO: 177132 - RNA, 32 nt, Homo Sapiens
uucugaggggguaguugaggaugggcugaagg

SEQ ID NO: 177133 - RNA, 32 nt, Homo Sapiens
uccagagauaauuauuuuuuacggacugaaug

SEQ ID NO: 177134 - RNA, 32 nt, Homo Sapiens
ccagcuccgggaacagggaauguggguuaugc

SEQ ID NO: 177135 - RNA, 32 nt, Homo Sapiens
ggaggccgggguggaggggugggcucuggcgg

SEQ ID NO: 177136 - RNA, 32 nt, Homo Sapiens
guucagggagguggagaugggcccgccaugug

SEQ ID NO: 177137 - RNA, 32 nt, Homo Sapiens
gugaaggggaagaucugagagcgugcuguuug

SEQ ID NO: 177138 - RNA, 32 nt, Homo Sapiens
ugcuucuaugaauauuuccauguauuuugacu

SEQ ID NO: 177139 - RNA, 32 nt, Homo Sapiens
gcggccagccccacccaauacccccagcccca

SEQ ID NO: 177140 - RNA, 32 nt, Homo Sapiens
agaugaacaaguuucugcuguuugggcacaga

SEQ ID NO: 177141 - RNA, 32 nt, Homo Sapiens
ggaauuucauuugcaucuauguuuuuagcuau

SEQ ID NO: 177142 - RNA, 32 nt, Homo Sapiens
augguuuguaaguagacaguaaggcaaggcag

SEQ ID NO: 177143 - RNA, 32 nt, Homo Sapiens
cuccccugucuccuuuccuccuccuggguuca

SEQ ID NO: 177144 - RNA, 32 nt, Homo Sapiens
cuuugcguagcgagggggguuaccaaaggccu

SEQ ID NO: 177145 - RNA, 32 nt, Homo Sapiens
gccgcauguagacaaugcugcuaagaaacaga

SEQ ID NO: 177146 - RNA, 28 nt, Homo Sapiens
acuguaaaagauuaaacugcgaagucaa

SEQ ID NO: 177147 - RNA, 32 nt, Homo Sapiens
accugccaagccauccuguauacaccaaugau

SEQ ID NO: 177148 - RNA, 32 nt, Homo Sapiens
acaggugcacaccaccacaccuggcuauuuuu

SEQ ID NO: 177149 - RNA, 28 nt, Homo Sapiens
guuaggaguucaggaccagccuggccag

SEQ ID NO: 177150 - RNA, 32 nt, Homo Sapiens
auuguuaaauguuuaaaggguuucccaauguu

SEQ ID NO: 177151 - RNA, 32 nt, Homo Sapiens
ggguccggggccacccucugucguccgccggc

SEQ ID NO: 177152 - RNA, 32 nt, Homo Sapiens
ggugauacugggggcggggaaggccuagaaau

SEQ ID NO: 177153 - RNA, 32 nt, Homo Sapiens
ccugagggacgccaucacccuggaccucuucu

SEQ ID NO: 177154 - RNA, 32 nt, Homo Sapiens
ugcaggugcagggcacgagcaggcugugcguc

SEQ ID NO: 177155 - RNA, 32 nt, Homo Sapiens
aacuugcagcuagccaaagagauggagaagga

SEQ ID NO: 177156 - RNA, 32 nt, Homo Sapiens
cuccaucaccaccugcccucacauccuggggc

SEQ ID NO: 177157 - RNA, 32 nt, Homo Sapiens
ugauggaaaaauuuuaauuuguagccaucuuu

SEQ ID NO: 177158 - RNA, 32 nt, Homo Sapiens
aaaguuugauuaaaaaucaaccuugcuucaua

SEQ ID NO: 177159 - RNA, 32 nt, Homo Sapiens
ucuuaguugcuguucccucagcucccagcucc

SEQ ID NO: 177160 - RNA, 32 nt, Homo Sapiens
gcagauauuucuuugguacuaccauguauugu

SEQ ID NO: 177161 - RNA, 32 nt, Homo Sapiens
augauccuuuugguguagaccugcuucuccuu

SEQ ID NO: 177162 - RNA, 32 nt, Homo Sapiens
cggcggcgccagccuuccucggccggaggcgg

SEQ ID NO: 177163 - RNA, 32 nt, Homo Sapiens
cuucgcgucccucuccgcuuuccggccggcag

SEQ ID NO: 177164 - RNA, 32 nt, Homo Sapiens
aaagugaggcagcaaugcuguuaacugcauuu

SEQ ID NO: 177165 - RNA, 32 nt, Homo Sapiens
augagaaguuguagcucugaugucuagcugua

SEQ ID NO: 177166 - RNA, 32 nt, Homo Sapiens
uucuugcugcugucaagucccaagagaacaac

SEQ ID NO: 177167 - RNA, 32 nt, Homo Sapiens
cgcugagagggagagugcugaagaaggggaca

SEQ ID NO: 177168 - RNA, 32 nt, Homo Sapiens
gauauccgccugguuuggcccgccugccucca

SEQ ID NO: 177169 - RNA, 32 nt, Homo Sapiens
gagugagacaaaauuuuaguccaaauaacaag

SEQ ID NO: 177170 - RNA, 32 nt, Homo Sapiens
gaaguaggggaauggaaguggaaggaugcagc

SEQ ID NO: 177171 - RNA, 32 nt, Homo Sapiens
ccccuccugggcuccuuucagcagcccuccag

SEQ ID NO: 177172 - RNA, 32 nt, Homo Sapiens
ucuccucuucuucuggagaucacauguuuuuc

SEQ ID NO: 177173 - RNA, 32 nt, Homo Sapiens
uuuuauauauauauuucuuggaguaaacauuu

SEQ ID NO: 177174 - RNA, 32 nt, Homo Sapiens
ggccaggugcgguggcucacgccuauaauccc

SEQ ID NO: 177175 - RNA, 32 nt, Homo Sapiens
ggccaggcgcgguggcucacgcccauaauccc

SEQ ID NO: 177176 - RNA, 32 nt, Homo Sapiens
agccaggugcgguggcucacgccuguaauccc

SEQ ID NO: 177177 - RNA, 32 nt, Homo Sapiens
aaaacaauaauuacauucaagcauacaaacuu

SEQ ID NO: 177178 - RNA, 32 nt, Homo Sapiens
ggccaggcacgguggcucacgccuguaauccu

SEQ ID NO: 177179 - RNA, 32 nt, Homo Sapiens
cuuggugcccgucugcugaugugcccagccug

SEQ ID NO: 177180 - RNA, 32 nt, Homo Sapiens
cgggcgggggccugaagcacggcggcucgggc

SEQ ID NO: 177181 - RNA, 32 nt, Homo Sapiens
ggaggaaaccauccugcaggacuugucuggga

SEQ ID NO: 177182 - RNA, 32 nt, Homo Sapiens
gcuucugaauugagaauuauauuguuauccaa

SEQ ID NO: 177183 - RNA, 32 nt, Homo Sapiens
cucauacuaugaacauauggguagagaguaua

SEQ ID NO: 177184 - RNA, 32 nt, Homo Sapiens
gcugggggcuggcgcgucgcggccuggcugag

SEQ ID NO: 177185 - RNA, 32 nt, Homo Sapiens
agaaagggaucuggucucggccaggcgcggug

SEQ ID NO: 177186 - RNA, 32 nt, Homo Sapiens
ccacuggacgagggcugcuaucucgaccauuu

SEQ ID NO: 177187 - RNA, 32 nt, Homo Sapiens
cgcucauaagguggcuggacugggugcucaua

SEQ ID NO: 177188 - RNA, 32 nt, Homo Sapiens
ggguauuuuuaaauuuuauuguuuuauuucuu

SEQ ID NO: 177189 - RNA, 32 nt, Homo Sapiens
aauacaauucugaaggaauccaaaugugacuu

SEQ ID NO: 177190 - RNA, 32 nt, Homo Sapiens
agcggcaggcgcggccgcugguucgagagcuc

SEQ ID NO: 177191 - RNA, 32 nt, Homo Sapiens
agagacuggagugagauuuggguguggagggg

SEQ ID NO: 177192 - RNA, 32 nt, Homo Sapiens
uagguccgugcagcccaagggucagcccucuu

SEQ ID NO: 177193 - RNA, 32 nt, Homo Sapiens
gauaugaauaugccuuaaaauaaaguguuccc

SEQ ID NO: 177194 - RNA, 32 nt, Homo Sapiens
gcaugaaacuuguggaggaaagagauuugcuu

SEQ ID NO: 177195 - RNA, 30 nt, Homo Sapiens
ccugugucuaucccugucugugugucucug

SEQ ID NO: 177196 - RNA, 31 nt, Homo Sapiens
gggauggagccccacagucagaauguuacua

SEQ ID NO: 177197 - RNA, 32 nt, Homo Sapiens
cagugauuccagccaccagccaucucauuagc

SEQ ID NO: 177198 - RNA, 32 nt, Homo Sapiens
cugccagaugacuugaauaugguacuagauuu

SEQ ID NO: 177199 - RNA, 32 nt, Homo Sapiens
cgguggcccaggugcugguggagcacaauguc

SEQ ID NO: 177200 - RNA, 32 nt, Homo Sapiens
ccaaugggagggugggggcuaggaccccaaga

SEQ ID NO: 177201 - RNA, 31 nt, Homo Sapiens
ugccugcugaacagccugcccccguccaucc

SEQ ID NO: 177202 - RNA, 32 nt, Homo Sapiens
ccccaugccccuggggaccccaaggccccagc

SEQ ID NO: 177203 - RNA, 32 nt, Homo Sapiens
gcugaacgcucgcuggcccuggaugucauacg

SEQ ID NO: 177204 - RNA, 32 nt, Homo Sapiens
auguguugauuuccuguuuccuccucccccgc

SEQ ID NO: 177205 - RNA, 32 nt, Homo Sapiens
aagccaauauucaaauccagaugauuuuuacu

SEQ ID NO: 177206 - RNA, 32 nt, Homo Sapiens
ggagcucgcaccgccgcgcccgggccgcgagu

SEQ ID NO: 177207 - RNA, 32 nt, Homo Sapiens
cccuggugcccggcccuuggugcugaguaucc

SEQ ID NO: 177208 - RNA, 28 nt, Homo Sapiens
ggagcgcagcugcggccgagguaccggg

SEQ ID NO: 177209 - RNA, 32 nt, Homo Sapiens
aaacuguucauuugaggauaaaaaaggcauug

SEQ ID NO: 177210 - RNA, 32 nt, Homo Sapiens
gaauccaugaccucccucgugcucucuuucuu

SEQ ID NO: 177211 - RNA, 32 nt, Homo Sapiens
guccacggcggcagcgaucugcccggggucuc

SEQ ID NO: 177212 - RNA, 32 nt, Homo Sapiens
aguuuuauuuucuauuugaugaaguaagacug

SEQ ID NO: 177213 - RNA, 32 nt, Homo Sapiens
guccaggccccggucauuggggugacccccuc

SEQ ID NO: 177214 - RNA, 32 nt, Homo Sapiens
cgggcagcacaggagcccauggaggggguggg

SEQ ID NO: 177215 - RNA, 32 nt, Homo Sapiens
auugugugaaccaaagcgucaggggcuugggg

SEQ ID NO: 177216 - RNA, 32 nt, Homo Sapiens
uugggauuccaagaugggagcaagaggagauc

SEQ ID NO: 177217 - RNA, 32 nt, Homo Sapiens
gccgggggcucuagugaacagcggagccggac

SEQ ID NO: 177218 - RNA, 32 nt, Homo Sapiens
cggugccuucauguccccgccggcccugcccc

SEQ ID NO: 177219 - RNA, 32 nt, Homo Sapiens
aggugagaggagaggaggagaaaacugcauca

SEQ ID NO: 177220 - RNA, 32 nt, Homo Sapiens
aggacuaucucauacauaaaagguaagcauac

SEQ ID NO: 177221 - RNA, 32 nt, Homo Sapiens
uaccucaucgccaugaggugaggcuaagauga

SEQ ID NO: 177222 - RNA, 32 nt, Homo Sapiens
augaacuuuguguuuaccuggaagugguaggg

SEQ ID NO: 177223 - RNA, 32 nt, Homo Sapiens
uaaagagugcuccucagcuucuuauccuucca

SEQ ID NO: 177224 - RNA, 32 nt, Homo Sapiens
uuccucagcuguucuucagcccucuauacuuu

SEQ ID NO: 177225 - RNA, 32 nt, Homo Sapiens
aaguaugaaauuggucaugaggccaugaauuu

SEQ ID NO: 177226 - RNA, 32 nt, Homo Sapiens
cccagccaggaagggcgggcgggccucgggug

SEQ ID NO: 177227 - RNA, 32 nt, Homo Sapiens
cuguuacaccaauggauuguaauacugguuug

SEQ ID NO: 177228 - RNA, 32 nt, Homo Sapiens
caggcggacaaaguucagugucgggaauuuuc

SEQ ID NO: 177229 - RNA, 32 nt, Homo Sapiens
ugugaugaauuuguaauuuaggaguucuuugg

SEQ ID NO: 177230 - RNA, 32 nt, Homo Sapiens
uccucgucugcaugguaacuccgucugagucu

SEQ ID NO: 177231 - RNA, 32 nt, Homo Sapiens
cacaauugaguugaagcuguuccuccuaaaac

SEQ ID NO: 177232 - RNA, 29 nt, Homo Sapiens
caaauagaguuuuuauauuuguuaugaua

SEQ ID NO: 177233 - RNA, 29 nt, Homo Sapiens
ccgcguccccaugaaugaaagcugucugg

SEQ ID NO: 177234 - RNA, 32 nt, Homo Sapiens
aucucaucuugaugaugauagucaucaucaag

SEQ ID NO: 177235 - RNA, 32 nt, Homo Sapiens
cccuaaauauccacugccuagaagacuaaaca

SEQ ID NO: 177236 - RNA, 32 nt, Homo Sapiens
guacuugcauuucaaagcuuauaagauauaaa

SEQ ID NO: 177237 - RNA, 32 nt, Homo Sapiens
ccccugccuuggggggcacaugucuucguucc

SEQ ID NO: 177238 - RNA, 32 nt, Homo Sapiens
aauuauauauuuuuacucuauguuucucuaca

SEQ ID NO: 177239 - RNA, 32 nt, Homo Sapiens
guagacuuuuucuauuuuuauuugcugcuauu

SEQ ID NO: 177240 - RNA, 32 nt, Homo Sapiens
aaugguacauauauuuuuuugcuuuugaggga

SEQ ID NO: 177241 - RNA, 32 nt, Homo Sapiens
agagcaggggagagaaggccucaucucucuau

SEQ ID NO: 177242 - RNA, 32 nt, Homo Sapiens
ugcucuuucuucaugauacuuagucugcaggg

SEQ ID NO: 177243 - RNA, 32 nt, Homo Sapiens
gccggcagggcuugggggcgccuuagagccga

SEQ ID NO: 177244 - RNA, 32 nt, Homo Sapiens
caaucuuuacacaaugucacgggaccaguauu

SEQ ID NO: 177245 - RNA, 32 nt, Homo Sapiens
aaugcauucauucuaaaaaauuuuuugaacca

SEQ ID NO: 177246 - RNA, 32 nt, Homo Sapiens
uucagcuaagaaaggagaggccaggcaagcaa

SEQ ID NO: 177247 - RNA, 32 nt, Homo Sapiens
aggguaucagaacuguuuuuugaaagaacuuu

SEQ ID NO: 177248 - RNA, 32 nt, Homo Sapiens
acagcaagcugaggggaacguccccaagcccu

SEQ ID NO: 177249 - RNA, 32 nt, Homo Sapiens
cccuccuccuucccccugcuuagcuuguacuu

SEQ ID NO: 177250 - RNA, 32 nt, Homo Sapiens
agaggaaguggaagaagagaaagacagccacc

SEQ ID NO: 177251 - RNA, 32 nt, Homo Sapiens
uuacaaaagcggcagcagccaaugcacgcccc

SEQ ID NO: 177252 - RNA, 32 nt, Homo Sapiens
gguaggagcugcgggcggccaggccccuuccu

SEQ ID NO: 177253 - RNA, 32 nt, Homo Sapiens
ugccaggugugguggcucaggccuguaauccc

SEQ ID NO: 177254 - RNA, 32 nt, Homo Sapiens
acacauucuccugucucuggcuucuucaggcu

SEQ ID NO: 177255 - RNA, 32 nt, Homo Sapiens
guuuuagagaugggaucucaccauguugccca

SEQ ID NO: 177256 - RNA, 32 nt, Homo Sapiens
uggccccucuguaguggcugcgggcgucuugg

SEQ ID NO: 177257 - RNA, 32 nt, Homo Sapiens
ucugacaucuccccggccauuucucaucuacc

SEQ ID NO: 177258 - RNA, 32 nt, Homo Sapiens
gccuggcuaauuagcucugugccacauuccua

SEQ ID NO: 177259 - RNA, 32 nt, Homo Sapiens
gcacccgagcugcugcuccgcggcugcggccc

SEQ ID NO: 177260 - RNA, 32 nt, Homo Sapiens
cggggacagggaaggaggaagaagcuucgaga

SEQ ID NO: 177261 - RNA, 32 nt, Homo Sapiens
gucaaagauaaaauuucugaaaaucuuggcuc

SEQ ID NO: 177262 - RNA, 32 nt, Homo Sapiens
ccagaguagugcuugcucccccugccuugucc

SEQ ID NO: 177263 - RNA, 32 nt, Homo Sapiens
cguccuccccggcgcuccuccacagcucgcug

SEQ ID NO: 177264 - RNA, 32 nt, Homo Sapiens
auaaugugucauugauuuucuacaaauagacu

SEQ ID NO: 177265 - RNA, 32 nt, Homo Sapiens
aggaggagagccaggccugcccugcccugcug

SEQ ID NO: 177266 - RNA, 32 nt, Homo Sapiens
ccuuccagccuuucugucaucaucuccacagc

SEQ ID NO: 177267 - RNA, 32 nt, Homo Sapiens
aauauuguacauaguuaaaucuguauucuguu

SEQ ID NO: 177268 - RNA, 32 nt, Homo Sapiens
caggcgggugucgucagcuguccgccagcugc

SEQ ID NO: 177269 - RNA, 32 nt, Homo Sapiens
gauucaucagcauuuggaccaauagcccacag

SEQ ID NO: 177270 - RNA, 32 nt, Homo Sapiens
cuugguuugguucuaacaaacucucauguucc

SEQ ID NO: 177271 - RNA, 32 nt, Homo Sapiens
cuggucuccccucuucaccacccagcagcugu

SEQ ID NO: 177272 - RNA, 32 nt, Homo Sapiens
gccgcucagcuccaugcugaguaacuugagcu

SEQ ID NO: 177273 - RNA, 32 nt, Homo Sapiens
gcccauaaaugaucucuagaaggacuguuagu

SEQ ID NO: 177274 - RNA, 32 nt, Homo Sapiens
auuauggcuucuaaaucaguuauuuucuucag

SEQ ID NO: 177275 - RNA, 32 nt, Homo Sapiens
uuuuuagaauccauucaguccauuuguauaau

SEQ ID NO: 177276 - RNA, 32 nt, Homo Sapiens
aaaucuuuuggggacuuuucucucuuuaccca

SEQ ID NO: 177277 - RNA, 32 nt, Homo Sapiens
gauuuaggguugacagaggaaagcagaggcgc

SEQ ID NO: 177278 - RNA, 32 nt, Homo Sapiens
cccuaggccuguuugugugugauccuucuccu

SEQ ID NO: 177279 - RNA, 29 nt, Homo Sapiens
auuaugaaauguauguuuauguagggcuu

SEQ ID NO: 177280 - RNA, 32 nt, Homo Sapiens
accuugacuacuaaaaacgucuccauggcggg

SEQ ID NO: 177281 - RNA, 32 nt, Homo Sapiens
ccacgaucaccagcacauugcccgccacgaug

SEQ ID NO: 177282 - RNA, 31 nt, Homo Sapiens
aggacguguggaugccugccugcccugcccu

SEQ ID NO: 177283 - RNA, 32 nt, Homo Sapiens
caaggugugccccgugggcauuacuguuuaag

SEQ ID NO: 177284 - RNA, 32 nt, Homo Sapiens
ccuugcugacuucgaugcaaauauucuggcca

SEQ ID NO: 177285 - RNA, 32 nt, Homo Sapiens
ucuuucagccucugcuggcauccugcuucccc

SEQ ID NO: 177286 - RNA, 32 nt, Homo Sapiens
ccucccggguuuuauuucucucuuucuugagu

SEQ ID NO: 177287 - RNA, 32 nt, Homo Sapiens
gcgcuggggagcuucucccuggagaagagcac

SEQ ID NO: 177288 - RNA, 32 nt, Homo Sapiens
ucauguguauuaccaucauucuuuugucaaaa

SEQ ID NO: 177289 - RNA, 32 nt, Homo Sapiens
aaaaauaaaaauuaucuauaaucucagaaccc

SEQ ID NO: 177290 - RNA, 32 nt, Homo Sapiens
gccccgggggaagagacgggaagcucggcucu

SEQ ID NO: 177291 - RNA, 32 nt, Homo Sapiens
ccacggugcugucccaagccagcccuuaggag

SEQ ID NO: 177292 - RNA, 32 nt, Homo Sapiens
gcaacuugguaguuguuuuuguugcuaauauc

SEQ ID NO: 177293 - RNA, 32 nt, Homo Sapiens
agagaaaaacaugccuaaggcuuuucuccauu

SEQ ID NO: 177294 - RNA, 32 nt, Homo Sapiens
ucauuuuauuuuucuguuuaaauugauggaaa

SEQ ID NO: 177295 - RNA, 32 nt, Homo Sapiens
cuccgcuuguguuuuagagguauaaauaucug

SEQ ID NO: 177296 - RNA, 32 nt, Homo Sapiens
aggauggcgcugguacugcugcuugcuggugg

SEQ ID NO: 177297 - RNA, 32 nt, Homo Sapiens
ugguuuauuccuauacucuuguuuccucugcu

SEQ ID NO: 177298 - RNA, 32 nt, Homo Sapiens
auuuaguaggauuuuucuauuucugcaaaaua

SEQ ID NO: 177299 - RNA, 32 nt, Homo Sapiens
ggggagcgcgcgcggcgcgauggacggucggg

SEQ ID NO: 177300 - RNA, 32 nt, Homo Sapiens
gugcauccaaaaauguauaaaaauauuauuau

SEQ ID NO: 177301 - RNA, 32 nt, Homo Sapiens
agccuuguauugugaacucuaauuguacuuuu

SEQ ID NO: 177302 - RNA, 32 nt, Homo Sapiens
cgcacauuuucccccuuccuguacaccucggg

SEQ ID NO: 177303 - RNA, 32 nt, Homo Sapiens
uccaggcacgguuuggaaauauucacaucgcu

SEQ ID NO: 177304 - RNA, 32 nt, Homo Sapiens
acucuucuaaagaaaaaucaccccagggagcu

SEQ ID NO: 177305 - RNA, 32 nt, Homo Sapiens
uaagucguugaacaucucuaguucucacuuuc

SEQ ID NO: 177306 - RNA, 32 nt, Homo Sapiens
ccugaauuacuuuggagggccuaauauaauug

SEQ ID NO: 177307 - RNA, 32 nt, Homo Sapiens
ucucagaggguggggagggaggugggggcagc

SEQ ID NO: 177308 - RNA, 32 nt, Homo Sapiens
aaucaggaucugaguuauuuugcuaaacuugg

SEQ ID NO: 177309 - RNA, 32 nt, Homo Sapiens
uggccuuguagaugacucuguaccucagugaa

SEQ ID NO: 177310 - RNA, 32 nt, Homo Sapiens
aggggccgugcugaccucucccggggaucugg

SEQ ID NO: 177311 - RNA, 32 nt, Homo Sapiens
aacaggggcaucccggcccauaccccuccaga

SEQ ID NO: 177312 - RNA, 32 nt, Homo Sapiens
ggacucuaaccaagccuuccuggagggaccca

SEQ ID NO: 177313 - RNA, 32 nt, Homo Sapiens
ugaacacagcuaggaaugauggucaaucagug

SEQ ID NO: 177314 - RNA, 32 nt, Homo Sapiens
cuaguuggcucuuagcagcaucaagcuguaca

SEQ ID NO: 177315 - RNA, 30 nt, Homo Sapiens
ccucuaagucuaaugggggagcaggaggag

SEQ ID NO: 177316 - RNA, 32 nt, Homo Sapiens
uuaaagaauaccaaacauaacaaaauuauguu

SEQ ID NO: 177317 - RNA, 32 nt, Homo Sapiens
cgcggaggacuggcacauccacaaccguagga

SEQ ID NO: 177318 - RNA, 32 nt, Homo Sapiens
uaaaucacauucaaaauuaaaguuauaucuaa

SEQ ID NO: 177319 - RNA, 30 nt, Homo Sapiens
ucccuccucagggccggcggcagggugugg

SEQ ID NO: 177320 - RNA, 32 nt, Homo Sapiens
ccuguuuaccucaggauuguugugauuguaga

SEQ ID NO: 177321 - RNA, 32 nt, Homo Sapiens
gugucaguauuucaggguucuacauuuuaucu

SEQ ID NO: 177322 - RNA, 32 nt, Homo Sapiens
uguacaauuacauuuuggccuaaauacauuuu

SEQ ID NO: 177323 - RNA, 32 nt, Homo Sapiens
uauccagacccgcacagcuguuuccugugugg

SEQ ID NO: 177324 - RNA, 32 nt, Homo Sapiens
cagcaucugugguuaaaaauauagcauucuga

SEQ ID NO: 177325 - RNA, 32 nt, Homo Sapiens
gccagggugucauggaagggcugcugacaaga

SEQ ID NO: 177326 - RNA, 32 nt, Homo Sapiens
gagugagaccucgucucaaaaaauuaaaaaga

SEQ ID NO: 177327 - RNA, 32 nt, Homo Sapiens
uucauguauggacuagaggggcuugcacagua

SEQ ID NO: 177328 - RNA, 32 nt, Homo Sapiens
cagacccgcgccccgccgucugcgagccuccc

SEQ ID NO: 177329 - RNA, 32 nt, Homo Sapiens
caugcauuuaaguuuaagugaagucaacaaaa

SEQ ID NO: 177330 - RNA, 32 nt, Homo Sapiens
acugggcagcaucaccagcuccuguaccgugg

SEQ ID NO: 177331 - RNA, 32 nt, Homo Sapiens
gacgggcacggcaagcaugguucaucggggcu

SEQ ID NO: 177332 - RNA, 32 nt, Homo Sapiens
gugugcauuauguaccucggcuguacugaguu

SEQ ID NO: 177333 - RNA, 32 nt, Homo Sapiens
gggcaggccuccgcccuccuccccuacuccag

SEQ ID NO: 177334 - RNA, 32 nt, Homo Sapiens
gaggacuguauauaugauuuuaaaccuaaguu

SEQ ID NO: 177335 - RNA, 32 nt, Homo Sapiens
aucagcucaucuccgagaacuacagcgagggc

SEQ ID NO: 177336 - RNA, 32 nt, Homo Sapiens
ggagguuggggauaugacugacaaggaaaggc

SEQ ID NO: 177337 - RNA, 32 nt, Homo Sapiens
ccccuuggagcagcugugggugcggauccagc

SEQ ID NO: 177338 - RNA, 32 nt, Homo Sapiens
auauggcauuguauauuucauuauuauccuuc

SEQ ID NO: 177339 - RNA, 32 nt, Homo Sapiens
auguugggaaagggucuuggugucacugccgc

SEQ ID NO: 177340 - RNA, 32 nt, Homo Sapiens
uuggugccaugcuuguauagccugcagaacua

SEQ ID NO: 177341 - RNA, 32 nt, Homo Sapiens
augcacaggaagauauugguggccggugguuu

SEQ ID NO: 177342 - RNA, 32 nt, Homo Sapiens
guuucagugucuaggauuccugaaaauuuccu

SEQ ID NO: 177343 - RNA, 32 nt, Homo Sapiens
aguccuuauacccacacccuccccacggaagg

SEQ ID NO: 177344 - RNA, 32 nt, Homo Sapiens
gccaagcccgccgggccggcccggucccaggu

SEQ ID NO: 177345 - RNA, 32 nt, Homo Sapiens
gcucccaagugccggccaccgcugucagggau

SEQ ID NO: 177346 - RNA, 29 nt, Homo Sapiens
agggucuguugccggguacguucaagagg

SEQ ID NO: 177347 - RNA, 32 nt, Homo Sapiens
gggguuagcgggggccgccgcgccaccugcgc

SEQ ID NO: 177348 - RNA, 32 nt, Homo Sapiens
uucugugauugcaccuuuguuauggccaacaa

SEQ ID NO: 177349 - RNA, 32 nt, Homo Sapiens
aauuuaaguauuuaaauugcuucauagucuaa

SEQ ID NO: 177350 - RNA, 32 nt, Homo Sapiens
caucugugacaacuccacgagcccuuaauuuc

SEQ ID NO: 177351 - RNA, 32 nt, Homo Sapiens
ccaagauaaaauguguucuuauuaaacaaugc

SEQ ID NO: 177352 - RNA, 32 nt, Homo Sapiens
guaaacacauaaaugaaagaaacccacagaag

SEQ ID NO: 177353 - RNA, 32 nt, Homo Sapiens
cggcgggggcccucgcguggacacccgccccu

SEQ ID NO: 177354 - RNA, 32 nt, Homo Sapiens
uagauaauauuuuuguauuucucuauuuucau

SEQ ID NO: 177355 - RNA, 30 nt, Homo Sapiens
aagcuauagcuggagggggaaaugagguca

SEQ ID NO: 177356 - RNA, 32 nt, Homo Sapiens
cuacggccggaagauggcggcggccgcagagu

SEQ ID NO: 177357 - RNA, 32 nt, Homo Sapiens
gacggaguguugcucugucacccaggcuggag

SEQ ID NO: 177358 - RNA, 32 nt, Homo Sapiens
cagugaaacaaucuagcagagaauuaauguca

SEQ ID NO: 177359 - RNA, 32 nt, Homo Sapiens
uuguuuguucuucuauuccuuuguuaaucaga

SEQ ID NO: 177360 - RNA, 32 nt, Homo Sapiens
caccugucucucucuuuuuuuuuuaagacagu

SEQ ID NO: 177361 - RNA, 32 nt, Homo Sapiens
cagggcuacagcgcccgacugcugcaggccgg

SEQ ID NO: 177362 - RNA, 32 nt, Homo Sapiens
aaguugcccagucucagguaugucuuuaucag

SEQ ID NO: 177363 - RNA, 32 nt, Homo Sapiens
guggcggaaugggguguauugauucugagcaa

SEQ ID NO: 177364 - RNA, 30 nt, Homo Sapiens
gcaaggaauauccuguguuguuucacucuu

SEQ ID NO: 177365 - RNA, 32 nt, Homo Sapiens
uucauuuuuuguagagacaggaucucacuaug

SEQ ID NO: 177366 - RNA, 32 nt, Homo Sapiens
ucagaugagucuuuucaacauggucuucaaca

SEQ ID NO: 177367 - RNA, 32 nt, Homo Sapiens
ugcaaguguuugccauuuuguaaaacauuuug

SEQ ID NO: 177368 - RNA, 32 nt, Homo Sapiens
cauuucugccccaccagaucuuugcuccuuuc

SEQ ID NO: 177369 - RNA, 32 nt, Homo Sapiens
gugugguggcauuccccccgaccuccaaugug

SEQ ID NO: 177370 - RNA, 32 nt, Homo Sapiens
aguuuuaaaaauacgugaauaaauugguuauu

SEQ ID NO: 177371 - RNA, 32 nt, Homo Sapiens
cucaagccaccgacuccaauagauaaaaggaa

SEQ ID NO: 177372 - RNA, 32 nt, Homo Sapiens
gguccugcuggggaggggggcugggcucccac

SEQ ID NO: 177373 - RNA, 32 nt, Homo Sapiens
cccugcuggguagcauuuuguauggaacgguu

SEQ ID NO: 177374 - RNA, 32 nt, Homo Sapiens
ggcuuagaauucagucucuuuaugauaaauau

SEQ ID NO: 177375 - RNA, 32 nt, Homo Sapiens
aauuacaucuucuuuuaauguaucuuuguucu

SEQ ID NO: 177376 - RNA, 32 nt, Homo Sapiens
ugcggcccgggcggcggcgaugcuguggccgc

SEQ ID NO: 177377 - RNA, 32 nt, Homo Sapiens
ugcccccaggaaaggacgcauccaccgguagc

SEQ ID NO: 177378 - RNA, 32 nt, Homo Sapiens
agccugagccuggccgggccaggaugggagug

SEQ ID NO: 177379 - RNA, 32 nt, Homo Sapiens
cuggcaugauuucuauuuauuaugauauccua

SEQ ID NO: 177380 - RNA, 32 nt, Homo Sapiens
cugcccuuggaaagagucugacagcucgacuu

SEQ ID NO: 177381 - RNA, 32 nt, Homo Sapiens
uuaaaauucauauagaaccaaacaagagcuug

SEQ ID NO: 177382 - RNA, 32 nt, Homo Sapiens
cauggacgccuggcuccaggcuccaggcugac

SEQ ID NO: 177383 - RNA, 32 nt, Homo Sapiens
aucucacacugugaguccagcggcgcagggug

SEQ ID NO: 177384 - RNA, 30 nt, Homo Sapiens
caccgucuggacucaucucuggguaacuca

SEQ ID NO: 177385 - RNA, 32 nt, Homo Sapiens
uugugucuggcaucuccuccucaugcugcguc

SEQ ID NO: 177386 - RNA, 32 nt, Homo Sapiens
uuggggggugccuggugaugaggaggggaugg

SEQ ID NO: 177387 - RNA, 32 nt, Homo Sapiens
ucacaaauauuuccaacaaaagagcauagaug

SEQ ID NO: 177388 - RNA, 31 nt, Homo Sapiens
ccgcuguugcugcugacuccaaggucugcuc

SEQ ID NO: 177389 - RNA, 32 nt, Homo Sapiens
gguaguggcaaugaaauagaauuauuaguaua

SEQ ID NO: 177390 - RNA, 32 nt, Homo Sapiens
ucagccugagccgggggaagccaggcggcccg

SEQ ID NO: 177391 - RNA, 32 nt, Homo Sapiens
gcugcagccugcagggagaagcaagaagcauc

SEQ ID NO: 177392 - RNA, 32 nt, Homo Sapiens
auguuagugcagugacgggaaauacacauuau

SEQ ID NO: 177393 - RNA, 30 nt, Homo Sapiens
aacagcugagugcgggcgccggcgccgucu

SEQ ID NO: 177394 - RNA, 32 nt, Homo Sapiens
gcccucagaucccaggguacacucuucuccau

SEQ ID NO: 177395 - RNA, 32 nt, Homo Sapiens
aagauccugggaagaaggggagggaggagauc

SEQ ID NO: 177396 - RNA, 31 nt, Homo Sapiens
ccagcuccacccucucgucaagcucauccuc

SEQ ID NO: 177397 - RNA, 30 nt, Homo Sapiens
cgggucagauucggcggcaggccgucaacg

SEQ ID NO: 177398 - RNA, 32 nt, Homo Sapiens
cugccugagcagccuuuccuccuugcccuguu

SEQ ID NO: 177399 - RNA, 32 nt, Homo Sapiens
ugugguuuguauccauuuaugcaggauacucu

SEQ ID NO: 177400 - RNA, 32 nt, Homo Sapiens
uggaugacugacuggcguggcccgaggggugc

SEQ ID NO: 177401 - RNA, 32 nt, Homo Sapiens
aaggaaugcaauaaagaguaaauauacuugaa

SEQ ID NO: 177402 - RNA, 28 nt, Homo Sapiens
ggagcggggaggcgcccgaggugagacg

SEQ ID NO: 177403 - RNA, 32 nt, Homo Sapiens
ucagcgggcgcggcggagggcuggccggccuc

SEQ ID NO: 177404 - RNA, 32 nt, Homo Sapiens
ugaauaaagccuuuuuacuugugggugcaauc

SEQ ID NO: 177405 - RNA, 32 nt, Homo Sapiens
ucucaguuguauguugcuauaauccuccaaau

SEQ ID NO: 177406 - RNA, 32 nt, Homo Sapiens
ugcuuuuccuggguccugucuuggaaggacag

SEQ ID NO: 177407 - RNA, 32 nt, Homo Sapiens
cacagaagaacaaaagaaaaccauaggcaaaa

SEQ ID NO: 177408 - RNA, 32 nt, Homo Sapiens
ucccugcuuccaugcuuucuccuucaguccau

SEQ ID NO: 177409 - RNA, 32 nt, Homo Sapiens
uuucauauucugaagucucaccacacauaaua

SEQ ID NO: 177410 - RNA, 32 nt, Homo Sapiens
agaacgacuaagaccaaauuauggaaaauaag

SEQ ID NO: 177411 - RNA, 32 nt, Homo Sapiens
cuguucucaaucuggucugggagacgaauccu

SEQ ID NO: 177412 - RNA, 32 nt, Homo Sapiens
aagaaauagaaagaacuacagcaaauuuucua

SEQ ID NO: 177413 - RNA, 32 nt, Homo Sapiens
cagccauccacgccgccgccacgaccgacucc

SEQ ID NO: 177414 - RNA, 32 nt, Homo Sapiens
acuuguuauaugcuuuugaaaguaaacugcaa

SEQ ID NO: 177415 - RNA, 32 nt, Homo Sapiens
gccgacgucaccccaaagccagccacggaagc

SEQ ID NO: 177416 - RNA, 32 nt, Homo Sapiens
ugugaacucgcuccaaauucuuucucgcauga

SEQ ID NO: 177417 - RNA, 32 nt, Homo Sapiens
gugcccccucuccugugccggcgugggcaucc

SEQ ID NO: 177418 - RNA, 32 nt, Homo Sapiens
uauggucuuaugcuagguaaccccaaacccag

SEQ ID NO: 177419 - RNA, 32 nt, Homo Sapiens
accaggaugccaggagcagagacaggguggcc

SEQ ID NO: 177420 - RNA, 32 nt, Homo Sapiens
cccugcucaacuucuccaccaagcauuugguu

SEQ ID NO: 177421 - RNA, 32 nt, Homo Sapiens
gaagcccugcuaaauuuuacuccaucaagauc

SEQ ID NO: 177422 - RNA, 32 nt, Homo Sapiens
ugaaaaccacguguuauauccuguugcuaguc

SEQ ID NO: 177423 - RNA, 32 nt, Homo Sapiens
gaaccaacugguaaucacaguauuauuuagug

SEQ ID NO: 177424 - RNA, 32 nt, Homo Sapiens
aaaacacaaaaauuagcugggugugguggugc

SEQ ID NO: 177425 - RNA, 30 nt, Homo Sapiens
cgggaggcgcccgcugucgaggcagcugag

SEQ ID NO: 177426 - RNA, 32 nt, Homo Sapiens
uacacuugacuucugcucaucaagugccaauu

SEQ ID NO: 177427 - RNA, 32 nt, Homo Sapiens
gagagagugagugguccuuuggucaaugaaaa

SEQ ID NO: 177428 - RNA, 32 nt, Homo Sapiens
aauguguguaaaaaaguguucuguguccuucu

SEQ ID NO: 177429 - RNA, 32 nt, Homo Sapiens
aaacuaaauaaggauggaacauuuauugaaug

SEQ ID NO: 177430 - RNA, 32 nt, Homo Sapiens
ugugcgcggagcuaguuucccaguuucccggg

SEQ ID NO: 177431 - RNA, 32 nt, Homo Sapiens
caaacaguaggagagaagaugccaaguuagaa

SEQ ID NO: 177432 - RNA, 32 nt, Homo Sapiens
uuuugacuuggagagacuugcuuuuguugguu

SEQ ID NO: 177433 - RNA, 32 nt, Homo Sapiens
uguuuuuggcacuuaaaacauaaaauucauua

SEQ ID NO: 177434 - RNA, 32 nt, Homo Sapiens
uuugcuuuuguuuauggacaauguucagcuga

SEQ ID NO: 177435 - RNA, 32 nt, Homo Sapiens
aagagcugucuggguggguuucgucuugcuuu

SEQ ID NO: 177436 - RNA, 32 nt, Homo Sapiens
uggcauagaaguagaagcugguccuccugggu

SEQ ID NO: 177437 - RNA, 32 nt, Homo Sapiens
ggagcagagucuucucaucguuucacuggagg

SEQ ID NO: 177438 - RNA, 32 nt, Homo Sapiens
ucgucaugaucaaugaauaugugauuugcucc

SEQ ID NO: 177439 - RNA, 32 nt, Homo Sapiens
gacgcgcgggccggcgcagccauggugaagau

SEQ ID NO: 177440 - RNA, 32 nt, Homo Sapiens
gaacuuucuuuucuguuuuucuuuaaucuccc

SEQ ID NO: 177441 - RNA, 32 nt, Homo Sapiens
cagccccaguccgcugcgggcgggcgucgaca

SEQ ID NO: 177442 - RNA, 32 nt, Homo Sapiens
cugaaucgcuggaagcugcaucugaaaaguau

SEQ ID NO: 177443 - RNA, 32 nt, Homo Sapiens
aaggugccaggaggagcauggguguggaaguc

SEQ ID NO: 177444 - RNA, 32 nt, Homo Sapiens
aauacagugucugaguuuucaucggucuucac

SEQ ID NO: 177445 - RNA, 32 nt, Homo Sapiens
agggcuggggugagaccccucccuuccagaau

SEQ ID NO: 177446 - RNA, 32 nt, Homo Sapiens
uaaaguacauauauuucagucacuuaauaaaa

SEQ ID NO: 177447 - RNA, 32 nt, Homo Sapiens
ucacuugacaacacacaggaauggaauggaca

SEQ ID NO: 177448 - RNA, 32 nt, Homo Sapiens
aagcucgcuccuuggucugcaguccuuuaaac

SEQ ID NO: 177449 - RNA, 32 nt, Homo Sapiens
ugcuucccacuuuugugguccaccugcaggcc

SEQ ID NO: 177450 - RNA, 32 nt, Homo Sapiens
caauccccgggaccugccgagcagccaaggcc

SEQ ID NO: 177451 - RNA, 32 nt, Homo Sapiens
uagggcaaccacuuaugaguugguuuuugcaa

SEQ ID NO: 177452 - RNA, 32 nt, Homo Sapiens
acaccacacuuacuguagguaaauaaaaauac

SEQ ID NO: 177453 - RNA, 32 nt, Homo Sapiens
gcaggcauaaaauaacccagacauacucucau

SEQ ID NO: 177454 - RNA, 32 nt, Homo Sapiens
agcguguuccuuuuccucuuuuuugucacuuu

SEQ ID NO: 177455 - RNA, 32 nt, Homo Sapiens
ugcuagcccucccaccaccauccacucugaua

SEQ ID NO: 177456 - RNA, 32 nt, Homo Sapiens
gggcggccagcugagucggaucuuuauguuug

SEQ ID NO: 177457 - RNA, 32 nt, Homo Sapiens
cccgugcguccgaccacagaucagaggagucc

SEQ ID NO: 177458 - RNA, 32 nt, Homo Sapiens
cauugcacuccagccugggugacagaguaaca

SEQ ID NO: 177459 - RNA, 32 nt, Homo Sapiens
ucgcgagcaccgcgcuccagaucgagagcggc

SEQ ID NO: 177460 - RNA, 32 nt, Homo Sapiens
caagcucugcccuggcuguggguaucaggacu

SEQ ID NO: 177461 - RNA, 32 nt, Homo Sapiens
cagaggaacaagaucaagaugcgcuuuaacug

SEQ ID NO: 177462 - RNA, 32 nt, Homo Sapiens
gcaaaauccccagccuuaauucuugcuucagg

SEQ ID NO: 177463 - RNA, 32 nt, Homo Sapiens
aggaugugcagggcugccucagaagcuggcug

SEQ ID NO: 177464 - RNA, 32 nt, Homo Sapiens
uauacacguacaugucuguguauacacauaua

SEQ ID NO: 177465 - RNA, 32 nt, Homo Sapiens
guuuuguuagacagucaggguguauuauuuca

SEQ ID NO: 177466 - RNA, 32 nt, Homo Sapiens
cacccuacugaagggaggaagaucugaucauu

SEQ ID NO: 177467 - RNA, 27 nt, Homo Sapiens
gagcucacucucuucagcuuccggccc

SEQ ID NO: 177468 - RNA, 32 nt, Homo Sapiens
aggaaaaauaauccuaaauguuugauuaccuc

SEQ ID NO: 177469 - RNA, 30 nt, Homo Sapiens
aacccgggagguggagguugcggugagcug

SEQ ID NO: 177470 - RNA, 29 nt, Homo Sapiens
gccuaaaagaguuuauauacuucuaaaag

SEQ ID NO: 177471 - RNA, 30 nt, Homo Sapiens
aaccugggagguggagguugcagugagcca

SEQ ID NO: 177472 - RNA, 32 nt, Homo Sapiens
agcggccccccuccccugcccgggagggaggc

SEQ ID NO: 177473 - RNA, 32 nt, Homo Sapiens
cccuuagaaaucagggugauuucaccuggaac

SEQ ID NO: 177474 - RNA, 32 nt, Homo Sapiens
cugccgccgccgacccccgccggcccugaacg

SEQ ID NO: 177475 - RNA, 32 nt, Homo Sapiens
auacuagguuggaaaaaucugguuuagcccac

SEQ ID NO: 177476 - RNA, 32 nt, Homo Sapiens
gugagaugaugaagauccacuuaugacugaac

SEQ ID NO: 177477 - RNA, 32 nt, Homo Sapiens
ccccagcguucgggagcggcccgggagcggaa

SEQ ID NO: 177478 - RNA, 32 nt, Homo Sapiens
cgacagggacgcugcggggccuggggaggaaa

SEQ ID NO: 177479 - RNA, 32 nt, Homo Sapiens
ugcugugaggaggcccagaaaaggccaaccag

SEQ ID NO: 177480 - RNA, 32 nt, Homo Sapiens
ggaggccugguggggguccgugcggcgacugg

SEQ ID NO: 177481 - RNA, 32 nt, Homo Sapiens
acagcccacugaacaaggucucagggguauug

SEQ ID NO: 177482 - RNA, 32 nt, Homo Sapiens
aagcgaguacacauugccagagcccaccaucc

SEQ ID NO: 177483 - RNA, 32 nt, Homo Sapiens
caggccuguuccuggcagcuguggcugcagcu

SEQ ID NO: 177484 - RNA, 32 nt, Homo Sapiens
cagcacccaacuuuaccacccucccccaccuc

SEQ ID NO: 177485 - RNA, 32 nt, Homo Sapiens
gaaaauuucuguguuuucagaauuuccauuuc

SEQ ID NO: 177486 - RNA, 32 nt, Homo Sapiens
auuguuuuuccuucugguggcuaugaggauga

SEQ ID NO: 177487 - RNA, 32 nt, Homo Sapiens
uuugcuuccgaugauuaaaucuaagucauuug

SEQ ID NO: 177488 - RNA, 31 nt, Homo Sapiens
cucagccugcgcagccauggccucggcaggg

SEQ ID NO: 177489 - RNA, 32 nt, Homo Sapiens
uuaacugagccugaaucccuucugggaaguaa

SEQ ID NO: 177490 - RNA, 32 nt, Homo Sapiens
aggguacauguuuaacauuucauuucaaaauc

SEQ ID NO: 177491 - RNA, 32 nt, Homo Sapiens
agcacccccacuuucaacugaaucaagugagg

SEQ ID NO: 177492 - RNA, 32 nt, Homo Sapiens
ugugggccgggcgggagugcggcgagagccgg

SEQ ID NO: 177493 - RNA, 32 nt, Homo Sapiens
guuacuuccaugaauggaugaguugaagugaa

SEQ ID NO: 177494 - RNA, 32 nt, Homo Sapiens
ggacugucucgugcgggcagcugcgggcgcac

SEQ ID NO: 177495 - RNA, 32 nt, Homo Sapiens
uaccguuaauucaaauugacagagauugauaa

SEQ ID NO: 177496 - RNA, 32 nt, Homo Sapiens
cuccccaccuuucucucccaaugaagaaacgu

SEQ ID NO: 177497 - RNA, 32 nt, Homo Sapiens
gcuaagcgcgcccuccaccccggcccccgaac

SEQ ID NO: 177498 - RNA, 32 nt, Homo Sapiens
cauccauggcccagccccucuccccucugucu

SEQ ID NO: 177499 - RNA, 32 nt, Homo Sapiens
cuuguauuuacuucuuuuuuuuaaauguaagg

SEQ ID NO: 177500 - RNA, 31 nt, Homo Sapiens
aaucgagagcauuguuagccauagacauuuu

SEQ ID NO: 177501 - RNA, 32 nt, Homo Sapiens
auauuagaacgaaaacagaaacauggcucacu

SEQ ID NO: 177502 - RNA, 32 nt, Homo Sapiens
cuucgguuaaugggucaguucuccuuggaacu

SEQ ID NO: 177503 - RNA, 32 nt, Homo Sapiens
ggagcuuugucucguguguuuugaaaaaggcu

SEQ ID NO: 177504 - RNA, 32 nt, Homo Sapiens
aggccgagugggaggaccugacccagcaguac

SEQ ID NO: 177505 - RNA, 32 nt, Homo Sapiens
uguauugccguggacuucagcacccagacaag

SEQ ID NO: 177506 - RNA, 32 nt, Homo Sapiens
uagauaugagagggagccgcuccugguucugg

SEQ ID NO: 177507 - RNA, 32 nt, Homo Sapiens
caccgcucgcucugcuggccgcuaccugcagc

SEQ ID NO: 177508 - RNA, 32 nt, Homo Sapiens
uggcgaugcugcuggugacgcugguggcggcc

SEQ ID NO: 177509 - RNA, 32 nt, Homo Sapiens
auuuucuuuuuguaggaguuuuaucccuuggu

SEQ ID NO: 177510 - RNA, 32 nt, Homo Sapiens
acaaaagaaaagacuuguaauauuuuuauaua

SEQ ID NO: 177511 - RNA, 32 nt, Homo Sapiens
agccagcccucccuguccuccucggaucaccg

SEQ ID NO: 177512 - RNA, 32 nt, Homo Sapiens
gccugaaccaaaaaacaacaaacaaacaaaaa

SEQ ID NO: 177513 - RNA, 32 nt, Homo Sapiens
ugcagcucagcaugcauaggugggguaguugg

SEQ ID NO: 177514 - RNA, 30 nt, Homo Sapiens
gggaaaggcugcaugggggagccccaucca

SEQ ID NO: 177515 - RNA, 32 nt, Homo Sapiens
ucaguaccagcagcccgaccaucacgcggcgg

SEQ ID NO: 177516 - RNA, 32 nt, Homo Sapiens
agauaacuuuuguagccagugguuauauugcu

SEQ ID NO: 177517 - RNA, 32 nt, Homo Sapiens
aaggggaauggggccauguuguugacauuagg

SEQ ID NO: 177518 - RNA, 32 nt, Homo Sapiens
caccuguaccagcuggguccuuuaucuugcac

SEQ ID NO: 177519 - RNA, 31 nt, Homo Sapiens
ggccacagugaccgccugcccccgccccucc

SEQ ID NO: 177520 - RNA, 32 nt, Homo Sapiens
aggguuugaaagauaugaaggaagggaaaaga

SEQ ID NO: 177521 - RNA, 30 nt, Homo Sapiens
gaguguuugcaaaagggggaaaguaguuug

SEQ ID NO: 177522 - RNA, 28 nt, Homo Sapiens
gcuuuguaucuuaagauguguuuccaag

SEQ ID NO: 177523 - RNA, 32 nt, Homo Sapiens
gcccuggaccccaucccaggaccucccuauca

SEQ ID NO: 177524 - RNA, 32 nt, Homo Sapiens
ucaccaaacuauuaaucaaaagucacuuauug

SEQ ID NO: 177525 - RNA, 32 nt, Homo Sapiens
gcuggagaagaagcggcuggaggagcgcaucg

SEQ ID NO: 177526 - RNA, 32 nt, Homo Sapiens
gcugugcccaaauuauuaauaaaucagauugc

SEQ ID NO: 177527 - RNA, 32 nt, Homo Sapiens
cuggcaggagucauaucauggacgaugauaaa

SEQ ID NO: 177528 - RNA, 32 nt, Homo Sapiens
uaauaagaugaaauuccucuguuguuaguaaa

SEQ ID NO: 177529 - RNA, 32 nt, Homo Sapiens
cgaaggcucagggccucacaaggcaguguacg

SEQ ID NO: 177530 - RNA, 32 nt, Homo Sapiens
cuguguuguggcggcccuggauccggcgucag

SEQ ID NO: 177531 - RNA, 32 nt, Homo Sapiens
aaagcuuugucuuuuuguuguuguuguuguuu

SEQ ID NO: 177532 - RNA, 32 nt, Homo Sapiens
cucggccacagugcaagacugugucgcuuaaa

SEQ ID NO: 177533 - RNA, 32 nt, Homo Sapiens
auaacguggaaggaaaacguagucuuuuggga

SEQ ID NO: 177534 - RNA, 32 nt, Homo Sapiens
aagaggacaaugaagggcaucauauaaugaua

SEQ ID NO: 177535 - RNA, 32 nt, Homo Sapiens
uuuccagagagaugaaugaaacagucauccug

SEQ ID NO: 177536 - RNA, 32 nt, Homo Sapiens
aaccauacauugucccaaaagugucugugcau

SEQ ID NO: 177537 - RNA, 32 nt, Homo Sapiens
aggaccagcugagacuaagaaggaccagcaga

SEQ ID NO: 177538 - RNA, 32 nt, Homo Sapiens
cgggaucggagcccgcgcggagcauggauccg

SEQ ID NO: 177539 - RNA, 32 nt, Homo Sapiens
gggacacaccucagccauccugugggggcagc

SEQ ID NO: 177540 - RNA, 32 nt, Homo Sapiens
aggguggaagagccgggcgagcagagcugcgc

SEQ ID NO: 177541 - RNA, 30 nt, Homo Sapiens
uuugagacagaguuucacucuuguugccug

SEQ ID NO: 177542 - RNA, 32 nt, Homo Sapiens
ugcgccgugcccgugaguccggcgcgcagagg

SEQ ID NO: 177543 - RNA, 32 nt, Homo Sapiens
cccaccacuggaaauguuagcauaaaagaacu

SEQ ID NO: 177544 - RNA, 32 nt, Homo Sapiens
uuacccugccagcuuggcugugaucacagccc

SEQ ID NO: 177545 - RNA, 31 nt, Homo Sapiens
cgaggcgcgcggugccaaccauggagcgggc

SEQ ID NO: 177546 - RNA, 32 nt, Homo Sapiens
ucuggauuugcuuuaccuuguuaauauuaucu

SEQ ID NO: 177547 - RNA, 32 nt, Homo Sapiens
ugaagguccauauuauacucacuugggaucug

SEQ ID NO: 177548 - RNA, 32 nt, Homo Sapiens
agugcagcuuggaucucggggguguggggccc

SEQ ID NO: 177549 - RNA, 32 nt, Homo Sapiens
ucugugaacugggacagaagcagaggaggcug

SEQ ID NO: 177550 - RNA, 32 nt, Homo Sapiens
gcugcagaggggcaggcccugcacuguccugc

SEQ ID NO: 177551 - RNA, 32 nt, Homo Sapiens
auaucguaucuuaaugaugcuaugauaauugc

SEQ ID NO: 177552 - RNA, 32 nt, Homo Sapiens
guccugugcaugucuggguuucagugucgucu

SEQ ID NO: 177553 - RNA, 32 nt, Homo Sapiens
ggcgcucccuccccgacuccuaaguccuucgg

SEQ ID NO: 177554 - RNA, 32 nt, Homo Sapiens
ccuucggcucccggucucgguguagcugccgu

SEQ ID NO: 177555 - RNA, 32 nt, Homo Sapiens
accucuaguuauguugaacacagccagcacag

SEQ ID NO: 177556 - RNA, 32 nt, Homo Sapiens
ggaaggggcuacuccgcccacgucagggagag

SEQ ID NO: 177557 - RNA, 30 nt, Homo Sapiens
gcggcaggcaggcgcccgcaguuccauggu

SEQ ID NO: 177558 - RNA, 32 nt, Homo Sapiens
gccacuuaauaaagguucauauguucauauua

SEQ ID NO: 177559 - RNA, 27 nt, Homo Sapiens
agaugaccgcgggcgccggcgugcucc

SEQ ID NO: 177560 - RNA, 32 nt, Homo Sapiens
ccggggaccccauggggugcuguaaucaugga

SEQ ID NO: 177561 - RNA, 32 nt, Homo Sapiens
cuuguuggaguaagacaguaaauaucagccuu

SEQ ID NO: 177562 - RNA, 32 nt, Homo Sapiens
caggcccgcggcggccccggccguaucgcgag

SEQ ID NO: 177563 - RNA, 32 nt, Homo Sapiens
cagcagugccgggcugggcucugcggugcggu

SEQ ID NO: 177564 - RNA, 32 nt, Homo Sapiens
ggcgauccgggaauaaagaauguccgccucuc

SEQ ID NO: 177565 - RNA, 30 nt, Homo Sapiens
uauuuuauauuaauggggagaggggauuuu

SEQ ID NO: 177566 - RNA, 32 nt, Homo Sapiens
uccucugcuucucuccucaucaucauucccaa

SEQ ID NO: 177567 - RNA, 32 nt, Homo Sapiens
agauuuuaaguaagaguagauacauuguaccc

SEQ ID NO: 177568 - RNA, 32 nt, Homo Sapiens
caccagaaaacagaugcagagauggaacucug

SEQ ID NO: 177569 - RNA, 32 nt, Homo Sapiens
uuuuaguucacaaagcacuuucaaauuuaugg

SEQ ID NO: 177570 - RNA, 32 nt, Homo Sapiens
agggcuggcccauaggugcugcuggcuccccg

SEQ ID NO: 177571 - RNA, 32 nt, Homo Sapiens
gaggggccugcgggagacccagggucggaccc

SEQ ID NO: 177572 - RNA, 32 nt, Homo Sapiens
auacaggguucaguauuuaguaagccuucaau

SEQ ID NO: 177573 - RNA, 32 nt, Homo Sapiens
ggaaguggaaugcgaccccccagccucuuucc

SEQ ID NO: 177574 - RNA, 32 nt, Homo Sapiens
aucaggacagcguccauugugcucucagucug

SEQ ID NO: 177575 - RNA, 32 nt, Homo Sapiens
ugugauuuaccucuguuaguaccugugccugc

SEQ ID NO: 177576 - RNA, 32 nt, Homo Sapiens
aggaagaaaugguuuucuuaaauaccuacaaa

SEQ ID NO: 177577 - RNA, 32 nt, Homo Sapiens
acauacacauaaauauuauugcaauuaaguga

SEQ ID NO: 177578 - RNA, 32 nt, Homo Sapiens
ucucauccauucucauauguauucucaaugac

SEQ ID NO: 177579 - RNA, 32 nt, Homo Sapiens
agccaggcgugguggcgggcgccuguaaucac

SEQ ID NO: 177580 - RNA, 32 nt, Homo Sapiens
caggaguuaacagauggccagcuccuuauuuu

SEQ ID NO: 177581 - RNA, 32 nt, Homo Sapiens
ggccacggagcugcuucaggaugugcggcacc

SEQ ID NO: 177582 - RNA, 32 nt, Homo Sapiens
cucauucugugagggagggaaagauuagccaa

SEQ ID NO: 177583 - RNA, 32 nt, Homo Sapiens
agucuaccaggaccgaccuggugcugcucaga

SEQ ID NO: 177584 - RNA, 32 nt, Homo Sapiens
uuacaggugugagccaccacacccagccaauu

SEQ ID NO: 177585 - RNA, 32 nt, Homo Sapiens
uuugggauucugcaugagacggagcugccucc

SEQ ID NO: 177586 - RNA, 32 nt, Homo Sapiens
uuugauaaguguugcuggaaucugcaacgcug

SEQ ID NO: 177587 - RNA, 32 nt, Homo Sapiens
gggagcaaugagauugccacuccauccccuga

SEQ ID NO: 177588 - RNA, 32 nt, Homo Sapiens
acuggguuuggagucgcaacagaaacuggacu

SEQ ID NO: 177589 - RNA, 32 nt, Homo Sapiens
gacccaauaaaaauacucaacuuuuuaaaaaa

SEQ ID NO: 177590 - RNA, 32 nt, Homo Sapiens
uacuuguccuuaagcagaagccaggcugugag

SEQ ID NO: 177591 - RNA, 32 nt, Homo Sapiens
auguagcaaaaauuuucuaaaacuguuuugug

SEQ ID NO: 177592 - RNA, 32 nt, Homo Sapiens
ggcaacagagugagaccccaucucuuuaaaaa

SEQ ID NO: 177593 - RNA, 32 nt, Homo Sapiens
uugaguuggguuucuaucacuugcaaucaaca

SEQ ID NO: 177594 - RNA, 32 nt, Homo Sapiens
caccucauuucccuccauuaucucccuaaagg

SEQ ID NO: 177595 - RNA, 32 nt, Homo Sapiens
gagcaccccuucccuuuccucugaagguacgc

SEQ ID NO: 177596 - RNA, 32 nt, Homo Sapiens
cuccuucccagacacacccccacgcccccacu

SEQ ID NO: 177597 - RNA, 31 nt, Homo Sapiens
ccacgucacaugcucgcuccagggguggggc

SEQ ID NO: 177598 - RNA, 32 nt, Homo Sapiens
agaaugaaagagguugcuuaucagugagcuga

SEQ ID NO: 177599 - RNA, 32 nt, Homo Sapiens
ucaggaaagcagccuuucuuuagggcugucau

SEQ ID NO: 177600 - RNA, 32 nt, Homo Sapiens
cuuagguggcuucaggacugggccaggcaccu

SEQ ID NO: 177601 - RNA, 32 nt, Homo Sapiens
uagccaggcgugguggugggcgccuguaaucc

SEQ ID NO: 177602 - RNA, 32 nt, Homo Sapiens
cacucucggcccggauccaggccuccggguuc

SEQ ID NO: 177603 - RNA, 32 nt, Homo Sapiens
ucuucucauauuuuugucuugcuucugucuca

SEQ ID NO: 177604 - RNA, 32 nt, Homo Sapiens
ggggcagcugucugucuggcucuuuuugacag

SEQ ID NO: 177605 - RNA, 32 nt, Homo Sapiens
cggguggagcaccauggacgaagcuggcagcu

SEQ ID NO: 177606 - RNA, 32 nt, Homo Sapiens
uuuaauguucuuuucuagaaguguucaaauag

SEQ ID NO: 177607 - RNA, 32 nt, Homo Sapiens
cuucacccuggagcuccucccgggaccuugca

SEQ ID NO: 177608 - RNA, 32 nt, Homo Sapiens
gcugaggauuaccauuacuggguguaucaccc

SEQ ID NO: 177609 - RNA, 32 nt, Homo Sapiens
agcccugcucaccccagccccacagccggggc

SEQ ID NO: 177610 - RNA, 32 nt, Homo Sapiens
auuaggaucacuugagaauccuuuaaaaauuc

SEQ ID NO: 177611 - RNA, 32 nt, Homo Sapiens
auacccuuuaucucuguaaaauuuauacacac

SEQ ID NO: 177612 - RNA, 32 nt, Homo Sapiens
gcggccccuccucuccuguggccacagaacac

SEQ ID NO: 177613 - RNA, 32 nt, Homo Sapiens
guuaaaacaaaauuauccuuuaagucugcuua

SEQ ID NO: 177614 - RNA, 32 nt, Homo Sapiens
acgcugcaggacccgcgccgcugggaccccca

SEQ ID NO: 177615 - RNA, 32 nt, Homo Sapiens
uaaaagaagaagagauggacuucuuucuuccc

SEQ ID NO: 177616 - RNA, 32 nt, Homo Sapiens
uucccuuugacgccaucccagccccaaugaac

SEQ ID NO: 177617 - RNA, 32 nt, Homo Sapiens
aacgggaccugcuggccucaggaggcaggcag

SEQ ID NO: 177618 - RNA, 32 nt, Homo Sapiens
uguuccccaagcccuuggucugcugcuggagc

SEQ ID NO: 177619 - RNA, 32 nt, Homo Sapiens
aacugaaauugggcaccuuuuaugauggauau

SEQ ID NO: 177620 - RNA, 32 nt, Homo Sapiens
aacagaucaaggaaaugcaaaaagcacagacu

SEQ ID NO: 177621 - RNA, 32 nt, Homo Sapiens
acucugcccugguccacacaagcuccgguagc

SEQ ID NO: 177622 - RNA, 32 nt, Homo Sapiens
aaauuccacagcugccuccagaaacauuaacc

SEQ ID NO: 177623 - RNA, 32 nt, Homo Sapiens
cggacacucgcgcgcagccccgcggccguccc

SEQ ID NO: 177624 - RNA, 32 nt, Homo Sapiens
aucuucgggccgcugcugggccugcuggugcu

SEQ ID NO: 177625 - RNA, 32 nt, Homo Sapiens
uauuuaugggugcuuucaugugcgaggcacau

SEQ ID NO: 177626 - RNA, 32 nt, Homo Sapiens
aaacaugguauuuuauuacauaucuaaaacug

SEQ ID NO: 177627 - RNA, 32 nt, Homo Sapiens
cagaggccucugcggcgccgcgacaggaagcg

SEQ ID NO: 177628 - RNA, 32 nt, Homo Sapiens
cuuguucuucaguuaaaagagcuucuuucaca

SEQ ID NO: 177629 - RNA, 32 nt, Homo Sapiens
uucuuugacugacagagcaccauccaggcaaa

SEQ ID NO: 177630 - RNA, 32 nt, Homo Sapiens
accacugugaggccuacagcucugccggggag

SEQ ID NO: 177631 - RNA, 32 nt, Homo Sapiens
cuccugcgcgaccgccucccgccgggcucugc

SEQ ID NO: 177632 - RNA, 32 nt, Homo Sapiens
uauccuguccuguaucugucugaucagucacu

SEQ ID NO: 177633 - RNA, 32 nt, Homo Sapiens
ucccuaauaaucaaaacaccgcguaggcuccu

SEQ ID NO: 177634 - RNA, 32 nt, Homo Sapiens
ugagaauguggugugccaggcggugugcuaug

SEQ ID NO: 177635 - RNA, 32 nt, Homo Sapiens
aagagggacuccugggcucaucugcccuccau

SEQ ID NO: 177636 - RNA, 32 nt, Homo Sapiens
gaauguggcaaggccccaguguguauggacga

SEQ ID NO: 177637 - RNA, 30 nt, Homo Sapiens
uuguuggucgagcuggcgggucccgcgggc

SEQ ID NO: 177638 - RNA, 32 nt, Homo Sapiens
caucaagaaagauaacguuacuucuaaauugu

SEQ ID NO: 177639 - RNA, 32 nt, Homo Sapiens
auugcuaugcuuaugauucaggcuggacagcc

SEQ ID NO: 177640 - RNA, 32 nt, Homo Sapiens
cugugguugcuguggacugcacacgacagcag

SEQ ID NO: 177641 - RNA, 32 nt, Homo Sapiens
cuaaguauuguaugaagugcccaugauucugu

SEQ ID NO: 177642 - RNA, 32 nt, Homo Sapiens
gaguccgguacuggagccaaucagcgcgggca

SEQ ID NO: 177643 - RNA, 32 nt, Homo Sapiens
uuguuuugaucuucuuguuuucugacuuggaa

SEQ ID NO: 177644 - RNA, 32 nt, Homo Sapiens
ccucuccgcccggccuuucccggcguccccac

SEQ ID NO: 177645 - RNA, 32 nt, Homo Sapiens
ggucuucuugucauccagcugucacacugaca

SEQ ID NO: 177646 - RNA, 32 nt, Homo Sapiens
ccagcacacagcgaauguccucgccauucuau

SEQ ID NO: 177647 - RNA, 32 nt, Homo Sapiens
gaagaaacuaauauuuuacauaaaaacuaaua

SEQ ID NO: 177648 - RNA, 32 nt, Homo Sapiens
ucagccuggcugggcucuggugggggcuccug

SEQ ID NO: 177649 - RNA, 32 nt, Homo Sapiens
aaucagugguccugagcagugauuccaaacuc

SEQ ID NO: 177650 - RNA, 32 nt, Homo Sapiens
uuuccauucuugaauauugguaccucagugau

SEQ ID NO: 177651 - RNA, 32 nt, Homo Sapiens
uuugagacagagucucacucuuguugcccaag

SEQ ID NO: 177652 - RNA, 32 nt, Homo Sapiens
uccgaugcggggagagcagagccucgggaggg

SEQ ID NO: 177653 - RNA, 32 nt, Homo Sapiens
ccauuugaggucauuuaaaaucugugaagcaa

SEQ ID NO: 177654 - RNA, 32 nt, Homo Sapiens
auuggagguggcagugaaggauacagugguag

SEQ ID NO: 177655 - RNA, 32 nt, Homo Sapiens
ugugagaguuguggaggcaacccugggacucu

SEQ ID NO: 177656 - RNA, 32 nt, Homo Sapiens
cggauuggggauuucagaaaaaguuuuaguca

SEQ ID NO: 177657 - RNA, 32 nt, Homo Sapiens
uucuggauuuuuuuuucuuuauauuuugggua

SEQ ID NO: 177658 - RNA, 32 nt, Homo Sapiens
guagacaaaauaauucagaaauccauugugcc

SEQ ID NO: 177659 - RNA, 32 nt, Homo Sapiens
aucuuucaucuucuuuuuuucuuuaucuuuuu

SEQ ID NO: 177660 - RNA, 32 nt, Homo Sapiens
uuuauaacucauaauuauuuagacauaaugca

SEQ ID NO: 177661 - RNA, 32 nt, Homo Sapiens
gacucugccagcgcguccugcccgcuucccuc

SEQ ID NO: 177662 - RNA, 32 nt, Homo Sapiens
ggcccagaauccacuugacccugcugggcgcu

SEQ ID NO: 177663 - RNA, 32 nt, Homo Sapiens
gcccagccuugaugccauaugccuuggggagg

SEQ ID NO: 177664 - RNA, 32 nt, Homo Sapiens
gcggccgccggcgucgccgccauggaccuagg

SEQ ID NO: 177665 - RNA, 32 nt, Homo Sapiens
ucuuccccaccucggguccccaagccgcuggg

SEQ ID NO: 177666 - RNA, 32 nt, Homo Sapiens
ggcugguuuuuggcaggauucgaggcacaaac

SEQ ID NO: 177667 - RNA, 28 nt, Homo Sapiens
ugaaaugggccgacuaggaugacgaaac

SEQ ID NO: 177668 - RNA, 32 nt, Homo Sapiens
gaccgcgucccaggagcggaccgccuaguuuc

SEQ ID NO: 177669 - RNA, 32 nt, Homo Sapiens
cgcucuugcgucaggacggcgccgccgggccc

SEQ ID NO: 177670 - RNA, 32 nt, Homo Sapiens
aggccugaggucggcggacugccugaggucag

SEQ ID NO: 177671 - RNA, 32 nt, Homo Sapiens
gccuguuagguagggaggggcgcuaccugcuu

SEQ ID NO: 177672 - RNA, 32 nt, Homo Sapiens
agggguggcgcaggcaccuugcaagccucgag

SEQ ID NO: 177673 - RNA, 32 nt, Homo Sapiens
guggucauaaccuuuucuuuuaucaugucucg

SEQ ID NO: 177674 - RNA, 32 nt, Homo Sapiens
ccagcacuucgggaggcugaggugggcggauc

SEQ ID NO: 177675 - RNA, 32 nt, Homo Sapiens
aaugcuuguuuuaggaaagugaaucuguuaga

SEQ ID NO: 177676 - RNA, 32 nt, Homo Sapiens
guucuuucaugccuuaguaccuuuaagguaag

SEQ ID NO: 177677 - RNA, 32 nt, Homo Sapiens
aauguugaaaucaaauauaugcacaagucuuu

SEQ ID NO: 177678 - RNA, 32 nt, Homo Sapiens
acugggaggguggcagggagggacggggaagg

SEQ ID NO: 177679 - RNA, 32 nt, Homo Sapiens
uuuaaaaaaaauuuaaaucauguguauacaau

SEQ ID NO: 177680 - RNA, 32 nt, Homo Sapiens
guuuuuacguauguaggcccagucgucaucag

SEQ ID NO: 177681 - RNA, 32 nt, Homo Sapiens
acccacccggcucccaggauccucauuaggaa

SEQ ID NO: 177682 - RNA, 30 nt, Homo Sapiens
auguuugucugugugcuguaaccugaaguc

SEQ ID NO: 177683 - RNA, 32 nt, Homo Sapiens
aggcucguagagaggugggauagaggaaggga

SEQ ID NO: 177684 - RNA, 27 nt, Homo Sapiens
ugucugucccucuucagccaagcccaa

SEQ ID NO: 177685 - RNA, 32 nt, Homo Sapiens
gcagcguaguggggcugccaggccccagcuuu

SEQ ID NO: 177686 - RNA, 32 nt, Homo Sapiens
cgucuucuuggucugggagaccaucugggcag

SEQ ID NO: 177687 - RNA, 32 nt, Homo Sapiens
uucccugccuuguuuggauuggcacuguuugc

SEQ ID NO: 177688 - RNA, 32 nt, Homo Sapiens
cucacagucugcuggugggcagagaagacaga

SEQ ID NO: 177689 - RNA, 32 nt, Homo Sapiens
uucucaugaacaugcuauguguauguucaagc

SEQ ID NO: 177690 - RNA, 32 nt, Homo Sapiens
aagcuacugcugccuccauuucugggaaagac

SEQ ID NO: 177691 - RNA, 32 nt, Homo Sapiens
aaaccaacauuuagugguaaauccauuccugg

SEQ ID NO: 177692 - RNA, 32 nt, Homo Sapiens
ccggggcucagguaccacggcccacgugggca

SEQ ID NO: 177693 - RNA, 32 nt, Homo Sapiens
cucugggggaggaggaggaugggaccuccugg

SEQ ID NO: 177694 - RNA, 32 nt, Homo Sapiens
agaaccaaugauugugcauaaguucuaaauua

SEQ ID NO: 177695 - RNA, 32 nt, Homo Sapiens
cuugucacagaaaacagaaaaacaguuguucc

SEQ ID NO: 177696 - RNA, 32 nt, Homo Sapiens
gcgccuuuccaggucuucucccggugaaccgg

SEQ ID NO: 177697 - RNA, 32 nt, Homo Sapiens
agaguuguuucaugcucaacaaugccauugga

SEQ ID NO: 177698 - RNA, 32 nt, Homo Sapiens
ucgcaaaugcaaaucuaacugacuggcuuccu

SEQ ID NO: 177699 - RNA, 32 nt, Homo Sapiens
cagccugagucuuuucguuacaggccuuccuu

SEQ ID NO: 177700 - RNA, 32 nt, Homo Sapiens
ugaaaaacaagcucauccauucaacaggcaac

SEQ ID NO: 177701 - RNA, 32 nt, Homo Sapiens
ccccuaggaggggccuugugucugugccugcc

SEQ ID NO: 177702 - RNA, 32 nt, Homo Sapiens
aacaguuaaaagaacuacaugcacuaaugaaa

SEQ ID NO: 177703 - RNA, 32 nt, Homo Sapiens
ucuuaacagucucugagaaguacuuuaccuga

SEQ ID NO: 177704 - RNA, 32 nt, Homo Sapiens
aguuuuugacgguacuaacaaaguggucgcag

SEQ ID NO: 177705 - RNA, 32 nt, Homo Sapiens
uagccgggaguggcggugggcgccuguagucc

SEQ ID NO: 177706 - RNA, 32 nt, Homo Sapiens
agaucuggacccaagucuaaccccaaagcuca

SEQ ID NO: 177707 - RNA, 32 nt, Homo Sapiens
aucauguaccgcuuuucuuaaaacuuaaauug

SEQ ID NO: 177708 - RNA, 32 nt, Homo Sapiens
ccagagcccucccucccagcgcuaugauuacc

SEQ ID NO: 177709 - RNA, 32 nt, Homo Sapiens
cugggccgucgcaccacccccacccaccucac

SEQ ID NO: 177710 - RNA, 32 nt, Homo Sapiens
aacaagaucugagccugaguguguguaugugu

SEQ ID NO: 177711 - RNA, 32 nt, Homo Sapiens
cggcucuucucgcuuccccggcggcggcaagg

SEQ ID NO: 177712 - RNA, 32 nt, Homo Sapiens
uagggcugauauuucaugccucauggaugaga

SEQ ID NO: 177713 - RNA, 32 nt, Homo Sapiens
gaccaaacacuggcagcuucaggcuuacaauc

SEQ ID NO: 177714 - RNA, 32 nt, Homo Sapiens
caaaagcagauacuugaggaaaacacuauuuc

SEQ ID NO: 177715 - RNA, 32 nt, Homo Sapiens
augcacuucagguuugcuaucuguaaagccuu

SEQ ID NO: 177716 - RNA, 32 nt, Homo Sapiens
cgcgguccgcccgcggccccagacccagcucc

SEQ ID NO: 177717 - RNA, 32 nt, Homo Sapiens
guggccacccucgggggaccuucugacucaga

SEQ ID NO: 177718 - RNA, 32 nt, Homo Sapiens
uucuuuacaaacgucauauuucacagaugcga

SEQ ID NO: 177719 - RNA, 32 nt, Homo Sapiens
cuucccgagcgcgggacgcggcgcccuggggg

SEQ ID NO: 177720 - RNA, 32 nt, Homo Sapiens
auauauauuucugcuaauauuaguaaauaucu

SEQ ID NO: 177721 - RNA, 32 nt, Homo Sapiens
aaguccaggacacccagugggguggagucgga

SEQ ID NO: 177722 - RNA, 32 nt, Homo Sapiens
agugcuugcaaaauguaauaaauacacuugug

SEQ ID NO: 177723 - RNA, 32 nt, Homo Sapiens
aggaaucuagagaagcagucuggccauauuuu

SEQ ID NO: 177724 - RNA, 32 nt, Homo Sapiens
cgggacccgcagagccgagccgacccuucucu

SEQ ID NO: 177725 - RNA, 32 nt, Homo Sapiens
cagcugggcuccugggucuaguggggauuugu

SEQ ID NO: 177726 - RNA, 32 nt, Homo Sapiens
uguuguuuaaagauuauuaauucgaauuuagc

SEQ ID NO: 177727 - RNA, 32 nt, Homo Sapiens
aggcuguuuuuggcuugaagcucucuuggccu

SEQ ID NO: 177728 - RNA, 32 nt, Homo Sapiens
ggggcaggggguaugcagagcuuguggugggg

SEQ ID NO: 177729 - RNA, 32 nt, Homo Sapiens
ccuggccucuuccuggggccuggagcccuggu

SEQ ID NO: 177730 - RNA, 32 nt, Homo Sapiens
guuuuaauugagguauaaauuaaugagacaaa

SEQ ID NO: 177731 - RNA, 32 nt, Homo Sapiens
aauaauagaaggaguucaauugugaaaaguuu

SEQ ID NO: 177732 - RNA, 30 nt, Homo Sapiens
gugacugaguucccugcccagcuuucggga

SEQ ID NO: 177733 - RNA, 32 nt, Homo Sapiens
acugcgaccuccgucucccgggcucacgccau

SEQ ID NO: 177734 - RNA, 32 nt, Homo Sapiens
ucacacgcgcgcccgagcgagccccgggcucc

SEQ ID NO: 177735 - RNA, 32 nt, Homo Sapiens
gaagcccguuggcgagcucuggcaccugcaaa

SEQ ID NO: 177736 - RNA, 32 nt, Homo Sapiens
cuccagagcccuggccggggccgcgggauauc

SEQ ID NO: 177737 - RNA, 32 nt, Homo Sapiens
gcuggggacaagggcugccacugcacuuagca

SEQ ID NO: 177738 - RNA, 32 nt, Homo Sapiens
gguaauuccuuuccucuuuuccuuccaaauua

SEQ ID NO: 177739 - RNA, 31 nt, Homo Sapiens
cuguggcuggacugccugcugcugcccaacu

SEQ ID NO: 177740 - RNA, 32 nt, Homo Sapiens
ccacuucacagcaugucagggaaaaucacugu

SEQ ID NO: 177741 - RNA, 32 nt, Homo Sapiens
ggcuacuggagaugggcgcccggcuaucgcgg

SEQ ID NO: 177742 - RNA, 32 nt, Homo Sapiens
ccagcacagccuggccaagaucgagcgcaacc

SEQ ID NO: 177743 - RNA, 32 nt, Homo Sapiens
uaccuauaacauuuuagguauuucauauugaa

SEQ ID NO: 177744 - RNA, 32 nt, Homo Sapiens
uggccacccugcuccaauccgccccgcaggug

SEQ ID NO: 177745 - RNA, 32 nt, Homo Sapiens
uguucaaaaugucagaauaaacacagaauaaa

SEQ ID NO: 177746 - RNA, 32 nt, Homo Sapiens
cagggguguggcuucugggggcuggucuucag

SEQ ID NO: 177747 - RNA, 32 nt, Homo Sapiens
gugccugauggacguggcucucgucacgaaau

SEQ ID NO: 177748 - RNA, 32 nt, Homo Sapiens
agacccccggcggcgucucuccgcggaccggu

SEQ ID NO: 177749 - RNA, 31 nt, Homo Sapiens
cauuucuaacuuuuuaccugaguuaucucuu

SEQ ID NO: 177750 - RNA, 32 nt, Homo Sapiens
cagagcugcugccagagcugcguucccugcag

SEQ ID NO: 177751 - RNA, 32 nt, Homo Sapiens
uuuuuccagaacaacaguguggaauaguucug

SEQ ID NO: 177752 - RNA, 32 nt, Homo Sapiens
cacaaggcagugcccauucuuaagcuugaucu

SEQ ID NO: 177753 - RNA, 32 nt, Homo Sapiens
aaggcagucaacacaagagggauggaucauuc

SEQ ID NO: 177754 - RNA, 32 nt, Homo Sapiens
acuacaucuagaaguauaagcauaaaacuguu

SEQ ID NO: 177755 - RNA, 32 nt, Homo Sapiens
auuggauagggcaaucaggacaaaaucugacu

SEQ ID NO: 177756 - RNA, 32 nt, Homo Sapiens
ugcggcgccccggccccacacucgccucccgg

SEQ ID NO: 177757 - RNA, 32 nt, Homo Sapiens
uucuuacccaaguaugacugccagauuucauc

SEQ ID NO: 177758 - RNA, 32 nt, Homo Sapiens
augacuaugcccuucgcaacacugugaaaaca

SEQ ID NO: 177759 - RNA, 32 nt, Homo Sapiens
ccgugccaaggcccgcgccgcccggacagacg

SEQ ID NO: 177760 - RNA, 32 nt, Homo Sapiens
guguccaggagcggcagagacucugacccaug

SEQ ID NO: 177761 - RNA, 32 nt, Homo Sapiens
uucauccucacaguggcaauaaucacgauaac

SEQ ID NO: 177762 - RNA, 32 nt, Homo Sapiens
cccgccagggucuuccuccccaucuuuccauc

SEQ ID NO: 177763 - RNA, 32 nt, Homo Sapiens
gaugcuaggaggaggaagagcagcugcuaggg

SEQ ID NO: 177764 - RNA, 32 nt, Homo Sapiens
aucaucagcuguuuuucuuaauuucagccaga

SEQ ID NO: 177765 - RNA, 32 nt, Homo Sapiens
ggcccgguacccuccgcccgccgccgccucug

SEQ ID NO: 177766 - RNA, 32 nt, Homo Sapiens
gcccggcucgccccgcgcuuggacauggaagg

SEQ ID NO: 177767 - RNA, 32 nt, Homo Sapiens
ccaccgcgcgcccggcaucccugcggccggaa

SEQ ID NO: 177768 - RNA, 32 nt, Homo Sapiens
cagcaucugcccggcccccuccacgaugucca

SEQ ID NO: 177769 - RNA, 32 nt, Homo Sapiens
augguuuauucuuuuucuuuacagcugaaauu

SEQ ID NO: 177770 - RNA, 32 nt, Homo Sapiens
ucucccaagaaagcugggacuggcgguaauga

SEQ ID NO: 177771 - RNA, 32 nt, Homo Sapiens
auuaccaagucauuugugggguuguguuuuuu

SEQ ID NO: 177772 - RNA, 32 nt, Homo Sapiens
caccgcggcuccagcagcuccaggcgcgguuc

SEQ ID NO: 177773 - RNA, 32 nt, Homo Sapiens
gguggugguggugguucuuaauuuuuaauuua

SEQ ID NO: 177774 - RNA, 32 nt, Homo Sapiens
gagaggagaaauguggacagagggcuugaaga

SEQ ID NO: 177775 - RNA, 27 nt, Homo Sapiens
uucuugcgcuucuucaccuccucuggc

SEQ ID NO: 177776 - RNA, 32 nt, Homo Sapiens
gagccaauucaccucagucucuaauuggcugu

SEQ ID NO: 177777 - RNA, 32 nt, Homo Sapiens
guacccucuguccagaauaaacauuggaacaa

SEQ ID NO: 177778 - RNA, 32 nt, Homo Sapiens
aucccuuuacuuuuguacuacuauauuaggca

SEQ ID NO: 177779 - RNA, 32 nt, Homo Sapiens
aauagccgaaacaauacauggcacauagaaga

SEQ ID NO: 177780 - RNA, 32 nt, Homo Sapiens
uucugagaaggccccagguccugcucccuccu

SEQ ID NO: 177781 - RNA, 32 nt, Homo Sapiens
augaccuucucuaucaagacauuuauacauua

SEQ ID NO: 177782 - RNA, 32 nt, Homo Sapiens
gguuuuaaaaaauuaacaaauaaugaacuugg

SEQ ID NO: 177783 - RNA, 29 nt, Homo Sapiens
ucagccagaauacauuucuuguaaaaccu

SEQ ID NO: 177784 - RNA, 30 nt, Homo Sapiens
ccgcaucucggcggcggcgagggcugagcg

SEQ ID NO: 177785 - RNA, 32 nt, Homo Sapiens
uuuccccuuuugcugccucaggaucccuggca

SEQ ID NO: 177786 - RNA, 32 nt, Homo Sapiens
agauaagcuagaauugagcaaaacagauuugc

SEQ ID NO: 177787 - RNA, 32 nt, Homo Sapiens
uuucugaaaagacaguguguugugaauugccu

SEQ ID NO: 177788 - RNA, 32 nt, Homo Sapiens
gcuuuaucaacauuuuuuauuaacuucaugcu

SEQ ID NO: 177789 - RNA, 32 nt, Homo Sapiens
uaaacaaagaacuccugccuugauggauggag

SEQ ID NO: 177790 - RNA, 32 nt, Homo Sapiens
uaagcccgugcaaugcguccaucaugugucca

SEQ ID NO: 177791 - RNA, 32 nt, Homo Sapiens
aucucuagcuaggcagcuuucaggcauccugc

SEQ ID NO: 177792 - RNA, 32 nt, Homo Sapiens
aggaagaauuauaauugucauuauuuguagac

SEQ ID NO: 177793 - RNA, 32 nt, Homo Sapiens
augaaugcauuugggaugauuuugguaaccag

SEQ ID NO: 177794 - RNA, 32 nt, Homo Sapiens
ucuuugccccacuaggaaauguaaacaggagg

SEQ ID NO: 177795 - RNA, 31 nt, Homo Sapiens
aucugggugaaugggguuccaagggccccug

SEQ ID NO: 177796 - RNA, 32 nt, Homo Sapiens
caccaggcuaccgccuccuggaccucuuugcu

SEQ ID NO: 177797 - RNA, 32 nt, Homo Sapiens
cucugccgccccagccucaguuccugcuucug

SEQ ID NO: 177798 - RNA, 32 nt, Homo Sapiens
agaccccgggugacggggcccggcgccgcuaa

SEQ ID NO: 177799 - RNA, 32 nt, Homo Sapiens
gggaccugcagccugcagaccccgccuggccc

SEQ ID NO: 177800 - RNA, 32 nt, Homo Sapiens
cgcuggggcuguuugggcaucuguggagggug

SEQ ID NO: 177801 - RNA, 32 nt, Homo Sapiens
gguggagcugcccgcccggccuuguggcagag

SEQ ID NO: 177802 - RNA, 32 nt, Homo Sapiens
gggacccagggcuggccagggcuggucucugg

SEQ ID NO: 177803 - RNA, 32 nt, Homo Sapiens
ugugccuucucuauggccuugcuaccugggau

SEQ ID NO: 177804 - RNA, 32 nt, Homo Sapiens
aggauuaaauauauuucugauaaucuguccuc

SEQ ID NO: 177805 - RNA, 32 nt, Homo Sapiens
aaaauuugaccuuuaaacuuucauauucuaag

SEQ ID NO: 177806 - RNA, 32 nt, Homo Sapiens
ugagaacaugcaauauuuggcuguuucugugu

SEQ ID NO: 177807 - RNA, 32 nt, Homo Sapiens
ccuaaccagcuaggagacccuggggaagccac

SEQ ID NO: 177808 - RNA, 32 nt, Homo Sapiens
uucgcgagcgcuggcuauggguccuggggcgc

SEQ ID NO: 177809 - RNA, 32 nt, Homo Sapiens
gcagugccucaggaaaagcaggugauauucuc

SEQ ID NO: 177810 - RNA, 32 nt, Homo Sapiens
gcgcggcaguucagcuggccugagcugcugcg

SEQ ID NO: 177811 - RNA, 32 nt, Homo Sapiens
gcaucuguccuaaggccuugccugcagcacag

SEQ ID NO: 177812 - RNA, 32 nt, Homo Sapiens
cuaaguuaauuucaaggcauucgaaaugggga

SEQ ID NO: 177813 - RNA, 32 nt, Homo Sapiens
ccccuuccccgcccccagcagugucgcuccaa

SEQ ID NO: 177814 - RNA, 32 nt, Homo Sapiens
uccaucuccaugacgaugguguuaaggacugc

SEQ ID NO: 177815 - RNA, 32 nt, Homo Sapiens
gaggguugcggcggaggacgcaaccgagcggg

SEQ ID NO: 177816 - RNA, 32 nt, Homo Sapiens
cuuuccauaccccucccuccccugguccucau

SEQ ID NO: 177817 - RNA, 32 nt, Homo Sapiens
ggcugcacaccccugcccuucucuggaugagc

SEQ ID NO: 177818 - RNA, 32 nt, Homo Sapiens
caccaagaacagccaguagguucuucuccccu

SEQ ID NO: 177819 - RNA, 32 nt, Homo Sapiens
caaguuaacuguaaauauuuuaauguuaguuu

SEQ ID NO: 177820 - RNA, 32 nt, Homo Sapiens
caaucaguuugguuccucuccccuaagccacg

SEQ ID NO: 177821 - RNA, 32 nt, Homo Sapiens
gcuaccuucccauuuauaugcgucuuguucaa

SEQ ID NO: 177822 - RNA, 32 nt, Homo Sapiens
ccccuggcugagccccuguccuccccucuguc

SEQ ID NO: 177823 - RNA, 32 nt, Homo Sapiens
auucagcaaaacccccaccuuaaccucuuuuc

SEQ ID NO: 177824 - RNA, 32 nt, Homo Sapiens
cgacauucuguuugagguuucuaaucacaagg

SEQ ID NO: 177825 - RNA, 32 nt, Homo Sapiens
agcucuucaaagaaaaccuuugaaagauuuau

SEQ ID NO: 177826 - RNA, 32 nt, Homo Sapiens
ucagggagaauguuguugucuauuugucucuu

SEQ ID NO: 177827 - RNA, 32 nt, Homo Sapiens
cuccaugcugagaacaaaaucaccuauucacu

SEQ ID NO: 177828 - RNA, 32 nt, Homo Sapiens
ccugugucacccucuaccaucuguaaacaacu

SEQ ID NO: 177829 - RNA, 32 nt, Homo Sapiens
cugagaagcugauguuuuccacauauuucaug

SEQ ID NO: 177830 - RNA, 32 nt, Homo Sapiens
cugcaugcuucuucuuuuaccuuuuugucuac

SEQ ID NO: 177831 - RNA, 32 nt, Homo Sapiens
cagccuucuccacugucucauuuccuuuuccc

SEQ ID NO: 177832 - RNA, 32 nt, Homo Sapiens
uggagaggccuguagguccauucuucacccgu

SEQ ID NO: 177833 - RNA, 32 nt, Homo Sapiens
ggucguugcggcggcccccgggcccagucauc

SEQ ID NO: 177834 - RNA, 32 nt, Homo Sapiens
ucagucuuuucuaaucauaauucauacuggag

SEQ ID NO: 177835 - RNA, 32 nt, Homo Sapiens
agauguuggccauuauuuucuaauccauuuuu

SEQ ID NO: 177836 - RNA, 32 nt, Homo Sapiens
uacccuguacuauacaugaaaauuccaguuau

SEQ ID NO: 177837 - RNA, 32 nt, Homo Sapiens
auuucuugaauuucuuauucucuuucuucagu

SEQ ID NO: 177838 - RNA, 32 nt, Homo Sapiens
uggggugccguggcuggaaguugcuguucuca

SEQ ID NO: 177839 - RNA, 32 nt, Homo Sapiens
gcguaguauaaaucagaaaaccgagccaucaa

SEQ ID NO: 177840 - RNA, 32 nt, Homo Sapiens
gcuucucugcaugauuucaccauugaaguguu

SEQ ID NO: 177841 - RNA, 32 nt, Homo Sapiens
gauggggguccucauuuagugaggcaguuugu

SEQ ID NO: 177842 - RNA, 32 nt, Homo Sapiens
agaauccucuaaaaaucccggcucugcacauu

SEQ ID NO: 177843 - RNA, 32 nt, Homo Sapiens
cagaaccaccugauguuuuagagcaguuuuca

SEQ ID NO: 177844 - RNA, 32 nt, Homo Sapiens
agaauuuuucuuuucauaaaagcuggaugaag

SEQ ID NO: 177845 - RNA, 32 nt, Homo Sapiens
ggucggagaaggaaaagccucugggagcacau

SEQ ID NO: 177846 - RNA, 32 nt, Homo Sapiens
acuccugugccaggcgggagggaagggcggca

SEQ ID NO: 177847 - RNA, 32 nt, Homo Sapiens
aacuugcugaugcauuuaacgagugggucguc

SEQ ID NO: 177848 - RNA, 32 nt, Homo Sapiens
auacuaaacugagugugacuauuuucacugca

SEQ ID NO: 177849 - RNA, 32 nt, Homo Sapiens
guagccaaagcugagggugaugacugugaacc

SEQ ID NO: 177850 - RNA, 32 nt, Homo Sapiens
cuggcugaggcccucucaguaggggggucacg

SEQ ID NO: 177851 - RNA, 32 nt, Homo Sapiens
gcuguauuaacagauuaugguuuuaauuaggu

SEQ ID NO: 177852 - RNA, 32 nt, Homo Sapiens
uuuuguuaacugugucaucaacuuauccuagu

SEQ ID NO: 177853 - RNA, 32 nt, Homo Sapiens
cuccaaucaguuuuccccaaucaaagaagcca

SEQ ID NO: 177854 - RNA, 32 nt, Homo Sapiens
ggauaccugauugugacauuuauuuaaaaugu

SEQ ID NO: 177855 - RNA, 32 nt, Homo Sapiens
ugguuaagaaaauuauuuugcuuucaguguaa

SEQ ID NO: 177856 - RNA, 32 nt, Homo Sapiens
aaauagugucauuguuucccuuaguuucuccu

SEQ ID NO: 177857 - RNA, 32 nt, Homo Sapiens
uagugggcagucaacacuuauucaccaucagg

SEQ ID NO: 177858 - RNA, 32 nt, Homo Sapiens
gacuuuuuaguuucuuuuuuuuuuuuuugaaa

SEQ ID NO: 177859 - RNA, 32 nt, Homo Sapiens
ugccccugccuuuucuccuauauccuguaguc

SEQ ID NO: 177860 - RNA, 32 nt, Homo Sapiens
gauuccuaaaaauauaauucugauuuauguaa

SEQ ID NO: 177861 - RNA, 32 nt, Homo Sapiens
agaaaaaggucuuauauucuuuuacacaaauu

SEQ ID NO: 177862 - RNA, 32 nt, Homo Sapiens
gcuaucuuuacuuauaaaucuacuucauaagc

SEQ ID NO: 177863 - RNA, 32 nt, Homo Sapiens
ggcaaagguauuggggaucacauggaaacugc

SEQ ID NO: 177864 - RNA, 32 nt, Homo Sapiens
agauguauguaugcaugguuauacuauuuugu

SEQ ID NO: 177865 - RNA, 31 nt, Homo Sapiens
ggugugcagcccugagcuccaaggcucugca

SEQ ID NO: 177866 - RNA, 32 nt, Homo Sapiens
acuucauuuucagagugacacccaagagggcu

SEQ ID NO: 177867 - RNA, 32 nt, Homo Sapiens
acgccagguuucugccugcauuguggcauccu

SEQ ID NO: 177868 - RNA, 32 nt, Homo Sapiens
uaugguuuaauaugguccucauuuuucuuuug

SEQ ID NO: 177869 - RNA, 32 nt, Homo Sapiens
cgggacaggaggacgugggagguugugggcuc

SEQ ID NO: 177870 - RNA, 32 nt, Homo Sapiens
ggcgcgcacagacccaggauuugugaagaggu

SEQ ID NO: 177871 - RNA, 32 nt, Homo Sapiens
gaauuagcugggugugguggcaugugccuaua

SEQ ID NO: 177872 - RNA, 32 nt, Homo Sapiens
ccaugccccagccccagccuggcccgcugcaa

SEQ ID NO: 177873 - RNA, 32 nt, Homo Sapiens
cccuugcugcgugauggggucuccaugcacuu

SEQ ID NO: 177874 - RNA, 32 nt, Homo Sapiens
gaagacaccacauuuuaacugaguuccaguga

SEQ ID NO: 177875 - RNA, 32 nt, Homo Sapiens
augccugacccuccccccaccccccgugggcu

SEQ ID NO: 177876 - RNA, 32 nt, Homo Sapiens
uuaguuuguugaaguucgugacugcuucacuc

SEQ ID NO: 177877 - RNA, 32 nt, Homo Sapiens
auauauguugugagcuucuaugucaauaaaua

SEQ ID NO: 177878 - RNA, 32 nt, Homo Sapiens
cgccgcucccaggcccgucucccggcccgugg

SEQ ID NO: 177879 - RNA, 32 nt, Homo Sapiens
aacccacagucccaggcgcugggccuucuucu

SEQ ID NO: 177880 - RNA, 32 nt, Homo Sapiens
agguacacgcaccugccggggacgcacugacc

SEQ ID NO: 177881 - RNA, 32 nt, Homo Sapiens
uccaauuuucuuuaaauaaucccaaauagacc

SEQ ID NO: 177882 - RNA, 32 nt, Homo Sapiens
agccauggcgggagacccccuucucugggcuc

SEQ ID NO: 177883 - RNA, 32 nt, Homo Sapiens
uaccuucaaggaucaggguuuuucuguuuguu

SEQ ID NO: 177884 - RNA, 32 nt, Homo Sapiens
ggacgccaccuacuccaagccccccucgccua

SEQ ID NO: 177885 - RNA, 32 nt, Homo Sapiens
uuggaauugggaagugugacuccuccaacuuu

SEQ ID NO: 177886 - RNA, 32 nt, Homo Sapiens
gcagcucccucagcuucgcagcgccgcccgcc

SEQ ID NO: 177887 - RNA, 32 nt, Homo Sapiens
cuuacucaaaauaauguaaaucuuuaaaaaua

SEQ ID NO: 177888 - RNA, 32 nt, Homo Sapiens
acagcagaauccagaguuggauuguaguuuac

SEQ ID NO: 177889 - RNA, 32 nt, Homo Sapiens
agcauuucuucuucauggauagaguggcuaag

SEQ ID NO: 177890 - RNA, 32 nt, Homo Sapiens
acucugaauuuaugauguggauacuaacuuca

SEQ ID NO: 177891 - RNA, 32 nt, Homo Sapiens
uuguugaagucaguauuuuguauaaacauuua

SEQ ID NO: 177892 - RNA, 32 nt, Homo Sapiens
uccaguccucagagaaauaaucacuuucuuaa

SEQ ID NO: 177893 - RNA, 32 nt, Homo Sapiens
uuuaacaaaacauguaaagguaucugacuucu

SEQ ID NO: 177894 - RNA, 32 nt, Homo Sapiens
cagccagcaugguguuccgugccucccggacg

SEQ ID NO: 177895 - RNA, 32 nt, Homo Sapiens
augcuuucuucccuggguuuuaaacuucauau

SEQ ID NO: 177896 - RNA, 32 nt, Homo Sapiens
uauuuuacaccugcgcccccaggcugcucaca

SEQ ID NO: 177897 - RNA, 32 nt, Homo Sapiens
uccacauguagcauaauucuuaaauaggcacu

SEQ ID NO: 177898 - RNA, 32 nt, Homo Sapiens
cuuauguuuaaacacgcccccaucucacacac

SEQ ID NO: 177899 - RNA, 32 nt, Homo Sapiens
cccagauucagggcagacugggcuugccuggc

SEQ ID NO: 177900 - RNA, 32 nt, Homo Sapiens
cagauugucuucugcuaauuccucugguaugu

SEQ ID NO: 177901 - RNA, 32 nt, Homo Sapiens
gaggcgcugcggcccgugcagccccggaggcc

SEQ ID NO: 177902 - RNA, 32 nt, Homo Sapiens
gcgcccucucgcgccgcacgcucugcggguuc

SEQ ID NO: 177903 - RNA, 27 nt, Homo Sapiens
ggaugaggaggagcagaaaucuuacca

SEQ ID NO: 177904 - RNA, 32 nt, Homo Sapiens
uguaauuaauggugugcaguuauuuuaaaaac

SEQ ID NO: 177905 - RNA, 32 nt, Homo Sapiens
uagccgcgggagccggguggggccuaggcgau

SEQ ID NO: 177906 - RNA, 32 nt, Homo Sapiens
gauauaucuauuccuauggcauuuauaccaca

SEQ ID NO: 177907 - RNA, 32 nt, Homo Sapiens
cggagcgcaggcucagcuccgcgcugcgagcg

SEQ ID NO: 177908 - RNA, 32 nt, Homo Sapiens
acugcagccucugcccagccagcccugagcuc

SEQ ID NO: 177909 - RNA, 32 nt, Homo Sapiens
acccagcccugaacaaagcaccucaagugcaa

SEQ ID NO: 177910 - RNA, 32 nt, Homo Sapiens
gugggcugcacccacccaggaguguggccacg

SEQ ID NO: 177911 - RNA, 31 nt, Homo Sapiens
ucuuuccugaaugacuuucuaacugugcaga

SEQ ID NO: 177912 - RNA, 32 nt, Homo Sapiens
aaaauauuugaaaguauuuuuauuaaugaacc

SEQ ID NO: 177913 - RNA, 32 nt, Homo Sapiens
ucuacuaaaaauacaaaaauuugcugggcaug

SEQ ID NO: 177914 - RNA, 32 nt, Homo Sapiens
ggggaaguccuagcccagauggaccaaggacg

SEQ ID NO: 177915 - RNA, 32 nt, Homo Sapiens
cagauguaacaccccugagaccccgauuauca

SEQ ID NO: 177916 - RNA, 32 nt, Homo Sapiens
gauugaugggcaaaaauguacaacacaguuau

SEQ ID NO: 177917 - RNA, 32 nt, Homo Sapiens
agaaauuaaauaagauuagaaaacucuguacu

SEQ ID NO: 177918 - RNA, 32 nt, Homo Sapiens
agaacauugauuuauuuacaugauguucagau

SEQ ID NO: 177919 - RNA, 32 nt, Homo Sapiens
gguggguggagggagggagaucaugagggacu

SEQ ID NO: 177920 - RNA, 32 nt, Homo Sapiens
guggagaacaugcggcggggaugggagugcgc

SEQ ID NO: 177921 - RNA, 32 nt, Homo Sapiens
augacuuugucaaaggcaagucuccacccaua

SEQ ID NO: 177922 - RNA, 32 nt, Homo Sapiens
acagacccaagcccaggcccucccagaggucc

SEQ ID NO: 177923 - RNA, 32 nt, Homo Sapiens
cucccacccccaacuuuauuugcaaugggauu

SEQ ID NO: 177924 - RNA, 32 nt, Homo Sapiens
cgguugggccuugccggcugucgguaugucgc

SEQ ID NO: 177925 - RNA, 32 nt, Homo Sapiens
acuguggaugucugugcagagccuuugccggc

SEQ ID NO: 177926 - RNA, 32 nt, Homo Sapiens
acauaacucugcaaacuguggugcgcccuauu

SEQ ID NO: 177927 - RNA, 32 nt, Homo Sapiens
ccaagccccccuccaucuuggaccuauguggu

SEQ ID NO: 177928 - RNA, 32 nt, Homo Sapiens
ugggggaggggagggagugaggggcaguggug

SEQ ID NO: 177929 - RNA, 32 nt, Homo Sapiens
gguaauuuucaugcuaguucacagcaaugggg

SEQ ID NO: 177930 - RNA, 32 nt, Homo Sapiens
gcccucgcugcgcuccucccggcccgagccug

SEQ ID NO: 177931 - RNA, 32 nt, Homo Sapiens
agauuucgcccauuauucaggcugcacaacac

SEQ ID NO: 177932 - RNA, 32 nt, Homo Sapiens
cccgcugggugcccggccuggaacacagguuc

SEQ ID NO: 177933 - RNA, 32 nt, Homo Sapiens
ucuccuccugugcuaucuucucuucuauccaa

SEQ ID NO: 177934 - RNA, 32 nt, Homo Sapiens
aaaugccuuuuggagguuguaauggcucacag

SEQ ID NO: 177935 - RNA, 32 nt, Homo Sapiens
aauagugcugaauuaaguggcauuuaguaucu

SEQ ID NO: 177936 - RNA, 30 nt, Homo Sapiens
uggacagucugugcgaagcgggcgcuuagg

SEQ ID NO: 177937 - RNA, 32 nt, Homo Sapiens
uaaacagaagagcacccugaaaaacauuauga

SEQ ID NO: 177938 - RNA, 32 nt, Homo Sapiens
gauuugagaacaaaaggaaaggucuuuuuuca

SEQ ID NO: 177939 - RNA, 32 nt, Homo Sapiens
ccuggaugccagcacccuguuccgcccgccca

SEQ ID NO: 177940 - RNA, 32 nt, Homo Sapiens
uuucccuggagagccugcuugccagcaccccg

SEQ ID NO: 177941 - RNA, 32 nt, Homo Sapiens
agaggagggccaagaaaaugagcuugguuucc

SEQ ID NO: 177942 - RNA, 32 nt, Homo Sapiens
gcaggcccugcuccagcaucuacuucagcccc

SEQ ID NO: 177943 - RNA, 32 nt, Homo Sapiens
caccaguguugcaagcaccaccauucccaguu

SEQ ID NO: 177944 - RNA, 29 nt, Homo Sapiens
gcccccgcauccccugccuccauccuagu

SEQ ID NO: 177945 - RNA, 32 nt, Homo Sapiens
ugcccuguuugguuguugacaaugaagcacca

SEQ ID NO: 177946 - RNA, 32 nt, Homo Sapiens
gguggacaaucuuccugugauauguagugaca

SEQ ID NO: 177947 - RNA, 32 nt, Homo Sapiens
accacaaaguauuguuucuaauuaaguacugg

SEQ ID NO: 177948 - RNA, 32 nt, Homo Sapiens
uguccaggagaugcaugucuuuguauuggaga

SEQ ID NO: 177949 - RNA, 32 nt, Homo Sapiens
ugaugcugccuaccagaaaacaugucaguuuc

SEQ ID NO: 177950 - RNA, 32 nt, Homo Sapiens
auaagacauaacaaguuuuuccaaauauuuuu

SEQ ID NO: 177951 - RNA, 32 nt, Homo Sapiens
agguucccguugcauuuguuuuguuuacagau

SEQ ID NO: 177952 - RNA, 32 nt, Homo Sapiens
gacagaaaugucagacacugugaugguuaaua

SEQ ID NO: 177953 - RNA, 32 nt, Homo Sapiens
acacuggccccggcccacggcacagcaauccc

SEQ ID NO: 177954 - RNA, 32 nt, Homo Sapiens
aagucuccaggcuuaugcugcaaagagaaugu

SEQ ID NO: 177955 - RNA, 32 nt, Homo Sapiens
gguauucaggacacuaaggcaggaggaccaca

SEQ ID NO: 177956 - RNA, 32 nt, Homo Sapiens
ucuagucucuacagcuguuucccucuuuuccc

SEQ ID NO: 177957 - RNA, 32 nt, Homo Sapiens
guucgggacugagugugaaucuguaaaagggg

SEQ ID NO: 177958 - RNA, 32 nt, Homo Sapiens
aggggucagugcuucccuuggugucagggacc

SEQ ID NO: 177959 - RNA, 32 nt, Homo Sapiens
agagucccggugcccucuguccccacugccgg

SEQ ID NO: 177960 - RNA, 30 nt, Homo Sapiens
aacucgggagguggagguugcagugagcug

SEQ ID NO: 177961 - RNA, 32 nt, Homo Sapiens
uauuuugugccuugaagggaaugucacaggag

SEQ ID NO: 177962 - RNA, 32 nt, Homo Sapiens
aacccaggccugggaggaggccccacggccug

SEQ ID NO: 177963 - RNA, 32 nt, Homo Sapiens
uauccuggagaauguucugugagcugaugaga

SEQ ID NO: 177964 - RNA, 32 nt, Homo Sapiens
acaaagaguaucuguuacauauuuuuuauugc

SEQ ID NO: 177965 - RNA, 32 nt, Homo Sapiens
caaaaccccaugcucccuuucaucucauuugu

SEQ ID NO: 177966 - RNA, 32 nt, Homo Sapiens
cuagauuuaacccuaagguaagaugcuggggu

SEQ ID NO: 177967 - RNA, 32 nt, Homo Sapiens
aauucuuccaucuccuucuaaagccccucacc

SEQ ID NO: 177968 - RNA, 32 nt, Homo Sapiens
gcccagcccacuccccgcauggggaggccgcc

SEQ ID NO: 177969 - RNA, 32 nt, Homo Sapiens
gcuccugagugcccucagauggucaaaaccca

SEQ ID NO: 177970 - RNA, 32 nt, Homo Sapiens
ugccagauggaggagcucuuuucuagagagcc

SEQ ID NO: 177971 - RNA, 32 nt, Homo Sapiens
guuuguugugcuggcaaguaaaugacaaaagg

SEQ ID NO: 177972 - RNA, 26 nt, Homo Sapiens
gauggauacuaugaugcugaaugugc

SEQ ID NO: 177973 - RNA, 32 nt, Homo Sapiens
uauaaucuauagaaauaaugcuuaucacuggc

SEQ ID NO: 177974 - RNA, 32 nt, Homo Sapiens
auuauuauuuuuccuuuaaugauggugcuaaa

SEQ ID NO: 177975 - RNA, 32 nt, Homo Sapiens
caaaacagcucuugguauuagagcaccugguc

SEQ ID NO: 177976 - RNA, 32 nt, Homo Sapiens
agagcccccguccucacugcucacuugcacag

SEQ ID NO: 177977 - RNA, 32 nt, Homo Sapiens
ggaggugagcaccaggcccacugagccucugc

SEQ ID NO: 177978 - RNA, 32 nt, Homo Sapiens
gacugagcggagcccggugacaggauguuggu

SEQ ID NO: 177979 - RNA, 32 nt, Homo Sapiens
cuaccaugaccugcacaaaaccccugccuccc

SEQ ID NO: 177980 - RNA, 30 nt, Homo Sapiens
cuggacccguucaugggggagggggcagaa

SEQ ID NO: 177981 - RNA, 32 nt, Homo Sapiens
uuagguuaguuuguaaugaaagcaaaaaauuu

SEQ ID NO: 177982 - RNA, 32 nt, Homo Sapiens
cccaggguccaugucccaggccccacuccagu

SEQ ID NO: 177983 - RNA, 32 nt, Homo Sapiens
cugaagcgccccacccaugccugccuggccug

SEQ ID NO: 177984 - RNA, 30 nt, Homo Sapiens
gacuggggcaggcgagcccggacagggaag

SEQ ID NO: 177985 - RNA, 32 nt, Homo Sapiens
gaauacuuuuugcaugaugauuugaagcagcc

SEQ ID NO: 177986 - RNA, 32 nt, Homo Sapiens
ugaccuggugcuuuuuuccccauccccauguu

SEQ ID NO: 177987 - RNA, 32 nt, Homo Sapiens
gaggaacagcggggccuccgcuguaaccagcu

SEQ ID NO: 177988 - RNA, 30 nt, Homo Sapiens
ugccugauuguguuuacagaagcuucugau

SEQ ID NO: 177989 - RNA, 32 nt, Homo Sapiens
ugagcuuuuuaaaaucuugaaugaauugagua

SEQ ID NO: 177990 - RNA, 32 nt, Homo Sapiens
guaucccugcagcaauuuuuuaaaaugucuga

SEQ ID NO: 177991 - RNA, 32 nt, Homo Sapiens
aagagcacccccacgcccggcccgcagcaucc

SEQ ID NO: 177992 - RNA, 32 nt, Homo Sapiens
agauauuauuaauaguuuauaauucaguaacu

SEQ ID NO: 177993 - RNA, 32 nt, Homo Sapiens
uuuauuacaaauaauuaaaucucuccauaaug

SEQ ID NO: 177994 - RNA, 32 nt, Homo Sapiens
gaggcagaugggaaagcagagagaggagcgcg

SEQ ID NO: 177995 - RNA, 28 nt, Homo Sapiens
gugaauuugaauaaaugagaaaaaaugc

SEQ ID NO: 177996 - RNA, 31 nt, Homo Sapiens
ucuccagaucccagucugaguuauacccugg

SEQ ID NO: 177997 - RNA, 32 nt, Homo Sapiens
auuuugugaacaaagaacaguuuuuauucuac

SEQ ID NO: 177998 - RNA, 32 nt, Homo Sapiens
guaucaagaagaaaaucagaaauacugguugg

SEQ ID NO: 177999 - RNA, 32 nt, Homo Sapiens
ggagucuccuagcaaugacccucuucucuccu

SEQ ID NO: 178000 - RNA, 32 nt, Homo Sapiens
gccaggguaaggugaauggggaggcugggagg

SEQ ID NO: 178001 - RNA, 32 nt, Homo Sapiens
cagagcuugaacaacaacuuuaggaguaaaua

SEQ ID NO: 178002 - RNA, 32 nt, Homo Sapiens
gcggccuccugcuccacgacgugaccauggcc

SEQ ID NO: 178003 - RNA, 32 nt, Homo Sapiens
cacuggugggccugggcuucugagguggccuc

SEQ ID NO: 178004 - RNA, 32 nt, Homo Sapiens
caaccuuguaacuguauucuccaggcagcaca

SEQ ID NO: 178005 - RNA, 32 nt, Homo Sapiens
gggcagggaacaggggagggcuccacaagcgu

SEQ ID NO: 178006 - RNA, 32 nt, Homo Sapiens
gaaugaaggugucagaauaauaagaggugcua

SEQ ID NO: 178007 - RNA, 32 nt, Homo Sapiens
aaucaccugauguuuucuuauucuccuuaaau

SEQ ID NO: 178008 - RNA, 32 nt, Homo Sapiens
uggaaaauauuuuucaacuuuaauuuucugaa

SEQ ID NO: 178009 - RNA, 32 nt, Homo Sapiens
cacauggguuuuauuuuucucuagcagccaag

SEQ ID NO: 178010 - RNA, 32 nt, Homo Sapiens
aaaaaggaccuuucgguguaagaaauugccgu

SEQ ID NO: 178011 - RNA, 32 nt, Homo Sapiens
cagguguauagggaauuuucauuuucauuauu

SEQ ID NO: 178012 - RNA, 32 nt, Homo Sapiens
ccaggcguccgcucuccacaccuuucacagau

SEQ ID NO: 178013 - RNA, 32 nt, Homo Sapiens
gacaucuccuucccucccaccugugcgcccca

SEQ ID NO: 178014 - RNA, 32 nt, Homo Sapiens
aagucaugcuuccuuuuaagccugcagaacug

SEQ ID NO: 178015 - RNA, 32 nt, Homo Sapiens
caggaaggaaaagaaaggacuuggagguggca

SEQ ID NO: 178016 - RNA, 32 nt, Homo Sapiens
uucacggagccggccggccucccgcccugggu

SEQ ID NO: 178017 - RNA, 32 nt, Homo Sapiens
ccacccccauccccucuauaucccaccccuga

SEQ ID NO: 178018 - RNA, 32 nt, Homo Sapiens
aucccgugccgcggggagccaagcccccuggg

SEQ ID NO: 178019 - RNA, 32 nt, Homo Sapiens
ucuucacaguuccauauguauaaugugccagg

SEQ ID NO: 178020 - RNA, 32 nt, Homo Sapiens
gcaggucagaguaggaacagguucuggugauc

SEQ ID NO: 178021 - RNA, 32 nt, Homo Sapiens
ugcagggcuuuccuuucaagucuuucaaguac

SEQ ID NO: 178022 - RNA, 32 nt, Homo Sapiens
uaugcuauuucuguguauguucaaauuguuua

SEQ ID NO: 178023 - RNA, 32 nt, Homo Sapiens
uuuuaaucaguucuuaauaggauauaguuuua

SEQ ID NO: 178024 - RNA, 32 nt, Homo Sapiens
guuuuggacagagggaggagagaguuagaaaa

SEQ ID NO: 178025 - RNA, 32 nt, Homo Sapiens
ggugggacagagcugucuuccuucugcauguc

SEQ ID NO: 178026 - RNA, 32 nt, Homo Sapiens
gacuggcuaggcugcuggcuggcccuggcucc

SEQ ID NO: 178027 - RNA, 32 nt, Homo Sapiens
cuguuccugccagcuccggucuuggaaaacau

SEQ ID NO: 178028 - RNA, 32 nt, Homo Sapiens
uuauaagauuucuugugauaaaugugucccug

SEQ ID NO: 178029 - RNA, 32 nt, Homo Sapiens
uuuuccuaaaaauuauguuuucuuaguuucau

SEQ ID NO: 178030 - RNA, 32 nt, Homo Sapiens
agccucggcaggagucccacuccuccuggggu

SEQ ID NO: 178031 - RNA, 32 nt, Homo Sapiens
gacugacacagguaaggcgucuucuaccaugg

SEQ ID NO: 178032 - RNA, 32 nt, Homo Sapiens
agcagagaagcauggaggaaaacaggaaagua

SEQ ID NO: 178033 - RNA, 32 nt, Homo Sapiens
uccccagcucugguccuccccagcucuguuuc

SEQ ID NO: 178034 - RNA, 32 nt, Homo Sapiens
cugccuccagggaggcgacgccaggccaggag

SEQ ID NO: 178035 - RNA, 32 nt, Homo Sapiens
ccccaaccaaaaucucaucuugacuuguaauc

SEQ ID NO: 178036 - RNA, 32 nt, Homo Sapiens
cacuugaguguggaaggcugcccggggcacug

SEQ ID NO: 178037 - RNA, 32 nt, Homo Sapiens
aacagcuugggcccugcaaacacaaccaucua

SEQ ID NO: 178038 - RNA, 32 nt, Homo Sapiens
aaggcagaauauaaaauaaauauacauuuagu

SEQ ID NO: 178039 - RNA, 32 nt, Homo Sapiens
agaauggcugggaugaaaguacacuugaacuc

SEQ ID NO: 178040 - RNA, 32 nt, Homo Sapiens
uggagaucuuccuuuaccccucaacuuuaauu

SEQ ID NO: 178041 - RNA, 32 nt, Homo Sapiens
caccuccucccucuucuccucuguggccuggg

SEQ ID NO: 178042 - RNA, 32 nt, Homo Sapiens
ggggaaggagccgcccucccuaucuugcugcu

SEQ ID NO: 178043 - RNA, 32 nt, Homo Sapiens
cacuguaaggauuguuccaaauacuaguugca

SEQ ID NO: 178044 - RNA, 32 nt, Homo Sapiens
uaucugcaucauccacccacagagaaaugccu

SEQ ID NO: 178045 - RNA, 29 nt, Homo Sapiens
gcugaugcucaccauggggcgccugcaac

SEQ ID NO: 178046 - RNA, 32 nt, Homo Sapiens
ccggggucucacagcgacugcgcggacggguu

SEQ ID NO: 178047 - RNA, 32 nt, Homo Sapiens
cagauuuccuucccucuccuccaggagaccau

SEQ ID NO: 178048 - RNA, 32 nt, Homo Sapiens
gauuuauuuuuccauugcagguuuuaaagugg

SEQ ID NO: 178049 - RNA, 30 nt, Homo Sapiens
auuaacuuacgcaccacccauuuuaucccc

SEQ ID NO: 178050 - RNA, 32 nt, Homo Sapiens
uagagccagaaagcagauggaaaugcuaauga

SEQ ID NO: 178051 - RNA, 32 nt, Homo Sapiens
cuugaacuucagcgguacgcggcaagcaacaa

SEQ ID NO: 178052 - RNA, 32 nt, Homo Sapiens
cugaaccauguggcagaagggauaagcagcuu

SEQ ID NO: 178053 - RNA, 32 nt, Homo Sapiens
agcugucgugccucguggucccgggacugcag

SEQ ID NO: 178054 - RNA, 32 nt, Homo Sapiens
caauagcgcuggcuggcuggcugcaguugagc

SEQ ID NO: 178055 - RNA, 32 nt, Homo Sapiens
acaaaacucuuccugccacgggcuugcagauu

SEQ ID NO: 178056 - RNA, 32 nt, Homo Sapiens
ccugguguggagggcucugucuguugcugagg

SEQ ID NO: 178057 - RNA, 32 nt, Homo Sapiens
caugugagugugcccaugagugacuccaaguu

SEQ ID NO: 178058 - RNA, 32 nt, Homo Sapiens
gaccccgcggcccgccccggugcucgugaugg

SEQ ID NO: 178059 - RNA, 32 nt, Homo Sapiens
aaaaccagacccagcccuacacuuugguuugu

SEQ ID NO: 178060 - RNA, 32 nt, Homo Sapiens
uauaugcuaaaggagcaucuaucagauuaagu

SEQ ID NO: 178061 - RNA, 29 nt, Homo Sapiens
uguaacauagugaguugugugaaaauaaa

SEQ ID NO: 178062 - RNA, 32 nt, Homo Sapiens
gaaugcggguggcuggaugggcgccaugugcc

SEQ ID NO: 178063 - RNA, 32 nt, Homo Sapiens
gacuccuccaagcaucgucuuucucgccugca

SEQ ID NO: 178064 - RNA, 32 nt, Homo Sapiens
uauagcuggagucccacagauaccaaauguca

SEQ ID NO: 178065 - RNA, 32 nt, Homo Sapiens
gucucuaaaaugggguggugccaggcagauua

SEQ ID NO: 178066 - RNA, 32 nt, Homo Sapiens
gaccccaggacccugccccggccugaggccag

SEQ ID NO: 178067 - RNA, 32 nt, Homo Sapiens
cucucccggcauccgcagagccagcugacgcc

SEQ ID NO: 178068 - RNA, 32 nt, Homo Sapiens
guuuugucuuuuuuuucuuuucuccuaccccu

SEQ ID NO: 178069 - RNA, 32 nt, Homo Sapiens
uacguccagaauagcaucaucuucauggguau

SEQ ID NO: 178070 - RNA, 32 nt, Homo Sapiens
cacagggacuugaggcaugcaguugggagguc

SEQ ID NO: 178071 - RNA, 32 nt, Homo Sapiens
guguggguaucccuuacccagcacuuaaacuu

SEQ ID NO: 178072 - RNA, 32 nt, Homo Sapiens
guauaaagcauuuaauaaauaauucuaaugug

SEQ ID NO: 178073 - RNA, 32 nt, Homo Sapiens
gcgagugccggggaguuccuggggagccgggc

SEQ ID NO: 178074 - RNA, 32 nt, Homo Sapiens
uaagcagaaucuuaaaguauauuuucauauaa

SEQ ID NO: 178075 - RNA, 32 nt, Homo Sapiens
gguuaugaagauagguacuguggguguuagaa

SEQ ID NO: 178076 - RNA, 30 nt, Homo Sapiens
cagccaggcaggcugucaggcccuaaucac

SEQ ID NO: 178077 - RNA, 30 nt, Homo Sapiens
ggccuugugcugcggaaacccaguagcucc

SEQ ID NO: 178078 - RNA, 32 nt, Homo Sapiens
acaggcggauaaaacggucccaucaagacuga

SEQ ID NO: 178079 - RNA, 32 nt, Homo Sapiens
uuggagaccuuucucauggcuacauugccugc

SEQ ID NO: 178080 - RNA, 32 nt, Homo Sapiens
aucugaauguuauugaacuguauuuuguucac

SEQ ID NO: 178081 - RNA, 32 nt, Homo Sapiens
uuccuuuuuguccuuuuauauuuuucuaaaga

SEQ ID NO: 178082 - RNA, 32 nt, Homo Sapiens
uuagauuuugucacguggggacccagcuguac

SEQ ID NO: 178083 - RNA, 32 nt, Homo Sapiens
augagaccuuggcaggcgggcagcggcggaaa

SEQ ID NO: 178084 - RNA, 32 nt, Homo Sapiens
uaugaggcugaauuccucuugaauuuauuaaa

SEQ ID NO: 178085 - RNA, 32 nt, Homo Sapiens
ggggcuagcugcggcggggcuggaggaggcca

SEQ ID NO: 178086 - RNA, 32 nt, Homo Sapiens
cccgcgccccgcccggcccccaccagucuucg

SEQ ID NO: 178087 - RNA, 32 nt, Homo Sapiens
uggcggcagcgggcgaggacucgccgaggacg

SEQ ID NO: 178088 - RNA, 32 nt, Homo Sapiens
ccggcgcauguuuuuucuucauuccuauugua

SEQ ID NO: 178089 - RNA, 32 nt, Homo Sapiens
ugaagugacaaugaaauuaauaggauccugau

SEQ ID NO: 178090 - RNA, 32 nt, Homo Sapiens
cacacacacagacacacacacacacacauaua

SEQ ID NO: 178091 - RNA, 32 nt, Homo Sapiens
uuccauccuccuccuccccuuaauggauugug

SEQ ID NO: 178092 - RNA, 32 nt, Homo Sapiens
agaggggugggugcguaaggaugugugaguuu

SEQ ID NO: 178093 - RNA, 32 nt, Homo Sapiens
uugacuacccgucauucagggguaacucauca

SEQ ID NO: 178094 - RNA, 32 nt, Homo Sapiens
ggaacgaaauaauggcauucacagcaaccugg

SEQ ID NO: 178095 - RNA, 32 nt, Homo Sapiens
aguuuacugcucuuguaggagcuccucucaca

SEQ ID NO: 178096 - RNA, 32 nt, Homo Sapiens
cgucaggaagucacagacuuguccucugaugu

SEQ ID NO: 178097 - RNA, 32 nt, Homo Sapiens
ugagcguguauagggaggggaaugcuaucgau

SEQ ID NO: 178098 - RNA, 32 nt, Homo Sapiens
uuuauauucuauguuaucagucucucuuucca

SEQ ID NO: 178099 - RNA, 32 nt, Homo Sapiens
uuugucugcuuuucuugcagcaucauuuccuu

SEQ ID NO: 178100 - RNA, 32 nt, Homo Sapiens
cuuagggcauucuccacauuucuuuuuuauua

SEQ ID NO: 178101 - RNA, 32 nt, Homo Sapiens
aacacggaagggauuauuaauaccauaagguu

SEQ ID NO: 178102 - RNA, 32 nt, Homo Sapiens
acccgcgccuccugcagacccgagggucgccg

SEQ ID NO: 178103 - RNA, 32 nt, Homo Sapiens
ugaaacacugugccagugagaagugcaacauc

SEQ ID NO: 178104 - RNA, 32 nt, Homo Sapiens
ugucucuucuccaugagggagaaggaagcagc

SEQ ID NO: 178105 - RNA, 32 nt, Homo Sapiens
aucaacaggcuuaugaaacgucaucuucagug

SEQ ID NO: 178106 - RNA, 32 nt, Homo Sapiens
guggcccgccccacaccaccgccgccugcaga

SEQ ID NO: 178107 - RNA, 32 nt, Homo Sapiens
agauuuugacauauuuaucuuuuuaccccauc

SEQ ID NO: 178108 - RNA, 32 nt, Homo Sapiens
gagggcacgccagccgcaugcuggggacaggc

SEQ ID NO: 178109 - RNA, 32 nt, Homo Sapiens
gagccaggacagcgggaagcagggauggcccu

SEQ ID NO: 178110 - RNA, 32 nt, Homo Sapiens
guccagugcaguaccuggaccggagcccccuu

SEQ ID NO: 178111 - RNA, 32 nt, Homo Sapiens
uuauugucauuccagagcugauugcaggccag

SEQ ID NO: 178112 - RNA, 32 nt, Homo Sapiens
uugucuacaguagaggucuaauccacagguua

SEQ ID NO: 178113 - RNA, 32 nt, Homo Sapiens
gaguuucaugcuucauuuucacaucucucugc

SEQ ID NO: 178114 - RNA, 32 nt, Homo Sapiens
aaaauaguaugaaaauggaaauuugggagagc

SEQ ID NO: 178115 - RNA, 32 nt, Homo Sapiens
uuucugcucucgcgccauaugcaguucccgcg

SEQ ID NO: 178116 - RNA, 32 nt, Homo Sapiens
ccugcccuaccuuacacccccagcuugacuuc

SEQ ID NO: 178117 - RNA, 32 nt, Homo Sapiens
uuccugcacucaacuuaugaccucaguugaua

SEQ ID NO: 178118 - RNA, 32 nt, Homo Sapiens
aaucuauaggaugguaaugauggacuugucac

SEQ ID NO: 178119 - RNA, 32 nt, Homo Sapiens
ucuugacacugacuucgguaacauuggcuaaa

SEQ ID NO: 178120 - RNA, 32 nt, Homo Sapiens
cagcagagaaagucccgucccuaucucugacu

SEQ ID NO: 178121 - RNA, 32 nt, Homo Sapiens
gaaaccggaagcagaagcugaguguggugagu

SEQ ID NO: 178122 - RNA, 32 nt, Homo Sapiens
augugcuuuucugcagaagguaacuugacagc

SEQ ID NO: 178123 - RNA, 32 nt, Homo Sapiens
uccaguagccccacgaguccccaccucucagu

SEQ ID NO: 178124 - RNA, 32 nt, Homo Sapiens
ucugugcccucugugucugugcaugcgcgugu

SEQ ID NO: 178125 - RNA, 32 nt, Homo Sapiens
uuuauaccuagaaaaacaccacaggggaacag

SEQ ID NO: 178126 - RNA, 32 nt, Homo Sapiens
agcaagugagagagaugggagcuccucuccug

SEQ ID NO: 178127 - RNA, 32 nt, Homo Sapiens
gcuuccuccccaccgauuucagcguguccaca

SEQ ID NO: 178128 - RNA, 32 nt, Homo Sapiens
cauuauaaaaguuuccuuuuuaucucucaagc

SEQ ID NO: 178129 - RNA, 32 nt, Homo Sapiens
aaauauaugaauaacauuucagauaccauuau

SEQ ID NO: 178130 - RNA, 32 nt, Homo Sapiens
gaagccggucaucacccagccucugagagcag

SEQ ID NO: 178131 - RNA, 32 nt, Homo Sapiens
guuuuuuugucuuuuuacuauguuuuucagau

SEQ ID NO: 178132 - RNA, 32 nt, Homo Sapiens
ucggggagggucaucauugugauaaaccaucg

SEQ ID NO: 178133 - RNA, 32 nt, Homo Sapiens
ugcgccccgcggcgcuccggagcccucucggc

SEQ ID NO: 178134 - RNA, 32 nt, Homo Sapiens
cggagugggcuuugggcugcagagccgccugg

SEQ ID NO: 178135 - RNA, 32 nt, Homo Sapiens
ccuggucaucagcuugcuuuguggcacugagc

SEQ ID NO: 178136 - RNA, 32 nt, Homo Sapiens
cuuaacaccggaaauugugcugugauguuuca

SEQ ID NO: 178137 - RNA, 32 nt, Homo Sapiens
agacuugaaugggaggcugcuaacccgcccuc

SEQ ID NO: 178138 - RNA, 32 nt, Homo Sapiens
uggcuaaaauccaauauuuauuuuauauuaau

SEQ ID NO: 178139 - RNA, 32 nt, Homo Sapiens
ucucauguaacuucuauuaacauccugaagaa

SEQ ID NO: 178140 - RNA, 32 nt, Homo Sapiens
gcaggcugucuccucaguaacacaugggccuu

SEQ ID NO: 178141 - RNA, 32 nt, Homo Sapiens
ucuuuccaucauaaguuuaacucucuguugaa

SEQ ID NO: 178142 - RNA, 32 nt, Homo Sapiens
ucaguaugucauucuguucucaucuucugcca

SEQ ID NO: 178143 - RNA, 32 nt, Homo Sapiens
cgugaugaugauaugcccuggaccucagcauc

SEQ ID NO: 178144 - RNA, 32 nt, Homo Sapiens
caucccaccaaaaccauuugacaagcaggaca

SEQ ID NO: 178145 - RNA, 32 nt, Homo Sapiens
agcuugcagagccgcagccgcugugggcaggg

SEQ ID NO: 178146 - RNA, 32 nt, Homo Sapiens
uuauuuagucaaauuuauugagaugauaauuu

SEQ ID NO: 178147 - RNA, 32 nt, Homo Sapiens
ugccucggccccaagacuccuccaacuuaccc

SEQ ID NO: 178148 - RNA, 32 nt, Homo Sapiens
aggcaagucccucuccucuuucuggcugguuc

SEQ ID NO: 178149 - RNA, 32 nt, Homo Sapiens
caggacgugaucugaaaacauguagagaagau

SEQ ID NO: 178150 - RNA, 32 nt, Homo Sapiens
gcgggaagccgcggccugggccgucccagcca

SEQ ID NO: 178151 - RNA, 32 nt, Homo Sapiens
ggggguccuggcggccugggccgucccgcacc

SEQ ID NO: 178152 - RNA, 32 nt, Homo Sapiens
ucgggaaaagggaucaaggaaaugacuauucc

SEQ ID NO: 178153 - RNA, 32 nt, Homo Sapiens
gcugaugcaacacuaauaaaccuggaggggcc

SEQ ID NO: 178154 - RNA, 31 nt, Homo Sapiens
uaggaaggacggagaaggggcguucgcuccu

SEQ ID NO: 178155 - RNA, 32 nt, Homo Sapiens
guccaaauaauaucaaguacaucuuggagaug

SEQ ID NO: 178156 - RNA, 32 nt, Homo Sapiens
uucauaagugguuuuuaaaagccuuuuuuaaa

SEQ ID NO: 178157 - RNA, 32 nt, Homo Sapiens
aucuggucccccagccucucuugggcuuucuu

SEQ ID NO: 178158 - RNA, 32 nt, Homo Sapiens
acuguucugccagccuaacaaagcaacguagc

SEQ ID NO: 178159 - RNA, 32 nt, Homo Sapiens
cccacauucgcaccccugcccgcgcgccgggc

SEQ ID NO: 178160 - RNA, 32 nt, Homo Sapiens
ugugccauuccaggauaacagcuugcacccuc

SEQ ID NO: 178161 - RNA, 32 nt, Homo Sapiens
uugugggggacuguaaguugggcuugcuauuc

SEQ ID NO: 178162 - RNA, 30 nt, Homo Sapiens
uaugcggcaguggugccgccuggugaauga

SEQ ID NO: 178163 - RNA, 32 nt, Homo Sapiens
ucuuccauggucaagaaaauauguuucuggaa

SEQ ID NO: 178164 - RNA, 32 nt, Homo Sapiens
agaaauucugucauagaaagugccagaaagug

SEQ ID NO: 178165 - RNA, 32 nt, Homo Sapiens
augcucacauuuucccuucucugccuugcuuc

SEQ ID NO: 178166 - RNA, 32 nt, Homo Sapiens
uuaaacugggauuucagauaaacaaguaauuu

SEQ ID NO: 178167 - RNA, 32 nt, Homo Sapiens
uacauuauaaauuuauaagcuaagugaguugg

SEQ ID NO: 178168 - RNA, 32 nt, Homo Sapiens
auguccucaccuguaccuggcagccgaccccc

SEQ ID NO: 178169 - RNA, 32 nt, Homo Sapiens
caaucccccucuuugcucuccucguguccucu

SEQ ID NO: 178170 - RNA, 32 nt, Homo Sapiens
cugcucagauaucuccucucccugacgaucga

SEQ ID NO: 178171 - RNA, 32 nt, Homo Sapiens
aaagucaaacuucugcauccucuugugaugag

SEQ ID NO: 178172 - RNA, 32 nt, Homo Sapiens
uccuugguuuuuccuuagcucauaggucauag

SEQ ID NO: 178173 - RNA, 32 nt, Homo Sapiens
ugagagaagaggaaaagaggaguggccagacu

SEQ ID NO: 178174 - RNA, 32 nt, Homo Sapiens
ugucuugguaaauacuaacaaauuuguuaggu

SEQ ID NO: 178175 - RNA, 32 nt, Homo Sapiens
augacccaguuucagauauuuuuuagagcagc

SEQ ID NO: 178176 - RNA, 32 nt, Homo Sapiens
uauguuuuacuuuuacuucauauucuugcuaa

SEQ ID NO: 178177 - RNA, 32 nt, Homo Sapiens
gugccaaguuuggggagcagccccuggcuccu

SEQ ID NO: 178178 - RNA, 32 nt, Homo Sapiens
gaaggaggccccaguacugguccuuggucaug

SEQ ID NO: 178179 - RNA, 32 nt, Homo Sapiens
ggcugggccaaggagcugccucuacugcuccc

SEQ ID NO: 178180 - RNA, 32 nt, Homo Sapiens
uucacgccguggacaccacggucugaggcaga

SEQ ID NO: 178181 - RNA, 32 nt, Homo Sapiens
agacuuggugccgaaauucaagagccagcucu

SEQ ID NO: 178182 - RNA, 32 nt, Homo Sapiens
uugggggacuaauuuaauuugcugcugacagc

SEQ ID NO: 178183 - RNA, 32 nt, Homo Sapiens
ggaagcggguggcaggaaggagcgugaggccu

SEQ ID NO: 178184 - RNA, 32 nt, Homo Sapiens
uggagcccgagccaugcggaccgcggaccggg

SEQ ID NO: 178185 - RNA, 32 nt, Homo Sapiens
uguaaaguuaguagagcuuguucuuguauugu

SEQ ID NO: 178186 - RNA, 32 nt, Homo Sapiens
agggaggcgcaucuggcgcuucgguaccagcg

SEQ ID NO: 178187 - RNA, 32 nt, Homo Sapiens
guuuucacugagggcagggaaaaggaacacuc

SEQ ID NO: 178188 - RNA, 32 nt, Homo Sapiens
auguguauauauacauacacuuguauaaaugu

SEQ ID NO: 178189 - RNA, 32 nt, Homo Sapiens
gcgugccuuccacagcgccguggcccagcgcc

SEQ ID NO: 178190 - RNA, 32 nt, Homo Sapiens
cccgcgcaagcgcaaccccuggcgagcgacgu

SEQ ID NO: 178191 - RNA, 32 nt, Homo Sapiens
cuuacauguuugcaugagugucagggcuuugu

SEQ ID NO: 178192 - RNA, 32 nt, Homo Sapiens
gagggagacagaggacgaugucauagaacaag

SEQ ID NO: 178193 - RNA, 32 nt, Homo Sapiens
gguucucccccuccugauuaaaaagggagaaa

SEQ ID NO: 178194 - RNA, 32 nt, Homo Sapiens
cgcacgaggagaagauccagaccguguucgag

SEQ ID NO: 178195 - RNA, 32 nt, Homo Sapiens
gggguguggugagaaggcagguugugcgggug

SEQ ID NO: 178196 - RNA, 32 nt, Homo Sapiens
aaagucgcagggccaguugcaggccgcugauu

SEQ ID NO: 178197 - RNA, 32 nt, Homo Sapiens
agggguuggaggagggccccggcggccgaccc

SEQ ID NO: 178198 - RNA, 32 nt, Homo Sapiens
cccaggccaagaugggcaggugucacaaagaa

SEQ ID NO: 178199 - RNA, 32 nt, Homo Sapiens
ccgugccccucccccguggagccggcuguccg

SEQ ID NO: 178200 - RNA, 32 nt, Homo Sapiens
aaggauaugaauggacacuucucuaaagaaga

SEQ ID NO: 178201 - RNA, 32 nt, Homo Sapiens
ucagcaccauccugcaccugcugcuggguuca

SEQ ID NO: 178202 - RNA, 30 nt, Homo Sapiens
gcuucccugauggugccgccgccuccgagc

SEQ ID NO: 178203 - RNA, 32 nt, Homo Sapiens
cucaucaaccucagagacacugcuuuccaacu

SEQ ID NO: 178204 - RNA, 32 nt, Homo Sapiens
uguuuaaugcaaaugaaggaaugcaauaaaga

SEQ ID NO: 178205 - RNA, 32 nt, Homo Sapiens
acuuuggaaaauuuguguaacauguuuuugag

SEQ ID NO: 178206 - RNA, 32 nt, Homo Sapiens
ggugggccucccacuccugugcucucuucuga

SEQ ID NO: 178207 - RNA, 32 nt, Homo Sapiens
guugcuguucccucagcucccagcuccaccuc

SEQ ID NO: 178208 - RNA, 32 nt, Homo Sapiens
ggucagaaggcacagggcuaacuccuagacac

SEQ ID NO: 178209 - RNA, 32 nt, Homo Sapiens
uacagaguuucuguuugaaaugaugaaaaacu

SEQ ID NO: 178210 - RNA, 32 nt, Homo Sapiens
uagggaaagccggagagcaacaacaaaaaaug

SEQ ID NO: 178211 - RNA, 32 nt, Homo Sapiens
acaguauguucccuucugcauaugcugcuuuc

SEQ ID NO: 178212 - RNA, 32 nt, Homo Sapiens
aagacacagcaccuacgccuuccccgggcccc

SEQ ID NO: 178213 - RNA, 32 nt, Homo Sapiens
uccaucuucugggucucccuaacgguaccguu

SEQ ID NO: 178214 - RNA, 30 nt, Homo Sapiens
cccugucuggacugagccuccguuggcuuc

SEQ ID NO: 178215 - RNA, 32 nt, Homo Sapiens
ggaguuuucuggaauggcguggcacauauuga

SEQ ID NO: 178216 - RNA, 32 nt, Homo Sapiens
acugauaaacgcgagugcuauuguagucuugg

SEQ ID NO: 178217 - RNA, 32 nt, Homo Sapiens
cacauccaucccaaaggaaaauguagacauca

SEQ ID NO: 178218 - RNA, 32 nt, Homo Sapiens
acagggcgaaaacugaagugcaaucagggcca

SEQ ID NO: 178219 - RNA, 32 nt, Homo Sapiens
gguuccccugcuccaacaccccguuccugagu

SEQ ID NO: 178220 - RNA, 32 nt, Homo Sapiens
guuaggugggucugggugagaguuauagugag

SEQ ID NO: 178221 - RNA, 32 nt, Homo Sapiens
ucacucugggugccuccuccccagguggaggu

SEQ ID NO: 178222 - RNA, 32 nt, Homo Sapiens
cuaagauagguguuacagaacauggagggaac

SEQ ID NO: 178223 - RNA, 32 nt, Homo Sapiens
ugcggugggggcgcuuccuguggacgcugcgc

SEQ ID NO: 178224 - RNA, 32 nt, Homo Sapiens
aaaggaugucucuggggugaugcaaggacagc

SEQ ID NO: 178225 - RNA, 32 nt, Homo Sapiens
guuacauaagauacaauuccagugauggaagg

SEQ ID NO: 178226 - RNA, 32 nt, Homo Sapiens
uacucaagaaaagacagaagagacagugauuu

SEQ ID NO: 178227 - RNA, 32 nt, Homo Sapiens
cccgggucgaggggcaaucugaggcgacuggu

SEQ ID NO: 178228 - RNA, 32 nt, Homo Sapiens
agcaauuaauuguuauauacuuuacauauuua

SEQ ID NO: 178229 - RNA, 32 nt, Homo Sapiens
uguuuugauuaccguuguguuacuacaagaug

SEQ ID NO: 178230 - RNA, 32 nt, Homo Sapiens
agaugaagccccagcaggcaccuucagaagac

SEQ ID NO: 178231 - RNA, 32 nt, Homo Sapiens
cuuuuaguagccaggcauaguggugcaugccu

SEQ ID NO: 178232 - RNA, 32 nt, Homo Sapiens
cgcgacuuccccgacgcggggcgcugagaagc

SEQ ID NO: 178233 - RNA, 32 nt, Homo Sapiens
uuuucugagaagauaaguuuguauguucugag

SEQ ID NO: 178234 - RNA, 32 nt, Homo Sapiens
cagccuugggaugucaugugggacuguguccu

SEQ ID NO: 178235 - RNA, 32 nt, Homo Sapiens
gcggcggcgccggguggggauggggucgcaga

SEQ ID NO: 178236 - RNA, 32 nt, Homo Sapiens
uacccuuacuggagagggaacucugugaggag

SEQ ID NO: 178237 - RNA, 32 nt, Homo Sapiens
ccagccaccaaaaugccagaagagauggacaa

SEQ ID NO: 178238 - RNA, 32 nt, Homo Sapiens
ucaacaaguauuucuuuuuuggcuucaacuac

SEQ ID NO: 178239 - RNA, 32 nt, Homo Sapiens
gcugcuggagcggcgcccgccgcggcucagcg

SEQ ID NO: 178240 - RNA, 32 nt, Homo Sapiens
ugggugugguggcgggcgcccguuaguccaac

SEQ ID NO: 178241 - RNA, 32 nt, Homo Sapiens
agugaugcagagagccaaaaccagcaucauga

SEQ ID NO: 178242 - RNA, 32 nt, Homo Sapiens
ccucgccuucgccgcguggaccgcgggcuggg

SEQ ID NO: 178243 - RNA, 32 nt, Homo Sapiens
guauagcagaacuucacccacuuguaagccag

SEQ ID NO: 178244 - RNA, 32 nt, Homo Sapiens
aaggguguguuaggaacaacgcucaaaauccu

SEQ ID NO: 178245 - RNA, 32 nt, Homo Sapiens
aucagaauaaagauuauauccauaaaauuuac

SEQ ID NO: 178246 - RNA, 32 nt, Homo Sapiens
gugaguuuuuucuuuuucauuaacuuauucca

SEQ ID NO: 178247 - RNA, 32 nt, Homo Sapiens
ccgugacaauaguuuaucaucaucauuauugu

SEQ ID NO: 178248 - RNA, 32 nt, Homo Sapiens
agacaucacgguuuuacccaguggugaaagaa

SEQ ID NO: 178249 - RNA, 32 nt, Homo Sapiens
uucauaagaacaaaauggauggagaggagaaa

SEQ ID NO: 178250 - RNA, 32 nt, Homo Sapiens
ucgacagcucucucgcccagcccaguucugga

SEQ ID NO: 178251 - RNA, 32 nt, Homo Sapiens
cggcugggccgcgaucgcguuucguccggggc

SEQ ID NO: 178252 - RNA, 32 nt, Homo Sapiens
caugaauaaaaacaacuuuauuccuuuggaaa

SEQ ID NO: 178253 - RNA, 32 nt, Homo Sapiens
guauauuacuacaaagacaaccccaaaccaau

SEQ ID NO: 178254 - RNA, 32 nt, Homo Sapiens
agauaauauauucaaaaaauauugggaccaaa

SEQ ID NO: 178255 - RNA, 32 nt, Homo Sapiens
ccauuuucuucugaucauacuuccucagaaaa

SEQ ID NO: 178256 - RNA, 32 nt, Homo Sapiens
cucgugcucccuccuuuuuauguugccaguuu

SEQ ID NO: 178257 - RNA, 32 nt, Homo Sapiens
auuugucgccgagccccgagcgcacggugaug

SEQ ID NO: 178258 - RNA, 32 nt, Homo Sapiens
ggcugacucucgcgccggcagcacucggcccc

SEQ ID NO: 178259 - RNA, 32 nt, Homo Sapiens
ggcacauucacgucucguguacucauaugaag

SEQ ID NO: 178260 - RNA, 29 nt, Homo Sapiens
agacgcgcgcgucgggguuuaacgcguuu

SEQ ID NO: 178261 - RNA, 32 nt, Homo Sapiens
ccuggaggaaccgaaaggccaaauucccuccu

SEQ ID NO: 178262 - RNA, 32 nt, Homo Sapiens
aauauugcauuuucuggggccaaaaaacaggc

SEQ ID NO: 178263 - RNA, 32 nt, Homo Sapiens
ucucaagaugggggcagggcugugcuugaagg

SEQ ID NO: 178264 - RNA, 32 nt, Homo Sapiens
cugcuucuguaacugcagaccccaggcccaau

SEQ ID NO: 178265 - RNA, 32 nt, Homo Sapiens
uauuucugcagacugcuucuuauaauucuuag

SEQ ID NO: 178266 - RNA, 32 nt, Homo Sapiens
gcucguggcucggaagacaaaccccacacaca

SEQ ID NO: 178267 - RNA, 32 nt, Homo Sapiens
cugagauuuuggugcacccaucacccaagggu

SEQ ID NO: 178268 - RNA, 32 nt, Homo Sapiens
caggaucggaagccugcguaacuuucucccuu

SEQ ID NO: 178269 - RNA, 32 nt, Homo Sapiens
gagcauuucuacaugcacccagggugcugggc

SEQ ID NO: 178270 - RNA, 32 nt, Homo Sapiens
aggcaucguugaagcaucuacacgcguccaca

SEQ ID NO: 178271 - RNA, 32 nt, Homo Sapiens
cuggaaucagaucuugguuuucccucucugag

SEQ ID NO: 178272 - RNA, 32 nt, Homo Sapiens
uuagcgccacucugcuggcugaggcugcggag

SEQ ID NO: 178273 - RNA, 32 nt, Homo Sapiens
agauauaaaucacaaggcaaagggcaacugaa

SEQ ID NO: 178274 - RNA, 30 nt, Homo Sapiens
augggguuucaccauguuagccaggcuggu

SEQ ID NO: 178275 - RNA, 32 nt, Homo Sapiens
gggggucucagggucuuaggugauacgggaga

SEQ ID NO: 178276 - RNA, 32 nt, Homo Sapiens
aguucuguucccucccaccccagggcucucca

SEQ ID NO: 178277 - RNA, 30 nt, Homo Sapiens
aaucggggcucggccccgccggcgcgcgac

SEQ ID NO: 178278 - RNA, 32 nt, Homo Sapiens
uuuuauauuaauuuguuuuucuuauccaagua

SEQ ID NO: 178279 - RNA, 32 nt, Homo Sapiens
gcugcaccuuggcggcuccccagagcgcgcgg

SEQ ID NO: 178280 - RNA, 32 nt, Homo Sapiens
guugcuuugccaguaaggaaaaauaguaaucu

SEQ ID NO: 178281 - RNA, 32 nt, Homo Sapiens
gcucggucacgcugcgcagcucucuguaccgg

SEQ ID NO: 178282 - RNA, 30 nt, Homo Sapiens
gacgcugugugugcugcaagugaccccgaa

SEQ ID NO: 178283 - RNA, 32 nt, Homo Sapiens
acagaacacagggaucaaaaacaaggaaaauu

SEQ ID NO: 178284 - RNA, 32 nt, Homo Sapiens
aacacacagcugaguucuuagaguugauuccu

SEQ ID NO: 178285 - RNA, 32 nt, Homo Sapiens
ccagaguugccucuccuccuccucuuccccaa

SEQ ID NO: 178286 - RNA, 32 nt, Homo Sapiens
uacuauggaaucagaaucuucaccuuauuaag

SEQ ID NO: 178287 - RNA, 32 nt, Homo Sapiens
aauuuucuaaacgcuuacaacuuaucugccac

SEQ ID NO: 178288 - RNA, 32 nt, Homo Sapiens
gagagcugggcagaagcagcgagggggcccag

SEQ ID NO: 178289 - RNA, 32 nt, Homo Sapiens
ugugaacacacacacacacacacacacacaca

SEQ ID NO: 178290 - RNA, 32 nt, Homo Sapiens
auuuaaaaauuaacucauuaguaucauaaacg

SEQ ID NO: 178291 - RNA, 32 nt, Homo Sapiens
aaaaagucaccauucugcauuuagcuguauuc

SEQ ID NO: 178292 - RNA, 32 nt, Homo Sapiens
aggggcgccucccaaucaccgcgcuggcggau

SEQ ID NO: 178293 - RNA, 32 nt, Homo Sapiens
ucgcucugcacuccagccuggcgacugaguga

SEQ ID NO: 178294 - RNA, 32 nt, Homo Sapiens
ccucagcuccuccaaugaccccuacagggaca

SEQ ID NO: 178295 - RNA, 32 nt, Homo Sapiens
aaugugcguaggaaucuuauuaaaaugcagau

SEQ ID NO: 178296 - RNA, 32 nt, Homo Sapiens
cgaaguucuggcucggggcacagggcacccag

SEQ ID NO: 178297 - RNA, 32 nt, Homo Sapiens
gagcaguggugcugucagcgcggccgucggag

SEQ ID NO: 178298 - RNA, 32 nt, Homo Sapiens
ccucccauccccuguguccucuaggccucccc

SEQ ID NO: 178299 - RNA, 32 nt, Homo Sapiens
gccuucuggaacguucucucccggcccugcgg

SEQ ID NO: 178300 - RNA, 32 nt, Homo Sapiens
caugauaucaaauaaacauggugaaacauuaa

SEQ ID NO: 178301 - RNA, 32 nt, Homo Sapiens
acucgcccgaacuucgagggccuccgaccugc

SEQ ID NO: 178302 - RNA, 32 nt, Homo Sapiens
auauuuacaaaaacaaaacaaacaaaccaccc

SEQ ID NO: 178303 - RNA, 32 nt, Homo Sapiens
cccaggaggaggaggaggacgagggccuagug

SEQ ID NO: 178304 - RNA, 32 nt, Homo Sapiens
ugcugugucugcugcgcacgcccccuccccgg

SEQ ID NO: 178305 - RNA, 32 nt, Homo Sapiens
uguuuuuaggugacuuuuuucccccucuuagu

SEQ ID NO: 178306 - RNA, 32 nt, Homo Sapiens
gggccuuccugaccaacagccaguuuuguccu

SEQ ID NO: 178307 - RNA, 32 nt, Homo Sapiens
ggcguccccucugggcgacgcgaggcccgggg

SEQ ID NO: 178308 - RNA, 32 nt, Homo Sapiens
augaguugggcuuccccuuacccagggcugca

SEQ ID NO: 178309 - RNA, 32 nt, Homo Sapiens
caacugcgucuucaucuuuguggccccagagc

SEQ ID NO: 178310 - RNA, 32 nt, Homo Sapiens
aaauagccaaaauaaaugagcuauaaaggccc

SEQ ID NO: 178311 - RNA, 32 nt, Homo Sapiens
ugguuugugaauugcaccuuugugccauguuu

SEQ ID NO: 178312 - RNA, 32 nt, Homo Sapiens
gaagauuuuuaaaauguauuuuucuagauuaa

SEQ ID NO: 178313 - RNA, 32 nt, Homo Sapiens
aaguguuugugauuuguuccucauacugcagu

SEQ ID NO: 178314 - RNA, 32 nt, Homo Sapiens
ucagagcuugaaauaugacacaauauaaaagg

SEQ ID NO: 178315 - RNA, 32 nt, Homo Sapiens
gccccagcugggucuggggaccugaaccuccu

SEQ ID NO: 178316 - RNA, 32 nt, Homo Sapiens
cgggcggaggccgggcugccgaagugugaggg

SEQ ID NO: 178317 - RNA, 32 nt, Homo Sapiens
uucaaucacuagucaagaaaaauauaaaaaca

SEQ ID NO: 178318 - RNA, 32 nt, Homo Sapiens
ugaaauauaguugcauauauggacaccgacuu

SEQ ID NO: 178319 - RNA, 32 nt, Homo Sapiens
guaccuuuagcacuggcccucaucucuguuuc

SEQ ID NO: 178320 - RNA, 32 nt, Homo Sapiens
aaggggguguggcauggcagggggucucauga

SEQ ID NO: 178321 - RNA, 32 nt, Homo Sapiens
ccucugcuguagagccauuuaauguuauuguc

SEQ ID NO: 178322 - RNA, 32 nt, Homo Sapiens
cacccucuguaccccaugaccuuauccuuccu

SEQ ID NO: 178323 - RNA, 32 nt, Homo Sapiens
aggaggaaaaacaguauaauagcagaaauuuu

SEQ ID NO: 178324 - RNA, 32 nt, Homo Sapiens
caggauugugaaugcauagaggaugcaaagaa

SEQ ID NO: 178325 - RNA, 32 nt, Homo Sapiens
aaucccuuuagcuuucucuccccucccuuuga

SEQ ID NO: 178326 - RNA, 32 nt, Homo Sapiens
gguguauaaaaagaaaaugaacaaagauuuca

SEQ ID NO: 178327 - RNA, 32 nt, Homo Sapiens
cacagggagacgggggccuggagccagcccug

SEQ ID NO: 178328 - RNA, 32 nt, Homo Sapiens
uuugaagaaggccuccucuccuuccucaacag

SEQ ID NO: 178329 - RNA, 32 nt, Homo Sapiens
ccucccauggucuccuuccgguucucgaugcu

SEQ ID NO: 178330 - RNA, 32 nt, Homo Sapiens
ugucagcuuauggcuuuuuuuugucaucucug

SEQ ID NO: 178331 - RNA, 32 nt, Homo Sapiens
cggucgccaggagcggauugggcccccgccgc

SEQ ID NO: 178332 - RNA, 32 nt, Homo Sapiens
ucgugucugaccaugucaccuggaggcuacgc

SEQ ID NO: 178333 - RNA, 32 nt, Homo Sapiens
uuuuuuguuuuguuuuguuuucugaaaaaauc

SEQ ID NO: 178334 - RNA, 32 nt, Homo Sapiens
aauauuuguuuuaagcacuuugaaacaccauc

SEQ ID NO: 178335 - RNA, 32 nt, Homo Sapiens
auacaccccagccgcacagaugcgugugaccc

SEQ ID NO: 178336 - RNA, 32 nt, Homo Sapiens
aggauauaucacuggcuaucuaauccaagaau

SEQ ID NO: 178337 - RNA, 32 nt, Homo Sapiens
gaaguccucucuugggauugguuauuggugaa

SEQ ID NO: 178338 - RNA, 32 nt, Homo Sapiens
uggggagaagcaaauucaugaugugugugcug

SEQ ID NO: 178339 - RNA, 32 nt, Homo Sapiens
cacgggcucugccagcagacagccuuggcaca

SEQ ID NO: 178340 - RNA, 32 nt, Homo Sapiens
guugcaaauaaugcuacuaugaacauaggcau

SEQ ID NO: 178341 - RNA, 32 nt, Homo Sapiens
agaagaucuucuggcuucccugcaucuugccu

SEQ ID NO: 178342 - RNA, 32 nt, Homo Sapiens
guccacgaucgcugacugcagaugaagcuugc

SEQ ID NO: 178343 - RNA, 32 nt, Homo Sapiens
gugagugugaaaccucuuuaagacaccguugg

SEQ ID NO: 178344 - RNA, 32 nt, Homo Sapiens
ccagacugucuccucugcuccucccaccucau

SEQ ID NO: 178345 - RNA, 32 nt, Homo Sapiens
cuucauuuguguucagucugaauuaugggaaa

SEQ ID NO: 178346 - RNA, 32 nt, Homo Sapiens
ggcuccggagaguggcucuggcagcaggcggg

SEQ ID NO: 178347 - RNA, 32 nt, Homo Sapiens
acaaggcacaaggcacuguugcagcuuaucca

SEQ ID NO: 178348 - RNA, 32 nt, Homo Sapiens
agagaaagaguaauucacgcaguguccucugu

SEQ ID NO: 178349 - RNA, 32 nt, Homo Sapiens
aggguugaauucuggaggaagaagacacauuc

SEQ ID NO: 178350 - RNA, 32 nt, Homo Sapiens
auuaugcagcgugcaaugagugauccugcagc

SEQ ID NO: 178351 - RNA, 32 nt, Homo Sapiens
uugccucauaacaguggaauuucugauagaca

SEQ ID NO: 178352 - RNA, 32 nt, Homo Sapiens
auauuaaaaucuacguaaguauacaaacuagu

SEQ ID NO: 178353 - RNA, 32 nt, Homo Sapiens
guggacagagaauaacaaaaccgugauggcag

SEQ ID NO: 178354 - RNA, 32 nt, Homo Sapiens
cuguucacagaaacuaggcaaaaauuuaagaa

SEQ ID NO: 178355 - RNA, 32 nt, Homo Sapiens
gagacaggguuucgcuguguugcuccagcugg

SEQ ID NO: 178356 - RNA, 32 nt, Homo Sapiens
gcugguucccgaagcugaugggcucugucuua

SEQ ID NO: 178357 - RNA, 32 nt, Homo Sapiens
cuggcuuuccuccugcuaccaacagcccuccc

SEQ ID NO: 178358 - RNA, 32 nt, Homo Sapiens
ucucaaaaauaagcuuccauugacgaccagcu

SEQ ID NO: 178359 - RNA, 32 nt, Homo Sapiens
caucucggaugggcgcugcauaaacagccugc

SEQ ID NO: 178360 - RNA, 32 nt, Homo Sapiens
uauuguaaacacaauagauguagcucuaucau

SEQ ID NO: 178361 - RNA, 32 nt, Homo Sapiens
cccucaaguucaaccccgggaccgcccagccc

SEQ ID NO: 178362 - RNA, 32 nt, Homo Sapiens
ugcccugccuccccgguaaucugguauucugg

SEQ ID NO: 178363 - RNA, 32 nt, Homo Sapiens
ccacacccauccccagcagccuguccuuggga

SEQ ID NO: 178364 - RNA, 32 nt, Homo Sapiens
uugacaguuuaaaagcacuuucacaccucucc

SEQ ID NO: 178365 - RNA, 31 nt, Homo Sapiens
agaaggaaauaaaaauugcccauuaucucac

SEQ ID NO: 178366 - RNA, 32 nt, Homo Sapiens
cggaucggggagaggcugggugcauaggggcc

SEQ ID NO: 178367 - RNA, 32 nt, Homo Sapiens
uaggcuguuacuaucagccugaaugggggcgg

SEQ ID NO: 178368 - RNA, 32 nt, Homo Sapiens
gaauggccuagagaaccuauuuuugugucuaa

SEQ ID NO: 178369 - RNA, 32 nt, Homo Sapiens
cgcccggcuuugcagcggggacuucggcggcg

SEQ ID NO: 178370 - RNA, 32 nt, Homo Sapiens
gcgagggcgggggaggagcggagcgggcuggg

SEQ ID NO: 178371 - RNA, 32 nt, Homo Sapiens
uaaacauuuugacacaaaauucuuaugguaug

SEQ ID NO: 178372 - RNA, 32 nt, Homo Sapiens
caaaagugacuucuggucguccucacugcuca

SEQ ID NO: 178373 - RNA, 32 nt, Homo Sapiens
gaagggugaaagggcaccuugucccagacuag

SEQ ID NO: 178374 - RNA, 32 nt, Homo Sapiens
uguaagggaaucacacagacucauggacauag

SEQ ID NO: 178375 - RNA, 32 nt, Homo Sapiens
acuccccagagccgcuaggccugaugugcaca

SEQ ID NO: 178376 - RNA, 32 nt, Homo Sapiens
ugaaccaauuauuuauuuuaaaauauauuuaa

SEQ ID NO: 178377 - RNA, 32 nt, Homo Sapiens
aaaccugaaaauauggauggaugucaggacua

SEQ ID NO: 178378 - RNA, 32 nt, Homo Sapiens
cuucuggagagccucuggguucugagucagca

SEQ ID NO: 178379 - RNA, 32 nt, Homo Sapiens
gaaugcuuuuauuuuuuauuaagggacccugc

SEQ ID NO: 178380 - RNA, 32 nt, Homo Sapiens
cuggcuggaaaagggacaaaccacaucacggg

SEQ ID NO: 178381 - RNA, 32 nt, Homo Sapiens
aggguggcggcggucgacauguuccagguccc

SEQ ID NO: 178382 - RNA, 32 nt, Homo Sapiens
uuccaaagcaagacucuuucucagugaaaucu

SEQ ID NO: 178383 - RNA, 32 nt, Homo Sapiens
ccaagggcgucccgggccucgccuuggcgucc

SEQ ID NO: 178384 - RNA, 32 nt, Homo Sapiens
cacagguucuggggcgggagcccgggacgcgg

SEQ ID NO: 178385 - RNA, 30 nt, Homo Sapiens
aaaaaucuuuguaaauaaaaucuuaacauu

SEQ ID NO: 178386 - RNA, 32 nt, Homo Sapiens
acuuuuccauauauuuugaauguauauuucua

SEQ ID NO: 178387 - RNA, 32 nt, Homo Sapiens
gcggccagcaaggggccgggggugcugcagaa

SEQ ID NO: 178388 - RNA, 32 nt, Homo Sapiens
gugcaaaucaguggaaggagcggcaaacuggg

SEQ ID NO: 178389 - RNA, 32 nt, Homo Sapiens
ggaggcccucucuccuucaguucaucacggcu

SEQ ID NO: 178390 - RNA, 32 nt, Homo Sapiens
accgggccagcggugcggggcccagcggagcc

SEQ ID NO: 178391 - RNA, 32 nt, Homo Sapiens
gggcggccaggcgggggucgacgggucccuga

SEQ ID NO: 178392 - RNA, 32 nt, Homo Sapiens
aacgucacguuucaaaacuagcucuacaguuu

SEQ ID NO: 178393 - RNA, 32 nt, Homo Sapiens
cccuaccuagaaugucagauguuuuucaguua

SEQ ID NO: 178394 - RNA, 32 nt, Homo Sapiens
aagagaaaguuccauucauuuaaaugaauaag

SEQ ID NO: 178395 - RNA, 32 nt, Homo Sapiens
cguccccucccuccccccgccaagugcucaca

SEQ ID NO: 178396 - RNA, 32 nt, Homo Sapiens
gaccauagggcuuauuugcugagaguugucua

SEQ ID NO: 178397 - RNA, 32 nt, Homo Sapiens
cuccugcccuccccaggccucuggggcccgcu

SEQ ID NO: 178398 - RNA, 32 nt, Homo Sapiens
gcuauaaauacuuuuuuauacucuacuuuuuu

SEQ ID NO: 178399 - RNA, 32 nt, Homo Sapiens
auugggaaaaggaggaguaagagcaggcccuu

SEQ ID NO: 178400 - RNA, 32 nt, Homo Sapiens
ucccagucuugucccggcagugccgcccuccc

SEQ ID NO: 178401 - RNA, 32 nt, Homo Sapiens
agaguuuacccauacauuuagcaaauugaaug

SEQ ID NO: 178402 - RNA, 31 nt, Homo Sapiens
uccugcagcugggccuggccaagggcgagga

SEQ ID NO: 178403 - RNA, 32 nt, Homo Sapiens
uucaacaaauagucuuuuuuuuuuuuuuuuuu

SEQ ID NO: 178404 - RNA, 32 nt, Homo Sapiens
gccgggaggagcuuccucuuucccugaacuaa

SEQ ID NO: 178405 - RNA, 32 nt, Homo Sapiens
gaccuuuacgaugauccacuuccaucuaauga

SEQ ID NO: 178406 - RNA, 32 nt, Homo Sapiens
cggcuccauggaggggccugugccggagaacg

SEQ ID NO: 178407 - RNA, 32 nt, Homo Sapiens
agucuuccaaaggauagaaauauuuuaguucc

SEQ ID NO: 178408 - RNA, 32 nt, Homo Sapiens
ccccuguaaucgcagcacuuugggaggcugaa

SEQ ID NO: 178409 - RNA, 32 nt, Homo Sapiens
gacaacagauuggauuuuauguugacauuugu

SEQ ID NO: 178410 - RNA, 32 nt, Homo Sapiens
gcauuaaacagucaauaacauaaaugacaguc

SEQ ID NO: 178411 - RNA, 32 nt, Homo Sapiens
uguugcuuauucugaaaggaauguagaacuug

SEQ ID NO: 178412 - RNA, 32 nt, Homo Sapiens
auggaauuugaaaaagauaauuauaaugccug

SEQ ID NO: 178413 - RNA, 32 nt, Homo Sapiens
uuggggccgguugugagaugccaggcagaggc

SEQ ID NO: 178414 - RNA, 32 nt, Homo Sapiens
ucaaaggcuaauguggaaguaaagaaugagga

SEQ ID NO: 178415 - RNA, 32 nt, Homo Sapiens
aauugaaauuuauacaccaauugauuuuaaac

SEQ ID NO: 178416 - RNA, 32 nt, Homo Sapiens
uugaagacgauguugauagcggaggcucucug

SEQ ID NO: 178417 - RNA, 30 nt, Homo Sapiens
gaaaaaggcaggcagugggaguuggcuccc

SEQ ID NO: 178418 - RNA, 32 nt, Homo Sapiens
cgaccuaacucggguugaaacuuuuggcuuuc

SEQ ID NO: 178419 - RNA, 32 nt, Homo Sapiens
auucacuuuugaaaaguucuuaaugaacaguu

SEQ ID NO: 178420 - RNA, 32 nt, Homo Sapiens
gugagcaaaacgguguuaauucugauuugacu

SEQ ID NO: 178421 - RNA, 32 nt, Homo Sapiens
aggacgagucugugcuccaucagcugccgcac

SEQ ID NO: 178422 - RNA, 32 nt, Homo Sapiens
gagaaggcggcacucugguggggcugcuccag

SEQ ID NO: 178423 - RNA, 32 nt, Homo Sapiens
ugcccagcacucggauucuccuggacaccauc

SEQ ID NO: 178424 - RNA, 32 nt, Homo Sapiens
auuuuauauugauguguguuuacaaugagaaa

SEQ ID NO: 178425 - RNA, 32 nt, Homo Sapiens
gccucuaucccuggagcgagccaggccgccug

SEQ ID NO: 178426 - RNA, 32 nt, Homo Sapiens
augauucuccagaauuucuccucauaaaaaag

SEQ ID NO: 178427 - RNA, 32 nt, Homo Sapiens
gcgcagcccggcacccgcagccugcagccugc

SEQ ID NO: 178428 - RNA, 32 nt, Homo Sapiens
agaguagaaaaaaugcuuauuauuuuuaacuu

SEQ ID NO: 178429 - RNA, 32 nt, Homo Sapiens
ugaaaauaaaucauguuuuuuauuuuuaaaua

SEQ ID NO: 178430 - RNA, 32 nt, Homo Sapiens
auauuagaacagacgauccaugcuaauauugu

SEQ ID NO: 178431 - RNA, 32 nt, Homo Sapiens
ugguccucuugcuuccgucgcggccgcaugug

SEQ ID NO: 178432 - RNA, 32 nt, Homo Sapiens
cacuucugcuuaaacuccaugugugaggagug

SEQ ID NO: 178433 - RNA, 32 nt, Homo Sapiens
gguacaauuucuuuugguucauuuucagauuc

SEQ ID NO: 178434 - RNA, 32 nt, Homo Sapiens
cagacucagagaccgugagcgccccgccccca

SEQ ID NO: 178435 - RNA, 32 nt, Homo Sapiens
gcaggggcgccgcgcgcaagcccgcgggcucu

SEQ ID NO: 178436 - RNA, 32 nt, Homo Sapiens
gaaagaaaauaauaaacugaccugagcuuggg

SEQ ID NO: 178437 - RNA, 28 nt, Homo Sapiens
auaaacagaaaauaacauuugaagacuc

SEQ ID NO: 178438 - RNA, 32 nt, Homo Sapiens
agaaacccugaacuccagccaggucuuacugu

SEQ ID NO: 178439 - RNA, 32 nt, Homo Sapiens
augcuuuuguaaaacuuuuuggauuuuguaaa

SEQ ID NO: 178440 - RNA, 32 nt, Homo Sapiens
cuucccugccccaccccacaugacauccgagg

SEQ ID NO: 178441 - RNA, 32 nt, Homo Sapiens
guuguggcugagcugcugcugcugugcugggg

SEQ ID NO: 178442 - RNA, 32 nt, Homo Sapiens
cugccaguugcaaauuugauaggauaguuagu

SEQ ID NO: 178443 - RNA, 32 nt, Homo Sapiens
ucaagauacugaaaaauagagcugggacugag

SEQ ID NO: 178444 - RNA, 32 nt, Homo Sapiens
gagguguagccccagcugggaaccacugaccc

SEQ ID NO: 178445 - RNA, 32 nt, Homo Sapiens
agauacuccaugaaaggucacaauuucucuug

SEQ ID NO: 178446 - RNA, 32 nt, Homo Sapiens
ugugguacaaauaacaucuaugaauaucauau

SEQ ID NO: 178447 - RNA, 32 nt, Homo Sapiens
ccuaguucuuugcauucguccuuagaauacug

SEQ ID NO: 178448 - RNA, 32 nt, Homo Sapiens
ugcugaugaaugccuguaucauuguuaauaaa

SEQ ID NO: 178449 - RNA, 32 nt, Homo Sapiens
gcaggccugugcugcccgccucaggagguggc

SEQ ID NO: 178450 - RNA, 31 nt, Homo Sapiens
aagaagauaaagaaaaaacauauuuaauuac

SEQ ID NO: 178451 - RNA, 32 nt, Homo Sapiens
agcggcggccggcgccccggcgcgcgcagccc

SEQ ID NO: 178452 - RNA, 32 nt, Homo Sapiens
aggacauuugaaauuucuguuaugaaaccuuu

SEQ ID NO: 178453 - RNA, 32 nt, Homo Sapiens
ucagggcuaagggccaggguguccuucugcac

SEQ ID NO: 178454 - RNA, 32 nt, Homo Sapiens
aacacaaucugauguuaauuuauucuaagaac

SEQ ID NO: 178455 - RNA, 32 nt, Homo Sapiens
uuuguuuuuuaaaaauaaaucuguaaaaucug

SEQ ID NO: 178456 - RNA, 32 nt, Homo Sapiens
guucauucagcacaggccuugccgucugcccu

SEQ ID NO: 178457 - RNA, 32 nt, Homo Sapiens
cucagcccauccccugccucuaucccuggcca

SEQ ID NO: 178458 - RNA, 32 nt, Homo Sapiens
agcucaggaguucaaggcugcagagagcuaug

SEQ ID NO: 178459 - RNA, 32 nt, Homo Sapiens
uugggcuaguuauuuuuuuaaucuucauauau

SEQ ID NO: 178460 - RNA, 32 nt, Homo Sapiens
cgcuguugccagcagcugccgaccaagggcau

SEQ ID NO: 178461 - RNA, 32 nt, Homo Sapiens
aguccuaaggagcugagggucugaggacgcag

SEQ ID NO: 178462 - RNA, 32 nt, Homo Sapiens
uucagcugcucuguccucuccaugccuggccg

SEQ ID NO: 178463 - RNA, 32 nt, Homo Sapiens
ugaucucugcuauuuuaaccccccaaauaagu

SEQ ID NO: 178464 - RNA, 32 nt, Homo Sapiens
caaaauccacugacgaucauucuccuaaacug

SEQ ID NO: 178465 - RNA, 32 nt, Homo Sapiens
ucugcaaguuugcaaggauuuuguagguccug

SEQ ID NO: 178466 - RNA, 32 nt, Homo Sapiens
cauuuuggcauugacauuuaauuuuagggucc

SEQ ID NO: 178467 - RNA, 32 nt, Homo Sapiens
uuuuuaaaauuugauuccaguuaauaacagag

SEQ ID NO: 178468 - RNA, 32 nt, Homo Sapiens
gacugggguaugggcgcuguccugcaggccaa

SEQ ID NO: 178469 - RNA, 32 nt, Homo Sapiens
gaacuuucauuccugaggaagaaauggggcaa

SEQ ID NO: 178470 - RNA, 32 nt, Homo Sapiens
cauguguauuucugccugguucuauggugugu

SEQ ID NO: 178471 - RNA, 32 nt, Homo Sapiens
gaagaggcugggugcaguggcucacaccuuua

SEQ ID NO: 178472 - RNA, 32 nt, Homo Sapiens
ccgggcagugugcgaggcgcacgcacaggagc

SEQ ID NO: 178473 - RNA, 32 nt, Homo Sapiens
aaaaugcaaaaauuagcugggcgugguggugu

SEQ ID NO: 178474 - RNA, 32 nt, Homo Sapiens
aaaaugcaaaaauuagcugggugugguggcgu

SEQ ID NO: 178475 - RNA, 32 nt, Homo Sapiens
uuuaaauuccaaguuaauaugcuugcaaacau

SEQ ID NO: 178476 - RNA, 32 nt, Homo Sapiens
gguagcugggucugaggauucaggauuguggc

SEQ ID NO: 178477 - RNA, 32 nt, Homo Sapiens
agagucauuguggaaagaaauaaaauaaaauu

SEQ ID NO: 178478 - RNA, 32 nt, Homo Sapiens
gggugaauuguaaaaaugaagaacuauaauuu

SEQ ID NO: 178479 - RNA, 32 nt, Homo Sapiens
gccucccugaugcugcgggggcgaccuugagc

SEQ ID NO: 178480 - RNA, 32 nt, Homo Sapiens
uaacugaaacaacauaagacaauauaaucaug

SEQ ID NO: 178481 - RNA, 32 nt, Homo Sapiens
uggagucacagcgaauccccgccccgccccgg

SEQ ID NO: 178482 - RNA, 29 nt, Homo Sapiens
aauaaaguagcuuuauauuaacuacagga

SEQ ID NO: 178483 - RNA, 32 nt, Homo Sapiens
cuguggggugggggcugaccccugccuuugau

SEQ ID NO: 178484 - RNA, 32 nt, Homo Sapiens
gagcauuagcuacuuuucagaauugaaggaga

SEQ ID NO: 178485 - RNA, 32 nt, Homo Sapiens
ggugccagacgguucccggcggggggcagggg

SEQ ID NO: 178486 - RNA, 29 nt, Homo Sapiens
cagcaugcugcacucucaggagucuggca

SEQ ID NO: 178487 - RNA, 32 nt, Homo Sapiens
aaaauaagaaaaacuuuauuauuucuccucag

SEQ ID NO: 178488 - RNA, 32 nt, Homo Sapiens
gacugaguguauucauuaaagaauuaauguuc

SEQ ID NO: 178489 - RNA, 32 nt, Homo Sapiens
caggcgagucccugcccucccucccaggccgc

SEQ ID NO: 178490 - RNA, 32 nt, Homo Sapiens
caccacagguaccauggauguggcugcaacca

SEQ ID NO: 178491 - RNA, 32 nt, Homo Sapiens
acucgcugcacuggugggaggcgguugggaaa

SEQ ID NO: 178492 - RNA, 32 nt, Homo Sapiens
agcccaccagccagcccuggcccaccccccag

SEQ ID NO: 178493 - RNA, 31 nt, Homo Sapiens
aucgcaggggcggugccgugguccucaccug

SEQ ID NO: 178494 - RNA, 32 nt, Homo Sapiens
caggagcagccagcuguggcagcgcauuaguu

SEQ ID NO: 178495 - RNA, 32 nt, Homo Sapiens
ggggucagcucuuuuuaacuucuugcugcucu

SEQ ID NO: 178496 - RNA, 32 nt, Homo Sapiens
gccugggaucuuucuuuuuuuuguuccuuuuc

SEQ ID NO: 178497 - RNA, 32 nt, Homo Sapiens
ucuggcccggcgacacauauggcugcaggcuu

SEQ ID NO: 178498 - RNA, 32 nt, Homo Sapiens
uugucuagcauuaucaucuuaaugacaaaggg

SEQ ID NO: 178499 - RNA, 32 nt, Homo Sapiens
gagauucaguugccgaucaaggcucuggcauu

SEQ ID NO: 178500 - RNA, 32 nt, Homo Sapiens
auuuggaaagcaaacugccaaaaaauaauagu

SEQ ID NO: 178501 - RNA, 32 nt, Homo Sapiens
cgcagacggacacagcgacaugccccagacac

SEQ ID NO: 178502 - RNA, 32 nt, Homo Sapiens
cgcgggccuuggagagcgcgugaaggcgggca

SEQ ID NO: 178503 - RNA, 32 nt, Homo Sapiens
acaacaacaacaacaaacccuuggggaauauu

SEQ ID NO: 178504 - RNA, 32 nt, Homo Sapiens
gaguguugggguuggcggccacagcuaagucc

SEQ ID NO: 178505 - RNA, 32 nt, Homo Sapiens
gccugccguuuugucuucuucuaaggugugug

SEQ ID NO: 178506 - RNA, 32 nt, Homo Sapiens
ggcuccagaauuuuugccaggcuuacagaaca

SEQ ID NO: 178507 - RNA, 32 nt, Homo Sapiens
aaggggacggcaacuccuccccgcgcccgccg

SEQ ID NO: 178508 - RNA, 32 nt, Homo Sapiens
ggugacuucucaucacucuggaccuccauucc

SEQ ID NO: 178509 - RNA, 32 nt, Homo Sapiens
aagcagucugggugguugucuauuugucuguc

SEQ ID NO: 178510 - RNA, 32 nt, Homo Sapiens
uccagugcucugcucugguggaccacagggag

SEQ ID NO: 178511 - RNA, 32 nt, Homo Sapiens
caaugaaauguguuaaaaauuugaccauauua

SEQ ID NO: 178512 - RNA, 32 nt, Homo Sapiens
uguuauuuuguaaaaauaacuguagcuuauau

SEQ ID NO: 178513 - RNA, 32 nt, Homo Sapiens
uggagaggccaggacagagaaagcagaucccu

SEQ ID NO: 178514 - RNA, 32 nt, Homo Sapiens
aaaaugcuauauuaauaaaucuguaguguuuu

SEQ ID NO: 178515 - RNA, 32 nt, Homo Sapiens
gagcccagcgccccgccuggaguggaugagcc

SEQ ID NO: 178516 - RNA, 32 nt, Homo Sapiens
ugagguauacuucacagguguuuggaggaagu

SEQ ID NO: 178517 - RNA, 32 nt, Homo Sapiens
uggguuugccuggccaugguuggagagggaau

SEQ ID NO: 178518 - RNA, 32 nt, Homo Sapiens
uuaaccuucaguagucuauuaaggcauuaaua

SEQ ID NO: 178519 - RNA, 29 nt, Homo Sapiens
aaggaauucauuuucagaggccugaaggg

SEQ ID NO: 178520 - RNA, 31 nt, Homo Sapiens
cuccaggcuccggucgcgcacgggacgaacu

SEQ ID NO: 178521 - RNA, 28 nt, Homo Sapiens
aaaacacugucuaauaugguucugagag

SEQ ID NO: 178522 - RNA, 32 nt, Homo Sapiens
gacuucugagaaauguauuccuggaggucggg

SEQ ID NO: 178523 - RNA, 32 nt, Homo Sapiens
aacacacacacacacacacacacacacauaca

SEQ ID NO: 178524 - RNA, 32 nt, Homo Sapiens
ccuugacugcgguuaguuacaugaccguuucu

SEQ ID NO: 178525 - RNA, 32 nt, Homo Sapiens
agcccucagccccaggccccagcuggagaaaa

SEQ ID NO: 178526 - RNA, 32 nt, Homo Sapiens
cagagaugaggaggaagaagaugcugauuucu

SEQ ID NO: 178527 - RNA, 32 nt, Homo Sapiens
aaacccccacugagaugccucucaugccucag

SEQ ID NO: 178528 - RNA, 32 nt, Homo Sapiens
ggaggaugggaccuccuggacccagcuuguua

SEQ ID NO: 178529 - RNA, 32 nt, Homo Sapiens
agggcagggccaccccacucuaccuccuuagc

SEQ ID NO: 178530 - RNA, 32 nt, Homo Sapiens
cugcagccaggcccgcgccgccaguggagccc

SEQ ID NO: 178531 - RNA, 32 nt, Homo Sapiens
ccuauaaauuuauucauguacaauuuugguua

SEQ ID NO: 178532 - RNA, 32 nt, Homo Sapiens
gagaaaagcauggugccguagggcugcuaugg

SEQ ID NO: 178533 - RNA, 31 nt, Homo Sapiens
uuuggggguuugagagcaucauucuuuuaau

SEQ ID NO: 178534 - RNA, 32 nt, Homo Sapiens
acuaugguagccagaugauaaauaugguuaau

SEQ ID NO: 178535 - RNA, 31 nt, Homo Sapiens
ggcuaaggauggggaaaguccagcucuaguc

SEQ ID NO: 178536 - RNA, 32 nt, Homo Sapiens
uugcuucuugcgcgugcguguagcgcuuuugc

SEQ ID NO: 178537 - RNA, 32 nt, Homo Sapiens
ccugcucgcggggcgcccgccacgcuccuuuc

SEQ ID NO: 178538 - RNA, 32 nt, Homo Sapiens
agcuuuauuaaguacuuacuacaugcuaagag

SEQ ID NO: 178539 - RNA, 32 nt, Homo Sapiens
caugauggcaucgugccuggagccugccuucc

SEQ ID NO: 178540 - RNA, 31 nt, Homo Sapiens
caaguaaaauaaaaacucaaucacauucaau

SEQ ID NO: 178541 - RNA, 32 nt, Homo Sapiens
ugauauuuuuauaguggcguguaaucuccuuu

SEQ ID NO: 178542 - RNA, 30 nt, Homo Sapiens
cacccaugggagcucagcccuugccgccuc

SEQ ID NO: 178543 - RNA, 32 nt, Homo Sapiens
gcuugugagaaaauggauuaaaaacuauucuu

SEQ ID NO: 178544 - RNA, 32 nt, Homo Sapiens
aaaaaauaaaaaggagaggaagcguucaccgc

SEQ ID NO: 178545 - RNA, 32 nt, Homo Sapiens
ggagauucuugacuagggccaaggcuaagccc

SEQ ID NO: 178546 - RNA, 32 nt, Homo Sapiens
cccagccuaugaguucagacuuggggggcucc

SEQ ID NO: 178547 - RNA, 32 nt, Homo Sapiens
gaggaaccacagugggaguccuguggcagggu

SEQ ID NO: 178548 - RNA, 32 nt, Homo Sapiens
aacuauggcucuauuaauuaacuuuuuuccuu

SEQ ID NO: 178549 - RNA, 32 nt, Homo Sapiens
gagaucaggcauauauaucuguucuuugcaua

SEQ ID NO: 178550 - RNA, 32 nt, Homo Sapiens
augccgcccgcggcgagguggcccggaccgca

SEQ ID NO: 178551 - RNA, 32 nt, Homo Sapiens
uaggcacucgcggucccggcaggcgcugggau

SEQ ID NO: 178552 - RNA, 32 nt, Homo Sapiens
uagguaacuaguaggauagaaacacugugucc

SEQ ID NO: 178553 - RNA, 32 nt, Homo Sapiens
aagcugucuccauagggaagaggccugaugug

SEQ ID NO: 178554 - RNA, 32 nt, Homo Sapiens
gaugagcucucgucuggcaggggcuuuuaggg

SEQ ID NO: 178555 - RNA, 32 nt, Homo Sapiens
aacguguuucaagaccaaaaaacacaauacca

SEQ ID NO: 178556 - RNA, 32 nt, Homo Sapiens
cagggggugucugcuagccucaaccuccuggg

SEQ ID NO: 178557 - RNA, 29 nt, Homo Sapiens
caggaugggaggguggccaggcucugagc

SEQ ID NO: 178558 - RNA, 32 nt, Homo Sapiens
ugcugcugccccaaagcacaagagggaagagc

SEQ ID NO: 178559 - RNA, 32 nt, Homo Sapiens
gcugagaggcugccuccgcaccugaccgcugc

SEQ ID NO: 178560 - RNA, 32 nt, Homo Sapiens
cucccucagagguggaggugaggggaaaguga

SEQ ID NO: 178561 - RNA, 32 nt, Homo Sapiens
ugcuugcaccacguagcuuccaccauaaaacu

SEQ ID NO: 178562 - RNA, 31 nt, Homo Sapiens
gcaacuuaugaguaaagguuauaugaaaaaa

SEQ ID NO: 178563 - RNA, 32 nt, Homo Sapiens
aggcugggggcuuauguuguggucgggggucc

SEQ ID NO: 178564 - RNA, 32 nt, Homo Sapiens
cagaauuauagaagaaguauuuccuguaacua

SEQ ID NO: 178565 - RNA, 32 nt, Homo Sapiens
auauuguguuugugauacugaaguauuugcuu

SEQ ID NO: 178566 - RNA, 32 nt, Homo Sapiens
auuuguggucugacuccuugggguccuuuccc

SEQ ID NO: 178567 - RNA, 32 nt, Homo Sapiens
cccucccuccgucgguauguccugcuuuccag

SEQ ID NO: 178568 - RNA, 32 nt, Homo Sapiens
gggcauugaagaguacuuccccugcccacaac

SEQ ID NO: 178569 - RNA, 32 nt, Homo Sapiens
ucuguuccugcccuggacggugucucagaaca

SEQ ID NO: 178570 - RNA, 32 nt, Homo Sapiens
cuagcucuacugucgggggcagggugacccca

SEQ ID NO: 178571 - RNA, 31 nt, Homo Sapiens
aguaucuucaaagaacuucgauauuauuuca

SEQ ID NO: 178572 - RNA, 32 nt, Homo Sapiens
cucugcacagaaaaaugaacgcacuggcaaac

SEQ ID NO: 178573 - RNA, 32 nt, Homo Sapiens
augcugugccuggccuccgaugccuggccugc

SEQ ID NO: 178574 - RNA, 32 nt, Homo Sapiens
gggaugcagacacuguccauggcucguucuau

SEQ ID NO: 178575 - RNA, 32 nt, Homo Sapiens
uggcucugccucaucacccagcaagccugagg

SEQ ID NO: 178576 - RNA, 32 nt, Homo Sapiens
caaguuuauaaguuauggaagaaccaggacau

SEQ ID NO: 178577 - RNA, 32 nt, Homo Sapiens
aaccauguuuuuaacuuguggcugcuuuugcu

SEQ ID NO: 178578 - RNA, 32 nt, Homo Sapiens
ucaccgaugauuuuauaacacuucugacugaa

SEQ ID NO: 178579 - RNA, 32 nt, Homo Sapiens
uaaagccauuuccaugaugaugaugaugggac

SEQ ID NO: 178580 - RNA, 32 nt, Homo Sapiens
gggacucggcccggcucccggcuccggggguu

SEQ ID NO: 178581 - RNA, 32 nt, Homo Sapiens
cuugccugaugcuuagcucaucugcaaauaug

SEQ ID NO: 178582 - RNA, 32 nt, Homo Sapiens
auaggcucuugaauuccacuccaaauaugcug

SEQ ID NO: 178583 - RNA, 32 nt, Homo Sapiens
augugcauguacuauuugaugcguuuucuuug

SEQ ID NO: 178584 - RNA, 32 nt, Homo Sapiens
cagaugcugguaaguggaaaaauaucauggua

SEQ ID NO: 178585 - RNA, 32 nt, Homo Sapiens
aaauacuuuaaaaauccacacuuuuuguuaag

SEQ ID NO: 178586 - RNA, 32 nt, Homo Sapiens
caaauggcagagcuagcaauuccuuuuucugu

SEQ ID NO: 178587 - RNA, 32 nt, Homo Sapiens
aaaagaaacauaaaaguauguuguguauuacu

SEQ ID NO: 178588 - RNA, 32 nt, Homo Sapiens
gacuucugucuccccgcuauauucccauugcu

SEQ ID NO: 178589 - RNA, 32 nt, Homo Sapiens
aauuagagcuggacuuaagacucauuggccga

SEQ ID NO: 178590 - RNA, 32 nt, Homo Sapiens
aauaaauaucuagagauaacuauuaacaguau

SEQ ID NO: 178591 - RNA, 32 nt, Homo Sapiens
ugggcuucaggcuggggcugcagacucuggcc

SEQ ID NO: 178592 - RNA, 32 nt, Homo Sapiens
uguuuuuugguuuuuuuuuuuacccagacaac

SEQ ID NO: 178593 - RNA, 32 nt, Homo Sapiens
aauccaauuaaaccucuuuuucuucccagucu

SEQ ID NO: 178594 - RNA, 32 nt, Homo Sapiens
aauuuaugugaacuuuuaaagcuaaauauuaa

SEQ ID NO: 178595 - RNA, 32 nt, Homo Sapiens
agcuggacuaacaggcacacuccaucaugccc

SEQ ID NO: 178596 - RNA, 32 nt, Homo Sapiens
uguccuccuguuauaugaacacacacacacac

SEQ ID NO: 178597 - RNA, 32 nt, Homo Sapiens
aacuccgaguucuuucugagccugcuggacau

SEQ ID NO: 178598 - RNA, 32 nt, Homo Sapiens
ucuuuuggguggcaaugguuuggauaucguuu

SEQ ID NO: 178599 - RNA, 32 nt, Homo Sapiens
agcagggagccaccuucaccugcgagugugaa

SEQ ID NO: 178600 - RNA, 32 nt, Homo Sapiens
agaaagacaaaauaacaauagaaaccauucac

SEQ ID NO: 178601 - RNA, 32 nt, Homo Sapiens
guuugugugcuguuggaaaacauggaaaaugc

SEQ ID NO: 178602 - RNA, 32 nt, Homo Sapiens
cugcagcagauuucuuugauaauuuagcuuuu

SEQ ID NO: 178603 - RNA, 32 nt, Homo Sapiens
gccaagcggaggcugcagcccgggccgcgaug

SEQ ID NO: 178604 - RNA, 32 nt, Homo Sapiens
uugcuccauugauaacguguauggagacuucg

SEQ ID NO: 178605 - RNA, 32 nt, Homo Sapiens
cuuaccucuuggcaucucagaugcacuggccu

SEQ ID NO: 178606 - RNA, 32 nt, Homo Sapiens
uugcucuggggggaagggaggggggaaugggu

SEQ ID NO: 178607 - RNA, 32 nt, Homo Sapiens
cacugcacgcaccuggccuccauggacgagca

SEQ ID NO: 178608 - RNA, 32 nt, Homo Sapiens
ucucuggcaguuccuuaugauagaguuuauaa

SEQ ID NO: 178609 - RNA, 32 nt, Homo Sapiens
auauuggggggccggguguaguggcucaugcc

SEQ ID NO: 178610 - RNA, 32 nt, Homo Sapiens
ggagcucuuggcugcaucuccucccugccccc

SEQ ID NO: 178611 - RNA, 32 nt, Homo Sapiens
ugcuaauaaaagacaacauaacucaagucugg

SEQ ID NO: 178612 - RNA, 32 nt, Homo Sapiens
uaguccauggaccagcagcaucaacauaacca

SEQ ID NO: 178613 - RNA, 32 nt, Homo Sapiens
aagggaugccacuguuuuuguaacauguugcu

SEQ ID NO: 178614 - RNA, 32 nt, Homo Sapiens
aucagaaagaaauuuuguauuuuuguauaacu

SEQ ID NO: 178615 - RNA, 32 nt, Homo Sapiens
gacaguuccagaagugugacuggcuaaagcuu

SEQ ID NO: 178616 - RNA, 32 nt, Homo Sapiens
aaaguuugccccagcuuucccgggcacaccac

SEQ ID NO: 178617 - RNA, 32 nt, Homo Sapiens
aauaauuccuauuugcaaauuagaaugacagu

SEQ ID NO: 178618 - RNA, 32 nt, Homo Sapiens
auaguucuuuaacaacguuaacuuauguaauc

SEQ ID NO: 178619 - RNA, 32 nt, Homo Sapiens
cgaggaugcaggacugagguugcucccagagu

SEQ ID NO: 178620 - RNA, 32 nt, Homo Sapiens
cuaggaacgccuucucccaccccucccagugg

SEQ ID NO: 178621 - RNA, 32 nt, Homo Sapiens
augcagcuugcgccuggcggggaggggugaaa

SEQ ID NO: 178622 - RNA, 32 nt, Homo Sapiens
ccaaugcaccaucuguggauagauggugcuuc

SEQ ID NO: 178623 - RNA, 32 nt, Homo Sapiens
uaagucucuugggauccuguguagaagcuguu

SEQ ID NO: 178624 - RNA, 32 nt, Homo Sapiens
ccgcccuccccgcuccucagucuuugcggaca

SEQ ID NO: 178625 - RNA, 32 nt, Homo Sapiens
auauuugugaauggaaugccuugcaauaugaa

SEQ ID NO: 178626 - RNA, 32 nt, Homo Sapiens
cuucagugcguggcacggagggggugacagga

SEQ ID NO: 178627 - RNA, 32 nt, Homo Sapiens
cacuuucgcucuugggggcugcaccccagaca

SEQ ID NO: 178628 - RNA, 32 nt, Homo Sapiens
aggccuggcgagcggggugugucgcgaugccg

SEQ ID NO: 178629 - RNA, 32 nt, Homo Sapiens
ucucaccagggcuuccuguugcuggcaggcgg

SEQ ID NO: 178630 - RNA, 32 nt, Homo Sapiens
acagagugagagauagaaagggauacuugaaa

SEQ ID NO: 178631 - RNA, 32 nt, Homo Sapiens
ccgccgcgccagcuccuccuccucccgcugcu

SEQ ID NO: 178632 - RNA, 32 nt, Homo Sapiens
aguuuauacaaauuauuuuuaaauaguaugau

SEQ ID NO: 178633 - RNA, 32 nt, Homo Sapiens
cuguauaucugugugucaauguguguguuggc

SEQ ID NO: 178634 - RNA, 32 nt, Homo Sapiens
cagacccuccucccgcccccagcccgagcccg

SEQ ID NO: 178635 - RNA, 32 nt, Homo Sapiens
ucuauggucccaauuccaauuccuuguaaaca

SEQ ID NO: 178636 - RNA, 27 nt, Homo Sapiens
aauuuucauuaauucaggcauauuuua

SEQ ID NO: 178637 - RNA, 32 nt, Homo Sapiens
ucccagaagcggggcuuacagccagcccuuac

SEQ ID NO: 178638 - RNA, 32 nt, Homo Sapiens
acaccaguagagugaggaagugagacagggaa

SEQ ID NO: 178639 - RNA, 32 nt, Homo Sapiens
ucauacaauauuaaggauugggagggacauuc

SEQ ID NO: 178640 - RNA, 32 nt, Homo Sapiens
cuaccucacaggguuguugugaggauaaacug

SEQ ID NO: 178641 - RNA, 32 nt, Homo Sapiens
cauuauuguguuucugggacguuacaaauuua

SEQ ID NO: 178642 - RNA, 32 nt, Homo Sapiens
ccucucagcguggggcuguggcugguccucac

SEQ ID NO: 178643 - RNA, 31 nt, Homo Sapiens
ucuagccugcccugccugccugcccugggcg

SEQ ID NO: 178644 - RNA, 32 nt, Homo Sapiens
aguaugcuccacgugguaagauccuccaagcu

SEQ ID NO: 178645 - RNA, 32 nt, Homo Sapiens
uaacaauuccucuacuaacaaucagcuccuuc

SEQ ID NO: 178646 - RNA, 32 nt, Homo Sapiens
cggcagcguucgcgcgggggccugcgaagcgc

SEQ ID NO: 178647 - RNA, 32 nt, Homo Sapiens
agguggccuggccagggcuggagucuggccag

SEQ ID NO: 178648 - RNA, 32 nt, Homo Sapiens
cucaucggcccggcgcugauuccucguguccg

SEQ ID NO: 178649 - RNA, 32 nt, Homo Sapiens
gauagucccuggauauccuugcugugguagag

SEQ ID NO: 178650 - RNA, 32 nt, Homo Sapiens
uggccgcgcuccugggacgccuguccgaccgc

SEQ ID NO: 178651 - RNA, 32 nt, Homo Sapiens
aagcuaaugaauuuaaaagccugaaaagugau

SEQ ID NO: 178652 - RNA, 32 nt, Homo Sapiens
cccaacggggccuacucacuuauucuuucacc

SEQ ID NO: 178653 - RNA, 32 nt, Homo Sapiens
gacaugaaucaucaacauaguauauacauauc

SEQ ID NO: 178654 - RNA, 32 nt, Homo Sapiens
acuaaaagcccauuuaaagggcacauaucucu

SEQ ID NO: 178655 - RNA, 32 nt, Homo Sapiens
gaucaucugcuuccuuuuugaauuuuuaacag

SEQ ID NO: 178656 - RNA, 32 nt, Homo Sapiens
cgagcggagggcggggccguacugcggggcug

SEQ ID NO: 178657 - RNA, 32 nt, Homo Sapiens
cagggaagcuaaaagauuggacaccucugauu

SEQ ID NO: 178658 - RNA, 32 nt, Homo Sapiens
gccagugugcacggucccacacuguggccccu

SEQ ID NO: 178659 - RNA, 32 nt, Homo Sapiens
cucagaaugggcuuuggacuccguggacuaaa

SEQ ID NO: 178660 - RNA, 32 nt, Homo Sapiens
ggccggucugcaccaugcugcgaacguccguc

SEQ ID NO: 178661 - RNA, 32 nt, Homo Sapiens
gaaccaaaugaaauggucaacugaaagccaac

SEQ ID NO: 178662 - RNA, 31 nt, Homo Sapiens
guagcaaugacugauguggaaacuacauaug

SEQ ID NO: 178663 - RNA, 32 nt, Homo Sapiens
gaauugagcucgucacuaucagaugcugcugc

SEQ ID NO: 178664 - RNA, 29 nt, Homo Sapiens
uuuguauaguuugcaaauuuucuacagug

SEQ ID NO: 178665 - RNA, 32 nt, Homo Sapiens
acccgaggaaugucaggugaagcaauugaaca

SEQ ID NO: 178666 - RNA, 32 nt, Homo Sapiens
auggcauauuguaaaugucauuuuaaacauug

SEQ ID NO: 178667 - RNA, 32 nt, Homo Sapiens
ggcgacccuacgccagcuccgggcgggagaaa

SEQ ID NO: 178668 - RNA, 32 nt, Homo Sapiens
aguucaaauucgagaagauuuaacucaagugg

SEQ ID NO: 178669 - RNA, 32 nt, Homo Sapiens
ugagugauaaaacauuuacuaccuuguccuuu

SEQ ID NO: 178670 - RNA, 32 nt, Homo Sapiens
cuuugagggcgcgacgcuuccaggcgcucucc

SEQ ID NO: 178671 - RNA, 32 nt, Homo Sapiens
ccauggauacccaucacuuuggcauucagugc

SEQ ID NO: 178672 - RNA, 32 nt, Homo Sapiens
acguaucuaugaauauacuaaaaaccaucgaa

SEQ ID NO: 178673 - RNA, 32 nt, Homo Sapiens
uagccaucuucagcauccuuaaaaggcaagga

SEQ ID NO: 178674 - RNA, 32 nt, Homo Sapiens
uuugugcuuacaaagcaggagaauuaaaaaga

SEQ ID NO: 178675 - RNA, 32 nt, Homo Sapiens
agcccugcugccugccugcuccuuccacuccu

SEQ ID NO: 178676 - RNA, 32 nt, Homo Sapiens
auuacccuccaagucuguaccucaaaugaauu

SEQ ID NO: 178677 - RNA, 32 nt, Homo Sapiens
cacagucccaaguucaauauuucugcggcaaa

SEQ ID NO: 178678 - RNA, 32 nt, Homo Sapiens
aggcgauccagugaugagucggggacaggcca

SEQ ID NO: 178679 - RNA, 31 nt, Homo Sapiens
uuaugcauacauuugcuuagagccugcuuua

SEQ ID NO: 178680 - RNA, 32 nt, Homo Sapiens
agaguuuuccuccgcagcucugagucuccacu

SEQ ID NO: 178681 - RNA, 32 nt, Homo Sapiens
cagugcagaccagcugccgcccugcccgaugc

SEQ ID NO: 178682 - RNA, 32 nt, Homo Sapiens
aaauuaacaaagcaaacugaaauaauaccuug

SEQ ID NO: 178683 - RNA, 32 nt, Homo Sapiens
caguccugcccugugauuacugcuacaaucaa

SEQ ID NO: 178684 - RNA, 32 nt, Homo Sapiens
ggaguggguggagggagggagcuacgggcagg

SEQ ID NO: 178685 - RNA, 28 nt, Homo Sapiens
uucaccuuguuggccaggaugaucucga

SEQ ID NO: 178686 - RNA, 32 nt, Homo Sapiens
aaucuuucaucuucuuuuuuucuuuaucuuuu

SEQ ID NO: 178687 - RNA, 32 nt, Homo Sapiens
uuucucuaacugucuacacgugcacauaggca

SEQ ID NO: 178688 - RNA, 32 nt, Homo Sapiens
acauucucagugagguuacuggcauuaaaaag

SEQ ID NO: 178689 - RNA, 32 nt, Homo Sapiens
cuaauuauuucugaacuugguuaauaaaaguu

SEQ ID NO: 178690 - RNA, 32 nt, Homo Sapiens
cccccacucgcccuccacuaccucugagagcc

SEQ ID NO: 178691 - RNA, 32 nt, Homo Sapiens
gcccacuucccucccccugccgaggcuguggc

SEQ ID NO: 178692 - RNA, 32 nt, Homo Sapiens
caacuuccacugaccauaaaauguuucucuuc

SEQ ID NO: 178693 - RNA, 32 nt, Homo Sapiens
gcuuuuagaacccaggaugaccucagagcaug

SEQ ID NO: 178694 - RNA, 29 nt, Homo Sapiens
gaagaugaggcagccagaggugagcgagg

SEQ ID NO: 178695 - RNA, 32 nt, Homo Sapiens
uggcucacaccuguaaucucaacgcuuuggga

SEQ ID NO: 178696 - RNA, 32 nt, Homo Sapiens
cuccaggaauccuggggggucccaggccaccu

SEQ ID NO: 178697 - RNA, 32 nt, Homo Sapiens
auuauaaaaccaguaauucauuuacucuugcc

SEQ ID NO: 178698 - RNA, 32 nt, Homo Sapiens
acauuugcauuguaaaugauaauuaaaaaaau

SEQ ID NO: 178699 - RNA, 32 nt, Homo Sapiens
aaaucuagcguagaagugcaucaaacucgauu

SEQ ID NO: 178700 - RNA, 32 nt, Homo Sapiens
gcuagaaaucucuuuccaguuccagauuguga

SEQ ID NO: 178701 - RNA, 32 nt, Homo Sapiens
uuggcuagaauuugaugauauuaaacuaugua

SEQ ID NO: 178702 - RNA, 32 nt, Homo Sapiens
aaugguuuuacugggauuuuuaucgagaagua

SEQ ID NO: 178703 - RNA, 32 nt, Homo Sapiens
cuuucgcccccuuuuccaaagaccaacaaaga

SEQ ID NO: 178704 - RNA, 32 nt, Homo Sapiens
auggcggcgcgguggagcucuaggugauguuu

SEQ ID NO: 178705 - RNA, 32 nt, Homo Sapiens
acagcuagaacaaaggggaggaaugagaagug

SEQ ID NO: 178706 - RNA, 32 nt, Homo Sapiens
ucucagcuuccacugcuccccuuguucccggc

SEQ ID NO: 178707 - RNA, 32 nt, Homo Sapiens
cuggccggcuacaggcuccauuucucugccuu

SEQ ID NO: 178708 - RNA, 32 nt, Homo Sapiens
uauauuaauagcuauucuuguuuuucuuaucc

SEQ ID NO: 178709 - RNA, 30 nt, Homo Sapiens
cgcgaauacaucccugccuuggacaagacg

SEQ ID NO: 178710 - RNA, 32 nt, Homo Sapiens
agcuugcgccuggcggggaggggugaaacacu

SEQ ID NO: 178711 - RNA, 32 nt, Homo Sapiens
ccuguauuuacagaucuuauccucauaggauu

SEQ ID NO: 178712 - RNA, 28 nt, Homo Sapiens
gagagcgcaggcgugccgagguggaugu

SEQ ID NO: 178713 - RNA, 32 nt, Homo Sapiens
uggcucuucuaauucucauuuaauuuuaggau

SEQ ID NO: 178714 - RNA, 32 nt, Homo Sapiens
uugagacggaggcuggccauccauucagcccu

SEQ ID NO: 178715 - RNA, 32 nt, Homo Sapiens
caaagaguuaauuggcagcugugagacuugag

SEQ ID NO: 178716 - RNA, 32 nt, Homo Sapiens
gaagugcaugucugcugcaccagaagcccccg

SEQ ID NO: 178717 - RNA, 32 nt, Homo Sapiens
auuuccccugucaguuuccccucucggccagg

SEQ ID NO: 178718 - RNA, 32 nt, Homo Sapiens
uuaucagaggauguagcauagagguaucacau

SEQ ID NO: 178719 - RNA, 32 nt, Homo Sapiens
uugccuggggcaauguugagacaaauaaggug

SEQ ID NO: 178720 - RNA, 32 nt, Homo Sapiens
aaucuuugcaaaggucgguucuauucagcgaa

SEQ ID NO: 178721 - RNA, 32 nt, Homo Sapiens
cccggugcucgccuagucacuccaguugaaga

SEQ ID NO: 178722 - RNA, 32 nt, Homo Sapiens
agaagugcguaccagaaguaugacucaugcaa

SEQ ID NO: 178723 - RNA, 32 nt, Homo Sapiens
gcuuaauuuggguuucuaucucuuauuuguaa

SEQ ID NO: 178724 - RNA, 32 nt, Homo Sapiens
gcacuggggaugcaagaagagaguugcacagg

SEQ ID NO: 178725 - RNA, 32 nt, Homo Sapiens
auuuagagggaaucagaaaaaugccaagccuu

SEQ ID NO: 178726 - RNA, 32 nt, Homo Sapiens
caucuggagauacaggcccaccccucaguccu

SEQ ID NO: 178727 - RNA, 32 nt, Homo Sapiens
gcucccagacuccugggugcugugggaggagg

SEQ ID NO: 178728 - RNA, 32 nt, Homo Sapiens
uugugagucuuacugaccuaagaaacauuguu

SEQ ID NO: 178729 - RNA, 32 nt, Homo Sapiens
uaaaggagaaaacuuguagguguuuaagaauu

SEQ ID NO: 178730 - RNA, 32 nt, Homo Sapiens
cucacuucuacagcagcaaggaacugcauucu

SEQ ID NO: 178731 - RNA, 32 nt, Homo Sapiens
cugaccccucgcgacaccguaggacuugacuu

SEQ ID NO: 178732 - RNA, 32 nt, Homo Sapiens
cgcgguguacaauacccauauaagguacauug

SEQ ID NO: 178733 - RNA, 32 nt, Homo Sapiens
gcgcgccggggcgggggccuagcucgacagcu

SEQ ID NO: 178734 - RNA, 32 nt, Homo Sapiens
ccgcccuggcacguguccuugcuggcggcccg

SEQ ID NO: 178735 - RNA, 32 nt, Homo Sapiens
acuggcucacaccucuggaggacccccuucug

SEQ ID NO: 178736 - RNA, 32 nt, Homo Sapiens
gauucuuguguacacacacacacacacacaca

SEQ ID NO: 178737 - RNA, 32 nt, Homo Sapiens
ggggaccaggggacagguggggaccaguuucc

SEQ ID NO: 178738 - RNA, 32 nt, Homo Sapiens
gagcugguucuucuggccccagcaauaacaac

SEQ ID NO: 178739 - RNA, 32 nt, Homo Sapiens
gguugcucucaaacuccugaccucaggugauc

SEQ ID NO: 178740 - RNA, 32 nt, Homo Sapiens
gagucucuguagcugcagcugcaacgugggca

SEQ ID NO: 178741 - RNA, 32 nt, Homo Sapiens
uucugcuccuuggcugccccaggcccugaguc

SEQ ID NO: 178742 - RNA, 32 nt, Homo Sapiens
ggcagcuuuccacagaauuugcauuuagagga

SEQ ID NO: 178743 - RNA, 32 nt, Homo Sapiens
uaaauuaaaaauuaaacuugaaaaaaaaaaaa

SEQ ID NO: 178744 - RNA, 32 nt, Homo Sapiens
ugacugcgccgucuuccacaacaccgacacac

SEQ ID NO: 178745 - RNA, 32 nt, Homo Sapiens
cuaggauucacaccccaccugcgcuucacuug

SEQ ID NO: 178746 - RNA, 32 nt, Homo Sapiens
uugugggcauuugucucuagugugauauauaa

SEQ ID NO: 178747 - RNA, 32 nt, Homo Sapiens
auccagagaaaauaaacuuaagauuacuggcc

SEQ ID NO: 178748 - RNA, 32 nt, Homo Sapiens
uacgcgcugcccgugucgugcgugcgcgacuu

SEQ ID NO: 178749 - RNA, 32 nt, Homo Sapiens
ccaaguccagcuugcuucauauccccugcagu

SEQ ID NO: 178750 - RNA, 32 nt, Homo Sapiens
guggcucccccuccacccagcggccagugggu

SEQ ID NO: 178751 - RNA, 32 nt, Homo Sapiens
caugugaauguucuucgggaaauauuucugcu

SEQ ID NO: 178752 - RNA, 32 nt, Homo Sapiens
caaggaacaccaaagauugacagaaaaucacc

SEQ ID NO: 178753 - RNA, 32 nt, Homo Sapiens
aagcuaggccgcuggaggaaagggaacucacc

SEQ ID NO: 178754 - RNA, 32 nt, Homo Sapiens
ggucacucuucaagauggggccuaccuugcau

SEQ ID NO: 178755 - RNA, 32 nt, Homo Sapiens
guuacccaagagacuuuuccuccaccuuccuc

SEQ ID NO: 178756 - RNA, 32 nt, Homo Sapiens
guuuuuuguuuuuuuuuaauucuugaggaaaa

SEQ ID NO: 178757 - RNA, 32 nt, Homo Sapiens
gcucccgccucccggcggccuuccccugccac

SEQ ID NO: 178758 - RNA, 32 nt, Homo Sapiens
guuuggaguggaagaaaaucgguuuugaaucu

SEQ ID NO: 178759 - RNA, 32 nt, Homo Sapiens
uguccuuccuuccauugcucccagugccaaac

SEQ ID NO: 178760 - RNA, 32 nt, Homo Sapiens
gacccgcccuccccccaccaaucucuauaaaa

SEQ ID NO: 178761 - RNA, 32 nt, Homo Sapiens
cacucgccugcgccccgcaccccuccgagcag

SEQ ID NO: 178762 - RNA, 32 nt, Homo Sapiens
uaagcauaauuuccuuuaguucuaguuaguca

SEQ ID NO: 178763 - RNA, 32 nt, Homo Sapiens
uuugcuauguaauccaaagugauuuauuccau

SEQ ID NO: 178764 - RNA, 32 nt, Homo Sapiens
uucuccguuagugcuuccggguugccgccagg

SEQ ID NO: 178765 - RNA, 32 nt, Homo Sapiens
cuaagguagagcuccccagcagcccucgcucc

SEQ ID NO: 178766 - RNA, 32 nt, Homo Sapiens
gaguccguuuaaggcuuuccuugguauuuggc

SEQ ID NO: 178767 - RNA, 32 nt, Homo Sapiens
acuugacuugaagagcucuaagagacugaaaa

SEQ ID NO: 178768 - RNA, 32 nt, Homo Sapiens
auuuuuaaauguuuguaaaaagagacuguuuu

SEQ ID NO: 178769 - RNA, 32 nt, Homo Sapiens
caucaagucuuuaaagauacaaaaacacgugu

SEQ ID NO: 178770 - RNA, 32 nt, Homo Sapiens
ggggaagcccccagcccugugggucauggucu

SEQ ID NO: 178771 - RNA, 32 nt, Homo Sapiens
uuccaguucuaaaaugcaguuaccagacccau

SEQ ID NO: 178772 - RNA, 32 nt, Homo Sapiens
accuggagcgccaggaaaggucaguggaggaa

SEQ ID NO: 178773 - RNA, 32 nt, Homo Sapiens
cuaccucgcugggacaggcucugggcccacgc

SEQ ID NO: 178774 - RNA, 32 nt, Homo Sapiens
aaagaagucugugccugaaugaauacacgcag

SEQ ID NO: 178775 - RNA, 32 nt, Homo Sapiens
cccccuaaguugccccgucauacucaguccca

SEQ ID NO: 178776 - RNA, 32 nt, Homo Sapiens
agccucucccugugucccacagggaguagcaa

SEQ ID NO: 178777 - RNA, 32 nt, Homo Sapiens
ugccggcccugcagucggugaccgcugacgac

SEQ ID NO: 178778 - RNA, 32 nt, Homo Sapiens
auuaauauugugcucaccauuaugacaggugc

SEQ ID NO: 178779 - RNA, 32 nt, Homo Sapiens
ucuuugccugaagacaaucagggaaaagaccc

SEQ ID NO: 178780 - RNA, 32 nt, Homo Sapiens
cggcggcgccgggaagcaggcauggagaguag

SEQ ID NO: 178781 - RNA, 32 nt, Homo Sapiens
uuugcccaugaugugcuggaugugucacucag

SEQ ID NO: 178782 - RNA, 32 nt, Homo Sapiens
ucuuccccaagguguggggagcuuagcuuacu

SEQ ID NO: 178783 - RNA, 32 nt, Homo Sapiens
accugguguacaccauuaagcagcccagcaau

SEQ ID NO: 178784 - RNA, 32 nt, Homo Sapiens
gacagguugguaaaacaugaaaagguaaauaa

SEQ ID NO: 178785 - RNA, 32 nt, Homo Sapiens
gacuuuuuuuuuuuuucuuuucucaccuauug

SEQ ID NO: 178786 - RNA, 32 nt, Homo Sapiens
uauaucuguauauggaucuuaccaucauaauu

SEQ ID NO: 178787 - RNA, 32 nt, Homo Sapiens
cccauauggacguuauuaaaacaaacaugagg

SEQ ID NO: 178788 - RNA, 32 nt, Homo Sapiens
uguugcuauuauuuuugcaugcacuuuucaaa

SEQ ID NO: 178789 - RNA, 32 nt, Homo Sapiens
uacuaguccuaauugcagaaagagcgucaguu

SEQ ID NO: 178790 - RNA, 31 nt, Homo Sapiens
cugaggcagcgcagccgcugccgcagggugc

SEQ ID NO: 178791 - RNA, 32 nt, Homo Sapiens
agaggcuccuccuguccuguccugccugugga

SEQ ID NO: 178792 - RNA, 32 nt, Homo Sapiens
ccccucugcccccguccucccuuccugggcac

SEQ ID NO: 178793 - RNA, 32 nt, Homo Sapiens
ggugccggagccggagcggggagccaggcugc

SEQ ID NO: 178794 - RNA, 32 nt, Homo Sapiens
cccuccugucuccuguguuggguccaugugag

SEQ ID NO: 178795 - RNA, 32 nt, Homo Sapiens
ccuccccaaucccacacuaaucucugcuuggu

SEQ ID NO: 178796 - RNA, 32 nt, Homo Sapiens
ucagucaucauucuucuaagagauuggagcuu

SEQ ID NO: 178797 - RNA, 32 nt, Homo Sapiens
aauacuauaauggagacuauucuuacacacau

SEQ ID NO: 178798 - RNA, 32 nt, Homo Sapiens
gcugacuguaagucccaccucccacuccgucc

SEQ ID NO: 178799 - RNA, 32 nt, Homo Sapiens
gucccgaggagaaaugagaaaaucccagaucu

SEQ ID NO: 178800 - RNA, 27 nt, Homo Sapiens
uccccauccugagucagccccucggug

SEQ ID NO: 178801 - RNA, 32 nt, Homo Sapiens
cuguauagugaggaucaggagaucugauccug

SEQ ID NO: 178802 - RNA, 32 nt, Homo Sapiens
uaauucaccaaaaugacgaacacaaagggaaa

SEQ ID NO: 178803 - RNA, 32 nt, Homo Sapiens
agcccgcgcgucgguccccgcgcggccgccau

SEQ ID NO: 178804 - RNA, 32 nt, Homo Sapiens
cgggcccauucccagacucagccucagcccgg

SEQ ID NO: 178805 - RNA, 32 nt, Homo Sapiens
cccugcugucugccggccagagccucucccau

SEQ ID NO: 178806 - RNA, 32 nt, Homo Sapiens
ggaaggaucauaagaaaggaaauacuuuuuaa

SEQ ID NO: 178807 - RNA, 32 nt, Homo Sapiens
ucccauuucugccccuucuccauauccuggca

SEQ ID NO: 178808 - RNA, 32 nt, Homo Sapiens
ucuucaaucuucccuuguuuuuguuuguuugu

SEQ ID NO: 178809 - RNA, 32 nt, Homo Sapiens
cguuugauuuagugcaaaaauguuuucaagac

SEQ ID NO: 178810 - RNA, 32 nt, Homo Sapiens
acuucuaaaaagacaagaaacauggccuaaau

SEQ ID NO: 178811 - RNA, 32 nt, Homo Sapiens
aggguuugcccacugacgcgcccgccaugggg

SEQ ID NO: 178812 - RNA, 32 nt, Homo Sapiens
acuccuaauaugucacagggguguacacacuu

SEQ ID NO: 178813 - RNA, 32 nt, Homo Sapiens
agauuagguugucacccccuccccuccagggg

SEQ ID NO: 178814 - RNA, 32 nt, Homo Sapiens
uuguguaagugauaaacaacagcaaauauacu

SEQ ID NO: 178815 - RNA, 32 nt, Homo Sapiens
gcaucucauacacgcaaaggguaggcaggcgg

SEQ ID NO: 178816 - RNA, 32 nt, Homo Sapiens
acaauuucuuaccagauaaaacaugaaaaguu

SEQ ID NO: 178817 - RNA, 30 nt, Homo Sapiens
acccccacugcugcugcaggagccgcugcu

SEQ ID NO: 178818 - RNA, 30 nt, Homo Sapiens
gcaccagccaccuucccccaucuuguggcu

SEQ ID NO: 178819 - RNA, 32 nt, Homo Sapiens
cagucugauggccaguugcugcggcugguuca

SEQ ID NO: 178820 - RNA, 32 nt, Homo Sapiens
agacuuaccccauagaacacggcuuccccgac

SEQ ID NO: 178821 - RNA, 32 nt, Homo Sapiens
cguccccgaguccuagcccgcgaggcgccagg

SEQ ID NO: 178822 - RNA, 32 nt, Homo Sapiens
ccagggugucaggaaggcaggggugccggguc

SEQ ID NO: 178823 - RNA, 32 nt, Homo Sapiens
cacaguucucccugagagagaucaaccucccu

SEQ ID NO: 178824 - RNA, 32 nt, Homo Sapiens
cggcuccccccgcccaccccgccgccucuaau

SEQ ID NO: 178825 - RNA, 32 nt, Homo Sapiens
agccggccggcgggaccuggcgcccaauccug

SEQ ID NO: 178826 - RNA, 32 nt, Homo Sapiens
gaggcaggcggugccgcggcgccgggacccga

SEQ ID NO: 178827 - RNA, 32 nt, Homo Sapiens
caggcauacaccuuucugaaauccuucuccag

SEQ ID NO: 178828 - RNA, 32 nt, Homo Sapiens
gaagaggcaaacaguaauuuugaaagccacua

SEQ ID NO: 178829 - RNA, 32 nt, Homo Sapiens
aagcuguucaccuucuugauaagauuuugaag

SEQ ID NO: 178830 - RNA, 32 nt, Homo Sapiens
cuguaucauccaccuauccauccaccuaccca

SEQ ID NO: 178831 - RNA, 32 nt, Homo Sapiens
gcucuucaacuacugggucuucguccaagcca

SEQ ID NO: 178832 - RNA, 32 nt, Homo Sapiens
ccuccuuccgcgccggcggagcgauuaaagug

SEQ ID NO: 178833 - RNA, 32 nt, Homo Sapiens
uuuagcauuaaaaauuguuuugaaagaagaac

SEQ ID NO: 178834 - RNA, 32 nt, Homo Sapiens
gguauggagaacaauuccuauuuuauuuugaa

SEQ ID NO: 178835 - RNA, 32 nt, Homo Sapiens
uucucuuuggaauaacaggacaugcuguauag

SEQ ID NO: 178836 - RNA, 32 nt, Homo Sapiens
ggcugggucagccccaggccugguugcugggu

SEQ ID NO: 178837 - RNA, 32 nt, Homo Sapiens
aagaucugcugacaccaaauuuuaagcauaca

SEQ ID NO: 178838 - RNA, 32 nt, Homo Sapiens
cagcgccucuucccagacagccaggcccaucu

SEQ ID NO: 178839 - RNA, 32 nt, Homo Sapiens
cugcaggaccuuccuucgcgcuuuuguuacaa

SEQ ID NO: 178840 - RNA, 32 nt, Homo Sapiens
aggcagagcuucugcccacuguuaucuucacu

SEQ ID NO: 178841 - RNA, 32 nt, Homo Sapiens
ucuguuuaauuauacaacuaagaugaaauauu

SEQ ID NO: 178842 - RNA, 28 nt, Homo Sapiens
guauaggaaagaauccauuugaagacaa

SEQ ID NO: 178843 - RNA, 32 nt, Homo Sapiens
ugcaguguggaggcacaaguggugguggcagg

SEQ ID NO: 178844 - RNA, 32 nt, Homo Sapiens
cauaugacccugggcuuuucuuucuugggagg

SEQ ID NO: 178845 - RNA, 32 nt, Homo Sapiens
cucaggcgcccggcucaggagcgggaggaagu

SEQ ID NO: 178846 - RNA, 32 nt, Homo Sapiens
guucuuuacugcaagaugucuuucuuuugcuc

SEQ ID NO: 178847 - RNA, 32 nt, Homo Sapiens
augucucugcucaucagcacugucccaggauc

SEQ ID NO: 178848 - RNA, 29 nt, Homo Sapiens
caacuggaaagucaaaauuuucuaacaac

SEQ ID NO: 178849 - RNA, 32 nt, Homo Sapiens
aaaucaugucauuguggaaaggaaguucccuc

SEQ ID NO: 178850 - RNA, 32 nt, Homo Sapiens
ggucuggcucccagcccaucgccagccagaua

SEQ ID NO: 178851 - RNA, 32 nt, Homo Sapiens
aauuagaugauuauauauuguuguuacuuuuu

SEQ ID NO: 178852 - RNA, 32 nt, Homo Sapiens
caaccugugggaaaucugugagagggaauggg

SEQ ID NO: 178853 - RNA, 32 nt, Homo Sapiens
cugucuucaugagguucccugggagaagcucc

SEQ ID NO: 178854 - RNA, 32 nt, Homo Sapiens
cagucaugagagacuugggucagggaaccacu

SEQ ID NO: 178855 - RNA, 32 nt, Homo Sapiens
ggaggcucuagauggcggcugugccuuagaga

SEQ ID NO: 178856 - RNA, 32 nt, Homo Sapiens
gagggggcaccaugcagcucacuacacuauuc

SEQ ID NO: 178857 - RNA, 32 nt, Homo Sapiens
cucguguccaugguguccuccuccuccucacc

SEQ ID NO: 178858 - RNA, 32 nt, Homo Sapiens
ugggaauugagccaacuguuauagaaaauugg

SEQ ID NO: 178859 - RNA, 31 nt, Homo Sapiens
aaugagacaaagaaaaauauaguuaacacag

SEQ ID NO: 178860 - RNA, 32 nt, Homo Sapiens
ugugaaugaauuccucuuuauuuggugccaca

SEQ ID NO: 178861 - RNA, 32 nt, Homo Sapiens
agcucagcaacaaccauuuugaugguaacagu

SEQ ID NO: 178862 - RNA, 32 nt, Homo Sapiens
uauguggcccucacugaugccccagggaagua

SEQ ID NO: 178863 - RNA, 32 nt, Homo Sapiens
cugaucuuuuugcuggcuccaguuuuaccuuu

SEQ ID NO: 178864 - RNA, 32 nt, Homo Sapiens
gcgccgcggugcccggcgcgcccuccaagcua

SEQ ID NO: 178865 - RNA, 32 nt, Homo Sapiens
gcggaccagagguggaaggcgcggcgggcgua

SEQ ID NO: 178866 - RNA, 32 nt, Homo Sapiens
gggcugcacaggcacuguccccugccugcguc

SEQ ID NO: 178867 - RNA, 32 nt, Homo Sapiens
uguacaaccugucccgacuccagccgccucuu

SEQ ID NO: 178868 - RNA, 32 nt, Homo Sapiens
gcuagaugguaaaauaaauucuuaauaaagua

SEQ ID NO: 178869 - RNA, 32 nt, Homo Sapiens
agcagagagaggaggcagaggcugggaauggg

SEQ ID NO: 178870 - RNA, 32 nt, Homo Sapiens
auaaugaggaagaaaugguauguguggggacu

SEQ ID NO: 178871 - RNA, 29 nt, Homo Sapiens
aaacuaacuuagaguuauuuucuguuauu

SEQ ID NO: 178872 - RNA, 32 nt, Homo Sapiens
aaaccacuugaaaaaauaaugaugaaacauuu

SEQ ID NO: 178873 - RNA, 32 nt, Homo Sapiens
gccgcagccccgcgcgcagauggcgcacucgg

SEQ ID NO: 178874 - RNA, 30 nt, Homo Sapiens
aaggcauuaaaauaaacuaaaaaaguacuc

SEQ ID NO: 178875 - RNA, 32 nt, Homo Sapiens
gcaggagcccucucauggugaacagcaacuau

SEQ ID NO: 178876 - RNA, 32 nt, Homo Sapiens
ccagccucgggccaguuguugcagcucaagga

SEQ ID NO: 178877 - RNA, 32 nt, Homo Sapiens
ugcuguuugaguuuuuaaacuuaaucuagaac

SEQ ID NO: 178878 - RNA, 32 nt, Homo Sapiens
ccccauggcauugugacuaauggcaucagggc

SEQ ID NO: 178879 - RNA, 32 nt, Homo Sapiens
auauacaaagagaaaggaaggauuauuuuaaa

SEQ ID NO: 178880 - RNA, 32 nt, Homo Sapiens
cucuuaagccugcucccucacccaggcacugg

SEQ ID NO: 178881 - RNA, 32 nt, Homo Sapiens
auuccccaaagcauugaaagccgaaaagagaa

SEQ ID NO: 178882 - RNA, 32 nt, Homo Sapiens
uugcaccgucccgcggccugcgggagccgcuc

SEQ ID NO: 178883 - RNA, 32 nt, Homo Sapiens
aguccacuccuuucaugguuuuuccugccaaa

SEQ ID NO: 178884 - RNA, 32 nt, Homo Sapiens
accccaaagggaggaauaaagaacaggagcag

SEQ ID NO: 178885 - RNA, 32 nt, Homo Sapiens
ucagugucaaggaaaaacacccacuacuuagc

SEQ ID NO: 178886 - RNA, 32 nt, Homo Sapiens
cccgaggccguggcgcaggacacgcggcggcg

SEQ ID NO: 178887 - RNA, 32 nt, Homo Sapiens
ggaccauuguacauuaugaacaauagauagag

SEQ ID NO: 178888 - RNA, 32 nt, Homo Sapiens
aagauuauuaaacccucauuuaaaugugacau

SEQ ID NO: 178889 - RNA, 32 nt, Homo Sapiens
cgcucccgcccgcuccccgacuuaggauccga

SEQ ID NO: 178890 - RNA, 32 nt, Homo Sapiens
gagagagacgaaagucaggaaauaaaggggug

SEQ ID NO: 178891 - RNA, 32 nt, Homo Sapiens
auaggaaaaguacauuuaauacagcaguguca

SEQ ID NO: 178892 - RNA, 32 nt, Homo Sapiens
caaccugcagagcacucgcggcgugggugggc

SEQ ID NO: 178893 - RNA, 32 nt, Homo Sapiens
ugucugcaccccuuguuccccggagcccugga

SEQ ID NO: 178894 - RNA, 32 nt, Homo Sapiens
cacaauuuguugaaucucagguaaaugagguc

SEQ ID NO: 178895 - RNA, 32 nt, Homo Sapiens
ugcacuuacugauaagauauugaggcaagcug

SEQ ID NO: 178896 - RNA, 32 nt, Homo Sapiens
cuggccuugaaccagcucuagaggacagguag

SEQ ID NO: 178897 - RNA, 32 nt, Homo Sapiens
gcgacgccccaguccaguggccucgcguccgc

SEQ ID NO: 178898 - RNA, 32 nt, Homo Sapiens
cugcgcgugcgcgcuuggccucccuagugcgg

SEQ ID NO: 178899 - RNA, 32 nt, Homo Sapiens
cagaccagcaaccagauuaucuagugccacug

SEQ ID NO: 178900 - RNA, 32 nt, Homo Sapiens
cuuuguaguugcaacagcgcccuaggugcccu

SEQ ID NO: 178901 - RNA, 32 nt, Homo Sapiens
gcucacccugcaggccacccccggccccggcc

SEQ ID NO: 178902 - RNA, 32 nt, Homo Sapiens
uuugcacuauugaugugauacuguagccagcc

SEQ ID NO: 178903 - RNA, 32 nt, Homo Sapiens
gacacagccuucugccuccucgccucuccugg

SEQ ID NO: 178904 - RNA, 32 nt, Homo Sapiens
acgccagguuuuucuucacugcuuauuucuag

SEQ ID NO: 178905 - RNA, 32 nt, Homo Sapiens
uauucaguuaguauuguauuuaguucagugaa

SEQ ID NO: 178906 - RNA, 32 nt, Homo Sapiens
aagguucucgugugucucggccugcaggucuc

SEQ ID NO: 178907 - RNA, 32 nt, Homo Sapiens
acggccgucggcggcccggcggcccgagaugu

SEQ ID NO: 178908 - RNA, 31 nt, Homo Sapiens
gggggaagggcggucgccucugccacuguca

SEQ ID NO: 178909 - RNA, 32 nt, Homo Sapiens
aggaaaagaacaaacaaaacuuaaaaguauuc

SEQ ID NO: 178910 - RNA, 32 nt, Homo Sapiens
agcaggugaaaauggcugagaacuugcuggac

SEQ ID NO: 178911 - RNA, 32 nt, Homo Sapiens
aguaccugggcaagcuggcggcugggguccca

SEQ ID NO: 178912 - RNA, 32 nt, Homo Sapiens
gucgccuuucccacccacagcgcuggccacag

SEQ ID NO: 178913 - RNA, 32 nt, Homo Sapiens
gaccuuggaaauguggacauaagcucuuucuu

SEQ ID NO: 178914 - RNA, 32 nt, Homo Sapiens
aguugcacucauuuuuccuggaccucagucua

SEQ ID NO: 178915 - RNA, 32 nt, Homo Sapiens
cagccuuccuuccccggaugccucccucucca

SEQ ID NO: 178916 - RNA, 32 nt, Homo Sapiens
auuuauaagaagacauaauacaugauaaggaa

SEQ ID NO: 178917 - RNA, 32 nt, Homo Sapiens
uagcuuauguaaauauuuuucuuaacaauuug

SEQ ID NO: 178918 - RNA, 32 nt, Homo Sapiens
gacaaguaauaaauuugaaucaacuucauuca

SEQ ID NO: 178919 - RNA, 32 nt, Homo Sapiens
gaggagccaagccgcacagacccgagaauucg

SEQ ID NO: 178920 - RNA, 32 nt, Homo Sapiens
gcaacaaaugacuuaucaacaagcaacacugg

SEQ ID NO: 178921 - RNA, 32 nt, Homo Sapiens
cuuuuuuuaaaauuauaaaauauuguaaagca

SEQ ID NO: 178922 - RNA, 32 nt, Homo Sapiens
gcugaaucgggcagugcuaaucaauaauuuaa

SEQ ID NO: 178923 - RNA, 32 nt, Homo Sapiens
aacucuccacuuguaugggaacuacauuucac

SEQ ID NO: 178924 - RNA, 32 nt, Homo Sapiens
gcucaaggcugauguuuguaacuuaugaacac

SEQ ID NO: 178925 - RNA, 32 nt, Homo Sapiens
gcuccacugcaacaucacgguuuuccuuguuc

SEQ ID NO: 178926 - RNA, 32 nt, Homo Sapiens
cucccgguccuguccccagcgccccgcggccu

SEQ ID NO: 178927 - RNA, 32 nt, Homo Sapiens
ugagaaaugugaaacgugcaaucuugaaacug

SEQ ID NO: 178928 - RNA, 32 nt, Homo Sapiens
acuagaauauaaauccuuagaaauugucuuua

SEQ ID NO: 178929 - RNA, 32 nt, Homo Sapiens
uuugcagugacccagcagcaucacuguuucuu

SEQ ID NO: 178930 - RNA, 32 nt, Homo Sapiens
ucaaaauaugauuuagaaauauuggccaaggu

SEQ ID NO: 178931 - RNA, 32 nt, Homo Sapiens
cgguccccauccccaccagcucguuuuucagc

SEQ ID NO: 178932 - RNA, 31 nt, Homo Sapiens
ggcagcgcauacacuacaauggcugcuggaa

SEQ ID NO: 178933 - RNA, 32 nt, Homo Sapiens
ugugucuuggcuucuucagucgguuuaauuaa

SEQ ID NO: 178934 - RNA, 32 nt, Homo Sapiens
uggcagcaugcacugcauauuuguuacugcug

SEQ ID NO: 178935 - RNA, 32 nt, Homo Sapiens
aagcugccgcuucucuuuuuuaucaccacaga

SEQ ID NO: 178936 - RNA, 32 nt, Homo Sapiens
gcccggggcgcaggcgggcgccagggcgcuaa

SEQ ID NO: 178937 - RNA, 32 nt, Homo Sapiens
accugaagcuguuuuucuucguuuuccuuugg

SEQ ID NO: 178938 - RNA, 32 nt, Homo Sapiens
agaaaaaacaaauagaagaaaaugaggguuac

SEQ ID NO: 178939 - RNA, 32 nt, Homo Sapiens
uggcagucugguauuuaugauuuuauauuuug

SEQ ID NO: 178940 - RNA, 32 nt, Homo Sapiens
ugcuagucugcccuauggauuugaaguuugcc

SEQ ID NO: 178941 - RNA, 32 nt, Homo Sapiens
gcuuauuugguacuuucacuuacuacacauca

SEQ ID NO: 178942 - RNA, 32 nt, Homo Sapiens
ugccgucuccgucucggugucccggccccuac

SEQ ID NO: 178943 - RNA, 32 nt, Homo Sapiens
acgauggggauacauucuuagaaaugugucac

SEQ ID NO: 178944 - RNA, 32 nt, Homo Sapiens
agauuagguuuuaccauucauuauuauucuug

SEQ ID NO: 178945 - RNA, 32 nt, Homo Sapiens
agcccugcauugaauauccauccacacuuugg

SEQ ID NO: 178946 - RNA, 32 nt, Homo Sapiens
uagaagaaaaucaaccugaguaaaagcagcac

SEQ ID NO: 178947 - RNA, 32 nt, Homo Sapiens
cgggaaagccauuuaagaaguuccuggaauaa

SEQ ID NO: 178948 - RNA, 32 nt, Homo Sapiens
ggcacucggcgcggggaucugcgcgccucgcu

SEQ ID NO: 178949 - RNA, 32 nt, Homo Sapiens
cccugaugucccugggguggcuaggcaggagu

SEQ ID NO: 178950 - RNA, 32 nt, Homo Sapiens
uggccaacgggccccagguugaaggccaccgc

SEQ ID NO: 178951 - RNA, 32 nt, Homo Sapiens
gcacaaguguugugucgugcagugcguggugg

SEQ ID NO: 178952 - RNA, 32 nt, Homo Sapiens
ugcgcccccggcccgcgcaggaccugccuugu

SEQ ID NO: 178953 - RNA, 32 nt, Homo Sapiens
ugacgccccccucccgcccggaaagcugccca

SEQ ID NO: 178954 - RNA, 32 nt, Homo Sapiens
gcgcucccgacacccccgcccgccuccccucc

SEQ ID NO: 178955 - RNA, 32 nt, Homo Sapiens
aaacauacauuugcgguuuggccacaggucgc

SEQ ID NO: 178956 - RNA, 32 nt, Homo Sapiens
cguccccgcacgacaggcucauacuuucugag

SEQ ID NO: 178957 - RNA, 30 nt, Homo Sapiens
uuguuaccacuugucacugucuccauguua

SEQ ID NO: 178958 - RNA, 32 nt, Homo Sapiens
gggacaaggcuuuuaaaagacuuguuagccaa

SEQ ID NO: 178959 - RNA, 32 nt, Homo Sapiens
ucgcugaggcggcggcggcggcggcggcucag

SEQ ID NO: 178960 - RNA, 32 nt, Homo Sapiens
cuccccagccccagcucccuguccuccccaac

SEQ ID NO: 178961 - RNA, 32 nt, Homo Sapiens
uaaaacuugaagaacuaaaacaacaaugcaaa

SEQ ID NO: 178962 - RNA, 29 nt, Homo Sapiens
cguggcuggggacagaccucucugaagug

SEQ ID NO: 178963 - RNA, 32 nt, Homo Sapiens
uuaacacgcauuuaaaauuauuucaugagucu

SEQ ID NO: 178964 - RNA, 32 nt, Homo Sapiens
ccaucccagugaaauaaacauguauuagacac

SEQ ID NO: 178965 - RNA, 32 nt, Homo Sapiens
cauuagaugauuauuuuccuagaauccccaaa

SEQ ID NO: 178966 - RNA, 32 nt, Homo Sapiens
cccugcaaggccaccauaaauccugccccugu

SEQ ID NO: 178967 - RNA, 32 nt, Homo Sapiens
ggaugauuugacugcauguaggucagagcugc

SEQ ID NO: 178968 - RNA, 32 nt, Homo Sapiens
cauggguuugaauucuuugagguccaauuuau

SEQ ID NO: 178969 - RNA, 32 nt, Homo Sapiens
cuucuguuugcuucaaaauauguagaauugug

SEQ ID NO: 178970 - RNA, 32 nt, Homo Sapiens
cuuuuauaaugagcauuaauccauucaugagg

SEQ ID NO: 178971 - RNA, 32 nt, Homo Sapiens
gggggccuguccagcccucucccgccauccuu

SEQ ID NO: 178972 - RNA, 32 nt, Homo Sapiens
cuuuggaaacaaaaauguacaauuaaguaaag

SEQ ID NO: 178973 - RNA, 32 nt, Homo Sapiens
aaguccacauuaaaaagaaaacaaaacaaacc

SEQ ID NO: 178974 - RNA, 32 nt, Homo Sapiens
uccugcugucacagcugccauccacuucucag

SEQ ID NO: 178975 - RNA, 32 nt, Homo Sapiens
accgcccaccaccuccuccccuucauuccugc

SEQ ID NO: 178976 - RNA, 32 nt, Homo Sapiens
ugccuggugcccacagccgucuggcucaggga

SEQ ID NO: 178977 - RNA, 32 nt, Homo Sapiens
auuuaaauuaaauuauugaauuguaauguuua

SEQ ID NO: 178978 - RNA, 32 nt, Homo Sapiens
ugauuccaauguguuggaaaguuuaccuuguc

SEQ ID NO: 178979 - RNA, 32 nt, Homo Sapiens
agcuguuuauuuucuguaaaucaauguaauuu

SEQ ID NO: 178980 - RNA, 32 nt, Homo Sapiens
aucgccgccuccccgccucaggcuccuccucc

SEQ ID NO: 178981 - RNA, 32 nt, Homo Sapiens
uaccugccaauccccccucacccaggccccug

SEQ ID NO: 178982 - RNA, 32 nt, Homo Sapiens
auaggugaugucugggucuauuuugcauucua

SEQ ID NO: 178983 - RNA, 32 nt, Homo Sapiens
aauggugcagcguggccaaaccuaccaauugu

SEQ ID NO: 178984 - RNA, 32 nt, Homo Sapiens
gaccuacacagggcuuucuagcaaggagugac

SEQ ID NO: 178985 - RNA, 32 nt, Homo Sapiens
uuccugcuuuugguuucccuggcagggguuga

SEQ ID NO: 178986 - RNA, 32 nt, Homo Sapiens
ugggugcuuuaaaauagauauuuaguucagug

SEQ ID NO: 178987 - RNA, 32 nt, Homo Sapiens
gccgccgcugcugcugccgcugccgggucgcc

SEQ ID NO: 178988 - RNA, 32 nt, Homo Sapiens
auugaagaaauaauugcuuguuuucuagccug

SEQ ID NO: 178989 - RNA, 32 nt, Homo Sapiens
uauuaauuucaagauagcagucaauucgauaa

SEQ ID NO: 178990 - RNA, 32 nt, Homo Sapiens
uuagggcaccaaauggaguuagcaauccaaga

SEQ ID NO: 178991 - RNA, 32 nt, Homo Sapiens
uugaaugaguugaauuacauaagcuaagauca

SEQ ID NO: 178992 - RNA, 32 nt, Homo Sapiens
cuaagagagauuuaaggccuagauuucauuuu

SEQ ID NO: 178993 - RNA, 32 nt, Homo Sapiens
cauaugacaaacaguauuugugaaacugugug

SEQ ID NO: 178994 - RNA, 32 nt, Homo Sapiens
auuuuucauuuacaucacugugcaaugugacu

SEQ ID NO: 178995 - RNA, 32 nt, Homo Sapiens
gcuucuauuucauguaccugcacaugugaccu

SEQ ID NO: 178996 - RNA, 32 nt, Homo Sapiens
aaccaugaacacuauauguauguacuuuauca

SEQ ID NO: 178997 - RNA, 32 nt, Homo Sapiens
ggccucauguaaaauucccauuuuucaucuuu

SEQ ID NO: 178998 - RNA, 32 nt, Homo Sapiens
uuuuuucaaguuaaguugucuuugauauauac

SEQ ID NO: 178999 - RNA, 32 nt, Homo Sapiens
gaaaauaucaaaauauaaaugaaucaaguuuu

SEQ ID NO: 179000 - RNA, 32 nt, Homo Sapiens
caagguuggaugccuacuuaugagcuugacca

SEQ ID NO: 179001 - RNA, 32 nt, Homo Sapiens
gccgaguucguggucacugcacuccagccugg

SEQ ID NO: 179002 - RNA, 32 nt, Homo Sapiens
gaagucacagaaauacgcagagcaaguaucug

SEQ ID NO: 179003 - RNA, 30 nt, Homo Sapiens
cuccucccugcucgcugacaucuggggcuu

SEQ ID NO: 179004 - RNA, 32 nt, Homo Sapiens
ucauaaugucucuguuuuuuguuuuuccaaca

SEQ ID NO: 179005 - RNA, 32 nt, Homo Sapiens
aaguuaacuggauuguucccaccugcauggau

SEQ ID NO: 179006 - RNA, 32 nt, Homo Sapiens
ucaauuugcugucuaguugagaauagagauug

SEQ ID NO: 179007 - RNA, 32 nt, Homo Sapiens
gcagggguggguggagccugacccuggagggc

SEQ ID NO: 179008 - RNA, 32 nt, Homo Sapiens
ugggcgggcccaaugucacguuugcaauugcu

SEQ ID NO: 179009 - RNA, 32 nt, Homo Sapiens
uauuggucccauccaugaugcugagacaaaca

SEQ ID NO: 179010 - RNA, 32 nt, Homo Sapiens
uccuucuccuuccuccuucugcuggcugaagu

SEQ ID NO: 179011 - RNA, 32 nt, Homo Sapiens
acaggguguuguggagaugggccagaggggcc

SEQ ID NO: 179012 - RNA, 32 nt, Homo Sapiens
agucauuuuagacauagcauuuauuaucacua

SEQ ID NO: 179013 - RNA, 32 nt, Homo Sapiens
gcggacucgaacuuaagcucuugcucuuaggc

SEQ ID NO: 179014 - RNA, 32 nt, Homo Sapiens
uuguccaggcugacacugaacucuugggcucc

SEQ ID NO: 179015 - RNA, 28 nt, Homo Sapiens
uucaaguugauuuucauguguuugggag

SEQ ID NO: 179016 - RNA, 32 nt, Homo Sapiens
auugcagcaguauccucaacuaccucuucuca

SEQ ID NO: 179017 - RNA, 32 nt, Homo Sapiens
ccuggagaugaaaucuugcagcuggguggcac

SEQ ID NO: 179018 - RNA, 32 nt, Homo Sapiens
uaucuaaugacuacaaaaugcguuacacacgu

SEQ ID NO: 179019 - RNA, 32 nt, Homo Sapiens
ggaauauacuuauguauggaagauuacugcuc

SEQ ID NO: 179020 - RNA, 32 nt, Homo Sapiens
cgcggcgggauauguggugccugucauaagcu

SEQ ID NO: 179021 - RNA, 32 nt, Homo Sapiens
auguguuuaaacagaaagaagggaaaagguac

SEQ ID NO: 179022 - RNA, 32 nt, Homo Sapiens
caaucaccaaaaugaagacugcuuuaauuuug

SEQ ID NO: 179023 - RNA, 32 nt, Homo Sapiens
ccggguggcggcggcggcgcuccggucgcgau

SEQ ID NO: 179024 - RNA, 32 nt, Homo Sapiens
ccagagccucucuaguggcagagcagcucaca

SEQ ID NO: 179025 - RNA, 32 nt, Homo Sapiens
aacaaaaacaaaaaacagccuuuaaacaaguu

SEQ ID NO: 179026 - RNA, 32 nt, Homo Sapiens
cuugguuuuaucaugucaaugcacuguacucu

SEQ ID NO: 179027 - RNA, 32 nt, Homo Sapiens
aaguuuuuauuaugaaaauauucaaacucaca

SEQ ID NO: 179028 - RNA, 32 nt, Homo Sapiens
uaaauggaaagacuugaucuaugguaauaaau

SEQ ID NO: 179029 - RNA, 32 nt, Homo Sapiens
ucuacuaaaaauaccaaaaauuagccgggcgu

SEQ ID NO: 179030 - RNA, 32 nt, Homo Sapiens
gccuauggacauuuggguaaaacccuguauag

SEQ ID NO: 179031 - RNA, 32 nt, Homo Sapiens
ccagcauccaaauuaaaaugaaauaccuuuuu

SEQ ID NO: 179032 - RNA, 32 nt, Homo Sapiens
guuggggucuccugggaagcugagugcuggcu

SEQ ID NO: 179033 - RNA, 32 nt, Homo Sapiens
auauguuuugcaugcauauauucacuaaaucc

SEQ ID NO: 179034 - RNA, 32 nt, Homo Sapiens
gcuggagcugguuggacuaaugagacugagga

SEQ ID NO: 179035 - RNA, 32 nt, Homo Sapiens
augaccacauaaagcuuaucaaggagucuaga

SEQ ID NO: 179036 - RNA, 32 nt, Homo Sapiens
cagauuggauauggacucuuuuuuaugccuau

SEQ ID NO: 179037 - RNA, 32 nt, Homo Sapiens
cauaggcuucaccaccaagaaaguaagaauug

SEQ ID NO: 179038 - RNA, 32 nt, Homo Sapiens
agcacauagcuugccuaauggcuuucacuuuc

SEQ ID NO: 179039 - RNA, 32 nt, Homo Sapiens
cuuaauuaaaaugaacacggccauuaaauuug

SEQ ID NO: 179040 - RNA, 32 nt, Homo Sapiens
cugucugcauccaccuccccagccuuugucac

SEQ ID NO: 179041 - RNA, 32 nt, Homo Sapiens
ucuacaccaacagugguauccugacuaccguc

SEQ ID NO: 179042 - RNA, 32 nt, Homo Sapiens
uuuuggacaguugcuuaacauggucauaagag

SEQ ID NO: 179043 - RNA, 32 nt, Homo Sapiens
uggccgugggccugggcuucggggcacuggca

SEQ ID NO: 179044 - RNA, 32 nt, Homo Sapiens
uagccauucuucugccucauuucuuaaaauua

SEQ ID NO: 179045 - RNA, 32 nt, Homo Sapiens
auuuuaaguucugggauacaugugcaggaugu

SEQ ID NO: 179046 - RNA, 32 nt, Homo Sapiens
ugagguuaauaaacugaagacaagccuugcga

SEQ ID NO: 179047 - RNA, 30 nt, Homo Sapiens
agacaugauaaaagaaacauuuguacguuc

SEQ ID NO: 179048 - RNA, 32 nt, Homo Sapiens
ggcgcuggcgguugcugucagcugauucccgg

SEQ ID NO: 179049 - RNA, 30 nt, Homo Sapiens
gagaggacaaaauaaagugugugugcaggg

SEQ ID NO: 179050 - RNA, 32 nt, Homo Sapiens
ccuauguuuaauaaguuuuucuuuaauuacug

SEQ ID NO: 179051 - RNA, 32 nt, Homo Sapiens
cuccagauauugccagauguccucuuggaagc

SEQ ID NO: 179052 - RNA, 32 nt, Homo Sapiens
ucuccucaucaaaagcauuucuuaagugccua

SEQ ID NO: 179053 - RNA, 30 nt, Homo Sapiens
gacagugggcggcagcacccucgaagaccg

SEQ ID NO: 179054 - RNA, 32 nt, Homo Sapiens
accucccgaugggucagacucccauuaguucc

SEQ ID NO: 179055 - RNA, 32 nt, Homo Sapiens
uagcaggggccuccuccgccccugcccagcgc

SEQ ID NO: 179056 - RNA, 32 nt, Homo Sapiens
gccaucgagggaagaguggggcugcuaggcaa

SEQ ID NO: 179057 - RNA, 32 nt, Homo Sapiens
ccugccuuccuucucuucccaagcccuccaau

SEQ ID NO: 179058 - RNA, 32 nt, Homo Sapiens
aagaucgucauaaauaaaauuuuuucucauug

SEQ ID NO: 179059 - RNA, 32 nt, Homo Sapiens
agggggcggcgcucccggcccaucccuuagcc

SEQ ID NO: 179060 - RNA, 32 nt, Homo Sapiens
auugggcugaggugggauuuucccucccccca

SEQ ID NO: 179061 - RNA, 32 nt, Homo Sapiens
aaggcaggcuccuguggcucugcuggcucagu

SEQ ID NO: 179062 - RNA, 32 nt, Homo Sapiens
gggaaaucuccacuucgggaccuucuaucugc

SEQ ID NO: 179063 - RNA, 32 nt, Homo Sapiens
aaguauuuaauucagguauuuucaaguuuuaa

SEQ ID NO: 179064 - RNA, 32 nt, Homo Sapiens
cauuuugugucuuuacuccacccuucacccua

SEQ ID NO: 179065 - RNA, 32 nt, Homo Sapiens
caaguguacuuuguggaguguugaguaagugg

SEQ ID NO: 179066 - RNA, 32 nt, Homo Sapiens
uuuaaaaaaaauuucuggcugggcccgguggc

SEQ ID NO: 179067 - RNA, 32 nt, Homo Sapiens
aaaguaauguguucccuuucccgccccuugcc

SEQ ID NO: 179068 - RNA, 32 nt, Homo Sapiens
gccgacuggaauccugaguccugggaagcugg

SEQ ID NO: 179069 - RNA, 32 nt, Homo Sapiens
uacaucuucagcgacccucacagccggauccu

SEQ ID NO: 179070 - RNA, 32 nt, Homo Sapiens
aucccauggaaccacuaaaaacaaggucugcu

SEQ ID NO: 179071 - RNA, 32 nt, Homo Sapiens
cagugcugcccccacgccugcccagcucgugu

SEQ ID NO: 179072 - RNA, 32 nt, Homo Sapiens
gcacagucuccgggauccccaggccuggaggg

SEQ ID NO: 179073 - RNA, 32 nt, Homo Sapiens
uguggcuucagcaugucguccucggugaaaac

SEQ ID NO: 179074 - RNA, 32 nt, Homo Sapiens
aauauacaaaaauuagccgggcaugauggugg

SEQ ID NO: 179075 - RNA, 32 nt, Homo Sapiens
gucaaaggcugauguccuguuucucuuucccu

SEQ ID NO: 179076 - RNA, 32 nt, Homo Sapiens
guuacucgccuggcgguggcuccaggguucuc

SEQ ID NO: 179077 - RNA, 32 nt, Homo Sapiens
ccauuugaauuuuuaaaaaauuucauacaugc

SEQ ID NO: 179078 - RNA, 32 nt, Homo Sapiens
cucguuuggaaaggccucauggccaaaggagg

SEQ ID NO: 179079 - RNA, 32 nt, Homo Sapiens
uggagcagggguccaccuggggccuaggacgc

SEQ ID NO: 179080 - RNA, 32 nt, Homo Sapiens
uaaacaagaaugacauuccagauggaaauaga

SEQ ID NO: 179081 - RNA, 32 nt, Homo Sapiens
uacugaaaacaaaaacaaugaaaauauucaua

SEQ ID NO: 179082 - RNA, 32 nt, Homo Sapiens
agaaaacauaauauagcuuaaaacacuucuaa

SEQ ID NO: 179083 - RNA, 32 nt, Homo Sapiens
aaguugcuguuuuuaugggaaucgcaggcuug

SEQ ID NO: 179084 - RNA, 32 nt, Homo Sapiens
ccucuccagggaagaacccagagggagagcgg

SEQ ID NO: 179085 - RNA, 32 nt, Homo Sapiens
ugcauuguauaaaugacucuggccugugugua

SEQ ID NO: 179086 - RNA, 32 nt, Homo Sapiens
guggggccgggcgagugcgcggcaucccaggc

SEQ ID NO: 179087 - RNA, 32 nt, Homo Sapiens
uguuaauaguccaacaguuggguuguguaaca

SEQ ID NO: 179088 - RNA, 32 nt, Homo Sapiens
aacaguggucauucaccuccccugucuaauua

SEQ ID NO: 179089 - RNA, 32 nt, Homo Sapiens
uugacugaugccaagacuaggagccaugcuga

SEQ ID NO: 179090 - RNA, 32 nt, Homo Sapiens
ucccggccgggcgcgguggcucacgccuggaa

SEQ ID NO: 179091 - RNA, 32 nt, Homo Sapiens
cuggcuucccccuggagcugggagagaggccg

SEQ ID NO: 179092 - RNA, 32 nt, Homo Sapiens
gcacaucaugcuuuuccagcucaucacacccc

SEQ ID NO: 179093 - RNA, 32 nt, Homo Sapiens
caccaucccaugaaaauucuauuuauauuuuc

SEQ ID NO: 179094 - RNA, 32 nt, Homo Sapiens
ccaggugggugguggcucuuaaggagguguuc

SEQ ID NO: 179095 - RNA, 32 nt, Homo Sapiens
uauuuucuugaagagaggugaugcuuuaaauu

SEQ ID NO: 179096 - RNA, 32 nt, Homo Sapiens
ccaggucugggucucacuccccggcccugguu

SEQ ID NO: 179097 - RNA, 32 nt, Homo Sapiens
gugagcaggaccagcugccuuucucaccacca

SEQ ID NO: 179098 - RNA, 32 nt, Homo Sapiens
caauacuuauuucaaacuuuugaaagaucuuu

SEQ ID NO: 179099 - RNA, 32 nt, Homo Sapiens
cagccuuggcuuuuccucuccugggugcucug

SEQ ID NO: 179100 - RNA, 32 nt, Homo Sapiens
uuucugccgggcgcuccgcgaagaugcagcuc

SEQ ID NO: 179101 - RNA, 32 nt, Homo Sapiens
aaccacuuucucaggcuucucauguguguagc

SEQ ID NO: 179102 - RNA, 32 nt, Homo Sapiens
caguagcuugagguuaacauuuagacuuggaa

SEQ ID NO: 179103 - RNA, 32 nt, Homo Sapiens
ggaaugggucacuacuuaagacuuuaucauuu

SEQ ID NO: 179104 - RNA, 32 nt, Homo Sapiens
ggcccuggcuccugggggcgggguuguggggg

SEQ ID NO: 179105 - RNA, 32 nt, Homo Sapiens
ugaaaaaucugugaagaaaaucuuauuucuua

SEQ ID NO: 179106 - RNA, 32 nt, Homo Sapiens
agucccagggaguggaggccccugccauggag

SEQ ID NO: 179107 - RNA, 32 nt, Homo Sapiens
ccaagaucuggccaucgcagcugcuggugguc

SEQ ID NO: 179108 - RNA, 32 nt, Homo Sapiens
aggaagaaaaggaauaauaaacaugaaguaag

SEQ ID NO: 179109 - RNA, 32 nt, Homo Sapiens
gguuguggugagccaacaucacaccauugcac

SEQ ID NO: 179110 - RNA, 32 nt, Homo Sapiens
uaccuuuuacuuugugcuuuuuguguuuuacu

SEQ ID NO: 179111 - RNA, 32 nt, Homo Sapiens
gugcaauugaaaucauuuuucuucauuuuaaa

SEQ ID NO: 179112 - RNA, 32 nt, Homo Sapiens
caggucagagaacacgaggcuugccaccaucu

SEQ ID NO: 179113 - RNA, 32 nt, Homo Sapiens
uugacauuacacaacucagugaaacaacauca

SEQ ID NO: 179114 - RNA, 32 nt, Homo Sapiens
aacauuccaauaacuuuuuuuuuucaggcgca

SEQ ID NO: 179115 - RNA, 32 nt, Homo Sapiens
aaguuaaauguaaaaagauacaguccauuuug

SEQ ID NO: 179116 - RNA, 32 nt, Homo Sapiens
gagcaauaugucagucacuaaaaggaagacag

SEQ ID NO: 179117 - RNA, 30 nt, Homo Sapiens
agcagacucuucggcgggcgccaugggacc

SEQ ID NO: 179118 - RNA, 30 nt, Homo Sapiens
ucaaagcaggggaguaugcaaaaguucuga

SEQ ID NO: 179119 - RNA, 32 nt, Homo Sapiens
uuuugcuuuucucugccccuagaaauuuuagg

SEQ ID NO: 179120 - RNA, 32 nt, Homo Sapiens
agccccuuccucucuuguuucccauggaaacg

SEQ ID NO: 179121 - RNA, 32 nt, Homo Sapiens
auaucauacuaaagucaggcacaucuuagaaa

SEQ ID NO: 179122 - RNA, 32 nt, Homo Sapiens
ccauagcacccaccccacaagccgugcuucau

SEQ ID NO: 179123 - RNA, 32 nt, Homo Sapiens
ggagaucgagaccaucguggcuaacaugguga

SEQ ID NO: 179124 - RNA, 32 nt, Homo Sapiens
ccgcggcggcccuucucagccccucccuccau

SEQ ID NO: 179125 - RNA, 32 nt, Homo Sapiens
aauccaaauggcaauuugcauucuggggauug

SEQ ID NO: 179126 - RNA, 32 nt, Homo Sapiens
uccguccggccgcuggagacccagggagccgg

SEQ ID NO: 179127 - RNA, 32 nt, Homo Sapiens
ucucugagagacugcagauaauaagauguaaa

SEQ ID NO: 179128 - RNA, 32 nt, Homo Sapiens
ccuuuaaagauuucagacuuugaaaggccuug

SEQ ID NO: 179129 - RNA, 32 nt, Homo Sapiens
aggauguaggaggacauguauaguaugucaaa

SEQ ID NO: 179130 - RNA, 32 nt, Homo Sapiens
ucacgcugacuucauggcagcaggcuccacgc

SEQ ID NO: 179131 - RNA, 32 nt, Homo Sapiens
cuugccccacuacuuuagggggcagcuaaaug

SEQ ID NO: 179132 - RNA, 32 nt, Homo Sapiens
gaagccuugacaaaguaaguauauuuuagagc

SEQ ID NO: 179133 - RNA, 32 nt, Homo Sapiens
acaucguguaugucucuccuugauuuguguug

SEQ ID NO: 179134 - RNA, 30 nt, Homo Sapiens
cgggugggagguggcaguagucuuagccug

SEQ ID NO: 179135 - RNA, 32 nt, Homo Sapiens
aauuguacucagagccaggagcuccgucggcg

SEQ ID NO: 179136 - RNA, 32 nt, Homo Sapiens
caguguuguucccucccucaaggcugggagga

SEQ ID NO: 179137 - RNA, 32 nt, Homo Sapiens
gaacauggcauggccucugugcgauccgaguc

SEQ ID NO: 179138 - RNA, 32 nt, Homo Sapiens
ccagugagaguuuccugagguaccucacccuu

SEQ ID NO: 179139 - RNA, 32 nt, Homo Sapiens
uuuucaccuggcacaucagaucaguggcaauc

SEQ ID NO: 179140 - RNA, 32 nt, Homo Sapiens
uggaguguggccuaggcauuagaaaaucuuca

SEQ ID NO: 179141 - RNA, 32 nt, Homo Sapiens
aguggaccuggcaaccacaagacccuccccau

SEQ ID NO: 179142 - RNA, 32 nt, Homo Sapiens
uagugccccccgcccccaucccuauaauaucu

SEQ ID NO: 179143 - RNA, 32 nt, Homo Sapiens
acaucgaaaaggaggauggagccaggugccau

SEQ ID NO: 179144 - RNA, 31 nt, Homo Sapiens
accucugccugugaucgucugaugaggcucc

SEQ ID NO: 179145 - RNA, 32 nt, Homo Sapiens
uucacauguaaucuccagugaacuuuuaagug

SEQ ID NO: 179146 - RNA, 30 nt, Homo Sapiens
uaugcauuauaaauaaauaccaaaaaauug

SEQ ID NO: 179147 - RNA, 32 nt, Homo Sapiens
uauacuuuuuaaaggucuagauaauuuugaac

SEQ ID NO: 179148 - RNA, 32 nt, Homo Sapiens
aaaggaauauuuuaaaccuuuuuggcuuaaac

SEQ ID NO: 179149 - RNA, 32 nt, Homo Sapiens
caaaacaaccuaauuucuuuuccaacaaggag

SEQ ID NO: 179150 - RNA, 32 nt, Homo Sapiens
accccuggcccucacgucuccuccagggaugg

SEQ ID NO: 179151 - RNA, 32 nt, Homo Sapiens
uguagauuuacauagaauuaagaguugaaaga

SEQ ID NO: 179152 - RNA, 32 nt, Homo Sapiens
aaggcucggccgcggcacuuccugacuauugg

SEQ ID NO: 179153 - RNA, 32 nt, Homo Sapiens
gugagguggccacaacggugugugggaauggg

SEQ ID NO: 179154 - RNA, 32 nt, Homo Sapiens
cuucgagucuuagcucuugguacucccucugu

SEQ ID NO: 179155 - RNA, 32 nt, Homo Sapiens
ugccgccaacuuguugagauguguguuugacu

SEQ ID NO: 179156 - RNA, 32 nt, Homo Sapiens
gccccuuguccacgcacccccaccagcccucu

SEQ ID NO: 179157 - RNA, 32 nt, Homo Sapiens
cccuccccuuuuacugcuaguuaugaaaguuu

SEQ ID NO: 179158 - RNA, 32 nt, Homo Sapiens
agccuacgccuggccgcgcccuugggcuuccu

SEQ ID NO: 179159 - RNA, 32 nt, Homo Sapiens
aaaaauacuguaauaaaaguacuuauaaacau

SEQ ID NO: 179160 - RNA, 32 nt, Homo Sapiens
aaggaaccauucuccucugcucugucauggau

SEQ ID NO: 179161 - RNA, 32 nt, Homo Sapiens
auuucaaagcuacuguuccuaguccagcuuua

SEQ ID NO: 179162 - RNA, 32 nt, Homo Sapiens
aguucucaauggcuacgucaaguucucaaugg

SEQ ID NO: 179163 - RNA, 32 nt, Homo Sapiens
gcucacuccaucccaaaccggaccccggaggc

SEQ ID NO: 179164 - RNA, 32 nt, Homo Sapiens
ccaccccugcuguccaccugcuccauccucua

SEQ ID NO: 179165 - RNA, 32 nt, Homo Sapiens
cuugugaauguggauuacaaaaugguauaauu

SEQ ID NO: 179166 - RNA, 32 nt, Homo Sapiens
gaccgagggcuuuggacaggaguaccgaggcc

SEQ ID NO: 179167 - RNA, 32 nt, Homo Sapiens
auuuuuaugaugaccugaaauuuuacauccga

SEQ ID NO: 179168 - RNA, 32 nt, Homo Sapiens
cagggccucccagcugaggccacaggacaagc

SEQ ID NO: 179169 - RNA, 32 nt, Homo Sapiens
ugugggagugcagagaaagaaagggaaacugg

SEQ ID NO: 179170 - RNA, 32 nt, Homo Sapiens
uacaguauauucucuuuuuuuucuuuauuuau

SEQ ID NO: 179171 - RNA, 31 nt, Homo Sapiens
aaugaaacaaauuauaaaaauguuuaaaugg

SEQ ID NO: 179172 - RNA, 32 nt, Homo Sapiens
cagggaaggggagggcugugcgugggggagau

SEQ ID NO: 179173 - RNA, 32 nt, Homo Sapiens
cagucugaggcuuggcgccgggggucugcggg

SEQ ID NO: 179174 - RNA, 32 nt, Homo Sapiens
gccacugcacuccagccugggcgacagagcaa

SEQ ID NO: 179175 - RNA, 32 nt, Homo Sapiens
gccacuacacuccagccugggcgacagagcga

SEQ ID NO: 179176 - RNA, 32 nt, Homo Sapiens
gggccccggcgccccgcaccuguacaguggaa

SEQ ID NO: 179177 - RNA, 32 nt, Homo Sapiens
uacagaacuauuucaaauuuccaauuuuuaua

SEQ ID NO: 179178 - RNA, 32 nt, Homo Sapiens
ucacuggacaaacggcaggcaagcccccugug

SEQ ID NO: 179179 - RNA, 32 nt, Homo Sapiens
caggccugcccggagggugcugcugcccacac

SEQ ID NO: 179180 - RNA, 32 nt, Homo Sapiens
acgcggucgcuacugaucaugcuugggccagg

SEQ ID NO: 179181 - RNA, 32 nt, Homo Sapiens
gcuggcccggcggcaggcucucagaaccgcua

SEQ ID NO: 179182 - RNA, 32 nt, Homo Sapiens
cugaugaugauuaagcucaauaauucuuugua

SEQ ID NO: 179183 - RNA, 32 nt, Homo Sapiens
guugaauuuuuuuuuuuuuuuaaaaaaaaaaa

SEQ ID NO: 179184 - RNA, 32 nt, Homo Sapiens
cccggccucccgcucccgcccuuucuccucau

SEQ ID NO: 179185 - RNA, 32 nt, Homo Sapiens
auacucugaugcuauucuccucucuuccucca

SEQ ID NO: 179186 - RNA, 32 nt, Homo Sapiens
gccuucagugugcagggacggcaccgaggagu

SEQ ID NO: 179187 - RNA, 32 nt, Homo Sapiens
gaugagaagggagagguccuggucggggacac

SEQ ID NO: 179188 - RNA, 32 nt, Homo Sapiens
aaguaguuuuaaaaucuagugcuauuuuuauu

SEQ ID NO: 179189 - RNA, 32 nt, Homo Sapiens
cuuguuuaaacacagacacacacacacacaaa

SEQ ID NO: 179190 - RNA, 32 nt, Homo Sapiens
aacccuuacuaaacaucuaagaacacacagau

SEQ ID NO: 179191 - RNA, 32 nt, Homo Sapiens
cucuuuguggcuuuugagggucagccaaggag

SEQ ID NO: 179192 - RNA, 32 nt, Homo Sapiens
cuuugggcccccuccugugaccucaggguuug

SEQ ID NO: 179193 - RNA, 32 nt, Homo Sapiens
gucugugcgugagacuccuucgauuguagcuc

SEQ ID NO: 179194 - RNA, 32 nt, Homo Sapiens
cuuccgggucauugggagagugcgggauuccu

SEQ ID NO: 179195 - RNA, 32 nt, Homo Sapiens
agcccaacaucacaacaucugcucuucggguu

SEQ ID NO: 179196 - RNA, 32 nt, Homo Sapiens
cgcucggaauccacgccaggccacgacggagg

SEQ ID NO: 179197 - RNA, 32 nt, Homo Sapiens
uucacugugggaagaaagaucaagugacguau

SEQ ID NO: 179198 - RNA, 32 nt, Homo Sapiens
cccaagccgccagcugggagcaccgcgggacu

SEQ ID NO: 179199 - RNA, 32 nt, Homo Sapiens
uaacucuugcuucucuuugacuccaugguguu

SEQ ID NO: 179200 - RNA, 32 nt, Homo Sapiens
uucucaaacuggccucccgggacucaggagug

SEQ ID NO: 179201 - RNA, 32 nt, Homo Sapiens
gcgcgaaaaaucacuaccaauauaauggauuu

SEQ ID NO: 179202 - RNA, 32 nt, Homo Sapiens
accaccauccaucuccauaacucuguucaucu

SEQ ID NO: 179203 - RNA, 32 nt, Homo Sapiens
gaagaacaaauaugcuuuuggaccacgaaaaa

SEQ ID NO: 179204 - RNA, 32 nt, Homo Sapiens
cuuauuuaguaaauuuaggucugaaugaauug

SEQ ID NO: 179205 - RNA, 32 nt, Homo Sapiens
ccccgccucacagcugacagcgccagucccag

SEQ ID NO: 179206 - RNA, 32 nt, Homo Sapiens
agccuaucagcuucagaauggcauuguacuca

SEQ ID NO: 179207 - RNA, 32 nt, Homo Sapiens
aggcgugcgggcgggugggugguggaggcugc

SEQ ID NO: 179208 - RNA, 32 nt, Homo Sapiens
ccucggcgcgcccgacuucccggccgccccug

SEQ ID NO: 179209 - RNA, 32 nt, Homo Sapiens
uuuauucuaaaaugaucuuucacagaaguaag

SEQ ID NO: 179210 - RNA, 32 nt, Homo Sapiens
agcaguggcagagguagcccccuaaaugggca

SEQ ID NO: 179211 - RNA, 32 nt, Homo Sapiens
gcugcugacgggcgggcgaccgggcgaggccg

SEQ ID NO: 179212 - RNA, 32 nt, Homo Sapiens
uucacgugacccaauuuuagacauuaguuaca

SEQ ID NO: 179213 - RNA, 29 nt, Homo Sapiens
cucaggucgaagauucguaaggaacaauu

SEQ ID NO: 179214 - RNA, 32 nt, Homo Sapiens
ugacgugcuccguagcucugcugcugauacug

SEQ ID NO: 179215 - RNA, 31 nt, Homo Sapiens
cagggugaagaauuacucagagcuuuggauc

SEQ ID NO: 179216 - RNA, 32 nt, Homo Sapiens
cgccggccaaccccuaguccccuuccugucuc

SEQ ID NO: 179217 - RNA, 32 nt, Homo Sapiens
aacuaucagucagaaggccaucugaagagcgu

SEQ ID NO: 179218 - RNA, 32 nt, Homo Sapiens
gaagcuaagaaccuugaaaaaagguuagagga

SEQ ID NO: 179219 - RNA, 32 nt, Homo Sapiens
guauugaaggaaaaaaugaagaccuaagaaaa

SEQ ID NO: 179220 - RNA, 32 nt, Homo Sapiens
gcaacagcagcagcagcagugaaugcaccaaa

SEQ ID NO: 179221 - RNA, 32 nt, Homo Sapiens
aucugugggggagggagggagacgugaagccu

SEQ ID NO: 179222 - RNA, 32 nt, Homo Sapiens
ggcggagguggggcggcccgggccccuggacu

SEQ ID NO: 179223 - RNA, 32 nt, Homo Sapiens
uuccaggcacugggcuaggcacugggauggug

SEQ ID NO: 179224 - RNA, 32 nt, Homo Sapiens
ugcuugccaagaugaagugcgucuugguggcc

SEQ ID NO: 179225 - RNA, 32 nt, Homo Sapiens
ccgcgcccaagccccgccccucccgcuucccg

SEQ ID NO: 179226 - RNA, 32 nt, Homo Sapiens
acacacauauauauguauauauacacauauau

SEQ ID NO: 179227 - RNA, 32 nt, Homo Sapiens
guacaggcaaaugugacuggauuucccucaaa

SEQ ID NO: 179228 - RNA, 32 nt, Homo Sapiens
uaaagaagaaugcccauuacggacuaaauguu

SEQ ID NO: 179229 - RNA, 32 nt, Homo Sapiens
gaagacagggccgggucucuccgcggacgaga

SEQ ID NO: 179230 - RNA, 32 nt, Homo Sapiens
augccagcaccgggaugcgcagagcacuggaa

SEQ ID NO: 179231 - RNA, 32 nt, Homo Sapiens
accccacauccacuucauugugcuguucacuc

SEQ ID NO: 179232 - RNA, 32 nt, Homo Sapiens
cacacaggacagccuuccuccugaagagaaug

SEQ ID NO: 179233 - RNA, 32 nt, Homo Sapiens
aaccucccaucccugcccuccuccuguguagc

SEQ ID NO: 179234 - RNA, 32 nt, Homo Sapiens
augcguaauuuaauggggucuguaaauacugg

SEQ ID NO: 179235 - RNA, 32 nt, Homo Sapiens
ccgaguaaugaaaccauagugugauugccuca

SEQ ID NO: 179236 - RNA, 32 nt, Homo Sapiens
aaagugguauuagucaguggcuugccaaacaa

SEQ ID NO: 179237 - RNA, 32 nt, Homo Sapiens
ugagccggcgcguggccgggcuggggggcacc

SEQ ID NO: 179238 - RNA, 32 nt, Homo Sapiens
uaagcaaauauuucaaguuguggauucuuuca

SEQ ID NO: 179239 - RNA, 32 nt, Homo Sapiens
ugccugaaggauucagugucuugguguucaca

SEQ ID NO: 179240 - RNA, 32 nt, Homo Sapiens
gaccuucagccagcuccggcccgcggcucccg

SEQ ID NO: 179241 - RNA, 32 nt, Homo Sapiens
agcccuugccccacccagaguuucccgucccc

SEQ ID NO: 179242 - RNA, 32 nt, Homo Sapiens
ggauuuuuaauggaucuuuguucuaggcagcu

SEQ ID NO: 179243 - RNA, 32 nt, Homo Sapiens
cuuuccugcuccauugguuccuuaagaaaugc

SEQ ID NO: 179244 - RNA, 32 nt, Homo Sapiens
ccagguccaccuaacacccccucccuccccua

SEQ ID NO: 179245 - RNA, 32 nt, Homo Sapiens
caccaaggaaggcagcggcagcuccacucagc

SEQ ID NO: 179246 - RNA, 31 nt, Homo Sapiens
uucgugaaauaaagaacaucauuucauuuaa

SEQ ID NO: 179247 - RNA, 32 nt, Homo Sapiens
acuccugggcgcugcgcggagccgcgccggcu

SEQ ID NO: 179248 - RNA, 32 nt, Homo Sapiens
aagagguuuugugaaggcauuuauggucauua

SEQ ID NO: 179249 - RNA, 32 nt, Homo Sapiens
gaguaaaaaucuuuaauauuucuaaagacaua

SEQ ID NO: 179250 - RNA, 32 nt, Homo Sapiens
gacguguguucuuuugaguccuuguaugaaua

SEQ ID NO: 179251 - RNA, 32 nt, Homo Sapiens
uuucuuucucccugagacccauaagguucauc

SEQ ID NO: 179252 - RNA, 32 nt, Homo Sapiens
aggcagucggccuggagucugugccugguccu

SEQ ID NO: 179253 - RNA, 32 nt, Homo Sapiens
guggcccagguggugguuccgccuccaggggc

SEQ ID NO: 179254 - RNA, 27 nt, Homo Sapiens
aagaaacccuucuucuguaucccaaua

SEQ ID NO: 179255 - RNA, 30 nt, Homo Sapiens
ccgcggcucgcucugucgccggcgcgggau

SEQ ID NO: 179256 - RNA, 32 nt, Homo Sapiens
ugagguuguugcuccuucagcgccuaucgcug

SEQ ID NO: 179257 - RNA, 32 nt, Homo Sapiens
ugccggcucucuccgcgccguggacuggcucc

SEQ ID NO: 179258 - RNA, 32 nt, Homo Sapiens
ccgccgcagcgcccgcgccuccgaggggacag

SEQ ID NO: 179259 - RNA, 32 nt, Homo Sapiens
uuuucaaaugcuuuaccuguauuuucauucca

SEQ ID NO: 179260 - RNA, 32 nt, Homo Sapiens
uuauuuggaagagagaaaggauguguguagca

SEQ ID NO: 179261 - RNA, 32 nt, Homo Sapiens
cacugguucugcaucacccgccccuggacuuc

SEQ ID NO: 179262 - RNA, 32 nt, Homo Sapiens
cggaagucagggccgcggcgcuucuggucccg

SEQ ID NO: 179263 - RNA, 32 nt, Homo Sapiens
ugucuggauguuuauaggcagcuccucugaag

SEQ ID NO: 179264 - RNA, 32 nt, Homo Sapiens
cccuuuuccuuccugugcccucugaaagcuaa

SEQ ID NO: 179265 - RNA, 32 nt, Homo Sapiens
cagagagaggggcugaacugcgagcuggccac

SEQ ID NO: 179266 - RNA, 32 nt, Homo Sapiens
aucuccgccucccaggcucaagcaauucuccu

SEQ ID NO: 179267 - RNA, 32 nt, Homo Sapiens
gaccaccauaaagauagaacuggggcuuaacc

SEQ ID NO: 179268 - RNA, 32 nt, Homo Sapiens
ccugcagccccacaguccugcuggcugagcuc

SEQ ID NO: 179269 - RNA, 32 nt, Homo Sapiens
auaauggcuagaguauaaaaauguucuuuuua

SEQ ID NO: 179270 - RNA, 32 nt, Homo Sapiens
ccaggacuccccgggccucgggcccggccugc

SEQ ID NO: 179271 - RNA, 32 nt, Homo Sapiens
cagaggguccguccaccacagcagccccaggu

SEQ ID NO: 179272 - RNA, 32 nt, Homo Sapiens
ucacucgcuccuucccccacccgcccccaccg

SEQ ID NO: 179273 - RNA, 32 nt, Homo Sapiens
cgccagccagagccuguggagagacuccgccu

SEQ ID NO: 179274 - RNA, 32 nt, Homo Sapiens
uugauuauuuugaaacucuacucuauaagaua

SEQ ID NO: 179275 - RNA, 32 nt, Homo Sapiens
cgggggugcagggcccugugguuggacuucac

SEQ ID NO: 179276 - RNA, 32 nt, Homo Sapiens
cagcuuuugacuguuuccagagugcuuauaau

SEQ ID NO: 179277 - RNA, 32 nt, Homo Sapiens
ccaguugcagugcaauuuuuuguacuaaaugc

SEQ ID NO: 179278 - RNA, 32 nt, Homo Sapiens
agcagucccgguuuagccugagguccccauag

SEQ ID NO: 179279 - RNA, 32 nt, Homo Sapiens
uuuaggaaaaauguauaauaagauaaaaucua

SEQ ID NO: 179280 - RNA, 32 nt, Homo Sapiens
aauauacaggguagcagguaccacugauuugg

SEQ ID NO: 179281 - RNA, 32 nt, Homo Sapiens
gguuuuccagcaugcugagaacacuuaccaug

SEQ ID NO: 179282 - RNA, 32 nt, Homo Sapiens
cggcucaacccucuccuacuucggucuggccg

SEQ ID NO: 179283 - RNA, 32 nt, Homo Sapiens
caguauuugucaauuaauuauauagcuuaagu

SEQ ID NO: 179284 - RNA, 32 nt, Homo Sapiens
agaagcucaaggacaauggacucauucugacu

SEQ ID NO: 179285 - RNA, 32 nt, Homo Sapiens
cuucgcuagguccuggguuuuggguggugugu

SEQ ID NO: 179286 - RNA, 32 nt, Homo Sapiens
ucuuagaauuuucagugugcuuuacugaaauc

SEQ ID NO: 179287 - RNA, 32 nt, Homo Sapiens
uguuuccuuugguuuccuuccuccccaaauug

SEQ ID NO: 179288 - RNA, 32 nt, Homo Sapiens
aaggagaacguuugguacaaucgacauccuag

SEQ ID NO: 179289 - RNA, 32 nt, Homo Sapiens
gugccaagcgacguggcgggcuccacguuagc

SEQ ID NO: 179290 - RNA, 32 nt, Homo Sapiens
ugcucguuuauggaauuugcucugccaccagu

SEQ ID NO: 179291 - RNA, 32 nt, Homo Sapiens
gauacgucugcugggagggagucaucgugacu

SEQ ID NO: 179292 - RNA, 32 nt, Homo Sapiens
ugaucaggccacuggaggacaaguugagggcu

SEQ ID NO: 179293 - RNA, 32 nt, Homo Sapiens
gcagcugugaagcucgggcugauucccccucu

SEQ ID NO: 179294 - RNA, 32 nt, Homo Sapiens
cccaguugucugcgggcugcggggagcuaagu

SEQ ID NO: 179295 - RNA, 32 nt, Homo Sapiens
uuaacagcucuuuugggauuggguguuucauu

SEQ ID NO: 179296 - RNA, 32 nt, Homo Sapiens
uagucacaaaaauuaaaauuaaacuuuauuuu

SEQ ID NO: 179297 - RNA, 32 nt, Homo Sapiens
auuuuuaguagacauguauuuaccaaaaauau

SEQ ID NO: 179298 - RNA, 32 nt, Homo Sapiens
guucugccaagagcugcuucugucagaaggca

SEQ ID NO: 179299 - RNA, 32 nt, Homo Sapiens
cggcuguccucagcgaggggccgugcacccgc

SEQ ID NO: 179300 - RNA, 32 nt, Homo Sapiens
gcggaggcggguguaucacgaggucaggagau

SEQ ID NO: 179301 - RNA, 32 nt, Homo Sapiens
cugccugcccaucuagguccccucuccugcau

SEQ ID NO: 179302 - RNA, 32 nt, Homo Sapiens
auauauacacauauauuuuaauuacaagugug

SEQ ID NO: 179303 - RNA, 32 nt, Homo Sapiens
ucacguggcugcuuacuguuucccugucuucu

SEQ ID NO: 179304 - RNA, 32 nt, Homo Sapiens
aaguuaaaaaaaugucuuucugauguuguguu

SEQ ID NO: 179305 - RNA, 32 nt, Homo Sapiens
gcucgcgcacgcugcugccaagcugcaggaug

SEQ ID NO: 179306 - RNA, 32 nt, Homo Sapiens
cacgugggccucuggggugcacaugggguggg

SEQ ID NO: 179307 - RNA, 32 nt, Homo Sapiens
caguggaagcccguuccccccaucccuggauc

SEQ ID NO: 179308 - RNA, 32 nt, Homo Sapiens
gcugagagcuauuugccaugauaaugcugauu

SEQ ID NO: 179309 - RNA, 32 nt, Homo Sapiens
acaagugguuggcucugugagcagaaggcuuc

SEQ ID NO: 179310 - RNA, 32 nt, Homo Sapiens
uucagauacuaaaguacaguuggaucauuuuc

SEQ ID NO: 179311 - RNA, 32 nt, Homo Sapiens
uuuauucuccuuucaccuuguuuucuucaaag

SEQ ID NO: 179312 - RNA, 31 nt, Homo Sapiens
cccaagccggcccccaccugagccagaacca

SEQ ID NO: 179313 - RNA, 32 nt, Homo Sapiens
cgggcuguggguuccuugagggaggaauuuug

SEQ ID NO: 179314 - RNA, 32 nt, Homo Sapiens
gcagcccuggccccggccuccaagcaguugaa

SEQ ID NO: 179315 - RNA, 30 nt, Homo Sapiens
gccccaagagccaaaaauaaaugggaauug

SEQ ID NO: 179316 - RNA, 32 nt, Homo Sapiens
ggcuccacacagcaguguccccugccccagag

SEQ ID NO: 179317 - RNA, 32 nt, Homo Sapiens
auccuagggcaucaccugcccgaaagccaagg

SEQ ID NO: 179318 - RNA, 32 nt, Homo Sapiens
ggacggugcucaccgccccgcugcuggacacc

SEQ ID NO: 179319 - RNA, 32 nt, Homo Sapiens
caugguguaaaaaucaaagguuuuagaguaaa

SEQ ID NO: 179320 - RNA, 30 nt, Homo Sapiens
uuagaggauaaaauaugauuacuuagcaga

SEQ ID NO: 179321 - RNA, 32 nt, Homo Sapiens
uuccucugccccucugccacuccacacuccag

SEQ ID NO: 179322 - RNA, 30 nt, Homo Sapiens
cucacucagcuaaugggauggcaaaggugg

SEQ ID NO: 179323 - RNA, 32 nt, Homo Sapiens
aauaugugccuucuagaauacauauuacaaga

SEQ ID NO: 179324 - RNA, 32 nt, Homo Sapiens
gauaugacaucuggcuaaaaagaaauuauugc

SEQ ID NO: 179325 - RNA, 32 nt, Homo Sapiens
uuggggucaggaagaauucugccaaguaucuu

SEQ ID NO: 179326 - RNA, 32 nt, Homo Sapiens
aaccuauuuuugugucuaaaguuuacaauaaa

SEQ ID NO: 179327 - RNA, 32 nt, Homo Sapiens
uuaaucuguaagauucaugaaauucggggcca

SEQ ID NO: 179328 - RNA, 32 nt, Homo Sapiens
ccauuugaagccguccaagaacaagucaccuc

SEQ ID NO: 179329 - RNA, 32 nt, Homo Sapiens
cuuggcacaaaguggagucaaucuuuuaaugu

SEQ ID NO: 179330 - RNA, 32 nt, Homo Sapiens
uccgcccaugccccgcugggucugcagggaac

SEQ ID NO: 179331 - RNA, 32 nt, Homo Sapiens
aguccaggaggaagcucuggcccuuguauuac

SEQ ID NO: 179332 - RNA, 32 nt, Homo Sapiens
ccaggcuuaucuaucaugugcuaugacuaauu

SEQ ID NO: 179333 - RNA, 32 nt, Homo Sapiens
aaacugaagggagaaguagauggcaaugguua

SEQ ID NO: 179334 - RNA, 32 nt, Homo Sapiens
auuacaguugucuacagaucacauccauucug

SEQ ID NO: 179335 - RNA, 32 nt, Homo Sapiens
aggccucagugaggaaucuaccaccgucuaca

SEQ ID NO: 179336 - RNA, 32 nt, Homo Sapiens
gcucgccugccagcucccucgccgcgcguccg

SEQ ID NO: 179337 - RNA, 32 nt, Homo Sapiens
guggaugaggccaaaggaccacagggcuaagg

SEQ ID NO: 179338 - RNA, 32 nt, Homo Sapiens
cugguguccagcaugacccauaaacaggucag

SEQ ID NO: 179339 - RNA, 32 nt, Homo Sapiens
aaggcgccgaggagcagcgaggcggccucugu

SEQ ID NO: 179340 - RNA, 32 nt, Homo Sapiens
uuucuagguaccaugaaggaagauugacccug

SEQ ID NO: 179341 - RNA, 32 nt, Homo Sapiens
uuuuucuucuauuuaacggaaaacuugacuuu

SEQ ID NO: 179342 - RNA, 32 nt, Homo Sapiens
gcuccgcaccgcucuuccuccagccgcugagc

SEQ ID NO: 179343 - RNA, 32 nt, Homo Sapiens
uggccagucccgagcccucccucccaggcacc

SEQ ID NO: 179344 - RNA, 32 nt, Homo Sapiens
cacaaguuugccccccaccuccacuuaccugu

SEQ ID NO: 179345 - RNA, 32 nt, Homo Sapiens
guugaaaguagugcuguaaauauucugccaua

SEQ ID NO: 179346 - RNA, 32 nt, Homo Sapiens
aaauagagaacaaaaggaaaagauuguuacca

SEQ ID NO: 179347 - RNA, 32 nt, Homo Sapiens
aggcccucauauuugcugcuuuguugcaaguu

SEQ ID NO: 179348 - RNA, 32 nt, Homo Sapiens
auuguuucucuguuuuaaaccuuguauaaaua

SEQ ID NO: 179349 - RNA, 32 nt, Homo Sapiens
cagcuuuuaaacacuggggacuggaucacaga

SEQ ID NO: 179350 - RNA, 32 nt, Homo Sapiens
cuacucugcccucccgucucagcccucguguu

SEQ ID NO: 179351 - RNA, 28 nt, Homo Sapiens
uucuguucaaaauaaaccuacucuguuc

SEQ ID NO: 179352 - RNA, 32 nt, Homo Sapiens
uugugguggagcaaaaguucguuugggguugu

SEQ ID NO: 179353 - RNA, 32 nt, Homo Sapiens
gcuaaaggaaaaaaccauccaggucacggggc

SEQ ID NO: 179354 - RNA, 32 nt, Homo Sapiens
gccaaauugggucuguccauuccugaggcucc

SEQ ID NO: 179355 - RNA, 32 nt, Homo Sapiens
gccaggauuuccugcaccgccagccgccucuu

SEQ ID NO: 179356 - RNA, 32 nt, Homo Sapiens
cagugaacggaauugaagagcaagacauggag

SEQ ID NO: 179357 - RNA, 32 nt, Homo Sapiens
augcucuguagccuaaacuccaaacauccucu

SEQ ID NO: 179358 - RNA, 32 nt, Homo Sapiens
cccucuuuccaagagcucccaggcuucugugu

SEQ ID NO: 179359 - RNA, 32 nt, Homo Sapiens
caccaucaaaauuuaagaccaugaugaaauuu

SEQ ID NO: 179360 - RNA, 32 nt, Homo Sapiens
auuuagagaacaaacccggaauaugaagugca

SEQ ID NO: 179361 - RNA, 32 nt, Homo Sapiens
caaacagaugcauggaagagaacaucauuuac

SEQ ID NO: 179362 - RNA, 32 nt, Homo Sapiens
aacgugcacuuuguaauuugaaagagaauuau

SEQ ID NO: 179363 - RNA, 32 nt, Homo Sapiens
aauugguuucuacuuuuuuauuguaaaaggug

SEQ ID NO: 179364 - RNA, 32 nt, Homo Sapiens
ucuuucaagaacccuuuuuuuagcuuauagaa

SEQ ID NO: 179365 - RNA, 32 nt, Homo Sapiens
cucucccaggagcagugaguugugaguggaaa

SEQ ID NO: 179366 - RNA, 32 nt, Homo Sapiens
uagaauucuauguaaauugaaucauacaauau

SEQ ID NO: 179367 - RNA, 29 nt, Homo Sapiens
cuuuucaucuguuucagaguaaguucaau

SEQ ID NO: 179368 - RNA, 32 nt, Homo Sapiens
gaauguaaaucagagcucucuagucuucauua

SEQ ID NO: 179369 - RNA, 32 nt, Homo Sapiens
uagcugggacugcaggcacgcgccaccuguau

SEQ ID NO: 179370 - RNA, 27 nt, Homo Sapiens
uuucugugauucuucagagcccaggag

SEQ ID NO: 179371 - RNA, 32 nt, Homo Sapiens
ucugaacugguagaaaaacaucugaagagcua

SEQ ID NO: 179372 - RNA, 32 nt, Homo Sapiens
aagcuuuuaaacauuacacuugagaucaguca

SEQ ID NO: 179373 - RNA, 32 nt, Homo Sapiens
uaccccuucuaaaauaaguuuuauuccaucug

SEQ ID NO: 179374 - RNA, 32 nt, Homo Sapiens
cguucggccccgaguggagggcaaaccuguga

SEQ ID NO: 179375 - RNA, 32 nt, Homo Sapiens
gcgagagaacugaaguugauguugacaggccc

SEQ ID NO: 179376 - RNA, 32 nt, Homo Sapiens
ccacuccccacuuuuacuacucuucuuuccuc

SEQ ID NO: 179377 - RNA, 32 nt, Homo Sapiens
ugauuuuauuauauauuuuuuaugguugcaug

SEQ ID NO: 179378 - RNA, 32 nt, Homo Sapiens
agugaguucauuugucauauaggcacuggguu

SEQ ID NO: 179379 - RNA, 32 nt, Homo Sapiens
uaaaacucaacguuuaaaugacacacuuuaaa

SEQ ID NO: 179380 - RNA, 32 nt, Homo Sapiens
ccuuucugccuggucagccccguggccucugg

SEQ ID NO: 179381 - RNA, 32 nt, Homo Sapiens
aaagggaacaaaugaauuuuugguuauauugu

SEQ ID NO: 179382 - RNA, 32 nt, Homo Sapiens
ccugcccugugcuugagaguucagggccggac

SEQ ID NO: 179383 - RNA, 32 nt, Homo Sapiens
aguccuuuuuugguuuuuguuuuguuuuuuaa

SEQ ID NO: 179384 - RNA, 32 nt, Homo Sapiens
ggccgggaggggcugccccaggcccugcgccu

SEQ ID NO: 179385 - RNA, 32 nt, Homo Sapiens
gccuccaccaucccuaaccaaccucucaucac

SEQ ID NO: 179386 - RNA, 32 nt, Homo Sapiens
ucgucccagaguggcccggcaggggcggggug

SEQ ID NO: 179387 - RNA, 32 nt, Homo Sapiens
cauuucuccaugaagaaaaacaacaacauuug

SEQ ID NO: 179388 - RNA, 32 nt, Homo Sapiens
ugauauucaguggauacaaauagaacaugaau

SEQ ID NO: 179389 - RNA, 32 nt, Homo Sapiens
uaaguuccgcggaaaugcuccgcuacaaccgc

SEQ ID NO: 179390 - RNA, 32 nt, Homo Sapiens
gacagacaggacuugugacuaguagcucugga

SEQ ID NO: 179391 - RNA, 32 nt, Homo Sapiens
augcacccacugacaagagaccuccagcugcu

SEQ ID NO: 179392 - RNA, 27 nt, Homo Sapiens
aucaccuccuaccccagcccccauccu

SEQ ID NO: 179393 - RNA, 30 nt, Homo Sapiens
gccaggcgcugcucaagggccucguggcgc

SEQ ID NO: 179394 - RNA, 32 nt, Homo Sapiens
uuguaaguuucuugaggccucccuggccaugc

SEQ ID NO: 179395 - RNA, 32 nt, Homo Sapiens
uccagucagggugggggcgcuggagccguggg

SEQ ID NO: 179396 - RNA, 29 nt, Homo Sapiens
uccauuguauggauauaccauagguuguu

SEQ ID NO: 179397 - RNA, 32 nt, Homo Sapiens
uuggaggacauuagcauucuuucuuguaucuc

SEQ ID NO: 179398 - RNA, 31 nt, Homo Sapiens
aguaagaaaacuguaaauucgagccauauaa

SEQ ID NO: 179399 - RNA, 32 nt, Homo Sapiens
ccccuccacuugggaaggaaaaucacccccca

SEQ ID NO: 179400 - RNA, 32 nt, Homo Sapiens
ugauaaucaaggaaucucacugauaaaacucu

SEQ ID NO: 179401 - RNA, 32 nt, Homo Sapiens
uggaggaucacuugaggccuagccuuggaggc

SEQ ID NO: 179402 - RNA, 32 nt, Homo Sapiens
ccuuggggaucucuuuaguccuggcuucccuu

SEQ ID NO: 179403 - RNA, 32 nt, Homo Sapiens
guuugcuuuuguuccaaugucaaugugaacgu

SEQ ID NO: 179404 - RNA, 32 nt, Homo Sapiens
gccugccucgcaccugcugagccgcacugcug

SEQ ID NO: 179405 - RNA, 32 nt, Homo Sapiens
gucauuaaacuucagccagaaagcagaguggc

SEQ ID NO: 179406 - RNA, 32 nt, Homo Sapiens
ggcaccaaggcacaagccugugcaguaggggc

SEQ ID NO: 179407 - RNA, 32 nt, Homo Sapiens
cggagcagccuucaccuucucucugggaucag

SEQ ID NO: 179408 - RNA, 32 nt, Homo Sapiens
aacaaucauacuuuuccucccuaaaagaaaaa

SEQ ID NO: 179409 - RNA, 32 nt, Homo Sapiens
caaacaugaagauguuuguaaaguuuuguuuu

SEQ ID NO: 179410 - RNA, 32 nt, Homo Sapiens
accccagagagaaacagaagugcugagggguc

SEQ ID NO: 179411 - RNA, 32 nt, Homo Sapiens
cugccuugauucagcaucagaacauacacucu

SEQ ID NO: 179412 - RNA, 32 nt, Homo Sapiens
cauucacaugcaauuugguguggcauuuagcu

SEQ ID NO: 179413 - RNA, 32 nt, Homo Sapiens
ccccagcccuccgccucaccgccccccacccc

SEQ ID NO: 179414 - RNA, 31 nt, Homo Sapiens
ccccagagacugacucucagagccagagaug

SEQ ID NO: 179415 - RNA, 32 nt, Homo Sapiens
uugugugguagugugaaccguaugaaccuaag

SEQ ID NO: 179416 - RNA, 32 nt, Homo Sapiens
cauguaaauaucuauaauguaaauguaauuua

SEQ ID NO: 179417 - RNA, 32 nt, Homo Sapiens
ugaggcaaauugcauuugcuugcucccuaugg

SEQ ID NO: 179418 - RNA, 32 nt, Homo Sapiens
ccuaaauccaaaugaggauaucaucuuuucua

SEQ ID NO: 179419 - RNA, 32 nt, Homo Sapiens
guuagaacacuuuauuuucccagccgcuuuca

SEQ ID NO: 179420 - RNA, 32 nt, Homo Sapiens
gaccagggugugcagucugagcuccucuaccu

SEQ ID NO: 179421 - RNA, 32 nt, Homo Sapiens
ccacgucucccuccacccacgucccucacccg

SEQ ID NO: 179422 - RNA, 32 nt, Homo Sapiens
ccaaggccgggcgugcgugaggccagguccac

SEQ ID NO: 179423 - RNA, 32 nt, Homo Sapiens
caauuguguugcaccuugggcacugaaucaca

SEQ ID NO: 179424 - RNA, 32 nt, Homo Sapiens
gacccuccugcacaacaucuccaggggaccgg

SEQ ID NO: 179425 - RNA, 32 nt, Homo Sapiens
agcucaccccagccuuccuucccugacccuga

SEQ ID NO: 179426 - RNA, 32 nt, Homo Sapiens
agcaucugccuugugccuggcacucugccggu

SEQ ID NO: 179427 - RNA, 32 nt, Homo Sapiens
ugagagaaauagaaaaguuguuaaaguuaccu

SEQ ID NO: 179428 - RNA, 32 nt, Homo Sapiens
caugcacaguugcacagacacacacacacagg

SEQ ID NO: 179429 - RNA, 32 nt, Homo Sapiens
ucugugccaagagacuuccccagauagaaaca

SEQ ID NO: 179430 - RNA, 32 nt, Homo Sapiens
uuggcgcgguggcucacgcauguaaucccagc

SEQ ID NO: 179431 - RNA, 32 nt, Homo Sapiens
uaaccaucauucuccauggacaggcucucggg

SEQ ID NO: 179432 - RNA, 32 nt, Homo Sapiens
uuuccuguucuucauaugccaguaccauaaac

SEQ ID NO: 179433 - RNA, 32 nt, Homo Sapiens
ucaucuguagacugacgauaauaauaguacau

SEQ ID NO: 179434 - RNA, 32 nt, Homo Sapiens
uacacccaugauauuucuaauaauauaugguu

SEQ ID NO: 179435 - RNA, 31 nt, Homo Sapiens
uggaagccgcgcagccuccgguggagaggaa

SEQ ID NO: 179436 - RNA, 32 nt, Homo Sapiens
ccacguggagcagcugcaggagcugcagacca

SEQ ID NO: 179437 - RNA, 32 nt, Homo Sapiens
ugccuccuucuucccaggaucaggaccucugc

SEQ ID NO: 179438 - RNA, 32 nt, Homo Sapiens
aagucgguugaugcuuuuggccugcagccucc

SEQ ID NO: 179439 - RNA, 32 nt, Homo Sapiens
gaggcccugaaucuggcgcagaugcaggagca

SEQ ID NO: 179440 - RNA, 32 nt, Homo Sapiens
agcuucaucuugccgccgccacggccaccgcc

SEQ ID NO: 179441 - RNA, 32 nt, Homo Sapiens
ugggcaauaucgugagaccccaucucuacaaa

SEQ ID NO: 179442 - RNA, 32 nt, Homo Sapiens
uggggucggcgggacccgcgggccauguacgg

SEQ ID NO: 179443 - RNA, 32 nt, Homo Sapiens
augggacagagccaguccuuucugggggucgg

SEQ ID NO: 179444 - RNA, 32 nt, Homo Sapiens
uaggcagacuucccugacgacaucagugauac

SEQ ID NO: 179445 - RNA, 32 nt, Homo Sapiens
cccucuucucagacagcgccaggccggggugg

SEQ ID NO: 179446 - RNA, 29 nt, Homo Sapiens
uaaaauuuaaaauaaauuucugcacaugg

SEQ ID NO: 179447 - RNA, 32 nt, Homo Sapiens
ccaggaugaagauacccugugcaaagccucac

SEQ ID NO: 179448 - RNA, 32 nt, Homo Sapiens
acgauggaauccacggaugagaccucagaugc

SEQ ID NO: 179449 - RNA, 32 nt, Homo Sapiens
auggagucaaaggagaucauuuuggagcuuua

SEQ ID NO: 179450 - RNA, 32 nt, Homo Sapiens
guauuuuucuuuucuuuuuuuaaugaaucaau

SEQ ID NO: 179451 - RNA, 32 nt, Homo Sapiens
aggcgaugcggcacgggugcugcgggacacac

SEQ ID NO: 179452 - RNA, 32 nt, Homo Sapiens
agaacauuuuuagguuugcaagccuccugauc

SEQ ID NO: 179453 - RNA, 32 nt, Homo Sapiens
caggcgcguuugcaggaggggcgcaccucuuc

SEQ ID NO: 179454 - RNA, 32 nt, Homo Sapiens
ugaaaaaaaaauuucuauucauagcuuauccu

SEQ ID NO: 179455 - RNA, 28 nt, Homo Sapiens
ggcagguggggccgccgcggaacuccag

SEQ ID NO: 179456 - RNA, 32 nt, Homo Sapiens
uguauaguagacuuugggaaaagcgauuuuuu

SEQ ID NO: 179457 - RNA, 32 nt, Homo Sapiens
cgugagccaccaccacacccagcccugggaau

SEQ ID NO: 179458 - RNA, 31 nt, Homo Sapiens
gcacugugcccagccauuccaggauuuuucu

SEQ ID NO: 179459 - RNA, 32 nt, Homo Sapiens
ucacugauugcaauuucuuuuacacagguugg

SEQ ID NO: 179460 - RNA, 32 nt, Homo Sapiens
ucauuugagccuaggaggucaaggcugcagug

SEQ ID NO: 179461 - RNA, 32 nt, Homo Sapiens
ucacuugagcccaggaggucaaggcugcagug

SEQ ID NO: 179462 - RNA, 32 nt, Homo Sapiens
acaccaugccuggcccuuagaagugcucaaua

SEQ ID NO: 179463 - RNA, 32 nt, Homo Sapiens
aaacaccagcuccugcaccccuggggugcuac

SEQ ID NO: 179464 - RNA, 32 nt, Homo Sapiens
uucucaggccccaccccacaccugcuggauca

SEQ ID NO: 179465 - RNA, 32 nt, Homo Sapiens
aaagugagucugccucuugugcuuggugucuu

SEQ ID NO: 179466 - RNA, 32 nt, Homo Sapiens
gggccagacccucgugaccagcccuauggccu

SEQ ID NO: 179467 - RNA, 32 nt, Homo Sapiens
uuaucaaguuucucaaccuuuauuuuuaauga

SEQ ID NO: 179468 - RNA, 32 nt, Homo Sapiens
aaaacuaugcuguuuauauugucauuaaauua

SEQ ID NO: 179469 - RNA, 32 nt, Homo Sapiens
agcucaacuguaauuuaaauuuggcuguucuc

SEQ ID NO: 179470 - RNA, 32 nt, Homo Sapiens
uaccacggggccucgcccacccugggcgcccc

SEQ ID NO: 179471 - RNA, 32 nt, Homo Sapiens
guguuuuggccauucaacucacuaccuggaga

SEQ ID NO: 179472 - RNA, 32 nt, Homo Sapiens
ucguccuaggccagagacccagggcgcacugc

SEQ ID NO: 179473 - RNA, 32 nt, Homo Sapiens
aucuauggaaaugugagaaaugucuaauagcc

SEQ ID NO: 179474 - RNA, 32 nt, Homo Sapiens
gccaugcgaccuggucaagccccccucacucu

SEQ ID NO: 179475 - RNA, 32 nt, Homo Sapiens
guggaguguaugcgcagaguagcugucuguuu

SEQ ID NO: 179476 - RNA, 32 nt, Homo Sapiens
cauagauacugacgugauaggaagcucugggc

SEQ ID NO: 179477 - RNA, 32 nt, Homo Sapiens
aaggcucaaauagucuauaccugaacugcuau

SEQ ID NO: 179478 - RNA, 32 nt, Homo Sapiens
ucacgauguaaauuauuaagcauuuugguugg

SEQ ID NO: 179479 - RNA, 31 nt, Homo Sapiens
uccagaggcuucauccaggcaagaaaaaugu

SEQ ID NO: 179480 - RNA, 32 nt, Homo Sapiens
aucuggugaggucauuguggggaccagggacu

SEQ ID NO: 179481 - RNA, 32 nt, Homo Sapiens
cucaugcacauuccagggaaaagcagagagua

SEQ ID NO: 179482 - RNA, 32 nt, Homo Sapiens
uccauccccucuccccgcguggacuccugagc

SEQ ID NO: 179483 - RNA, 32 nt, Homo Sapiens
gcucugcgaggggccggagcgcggcggagcca

SEQ ID NO: 179484 - RNA, 32 nt, Homo Sapiens
aaaggagccggggccuggagguuugcguaccg

SEQ ID NO: 179485 - RNA, 32 nt, Homo Sapiens
agaggagauguagaaaaauguguacaauguua

SEQ ID NO: 179486 - RNA, 32 nt, Homo Sapiens
gaggccaaugaagagaucauugaugaugacaa

SEQ ID NO: 179487 - RNA, 32 nt, Homo Sapiens
uccauuugcacuugagaaaaacguguguacug

SEQ ID NO: 179488 - RNA, 32 nt, Homo Sapiens
gaugagcaaccuggcacacaaacuaugagcag

SEQ ID NO: 179489 - RNA, 32 nt, Homo Sapiens
gcugugauacccccuuaccucccccagugccu

SEQ ID NO: 179490 - RNA, 32 nt, Homo Sapiens
gaggagugacugaguuuucauuuucauaauua

SEQ ID NO: 179491 - RNA, 32 nt, Homo Sapiens
aagaaaagaacaaggaaaaauggauguuucgc

SEQ ID NO: 179492 - RNA, 32 nt, Homo Sapiens
uaugguuuucaaguacaagucuuuugcuuccu

SEQ ID NO: 179493 - RNA, 32 nt, Homo Sapiens
gggucuugagcucuagagagcuaggccuugcu

SEQ ID NO: 179494 - RNA, 32 nt, Homo Sapiens
cgccgcucgccgcccgcggguuccauugagaa

SEQ ID NO: 179495 - RNA, 32 nt, Homo Sapiens
ucuccgcaggggggcgcucacaaagaugccag

SEQ ID NO: 179496 - RNA, 32 nt, Homo Sapiens
caaggcugccauggauaaagaauagaaaacuu

SEQ ID NO: 179497 - RNA, 28 nt, Homo Sapiens
gggccagagauuauaaguuugacacaac

SEQ ID NO: 179498 - RNA, 32 nt, Homo Sapiens
acuugacccaaguggauauacugcuacaaggu

SEQ ID NO: 179499 - RNA, 32 nt, Homo Sapiens
guguguguuggaucuacuaacauguuuagcaa

SEQ ID NO: 179500 - RNA, 32 nt, Homo Sapiens
cuaguccggggacacgguauuccucucuggcc

SEQ ID NO: 179501 - RNA, 32 nt, Homo Sapiens
ggacagcucucucgaagagaucuuacagacug

SEQ ID NO: 179502 - RNA, 32 nt, Homo Sapiens
gcaucaccaaccccagauuuaaaaauccagag

SEQ ID NO: 179503 - RNA, 32 nt, Homo Sapiens
gcuagcaguuugcagucuauguuuaaugaaug

SEQ ID NO: 179504 - RNA, 32 nt, Homo Sapiens
ucugagccaucggcuuuguggucaucauguuc

SEQ ID NO: 179505 - RNA, 32 nt, Homo Sapiens
aucuacaaaaaauaaagcuggaaaagcaagca

SEQ ID NO: 179506 - RNA, 32 nt, Homo Sapiens
ggggugucaggagggagagacagccuggguau

SEQ ID NO: 179507 - RNA, 32 nt, Homo Sapiens
uucuaauaauuucugaucuucuaguggcuacu

SEQ ID NO: 179508 - RNA, 32 nt, Homo Sapiens
ccaugucccacuguggagcaguguggcccagc

SEQ ID NO: 179509 - RNA, 29 nt, Homo Sapiens
aacugagagggacagaagaugcuggaagg

SEQ ID NO: 179510 - RNA, 32 nt, Homo Sapiens
cucucauacuuucuccucuccccucucccaag

SEQ ID NO: 179511 - RNA, 32 nt, Homo Sapiens
uuuaaauaaaagacuaaagacagggagcuaga

SEQ ID NO: 179512 - RNA, 32 nt, Homo Sapiens
uggcgugggcuugcaaggcgcugcugguuuuu

SEQ ID NO: 179513 - RNA, 32 nt, Homo Sapiens
caacgcgccaccacacuaaaucuuuaauuuuu

SEQ ID NO: 179514 - RNA, 32 nt, Homo Sapiens
ggcacacggggcucagcccuguugggaaacug

SEQ ID NO: 179515 - RNA, 31 nt, Homo Sapiens
ugaggauagaauuucgaacaccaagagucaa

SEQ ID NO: 179516 - RNA, 32 nt, Homo Sapiens
uagcauagaugaugaaaagcuguuacugguga

SEQ ID NO: 179517 - RNA, 32 nt, Homo Sapiens
gccaggggggaagaggggauggaucucagcca

SEQ ID NO: 179518 - RNA, 32 nt, Homo Sapiens
accacgcggcacguggcagagccacagcgcaa

SEQ ID NO: 179519 - RNA, 32 nt, Homo Sapiens
ggcaagggcccagcguucuacugcaccugccu

SEQ ID NO: 179520 - RNA, 32 nt, Homo Sapiens
auccugcauaaaaagucagccaucuggguucu

SEQ ID NO: 179521 - RNA, 32 nt, Homo Sapiens
cuaagaaaugugaaauagaacaauuuucaucu

SEQ ID NO: 179522 - RNA, 32 nt, Homo Sapiens
caugauacuuuuaguaguacuuuaggaaaaac

SEQ ID NO: 179523 - RNA, 32 nt, Homo Sapiens
cacugcaguucgaggagcucgucuaccucugg

SEQ ID NO: 179524 - RNA, 32 nt, Homo Sapiens
auccuuacagcaugccgugaaugugugcaaca

SEQ ID NO: 179525 - RNA, 32 nt, Homo Sapiens
gugaugcggcccuggaccuggccacggcccac

SEQ ID NO: 179526 - RNA, 32 nt, Homo Sapiens
gcgugugguuuguuccuucuccuugccgggaa

SEQ ID NO: 179527 - RNA, 32 nt, Homo Sapiens
ccauauuuuaaauucucauaaguagcauucau

SEQ ID NO: 179528 - RNA, 32 nt, Homo Sapiens
uggagauccugcuucccagaccacagcugugg

SEQ ID NO: 179529 - RNA, 32 nt, Homo Sapiens
cacagaaguagcugcauagaaagagcacugga

SEQ ID NO: 179530 - RNA, 32 nt, Homo Sapiens
aagugauauucaagcaauuaauuuuaaacaag

SEQ ID NO: 179531 - RNA, 32 nt, Homo Sapiens
gccuagaaauuauuuaaaauggcgacugauac

SEQ ID NO: 179532 - RNA, 32 nt, Homo Sapiens
uccccgcucaggugcggcgcuguggcaggaag

SEQ ID NO: 179533 - RNA, 32 nt, Homo Sapiens
aguguuaucuaauuugaauauucauuuacuua

SEQ ID NO: 179534 - RNA, 32 nt, Homo Sapiens
ugccuaggaaaacagaagcuuucuucuuccuu

SEQ ID NO: 179535 - RNA, 32 nt, Homo Sapiens
uguguaccguguguauauaaauccacagaacc

SEQ ID NO: 179536 - RNA, 32 nt, Homo Sapiens
uggccccucauggccuggcccucuggguugga

SEQ ID NO: 179537 - RNA, 32 nt, Homo Sapiens
uaaagauggcuaaaaugguauauuuuauguaa

SEQ ID NO: 179538 - RNA, 32 nt, Homo Sapiens
uugcucuuugacaacuaaaauuaggacuguau

SEQ ID NO: 179539 - RNA, 32 nt, Homo Sapiens
acccggccaugcaggagccgcugcugggagcc

SEQ ID NO: 179540 - RNA, 32 nt, Homo Sapiens
auggaggguggcuggcuuggugguuauugucu

SEQ ID NO: 179541 - RNA, 32 nt, Homo Sapiens
caccaccaccgcccccuauuccaguuucaaag

SEQ ID NO: 179542 - RNA, 32 nt, Homo Sapiens
gcuggucuuugauauguuuccuuucaauuucc

SEQ ID NO: 179543 - RNA, 32 nt, Homo Sapiens
uuguugaaauguucaauucuuuguuggcuuuc

SEQ ID NO: 179544 - RNA, 32 nt, Homo Sapiens
ggcucugugggaaaauggagacuuugaagacc

SEQ ID NO: 179545 - RNA, 32 nt, Homo Sapiens
acaauuuaauuucaaacaacgauccuuccaga

SEQ ID NO: 179546 - RNA, 32 nt, Homo Sapiens
gacccacccuccccguaugcacucucaggggc

SEQ ID NO: 179547 - RNA, 32 nt, Homo Sapiens
gaaucacagauguggaauauuugucauaaaua

SEQ ID NO: 179548 - RNA, 32 nt, Homo Sapiens
agacuuuucagaugaaauuguucauucucgua

SEQ ID NO: 179549 - RNA, 32 nt, Homo Sapiens
uguuacuguuaacuuucaaacacgcuaugcgu

SEQ ID NO: 179550 - RNA, 32 nt, Homo Sapiens
uaacaguguuuguauuugauauuuguauaugu

SEQ ID NO: 179551 - RNA, 30 nt, Homo Sapiens
aggaagccacuugcaagcaacaucugcucu

SEQ ID NO: 179552 - RNA, 32 nt, Homo Sapiens
guggauuugaugacaaccucugauugagggaa

SEQ ID NO: 179553 - RNA, 32 nt, Homo Sapiens
gcucuuaauucuauuacaaaauguggacucac

SEQ ID NO: 179554 - RNA, 32 nt, Homo Sapiens
cuucugccgccgccggccgccugggaccuugc

SEQ ID NO: 179555 - RNA, 32 nt, Homo Sapiens
aaugaggacugauguaaaaaucaauagaaagc

SEQ ID NO: 179556 - RNA, 32 nt, Homo Sapiens
uggcucacaccuguggucucagccucccgagu

SEQ ID NO: 179557 - RNA, 32 nt, Homo Sapiens
ugccuucaguuuuaacauaguuucacauguuc

SEQ ID NO: 179558 - RNA, 31 nt, Homo Sapiens
auggagacuuaaaaacagaucaacugaaaau

SEQ ID NO: 179559 - RNA, 32 nt, Homo Sapiens
ccaccgccucugccuccaggccgcccgcugcu

SEQ ID NO: 179560 - RNA, 32 nt, Homo Sapiens
cacccagaggccgggucugcaccgugcccuga

SEQ ID NO: 179561 - RNA, 32 nt, Homo Sapiens
auugcuauuauuuuaaaccugcaugauuguac

SEQ ID NO: 179562 - RNA, 32 nt, Homo Sapiens
uuauucgggaagaggagacguguuaacacucu

SEQ ID NO: 179563 - RNA, 32 nt, Homo Sapiens
aauaucacagaauaaacuuucuuuagaugcug

SEQ ID NO: 179564 - RNA, 32 nt, Homo Sapiens
gaaaucugucuccacagccacacaaccagagg

SEQ ID NO: 179565 - RNA, 32 nt, Homo Sapiens
agccguucuaaaaguuuauuuacaauaucaaa

SEQ ID NO: 179566 - RNA, 32 nt, Homo Sapiens
uaugcaacaaaauggaugacuuaguggagaug

SEQ ID NO: 179567 - RNA, 32 nt, Homo Sapiens
auauacaaacacacuaaugguagaaugcuuuu

SEQ ID NO: 179568 - RNA, 32 nt, Homo Sapiens
gcgacccgcuccagcgcgggaccagcagcaag

SEQ ID NO: 179569 - RNA, 32 nt, Homo Sapiens
uuguagacaaugaggggguucucuugauguaa

SEQ ID NO: 179570 - RNA, 32 nt, Homo Sapiens
auggucagagucaggugcugcccggcggaggu

SEQ ID NO: 179571 - RNA, 32 nt, Homo Sapiens
ugaauuguguaugugaucuacauagaaagaau

SEQ ID NO: 179572 - RNA, 29 nt, Homo Sapiens
uaucaugggucaggaauugaccaaagagc

SEQ ID NO: 179573 - RNA, 32 nt, Homo Sapiens
cagcuauaaaaagcaacugcagaugcugacug

SEQ ID NO: 179574 - RNA, 32 nt, Homo Sapiens
gugcggcaggcucguggccuccccucccagaa

SEQ ID NO: 179575 - RNA, 32 nt, Homo Sapiens
ggcugccgggucggcucugguccacagcacgg

SEQ ID NO: 179576 - RNA, 32 nt, Homo Sapiens
acgcacaggacacgugugcaauucauaggaac

SEQ ID NO: 179577 - RNA, 32 nt, Homo Sapiens
cgccgccccucggagaccacuccagcucggac

SEQ ID NO: 179578 - RNA, 32 nt, Homo Sapiens
cgcggugcgcaccaacuucacuaccaagcagc

SEQ ID NO: 179579 - RNA, 32 nt, Homo Sapiens
uucuggguucaagugauucuucugccucagcc

SEQ ID NO: 179580 - RNA, 32 nt, Homo Sapiens
aggaagcagcuaggggcggguagguggggguc

SEQ ID NO: 179581 - RNA, 32 nt, Homo Sapiens
auaaaaaggaaguggggacagauucgcagcac

SEQ ID NO: 179582 - RNA, 32 nt, Homo Sapiens
ggugacccuggagcccagccugccccgaggag

SEQ ID NO: 179583 - RNA, 32 nt, Homo Sapiens
uuguaacuuaucuauuuauaguuaugagauua

SEQ ID NO: 179584 - RNA, 32 nt, Homo Sapiens
gccuggucgcuggugaagcccgcggcgcgcgc

SEQ ID NO: 179585 - RNA, 32 nt, Homo Sapiens
cagccccggccgccagguacucgcccgcccgg

SEQ ID NO: 179586 - RNA, 32 nt, Homo Sapiens
gucaauaucgaacuaaaaccacaaauaaugaa

SEQ ID NO: 179587 - RNA, 32 nt, Homo Sapiens
uuucuugaaaaauuaguuuuugaaaagcaaau

SEQ ID NO: 179588 - RNA, 32 nt, Homo Sapiens
aauugacagaugaaaggagacaaugguugugu

SEQ ID NO: 179589 - RNA, 32 nt, Homo Sapiens
uugugucugugcccuccaaagagccuucagaa

SEQ ID NO: 179590 - RNA, 32 nt, Homo Sapiens
gcuagccauggugaggcgccggaggccccggg

SEQ ID NO: 179591 - RNA, 32 nt, Homo Sapiens
gauuugaacugucauugggauaagggggcaga

SEQ ID NO: 179592 - RNA, 32 nt, Homo Sapiens
cagggaccagcuggaacuggacaggcugaaag

SEQ ID NO: 179593 - RNA, 32 nt, Homo Sapiens
acaaguuugucaaccuacacuuuuauauagac

SEQ ID NO: 179594 - RNA, 32 nt, Homo Sapiens
uucgguacaucccacagcauccuauagaaaua

SEQ ID NO: 179595 - RNA, 32 nt, Homo Sapiens
auuggaagaaaguuuugccauuguugaagaua

SEQ ID NO: 179596 - RNA, 32 nt, Homo Sapiens
uacuaacgggagagggcauuggcggccgcccu

SEQ ID NO: 179597 - RNA, 27 nt, Homo Sapiens
aaaccucauuaauucugaaauuuaaga

SEQ ID NO: 179598 - RNA, 32 nt, Homo Sapiens
cuggucugucuccucagggcagggcccagcac

SEQ ID NO: 179599 - RNA, 32 nt, Homo Sapiens
cccggaacagagcucaugcugcugcuccuggg

SEQ ID NO: 179600 - RNA, 32 nt, Homo Sapiens
gagccuugauuuccucagcugccaaaugggaa

SEQ ID NO: 179601 - RNA, 32 nt, Homo Sapiens
accuuccuauugcauuuccuacuccuuugcua

SEQ ID NO: 179602 - RNA, 32 nt, Homo Sapiens
augacuuuaaucuugaaugauuucgacuugcu

SEQ ID NO: 179603 - RNA, 32 nt, Homo Sapiens
uuuuuucuuuugcugcuuuaacauuuucugga

SEQ ID NO: 179604 - RNA, 32 nt, Homo Sapiens
acagcagaaggauguugcuuuuuuaagggagg

SEQ ID NO: 179605 - RNA, 32 nt, Homo Sapiens
gagcaguggcacgggggcgugaggaagaggga

SEQ ID NO: 179606 - RNA, 32 nt, Homo Sapiens
uggccaggccggcugggcugcagagcgccggc

SEQ ID NO: 179607 - RNA, 32 nt, Homo Sapiens
auauugcauucuaaauaagaugcuaaauaaga

SEQ ID NO: 179608 - RNA, 32 nt, Homo Sapiens
uguauauugguaguugaauuuagcaaagaaau

SEQ ID NO: 179609 - RNA, 32 nt, Homo Sapiens
gcguggggaaaggggcugugggccucucgggg

SEQ ID NO: 179610 - RNA, 32 nt, Homo Sapiens
guaauugcaaaacaaaucaugcacgugcgucg

SEQ ID NO: 179611 - RNA, 32 nt, Homo Sapiens
gagacggggcucugaggccgagcacaguggcc

SEQ ID NO: 179612 - RNA, 31 nt, Homo Sapiens
cagggaagcuggaccaccuggaguugauccu

SEQ ID NO: 179613 - RNA, 32 nt, Homo Sapiens
cacucuccuaaacagcagcaguuucaaguaag

SEQ ID NO: 179614 - RNA, 32 nt, Homo Sapiens
cagggagcugucuaccagcugagguccuccca

SEQ ID NO: 179615 - RNA, 32 nt, Homo Sapiens
cuucgcugccagcuggucgucgccaugaaccc

SEQ ID NO: 179616 - RNA, 32 nt, Homo Sapiens
auuuggugguggcggcaguggaggauugcccg

SEQ ID NO: 179617 - RNA, 32 nt, Homo Sapiens
cuucaaaauuaggaaauacuacaggacacccc

SEQ ID NO: 179618 - RNA, 32 nt, Homo Sapiens
cuaaaaugugaauaaacuuguuuuauaaaaag

SEQ ID NO: 179619 - RNA, 32 nt, Homo Sapiens
cagaguccgauggcuccucccggggaagccug

SEQ ID NO: 179620 - RNA, 32 nt, Homo Sapiens
gccuugccuaggggcccgggcacugccaucac

SEQ ID NO: 179621 - RNA, 32 nt, Homo Sapiens
cugcaggcucugccaugcacgcaccucacugc

SEQ ID NO: 179622 - RNA, 32 nt, Homo Sapiens
uguuagaccagaauaaaauuaauuauauucug

SEQ ID NO: 179623 - RNA, 32 nt, Homo Sapiens
ggagguggagcuucaggaugccugcuguguuc

SEQ ID NO: 179624 - RNA, 32 nt, Homo Sapiens
cauggaaauaaucagcuuuguucaagaggaca

SEQ ID NO: 179625 - RNA, 25 nt, Homo Sapiens
auggcgacaccggacgcggggcucc

SEQ ID NO: 179626 - RNA, 32 nt, Homo Sapiens
acuagcuggaggacaccugaguacucuuaaag

SEQ ID NO: 179627 - RNA, 32 nt, Homo Sapiens
gccgcauccuccccgagcccuuauaccuuggc

SEQ ID NO: 179628 - RNA, 32 nt, Homo Sapiens
aaagacaggcuuuuuccaccggcaucaucacu

SEQ ID NO: 179629 - RNA, 32 nt, Homo Sapiens
auuuuugagaauaacauagcugugcuauugca

SEQ ID NO: 179630 - RNA, 32 nt, Homo Sapiens
caagcaucccaacaauaaagcucaugucugga

SEQ ID NO: 179631 - RNA, 32 nt, Homo Sapiens
gggagugugucugacggugcgaggguggcugu

SEQ ID NO: 179632 - RNA, 32 nt, Homo Sapiens
ccugggcgcuccuggagcgcgcggugacuccc

SEQ ID NO: 179633 - RNA, 32 nt, Homo Sapiens
agaggcugcaggaagcgcuugccucucccugg

SEQ ID NO: 179634 - RNA, 32 nt, Homo Sapiens
ugccagauaauugcauucucuccaccugagug

SEQ ID NO: 179635 - RNA, 32 nt, Homo Sapiens
aucgugcgccacaucccggaccgcggugcgcc

SEQ ID NO: 179636 - RNA, 32 nt, Homo Sapiens
gccauccaaccaaaggaagugauuugacaaag

SEQ ID NO: 179637 - RNA, 32 nt, Homo Sapiens
caaguggaccucugagugcagcaaaagguggg

SEQ ID NO: 179638 - RNA, 32 nt, Homo Sapiens
augaugaugauccuuuaauugggugcaugugc

SEQ ID NO: 179639 - RNA, 32 nt, Homo Sapiens
auaacauaucuaaagucaucaugaacuggcuu

SEQ ID NO: 179640 - RNA, 32 nt, Homo Sapiens
uauacuugucuuaccucucaauaaaaggguac

SEQ ID NO: 179641 - RNA, 32 nt, Homo Sapiens
augauggagcucagcccuccaccuccacagcu

SEQ ID NO: 179642 - RNA, 32 nt, Homo Sapiens
cccacaccaacccccagggccuccccgcaguc

SEQ ID NO: 179643 - RNA, 32 nt, Homo Sapiens
acuucagagcccgcccucugugcuacuuacuc

SEQ ID NO: 179644 - RNA, 32 nt, Homo Sapiens
accacaaaagaaaaaaucaaaaugcagaaaau

SEQ ID NO: 179645 - RNA, 32 nt, Homo Sapiens
cuuagagcuugauuucugaaacauggggagcu

SEQ ID NO: 179646 - RNA, 32 nt, Homo Sapiens
uuugcucugcuguccuggacccugugugccuc

SEQ ID NO: 179647 - RNA, 32 nt, Homo Sapiens
augguuacugaucuccacggguuuucacaucu

SEQ ID NO: 179648 - RNA, 32 nt, Homo Sapiens
acuguuuaaugaguaaucaacaaaaucugcca

SEQ ID NO: 179649 - RNA, 32 nt, Homo Sapiens
cuuagagauuacuaagccauuuagaucuuacc

SEQ ID NO: 179650 - RNA, 32 nt, Homo Sapiens
ccgaagccauggcaagcaagggcuugcaggac

SEQ ID NO: 179651 - RNA, 32 nt, Homo Sapiens
guccaugaggucuaaggcaacuuagaucaaag

SEQ ID NO: 179652 - RNA, 32 nt, Homo Sapiens
aacuuuuccagaugaacggaccauaaaugugu

SEQ ID NO: 179653 - RNA, 32 nt, Homo Sapiens
uauaaaucuucaugguuuuucuauuucugaua

SEQ ID NO: 179654 - RNA, 28 nt, Homo Sapiens
cagguuggcauggcgaugacaucagaga

SEQ ID NO: 179655 - RNA, 32 nt, Homo Sapiens
ucuagcgggguuccaaggcggcggcggcauca

SEQ ID NO: 179656 - RNA, 32 nt, Homo Sapiens
agccugggcaacauggcuauauggaaagcaca

SEQ ID NO: 179657 - RNA, 32 nt, Homo Sapiens
uaaaacuauuuucucuuugcccuuaccacucc

SEQ ID NO: 179658 - RNA, 32 nt, Homo Sapiens
cuaaugagacuugagucuauuuuuguacaaaa

SEQ ID NO: 179659 - RNA, 32 nt, Homo Sapiens
uggacaugcugaagaacaugcuugacaaggua

SEQ ID NO: 179660 - RNA, 32 nt, Homo Sapiens
ccgcuaguccucuaaagagcugcgaguaccau

SEQ ID NO: 179661 - RNA, 32 nt, Homo Sapiens
aaggacuucuuagccuucaauugggagauacc

SEQ ID NO: 179662 - RNA, 32 nt, Homo Sapiens
gaaaguuuuuaaauggcuaccauuaugucuuu

SEQ ID NO: 179663 - RNA, 32 nt, Homo Sapiens
caccugggggagaggggcgggcgccgcgcugc

SEQ ID NO: 179664 - RNA, 32 nt, Homo Sapiens
uccaauuuagacuuuuuuccugaucucuauau

SEQ ID NO: 179665 - RNA, 32 nt, Homo Sapiens
gccgggcaggucggguagaguauaagagccgg

SEQ ID NO: 179666 - RNA, 32 nt, Homo Sapiens
gaggccauuguuaaaggagcucuuuccuaccu

SEQ ID NO: 179667 - RNA, 30 nt, Homo Sapiens
aaggaguauggcccugccuacaccuugauu

SEQ ID NO: 179668 - RNA, 32 nt, Homo Sapiens
auuuugccugaugccucccaaggaggcugugc

SEQ ID NO: 179669 - RNA, 32 nt, Homo Sapiens
uaauagugcuaauuccugaggaccugaagggc

SEQ ID NO: 179670 - RNA, 32 nt, Homo Sapiens
ccgugucuguugaccaaucucuauucagcauc

SEQ ID NO: 179671 - RNA, 32 nt, Homo Sapiens
ugccucggcugcgacguguccaggcguggaga

SEQ ID NO: 179672 - RNA, 32 nt, Homo Sapiens
uacagacuagauguuuuucugaagaucaauua

SEQ ID NO: 179673 - RNA, 29 nt, Homo Sapiens
agcucuucauguuucaggagagaguugaa

SEQ ID NO: 179674 - RNA, 32 nt, Homo Sapiens
cacugccccacuggauuuugggcuugcauggg

SEQ ID NO: 179675 - RNA, 32 nt, Homo Sapiens
auauauaaaaauucuuagaacucaacaauaua

SEQ ID NO: 179676 - RNA, 32 nt, Homo Sapiens
aagcuuggcacgaggcuuuuuuuuuagcaucc

SEQ ID NO: 179677 - RNA, 32 nt, Homo Sapiens
aaagccaagagggaaggucagcagaagcugcc

SEQ ID NO: 179678 - RNA, 32 nt, Homo Sapiens
cuccgcgacccgggccgugcguccgucccccu

SEQ ID NO: 179679 - RNA, 32 nt, Homo Sapiens
uaccgucucucacuggauuggugccaccuaaa

SEQ ID NO: 179680 - RNA, 32 nt, Homo Sapiens
agcccugauuuugucuuuuucucuaaguucuu

SEQ ID NO: 179681 - RNA, 32 nt, Homo Sapiens
cuuccuggugcugcuggccgccgcccggcagg

SEQ ID NO: 179682 - RNA, 32 nt, Homo Sapiens
uccagaaaucuauuccaguauuuuuuccacua

SEQ ID NO: 179683 - RNA, 32 nt, Homo Sapiens
ugccaaaauauuacuguggagguugaagaguu

SEQ ID NO: 179684 - RNA, 32 nt, Homo Sapiens
uuaucuacuuauaauuacugauuuaacauuga

SEQ ID NO: 179685 - RNA, 32 nt, Homo Sapiens
uggaagugaccuguacaagugaugcagaaagg

SEQ ID NO: 179686 - RNA, 32 nt, Homo Sapiens
ugagccgugggaagaaaagagggagcagcuag

SEQ ID NO: 179687 - RNA, 32 nt, Homo Sapiens
uugugacuaaacaaagacuuucauauuaaaug

SEQ ID NO: 179688 - RNA, 32 nt, Homo Sapiens
gucgggaggagcuucccuggccccuccgauua

SEQ ID NO: 179689 - RNA, 32 nt, Homo Sapiens
acaucucaguauauuucuguugagguaaaguu

SEQ ID NO: 179690 - RNA, 32 nt, Homo Sapiens
aggcagcugcaccuccagagcaccugcagagu

SEQ ID NO: 179691 - RNA, 32 nt, Homo Sapiens
cauugaagaaugcacuuugguacuguuuaaau

SEQ ID NO: 179692 - RNA, 32 nt, Homo Sapiens
cuugggcccgguauuucuuacucuucaaaucc

SEQ ID NO: 179693 - RNA, 32 nt, Homo Sapiens
accugagcuagaagcuggaggacuagaaccug

SEQ ID NO: 179694 - RNA, 32 nt, Homo Sapiens
gaugguuuuaucaggggcuucugcuuuugcau

SEQ ID NO: 179695 - RNA, 32 nt, Homo Sapiens
cuagcuauaugggguagaaauaaaaucucuga

SEQ ID NO: 179696 - RNA, 32 nt, Homo Sapiens
uuaaaauagaaugcuuaaaauaaaauagaaug

SEQ ID NO: 179697 - RNA, 32 nt, Homo Sapiens
agucgccgcgccccgcagccgccccgacuggu

SEQ ID NO: 179698 - RNA, 32 nt, Homo Sapiens
cagcucugacccgcccuuguuauaggcagcac

SEQ ID NO: 179699 - RNA, 32 nt, Homo Sapiens
ccaacuuuuuguuuuccaacuaucaguucaaa

SEQ ID NO: 179700 - RNA, 32 nt, Homo Sapiens
uauuucuccuaagcuauuccuccccuagcccu

SEQ ID NO: 179701 - RNA, 32 nt, Homo Sapiens
gggagcucggcauggcgguccccgcugcagcc

SEQ ID NO: 179702 - RNA, 32 nt, Homo Sapiens
ucuauuccuuuucucuugugucccuacucauu

SEQ ID NO: 179703 - RNA, 32 nt, Homo Sapiens
ucagccacaagucuuaauaguuugugugagug

SEQ ID NO: 179704 - RNA, 32 nt, Homo Sapiens
caagaaguuugucaacagaggaccccuacucc

SEQ ID NO: 179705 - RNA, 32 nt, Homo Sapiens
aguaacguuaagaugcgugggcagggcaccuu

SEQ ID NO: 179706 - RNA, 32 nt, Homo Sapiens
uacauuauuuucugcccucaaguugcucuauc

SEQ ID NO: 179707 - RNA, 32 nt, Homo Sapiens
cagcuucagcuggcagagaggcuuucccagaa

SEQ ID NO: 179708 - RNA, 32 nt, Homo Sapiens
cucgucagccggucggccgccgccuccagccg

SEQ ID NO: 179709 - RNA, 32 nt, Homo Sapiens
ggcacacaugugagcucagacauggaaugugg

SEQ ID NO: 179710 - RNA, 32 nt, Homo Sapiens
uuuaaugcaaguuugucugggaugucaacugc

SEQ ID NO: 179711 - RNA, 32 nt, Homo Sapiens
aacugaaguuuuuucuuaauuaucaugugacg

SEQ ID NO: 179712 - RNA, 32 nt, Homo Sapiens
ugugccaagaaugcaagguaauaaucaagacc

SEQ ID NO: 179713 - RNA, 32 nt, Homo Sapiens
acggucaaccccaauuaccaauuuaguugagg

SEQ ID NO: 179714 - RNA, 32 nt, Homo Sapiens
cugcucugggugccgguccauugcccuguggc

SEQ ID NO: 179715 - RNA, 32 nt, Homo Sapiens
agaugaggccaacagugagcugagagaggcca

SEQ ID NO: 179716 - RNA, 32 nt, Homo Sapiens
uauguuuuaaguggccaguaauuuaaugaauu

SEQ ID NO: 179717 - RNA, 32 nt, Homo Sapiens
uuuuguauuuuggagaauucauauuauggaga

SEQ ID NO: 179718 - RNA, 30 nt, Homo Sapiens
acuguguaucacccccugaggcgugcugag

SEQ ID NO: 179719 - RNA, 32 nt, Homo Sapiens
ugugacaauaugaaucaaguccaucagcaagu

SEQ ID NO: 179720 - RNA, 32 nt, Homo Sapiens
gcuuccaagucacacggcugcugcuggcacac

SEQ ID NO: 179721 - RNA, 32 nt, Homo Sapiens
ucagggauggucggcugggugggccuggacgg

SEQ ID NO: 179722 - RNA, 32 nt, Homo Sapiens
ucgggguggcagcugguucucaaugugccagc

SEQ ID NO: 179723 - RNA, 32 nt, Homo Sapiens
gcgcccucgcagucaccgccacccaccagcuc

SEQ ID NO: 179724 - RNA, 32 nt, Homo Sapiens
cuuacugaaauaaagcacuuuucaaagagaaa

SEQ ID NO: 179725 - RNA, 32 nt, Homo Sapiens
uguucucuccagguaggcggcuccuccuccaa

SEQ ID NO: 179726 - RNA, 32 nt, Homo Sapiens
cccagacugggauuaccagauaccaggugauu

SEQ ID NO: 179727 - RNA, 32 nt, Homo Sapiens
ggaucaaacuuguauggaugagaaguuccuuc

SEQ ID NO: 179728 - RNA, 32 nt, Homo Sapiens
cuccauguaaaggcaacauuccuuacccauua

SEQ ID NO: 179729 - RNA, 32 nt, Homo Sapiens
uuaaggacaugauaaaugaacuuuucuguccc

SEQ ID NO: 179730 - RNA, 32 nt, Homo Sapiens
gcccacucaucccacccgucucgugcuguugc

SEQ ID NO: 179731 - RNA, 32 nt, Homo Sapiens
cuucccugcccccaccccuaggcucaccucug

SEQ ID NO: 179732 - RNA, 32 nt, Homo Sapiens
agcggcgcccuccuccggcccgcgagcguccu

SEQ ID NO: 179733 - RNA, 32 nt, Homo Sapiens
cacucgcagaaccaccuggacucuguccgugu

SEQ ID NO: 179734 - RNA, 32 nt, Homo Sapiens
gcuuuccucccucccccaaucuaugggucaca

SEQ ID NO: 179735 - RNA, 32 nt, Homo Sapiens
gugccccaaccuggcguccgucacgcucucgg

SEQ ID NO: 179736 - RNA, 32 nt, Homo Sapiens
uggggaauccucgggaugaaacaaacuuacaa

SEQ ID NO: 179737 - RNA, 32 nt, Homo Sapiens
gcggccgaaggcagcuccugcugcgcgcccug

SEQ ID NO: 179738 - RNA, 32 nt, Homo Sapiens
aucaaaguucuuccuaaaggucaugcagcugg

SEQ ID NO: 179739 - RNA, 32 nt, Homo Sapiens
gcauaagugaaaucagcagagccucugggugg

SEQ ID NO: 179740 - RNA, 32 nt, Homo Sapiens
uuccaucauuucaguucucaccugcaguuuug

SEQ ID NO: 179741 - RNA, 31 nt, Homo Sapiens
ccugugguaaacacucugauugaaucugggg

SEQ ID NO: 179742 - RNA, 32 nt, Homo Sapiens
aacuauaucuuuaagugugcuguaugcugagu

SEQ ID NO: 179743 - RNA, 30 nt, Homo Sapiens
ccuuucccaccaagaauccaucuuagcgcc

SEQ ID NO: 179744 - RNA, 32 nt, Homo Sapiens
uaacaguuucaguuugggaaauccaagaaaaa

SEQ ID NO: 179745 - RNA, 32 nt, Homo Sapiens
ggccugcccccggccccauuugugccauaaag

SEQ ID NO: 179746 - RNA, 32 nt, Homo Sapiens
cugcccacauccccucuccaauaaagcaccug

SEQ ID NO: 179747 - RNA, 32 nt, Homo Sapiens
cgagggacgacggaagggacgggcaggugugg

SEQ ID NO: 179748 - RNA, 32 nt, Homo Sapiens
aguuuauugaccucagauaaaacacuggcccu

SEQ ID NO: 179749 - RNA, 32 nt, Homo Sapiens
uuuuauaauuuucauuccaguccuuugauauu

SEQ ID NO: 179750 - RNA, 32 nt, Homo Sapiens
uugacagccccagccuaggcagaugggggcug

SEQ ID NO: 179751 - RNA, 32 nt, Homo Sapiens
uucucccguggcucgagagcugcgcugguuuc

SEQ ID NO: 179752 - RNA, 32 nt, Homo Sapiens
ggcuguguuuccagcccugugcugggccugua

SEQ ID NO: 179753 - RNA, 32 nt, Homo Sapiens
aguuuuaugcuucaugguauuuuuggaaacau

SEQ ID NO: 179754 - RNA, 32 nt, Homo Sapiens
accuaagaaagguuguguaagcagaagcugga

SEQ ID NO: 179755 - RNA, 32 nt, Homo Sapiens
ggggaggcggcagugggcagggggugcugggg

SEQ ID NO: 179756 - RNA, 32 nt, Homo Sapiens
cugcugcccucccacagccuccuucuguuugu

SEQ ID NO: 179757 - RNA, 32 nt, Homo Sapiens
auacaggaacuuauggguaccuugcaaguuug

SEQ ID NO: 179758 - RNA, 32 nt, Homo Sapiens
cuuggcucagcucugccgccucagguagcacg

SEQ ID NO: 179759 - RNA, 32 nt, Homo Sapiens
caaggucucgcucugucgcccagggcuggagu

SEQ ID NO: 179760 - RNA, 32 nt, Homo Sapiens
caucuuacagaaaacccuccuuguagaguugg

SEQ ID NO: 179761 - RNA, 32 nt, Homo Sapiens
uuuuugacaaccccuacuuuaaagauuuauuc

SEQ ID NO: 179762 - RNA, 32 nt, Homo Sapiens
aaauaauguauauaagcagacuugcacaauuc

SEQ ID NO: 179763 - RNA, 32 nt, Homo Sapiens
acaaaauagcagccugcuccuuuucaauggcg

SEQ ID NO: 179764 - RNA, 32 nt, Homo Sapiens
aaauuuuguauugcuuuuuuuccaguuuugca

SEQ ID NO: 179765 - RNA, 28 nt, Homo Sapiens
uauaggaaagaccaacauuuguuuagcu

SEQ ID NO: 179766 - RNA, 32 nt, Homo Sapiens
cuuccacugcuccccuuguucccggccggcug

SEQ ID NO: 179767 - RNA, 32 nt, Homo Sapiens
agggugccgcgggcgagaagggcgcaggaacc

SEQ ID NO: 179768 - RNA, 32 nt, Homo Sapiens
cggggcgggacaggcagcccggcggccuccga

SEQ ID NO: 179769 - RNA, 32 nt, Homo Sapiens
uggcaugacugccuauguggguggcaagccac

SEQ ID NO: 179770 - RNA, 31 nt, Homo Sapiens
ucaggcauaaagaaaacgauacuaauggcag

SEQ ID NO: 179771 - RNA, 32 nt, Homo Sapiens
ugcaggcaaaaagccaguguuaacggagcaag

SEQ ID NO: 179772 - RNA, 32 nt, Homo Sapiens
cccaccccugacgccgcggaccgcagcuccuc

SEQ ID NO: 179773 - RNA, 32 nt, Homo Sapiens
aguuucucggcucuuccuccccgcugcccccc

SEQ ID NO: 179774 - RNA, 32 nt, Homo Sapiens
cgcaggccucccaggagcuccagugcagcccc

SEQ ID NO: 179775 - RNA, 32 nt, Homo Sapiens
cuggcccccaccccggcccggccacacccaug

SEQ ID NO: 179776 - RNA, 32 nt, Homo Sapiens
uuagauuugaguuuuaucuaaaaauuaccacu

SEQ ID NO: 179777 - RNA, 32 nt, Homo Sapiens
uauaucauguuuccuuuuccauuacauagggu

SEQ ID NO: 179778 - RNA, 32 nt, Homo Sapiens
uucucuauuuuuuccuucccugauggauuugc

SEQ ID NO: 179779 - RNA, 32 nt, Homo Sapiens
gaguauuaauaaaauuaaaccagcugauaauu

SEQ ID NO: 179780 - RNA, 32 nt, Homo Sapiens
auagaagaugagaaguacaggcaagugguuug

SEQ ID NO: 179781 - RNA, 32 nt, Homo Sapiens
cgcgcgcuggccaucaggugcugcugacgcug

SEQ ID NO: 179782 - RNA, 32 nt, Homo Sapiens
gccucgcggccccuuguggggaucgggggcac

SEQ ID NO: 179783 - RNA, 32 nt, Homo Sapiens
gacgaccauggcgggggaugugggcggucgca

SEQ ID NO: 179784 - RNA, 32 nt, Homo Sapiens
gggcagggaggggacaucugagggcuucacag

SEQ ID NO: 179785 - RNA, 32 nt, Homo Sapiens
gcagccgguuccggguucggcgcggggcgggg

SEQ ID NO: 179786 - RNA, 32 nt, Homo Sapiens
ggagguggagcugggcagcuguggagccccac

SEQ ID NO: 179787 - RNA, 32 nt, Homo Sapiens
gggaguaaaaacaaaagcaucuccagaggccc

SEQ ID NO: 179788 - RNA, 32 nt, Homo Sapiens
auaauaauuagauuugagcuugaaagaugggc

SEQ ID NO: 179789 - RNA, 32 nt, Homo Sapiens
ccuucacguuccauucccaggcuggucugagc

SEQ ID NO: 179790 - RNA, 32 nt, Homo Sapiens
ccacgccccauagggaggccaagccccggacc

SEQ ID NO: 179791 - RNA, 32 nt, Homo Sapiens
cuggugggaucugcggcggcucccagaugaug

SEQ ID NO: 179792 - RNA, 32 nt, Homo Sapiens
auuugaggcggcugcuggaggcugguucccuc

SEQ ID NO: 179793 - RNA, 31 nt, Homo Sapiens
guuuuguuccuugagucagugcuguugauga

SEQ ID NO: 179794 - RNA, 32 nt, Homo Sapiens
acuguguguacacuuuaccugccugacagaau

SEQ ID NO: 179795 - RNA, 32 nt, Homo Sapiens
ccaguaggagggcucagggucugugccagccc

SEQ ID NO: 179796 - RNA, 32 nt, Homo Sapiens
ucaaccacaaaguuggcauucccuuuaguaga

SEQ ID NO: 179797 - RNA, 32 nt, Homo Sapiens
cuggacgguccgcaggagacgucuccugucuu

SEQ ID NO: 179798 - RNA, 32 nt, Homo Sapiens
acauuguauguaaauucagggauauguauaug

SEQ ID NO: 179799 - RNA, 32 nt, Homo Sapiens
ugauggaaaaaguucucucgcguauugauuag

SEQ ID NO: 179800 - RNA, 32 nt, Homo Sapiens
gccugccgcgcuggccccgaggagggggcguu

SEQ ID NO: 179801 - RNA, 32 nt, Homo Sapiens
ccuaggcaaugaggggcaggaaagggguacag

SEQ ID NO: 179802 - RNA, 32 nt, Homo Sapiens
aagacguggccuugaagcccacaggguugaug

SEQ ID NO: 179803 - RNA, 32 nt, Homo Sapiens
cugcugauuuaaaaguaaaguucuccaauucu

SEQ ID NO: 179804 - RNA, 32 nt, Homo Sapiens
cagaucuagacaauguguggacagugucagag

SEQ ID NO: 179805 - RNA, 32 nt, Homo Sapiens
uuucugaagaaccguguaucaguguuagaugu

SEQ ID NO: 179806 - RNA, 32 nt, Homo Sapiens
ggcucaggccaugccccuccccgcacccaccu

SEQ ID NO: 179807 - RNA, 32 nt, Homo Sapiens
ugaguguggcaaaauggcgccuugaagaaaga

SEQ ID NO: 179808 - RNA, 31 nt, Homo Sapiens
aaauccaagccucauuucagagccugugccc

SEQ ID NO: 179809 - RNA, 32 nt, Homo Sapiens
aagacccaacuggagcguggggcgggcaggca

SEQ ID NO: 179810 - RNA, 32 nt, Homo Sapiens
ggaugugcuuugcaugccagggaccaagaggg

SEQ ID NO: 179811 - RNA, 32 nt, Homo Sapiens
cucccaugcccgccucccuccccucgccgccg

SEQ ID NO: 179812 - RNA, 32 nt, Homo Sapiens
uugaaaccuuggccagguuccaugaccauggg

SEQ ID NO: 179813 - RNA, 32 nt, Homo Sapiens
uuuagggaaggggugggugggcacuugggccu

SEQ ID NO: 179814 - RNA, 32 nt, Homo Sapiens
acaguugaacaaaguguauaguacgugcccag

SEQ ID NO: 179815 - RNA, 32 nt, Homo Sapiens
uaucuuuguauaucaggccgcaugauucccaa

SEQ ID NO: 179816 - RNA, 32 nt, Homo Sapiens
caaauccuaggauaauucaccuccucauuuga

SEQ ID NO: 179817 - RNA, 32 nt, Homo Sapiens
ucuagggaccagcaauacagugcucgccacag

SEQ ID NO: 179818 - RNA, 32 nt, Homo Sapiens
ccggucccggcgccgccuuccggagcguagcg

SEQ ID NO: 179819 - RNA, 32 nt, Homo Sapiens
cgugaauagucuuuugcaugucgcacaauguu

SEQ ID NO: 179820 - RNA, 32 nt, Homo Sapiens
guuuuuuuaaaauuaagugcuguuuguuuucu

SEQ ID NO: 179821 - RNA, 32 nt, Homo Sapiens
cuauuugcagcuuuuauguuuaaauuaguuac

SEQ ID NO: 179822 - RNA, 32 nt, Homo Sapiens
ucagaaggcucugcuauagacccgguguuccu

SEQ ID NO: 179823 - RNA, 32 nt, Homo Sapiens
uggaagaagguggucauagcucuaccuuuaau

SEQ ID NO: 179824 - RNA, 32 nt, Homo Sapiens
gccugcccugccugcuggcuacuuccuggcuu

SEQ ID NO: 179825 - RNA, 32 nt, Homo Sapiens
uccggcuggugcccgcuccagccgcggcaggu

SEQ ID NO: 179826 - RNA, 32 nt, Homo Sapiens
aaaacagucuacugaggcacaaguucugagug

SEQ ID NO: 179827 - RNA, 32 nt, Homo Sapiens
cuggaacaaccacuucaagguugaauucguca

SEQ ID NO: 179828 - RNA, 32 nt, Homo Sapiens
uguggaaauggugagcgcugugagauggaugu

SEQ ID NO: 179829 - RNA, 32 nt, Homo Sapiens
caagguggcagauguggaaccaucagagaggg

SEQ ID NO: 179830 - RNA, 32 nt, Homo Sapiens
ucaggcaucugggaagggccugcccccauggg

SEQ ID NO: 179831 - RNA, 32 nt, Homo Sapiens
uuuucuguaaaaauuaaguugaauacuuuggu

SEQ ID NO: 179832 - RNA, 30 nt, Homo Sapiens
ggcgguggagguggugguuguagugugaug

SEQ ID NO: 179833 - RNA, 32 nt, Homo Sapiens
gggggacguccacuucccauggguuuggcuau

SEQ ID NO: 179834 - RNA, 32 nt, Homo Sapiens
uauucauaugugcacuuguuaccuguugcuua

SEQ ID NO: 179835 - RNA, 32 nt, Homo Sapiens
ccacuugauuuguuuuccaagcaagugcuaga

SEQ ID NO: 179836 - RNA, 32 nt, Homo Sapiens
caguuuuauuuuuucaucuuuugcaaaaagua

SEQ ID NO: 179837 - RNA, 32 nt, Homo Sapiens
uuguaagugcacaacuaauaaauaaaccuuuu

SEQ ID NO: 179838 - RNA, 32 nt, Homo Sapiens
uaccggaguauuuuaugccugccucauuuuau

SEQ ID NO: 179839 - RNA, 30 nt, Homo Sapiens
ccaggauggaggaggccggagcagcggugg

SEQ ID NO: 179840 - RNA, 32 nt, Homo Sapiens
ccugaucauuggggaagcuggcuuucuggcug

SEQ ID NO: 179841 - RNA, 32 nt, Homo Sapiens
uugauuaauguuugcaugguuaauauuucuuc

SEQ ID NO: 179842 - RNA, 32 nt, Homo Sapiens
cuuugugggaaucuguuccucaccauaucauc

SEQ ID NO: 179843 - RNA, 32 nt, Homo Sapiens
uccgcgcguccgccgcgcgccggccguuaaua

SEQ ID NO: 179844 - RNA, 32 nt, Homo Sapiens
ucagcaauuaaaaggaaaaaauacuuaacagg

SEQ ID NO: 179845 - RNA, 32 nt, Homo Sapiens
uugacaucaguuccuuuguguguacucacuga

SEQ ID NO: 179846 - RNA, 32 nt, Homo Sapiens
gcagccccggcgggcucugggacuugcugugc

SEQ ID NO: 179847 - RNA, 32 nt, Homo Sapiens
ccuaggaucugguaguaggcaaggcugucauu

SEQ ID NO: 179848 - RNA, 32 nt, Homo Sapiens
gaaaguagggggcuuucuggggccuagcgauc

SEQ ID NO: 179849 - RNA, 32 nt, Homo Sapiens
aguccuaccucugccacuaaugagguguuugg

SEQ ID NO: 179850 - RNA, 32 nt, Homo Sapiens
ugcucagagaaauuauucauaagagaaaagaa

SEQ ID NO: 179851 - RNA, 32 nt, Homo Sapiens
auagucacaugauuuuaagaaaacuguaaaag

SEQ ID NO: 179852 - RNA, 32 nt, Homo Sapiens
caauaaacucucugaccaacccuaaaaaaaaa

SEQ ID NO: 179853 - RNA, 32 nt, Homo Sapiens
uaaaagaggguggggguggggggugauugcug

SEQ ID NO: 179854 - RNA, 32 nt, Homo Sapiens
caucccuggugcuacuggucuuucuaaacuua

SEQ ID NO: 179855 - RNA, 32 nt, Homo Sapiens
aaacacuguauaucaauuuuaaaaugcagcau

SEQ ID NO: 179856 - RNA, 32 nt, Homo Sapiens
accgaaguucccccaaaccuguccucucaaga

SEQ ID NO: 179857 - RNA, 32 nt, Homo Sapiens
gagcuaaaaucuauuuaccauugaguaauuga

SEQ ID NO: 179858 - RNA, 32 nt, Homo Sapiens
aaccccagucccagcucugcaggccuccaagg

SEQ ID NO: 179859 - RNA, 32 nt, Homo Sapiens
gugaugacggguggaggggcuagcucgaggca

SEQ ID NO: 179860 - RNA, 32 nt, Homo Sapiens
acugagcccccuccccacagguuaaaaaacuu

SEQ ID NO: 179861 - RNA, 32 nt, Homo Sapiens
aggagccucacagacauauccagguaaaaaga

SEQ ID NO: 179862 - RNA, 32 nt, Homo Sapiens
auuaaucgagccagaauguguuuugugugguc

SEQ ID NO: 179863 - RNA, 32 nt, Homo Sapiens
cagagcccuccagccgcucaccccgcgugcca

SEQ ID NO: 179864 - RNA, 32 nt, Homo Sapiens
caguagcauguggaugccauggagacuggaag

SEQ ID NO: 179865 - RNA, 32 nt, Homo Sapiens
gcgccucacgccccggguguguccuuguccag

SEQ ID NO: 179866 - RNA, 32 nt, Homo Sapiens
caguccgcaggccagcagcaucaucugggaac

SEQ ID NO: 179867 - RNA, 32 nt, Homo Sapiens
agaagucagacuccuccgggucgcgcuccagc

SEQ ID NO: 179868 - RNA, 32 nt, Homo Sapiens
gagcuuuccgcggaacuucacaggucucccuc

SEQ ID NO: 179869 - RNA, 32 nt, Homo Sapiens
ucuuuuauuuuugcuuauugaauguauuuccu

SEQ ID NO: 179870 - RNA, 32 nt, Homo Sapiens
auauugcaaaauuuaauauauuuguucacuug

SEQ ID NO: 179871 - RNA, 32 nt, Homo Sapiens
aaaauggacacaaaaacaagaagaaaugcuca

SEQ ID NO: 179872 - RNA, 32 nt, Homo Sapiens
ugucuugguggggucucccaccccuccaagac

SEQ ID NO: 179873 - RNA, 29 nt, Homo Sapiens
uagccuucagaucuugguguuuugaauuc

SEQ ID NO: 179874 - RNA, 32 nt, Homo Sapiens
gugcuuaccuccaaaaaucucaucucuucccu

SEQ ID NO: 179875 - RNA, 32 nt, Homo Sapiens
aggaugcgccuccucucccccaucccaguccu

SEQ ID NO: 179876 - RNA, 32 nt, Homo Sapiens
aguucuuaaagauggugugucuggaguuuguu

SEQ ID NO: 179877 - RNA, 32 nt, Homo Sapiens
gccacugugugucuuccuccccggcgggagcc

SEQ ID NO: 179878 - RNA, 32 nt, Homo Sapiens
cuuuggaaauuuaauguuaguugaaauguaaa

SEQ ID NO: 179879 - RNA, 32 nt, Homo Sapiens
ggggacucuaaagugcaaggagauuuacaguu

SEQ ID NO: 179880 - RNA, 32 nt, Homo Sapiens
cuucuuuggggauaggaagagaaacauaacua

SEQ ID NO: 179881 - RNA, 32 nt, Homo Sapiens
caaaugggauuagagacacagaguucuugcuu

SEQ ID NO: 179882 - RNA, 32 nt, Homo Sapiens
aaccgcgguaagggcgguggugcgggcguccg

SEQ ID NO: 179883 - RNA, 32 nt, Homo Sapiens
ccuuugaggcaggcgaggggcugggagugggu

SEQ ID NO: 179884 - RNA, 32 nt, Homo Sapiens
gcgcggcccugcccggcccaccgagcccuggu

SEQ ID NO: 179885 - RNA, 32 nt, Homo Sapiens
cauauaacuuuagccuacaaucucuuauuaaa

SEQ ID NO: 179886 - RNA, 32 nt, Homo Sapiens
cggguggggcugcagcuucuggaccuaggacu

SEQ ID NO: 179887 - RNA, 32 nt, Homo Sapiens
uaaaguuauuaagcaguuuuauguucguuuug

SEQ ID NO: 179888 - RNA, 32 nt, Homo Sapiens
cccggcgccucagcugcccccggccauggcgu

SEQ ID NO: 179889 - RNA, 32 nt, Homo Sapiens
aggaggggugguguccuucuccucuuguagcc

SEQ ID NO: 179890 - RNA, 32 nt, Homo Sapiens
gggccccccguccugccgagcccugcagagug

SEQ ID NO: 179891 - RNA, 32 nt, Homo Sapiens
cugcaucgcggagccaggccgaggacgugagg

SEQ ID NO: 179892 - RNA, 32 nt, Homo Sapiens
uggcuccucuucugcucuuuccaucuuuuugc

SEQ ID NO: 179893 - RNA, 32 nt, Homo Sapiens
cuuccuucugguggguucguggucucgcugac

SEQ ID NO: 179894 - RNA, 32 nt, Homo Sapiens
agaggcuuuuaaagauuacauguauuaauaua

SEQ ID NO: 179895 - RNA, 32 nt, Homo Sapiens
ccaggugagcugaagacaaaccacuguacaua

SEQ ID NO: 179896 - RNA, 32 nt, Homo Sapiens
cacuugucagugcgcuuucucuuucgauagug

SEQ ID NO: 179897 - RNA, 32 nt, Homo Sapiens
uaccuagaaagcgagcggcgccgcccgugggg

SEQ ID NO: 179898 - RNA, 32 nt, Homo Sapiens
cugacaaagugaaagaggcugagacccgugcu

SEQ ID NO: 179899 - RNA, 32 nt, Homo Sapiens
agcuggcagagucccguugcugagagauggau

SEQ ID NO: 179900 - RNA, 32 nt, Homo Sapiens
gcuccaccaggcgccuuggagagcagcgccag

SEQ ID NO: 179901 - RNA, 32 nt, Homo Sapiens
ugauaaaaacaguggcgcaguuugagagaaug

SEQ ID NO: 179902 - RNA, 32 nt, Homo Sapiens
cugcaguggcuuccucuggggugucaccaagc

SEQ ID NO: 179903 - RNA, 32 nt, Homo Sapiens
ugcugagcaaaauuccacaaaggagagaaagg

SEQ ID NO: 179904 - RNA, 32 nt, Homo Sapiens
aucauugugucugcauuggucaagauccugga

SEQ ID NO: 179905 - RNA, 32 nt, Homo Sapiens
agcuuuaaccuccccgucagcggccgccccag

SEQ ID NO: 179906 - RNA, 32 nt, Homo Sapiens
cacugcacccagcccuguauucuuauucuuca

SEQ ID NO: 179907 - RNA, 32 nt, Homo Sapiens
aucgcaaaaaauauuucuuuagaaacauaagc

SEQ ID NO: 179908 - RNA, 32 nt, Homo Sapiens
cauguauacuuauuaucuugcucaguauuuua

SEQ ID NO: 179909 - RNA, 32 nt, Homo Sapiens
cauucauaaaagacaugguguaaauauuuugu

SEQ ID NO: 179910 - RNA, 32 nt, Homo Sapiens
uaagcucuguuguugacauuuugcagugauac

SEQ ID NO: 179911 - RNA, 32 nt, Homo Sapiens
guuuguuuguucauccuuucugucagcaugga

SEQ ID NO: 179912 - RNA, 32 nt, Homo Sapiens
uuaaccuccacauccaggucuuucuggcuaaa

SEQ ID NO: 179913 - RNA, 32 nt, Homo Sapiens
guggggaccccaugggccagcccuugcaggag

SEQ ID NO: 179914 - RNA, 32 nt, Homo Sapiens
gcugcuucuccaagcuuucagacaagaaugug

SEQ ID NO: 179915 - RNA, 32 nt, Homo Sapiens
auucuuuaaugauauuaaauaugccgaagcca

SEQ ID NO: 179916 - RNA, 32 nt, Homo Sapiens
ccccgccgcgcgcgcuuugaauuucccagccg

SEQ ID NO: 179917 - RNA, 32 nt, Homo Sapiens
aaacacacuugaaaaugagauugaccuggaga

SEQ ID NO: 179918 - RNA, 32 nt, Homo Sapiens
ugguuccuuuucucagcccucuugaggggcga

SEQ ID NO: 179919 - RNA, 32 nt, Homo Sapiens
ucaagccucuagcacagccauccacacaaagg

SEQ ID NO: 179920 - RNA, 32 nt, Homo Sapiens
acauuuugauagcacaaaauuuugaaaaccca

SEQ ID NO: 179921 - RNA, 32 nt, Homo Sapiens
uugacaaucgugauaguuauuauuuucccauu

SEQ ID NO: 179922 - RNA, 32 nt, Homo Sapiens
ggaguggacuaauacagagggcugggaaagaa

SEQ ID NO: 179923 - RNA, 32 nt, Homo Sapiens
aacagaagggaagaagcaguuggaagcaugac

SEQ ID NO: 179924 - RNA, 32 nt, Homo Sapiens
gucuuagucaaggugcugcagaaggacagaac

SEQ ID NO: 179925 - RNA, 32 nt, Homo Sapiens
uuuucucuacguucuauaugcaauuguuauau

SEQ ID NO: 179926 - RNA, 32 nt, Homo Sapiens
uccuggccuucuucaagugcugccugcucacu

SEQ ID NO: 179927 - RNA, 32 nt, Homo Sapiens
cucuuuuaugguuuuuaauuuuuaucaggacu

SEQ ID NO: 179928 - RNA, 32 nt, Homo Sapiens
agccagugucgccccuaccccaucccacagcc

SEQ ID NO: 179929 - RNA, 32 nt, Homo Sapiens
ugcuuaacuuuuugaaaaaauuagauuuuuug

SEQ ID NO: 179930 - RNA, 32 nt, Homo Sapiens
aacaaacaguuuuuccaauuauaaauaaaugc

SEQ ID NO: 179931 - RNA, 32 nt, Homo Sapiens
gcagagaacgauccccacaggaacuggucuaa

SEQ ID NO: 179932 - RNA, 32 nt, Homo Sapiens
acaauguuuucuaugaucugaaccugucauuu

SEQ ID NO: 179933 - RNA, 30 nt, Homo Sapiens
ccaagauggcugccuccauagugcggcgcg

SEQ ID NO: 179934 - RNA, 32 nt, Homo Sapiens
gggggaugaagauuacacaugcaguuaagaag

SEQ ID NO: 179935 - RNA, 32 nt, Homo Sapiens
uugcuugaagaaaagauaaacaggacgggucc

SEQ ID NO: 179936 - RNA, 32 nt, Homo Sapiens
auaugagagaagaucuccuguauuuuaacacg

SEQ ID NO: 179937 - RNA, 32 nt, Homo Sapiens
gggcaagaggggaaucugcugcugcaucgggc

SEQ ID NO: 179938 - RNA, 32 nt, Homo Sapiens
auuuuucuuuuggagucucauuuuuauuugug

SEQ ID NO: 179939 - RNA, 32 nt, Homo Sapiens
acacacacgugagcacgcacacaccaauucca

SEQ ID NO: 179940 - RNA, 32 nt, Homo Sapiens
ccccauuaucccaucagaacaucuucuuggcc

SEQ ID NO: 179941 - RNA, 32 nt, Homo Sapiens
cagugccugccccagacagguuguucauaagc

SEQ ID NO: 179942 - RNA, 32 nt, Homo Sapiens
ccugacgugaugccucuauugcagcucagagg

SEQ ID NO: 179943 - RNA, 32 nt, Homo Sapiens
cuggcacugaagaucuccagggacuucagaga

SEQ ID NO: 179944 - RNA, 32 nt, Homo Sapiens
uaacucuuguaaaagaaaauaauuuaucauag

SEQ ID NO: 179945 - RNA, 32 nt, Homo Sapiens
caggcaccacucagcucuggcucuuccuggga

SEQ ID NO: 179946 - RNA, 32 nt, Homo Sapiens
ccuggacugcauuaggaagaccucuuucccug

SEQ ID NO: 179947 - RNA, 32 nt, Homo Sapiens
ggagaaugguggccuccuccacaggaauggug

SEQ ID NO: 179948 - RNA, 32 nt, Homo Sapiens
gcccuggcccaggcuuggggcugcugggguug

SEQ ID NO: 179949 - RNA, 31 nt, Homo Sapiens
ggcgucuggcuggcugcaggaguccagagcc

SEQ ID NO: 179950 - RNA, 32 nt, Homo Sapiens
agaaauaaaaacauuguaggaaaauaaguagc

SEQ ID NO: 179951 - RNA, 32 nt, Homo Sapiens
uauguuaaaaauuauuaaucuuaauauuuugu

SEQ ID NO: 179952 - RNA, 32 nt, Homo Sapiens
uuuguuucuuuuccaaagucaagcugcacuaa

SEQ ID NO: 179953 - RNA, 32 nt, Homo Sapiens
cacugcagccuugggaaaguuauuuaaacuca

SEQ ID NO: 179954 - RNA, 32 nt, Homo Sapiens
gggcuggagccggagcucgggcggcgcgggug

SEQ ID NO: 179955 - RNA, 29 nt, Homo Sapiens
uauacuucuauccucgauaguaaaaaagg

SEQ ID NO: 179956 - RNA, 32 nt, Homo Sapiens
caggcguccgcugcaguccgccggcgagggag

SEQ ID NO: 179957 - RNA, 32 nt, Homo Sapiens
caacccaacuaaaagccgguuccuugaaaaga

SEQ ID NO: 179958 - RNA, 32 nt, Homo Sapiens
aguccuggucccccuccucccuggcccucucg

SEQ ID NO: 179959 - RNA, 32 nt, Homo Sapiens
uccaacguccacuccaagcaagccagagccag

SEQ ID NO: 179960 - RNA, 32 nt, Homo Sapiens
gccucuaccugccugguccagcugggacccug

SEQ ID NO: 179961 - RNA, 32 nt, Homo Sapiens
ugcaauuagcgucauuggauuuggcgcuccuc

SEQ ID NO: 179962 - RNA, 32 nt, Homo Sapiens
ccaggggcucacccucugcugcaccucucuuc

SEQ ID NO: 179963 - RNA, 32 nt, Homo Sapiens
uuaaucgauauugauuuuuuuauuuuaaucau

SEQ ID NO: 179964 - RNA, 32 nt, Homo Sapiens
auggaaaaacaaauuugcacaauggccuggga

SEQ ID NO: 179965 - RNA, 32 nt, Homo Sapiens
aguaacaccucuucccacccaccuccugugaa

SEQ ID NO: 179966 - RNA, 32 nt, Homo Sapiens
uaaaugcaguuuuauaaaacccuaacagcggu

SEQ ID NO: 179967 - RNA, 32 nt, Homo Sapiens
acaucagggaauuuauauuggagaaaaauccu

SEQ ID NO: 179968 - RNA, 32 nt, Homo Sapiens
cguaauuccaaauuauuuuucaguaagacagu

SEQ ID NO: 179969 - RNA, 31 nt, Homo Sapiens
ugacucuuugccaccacccugaucuaagccc

SEQ ID NO: 179970 - RNA, 32 nt, Homo Sapiens
aguguaugccuguguaacugguaaauagugaa

SEQ ID NO: 179971 - RNA, 32 nt, Homo Sapiens
cauucuacuagauuauuauguaucuggauuuu

SEQ ID NO: 179972 - RNA, 32 nt, Homo Sapiens
ggcuuauauacaaugcuucuuuccuguauauu

SEQ ID NO: 179973 - RNA, 32 nt, Homo Sapiens
accgccugcagcugcgcgaggagugccgccgc

SEQ ID NO: 179974 - RNA, 32 nt, Homo Sapiens
uuauucaugucccagaagaccaaaaagugcuc

SEQ ID NO: 179975 - RNA, 32 nt, Homo Sapiens
agcacuuguuaacccucugagugcauagaauu

SEQ ID NO: 179976 - RNA, 32 nt, Homo Sapiens
aaguuacaaaaauaaauguuaaagguuuuuuu

SEQ ID NO: 179977 - RNA, 32 nt, Homo Sapiens
augaucuguuuugaaggcaaaauugcaaaucu

SEQ ID NO: 179978 - RNA, 32 nt, Homo Sapiens
aacugacacaucuccagguguaccuccaaccc

SEQ ID NO: 179979 - RNA, 32 nt, Homo Sapiens
gauucucccgggaaaucugaccucagaagaca

SEQ ID NO: 179980 - RNA, 32 nt, Homo Sapiens
uauuugaaauuugauaagccaaaaaugugguu

SEQ ID NO: 179981 - RNA, 31 nt, Homo Sapiens
cgccguggggcggugccugcgccugagccuc

SEQ ID NO: 179982 - RNA, 32 nt, Homo Sapiens
cgacaggcggccugaggccucgcucaguggcg

SEQ ID NO: 179983 - RNA, 32 nt, Homo Sapiens
uuguggagcgagggcggcgccacgagguggaa

SEQ ID NO: 179984 - RNA, 32 nt, Homo Sapiens
cggggacuggggugggggugggaggggggcug

SEQ ID NO: 179985 - RNA, 32 nt, Homo Sapiens
gacuuugggggauuuuucugcugguaagugag

SEQ ID NO: 179986 - RNA, 32 nt, Homo Sapiens
gacugcuggucuccacagauaccugcuguucu

SEQ ID NO: 179987 - RNA, 32 nt, Homo Sapiens
aaccaaggagaagagggaggagucacgcccug

SEQ ID NO: 179988 - RNA, 32 nt, Homo Sapiens
ugaaugcaggggguggccacggguaucgucug

SEQ ID NO: 179989 - RNA, 32 nt, Homo Sapiens
ucugcuuuguaauucuaaagucaacacuauac

SEQ ID NO: 179990 - RNA, 32 nt, Homo Sapiens
gucucacuacaguuagaaaaacaaaaauauga

SEQ ID NO: 179991 - RNA, 32 nt, Homo Sapiens
ccaucacucugauaggcaccccgcagugggga

SEQ ID NO: 179992 - RNA, 32 nt, Homo Sapiens
aaaccaaaacaaaauuuccaaaaacaaugaag

SEQ ID NO: 179993 - RNA, 32 nt, Homo Sapiens
ugucaauauauauaaucaggggucuuccagau

SEQ ID NO: 179994 - RNA, 32 nt, Homo Sapiens
accccgcucagguucugccugccuuacugggg

SEQ ID NO: 179995 - RNA, 32 nt, Homo Sapiens
accgcugacugacuuugggugccggggcugcg

SEQ ID NO: 179996 - RNA, 32 nt, Homo Sapiens
ucacuacuauccacaucaaaagaagaacuaug

SEQ ID NO: 179997 - RNA, 32 nt, Homo Sapiens
agcaggcggggaagaggucggagaggcagcgc

SEQ ID NO: 179998 - RNA, 32 nt, Homo Sapiens
gccuaccuuguacuuucccugcugcagcccug

SEQ ID NO: 179999 - RNA, 30 nt, Homo Sapiens
uacaggcgcgcgccaccacgaccagcuaau

SEQ ID NO: 180000 - RNA, 32 nt, Homo Sapiens
ucgcgggcggggguccucaggcggccgccuuc

SEQ ID NO: 180001 - RNA, 32 nt, Homo Sapiens
cggcaggaaaugggcugcucuucccacuugac

SEQ ID NO: 180002 - RNA, 32 nt, Homo Sapiens
gugaaauuuuaaaaauuguuaauuuuuccuau

SEQ ID NO: 180003 - RNA, 32 nt, Homo Sapiens
uaccuuccaguuccucauuuuugaauacaggc

SEQ ID NO: 180004 - RNA, 32 nt, Homo Sapiens
gcccuuuaaacgccgcgcgugccucggcgucu

SEQ ID NO: 180005 - RNA, 32 nt, Homo Sapiens
gcugcucggcgcccggguccgccaugcgcucc

SEQ ID NO: 180006 - RNA, 32 nt, Homo Sapiens
agauagauuuucuucugagacucccggagucu

SEQ ID NO: 180007 - RNA, 32 nt, Homo Sapiens
gaugccucaguucaaaucgcuaagcuuuacgc

SEQ ID NO: 180008 - RNA, 32 nt, Homo Sapiens
uacuuugugaauggacaacaguuacauagugu

SEQ ID NO: 180009 - RNA, 32 nt, Homo Sapiens
ggggugccuagccugagcguugccuggagccu

SEQ ID NO: 180010 - RNA, 32 nt, Homo Sapiens
ucaguagaguugggaaugaggaugcuguuacu

SEQ ID NO: 180011 - RNA, 32 nt, Homo Sapiens
gggccauugauagcaucucccaggaacaacga

SEQ ID NO: 180012 - RNA, 32 nt, Homo Sapiens
agaaaacagucuuuggugauauuuauuauaug

SEQ ID NO: 180013 - RNA, 32 nt, Homo Sapiens
cgcgggaccgcggcggcgcaggaagaaguccc

SEQ ID NO: 180014 - RNA, 32 nt, Homo Sapiens
ucugcuaaaaauaccaaaauuacccgggcgug

SEQ ID NO: 180015 - RNA, 32 nt, Homo Sapiens
augucagcuccuguuagcaaccaguggagucu

SEQ ID NO: 180016 - RNA, 32 nt, Homo Sapiens
cagcggacgcgugcagcagacccgggagcgag

SEQ ID NO: 180017 - RNA, 32 nt, Homo Sapiens
caacuucaggaaguaacaagggcuugcuuaga

SEQ ID NO: 180018 - RNA, 32 nt, Homo Sapiens
uccccccguccugccccucguccacuguaagc

SEQ ID NO: 180019 - RNA, 32 nt, Homo Sapiens
ucugccagggugacaauggguguucauagaca

SEQ ID NO: 180020 - RNA, 32 nt, Homo Sapiens
aaacaccccacuuuuaaaguccccguucaaaa

SEQ ID NO: 180021 - RNA, 32 nt, Homo Sapiens
ugugcgagcacaacacacacaauccuuucuaa

SEQ ID NO: 180022 - RNA, 32 nt, Homo Sapiens
ggggggucaccauugagccugccauggugagc

SEQ ID NO: 180023 - RNA, 32 nt, Homo Sapiens
uaaggagguauacagaacugcagaccucuaaa

SEQ ID NO: 180024 - RNA, 32 nt, Homo Sapiens
guaaaaaauuuaaucauuauuuugaugcuuua

SEQ ID NO: 180025 - RNA, 32 nt, Homo Sapiens
aagugaaggcuuuugagguuuauaaaauggua

SEQ ID NO: 180026 - RNA, 32 nt, Homo Sapiens
caagcccuguucuuccucucccacugaauucu

SEQ ID NO: 180027 - RNA, 32 nt, Homo Sapiens
gggcccggaccccggcgauugccgcccgcuuc

SEQ ID NO: 180028 - RNA, 32 nt, Homo Sapiens
augacacaccuuggauuaaaacgggaaucaca

SEQ ID NO: 180029 - RNA, 32 nt, Homo Sapiens
gaaguccacguaugcuagaacucugggcaggg

SEQ ID NO: 180030 - RNA, 32 nt, Homo Sapiens
uaaaugaagcuagcuaagcggaugcuguauca

SEQ ID NO: 180031 - RNA, 32 nt, Homo Sapiens
ggggggcgcgggcgaggauggcggcggagaac

SEQ ID NO: 180032 - RNA, 32 nt, Homo Sapiens
gugaccccaggccccaggaaagggagcgagga

SEQ ID NO: 180033 - RNA, 32 nt, Homo Sapiens
uaaagugucugcaaguggaaauccagaggaag

SEQ ID NO: 180034 - RNA, 32 nt, Homo Sapiens
uguagaagguggagaggagggauacuucccag

SEQ ID NO: 180035 - RNA, 32 nt, Homo Sapiens
aggaggguggccacgugaaaagcaaugaagag

SEQ ID NO: 180036 - RNA, 32 nt, Homo Sapiens
ggagagaugcuggaggugggggugcuguguuc

SEQ ID NO: 180037 - RNA, 32 nt, Homo Sapiens
aauauuuguaaaauaucacugugaauuuacag

SEQ ID NO: 180038 - RNA, 32 nt, Homo Sapiens
aaugagacaaagugaaaaagaaauuauauuca

SEQ ID NO: 180039 - RNA, 32 nt, Homo Sapiens
aagcccugucucggcuggcccauaacuccuga

SEQ ID NO: 180040 - RNA, 32 nt, Homo Sapiens
uauuuuuguaauuauuucuaccuccaaauaua

SEQ ID NO: 180041 - RNA, 32 nt, Homo Sapiens
auuauagguauuuuauucccauguuuccaucu

SEQ ID NO: 180042 - RNA, 32 nt, Homo Sapiens
gucccuggcugccuuucauggaggaaggacac

SEQ ID NO: 180043 - RNA, 32 nt, Homo Sapiens
caucacauauugacugaguggcugcuuagcau

SEQ ID NO: 180044 - RNA, 32 nt, Homo Sapiens
accugcauauuuuuauguaaaucucuaaauuu

SEQ ID NO: 180045 - RNA, 32 nt, Homo Sapiens
cugcagcccagccccagcuucucugcccacuc

SEQ ID NO: 180046 - RNA, 32 nt, Homo Sapiens
uuuuuauaccuguuuaaauugcucacaguuau

SEQ ID NO: 180047 - RNA, 32 nt, Homo Sapiens
caucagcucccucuccuccucagcuacuuauu

SEQ ID NO: 180048 - RNA, 32 nt, Homo Sapiens
gagaaggggaggaggccucggccggccgcaga

SEQ ID NO: 180049 - RNA, 32 nt, Homo Sapiens
guauuuauaggucuuaaacaugaugaauuuuu

SEQ ID NO: 180050 - RNA, 32 nt, Homo Sapiens
aucuguaguauuacuaauuggaaggaauuauu

SEQ ID NO: 180051 - RNA, 32 nt, Homo Sapiens
ugggauuguggauagagcugccgugaacaugg

SEQ ID NO: 180052 - RNA, 32 nt, Homo Sapiens
aaaugaagucaaaaugccaauaagaccagauc

SEQ ID NO: 180053 - RNA, 32 nt, Homo Sapiens
gggaucuucuaaagguaagcuuaauauugcaa

SEQ ID NO: 180054 - RNA, 32 nt, Homo Sapiens
caaaauaucugaacagaagaggacuuaggaga

SEQ ID NO: 180055 - RNA, 32 nt, Homo Sapiens
gauauauaacuauauauauugccaucacacac

SEQ ID NO: 180056 - RNA, 32 nt, Homo Sapiens
uccuuucccuucccuucuccacuggccagcuu

SEQ ID NO: 180057 - RNA, 32 nt, Homo Sapiens
acuuucugaaaacacuugaugauguggaaaug

SEQ ID NO: 180058 - RNA, 30 nt, Homo Sapiens
caggcuggagguggcgcggguggccuggaa

SEQ ID NO: 180059 - RNA, 32 nt, Homo Sapiens
cagaggccggugccggugcagguccuaggugu

SEQ ID NO: 180060 - RNA, 32 nt, Homo Sapiens
cauugauuggguuuuuucuuuauucuuaauuu

SEQ ID NO: 180061 - RNA, 32 nt, Homo Sapiens
gcaugcagaugucaaggcaguuaggaaguaaa

SEQ ID NO: 180062 - RNA, 32 nt, Homo Sapiens
aucacuuuuuaaaaccuguuaagucaaaacca

SEQ ID NO: 180063 - RNA, 32 nt, Homo Sapiens
guccuacccgcccgcguccaaccccggggcau

SEQ ID NO: 180064 - RNA, 32 nt, Homo Sapiens
agugggagagcgucgggcgggaggcggugguc

SEQ ID NO: 180065 - RNA, 32 nt, Homo Sapiens
ucuccgucucccucuuuuuguacccaucacug

SEQ ID NO: 180066 - RNA, 32 nt, Homo Sapiens
aagcugccugucaucuccugcccaauccccag

SEQ ID NO: 180067 - RNA, 32 nt, Homo Sapiens
agagcgugagaagccagagugcagagugggag

SEQ ID NO: 180068 - RNA, 32 nt, Homo Sapiens
aucucuggugcguaagcgucaggaaauagcag

SEQ ID NO: 180069 - RNA, 32 nt, Homo Sapiens
cgggucggcaggugcuggcuugcgagguuguc

SEQ ID NO: 180070 - RNA, 32 nt, Homo Sapiens
aagagucagauuuauagcauuuucaaccaaaa

SEQ ID NO: 180071 - RNA, 32 nt, Homo Sapiens
aaaaaauuguuugcacuuaaaaauaguugaau

SEQ ID NO: 180072 - RNA, 32 nt, Homo Sapiens
uaagaaauggaugguauucaccggggaaacaa

SEQ ID NO: 180073 - RNA, 32 nt, Homo Sapiens
uuacaucgugguuucccuccccgacuuuuuau

SEQ ID NO: 180074 - RNA, 32 nt, Homo Sapiens
guacugagcaccagcucgucucccuagagcgu

SEQ ID NO: 180075 - RNA, 32 nt, Homo Sapiens
uauauauaauuuccaauucaggauauugcccu

SEQ ID NO: 180076 - RNA, 32 nt, Homo Sapiens
cccucgaccugucgaugccccgcggccccgcc

SEQ ID NO: 180077 - RNA, 32 nt, Homo Sapiens
uggccgggcgugauggugggcgccuguaaucc

SEQ ID NO: 180078 - RNA, 32 nt, Homo Sapiens
cucaguggcaccugggaccccuggcugcagug

SEQ ID NO: 180079 - RNA, 32 nt, Homo Sapiens
ugauguccuuugaggcuucuuuagcucuaguu

SEQ ID NO: 180080 - RNA, 32 nt, Homo Sapiens
ccucucuggugcccggccagcgacagggaccc

SEQ ID NO: 180081 - RNA, 32 nt, Homo Sapiens
uccaucucuugaaaaaauguagucuuugaaug

SEQ ID NO: 180082 - RNA, 32 nt, Homo Sapiens
ggggcagggcgguggcgccuuccugaccuuug

SEQ ID NO: 180083 - RNA, 32 nt, Homo Sapiens
cugacuuucucuaucauuucuaaaaugacuaa

SEQ ID NO: 180084 - RNA, 32 nt, Homo Sapiens
gagcuugcaaugagccgagaucgcgccacugc

SEQ ID NO: 180085 - RNA, 32 nt, Homo Sapiens
cagagccacgggcgcccgccccgccccgcgcc

SEQ ID NO: 180086 - RNA, 32 nt, Homo Sapiens
uacgcacgugccggaccugaggcggaucuccc

SEQ ID NO: 180087 - RNA, 32 nt, Homo Sapiens
uuuuucgguuuguuuuuauuuaucucuuuggc

SEQ ID NO: 180088 - RNA, 32 nt, Homo Sapiens
aagauggagagauggagccaccccaagagaca

SEQ ID NO: 180089 - RNA, 32 nt, Homo Sapiens
cuggacaagaaaggcuugacuggccgugaacu

SEQ ID NO: 180090 - RNA, 30 nt, Homo Sapiens
uguggguaccucccugcccagguuauucac

SEQ ID NO: 180091 - RNA, 32 nt, Homo Sapiens
acaaccguccugcuccccaccucccccaggaa

SEQ ID NO: 180092 - RNA, 32 nt, Homo Sapiens
aaccgguguucuuauugguuugccauccuugu

SEQ ID NO: 180093 - RNA, 27 nt, Homo Sapiens
caauccucccgcuucagccuccugagu

SEQ ID NO: 180094 - RNA, 30 nt, Homo Sapiens
cagguucauucugccacccaucugcauuaa

SEQ ID NO: 180095 - RNA, 32 nt, Homo Sapiens
uuuuuaucgcagugaagcucaagugguaccca

SEQ ID NO: 180096 - RNA, 32 nt, Homo Sapiens
caugguggaugaaaaugaugucugguuuagua

SEQ ID NO: 180097 - RNA, 32 nt, Homo Sapiens
caccggcgcccaaguccuccccgcgccgccuc

SEQ ID NO: 180098 - RNA, 32 nt, Homo Sapiens
ccccugggccgugccugcccuccaccuugagu

SEQ ID NO: 180099 - RNA, 32 nt, Homo Sapiens
uguuuugaagugcuauuaccuuucucaguuac

SEQ ID NO: 180100 - RNA, 32 nt, Homo Sapiens
ggcgccugcagacggccccuggaagggcucug

SEQ ID NO: 180101 - RNA, 32 nt, Homo Sapiens
uuggaaauucagaaccuauuuuuuaucaucuu

SEQ ID NO: 180102 - RNA, 32 nt, Homo Sapiens
gagaugcuuaggaugcugaauuuuaaccccuu

SEQ ID NO: 180103 - RNA, 32 nt, Homo Sapiens
ggccucuugaaagagaaucauaaaaaacaaag

SEQ ID NO: 180104 - RNA, 32 nt, Homo Sapiens
guauucaaaaaauuauugguugcaauguuguu

SEQ ID NO: 180105 - RNA, 32 nt, Homo Sapiens
agggaccuuaggggagcagagaagacaggcaa

SEQ ID NO: 180106 - RNA, 32 nt, Homo Sapiens
ucuagaaagggggcguggagggggcgugaccg

SEQ ID NO: 180107 - RNA, 32 nt, Homo Sapiens
ugcaaaagagauuuguuguaaaagcuuugaaa

SEQ ID NO: 180108 - RNA, 32 nt, Homo Sapiens
ugcuugaaaaagacaauacugaagauuguacu

SEQ ID NO: 180109 - RNA, 32 nt, Homo Sapiens
aagucucuauuuaaaaauaauuuuguguuuuc

SEQ ID NO: 180110 - RNA, 30 nt, Homo Sapiens
ucaccaugauuaucaagcacuucuuuggaa

SEQ ID NO: 180111 - RNA, 32 nt, Homo Sapiens
aggagguagguccuuuucuccuccggccuagu

SEQ ID NO: 180112 - RNA, 32 nt, Homo Sapiens
cauguggagacuuacuuuguagucuuuuaaga

SEQ ID NO: 180113 - RNA, 32 nt, Homo Sapiens
cucuugggaggucucuaguucucuaaaguucu

SEQ ID NO: 180114 - RNA, 32 nt, Homo Sapiens
gugugaugagagagaugggaggggcacaaaga

SEQ ID NO: 180115 - RNA, 32 nt, Homo Sapiens
acaggauacugggucuugucuaucuugaugga

SEQ ID NO: 180116 - RNA, 32 nt, Homo Sapiens
uuagagcagauuugcaauuagauucuuguauc

SEQ ID NO: 180117 - RNA, 29 nt, Homo Sapiens
cagaaucuggggggaguacggucagggau

SEQ ID NO: 180118 - RNA, 32 nt, Homo Sapiens
ggcuacugguguauguagcaguucuuaaauca

SEQ ID NO: 180119 - RNA, 32 nt, Homo Sapiens
gcuagaauggugcugcaguggcagaagacggc

SEQ ID NO: 180120 - RNA, 30 nt, Homo Sapiens
ggcaucuggaaagggggggaaaaaagcaaa

SEQ ID NO: 180121 - RNA, 32 nt, Homo Sapiens
uuuguuuuaaacacgucaucaauucauugccu

SEQ ID NO: 180122 - RNA, 32 nt, Homo Sapiens
gccucagugauucuccuguccccucccucaug

SEQ ID NO: 180123 - RNA, 32 nt, Homo Sapiens
ucauggcuuacugcauccaugauccuccugcc

SEQ ID NO: 180124 - RNA, 32 nt, Homo Sapiens
gagucauuugaaauggucauugaggaagcaac

SEQ ID NO: 180125 - RNA, 32 nt, Homo Sapiens
agggaugcuuugcugcaggcacaggcugccuu

SEQ ID NO: 180126 - RNA, 32 nt, Homo Sapiens
ggggcucuggucuuuucccagaggcuggcacc

SEQ ID NO: 180127 - RNA, 32 nt, Homo Sapiens
gcagaaugacugcaugaggcuucgggagucac

SEQ ID NO: 180128 - RNA, 32 nt, Homo Sapiens
cagaaccuucgggaagaccgggugcucucccu

SEQ ID NO: 180129 - RNA, 32 nt, Homo Sapiens
acgggcagccgcgggggcguugugggccgcgg

SEQ ID NO: 180130 - RNA, 32 nt, Homo Sapiens
ucugagcagggccuggccuuuccuccucuucc

SEQ ID NO: 180131 - RNA, 32 nt, Homo Sapiens
gcaaauacaucauauuauguuuucuccauauu

SEQ ID NO: 180132 - RNA, 32 nt, Homo Sapiens
uccagcuacuuguucacacguugggcacuagu

SEQ ID NO: 180133 - RNA, 32 nt, Homo Sapiens
ugaugggucgaggcggacgcgcggcugcguca

SEQ ID NO: 180134 - RNA, 32 nt, Homo Sapiens
gcggcugcugcagcugcaggaggagcccaggg

SEQ ID NO: 180135 - RNA, 32 nt, Homo Sapiens
caaggucugcaaaggcgcggcgcucggacuau

SEQ ID NO: 180136 - RNA, 32 nt, Homo Sapiens
cgccaccuccacgucugucuuguacaugacac

SEQ ID NO: 180137 - RNA, 32 nt, Homo Sapiens
cggccgggacucggaggcugccggcuggaggg

SEQ ID NO: 180138 - RNA, 32 nt, Homo Sapiens
uaagugaagauaagagagaauaugcaguucac

SEQ ID NO: 180139 - RNA, 32 nt, Homo Sapiens
ucaucucgcuucgaccccgccgccgccgccgc

SEQ ID NO: 180140 - RNA, 32 nt, Homo Sapiens
gccggugucugacuuccggcagcagcugcugg

SEQ ID NO: 180141 - RNA, 32 nt, Homo Sapiens
gcuuuacguuguucuuuuuuuuugagacggag

SEQ ID NO: 180142 - RNA, 32 nt, Homo Sapiens
ggagaguacagcucaacuuuguugaaacuuuu

SEQ ID NO: 180143 - RNA, 32 nt, Homo Sapiens
cauuauuaaggucuuauuuaauuucagagugu

SEQ ID NO: 180144 - RNA, 32 nt, Homo Sapiens
cugaucucggggauucgggugcggagcccuug

SEQ ID NO: 180145 - RNA, 32 nt, Homo Sapiens
gagcugcagcgaagguccucagucagccagau

SEQ ID NO: 180146 - RNA, 31 nt, Homo Sapiens
caacccauggcgcuaccaggcuccucacagg

SEQ ID NO: 180147 - RNA, 32 nt, Homo Sapiens
gaaguuguguucagcccggccccgcugcgccu

SEQ ID NO: 180148 - RNA, 32 nt, Homo Sapiens
accagccugagcaacauagugagacccugucu

SEQ ID NO: 180149 - RNA, 32 nt, Homo Sapiens
gauggugacaacacaaugaggccaaguagcaa

SEQ ID NO: 180150 - RNA, 32 nt, Homo Sapiens
cggccggguuugucaccagguccuggggucug

SEQ ID NO: 180151 - RNA, 32 nt, Homo Sapiens
ugguuuccaccuuauuuuccugcccccguuuu

SEQ ID NO: 180152 - RNA, 32 nt, Homo Sapiens
cuugauaaggcaguguuuuguauuuuaguucu

SEQ ID NO: 180153 - RNA, 32 nt, Homo Sapiens
auucacagcggguggggaaacacacacagcuc

SEQ ID NO: 180154 - RNA, 30 nt, Homo Sapiens
accugaacggagguugcgggucccugccga

SEQ ID NO: 180155 - RNA, 32 nt, Homo Sapiens
ugugaguggucagugggaagggggguguaaug

SEQ ID NO: 180156 - RNA, 32 nt, Homo Sapiens
gugcucugcuucuggcagcugaagaucccagu

SEQ ID NO: 180157 - RNA, 31 nt, Homo Sapiens
gcugauccucuccucucuugaguuaaccccu

SEQ ID NO: 180158 - RNA, 32 nt, Homo Sapiens
ggaagugcuauuucucauaggcuguuucuuga

SEQ ID NO: 180159 - RNA, 32 nt, Homo Sapiens
gaccuaaugauuuaugcaaucucuguaauuuc

SEQ ID NO: 180160 - RNA, 32 nt, Homo Sapiens
ucgcggggcccguuugcagagcccgcggcgcc

SEQ ID NO: 180161 - RNA, 32 nt, Homo Sapiens
aguggaggaaaagaacaaagaagcacgugucu

SEQ ID NO: 180162 - RNA, 32 nt, Homo Sapiens
uuugauaaacacugaagcuggagcuguuaaau

SEQ ID NO: 180163 - RNA, 32 nt, Homo Sapiens
cacucaauccucuuccucuccucuguggcuuu

SEQ ID NO: 180164 - RNA, 32 nt, Homo Sapiens
ucaggcacugacuggggugcuuccaagaggca

SEQ ID NO: 180165 - RNA, 32 nt, Homo Sapiens
uugauaaauuagauugaaaccauuccaguagg

SEQ ID NO: 180166 - RNA, 32 nt, Homo Sapiens
uccgcccucgcccugcgcagccgcccgagccc

SEQ ID NO: 180167 - RNA, 32 nt, Homo Sapiens
ucauccuuaaacaaaaugauccaccuaagauc

SEQ ID NO: 180168 - RNA, 32 nt, Homo Sapiens
ugcccugcaggcuguccuccccgccucucugc

SEQ ID NO: 180169 - RNA, 32 nt, Homo Sapiens
cuuaugacuuccugccuuccagcccucagauu

SEQ ID NO: 180170 - RNA, 32 nt, Homo Sapiens
cauguugccgcuaagugauauuucauaugugu

SEQ ID NO: 180171 - RNA, 32 nt, Homo Sapiens
auuuucauugaugaaauuguggugguuuacag

SEQ ID NO: 180172 - RNA, 32 nt, Homo Sapiens
uggaaagaugcauagaaagaguauaauguuuu

SEQ ID NO: 180173 - RNA, 32 nt, Homo Sapiens
cuguugagguagucauggguuccccuggccuc

SEQ ID NO: 180174 - RNA, 32 nt, Homo Sapiens
cugcuuacuuuuuauauagcaaaaugauuccc

SEQ ID NO: 180175 - RNA, 32 nt, Homo Sapiens
aagagcuugaguuagauugaaguagaaucagu

SEQ ID NO: 180176 - RNA, 32 nt, Homo Sapiens
cuucacucauuucucauagauagccaggauuu

SEQ ID NO: 180177 - RNA, 32 nt, Homo Sapiens
ccgcggccuccuccuccuccccguucccuuca

SEQ ID NO: 180178 - RNA, 32 nt, Homo Sapiens
gaacuuaaugaaauuuagcagauucuucuuuu

SEQ ID NO: 180179 - RNA, 32 nt, Homo Sapiens
auuguaaauaacaugcaaccuaaguguaauau

SEQ ID NO: 180180 - RNA, 32 nt, Homo Sapiens
uguguaugccuucagacuucucauggaaaaug

SEQ ID NO: 180181 - RNA, 32 nt, Homo Sapiens
ucuuugggcgucgacgaggccugguucugggu

SEQ ID NO: 180182 - RNA, 32 nt, Homo Sapiens
cccagguggugucaacacaacaucacacacag

SEQ ID NO: 180183 - RNA, 32 nt, Homo Sapiens
gagccccgcgcgcggcgucgcucauugcuaug

SEQ ID NO: 180184 - RNA, 32 nt, Homo Sapiens
gcggucgaugggacggggcgccgcggagcagg

SEQ ID NO: 180185 - RNA, 32 nt, Homo Sapiens
acgagggcaagagcuucaccuacgcggccuuc

SEQ ID NO: 180186 - RNA, 31 nt, Homo Sapiens
ggcaccauggcuuuccucuggcuccucuccu

SEQ ID NO: 180187 - RNA, 32 nt, Homo Sapiens
gguguuccugcucuagcuuccacgaugaggcg

SEQ ID NO: 180188 - RNA, 32 nt, Homo Sapiens
ggguggccuggaaggggagacagagguggagg

SEQ ID NO: 180189 - RNA, 32 nt, Homo Sapiens
ugaaaaugaugaaccuccgcugaaacggggag

SEQ ID NO: 180190 - RNA, 32 nt, Homo Sapiens
uaggcgacacgcggcgggcgcugaggcgggaa

SEQ ID NO: 180191 - RNA, 32 nt, Homo Sapiens
agcuuccccgucccgcccuccccgcuccgagg

SEQ ID NO: 180192 - RNA, 32 nt, Homo Sapiens
gauugugaggauuaaaugagugaauguguguc

SEQ ID NO: 180193 - RNA, 32 nt, Homo Sapiens
uucauauguuugauuuuaaaucaguguauaau

SEQ ID NO: 180194 - RNA, 32 nt, Homo Sapiens
aaacaaaggagauaaauuuaguauacauugua

SEQ ID NO: 180195 - RNA, 32 nt, Homo Sapiens
acucauguggcauugccuccaguucuggccac

SEQ ID NO: 180196 - RNA, 32 nt, Homo Sapiens
aguagcuucuccauggagccugcccagagcgg

SEQ ID NO: 180197 - RNA, 32 nt, Homo Sapiens
ccacagccugggccucccgggagggacacggc

SEQ ID NO: 180198 - RNA, 32 nt, Homo Sapiens
ccccagcaaagauuagggaaagagacuugacc

SEQ ID NO: 180199 - RNA, 32 nt, Homo Sapiens
cacauucuugguuuccucacuucugcuagaca

SEQ ID NO: 180200 - RNA, 32 nt, Homo Sapiens
ugggagcugucugggauguugauccuugagaa

SEQ ID NO: 180201 - RNA, 32 nt, Homo Sapiens
cacacacacacacucacacacacacacauaca

SEQ ID NO: 180202 - RNA, 32 nt, Homo Sapiens
cacacacacacacacacacacacacacauuca

SEQ ID NO: 180203 - RNA, 32 nt, Homo Sapiens
ggccccaguuucccucccgugaaugugaaguu

SEQ ID NO: 180204 - RNA, 32 nt, Homo Sapiens
aauuaacucgugcuaaggggucgggggcuuug

SEQ ID NO: 180205 - RNA, 32 nt, Homo Sapiens
uucagagggcucacuuugagacuugcugauac

SEQ ID NO: 180206 - RNA, 32 nt, Homo Sapiens
uaaggguagggaucuaaucuauucaucaguca

SEQ ID NO: 180207 - RNA, 32 nt, Homo Sapiens
ccaaaaagcuccuggggcguccaggccgcgcc

SEQ ID NO: 180208 - RNA, 32 nt, Homo Sapiens
cagagccucccucuccaaggcucuguugcucc

SEQ ID NO: 180209 - RNA, 32 nt, Homo Sapiens
ugucugccgcaacuacucgacucuguagcgug

SEQ ID NO: 180210 - RNA, 32 nt, Homo Sapiens
uugacuuugggguucaggugccccagcugcuu

SEQ ID NO: 180211 - RNA, 32 nt, Homo Sapiens
uuuagucauucuucuuuuaaauuuagaaaccc

SEQ ID NO: 180212 - RNA, 32 nt, Homo Sapiens
gacauguuugaguuccaggucuacgccuuagc

SEQ ID NO: 180213 - RNA, 32 nt, Homo Sapiens
ccagcacuucgggaggccaaggcggguggguc

SEQ ID NO: 180214 - RNA, 32 nt, Homo Sapiens
guuaggcaaguacaggcauuuuagagcaggau

SEQ ID NO: 180215 - RNA, 32 nt, Homo Sapiens
ggaaccguaucaggcauuccccugccucucac

SEQ ID NO: 180216 - RNA, 32 nt, Homo Sapiens
uuaaagaacaaagcuuccacagcgugaaaggg

SEQ ID NO: 180217 - RNA, 32 nt, Homo Sapiens
ucaggggcuuggauuucgugugccgcugccac

SEQ ID NO: 180218 - RNA, 32 nt, Homo Sapiens
cgugcugcgugcccucugggaagggugaagua

SEQ ID NO: 180219 - RNA, 32 nt, Homo Sapiens
uguuacagaaaagcggacuggauagacaaaac

SEQ ID NO: 180220 - RNA, 32 nt, Homo Sapiens
cacgugaucugccccaccuuggccucccaaag

SEQ ID NO: 180221 - RNA, 32 nt, Homo Sapiens
ccagauuuuuagacauauuuugaaagucuuuc

SEQ ID NO: 180222 - RNA, 32 nt, Homo Sapiens
auccacugacagauucaccucccccacauccc

SEQ ID NO: 180223 - RNA, 32 nt, Homo Sapiens
ccaccgcuucucugaccccacccaggcugcuu

SEQ ID NO: 180224 - RNA, 32 nt, Homo Sapiens
ugagccggcucugccuccugccugcaggcacc

SEQ ID NO: 180225 - RNA, 32 nt, Homo Sapiens
cuucuccguucuuuuuacaaucaucuuacacg

SEQ ID NO: 180226 - RNA, 32 nt, Homo Sapiens
gagcugcgcuggcccccaucaucugcuccaaa

SEQ ID NO: 180227 - RNA, 31 nt, Homo Sapiens
ccccaggagccccagccccagagugguuugc

SEQ ID NO: 180228 - RNA, 32 nt, Homo Sapiens
gaggccagagaauugcagaaacccaccuguaa

SEQ ID NO: 180229 - RNA, 32 nt, Homo Sapiens
gauuucauguuaaguguucuuaccacaguuuu

SEQ ID NO: 180230 - RNA, 32 nt, Homo Sapiens
aaugugguuucuauauuuugagauguuuuuuc

SEQ ID NO: 180231 - RNA, 32 nt, Homo Sapiens
acuccucccuucccucgcuguguacuuccuug

SEQ ID NO: 180232 - RNA, 31 nt, Homo Sapiens
uuaaaacgaaaauaaaguagcugcgauuggg

SEQ ID NO: 180233 - RNA, 32 nt, Homo Sapiens
gcgagcacacggucucuuccccugccccaacu

SEQ ID NO: 180234 - RNA, 32 nt, Homo Sapiens
uaaaagcccacuuuucugugaccagcagaccu

SEQ ID NO: 180235 - RNA, 32 nt, Homo Sapiens
agaccguucuggugggccgccgggcggugcug

SEQ ID NO: 180236 - RNA, 32 nt, Homo Sapiens
gacuuuagaguaccuuuugggacauagggccu

SEQ ID NO: 180237 - RNA, 32 nt, Homo Sapiens
aaacuagaaagaugaaaacuuuuacauuuuuc

SEQ ID NO: 180238 - RNA, 32 nt, Homo Sapiens
auauuuuuuguugcaaagugucucucuagaga

SEQ ID NO: 180239 - RNA, 32 nt, Homo Sapiens
caggugugugucccggugugaaaucgaggagg

SEQ ID NO: 180240 - RNA, 32 nt, Homo Sapiens
cccagaggugugaucagcaggaugcugaggaa

SEQ ID NO: 180241 - RNA, 32 nt, Homo Sapiens
auuuugaaggcacauuuuucugugauucauuu

SEQ ID NO: 180242 - RNA, 32 nt, Homo Sapiens
ugcuuguuuccauggcuccccucaccaaugaa

SEQ ID NO: 180243 - RNA, 32 nt, Homo Sapiens
cccuggcccucgcuuucagugcccagcccgga

SEQ ID NO: 180244 - RNA, 32 nt, Homo Sapiens
ggccgcgugugagcgcacuuugcaccuccuau

SEQ ID NO: 180245 - RNA, 32 nt, Homo Sapiens
gguuacauuacauccuuauuuuguuauccaau

SEQ ID NO: 180246 - RNA, 32 nt, Homo Sapiens
caaccuucaaagucagaugacaauguguaugc

SEQ ID NO: 180247 - RNA, 32 nt, Homo Sapiens
ugcacaauauucucugaugacaacuccaaagc

SEQ ID NO: 180248 - RNA, 32 nt, Homo Sapiens
gaugguuugucaauuuaaaauuccagaauuua

SEQ ID NO: 180249 - RNA, 32 nt, Homo Sapiens
ucuauuucugucucugaugcucuucuucugug

SEQ ID NO: 180250 - RNA, 32 nt, Homo Sapiens
acagaaaaauuugugccuaauguuaaccaaag

SEQ ID NO: 180251 - RNA, 32 nt, Homo Sapiens
gguggacucggccguggagguggccuuccugu

SEQ ID NO: 180252 - RNA, 32 nt, Homo Sapiens
uacuguuaugagugugaagggcuccugugggg

SEQ ID NO: 180253 - RNA, 32 nt, Homo Sapiens
aaaaagaaagagagucaagaauuuuguuggau

SEQ ID NO: 180254 - RNA, 32 nt, Homo Sapiens
cuagaaggcagagcaagaacuguuccaccagg

SEQ ID NO: 180255 - RNA, 32 nt, Homo Sapiens
ucucccgcauuccuccucccacuuggccaaga

SEQ ID NO: 180256 - RNA, 32 nt, Homo Sapiens
aguagcugggauuacagguuccugcuaccacg

SEQ ID NO: 180257 - RNA, 32 nt, Homo Sapiens
uucagccucuucuguuauguuuugucuugaau

SEQ ID NO: 180258 - RNA, 29 nt, Homo Sapiens
uccgcuccgguccgcucccgccgcccgag

SEQ ID NO: 180259 - RNA, 32 nt, Homo Sapiens
gaaguaucauguaaucacaguuuaaugacagu

SEQ ID NO: 180260 - RNA, 32 nt, Homo Sapiens
gcccucgcagaaggacuacgggccccggcgac

SEQ ID NO: 180261 - RNA, 31 nt, Homo Sapiens
gggcugaggcacugccuuucuaguaugugcc

SEQ ID NO: 180262 - RNA, 32 nt, Homo Sapiens
agaggggaaugggaaguucuugcuuaaugagc

SEQ ID NO: 180263 - RNA, 32 nt, Homo Sapiens
agaaugugaccgugcuuggagauaagaccuuu

SEQ ID NO: 180264 - RNA, 32 nt, Homo Sapiens
gguuuucccaagggaccugaaaacccuucucu

SEQ ID NO: 180265 - RNA, 32 nt, Homo Sapiens
ucccaguccucggccacccccagcucuggauc

SEQ ID NO: 180266 - RNA, 32 nt, Homo Sapiens
gggacugaggaauaaauugugcucuuugucau

SEQ ID NO: 180267 - RNA, 32 nt, Homo Sapiens
uggacccggaggaggaggagcggccgagcauc

SEQ ID NO: 180268 - RNA, 27 nt, Homo Sapiens
auuaucuuccucuccagccccccaacu

SEQ ID NO: 180269 - RNA, 32 nt, Homo Sapiens
caccgucccgccagugcagaucacgaacucau

SEQ ID NO: 180270 - RNA, 32 nt, Homo Sapiens
uguguguugugagccaggacgcaacuugccgg

SEQ ID NO: 180271 - RNA, 32 nt, Homo Sapiens
acagagguagagagcgcgcgagggagagagag

SEQ ID NO: 180272 - RNA, 32 nt, Homo Sapiens
gggacauacucacacuaacaaauuauuuguca

SEQ ID NO: 180273 - RNA, 32 nt, Homo Sapiens
ucuaugcauuuuacaguaacuuauuuuaugau

SEQ ID NO: 180274 - RNA, 32 nt, Homo Sapiens
ccuaccucacgugccgagacucucaugucaca

SEQ ID NO: 180275 - RNA, 32 nt, Homo Sapiens
ggcucagggccuggggcgggguccuggguaga

SEQ ID NO: 180276 - RNA, 32 nt, Homo Sapiens
uuuuuuugaucuucuguaaauggauuuauaaa

SEQ ID NO: 180277 - RNA, 32 nt, Homo Sapiens
uagcccuuuccuccuauucucuagcccuucua

SEQ ID NO: 180278 - RNA, 32 nt, Homo Sapiens
gccccauucuccucuggaaagccuucccgauc

SEQ ID NO: 180279 - RNA, 32 nt, Homo Sapiens
ggcgcggcccccggagaaagcggccgccucgg

SEQ ID NO: 180280 - RNA, 32 nt, Homo Sapiens
uugaggucaggagauugagaccagccuggcca

SEQ ID NO: 180281 - RNA, 32 nt, Homo Sapiens
cccaacacgaccacugccucccugcccccaca

SEQ ID NO: 180282 - RNA, 32 nt, Homo Sapiens
gcaaugugauagguguuucucuucuuauuuuc

SEQ ID NO: 180283 - RNA, 32 nt, Homo Sapiens
ugcuucaaaauaaguugacaugugauaauaag

SEQ ID NO: 180284 - RNA, 32 nt, Homo Sapiens
agagauggagcuccuuccuuuuccuguuucuu

SEQ ID NO: 180285 - RNA, 32 nt, Homo Sapiens
gaaacuaagcugggguccauggagccugcacc

SEQ ID NO: 180286 - RNA, 32 nt, Homo Sapiens
uuuucauuguuuacaaaagcccaacagaaacu

SEQ ID NO: 180287 - RNA, 32 nt, Homo Sapiens
auauaugguucacauaucuggaucugcuggau

SEQ ID NO: 180288 - RNA, 32 nt, Homo Sapiens
uaaucuccggaugagcugguggcaccgcugag

SEQ ID NO: 180289 - RNA, 32 nt, Homo Sapiens
guagacuuggaaggauucuguggccuguucga

SEQ ID NO: 180290 - RNA, 32 nt, Homo Sapiens
ucugugcggcccccagcagccaucucaaccac

SEQ ID NO: 180291 - RNA, 32 nt, Homo Sapiens
cagcgagugucguggugcaggcaggcccugug

SEQ ID NO: 180292 - RNA, 32 nt, Homo Sapiens
uguuagauuuuggcacccguuuucucagcauu

SEQ ID NO: 180293 - RNA, 32 nt, Homo Sapiens
uuucuuuaauuucaaaagcccugcagacauag

SEQ ID NO: 180294 - RNA, 32 nt, Homo Sapiens
agcagacucuccagcccucuuccuccuuccuc

SEQ ID NO: 180295 - RNA, 32 nt, Homo Sapiens
gucuuaggagcacuuaaaagauaccuuggcau

SEQ ID NO: 180296 - RNA, 32 nt, Homo Sapiens
ucugccuguugcacaucuuguaaaauuggaca

SEQ ID NO: 180297 - RNA, 32 nt, Homo Sapiens
cgggucauagagcuaccguauuuucuaggaca

SEQ ID NO: 180298 - RNA, 32 nt, Homo Sapiens
auuuuuaaauguuuacauauguuuacauguuu

SEQ ID NO: 180299 - RNA, 32 nt, Homo Sapiens
ugacuuuuauaaagccuggacuucuacuuuau

SEQ ID NO: 180300 - RNA, 27 nt, Homo Sapiens
cccuuugguuauuucagcccccaucac

SEQ ID NO: 180301 - RNA, 32 nt, Homo Sapiens
gggcagggggacggugggggagcccucgcccc

SEQ ID NO: 180302 - RNA, 32 nt, Homo Sapiens
guuggaagugugacuucuuacacauaaagcac

SEQ ID NO: 180303 - RNA, 32 nt, Homo Sapiens
aagguauuuguaauaagguuccacacccagcu

SEQ ID NO: 180304 - RNA, 32 nt, Homo Sapiens
ccugacucaaccccagccuggggcuuugugcu

SEQ ID NO: 180305 - RNA, 32 nt, Homo Sapiens
uggaacgccguugccaccgaggaggcggcggc

SEQ ID NO: 180306 - RNA, 32 nt, Homo Sapiens
agacaccuggaaagucucuuauguuugccguu

SEQ ID NO: 180307 - RNA, 32 nt, Homo Sapiens
ucucaaauuuguaaguuuuuauacauccuuuc

SEQ ID NO: 180308 - RNA, 32 nt, Homo Sapiens
caagaaaugcaaagcugguugaggcuuuauuc

SEQ ID NO: 180309 - RNA, 32 nt, Homo Sapiens
uccuccccugaccccuccuuccacccgccgag

SEQ ID NO: 180310 - RNA, 32 nt, Homo Sapiens
gagaacggccgagcuuggggaccgcccggcgc

SEQ ID NO: 180311 - RNA, 32 nt, Homo Sapiens
uagggagggggcuguggcugcugggguccgag

SEQ ID NO: 180312 - RNA, 32 nt, Homo Sapiens
aaugugggagaaaaucgcugcugcugagaugg

SEQ ID NO: 180313 - RNA, 32 nt, Homo Sapiens
ugcaaaaucuugagaaucaaucaauaaagaaa

SEQ ID NO: 180314 - RNA, 32 nt, Homo Sapiens
cggaggcgaagccaggaagcgcugcuucugca

SEQ ID NO: 180315 - RNA, 32 nt, Homo Sapiens
cgcggugaccccagccccagccggcgcggagc

SEQ ID NO: 180316 - RNA, 29 nt, Homo Sapiens
cccauccggcgacagaggacagccagaag

SEQ ID NO: 180317 - RNA, 32 nt, Homo Sapiens
augguacaaaccaaaugguaaaaucccaaguc

SEQ ID NO: 180318 - RNA, 32 nt, Homo Sapiens
uaaagugaagaaugaaaaauauguaagagucu

SEQ ID NO: 180319 - RNA, 32 nt, Homo Sapiens
aaaguauuuuuaagucucaccaaaaaggugga

SEQ ID NO: 180320 - RNA, 32 nt, Homo Sapiens
uugcaguguuuguuucuuauuuaauaggcuuu

SEQ ID NO: 180321 - RNA, 32 nt, Homo Sapiens
auaauugucauugauucauauuuaguaccugu

SEQ ID NO: 180322 - RNA, 32 nt, Homo Sapiens
uaccucucuuguauucuaaaauaaaaauuacu

SEQ ID NO: 180323 - RNA, 32 nt, Homo Sapiens
caguaggggcuaaugacccaccccugcuacau

SEQ ID NO: 180324 - RNA, 32 nt, Homo Sapiens
gguggccagguggccuggccagggcuggaguc

SEQ ID NO: 180325 - RNA, 32 nt, Homo Sapiens
aaaggguaaaauaaaauuuucuggagaggaac

SEQ ID NO: 180326 - RNA, 32 nt, Homo Sapiens
agucucccggugccgccgcggcgucagagaca

SEQ ID NO: 180327 - RNA, 32 nt, Homo Sapiens
guauuuauuccauauuuauauggucuacuucc

SEQ ID NO: 180328 - RNA, 32 nt, Homo Sapiens
uggguuugaucuuuuguuguaccugaugacag

SEQ ID NO: 180329 - RNA, 32 nt, Homo Sapiens
cucauugcaauaagugaaaugcugcucuaggu

SEQ ID NO: 180330 - RNA, 32 nt, Homo Sapiens
uuuuuguguuuuucuuuuuuugucuuauguug

SEQ ID NO: 180331 - RNA, 32 nt, Homo Sapiens
uucuuuuguauaauucaauacaugaucaucaa

SEQ ID NO: 180332 - RNA, 32 nt, Homo Sapiens
guccagcaguugcuugaaaugcuuugccgaau

SEQ ID NO: 180333 - RNA, 32 nt, Homo Sapiens
uucaucuuuacauuucuuuguacaucuguaca

SEQ ID NO: 180334 - RNA, 32 nt, Homo Sapiens
ccaggguccagggaggggcgccugcugagcac

SEQ ID NO: 180335 - RNA, 32 nt, Homo Sapiens
ccccacagaagccccaagaggccagggacacu

SEQ ID NO: 180336 - RNA, 32 nt, Homo Sapiens
agcauugcuuuccuugauugucucucuccuuc

SEQ ID NO: 180337 - RNA, 32 nt, Homo Sapiens
gguaucaauauguuuucaaugccugaugaccu

SEQ ID NO: 180338 - RNA, 32 nt, Homo Sapiens
caaaggcuuuuggaccauuuagcaucaugagc

SEQ ID NO: 180339 - RNA, 32 nt, Homo Sapiens
gcuguuuuugaagcggggcccgggccccaccg

SEQ ID NO: 180340 - RNA, 32 nt, Homo Sapiens
ccaaaccccacuuggcuacucuggccuggcuu

SEQ ID NO: 180341 - RNA, 32 nt, Homo Sapiens
agaacaacaguguggaauaguucugaauuaug

SEQ ID NO: 180342 - RNA, 32 nt, Homo Sapiens
aggaggcugugccuucauucggucacgccccg

SEQ ID NO: 180343 - RNA, 31 nt, Homo Sapiens
uagcuguggccuccccugccccugcuccagc

SEQ ID NO: 180344 - RNA, 32 nt, Homo Sapiens
acuacaugugggaaaacagggauuaacgaggg

SEQ ID NO: 180345 - RNA, 32 nt, Homo Sapiens
acaaugaggcuugcagugauguguuugaauuu

SEQ ID NO: 180346 - RNA, 32 nt, Homo Sapiens
augauuugauaaaagcguaacagacucugcuc

SEQ ID NO: 180347 - RNA, 32 nt, Homo Sapiens
auauaugccacauuuucuuaaucuacucuguu

SEQ ID NO: 180348 - RNA, 32 nt, Homo Sapiens
uguuccuaaauauauaauaauaaaaugauuga

SEQ ID NO: 180349 - RNA, 32 nt, Homo Sapiens
ugccuccauuuaugaaauuugacccugaagug

SEQ ID NO: 180350 - RNA, 32 nt, Homo Sapiens
cugcugcugaggcggcucucgguggaagaguc

SEQ ID NO: 180351 - RNA, 32 nt, Homo Sapiens
gcaucuagcauuagguauaucucccaaugcua

SEQ ID NO: 180352 - RNA, 32 nt, Homo Sapiens
caucuacuuaggaccccucuuugcccagacua

SEQ ID NO: 180353 - RNA, 32 nt, Homo Sapiens
uucgcgucaugccgagccucccggccccgccg

SEQ ID NO: 180354 - RNA, 32 nt, Homo Sapiens
cugcgcugcaucggacucgacgcccgcuggug

SEQ ID NO: 180355 - RNA, 32 nt, Homo Sapiens
gcucuugacacucuaaaccccuggaccaucug

SEQ ID NO: 180356 - RNA, 32 nt, Homo Sapiens
uggcggccugcagcgugagcugugggagaggg

SEQ ID NO: 180357 - RNA, 32 nt, Homo Sapiens
ggacauggaucuuuggggggaccguuauucag

SEQ ID NO: 180358 - RNA, 32 nt, Homo Sapiens
ggguguaguucuuuuccacauucugugucauc

SEQ ID NO: 180359 - RNA, 32 nt, Homo Sapiens
auaaaucaaauuagugguagucugguguaaaa

SEQ ID NO: 180360 - RNA, 32 nt, Homo Sapiens
aucagcgccccgaggcagaggccggagggcgc

SEQ ID NO: 180361 - RNA, 32 nt, Homo Sapiens
guaaauaaaaauuuuaaacaguaaaauaaaag

SEQ ID NO: 180362 - RNA, 32 nt, Homo Sapiens
gcugacuucagccuggucaugcuugcucugcc

SEQ ID NO: 180363 - RNA, 32 nt, Homo Sapiens
uggcuagaaauccugaguuuucaacuguauau

SEQ ID NO: 180364 - RNA, 32 nt, Homo Sapiens
caaggacggccuucaacugaaaagacucagug

SEQ ID NO: 180365 - RNA, 32 nt, Homo Sapiens
uguucuauaugauugcuauuaaccuuauguaa

SEQ ID NO: 180366 - RNA, 32 nt, Homo Sapiens
ggcggcaccccggugcuccccgcggcucucgg

SEQ ID NO: 180367 - RNA, 32 nt, Homo Sapiens
cugacagauuccaacagaaguguauuuaaauu

SEQ ID NO: 180368 - RNA, 32 nt, Homo Sapiens
guucccgugcgcgccggagccugcuguggccu

SEQ ID NO: 180369 - RNA, 32 nt, Homo Sapiens
gccaaaaauaaucagggauuuuaaauugggca

SEQ ID NO: 180370 - RNA, 32 nt, Homo Sapiens
ucaugcgcaacugcguccgcugcugggccauu

SEQ ID NO: 180371 - RNA, 32 nt, Homo Sapiens
auccaggcgccuccuccaccgaaacgcucaug

SEQ ID NO: 180372 - RNA, 32 nt, Homo Sapiens
gagcagcccccaggcgggggaccgccuuggag

SEQ ID NO: 180373 - RNA, 32 nt, Homo Sapiens
gagagccuggugcugcugcugcuguggcguga

SEQ ID NO: 180374 - RNA, 29 nt, Homo Sapiens
gcuucauaaaguugacaucuuucgucaug

SEQ ID NO: 180375 - RNA, 32 nt, Homo Sapiens
gaccuaggcucauggaggaagccaaagauuuc

SEQ ID NO: 180376 - RNA, 32 nt, Homo Sapiens
uggagcacuugcugacaagccuugcaaccacc

SEQ ID NO: 180377 - RNA, 32 nt, Homo Sapiens
agacacacuccagccugaucucagugaggguc

SEQ ID NO: 180378 - RNA, 32 nt, Homo Sapiens
agaaauuaaaacuacugagcagcaucuggagg

SEQ ID NO: 180379 - RNA, 32 nt, Homo Sapiens
ggcgaaugagcagguccuguagcuuuacaaau

SEQ ID NO: 180380 - RNA, 32 nt, Homo Sapiens
gucucuguugcccaagcuugagggcaguggug

SEQ ID NO: 180381 - RNA, 32 nt, Homo Sapiens
acccucacggaggaggagcugcugcuggaagg

SEQ ID NO: 180382 - RNA, 32 nt, Homo Sapiens
uggggcgcuacggugccuggagcugggcgguc

SEQ ID NO: 180383 - RNA, 32 nt, Homo Sapiens
gcugugggugaggacggcucuagcuaggugag

SEQ ID NO: 180384 - RNA, 32 nt, Homo Sapiens
gggaaguucugcgcaugcguggcaccauuucc

SEQ ID NO: 180385 - RNA, 32 nt, Homo Sapiens
cuuauggaagacauaccugcaauggaagcugu

SEQ ID NO: 180386 - RNA, 32 nt, Homo Sapiens
uccugccaccccacccuuccucuguguguuau

SEQ ID NO: 180387 - RNA, 32 nt, Homo Sapiens
acugaggaggcgauccccgagcaggaggugga

SEQ ID NO: 180388 - RNA, 32 nt, Homo Sapiens
auuccccauacacccaaggguaauaaacgugu

SEQ ID NO: 180389 - RNA, 32 nt, Homo Sapiens
ggcucauuuuuguauuuuuaguagugacagcg

SEQ ID NO: 180390 - RNA, 32 nt, Homo Sapiens
cgcggccaaggcgggggcgcuggacgguggcg

SEQ ID NO: 180391 - RNA, 32 nt, Homo Sapiens
auggauaauuuucauagcugccuaucagaauu

SEQ ID NO: 180392 - RNA, 32 nt, Homo Sapiens
gcugguacucccagcccugccaugccugagcc

SEQ ID NO: 180393 - RNA, 32 nt, Homo Sapiens
uccuugcccuagaugagcccagcccuguucug

SEQ ID NO: 180394 - RNA, 32 nt, Homo Sapiens
aacacaguuucccaaagaaaaaugggcaccaa

SEQ ID NO: 180395 - RNA, 32 nt, Homo Sapiens
uccuccagcaccauagagaggcgcuagagccc

SEQ ID NO: 180396 - RNA, 32 nt, Homo Sapiens
gagccucggggccggagucgcgugggcgcugg

SEQ ID NO: 180397 - RNA, 32 nt, Homo Sapiens
gcaugacaaaaauaacacuguuggcacuuaua

SEQ ID NO: 180398 - RNA, 31 nt, Homo Sapiens
auauacacaucuauguauggauaugugugua

SEQ ID NO: 180399 - RNA, 32 nt, Homo Sapiens
augauggcaguccagcagcaacucccugugcu

SEQ ID NO: 180400 - RNA, 32 nt, Homo Sapiens
cucgccccgccaugcuccugcugcuggggcug

SEQ ID NO: 180401 - RNA, 32 nt, Homo Sapiens
acuccaacauuaccggaucuggauuggggagg

SEQ ID NO: 180402 - RNA, 32 nt, Homo Sapiens
caggccaggcguucccaccucuccuccuuggg

SEQ ID NO: 180403 - RNA, 32 nt, Homo Sapiens
auuugugcaacauuacucuuugaaauaaaaau

SEQ ID NO: 180404 - RNA, 32 nt, Homo Sapiens
ggaauuaguucuacaaaaaucagcugaaauca

SEQ ID NO: 180405 - RNA, 32 nt, Homo Sapiens
gaacaggacccgucgccaugggccgugugauc

SEQ ID NO: 180406 - RNA, 32 nt, Homo Sapiens
guaauuaaauuaauauuauaaaucuaugagag

SEQ ID NO: 180407 - RNA, 32 nt, Homo Sapiens
aauggacaauacuauuggucgauuuucuucag

SEQ ID NO: 180408 - RNA, 32 nt, Homo Sapiens
cgccugcaaccucacugugcccgccccgcacc

SEQ ID NO: 180409 - RNA, 32 nt, Homo Sapiens
ggugugcaggagcgcagcgcgcggcgagcgca

SEQ ID NO: 180410 - RNA, 32 nt, Homo Sapiens
aagaggagagaauaugaugaagagacuguucg

SEQ ID NO: 180411 - RNA, 32 nt, Homo Sapiens
uguccucccacagucccgcuguuuccugugca

SEQ ID NO: 180412 - RNA, 32 nt, Homo Sapiens
accccaggcaaggcuuggggcccccgucugcu

SEQ ID NO: 180413 - RNA, 32 nt, Homo Sapiens
uggcacagaagcuaggaugucaccuuaaaggg

SEQ ID NO: 180414 - RNA, 32 nt, Homo Sapiens
ugccucaguugcugcuuucuccucuaaaucuu

SEQ ID NO: 180415 - RNA, 32 nt, Homo Sapiens
gccagaggagaugcuuaccaggccugagaccu

SEQ ID NO: 180416 - RNA, 32 nt, Homo Sapiens
uucagcacucccuguccaguguugucauguca

SEQ ID NO: 180417 - RNA, 32 nt, Homo Sapiens
caagucggggccugggacacuucccugggccu

SEQ ID NO: 180418 - RNA, 32 nt, Homo Sapiens
gguuuguuugacucccggauaugagaauauca

SEQ ID NO: 180419 - RNA, 30 nt, Homo Sapiens
ugacuggccguucauaaaguuuugaggaca

SEQ ID NO: 180420 - RNA, 32 nt, Homo Sapiens
cuacauuuaugaugaagauccugagcggaggu

SEQ ID NO: 180421 - RNA, 32 nt, Homo Sapiens
uaaaauuauagcuaugugcagcugcacaacac

SEQ ID NO: 180422 - RNA, 32 nt, Homo Sapiens
cugauagcugguguucaugaaauauuuuaccu

SEQ ID NO: 180423 - RNA, 32 nt, Homo Sapiens
uagagaaaacaaacaaacaaacaaacuggguc

SEQ ID NO: 180424 - RNA, 32 nt, Homo Sapiens
gccaaagcauguucaaccaacgcugucggcag

SEQ ID NO: 180425 - RNA, 32 nt, Homo Sapiens
ugacauauauagaaacauaaaucaggcuagag

SEQ ID NO: 180426 - RNA, 32 nt, Homo Sapiens
uuuacuuccuuuuuuuuuuuuaagaaaggaaa

SEQ ID NO: 180427 - RNA, 32 nt, Homo Sapiens
uucaguuucaaaucaaaccuugaaagacauag

SEQ ID NO: 180428 - RNA, 32 nt, Homo Sapiens
gcuuuccgcccggcucgccgcuccaugcagcc

SEQ ID NO: 180429 - RNA, 32 nt, Homo Sapiens
caaugccugcucucuucucaccacauucaccu

SEQ ID NO: 180430 - RNA, 32 nt, Homo Sapiens
aauaucuucuacaaagaucacuucccagucca

SEQ ID NO: 180431 - RNA, 30 nt, Homo Sapiens
cgcggaggucucggcggccgcugcgggagc

SEQ ID NO: 180432 - RNA, 32 nt, Homo Sapiens
aaggaccccgugagccagcagagagccauaaa

SEQ ID NO: 180433 - RNA, 32 nt, Homo Sapiens
acaugagcucuuaguuacaaucucuuagugcu

SEQ ID NO: 180434 - RNA, 32 nt, Homo Sapiens
cccuuauauauuaaaaggcaacaggaauuaca

SEQ ID NO: 180435 - RNA, 32 nt, Homo Sapiens
aaaaguggcauggugcguggggccuggccccc

SEQ ID NO: 180436 - RNA, 32 nt, Homo Sapiens
caggaaauggugagacaaagggcgcuggcugg

SEQ ID NO: 180437 - RNA, 28 nt, Homo Sapiens
aauucaguggcuaaauugaggacauccc

SEQ ID NO: 180438 - RNA, 32 nt, Homo Sapiens
gcgucuggguccguuggggcagaaccauggag

SEQ ID NO: 180439 - RNA, 32 nt, Homo Sapiens
gaauccuaaggguauccuuccagagacggcgu

SEQ ID NO: 180440 - RNA, 32 nt, Homo Sapiens
ccacggcauccaccaugaucuuaagacacauc

SEQ ID NO: 180441 - RNA, 32 nt, Homo Sapiens
cuuuaccccucccccggaaccuccuuuuuuac

SEQ ID NO: 180442 - RNA, 32 nt, Homo Sapiens
ccgaauccucgugguuuaaauagacuuucagu

SEQ ID NO: 180443 - RNA, 32 nt, Homo Sapiens
aaacuagaugaccucauuaaccgaugcuuuac

SEQ ID NO: 180444 - RNA, 32 nt, Homo Sapiens
guauuucuaguuuuauacuaaaaaucaauugg

SEQ ID NO: 180445 - RNA, 32 nt, Homo Sapiens
auuugaguuauuuuuauuguaugcccggaguu

SEQ ID NO: 180446 - RNA, 32 nt, Homo Sapiens
agauaagcaugcugaggcccaggcagacugac

SEQ ID NO: 180447 - RNA, 32 nt, Homo Sapiens
ugggacgcugcggccuggccuucaggccacug

SEQ ID NO: 180448 - RNA, 32 nt, Homo Sapiens
uuuagcaauuuaauggcuacauuuuagagucu

SEQ ID NO: 180449 - RNA, 32 nt, Homo Sapiens
uggcuuaagauuaaacaaaaacauuuuucaag

SEQ ID NO: 180450 - RNA, 32 nt, Homo Sapiens
gcuguguacauuucuucaguccuuagcuuccu

SEQ ID NO: 180451 - RNA, 30 nt, Homo Sapiens
cuugguagggcaggagacgcagcguggagc

SEQ ID NO: 180452 - RNA, 32 nt, Homo Sapiens
gggauuuagggccaggucagaguuucuuuuca

SEQ ID NO: 180453 - RNA, 32 nt, Homo Sapiens
caagucuuacuccccaggagcucccagggccc

SEQ ID NO: 180454 - RNA, 32 nt, Homo Sapiens
ccucagcauauacucuucuccuccgaucucac

SEQ ID NO: 180455 - RNA, 32 nt, Homo Sapiens
guccccuaagucccuuucucaguuugcaauaa

SEQ ID NO: 180456 - RNA, 30 nt, Homo Sapiens
caccauucuguagccacccauccuuugccu

SEQ ID NO: 180457 - RNA, 32 nt, Homo Sapiens
ccaggacuuggucuucaaccaccauuaccccu

SEQ ID NO: 180458 - RNA, 32 nt, Homo Sapiens
guguguacagaugaagucaguggcuugucugu

SEQ ID NO: 180459 - RNA, 32 nt, Homo Sapiens
uugggaccuuggagugggcacuagaugaagca

SEQ ID NO: 180460 - RNA, 32 nt, Homo Sapiens
accuaaauguacuucaaugucuuuuuaaguca

SEQ ID NO: 180461 - RNA, 32 nt, Homo Sapiens
cucuuuguggggaagaggggcuggggcaaugc

SEQ ID NO: 180462 - RNA, 32 nt, Homo Sapiens
uaauguuucuucauugauuauggaacuuuugu

SEQ ID NO: 180463 - RNA, 32 nt, Homo Sapiens
cagggaggggagagaugggcgaccccgcccca

SEQ ID NO: 180464 - RNA, 32 nt, Homo Sapiens
uagccgauggaaaauaccuaauuguggaugau

SEQ ID NO: 180465 - RNA, 32 nt, Homo Sapiens
aaaccuuugaagacauaaaaaaaaccugucug

SEQ ID NO: 180466 - RNA, 32 nt, Homo Sapiens
uggacuagcaaaaccaaugccccaguugaguu

SEQ ID NO: 180467 - RNA, 32 nt, Homo Sapiens
cuacuuuguugaugaaagaaaacaaguggaaa

SEQ ID NO: 180468 - RNA, 32 nt, Homo Sapiens
gauuuauugguaggacauuuaugugccagaga

SEQ ID NO: 180469 - RNA, 32 nt, Homo Sapiens
cgcagcaggaggaggcccgagccugcgccagg

SEQ ID NO: 180470 - RNA, 32 nt, Homo Sapiens
uccccuccuuggaggugcagugaugaugggag

SEQ ID NO: 180471 - RNA, 32 nt, Homo Sapiens
auugaaauauagaauucccaggcaccuccaac

SEQ ID NO: 180472 - RNA, 32 nt, Homo Sapiens
gcucugauaccauuggguuaaggggcagauug

SEQ ID NO: 180473 - RNA, 32 nt, Homo Sapiens
cuaggacuuaccaagcuguagggccagggcug

SEQ ID NO: 180474 - RNA, 32 nt, Homo Sapiens
uaugugcuuauuguuuuaauucucaucacucu

SEQ ID NO: 180475 - RNA, 32 nt, Homo Sapiens
aaaaguuuacauaaguuuuuuuuaaccccuag

SEQ ID NO: 180476 - RNA, 32 nt, Homo Sapiens
cacagcacuccagccugggugacagagcaaga

SEQ ID NO: 180477 - RNA, 32 nt, Homo Sapiens
ggucucaccauguuggccaggcuggucucaca

SEQ ID NO: 180478 - RNA, 32 nt, Homo Sapiens
cugacacccaaguucauauugcucagaaacag

SEQ ID NO: 180479 - RNA, 32 nt, Homo Sapiens
gugcaagguucagauccauguagcuaaguauu

SEQ ID NO: 180480 - RNA, 32 nt, Homo Sapiens
aacuccgagaguccuugauucuggagaggcac

SEQ ID NO: 180481 - RNA, 32 nt, Homo Sapiens
uauagcuaaaauuguauguaaucaauaaaacc

SEQ ID NO: 180482 - RNA, 31 nt, Homo Sapiens
aggcaggagccccgcccucccaggcacagcu

SEQ ID NO: 180483 - RNA, 32 nt, Homo Sapiens
gggaggcggcggugacaacgacggcgguggug

SEQ ID NO: 180484 - RNA, 32 nt, Homo Sapiens
gugauguauguggcaaggucuuuaaucggaag

SEQ ID NO: 180485 - RNA, 31 nt, Homo Sapiens
cuuuccacacccucaucagauucaucuccac

SEQ ID NO: 180486 - RNA, 32 nt, Homo Sapiens
cccugcucucccacccaagugcccccacugag

SEQ ID NO: 180487 - RNA, 32 nt, Homo Sapiens
ccagugccagguggacagccaguguccuggcc

SEQ ID NO: 180488 - RNA, 32 nt, Homo Sapiens
cggccggagaacgaaacccuggggucgucuga

SEQ ID NO: 180489 - RNA, 32 nt, Homo Sapiens
cugcaagugaggugugucacaaugagauugaa

SEQ ID NO: 180490 - RNA, 27 nt, Homo Sapiens
ucauccuccuucuucagggacuugggu

SEQ ID NO: 180491 - RNA, 30 nt, Homo Sapiens
gagcgggaagauggcggcggcgcaggaggc

SEQ ID NO: 180492 - RNA, 32 nt, Homo Sapiens
gccaguuaaacuaauauuuuuguuuguugcuu

SEQ ID NO: 180493 - RNA, 30 nt, Homo Sapiens
gcuaagaaggggcaguuugagucugagcua

SEQ ID NO: 180494 - RNA, 32 nt, Homo Sapiens
cagaugcaaccucacuaugguaugcuggccag

SEQ ID NO: 180495 - RNA, 32 nt, Homo Sapiens
gggccugagaaccuuggugcccgcaacaucug

SEQ ID NO: 180496 - RNA, 32 nt, Homo Sapiens
acaaccagccagggccugugcugcuggagcgg

SEQ ID NO: 180497 - RNA, 32 nt, Homo Sapiens
gcauaaaugcaaauguaaaguaaagcugaaau

SEQ ID NO: 180498 - RNA, 32 nt, Homo Sapiens
acagauuucuauuuauccauagauagguaucu

SEQ ID NO: 180499 - RNA, 32 nt, Homo Sapiens
uauuugcacaacuuuuugggaauacuucuauu

SEQ ID NO: 180500 - RNA, 32 nt, Homo Sapiens
gccgggcucccgcuccaggccucgcuccccug

SEQ ID NO: 180501 - RNA, 32 nt, Homo Sapiens
aagugucugacugucuuggugauccuuaaguu

SEQ ID NO: 180502 - RNA, 32 nt, Homo Sapiens
ucccuccgcgcccucccucccccucgagccgc

SEQ ID NO: 180503 - RNA, 32 nt, Homo Sapiens
uggcaacauauuuuaaaugaaaacacuaaaac

SEQ ID NO: 180504 - RNA, 32 nt, Homo Sapiens
gagcagcccgggccagccuucuccuguaggga

SEQ ID NO: 180505 - RNA, 32 nt, Homo Sapiens
auuaguuuuuaaaaucaguacuuuuuaaaugg

SEQ ID NO: 180506 - RNA, 32 nt, Homo Sapiens
ccgccucugcacguccgccccggagcccgcac

SEQ ID NO: 180507 - RNA, 32 nt, Homo Sapiens
ggacucugagggugggggagagagaggcgugg

SEQ ID NO: 180508 - RNA, 32 nt, Homo Sapiens
uacugucgcucuugauguuccugauacaggua

SEQ ID NO: 180509 - RNA, 32 nt, Homo Sapiens
caggggauuuaaaagaguuuucugcuuugaga

SEQ ID NO: 180510 - RNA, 32 nt, Homo Sapiens
ggagcaaccacccgagcagacggaguacacgg

SEQ ID NO: 180511 - RNA, 32 nt, Homo Sapiens
ccggccugccaggaggacccagggcucuguaa

SEQ ID NO: 180512 - RNA, 32 nt, Homo Sapiens
ccgggggaggacccgcccuuugccggacccuc

SEQ ID NO: 180513 - RNA, 32 nt, Homo Sapiens
acuccagugucuguuauucccuucuuuguguu

SEQ ID NO: 180514 - RNA, 32 nt, Homo Sapiens
cagagcugugcucuccuucuuauggggcaacc

SEQ ID NO: 180515 - RNA, 32 nt, Homo Sapiens
ccucagcucaggugauaugccugccuuggccu

SEQ ID NO: 180516 - RNA, 32 nt, Homo Sapiens
acugguuugcauuaguuuauguuuccaugcca

SEQ ID NO: 180517 - RNA, 32 nt, Homo Sapiens
aguggcuuuguaugcaaauaugcuguguugga

SEQ ID NO: 180518 - RNA, 32 nt, Homo Sapiens
ugggaggaggaccccugggaugcccugugagc

SEQ ID NO: 180519 - RNA, 32 nt, Homo Sapiens
cccagacccagcuccggagcccacaggcgugg

SEQ ID NO: 180520 - RNA, 32 nt, Homo Sapiens
uuuuuaacgaaauggugacuaauguucuggaa

SEQ ID NO: 180521 - RNA, 32 nt, Homo Sapiens
ccuuugucuccuggcagccagcuccucccuug

SEQ ID NO: 180522 - RNA, 32 nt, Homo Sapiens
agcugcucuaagcccaggaucucuuuccccaa

SEQ ID NO: 180523 - RNA, 32 nt, Homo Sapiens
uuccacugcgccccgcgcucugcgguccucgg

SEQ ID NO: 180524 - RNA, 32 nt, Homo Sapiens
ucaauggccuucgggggcgggccagcggccgc

SEQ ID NO: 180525 - RNA, 32 nt, Homo Sapiens
agcucagugucugugcuaugacuugcucucau

SEQ ID NO: 180526 - RNA, 32 nt, Homo Sapiens
agccauggggaauggagggucuggguccaguu

SEQ ID NO: 180527 - RNA, 32 nt, Homo Sapiens
auuuuagauaaugccucacaucucuguccccc

SEQ ID NO: 180528 - RNA, 32 nt, Homo Sapiens
augacccccuggaaggguugcugcuggccuua

SEQ ID NO: 180529 - RNA, 32 nt, Homo Sapiens
gccauaaaacauuaagaaaaucauauugcuuc

SEQ ID NO: 180530 - RNA, 32 nt, Homo Sapiens
auucauguuuuucauuugauacuuuuaauuua

SEQ ID NO: 180531 - RNA, 32 nt, Homo Sapiens
agaaguaccaugauuucuuuuaaacugaucua

SEQ ID NO: 180532 - RNA, 31 nt, Homo Sapiens
aaugggguuucacuguguuagccaggauggu

SEQ ID NO: 180533 - RNA, 32 nt, Homo Sapiens
cucccucccaacuuauacgaccugauuuccuu

SEQ ID NO: 180534 - RNA, 32 nt, Homo Sapiens
ggagcaccaaccccugcucggccccguaccag

SEQ ID NO: 180535 - RNA, 32 nt, Homo Sapiens
aguuucuguaucuauuuuacagaugaggaaac

SEQ ID NO: 180536 - RNA, 32 nt, Homo Sapiens
ugaaggcugaguucuagagaucgggucggcuu

SEQ ID NO: 180537 - RNA, 32 nt, Homo Sapiens
ucaugauuacaauuuuuuccuuugcagaugcc

SEQ ID NO: 180538 - RNA, 32 nt, Homo Sapiens
cauuguuucuuacuaguuucuugaauuguucu

SEQ ID NO: 180539 - RNA, 32 nt, Homo Sapiens
uccaugugaaaauaaaauaugaggaaaaguuu

SEQ ID NO: 180540 - RNA, 32 nt, Homo Sapiens
gcccacgacuccccggaccccgacccccgauc

SEQ ID NO: 180541 - RNA, 32 nt, Homo Sapiens
ggauauugauaagggguacugaaugguaauaa

SEQ ID NO: 180542 - RNA, 32 nt, Homo Sapiens
ugcaucccaacccccaaccccugcccacagaa

SEQ ID NO: 180543 - RNA, 32 nt, Homo Sapiens
gcgagggccccggcacggacaagggccacugc

SEQ ID NO: 180544 - RNA, 32 nt, Homo Sapiens
ugcagccuuaaccuccacggccuucgauacuu

SEQ ID NO: 180545 - RNA, 32 nt, Homo Sapiens
auggaauacuauucagccuucaaaggugguaa

SEQ ID NO: 180546 - RNA, 30 nt, Homo Sapiens
gggagagcuguguccccgccggcgcccccc

SEQ ID NO: 180547 - RNA, 32 nt, Homo Sapiens
ugcucuugucagcuucguuuuaggcguagcau

SEQ ID NO: 180548 - RNA, 32 nt, Homo Sapiens
cggggggagggaggagggcgugggcaugggcg

SEQ ID NO: 180549 - RNA, 32 nt, Homo Sapiens
ccgacacccagcuagcgugcaaggcgccgcgg

SEQ ID NO: 180550 - RNA, 32 nt, Homo Sapiens
gauggagcaaaccgaaguuggcugggaagaaa

SEQ ID NO: 180551 - RNA, 32 nt, Homo Sapiens
auguaauauuguuuaaaauauguaaaaaccaa

SEQ ID NO: 180552 - RNA, 32 nt, Homo Sapiens
uucagagaacugcagaauaaguaaaauaagca

SEQ ID NO: 180553 - RNA, 32 nt, Homo Sapiens
caucuccgcgaucuccucuccccuccaauccu

SEQ ID NO: 180554 - RNA, 27 nt, Homo Sapiens
ccaggguccagcugcagcccccgccac

SEQ ID NO: 180555 - RNA, 32 nt, Homo Sapiens
cucccgccgggcgagcauggggcgccuggccu

SEQ ID NO: 180556 - RNA, 32 nt, Homo Sapiens
uucauaaauauguacuauuuuaauuaugucga

SEQ ID NO: 180557 - RNA, 30 nt, Homo Sapiens
acaggguuucaccauguuagccaggcuggu

SEQ ID NO: 180558 - RNA, 32 nt, Homo Sapiens
aguauauaaccaagauaagaaaauagguuuua

SEQ ID NO: 180559 - RNA, 32 nt, Homo Sapiens
uaaagaacugaagauaacuggugcuggauaga

SEQ ID NO: 180560 - RNA, 32 nt, Homo Sapiens
gccaaauauaaaaauauaaaugaugcuuugua

SEQ ID NO: 180561 - RNA, 32 nt, Homo Sapiens
uuucuaaugaacuuuguacguccuuagccucu

SEQ ID NO: 180562 - RNA, 32 nt, Homo Sapiens
gucccggagcgcccaauccugggcuggaacga

SEQ ID NO: 180563 - RNA, 32 nt, Homo Sapiens
ggucugaggcccaggacccaccccccugccac

SEQ ID NO: 180564 - RNA, 32 nt, Homo Sapiens
cccagcuugcuggcugcccucuuugccuucug

SEQ ID NO: 180565 - RNA, 32 nt, Homo Sapiens
agugacugacaaauauuguauuacuguacaua

SEQ ID NO: 180566 - RNA, 32 nt, Homo Sapiens
ggacgucuuuggaggucugucauucagccugc

SEQ ID NO: 180567 - RNA, 32 nt, Homo Sapiens
gccuccgagugcaggcuuccccggccccugcu

SEQ ID NO: 180568 - RNA, 32 nt, Homo Sapiens
caagagggagaaaccaaggagcucuggucauc

SEQ ID NO: 180569 - RNA, 25 nt, Homo Sapiens
auggacccguuccuggugcugcugc

SEQ ID NO: 180570 - RNA, 30 nt, Homo Sapiens
augagggcgcccgucugcucaagccucagg

SEQ ID NO: 180571 - RNA, 32 nt, Homo Sapiens
ugcuuuguaauauaaaucuguuuuagaacugc

SEQ ID NO: 180572 - RNA, 32 nt, Homo Sapiens
ccucgauaugggagaccuggaacugcugcugc

SEQ ID NO: 180573 - RNA, 32 nt, Homo Sapiens
cccaggcacacaggucccggggcaucaggaga

SEQ ID NO: 180574 - RNA, 32 nt, Homo Sapiens
aagagagaaaucaacuauucaggaccggcccc

SEQ ID NO: 180575 - RNA, 29 nt, Homo Sapiens
ugaaauauauguauguauucauggauaug

SEQ ID NO: 180576 - RNA, 32 nt, Homo Sapiens
auuuugagaucauggaggaaggaugaagaagu

SEQ ID NO: 180577 - RNA, 32 nt, Homo Sapiens
caaagccuuuggccuuucuccucccaggccuc

SEQ ID NO: 180578 - RNA, 28 nt, Homo Sapiens
cgggguuggcggccgcagcgcugguggc

SEQ ID NO: 180579 - RNA, 32 nt, Homo Sapiens
ccgagaucacgucacugcacuccagcuugggc

SEQ ID NO: 180580 - RNA, 32 nt, Homo Sapiens
ggcgggaucggccucccucccccacgacucag

SEQ ID NO: 180581 - RNA, 32 nt, Homo Sapiens
uguuacaucuguuuuaaauuuauuucaaaaag

SEQ ID NO: 180582 - RNA, 32 nt, Homo Sapiens
uauuaugauauuaaagaaauggccuuuuauuu

SEQ ID NO: 180583 - RNA, 32 nt, Homo Sapiens
ccugaugcgcuucaggacguagcgccacggcu

SEQ ID NO: 180584 - RNA, 32 nt, Homo Sapiens
uuuuuguucuaauauuugauuuaugagaaaug

SEQ ID NO: 180585 - RNA, 32 nt, Homo Sapiens
gcagacaugcccaagcuugguuaugcucugau

SEQ ID NO: 180586 - RNA, 32 nt, Homo Sapiens
ccagaacccagggugguggcgaggugggagcu

SEQ ID NO: 180587 - RNA, 31 nt, Homo Sapiens
agaguugcugugccguguccaagggccgugc

SEQ ID NO: 180588 - RNA, 32 nt, Homo Sapiens
ggagcgcgugggagcgcagaggccggaggagg

SEQ ID NO: 180589 - RNA, 32 nt, Homo Sapiens
cugcuggagauguaaauuugccaugcuuccug

SEQ ID NO: 180590 - RNA, 32 nt, Homo Sapiens
cuccuggagccucagcugccccuccaacacag

SEQ ID NO: 180591 - RNA, 32 nt, Homo Sapiens
ggggcuguggaugggagggguccccaacaugg

SEQ ID NO: 180592 - RNA, 30 nt, Homo Sapiens
acaagauaucaauaaacuuauuuuuaauac

SEQ ID NO: 180593 - RNA, 32 nt, Homo Sapiens
aaacucugaagauggaucauggccaugacugc

SEQ ID NO: 180594 - RNA, 32 nt, Homo Sapiens
gccccucuugucacccauacccauuucuuaca

SEQ ID NO: 180595 - RNA, 32 nt, Homo Sapiens
cugcuuaccuccccacgaacuugcacaucucc

SEQ ID NO: 180596 - RNA, 32 nt, Homo Sapiens
aaagauauuccacaggacaugccacuuuauua

SEQ ID NO: 180597 - RNA, 32 nt, Homo Sapiens
uaaacggcaguguuauuuucuuucucagugac

SEQ ID NO: 180598 - RNA, 32 nt, Homo Sapiens
acccagugugggggcaaagggcgugggaagag

SEQ ID NO: 180599 - RNA, 32 nt, Homo Sapiens
aaauuuuuaugaaaccaaaaacaaacaaguuu

SEQ ID NO: 180600 - RNA, 32 nt, Homo Sapiens
auaaaaagucaucuuaaaaaccuggaugcaua

SEQ ID NO: 180601 - RNA, 32 nt, Homo Sapiens
uccgcgcccucccaggcacccggccuuucuuu

SEQ ID NO: 180602 - RNA, 32 nt, Homo Sapiens
aggaagccuagauuguaagauuuuaaacauuu

SEQ ID NO: 180603 - RNA, 32 nt, Homo Sapiens
uaccucacggcggggccagcucugcuguccug

SEQ ID NO: 180604 - RNA, 32 nt, Homo Sapiens
auuacugaggggauucucuacugccaagcccc

SEQ ID NO: 180605 - RNA, 27 nt, Homo Sapiens
ugagugaauggcaaagugguugcuucu

SEQ ID NO: 180606 - RNA, 32 nt, Homo Sapiens
guaagggccccggugguccuagggaccccaug

SEQ ID NO: 180607 - RNA, 32 nt, Homo Sapiens
uuuaacccacaucugcgagaucagcguuaugc

SEQ ID NO: 180608 - RNA, 32 nt, Homo Sapiens
ucgucauuucucucaccucucaucuuuggaau

SEQ ID NO: 180609 - RNA, 32 nt, Homo Sapiens
uuggcauaagaaguauuuugaguugaagacaa

SEQ ID NO: 180610 - RNA, 32 nt, Homo Sapiens
gccuucuugacuauacuuugcacauguuuucu

SEQ ID NO: 180611 - RNA, 32 nt, Homo Sapiens
gucucccgggacuaccugggaccuccaccguu

SEQ ID NO: 180612 - RNA, 32 nt, Homo Sapiens
aacaccccauccccucacguucucaccccagg

SEQ ID NO: 180613 - RNA, 32 nt, Homo Sapiens
cuuuguuuauacugaggcuuguuucugccaca

SEQ ID NO: 180614 - RNA, 32 nt, Homo Sapiens
gcagugcuggguggagagagccagaaaacaga

SEQ ID NO: 180615 - RNA, 32 nt, Homo Sapiens
cuccuuccaagcccaugguagucccuccccga

SEQ ID NO: 180616 - RNA, 32 nt, Homo Sapiens
uuguuucccuaaucgauaaugacuccauuucc

SEQ ID NO: 180617 - RNA, 32 nt, Homo Sapiens
cgcuggcaagauggcgggaggggugcgcccgc

SEQ ID NO: 180618 - RNA, 32 nt, Homo Sapiens
gccugccacgccgaggacguggcugccgcagc

SEQ ID NO: 180619 - RNA, 32 nt, Homo Sapiens
gauccuccugccccggccuccugaguaccugg

SEQ ID NO: 180620 - RNA, 32 nt, Homo Sapiens
ucugcuuguucuugucugccagcccucgucgu

SEQ ID NO: 180621 - RNA, 32 nt, Homo Sapiens
ucccccgccucccgugcgcccgggacaauccu

SEQ ID NO: 180622 - RNA, 32 nt, Homo Sapiens
gagugggagagcaggaccgcggugcuugcaaa

SEQ ID NO: 180623 - RNA, 32 nt, Homo Sapiens
ccugaccucaagugauccacccgccucggccu

SEQ ID NO: 180624 - RNA, 32 nt, Homo Sapiens
ugucuucccucgcgcguagagagugacucgaa

SEQ ID NO: 180625 - RNA, 31 nt, Homo Sapiens
cugcugcggcacuucaugacccagcggcgcg

SEQ ID NO: 180626 - RNA, 32 nt, Homo Sapiens
ccgagcgcgggcgcuggacgccgccaagccgc

SEQ ID NO: 180627 - RNA, 32 nt, Homo Sapiens
ucacagaggggcaccagccugaugccaaccgg

SEQ ID NO: 180628 - RNA, 32 nt, Homo Sapiens
acugcaccggugccagcugucuugggggccac

SEQ ID NO: 180629 - RNA, 32 nt, Homo Sapiens
gguguuucugcggcaggcgccaugucagaacc

SEQ ID NO: 180630 - RNA, 30 nt, Homo Sapiens
ggguaggcgggcgugccgcagccguccagg

SEQ ID NO: 180631 - RNA, 32 nt, Homo Sapiens
ccugaaccuccagccaggggcgccccgggagc

SEQ ID NO: 180632 - RNA, 32 nt, Homo Sapiens
aggaaaggggucugggucuugucccuaggaau

SEQ ID NO: 180633 - RNA, 32 nt, Homo Sapiens
augcagaagaacccagaaaggagcaggucuug

SEQ ID NO: 180634 - RNA, 31 nt, Homo Sapiens
aaagcagaguguaacaagggauaugucaagg

SEQ ID NO: 180635 - RNA, 32 nt, Homo Sapiens
aguagcacugacuauuugacaauagggcugau

SEQ ID NO: 180636 - RNA, 32 nt, Homo Sapiens
auaugugcauggauacuuuucuagugaacagg

SEQ ID NO: 180637 - RNA, 32 nt, Homo Sapiens
gcucuggggggcccauuccggcagcggcgccu

SEQ ID NO: 180638 - RNA, 32 nt, Homo Sapiens
accuacuuuuaucaaacaaaaguacaaaagca

SEQ ID NO: 180639 - RNA, 32 nt, Homo Sapiens
cggcugcucgcggcgagcccgggagugauggc

SEQ ID NO: 180640 - RNA, 32 nt, Homo Sapiens
gcccuggggugagccgccggggccccccugcu

SEQ ID NO: 180641 - RNA, 32 nt, Homo Sapiens
agcaccuaggcgggcgggagcugugcggccca

SEQ ID NO: 180642 - RNA, 32 nt, Homo Sapiens
uguaauacaucauuauuuucuaaucuguguuu

SEQ ID NO: 180643 - RNA, 32 nt, Homo Sapiens
gaucaggacagaggaaggaaucucuaaucguc

SEQ ID NO: 180644 - RNA, 32 nt, Homo Sapiens
accccuuuccuccuguucccuccaccuacagg

SEQ ID NO: 180645 - RNA, 32 nt, Homo Sapiens
gcgcccugugcagcugaagcgcuuugugugua

SEQ ID NO: 180646 - RNA, 32 nt, Homo Sapiens
gccacgcucccucuccuguagccacuggcaua

SEQ ID NO: 180647 - RNA, 32 nt, Homo Sapiens
cggcguccucucccggcccucucgcgcugcac

SEQ ID NO: 180648 - RNA, 32 nt, Homo Sapiens
auuuguggguuuucuuuuuuuuuuuuucuuug

SEQ ID NO: 180649 - RNA, 32 nt, Homo Sapiens
cgcugcgccggggccuggcuucugaggcugaa

SEQ ID NO: 180650 - RNA, 32 nt, Homo Sapiens
cuaagauggcccggcgcgguggcucccgccug

SEQ ID NO: 180651 - RNA, 32 nt, Homo Sapiens
gucaccaauuuugcugcaagaaugggaacugc

SEQ ID NO: 180652 - RNA, 32 nt, Homo Sapiens
gaguuguauaaaauaagaaauaaauacaguac

SEQ ID NO: 180653 - RNA, 32 nt, Homo Sapiens
uuucauuuguaucuccuggggagcuuuuaaag

SEQ ID NO: 180654 - RNA, 32 nt, Homo Sapiens
ccugcgcccucccccuccgcccagcucggcca

SEQ ID NO: 180655 - RNA, 32 nt, Homo Sapiens
uaacacaggugcaguguauuauagaaaaaaua

SEQ ID NO: 180656 - RNA, 32 nt, Homo Sapiens
aacuacacuuugcugguuccuguccccucuga

SEQ ID NO: 180657 - RNA, 32 nt, Homo Sapiens
aacuauguuauccauccugaguuugugucuga

SEQ ID NO: 180658 - RNA, 32 nt, Homo Sapiens
ccugagugguccuaguucaccuccucagcugu

SEQ ID NO: 180659 - RNA, 29 nt, Homo Sapiens
ggaaaugcuggcgcgcgcggcgcggggca

SEQ ID NO: 180660 - RNA, 32 nt, Homo Sapiens
ugaggugaacaaaggcggagcugggugaagcc

SEQ ID NO: 180661 - RNA, 32 nt, Homo Sapiens
cuugacauuuuucuugugaaauuuggaaaaug

SEQ ID NO: 180662 - RNA, 32 nt, Homo Sapiens
ccgcgcgcacgcacagcgcccggagccucggc

SEQ ID NO: 180663 - RNA, 32 nt, Homo Sapiens
aucuggaaagacuuuucuagcugcaauuuaag

SEQ ID NO: 180664 - RNA, 32 nt, Homo Sapiens
ggggaccaucuuggagcgaucaccuugcagcu

SEQ ID NO: 180665 - RNA, 32 nt, Homo Sapiens
auaaaaaaucuuaaauucuuugaaauucaagu

SEQ ID NO: 180666 - RNA, 32 nt, Homo Sapiens
ggguaggugacacguggacucuaguauguaaa

SEQ ID NO: 180667 - RNA, 32 nt, Homo Sapiens
gauuaggggauggggaggaagagagagacugu

SEQ ID NO: 180668 - RNA, 32 nt, Homo Sapiens
cucgcugcccucccgcgccugcaacggugcgc

SEQ ID NO: 180669 - RNA, 32 nt, Homo Sapiens
gccgcgggccugcugagcuccggagcgcggca

SEQ ID NO: 180670 - RNA, 32 nt, Homo Sapiens
gugugggcgguaggcccggccuggcuuagugg

SEQ ID NO: 180671 - RNA, 32 nt, Homo Sapiens
auuauugcucacugccuauuuaauguagcuaa

SEQ ID NO: 180672 - RNA, 30 nt, Homo Sapiens
gggcuguggggcggugcggaagcgagaggc

SEQ ID NO: 180673 - RNA, 32 nt, Homo Sapiens
auccgcaggaucuguagaagacauuuugggaa

SEQ ID NO: 180674 - RNA, 32 nt, Homo Sapiens
acaauuuuucuuugugcacuaaaugauuuuug

SEQ ID NO: 180675 - RNA, 32 nt, Homo Sapiens
cgauucugagagagggggaagacgguggggcc

SEQ ID NO: 180676 - RNA, 31 nt, Homo Sapiens
gggaaccagcgcagcguggcgaugggcgggg

SEQ ID NO: 180677 - RNA, 32 nt, Homo Sapiens
gcuuuggaaauuauuagauauauccuauuccc

SEQ ID NO: 180678 - RNA, 32 nt, Homo Sapiens
gggaaaugggagcacaguacugggaaguggga

SEQ ID NO: 180679 - RNA, 32 nt, Homo Sapiens
uaagccaggacucagaggaucccuuugcccuc

SEQ ID NO: 180680 - RNA, 31 nt, Homo Sapiens
agcucccggcacugcccccgacgaacggaaa

SEQ ID NO: 180681 - RNA, 32 nt, Homo Sapiens
ugaugauaaauacauaguauuccucaguaucu

SEQ ID NO: 180682 - RNA, 31 nt, Homo Sapiens
caugauuucaaugauuguuuaauuguagguc

SEQ ID NO: 180683 - RNA, 30 nt, Homo Sapiens
agggaugcucagggagggauaugcuggugu

SEQ ID NO: 180684 - RNA, 32 nt, Homo Sapiens
cauucccugugcugaaagagggaccaggguag

SEQ ID NO: 180685 - RNA, 29 nt, Homo Sapiens
accccauggggacaggcagagcuggucuc

SEQ ID NO: 180686 - RNA, 32 nt, Homo Sapiens
aggccucacccuugggcuuugcugcccuguug

SEQ ID NO: 180687 - RNA, 32 nt, Homo Sapiens
uuaaacauucucagccaagaagacagugagca

SEQ ID NO: 180688 - RNA, 32 nt, Homo Sapiens
cgugccauaaaauagucccuuuccaggccaag

SEQ ID NO: 180689 - RNA, 32 nt, Homo Sapiens
uaaaaguguuuuaaauggaaaauguacucuag

SEQ ID NO: 180690 - RNA, 32 nt, Homo Sapiens
cuccaccccccgccccacuccagccaguguag

SEQ ID NO: 180691 - RNA, 32 nt, Homo Sapiens
agcagacggcucggggacccuggugagcaggc

SEQ ID NO: 180692 - RNA, 32 nt, Homo Sapiens
ucaaagccaucuuuaaauaguucuuuaaaaau

SEQ ID NO: 180693 - RNA, 29 nt, Homo Sapiens
cgacauggagggcgagauggcagugcggg

SEQ ID NO: 180694 - RNA, 32 nt, Homo Sapiens
uuuuuaguuuugcugucaucaccaucucagga

SEQ ID NO: 180695 - RNA, 32 nt, Homo Sapiens
uuggggaucaccagcucugacuccaccaaccc

SEQ ID NO: 180696 - RNA, 31 nt, Homo Sapiens
cccugacaugcguccgcaggaccccgcgcuc

SEQ ID NO: 180697 - RNA, 32 nt, Homo Sapiens
caauuguuaguuauaauuguuggaccuccuug

SEQ ID NO: 180698 - RNA, 32 nt, Homo Sapiens
cuggccugcagccccaggacuggacgaccuga

SEQ ID NO: 180699 - RNA, 32 nt, Homo Sapiens
gcagacaugguggcggccgccgcccccuccuc

SEQ ID NO: 180700 - RNA, 32 nt, Homo Sapiens
auuaagauuuauauuucuuuaaauagaaaaag

SEQ ID NO: 180701 - RNA, 32 nt, Homo Sapiens
uggccccugacucugguaagggcagccugcag

SEQ ID NO: 180702 - RNA, 32 nt, Homo Sapiens
acagccuggcagagccgagccgucaccugauu

SEQ ID NO: 180703 - RNA, 30 nt, Homo Sapiens
uugaggccacuugcccccaagcacuucaca

SEQ ID NO: 180704 - RNA, 32 nt, Homo Sapiens
uccccucucagccaugugaggacccagcaaga

SEQ ID NO: 180705 - RNA, 32 nt, Homo Sapiens
cuuggugugcauuuuuaaguguuucauguaga

SEQ ID NO: 180706 - RNA, 32 nt, Homo Sapiens
cuugagggaccccuagaugcuucuacucaaag

SEQ ID NO: 180707 - RNA, 32 nt, Homo Sapiens
ugcugggucccaaugaagcagcagccacaugu

SEQ ID NO: 180708 - RNA, 32 nt, Homo Sapiens
caugaguaaaauuuagacaagugaugguaaag

SEQ ID NO: 180709 - RNA, 30 nt, Homo Sapiens
ggaugaacaggccuguucgcccuggggucc

SEQ ID NO: 180710 - RNA, 32 nt, Homo Sapiens
ggucaucuugcaccuuuacaaacaaggaauuc

SEQ ID NO: 180711 - RNA, 32 nt, Homo Sapiens
auaaaugguuaacuuucaaaugaugcugcugc

SEQ ID NO: 180712 - RNA, 32 nt, Homo Sapiens
ucacuauuuuguaauaaauguggcuggagcug

SEQ ID NO: 180713 - RNA, 32 nt, Homo Sapiens
uggagugguguugcuuuuuuuuuauaaaagua

SEQ ID NO: 180714 - RNA, 32 nt, Homo Sapiens
cccaguggcuuacuguuuuucuuaaucucuuu

SEQ ID NO: 180715 - RNA, 32 nt, Homo Sapiens
ucucuccugccuuuuccaaguuugauggcucu

SEQ ID NO: 180716 - RNA, 32 nt, Homo Sapiens
cggaggagguggagaugaauggcgggcgcggc

SEQ ID NO: 180717 - RNA, 32 nt, Homo Sapiens
gucauuuuuuaaaggaauauuuucuucuuaag

SEQ ID NO: 180718 - RNA, 32 nt, Homo Sapiens
aguuuagagccuucugcuuuucuggggguuuc

SEQ ID NO: 180719 - RNA, 32 nt, Homo Sapiens
augagccccccgcaagccccgggcucuauccc

SEQ ID NO: 180720 - RNA, 32 nt, Homo Sapiens
guugggacagcgucuucgcugcugcuggauag

SEQ ID NO: 180721 - RNA, 32 nt, Homo Sapiens
cugcagucucuccagcucuaggauucaaugau

SEQ ID NO: 180722 - RNA, 32 nt, Homo Sapiens
uuuauuuguuuuauuuauuuuuuuuuaccgcu

SEQ ID NO: 180723 - RNA, 32 nt, Homo Sapiens
ucccuaaucagcgcccuuacggaugagccgag

SEQ ID NO: 180724 - RNA, 31 nt, Homo Sapiens
aagaacuagggucucauucagaauguccaaa

SEQ ID NO: 180725 - RNA, 32 nt, Homo Sapiens
caagaaacucggaagaagccacggccaaagga

SEQ ID NO: 180726 - RNA, 32 nt, Homo Sapiens
ccaggcagagggaccuugcugcugugugauug

SEQ ID NO: 180727 - RNA, 32 nt, Homo Sapiens
uaugucuagcuaagauguauuauucugcugug

SEQ ID NO: 180728 - RNA, 32 nt, Homo Sapiens
cggaaagucucauccacccccacaucgccucu

SEQ ID NO: 180729 - RNA, 32 nt, Homo Sapiens
ggagaacuguaacgcgagccccgagccauggg

SEQ ID NO: 180730 - RNA, 32 nt, Homo Sapiens
cauuaucugcuguuccuucgaggguuccaggc

SEQ ID NO: 180731 - RNA, 32 nt, Homo Sapiens
aaaaguccccgcagcacagcgacggugggaag

SEQ ID NO: 180732 - RNA, 32 nt, Homo Sapiens
ucaguaaugauuugguaguauuaauuuugugg

SEQ ID NO: 180733 - RNA, 32 nt, Homo Sapiens
uccuggcccucccccaccgccgccucggagcu

SEQ ID NO: 180734 - RNA, 32 nt, Homo Sapiens
gugcugugauuugggcaaaucauuccaggucu

SEQ ID NO: 180735 - RNA, 32 nt, Homo Sapiens
cacguaaaaugaagcuuuggaaucgccaguac

SEQ ID NO: 180736 - RNA, 32 nt, Homo Sapiens
cuggguaauuucauguuuauuaaacucgaacu

SEQ ID NO: 180737 - RNA, 32 nt, Homo Sapiens
ccaccucgcgggcgaccccgcggccaaggccc

SEQ ID NO: 180738 - RNA, 32 nt, Homo Sapiens
cuuugaaugaauuuugguaaaauccaaaggaa

SEQ ID NO: 180739 - RNA, 32 nt, Homo Sapiens
caguuaugaaauuaauauuugcugucugugug

SEQ ID NO: 180740 - RNA, 32 nt, Homo Sapiens
uccuugaaggauucuucauuguuuucuuggac

SEQ ID NO: 180741 - RNA, 32 nt, Homo Sapiens
uuuaucuagacaauuuaaguacuggcugauuu

SEQ ID NO: 180742 - RNA, 32 nt, Homo Sapiens
ugacugcuguuuguuugguuugccauggguac

SEQ ID NO: 180743 - RNA, 32 nt, Homo Sapiens
cccuucucagcacaagacccacugugugucua

SEQ ID NO: 180744 - RNA, 32 nt, Homo Sapiens
gggguggggguggaagcagccgcaggagcaag

SEQ ID NO: 180745 - RNA, 32 nt, Homo Sapiens
gcacgcugucggugcuggaguggcucucgucg

SEQ ID NO: 180746 - RNA, 32 nt, Homo Sapiens
acuuggcuaaucuuccauuuacauuaauucug

SEQ ID NO: 180747 - RNA, 32 nt, Homo Sapiens
aggucugcauuuucuuuuuucuuuucuuuuuu

SEQ ID NO: 180748 - RNA, 32 nt, Homo Sapiens
guggacccuuucuuccucuccccuuaguaauu

SEQ ID NO: 180749 - RNA, 32 nt, Homo Sapiens
aacacuacacgguguacauuuccagagccuug

SEQ ID NO: 180750 - RNA, 32 nt, Homo Sapiens
gcagccggcugugcgugcuguacggaaagccu

SEQ ID NO: 180751 - RNA, 32 nt, Homo Sapiens
accugugugccauuuuaagaguuacuuaaugu

SEQ ID NO: 180752 - RNA, 32 nt, Homo Sapiens
cccaugcaggugauccacggaccacauguuga

SEQ ID NO: 180753 - RNA, 32 nt, Homo Sapiens
cuccagcuccacgugcgcccggggaugcaaug

SEQ ID NO: 180754 - RNA, 32 nt, Homo Sapiens
uacccuugguggucuaaacggaugcugcuggg

SEQ ID NO: 180755 - RNA, 32 nt, Homo Sapiens
cccuugcccuccccggcacaggccaccauggc

SEQ ID NO: 180756 - RNA, 32 nt, Homo Sapiens
ucugugacauacuuuuuuuuucuuauagcaau

SEQ ID NO: 180757 - RNA, 32 nt, Homo Sapiens
ccggccuuuuguuuguuuuagagaaaguugua

SEQ ID NO: 180758 - RNA, 32 nt, Homo Sapiens
auuauuaaauguuuaaacuaaugaacuuggcu

SEQ ID NO: 180759 - RNA, 32 nt, Homo Sapiens
cuggcuuuuauuuauuuuuuuauuuuuaauau

SEQ ID NO: 180760 - RNA, 32 nt, Homo Sapiens
ggcaggcaggaggccgcggggagcacguggaa

SEQ ID NO: 180761 - RNA, 32 nt, Homo Sapiens
cggugguggcggcguucaccaaguacucugcu

SEQ ID NO: 180762 - RNA, 32 nt, Homo Sapiens
acauaagauaauguuuauuuuaucgggguauc

SEQ ID NO: 180763 - RNA, 32 nt, Homo Sapiens
ugagucugccccccgggcuuccugcccacccc

SEQ ID NO: 180764 - RNA, 32 nt, Homo Sapiens
aagucuuggacgggaaggcgcuacugguuuua

SEQ ID NO: 180765 - RNA, 32 nt, Homo Sapiens
uggggggcuggggcuccuggaccaggcucauc

SEQ ID NO: 180766 - RNA, 32 nt, Homo Sapiens
acccggcagugcgggccagagccccuccgccc

SEQ ID NO: 180767 - RNA, 32 nt, Homo Sapiens
uauguuaaaaauuuaguauuacauguuaggga

SEQ ID NO: 180768 - RNA, 32 nt, Homo Sapiens
auuuuaucuggcaauccuaaaauacauuggua

SEQ ID NO: 180769 - RNA, 32 nt, Homo Sapiens
cucaaugacauuagccaaaguuggguuugcca

SEQ ID NO: 180770 - RNA, 32 nt, Homo Sapiens
gucccugcuucuuuucugaccgggaaauaaau

SEQ ID NO: 180771 - RNA, 32 nt, Homo Sapiens
aguagcugcauaacucacccauuuggucagag

SEQ ID NO: 180772 - RNA, 32 nt, Homo Sapiens
ugucuauaaauauuugaagguauauaaaaaug

SEQ ID NO: 180773 - RNA, 32 nt, Homo Sapiens
ggggggcgcugagguagccccccggagcggca

SEQ ID NO: 180774 - RNA, 32 nt, Homo Sapiens
gugggcugagcuugggacgagcugcguuccgc

SEQ ID NO: 180775 - RNA, 32 nt, Homo Sapiens
gauuaucucuacaucauuuuaacagcugguau

SEQ ID NO: 180776 - RNA, 32 nt, Homo Sapiens
ucccucuauagucuaguauaguuuacaauaga

SEQ ID NO: 180777 - RNA, 32 nt, Homo Sapiens
gggcgccuggagcacuggcccggacugugcgc

SEQ ID NO: 180778 - RNA, 32 nt, Homo Sapiens
ucacaaaacugggacaucuccuagagucaaaa

SEQ ID NO: 180779 - RNA, 32 nt, Homo Sapiens
ucaugucuuuugccucuuuuguuacccagguu

SEQ ID NO: 180780 - RNA, 32 nt, Homo Sapiens
ccucugcccucccgucugugagcucccugccc

SEQ ID NO: 180781 - RNA, 32 nt, Homo Sapiens
ggcaggcagcugccucccuggggcugaggggc

SEQ ID NO: 180782 - RNA, 32 nt, Homo Sapiens
cauugaaauaccaucggaagacgaugggacgg

SEQ ID NO: 180783 - RNA, 32 nt, Homo Sapiens
ccggaaggcacggcgcucagcucaggaccgcg

SEQ ID NO: 180784 - RNA, 32 nt, Homo Sapiens
agugcuagaagaaaaaggaugcccaguugaug

SEQ ID NO: 180785 - RNA, 32 nt, Homo Sapiens
gaaaagaaaaagaauguaaaacuauacugacc

SEQ ID NO: 180786 - RNA, 32 nt, Homo Sapiens
cggcggcuaggcgcgggagaagugcggaggag

SEQ ID NO: 180787 - RNA, 32 nt, Homo Sapiens
gaggugucagagguggcugugccagaggugcg

SEQ ID NO: 180788 - RNA, 32 nt, Homo Sapiens
gagcccacuccaggggcccccgccccccagua

SEQ ID NO: 180789 - RNA, 32 nt, Homo Sapiens
caacgugacgcagcaagugcugauggagaagc

SEQ ID NO: 180790 - RNA, 32 nt, Homo Sapiens
gcaggagcacguggagaggccggguagccaca

SEQ ID NO: 180791 - RNA, 32 nt, Homo Sapiens
aagccuagccuuuaaccaucuuugcaguuagu

SEQ ID NO: 180792 - RNA, 32 nt, Homo Sapiens
cuaauguagcagcgggaagaguguaggucccu

SEQ ID NO: 180793 - RNA, 32 nt, Homo Sapiens
ucccaugauccccucucuuccuccccacccug

SEQ ID NO: 180794 - RNA, 32 nt, Homo Sapiens
gugccucucucuucuuuauucccuguaauaga

SEQ ID NO: 180795 - RNA, 32 nt, Homo Sapiens
aaucaguuuuauuugcuaauagcuaagacaaa

SEQ ID NO: 180796 - RNA, 32 nt, Homo Sapiens
uggggucgcucuugggaggcacaggcaugggu

SEQ ID NO: 180797 - RNA, 32 nt, Homo Sapiens
uagauugaaacacuaaguuguuuuuacuguuu

SEQ ID NO: 180798 - RNA, 32 nt, Homo Sapiens
gugggggcggcucggcggaaccagccccggcu

SEQ ID NO: 180799 - RNA, 32 nt, Homo Sapiens
aaggcuuggcuccgcuacuuguaacaagcucc

SEQ ID NO: 180800 - RNA, 32 nt, Homo Sapiens
ccaacccuacugugaacugugcaugcgaggga

SEQ ID NO: 180801 - RNA, 32 nt, Homo Sapiens
cccccaccaacccuccaccccgagugaaggcu

SEQ ID NO: 180802 - RNA, 32 nt, Homo Sapiens
gaaagauuaaaccauggauggacacaauucua

SEQ ID NO: 180803 - RNA, 32 nt, Homo Sapiens
agguggcuaggagggcuggggaggcccagugg

SEQ ID NO: 180804 - RNA, 32 nt, Homo Sapiens
cccgaaggagaaaccauugucuucccaggcuu

SEQ ID NO: 180805 - RNA, 32 nt, Homo Sapiens
cgaauggcaccaaggcucacuugggaggugac

SEQ ID NO: 180806 - RNA, 30 nt, Homo Sapiens
gggcggggcgcgcagcaggagcgagugggg

SEQ ID NO: 180807 - RNA, 32 nt, Homo Sapiens
agucaacaacgcuuuguccuucagugccugcc

SEQ ID NO: 180808 - RNA, 32 nt, Homo Sapiens
uauucaagauugaguucucacuaguguuuuuu

SEQ ID NO: 180809 - RNA, 32 nt, Homo Sapiens
guuuggggagcagccccuggcuccuugcaagc

SEQ ID NO: 180810 - RNA, 32 nt, Homo Sapiens
ggcgggacccauggaggcgcgcggggagcugg

SEQ ID NO: 180811 - RNA, 32 nt, Homo Sapiens
ggcaucauuuccccucccgcuuccuccggcug

SEQ ID NO: 180812 - RNA, 32 nt, Homo Sapiens
uguccauugagaaaauucacaauauaaacaga

SEQ ID NO: 180813 - RNA, 32 nt, Homo Sapiens
aucuaggggaaucucuauuacucuguacuuau

SEQ ID NO: 180814 - RNA, 32 nt, Homo Sapiens
aggacaaccagagcuuccaguacgaccacgag

SEQ ID NO: 180815 - RNA, 32 nt, Homo Sapiens
cacagcuuuccauggugaaaucuucgguacca

SEQ ID NO: 180816 - RNA, 32 nt, Homo Sapiens
guagguggaguuaguauauagguccaagcucu

SEQ ID NO: 180817 - RNA, 32 nt, Homo Sapiens
ucucaaugaaaggcagaugucccuuuaagguu

SEQ ID NO: 180818 - RNA, 32 nt, Homo Sapiens
ggcccaccugguggcuuucccuggacguuuaa

SEQ ID NO: 180819 - RNA, 32 nt, Homo Sapiens
gucucagaggaacauuuccauaaaaggugugg

SEQ ID NO: 180820 - RNA, 32 nt, Homo Sapiens
gauccgcgucccgccucagcggccggaggaca

SEQ ID NO: 180821 - RNA, 32 nt, Homo Sapiens
guagcagaaaucauuuuauucgucaugaucaa

SEQ ID NO: 180822 - RNA, 32 nt, Homo Sapiens
uuacaguauaguguuaugauuguaucuuauua

SEQ ID NO: 180823 - RNA, 32 nt, Homo Sapiens
uagagaagggagaggggcgugugcaugggagu

SEQ ID NO: 180824 - RNA, 32 nt, Homo Sapiens
ggcagacaacuggcccuugguucccaccacac

SEQ ID NO: 180825 - RNA, 32 nt, Homo Sapiens
uucuuuucaauuaaaaccaacauaucagcaau

SEQ ID NO: 180826 - RNA, 32 nt, Homo Sapiens
auuucaaguugaaaggcagucccuuuaguugg

SEQ ID NO: 180827 - RNA, 32 nt, Homo Sapiens
gaacccaugagguggagguugcggugagccaa

SEQ ID NO: 180828 - RNA, 32 nt, Homo Sapiens
uguuuuacacauucuuuuuugguguucauagc

SEQ ID NO: 180829 - RNA, 32 nt, Homo Sapiens
gccgcccgccccacaacaaaacucagcgcagc

SEQ ID NO: 180830 - RNA, 32 nt, Homo Sapiens
gccucguagcggggccccggauccccgagugg

SEQ ID NO: 180831 - RNA, 31 nt, Homo Sapiens
cuacagggucgcugccugcucuccuggggcu

SEQ ID NO: 180832 - RNA, 32 nt, Homo Sapiens
uacucacugccucucugggugagcacaggagc

SEQ ID NO: 180833 - RNA, 32 nt, Homo Sapiens
ggcaucuauuaacaauugguuaugguuccuug

SEQ ID NO: 180834 - RNA, 32 nt, Homo Sapiens
ucacaggcccgagccgugaacucuguggcugc

SEQ ID NO: 180835 - RNA, 32 nt, Homo Sapiens
caaagugugggaaggccgugagggucugcagu

SEQ ID NO: 180836 - RNA, 32 nt, Homo Sapiens
uggacugauccagauggcucccggggaugaau

SEQ ID NO: 180837 - RNA, 32 nt, Homo Sapiens
guuagcauuuacugcccuugccauuuuaauuu

SEQ ID NO: 180838 - RNA, 32 nt, Homo Sapiens
ugauaaauugaaaauauaauggucauugcaga

SEQ ID NO: 180839 - RNA, 32 nt, Homo Sapiens
gggaaucccagagauagcaaaugccaccugac

SEQ ID NO: 180840 - RNA, 32 nt, Homo Sapiens
gcggggcgcugcggccgguacacgccggggua

SEQ ID NO: 180841 - RNA, 32 nt, Homo Sapiens
cauucccgccccaccuuguugguuggauggaa

SEQ ID NO: 180842 - RNA, 32 nt, Homo Sapiens
ucugcagcucacggcuggcccggugggcuggg

SEQ ID NO: 180843 - RNA, 32 nt, Homo Sapiens
cgaccagcacaagcuuugcccaaggacuaagc

SEQ ID NO: 180844 - RNA, 32 nt, Homo Sapiens
cuuggauuuuauucuuagaaauccagaauccc

SEQ ID NO: 180845 - RNA, 32 nt, Homo Sapiens
agcugcagcaggacgcgcugcagacagcggag

SEQ ID NO: 180846 - RNA, 32 nt, Homo Sapiens
auugucaugugugcggcuuccuguucucaaua

SEQ ID NO: 180847 - RNA, 31 nt, Homo Sapiens
ccgccuaacugccccguuccaagggugccac

SEQ ID NO: 180848 - RNA, 30 nt, Homo Sapiens
gcaauauucggccuccgcgcccugaacuca

SEQ ID NO: 180849 - RNA, 32 nt, Homo Sapiens
uuucuucaaugaguuaauaaacagaaaucucc

SEQ ID NO: 180850 - RNA, 32 nt, Homo Sapiens
uucaaaaacaaaugacaggguuguuaaguugu

SEQ ID NO: 180851 - RNA, 32 nt, Homo Sapiens
gguugggacuggagguuguauaagguguucuu

SEQ ID NO: 180852 - RNA, 32 nt, Homo Sapiens
ucuuggcuaaagggcuaguguggccuucagaa

SEQ ID NO: 180853 - RNA, 32 nt, Homo Sapiens
uggagcuauguuuuuaaaauuguuauuaaaua

SEQ ID NO: 180854 - RNA, 29 nt, Homo Sapiens
uggcacucuuguuucaguaggaggaccac

SEQ ID NO: 180855 - RNA, 32 nt, Homo Sapiens
aaacuuaaaagacgaacacagauggaaguuug

SEQ ID NO: 180856 - RNA, 32 nt, Homo Sapiens
ggugagggcguggggagcaggggguggcagag

SEQ ID NO: 180857 - RNA, 32 nt, Homo Sapiens
gaucaaaaacuauuugggauauguauggguag

SEQ ID NO: 180858 - RNA, 32 nt, Homo Sapiens
ggcuaauagagaaaugugauauauagaguaau

SEQ ID NO: 180859 - RNA, 32 nt, Homo Sapiens
aaugggcaggcuuuucuguugaagaguggauu

SEQ ID NO: 180860 - RNA, 32 nt, Homo Sapiens
ucuacaaaauucuccaagcaguguugugguuu

SEQ ID NO: 180861 - RNA, 32 nt, Homo Sapiens
ccuagaucuaguuggccuuugguugauagauc

SEQ ID NO: 180862 - RNA, 32 nt, Homo Sapiens
acggcucguccucccugcuuuuuguuuuucaa

SEQ ID NO: 180863 - RNA, 32 nt, Homo Sapiens
ugcuguggugagcuggccacuccagagcugca

SEQ ID NO: 180864 - RNA, 32 nt, Homo Sapiens
ggacagggacuggcuucucaccaccagccuuu

SEQ ID NO: 180865 - RNA, 32 nt, Homo Sapiens
ccaagcccugugagacugaaaaagcacuuuga

SEQ ID NO: 180866 - RNA, 32 nt, Homo Sapiens
uagacagggucucacuguguugcccaagcuug

SEQ ID NO: 180867 - RNA, 32 nt, Homo Sapiens
gaucucagcuggaaguucuguuuggagcccau

SEQ ID NO: 180868 - RNA, 32 nt, Homo Sapiens
gaaacuuguuagaaauacaaauuuuagggccu

SEQ ID NO: 180869 - RNA, 32 nt, Homo Sapiens
uguugucaacaaaccaagcaucagggggaaga

SEQ ID NO: 180870 - RNA, 32 nt, Homo Sapiens
cggugcaggaggaggaucugguccagauaauu

SEQ ID NO: 180871 - RNA, 32 nt, Homo Sapiens
cgccugacgcgucccgaguuauacagaaauaa

SEQ ID NO: 180872 - RNA, 32 nt, Homo Sapiens
ucaaacugcugacuucaggugauccacccgcc

SEQ ID NO: 180873 - RNA, 32 nt, Homo Sapiens
ggcuucaucucuuuucugucagucuuugacua

SEQ ID NO: 180874 - RNA, 32 nt, Homo Sapiens
gauuuaggguaucugauagaagaaauuucuaa

SEQ ID NO: 180875 - RNA, 32 nt, Homo Sapiens
gauccagcccccagcccccagcuggccccuga

SEQ ID NO: 180876 - RNA, 32 nt, Homo Sapiens
gagccuggccccccgacccuccccucgggagc

SEQ ID NO: 180877 - RNA, 32 nt, Homo Sapiens
gcacuuugggaggccgaggccggcgcaucauc

SEQ ID NO: 180878 - RNA, 32 nt, Homo Sapiens
cugauacaugagccagugauuauucuuguuca

SEQ ID NO: 180879 - RNA, 32 nt, Homo Sapiens
uuuguguuuuguaaguugucuauuuugauaau

SEQ ID NO: 180880 - RNA, 32 nt, Homo Sapiens
guuuguuuucacagcuuagggauuggugggug

SEQ ID NO: 180881 - RNA, 32 nt, Homo Sapiens
ggggccugaagacagcagagggcgcgcugcgu

SEQ ID NO: 180882 - RNA, 32 nt, Homo Sapiens
uacaugagagaggucuggauucuuauuuuuuc

SEQ ID NO: 180883 - RNA, 32 nt, Homo Sapiens
caucuuaauggccuaaugcacccccaaacaug

SEQ ID NO: 180884 - RNA, 32 nt, Homo Sapiens
cacaccugaccagccccuccccccaggcucag

SEQ ID NO: 180885 - RNA, 32 nt, Homo Sapiens
agaagauagugucaaggagugagaaaguuugu

SEQ ID NO: 180886 - RNA, 32 nt, Homo Sapiens
guugacuguuguaugcccacuccuccuucucu

SEQ ID NO: 180887 - RNA, 32 nt, Homo Sapiens
acuggccgauucuggucuccagaggaccuugg

SEQ ID NO: 180888 - RNA, 32 nt, Homo Sapiens
cuuuuuuaaaacuaaacuuauuuuaaaaagaa

SEQ ID NO: 180889 - RNA, 32 nt, Homo Sapiens
cagguuccuggaaagacucuccaggaaaugga

SEQ ID NO: 180890 - RNA, 32 nt, Homo Sapiens
gaggaagacauaaaguuggggguggagaggcu

SEQ ID NO: 180891 - RNA, 32 nt, Homo Sapiens
acaugaugauggugugaagggcaggaaacagu

SEQ ID NO: 180892 - RNA, 32 nt, Homo Sapiens
ucauccggcuggaggaggagccgcagaggagu

SEQ ID NO: 180893 - RNA, 32 nt, Homo Sapiens
ggcaggcaggacgggggcguuggggagccaaa

SEQ ID NO: 180894 - RNA, 32 nt, Homo Sapiens
gauucacauuuuauuaguuugguuauguuuug

SEQ ID NO: 180895 - RNA, 32 nt, Homo Sapiens
aaauuuuaacacaucagcauucaccaccaggu

SEQ ID NO: 180896 - RNA, 32 nt, Homo Sapiens
cuccuaaggccuuuccucuuuccuggucucac

SEQ ID NO: 180897 - RNA, 32 nt, Homo Sapiens
ggccagcauggacaacauagugaggccuuguc

SEQ ID NO: 180898 - RNA, 32 nt, Homo Sapiens
aggucgggaguucaagacaaaccuggccaaca

SEQ ID NO: 180899 - RNA, 32 nt, Homo Sapiens
gugauccauccgccucgcccucccagagugcu

SEQ ID NO: 180900 - RNA, 27 nt, Homo Sapiens
ucuugcuccuucuucaacuccuggugu

SEQ ID NO: 180901 - RNA, 32 nt, Homo Sapiens
gucuucaaucagaaacaaaaggacauuaauga

SEQ ID NO: 180902 - RNA, 31 nt, Homo Sapiens
uaugcuguacauuucaguucaguguaugacc

SEQ ID NO: 180903 - RNA, 32 nt, Homo Sapiens
gcggcauccuucugccuguuucuguaagcaaa

SEQ ID NO: 180904 - RNA, 32 nt, Homo Sapiens
agagagagaugucccagagaccaagagcuccc

SEQ ID NO: 180905 - RNA, 32 nt, Homo Sapiens
caggcuggagccaggcugggggugcugggugg

SEQ ID NO: 180906 - RNA, 32 nt, Homo Sapiens
cuaaauuauagcaggggacuuuggcacccaag

SEQ ID NO: 180907 - RNA, 32 nt, Homo Sapiens
gaccugggcugaugucugaugaaauuuuaagc

SEQ ID NO: 180908 - RNA, 32 nt, Homo Sapiens
guagggcacaacaggcacaaagggagaccaua

SEQ ID NO: 180909 - RNA, 32 nt, Homo Sapiens
aguagcagucucagcccucuucucgucucauu

SEQ ID NO: 180910 - RNA, 32 nt, Homo Sapiens
ugugccaaaggcaagugacaaccgggaacaau

SEQ ID NO: 180911 - RNA, 32 nt, Homo Sapiens
ggagugggcaaaguaaccucuugcuuggugca

SEQ ID NO: 180912 - RNA, 32 nt, Homo Sapiens
aauaaugcuucagauauuauugcuuuauugcu

SEQ ID NO: 180913 - RNA, 32 nt, Homo Sapiens
ccaugaaaaaauacaggugucuagacugccag

SEQ ID NO: 180914 - RNA, 32 nt, Homo Sapiens
uauuuuaucauuuuaauguuuucauggacuuu

SEQ ID NO: 180915 - RNA, 32 nt, Homo Sapiens
augccgugaaugugugcaacauccuuauucuc

SEQ ID NO: 180916 - RNA, 32 nt, Homo Sapiens
ggccuuggagaccccuggucccaccccugccg

SEQ ID NO: 180917 - RNA, 32 nt, Homo Sapiens
aggccugcgcgagggucaucuucaucacagag

SEQ ID NO: 180918 - RNA, 32 nt, Homo Sapiens
ucucagauguucaguuuuccugucacaaggcu

SEQ ID NO: 180919 - RNA, 32 nt, Homo Sapiens
gccuuggugcucagcccucccauugggagcag

SEQ ID NO: 180920 - RNA, 32 nt, Homo Sapiens
ccaggguggaggaggagcauuguccaggcaug

SEQ ID NO: 180921 - RNA, 32 nt, Homo Sapiens
agcgaaggacccaggggcagagcccacgcugg

SEQ ID NO: 180922 - RNA, 32 nt, Homo Sapiens
cuccugaguccucucggcacccagcaagguug

SEQ ID NO: 180923 - RNA, 32 nt, Homo Sapiens
agaagagggcggcgccugcugcugucucgugu

SEQ ID NO: 180924 - RNA, 32 nt, Homo Sapiens
acuaaacauaagagaauucauaccauagagaa

SEQ ID NO: 180925 - RNA, 32 nt, Homo Sapiens
aguaaaucaaggccucauagcacauuguuaaa

SEQ ID NO: 180926 - RNA, 32 nt, Homo Sapiens
ccucuuuugcaggaucuggggguggggaggga

SEQ ID NO: 180927 - RNA, 32 nt, Homo Sapiens
aauaaagcacaaaaaccucucuuauucuacaa

SEQ ID NO: 180928 - RNA, 32 nt, Homo Sapiens
caucgaccugcaguuucccuaccuguuuccuc

SEQ ID NO: 180929 - RNA, 32 nt, Homo Sapiens
uaggaguggaagagggccuaggacagagucuu

SEQ ID NO: 180930 - RNA, 32 nt, Homo Sapiens
cgaggcggaggcggaccgcgagccggccaugu

SEQ ID NO: 180931 - RNA, 29 nt, Homo Sapiens
agccaugggccgggcccggccgggccaac

SEQ ID NO: 180932 - RNA, 29 nt, Homo Sapiens
ggagaugagcagguccgcgacgcugcugc

SEQ ID NO: 180933 - RNA, 32 nt, Homo Sapiens
ccggagugcgaggcggaggcgaggaggccgcg

SEQ ID NO: 180934 - RNA, 32 nt, Homo Sapiens
ugugggaguaagcugacaguuucucugcaggu

SEQ ID NO: 180935 - RNA, 32 nt, Homo Sapiens
uggccugaugacccacagacugugccuggccc

SEQ ID NO: 180936 - RNA, 32 nt, Homo Sapiens
gugcggggccgaggcugcuugcuuuuccuucc

SEQ ID NO: 180937 - RNA, 32 nt, Homo Sapiens
gcaaaauauuaaaauauagugaggaucuucaa

SEQ ID NO: 180938 - RNA, 32 nt, Homo Sapiens
uguucggaaagaaucugcuauauuuuagguua

SEQ ID NO: 180939 - RNA, 32 nt, Homo Sapiens
gagcuggggagcuuccucacaucucugcugaa

SEQ ID NO: 180940 - RNA, 30 nt, Homo Sapiens
cauuugcugcuaaugggacuugcccagcug

SEQ ID NO: 180941 - RNA, 32 nt, Homo Sapiens
uuaaaacaauuuuuuauuguuaaauuuguggu

SEQ ID NO: 180942 - RNA, 32 nt, Homo Sapiens
agucagaagaacuuacuggccuuggauccuca

SEQ ID NO: 180943 - RNA, 31 nt, Homo Sapiens
cguccucaagccggcaccugagcggcggaga

SEQ ID NO: 180944 - RNA, 32 nt, Homo Sapiens
cucacuguccccagccugccugccuccguuuc

SEQ ID NO: 180945 - RNA, 32 nt, Homo Sapiens
aauuuucuuguuguggucuauauccaagugau

SEQ ID NO: 180946 - RNA, 32 nt, Homo Sapiens
gcugggggcggagaggcggcggugggcucccu

SEQ ID NO: 180947 - RNA, 32 nt, Homo Sapiens
cccaguguccuccuccuucuccggccagaccc

SEQ ID NO: 180948 - RNA, 32 nt, Homo Sapiens
cucucccgcgacggcccgcccgggacuggacc

SEQ ID NO: 180949 - RNA, 32 nt, Homo Sapiens
aagggcccgaacuugccuuaaaucuuccucaa

SEQ ID NO: 180950 - RNA, 32 nt, Homo Sapiens
ggagcagggguugauucacacagaugggggcc

SEQ ID NO: 180951 - RNA, 32 nt, Homo Sapiens
aaaaggcaaugauuugugagauaauauggcau

SEQ ID NO: 180952 - RNA, 27 nt, Homo Sapiens
gcauggccgggcugggggcgucgcucc

SEQ ID NO: 180953 - RNA, 32 nt, Homo Sapiens
ggcaggaaaugggaaccgagcugaagcagagg

SEQ ID NO: 180954 - RNA, 32 nt, Homo Sapiens
ucaggcggccgggaacgggcgguggggagcgg

SEQ ID NO: 180955 - RNA, 32 nt, Homo Sapiens
ggacuagcugucucggggccuuccauccgcuu

SEQ ID NO: 180956 - RNA, 32 nt, Homo Sapiens
augaaacuccgucuuuacuaaaaauacaaaau

SEQ ID NO: 180957 - RNA, 32 nt, Homo Sapiens
cgggaauuagugauccuucucuggagagaagg

SEQ ID NO: 180958 - RNA, 32 nt, Homo Sapiens
agaggauaaggaggcacugcugauugaagaca

SEQ ID NO: 180959 - RNA, 32 nt, Homo Sapiens
cccaucaauauaucucaguauuucaugucuca

SEQ ID NO: 180960 - RNA, 32 nt, Homo Sapiens
acaauaaugggaugucaucaccauugcuagaa

SEQ ID NO: 180961 - RNA, 31 nt, Homo Sapiens
auuuuugcaguacuuuuuaauuuugauaaaa

SEQ ID NO: 180962 - RNA, 32 nt, Homo Sapiens
gccaagccugccccggccacucuguuugcuca

SEQ ID NO: 180963 - RNA, 32 nt, Homo Sapiens
cuuguuggagccugcucugugcuccccacucc

SEQ ID NO: 180964 - RNA, 32 nt, Homo Sapiens
cguuuuugagacggaguuugcucuuguugaug

SEQ ID NO: 180965 - RNA, 32 nt, Homo Sapiens
uacccagccagcaaguauauagcacagaacac

SEQ ID NO: 180966 - RNA, 32 nt, Homo Sapiens
auugguagauggcagucccaccccuacaccug

SEQ ID NO: 180967 - RNA, 32 nt, Homo Sapiens
gugagacggggcggggcgcgcguaucggcgcc

SEQ ID NO: 180968 - RNA, 32 nt, Homo Sapiens
acgccgaccgccccggaccccuguuuguggau

SEQ ID NO: 180969 - RNA, 32 nt, Homo Sapiens
cacuguuaccuaaguucucaagcugccuaugg

SEQ ID NO: 180970 - RNA, 32 nt, Homo Sapiens
ggcagcucgagcccaguccgcggccccagcag

SEQ ID NO: 180971 - RNA, 32 nt, Homo Sapiens
ccaaucacagaaaggcuaaaccagagaacugu

SEQ ID NO: 180972 - RNA, 32 nt, Homo Sapiens
guaagauaggagcacucagcucugucacaauu

SEQ ID NO: 180973 - RNA, 32 nt, Homo Sapiens
gcuauguguacugugauguaaaaauaagacau

SEQ ID NO: 180974 - RNA, 32 nt, Homo Sapiens
uugacaaugaaaagcagaaugaaaaugaguca

SEQ ID NO: 180975 - RNA, 32 nt, Homo Sapiens
uuguccccuccccuccuccccagccgccugga

SEQ ID NO: 180976 - RNA, 32 nt, Homo Sapiens
ggcuguaaauuuaguuucuacuugggcagcca

SEQ ID NO: 180977 - RNA, 32 nt, Homo Sapiens
uccucccaccucagccucccauguagcaggaa

SEQ ID NO: 180978 - RNA, 32 nt, Homo Sapiens
ccgcagcaccacgccagcuggugcggccccca

SEQ ID NO: 180979 - RNA, 32 nt, Homo Sapiens
gagacuuggccauaaagauaaugcugcauuuu

SEQ ID NO: 180980 - RNA, 28 nt, Homo Sapiens
guccgacuuacaggacaucagcgacagc

SEQ ID NO: 180981 - RNA, 30 nt, Homo Sapiens
cucagagccguuccgagaucuuggaggucc

SEQ ID NO: 180982 - RNA, 32 nt, Homo Sapiens
cuaauuccccuccuaacagcccugcagcgccu

SEQ ID NO: 180983 - RNA, 32 nt, Homo Sapiens
cacacaaaaauauuuaugaagcaguuuggaac

SEQ ID NO: 180984 - RNA, 32 nt, Homo Sapiens
uuagcugggugugguggcgugugccuguaauc

SEQ ID NO: 180985 - RNA, 32 nt, Homo Sapiens
gagccccuccccagccagcccuucccuggccc

SEQ ID NO: 180986 - RNA, 32 nt, Homo Sapiens
cugaaugagucuaugaugaacacugaggcagc

SEQ ID NO: 180987 - RNA, 32 nt, Homo Sapiens
uuuauuugacuucugcauugcuuuucaacaag

SEQ ID NO: 180988 - RNA, 32 nt, Homo Sapiens
agggacaucgacgaguauccuccuccugcugu

SEQ ID NO: 180989 - RNA, 32 nt, Homo Sapiens
uguucucuccauggguggggucggccagcgcc

SEQ ID NO: 180990 - RNA, 32 nt, Homo Sapiens
ggcggagcugagcuuaaaaucggcugcuuccu

SEQ ID NO: 180991 - RNA, 32 nt, Homo Sapiens
aguguagggcccggcccguguuggccccagga

SEQ ID NO: 180992 - RNA, 32 nt, Homo Sapiens
uguaccccaucccuauauacaccuaauaccca

SEQ ID NO: 180993 - RNA, 32 nt, Homo Sapiens
gcuggucugaaucucugaauuuauaucaucca

SEQ ID NO: 180994 - RNA, 32 nt, Homo Sapiens
ccugccgaccacagcccuccccacugugagcc

SEQ ID NO: 180995 - RNA, 32 nt, Homo Sapiens
agaucugcauuagggaagcaaagcagauuaaa

SEQ ID NO: 180996 - RNA, 32 nt, Homo Sapiens
ccccacgccagcccgcgccccgcauggcugcc

SEQ ID NO: 180997 - RNA, 32 nt, Homo Sapiens
cauuucaccauguuggccaggcuggucucgaa

SEQ ID NO: 180998 - RNA, 32 nt, Homo Sapiens
ccgcgucugccuugggggcccgagucccgccc

SEQ ID NO: 180999 - RNA, 32 nt, Homo Sapiens
aauuauauauugccuucuccaaauucccaacc

SEQ ID NO: 181000 - RNA, 32 nt, Homo Sapiens
ugagaaugaagauaaacugugaguugaaagug

SEQ ID NO: 181001 - RNA, 32 nt, Homo Sapiens
gcuaucgcccuccuuucccuuauugccuccca

SEQ ID NO: 181002 - RNA, 31 nt, Homo Sapiens
agcagggacgccgucgcuccggccgccugcu

SEQ ID NO: 181003 - RNA, 32 nt, Homo Sapiens
cugcccucccacuuccuccccgcugagaccca

SEQ ID NO: 181004 - RNA, 32 nt, Homo Sapiens
cagcuggguucccuggcugacucuguaccuua

SEQ ID NO: 181005 - RNA, 32 nt, Homo Sapiens
agggagcagucauggcggagcuggaggcugug

SEQ ID NO: 181006 - RNA, 32 nt, Homo Sapiens
aagaugaauaaaaauucaaauaaaaugauaac

SEQ ID NO: 181007 - RNA, 32 nt, Homo Sapiens
aggcucugucuccuuccugcugccaggaccug

SEQ ID NO: 181008 - RNA, 32 nt, Homo Sapiens
ugugucccgcgaugggggcgcugccuccccug

SEQ ID NO: 181009 - RNA, 32 nt, Homo Sapiens
agcuuugggcauuuuucuuuuuaauuauucuu

SEQ ID NO: 181010 - RNA, 32 nt, Homo Sapiens
cagaagccuaguccuguucagagcagcacugu

SEQ ID NO: 181011 - RNA, 32 nt, Homo Sapiens
uuccagcugagacacugugauuuuaaauuaaa

SEQ ID NO: 181012 - RNA, 32 nt, Homo Sapiens
aauguggccuaaaaaugcaacuucuuuuuauu

SEQ ID NO: 181013 - RNA, 32 nt, Homo Sapiens
ggauagauguuuuaauggcaccagcuagucac

SEQ ID NO: 181014 - RNA, 32 nt, Homo Sapiens
gccaagaaagguuuaagaagucuuucuggaua

SEQ ID NO: 181015 - RNA, 32 nt, Homo Sapiens
aagacaagaagaaaaaggaaagaguggguuuc

SEQ ID NO: 181016 - RNA, 32 nt, Homo Sapiens
cggcccuggguuggcgugagugggucagaguu

SEQ ID NO: 181017 - RNA, 30 nt, Homo Sapiens
gguggcaccggcggcggcguaggacggagg

SEQ ID NO: 181018 - RNA, 32 nt, Homo Sapiens
gaguaucuuccagccgcugccuccugacugua

SEQ ID NO: 181019 - RNA, 32 nt, Homo Sapiens
aaacaaugcgggggcggggcagcggcgacgcu

SEQ ID NO: 181020 - RNA, 32 nt, Homo Sapiens
acacauaaauauauuuuuauagaaaaacaaau

SEQ ID NO: 181021 - RNA, 29 nt, Homo Sapiens
acauagugcuguuuauauaguuuaggagu

SEQ ID NO: 181022 - RNA, 32 nt, Homo Sapiens
gggcccugccagccugucgcccagaggccgag

SEQ ID NO: 181023 - RNA, 32 nt, Homo Sapiens
aaucuuguucauagugccaccuauggucacga

SEQ ID NO: 181024 - RNA, 31 nt, Homo Sapiens
aggagguggcuuaugaaagugugauguucgc

SEQ ID NO: 181025 - RNA, 32 nt, Homo Sapiens
caagaaguuaaacuauuuugagcauuagaaug

SEQ ID NO: 181026 - RNA, 32 nt, Homo Sapiens
gcaggugaaggaggcucucacuuuuuaauauc

SEQ ID NO: 181027 - RNA, 32 nt, Homo Sapiens
gaaaacccagcauuuuaauuacuugcaaauua

SEQ ID NO: 181028 - RNA, 32 nt, Homo Sapiens
gggagcaccugcuagacccugauuccggugcu

SEQ ID NO: 181029 - RNA, 32 nt, Homo Sapiens
accccuaaugugcaugaggcauccugggaaug

SEQ ID NO: 181030 - RNA, 32 nt, Homo Sapiens
agagggagaagccaaggcaggcguguguggua

SEQ ID NO: 181031 - RNA, 28 nt, Homo Sapiens
uggugucuuguaggaccaaaucgauguu

SEQ ID NO: 181032 - RNA, 32 nt, Homo Sapiens
gaagcccucggcaugcuccccucccccacagc

SEQ ID NO: 181033 - RNA, 32 nt, Homo Sapiens
aucugaaugaagucuguaauuuggguaacagu

SEQ ID NO: 181034 - RNA, 32 nt, Homo Sapiens
cuuuaaauacaucauuaaaaucuuaugcacaa

SEQ ID NO: 181035 - RNA, 32 nt, Homo Sapiens
cuguccugaaguugcaucaggaucucauaucc

SEQ ID NO: 181036 - RNA, 32 nt, Homo Sapiens
ugcauuccgcagagccgcagcgagggugaugu

SEQ ID NO: 181037 - RNA, 32 nt, Homo Sapiens
ggaaguugccugcagccgcccgggccgccggc

SEQ ID NO: 181038 - RNA, 32 nt, Homo Sapiens
uucccacccauucgccaacgcgggaaaggcaa

SEQ ID NO: 181039 - RNA, 32 nt, Homo Sapiens
ggaccacuugggggaggucagaggauguaugu

SEQ ID NO: 181040 - RNA, 32 nt, Homo Sapiens
uguccgaaauaccaaccgugaaacuggguaaa

SEQ ID NO: 181041 - RNA, 32 nt, Homo Sapiens
aucaucaguacuccuuguuuuucuguuaucuc

SEQ ID NO: 181042 - RNA, 32 nt, Homo Sapiens
gcccaagggcuuugugauaggcacagagccuc

SEQ ID NO: 181043 - RNA, 32 nt, Homo Sapiens
cguuugcccaucuccuucuucaccgagcuucg

SEQ ID NO: 181044 - RNA, 32 nt, Homo Sapiens
uauuuauuuuuacuuuugugaccacuauuuua

SEQ ID NO: 181045 - RNA, 32 nt, Homo Sapiens
aggucccaaauauguggucuaucaccacugaa

SEQ ID NO: 181046 - RNA, 32 nt, Homo Sapiens
uaaaauuugaauuucacauaaaugguaaauaa

SEQ ID NO: 181047 - RNA, 32 nt, Homo Sapiens
acccugccagaaagaacucuucaugaagaagu

SEQ ID NO: 181048 - RNA, 32 nt, Homo Sapiens
auacagagaaauuuauucauuuagauaaaaau

SEQ ID NO: 181049 - RNA, 32 nt, Homo Sapiens
uguccaguuggccuauggaagggugcccuugg

SEQ ID NO: 181050 - RNA, 32 nt, Homo Sapiens
caccccuuccaccagcaacaugugauuaauuu

SEQ ID NO: 181051 - RNA, 32 nt, Homo Sapiens
gggcccaagcgucagcggcccgcgccugucgg

SEQ ID NO: 181052 - RNA, 32 nt, Homo Sapiens
auucugagaugaaaggagaaugucuaagggaa

SEQ ID NO: 181053 - RNA, 32 nt, Homo Sapiens
ucucaggcacagagaaaggaaguaaaaagaaa

SEQ ID NO: 181054 - RNA, 32 nt, Homo Sapiens
aguccucacaaacuguucccagcccuaggcug

SEQ ID NO: 181055 - RNA, 32 nt, Homo Sapiens
uuucuucuaaucuuaaaccugaucauuacaac

SEQ ID NO: 181056 - RNA, 32 nt, Homo Sapiens
ccccauggaagacagugcucccagcugaggua

SEQ ID NO: 181057 - RNA, 32 nt, Homo Sapiens
guugguccagccauaucucuauucccaccguu

SEQ ID NO: 181058 - RNA, 32 nt, Homo Sapiens
uaacuaucacuaagggucuauaaggccucacc

SEQ ID NO: 181059 - RNA, 32 nt, Homo Sapiens
ggcgcugggcgggcggcugugagcggcgcucg

SEQ ID NO: 181060 - RNA, 32 nt, Homo Sapiens
uaucaacuuuuuaaacacaucuaaugcuugua

SEQ ID NO: 181061 - RNA, 32 nt, Homo Sapiens
ucauuauggaagacaaagaaauccccaucaag

SEQ ID NO: 181062 - RNA, 32 nt, Homo Sapiens
gccucuuuagauuacauagaagcauuguaguc

SEQ ID NO: 181063 - RNA, 32 nt, Homo Sapiens
ucuuuaugaauuauuuugauaaauuacuaauu

SEQ ID NO: 181064 - RNA, 32 nt, Homo Sapiens
caggggcugucccacagccugucuuuuccagg

SEQ ID NO: 181065 - RNA, 32 nt, Homo Sapiens
accccucacuuaggcuuuccucugccaccccg

SEQ ID NO: 181066 - RNA, 32 nt, Homo Sapiens
uugccuuauuugucuguaaaaaauggagcuca

SEQ ID NO: 181067 - RNA, 32 nt, Homo Sapiens
uccacagucaugaugagcagauuacgggcagg

SEQ ID NO: 181068 - RNA, 32 nt, Homo Sapiens
aucaguuuaaguguuaagugcuccaaggaggu

SEQ ID NO: 181069 - RNA, 30 nt, Homo Sapiens
cagaaagagaagccaucucaguaugaucuu

SEQ ID NO: 181070 - RNA, 32 nt, Homo Sapiens
gcaccagacaaccugauggaacauuugcaccu

SEQ ID NO: 181071 - RNA, 32 nt, Homo Sapiens
uagguuccggcucauucauuaacaucaauuuc

SEQ ID NO: 181072 - RNA, 32 nt, Homo Sapiens
auggcaaucuguguuaugaucagaagauuugg

SEQ ID NO: 181073 - RNA, 32 nt, Homo Sapiens
gacugucccucuggggacguggcacugaagug

SEQ ID NO: 181074 - RNA, 32 nt, Homo Sapiens
auaaaugaucacaauguguaaaacacuguagu

SEQ ID NO: 181075 - RNA, 32 nt, Homo Sapiens
auaacuguauuuauaaaccacucuucaacagc

SEQ ID NO: 181076 - RNA, 32 nt, Homo Sapiens
cacgugggccgcggcgcuccgaccuccgcuuu

SEQ ID NO: 181077 - RNA, 30 nt, Homo Sapiens
gaggaggaauaacuugaugagauugagaaa

SEQ ID NO: 181078 - RNA, 32 nt, Homo Sapiens
agcaaaauacuagcagucugccuaaacauguu

SEQ ID NO: 181079 - RNA, 32 nt, Homo Sapiens
cagcaguccccgggucgcccagcccacgcgcg

SEQ ID NO: 181080 - RNA, 32 nt, Homo Sapiens
aauccugggccuucauugguuccgaugucaua

SEQ ID NO: 181081 - RNA, 32 nt, Homo Sapiens
aaggucaugaugaauggaauauguaagacuug

SEQ ID NO: 181082 - RNA, 32 nt, Homo Sapiens
gaugaugaugaugaugauaucuagaacuccag

SEQ ID NO: 181083 - RNA, 32 nt, Homo Sapiens
uggauaagcugauuaaugguuuugcaacugua

SEQ ID NO: 181084 - RNA, 32 nt, Homo Sapiens
cacacagacuggugaggccuggggucaggagg

SEQ ID NO: 181085 - RNA, 32 nt, Homo Sapiens
gccaggucuccucucugcggcccgcaccccaa

SEQ ID NO: 181086 - RNA, 30 nt, Homo Sapiens
uugcaguguugaaacuacaagagcuagaaa

SEQ ID NO: 181087 - RNA, 31 nt, Homo Sapiens
cagagcaggggccccaacagaguuuuuaaac

SEQ ID NO: 181088 - RNA, 32 nt, Homo Sapiens
accgccuggggugggugagcucggggcucggg

SEQ ID NO: 181089 - RNA, 32 nt, Homo Sapiens
ccccuggagcuuggauacugucugcacuucaa

SEQ ID NO: 181090 - RNA, 32 nt, Homo Sapiens
guauguggcaaauucuaagcugccauauugaa

SEQ ID NO: 181091 - RNA, 31 nt, Homo Sapiens
uugaugaaauaaagacauaucauuaugcauu

SEQ ID NO: 181092 - RNA, 32 nt, Homo Sapiens
uucaauuuugguuuuucauuuucaaagcuuua

SEQ ID NO: 181093 - RNA, 32 nt, Homo Sapiens
cccuugaggcccuggaggaagcgggcagcaca

SEQ ID NO: 181094 - RNA, 32 nt, Homo Sapiens
cuuuccuucuaauuuuucagcuccuucaaugc

SEQ ID NO: 181095 - RNA, 32 nt, Homo Sapiens
ccuagcuccggcccucggucuauccgguugca

SEQ ID NO: 181096 - RNA, 32 nt, Homo Sapiens
cccccuggggccccggcccucacucuccuaua

SEQ ID NO: 181097 - RNA, 31 nt, Homo Sapiens
caucagcaucgcagccacuccagcgccuccc

SEQ ID NO: 181098 - RNA, 32 nt, Homo Sapiens
ccagcagggccugcauuggggguguggaggcc

SEQ ID NO: 181099 - RNA, 32 nt, Homo Sapiens
aguuggagcaauugucuguguuugaaaagaug

SEQ ID NO: 181100 - RNA, 32 nt, Homo Sapiens
agucaaggagucggcuuucagguuccugacgg

SEQ ID NO: 181101 - RNA, 30 nt, Homo Sapiens
cuggggaauaucccugaaccccaugccucu

SEQ ID NO: 181102 - RNA, 32 nt, Homo Sapiens
accaacugcagccccaggcuuuggacuguuac

SEQ ID NO: 181103 - RNA, 32 nt, Homo Sapiens
cuugccuaaagccccagggugaagcagcaucu

SEQ ID NO: 181104 - RNA, 32 nt, Homo Sapiens
uuuauuuuagaauugauauacacggaugacuu

SEQ ID NO: 181105 - RNA, 32 nt, Homo Sapiens
auauuuauagaugagugaaugaggaaauaauu

SEQ ID NO: 181106 - RNA, 32 nt, Homo Sapiens
uagagaaaucauauauauaauguuuuccuagg

SEQ ID NO: 181107 - RNA, 32 nt, Homo Sapiens
auuuucuugugauuugggauuggaugcucaug

SEQ ID NO: 181108 - RNA, 32 nt, Homo Sapiens
uuccggggcgccgcagagcucccggccucugg

SEQ ID NO: 181109 - RNA, 32 nt, Homo Sapiens
gagcaauuuugcuugcagaaagcuaugaaaua

SEQ ID NO: 181110 - RNA, 32 nt, Homo Sapiens
aauccuuguaaaugauagauuccaugggugag

SEQ ID NO: 181111 - RNA, 32 nt, Homo Sapiens
uauugauaaaacuauaaauuuucauuuuccag

SEQ ID NO: 181112 - RNA, 32 nt, Homo Sapiens
accagauagagcuggaguuggccacggccaag

SEQ ID NO: 181113 - RNA, 32 nt, Homo Sapiens
aaguccuugugcugggcacccuggacacgucc

SEQ ID NO: 181114 - RNA, 32 nt, Homo Sapiens
gggaggccugagcgggaagcauuggcguccga

SEQ ID NO: 181115 - RNA, 32 nt, Homo Sapiens
uuuuaugacuuauauuguuuccaggugggcau

SEQ ID NO: 181116 - RNA, 32 nt, Homo Sapiens
auguucugaaauugauuauguugacggucaca

SEQ ID NO: 181117 - RNA, 32 nt, Homo Sapiens
ggggcauggccccgcgcuagccccacaucccg

SEQ ID NO: 181118 - RNA, 32 nt, Homo Sapiens
cauaagcaaaauugaaaugcauggucuuucag

SEQ ID NO: 181119 - RNA, 32 nt, Homo Sapiens
cagaggaugggugcugguggggccuggagaug

SEQ ID NO: 181120 - RNA, 32 nt, Homo Sapiens
uuuaaaagagaaguuucuuuucugguuuuagu

SEQ ID NO: 181121 - RNA, 32 nt, Homo Sapiens
gagccugguaaaaagaggaaagagacucaugu

SEQ ID NO: 181122 - RNA, 32 nt, Homo Sapiens
gaagaaauagagaauuccagcagaauucagug

SEQ ID NO: 181123 - RNA, 32 nt, Homo Sapiens
gucuuuaauuuucacucacuguggaaauaaaa

SEQ ID NO: 181124 - RNA, 32 nt, Homo Sapiens
uauucuuuuuaaaguauguuauugcauaauuu

SEQ ID NO: 181125 - RNA, 31 nt, Homo Sapiens
guccugcguccgcgccugccccgccaugaau

SEQ ID NO: 181126 - RNA, 32 nt, Homo Sapiens
uggaugggggguaauuaggaguugcagcuaga

SEQ ID NO: 181127 - RNA, 32 nt, Homo Sapiens
ggaaguguagcggggggaggcggcggccaccg

SEQ ID NO: 181128 - RNA, 32 nt, Homo Sapiens
cuucuuauuuaguaaugauaagacuuuucauu

SEQ ID NO: 181129 - RNA, 32 nt, Homo Sapiens
agugugccaagaguucgauguuagcguuuacg

SEQ ID NO: 181130 - RNA, 32 nt, Homo Sapiens
acgugggcgccggcugccggggcggcgaucuu

SEQ ID NO: 181131 - RNA, 32 nt, Homo Sapiens
guugcuacaucagaguguauuuuuguaauucc

SEQ ID NO: 181132 - RNA, 32 nt, Homo Sapiens
aguggucgagugacacaccucacgcaggcuga

SEQ ID NO: 181133 - RNA, 32 nt, Homo Sapiens
gaacccugggcugcuggcgccugcgcagagcc

SEQ ID NO: 181134 - RNA, 32 nt, Homo Sapiens
gaaaugggagcacaguacugggaaauaugagc

SEQ ID NO: 181135 - RNA, 32 nt, Homo Sapiens
auuaaaaagcuacugacuugacugucauccug

SEQ ID NO: 181136 - RNA, 32 nt, Homo Sapiens
augccugcuaacuaucuaauuuauugagucac

SEQ ID NO: 181137 - RNA, 32 nt, Homo Sapiens
caugcuggcucccagggccaugaacuuugucc

SEQ ID NO: 181138 - RNA, 32 nt, Homo Sapiens
aagcacauauaaaaugauuuuuguaggucauc

SEQ ID NO: 181139 - RNA, 32 nt, Homo Sapiens
gaaacaguguggcuccuccuccucuuccccuc

SEQ ID NO: 181140 - RNA, 31 nt, Homo Sapiens
ccggguggggcggugcggguaccucuguaug

SEQ ID NO: 181141 - RNA, 32 nt, Homo Sapiens
ucaaaaggaacaaaaauuacaaagaaccaugc

SEQ ID NO: 181142 - RNA, 32 nt, Homo Sapiens
uuucuugcuguauggaucacugauugaauaau

SEQ ID NO: 181143 - RNA, 31 nt, Homo Sapiens
uugaugaaauaaaauguguaucugagugaga

SEQ ID NO: 181144 - RNA, 32 nt, Homo Sapiens
ugccugcccuccccauacccagaaaaucugga

SEQ ID NO: 181145 - RNA, 32 nt, Homo Sapiens
ucugggaaauuuuaucuguccaaauacgugug

SEQ ID NO: 181146 - RNA, 32 nt, Homo Sapiens
aacaccgcauccuugcacugcugcuggggcug

SEQ ID NO: 181147 - RNA, 32 nt, Homo Sapiens
caugugacuuuggcccuugguuuucuuuccag

SEQ ID NO: 181148 - RNA, 27 nt, Homo Sapiens
uggcaguccuucucacucccucaaccu

SEQ ID NO: 181149 - RNA, 32 nt, Homo Sapiens
aaaaugugugguucuuuuuuuuguuuuguuuu

SEQ ID NO: 181150 - RNA, 32 nt, Homo Sapiens
uaguuaauuuuuuggcuuucaacagcagcccu

SEQ ID NO: 181151 - RNA, 32 nt, Homo Sapiens
acauuaauuagauguccauacuguauuuuguu

SEQ ID NO: 181152 - RNA, 32 nt, Homo Sapiens
auuaacgguauuugcuuguaagaguaacguua

SEQ ID NO: 181153 - RNA, 32 nt, Homo Sapiens
cccagcuucccagugcucacagauggcuggcc

SEQ ID NO: 181154 - RNA, 32 nt, Homo Sapiens
cugacuaacucuugcguugucagacacuuuca

SEQ ID NO: 181155 - RNA, 32 nt, Homo Sapiens
cugacauauauucagaguguuguaguuuuaag

SEQ ID NO: 181156 - RNA, 32 nt, Homo Sapiens
gccaggcuucccugggguucugcucauugaaa

SEQ ID NO: 181157 - RNA, 28 nt, Homo Sapiens
guaaggggugauucgccgaggggcgcgg

SEQ ID NO: 181158 - RNA, 32 nt, Homo Sapiens
ccauggcccucccccugcccuucaggccagug

SEQ ID NO: 181159 - RNA, 32 nt, Homo Sapiens
auuaaagccaaucuaaagauuaugaccaucac

SEQ ID NO: 181160 - RNA, 32 nt, Homo Sapiens
cccuauguugucaucacuugguccaugaaaua

SEQ ID NO: 181161 - RNA, 32 nt, Homo Sapiens
acugugauauuguguaaaugucuaucugcccu

SEQ ID NO: 181162 - RNA, 32 nt, Homo Sapiens
gggacccccuccccgcccuucuuuugaccccu

SEQ ID NO: 181163 - RNA, 32 nt, Homo Sapiens
acuuuuuauacuuauaaaaauaguguguucuu

SEQ ID NO: 181164 - RNA, 32 nt, Homo Sapiens
agacuuuuaagugauuaacaaggcuaguucag

SEQ ID NO: 181165 - RNA, 32 nt, Homo Sapiens
cacaacccaccccgcuuucguaguuuucauuu

SEQ ID NO: 181166 - RNA, 32 nt, Homo Sapiens
gacgccuaggcuggaggcagggggcccgugcu

SEQ ID NO: 181167 - RNA, 32 nt, Homo Sapiens
gugcgcccggcgggcuuugggaaugagggguu

SEQ ID NO: 181168 - RNA, 32 nt, Homo Sapiens
uuggcuucaaugauuggcaacuucuacagggg

SEQ ID NO: 181169 - RNA, 31 nt, Homo Sapiens
cugaguuugugcugguguaugugugaaguga

SEQ ID NO: 181170 - RNA, 32 nt, Homo Sapiens
uccaacagggucaacuggagacaacucugaag

SEQ ID NO: 181171 - RNA, 30 nt, Homo Sapiens
cuugguucccuugccacccuucuugcugcc

SEQ ID NO: 181172 - RNA, 32 nt, Homo Sapiens
gggccaagggcgggcugcuugccgcuauggcu

SEQ ID NO: 181173 - RNA, 32 nt, Homo Sapiens
agaggcccugucauggcccgcccccagccaug

SEQ ID NO: 181174 - RNA, 32 nt, Homo Sapiens
aggugaagccccacgacaaggaugccaaaaug

SEQ ID NO: 181175 - RNA, 32 nt, Homo Sapiens
aagguagaugagagacccuuauuuuggcugug

SEQ ID NO: 181176 - RNA, 32 nt, Homo Sapiens
cacauacacaccccugaacacacacacagaca

SEQ ID NO: 181177 - RNA, 32 nt, Homo Sapiens
acccagcucccugcacacccaggccagccacc

SEQ ID NO: 181178 - RNA, 32 nt, Homo Sapiens
aguacgcucagaguuguuaaccagaaaguccu

SEQ ID NO: 181179 - RNA, 32 nt, Homo Sapiens
auacagguuauuguuggauuuuccaaguacuu

SEQ ID NO: 181180 - RNA, 32 nt, Homo Sapiens
gcagugaugcggauggguacccgggcacacca

SEQ ID NO: 181181 - RNA, 32 nt, Homo Sapiens
gccuccgaaaaccaccuggggacucacguagc

SEQ ID NO: 181182 - RNA, 32 nt, Homo Sapiens
auccacccaucccaaccuuucucuccucaguc

SEQ ID NO: 181183 - RNA, 32 nt, Homo Sapiens
cagagucugaugagcuggccuuugugcacacu

SEQ ID NO: 181184 - RNA, 32 nt, Homo Sapiens
ccggaccucagccccagcccgcucccccaccc

SEQ ID NO: 181185 - RNA, 32 nt, Homo Sapiens
uguugucuugguuuuucucauagacuuuauaa

SEQ ID NO: 181186 - RNA, 32 nt, Homo Sapiens
uccugcagcacaucaucgucagggaccugcag

SEQ ID NO: 181187 - RNA, 32 nt, Homo Sapiens
ggugcuucuccccacaccccuguaggccucaa

SEQ ID NO: 181188 - RNA, 32 nt, Homo Sapiens
caggggcugcucaucacccaguccuggccauu

SEQ ID NO: 181189 - RNA, 32 nt, Homo Sapiens
ccuucugugauuaugauuuccucuccuauaau

SEQ ID NO: 181190 - RNA, 32 nt, Homo Sapiens
ccucagccuccucuccuaggucccuccgcccg

SEQ ID NO: 181191 - RNA, 32 nt, Homo Sapiens
agagugaggaggaggaggagccuugguccaug

SEQ ID NO: 181192 - RNA, 32 nt, Homo Sapiens
aagguggaauggggggcucuggcuuggugaga

SEQ ID NO: 181193 - RNA, 31 nt, Homo Sapiens
gagacgaugguggaccacuuggccaacacgg

SEQ ID NO: 181194 - RNA, 32 nt, Homo Sapiens
uuagauuuauuccuguuuaauucauaauggug

SEQ ID NO: 181195 - RNA, 32 nt, Homo Sapiens
uggauagaacuguguuuaauguccuguuguag

SEQ ID NO: 181196 - RNA, 32 nt, Homo Sapiens
aaugcuuaauauuuuggauacuauuuguuuuu

SEQ ID NO: 181197 - RNA, 32 nt, Homo Sapiens
ccuucgcagugcccucuacugggaauccuccu

SEQ ID NO: 181198 - RNA, 32 nt, Homo Sapiens
gauucaagacucaauguggaaaaaauauuuua

SEQ ID NO: 181199 - RNA, 32 nt, Homo Sapiens
cuccacuccuacuccuucucuuacugugccac

SEQ ID NO: 181200 - RNA, 32 nt, Homo Sapiens
uuccagaauauguuggaauuucagacuccgga

SEQ ID NO: 181201 - RNA, 31 nt, Homo Sapiens
ugauaaaauagccaagagguauaucgaugau

SEQ ID NO: 181202 - RNA, 32 nt, Homo Sapiens
ccgccugcggagagcaccgggcggccgggccu

SEQ ID NO: 181203 - RNA, 32 nt, Homo Sapiens
augaccuugcucuuggauuugcugagcaugau

SEQ ID NO: 181204 - RNA, 32 nt, Homo Sapiens
cguagcccgugcgcccucggcgcggagccccg

SEQ ID NO: 181205 - RNA, 32 nt, Homo Sapiens
cuuuggaggauauugauggggguggagguggg

SEQ ID NO: 181206 - RNA, 32 nt, Homo Sapiens
aauuguucuugaugaaucuauaugagucauag

SEQ ID NO: 181207 - RNA, 32 nt, Homo Sapiens
cuucuuuuucuuuuuuauuaccagguccauuu

SEQ ID NO: 181208 - RNA, 32 nt, Homo Sapiens
accucaauuauuggacaauacuguauagcuag

SEQ ID NO: 181209 - RNA, 32 nt, Homo Sapiens
cgggccggagcgggguguuggcggcggccggu

SEQ ID NO: 181210 - RNA, 32 nt, Homo Sapiens
agguugcauuauuuauacuugagauuuuuuuc

SEQ ID NO: 181211 - RNA, 32 nt, Homo Sapiens
uguacuucagauucuuuuuucucuugggggcc

SEQ ID NO: 181212 - RNA, 32 nt, Homo Sapiens
ccuuccgcacgcuggaagccugcccggccuga

SEQ ID NO: 181213 - RNA, 32 nt, Homo Sapiens
aguagcagaguagggugaaaaggaacuuucug

SEQ ID NO: 181214 - RNA, 32 nt, Homo Sapiens
aauggaugaugaugaugacuguuaccagggcu

SEQ ID NO: 181215 - RNA, 32 nt, Homo Sapiens
aaacgcuuacacaaagaacaauuugaggcucu

SEQ ID NO: 181216 - RNA, 32 nt, Homo Sapiens
caguucagugaacacaaaacuuauuuaaagau

SEQ ID NO: 181217 - RNA, 32 nt, Homo Sapiens
gcggcuaacaaggcugcuuguuugagcuacuu

SEQ ID NO: 181218 - RNA, 32 nt, Homo Sapiens
agauggacagcuugguuaccuccaccuuccug

SEQ ID NO: 181219 - RNA, 32 nt, Homo Sapiens
caguugauuucccccauccccaguuuauggau

SEQ ID NO: 181220 - RNA, 32 nt, Homo Sapiens
auagaggagaggaaaagguauaggcuugccuu

SEQ ID NO: 181221 - RNA, 32 nt, Homo Sapiens
cucgucggccugccccagcugcaggcccggug

SEQ ID NO: 181222 - RNA, 32 nt, Homo Sapiens
ggcugugcgaggcauccuggggcuggcagcac

SEQ ID NO: 181223 - RNA, 32 nt, Homo Sapiens
acagaaaaagcaaucaaggagaagaagauuuu

SEQ ID NO: 181224 - RNA, 32 nt, Homo Sapiens
auuauuguacuauucuaaauguaagauuuuua

SEQ ID NO: 181225 - RNA, 32 nt, Homo Sapiens
gaaaaggagugagaagacaaagccgucaaagc

SEQ ID NO: 181226 - RNA, 32 nt, Homo Sapiens
ugcccucuccccaccccuuccaaugagcuccu

SEQ ID NO: 181227 - RNA, 32 nt, Homo Sapiens
ccuuggcaguaccauggagcaacugacaaccc

SEQ ID NO: 181228 - RNA, 29 nt, Homo Sapiens
aagccuuggccucagaggacccuuuccag

SEQ ID NO: 181229 - RNA, 32 nt, Homo Sapiens
aaaacaauacagagcuuuugggaauggaauca

SEQ ID NO: 181230 - RNA, 32 nt, Homo Sapiens
caugcgucccgugagggcgguuccucgagccu

SEQ ID NO: 181231 - RNA, 32 nt, Homo Sapiens
uugaacacugaauaucuuuuugaaagauuaua

SEQ ID NO: 181232 - RNA, 32 nt, Homo Sapiens
ccuuuugacauuagucacguggaacuugaugc

SEQ ID NO: 181233 - RNA, 32 nt, Homo Sapiens
uaucaaguuaauuaauaaaaauacuagguauu

SEQ ID NO: 181234 - RNA, 32 nt, Homo Sapiens
uucuggccuaugucuugacuccguauuccugg

SEQ ID NO: 181235 - RNA, 32 nt, Homo Sapiens
uugcucaagaauuuuuuccgucaaauugugaa

SEQ ID NO: 181236 - RNA, 32 nt, Homo Sapiens
cccgcggccccgagcgcacgaugcgcggaccc

SEQ ID NO: 181237 - RNA, 32 nt, Homo Sapiens
aagaaagcaacugaaauugaaaucuugagggc

SEQ ID NO: 181238 - RNA, 32 nt, Homo Sapiens
guccaacccccuccccgcuuuucacagguugg

SEQ ID NO: 181239 - RNA, 32 nt, Homo Sapiens
ccuuauucacuuuaaagcuuuguucaucuaca

SEQ ID NO: 181240 - RNA, 32 nt, Homo Sapiens
gagacugucgguuuuucuaguucuugcaaagg

SEQ ID NO: 181241 - RNA, 32 nt, Homo Sapiens
aucuauugacugaauuaucuuuugcagauauc

SEQ ID NO: 181242 - RNA, 32 nt, Homo Sapiens
cccuggcugugacccuuccacaccccagaacu

SEQ ID NO: 181243 - RNA, 32 nt, Homo Sapiens
ccaacaguccuggccucccccaucccuaggcu

SEQ ID NO: 181244 - RNA, 32 nt, Homo Sapiens
cccccuugcagaccccacccccugccugcucu

SEQ ID NO: 181245 - RNA, 32 nt, Homo Sapiens
accacuggcucuugggcaaacguccuuccuca

SEQ ID NO: 181246 - RNA, 32 nt, Homo Sapiens
gaccugcugucauccccaucuguggccugggg

SEQ ID NO: 181247 - RNA, 32 nt, Homo Sapiens
ggccagaagugcaauuaaccucuuagguggca

SEQ ID NO: 181248 - RNA, 32 nt, Homo Sapiens
gugcacacgaucucagggcuggugcugagcag

SEQ ID NO: 181249 - RNA, 32 nt, Homo Sapiens
uuauuuacuccucugccuuccauugcagcucu

SEQ ID NO: 181250 - RNA, 32 nt, Homo Sapiens
ggucccugacuucccacaacaaauuaaugaua

SEQ ID NO: 181251 - RNA, 32 nt, Homo Sapiens
gcccgugcguggucuuucuccuccuuuucaaa

SEQ ID NO: 181252 - RNA, 32 nt, Homo Sapiens
ccuuuuuuuuuuucuuuuuaucuuuuaucugg

SEQ ID NO: 181253 - RNA, 32 nt, Homo Sapiens
ggugucugcgcuccccgcaaugggcugcucca

SEQ ID NO: 181254 - RNA, 32 nt, Homo Sapiens
gaaguuauuuuugcuuuuucuuagauaggauu

SEQ ID NO: 181255 - RNA, 32 nt, Homo Sapiens
uaggcucugauuccuuggggccccaggagccu

SEQ ID NO: 181256 - RNA, 32 nt, Homo Sapiens
cgugaauauaggcuaccaaaacauagaugaca

SEQ ID NO: 181257 - RNA, 32 nt, Homo Sapiens
cccucucauuauuauuuuaaaaacagacaccc

SEQ ID NO: 181258 - RNA, 32 nt, Homo Sapiens
ggggcguguggcgggcgggugaggcugcuuug

SEQ ID NO: 181259 - RNA, 32 nt, Homo Sapiens
agggaccaggguagaugcccccugcccucgaa

SEQ ID NO: 181260 - RNA, 32 nt, Homo Sapiens
ugaaaaugucuuaaauucccaccuaaaugaaa

SEQ ID NO: 181261 - RNA, 32 nt, Homo Sapiens
uugcugggcuuucugggagauguugucucuuu

SEQ ID NO: 181262 - RNA, 32 nt, Homo Sapiens
gggaagcacauuagcuugcuugaagugcugau

SEQ ID NO: 181263 - RNA, 31 nt, Homo Sapiens
caugguuauugucaagguggaggauccguga

SEQ ID NO: 181264 - RNA, 29 nt, Homo Sapiens
uguccuucuauccaaacagacguucacug

SEQ ID NO: 181265 - RNA, 32 nt, Homo Sapiens
aaaagauaaugaagggaauuguuggaaauaga

SEQ ID NO: 181266 - RNA, 32 nt, Homo Sapiens
cagcaggguggcugaugacuuauuuaagucau

SEQ ID NO: 181267 - RNA, 32 nt, Homo Sapiens
gagagccgccucugugcccccaucccacuggg

SEQ ID NO: 181268 - RNA, 30 nt, Homo Sapiens
gagcagcgcgcgcgucaccagagucguuuc

SEQ ID NO: 181269 - RNA, 32 nt, Homo Sapiens
gaugccaggaggaugagagcggcgccccccug

SEQ ID NO: 181270 - RNA, 32 nt, Homo Sapiens
aagguguuucuagauagcacaggagagcaggc

SEQ ID NO: 181271 - RNA, 32 nt, Homo Sapiens
uuuuuuuugaaauuauuucaaaauaaaauuau

SEQ ID NO: 181272 - RNA, 32 nt, Homo Sapiens
gagucucgcucuuucgcccaggcuggagugca

SEQ ID NO: 181273 - RNA, 32 nt, Homo Sapiens
aagugggggagguggagggggaggcaggcacc

SEQ ID NO: 181274 - RNA, 32 nt, Homo Sapiens
gccugcagggagcgagccggccugucccgaug

SEQ ID NO: 181275 - RNA, 32 nt, Homo Sapiens
auauaagacaguuuauacuuugagagaaaccc

SEQ ID NO: 181276 - RNA, 32 nt, Homo Sapiens
aaucuccauuuucugaaggucuguuaguuaau

SEQ ID NO: 181277 - RNA, 32 nt, Homo Sapiens
uaaucauuauauuugcagugaauuuuuucuag

SEQ ID NO: 181278 - RNA, 32 nt, Homo Sapiens
uagggggaaaugggggcgacagauauuauucc

SEQ ID NO: 181279 - RNA, 32 nt, Homo Sapiens
gcagcuguacuaucuaccaaccaugcugagga

SEQ ID NO: 181280 - RNA, 32 nt, Homo Sapiens
uaaugacuauguaaucucaaaaaacaaauaaa

SEQ ID NO: 181281 - RNA, 32 nt, Homo Sapiens
aguaauacugauuaucuuauuauuauguuacu

SEQ ID NO: 181282 - RNA, 32 nt, Homo Sapiens
auuccagaagccucuccuccccgccgcccucc

SEQ ID NO: 181283 - RNA, 32 nt, Homo Sapiens
uagccauccacuuuucaaacuaaaagaccuac

SEQ ID NO: 181284 - RNA, 32 nt, Homo Sapiens
gcugcgcccucccugaccucccaggcugcggc

SEQ ID NO: 181285 - RNA, 30 nt, Homo Sapiens
agcagcagcgcggcggcgccggcgucgucc

SEQ ID NO: 181286 - RNA, 32 nt, Homo Sapiens
agagauucccuuaagugacuccagguuuucca

SEQ ID NO: 181287 - RNA, 32 nt, Homo Sapiens
cgugaguggggaggagacucaggcccacauug

SEQ ID NO: 181288 - RNA, 32 nt, Homo Sapiens
ggagagccuguccugccuccaguccaccugug

SEQ ID NO: 181289 - RNA, 32 nt, Homo Sapiens
uccucaucuccagccuccccaccccaguggga

SEQ ID NO: 181290 - RNA, 32 nt, Homo Sapiens
gaaggaagguggugcacgcagaagagagguua

SEQ ID NO: 181291 - RNA, 32 nt, Homo Sapiens
ugcugucagcccuguguggucaacgaauacua

SEQ ID NO: 181292 - RNA, 32 nt, Homo Sapiens
caggcauacucacacacagacacacacacaca

SEQ ID NO: 181293 - RNA, 32 nt, Homo Sapiens
ucucggcgcgcccggcgcgaagccugcgauuc

SEQ ID NO: 181294 - RNA, 32 nt, Homo Sapiens
gagaaacuucugugcugcuuuccacagugguu

SEQ ID NO: 181295 - RNA, 32 nt, Homo Sapiens
cacauuaaaaauacucugcugccuauacaaug

SEQ ID NO: 181296 - RNA, 32 nt, Homo Sapiens
caucacuuuggucagagcugcugcugaagcuc

SEQ ID NO: 181297 - RNA, 32 nt, Homo Sapiens
ccgaaucugaugcugcugcugccuuugcaagg

SEQ ID NO: 181298 - RNA, 32 nt, Homo Sapiens
agcaaaccaaaguggauaauggacuuuuucau

SEQ ID NO: 181299 - RNA, 30 nt, Homo Sapiens
ggaugggauuguagcggcggcgcggacucg

SEQ ID NO: 181300 - RNA, 31 nt, Homo Sapiens
ccuguuggggccgagccaggagucccaaguc

SEQ ID NO: 181301 - RNA, 32 nt, Homo Sapiens
cugcggcccgcaccccaagcuccaggcuugau

SEQ ID NO: 181302 - RNA, 30 nt, Homo Sapiens
cccaucauucuugugggggaaaaauucuag

SEQ ID NO: 181303 - RNA, 32 nt, Homo Sapiens
ucucgagggcuuccuuuuugcauaccuguauu

SEQ ID NO: 181304 - RNA, 32 nt, Homo Sapiens
ugccuaugccuuuuaaugucugcacagucugu

SEQ ID NO: 181305 - RNA, 32 nt, Homo Sapiens
aacucuugaaagaagauuauuaguuguaacua

SEQ ID NO: 181306 - RNA, 32 nt, Homo Sapiens
acguguaaucccaacacuuugggaggcugagg

SEQ ID NO: 181307 - RNA, 32 nt, Homo Sapiens
auuuaacuggagacauaaucucaauuuguaaa

SEQ ID NO: 181308 - RNA, 32 nt, Homo Sapiens
uauuuuuaaaacgaagaucgauaauaucuacu

SEQ ID NO: 181309 - RNA, 32 nt, Homo Sapiens
aguguugggcagugacaccaugccaaacacug

SEQ ID NO: 181310 - RNA, 32 nt, Homo Sapiens
uggccugggaggucuguaauuccugucuccug

SEQ ID NO: 181311 - RNA, 32 nt, Homo Sapiens
cgacugcccaaccuggugaguggcggggcggc

SEQ ID NO: 181312 - RNA, 28 nt, Homo Sapiens
gcaaugaagugguccaaaggcaaaguuc

SEQ ID NO: 181313 - RNA, 32 nt, Homo Sapiens
ucaaauauugucuucgacugcuauguguauag

SEQ ID NO: 181314 - RNA, 32 nt, Homo Sapiens
ggauucuucccgcuccccaccuacccagcuga

SEQ ID NO: 181315 - RNA, 32 nt, Homo Sapiens
ugugcugggcccgaggcccugacuucuugcug

SEQ ID NO: 181316 - RNA, 32 nt, Homo Sapiens
uuggauuuucuuuuuguggucauugugaguga

SEQ ID NO: 181317 - RNA, 30 nt, Homo Sapiens
ugcuggggaggugaaugccacauccuuggc

SEQ ID NO: 181318 - RNA, 32 nt, Homo Sapiens
gaaccagauucauacacaaaauguaagauaau

SEQ ID NO: 181319 - RNA, 32 nt, Homo Sapiens
aguguggcaccuccccucccaagccccccuug

SEQ ID NO: 181320 - RNA, 32 nt, Homo Sapiens
gcucccacuccagcucccuguauugauauaac

SEQ ID NO: 181321 - RNA, 32 nt, Homo Sapiens
gucagauuguugauauauaccuucuguaaaua

SEQ ID NO: 181322 - RNA, 32 nt, Homo Sapiens
ucugggcaguugcagagcagguuuguuuguuu

SEQ ID NO: 181323 - RNA, 32 nt, Homo Sapiens
aauaaaguaucaccuagauugaacuaagcagg

SEQ ID NO: 181324 - RNA, 32 nt, Homo Sapiens
uuguguugacauuccauaagaugaguuggcau

SEQ ID NO: 181325 - RNA, 32 nt, Homo Sapiens
acugguccuccccuccgcacaggaaagguacc

SEQ ID NO: 181326 - RNA, 32 nt, Homo Sapiens
gcuugauccagaagagcccauaucacuaagau

SEQ ID NO: 181327 - RNA, 32 nt, Homo Sapiens
cucaaaauauauguauaugggugaaauugaag

SEQ ID NO: 181328 - RNA, 32 nt, Homo Sapiens
uuuuuggccuguaucucuccuacuccucugag

SEQ ID NO: 181329 - RNA, 32 nt, Homo Sapiens
ucuauugagaaauuauuuugcagugguuuuag

SEQ ID NO: 181330 - RNA, 32 nt, Homo Sapiens
cuuuauguacuuuuuuuuuuuaucauggaaca

SEQ ID NO: 181331 - RNA, 32 nt, Homo Sapiens
guggaauaaagaugguccaaaaauagucaaaa

SEQ ID NO: 181332 - RNA, 32 nt, Homo Sapiens
gagagggcaccucgaugccugcucugaccuga

SEQ ID NO: 181333 - RNA, 32 nt, Homo Sapiens
aacccucagauaacugcagaauguagaacauu

SEQ ID NO: 181334 - RNA, 32 nt, Homo Sapiens
ccagucccuccucugcucuccucaaagacgca

SEQ ID NO: 181335 - RNA, 32 nt, Homo Sapiens
agggcuugugccccgcuauuccucacucagag

SEQ ID NO: 181336 - RNA, 32 nt, Homo Sapiens
ucccuguuccagggguuccagaauaggcuucc

SEQ ID NO: 181337 - RNA, 32 nt, Homo Sapiens
gugccaaccugaugaccacagcagaaaccccc

SEQ ID NO: 181338 - RNA, 32 nt, Homo Sapiens
acagcaagugaacaggggcuaccugccacauc

SEQ ID NO: 181339 - RNA, 32 nt, Homo Sapiens
cuguagucuaucugacuccccauccuggaauu

SEQ ID NO: 181340 - RNA, 32 nt, Homo Sapiens
gcaggggcgggggaugaggcggacgacgagcg

SEQ ID NO: 181341 - RNA, 32 nt, Homo Sapiens
guuugcuuguuguguuugcuuggaggcgacag

SEQ ID NO: 181342 - RNA, 32 nt, Homo Sapiens
ccuccccagguccgcccgucugcgccccucac

SEQ ID NO: 181343 - RNA, 32 nt, Homo Sapiens
aaugccccaaggacaaggggcgugccuggcgc

SEQ ID NO: 181344 - RNA, 32 nt, Homo Sapiens
uagucccugcuccucuuagaaucuucaccaag

SEQ ID NO: 181345 - RNA, 32 nt, Homo Sapiens
ucgcaaugcggcuagcgcgcuccggcgcgcgg

SEQ ID NO: 181346 - RNA, 32 nt, Homo Sapiens
ucaggcgcuggcccggcccagaggggacagga

SEQ ID NO: 181347 - RNA, 32 nt, Homo Sapiens
gcccgcgcccacccggccacggcgggcacuca

SEQ ID NO: 181348 - RNA, 32 nt, Homo Sapiens
ugccucuguaaggggcucugggacgcccagac

SEQ ID NO: 181349 - RNA, 32 nt, Homo Sapiens
ugcuuuuucuuacuuuguagcuacacuuugaa

SEQ ID NO: 181350 - RNA, 32 nt, Homo Sapiens
caggucugggauugagacccaggccuggcugg

SEQ ID NO: 181351 - RNA, 31 nt, Homo Sapiens
aagaagaaauaaauuuaguuauugcucagau

SEQ ID NO: 181352 - RNA, 31 nt, Homo Sapiens
caaucccagugcuacaccugagguucuggag

SEQ ID NO: 181353 - RNA, 32 nt, Homo Sapiens
cuguacagaaaagguaagagaaaugcuagauu

SEQ ID NO: 181354 - RNA, 32 nt, Homo Sapiens
uaaaauaaacaaauaagacagcacuuuauacu

SEQ ID NO: 181355 - RNA, 32 nt, Homo Sapiens
uucaguauuuauuggauacccucuauugguca

SEQ ID NO: 181356 - RNA, 32 nt, Homo Sapiens
cacagcugacgggcucaggagcuccaugaagg

SEQ ID NO: 181357 - RNA, 32 nt, Homo Sapiens
gggaugacuccacccuccccuacuaugcccag

SEQ ID NO: 181358 - RNA, 32 nt, Homo Sapiens
aauucauuuucagagcacuuuaaagucugaua

SEQ ID NO: 181359 - RNA, 32 nt, Homo Sapiens
ccuuuccaggccagcucuuuguuuuguagcag

SEQ ID NO: 181360 - RNA, 32 nt, Homo Sapiens
uguauuuuuuauuuuccaauacugcauccaug

SEQ ID NO: 181361 - RNA, 32 nt, Homo Sapiens
aaaucuuucuaaaaugcacaauuauaauuucu

SEQ ID NO: 181362 - RNA, 32 nt, Homo Sapiens
cggugccgcagcugcgauggccguggccgugg

SEQ ID NO: 181363 - RNA, 32 nt, Homo Sapiens
gucuucaucuuuacagaggaauagucuacaaa

SEQ ID NO: 181364 - RNA, 32 nt, Homo Sapiens
aacccuuuaucaugcauaucaggaaguagagu

SEQ ID NO: 181365 - RNA, 32 nt, Homo Sapiens
cucuaucuccuccucuuacaaauacaggcuug

SEQ ID NO: 181366 - RNA, 32 nt, Homo Sapiens
ggcaauuuacacaucgaaaaaacauggccaaa

SEQ ID NO: 181367 - RNA, 32 nt, Homo Sapiens
gaugacauugcccgcccucccccuaggcccag

SEQ ID NO: 181368 - RNA, 32 nt, Homo Sapiens
ccacccuguaucuauuuuuaauugcuuuguga

SEQ ID NO: 181369 - RNA, 32 nt, Homo Sapiens
gaacuugcguguauaauucuuguguacauccu

SEQ ID NO: 181370 - RNA, 32 nt, Homo Sapiens
ggaaaucucuacagccugaucauugcucuccu

SEQ ID NO: 181371 - RNA, 32 nt, Homo Sapiens
gugcagcagaaucuggcaggacugauauuugu

SEQ ID NO: 181372 - RNA, 31 nt, Homo Sapiens
acuuuuauggucauacauauaugauacaaau

SEQ ID NO: 181373 - RNA, 32 nt, Homo Sapiens
gaucuuuuuuggcaucacuguggaccaggcgu

SEQ ID NO: 181374 - RNA, 32 nt, Homo Sapiens
uucaagcucugcaacagggggcaaagauuaau

SEQ ID NO: 181375 - RNA, 32 nt, Homo Sapiens
acauguuggucccagccucugcguuuccagau

SEQ ID NO: 181376 - RNA, 32 nt, Homo Sapiens
ugaaauuuuaaagggaggggguccauguccuu

SEQ ID NO: 181377 - RNA, 32 nt, Homo Sapiens
gauuuaccuuuggauucuacuuuuuuccauaa

SEQ ID NO: 181378 - RNA, 32 nt, Homo Sapiens
gagaggucuccaugugacacaugggcucaggg

SEQ ID NO: 181379 - RNA, 28 nt, Homo Sapiens
uuguugaaagauuuaagaguuugggccg

SEQ ID NO: 181380 - RNA, 32 nt, Homo Sapiens
gaaauaaagcaucucauuuugaguagagagca

SEQ ID NO: 181381 - RNA, 32 nt, Homo Sapiens
ggugccuugcagagagacucacagcaacucuc

SEQ ID NO: 181382 - RNA, 32 nt, Homo Sapiens
auuguaaaaaaauaaaauuaaaauuaaaaaaa

SEQ ID NO: 181383 - RNA, 32 nt, Homo Sapiens
guaucucauugugguuuugauuugcauuucuc

SEQ ID NO: 181384 - RNA, 32 nt, Homo Sapiens
cagcagcggcgcggccggccccagucgccguc

SEQ ID NO: 181385 - RNA, 32 nt, Homo Sapiens
uaaugaauguaaaagggaaauaaaagucuuuu

SEQ ID NO: 181386 - RNA, 32 nt, Homo Sapiens
uuuuguuuuuauuuugggggccuuuuuugaca

SEQ ID NO: 181387 - RNA, 32 nt, Homo Sapiens
ggggaccccuccccagagccggccggacccca

SEQ ID NO: 181388 - RNA, 32 nt, Homo Sapiens
accacugcaucugugucagcaacagcagcucc

SEQ ID NO: 181389 - RNA, 32 nt, Homo Sapiens
uaagcuuccuuccuugcagcuaaauguugcag

SEQ ID NO: 181390 - RNA, 32 nt, Homo Sapiens
agaggauguggaaagcacuuuuuggcugacuu

SEQ ID NO: 181391 - RNA, 32 nt, Homo Sapiens
caguucuuucuccucaguuuccaaaguaaaug

SEQ ID NO: 181392 - RNA, 32 nt, Homo Sapiens
cuguucgggccagcgcccgccggcugcuccgc

SEQ ID NO: 181393 - RNA, 32 nt, Homo Sapiens
auuuaaaaucaucuuauucugacuuaauuacc

SEQ ID NO: 181394 - RNA, 32 nt, Homo Sapiens
ggccaaucucuuuuccauuaaauaaacuguaa

SEQ ID NO: 181395 - RNA, 32 nt, Homo Sapiens
gagcugccugaaggauucagugucuugguguu

SEQ ID NO: 181396 - RNA, 32 nt, Homo Sapiens
uccuucuccuacucccugucuuucuggcauuu

SEQ ID NO: 181397 - RNA, 32 nt, Homo Sapiens
aggaaccugccaguucagggaggcccaccuuu

SEQ ID NO: 181398 - RNA, 32 nt, Homo Sapiens
gagacacccggggccuggccacgcucuggggc

SEQ ID NO: 181399 - RNA, 32 nt, Homo Sapiens
cuggaggauaaccagcaggagcagagauaacu

SEQ ID NO: 181400 - RNA, 32 nt, Homo Sapiens
cugguagcuggguugcucugcuucuguccccg

SEQ ID NO: 181401 - RNA, 32 nt, Homo Sapiens
aguguggggacugucauuuuugugauuuaaua

SEQ ID NO: 181402 - RNA, 32 nt, Homo Sapiens
ggauccggguaccaugggaggaaaacuucuuc

SEQ ID NO: 181403 - RNA, 32 nt, Homo Sapiens
guaaggucgcugccuuccuucucugccagaga

SEQ ID NO: 181404 - RNA, 32 nt, Homo Sapiens
ucucucaugauuuuuguuuuguuuucaacaaa

SEQ ID NO: 181405 - RNA, 32 nt, Homo Sapiens
uagauuaguuaaugguuuuucuugaauucgag

SEQ ID NO: 181406 - RNA, 32 nt, Homo Sapiens
auuuuaucuggcagugucgaaaauaguaggag

SEQ ID NO: 181407 - RNA, 32 nt, Homo Sapiens
gucaaccacauuggauaauucaauugcaauaa

SEQ ID NO: 181408 - RNA, 32 nt, Homo Sapiens
gagauuaggcgaauuaaugacucugcaauggc

SEQ ID NO: 181409 - RNA, 32 nt, Homo Sapiens
ccacuguccacguaguugaacuucugggauca

SEQ ID NO: 181410 - RNA, 32 nt, Homo Sapiens
uauaccaacuuugauuugauaauacccuugaa

SEQ ID NO: 181411 - RNA, 32 nt, Homo Sapiens
ggacgccagggacuccucuccgucucccugga

SEQ ID NO: 181412 - RNA, 32 nt, Homo Sapiens
aagagcaaccccagcccgucccuuccccccgu

SEQ ID NO: 181413 - RNA, 32 nt, Homo Sapiens
uccaagagcccccugagcucagcccucugccu

SEQ ID NO: 181414 - RNA, 32 nt, Homo Sapiens
uaaauacauuaaaguuauuucuuaagaaaaaa

SEQ ID NO: 181415 - RNA, 32 nt, Homo Sapiens
auauuuuugucaauguaugacuuuucagccac

SEQ ID NO: 181416 - RNA, 32 nt, Homo Sapiens
cucccaucuuuuuuccucuucagucucccagu

SEQ ID NO: 181417 - RNA, 32 nt, Homo Sapiens
gcuauuuauagaaaacgagaaaaaagaaaaaa

SEQ ID NO: 181418 - RNA, 32 nt, Homo Sapiens
cuggcggggggaggaggcaggaaccgcgaugg

SEQ ID NO: 181419 - RNA, 32 nt, Homo Sapiens
acuggucuggccugcuggccugggcgucaggg

SEQ ID NO: 181420 - RNA, 32 nt, Homo Sapiens
uucaucuguuuauacaagucuaccacugccga

SEQ ID NO: 181421 - RNA, 32 nt, Homo Sapiens
uagaaagaggucuuguauuugcugcaucguaa

SEQ ID NO: 181422 - RNA, 32 nt, Homo Sapiens
cugagaaauuaccagaagaaauuaaaauccuu

SEQ ID NO: 181423 - RNA, 32 nt, Homo Sapiens
uccaaagccuuuuacagcccccgccccccauc

SEQ ID NO: 181424 - RNA, 32 nt, Homo Sapiens
auacuguaugaauaagaaaauaaaauauuuga

SEQ ID NO: 181425 - RNA, 32 nt, Homo Sapiens
uccagucuguugcaguaacaaacucuagaaua

SEQ ID NO: 181426 - RNA, 32 nt, Homo Sapiens
ugaauggauauuuguuucuauauccugauaau

SEQ ID NO: 181427 - RNA, 32 nt, Homo Sapiens
aagacuucaggguggggugggcaugggguggg

SEQ ID NO: 181428 - RNA, 32 nt, Homo Sapiens
ggcagugcugccucuuguaggugcuggcuaag

SEQ ID NO: 181429 - RNA, 32 nt, Homo Sapiens
ucuggauuuaauggggggaaaagggcggaaaa

SEQ ID NO: 181430 - RNA, 32 nt, Homo Sapiens
uugagaaucaagcauuuaagcauuucagugau

SEQ ID NO: 181431 - RNA, 32 nt, Homo Sapiens
uucuauuuuucuuccuucucuacacagccccu

SEQ ID NO: 181432 - RNA, 32 nt, Homo Sapiens
ucccucuggauuccccaccuccccuggaaccu

SEQ ID NO: 181433 - RNA, 32 nt, Homo Sapiens
uuuuuguuguuguuuauagacacucuugggug

SEQ ID NO: 181434 - RNA, 32 nt, Homo Sapiens
caauugguggugcuggaauccccuaggagccu

SEQ ID NO: 181435 - RNA, 32 nt, Homo Sapiens
gcccugcccccgccuccuuccccuccucggcc

SEQ ID NO: 181436 - RNA, 29 nt, Homo Sapiens
uaaaaugugggaagagagaagcaaauuaa

SEQ ID NO: 181437 - RNA, 32 nt, Homo Sapiens
acaaaaaaacccucacuaauuugcccuaauug

SEQ ID NO: 181438 - RNA, 30 nt, Homo Sapiens
cggcggcgcccgcagcaccuguugcccggu

SEQ ID NO: 181439 - RNA, 32 nt, Homo Sapiens
acccaguccagcugcuauaacugcuuggacac

SEQ ID NO: 181440 - RNA, 32 nt, Homo Sapiens
ugcauuacaccuguaguguaaaguggccacua

SEQ ID NO: 181441 - RNA, 32 nt, Homo Sapiens
ugccucaaggucucuguaaaugaaauaaacug

SEQ ID NO: 181442 - RNA, 32 nt, Homo Sapiens
cagaggcagggccauaccaucaucuugggugc

SEQ ID NO: 181443 - RNA, 32 nt, Homo Sapiens
caguguauuuuccauaaagugauucgggcaua

SEQ ID NO: 181444 - RNA, 32 nt, Homo Sapiens
cacccggcccacgcgugcugcagaugugggga

SEQ ID NO: 181445 - RNA, 32 nt, Homo Sapiens
ccacagccacuacugcugcagccagccacagg

SEQ ID NO: 181446 - RNA, 32 nt, Homo Sapiens
cugggagcgcugcugcgccgcggcaggagaaa

SEQ ID NO: 181447 - RNA, 32 nt, Homo Sapiens
aucuuuuucuuuucuuuuuuuuagaauagcug

SEQ ID NO: 181448 - RNA, 32 nt, Homo Sapiens
uuugcaaguggaaaccuguauuuauacauuag

SEQ ID NO: 181449 - RNA, 32 nt, Homo Sapiens
uccgcuccaugacugucgcgcggccgcgccgg

SEQ ID NO: 181450 - RNA, 32 nt, Homo Sapiens
auuuuguuuuguaguuugcagaugagcauuuc

SEQ ID NO: 181451 - RNA, 32 nt, Homo Sapiens
gugaguauaguaacccaagaugccauaaaaaa

SEQ ID NO: 181452 - RNA, 32 nt, Homo Sapiens
acugggcgccuccuccucccccuccuccucac

SEQ ID NO: 181453 - RNA, 32 nt, Homo Sapiens
ggucgcggguaguuggugggcacaagagcgag

SEQ ID NO: 181454 - RNA, 32 nt, Homo Sapiens
gcugccaccuccugggcagcugugggugcccc

SEQ ID NO: 181455 - RNA, 32 nt, Homo Sapiens
ggccacugcaccagcccucagcucagggggaa

SEQ ID NO: 181456 - RNA, 32 nt, Homo Sapiens
acguggagcugcuggaggugcuccaggcgcgg

SEQ ID NO: 181457 - RNA, 32 nt, Homo Sapiens
ucaggaguaagcaagacagagaaggucucucu

SEQ ID NO: 181458 - RNA, 32 nt, Homo Sapiens
ggccuggaccucuggccucauucuucaaagcc

SEQ ID NO: 181459 - RNA, 32 nt, Homo Sapiens
auaggagugcggucuuccuucuggacauuucu

SEQ ID NO: 181460 - RNA, 32 nt, Homo Sapiens
uuccgaauccucccaguugaggcaguagcugu

SEQ ID NO: 181461 - RNA, 32 nt, Homo Sapiens
agaaaaggccccagaaugggcuggcuugaacu

SEQ ID NO: 181462 - RNA, 32 nt, Homo Sapiens
uggaauacaggggaaugaugacaaccagccca

SEQ ID NO: 181463 - RNA, 32 nt, Homo Sapiens
gugguuucauuguagguacauagugcacuguu

SEQ ID NO: 181464 - RNA, 32 nt, Homo Sapiens
acggggggaaaggccuguagcggggcugccca

SEQ ID NO: 181465 - RNA, 32 nt, Homo Sapiens
ccaggggaaaaguuaacaaguuaucuuucgua

SEQ ID NO: 181466 - RNA, 32 nt, Homo Sapiens
cuccccucuccuguaccccuuggaccugggau

SEQ ID NO: 181467 - RNA, 32 nt, Homo Sapiens
agagaagcacgcuguccccgucucuccuggcu

SEQ ID NO: 181468 - RNA, 32 nt, Homo Sapiens
uuacaggcaaagugggagggagcugggggaca

SEQ ID NO: 181469 - RNA, 27 nt, Homo Sapiens
agugagggaaauguuggacaugugcag

SEQ ID NO: 181470 - RNA, 32 nt, Homo Sapiens
ggggaggaauggguuucuucuugacagcugac

SEQ ID NO: 181471 - RNA, 32 nt, Homo Sapiens
auaccuaaacagagauagcucaucuuugccua

SEQ ID NO: 181472 - RNA, 32 nt, Homo Sapiens
ugagcaggcagcucccaccuccuggcaggcuu

SEQ ID NO: 181473 - RNA, 32 nt, Homo Sapiens
aaaaaaguucaagucauguuauacaggugugu

SEQ ID NO: 181474 - RNA, 32 nt, Homo Sapiens
cagcauaaagucaugagaagugaagaauguga

SEQ ID NO: 181475 - RNA, 32 nt, Homo Sapiens
aaagaaaagucacaguaggcacucuuuaccag

SEQ ID NO: 181476 - RNA, 32 nt, Homo Sapiens
gggcuucaucaacuccuucuggcuggaaagag

SEQ ID NO: 181477 - RNA, 32 nt, Homo Sapiens
ugauuuucuggccuuuggagaagugauucaaa

SEQ ID NO: 181478 - RNA, 32 nt, Homo Sapiens
gcagaauuuugagccaaugcaagcauuuuuaa

SEQ ID NO: 181479 - RNA, 32 nt, Homo Sapiens
uuguacaucuuauauacaacacugcuaaaaag

SEQ ID NO: 181480 - RNA, 32 nt, Homo Sapiens
gggaugcggcugccuccccgggccggggugua

SEQ ID NO: 181481 - RNA, 32 nt, Homo Sapiens
ugggcugugaggccuggggcccgggguagcua

SEQ ID NO: 181482 - RNA, 30 nt, Homo Sapiens
uaggcguggggcgcucccggcaugucccug

SEQ ID NO: 181483 - RNA, 32 nt, Homo Sapiens
cugcagggccaggacgcacguuucaagcucau

SEQ ID NO: 181484 - RNA, 32 nt, Homo Sapiens
gcuucuugccccuguugacguggaaugcugug

SEQ ID NO: 181485 - RNA, 32 nt, Homo Sapiens
ucccccgcucggggaccccggccacccgcagc

SEQ ID NO: 181486 - RNA, 32 nt, Homo Sapiens
agaacguacagcuuggagggcaagggggacuc

SEQ ID NO: 181487 - RNA, 32 nt, Homo Sapiens
guuuuuugagcauuauuuuauaaaugugccac

SEQ ID NO: 181488 - RNA, 32 nt, Homo Sapiens
uaaaugacugaguguugagauuuuaaauaaaa

SEQ ID NO: 181489 - RNA, 32 nt, Homo Sapiens
guuccagccugucucggcacccauggugugcu

SEQ ID NO: 181490 - RNA, 32 nt, Homo Sapiens
cuaaaucucuguuaauauucucucuuuuaacu

SEQ ID NO: 181491 - RNA, 32 nt, Homo Sapiens
caucugaugcccaagagggcuccucugcaaug

SEQ ID NO: 181492 - RNA, 32 nt, Homo Sapiens
aaucagacacaagcugcaguagcuuccugaug

SEQ ID NO: 181493 - RNA, 32 nt, Homo Sapiens
caaaggaggugggagacugccuuggugccgca

SEQ ID NO: 181494 - RNA, 32 nt, Homo Sapiens
ccggugcggccgcgcgcgccuuaggcucggcc

SEQ ID NO: 181495 - RNA, 32 nt, Homo Sapiens
ucuuggcugggucuggaggugucuguggagca

SEQ ID NO: 181496 - RNA, 32 nt, Homo Sapiens
gucuagcuuggcuggcucccgaacauguccau

SEQ ID NO: 181497 - RNA, 32 nt, Homo Sapiens
caccuuuuauuacauggggucuaaaacuugac

SEQ ID NO: 181498 - RNA, 32 nt, Homo Sapiens
uuuaccaaaaauacaaaaauuagccaggugua

SEQ ID NO: 181499 - RNA, 32 nt, Homo Sapiens
ccgguggucacugucuucccccggggacgagg

SEQ ID NO: 181500 - RNA, 32 nt, Homo Sapiens
cugccucaguucccuuuggccucccccuuuac

SEQ ID NO: 181501 - RNA, 32 nt, Homo Sapiens
gaguaaaaucaucagaaacugaauccauguaa

SEQ ID NO: 181502 - RNA, 32 nt, Homo Sapiens
gccaaaucaguucccuucauuaucaguauuuc

SEQ ID NO: 181503 - RNA, 32 nt, Homo Sapiens
cagacccauuccauuccagacuuuguaccuua

SEQ ID NO: 181504 - RNA, 32 nt, Homo Sapiens
acucagagccuguggaguugacuuuuuuauua

SEQ ID NO: 181505 - RNA, 32 nt, Homo Sapiens
cauuugcuuagcuauuugaguaucuagagaaa

SEQ ID NO: 181506 - RNA, 32 nt, Homo Sapiens
cuggagccgcggcugacgggcccgcggucugg

SEQ ID NO: 181507 - RNA, 32 nt, Homo Sapiens
uuaaucuggaaacuuaaaauggcaauccagug

SEQ ID NO: 181508 - RNA, 32 nt, Homo Sapiens
ccaaccagaaagggaagaaaaacaggaagaug

SEQ ID NO: 181509 - RNA, 32 nt, Homo Sapiens
auggauagaaauuuuuaaacuggaaagaaaac

SEQ ID NO: 181510 - RNA, 32 nt, Homo Sapiens
gcaaaacuaugaaaauuaauggucauugugau

SEQ ID NO: 181511 - RNA, 32 nt, Homo Sapiens
gggccugcgccucggcguccccgaggaggccg

SEQ ID NO: 181512 - RNA, 32 nt, Homo Sapiens
cuuuuauuuauuuuuauuuuuaucccaugaug

SEQ ID NO: 181513 - RNA, 32 nt, Homo Sapiens
acuugguaacuauuuauagagcauacaccaau

SEQ ID NO: 181514 - RNA, 32 nt, Homo Sapiens
uguuuuccuuuuucuuuaaaucuuggacuuua

SEQ ID NO: 181515 - RNA, 32 nt, Homo Sapiens
cuugagcuguaauucagaaauaaagcguaucu

SEQ ID NO: 181516 - RNA, 28 nt, Homo Sapiens
uauaguuguacauauauguguguauaua

SEQ ID NO: 181517 - RNA, 32 nt, Homo Sapiens
ggggagcagcagggcuccauggagaacgagcc

SEQ ID NO: 181518 - RNA, 31 nt, Homo Sapiens
ucaggaaucagagggcagguauauuggggga

SEQ ID NO: 181519 - RNA, 32 nt, Homo Sapiens
ugcccucgcgugccaggcccgcggcggccgaa

SEQ ID NO: 181520 - RNA, 32 nt, Homo Sapiens
gucaucuggccagcccccgccccuccucccgg

SEQ ID NO: 181521 - RNA, 32 nt, Homo Sapiens
acuggagcaauaaaguuugaagaacuuuuacc

SEQ ID NO: 181522 - RNA, 32 nt, Homo Sapiens
caccccgagggaagccggccccggccucaggg

SEQ ID NO: 181523 - RNA, 32 nt, Homo Sapiens
auuuccuauuuggagaacuauauugaggugga

SEQ ID NO: 181524 - RNA, 32 nt, Homo Sapiens
gaaaacuuuggauuuuugaaguaaauuuuaau

SEQ ID NO: 181525 - RNA, 32 nt, Homo Sapiens
uucuguguuucaugauacuucccuuccuaauu

SEQ ID NO: 181526 - RNA, 28 nt, Homo Sapiens
cuagaggggcggccaggugggggcccug

SEQ ID NO: 181527 - RNA, 32 nt, Homo Sapiens
uucuuugagguagaagaagagaauguuucuuu

SEQ ID NO: 181528 - RNA, 32 nt, Homo Sapiens
aguaaguuaauuuguuucugcauauaugcaca

SEQ ID NO: 181529 - RNA, 32 nt, Homo Sapiens
cuuaaacuuuuacuuuuuucuauuuuuccugg

SEQ ID NO: 181530 - RNA, 32 nt, Homo Sapiens
ccaccaugccuggucagcaccaauucaagcca

SEQ ID NO: 181531 - RNA, 32 nt, Homo Sapiens
uaggcucaaaaauuauaucuuacaauuucuua

SEQ ID NO: 181532 - RNA, 32 nt, Homo Sapiens
gaggcggcugcagugcugacaccacucagggc

SEQ ID NO: 181533 - RNA, 32 nt, Homo Sapiens
ggccgcgcugcaggagcagcugucccggcuga

SEQ ID NO: 181534 - RNA, 32 nt, Homo Sapiens
uuuagacccgcacuccccuuuuauaccugcuc

SEQ ID NO: 181535 - RNA, 32 nt, Homo Sapiens
augaugagaguuucauuugcguuucaaaaaug

SEQ ID NO: 181536 - RNA, 32 nt, Homo Sapiens
uugaaacuuuugauuuucuguuuggcaaugcu

SEQ ID NO: 181537 - RNA, 32 nt, Homo Sapiens
ggauccucucucccuuuccuguggaugcagcu

SEQ ID NO: 181538 - RNA, 32 nt, Homo Sapiens
ugaagucauccaagaaguggacacaguggcau

SEQ ID NO: 181539 - RNA, 32 nt, Homo Sapiens
uacauccuggcacugaaaaaucagcgcagccg

SEQ ID NO: 181540 - RNA, 32 nt, Homo Sapiens
gauuacuguugaccaauaaauuguaauuuugg

SEQ ID NO: 181541 - RNA, 32 nt, Homo Sapiens
acuuggaagaacccauuguacaaaguucaagg

SEQ ID NO: 181542 - RNA, 32 nt, Homo Sapiens
ucccacugauucaacuuuaugaauuccaugaa

SEQ ID NO: 181543 - RNA, 32 nt, Homo Sapiens
aucauauaauccuagauuaaugcugaaaucua

SEQ ID NO: 181544 - RNA, 32 nt, Homo Sapiens
guucaguuaucuccagagccauuucacccuuu

SEQ ID NO: 181545 - RNA, 32 nt, Homo Sapiens
ugcaccuugcucugucccaccugccucugggu

SEQ ID NO: 181546 - RNA, 32 nt, Homo Sapiens
gcuuuccgcugccuuccacacagccagguuug

SEQ ID NO: 181547 - RNA, 32 nt, Homo Sapiens
agaaggacaaacuauuugauuaauuugaaggu

SEQ ID NO: 181548 - RNA, 32 nt, Homo Sapiens
uaaaugcgggcucaguggaccacuggugacug

SEQ ID NO: 181549 - RNA, 32 nt, Homo Sapiens
aagaaguuaguggugcugggccugcuggccgu

SEQ ID NO: 181550 - RNA, 32 nt, Homo Sapiens
ggcgguuuuaugucuuuagaaauguuuugccu

SEQ ID NO: 181551 - RNA, 32 nt, Homo Sapiens
auaaauaucuucaggaaacauaaaaaaaaaaa

SEQ ID NO: 181552 - RNA, 32 nt, Homo Sapiens
ccucuacgcgccggacccugggaugcucuucg

SEQ ID NO: 181553 - RNA, 32 nt, Homo Sapiens
uacccgcucccucugcucauccauccuugauu

SEQ ID NO: 181554 - RNA, 31 nt, Homo Sapiens
aagcggggcccucugccgccccgcgcuccca

SEQ ID NO: 181555 - RNA, 32 nt, Homo Sapiens
gagacguggagaagaggaaugcugagugaugg

SEQ ID NO: 181556 - RNA, 32 nt, Homo Sapiens
aauaauaugaucgaauggcaaucuugcuaguu

SEQ ID NO: 181557 - RNA, 32 nt, Homo Sapiens
ucucccccuuagagcuccauccagucaccucu

SEQ ID NO: 181558 - RNA, 32 nt, Homo Sapiens
cagcuuugcugcgagcccuccggccagcggga

SEQ ID NO: 181559 - RNA, 32 nt, Homo Sapiens
cugcaaugccagcacuuugagaggccaagacu

SEQ ID NO: 181560 - RNA, 32 nt, Homo Sapiens
ugcgccaccgacagagacaucuggaagccgga

SEQ ID NO: 181561 - RNA, 32 nt, Homo Sapiens
uaacucaaauguauucuuuguuagaauuuacc

SEQ ID NO: 181562 - RNA, 32 nt, Homo Sapiens
cauguuguaaacauuucuuucaauaaacuaaa

SEQ ID NO: 181563 - RNA, 32 nt, Homo Sapiens
ugcgugcaggugggacccagguccuggugcuu

SEQ ID NO: 181564 - RNA, 25 nt, Homo Sapiens
auggccgccgcugggccccggcgcu

SEQ ID NO: 181565 - RNA, 32 nt, Homo Sapiens
gcauaaccuuaccaagaagcgugaaucauaug

SEQ ID NO: 181566 - RNA, 32 nt, Homo Sapiens
gacccgcaggccggcccgggcucacuuucggu

SEQ ID NO: 181567 - RNA, 32 nt, Homo Sapiens
ucccagcccucagccacccccaucccugcccc

SEQ ID NO: 181568 - RNA, 32 nt, Homo Sapiens
acaccauaccucaggccucguggaggcaucua

SEQ ID NO: 181569 - RNA, 32 nt, Homo Sapiens
ugucaccuggggugacaagaccagacaggcuu

SEQ ID NO: 181570 - RNA, 32 nt, Homo Sapiens
caauucuccaugaacgaguacccagcugacug

SEQ ID NO: 181571 - RNA, 32 nt, Homo Sapiens
aaguggcagucuauaacugaaaaugugguaaa

SEQ ID NO: 181572 - RNA, 32 nt, Homo Sapiens
uccagacgcgccgccuuaagagcuguaacacu

SEQ ID NO: 181573 - RNA, 32 nt, Homo Sapiens
aaaggcagccccagagggaucccgcccuccag

SEQ ID NO: 181574 - RNA, 32 nt, Homo Sapiens
aauacaagcugauauugcuacaucguguucau

SEQ ID NO: 181575 - RNA, 32 nt, Homo Sapiens
agccuggagcagccggacuugcccugugggag

SEQ ID NO: 181576 - RNA, 32 nt, Homo Sapiens
cacacuguuguccuuaaaauuccccuuuuuuc

SEQ ID NO: 181577 - RNA, 31 nt, Homo Sapiens
cugacagagcaucagaaccagaggcuugguc

SEQ ID NO: 181578 - RNA, 32 nt, Homo Sapiens
ucugcgauauuuuuccacauuuucuugucgcu

SEQ ID NO: 181579 - RNA, 32 nt, Homo Sapiens
cuuccagucaauacaacuuaccaauccugagg

SEQ ID NO: 181580 - RNA, 32 nt, Homo Sapiens
uaaccaagaaacaaauaauagcaaugguggug

SEQ ID NO: 181581 - RNA, 32 nt, Homo Sapiens
accagagccaccuccgaguccuggggccagcg

SEQ ID NO: 181582 - RNA, 32 nt, Homo Sapiens
ccaguuuugacaaaacagguuuguuuuuuauu

SEQ ID NO: 181583 - RNA, 31 nt, Homo Sapiens
ucguugugaaacauacucaguauugauaaaa

SEQ ID NO: 181584 - RNA, 32 nt, Homo Sapiens
ucccagccuuugauuuuuuaagguggauuuug

SEQ ID NO: 181585 - RNA, 32 nt, Homo Sapiens
aggcgaggagauucuguaaacuuaaaauuacu

SEQ ID NO: 181586 - RNA, 32 nt, Homo Sapiens
ugaccucacagugacccucaaauacacuggaa

SEQ ID NO: 181587 - RNA, 32 nt, Homo Sapiens
ggcuaaccuccacuuccacauuccagcccaag

SEQ ID NO: 181588 - RNA, 32 nt, Homo Sapiens
cucuuggcccccagccccuuccccacacagcc

SEQ ID NO: 181589 - RNA, 32 nt, Homo Sapiens
aaaauauaaaauauuucauauauguuaucagg

SEQ ID NO: 181590 - RNA, 32 nt, Homo Sapiens
gugggaggucagaggagaugggggccggcuuu

SEQ ID NO: 181591 - RNA, 32 nt, Homo Sapiens
agcccaaaggagaaaaguaacuuuacaauggg

SEQ ID NO: 181592 - RNA, 32 nt, Homo Sapiens
ugggcagaggagcagcugggauucccgaccaa

SEQ ID NO: 181593 - RNA, 32 nt, Homo Sapiens
aaaaacagaggauaauuaagauacuagucaug

SEQ ID NO: 181594 - RNA, 32 nt, Homo Sapiens
gauauuguaaucaaauaguuaacaucaggaag

SEQ ID NO: 181595 - RNA, 32 nt, Homo Sapiens
gugguuguuuugucaugaauucuuaugcuuau

SEQ ID NO: 181596 - RNA, 32 nt, Homo Sapiens
caagcaugaagaggaacagaggugauguuagg

SEQ ID NO: 181597 - RNA, 32 nt, Homo Sapiens
uguuugaaugugcugguaacugcuuugcuucu

SEQ ID NO: 181598 - RNA, 32 nt, Homo Sapiens
guauccguaaaugucauuugugauuuugacuu

SEQ ID NO: 181599 - RNA, 32 nt, Homo Sapiens
ugauccuguugugaaauguacggaugguauuc

SEQ ID NO: 181600 - RNA, 32 nt, Homo Sapiens
agccaaaugucugauuaauguuggcaacuuag

SEQ ID NO: 181601 - RNA, 32 nt, Homo Sapiens
cacagggcaauagaaacauauuuguggaauuu

SEQ ID NO: 181602 - RNA, 32 nt, Homo Sapiens
gugauugugucugaugaagaggaaugcauacu

SEQ ID NO: 181603 - RNA, 32 nt, Homo Sapiens
uccucaccuaacaguuacuuuacaauuaaacu

SEQ ID NO: 181604 - RNA, 32 nt, Homo Sapiens
cccuggcccgaguccccucccccguuagaaac

SEQ ID NO: 181605 - RNA, 32 nt, Homo Sapiens
uccagcuucucugaagagccagcccuuaaggc

SEQ ID NO: 181606 - RNA, 31 nt, Homo Sapiens
acccaggagccccgagaccugcagggaugug

SEQ ID NO: 181607 - RNA, 32 nt, Homo Sapiens
uuaaaaguuucauuuucuuuugcaauuuuagu

SEQ ID NO: 181608 - RNA, 32 nt, Homo Sapiens
ccccagagccacccacuucucaucccaaaccc

SEQ ID NO: 181609 - RNA, 32 nt, Homo Sapiens
ccucagaagaccuggaacaagauucugccauc

SEQ ID NO: 181610 - RNA, 32 nt, Homo Sapiens
caaggcccuuggcggugcguugcgcacccccg

SEQ ID NO: 181611 - RNA, 27 nt, Homo Sapiens
caugagugauucuucagaugcccuucc

SEQ ID NO: 181612 - RNA, 32 nt, Homo Sapiens
agugagcagcuagacaccaaugacgagaguga

SEQ ID NO: 181613 - RNA, 32 nt, Homo Sapiens
auauacgagcaguauaaagauacguuugcaau

SEQ ID NO: 181614 - RNA, 32 nt, Homo Sapiens
aguuuuugucauuguuuaagaaagccauuugu

SEQ ID NO: 181615 - RNA, 30 nt, Homo Sapiens
cgacacagauggcgcgcgggcucuuggguu

SEQ ID NO: 181616 - RNA, 32 nt, Homo Sapiens
cacuuuuugucaagacauuaaaccaucuuaga

SEQ ID NO: 181617 - RNA, 32 nt, Homo Sapiens
agccugggcucuagcgugcugcaccagcuugg

SEQ ID NO: 181618 - RNA, 32 nt, Homo Sapiens
cugguggguccuuuuucuuucuuuuuaaaaau

SEQ ID NO: 181619 - RNA, 32 nt, Homo Sapiens
aagucggacaccuugguuuuuguguuagauug

SEQ ID NO: 181620 - RNA, 32 nt, Homo Sapiens
gguccugauuuuucuuuuuacaauuaccaaaa

SEQ ID NO: 181621 - RNA, 32 nt, Homo Sapiens
gcaauauuuugugcugaagaccucuuuuacuu

SEQ ID NO: 181622 - RNA, 32 nt, Homo Sapiens
uguugaacaaaaggcaguuauuugaggacugg

SEQ ID NO: 181623 - RNA, 32 nt, Homo Sapiens
ccuuuuagaugaugaaauggacguugauuugg

SEQ ID NO: 181624 - RNA, 32 nt, Homo Sapiens
aucuuuucugaaaucuaccgacugaaaaacca

SEQ ID NO: 181625 - RNA, 32 nt, Homo Sapiens
ugguccuucgccgguguccccggagcccagcg

SEQ ID NO: 181626 - RNA, 32 nt, Homo Sapiens
uguaugaaggcacccugccucugcagagcaga

SEQ ID NO: 181627 - RNA, 30 nt, Homo Sapiens
agaaugggaggugguaugggaaguggcaug

SEQ ID NO: 181628 - RNA, 32 nt, Homo Sapiens
ugaaccucccgcugcugcugcugcugcugggg

SEQ ID NO: 181629 - RNA, 32 nt, Homo Sapiens
ccccgcccacccacgcauacacacaugcccuc

SEQ ID NO: 181630 - RNA, 30 nt, Homo Sapiens
gcacaccuccuugccaccuuccuuccucca

SEQ ID NO: 181631 - RNA, 32 nt, Homo Sapiens
ccagauggaggaaaccagugacuuuauggggc

SEQ ID NO: 181632 - RNA, 32 nt, Homo Sapiens
uaaauguguuuguuccaauuagcuuuguugaa

SEQ ID NO: 181633 - RNA, 32 nt, Homo Sapiens
ugaucgauaaccuggagaaccagcuggccgag

SEQ ID NO: 181634 - RNA, 32 nt, Homo Sapiens
ggccuuaucuucaccccacaaacaauaaagca

SEQ ID NO: 181635 - RNA, 32 nt, Homo Sapiens
cuuccuccaagccccgcccccucugccccacg

SEQ ID NO: 181636 - RNA, 32 nt, Homo Sapiens
aaggacucacaagucacuucucuucuccauag

SEQ ID NO: 181637 - RNA, 32 nt, Homo Sapiens
aagacaagaacaaaaaguaaugaguuuagaaa

SEQ ID NO: 181638 - RNA, 30 nt, Homo Sapiens
cugccaugggcuccguggggagccagcgcc

SEQ ID NO: 181639 - RNA, 32 nt, Homo Sapiens
gugcccaagaguggcgcccgcguaguaauucc

SEQ ID NO: 181640 - RNA, 32 nt, Homo Sapiens
uucaaauagugauguuagacuuaaccuaauuu

SEQ ID NO: 181641 - RNA, 32 nt, Homo Sapiens
acacaccuguagucccagcugcuccugaggcu

SEQ ID NO: 181642 - RNA, 32 nt, Homo Sapiens
ugggcacuggggauugcuuguggcccacucaa

SEQ ID NO: 181643 - RNA, 32 nt, Homo Sapiens
ccccucaugcaacaggcagguuugggaguuag

SEQ ID NO: 181644 - RNA, 32 nt, Homo Sapiens
gcaaagaaggucggcugcugagccagggcgug

SEQ ID NO: 181645 - RNA, 32 nt, Homo Sapiens
uuuguugcugcuaguuaaaacuuguugcaacu

SEQ ID NO: 181646 - RNA, 32 nt, Homo Sapiens
aguugguaaaaugugaauauugucugaagagu

SEQ ID NO: 181647 - RNA, 32 nt, Homo Sapiens
ccuuuucucccacacaaaauaguuuuagugau

SEQ ID NO: 181648 - RNA, 32 nt, Homo Sapiens
cugaaaggcgcggcgucgcaccgcccagagcu

SEQ ID NO: 181649 - RNA, 32 nt, Homo Sapiens
cagggagccccauaggccaucaucauccuuau

SEQ ID NO: 181650 - RNA, 32 nt, Homo Sapiens
cguuccaccuggcccgcccacccacgccgagu

SEQ ID NO: 181651 - RNA, 30 nt, Homo Sapiens
cgguaagauggcggcggcggcgguggugga

SEQ ID NO: 181652 - RNA, 32 nt, Homo Sapiens
caacgccgugcagcugcccaucgaccagccca

SEQ ID NO: 181653 - RNA, 32 nt, Homo Sapiens
ugaagcuuaccuagagcaaugaucuuuuucac

SEQ ID NO: 181654 - RNA, 32 nt, Homo Sapiens
uuaagaucauauccugccccaaauuucaaauu

SEQ ID NO: 181655 - RNA, 32 nt, Homo Sapiens
aagacacuugcuuuccucuucauuuuuccucc

SEQ ID NO: 181656 - RNA, 32 nt, Homo Sapiens
auuucccuggauguuagacacaauaucacaaa

SEQ ID NO: 181657 - RNA, 32 nt, Homo Sapiens
gggagccggagcugggcagagccugggcuggu

SEQ ID NO: 181658 - RNA, 32 nt, Homo Sapiens
cacacacacacacacagacacacacacacaca

SEQ ID NO: 181659 - RNA, 32 nt, Homo Sapiens
gacacacacacacacacacacacacacacaca

SEQ ID NO: 181660 - RNA, 32 nt, Homo Sapiens
gacagacagacagacagacacacacacacaca

SEQ ID NO: 181661 - RNA, 32 nt, Homo Sapiens
cacacacagacacacacacacacacacacaca

SEQ ID NO: 181662 - RNA, 32 nt, Homo Sapiens
aagccuguuucccauaucacagauguggggcc

SEQ ID NO: 181663 - RNA, 32 nt, Homo Sapiens
cggcgccgcucccgaggagcugcaaggcucgc

SEQ ID NO: 181664 - RNA, 32 nt, Homo Sapiens
ucugugacagcgcagagcucagcgccggccuu

SEQ ID NO: 181665 - RNA, 32 nt, Homo Sapiens
gcacugugcuaggugcugggaauaccacugau

SEQ ID NO: 181666 - RNA, 32 nt, Homo Sapiens
ggaccagagcucugcgugcugcugcugccacc

SEQ ID NO: 181667 - RNA, 32 nt, Homo Sapiens
auuggaucuuaccaaugcggcuauaggaaaac

SEQ ID NO: 181668 - RNA, 32 nt, Homo Sapiens
aaguuggccuccugggaguguaguuuucuguu

SEQ ID NO: 181669 - RNA, 32 nt, Homo Sapiens
gaagagcuggaacagcaggaggcggaggugca

SEQ ID NO: 181670 - RNA, 32 nt, Homo Sapiens
acaauacuucuacaauaacacaagauaccugu

SEQ ID NO: 181671 - RNA, 32 nt, Homo Sapiens
caugcugugucuuugugcgccaugguguguca

SEQ ID NO: 181672 - RNA, 32 nt, Homo Sapiens
cguucccccgcuccucggggcccuccaaggug

SEQ ID NO: 181673 - RNA, 30 nt, Homo Sapiens
ccuuuugucuguguuaucugaacacucuac

SEQ ID NO: 181674 - RNA, 32 nt, Homo Sapiens
gccggggcgcccacuccgcagcagccagcgag

SEQ ID NO: 181675 - RNA, 32 nt, Homo Sapiens
agccacuucuccccccacguggcacuggagug

SEQ ID NO: 181676 - RNA, 32 nt, Homo Sapiens
cucucuauucuauuccuuuggucuguaggucu

SEQ ID NO: 181677 - RNA, 32 nt, Homo Sapiens
ucaugggcguugagugcucagaauaaugcuug

SEQ ID NO: 181678 - RNA, 32 nt, Homo Sapiens
aaaugaauguuuaaguauuaaauugaaacuug

SEQ ID NO: 181679 - RNA, 32 nt, Homo Sapiens
ucccuccugccagcacaccgaugcacacaccg

SEQ ID NO: 181680 - RNA, 32 nt, Homo Sapiens
ggggcauuuagaaaauauauuuuuaguguaug

SEQ ID NO: 181681 - RNA, 31 nt, Homo Sapiens
cccgccaugccugagccuccccgcgcuccgu

SEQ ID NO: 181682 - RNA, 32 nt, Homo Sapiens
aggguccuggagcuaggcauggaggcugcuuu

SEQ ID NO: 181683 - RNA, 32 nt, Homo Sapiens
gcagggcucagccugcccagcagggacgacag

SEQ ID NO: 181684 - RNA, 32 nt, Homo Sapiens
caaagugaaaagacaccaucuaugaaccagga

SEQ ID NO: 181685 - RNA, 32 nt, Homo Sapiens
ccuggcucaauccuccuccaccaccaggggcc

SEQ ID NO: 181686 - RNA, 32 nt, Homo Sapiens
ggcgcgcgucuucgcgacccucggcugggccc

SEQ ID NO: 181687 - RNA, 32 nt, Homo Sapiens
uuuuuugcaauaaagaaaacaaauuaaucaua

SEQ ID NO: 181688 - RNA, 32 nt, Homo Sapiens
gccugccugugcuggcugcuggggucgauagg

SEQ ID NO: 181689 - RNA, 32 nt, Homo Sapiens
aauuucauuaugucacagugaugcaugucuua

SEQ ID NO: 181690 - RNA, 32 nt, Homo Sapiens
guuuuucucugauuuuuaaauaaacuuaagaa

SEQ ID NO: 181691 - RNA, 32 nt, Homo Sapiens
ucuaacuugagcaucaguccuagcuaugccug

SEQ ID NO: 181692 - RNA, 32 nt, Homo Sapiens
guccuccccaccaagcccucuaucuccuucua

SEQ ID NO: 181693 - RNA, 32 nt, Homo Sapiens
gaaagugguucuaugaugaaguccugucuugg

SEQ ID NO: 181694 - RNA, 32 nt, Homo Sapiens
cauucagagaauauaaacacccauguaaauau

SEQ ID NO: 181695 - RNA, 32 nt, Homo Sapiens
ccuucacccaggugcugacgugccgggguuga

SEQ ID NO: 181696 - RNA, 32 nt, Homo Sapiens
ccgauccccccgcgccgcucaggcgucuuggc

SEQ ID NO: 181697 - RNA, 32 nt, Homo Sapiens
cccccaauacuagaauggguuugagcuugggg

SEQ ID NO: 181698 - RNA, 32 nt, Homo Sapiens
caguggcuuauuucuucauuucucaguaauca

SEQ ID NO: 181699 - RNA, 32 nt, Homo Sapiens
gcuggugggcaccucccuguucugcacagcuc

SEQ ID NO: 181700 - RNA, 32 nt, Homo Sapiens
agucugacuuaauugcaaagacgagguuucac

SEQ ID NO: 181701 - RNA, 32 nt, Homo Sapiens
aggaauacuuggaccucagccaaccucucgaa

SEQ ID NO: 181702 - RNA, 32 nt, Homo Sapiens
agauaaaagguuucuuuuuuuuuccuuuuuug

SEQ ID NO: 181703 - RNA, 32 nt, Homo Sapiens
agguuuuuggcaguuuuggaucaauaaauuuu

SEQ ID NO: 181704 - RNA, 32 nt, Homo Sapiens
uuauuucuguuucuuaaaaaguauuguuagug

SEQ ID NO: 181705 - RNA, 32 nt, Homo Sapiens
gcuggcaucccuaggcagcaguguaucugcuu

SEQ ID NO: 181706 - RNA, 32 nt, Homo Sapiens
cucacaaaggcacaaauacagcaagcuuuuau

SEQ ID NO: 181707 - RNA, 32 nt, Homo Sapiens
cucuuggaggagggcuaaggcuuuagcauugu

SEQ ID NO: 181708 - RNA, 32 nt, Homo Sapiens
auugucauuucucuuuacuggauguuuauuua

SEQ ID NO: 181709 - RNA, 32 nt, Homo Sapiens
agaacagcuugcuggcagcuggcaucgugucg

SEQ ID NO: 181710 - RNA, 32 nt, Homo Sapiens
uguuggggucauugggagaugcccgguuuugc

SEQ ID NO: 181711 - RNA, 32 nt, Homo Sapiens
gauaggaccucccaggaugcuucccagccucu

SEQ ID NO: 181712 - RNA, 32 nt, Homo Sapiens
cuggcacagggaggauggaaaccuugaauggc

SEQ ID NO: 181713 - RNA, 32 nt, Homo Sapiens
gcaugaaggaugcacaggucaggccauucugu

SEQ ID NO: 181714 - RNA, 32 nt, Homo Sapiens
gcacaacuccguucucgggguggcggcaggca

SEQ ID NO: 181715 - RNA, 32 nt, Homo Sapiens
ugcaaauaccuuuucccuccccggggccccag

SEQ ID NO: 181716 - RNA, 32 nt, Homo Sapiens
cagcagggccgacgaugucaccuggugccucg

SEQ ID NO: 181717 - RNA, 32 nt, Homo Sapiens
cgagcgucccacccgcgccugggaccauggcc

SEQ ID NO: 181718 - RNA, 32 nt, Homo Sapiens
cuuuugguggagguucuguagguucagguuuc

SEQ ID NO: 181719 - RNA, 32 nt, Homo Sapiens
cuaucaguucaaaacaacacaugaaaccagga

SEQ ID NO: 181720 - RNA, 32 nt, Homo Sapiens
ggcucugggggacucaggccaagccccuuggc

SEQ ID NO: 181721 - RNA, 32 nt, Homo Sapiens
ugaucagguugacaugcuccaacagcauugug

SEQ ID NO: 181722 - RNA, 32 nt, Homo Sapiens
gaaacugugggguuauucuacggcgaggggga

SEQ ID NO: 181723 - RNA, 32 nt, Homo Sapiens
ccacacagccuccaggacguggcacgguuccc

SEQ ID NO: 181724 - RNA, 32 nt, Homo Sapiens
uuuuguuucgagaagguaucugcacgguucaa

SEQ ID NO: 181725 - RNA, 32 nt, Homo Sapiens
cuuuagagccagcccauggcuuuagcuaccuc

SEQ ID NO: 181726 - RNA, 32 nt, Homo Sapiens
gaggccaggcagggcugcugcugaacaucccu

SEQ ID NO: 181727 - RNA, 30 nt, Homo Sapiens
ucaguggugcuuaugggggagaugggacua

SEQ ID NO: 181728 - RNA, 32 nt, Homo Sapiens
ugguuggugacgggacagagcggucggugaca

SEQ ID NO: 181729 - RNA, 32 nt, Homo Sapiens
gccuucccagccagcccuuguuggcuugccau

SEQ ID NO: 181730 - RNA, 32 nt, Homo Sapiens
cagaaggauccccaguacccagcccucugccu

SEQ ID NO: 181731 - RNA, 32 nt, Homo Sapiens
auacucgcauacaaccuauaaauacacaaggc

SEQ ID NO: 181732 - RNA, 32 nt, Homo Sapiens
ugcuccagccuggacugcaccguucgcaucug

SEQ ID NO: 181733 - RNA, 32 nt, Homo Sapiens
guucaaugcggcaaguuuuuguauauaagaua

SEQ ID NO: 181734 - RNA, 32 nt, Homo Sapiens
cagaagcaaaaauaagaaaauuaaaauaaucu

SEQ ID NO: 181735 - RNA, 32 nt, Homo Sapiens
ucagucuucaacauaccgcucagcucaagagu

SEQ ID NO: 181736 - RNA, 32 nt, Homo Sapiens
gcaucguucuuugcugaggccucuaucugucc

SEQ ID NO: 181737 - RNA, 32 nt, Homo Sapiens
uaccauauuuuagggccagggauuauuuuaac

SEQ ID NO: 181738 - RNA, 32 nt, Homo Sapiens
aauauauguuuuaauaccacaaacacuguggg

SEQ ID NO: 181739 - RNA, 32 nt, Homo Sapiens
aggccccggacgggguagcaccccccauuggg

SEQ ID NO: 181740 - RNA, 32 nt, Homo Sapiens
ccagcaagaaaacgauagugugcuuugaaaau

SEQ ID NO: 181741 - RNA, 32 nt, Homo Sapiens
agcuccccugcgcccgccguccaugcgggagg

SEQ ID NO: 181742 - RNA, 32 nt, Homo Sapiens
aaucagcgagguugauguagauaauaauuucu

SEQ ID NO: 181743 - RNA, 32 nt, Homo Sapiens
cauuauugacucacuuuuuuuauugugguaga

SEQ ID NO: 181744 - RNA, 32 nt, Homo Sapiens
ggaaugaguggucccggagaugugcuauauga

SEQ ID NO: 181745 - RNA, 32 nt, Homo Sapiens
auaagaaauuuagagaaaaauauuuucugauc

SEQ ID NO: 181746 - RNA, 32 nt, Homo Sapiens
uuucuaaggagaacaggugacaauauacacau

SEQ ID NO: 181747 - RNA, 32 nt, Homo Sapiens
gaguuggaaaauuuguaaccaucauaauacag

SEQ ID NO: 181748 - RNA, 32 nt, Homo Sapiens
uagacaucccugcugcccuuugcuggguaugc

SEQ ID NO: 181749 - RNA, 28 nt, Homo Sapiens
auugugauggacacgauuauaaacauac

SEQ ID NO: 181750 - RNA, 32 nt, Homo Sapiens
uuccagugcaagagaagggaaauacuaggaac

SEQ ID NO: 181751 - RNA, 32 nt, Homo Sapiens
aacuacgcggacgccgaacgggacgcgcugca

SEQ ID NO: 181752 - RNA, 32 nt, Homo Sapiens
cucccaggucccagccccuuuuccccaguccc

SEQ ID NO: 181753 - RNA, 32 nt, Homo Sapiens
gcuaaaucuuuuugaacagaugaugauaaacc

SEQ ID NO: 181754 - RNA, 32 nt, Homo Sapiens
gggcuugggggcggggagcaggcggugcagga

SEQ ID NO: 181755 - RNA, 32 nt, Homo Sapiens
gccucgggccccagaggucccgcuccucagcc

SEQ ID NO: 181756 - RNA, 32 nt, Homo Sapiens
guuuacccaggggccgggccagagacgggggu

SEQ ID NO: 181757 - RNA, 32 nt, Homo Sapiens
cuaguugugauucugucuucucuuuauaacau

SEQ ID NO: 181758 - RNA, 32 nt, Homo Sapiens
cgucccggaagcggcgguggcggccgcggcgu

SEQ ID NO: 181759 - RNA, 32 nt, Homo Sapiens
aaaaguccacacuucguuugugcuauaaccuc

SEQ ID NO: 181760 - RNA, 32 nt, Homo Sapiens
aucccgaguggaagaaacgggggaaaagucau

SEQ ID NO: 181761 - RNA, 32 nt, Homo Sapiens
ugucgcugcgguguugcuguuggagacucgau

SEQ ID NO: 181762 - RNA, 32 nt, Homo Sapiens
ggaagaggacacugaaggcauuccuucagucc

SEQ ID NO: 181763 - RNA, 32 nt, Homo Sapiens
uacgccaagcgcugcgcggcgcucgggcuccu

SEQ ID NO: 181764 - RNA, 32 nt, Homo Sapiens
cgaguccaggcagcggcugagucagugugugu

SEQ ID NO: 181765 - RNA, 32 nt, Homo Sapiens
gaccuggcaggccuggaggugugagucggcuc

SEQ ID NO: 181766 - RNA, 32 nt, Homo Sapiens
auuucaaaccugguuucuuacaggugguuguc

SEQ ID NO: 181767 - RNA, 32 nt, Homo Sapiens
aucagccuucuagaaucggagcuccggagugu

SEQ ID NO: 181768 - RNA, 32 nt, Homo Sapiens
uucuaggcuagaggccccggcggugaagcgcc

SEQ ID NO: 181769 - RNA, 32 nt, Homo Sapiens
gugaggaaagaguaugaauuugccaugugauu

SEQ ID NO: 181770 - RNA, 32 nt, Homo Sapiens
uuucacccugaacucagcacccaguucaggug

SEQ ID NO: 181771 - RNA, 32 nt, Homo Sapiens
cagcguucacaccaggcgggcuggguccccug

SEQ ID NO: 181772 - RNA, 32 nt, Homo Sapiens
agagaugcaggugagaaaaaacaugacgaugg

SEQ ID NO: 181773 - RNA, 32 nt, Homo Sapiens
gugcaugucuaaauagucacaaugaagaugaa

SEQ ID NO: 181774 - RNA, 32 nt, Homo Sapiens
aaaaguugggagugacaccagagccuucugca

SEQ ID NO: 181775 - RNA, 32 nt, Homo Sapiens
uuuuuuaaaaaagcaauaauuaacucagaccu

SEQ ID NO: 181776 - RNA, 32 nt, Homo Sapiens
cacauaucauagcuugaauauuacaacagugu

SEQ ID NO: 181777 - RNA, 32 nt, Homo Sapiens
ggcggcugacgcccgguuuaggcggagagcgc

SEQ ID NO: 181778 - RNA, 32 nt, Homo Sapiens
auacaggaacauagucauuuaauagcaaagcu

SEQ ID NO: 181779 - RNA, 30 nt, Homo Sapiens
cuaacguaucaccagcaaccugugugucuc

SEQ ID NO: 181780 - RNA, 32 nt, Homo Sapiens
ugcucuccucguguccucucccagaccuuucu

SEQ ID NO: 181781 - RNA, 32 nt, Homo Sapiens
auagauaaaaauuauuuugugaucauaacucu

SEQ ID NO: 181782 - RNA, 32 nt, Homo Sapiens
aauuuuagcccaaauucuuuuccuccuuucuu

SEQ ID NO: 181783 - RNA, 32 nt, Homo Sapiens
uaauguggacaauuuacacacccaacacauac

SEQ ID NO: 181784 - RNA, 32 nt, Homo Sapiens
acucagcccagcuggggaggacauggcgcccg

SEQ ID NO: 181785 - RNA, 32 nt, Homo Sapiens
uucuucgcgucgccgcggggcuuccucagggu

SEQ ID NO: 181786 - RNA, 32 nt, Homo Sapiens
ucugcgacccggggcucuggccagcacugugu

SEQ ID NO: 181787 - RNA, 32 nt, Homo Sapiens
gaccuggcuggaaaacagcaucaggcaaaaaa

SEQ ID NO: 181788 - RNA, 32 nt, Homo Sapiens
cuggauugucuagacacagaugaugagacaga

SEQ ID NO: 181789 - RNA, 32 nt, Homo Sapiens
auuccucccucauaccuagccauuucuccaag

SEQ ID NO: 181790 - RNA, 32 nt, Homo Sapiens
ugugccuagagcaugcaccugcucccucugcu

SEQ ID NO: 181791 - RNA, 32 nt, Homo Sapiens
uuggcucgccgggaccucgcgcaccggcggca

SEQ ID NO: 181792 - RNA, 32 nt, Homo Sapiens
guauuuacauauauuccacauauauaacagga

SEQ ID NO: 181793 - RNA, 32 nt, Homo Sapiens
uuuuaagaaaaaagugaugauuucuuauugau

SEQ ID NO: 181794 - RNA, 32 nt, Homo Sapiens
uccccgagccuggccuggcucuggcccggucc

SEQ ID NO: 181795 - RNA, 32 nt, Homo Sapiens
auauccucauguaauugccaucugucacucac

SEQ ID NO: 181796 - RNA, 32 nt, Homo Sapiens
gauuugucuuuuccucaccaccuucccuccaa

SEQ ID NO: 181797 - RNA, 32 nt, Homo Sapiens
cuuuaaaugcccugugucauuucuggauuaua

SEQ ID NO: 181798 - RNA, 32 nt, Homo Sapiens
guguguacauauauauacacacacauacacau

SEQ ID NO: 181799 - RNA, 32 nt, Homo Sapiens
aaugcugagcacuggggugagccugggggcag

SEQ ID NO: 181800 - RNA, 32 nt, Homo Sapiens
agcugucuuguccuugcugguuuucuggaugg

SEQ ID NO: 181801 - RNA, 32 nt, Homo Sapiens
gggugaucucugcuuccuguaccuugacaugc

SEQ ID NO: 181802 - RNA, 32 nt, Homo Sapiens
cauccaucuucagaauuauuuucaucuuauac

SEQ ID NO: 181803 - RNA, 32 nt, Homo Sapiens
ucaauuggguccguggcaaggaagcuauuagg

SEQ ID NO: 181804 - RNA, 32 nt, Homo Sapiens
ccuuucucgccgucagcgcccgucgccaucuc

SEQ ID NO: 181805 - RNA, 32 nt, Homo Sapiens
aggcgggcaaaucaccugaggucaggagcucg

SEQ ID NO: 181806 - RNA, 32 nt, Homo Sapiens
cagaacucauucaaauaaauuauuuugugauu

SEQ ID NO: 181807 - RNA, 32 nt, Homo Sapiens
cugccugccuuggucucccaauacaggcauga

SEQ ID NO: 181808 - RNA, 32 nt, Homo Sapiens
uaauauuccagaagaacaacuuuagcaucaga

SEQ ID NO: 181809 - RNA, 32 nt, Homo Sapiens
uggaucccguuucugaugcagauucuugucuu

SEQ ID NO: 181810 - RNA, 32 nt, Homo Sapiens
ucccuuuccuucccaccccuguggccacagcu

SEQ ID NO: 181811 - RNA, 32 nt, Homo Sapiens
ccucauugaucaauuuuauguauuugaauauc

SEQ ID NO: 181812 - RNA, 32 nt, Homo Sapiens
uugcucuuaggaaucaaugucuuugcagauaa

SEQ ID NO: 181813 - RNA, 32 nt, Homo Sapiens
gcucagaggggagggcuguuggauguaugggg

SEQ ID NO: 181814 - RNA, 32 nt, Homo Sapiens
aaguagauccuauuuuuguuuauuuuuauugg

SEQ ID NO: 181815 - RNA, 32 nt, Homo Sapiens
ugccgacccacccacguuccggaucagcgaaa

SEQ ID NO: 181816 - RNA, 32 nt, Homo Sapiens
gucagcuucgaccagggggacaaaagcaacaa

SEQ ID NO: 181817 - RNA, 32 nt, Homo Sapiens
uuuacaucuauaagagucaucuugacauuaac

SEQ ID NO: 181818 - RNA, 32 nt, Homo Sapiens
ccauuguuaacucagccucaaaucucaacugu

SEQ ID NO: 181819 - RNA, 32 nt, Homo Sapiens
agggacacuauaaauaagacuccauguuuuaa

SEQ ID NO: 181820 - RNA, 32 nt, Homo Sapiens
aaguuggagguuuugugucagcugcaaauccu

SEQ ID NO: 181821 - RNA, 32 nt, Homo Sapiens
gagaaacccagaaaaauguacaugacucucag

SEQ ID NO: 181822 - RNA, 32 nt, Homo Sapiens
cuccagugaucuccagagcuaguucccugccc

SEQ ID NO: 181823 - RNA, 32 nt, Homo Sapiens
ccaggcauccuccgcggcgggccggaccgggc

SEQ ID NO: 181824 - RNA, 32 nt, Homo Sapiens
gcaguucauuggccacucugcacgcauucagu

SEQ ID NO: 181825 - RNA, 32 nt, Homo Sapiens
ccccagcacccaguucugagccaggcacauca

SEQ ID NO: 181826 - RNA, 30 nt, Homo Sapiens
cugcgcccauuccugccgccggcgauguaa

SEQ ID NO: 181827 - RNA, 32 nt, Homo Sapiens
caaaaggaaaccaucgccaucaucaucaccac

SEQ ID NO: 181828 - RNA, 32 nt, Homo Sapiens
guaacagaaagauagggauuuuuaggagacaa

SEQ ID NO: 181829 - RNA, 32 nt, Homo Sapiens
uuauacaucucuccuccaaccccacccucuau

SEQ ID NO: 181830 - RNA, 32 nt, Homo Sapiens
uagcugugaguaccucuuucuacuccuuucag

SEQ ID NO: 181831 - RNA, 32 nt, Homo Sapiens
aaaaacgaugaaaugaaagcuauggauguuuu

SEQ ID NO: 181832 - RNA, 32 nt, Homo Sapiens
uagagagcccccacaaaguuauuuaaaagaug

SEQ ID NO: 181833 - RNA, 32 nt, Homo Sapiens
auacugcccaagguaauuuauagauucaaugc

SEQ ID NO: 181834 - RNA, 32 nt, Homo Sapiens
gauuugagggaagaaugaauaagagauacaag

SEQ ID NO: 181835 - RNA, 32 nt, Homo Sapiens
auggugcugcugcuucugcugcuucuccagaa

SEQ ID NO: 181836 - RNA, 32 nt, Homo Sapiens
aaggauauaguggcaggcuugucccucuuuaa

SEQ ID NO: 181837 - RNA, 32 nt, Homo Sapiens
ugguugugccucugcuggcuacugggugugcu

SEQ ID NO: 181838 - RNA, 32 nt, Homo Sapiens
guccaccuucuuaaauuuuuaagaugaacuga

SEQ ID NO: 181839 - RNA, 32 nt, Homo Sapiens
uaacuggcuuauuuuuaacagcuuugucaaac

SEQ ID NO: 181840 - RNA, 32 nt, Homo Sapiens
gaguguuuuuaacuuuuuauaguugaugacuu

SEQ ID NO: 181841 - RNA, 29 nt, Homo Sapiens
aaaccgcaugggaugucuaggaaggggcu

SEQ ID NO: 181842 - RNA, 32 nt, Homo Sapiens
cccaccugccagcccugcuugccuggcccugu

SEQ ID NO: 181843 - RNA, 32 nt, Homo Sapiens
cgcuucuagagcagucucugcuuuugccuugc

SEQ ID NO: 181844 - RNA, 32 nt, Homo Sapiens
cuguccguggcggcugguguuggcuggcauug

SEQ ID NO: 181845 - RNA, 32 nt, Homo Sapiens
aggcuguuuccucuccggggccuccaggguuc

SEQ ID NO: 181846 - RNA, 32 nt, Homo Sapiens
ucuccauccccuuucccuuccacuuuggguuc

SEQ ID NO: 181847 - RNA, 32 nt, Homo Sapiens
gucaauuaaguacacuuuauugaaaauugccu

SEQ ID NO: 181848 - RNA, 32 nt, Homo Sapiens
aauuugaauguuuuuuacacuaacuaacuuuu

SEQ ID NO: 181849 - RNA, 32 nt, Homo Sapiens
uguuuuccuuaauguauuuaaucuucauaauu

SEQ ID NO: 181850 - RNA, 32 nt, Homo Sapiens
acuccucagacccuucugcucccggccgccgc

SEQ ID NO: 181851 - RNA, 32 nt, Homo Sapiens
uguuaguagauggggguacuucuguggugggc

SEQ ID NO: 181852 - RNA, 32 nt, Homo Sapiens
gcacgguggugccccgugcacuggagaggcug

SEQ ID NO: 181853 - RNA, 32 nt, Homo Sapiens
ucuuuaugaugauacaguguuaaaagaaaaua

SEQ ID NO: 181854 - RNA, 32 nt, Homo Sapiens
gaucucucaugucucccuaaaauguauaaaac

SEQ ID NO: 181855 - RNA, 32 nt, Homo Sapiens
auuugccuacuuuaacccauuuuucaaccugu

SEQ ID NO: 181856 - RNA, 32 nt, Homo Sapiens
uccacaaagugugaagagagccccaggcauuc

SEQ ID NO: 181857 - RNA, 28 nt, Homo Sapiens
acaaggaaagauuuauuuaaaauauacu

SEQ ID NO: 181858 - RNA, 32 nt, Homo Sapiens
aaucuucuuagucuuaugcuaaauuuauucca

SEQ ID NO: 181859 - RNA, 32 nt, Homo Sapiens
auaugaauauauuuguuuuucauauuguucug

SEQ ID NO: 181860 - RNA, 32 nt, Homo Sapiens
gauuaucucauuuaauccuuauaccaucauua

SEQ ID NO: 181861 - RNA, 32 nt, Homo Sapiens
ccaaaugauuagugaacacuuuuuucaauauu

SEQ ID NO: 181862 - RNA, 32 nt, Homo Sapiens
gaacuguuggauuuuucuaguugccgccaaac

SEQ ID NO: 181863 - RNA, 32 nt, Homo Sapiens
cagaaacaauagccccuguguaacuaccaccu

SEQ ID NO: 181864 - RNA, 32 nt, Homo Sapiens
ccagcuuccccaggccggcccgagcagcacac

SEQ ID NO: 181865 - RNA, 32 nt, Homo Sapiens
acaaaagguaguauguccaguggcuagaggug

SEQ ID NO: 181866 - RNA, 32 nt, Homo Sapiens
uagagggcucugcuccaagucauugcuuacua

SEQ ID NO: 181867 - RNA, 32 nt, Homo Sapiens
gcagucaacuucagccaggcucucagacugga

SEQ ID NO: 181868 - RNA, 32 nt, Homo Sapiens
gaaagugugguaaaaagccagaguaguuuuau

SEQ ID NO: 181869 - RNA, 32 nt, Homo Sapiens
agugccuggcaugugggauccaggcguucuuu

SEQ ID NO: 181870 - RNA, 32 nt, Homo Sapiens
cccucagcuugcagggagguguggagcgagag

SEQ ID NO: 181871 - RNA, 32 nt, Homo Sapiens
acuuccuuugaaaaacugcuuugaauuaugau

SEQ ID NO: 181872 - RNA, 32 nt, Homo Sapiens
acagaaccaaaauuggaagcauguguucaauu

SEQ ID NO: 181873 - RNA, 32 nt, Homo Sapiens
accaggagcaucuggaccaucgaccuggccua

SEQ ID NO: 181874 - RNA, 32 nt, Homo Sapiens
uuuggggggagcugcgccgaucaccagauuaa

SEQ ID NO: 181875 - RNA, 32 nt, Homo Sapiens
ccccagggccagugagggcccugcguuccgug

SEQ ID NO: 181876 - RNA, 32 nt, Homo Sapiens
gggccuuccccucccagugccuccggggguuc

SEQ ID NO: 181877 - RNA, 32 nt, Homo Sapiens
caaaaaaucugaccaaaacaaacaaacagaaa

SEQ ID NO: 181878 - RNA, 32 nt, Homo Sapiens
ggucauccugggauugguaguucgcuuucucu

SEQ ID NO: 181879 - RNA, 32 nt, Homo Sapiens
guuccauccguaaaauauguaaagguaagugg

SEQ ID NO: 181880 - RNA, 32 nt, Homo Sapiens
gucugugauauggggugucuguguacauauau

SEQ ID NO: 181881 - RNA, 32 nt, Homo Sapiens
accacugcgcccagccccaaguggcuuuuuca

SEQ ID NO: 181882 - RNA, 32 nt, Homo Sapiens
ugggagcucugcaaaaucaguagcaagugcug

SEQ ID NO: 181883 - RNA, 32 nt, Homo Sapiens
uacacaugaauuuuugacuaaguuuaaacuca

SEQ ID NO: 181884 - RNA, 32 nt, Homo Sapiens
uuguucaucauuacuuuuuuuaaccuaucuuu

SEQ ID NO: 181885 - RNA, 32 nt, Homo Sapiens
acucacuuugcaccuuucccugucgcucucua

SEQ ID NO: 181886 - RNA, 32 nt, Homo Sapiens
cauuucuuacuucuccgucucuaggcuuagac

SEQ ID NO: 181887 - RNA, 32 nt, Homo Sapiens
uccugcaggcccuuccucugccugcugggguc

SEQ ID NO: 181888 - RNA, 32 nt, Homo Sapiens
auuccuugaggaggaguggcaacaucaaagug

SEQ ID NO: 181889 - RNA, 32 nt, Homo Sapiens
ccaccagcauccucuggaguccuuccaguguc

SEQ ID NO: 181890 - RNA, 32 nt, Homo Sapiens
caugcagcagcuuuugacuguuuccagagugc

SEQ ID NO: 181891 - RNA, 32 nt, Homo Sapiens
uaacugucuuuauacgcuucugcacucugggg

SEQ ID NO: 181892 - RNA, 32 nt, Homo Sapiens
aaaagucuucagugauggccuacgccaaagca

SEQ ID NO: 181893 - RNA, 32 nt, Homo Sapiens
ccagcgcauccacagcggcgagaagcccuacg

SEQ ID NO: 181894 - RNA, 32 nt, Homo Sapiens
gcgacccccuggggcgguagccccacagcugc

SEQ ID NO: 181895 - RNA, 31 nt, Homo Sapiens
agggcgccacggagaggaaccgcucuaggca

SEQ ID NO: 181896 - RNA, 32 nt, Homo Sapiens
ucaggaggaaaugacauuauauucuguuccac

SEQ ID NO: 181897 - RNA, 32 nt, Homo Sapiens
cauaauuugcugaggcuucuuaagcuuucuau

SEQ ID NO: 181898 - RNA, 32 nt, Homo Sapiens
cccuuccugguaguuuuuuauuuuguuguugu

SEQ ID NO: 181899 - RNA, 32 nt, Homo Sapiens
ggguguuuuuuuuuuucuuuuuuguccccccc

SEQ ID NO: 181900 - RNA, 32 nt, Homo Sapiens
aaauauuggcccuaucuugacccccaaaucca

SEQ ID NO: 181901 - RNA, 32 nt, Homo Sapiens
aacugcuguauucuaacaaauuuacuacacgu

SEQ ID NO: 181902 - RNA, 32 nt, Homo Sapiens
acuucauuuuucagaacuuguuuacucauuua

SEQ ID NO: 181903 - RNA, 32 nt, Homo Sapiens
caaaauaaguaaauaauaaauaaaauaaagcc

SEQ ID NO: 181904 - RNA, 32 nt, Homo Sapiens
agucugagccacucgaggucagggccaugacc

SEQ ID NO: 181905 - RNA, 32 nt, Homo Sapiens
ugaagacccagcuaugaaaccgcaguuccugu

SEQ ID NO: 181906 - RNA, 32 nt, Homo Sapiens
aguaaggcugguccugggguccucccugcacg

SEQ ID NO: 181907 - RNA, 30 nt, Homo Sapiens
aaagucaccuucccuuucgguucuaggaau

SEQ ID NO: 181908 - RNA, 32 nt, Homo Sapiens
aucuccacuuucuggaaccagaaugagccccc

SEQ ID NO: 181909 - RNA, 32 nt, Homo Sapiens
ucauuuucccugacaauccccaucaccuuuag

SEQ ID NO: 181910 - RNA, 32 nt, Homo Sapiens
aaagauucacaaaacuguagcuuuuaaugaaa

SEQ ID NO: 181911 - RNA, 32 nt, Homo Sapiens
auacaauuuguauuuaaggauuuuaaaauacc

SEQ ID NO: 181912 - RNA, 32 nt, Homo Sapiens
agcugggcgugguggcgggcgccuguaguccc

SEQ ID NO: 181913 - RNA, 32 nt, Homo Sapiens
auccugaggaucgggguggggguggagugggg

SEQ ID NO: 181914 - RNA, 32 nt, Homo Sapiens
aauugucuuauuauuuuuuuuauauauauauu

SEQ ID NO: 181915 - RNA, 32 nt, Homo Sapiens
cacagccuucagagcugagagccccgaacaga

SEQ ID NO: 181916 - RNA, 32 nt, Homo Sapiens
guuuagaagauaagaaacaugucaucauauuu

SEQ ID NO: 181917 - RNA, 32 nt, Homo Sapiens
agcauguguugcaggugcuguuugauuuuucu

SEQ ID NO: 181918 - RNA, 32 nt, Homo Sapiens
aauacccugaagauguagcuccuacuguugga

SEQ ID NO: 181919 - RNA, 30 nt, Homo Sapiens
caccuggauuuccugccgccggggcugcuc

SEQ ID NO: 181920 - RNA, 32 nt, Homo Sapiens
uuucugagcuggccuuuuuuucucaucagauu

SEQ ID NO: 181921 - RNA, 32 nt, Homo Sapiens
acuaauuuacuuugcugcugacagccaccaug

SEQ ID NO: 181922 - RNA, 32 nt, Homo Sapiens
ucccaaacgucuuuuuaaaaauugcuugggaa

SEQ ID NO: 181923 - RNA, 32 nt, Homo Sapiens
aauuagugggauugaaggaaaaguagucuuug

SEQ ID NO: 181924 - RNA, 32 nt, Homo Sapiens
caccuucucaggacacaaguggcugcccaacc

SEQ ID NO: 181925 - RNA, 32 nt, Homo Sapiens
gaagugaggggagggagggaugucaccccaaa

SEQ ID NO: 181926 - RNA, 32 nt, Homo Sapiens
auuuugaccuagucuguaaguuuuucugucag

SEQ ID NO: 181927 - RNA, 32 nt, Homo Sapiens
aacaacaguggagaagcaggcggggcagccac

SEQ ID NO: 181928 - RNA, 32 nt, Homo Sapiens
ccccacaaggaccaugagggcgcuggaggggc

SEQ ID NO: 181929 - RNA, 32 nt, Homo Sapiens
aaaagaaguccuccucccuuucugggcuucca

SEQ ID NO: 181930 - RNA, 32 nt, Homo Sapiens
ugcggggcucugccgggugcacggcugaccug

SEQ ID NO: 181931 - RNA, 32 nt, Homo Sapiens
ccagagcagcggggccgggcgcgcagggccug

SEQ ID NO: 181932 - RNA, 32 nt, Homo Sapiens
uggaagcugagaaauguaugguaaaugucaca

SEQ ID NO: 181933 - RNA, 32 nt, Homo Sapiens
aaaucugaaugggaaaaaugacacuagaaugu

SEQ ID NO: 181934 - RNA, 32 nt, Homo Sapiens
aggugccggggguggggugcccuagcgugacc

SEQ ID NO: 181935 - RNA, 32 nt, Homo Sapiens
uugaggcaguuaagcaugaccaauuaauguca

SEQ ID NO: 181936 - RNA, 32 nt, Homo Sapiens
gcagucuccaguugggcugugcauggaagcuu

SEQ ID NO: 181937 - RNA, 32 nt, Homo Sapiens
ggcuuuuucgccuggugauugaugucccagag

SEQ ID NO: 181938 - RNA, 32 nt, Homo Sapiens
aacucagacaauuuagauaaacaucaugguuc

SEQ ID NO: 181939 - RNA, 32 nt, Homo Sapiens
gggacaaggaccaucucugugcccccugucug

SEQ ID NO: 181940 - RNA, 32 nt, Homo Sapiens
cuccagaggcaggcagaggaaauauugucaga

SEQ ID NO: 181941 - RNA, 32 nt, Homo Sapiens
cuacccaggaccaacuccugcuccugaaucuu

SEQ ID NO: 181942 - RNA, 32 nt, Homo Sapiens
ggcugguuucacaugaauacuauacugaaauc

SEQ ID NO: 181943 - RNA, 32 nt, Homo Sapiens
cugcugagugguuuuucuuuuaaaauaccauu

SEQ ID NO: 181944 - RNA, 32 nt, Homo Sapiens
aauauuuguaaauuuuuacauaaacaugguga

SEQ ID NO: 181945 - RNA, 32 nt, Homo Sapiens
cuuguaaguauuuaagugaucguuacauuuua

SEQ ID NO: 181946 - RNA, 32 nt, Homo Sapiens
uuaauccuuuugugugauacaggaugaacuug

SEQ ID NO: 181947 - RNA, 32 nt, Homo Sapiens
cucacucacacacacacacacacacacacaca

SEQ ID NO: 181948 - RNA, 32 nt, Homo Sapiens
gaccacgcccuuuaaccuagaccugccuguga

SEQ ID NO: 181949 - RNA, 32 nt, Homo Sapiens
augaugacuaaguggaauaaccuauuuugaaa

SEQ ID NO: 181950 - RNA, 32 nt, Homo Sapiens
ccaggccgaggguccccgggcacccaggucgg

SEQ ID NO: 181951 - RNA, 32 nt, Homo Sapiens
ggugccgccucuuggccgcggggggccccgac

SEQ ID NO: 181952 - RNA, 30 nt, Homo Sapiens
ccagggguguagaugggggaacugugaaua

SEQ ID NO: 181953 - RNA, 32 nt, Homo Sapiens
cgucgcggcuccuggagagcugaucguucacc

SEQ ID NO: 181954 - RNA, 32 nt, Homo Sapiens
caaugcaaacuuaggcgaguacuucuugaaau

SEQ ID NO: 181955 - RNA, 32 nt, Homo Sapiens
caguuauagaaagcaagauguacuauaacaua

SEQ ID NO: 181956 - RNA, 32 nt, Homo Sapiens
acauugccaugggggagggaagauguguccug

SEQ ID NO: 181957 - RNA, 32 nt, Homo Sapiens
agaacuguuucauuagaagacagaagaaugaa

SEQ ID NO: 181958 - RNA, 32 nt, Homo Sapiens
gcaguuaggccgcgagcgacugcggcgccgag

SEQ ID NO: 181959 - RNA, 32 nt, Homo Sapiens
cccggcggcggcuggaggaggaagccaggcgg

SEQ ID NO: 181960 - RNA, 31 nt, Homo Sapiens
caggauuuuuguaugaaaguuuuguuugauu

SEQ ID NO: 181961 - RNA, 32 nt, Homo Sapiens
uugcaacuaccucugugacuaguggagacaac

SEQ ID NO: 181962 - RNA, 32 nt, Homo Sapiens
aaccuuuuacacaacaucauuguguaauuugu

SEQ ID NO: 181963 - RNA, 32 nt, Homo Sapiens
aggaagaaaaagaaagccuaauauugggagaa

SEQ ID NO: 181964 - RNA, 32 nt, Homo Sapiens
cuccagagguaacaauuauccaaaauuugaug

SEQ ID NO: 181965 - RNA, 32 nt, Homo Sapiens
uaaucaagaaaggcuggaaaaacuacugaaaa

SEQ ID NO: 181966 - RNA, 32 nt, Homo Sapiens
aacuacaagacuguuaacuaagaucaaugugg

SEQ ID NO: 181967 - RNA, 32 nt, Homo Sapiens
aauuaaaguaugcaaaauaaagaauaugccgu

SEQ ID NO: 181968 - RNA, 32 nt, Homo Sapiens
ccuaauggugcuauagagagggagguaacaga

SEQ ID NO: 181969 - RNA, 32 nt, Homo Sapiens
ucacuguaucccacccaccccuccuggcccug

SEQ ID NO: 181970 - RNA, 32 nt, Homo Sapiens
gcuuuauagauauauacaauguaaugaguagu

SEQ ID NO: 181971 - RNA, 32 nt, Homo Sapiens
cucaccacaucuucaucaccagcaaacgccag

SEQ ID NO: 181972 - RNA, 32 nt, Homo Sapiens
uuugccgcaucccaccgcccuacgacaagaaa

SEQ ID NO: 181973 - RNA, 32 nt, Homo Sapiens
gagacacccggcacccaguccgaagcccuccc

SEQ ID NO: 181974 - RNA, 32 nt, Homo Sapiens
uuguagaguauuuuuauuggguguuaacuuug

SEQ ID NO: 181975 - RNA, 32 nt, Homo Sapiens
acugauugaaagauuuuuuauguuuuccuugu

SEQ ID NO: 181976 - RNA, 32 nt, Homo Sapiens
gcugugcauguuggcuucuuuggaccugcacu

SEQ ID NO: 181977 - RNA, 32 nt, Homo Sapiens
guuuguaguaccuuuguuuguaucauagaucu

SEQ ID NO: 181978 - RNA, 32 nt, Homo Sapiens
cagugccugcagccauggcucccggccagcuc

SEQ ID NO: 181979 - RNA, 32 nt, Homo Sapiens
cgcagggcccgaguccuccucgguaaugaguc

SEQ ID NO: 181980 - RNA, 32 nt, Homo Sapiens
guauauaaacaaaaguaaauacuauaauacaa

SEQ ID NO: 181981 - RNA, 32 nt, Homo Sapiens
gaggacagugcuccuggccacccagccucugc

SEQ ID NO: 181982 - RNA, 32 nt, Homo Sapiens
uggcaugugaucugggaaacugauugaauaau

SEQ ID NO: 181983 - RNA, 32 nt, Homo Sapiens
ccauacucugucacugccacauuuucaccugg

SEQ ID NO: 181984 - RNA, 32 nt, Homo Sapiens
ccauuagugucugcuaccuucugcaacccaga

SEQ ID NO: 181985 - RNA, 32 nt, Homo Sapiens
ccucuuaacccucuccuuagcccuagggcagu

SEQ ID NO: 181986 - RNA, 32 nt, Homo Sapiens
aagaggaacuaaaaccagaggcauuauuacug

SEQ ID NO: 181987 - RNA, 32 nt, Homo Sapiens
uuccugguuguauguggccuguuuacaugaug

SEQ ID NO: 181988 - RNA, 32 nt, Homo Sapiens
gaaacgcucuccccacccacgccaugcugacc

SEQ ID NO: 181989 - RNA, 32 nt, Homo Sapiens
gcaggagagccacugccuccccugccuccccu

SEQ ID NO: 181990 - RNA, 32 nt, Homo Sapiens
ccaguaccuaagauggccgccggcccauccac

SEQ ID NO: 181991 - RNA, 32 nt, Homo Sapiens
agcuaugggagccccagggucuucccuaccuc

SEQ ID NO: 181992 - RNA, 32 nt, Homo Sapiens
auucccggccccaucccucacccccacccuca

SEQ ID NO: 181993 - RNA, 32 nt, Homo Sapiens
ugaaaaucauagucucaaucuagacagucuuu

SEQ ID NO: 181994 - RNA, 32 nt, Homo Sapiens
gcuuucagcaaggauuugaaaacucuuccguc

SEQ ID NO: 181995 - RNA, 32 nt, Homo Sapiens
ucucucugacuaucugaagauauaugaaaaag

SEQ ID NO: 181996 - RNA, 32 nt, Homo Sapiens
uccccccaccucccucccggacggggcagcug

SEQ ID NO: 181997 - RNA, 32 nt, Homo Sapiens
uccaggccgucaaauuauucucuuguucauuu

SEQ ID NO: 181998 - RNA, 30 nt, Homo Sapiens
aggacucaguucaugggggaaacuugaccu

SEQ ID NO: 181999 - RNA, 32 nt, Homo Sapiens
gugguucuaugaugaaguccugucuuggaagg

SEQ ID NO: 182000 - RNA, 29 nt, Homo Sapiens
auacauauauguauacauauacacauaua

SEQ ID NO: 182001 - RNA, 32 nt, Homo Sapiens
aauccacuaugggaagcucuguguguaccugg

SEQ ID NO: 182002 - RNA, 32 nt, Homo Sapiens
aaaggacauggcacuuugugcugcuggcacug

SEQ ID NO: 182003 - RNA, 32 nt, Homo Sapiens
cccuaggccccagcgcagcugccucccgugcu

SEQ ID NO: 182004 - RNA, 32 nt, Homo Sapiens
gagagaacccucacuguggggaaugcugauaa

SEQ ID NO: 182005 - RNA, 32 nt, Homo Sapiens
guuuagaugauuagcccucuuguuuuaucuuu

SEQ ID NO: 182006 - RNA, 32 nt, Homo Sapiens
ucuguuuauauuaaauccacaauauuuuauua

SEQ ID NO: 182007 - RNA, 32 nt, Homo Sapiens
uugugucuuauguucucuguauuuaugcagcu

SEQ ID NO: 182008 - RNA, 32 nt, Homo Sapiens
aagccggcgcgcccgcggcccgcgcgauuucc

SEQ ID NO: 182009 - RNA, 32 nt, Homo Sapiens
gauguaaaauuccuuucugaagugucucuucu

SEQ ID NO: 182010 - RNA, 32 nt, Homo Sapiens
uggcucuaauuugaauaagcugaguaaaacca

SEQ ID NO: 182011 - RNA, 32 nt, Homo Sapiens
cgccacucguucacccuccccccagcucauga

SEQ ID NO: 182012 - RNA, 32 nt, Homo Sapiens
gaaucagaucauauucuacaguuguccuggca

SEQ ID NO: 182013 - RNA, 32 nt, Homo Sapiens
gauucugaugauucuuugaccaaaaaauugag

SEQ ID NO: 182014 - RNA, 32 nt, Homo Sapiens
uuugggaagaaccaagguagaauuuaauuuuc

SEQ ID NO: 182015 - RNA, 32 nt, Homo Sapiens
aggcugagagacaaagcagaccaccuggugaa

SEQ ID NO: 182016 - RNA, 32 nt, Homo Sapiens
gaagauaaacacaaguaaguacgguuguuccc

SEQ ID NO: 182017 - RNA, 32 nt, Homo Sapiens
cacccuaggucugaaggcccccgccccgaauc

SEQ ID NO: 182018 - RNA, 32 nt, Homo Sapiens
aaucuuggcuaagcaccuccagugugcaguaa

SEQ ID NO: 182019 - RNA, 32 nt, Homo Sapiens
uccugccaugcccggcggccccaguccccgca

SEQ ID NO: 182020 - RNA, 32 nt, Homo Sapiens
ugaaacagugauugaguuuguucaagccaugg

SEQ ID NO: 182021 - RNA, 32 nt, Homo Sapiens
aaggcuggaagacauuuggguccuagaagaag

SEQ ID NO: 182022 - RNA, 32 nt, Homo Sapiens
uggaggucagugauuggcugugucacagugcc

SEQ ID NO: 182023 - RNA, 32 nt, Homo Sapiens
acagacaccagcucagccaggugauugagguu

SEQ ID NO: 182024 - RNA, 32 nt, Homo Sapiens
uuucccaggcuggucucaaacuccugagcuca

SEQ ID NO: 182025 - RNA, 32 nt, Homo Sapiens
aacuuugcacuccaaaagcuuauuuggauuuu

SEQ ID NO: 182026 - RNA, 32 nt, Homo Sapiens
aagguugccacgggaaggcccuguugggauuu

SEQ ID NO: 182027 - RNA, 32 nt, Homo Sapiens
uuuccucuguagagaauucacuuuucucaaau

SEQ ID NO: 182028 - RNA, 32 nt, Homo Sapiens
agccaaagcuggagggcagcugccggccacaa

SEQ ID NO: 182029 - RNA, 32 nt, Homo Sapiens
acugugccuggccaguuauuuccuuuuuaagc

SEQ ID NO: 182030 - RNA, 32 nt, Homo Sapiens
augacuccauucaaaucuacgguuaugaaggc

SEQ ID NO: 182031 - RNA, 32 nt, Homo Sapiens
guccccuuucccugucccagccccaucugugg

SEQ ID NO: 182032 - RNA, 32 nt, Homo Sapiens
cacgaggcugugcucccggcgcugacgugucu

SEQ ID NO: 182033 - RNA, 32 nt, Homo Sapiens
aguggccgggaagaggaggagacccggccaga

SEQ ID NO: 182034 - RNA, 32 nt, Homo Sapiens
gggggcagaggcggaccugucuggagauggua

SEQ ID NO: 182035 - RNA, 32 nt, Homo Sapiens
cccagugggggacagggccugucugcaugaag

SEQ ID NO: 182036 - RNA, 32 nt, Homo Sapiens
gaucaaaucaucacagaauaaccccgugauag

SEQ ID NO: 182037 - RNA, 32 nt, Homo Sapiens
agcauuacaucauuuuguccauaaauauuucu

SEQ ID NO: 182038 - RNA, 32 nt, Homo Sapiens
gacuccgccccucccccucccccucgaacaaa

SEQ ID NO: 182039 - RNA, 32 nt, Homo Sapiens
gcgccucgcccggcuggagcuagagaacucgu

SEQ ID NO: 182040 - RNA, 32 nt, Homo Sapiens
ugagcucagaggggguacccaggcgggcaggg

SEQ ID NO: 182041 - RNA, 32 nt, Homo Sapiens
gcauugcagaaagguggucagaugaccagugu

SEQ ID NO: 182042 - RNA, 32 nt, Homo Sapiens
uauauuuuguuguuugcugggguguucaugga

SEQ ID NO: 182043 - RNA, 32 nt, Homo Sapiens
auuuucccuucgcuugaauauuaucccuguau

SEQ ID NO: 182044 - RNA, 32 nt, Homo Sapiens
augcugucacucagccagaucaguauugaccc

SEQ ID NO: 182045 - RNA, 32 nt, Homo Sapiens
cugggugaaacacgacguggacgcccgcaggc

SEQ ID NO: 182046 - RNA, 32 nt, Homo Sapiens
auaacaguaagggauauuagauaauauaccgu

SEQ ID NO: 182047 - RNA, 32 nt, Homo Sapiens
ccuucuguucuuccuuggccaagcugcagggg

SEQ ID NO: 182048 - RNA, 30 nt, Homo Sapiens
ccggagcgcucagugccgccgcugccgccc

SEQ ID NO: 182049 - RNA, 32 nt, Homo Sapiens
agggagccaagaggauggggugggggccaggg

SEQ ID NO: 182050 - RNA, 32 nt, Homo Sapiens
cacagucagaacagcagccucuacacauguug

SEQ ID NO: 182051 - RNA, 32 nt, Homo Sapiens
gguuccaaauuauccuggucuuuuucuaccuu

SEQ ID NO: 182052 - RNA, 32 nt, Homo Sapiens
gccggacaccgggcccuggacaugcugcuucc

SEQ ID NO: 182053 - RNA, 32 nt, Homo Sapiens
ccucugccuucucagggacaagaguaguccuu

SEQ ID NO: 182054 - RNA, 32 nt, Homo Sapiens
ccucaaagugguucuccccaccuaccccacuc

SEQ ID NO: 182055 - RNA, 32 nt, Homo Sapiens
uguuaaucaaauuuauguuaauuggauccuuu

SEQ ID NO: 182056 - RNA, 32 nt, Homo Sapiens
gguggggcugcguggaggagggggccacgugu

SEQ ID NO: 182057 - RNA, 32 nt, Homo Sapiens
uuuuauauuuggcugcucccaaacugucccca

SEQ ID NO: 182058 - RNA, 32 nt, Homo Sapiens
cuugacauuucuuuuuaccuucauaugccacu

SEQ ID NO: 182059 - RNA, 32 nt, Homo Sapiens
cggugcgcgggcggggaggacggcgggggaca

SEQ ID NO: 182060 - RNA, 32 nt, Homo Sapiens
uuuaauauguuaaacugaauuuuucagguaua

SEQ ID NO: 182061 - RNA, 32 nt, Homo Sapiens
ggagggaggcggaggaaccgguguucgccgcc

SEQ ID NO: 182062 - RNA, 32 nt, Homo Sapiens
cugccucacaagcagugacaccucggguccuu

SEQ ID NO: 182063 - RNA, 32 nt, Homo Sapiens
aaaucuauuaaauuuuucuccucuaaaaacug

SEQ ID NO: 182064 - RNA, 32 nt, Homo Sapiens
ccuucccaccccagcccuugcuggucccuagg

SEQ ID NO: 182065 - RNA, 32 nt, Homo Sapiens
cgacugcgccccgucccggcgccgcgcucguc

SEQ ID NO: 182066 - RNA, 32 nt, Homo Sapiens
cggccgguucccucagcaggaccugggcuggc

SEQ ID NO: 182067 - RNA, 32 nt, Homo Sapiens
ucagaacagggcuauuugaagaauuauuuuau

SEQ ID NO: 182068 - RNA, 32 nt, Homo Sapiens
uuuuagauaaaggauaugaaaacucuauguug

SEQ ID NO: 182069 - RNA, 32 nt, Homo Sapiens
gggggucacaccagaagcuggccuggggucuc

SEQ ID NO: 182070 - RNA, 32 nt, Homo Sapiens
caagcccgagggugcguggcgcccccgcccgc

SEQ ID NO: 182071 - RNA, 32 nt, Homo Sapiens
uuauauuuuauuagaugauuugcuuccuauaa

SEQ ID NO: 182072 - RNA, 32 nt, Homo Sapiens
accggcugcaccugcuguucucuucuuuaugc

SEQ ID NO: 182073 - RNA, 32 nt, Homo Sapiens
ucaguuaccuccacuuuuuuuaucguaacacc

SEQ ID NO: 182074 - RNA, 32 nt, Homo Sapiens
cuauuucagcaaauaaaauauuucauugcuua

SEQ ID NO: 182075 - RNA, 32 nt, Homo Sapiens
cccuggcauggcaaccugcagcaggauuaacu

SEQ ID NO: 182076 - RNA, 32 nt, Homo Sapiens
ggccagcccgcuucucugcccggagccaugaa

SEQ ID NO: 182077 - RNA, 32 nt, Homo Sapiens
gcccuuaucuuugccuucauggaguaaacagu

SEQ ID NO: 182078 - RNA, 32 nt, Homo Sapiens
auggauuugggguuggaggggccauuccggag

SEQ ID NO: 182079 - RNA, 32 nt, Homo Sapiens
ugcucaaugcccuuuguguccaucggguucca

SEQ ID NO: 182080 - RNA, 32 nt, Homo Sapiens
ggggaaggcagacauccugagugaugggcgcc

SEQ ID NO: 182081 - RNA, 31 nt, Homo Sapiens
cugaagcugccgggucugcuacggcaccgcg

SEQ ID NO: 182082 - RNA, 32 nt, Homo Sapiens
guugccgcguccuuggcuggcgucagaaaaau

SEQ ID NO: 182083 - RNA, 32 nt, Homo Sapiens
cccguccccaucccccuccccucccccgacua

SEQ ID NO: 182084 - RNA, 32 nt, Homo Sapiens
gaacccgggaggaggagguugcacugagccga

SEQ ID NO: 182085 - RNA, 32 nt, Homo Sapiens
aagaauggacauuugaaccagacaucacugag

SEQ ID NO: 182086 - RNA, 32 nt, Homo Sapiens
gaaauuaccagcaguagggacacacauucugg

SEQ ID NO: 182087 - RNA, 32 nt, Homo Sapiens
auugucacaauuuuaaaguuugcuuaauaccu

SEQ ID NO: 182088 - RNA, 32 nt, Homo Sapiens
cugaccaucuucuccaaaccuuccccaggaga

SEQ ID NO: 182089 - RNA, 32 nt, Homo Sapiens
gacgcaucgcagcagcagcagcagcagcagaa

SEQ ID NO: 182090 - RNA, 30 nt, Homo Sapiens
ucucuccauaucccuguuucucucugccug

SEQ ID NO: 182091 - RNA, 32 nt, Homo Sapiens
ucuuucuuuucuucuuuuuuauuuuuuauaua

SEQ ID NO: 182092 - RNA, 32 nt, Homo Sapiens
uggcaccacacacauugucuccagcuuucagg

SEQ ID NO: 182093 - RNA, 32 nt, Homo Sapiens
uuuuaccuaguacaaggcaacauauagguugu

SEQ ID NO: 182094 - RNA, 32 nt, Homo Sapiens
gcaaugcagucaacuggagagaguuccgauuu

SEQ ID NO: 182095 - RNA, 32 nt, Homo Sapiens
aguguuucaacguuauuggacaauuaggaaga

SEQ ID NO: 182096 - RNA, 32 nt, Homo Sapiens
aguccugcggccagcuguugccugcagcagag

SEQ ID NO: 182097 - RNA, 32 nt, Homo Sapiens
gaaaugccugaagccaaaaaugugauagcugu

SEQ ID NO: 182098 - RNA, 32 nt, Homo Sapiens
uaguggcgcugcuagccggccggcgcaggcug

SEQ ID NO: 182099 - RNA, 32 nt, Homo Sapiens
uacaacacuauuuauuuuuuuauuuaugucau

SEQ ID NO: 182100 - RNA, 32 nt, Homo Sapiens
gggugagccgggggcggggacgggggcgggac

SEQ ID NO: 182101 - RNA, 32 nt, Homo Sapiens
aaaucagaguugcugaaucuaauuguaauuuc

SEQ ID NO: 182102 - RNA, 32 nt, Homo Sapiens
ugcaucuuagggcaucgcucuuccucacacca

SEQ ID NO: 182103 - RNA, 32 nt, Homo Sapiens
aaacaaaguccuccccuucguggagccuauau

SEQ ID NO: 182104 - RNA, 32 nt, Homo Sapiens
cgcugccuggaaauggacuuugcugccugcau

SEQ ID NO: 182105 - RNA, 32 nt, Homo Sapiens
gccuucggacugucuauuugccugcaguccag

SEQ ID NO: 182106 - RNA, 32 nt, Homo Sapiens
aaaaggcucugugccaaggagggaccacagga

SEQ ID NO: 182107 - RNA, 32 nt, Homo Sapiens
aagcuauagauauacagauaucagcuuaccua

SEQ ID NO: 182108 - RNA, 32 nt, Homo Sapiens
uauaaucuaaucuuggaagucacaaaauguca

SEQ ID NO: 182109 - RNA, 32 nt, Homo Sapiens
ucccgcggccccauccagaaguggcucagcgu

SEQ ID NO: 182110 - RNA, 32 nt, Homo Sapiens
ccgccgccgccucuccuugcugcagccaugga

SEQ ID NO: 182111 - RNA, 32 nt, Homo Sapiens
uggugagcugaauucugcauggcagugcuuac

SEQ ID NO: 182112 - RNA, 32 nt, Homo Sapiens
ggcuucuuuaucgagaagaauacaauucuaca

SEQ ID NO: 182113 - RNA, 32 nt, Homo Sapiens
caagauugaaagagucuuucuccgaaaaucau

SEQ ID NO: 182114 - RNA, 32 nt, Homo Sapiens
aaauuuuucuuuaaguuuucucugaguuuggc

SEQ ID NO: 182115 - RNA, 32 nt, Homo Sapiens
ggacggccgaggcgugucugggccggcagccc

SEQ ID NO: 182116 - RNA, 32 nt, Homo Sapiens
gacagugauggaguggacggcggcacgggccc

SEQ ID NO: 182117 - RNA, 32 nt, Homo Sapiens
ugaccagccuacuccugcgugagcugccagcc

SEQ ID NO: 182118 - RNA, 32 nt, Homo Sapiens
gcuuucauuauuuuccucgggccuuacugagc

SEQ ID NO: 182119 - RNA, 32 nt, Homo Sapiens
acugcuugaaagauauauuuuaaguggugcac

SEQ ID NO: 182120 - RNA, 32 nt, Homo Sapiens
ggaaaaaggggauccagggagaggaacuuuuc

SEQ ID NO: 182121 - RNA, 32 nt, Homo Sapiens
aaacaggaauacuuuaacaauuaaaaagaaaa

SEQ ID NO: 182122 - RNA, 32 nt, Homo Sapiens
aacccagaugccugaggccuggcuggggcugc

SEQ ID NO: 182123 - RNA, 32 nt, Homo Sapiens
accugcgcccaccagcagugaagguugaugua

SEQ ID NO: 182124 - RNA, 32 nt, Homo Sapiens
cccuuucugcacccacaggucugucuugcuca

SEQ ID NO: 182125 - RNA, 32 nt, Homo Sapiens
agcuuccuacaggcagagucaggccgcacugg

SEQ ID NO: 182126 - RNA, 32 nt, Homo Sapiens
caccuaagugguuuuucuugccaacaagaauu

SEQ ID NO: 182127 - RNA, 32 nt, Homo Sapiens
ugaauggccuacuguucuauuauuuguuuuga

SEQ ID NO: 182128 - RNA, 32 nt, Homo Sapiens
ccccgcccccgucauggcgcccgaggagaacg

SEQ ID NO: 182129 - RNA, 32 nt, Homo Sapiens
guguaugagucuuugagcaugugugugucaac

SEQ ID NO: 182130 - RNA, 32 nt, Homo Sapiens
gagcccgaggcgaaaaaguaacugucaaaugc

SEQ ID NO: 182131 - RNA, 32 nt, Homo Sapiens
cccagaaaauauauuucaauaaaagagagaag

SEQ ID NO: 182132 - RNA, 32 nt, Homo Sapiens
uagaggcggcaccgggauccccggcuccgggg

SEQ ID NO: 182133 - RNA, 32 nt, Homo Sapiens
gaggaucagccuuuuccagcauccugugagag

SEQ ID NO: 182134 - RNA, 32 nt, Homo Sapiens
cgcugcucaggcgaauuucucauuucaagcca

SEQ ID NO: 182135 - RNA, 32 nt, Homo Sapiens
cauccaggagcccaccaagaggugccucauua

SEQ ID NO: 182136 - RNA, 32 nt, Homo Sapiens
gcggguugggcggggggcgcugccgcccaagg

SEQ ID NO: 182137 - RNA, 32 nt, Homo Sapiens
acccugcucuuucuccuucauuccgcagccuc

SEQ ID NO: 182138 - RNA, 32 nt, Homo Sapiens
agcccccgcggcggggaccccugaucggcagc

SEQ ID NO: 182139 - RNA, 31 nt, Homo Sapiens
gagggcucucggagaaaguguguguauuccu

SEQ ID NO: 182140 - RNA, 32 nt, Homo Sapiens
uuagugccaaauguauuccauuuuaaaaguaa

SEQ ID NO: 182141 - RNA, 32 nt, Homo Sapiens
uauuuagcaagagacacuauuaccaaagauug

SEQ ID NO: 182142 - RNA, 32 nt, Homo Sapiens
cauuguaucagauuauuuuuaaguuuuauccg

SEQ ID NO: 182143 - RNA, 32 nt, Homo Sapiens
cuagauguauuuaauauaauccuuacuuaaaa

SEQ ID NO: 182144 - RNA, 32 nt, Homo Sapiens
aacacuggaauaggugaagaccugacaguaau

SEQ ID NO: 182145 - RNA, 32 nt, Homo Sapiens
cucauggcacccaaaaagcucugggaacccag

SEQ ID NO: 182146 - RNA, 32 nt, Homo Sapiens
aagccuggguggcagaugaacagugcuuccuu

SEQ ID NO: 182147 - RNA, 32 nt, Homo Sapiens
gcacggcaagaagugucugggcugggacggac

SEQ ID NO: 182148 - RNA, 32 nt, Homo Sapiens
caaaaaauuggauguauuauuuugagcuucua

SEQ ID NO: 182149 - RNA, 32 nt, Homo Sapiens
guccacauuuccccaugugacucauugcaccc

SEQ ID NO: 182150 - RNA, 32 nt, Homo Sapiens
cagcaagacagaggaacugaaacgcgaggugg

SEQ ID NO: 182151 - RNA, 32 nt, Homo Sapiens
caacuaagcagucccugagaccauuuaacaug

SEQ ID NO: 182152 - RNA, 32 nt, Homo Sapiens
gaguauuaauuuuauguaagcauucuauuuaa

SEQ ID NO: 182153 - RNA, 32 nt, Homo Sapiens
caaagccugcaucuguguugacuugcaagauu

SEQ ID NO: 182154 - RNA, 32 nt, Homo Sapiens
agcugcugcucuugaauggguuuuggaaguua

SEQ ID NO: 182155 - RNA, 32 nt, Homo Sapiens
cacacacacacacacacacacauacaccuaca

SEQ ID NO: 182156 - RNA, 32 nt, Homo Sapiens
uacacaucuuuuuauauccaguuucuuacugg

SEQ ID NO: 182157 - RNA, 32 nt, Homo Sapiens
cguguccgggugcuaggcugcagacccgccgc

SEQ ID NO: 182158 - RNA, 32 nt, Homo Sapiens
uuccuagucuuucagcagcagcugcacagagu

SEQ ID NO: 182159 - RNA, 32 nt, Homo Sapiens
gaguguguguugggggcggugugggcucugga

SEQ ID NO: 182160 - RNA, 32 nt, Homo Sapiens
gggacccgaggacugccccccggcgccugccc

SEQ ID NO: 182161 - RNA, 32 nt, Homo Sapiens
auauuacaaaaauauuguuuguuuuguggcuc

SEQ ID NO: 182162 - RNA, 32 nt, Homo Sapiens
accuccagucucggcuuuccccggggggccaa

SEQ ID NO: 182163 - RNA, 32 nt, Homo Sapiens
uuuuauuacugauuuuguuauuuuuauaucag

SEQ ID NO: 182164 - RNA, 32 nt, Homo Sapiens
auuugagaagcuggcuguuuaagggaacccag

SEQ ID NO: 182165 - RNA, 32 nt, Homo Sapiens
aaaaagagcccuggaauauaaaaagacaugag

SEQ ID NO: 182166 - RNA, 32 nt, Homo Sapiens
agaaugggagacgugccuccccuuccccacuc

SEQ ID NO: 182167 - RNA, 32 nt, Homo Sapiens
auugcauguguuccuuuugaagguaggggaug

SEQ ID NO: 182168 - RNA, 32 nt, Homo Sapiens
uuuuucuuuuucuauuuuuguuuacuuagucc

SEQ ID NO: 182169 - RNA, 30 nt, Homo Sapiens
gcuggguggggcgggugcacggguggagcc

SEQ ID NO: 182170 - RNA, 32 nt, Homo Sapiens
gucgggcggagcaggcggcugcuugacagcug

SEQ ID NO: 182171 - RNA, 32 nt, Homo Sapiens
cugaucacaaaauaaacuccuggguugacgcc

SEQ ID NO: 182172 - RNA, 32 nt, Homo Sapiens
auuuccuacauuccuccuuguuugccgcugcu

SEQ ID NO: 182173 - RNA, 32 nt, Homo Sapiens
acagucacuuccaagcucagucuaaaugaaac

SEQ ID NO: 182174 - RNA, 32 nt, Homo Sapiens
cgaagccuacaggggcaagggccgcuucguau

SEQ ID NO: 182175 - RNA, 32 nt, Homo Sapiens
aacacagagccuuauuuaauagcaugaugauu

SEQ ID NO: 182176 - RNA, 32 nt, Homo Sapiens
aggccgcgggccggcacuccccggaugcacca

SEQ ID NO: 182177 - RNA, 32 nt, Homo Sapiens
uuuuaaaaaaaauuaaugguuuuaaauauaug

SEQ ID NO: 182178 - RNA, 32 nt, Homo Sapiens
cugcagauggggaccaguggcucccauuuuca

SEQ ID NO: 182179 - RNA, 30 nt, Homo Sapiens
ucccgaugcaggcgcccggccgggggccac

SEQ ID NO: 182180 - RNA, 32 nt, Homo Sapiens
ucacgacuauucuccucguuucucaaaaggcc

SEQ ID NO: 182181 - RNA, 32 nt, Homo Sapiens
uaggcgaggaaaaugcccgaggcgcugucuuc

SEQ ID NO: 182182 - RNA, 32 nt, Homo Sapiens
acugguacauaaauaccuaggaaauauuuuuc

SEQ ID NO: 182183 - RNA, 32 nt, Homo Sapiens
uggccuggccuggccugaccaaugagaggcca

SEQ ID NO: 182184 - RNA, 32 nt, Homo Sapiens
uuauaucuguacauauuagacacacgcgagcc

SEQ ID NO: 182185 - RNA, 32 nt, Homo Sapiens
cguggcugcccucuccugccucaugcuuguug

SEQ ID NO: 182186 - RNA, 32 nt, Homo Sapiens
guuguuguuuuaaauauggagucucgcuguau

SEQ ID NO: 182187 - RNA, 32 nt, Homo Sapiens
gcgcgcgcuucccucccggcgcagucaccggc

SEQ ID NO: 182188 - RNA, 32 nt, Homo Sapiens
ugagguuggcaaggcucucaccacucagccuu

SEQ ID NO: 182189 - RNA, 28 nt, Homo Sapiens
uugauggaagcagaaaccaaaacucuuc

SEQ ID NO: 182190 - RNA, 32 nt, Homo Sapiens
ugcacuugcugcccucugacaccugggaagau

SEQ ID NO: 182191 - RNA, 32 nt, Homo Sapiens
auaagauccacccacaccuaagucacagaauu

SEQ ID NO: 182192 - RNA, 32 nt, Homo Sapiens
acacagagcugacaccauauuccagggcaguc

SEQ ID NO: 182193 - RNA, 32 nt, Homo Sapiens
cggaccuggcccugcucuguggucucuugcau

SEQ ID NO: 182194 - RNA, 32 nt, Homo Sapiens
ugcccuccaagcgcccucuggggacagaccaa

SEQ ID NO: 182195 - RNA, 32 nt, Homo Sapiens
ucgagaaaaugaaugaaacacucaaaggacau

SEQ ID NO: 182196 - RNA, 32 nt, Homo Sapiens
ggaagcaacccggacuacacuuggcaagcaug

SEQ ID NO: 182197 - RNA, 32 nt, Homo Sapiens
acauuuuccagucucacgguucuguguaccuc

SEQ ID NO: 182198 - RNA, 32 nt, Homo Sapiens
aguuauaggggaaaaaauauuuucucuaagau

SEQ ID NO: 182199 - RNA, 32 nt, Homo Sapiens
ucuagaccaaaauuaccuuugccacagaauuc

SEQ ID NO: 182200 - RNA, 32 nt, Homo Sapiens
uucccaggugucccuuucuccuccccuagugu

SEQ ID NO: 182201 - RNA, 32 nt, Homo Sapiens
acagaggugcggugacuugcccggggcuccag

SEQ ID NO: 182202 - RNA, 32 nt, Homo Sapiens
cccguggccgcuguccaggagcucugcucucc

SEQ ID NO: 182203 - RNA, 32 nt, Homo Sapiens
cucuuugagucaagucaaauauguagaugccu

SEQ ID NO: 182204 - RNA, 32 nt, Homo Sapiens
gcuucucuggauccuccccacccccuccugcu

SEQ ID NO: 182205 - RNA, 32 nt, Homo Sapiens
caaagauaagguggcauucacccccaggcucu

SEQ ID NO: 182206 - RNA, 29 nt, Homo Sapiens
uuugcuuuuuggauucggaugacgucaug

SEQ ID NO: 182207 - RNA, 32 nt, Homo Sapiens
aacacuguaaauuuuccaagccucaguuucuu

SEQ ID NO: 182208 - RNA, 32 nt, Homo Sapiens
cuggaccucgaccgugaacccaagaaagaggc

SEQ ID NO: 182209 - RNA, 32 nt, Homo Sapiens
cuggaaguguaaacaugucuauugauguguau

SEQ ID NO: 182210 - RNA, 32 nt, Homo Sapiens
uacaugcgccgggagcuucuugcaggaauacu

SEQ ID NO: 182211 - RNA, 30 nt, Homo Sapiens
auguuugucuguguucauuggauccaucuu

SEQ ID NO: 182212 - RNA, 32 nt, Homo Sapiens
augcaaaaaauauacaaaaauuuuguccuaaa

SEQ ID NO: 182213 - RNA, 29 nt, Homo Sapiens
acgucaucggggcgccggacgccggggcg

SEQ ID NO: 182214 - RNA, 32 nt, Homo Sapiens
ccacguccccagggauuggaggaggcuccggu

SEQ ID NO: 182215 - RNA, 32 nt, Homo Sapiens
guccagguucccuccccgccacagugaaauaa

SEQ ID NO: 182216 - RNA, 32 nt, Homo Sapiens
aggugaggaagaagaaagaggaagcgcugaau

SEQ ID NO: 182217 - RNA, 32 nt, Homo Sapiens
ccagaggaccaggcccaggcaaggcugggaau

SEQ ID NO: 182218 - RNA, 32 nt, Homo Sapiens
cuuccucacccgcucccaccucacaccccuca

SEQ ID NO: 182219 - RNA, 32 nt, Homo Sapiens
cucggaccaggcccgcagcgccgcccgcccuc

SEQ ID NO: 182220 - RNA, 32 nt, Homo Sapiens
cgcuccuaggggcggagaagggugcgggcucu

SEQ ID NO: 182221 - RNA, 32 nt, Homo Sapiens
gggcuggugcguggccggcagcucgcgaacag

SEQ ID NO: 182222 - RNA, 32 nt, Homo Sapiens
aaaaauaaucauccaaaaugucuuaggaaccu

SEQ ID NO: 182223 - RNA, 32 nt, Homo Sapiens
cccaccaccacagcccaccuccguccucacau

SEQ ID NO: 182224 - RNA, 32 nt, Homo Sapiens
gacuggauggcuagaaauauuuuagguggaua

SEQ ID NO: 182225 - RNA, 32 nt, Homo Sapiens
caggggcccccgaggagaagugcaggccccuu

SEQ ID NO: 182226 - RNA, 27 nt, Homo Sapiens
cucuguucucucuucagcuccacccgc

SEQ ID NO: 182227 - RNA, 32 nt, Homo Sapiens
ccccaggcucccugcuuucucucuugcccucc

SEQ ID NO: 182228 - RNA, 32 nt, Homo Sapiens
ggaaucaaauauuuuuuccaggggugagaaua

SEQ ID NO: 182229 - RNA, 32 nt, Homo Sapiens
aaauuugugaauguugaaauucaacaugcuuc

SEQ ID NO: 182230 - RNA, 32 nt, Homo Sapiens
ucgggggugcaucaucuuucuguuagaauggg

SEQ ID NO: 182231 - RNA, 32 nt, Homo Sapiens
ccggccaaaaagacaaaacacauagacgcaca

SEQ ID NO: 182232 - RNA, 32 nt, Homo Sapiens
gccccgcugagcccgcgaucacuuccucccug

SEQ ID NO: 182233 - RNA, 32 nt, Homo Sapiens
uucaucuguccucauucucugcgccuuucgca

SEQ ID NO: 182234 - RNA, 32 nt, Homo Sapiens
caacuucccccuccugcaggggauccgggucc

SEQ ID NO: 182235 - RNA, 32 nt, Homo Sapiens
aaggggcugcccuggggugugcccuggggagc

SEQ ID NO: 182236 - RNA, 32 nt, Homo Sapiens
ccacuucuugagcuuuaucuuuuuugacaaua

SEQ ID NO: 182237 - RNA, 32 nt, Homo Sapiens
cuauugaugcucucggcuccauugggagagca

SEQ ID NO: 182238 - RNA, 30 nt, Homo Sapiens
gggccuuuggucugcauccccuggccaggu

SEQ ID NO: 182239 - RNA, 32 nt, Homo Sapiens
auauuaauauaaauuacuucuugaguaauccc

SEQ ID NO: 182240 - RNA, 32 nt, Homo Sapiens
aagaauauuuuuguggaauauaagauucagag

SEQ ID NO: 182241 - RNA, 32 nt, Homo Sapiens
cccgccggguccguuaaucucaccgcgccgca

SEQ ID NO: 182242 - RNA, 32 nt, Homo Sapiens
caguggaaagcagagcugagaaauggacaaac

SEQ ID NO: 182243 - RNA, 32 nt, Homo Sapiens
gauccuuuucccuccagucagggccaggcgug

SEQ ID NO: 182244 - RNA, 32 nt, Homo Sapiens
ucccugaauuccacgcaucugcuggaaacgag

SEQ ID NO: 182245 - RNA, 32 nt, Homo Sapiens
aagucaguguaaaccacuuagauaguaguuuu

SEQ ID NO: 182246 - RNA, 32 nt, Homo Sapiens
accccccgccccacuccauguuggcugugcuc

SEQ ID NO: 182247 - RNA, 32 nt, Homo Sapiens
cacacacucuucaaguuuuuuucaaaguccaa

SEQ ID NO: 182248 - RNA, 32 nt, Homo Sapiens
gggaugucaucacccugggaaccgggagugcc

SEQ ID NO: 182249 - RNA, 32 nt, Homo Sapiens
cuuuguacagucucgauggcccacaccaaaac

SEQ ID NO: 182250 - RNA, 32 nt, Homo Sapiens
gaguauuaucuaaacagguugguggaaugaau

SEQ ID NO: 182251 - RNA, 32 nt, Homo Sapiens
aaggacuccaugaaccugggcuaaugggagac

SEQ ID NO: 182252 - RNA, 32 nt, Homo Sapiens
cuccuccccccucucucccuggugucaacucg

SEQ ID NO: 182253 - RNA, 32 nt, Homo Sapiens
ccgccaugauucugaggccucccccgccaugu

SEQ ID NO: 182254 - RNA, 32 nt, Homo Sapiens
cccaagggccggggagggagggguggaaagga

SEQ ID NO: 182255 - RNA, 32 nt, Homo Sapiens
cgcggucaacuuuccucaggaucugauuggcu

SEQ ID NO: 182256 - RNA, 32 nt, Homo Sapiens
cgucgucggauguuguguugcccgccaccaug

SEQ ID NO: 182257 - RNA, 32 nt, Homo Sapiens
cucuuccuccaaaauuugucuuucugaguggu

SEQ ID NO: 182258 - RNA, 32 nt, Homo Sapiens
uuauugcaugguuuauucuuuuucuuuacagc

SEQ ID NO: 182259 - RNA, 32 nt, Homo Sapiens
cggcggggucuguaggaaguugggccggguug

SEQ ID NO: 182260 - RNA, 32 nt, Homo Sapiens
uggggccaaaguugagauagaauagaggguga

SEQ ID NO: 182261 - RNA, 32 nt, Homo Sapiens
cuuugguuuuuggggguuuuuugggcaguuau

SEQ ID NO: 182262 - RNA, 32 nt, Homo Sapiens
cucugccucgcccaccccucagcccuccuccc

SEQ ID NO: 182263 - RNA, 32 nt, Homo Sapiens
ggcugcugccagcaccugccacucagagcgcc

SEQ ID NO: 182264 - RNA, 30 nt, Homo Sapiens
cuggaggauaaaagccggugcuuauugcau

SEQ ID NO: 182265 - RNA, 32 nt, Homo Sapiens
ucgcagcugggauuggagucgcugcucauggg

SEQ ID NO: 182266 - RNA, 32 nt, Homo Sapiens
auucuuccuccagccaaccccugaaaauuuua

SEQ ID NO: 182267 - RNA, 32 nt, Homo Sapiens
aucuauaguuuagcugaaaacaaaaucaaagc

SEQ ID NO: 182268 - RNA, 32 nt, Homo Sapiens
uaaagaaggauacauuuuuaauauauuugagu

SEQ ID NO: 182269 - RNA, 32 nt, Homo Sapiens
cuggagagaaaagguaguguuuuuguacaagg

SEQ ID NO: 182270 - RNA, 29 nt, Homo Sapiens
gggcauccgguccagggucuggagaccgu

SEQ ID NO: 182271 - RNA, 32 nt, Homo Sapiens
uguuuuuaauuucaagcaaaaucuuacuguac

SEQ ID NO: 182272 - RNA, 32 nt, Homo Sapiens
ggugccugaggguggggugggauuugcagggu

SEQ ID NO: 182273 - RNA, 32 nt, Homo Sapiens
cagcggcggcggaagcggagggggaccaccgu

SEQ ID NO: 182274 - RNA, 32 nt, Homo Sapiens
auuggggaagacuguggcugcuagcacuugga

SEQ ID NO: 182275 - RNA, 32 nt, Homo Sapiens
agaaugugaggaggaaguaacacacagaggag

SEQ ID NO: 182276 - RNA, 32 nt, Homo Sapiens
gcccccagccccagcuaccaccuccuccccgg

SEQ ID NO: 182277 - RNA, 32 nt, Homo Sapiens
agugaccagggccagccucugucucaggacau

SEQ ID NO: 182278 - RNA, 32 nt, Homo Sapiens
uggcuucuugugcugcagaagcucguugacaa

SEQ ID NO: 182279 - RNA, 32 nt, Homo Sapiens
uuuucucucguugccuccuugguuucagaaga

SEQ ID NO: 182280 - RNA, 32 nt, Homo Sapiens
ucauggggaaaagaaguaaagcugaggauggc

SEQ ID NO: 182281 - RNA, 32 nt, Homo Sapiens
acgaagccaggagagguagagugaaaauccca

SEQ ID NO: 182282 - RNA, 32 nt, Homo Sapiens
agcggcggcgacagcucugggguuugcgucuc

SEQ ID NO: 182283 - RNA, 32 nt, Homo Sapiens
uauuuauagaauauaaauuugucaguggaaua

SEQ ID NO: 182284 - RNA, 32 nt, Homo Sapiens
cucuguggccuguggagacuacagggucgcug

SEQ ID NO: 182285 - RNA, 32 nt, Homo Sapiens
aaagcuuguaaguccucccgacggccaugaac

SEQ ID NO: 182286 - RNA, 32 nt, Homo Sapiens
cggccaagccccagccucagccugcgccugag

SEQ ID NO: 182287 - RNA, 32 nt, Homo Sapiens
gcucuggccgccugagccaggaggaagcagcg

SEQ ID NO: 182288 - RNA, 32 nt, Homo Sapiens
cucauuuuuuaaaguuggcgauaccucacauc

SEQ ID NO: 182289 - RNA, 32 nt, Homo Sapiens
gaugcugccgugcgguacuugucauggagcug

SEQ ID NO: 182290 - RNA, 32 nt, Homo Sapiens
augaucugcuuagccauugaugaugacaacaa

SEQ ID NO: 182291 - RNA, 32 nt, Homo Sapiens
ugugggugguuuuaguggcauguaggacguga

SEQ ID NO: 182292 - RNA, 32 nt, Homo Sapiens
agcauucuggacuuaaauagguguaugugugu

SEQ ID NO: 182293 - RNA, 32 nt, Homo Sapiens
auugccauuuuucuuuuuguuaaaagauuaua

SEQ ID NO: 182294 - RNA, 32 nt, Homo Sapiens
uucuagugaagccauccuuucuuuuaauuuua

SEQ ID NO: 182295 - RNA, 32 nt, Homo Sapiens
aauggacuauacauguuauuguaaacaaauug

SEQ ID NO: 182296 - RNA, 32 nt, Homo Sapiens
aggcugcggucccagcgggugcgucugcagcu

SEQ ID NO: 182297 - RNA, 32 nt, Homo Sapiens
gcaaugcugcuguucagcucuuguguuuuugu

SEQ ID NO: 182298 - RNA, 32 nt, Homo Sapiens
cuccugcccugcauuccauccauccucacuca

SEQ ID NO: 182299 - RNA, 32 nt, Homo Sapiens
uaaauguaaugaaugugagaaaacauuugccc

SEQ ID NO: 182300 - RNA, 32 nt, Homo Sapiens
ugaggucaggaguucaagauuagccuggccaa

SEQ ID NO: 182301 - RNA, 32 nt, Homo Sapiens
ggauaaaucuucauuuuuguuucaacaaaacu

SEQ ID NO: 182302 - RNA, 32 nt, Homo Sapiens
ccagaccgggugugggggcucacgccuguaau

SEQ ID NO: 182303 - RNA, 32 nt, Homo Sapiens
ccucugagcucugggagggaagggaauggagc

SEQ ID NO: 182304 - RNA, 32 nt, Homo Sapiens
aggacuuggucgcgcccucccuuggcguggag

SEQ ID NO: 182305 - RNA, 31 nt, Homo Sapiens
gugugcagucgccccgcgccccgcgcgaccc

SEQ ID NO: 182306 - RNA, 32 nt, Homo Sapiens
cccugugccccggcaggccuggggucugcagu

SEQ ID NO: 182307 - RNA, 32 nt, Homo Sapiens
uacucauucuucccuucaaaacccagccucuu

SEQ ID NO: 182308 - RNA, 32 nt, Homo Sapiens
aauaaauauugugguuuuaucuacguuauugg

SEQ ID NO: 182309 - RNA, 32 nt, Homo Sapiens
cuauguacaaccuacccuguguauaacauuuc

SEQ ID NO: 182310 - RNA, 32 nt, Homo Sapiens
cauuuuuucauucuacagcauaaaaacaugag

SEQ ID NO: 182311 - RNA, 32 nt, Homo Sapiens
aucauuacuauaaccuaauuaagggacauuuu

SEQ ID NO: 182312 - RNA, 32 nt, Homo Sapiens
auccuaaaauguauauuuugcauaaaagagau

SEQ ID NO: 182313 - RNA, 32 nt, Homo Sapiens
ucuucuccaauguaugguauguuauuuuauuu

SEQ ID NO: 182314 - RNA, 32 nt, Homo Sapiens
ccauguaacccugcuuugggaauauggaugua

SEQ ID NO: 182315 - RNA, 32 nt, Homo Sapiens
guuaggcaauuugaacauguaggcaaaacucu

SEQ ID NO: 182316 - RNA, 32 nt, Homo Sapiens
uggcaggugaggaggagcuacagaugauucag

SEQ ID NO: 182317 - RNA, 32 nt, Homo Sapiens
ugccccaaccucagacuuaccaggaagcagau

SEQ ID NO: 182318 - RNA, 32 nt, Homo Sapiens
gagcucuagaaauuccagguccgggucgcagc

SEQ ID NO: 182319 - RNA, 32 nt, Homo Sapiens
cuuuagccucucugcccuuccacucucugacc

SEQ ID NO: 182320 - RNA, 32 nt, Homo Sapiens
cucucacgauuggggaggagggggcguuucug

SEQ ID NO: 182321 - RNA, 32 nt, Homo Sapiens
cccuguccugucauguguccucaccgggguau

SEQ ID NO: 182322 - RNA, 29 nt, Homo Sapiens
cugauauaaaguuuauauucaaauuucuc

SEQ ID NO: 182323 - RNA, 32 nt, Homo Sapiens
gugggggacagagguggccgggacgugagcug

SEQ ID NO: 182324 - RNA, 32 nt, Homo Sapiens
ugcaaaauauuuuguaaauacacuuuuuuacu

SEQ ID NO: 182325 - RNA, 32 nt, Homo Sapiens
auuccugggcugcaugauauuccccugggagc

SEQ ID NO: 182326 - RNA, 32 nt, Homo Sapiens
uuaugaagucugauuagcuuugaaaugcaucu

SEQ ID NO: 182327 - RNA, 32 nt, Homo Sapiens
cuauggaaaugaauccuacuuagugacaaguc

SEQ ID NO: 182328 - RNA, 32 nt, Homo Sapiens
uguggauuuuuuaacauaaauaaaucauacaa

SEQ ID NO: 182329 - RNA, 32 nt, Homo Sapiens
ccacucccuggccugcccuguuuuugggucaa

SEQ ID NO: 182330 - RNA, 32 nt, Homo Sapiens
aggccgcagcggguggccgguucugucccguc

SEQ ID NO: 182331 - RNA, 32 nt, Homo Sapiens
ccggccuugcaucucccggcgcugggccuugg

SEQ ID NO: 182332 - RNA, 32 nt, Homo Sapiens
guuucuugcugccuaucuguaaguaauuaacu

SEQ ID NO: 182333 - RNA, 32 nt, Homo Sapiens
gggucuuggggaugaggagggguacagcaggc

SEQ ID NO: 182334 - RNA, 32 nt, Homo Sapiens
gacuaauaaaagacuucuagaugaaacacaag

SEQ ID NO: 182335 - RNA, 32 nt, Homo Sapiens
uuuaaaagaaauuuauuacuuguugcaaaggu

SEQ ID NO: 182336 - RNA, 32 nt, Homo Sapiens
auaccagaauuaauuugccacauguugucugu

SEQ ID NO: 182337 - RNA, 32 nt, Homo Sapiens
ugcuacuuucccuguggccuaggcuuugccua

SEQ ID NO: 182338 - RNA, 30 nt, Homo Sapiens
cuacaaucguucagcuauucucggaagaga

SEQ ID NO: 182339 - RNA, 32 nt, Homo Sapiens
uaauccaugguaacuauuaucaucucagaaca

SEQ ID NO: 182340 - RNA, 32 nt, Homo Sapiens
agcaaaagcugauuuugcuuacuugcuaaacu

SEQ ID NO: 182341 - RNA, 32 nt, Homo Sapiens
ugugauacuagaugguuaaaaucaugaaagca

SEQ ID NO: 182342 - RNA, 32 nt, Homo Sapiens
guuuucaucuguaaauaguuaaguauguacac

SEQ ID NO: 182343 - RNA, 32 nt, Homo Sapiens
gucagccagggccaggggucucccuggagugc

SEQ ID NO: 182344 - RNA, 32 nt, Homo Sapiens
gcgggaaugagggagucagauaaagaacaaac

SEQ ID NO: 182345 - RNA, 32 nt, Homo Sapiens
aacacacuaacacuaaccauaguugaugagcu

SEQ ID NO: 182346 - RNA, 32 nt, Homo Sapiens
agcagugcccacucuggcuccuccugccuugg

SEQ ID NO: 182347 - RNA, 32 nt, Homo Sapiens
agauaagcagauuucgcaaccaaaaaauaucg

SEQ ID NO: 182348 - RNA, 32 nt, Homo Sapiens
gccacccgcgguccgacgggagcaggcccagc

SEQ ID NO: 182349 - RNA, 32 nt, Homo Sapiens
cccuaaaccaguacccauccaccacagccacc

SEQ ID NO: 182350 - RNA, 32 nt, Homo Sapiens
auacccaggcccccuccaccauggccagccgg

SEQ ID NO: 182351 - RNA, 32 nt, Homo Sapiens
cagggguggccauggcggcggcggccggggag

SEQ ID NO: 182352 - RNA, 32 nt, Homo Sapiens
uguauauguagcaaaaugguuuuuaaguacuu

SEQ ID NO: 182353 - RNA, 31 nt, Homo Sapiens
gaagaccaagccaccauuggcgccuggaacu

SEQ ID NO: 182354 - RNA, 32 nt, Homo Sapiens
ugugggaccucgcgcccacgccgcuggggaag

SEQ ID NO: 182355 - RNA, 32 nt, Homo Sapiens
gggauggggcacagugcaggacacagccaugu

SEQ ID NO: 182356 - RNA, 32 nt, Homo Sapiens
cuucgcggaucuuugauaucguacugagguaa

SEQ ID NO: 182357 - RNA, 32 nt, Homo Sapiens
aagcgcaagagagagcgcacacgcacacaccc

SEQ ID NO: 182358 - RNA, 32 nt, Homo Sapiens
uacaauaggauggucgucuguacaccagaagu

SEQ ID NO: 182359 - RNA, 32 nt, Homo Sapiens
acguacugcuccaacaguaacaagagcucccu

SEQ ID NO: 182360 - RNA, 32 nt, Homo Sapiens
cagaggccaagaguuugagggagaaauagucg

SEQ ID NO: 182361 - RNA, 32 nt, Homo Sapiens
aaaucagaucaucaacaguauuucgaagcaug

SEQ ID NO: 182362 - RNA, 32 nt, Homo Sapiens
uugugcccacugugugggccuguguugugucc

SEQ ID NO: 182363 - RNA, 32 nt, Homo Sapiens
aggcuguaguggggcugguggugcuuccaacu

SEQ ID NO: 182364 - RNA, 32 nt, Homo Sapiens
gaaaacaacccuuuuugcugcacauguaagug

SEQ ID NO: 182365 - RNA, 29 nt, Homo Sapiens
guguauauauguaugugugcauaugucug

SEQ ID NO: 182366 - RNA, 32 nt, Homo Sapiens
uguacauaggggauugauaauacuguauuugu

SEQ ID NO: 182367 - RNA, 32 nt, Homo Sapiens
auucaucuaacgcuacacaaaagcauaaaaua

SEQ ID NO: 182368 - RNA, 32 nt, Homo Sapiens
ccaaacgcagccagccagaucgggagcaaacc

SEQ ID NO: 182369 - RNA, 32 nt, Homo Sapiens
ggaccccgcagcuccagacuccgcuuuggcac

SEQ ID NO: 182370 - RNA, 32 nt, Homo Sapiens
uaauuuagauuucaaaaauagcuugcaggauu

SEQ ID NO: 182371 - RNA, 32 nt, Homo Sapiens
cuggugcagguacacacacacacacacacaca

SEQ ID NO: 182372 - RNA, 32 nt, Homo Sapiens
auuuguguucauuuuuucucuuuauguauuac

SEQ ID NO: 182373 - RNA, 32 nt, Homo Sapiens
uaugcuuuguggcagcucuacggugcuuaucu

SEQ ID NO: 182374 - RNA, 32 nt, Homo Sapiens
acgcugugucugagggcaccaaggcugucacc

SEQ ID NO: 182375 - RNA, 32 nt, Homo Sapiens
cugcaaugucaagggagggggcucacccaggg

SEQ ID NO: 182376 - RNA, 32 nt, Homo Sapiens
uuggauuccccauuuuaaauauuucauaauaa

SEQ ID NO: 182377 - RNA, 32 nt, Homo Sapiens
gaggucaagaaccuugcagaaaaguuggccag

SEQ ID NO: 182378 - RNA, 32 nt, Homo Sapiens
uggaggcccucccaucuccccgcugaaaccug

SEQ ID NO: 182379 - RNA, 32 nt, Homo Sapiens
cccauccccagccccagccccagcccaguccc

SEQ ID NO: 182380 - RNA, 32 nt, Homo Sapiens
ccuaauccaaaauaaaauucacuuaaguagaa

SEQ ID NO: 182381 - RNA, 32 nt, Homo Sapiens
uuuuuacaagcccacccucccccugccuuggu

SEQ ID NO: 182382 - RNA, 32 nt, Homo Sapiens
aaugugagguaugugacaaggucuuuaaucag

SEQ ID NO: 182383 - RNA, 32 nt, Homo Sapiens
ucgcugcuccagcugcccagcucuucccccgc

SEQ ID NO: 182384 - RNA, 32 nt, Homo Sapiens
gccaaggacgccuaccccgaaaccggccccga

SEQ ID NO: 182385 - RNA, 32 nt, Homo Sapiens
caucuuuccugccuauagaaaaucuuucuaau

SEQ ID NO: 182386 - RNA, 32 nt, Homo Sapiens
uauugacuuuucguaucuuuuaucuucacacu

SEQ ID NO: 182387 - RNA, 32 nt, Homo Sapiens
cugugcuuuuucuguagugagauauccuugcu

SEQ ID NO: 182388 - RNA, 32 nt, Homo Sapiens
gguagaaaccccagggaugauucuucaaagcc

SEQ ID NO: 182389 - RNA, 32 nt, Homo Sapiens
ccgcccacgccccgccggggcccuaauccugg

SEQ ID NO: 182390 - RNA, 32 nt, Homo Sapiens
aucuggaaccucucagauaccucuaaaacagc

SEQ ID NO: 182391 - RNA, 32 nt, Homo Sapiens
uugcuuggaugaugaaguaauggaggugggcu

SEQ ID NO: 182392 - RNA, 32 nt, Homo Sapiens
uugugugcugccucaagacugcuggagucagg

SEQ ID NO: 182393 - RNA, 32 nt, Homo Sapiens
ugcagugaauuucuuuccuguugcaaagacgc

SEQ ID NO: 182394 - RNA, 32 nt, Homo Sapiens
gguuuacaagauaugaaauauauuuuacuuuu

SEQ ID NO: 182395 - RNA, 32 nt, Homo Sapiens
accuccaucucuacaaaaaauaagaaaauuag

SEQ ID NO: 182396 - RNA, 32 nt, Homo Sapiens
uuuugauggcuguuguuuugcauuguaaauac

SEQ ID NO: 182397 - RNA, 32 nt, Homo Sapiens
aauaacaugaaaagaguauacuguguuuuuaa

SEQ ID NO: 182398 - RNA, 32 nt, Homo Sapiens
gcucuuugauucaaagcacuguuucucucacu

SEQ ID NO: 182399 - RNA, 32 nt, Homo Sapiens
cacaagccuuacucaccucucucuaaguuuag

SEQ ID NO: 182400 - RNA, 32 nt, Homo Sapiens
aaucaaguuucuucuuuuccacuuuuacuuau

SEQ ID NO: 182401 - RNA, 32 nt, Homo Sapiens
uugcuguccccuccccugagccaggugauuug

SEQ ID NO: 182402 - RNA, 32 nt, Homo Sapiens
uucugggguacaugcucaggaugugcagguuu

SEQ ID NO: 182403 - RNA, 32 nt, Homo Sapiens
cugugaauuuuggugauguaaaacagaauauu

SEQ ID NO: 182404 - RNA, 32 nt, Homo Sapiens
ucuucccugcccgcccggggcccugaccgugg

SEQ ID NO: 182405 - RNA, 32 nt, Homo Sapiens
uacuaccuacauaaguuguuguugugaagauu

SEQ ID NO: 182406 - RNA, 32 nt, Homo Sapiens
gcaauuugaaauaauuuucaagcaaaguauug

SEQ ID NO: 182407 - RNA, 32 nt, Homo Sapiens
guauuuccucagaguucucacauauggaaagg

SEQ ID NO: 182408 - RNA, 32 nt, Homo Sapiens
gucuguugauauaaauauaugacguuacuaaa

SEQ ID NO: 182409 - RNA, 32 nt, Homo Sapiens
uaaaaugugaaucugcaaugaucauaaaaauu

SEQ ID NO: 182410 - RNA, 32 nt, Homo Sapiens
cccauuuccagaugggaggccacuguccaggg

SEQ ID NO: 182411 - RNA, 30 nt, Homo Sapiens
uucuuucuugccgugccgauagcgcucacg

SEQ ID NO: 182412 - RNA, 32 nt, Homo Sapiens
cacacguguacagcugcagucuuuguagccag

SEQ ID NO: 182413 - RNA, 32 nt, Homo Sapiens
gcgggaugaugaugugccugcagauaugguug

SEQ ID NO: 182414 - RNA, 32 nt, Homo Sapiens
uagauaucgagccaucccagguguugggcggg

SEQ ID NO: 182415 - RNA, 32 nt, Homo Sapiens
uuuuugaaaaggauaggucaguuauuuuauag

SEQ ID NO: 182416 - RNA, 32 nt, Homo Sapiens
ccgcccgucccaggcuggauagagucccuucc

SEQ ID NO: 182417 - RNA, 32 nt, Homo Sapiens
ccugcuucccccuguuuucccaggauuagagg

SEQ ID NO: 182418 - RNA, 32 nt, Homo Sapiens
uuuauaaaccaaucagucuucauuaaaguucu

SEQ ID NO: 182419 - RNA, 32 nt, Homo Sapiens
aaaucgaagggagaggagaaaggcgcugcacu

SEQ ID NO: 182420 - RNA, 32 nt, Homo Sapiens
caacgccagcaugcagcgcccgggcccccgcc

SEQ ID NO: 182421 - RNA, 32 nt, Homo Sapiens
uccacccacaugcccgagucugugcagaaacc

SEQ ID NO: 182422 - RNA, 32 nt, Homo Sapiens
gacgccgcgccgggcgggugagagaaagcccg

SEQ ID NO: 182423 - RNA, 32 nt, Homo Sapiens
aggagguggaggcagccaagaaucucaggagc

SEQ ID NO: 182424 - RNA, 32 nt, Homo Sapiens
accggcgccccacggagcugcugcugucagac

SEQ ID NO: 182425 - RNA, 32 nt, Homo Sapiens
acgugaagcugacaccacugaagggagaguug

SEQ ID NO: 182426 - RNA, 32 nt, Homo Sapiens
uccagucugaagauguuuguguaucuguuuac

SEQ ID NO: 182427 - RNA, 32 nt, Homo Sapiens
gauaggaagaaucuuugccuugauggcugaug

SEQ ID NO: 182428 - RNA, 32 nt, Homo Sapiens
uaucuuugauaaauuuuuguuuguuuugcuuu

SEQ ID NO: 182429 - RNA, 32 nt, Homo Sapiens
caaagagccgcuccggccccggcccugaggga

SEQ ID NO: 182430 - RNA, 32 nt, Homo Sapiens
ugggagucucccuccgacuccagauaugaaca

SEQ ID NO: 182431 - RNA, 30 nt, Homo Sapiens
cagaugaguaucccuguaggucaccugcag

SEQ ID NO: 182432 - RNA, 32 nt, Homo Sapiens
uugucaccucaucuugcccccuugguuuugga

SEQ ID NO: 182433 - RNA, 32 nt, Homo Sapiens
agguuuaaaaauuuuuuuaagguaacauguaa

SEQ ID NO: 182434 - RNA, 32 nt, Homo Sapiens
uagggauucugguugucacuuuucuuaguuau

SEQ ID NO: 182435 - RNA, 32 nt, Homo Sapiens
caacccgauuucuuccucucuuuucccuuuua

SEQ ID NO: 182436 - RNA, 32 nt, Homo Sapiens
gcuguggauagagaagcaggaagagcacugga

SEQ ID NO: 182437 - RNA, 32 nt, Homo Sapiens
cuuucucugcccucccuucucuggaggcccug

SEQ ID NO: 182438 - RNA, 32 nt, Homo Sapiens
auagaagcagcaaagcagcaagcgacguucuu

SEQ ID NO: 182439 - RNA, 32 nt, Homo Sapiens
ugugcugagagccgcagccccugugcacaccu

SEQ ID NO: 182440 - RNA, 32 nt, Homo Sapiens
ggauggugaaaccaaccugaaagugaagcagg

SEQ ID NO: 182441 - RNA, 32 nt, Homo Sapiens
uuaauagcaguagaagagaacauaaggaauag

SEQ ID NO: 182442 - RNA, 32 nt, Homo Sapiens
aaagcaaugcaaacugagcugcuuuaguccuu

SEQ ID NO: 182443 - RNA, 32 nt, Homo Sapiens
aagucagccaagggccuacccugaugccagag

SEQ ID NO: 182444 - RNA, 32 nt, Homo Sapiens
gguguccugugcuuccugugagacuuccuggg

SEQ ID NO: 182445 - RNA, 32 nt, Homo Sapiens
ggggugacgcccggagagcggccuggagagcg

SEQ ID NO: 182446 - RNA, 32 nt, Homo Sapiens
aggugaaaaauauucaguaacuuguuuacaua

SEQ ID NO: 182447 - RNA, 32 nt, Homo Sapiens
aguacugcaaaauuauauuguaacuuccccuc

SEQ ID NO: 182448 - RNA, 32 nt, Homo Sapiens
uggccuggugcauccacagaggauguuguuca

SEQ ID NO: 182449 - RNA, 32 nt, Homo Sapiens
ggcuuuucaguauaauuuuaauuuaggauagg

SEQ ID NO: 182450 - RNA, 32 nt, Homo Sapiens
aucacagucacagauuucuccaaaguccuggg

SEQ ID NO: 182451 - RNA, 32 nt, Homo Sapiens
aggagucaggacuuggaauuggggacaucagg

SEQ ID NO: 182452 - RNA, 32 nt, Homo Sapiens
agcucucacagcagugucuuccccgccugcug

SEQ ID NO: 182453 - RNA, 32 nt, Homo Sapiens
uucacuugucauuguuauauaaucauuauuac

SEQ ID NO: 182454 - RNA, 28 nt, Homo Sapiens
gagauggcugggcauccauggcauggua

SEQ ID NO: 182455 - RNA, 29 nt, Homo Sapiens
gccacagaccuccaauaaagacagcaugg

SEQ ID NO: 182456 - RNA, 31 nt, Homo Sapiens
ggcugcacacccugccugccaucacccuugc

SEQ ID NO: 182457 - RNA, 32 nt, Homo Sapiens
augguacaggauaaagauaucaauuuaaauaa

SEQ ID NO: 182458 - RNA, 32 nt, Homo Sapiens
uuuauaaaauuuuccccucucauuucaaaugc

SEQ ID NO: 182459 - RNA, 32 nt, Homo Sapiens
agagggcugguauauuugugccugcuggaggu

SEQ ID NO: 182460 - RNA, 32 nt, Homo Sapiens
uugugcagggggaaacaaaucuauuuuguuuu

SEQ ID NO: 182461 - RNA, 32 nt, Homo Sapiens
cauauacaaaaauuaacucaagauggauuaaa

SEQ ID NO: 182462 - RNA, 32 nt, Homo Sapiens
agugauuaucuuuucuucuguuaagucaugua

SEQ ID NO: 182463 - RNA, 32 nt, Homo Sapiens
aacaguaauauuugccucagauguaagaauaa

SEQ ID NO: 182464 - RNA, 32 nt, Homo Sapiens
uaugcacguaguggcucuuuuacuccccacaa

SEQ ID NO: 182465 - RNA, 32 nt, Homo Sapiens
ccuucccccuccccacaggcucuccuuguggg

SEQ ID NO: 182466 - RNA, 32 nt, Homo Sapiens
uacuuugagucuuuuuaaauaugcucuguuag

SEQ ID NO: 182467 - RNA, 32 nt, Homo Sapiens
cugcacuccccucccaggaaaggggcaggaug

SEQ ID NO: 182468 - RNA, 32 nt, Homo Sapiens
uuuaagggguuaauauccuacacaauucauuu

SEQ ID NO: 182469 - RNA, 31 nt, Homo Sapiens
agauguguauuuucaaggauaugauaccuuu

SEQ ID NO: 182470 - RNA, 32 nt, Homo Sapiens
gauuucaccauauuggccaggcuggucucaaa

SEQ ID NO: 182471 - RNA, 32 nt, Homo Sapiens
uguuaaacagguuuaaugacggucauggcaac

SEQ ID NO: 182472 - RNA, 32 nt, Homo Sapiens
ucugcuuuaagugguauaauucugggauagau

SEQ ID NO: 182473 - RNA, 32 nt, Homo Sapiens
gcccuucagaucuggggguguggugaguggca

SEQ ID NO: 182474 - RNA, 32 nt, Homo Sapiens
ucuacccugaaaccccacccuccaucaagguc

SEQ ID NO: 182475 - RNA, 32 nt, Homo Sapiens
ugacaugagcaacuuuuacuuuuacacaagau

SEQ ID NO: 182476 - RNA, 32 nt, Homo Sapiens
aguauugcuguaauuccuuuucuuuucuuccu

SEQ ID NO: 182477 - RNA, 32 nt, Homo Sapiens
aacacaggagagguaggcuucuccggaaaagc

SEQ ID NO: 182478 - RNA, 32 nt, Homo Sapiens
acugggcgcgcgcggcuccggcucgggacgcc

SEQ ID NO: 182479 - RNA, 32 nt, Homo Sapiens
cugcccgccucagccucccaaagugcuggaau

SEQ ID NO: 182480 - RNA, 32 nt, Homo Sapiens
ucagggugucagaacagcaucuggagaagccc

SEQ ID NO: 182481 - RNA, 32 nt, Homo Sapiens
gggaggggaagaaauacauuguagccuaccac

SEQ ID NO: 182482 - RNA, 32 nt, Homo Sapiens
gaauccagugauuagcuaaauuugacauagaa

SEQ ID NO: 182483 - RNA, 32 nt, Homo Sapiens
auggagcccuccccaacccgggcguuccccag

SEQ ID NO: 182484 - RNA, 32 nt, Homo Sapiens
ggggccauggcccagcccuggcacuccccgcc

SEQ ID NO: 182485 - RNA, 32 nt, Homo Sapiens
uugugaaaauuugaagcuaucucaguaaaaag

SEQ ID NO: 182486 - RNA, 32 nt, Homo Sapiens
cucuguuaaaaauuaaaauaaaugauucuauu

SEQ ID NO: 182487 - RNA, 32 nt, Homo Sapiens
uagcaugguaauauucuaugcaacuauaguua

SEQ ID NO: 182488 - RNA, 32 nt, Homo Sapiens
gcaacauacucccuccagcgugccaaaugcug

SEQ ID NO: 182489 - RNA, 32 nt, Homo Sapiens
aaaguaagccuuauuguuacaaugcacagugg

SEQ ID NO: 182490 - RNA, 32 nt, Homo Sapiens
ccgggcuuuugaacagaagaguaaauacagaa

SEQ ID NO: 182491 - RNA, 32 nt, Homo Sapiens
gaugacuugagcucaggaguuugagaccagcc

SEQ ID NO: 182492 - RNA, 32 nt, Homo Sapiens
gccuucucccgccaccgccgccgccgccuucc

SEQ ID NO: 182493 - RNA, 32 nt, Homo Sapiens
cugauauaaacacuuccaaauaaaaauaugua

SEQ ID NO: 182494 - RNA, 32 nt, Homo Sapiens
gguugaugcgcaaguuuccguccccaucggcc

SEQ ID NO: 182495 - RNA, 32 nt, Homo Sapiens
uaaaugguuucauuuucucuaaaauaacuagu

SEQ ID NO: 182496 - RNA, 32 nt, Homo Sapiens
ggcggaggcccgagcccggcccagccucgucc

SEQ ID NO: 182497 - RNA, 32 nt, Homo Sapiens
aaaaccccuaaaaacaaaacaaacacacacac

SEQ ID NO: 182498 - RNA, 32 nt, Homo Sapiens
cucccgcgcgccccucuccuuucugugcuuaa

SEQ ID NO: 182499 - RNA, 32 nt, Homo Sapiens
cuguuggcugaaaagauggacuugcuugccuc

SEQ ID NO: 182500 - RNA, 32 nt, Homo Sapiens
ucaucagcuccgcaugagaagaagggggaauu

SEQ ID NO: 182501 - RNA, 32 nt, Homo Sapiens
cccggccuaggcucuccaccgcaucggauucu

SEQ ID NO: 182502 - RNA, 32 nt, Homo Sapiens
ucuauuuuucuuuguucccaauuaauguagau

SEQ ID NO: 182503 - RNA, 32 nt, Homo Sapiens
aaguaagugcaaacauauuucgaauuaucugu

SEQ ID NO: 182504 - RNA, 32 nt, Homo Sapiens
cuuccacccucgcccugacccuggacacugcc

SEQ ID NO: 182505 - RNA, 32 nt, Homo Sapiens
ccagacagcaccagagauaaucaaacugacuu

SEQ ID NO: 182506 - RNA, 32 nt, Homo Sapiens
uugagggugggagagagccagcuccuccugca

SEQ ID NO: 182507 - RNA, 32 nt, Homo Sapiens
augccaugcaaacacauuauuguguuuguggu

SEQ ID NO: 182508 - RNA, 30 nt, Homo Sapiens
cccaggucaugccagccccaucuuacccgu

SEQ ID NO: 182509 - RNA, 32 nt, Homo Sapiens
cuguacgagaucuggaaccuggugaggugccu

SEQ ID NO: 182510 - RNA, 32 nt, Homo Sapiens
auuaggucccucacuccacagagugagccagu

SEQ ID NO: 182511 - RNA, 32 nt, Homo Sapiens
aguuguugacauuggacaggugaacaguaggg

SEQ ID NO: 182512 - RNA, 32 nt, Homo Sapiens
agaguucuggucuauagaaacccaaaacuaaa

SEQ ID NO: 182513 - RNA, 32 nt, Homo Sapiens
ucuacuaaaaauacagaaaaauuagccagggu

SEQ ID NO: 182514 - RNA, 32 nt, Homo Sapiens
auguacaaguaacaucuaaauaaaauuacacu

SEQ ID NO: 182515 - RNA, 32 nt, Homo Sapiens
gcaacaggcagagcugugucgcacagcagugc

SEQ ID NO: 182516 - RNA, 32 nt, Homo Sapiens
ugugcugaaaauaaaaggagucuucaggaauc

SEQ ID NO: 182517 - RNA, 32 nt, Homo Sapiens
cccaggccaggcagcugcugaccuccagcacc

SEQ ID NO: 182518 - RNA, 32 nt, Homo Sapiens
gggaggggaacgugugggcaagagacuuccuc

SEQ ID NO: 182519 - RNA, 32 nt, Homo Sapiens
gcaguaugaagaugggcaaguuauuuaacuca

SEQ ID NO: 182520 - RNA, 32 nt, Homo Sapiens
ccuuuccccucgcacuguugcuuuuccugaug

SEQ ID NO: 182521 - RNA, 32 nt, Homo Sapiens
ugugauucuugccacuagaacgccacccaaag

SEQ ID NO: 182522 - RNA, 32 nt, Homo Sapiens
cuagugagaagcuggcccugcaggugguggca

SEQ ID NO: 182523 - RNA, 32 nt, Homo Sapiens
acaucacaucagacccaagggcccguucauug

SEQ ID NO: 182524 - RNA, 32 nt, Homo Sapiens
gaugaguuaaaagguaucugguuaggccuauu

SEQ ID NO: 182525 - RNA, 32 nt, Homo Sapiens
ggcuuuccacagccuuuuuuuaugucuccuuu

SEQ ID NO: 182526 - RNA, 32 nt, Homo Sapiens
acucagcuaauuuuuguauuuucaguagagac

SEQ ID NO: 182527 - RNA, 32 nt, Homo Sapiens
gugcuccugcuuaccuugcucuaggcugucug

SEQ ID NO: 182528 - RNA, 32 nt, Homo Sapiens
acaaaguaaaauguuauaaaugugaaguuaua

SEQ ID NO: 182529 - RNA, 32 nt, Homo Sapiens
agcaguuuccgaagugauacagacaguucagu

SEQ ID NO: 182530 - RNA, 32 nt, Homo Sapiens
acaagaggaucgucuguagacaggcuacagau

SEQ ID NO: 182531 - RNA, 32 nt, Homo Sapiens
gagaaggaagggguauuaucccugcccugauu

SEQ ID NO: 182532 - RNA, 32 nt, Homo Sapiens
uccacaucccccaccccccauucuaucuuugu

SEQ ID NO: 182533 - RNA, 32 nt, Homo Sapiens
acuucucauacaccuaggauggaucuuauauu

SEQ ID NO: 182534 - RNA, 32 nt, Homo Sapiens
auuucaucaguucucagauuaacaagcauuuc

SEQ ID NO: 182535 - RNA, 32 nt, Homo Sapiens
gugccugcaccucggccagcaucuccuaugcu

SEQ ID NO: 182536 - RNA, 32 nt, Homo Sapiens
aaacuucacucuggggacacucugccagcaaa

SEQ ID NO: 182537 - RNA, 32 nt, Homo Sapiens
cauuacuugggaagaaggaaaccaggaguuuu

SEQ ID NO: 182538 - RNA, 32 nt, Homo Sapiens
agcccggcgcccagcucuuuguucuccaagca

SEQ ID NO: 182539 - RNA, 32 nt, Homo Sapiens
ucagcucuggcuguguaggggaggaaggggug

SEQ ID NO: 182540 - RNA, 32 nt, Homo Sapiens
cacccuguggucaaggcgucaggacccgccug

SEQ ID NO: 182541 - RNA, 32 nt, Homo Sapiens
ucgagaccacaccuccucccccuucauuuuca

SEQ ID NO: 182542 - RNA, 32 nt, Homo Sapiens
ucucuaaugcuacuauuucucugcacacacac

SEQ ID NO: 182543 - RNA, 32 nt, Homo Sapiens
acuugucugugcuaugauguaugcaggauccc

SEQ ID NO: 182544 - RNA, 32 nt, Homo Sapiens
gagcccugacauugcugcgcucggggggcucc

SEQ ID NO: 182545 - RNA, 32 nt, Homo Sapiens
uggagaacaaggcaugagacuuuggagaccug

SEQ ID NO: 182546 - RNA, 32 nt, Homo Sapiens
uaauagacaggccccaccucucaaaauauuuu

SEQ ID NO: 182547 - RNA, 32 nt, Homo Sapiens
gaauggccagcaccccaggcagucugugugug

SEQ ID NO: 182548 - RNA, 32 nt, Homo Sapiens
gaaguugauauuaaagaaauccucaucauaau

SEQ ID NO: 182549 - RNA, 32 nt, Homo Sapiens
ggcuaagaaacaaaacaaaagcuugugaucug

SEQ ID NO: 182550 - RNA, 29 nt, Homo Sapiens
uagagccuagugaugcuuacacuauagaa

SEQ ID NO: 182551 - RNA, 32 nt, Homo Sapiens
cgaagaaugcuguucugauuuacuagagaaug

SEQ ID NO: 182552 - RNA, 32 nt, Homo Sapiens
uuccucucccaggcucacccaggcucugcuca

SEQ ID NO: 182553 - RNA, 28 nt, Homo Sapiens
aaauucuggagggggccgagguggcagg

SEQ ID NO: 182554 - RNA, 32 nt, Homo Sapiens
uuuccccauuuucuuaucucccugaccaaaau

SEQ ID NO: 182555 - RNA, 32 nt, Homo Sapiens
caguggaucccaggaagcuggcacaucuugga

SEQ ID NO: 182556 - RNA, 32 nt, Homo Sapiens
cacugucuuggugacauucagcuccucauuac

SEQ ID NO: 182557 - RNA, 32 nt, Homo Sapiens
acucccccugaacaauccuuuucaguauuaua

SEQ ID NO: 182558 - RNA, 32 nt, Homo Sapiens
ugauuguuggaaaauaaaggaaaauggugcug

SEQ ID NO: 182559 - RNA, 32 nt, Homo Sapiens
cgcugagguccaggagcgccuggcccaggcac

SEQ ID NO: 182560 - RNA, 31 nt, Homo Sapiens
cagguggagccccagggccugggacagccug

SEQ ID NO: 182561 - RNA, 32 nt, Homo Sapiens
aaaacuucuauuauuuguuuaguauguuguaa

SEQ ID NO: 182562 - RNA, 30 nt, Homo Sapiens
cgcggagaagcuuggguaccugagccgcgg

SEQ ID NO: 182563 - RNA, 32 nt, Homo Sapiens
gguccucgucgcgaccggcccgggccgcagga

SEQ ID NO: 182564 - RNA, 32 nt, Homo Sapiens
aaacguagaaauuuauuauuaaaagaauggac

SEQ ID NO: 182565 - RNA, 32 nt, Homo Sapiens
uucaggacucuugauuugagauauggauuuga

SEQ ID NO: 182566 - RNA, 32 nt, Homo Sapiens
acgucugcccuguugggaccucguuccuguau

SEQ ID NO: 182567 - RNA, 32 nt, Homo Sapiens
cacucuguugcccaggcugagguacaguggcg

SEQ ID NO: 182568 - RNA, 32 nt, Homo Sapiens
aauugaaugucauuaaaugaugguggccaaaa

SEQ ID NO: 182569 - RNA, 32 nt, Homo Sapiens
agaaggugacaguccaagugugcaacagcugu

SEQ ID NO: 182570 - RNA, 32 nt, Homo Sapiens
aaauauuuacagcacaucacuguguauauaug

SEQ ID NO: 182571 - RNA, 32 nt, Homo Sapiens
caagcuuggaggucccugaaccagaggcacua

SEQ ID NO: 182572 - RNA, 32 nt, Homo Sapiens
cuuggguugguggaaauugauuuucgagauaa

SEQ ID NO: 182573 - RNA, 32 nt, Homo Sapiens
ugucuuuccuuccguggucacagcugaaagaa

SEQ ID NO: 182574 - RNA, 32 nt, Homo Sapiens
ccuccaaaaaauaguuguuaauuaguugugaa

SEQ ID NO: 182575 - RNA, 32 nt, Homo Sapiens
uccuuuaauaaucaagaaaugccugcuauagu

SEQ ID NO: 182576 - RNA, 32 nt, Homo Sapiens
aggguggagacccaugcugggguuggugcccu

SEQ ID NO: 182577 - RNA, 32 nt, Homo Sapiens
ggacccugucuucuccucgaggcuggcacagc

SEQ ID NO: 182578 - RNA, 32 nt, Homo Sapiens
caguuuuuugcuuugucuuaugcuucuaugga

SEQ ID NO: 182579 - RNA, 32 nt, Homo Sapiens
auaaacacugaacauauagaccacaccaaacu

SEQ ID NO: 182580 - RNA, 29 nt, Homo Sapiens
ggguaguggggacagaguucgcccccaga

SEQ ID NO: 182581 - RNA, 32 nt, Homo Sapiens
gaggaccagccccuccucccucagugcggguc

SEQ ID NO: 182582 - RNA, 31 nt, Homo Sapiens
agucuuuguuguacauugucaguguaauaaa

SEQ ID NO: 182583 - RNA, 32 nt, Homo Sapiens
cugcugggcgggggcgggagcuggagccggag

SEQ ID NO: 182584 - RNA, 32 nt, Homo Sapiens
ggggcgggcagaugaggccuaggggugccgau

SEQ ID NO: 182585 - RNA, 32 nt, Homo Sapiens
ggagcagaacgcugcggaccgcggcggaggac

SEQ ID NO: 182586 - RNA, 32 nt, Homo Sapiens
uucuugccugcccuguguuguaaaaugggagu

SEQ ID NO: 182587 - RNA, 32 nt, Homo Sapiens
guuucucagaaccagcagaaucagugccuagc

SEQ ID NO: 182588 - RNA, 32 nt, Homo Sapiens
aacgugcuuugaaggccacauaaaaagcccaa

SEQ ID NO: 182589 - RNA, 32 nt, Homo Sapiens
uuuuuaaaaaauuuuuuauagaggcagagucu

SEQ ID NO: 182590 - RNA, 32 nt, Homo Sapiens
gaggccuuaucuccagugggagaccccuucuc

SEQ ID NO: 182591 - RNA, 32 nt, Homo Sapiens
uaggacuuuguaguuuuauuuccacuaaguga

SEQ ID NO: 182592 - RNA, 32 nt, Homo Sapiens
caaucaauuuaaauuauguagguuuaagacua

SEQ ID NO: 182593 - RNA, 32 nt, Homo Sapiens
ggcuguaacugccaccugacaccgcugacugg

SEQ ID NO: 182594 - RNA, 32 nt, Homo Sapiens
gcagaaauuggaaaguuuauguuuuaaauaaa

SEQ ID NO: 182595 - RNA, 32 nt, Homo Sapiens
caaguuuuucuuuuuuaagcaauuucaauuuu

SEQ ID NO: 182596 - RNA, 32 nt, Homo Sapiens
augauggccugacaaugaacuacugcaggaau

SEQ ID NO: 182597 - RNA, 32 nt, Homo Sapiens
uaggcagacauuucagcaaggcugcugaggaa

SEQ ID NO: 182598 - RNA, 32 nt, Homo Sapiens
ugccgaguucccuucaggccuggcagacgggc

SEQ ID NO: 182599 - RNA, 29 nt, Homo Sapiens
guuccaccgugugucagaggcugcaaguu

SEQ ID NO: 182600 - RNA, 32 nt, Homo Sapiens
gagguccggccgcgagcgugaccucacgggga

SEQ ID NO: 182601 - RNA, 32 nt, Homo Sapiens
ucccugcccaacccuuacugacgggggccaca

SEQ ID NO: 182602 - RNA, 32 nt, Homo Sapiens
ccucccaccagucaccuccacugcacaacucg

SEQ ID NO: 182603 - RNA, 32 nt, Homo Sapiens
aguuaucauagucccuagguugcuacggcuua

SEQ ID NO: 182604 - RNA, 29 nt, Homo Sapiens
gaccagccugggcaacauggcaaaacccc

SEQ ID NO: 182605 - RNA, 32 nt, Homo Sapiens
agcugcugccccagcugccuccuacccauugc

SEQ ID NO: 182606 - RNA, 32 nt, Homo Sapiens
uuuuaucuuaguuugcagaaagguguugaaau

SEQ ID NO: 182607 - RNA, 32 nt, Homo Sapiens
ccauucucacuuuccuucucaaggaguuggcu

SEQ ID NO: 182608 - RNA, 32 nt, Homo Sapiens
uuucucccacuuucuaggaucauuuuuaugua

SEQ ID NO: 182609 - RNA, 32 nt, Homo Sapiens
ucucaggccagacacuggaucccggagagcuu

SEQ ID NO: 182610 - RNA, 32 nt, Homo Sapiens
aacagaaggggagaagaaugacccaaguggaa

SEQ ID NO: 182611 - RNA, 32 nt, Homo Sapiens
uccaccgacccuccucccacccccucccacuc

SEQ ID NO: 182612 - RNA, 32 nt, Homo Sapiens
guugcuaacaucaucuuccuuauuuucagcca

SEQ ID NO: 182613 - RNA, 32 nt, Homo Sapiens
cgugcaaacagccacuucccagccccacuccu

SEQ ID NO: 182614 - RNA, 32 nt, Homo Sapiens
caacaaacacauugugaauauuagauugcuga

SEQ ID NO: 182615 - RNA, 32 nt, Homo Sapiens
accucuuguaaaaacagcccugaguagguauu

SEQ ID NO: 182616 - RNA, 32 nt, Homo Sapiens
aaagacccaaaguguuuguaauucuucuuugu

SEQ ID NO: 182617 - RNA, 32 nt, Homo Sapiens
ccucaggcucugcgugcccucacaguccccuc

SEQ ID NO: 182618 - RNA, 32 nt, Homo Sapiens
gcaagggauucggaaaugcucuggagacaguc

SEQ ID NO: 182619 - RNA, 32 nt, Homo Sapiens
cucuccccggccggagcgcuccuccuccagcc

SEQ ID NO: 182620 - RNA, 32 nt, Homo Sapiens
cauccaaaaaucauugcuuuuaacuguuugca

SEQ ID NO: 182621 - RNA, 32 nt, Homo Sapiens
ggacugucccucagcccucagggccuucaugc

SEQ ID NO: 182622 - RNA, 32 nt, Homo Sapiens
ggaucacggcugcuuaagauuauaucacgaua

SEQ ID NO: 182623 - RNA, 32 nt, Homo Sapiens
guauuuguauagcuguaaaauaauauuguuaa

SEQ ID NO: 182624 - RNA, 32 nt, Homo Sapiens
aucucacugcagucugaaucuagacaucgcca

SEQ ID NO: 182625 - RNA, 32 nt, Homo Sapiens
gagugcugucauuauuuccucuuaucaacaac

SEQ ID NO: 182626 - RNA, 32 nt, Homo Sapiens
ggucucaaacauuuuguaauuuucauuuaaau

SEQ ID NO: 182627 - RNA, 32 nt, Homo Sapiens
cagcuggccucggcccggggcaccuucggcug

SEQ ID NO: 182628 - RNA, 32 nt, Homo Sapiens
uucauucucgucuggcugaacucugggagugu

SEQ ID NO: 182629 - RNA, 32 nt, Homo Sapiens
uuccuggcaggagagcagaugugauucugagc

SEQ ID NO: 182630 - RNA, 32 nt, Homo Sapiens
gcgggcggggacccgggcuacugcggugugga

SEQ ID NO: 182631 - RNA, 32 nt, Homo Sapiens
ggggaaccugggagaccccuccgcccuccccg

SEQ ID NO: 182632 - RNA, 32 nt, Homo Sapiens
aagcugccuuuucauuuuuagacaaaaucuuu

SEQ ID NO: 182633 - RNA, 32 nt, Homo Sapiens
caucuuugagaugaacgauaaugauccacgca

SEQ ID NO: 182634 - RNA, 32 nt, Homo Sapiens
auuggguuggggggaugacggggggugggaac

SEQ ID NO: 182635 - RNA, 32 nt, Homo Sapiens
ggaugaggaugaugaccuucaguaugccgauc

SEQ ID NO: 182636 - RNA, 32 nt, Homo Sapiens
uugcaacaauaggucuauuauuagagucaccu

SEQ ID NO: 182637 - RNA, 32 nt, Homo Sapiens
ccugccagagaugggccuggggccugaugagg

SEQ ID NO: 182638 - RNA, 32 nt, Homo Sapiens
gugauuugcugcaccuugaguugagaggacua

SEQ ID NO: 182639 - RNA, 32 nt, Homo Sapiens
aauuguuucuuacacagacauuauuacuauua

SEQ ID NO: 182640 - RNA, 32 nt, Homo Sapiens
cucauugucccacguugcaguuccuggauccc

SEQ ID NO: 182641 - RNA, 32 nt, Homo Sapiens
gacuauguuguaaaaaugggaagguuguaaac

SEQ ID NO: 182642 - RNA, 32 nt, Homo Sapiens
aauagguaaugguggugcuaguagcaaauugg

SEQ ID NO: 182643 - RNA, 32 nt, Homo Sapiens
ggaaacugccagcaggauccaugcaaagagcc

SEQ ID NO: 182644 - RNA, 32 nt, Homo Sapiens
aagacuuuuuaaagcuuuaauuauucaacuaa

SEQ ID NO: 182645 - RNA, 32 nt, Homo Sapiens
acagggcucaguuauucauuugccaagcuucg

SEQ ID NO: 182646 - RNA, 32 nt, Homo Sapiens
cauaugaguauuaagauuaccaccuauagacu

SEQ ID NO: 182647 - RNA, 32 nt, Homo Sapiens
gcaccccgcacggcccgggcccacguacaaug

SEQ ID NO: 182648 - RNA, 32 nt, Homo Sapiens
aaagaugacaccuggagagcaaacgcaggaug

SEQ ID NO: 182649 - RNA, 32 nt, Homo Sapiens
auguguacuauguaccuaugaugugucauauc

SEQ ID NO: 182650 - RNA, 27 nt, Homo Sapiens
caccuguuuuucuucagcuaauaaaaa

SEQ ID NO: 182651 - RNA, 32 nt, Homo Sapiens
ucaguacuguggaaaugaacuauauuagcuau

SEQ ID NO: 182652 - RNA, 32 nt, Homo Sapiens
uggaccuuugcaggcccggccucggccucggc

SEQ ID NO: 182653 - RNA, 32 nt, Homo Sapiens
agacuggugccccuugcugaucugagcgcuug

SEQ ID NO: 182654 - RNA, 32 nt, Homo Sapiens
aaaguguuucauuaugaccagaucucugauug

SEQ ID NO: 182655 - RNA, 32 nt, Homo Sapiens
gagccaccacgcccggcccccagauggacuuu

SEQ ID NO: 182656 - RNA, 32 nt, Homo Sapiens
gaagguggguggcagggaucaacugaggagga

SEQ ID NO: 182657 - RNA, 32 nt, Homo Sapiens
acuacaaagcuuugcuacaaauuuaugcauuu

SEQ ID NO: 182658 - RNA, 32 nt, Homo Sapiens
uggggccgcucuuggccccaagguugccccgg

SEQ ID NO: 182659 - RNA, 32 nt, Homo Sapiens
uagccaggccuuuucauagccauggugacaca

SEQ ID NO: 182660 - RNA, 32 nt, Homo Sapiens
cuuccacugaauauuauaugcauaagggucuc

SEQ ID NO: 182661 - RNA, 32 nt, Homo Sapiens
ccucugugggggcacuaugggcugggaagcac

SEQ ID NO: 182662 - RNA, 32 nt, Homo Sapiens
ccagggaagguugugcugguauuuggcucaug

SEQ ID NO: 182663 - RNA, 32 nt, Homo Sapiens
aaguugacaaugaauugcaauaaaacuaagaa

SEQ ID NO: 182664 - RNA, 32 nt, Homo Sapiens
caaacacccacuuuuuccagaucuuccucuug

SEQ ID NO: 182665 - RNA, 32 nt, Homo Sapiens
gcccccacaucccaccccaucaggucagcuca

SEQ ID NO: 182666 - RNA, 32 nt, Homo Sapiens
cuugaaagagauacucgguauguaucuucccg

SEQ ID NO: 182667 - RNA, 28 nt, Homo Sapiens
uccggggggcggccuuugagcuucccgg

SEQ ID NO: 182668 - RNA, 32 nt, Homo Sapiens
gggcagcggcugccgcgccugucugcccgagg

SEQ ID NO: 182669 - RNA, 32 nt, Homo Sapiens
uuucaaacacaagucuuccaaauuauggaccc

SEQ ID NO: 182670 - RNA, 32 nt, Homo Sapiens
cccucuuuaaacaaauuuaaagaucuauauac

SEQ ID NO: 182671 - RNA, 32 nt, Homo Sapiens
cccugugccuuuccagggagccaggcgccaug

SEQ ID NO: 182672 - RNA, 32 nt, Homo Sapiens
ggcucugauucuccaaugggaauaccaaggga

SEQ ID NO: 182673 - RNA, 32 nt, Homo Sapiens
aucccuucaaggaagugauaacacuggagugg

SEQ ID NO: 182674 - RNA, 32 nt, Homo Sapiens
caaaaccagaacaguaugaauuugagcagguc

SEQ ID NO: 182675 - RNA, 32 nt, Homo Sapiens
gcauggcacucuucccaccucagugcccacag

SEQ ID NO: 182676 - RNA, 32 nt, Homo Sapiens
uuuggcucgacggcgaggcggccgagggcgug

SEQ ID NO: 182677 - RNA, 32 nt, Homo Sapiens
ucaguuugacaugaaauuggcugaugugggag

SEQ ID NO: 182678 - RNA, 32 nt, Homo Sapiens
aaagagaaugagccaguggcaugagaucaguc

SEQ ID NO: 182679 - RNA, 32 nt, Homo Sapiens
gggggauuacgcuaguuuuucuuuguauuuuu

SEQ ID NO: 182680 - RNA, 32 nt, Homo Sapiens
cagccuggguggcagagagagacucugucuca

SEQ ID NO: 182681 - RNA, 32 nt, Homo Sapiens
ucugccugucuccuugaauuguggccaguuuc

SEQ ID NO: 182682 - RNA, 32 nt, Homo Sapiens
aagugaccugaaggcucugggcucaccauaca

SEQ ID NO: 182683 - RNA, 32 nt, Homo Sapiens
aaaaacaaaaacagaaaacaaacaaacaaaaa

SEQ ID NO: 182684 - RNA, 29 nt, Homo Sapiens
ugaguggcucugugugaccauaggcagau

SEQ ID NO: 182685 - RNA, 32 nt, Homo Sapiens
ggagguggggguacaaauccucagcuccugcu

SEQ ID NO: 182686 - RNA, 32 nt, Homo Sapiens
gccaacuugacaaauauuuaaguguuacggca

SEQ ID NO: 182687 - RNA, 32 nt, Homo Sapiens
uuaucuuuauuacuucccguuuauugccacug

SEQ ID NO: 182688 - RNA, 30 nt, Homo Sapiens
aauugaaugcaaaaaaaaaaaaaaaaaaaa

SEQ ID NO: 182689 - RNA, 28 nt, Homo Sapiens
auagagagaauauggcauuugaaagaaa

SEQ ID NO: 182690 - RNA, 32 nt, Homo Sapiens
ucucauuggcugcuugcaggcugcugauuggc

SEQ ID NO: 182691 - RNA, 32 nt, Homo Sapiens
uaaagaacaaaauaaaagccuugucccuuugu

SEQ ID NO: 182692 - RNA, 32 nt, Homo Sapiens
gggggcugguuggagauggccuuggagcagcc

SEQ ID NO: 182693 - RNA, 32 nt, Homo Sapiens
gcggagcgcgcgcgggguugguugccgcgagc

SEQ ID NO: 182694 - RNA, 32 nt, Homo Sapiens
ucucccaggagcucagggccugucagaccugg

SEQ ID NO: 182695 - RNA, 32 nt, Homo Sapiens
ggccggcuccccaccccaccuuugauggccuc

SEQ ID NO: 182696 - RNA, 32 nt, Homo Sapiens
aauaauguauauuauuuuaccuauuagauucu

SEQ ID NO: 182697 - RNA, 32 nt, Homo Sapiens
ucugcccaaaaauauaauauagaacuaauugc

SEQ ID NO: 182698 - RNA, 32 nt, Homo Sapiens
gcccgcccucggcuccuccgccgugaugcugu

SEQ ID NO: 182699 - RNA, 32 nt, Homo Sapiens
cugugccucaucccgugccgcucggucucugg

SEQ ID NO: 182700 - RNA, 32 nt, Homo Sapiens
guuugcccugaaccgugcccaaggcugugugc

SEQ ID NO: 182701 - RNA, 32 nt, Homo Sapiens
auguaucccucaugcaguuggcauccaggcag

SEQ ID NO: 182702 - RNA, 32 nt, Homo Sapiens
guuugggaaaaaauuuuggaaaaaagacaagc

SEQ ID NO: 182703 - RNA, 32 nt, Homo Sapiens
guacuuugcgccucuggggugcuagagguggg

SEQ ID NO: 182704 - RNA, 32 nt, Homo Sapiens
aaugaccagugaucacuacaugaugcuuauua

SEQ ID NO: 182705 - RNA, 32 nt, Homo Sapiens
auggaaaaaaggacucaguuuacuuucgucau

SEQ ID NO: 182706 - RNA, 32 nt, Homo Sapiens
gucuguccuugugauuggcauaaagagcuucu

SEQ ID NO: 182707 - RNA, 32 nt, Homo Sapiens
acgugcuggcuccuccuuugccuucugcuauc

SEQ ID NO: 182708 - RNA, 32 nt, Homo Sapiens
ccuggggaggaagcucaccaaaaguuuuuccc

SEQ ID NO: 182709 - RNA, 32 nt, Homo Sapiens
caggugaggccaggccggcgcgugcgcagaag

SEQ ID NO: 182710 - RNA, 32 nt, Homo Sapiens
uuuuuucugaucccgagcugcguucggacccc

SEQ ID NO: 182711 - RNA, 32 nt, Homo Sapiens
cuggacacccccaggcucuacuccaucccauu

SEQ ID NO: 182712 - RNA, 32 nt, Homo Sapiens
uccucuucugucaucucaccgccccaccacag

SEQ ID NO: 182713 - RNA, 32 nt, Homo Sapiens
uuccaguuccacccuuuccugcggcaccaccu

SEQ ID NO: 182714 - RNA, 32 nt, Homo Sapiens
ugccagggcagagccaugccacaucuguauau

SEQ ID NO: 182715 - RNA, 32 nt, Homo Sapiens
cauaauacuuguuuuucuuacaugugacuagc

SEQ ID NO: 182716 - RNA, 32 nt, Homo Sapiens
cccuagcccagccccagucacugucagggucg

SEQ ID NO: 182717 - RNA, 32 nt, Homo Sapiens
cucugccuagggugcugggacgcgagccugga

SEQ ID NO: 182718 - RNA, 32 nt, Homo Sapiens
ggcaugaugcccucgcucccccaugcccccac

SEQ ID NO: 182719 - RNA, 32 nt, Homo Sapiens
cuggccccacuugguaccaauccaccaggcag

SEQ ID NO: 182720 - RNA, 32 nt, Homo Sapiens
gggaguguuguccugagauaaggaggaacugu

SEQ ID NO: 182721 - RNA, 32 nt, Homo Sapiens
ccgggggcuaccgcguccaggugugguccagc

SEQ ID NO: 182722 - RNA, 32 nt, Homo Sapiens
uucauacaucacauuuuaaauuggggacugug

SEQ ID NO: 182723 - RNA, 32 nt, Homo Sapiens
gcaacacagccauuauuuuauugucuagcucc

SEQ ID NO: 182724 - RNA, 32 nt, Homo Sapiens
gacaauuuuuauuucuaauguuuauuucuguu

SEQ ID NO: 182725 - RNA, 32 nt, Homo Sapiens
auugccggcgcgugucuguuucugugcggcgg

SEQ ID NO: 182726 - RNA, 32 nt, Homo Sapiens
ucucggacuugguuguugcgcgcuccggcucc

SEQ ID NO: 182727 - RNA, 32 nt, Homo Sapiens
gccagagaugaccucaaggcccaccaaauaga

SEQ ID NO: 182728 - RNA, 32 nt, Homo Sapiens
ugauaguuucuuuugcuauuccacaauguuuu

SEQ ID NO: 182729 - RNA, 32 nt, Homo Sapiens
gaagaugugugcucuggcucggauaagagaug

SEQ ID NO: 182730 - RNA, 32 nt, Homo Sapiens
cuuauucccuuaguuucuuuucauaaaguaag

SEQ ID NO: 182731 - RNA, 32 nt, Homo Sapiens
accgggagagcagcugcaggacucggcgcgcc

SEQ ID NO: 182732 - RNA, 32 nt, Homo Sapiens
ccaagccagaugagugaauccgaguuacagau

SEQ ID NO: 182733 - RNA, 32 nt, Homo Sapiens
ugguuccaggacuacaaugucuuuauuuuuaa

SEQ ID NO: 182734 - RNA, 32 nt, Homo Sapiens
gcauggaacaaaugaguaugugcgagcaggga

SEQ ID NO: 182735 - RNA, 32 nt, Homo Sapiens
uauauuucuguuaaacaguucuucaccuaaca

SEQ ID NO: 182736 - RNA, 32 nt, Homo Sapiens
uguaccuagucuuuuuugcauuacuuuguaac

SEQ ID NO: 182737 - RNA, 32 nt, Homo Sapiens
gacagggccacaagcuaggaucucuaacaaac

SEQ ID NO: 182738 - RNA, 32 nt, Homo Sapiens
aauggaguuucgcucucguugccgaggcugga

SEQ ID NO: 182739 - RNA, 32 nt, Homo Sapiens
acaagauaauuaaaaauucacuuuuucucagu

SEQ ID NO: 182740 - RNA, 32 nt, Homo Sapiens
acugagaaauuugagccagguauccagagcca

SEQ ID NO: 182741 - RNA, 32 nt, Homo Sapiens
ggugcuacuggcuuucauuugcugacuugauu

SEQ ID NO: 182742 - RNA, 32 nt, Homo Sapiens
uuaauaaaacauauauuauauugaacuaugug

SEQ ID NO: 182743 - RNA, 32 nt, Homo Sapiens
cgccuucucggccgcccucccgguuuaccgcc

SEQ ID NO: 182744 - RNA, 32 nt, Homo Sapiens
acgcgagcgccggggaguggcuccugcuuugc

SEQ ID NO: 182745 - RNA, 32 nt, Homo Sapiens
cuaacaucuucagaacaagauauaucaccucg

SEQ ID NO: 182746 - RNA, 32 nt, Homo Sapiens
caacacccgcucgacccucucccggccccucc

SEQ ID NO: 182747 - RNA, 32 nt, Homo Sapiens
ucuagcagcaacccaccuacaauggcguuaug

SEQ ID NO: 182748 - RNA, 32 nt, Homo Sapiens
ucccaacggccugggaagccacggccaggcug

SEQ ID NO: 182749 - RNA, 32 nt, Homo Sapiens
agaagagggugcauuuucaggaggaagcgaug

SEQ ID NO: 182750 - RNA, 32 nt, Homo Sapiens
ccuaucggaagggaagcagaaaaugaucaggu

SEQ ID NO: 182751 - RNA, 32 nt, Homo Sapiens
gugaaggagacggagaaacgcgccccaucccu

SEQ ID NO: 182752 - RNA, 32 nt, Homo Sapiens
gacccugcacucagccaucaaaguguuccugc

SEQ ID NO: 182753 - RNA, 32 nt, Homo Sapiens
gcacccccaggauucccagagagacgcuguga

SEQ ID NO: 182754 - RNA, 32 nt, Homo Sapiens
gucggggguuguuaggcuuuucugccugcucc

SEQ ID NO: 182755 - RNA, 32 nt, Homo Sapiens
cuagggagcccagaggcccauccugagccucc

SEQ ID NO: 182756 - RNA, 32 nt, Homo Sapiens
acguggucuccauggcaucugacugcaggguc

SEQ ID NO: 182757 - RNA, 32 nt, Homo Sapiens
cuaaccccagacaugcugcugcugcugcugcc

SEQ ID NO: 182758 - RNA, 32 nt, Homo Sapiens
gguugaggggcuauuucaaguuccucguggcu

SEQ ID NO: 182759 - RNA, 32 nt, Homo Sapiens
cucuuucacucuguaacccauuuuaaaaugag

SEQ ID NO: 182760 - RNA, 32 nt, Homo Sapiens
acauugaguccuguuuuccauuggcuucaggg

SEQ ID NO: 182761 - RNA, 32 nt, Homo Sapiens
uguggcccuggccagaacuaguauuuggcuua

SEQ ID NO: 182762 - RNA, 32 nt, Homo Sapiens
gaaauuucaaguuggccaauaauagcauucuc

SEQ ID NO: 182763 - RNA, 32 nt, Homo Sapiens
ugcucuguucuucccccuccuuaggccccagc

SEQ ID NO: 182764 - RNA, 32 nt, Homo Sapiens
agaucugugaucuuucugaaagauggggcagu

SEQ ID NO: 182765 - RNA, 32 nt, Homo Sapiens
uaggacccuggccgcgcuugguucuuccaaag

SEQ ID NO: 182766 - RNA, 32 nt, Homo Sapiens
uccuccgcccaagcccuguccccucccccgcc

SEQ ID NO: 182767 - RNA, 32 nt, Homo Sapiens
cucuuuucuguacuccacgugcuguccugguc

SEQ ID NO: 182768 - RNA, 32 nt, Homo Sapiens
uaacaauacuaaauaucacacugugauggagg

SEQ ID NO: 182769 - RNA, 32 nt, Homo Sapiens
ccgaggggccucuggagggggcggguucucuc

SEQ ID NO: 182770 - RNA, 32 nt, Homo Sapiens
acagaaacaccguaagugucuggaaggcaaaa

SEQ ID NO: 182771 - RNA, 32 nt, Homo Sapiens
gaaugccgauacucagacugcagcuggaccgg

SEQ ID NO: 182772 - RNA, 32 nt, Homo Sapiens
gacgcgcggcucccaccccuccccucucacgg

SEQ ID NO: 182773 - RNA, 32 nt, Homo Sapiens
ccuuccccugaaacagcucccggagcccugcc

SEQ ID NO: 182774 - RNA, 32 nt, Homo Sapiens
ccccucagccccacccuaaaauucuugauacc

SEQ ID NO: 182775 - RNA, 32 nt, Homo Sapiens
ugcgaccugagcgcugccuucagacaccucuc

SEQ ID NO: 182776 - RNA, 32 nt, Homo Sapiens
ucgagaagcugauccugaaauucauauagaaa

SEQ ID NO: 182777 - RNA, 32 nt, Homo Sapiens
ggggcaagaggagggagaaggcagggccguga

SEQ ID NO: 182778 - RNA, 32 nt, Homo Sapiens
agaugcccucgugaggucggggaccagcaggc

SEQ ID NO: 182779 - RNA, 32 nt, Homo Sapiens
aacccaagggaagaggcacaaagagaaguaug

SEQ ID NO: 182780 - RNA, 32 nt, Homo Sapiens
acgcgguuagcaaggcuuagugcucgggccgg

SEQ ID NO: 182781 - RNA, 32 nt, Homo Sapiens
ugcuaauuugaaagaaaauugauaagaaaacu

SEQ ID NO: 182782 - RNA, 32 nt, Homo Sapiens
guugggaggacucacucugugcuccccgaccc

SEQ ID NO: 182783 - RNA, 32 nt, Homo Sapiens
ugcacagagccugguguccacaagcuuccagg

SEQ ID NO: 182784 - RNA, 32 nt, Homo Sapiens
gucauguagagauaaaugugugucacagugaa

SEQ ID NO: 182785 - RNA, 32 nt, Homo Sapiens
aucucuuuucccuugucaugcaagccaaaaau

SEQ ID NO: 182786 - RNA, 32 nt, Homo Sapiens
cugcgggcaacgccuuggcuacccgaggcugg

SEQ ID NO: 182787 - RNA, 32 nt, Homo Sapiens
ggggacgacugccugccaggcugggacaacug

SEQ ID NO: 182788 - RNA, 32 nt, Homo Sapiens
auuuauacuuuuuguuugauuauacguuuaac

SEQ ID NO: 182789 - RNA, 32 nt, Homo Sapiens
aguccuuauuaaguguaaacuucuguucaauu

SEQ ID NO: 182790 - RNA, 32 nt, Homo Sapiens
cuucccagugaacaagggggcauaggcuccuc

SEQ ID NO: 182791 - RNA, 32 nt, Homo Sapiens
aggcuuuauuacacugaagcugcaucuauaug

SEQ ID NO: 182792 - RNA, 31 nt, Homo Sapiens
uauggaagaaauaugcagguauauaagacca

SEQ ID NO: 182793 - RNA, 32 nt, Homo Sapiens
cauuuacacugcuugccaacccuaaugaauau

SEQ ID NO: 182794 - RNA, 32 nt, Homo Sapiens
cacagcuccauuaugcaauccauuccagcaaa

SEQ ID NO: 182795 - RNA, 32 nt, Homo Sapiens
agccaggguccuucaccacccagccgcuggag

SEQ ID NO: 182796 - RNA, 32 nt, Homo Sapiens
ccgcccgacccgcuccguucuccggccugcga

SEQ ID NO: 182797 - RNA, 32 nt, Homo Sapiens
aauauacaagauaugaaaaaauuggacaaggg

SEQ ID NO: 182798 - RNA, 32 nt, Homo Sapiens
uuaagaaugcuguuucaauguauugcugauug

SEQ ID NO: 182799 - RNA, 32 nt, Homo Sapiens
ugcagccagaggugccgggagccccgggccug

SEQ ID NO: 182800 - RNA, 32 nt, Homo Sapiens
gacagguaaugucggcuuccaagugaugcccu

SEQ ID NO: 182801 - RNA, 32 nt, Homo Sapiens
agcaggccccacucccuccccuccccccuccu

SEQ ID NO: 182802 - RNA, 32 nt, Homo Sapiens
aggccuaaggacuuaguuuauuugggcuagac

SEQ ID NO: 182803 - RNA, 32 nt, Homo Sapiens
uucagcuccgaaccccaccccacucaguacau

SEQ ID NO: 182804 - RNA, 32 nt, Homo Sapiens
acaucugaaauugcaugggacucaugcccagc

SEQ ID NO: 182805 - RNA, 32 nt, Homo Sapiens
aagauguuucuucugcuucuugguuauaggag

SEQ ID NO: 182806 - RNA, 32 nt, Homo Sapiens
caagauggacagaggggccuagcuggcuagcc

SEQ ID NO: 182807 - RNA, 32 nt, Homo Sapiens
cccagcccugggcuggggggcuccucaggacc

SEQ ID NO: 182808 - RNA, 32 nt, Homo Sapiens
gcuuucaucuucuguugcucucugugucugag

SEQ ID NO: 182809 - RNA, 32 nt, Homo Sapiens
uagcuguacaaauauaagaauaaaauguugaa

SEQ ID NO: 182810 - RNA, 32 nt, Homo Sapiens
aggucaauuuaaaauagggacuagaaauuauu

SEQ ID NO: 182811 - RNA, 32 nt, Homo Sapiens
acauuggccgcuucagacacgcacuucugggg

SEQ ID NO: 182812 - RNA, 32 nt, Homo Sapiens
gugggggacagggcuagaagcugcauuaguau

SEQ ID NO: 182813 - RNA, 32 nt, Homo Sapiens
cgccccaccauggcucggggccccggccucgc

SEQ ID NO: 182814 - RNA, 32 nt, Homo Sapiens
ugguaccucuugggccucugcacuuucuugcc

SEQ ID NO: 182815 - RNA, 32 nt, Homo Sapiens
cuccugaaguggucagaagagugugugaccca

SEQ ID NO: 182816 - RNA, 32 nt, Homo Sapiens
caacaagaauacuaagacuguuugggaauuuu

SEQ ID NO: 182817 - RNA, 32 nt, Homo Sapiens
acaagagugauagagagcugcaggcugcuaca

SEQ ID NO: 182818 - RNA, 32 nt, Homo Sapiens
cuugcauccaacaugaauuuccagccgaugau

SEQ ID NO: 182819 - RNA, 32 nt, Homo Sapiens
gacaguuuccgcccaccccccagcccaagaaa

SEQ ID NO: 182820 - RNA, 32 nt, Homo Sapiens
gaaugacaugcuucuuguuuuugucuguuaua

SEQ ID NO: 182821 - RNA, 32 nt, Homo Sapiens
gcuugcccccgcagagagaaagcugcagugca

SEQ ID NO: 182822 - RNA, 32 nt, Homo Sapiens
aaaaugggaagauauacauguuguguaaaaaa

SEQ ID NO: 182823 - RNA, 32 nt, Homo Sapiens
uuacccagaaccacuccuccaggagagcugga

SEQ ID NO: 182824 - RNA, 32 nt, Homo Sapiens
ccaccagggcacacccuacuguccuugugccu

SEQ ID NO: 182825 - RNA, 32 nt, Homo Sapiens
uuugaugccgugcacugugugaagcagauguu

SEQ ID NO: 182826 - RNA, 32 nt, Homo Sapiens
agggccgaggcaggccugacccggggccgggc

SEQ ID NO: 182827 - RNA, 32 nt, Homo Sapiens
aaaaaaaaacaaaaaaaaaaccacacacacac

SEQ ID NO: 182828 - RNA, 32 nt, Homo Sapiens
aaaugcaauuuaaauuuuaauacaguacauuu

SEQ ID NO: 182829 - RNA, 32 nt, Homo Sapiens
auugauuaaaauugcuaaauuuguacuuguuc

SEQ ID NO: 182830 - RNA, 32 nt, Homo Sapiens
uuauaucacuuacuguauaauaaaauaaucuu

SEQ ID NO: 182831 - RNA, 32 nt, Homo Sapiens
gagaaagggauuacaagauguaugaguauaau

SEQ ID NO: 182832 - RNA, 32 nt, Homo Sapiens
auggauggguuuucuuguuuuguugauuauuu

SEQ ID NO: 182833 - RNA, 32 nt, Homo Sapiens
ucguaaccgucgcuccuccucgcugacucgcg

SEQ ID NO: 182834 - RNA, 28 nt, Homo Sapiens
acaauggcggccuuaggguccccgucgc

SEQ ID NO: 182835 - RNA, 32 nt, Homo Sapiens
aaaugaaguggaaaguaguacuucauaaugaa

SEQ ID NO: 182836 - RNA, 32 nt, Homo Sapiens
ccaggucaccuccccaccuugcugccuguguc

SEQ ID NO: 182837 - RNA, 32 nt, Homo Sapiens
agcccacccacccccaugauuguaugaaguuu

SEQ ID NO: 182838 - RNA, 32 nt, Homo Sapiens
ucccagucccgccccacuuccggggccgccac

SEQ ID NO: 182839 - RNA, 31 nt, Homo Sapiens
ucccuccucuggagaaagcaccuccucuucu

SEQ ID NO: 182840 - RNA, 27 nt, Homo Sapiens
cgaugggcaacgccgccgccgccaaga

SEQ ID NO: 182841 - RNA, 32 nt, Homo Sapiens
gagauaucaaaggaggucagaccuuggacagu

SEQ ID NO: 182842 - RNA, 32 nt, Homo Sapiens
uuuuagagaauggggguggggaggcaagaacc

SEQ ID NO: 182843 - RNA, 32 nt, Homo Sapiens
ccaccgcccucccucuccccggggcccauggc

SEQ ID NO: 182844 - RNA, 32 nt, Homo Sapiens
caacuauagaauguauuuuauauaucguucau

SEQ ID NO: 182845 - RNA, 32 nt, Homo Sapiens
cugauucgguucccugucuccuccucccguca

SEQ ID NO: 182846 - RNA, 32 nt, Homo Sapiens
uuaucagugagcugaaaacuaaaauuauagaa

SEQ ID NO: 182847 - RNA, 32 nt, Homo Sapiens
ugugucaaaaaccagcaccaaaaaagaacaua

SEQ ID NO: 182848 - RNA, 32 nt, Homo Sapiens
ccauggagucagaugggaccagaugcuagacu

SEQ ID NO: 182849 - RNA, 32 nt, Homo Sapiens
ugaccacaccaaucacuguauuuuauagcuuu

SEQ ID NO: 182850 - RNA, 32 nt, Homo Sapiens
auuuuacacacacacacacacacacacacaua

SEQ ID NO: 182851 - RNA, 28 nt, Homo Sapiens
uguccaguuacaggagcugagcacacug

SEQ ID NO: 182852 - RNA, 32 nt, Homo Sapiens
ucucuguccugacuucauaggugccaccuugu

SEQ ID NO: 182853 - RNA, 32 nt, Homo Sapiens
gguuuugaccuggccucagccuuggggcuguu

SEQ ID NO: 182854 - RNA, 32 nt, Homo Sapiens
ccaaagugcugggauuauacaugugagccacc

SEQ ID NO: 182855 - RNA, 29 nt, Homo Sapiens
acacgauugacuuucuugauggguaauuu

SEQ ID NO: 182856 - RNA, 32 nt, Homo Sapiens
ccauuuggcugucgugaggaguaauugaaugu

SEQ ID NO: 182857 - RNA, 32 nt, Homo Sapiens
cguuggcgugguugacuagugccucgcagccu

SEQ ID NO: 182858 - RNA, 32 nt, Homo Sapiens
cgggacaagaggccgucugugcggcugugguc

SEQ ID NO: 182859 - RNA, 32 nt, Homo Sapiens
aaguaaaugaugguuuaaaaaauacacaccuu

SEQ ID NO: 182860 - RNA, 32 nt, Homo Sapiens
gccaacagauguaaauaauagcacuagccacu

SEQ ID NO: 182861 - RNA, 32 nt, Homo Sapiens
uuggaaacauauguccuagaaaacauaaaauu

SEQ ID NO: 182862 - RNA, 32 nt, Homo Sapiens
gugggccaacuggcagcccaggaguggggagg

SEQ ID NO: 182863 - RNA, 32 nt, Homo Sapiens
aaucuauguagacaaugggacguuaggcagag

SEQ ID NO: 182864 - RNA, 32 nt, Homo Sapiens
guuuuuuccccucuuuuacuuuccauugagga

SEQ ID NO: 182865 - RNA, 32 nt, Homo Sapiens
ccggcgcagccgcggcgggcgaggccaaugga

SEQ ID NO: 182866 - RNA, 32 nt, Homo Sapiens
guuuaacucacguaucuuaaccaaauauacac

SEQ ID NO: 182867 - RNA, 32 nt, Homo Sapiens
ucgguggaagcucuggugugauugguuggcuc

SEQ ID NO: 182868 - RNA, 32 nt, Homo Sapiens
cccugccccaugugucccccguuaccuguccu

SEQ ID NO: 182869 - RNA, 32 nt, Homo Sapiens
ugcagagaacucauaaaggagcauauaaggcu

SEQ ID NO: 182870 - RNA, 32 nt, Homo Sapiens
cgccgggagaggauuaaguuugaucacuauga

SEQ ID NO: 182871 - RNA, 32 nt, Homo Sapiens
agggucuuugcugcugcgcccgggcaggggcu

SEQ ID NO: 182872 - RNA, 32 nt, Homo Sapiens
uuucuccauucuagguuuuucuuuuuuucagu

SEQ ID NO: 182873 - RNA, 32 nt, Homo Sapiens
ugcuguuccuaggugauaacuguccuaauauu

SEQ ID NO: 182874 - RNA, 30 nt, Homo Sapiens
aggcgccauuugcugccgccgagcguggac

SEQ ID NO: 182875 - RNA, 32 nt, Homo Sapiens
gggccagugagucacuccaugaaggccaaaga

SEQ ID NO: 182876 - RNA, 32 nt, Homo Sapiens
ggccauccuccucuucuuggaccuccuuggcc

SEQ ID NO: 182877 - RNA, 32 nt, Homo Sapiens
aacgucccuagcccuuacguccuuccacuucc

SEQ ID NO: 182878 - RNA, 32 nt, Homo Sapiens
accuuggaggcugcuuauuccagacuggguug

SEQ ID NO: 182879 - RNA, 32 nt, Homo Sapiens
acugacuuugaugcugaugacagcccugauag

SEQ ID NO: 182880 - RNA, 32 nt, Homo Sapiens
augaauaaauggugguacuguucuuucccuca

SEQ ID NO: 182881 - RNA, 32 nt, Homo Sapiens
agcuggaccaggugcugcacugccgcugggcc

SEQ ID NO: 182882 - RNA, 32 nt, Homo Sapiens
acacauaccaggaugcuucuucaugcaugcga

SEQ ID NO: 182883 - RNA, 32 nt, Homo Sapiens
cagauccuuccacuacuccccagccuagaaga

SEQ ID NO: 182884 - RNA, 32 nt, Homo Sapiens
ugaaaacugaauuuaaguauuauuuaaacaga

SEQ ID NO: 182885 - RNA, 32 nt, Homo Sapiens
cggcgaaacaacaccguacugggagucagaac

SEQ ID NO: 182886 - RNA, 32 nt, Homo Sapiens
gugcgcgugugagugugucugcgcccagccau

SEQ ID NO: 182887 - RNA, 32 nt, Homo Sapiens
aaaggcuucucgcucaccgcgcucgaggccgg

SEQ ID NO: 182888 - RNA, 32 nt, Homo Sapiens
gagcuucaugcgccugguggaggccugugggg

SEQ ID NO: 182889 - RNA, 32 nt, Homo Sapiens
accccaucaccgcggccggcgccgggccggga

SEQ ID NO: 182890 - RNA, 32 nt, Homo Sapiens
ucagaagcaaaaauaaaauugcaguaagugaa

SEQ ID NO: 182891 - RNA, 32 nt, Homo Sapiens
gcuugggaagcagcuccugcugggagcauggc

SEQ ID NO: 182892 - RNA, 32 nt, Homo Sapiens
cuugggcccucccugcgacagccggacccgcc

SEQ ID NO: 182893 - RNA, 32 nt, Homo Sapiens
uacggccuguggaaccgugagccaauuaaacu

SEQ ID NO: 182894 - RNA, 32 nt, Homo Sapiens
gauacuuggaaucaaggcaucucuguauuaca

SEQ ID NO: 182895 - RNA, 29 nt, Homo Sapiens
acauauauauguaugugggugugagugug

SEQ ID NO: 182896 - RNA, 32 nt, Homo Sapiens
ucguggguauggaaggacagauauauuucuuu

SEQ ID NO: 182897 - RNA, 32 nt, Homo Sapiens
acggauccuccuccucccuuauucccuugcuc

SEQ ID NO: 182898 - RNA, 32 nt, Homo Sapiens
gaugaauguuuccggcauucuuucuaacucac

SEQ ID NO: 182899 - RNA, 32 nt, Homo Sapiens
aauguaugcaagagaccaaaaagauggcucca

SEQ ID NO: 182900 - RNA, 32 nt, Homo Sapiens
auuccgcccugacgucgccgcguacacguacc

SEQ ID NO: 182901 - RNA, 32 nt, Homo Sapiens
uuguauuuaaguauaaaaugugaaucaucuug

SEQ ID NO: 182902 - RNA, 32 nt, Homo Sapiens
ugguuggaacuaaacgucaccaagguggcuuc

SEQ ID NO: 182903 - RNA, 32 nt, Homo Sapiens
gccauucggaagcuggcagcauuuuaucgcaa

SEQ ID NO: 182904 - RNA, 32 nt, Homo Sapiens
cucagugcccucgccgccgccggcacugccuc

SEQ ID NO: 182905 - RNA, 32 nt, Homo Sapiens
uuugcuuuguuugugagagauguguauguauu

SEQ ID NO: 182906 - RNA, 32 nt, Homo Sapiens
ggggaaucuugcgucuacggggccuagagucc

SEQ ID NO: 182907 - RNA, 32 nt, Homo Sapiens
aaagaccagaauauucuaccuaaauaucaaga

SEQ ID NO: 182908 - RNA, 32 nt, Homo Sapiens
gaagcucucccucuugucgcucugggaccgcu

SEQ ID NO: 182909 - RNA, 30 nt, Homo Sapiens
aaugacccuccuaggaccuaagaauagaga

SEQ ID NO: 182910 - RNA, 32 nt, Homo Sapiens
gagcuuguagagagugcccgagaggccuggag

SEQ ID NO: 182911 - RNA, 32 nt, Homo Sapiens
ggggcggcacagggcuccugcacuccuggaug

SEQ ID NO: 182912 - RNA, 32 nt, Homo Sapiens
gcucucagucugccucaggugugugccuggag

SEQ ID NO: 182913 - RNA, 32 nt, Homo Sapiens
gcacagcagaauuuauauaggcaugugaugug

SEQ ID NO: 182914 - RNA, 32 nt, Homo Sapiens
ccuauagaugggaaguccauggagacuauaac

SEQ ID NO: 182915 - RNA, 32 nt, Homo Sapiens
gacaaguuccaggagcacuuuggggacugggg

SEQ ID NO: 182916 - RNA, 32 nt, Homo Sapiens
auuuaaauauaaguauauggugugcgugugua

SEQ ID NO: 182917 - RNA, 32 nt, Homo Sapiens
gaggccugcgcccacacccucuccuguccagc

SEQ ID NO: 182918 - RNA, 32 nt, Homo Sapiens
uguuuacacguuugcauagacuacacacaugu

SEQ ID NO: 182919 - RNA, 32 nt, Homo Sapiens
agauggggaaacugaggcuuaggaagagaaug

SEQ ID NO: 182920 - RNA, 32 nt, Homo Sapiens
uggcaguggcccagccccagccucagggacgg

SEQ ID NO: 182921 - RNA, 32 nt, Homo Sapiens
agacucagaaaaggaguggggggcagucacca

SEQ ID NO: 182922 - RNA, 31 nt, Homo Sapiens
acacgugugaucucgucuucagugugccgcu

SEQ ID NO: 182923 - RNA, 32 nt, Homo Sapiens
gccgcaagcaaguugcugggcggcgguggaga

SEQ ID NO: 182924 - RNA, 32 nt, Homo Sapiens
aucaggccccaagacagaaguacuuggaggag

SEQ ID NO: 182925 - RNA, 32 nt, Homo Sapiens
aagaguuauaaagauuccuuccaauuguaucu

SEQ ID NO: 182926 - RNA, 32 nt, Homo Sapiens
ggcaaggaccagcgcuccaugauccuucgguc

SEQ ID NO: 182927 - RNA, 32 nt, Homo Sapiens
ccauuuuccuacaggcagucucucucuuccuc

SEQ ID NO: 182928 - RNA, 32 nt, Homo Sapiens
auauaacucuuagagaaauguacauaaaagaa

SEQ ID NO: 182929 - RNA, 32 nt, Homo Sapiens
gccucuggccccaguucguuuccucugcccac

SEQ ID NO: 182930 - RNA, 32 nt, Homo Sapiens
gguuaaacuaaauggaaccaugugcuaauuuu

SEQ ID NO: 182931 - RNA, 32 nt, Homo Sapiens
ccacaaauaaaauggauuuauuagaauuucau

SEQ ID NO: 182932 - RNA, 32 nt, Homo Sapiens
acccuggagcagccuggauuccuggggugucc

SEQ ID NO: 182933 - RNA, 32 nt, Homo Sapiens
cuuggugcugccugggguguugcugagcggac

SEQ ID NO: 182934 - RNA, 32 nt, Homo Sapiens
ugaaacuuaccuuguuuucacuugugcacugu

SEQ ID NO: 182935 - RNA, 32 nt, Homo Sapiens
gguaggaagagguaccacaggaagccgccuag

SEQ ID NO: 182936 - RNA, 32 nt, Homo Sapiens
acugaguccaauccaagcccagccccggcacu

SEQ ID NO: 182937 - RNA, 32 nt, Homo Sapiens
auuacaggcguuagccacugcgcccggcccga

SEQ ID NO: 182938 - RNA, 32 nt, Homo Sapiens
cucauucuccccgugcgcagccgguggcaucg

SEQ ID NO: 182939 - RNA, 32 nt, Homo Sapiens
uggcccuaaaauuuauaugaaaugaaaaggaa

SEQ ID NO: 182940 - RNA, 32 nt, Homo Sapiens
aucugauuggcagaugagcuuauuucaaaagg

SEQ ID NO: 182941 - RNA, 32 nt, Homo Sapiens
agccugacuccgcugggagagugcaggagcac

SEQ ID NO: 182942 - RNA, 32 nt, Homo Sapiens
ucauuaugaaauguauguuuauguagggcuuu

SEQ ID NO: 182943 - RNA, 32 nt, Homo Sapiens
cauuacaaaaaagaagccugggcacuguggcu

SEQ ID NO: 182944 - RNA, 32 nt, Homo Sapiens
cugauguacacagacugaaacacacacacaua

SEQ ID NO: 182945 - RNA, 32 nt, Homo Sapiens
acugauuguuucgauauguacauauuacucac

SEQ ID NO: 182946 - RNA, 32 nt, Homo Sapiens
ucaaagcaauuggcugacagccaauucccccu

SEQ ID NO: 182947 - RNA, 32 nt, Homo Sapiens
caaaucuucuaaauaacaauccugcauaguuu

SEQ ID NO: 182948 - RNA, 32 nt, Homo Sapiens
gaaccacagggcgguaucccaggccgugugcu

SEQ ID NO: 182949 - RNA, 32 nt, Homo Sapiens
gggcuggaccccagcccuugcagccucccuuc

SEQ ID NO: 182950 - RNA, 32 nt, Homo Sapiens
ugugguaaucuugggaggcagcuccccacccc

SEQ ID NO: 182951 - RNA, 32 nt, Homo Sapiens
cauuuugucuuacucugaaagaagaacagcaa

SEQ ID NO: 182952 - RNA, 32 nt, Homo Sapiens
augauccuuccagagcucuauguacaugcaga

SEQ ID NO: 182953 - RNA, 32 nt, Homo Sapiens
aggcauauguauauauuuucacacuucaaaga

SEQ ID NO: 182954 - RNA, 32 nt, Homo Sapiens
cuuaaagugauaaacuaacaaacaaauauaac

SEQ ID NO: 182955 - RNA, 32 nt, Homo Sapiens
auugcugccguggagaagacuggaggaaacuc

SEQ ID NO: 182956 - RNA, 32 nt, Homo Sapiens
guaaccccuaccucacaggguuguugugagga

SEQ ID NO: 182957 - RNA, 32 nt, Homo Sapiens
ggcggccgagaccugcacggcccagcgggcac

SEQ ID NO: 182958 - RNA, 32 nt, Homo Sapiens
gggcgcgcguaucggcgccgcggccgcgugac

SEQ ID NO: 182959 - RNA, 32 nt, Homo Sapiens
gaccuggauuaucauugcaaauccauuaaaga

SEQ ID NO: 182960 - RNA, 32 nt, Homo Sapiens
auccagccucaucuuucuuuuaaccaauaaac

SEQ ID NO: 182961 - RNA, 30 nt, Homo Sapiens
ccgccgggugcucgcgcgggguuggugagg

SEQ ID NO: 182962 - RNA, 32 nt, Homo Sapiens
uuuuuaguguaacuaaugucaaacuguaucau

SEQ ID NO: 182963 - RNA, 32 nt, Homo Sapiens
uccaucuaucagucuuacuccaaauauaugaa

SEQ ID NO: 182964 - RNA, 32 nt, Homo Sapiens
ccggccgaucccugggccggccgcgggagcag

SEQ ID NO: 182965 - RNA, 32 nt, Homo Sapiens
acccagagaagcugagggggcgguagcggcgg

SEQ ID NO: 182966 - RNA, 32 nt, Homo Sapiens
aggacucuuggccaugcugcuggcaguggaga

SEQ ID NO: 182967 - RNA, 30 nt, Homo Sapiens
agcagcagcacaggcgcgggucccgggagg

SEQ ID NO: 182968 - RNA, 32 nt, Homo Sapiens
gcucccgggauaggcugccccggagagggaga

SEQ ID NO: 182969 - RNA, 32 nt, Homo Sapiens
ggagucagaucaggggaacuauucuaggguau

SEQ ID NO: 182970 - RNA, 32 nt, Homo Sapiens
auccaccaaaaauauauaauguaccauauaua

SEQ ID NO: 182971 - RNA, 32 nt, Homo Sapiens
gguuaaaggcuuuguccuccuguuuaauccac

SEQ ID NO: 182972 - RNA, 32 nt, Homo Sapiens
agagaccagcagaacggcaucccagccacgac

SEQ ID NO: 182973 - RNA, 32 nt, Homo Sapiens
aacuaaugauuuccuccuaaauauguaauguc

SEQ ID NO: 182974 - RNA, 32 nt, Homo Sapiens
ugcaugccuuuucucuagucugccuuuuguga

SEQ ID NO: 182975 - RNA, 32 nt, Homo Sapiens
gcccgcgcccuccgcgcgacgccagcuacgag

SEQ ID NO: 182976 - RNA, 32 nt, Homo Sapiens
augaccaugaaguuaucauugaauguuaagau

SEQ ID NO: 182977 - RNA, 32 nt, Homo Sapiens
aaugaccucgggcuuaacuuaaccccuucgcu

SEQ ID NO: 182978 - RNA, 32 nt, Homo Sapiens
gaugcccccucaggccucccccaaguuugcug

SEQ ID NO: 182979 - RNA, 32 nt, Homo Sapiens
ggaggaauugguuguauagaagauccuaguga

SEQ ID NO: 182980 - RNA, 32 nt, Homo Sapiens
caggaucugggagggacaaguugcauugugau

SEQ ID NO: 182981 - RNA, 32 nt, Homo Sapiens
agacccaggcuccaccaagaagcuagugguuu

SEQ ID NO: 182982 - RNA, 32 nt, Homo Sapiens
ggaccuuggaauggggugaauguauuuugcau

SEQ ID NO: 182983 - RNA, 32 nt, Homo Sapiens
acguuuauuguaacaagaauuguuauguauua

SEQ ID NO: 182984 - RNA, 32 nt, Homo Sapiens
ucugucuagcuaaagauuuguaaaugcaccaa

SEQ ID NO: 182985 - RNA, 29 nt, Homo Sapiens
gcagguccucaauaaauacucgcuggauc

SEQ ID NO: 182986 - RNA, 32 nt, Homo Sapiens
ggaggacuagaggcucaggggguguggguggg

SEQ ID NO: 182987 - RNA, 27 nt, Homo Sapiens
ccucaacccucccucagccccucuugc

SEQ ID NO: 182988 - RNA, 32 nt, Homo Sapiens
cucccggccccggggccaccucacguucugcu

SEQ ID NO: 182989 - RNA, 32 nt, Homo Sapiens
uggucuggaucgcggagggaaugccccggagg

SEQ ID NO: 182990 - RNA, 32 nt, Homo Sapiens
gguguggccuucggcaccuccccuccccaacg

SEQ ID NO: 182991 - RNA, 32 nt, Homo Sapiens
auaauuuaccaugaauccuuaguagcaaugac

SEQ ID NO: 182992 - RNA, 32 nt, Homo Sapiens
ugguuguuuuucuugcccacucugguagggga

SEQ ID NO: 182993 - RNA, 32 nt, Homo Sapiens
cuuacuuuacuuuauuguaauacaugaagcau

SEQ ID NO: 182994 - RNA, 31 nt, Homo Sapiens
cuaugggagccccagggucuucccuaccuca

SEQ ID NO: 182995 - RNA, 32 nt, Homo Sapiens
ccgcaggaggucgucccugauggccccuggag

SEQ ID NO: 182996 - RNA, 32 nt, Homo Sapiens
uagaaaacaauguauuugaauuuugauguaag

SEQ ID NO: 182997 - RNA, 32 nt, Homo Sapiens
ccaggucccagcugaggaagcccuguggucag

SEQ ID NO: 182998 - RNA, 32 nt, Homo Sapiens
ucccacacugguuuuauuuguaauuugcauuu

SEQ ID NO: 182999 - RNA, 32 nt, Homo Sapiens
cauucugaguagauuuaagagaacaaaagaca

SEQ ID NO: 183000 - RNA, 32 nt, Homo Sapiens
aagaccccuaaaaagccuaaagcuuuaaauug

SEQ ID NO: 183001 - RNA, 32 nt, Homo Sapiens
uggcccccaccuucuuggaggcgacaaccccc

SEQ ID NO: 183002 - RNA, 32 nt, Homo Sapiens
ucauguuuuuucugcaaugacuguggaguucc

SEQ ID NO: 183003 - RNA, 32 nt, Homo Sapiens
gauaaaugauccuaaacuaucaagucaguuuc

SEQ ID NO: 183004 - RNA, 30 nt, Homo Sapiens
gaaggggcgcccguggggugcggacgcaug

SEQ ID NO: 183005 - RNA, 32 nt, Homo Sapiens
ugccagccaggggcuccagccaugcuggcaca

SEQ ID NO: 183006 - RNA, 32 nt, Homo Sapiens
aggacgcccgucuccucucccugaggauuuca

SEQ ID NO: 183007 - RNA, 32 nt, Homo Sapiens
uuaacuaaggugagacauugauauauccuuuu

SEQ ID NO: 183008 - RNA, 32 nt, Homo Sapiens
aauuuaaaauuugauuuaaauacaaaccucuu

SEQ ID NO: 183009 - RNA, 32 nt, Homo Sapiens
gcaaccagaguauuuuuguacagauuugcuuu

SEQ ID NO: 183010 - RNA, 32 nt, Homo Sapiens
caggcgcugcccgugcguucagugacuaauaa

SEQ ID NO: 183011 - RNA, 32 nt, Homo Sapiens
cagcccgggcacuuccgcagccaggcaggccc

SEQ ID NO: 183012 - RNA, 32 nt, Homo Sapiens
guuaauacuuggauauaauaauauuuuggggu

SEQ ID NO: 183013 - RNA, 32 nt, Homo Sapiens
uacuuugaaaugcaugagaaucaugcugcaau

SEQ ID NO: 183014 - RNA, 32 nt, Homo Sapiens
uagugcucuccaccccaccuuuuguuaucauu

SEQ ID NO: 183015 - RNA, 32 nt, Homo Sapiens
ccuuguuuuugaucaauggggaccagccacug

SEQ ID NO: 183016 - RNA, 32 nt, Homo Sapiens
guucagugcagguguuucuagaucuuacgguu

SEQ ID NO: 183017 - RNA, 32 nt, Homo Sapiens
agcggagcuggaagagccuggggccaccuguc

SEQ ID NO: 183018 - RNA, 32 nt, Homo Sapiens
caucagcaugacugagugcuuccugcccccca

SEQ ID NO: 183019 - RNA, 30 nt, Homo Sapiens
gaugaauuucuagugguggaaaccguuuuc

SEQ ID NO: 183020 - RNA, 32 nt, Homo Sapiens
agaaauacuguaaaaauaguacaaagaauucc

SEQ ID NO: 183021 - RNA, 32 nt, Homo Sapiens
aguuaaaacagguggagaaauuccuugauuca

SEQ ID NO: 183022 - RNA, 32 nt, Homo Sapiens
ugugaguuauuuagaaaugaucaaaauuugua

SEQ ID NO: 183023 - RNA, 32 nt, Homo Sapiens
ugugaggaauaauucagucuaguugugcugau

SEQ ID NO: 183024 - RNA, 32 nt, Homo Sapiens
gguuuugcaccucuccgugauuguagcccuac

SEQ ID NO: 183025 - RNA, 32 nt, Homo Sapiens
cacauaaaagaagaaacuauuuuuuaaaaauu

SEQ ID NO: 183026 - RNA, 32 nt, Homo Sapiens
cggcggcagcggcggcggcuggaacaaucacu

SEQ ID NO: 183027 - RNA, 32 nt, Homo Sapiens
ucuaucccauucuuauuguuucuauuugucaa

SEQ ID NO: 183028 - RNA, 32 nt, Homo Sapiens
cagaaaaacaauuuuuaaauggauuuuagagc

SEQ ID NO: 183029 - RNA, 32 nt, Homo Sapiens
cgccuguaaucccagcacuuugggaggcagag

SEQ ID NO: 183030 - RNA, 32 nt, Homo Sapiens
agcuguaaugaaagcaggauuuuaauaaaaac

SEQ ID NO: 183031 - RNA, 32 nt, Homo Sapiens
acucucuccccaccacccagcucaggccccag

SEQ ID NO: 183032 - RNA, 32 nt, Homo Sapiens
aaggaaauaaugauuggccuucuguuuggaag

SEQ ID NO: 183033 - RNA, 32 nt, Homo Sapiens
ccggugugagccccugcccccgaacugcgugc

SEQ ID NO: 183034 - RNA, 32 nt, Homo Sapiens
cacuauaaaauccaguugaccuggacaguauu

SEQ ID NO: 183035 - RNA, 32 nt, Homo Sapiens
ucaucugacaccugagggccgcuggagaccca

SEQ ID NO: 183036 - RNA, 32 nt, Homo Sapiens
ucuuaaugcuccugaaugaaagaaauuauccc

SEQ ID NO: 183037 - RNA, 32 nt, Homo Sapiens
ggaguugacccgcccaccugggcuuuucaacc

SEQ ID NO: 183038 - RNA, 32 nt, Homo Sapiens
uuagcaggaaaugucuuuaaagucuuauguug

SEQ ID NO: 183039 - RNA, 32 nt, Homo Sapiens
guuccuuuaaacaugcuacaaagcccaggcau

SEQ ID NO: 183040 - RNA, 32 nt, Homo Sapiens
gcgccgcgccauggccaccuccccgcagaagu

SEQ ID NO: 183041 - RNA, 32 nt, Homo Sapiens
ggucauuauuacauuugugucaaugaagggca

SEQ ID NO: 183042 - RNA, 32 nt, Homo Sapiens
aaaagcaugucacugaguuggccacggucugu

SEQ ID NO: 183043 - RNA, 32 nt, Homo Sapiens
aggccguuauucugcccaccgcacccuccguu

SEQ ID NO: 183044 - RNA, 32 nt, Homo Sapiens
acaaggucaggaguucgagaccagccuggcca

SEQ ID NO: 183045 - RNA, 32 nt, Homo Sapiens
cucuuccauugcauccuguaggacccagugga

SEQ ID NO: 183046 - RNA, 32 nt, Homo Sapiens
auguuugccaguacucauguacgaugucuaca

SEQ ID NO: 183047 - RNA, 32 nt, Homo Sapiens
ugggcaacagagugaggcucugucugaaaaaa

SEQ ID NO: 183048 - RNA, 28 nt, Homo Sapiens
guuguguggauauaacauuugggggauc

SEQ ID NO: 183049 - RNA, 32 nt, Homo Sapiens
caggaaacaagaacuacaggauguagaagacc

SEQ ID NO: 183050 - RNA, 32 nt, Homo Sapiens
gguuuggaaagccaccugagaccacuucauag

SEQ ID NO: 183051 - RNA, 31 nt, Homo Sapiens
cucaaauaaaauguauaacucuaguaaaaaa

SEQ ID NO: 183052 - RNA, 32 nt, Homo Sapiens
auucacguucccacccagccuggcuggcggug

SEQ ID NO: 183053 - RNA, 32 nt, Homo Sapiens
aaaauaacauggauuccauacugagagccuau

SEQ ID NO: 183054 - RNA, 32 nt, Homo Sapiens
gccuaugauccagugaggcauuucucgaccua

SEQ ID NO: 183055 - RNA, 32 nt, Homo Sapiens
caucuaaacugggacuauacuaguaggagagg

SEQ ID NO: 183056 - RNA, 32 nt, Homo Sapiens
uugacagacauucaagggcaggagggagcccc

SEQ ID NO: 183057 - RNA, 32 nt, Homo Sapiens
uggggaaaacgaauuucucauuuucuucuuaa

SEQ ID NO: 183058 - RNA, 32 nt, Homo Sapiens
ggcaggcauacuccuaucuccuccucuuggcu

SEQ ID NO: 183059 - RNA, 32 nt, Homo Sapiens
cacacacacacacacacacacacacacacaaa

SEQ ID NO: 183060 - RNA, 32 nt, Homo Sapiens
cccccuaccagugcaugagacacacaccuacc

SEQ ID NO: 183061 - RNA, 32 nt, Homo Sapiens
uuuaugucucuuaaaauggugauggaugugac

SEQ ID NO: 183062 - RNA, 32 nt, Homo Sapiens
cucuuguuggccugggaacuucuuggaacuuu

SEQ ID NO: 183063 - RNA, 32 nt, Homo Sapiens
aaagaugaagcuuuggcuuugcuggugagauc

SEQ ID NO: 183064 - RNA, 32 nt, Homo Sapiens
gaguagcaacauaaaaagaaguggcucaaguc

SEQ ID NO: 183065 - RNA, 32 nt, Homo Sapiens
gcaaccacucucaggaaaggugauggagcccc

SEQ ID NO: 183066 - RNA, 32 nt, Homo Sapiens
ucucuaauagguuuccuuuucacguucuuuua

SEQ ID NO: 183067 - RNA, 32 nt, Homo Sapiens
ccguuccaagggugccaccggaccccgcugga

SEQ ID NO: 183068 - RNA, 32 nt, Homo Sapiens
gaaguagaaaaauuauuuucuuuagucuugcu

SEQ ID NO: 183069 - RNA, 32 nt, Homo Sapiens
uggcacagaauugcucuuucugaaggguagca

SEQ ID NO: 183070 - RNA, 32 nt, Homo Sapiens
augcuauuuugcauaaucaaggcacuguaaau

SEQ ID NO: 183071 - RNA, 32 nt, Homo Sapiens
caaugccuggaaaaauuauuuuguuucccucu

SEQ ID NO: 183072 - RNA, 32 nt, Homo Sapiens
uccguggcggccuuuaucuucaaggagugugg

SEQ ID NO: 183073 - RNA, 32 nt, Homo Sapiens
uuaguuuaaggggaacacgugcagguuuguuc

SEQ ID NO: 183074 - RNA, 32 nt, Homo Sapiens
cauccccccgguuuccucaucugagagcgagg

SEQ ID NO: 183075 - RNA, 32 nt, Homo Sapiens
ggaggccgugaggcugcagaacagugaggguu

SEQ ID NO: 183076 - RNA, 32 nt, Homo Sapiens
ccguggaacugggaggagccggaagagagcag

SEQ ID NO: 183077 - RNA, 32 nt, Homo Sapiens
uacaacuugagccagugaggcagauugggcug

SEQ ID NO: 183078 - RNA, 32 nt, Homo Sapiens
aaccaggggacaggguaucauaaagagauaau

SEQ ID NO: 183079 - RNA, 32 nt, Homo Sapiens
cuucugacuuguuuuuguuuucuggauuuuua

SEQ ID NO: 183080 - RNA, 32 nt, Homo Sapiens
gccuuugccuccccggcucgagcaguccugcc

SEQ ID NO: 183081 - RNA, 32 nt, Homo Sapiens
cagccaccgccgcaaucaugggcuugugcugg

SEQ ID NO: 183082 - RNA, 28 nt, Homo Sapiens
ccuguuggaaaacuggcaguaucuacca

SEQ ID NO: 183083 - RNA, 27 nt, Homo Sapiens
acauccuccugcuucagccuccagaga

SEQ ID NO: 183084 - RNA, 30 nt, Homo Sapiens
uuggcuugccuggugggggaaggggaggag

SEQ ID NO: 183085 - RNA, 32 nt, Homo Sapiens
cacacccgcacuccucccggguuucugcucuc

SEQ ID NO: 183086 - RNA, 32 nt, Homo Sapiens
gaaguguccuuuccucuucaguuuuuuggaag

SEQ ID NO: 183087 - RNA, 32 nt, Homo Sapiens
acuacaaaacuguacagccuauuuuagugugg

SEQ ID NO: 183088 - RNA, 32 nt, Homo Sapiens
gccagagcgaaaggggaccuucugccaccagc

SEQ ID NO: 183089 - RNA, 32 nt, Homo Sapiens
ugaggucagcaguucaagacuagccuggccaa

SEQ ID NO: 183090 - RNA, 32 nt, Homo Sapiens
cccaucugcauuugauuuuuuauuauuuuaug

SEQ ID NO: 183091 - RNA, 32 nt, Homo Sapiens
aauauaagacugacuuuuauccugcuucauaa

SEQ ID NO: 183092 - RNA, 32 nt, Homo Sapiens
aggcuagaguaggauuguuaaauacuacuguu

SEQ ID NO: 183093 - RNA, 32 nt, Homo Sapiens
guccccgacgugcuccgccacuaucgcgccau

SEQ ID NO: 183094 - RNA, 30 nt, Homo Sapiens
guccugccacuugcuggaucuugguugcag

SEQ ID NO: 183095 - RNA, 32 nt, Homo Sapiens
gcgucauaccugcuuguauuccugcuucuggu

SEQ ID NO: 183096 - RNA, 32 nt, Homo Sapiens
guagcagcugacgcguggguccaccaugaacu

SEQ ID NO: 183097 - RNA, 32 nt, Homo Sapiens
ucuggaaauuccuaauguccugaguauuaaua

SEQ ID NO: 183098 - RNA, 32 nt, Homo Sapiens
cucugggaaccgcuccuuccgcuccgcccgcc

SEQ ID NO: 183099 - RNA, 32 nt, Homo Sapiens
uucaguccugcugccugaaucaucucacacca

SEQ ID NO: 183100 - RNA, 32 nt, Homo Sapiens
ucuggggaaaacaguuguggaauucuuacuuc

SEQ ID NO: 183101 - RNA, 32 nt, Homo Sapiens
caagcucugacauuuuugguuuucauagucgu

SEQ ID NO: 183102 - RNA, 32 nt, Homo Sapiens
cuguucagccuccuaaagagggacaaacucug

SEQ ID NO: 183103 - RNA, 32 nt, Homo Sapiens
uguucuuaaucuuuuuuccuuaccacucuuca

SEQ ID NO: 183104 - RNA, 32 nt, Homo Sapiens
ucuguaaagcucuguuaaaggcacaugagcug

SEQ ID NO: 183105 - RNA, 32 nt, Homo Sapiens
cagggacauggcugauggcugcggaugcugga

SEQ ID NO: 183106 - RNA, 32 nt, Homo Sapiens
uguugugccucacuuaaaauggugcuuuuuuc

SEQ ID NO: 183107 - RNA, 32 nt, Homo Sapiens
gcaccgcagcuagugggccuggcugggggugc

SEQ ID NO: 183108 - RNA, 32 nt, Homo Sapiens
cuaaucccucaugccaggggccaggcacuugc

SEQ ID NO: 183109 - RNA, 32 nt, Homo Sapiens
agcugcuucugcgcuguuguuguccguauuua

SEQ ID NO: 183110 - RNA, 32 nt, Homo Sapiens
aacaaggggugcuccaggaagaaagagucccc

SEQ ID NO: 183111 - RNA, 32 nt, Homo Sapiens
ugacuccgugugugcccggcccucgucucacc

SEQ ID NO: 183112 - RNA, 32 nt, Homo Sapiens
aauggguaagcagagucugaauuuauacuaau

SEQ ID NO: 183113 - RNA, 32 nt, Homo Sapiens
agagucauauauauuuuuauaaucuauggauu

SEQ ID NO: 183114 - RNA, 32 nt, Homo Sapiens
ccugaggguggccaggaucuggagcugcaucu

SEQ ID NO: 183115 - RNA, 32 nt, Homo Sapiens
uuagcauguuauacauuugaucuuacagcauc

SEQ ID NO: 183116 - RNA, 32 nt, Homo Sapiens
uuuuggugguggcuuuugggcaaggacagguc

SEQ ID NO: 183117 - RNA, 32 nt, Homo Sapiens
cccgcucugcccgccgcuggguccgaccgcgc

SEQ ID NO: 183118 - RNA, 30 nt, Homo Sapiens
uuuuguucccuagugggggaaagcccuuag

SEQ ID NO: 183119 - RNA, 32 nt, Homo Sapiens
gucuucccacuuuaagcuuguuuucaguacaa

SEQ ID NO: 183120 - RNA, 32 nt, Homo Sapiens
uuucuagaauuacaauaaauggcauuguauau

SEQ ID NO: 183121 - RNA, 32 nt, Homo Sapiens
ccgcuccagcaauaauggcauuaauccauuca

SEQ ID NO: 183122 - RNA, 32 nt, Homo Sapiens
guguaaaaguuccaugagagcagagguuuugu

SEQ ID NO: 183123 - RNA, 32 nt, Homo Sapiens
uugccaacaaugagacacgaagcgcccaugca

SEQ ID NO: 183124 - RNA, 32 nt, Homo Sapiens
uggacaugaaccccaaaguccaguuuuguaac

SEQ ID NO: 183125 - RNA, 32 nt, Homo Sapiens
augagguucauguggacuauggcacucuguag

SEQ ID NO: 183126 - RNA, 32 nt, Homo Sapiens
gaucauauuaaaauugcaaacaaaaucaucuu

SEQ ID NO: 183127 - RNA, 32 nt, Homo Sapiens
ggaggaggaagcaagcgagggggcugguuccu

SEQ ID NO: 183128 - RNA, 32 nt, Homo Sapiens
gucaccaggaggaagacggagcuggcugccca

SEQ ID NO: 183129 - RNA, 32 nt, Homo Sapiens
agucaggcauggugacacgugccuguaguccc

SEQ ID NO: 183130 - RNA, 31 nt, Homo Sapiens
cacuuuacaaagaauauaaaagcuauauuuu

SEQ ID NO: 183131 - RNA, 32 nt, Homo Sapiens
agugggugaugcuuuugcugcugcuuaauccu

SEQ ID NO: 183132 - RNA, 32 nt, Homo Sapiens
ggucauaagcagugguuuuggccauaccguau

SEQ ID NO: 183133 - RNA, 32 nt, Homo Sapiens
cuuucacuccuucgggcugccucccccucccc

SEQ ID NO: 183134 - RNA, 32 nt, Homo Sapiens
guuccuauaugucuuuccuuuuuuguucuucu

SEQ ID NO: 183135 - RNA, 32 nt, Homo Sapiens
uccuguaguagcuagagugccuugaaaaaaug

SEQ ID NO: 183136 - RNA, 32 nt, Homo Sapiens
caacuuugcaaauuauuuauuacuugugcacu

SEQ ID NO: 183137 - RNA, 32 nt, Homo Sapiens
ccacugagcaaaacccaaauucuaggcaccug

SEQ ID NO: 183138 - RNA, 32 nt, Homo Sapiens
ggacaccccgcggaaggauccgguuuguugug

SEQ ID NO: 183139 - RNA, 32 nt, Homo Sapiens
caucucuaccagcagcagcagcagcgagguuc

SEQ ID NO: 183140 - RNA, 32 nt, Homo Sapiens
gccgguucccucucuggugucuguggacccug

SEQ ID NO: 183141 - RNA, 32 nt, Homo Sapiens
aaauacauuuccccuauauaauuccaacagca

SEQ ID NO: 183142 - RNA, 32 nt, Homo Sapiens
auagcaccuuccuuuuucguuuucaguuauca

SEQ ID NO: 183143 - RNA, 32 nt, Homo Sapiens
cggggcugcauggcuuucgcaaagucacuagc

SEQ ID NO: 183144 - RNA, 32 nt, Homo Sapiens
gacccggccccgcuccagauccccccagcucu

SEQ ID NO: 183145 - RNA, 32 nt, Homo Sapiens
auauuuaauccuuaaaaccccuuuaaaugagg

SEQ ID NO: 183146 - RNA, 32 nt, Homo Sapiens
gggccaccaaccccaaagaacugggaugaaag

SEQ ID NO: 183147 - RNA, 32 nt, Homo Sapiens
ugucucuuuuccuuuuucuguauccugugaga

SEQ ID NO: 183148 - RNA, 32 nt, Homo Sapiens
auauuugugggauuuuaguaaggucaguuuga

SEQ ID NO: 183149 - RNA, 32 nt, Homo Sapiens
aagaaaagccagaaacaaaauggcagaauggu

SEQ ID NO: 183150 - RNA, 32 nt, Homo Sapiens
uuuuuuccaaaaaauaugugauuauauauguu

SEQ ID NO: 183151 - RNA, 32 nt, Homo Sapiens
uuuggaaucugaagaauccuauguaaaucauu

SEQ ID NO: 183152 - RNA, 32 nt, Homo Sapiens
gcauugcucggauuuucccauccaucacuccc

SEQ ID NO: 183153 - RNA, 32 nt, Homo Sapiens
auucagcucuuuucagcuuucagaugccacua

SEQ ID NO: 183154 - RNA, 32 nt, Homo Sapiens
ugauacggaaggggggcggggaagugcuggga

SEQ ID NO: 183155 - RNA, 32 nt, Homo Sapiens
ucuuuggcaggcucuuccuucuuauggaugag

SEQ ID NO: 183156 - RNA, 32 nt, Homo Sapiens
ucuauuuguaauagaaacuuccaaggcucuuc

SEQ ID NO: 183157 - RNA, 32 nt, Homo Sapiens
ccaaaggacaacugaggagacugcccagcaca

SEQ ID NO: 183158 - RNA, 32 nt, Homo Sapiens
aaugcuuucucuaaaaucaaagagggagucau

SEQ ID NO: 183159 - RNA, 32 nt, Homo Sapiens
uagccccaccgcgcucccggcgcggccuccgc

SEQ ID NO: 183160 - RNA, 32 nt, Homo Sapiens
acugaagaggaaaauugaaaucucuaaugaag

SEQ ID NO: 183161 - RNA, 32 nt, Homo Sapiens
gaccgcuucugagcuccugcugccgcauuuag

SEQ ID NO: 183162 - RNA, 32 nt, Homo Sapiens
ccuccuucuagucugucaggaaugggaauguu

SEQ ID NO: 183163 - RNA, 32 nt, Homo Sapiens
gcgccuccgcccgccagcggcgcuggggaagg

SEQ ID NO: 183164 - RNA, 32 nt, Homo Sapiens
gucaguuauuagauuuaaaucaccuucugaaa

SEQ ID NO: 183165 - RNA, 32 nt, Homo Sapiens
ugcuguucucucccuuucuucaugcccuguug

SEQ ID NO: 183166 - RNA, 32 nt, Homo Sapiens
caaggucaggcccgacuuccccggcugaggcc

SEQ ID NO: 183167 - RNA, 32 nt, Homo Sapiens
acacugccauccaagccgcgggcggccgugga

SEQ ID NO: 183168 - RNA, 32 nt, Homo Sapiens
cauuuuuaaguacauuugcaugugggcaagaa

SEQ ID NO: 183169 - RNA, 32 nt, Homo Sapiens
agucacucccuaucuuccccuccaccuguccg

SEQ ID NO: 183170 - RNA, 32 nt, Homo Sapiens
gggagaaauuuucucuggacccaguuaugcuu

SEQ ID NO: 183171 - RNA, 32 nt, Homo Sapiens
ggaaccaaggccaccucugugccgggaaagac

SEQ ID NO: 183172 - RNA, 32 nt, Homo Sapiens
uguguuuauuuuuucauauguacucaaaggug

SEQ ID NO: 183173 - RNA, 32 nt, Homo Sapiens
aaggcacuugguuuuucuguuuuauauacuaa

SEQ ID NO: 183174 - RNA, 32 nt, Homo Sapiens
cugagcccccugccuuggcuccagguugguag

SEQ ID NO: 183175 - RNA, 32 nt, Homo Sapiens
ccucgggggaucuggaaacaguuuaggccaau

SEQ ID NO: 183176 - RNA, 31 nt, Homo Sapiens
augaugugaaacacuuugccuccuguguacu

SEQ ID NO: 183177 - RNA, 32 nt, Homo Sapiens
gccgggaaaugguguguguucucauuuuaccc

SEQ ID NO: 183178 - RNA, 32 nt, Homo Sapiens
ucucugaagcuguguuuagugaaaugagcuca

SEQ ID NO: 183179 - RNA, 32 nt, Homo Sapiens
ccuccccaaaaggcuuuuggauuugugcauag

SEQ ID NO: 183180 - RNA, 32 nt, Homo Sapiens
uuuuuguuguuguuuuuauauauugaagcgcc

SEQ ID NO: 183181 - RNA, 32 nt, Homo Sapiens
gggacauagaaaggaaacugcaucagaaacau

SEQ ID NO: 183182 - RNA, 32 nt, Homo Sapiens
cuuguacaagacagcagcugcuaugcacacug

SEQ ID NO: 183183 - RNA, 32 nt, Homo Sapiens
acuaagcuaaaguuaagaagccgacuucauaa

SEQ ID NO: 183184 - RNA, 32 nt, Homo Sapiens
cccacaaucauuugaggccuauugauaauacc

SEQ ID NO: 183185 - RNA, 32 nt, Homo Sapiens
ucucauagcaaccuagaaauuaagaaccugga

SEQ ID NO: 183186 - RNA, 32 nt, Homo Sapiens
aaugaugcccagguugguccccggcccaccgc

SEQ ID NO: 183187 - RNA, 32 nt, Homo Sapiens
agacaggaucccgcucugucucccaggccgga

SEQ ID NO: 183188 - RNA, 32 nt, Homo Sapiens
augugaauuuaugaaguuuacuuuuuauugaa

SEQ ID NO: 183189 - RNA, 32 nt, Homo Sapiens
guagaauuugaagaucaagaugaugaagccag

SEQ ID NO: 183190 - RNA, 32 nt, Homo Sapiens
uuaucauuuuaaaaucuuguauaauuugccac

SEQ ID NO: 183191 - RNA, 32 nt, Homo Sapiens
gcucgccgguccucggcacgccgcccguucgc

SEQ ID NO: 183192 - RNA, 32 nt, Homo Sapiens
ggaguucgagaccaucuuggcuaacaugguga

SEQ ID NO: 183193 - RNA, 32 nt, Homo Sapiens
aaucuuuuaguaacuugucucaucuccacaca

SEQ ID NO: 183194 - RNA, 32 nt, Homo Sapiens
uauguuagcauugagugcuuugaaauauggag

SEQ ID NO: 183195 - RNA, 32 nt, Homo Sapiens
caggcugaggaagcuccagagaagaucauucc

SEQ ID NO: 183196 - RNA, 32 nt, Homo Sapiens
aaccugauucuauaggcaguuacucuguguuc

SEQ ID NO: 183197 - RNA, 32 nt, Homo Sapiens
augacaauuguaucuucaguaaucauggggca

SEQ ID NO: 183198 - RNA, 32 nt, Homo Sapiens
gggcagcuaugucaucaacgggcgcaccaagg

SEQ ID NO: 183199 - RNA, 32 nt, Homo Sapiens
cgcgaggccccggcccagccauggcccccugg

SEQ ID NO: 183200 - RNA, 32 nt, Homo Sapiens
accaagccugaccccacccccaugccagcauu

SEQ ID NO: 183201 - RNA, 32 nt, Homo Sapiens
agacaccagcucugaggccaguuaaucauccc

SEQ ID NO: 183202 - RNA, 32 nt, Homo Sapiens
ccuuguaccggauuauucuacuccugcaauga

SEQ ID NO: 183203 - RNA, 32 nt, Homo Sapiens
ggcuauuuaaccaaaugaggagguuuaaucaa

SEQ ID NO: 183204 - RNA, 32 nt, Homo Sapiens
caagaaaguauuuugugucagucaucagcacu

SEQ ID NO: 183205 - RNA, 32 nt, Homo Sapiens
ucuuuuaacuacucuccugguuauguuggccu

SEQ ID NO: 183206 - RNA, 30 nt, Homo Sapiens
cagaggcgcgcgcccucagugcaugugacg

SEQ ID NO: 183207 - RNA, 32 nt, Homo Sapiens
ugaauaugcauguguuaggaccucuuuuauga

SEQ ID NO: 183208 - RNA, 32 nt, Homo Sapiens
uaccccugaguccccggggucccggccgccag

SEQ ID NO: 183209 - RNA, 32 nt, Homo Sapiens
ggaucuccagagugcgagccugguucgggaca

SEQ ID NO: 183210 - RNA, 32 nt, Homo Sapiens
agcauggaaguuuaaauuuucucuaaaauuaa

SEQ ID NO: 183211 - RNA, 31 nt, Homo Sapiens
ugggucauggagcacuucuugcuggaggugg

SEQ ID NO: 183212 - RNA, 32 nt, Homo Sapiens
aaagaguguguuucgaaccaggcggucggaau

SEQ ID NO: 183213 - RNA, 32 nt, Homo Sapiens
uuuuuccauuuucuuuggcauuuauuuauucg

SEQ ID NO: 183214 - RNA, 32 nt, Homo Sapiens
gccuagguuaacauuuucaggcgucuuagccg

SEQ ID NO: 183215 - RNA, 31 nt, Homo Sapiens
acaagagaaaagguuuuuaacuuagaguagc

SEQ ID NO: 183216 - RNA, 32 nt, Homo Sapiens
uugccugacaacuuuauguguuaugccagaac

SEQ ID NO: 183217 - RNA, 32 nt, Homo Sapiens
uagcuucacaauguuccuuuuuuguauauuac

SEQ ID NO: 183218 - RNA, 32 nt, Homo Sapiens
agcucccugccagccgaggcggggcgaaccuc

SEQ ID NO: 183219 - RNA, 32 nt, Homo Sapiens
gaucuuuuucaaaacuauuuucuuaaacauuu

SEQ ID NO: 183220 - RNA, 32 nt, Homo Sapiens
ugauucuuggcuugccucuccuccaauuccaa

SEQ ID NO: 183221 - RNA, 32 nt, Homo Sapiens
auuucaguucuauuuucuuacucuaucauucu

SEQ ID NO: 183222 - RNA, 32 nt, Homo Sapiens
ggggaaacccgcggaaggcgaggugccuggcc

SEQ ID NO: 183223 - RNA, 32 nt, Homo Sapiens
uuuugcucaaaauuguugaaauuuaugcccuu

SEQ ID NO: 183224 - RNA, 32 nt, Homo Sapiens
agcccacuaguagugcgcugguaaaugcuaug

SEQ ID NO: 183225 - RNA, 32 nt, Homo Sapiens
uaggaaaaacauccugcaauguauaugaaaau

SEQ ID NO: 183226 - RNA, 32 nt, Homo Sapiens
cgccugcugaaacauggugugcaggucaacgg

SEQ ID NO: 183227 - RNA, 32 nt, Homo Sapiens
acauaaacauagugaauguguuaauaucauau

SEQ ID NO: 183228 - RNA, 32 nt, Homo Sapiens
cugcuucagggccacccacgggcccuccccca

SEQ ID NO: 183229 - RNA, 32 nt, Homo Sapiens
ccacuuggccucagucuccccaccuguggggc

SEQ ID NO: 183230 - RNA, 32 nt, Homo Sapiens
ccaagccuuucuguguguagcgcacaucucuc

SEQ ID NO: 183231 - RNA, 32 nt, Homo Sapiens
ccggggcggucgcggcggcugcauccucaggc

SEQ ID NO: 183232 - RNA, 32 nt, Homo Sapiens
ugccgcugugccagguugaaguauuguauuuu

SEQ ID NO: 183233 - RNA, 32 nt, Homo Sapiens
ugcuguuuuucuggucugaccaucgcaacccu

SEQ ID NO: 183234 - RNA, 32 nt, Homo Sapiens
uucauaugaaauuuggggggucacugugugug

SEQ ID NO: 183235 - RNA, 32 nt, Homo Sapiens
gugaguuuugaaugauuuugcaguaaagaccu

SEQ ID NO: 183236 - RNA, 32 nt, Homo Sapiens
uaggagcuuuuggcaguguuuacuuuaccuag

SEQ ID NO: 183237 - RNA, 32 nt, Homo Sapiens
ccacaggugcugcccuugcugcugcuggucgg

SEQ ID NO: 183238 - RNA, 32 nt, Homo Sapiens
ccggggcugcugcggcaggccgauccccagca

SEQ ID NO: 183239 - RNA, 32 nt, Homo Sapiens
cuggaccccacuuuccacaucugugcacucaa

SEQ ID NO: 183240 - RNA, 32 nt, Homo Sapiens
gacacguccauccuuccacuuugucucuuaaa

SEQ ID NO: 183241 - RNA, 32 nt, Homo Sapiens
auaugaugaacucuaaaccuagcugaucugua

SEQ ID NO: 183242 - RNA, 32 nt, Homo Sapiens
uuuuuauaagagaaauuucugcacuuugaaac

SEQ ID NO: 183243 - RNA, 32 nt, Homo Sapiens
aggcggacgaaaacagaacggaagacgacaag

SEQ ID NO: 183244 - RNA, 32 nt, Homo Sapiens
gccccaucuacuaaaacaaaaccuuuguagac

SEQ ID NO: 183245 - RNA, 32 nt, Homo Sapiens
ccggggacuugcgcggccguggcaccgcugga

SEQ ID NO: 183246 - RNA, 32 nt, Homo Sapiens
gcgcgcgugcgcgcgcggggcugacugcggga

SEQ ID NO: 183247 - RNA, 32 nt, Homo Sapiens
gguccuguaaaacuucucugguguuuguugac

SEQ ID NO: 183248 - RNA, 32 nt, Homo Sapiens
aagagcaaaucauauuacauaauuacauuuua

SEQ ID NO: 183249 - RNA, 32 nt, Homo Sapiens
auguguuuuuaaaauucuauuaaugucuauac

SEQ ID NO: 183250 - RNA, 32 nt, Homo Sapiens
cgguugcuacccaggcggccaagcuccagacc

SEQ ID NO: 183251 - RNA, 32 nt, Homo Sapiens
ggauuggcacaaaauaaaauaauuuuauuuua

SEQ ID NO: 183252 - RNA, 32 nt, Homo Sapiens
cucccucccccuccccccuagaaccuggcucc

SEQ ID NO: 183253 - RNA, 32 nt, Homo Sapiens
agaacuuugaggugaaggcagaugaccuggag

SEQ ID NO: 183254 - RNA, 32 nt, Homo Sapiens
gagaacagugaccaggguauugccagaagugg

SEQ ID NO: 183255 - RNA, 32 nt, Homo Sapiens
gugcaauuucuaaauuuguaagaguagguuua

SEQ ID NO: 183256 - RNA, 32 nt, Homo Sapiens
ggguaggcagaguggugaggcuuuugcugaac

SEQ ID NO: 183257 - RNA, 32 nt, Homo Sapiens
ccuggcugcagccugcggggggacgccgagga

SEQ ID NO: 183258 - RNA, 32 nt, Homo Sapiens
gggcucaggaggaggaaggaggacccgugcga

SEQ ID NO: 183259 - RNA, 32 nt, Homo Sapiens
uauuauucaguaguggaaaugagugaacuaca

SEQ ID NO: 183260 - RNA, 32 nt, Homo Sapiens
gagcuuuaaggaucugguaauagacuucaaaa

SEQ ID NO: 183261 - RNA, 32 nt, Homo Sapiens
aaggacacacugguuuuaaucuguagaacugu

SEQ ID NO: 183262 - RNA, 32 nt, Homo Sapiens
ggaguaaucaacaguaacgaaaauagacggcu

SEQ ID NO: 183263 - RNA, 32 nt, Homo Sapiens
caauaaagucaccagcaguauuacuaucacac

SEQ ID NO: 183264 - RNA, 32 nt, Homo Sapiens
aaugcuguuuauagugcaauaaagguguuucg

SEQ ID NO: 183265 - RNA, 32 nt, Homo Sapiens
ggaacacugaaauacagcgguuguguaauuua

SEQ ID NO: 183266 - RNA, 32 nt, Homo Sapiens
cuauucuugauagugagccaguaucucuaagg

SEQ ID NO: 183267 - RNA, 32 nt, Homo Sapiens
aaaaauacagaaaaauuagccaggguuggugc

SEQ ID NO: 183268 - RNA, 32 nt, Homo Sapiens
uuucucugcagaugugcggagcgggaggcggu

SEQ ID NO: 183269 - RNA, 32 nt, Homo Sapiens
agagcauccagagccucuguccugcccacgcu

SEQ ID NO: 183270 - RNA, 32 nt, Homo Sapiens
gaaccccaacucccagccuagggcagcaggga

SEQ ID NO: 183271 - RNA, 32 nt, Homo Sapiens
gcgacuuccggcggcgccgaggcacgcgcgcc

SEQ ID NO: 183272 - RNA, 32 nt, Homo Sapiens
uuguuuauaacaccucuuuuccgugaaucaca

SEQ ID NO: 183273 - RNA, 32 nt, Homo Sapiens
uaauuuucaaggaaagaguaaucauccaucaa

SEQ ID NO: 183274 - RNA, 32 nt, Homo Sapiens
uaaugggaauaaaauguaaguaucaguaguuu

SEQ ID NO: 183275 - RNA, 32 nt, Homo Sapiens
aaacuguuaacagauucuugcucgauaaaaaa

SEQ ID NO: 183276 - RNA, 32 nt, Homo Sapiens
caauauaaaaauaaguuuuuauauaauuauau

SEQ ID NO: 183277 - RNA, 32 nt, Homo Sapiens
uuccggaaacugcccccacagauucuucugcu

SEQ ID NO: 183278 - RNA, 32 nt, Homo Sapiens
ugaacugaagccacccuggagcccuuaauggu

SEQ ID NO: 183279 - RNA, 32 nt, Homo Sapiens
auuucccggaucugguaacauggcaaaagaug

SEQ ID NO: 183280 - RNA, 32 nt, Homo Sapiens
uuucuuagaggagcuucagaauacuaaucauc

SEQ ID NO: 183281 - RNA, 32 nt, Homo Sapiens
gugacucuuggauuuaagugcacuauuauuca

SEQ ID NO: 183282 - RNA, 32 nt, Homo Sapiens
ugccuguaaacccagcacuuugggaggcugaa

SEQ ID NO: 183283 - RNA, 32 nt, Homo Sapiens
gaaaauccgcgggcccgagccacgcgccugug

SEQ ID NO: 183284 - RNA, 32 nt, Homo Sapiens
uuauuugaaaugucuguaagucucuuuccauc

SEQ ID NO: 183285 - RNA, 32 nt, Homo Sapiens
acugcuggucugacuuuauggauugacacugu

SEQ ID NO: 183286 - RNA, 32 nt, Homo Sapiens
uacauuuauuuuuauagcagcaauguucuauu

SEQ ID NO: 183287 - RNA, 32 nt, Homo Sapiens
cccucauccggugugagagcgcugcuuccgcu

SEQ ID NO: 183288 - RNA, 32 nt, Homo Sapiens
gauuugugggcagccagagggagucugacuga

SEQ ID NO: 183289 - RNA, 32 nt, Homo Sapiens
uuaccuagcuucauaugaaaaugucuuaaauu

SEQ ID NO: 183290 - RNA, 32 nt, Homo Sapiens
agugugcgaaucaaaccugaccaagcggcuca

SEQ ID NO: 183291 - RNA, 32 nt, Homo Sapiens
aguagggagaugucugugaagaauuauaacug

SEQ ID NO: 183292 - RNA, 32 nt, Homo Sapiens
cauccauaauaacugugugaaacacauuucau

SEQ ID NO: 183293 - RNA, 32 nt, Homo Sapiens
gagaacuacaguuuuucuuuugaauuuaguau

SEQ ID NO: 183294 - RNA, 32 nt, Homo Sapiens
gucaccgcuggugcguggcggcguggagcgcg

SEQ ID NO: 183295 - RNA, 32 nt, Homo Sapiens
acgugacccaccccccagggcagguaucaggg

SEQ ID NO: 183296 - RNA, 32 nt, Homo Sapiens
uuaucugcgccugcgccgcgcgggauucgcgg

SEQ ID NO: 183297 - RNA, 32 nt, Homo Sapiens
cuugcaaaugaaaagaaaacucaaaaggugcc

SEQ ID NO: 183298 - RNA, 32 nt, Homo Sapiens
ugagugaagaccccguugugggacaucuaggc

SEQ ID NO: 183299 - RNA, 32 nt, Homo Sapiens
aagagagcggcuuugaagauuaucgcggaaca

SEQ ID NO: 183300 - RNA, 32 nt, Homo Sapiens
uccuagaaaucagguuucuacugcuaggcaau

SEQ ID NO: 183301 - RNA, 32 nt, Homo Sapiens
ccugugaacagguuuuucggggguauguaaac

SEQ ID NO: 183302 - RNA, 32 nt, Homo Sapiens
gaaugauuuuuagggagagucuugcagggcuc

SEQ ID NO: 183303 - RNA, 32 nt, Homo Sapiens
caucuauucaagcacucagggcgaaggggggu

SEQ ID NO: 183304 - RNA, 32 nt, Homo Sapiens
cuuguguuggaaacgcacacacugaagguggc

SEQ ID NO: 183305 - RNA, 32 nt, Homo Sapiens
acggcugaaccccuggccccagagcccccagc

SEQ ID NO: 183306 - RNA, 32 nt, Homo Sapiens
gaagcaauagaauucuaacauaaggccaagaa

SEQ ID NO: 183307 - RNA, 32 nt, Homo Sapiens
acccauguuuugcaugcaaugacucaugcaug

SEQ ID NO: 183308 - RNA, 32 nt, Homo Sapiens
uggugcugauggugcugggaccuauauguaua

SEQ ID NO: 183309 - RNA, 32 nt, Homo Sapiens
uaggaaaaugaaauuauuuuuucauuguguuu

SEQ ID NO: 183310 - RNA, 32 nt, Homo Sapiens
augagauacuauucuuccaagguggagaaagu

SEQ ID NO: 183311 - RNA, 32 nt, Homo Sapiens
caauaaauuuaugugaagagaaugagaauuua

SEQ ID NO: 183312 - RNA, 32 nt, Homo Sapiens
gauccaccucauuugcagauguccaaacuuaa

SEQ ID NO: 183313 - RNA, 32 nt, Homo Sapiens
uuacaacuucuuaucaucugcauauuuauguc

SEQ ID NO: 183314 - RNA, 32 nt, Homo Sapiens
cuuuuuagaacaaaucuggauaaaugugcaaa

SEQ ID NO: 183315 - RNA, 32 nt, Homo Sapiens
uggcaccuggaaaugcaaggugcggcucuauc

SEQ ID NO: 183316 - RNA, 32 nt, Homo Sapiens
augucacaaacacaaucuauucuacaugagga

SEQ ID NO: 183317 - RNA, 32 nt, Homo Sapiens
auuccacuaauaguaggaagcaagagacuuaa

SEQ ID NO: 183318 - RNA, 32 nt, Homo Sapiens
agacuacaguguucuuuggaugcucaugaaau

SEQ ID NO: 183319 - RNA, 32 nt, Homo Sapiens
cuuaaugauuucuguuaucaagaaguauuuau

SEQ ID NO: 183320 - RNA, 32 nt, Homo Sapiens
caacucaauuguuuuaagaaaacucuauuucu

SEQ ID NO: 183321 - RNA, 32 nt, Homo Sapiens
acaucucugaagaguuuuuaaucuucagcuca

SEQ ID NO: 183322 - RNA, 32 nt, Homo Sapiens
gggccgccgagcggggccaugcagccaacgcu

SEQ ID NO: 183323 - RNA, 32 nt, Homo Sapiens
guuucguauucuguauucagcacauguuaucu

SEQ ID NO: 183324 - RNA, 32 nt, Homo Sapiens
ccuaaaguaugucauugggcuuuuucauccau

SEQ ID NO: 183325 - RNA, 32 nt, Homo Sapiens
acacccagcucuugucuguaaguggccucugc

SEQ ID NO: 183326 - RNA, 32 nt, Homo Sapiens
uauuucuuucccuauuucccuugccugcuaau

SEQ ID NO: 183327 - RNA, 32 nt, Homo Sapiens
acaacaacaacaacaauaauaaagaugugaaa

SEQ ID NO: 183328 - RNA, 32 nt, Homo Sapiens
gucuuuauuuuugagacuauuuucauacaguu

SEQ ID NO: 183329 - RNA, 32 nt, Homo Sapiens
aaaauaagugugugugagacacuugcguuuga

SEQ ID NO: 183330 - RNA, 32 nt, Homo Sapiens
aggacuucagaaugccgugggcuccagcgaag

SEQ ID NO: 183331 - RNA, 32 nt, Homo Sapiens
ggaagcugccagcugcccggcuggcaauggug

SEQ ID NO: 183332 - RNA, 32 nt, Homo Sapiens
cugguuauaccuucaauugaucaauaacuuca

SEQ ID NO: 183333 - RNA, 32 nt, Homo Sapiens
ccugcccgucagcaugagauacccagugggaa

SEQ ID NO: 183334 - RNA, 32 nt, Homo Sapiens
aaucucagcucuuuauccauugcuuucacuua

SEQ ID NO: 183335 - RNA, 32 nt, Homo Sapiens
ggaagauggcaguggcuguaggcuggguugcc

SEQ ID NO: 183336 - RNA, 32 nt, Homo Sapiens
gucugcccgugagccucagcagauauggcucc

SEQ ID NO: 183337 - RNA, 32 nt, Homo Sapiens
aagcagaggugauucauggcucugugaauuug

SEQ ID NO: 183338 - RNA, 32 nt, Homo Sapiens
uguuauuauuuuuagucugugcguguggacac

SEQ ID NO: 183339 - RNA, 32 nt, Homo Sapiens
cccaccaagcccuggccccaccucugagcacc

SEQ ID NO: 183340 - RNA, 32 nt, Homo Sapiens
ucugagguaaccucauuaucaguccaaagggc

SEQ ID NO: 183341 - RNA, 32 nt, Homo Sapiens
cgcaugggcugagguguagcugauuggcugcc

SEQ ID NO: 183342 - RNA, 32 nt, Homo Sapiens
gagguggugccaggagccugcccgcuuaccuc

SEQ ID NO: 183343 - RNA, 32 nt, Homo Sapiens
agaaagaggguggggucccgggggcggggcug

SEQ ID NO: 183344 - RNA, 32 nt, Homo Sapiens
ccuuggaggagauaaaccaauuuuaugucuau

SEQ ID NO: 183345 - RNA, 32 nt, Homo Sapiens
aacuccgacgccaagcguuacacuggaaacua

SEQ ID NO: 183346 - RNA, 32 nt, Homo Sapiens
ccuuucugccagcaguucugguucucaagaaa

SEQ ID NO: 183347 - RNA, 32 nt, Homo Sapiens
ugcauaugacaaacaguauuugugaaacugug

SEQ ID NO: 183348 - RNA, 32 nt, Homo Sapiens
ggcgguggggaucgaaagaaaggagggcaugu

SEQ ID NO: 183349 - RNA, 32 nt, Homo Sapiens
uccuugaugagcaugccagcuaugugguaggg

SEQ ID NO: 183350 - RNA, 32 nt, Homo Sapiens
acccaccugccucugcuugcuuucucacccau

SEQ ID NO: 183351 - RNA, 32 nt, Homo Sapiens
gccaugguuggcucuagaugcugcuggcuaua

SEQ ID NO: 183352 - RNA, 32 nt, Homo Sapiens
ucccgacccucccaccccuccuccccgcgcca

SEQ ID NO: 183353 - RNA, 32 nt, Homo Sapiens
caaggaaugaacugauuggcaccaagcaagaa

SEQ ID NO: 183354 - RNA, 32 nt, Homo Sapiens
auuugaguuauuuuaauuaucuuuucuauugu

SEQ ID NO: 183355 - RNA, 32 nt, Homo Sapiens
cacaaguguuuguaaacugggcugcuauaagg

SEQ ID NO: 183356 - RNA, 32 nt, Homo Sapiens
uucuuuuccaacaaggagaacuuaauggcaug

SEQ ID NO: 183357 - RNA, 30 nt, Homo Sapiens
ccgcuccuugucggcggcguugcgggaggc

SEQ ID NO: 183358 - RNA, 32 nt, Homo Sapiens
uuuuguguaugcuuggaaauuuucauaauuaa

SEQ ID NO: 183359 - RNA, 32 nt, Homo Sapiens
acagcaugcugcuuugccaaguugcugucacu

SEQ ID NO: 183360 - RNA, 32 nt, Homo Sapiens
acccuaaauaaucaaucggccuugugauaucc

SEQ ID NO: 183361 - RNA, 32 nt, Homo Sapiens
uuuuuucagguggggucucgcucugucaccua

SEQ ID NO: 183362 - RNA, 32 nt, Homo Sapiens
cgagcuaagaucuggacagggaaccugaugcc

SEQ ID NO: 183363 - RNA, 32 nt, Homo Sapiens
aaucauauagugucugucuucuuucacuagua

SEQ ID NO: 183364 - RNA, 32 nt, Homo Sapiens
aaggucccacccagugaaguaacaagccgugg

SEQ ID NO: 183365 - RNA, 32 nt, Homo Sapiens
ccucccugucgccacagagacccggcaaugca

SEQ ID NO: 183366 - RNA, 32 nt, Homo Sapiens
uauuuauuuggcacuccuggaacaaguauauc

SEQ ID NO: 183367 - RNA, 32 nt, Homo Sapiens
aaagacauacccaugacugggcaauuuacaaa

SEQ ID NO: 183368 - RNA, 32 nt, Homo Sapiens
ucgcaggacuuccagcaagucggaggcagggg

SEQ ID NO: 183369 - RNA, 32 nt, Homo Sapiens
aucuaaaauuuguuauucaaauuaaauggcug

SEQ ID NO: 183370 - RNA, 32 nt, Homo Sapiens
aggggcgggcagccgcgccgccgcggcacuuu

SEQ ID NO: 183371 - RNA, 32 nt, Homo Sapiens
aaauuaccuaaguacacacaaacaaaaacaug

SEQ ID NO: 183372 - RNA, 32 nt, Homo Sapiens
uucuaacagacauuuagguuaauuguaaagau

SEQ ID NO: 183373 - RNA, 32 nt, Homo Sapiens
ggaagcuuuguaccucuuuugcaggauccggg

SEQ ID NO: 183374 - RNA, 32 nt, Homo Sapiens
ucauaaaaauuaaccuuuuguauuaaaauuug

SEQ ID NO: 183375 - RNA, 32 nt, Homo Sapiens
ggaauugucaucuuccucaggcaaauaguuuu

SEQ ID NO: 183376 - RNA, 32 nt, Homo Sapiens
uuucuccuuccuuuagugauccugcuugcccu

SEQ ID NO: 183377 - RNA, 29 nt, Homo Sapiens
cugguuaggaaggugggccgcuacccuuc

SEQ ID NO: 183378 - RNA, 32 nt, Homo Sapiens
augcacauaccuaugggauuuuacacaccacc

SEQ ID NO: 183379 - RNA, 31 nt, Homo Sapiens
ugguugccagccuggaccugagugggcccau

SEQ ID NO: 183380 - RNA, 32 nt, Homo Sapiens
ggggcgccgggcggguggacgugaggaccagc

SEQ ID NO: 183381 - RNA, 32 nt, Homo Sapiens
aauuuaaaaguuguauuuuguuguagaaugcu

SEQ ID NO: 183382 - RNA, 32 nt, Homo Sapiens
aaccguccccuggccugcccuccccggugggg

SEQ ID NO: 183383 - RNA, 32 nt, Homo Sapiens
acguuggauccuccuuuucuguccccugcugu

SEQ ID NO: 183384 - RNA, 32 nt, Homo Sapiens
auaauuauuuagacauaaugcaaaugugggcu

SEQ ID NO: 183385 - RNA, 32 nt, Homo Sapiens
uaucccgcggguggaggccgggguggcgccgg

SEQ ID NO: 183386 - RNA, 32 nt, Homo Sapiens
gcagccaugaagaacgaaaguuuuagaaaagg

SEQ ID NO: 183387 - RNA, 32 nt, Homo Sapiens
ccggcgccacuacuccccuuccuaaggccgcc

SEQ ID NO: 183388 - RNA, 32 nt, Homo Sapiens
uaccagacgcuggagcuggagaaggaguuuca

SEQ ID NO: 183389 - RNA, 32 nt, Homo Sapiens
uguaacuuuccacucuuccuguagucccgagg

SEQ ID NO: 183390 - RNA, 32 nt, Homo Sapiens
ugcuuuacggaggggauugugucgugugagau

SEQ ID NO: 183391 - RNA, 32 nt, Homo Sapiens
uaaacuuagcaucuuaauggaagaaaaaugag

SEQ ID NO: 183392 - RNA, 32 nt, Homo Sapiens
gaggcgggcgcgggucucggaggcggucgccu

SEQ ID NO: 183393 - RNA, 32 nt, Homo Sapiens
cuugccuggaaagaggcagucuucuuagcaug

SEQ ID NO: 183394 - RNA, 32 nt, Homo Sapiens
guagccucauuucuuacagacggggaaacuga

SEQ ID NO: 183395 - RNA, 32 nt, Homo Sapiens
cuuacuuuuuucccuuuuccuuuuuuggggag

SEQ ID NO: 183396 - RNA, 32 nt, Homo Sapiens
agugcccucuacugggaauccuccucaggcag

SEQ ID NO: 183397 - RNA, 32 nt, Homo Sapiens
gcgccucugggaagaagaccacgggggaagca

SEQ ID NO: 183398 - RNA, 32 nt, Homo Sapiens
gguggcgagaugggcuugagggggcucagagc

SEQ ID NO: 183399 - RNA, 30 nt, Homo Sapiens
ugaguagagaagcuuaagauaauuucugag

SEQ ID NO: 183400 - RNA, 32 nt, Homo Sapiens
aagacgcccgcccgccgcccagcccucgccuc

SEQ ID NO: 183401 - RNA, 32 nt, Homo Sapiens
cauuucccacaguaugacaaguuuauaugggc

SEQ ID NO: 183402 - RNA, 32 nt, Homo Sapiens
uuuuugguaauauuuuugugaucuuugauggu

SEQ ID NO: 183403 - RNA, 32 nt, Homo Sapiens
cauuaaauaaggaaacuguaugaaugucugcu

SEQ ID NO: 183404 - RNA, 32 nt, Homo Sapiens
aaggcggcgggggugguggcccgggccgcguu

SEQ ID NO: 183405 - RNA, 32 nt, Homo Sapiens
uuuucuucauugauaaguggaggagaaaugca

SEQ ID NO: 183406 - RNA, 32 nt, Homo Sapiens
ccagccuccugccugccucuccaaggacucca

SEQ ID NO: 183407 - RNA, 32 nt, Homo Sapiens
cuaguaauuuucaucauuuaagagugauauuu

SEQ ID NO: 183408 - RNA, 32 nt, Homo Sapiens
uauauuuuuugagauaucgucuuucuguguug

SEQ ID NO: 183409 - RNA, 32 nt, Homo Sapiens
cauuuauaugugguauuaaaaauuaaugaaau

SEQ ID NO: 183410 - RNA, 32 nt, Homo Sapiens
ggugcagacaucuggaggagagagucggagag

SEQ ID NO: 183411 - RNA, 32 nt, Homo Sapiens
cccuggucgcugggcuucaccccaccugggaa

SEQ ID NO: 183412 - RNA, 32 nt, Homo Sapiens
accugcaccccucccugcaagggguucagagc

SEQ ID NO: 183413 - RNA, 32 nt, Homo Sapiens
uccaaggcggguggggaccgcccucccgacga

SEQ ID NO: 183414 - RNA, 32 nt, Homo Sapiens
uugauuaaggauauaaauuugucauuuauuau

SEQ ID NO: 183415 - RNA, 32 nt, Homo Sapiens
augaucuagugcaauuaaaaaauauauauaca

SEQ ID NO: 183416 - RNA, 32 nt, Homo Sapiens
ggaaguuaguuuuuaaucucuccaccuuccaa

SEQ ID NO: 183417 - RNA, 32 nt, Homo Sapiens
ggauccacguucagaagcugacucugcaggca

SEQ ID NO: 183418 - RNA, 32 nt, Homo Sapiens
cugcaggacacugagggcuuggcugccugcca

SEQ ID NO: 183419 - RNA, 32 nt, Homo Sapiens
ccaaggugaggcacugauguggcaggcugcuu

SEQ ID NO: 183420 - RNA, 32 nt, Homo Sapiens
uaaagacaggagacaaaagagcagugguaaga

SEQ ID NO: 183421 - RNA, 32 nt, Homo Sapiens
acaaaaaacacuuuggauucagguucuccaca

SEQ ID NO: 183422 - RNA, 32 nt, Homo Sapiens
uaagaagaaugagaaggccaauaguuuuagau

SEQ ID NO: 183423 - RNA, 31 nt, Homo Sapiens
guguagcaauaaaaaucacaugucaguucag

SEQ ID NO: 183424 - RNA, 32 nt, Homo Sapiens
cgggcccgucuuccucgcgucuccucggggag

SEQ ID NO: 183425 - RNA, 32 nt, Homo Sapiens
acaauuaugcuuaauauaaagucuauuaagug

SEQ ID NO: 183426 - RNA, 32 nt, Homo Sapiens
aaacaagaaccucaguucaggggaaacacagc

SEQ ID NO: 183427 - RNA, 32 nt, Homo Sapiens
gaaagcugcuaccaccucugugcccccccggc

SEQ ID NO: 183428 - RNA, 32 nt, Homo Sapiens
ccaccucacacgcccucuucccuggccccaca

SEQ ID NO: 183429 - RNA, 32 nt, Homo Sapiens
cucauucagucguauuuuuuuauccauagaaa

SEQ ID NO: 183430 - RNA, 32 nt, Homo Sapiens
uuuuauaaauuaauauuuuauuguuggauccu

SEQ ID NO: 183431 - RNA, 32 nt, Homo Sapiens
aagacuggcaguucuagauuccucuauauggg

SEQ ID NO: 183432 - RNA, 32 nt, Homo Sapiens
ugcuugucaaaauuauuucuggguugauucaa

SEQ ID NO: 183433 - RNA, 32 nt, Homo Sapiens
gaaaagacacaucacacaaucaccuugcugcu

SEQ ID NO: 183434 - RNA, 32 nt, Homo Sapiens
ucguuucgcucuugugaaacugaagacaauuu

SEQ ID NO: 183435 - RNA, 32 nt, Homo Sapiens
aguuaaccagaaaaauagaaauuaaaaacaaa

SEQ ID NO: 183436 - RNA, 32 nt, Homo Sapiens
aagcauuaaagcaaauguauggcugccuuuua

SEQ ID NO: 183437 - RNA, 32 nt, Homo Sapiens
ugcagaaguuaaaccuguguuguauuuuuucu

SEQ ID NO: 183438 - RNA, 32 nt, Homo Sapiens
cucugcgcugagcacagcggcaccaggcugag

SEQ ID NO: 183439 - RNA, 32 nt, Homo Sapiens
uuguaaguagcacauugcaacaacaaucaugc

SEQ ID NO: 183440 - RNA, 32 nt, Homo Sapiens
ggcccugcccacugugcucaccccgcuggccc

SEQ ID NO: 183441 - RNA, 32 nt, Homo Sapiens
gucucgucuccuguguguaugugugugagugg

SEQ ID NO: 183442 - RNA, 32 nt, Homo Sapiens
ucgucucgcugcccucccgcgccugcaacggu

SEQ ID NO: 183443 - RNA, 32 nt, Homo Sapiens
uuaaagaaagauguugcuuacuauggugucaa

SEQ ID NO: 183444 - RNA, 32 nt, Homo Sapiens
cuguggccgggaggcguucggcagcugugcuu

SEQ ID NO: 183445 - RNA, 32 nt, Homo Sapiens
accuauuguaaaaaugauuaaauauuguaaua

SEQ ID NO: 183446 - RNA, 32 nt, Homo Sapiens
aggaaggccugcgagaaggacaguagagaugc

SEQ ID NO: 183447 - RNA, 32 nt, Homo Sapiens
gggccgggcccugugugcugcggccgccaucc

SEQ ID NO: 183448 - RNA, 32 nt, Homo Sapiens
ucccuucccuccccguuguccuguccccacag

SEQ ID NO: 183449 - RNA, 32 nt, Homo Sapiens
ugcccccaucccucccucuccccuuuuggagu

SEQ ID NO: 183450 - RNA, 32 nt, Homo Sapiens
gggcagagccacccaucucuccccucccuaug

SEQ ID NO: 183451 - RNA, 32 nt, Homo Sapiens
gggggcugcucuucccucccccgccauagcua

SEQ ID NO: 183452 - RNA, 32 nt, Homo Sapiens
aaaaaacuggagaaacaaauauccugccaccu

SEQ ID NO: 183453 - RNA, 32 nt, Homo Sapiens
gaaccauccccacuaacagacauuaaauuauu

SEQ ID NO: 183454 - RNA, 32 nt, Homo Sapiens
uaaggauguacaaaaguaugucugcaucgaug

SEQ ID NO: 183455 - RNA, 32 nt, Homo Sapiens
caguguggaacaccuucccaaucuuaguucag

SEQ ID NO: 183456 - RNA, 32 nt, Homo Sapiens
uagaaccaagucuacuuggagaaaagaaccaa

SEQ ID NO: 183457 - RNA, 32 nt, Homo Sapiens
cgcccugcucagcgcguccucccgcggcggcc

SEQ ID NO: 183458 - RNA, 32 nt, Homo Sapiens
uccugauucuccuuauaugaccucaaacugac

SEQ ID NO: 183459 - RNA, 32 nt, Homo Sapiens
guccacgcaccucgcaggcaguacguuuaccu

SEQ ID NO: 183460 - RNA, 32 nt, Homo Sapiens
gcgcgcgccucccgggcggauuccagccccga

SEQ ID NO: 183461 - RNA, 32 nt, Homo Sapiens
aauuuaacagcuggaaacuuggacuagagcuu

SEQ ID NO: 183462 - RNA, 32 nt, Homo Sapiens
gcaucgcccgucugaagcucuuugccucugaa

SEQ ID NO: 183463 - RNA, 32 nt, Homo Sapiens
uuugcagcuggagcgcagggcugcuggagacu

SEQ ID NO: 183464 - RNA, 32 nt, Homo Sapiens
agccgagauugugccauugcacuccaaccugg

SEQ ID NO: 183465 - RNA, 32 nt, Homo Sapiens
ucccggucuguccccgcccacucggugcugcc

SEQ ID NO: 183466 - RNA, 32 nt, Homo Sapiens
gaaaauucuaaagagaaaauauuuuaaaagau

SEQ ID NO: 183467 - RNA, 32 nt, Homo Sapiens
uguuuccgugcagccuuucuaucagacaauuu

SEQ ID NO: 183468 - RNA, 32 nt, Homo Sapiens
ugguacuccucccagggagcucucaggacagc

SEQ ID NO: 183469 - RNA, 32 nt, Homo Sapiens
ccucagggaagacaguaaucaugccuuuucuu

SEQ ID NO: 183470 - RNA, 32 nt, Homo Sapiens
gugucagaccucugagcccaagcaaagccauc

SEQ ID NO: 183471 - RNA, 32 nt, Homo Sapiens
aaucauuauuccucaugcaucauuugccauuu

SEQ ID NO: 183472 - RNA, 32 nt, Homo Sapiens
guuaccgccucccggccagcgccaucucccgc

SEQ ID NO: 183473 - RNA, 32 nt, Homo Sapiens
aguagggacauguuggccaggcugguggugag

SEQ ID NO: 183474 - RNA, 32 nt, Homo Sapiens
cucaguugcauucuuuuccuuuuucuuccugu

SEQ ID NO: 183475 - RNA, 32 nt, Homo Sapiens
cagguguggugguggcucacgccuguaauccc

SEQ ID NO: 183476 - RNA, 32 nt, Homo Sapiens
aacgagcugauggcauuugaucuugccccauu

SEQ ID NO: 183477 - RNA, 32 nt, Homo Sapiens
caaacugugcgguggcucuuguuauggggcca

SEQ ID NO: 183478 - RNA, 32 nt, Homo Sapiens
uccugggggacgggacuccagggguuugacaa

SEQ ID NO: 183479 - RNA, 32 nt, Homo Sapiens
uguacauuguaacuuugaacacuuaugaaaaa

SEQ ID NO: 183480 - RNA, 32 nt, Homo Sapiens
cagucccagaaccuacagauacccugcuacuu

SEQ ID NO: 183481 - RNA, 32 nt, Homo Sapiens
ucugggaagggagaauggcggcgcccgggcug

SEQ ID NO: 183482 - RNA, 32 nt, Homo Sapiens
guggggggugguugaggggggaggcagcacag

SEQ ID NO: 183483 - RNA, 32 nt, Homo Sapiens
acuggaaauaauaaacuugaucuuauacaaau

SEQ ID NO: 183484 - RNA, 32 nt, Homo Sapiens
ccgcgcucuggccaccccggcgggaaaaggau

SEQ ID NO: 183485 - RNA, 32 nt, Homo Sapiens
gacucaugcauaacccaggaaacauuucagga

SEQ ID NO: 183486 - RNA, 32 nt, Homo Sapiens
ugagaaaacugggucagcccucagaaacugca

SEQ ID NO: 183487 - RNA, 32 nt, Homo Sapiens
cuccauggcuuccuccucccuccugccgacuc

SEQ ID NO: 183488 - RNA, 32 nt, Homo Sapiens
ucaaaccccacuuaugacuucccuuagaggac

SEQ ID NO: 183489 - RNA, 32 nt, Homo Sapiens
auccucauaauuuaucaacaaacacaaaaaag

SEQ ID NO: 183490 - RNA, 32 nt, Homo Sapiens
agugcuuguaaaucuuuuuuuuuuuuuaagaa

SEQ ID NO: 183491 - RNA, 32 nt, Homo Sapiens
ggagguucuguggguagggcuguuugcuggaa

SEQ ID NO: 183492 - RNA, 32 nt, Homo Sapiens
ugaagaagccaaggauuugggguguggggucg

SEQ ID NO: 183493 - RNA, 32 nt, Homo Sapiens
gguggcacuaccccaaacccaucuuuuguucu

SEQ ID NO: 183494 - RNA, 32 nt, Homo Sapiens
uuuuucaaagauuucuuccgcggcagggaucu

SEQ ID NO: 183495 - RNA, 32 nt, Homo Sapiens
ugcugcagaugggggaggagccauaagccucu

SEQ ID NO: 183496 - RNA, 32 nt, Homo Sapiens
auugugagggggacuauuuugcagguccucau

SEQ ID NO: 183497 - RNA, 32 nt, Homo Sapiens
uacuguugacauuaacuuucauaaaugaagca

SEQ ID NO: 183498 - RNA, 32 nt, Homo Sapiens
cucccgcugcuuguucuguccccucccucgga

SEQ ID NO: 183499 - RNA, 32 nt, Homo Sapiens
aagggcgcuuucugccgacgcuccccguggcc

SEQ ID NO: 183500 - RNA, 32 nt, Homo Sapiens
uuguauguauaaagauuauacaaaggugcaau

SEQ ID NO: 183501 - RNA, 32 nt, Homo Sapiens
auugaauauauugguugcucauuuuugaagag

SEQ ID NO: 183502 - RNA, 31 nt, Homo Sapiens
ccuuugaaacaacugaugagagccugaggag

SEQ ID NO: 183503 - RNA, 32 nt, Homo Sapiens
uuuucccugaaguuauguguaugugaguauuc

SEQ ID NO: 183504 - RNA, 32 nt, Homo Sapiens
uuucuaaaugagaaauuguaacucaggaaaua

SEQ ID NO: 183505 - RNA, 32 nt, Homo Sapiens
gcggcggcugcgggcgccgagccccgggauag

SEQ ID NO: 183506 - RNA, 32 nt, Homo Sapiens
ggaagaaaaaaguccaugaaaacuaaaacuuu

SEQ ID NO: 183507 - RNA, 32 nt, Homo Sapiens
cgcagccaccgccgccgccucuccuuagucgc

SEQ ID NO: 183508 - RNA, 32 nt, Homo Sapiens
gggacagccagccagcagcaggaggggggcua

SEQ ID NO: 183509 - RNA, 32 nt, Homo Sapiens
aaccuggcacuaguaggcagguaaagucacaa

SEQ ID NO: 183510 - RNA, 32 nt, Homo Sapiens
ugccugaaggcacaaguaaguccuaggugaag

SEQ ID NO: 183511 - RNA, 32 nt, Homo Sapiens
uggcaauggccacuucccucuuucugaccccc

SEQ ID NO: 183512 - RNA, 32 nt, Homo Sapiens
gacugcuggcuacuauccaugcacacgcuguc

SEQ ID NO: 183513 - RNA, 32 nt, Homo Sapiens
aucauuuuucuuuuuucuuuuuuagaaaacuc

SEQ ID NO: 183514 - RNA, 32 nt, Homo Sapiens
gcugccgccggggccuggggcugacccgucug

SEQ ID NO: 183515 - RNA, 32 nt, Homo Sapiens
ggauaccgcucgccugcucccggagcuguucg

SEQ ID NO: 183516 - RNA, 32 nt, Homo Sapiens
cugaagacagaaaaauugaugaacugaagaag

SEQ ID NO: 183517 - RNA, 32 nt, Homo Sapiens
ugggagccaggcgggcggcugggcugcagcaa

SEQ ID NO: 183518 - RNA, 32 nt, Homo Sapiens
ggcgcggcggguggggaggcagcaggcaccag

SEQ ID NO: 183519 - RNA, 32 nt, Homo Sapiens
agguauagaugcuauuguucugauggcccggc

SEQ ID NO: 183520 - RNA, 32 nt, Homo Sapiens
cugcugucgggccccaggccguuguccugcuc

SEQ ID NO: 183521 - RNA, 32 nt, Homo Sapiens
cacccccgcgcgcccuccgucuauuuuuuccu

SEQ ID NO: 183522 - RNA, 32 nt, Homo Sapiens
gcuuaccugguauuuuauuagaugcagaaaca

SEQ ID NO: 183523 - RNA, 32 nt, Homo Sapiens
cccacuccccccacccccaauaaagccucuuc

SEQ ID NO: 183524 - RNA, 32 nt, Homo Sapiens
acuauaaaaauauaacgggacagcuuuaaacc

SEQ ID NO: 183525 - RNA, 32 nt, Homo Sapiens
caggcugggacucagaguuauuuccuaguauc

SEQ ID NO: 183526 - RNA, 32 nt, Homo Sapiens
ggcccccugccguguauuuccuccccagggag

SEQ ID NO: 183527 - RNA, 29 nt, Homo Sapiens
gcagcucugugucccaggccacagcaaag

SEQ ID NO: 183528 - RNA, 32 nt, Homo Sapiens
ccagagacggccggugggcaggcggggagagc

SEQ ID NO: 183529 - RNA, 32 nt, Homo Sapiens
cuugguauuauuaaaauuguuuuaaaaaggag

SEQ ID NO: 183530 - RNA, 32 nt, Homo Sapiens
ggcaggagggcuuggggacaacuguggggaca

SEQ ID NO: 183531 - RNA, 32 nt, Homo Sapiens
uucagaugucacccuaauccacugcccuaaga

SEQ ID NO: 183532 - RNA, 32 nt, Homo Sapiens
uguauuccuguugcuugagcuacauuaaguag

SEQ ID NO: 183533 - RNA, 32 nt, Homo Sapiens
ugaucaaagacaacggcugggacugcccccgc

SEQ ID NO: 183534 - RNA, 32 nt, Homo Sapiens
gcccuacccccucccauuuugauggugucugu

SEQ ID NO: 183535 - RNA, 31 nt, Homo Sapiens
ucuguagcugcuuucacuccaaggaugaauc

SEQ ID NO: 183536 - RNA, 32 nt, Homo Sapiens
agaauagaucauguggaacauaaacacuaaag

SEQ ID NO: 183537 - RNA, 32 nt, Homo Sapiens
ucugauacuccagcccuguggcaccccagacc

SEQ ID NO: 183538 - RNA, 32 nt, Homo Sapiens
ugucuguccgucugcagcugcgugacugucug

SEQ ID NO: 183539 - RNA, 32 nt, Homo Sapiens
aagacuucaaggaagcuuucaagccaaugaac

SEQ ID NO: 183540 - RNA, 32 nt, Homo Sapiens
agagcaaggaacaacccauuucgucguuaugg

SEQ ID NO: 183541 - RNA, 32 nt, Homo Sapiens
ccagcuccucugggcucuggccucaggcccac

SEQ ID NO: 183542 - RNA, 32 nt, Homo Sapiens
aacuaagguauugccugaaaaacaagugaugu

SEQ ID NO: 183543 - RNA, 32 nt, Homo Sapiens
gggaaggccucccagcaucugggacucgagag

SEQ ID NO: 183544 - RNA, 32 nt, Homo Sapiens
cugacccucacagaaagagagcucugagcagg

SEQ ID NO: 183545 - RNA, 32 nt, Homo Sapiens
cagccacgucugggggcgugcccugagccguc

SEQ ID NO: 183546 - RNA, 32 nt, Homo Sapiens
uccauccauaucuauugaaauuguacaggucc

SEQ ID NO: 183547 - RNA, 32 nt, Homo Sapiens
gcuggcccuggcugggggccugagagacagac

SEQ ID NO: 183548 - RNA, 32 nt, Homo Sapiens
gagggggaggcuggcgcaaacgcagcgggugg

SEQ ID NO: 183549 - RNA, 32 nt, Homo Sapiens
cucucucccugagcuuccuguacccugacccu

SEQ ID NO: 183550 - RNA, 32 nt, Homo Sapiens
guuguuguggguucuauguuuacuuccccuau

SEQ ID NO: 183551 - RNA, 32 nt, Homo Sapiens
aaaugaaagaaguagagagagaauuaaaaacu

SEQ ID NO: 183552 - RNA, 32 nt, Homo Sapiens
ggcugcugcucccgaacggaggggucgggguu

SEQ ID NO: 183553 - RNA, 32 nt, Homo Sapiens
augaaugacaaugaaagcacuguguagaaaca

SEQ ID NO: 183554 - RNA, 32 nt, Homo Sapiens
ccuuccaccugcgcccgaggcagacggugcag

SEQ ID NO: 183555 - RNA, 32 nt, Homo Sapiens
guuuuaaccuuauagacuugggcacugguucc

SEQ ID NO: 183556 - RNA, 32 nt, Homo Sapiens
uguuugugcccccaaccccaaauccauacauc

SEQ ID NO: 183557 - RNA, 32 nt, Homo Sapiens
ggggucgugaucugcuaaucuccaguuauuau

SEQ ID NO: 183558 - RNA, 32 nt, Homo Sapiens
gccgccaucccucggcgccccgcccggaaccg

SEQ ID NO: 183559 - RNA, 32 nt, Homo Sapiens
gacaauguuuacucaaagucuaacauauucaa

SEQ ID NO: 183560 - RNA, 32 nt, Homo Sapiens
cuccucuccuucccauggccccuguuguugaa

SEQ ID NO: 183561 - RNA, 32 nt, Homo Sapiens
agaccccacuccauuuauaggcacaucuccuu

SEQ ID NO: 183562 - RNA, 32 nt, Homo Sapiens
ugcuguaaagaacuuauaucaaagugagaagc

SEQ ID NO: 183563 - RNA, 32 nt, Homo Sapiens
agacaucaguagugacguuugcuggagacuuc

SEQ ID NO: 183564 - RNA, 32 nt, Homo Sapiens
ggcagagugaucguaacuaaaggucagugggg

SEQ ID NO: 183565 - RNA, 32 nt, Homo Sapiens
uauuguuuaugagcuuccauuguaaugauucc

SEQ ID NO: 183566 - RNA, 32 nt, Homo Sapiens
uuguuauccaaauaaaauugaugaguuucugu

SEQ ID NO: 183567 - RNA, 32 nt, Homo Sapiens
aacgccccuugauggaggaucucgugugccua

SEQ ID NO: 183568 - RNA, 32 nt, Homo Sapiens
uagugcaccaaaaggauaaagcaucuguacau

SEQ ID NO: 183569 - RNA, 32 nt, Homo Sapiens
caccaaaagaaguaaaagcaaaaaagaaaacc

SEQ ID NO: 183570 - RNA, 32 nt, Homo Sapiens
uuaguuuagagaaggagagaugucuaacccuu

SEQ ID NO: 183571 - RNA, 32 nt, Homo Sapiens
ucccugaauuucacaagcugguguggcagauc

SEQ ID NO: 183572 - RNA, 32 nt, Homo Sapiens
gaccacuggcccggcgccgaccaccccuguag

SEQ ID NO: 183573 - RNA, 32 nt, Homo Sapiens
gggccuccaagcauaggauuuggaagacagga

SEQ ID NO: 183574 - RNA, 32 nt, Homo Sapiens
uagcaucugcaaauugaacucuaucuaauuug

SEQ ID NO: 183575 - RNA, 32 nt, Homo Sapiens
gaacagccugaagcagaagguggugacccugg

SEQ ID NO: 183576 - RNA, 32 nt, Homo Sapiens
uauuuuauaugauuuucuccauuugucaucgu

SEQ ID NO: 183577 - RNA, 32 nt, Homo Sapiens
cucgucuucagcgcucuguguccucugcuccu

SEQ ID NO: 183578 - RNA, 32 nt, Homo Sapiens
uguuugaaacaaaagaaaauaaugcauugugu

SEQ ID NO: 183579 - RNA, 32 nt, Homo Sapiens
gacgggagcuuggagguagagccccgggagag

SEQ ID NO: 183580 - RNA, 32 nt, Homo Sapiens
cagagagugacguaaguguucuuucuuuauuu

SEQ ID NO: 183581 - RNA, 32 nt, Homo Sapiens
ucuucagauaaauucuaccauuuucauuucac

SEQ ID NO: 183582 - RNA, 32 nt, Homo Sapiens
uugaagcuuccucuccucggggggcacaagcu

SEQ ID NO: 183583 - RNA, 32 nt, Homo Sapiens
agaagguuuuucuguggaggacugcagcauuu

SEQ ID NO: 183584 - RNA, 32 nt, Homo Sapiens
ccuguuaaacauuaguaucuuucaaguguuuu

SEQ ID NO: 183585 - RNA, 32 nt, Homo Sapiens
gagcaggacgugagcgcagagcagagccugga

SEQ ID NO: 183586 - RNA, 32 nt, Homo Sapiens
gagguagucuugcucugucacccaggcuggag

SEQ ID NO: 183587 - RNA, 32 nt, Homo Sapiens
gccuagccacccccaaacuuccaaaucccacu

SEQ ID NO: 183588 - RNA, 32 nt, Homo Sapiens
uacugucgggccccggcccucuggagcuucag

SEQ ID NO: 183589 - RNA, 32 nt, Homo Sapiens
ggugucugauugucuccuccacagcccugagu

SEQ ID NO: 183590 - RNA, 32 nt, Homo Sapiens
ucagcuuauugccuggcauggaccccccugag

SEQ ID NO: 183591 - RNA, 32 nt, Homo Sapiens
uugggaggaaauggggauggggugcuuagagg

SEQ ID NO: 183592 - RNA, 32 nt, Homo Sapiens
ggagcauccaccuccuucucugucucaugugu

SEQ ID NO: 183593 - RNA, 32 nt, Homo Sapiens
ggcagugagagacuucggcggacauggcuccc

SEQ ID NO: 183594 - RNA, 32 nt, Homo Sapiens
ggccuuguagcuagugccugggcacagguguu

SEQ ID NO: 183595 - RNA, 32 nt, Homo Sapiens
cagacuuuugugaacaaaaauuauaacauuua

SEQ ID NO: 183596 - RNA, 32 nt, Homo Sapiens
gcggcggggaccgcgguuugggagaccggccg

SEQ ID NO: 183597 - RNA, 32 nt, Homo Sapiens
ggggcaguggcgggcuccagguugcccaaggc

SEQ ID NO: 183598 - RNA, 28 nt, Homo Sapiens
cugugggggcggcugugggggagguccc

SEQ ID NO: 183599 - RNA, 32 nt, Homo Sapiens
uuuuauauaugaucacaaauauuuuccucugc

SEQ ID NO: 183600 - RNA, 32 nt, Homo Sapiens
aacaacacaaaacaggaaagcuagaagagguu

SEQ ID NO: 183601 - RNA, 32 nt, Homo Sapiens
caguuuacaacuuuuuaccaucgauguacaca

SEQ ID NO: 183602 - RNA, 32 nt, Homo Sapiens
gcaccgcagagguggaucgacgcccaggagga

SEQ ID NO: 183603 - RNA, 32 nt, Homo Sapiens
ucagaggccuggauccacgaaaaacuccgcac

SEQ ID NO: 183604 - RNA, 32 nt, Homo Sapiens
caggugaucugccugccuuggccucccaaagu

SEQ ID NO: 183605 - RNA, 32 nt, Homo Sapiens
uucuuucguuccugcuauugucuuaaaacaua

SEQ ID NO: 183606 - RNA, 32 nt, Homo Sapiens
uauucuagauaauaaugacauuaaccauaaua

SEQ ID NO: 183607 - RNA, 32 nt, Homo Sapiens
ccagaccacaaaugcaggaauuuggcugagga

SEQ ID NO: 183608 - RNA, 32 nt, Homo Sapiens
gccccacugaucaucuuccagcccuuggcccu

SEQ ID NO: 183609 - RNA, 32 nt, Homo Sapiens
uauacuuauauucggggauaugaaggauucaa

SEQ ID NO: 183610 - RNA, 32 nt, Homo Sapiens
aaaagaaaaaggaaacaaaaauauauuaaaaa

SEQ ID NO: 183611 - RNA, 32 nt, Homo Sapiens
uaagguaaucuaagauuaaaauguaaacauuu

SEQ ID NO: 183612 - RNA, 32 nt, Homo Sapiens
cagagauugcgccacuguacuccaguuuggac

SEQ ID NO: 183613 - RNA, 32 nt, Homo Sapiens
cgcuggacuguuggccuuuccggagcgaguuu

SEQ ID NO: 183614 - RNA, 32 nt, Homo Sapiens
cuuuaaucugcuuuuccaagcacuggaugccc

SEQ ID NO: 183615 - RNA, 27 nt, Homo Sapiens
guauaucaacuauucugguuuagauaa

SEQ ID NO: 183616 - RNA, 30 nt, Homo Sapiens
ggcgguagcggcggcggcggugcgagcaug

SEQ ID NO: 183617 - RNA, 32 nt, Homo Sapiens
ugcccgcuuugauacauaaacuuuugcaggaa

SEQ ID NO: 183618 - RNA, 32 nt, Homo Sapiens
cuauuuggaccuguuucuaucucuaaaugaau

SEQ ID NO: 183619 - RNA, 32 nt, Homo Sapiens
uugucggguuuggggcuggaggugaagcccug

SEQ ID NO: 183620 - RNA, 32 nt, Homo Sapiens
gggucaagcugagacacagaggagucagggcc

SEQ ID NO: 183621 - RNA, 32 nt, Homo Sapiens
auuuauuuauaaguagauguuuacauaugccc

SEQ ID NO: 183622 - RNA, 32 nt, Homo Sapiens
ggacaaguuguguuucuguuuuccgccacgga

SEQ ID NO: 183623 - RNA, 32 nt, Homo Sapiens
aaaacuaaaaauuuaauaauaaaaaguggaca

SEQ ID NO: 183624 - RNA, 32 nt, Homo Sapiens
cguccucagguggguucgggcuucaccgccug

SEQ ID NO: 183625 - RNA, 29 nt, Homo Sapiens
uuuuucuuauguaugcugucguaucguag

SEQ ID NO: 183626 - RNA, 32 nt, Homo Sapiens
uuauuuaaaaauuuaaucacauguuucgaggg

SEQ ID NO: 183627 - RNA, 32 nt, Homo Sapiens
ccaaccccagauaugcugcugcugcugcugcu

SEQ ID NO: 183628 - RNA, 32 nt, Homo Sapiens
gaccauuucuucauuuucugaaagcacuuuaa

SEQ ID NO: 183629 - RNA, 32 nt, Homo Sapiens
uggcgcgcaccucugcucccuucuccucacua

SEQ ID NO: 183630 - RNA, 30 nt, Homo Sapiens
uuaccugucugugccucaguuuccucacca

SEQ ID NO: 183631 - RNA, 32 nt, Homo Sapiens
uuguuccgcgcccgcagccccuggacuagcag

SEQ ID NO: 183632 - RNA, 32 nt, Homo Sapiens
acgggcgcuggcaccaccuggcccucgagcuc

SEQ ID NO: 183633 - RNA, 26 nt, Homo Sapiens
cuguuauccuguucuuuuuucaaggc

SEQ ID NO: 183634 - RNA, 32 nt, Homo Sapiens
ggccgcugccacguuggagaagcccgugugag

SEQ ID NO: 183635 - RNA, 32 nt, Homo Sapiens
ccacuccugugcuacccagccccagaggcaga

SEQ ID NO: 183636 - RNA, 32 nt, Homo Sapiens
ccaaggucaggagggcagggcugggguugacu

SEQ ID NO: 183637 - RNA, 32 nt, Homo Sapiens
gcgagcgcuuccccggcgcccagcacgaggug

SEQ ID NO: 183638 - RNA, 32 nt, Homo Sapiens
cugcgcuugucuccagcuuccagcccuccucc

SEQ ID NO: 183639 - RNA, 32 nt, Homo Sapiens
gucacugaaaauauaguaucuguggcaaauug

SEQ ID NO: 183640 - RNA, 32 nt, Homo Sapiens
auugaugaaaaaauugaacaaacaaaugaaaa

SEQ ID NO: 183641 - RNA, 32 nt, Homo Sapiens
auuucccccguccccuucccccuguuacuaau

SEQ ID NO: 183642 - RNA, 32 nt, Homo Sapiens
uuuuuauauacaauuaggauaauuagcauugu

SEQ ID NO: 183643 - RNA, 32 nt, Homo Sapiens
ccauaugaaaauaugcaggucauuagcuuacu

SEQ ID NO: 183644 - RNA, 32 nt, Homo Sapiens
ucugagaggagaacuuccuggagccagugccc

SEQ ID NO: 183645 - RNA, 32 nt, Homo Sapiens
cuacauguccggagcaacacuuugaaaaccaa

SEQ ID NO: 183646 - RNA, 32 nt, Homo Sapiens
uugucuccauucagcuuguggauuguaagugg

SEQ ID NO: 183647 - RNA, 32 nt, Homo Sapiens
gugagacccgcuugugaguccuccacacucgu

SEQ ID NO: 183648 - RNA, 32 nt, Homo Sapiens
gugaauggaugguuuuguuuccuaugggaauu

SEQ ID NO: 183649 - RNA, 32 nt, Homo Sapiens
gugaggaggccggccgagggcugggguuccac

SEQ ID NO: 183650 - RNA, 32 nt, Homo Sapiens
gacucuucagcuccccucuggcaggacccggg

SEQ ID NO: 183651 - RNA, 32 nt, Homo Sapiens
auaauggacagcuaacggaacaauauaaucac

SEQ ID NO: 183652 - RNA, 32 nt, Homo Sapiens
aacaguggggugauuucauuugccauaauuca

SEQ ID NO: 183653 - RNA, 32 nt, Homo Sapiens
uacagaaaaaauuuaaaaacagaucagcuggg

SEQ ID NO: 183654 - RNA, 32 nt, Homo Sapiens
ucgccuucgccuuuuccgcugcggacucugcu

SEQ ID NO: 183655 - RNA, 32 nt, Homo Sapiens
ccucuccuccuccagcccccagccuacucucc

SEQ ID NO: 183656 - RNA, 32 nt, Homo Sapiens
uguggaggccgcgucucugcugcguguucgcg

SEQ ID NO: 183657 - RNA, 32 nt, Homo Sapiens
gaaaaugguguuggguuuguucuaggagccuc

SEQ ID NO: 183658 - RNA, 32 nt, Homo Sapiens
aggaggccccgcgcgcagcugccgcgcucugc

SEQ ID NO: 183659 - RNA, 32 nt, Homo Sapiens
gcucuuuuaaacagccagcucuuacagcaccu

SEQ ID NO: 183660 - RNA, 32 nt, Homo Sapiens
agcccgcggcggcggcagcagcuacagcgaaa

SEQ ID NO: 183661 - RNA, 32 nt, Homo Sapiens
gacuguuacugauguguuguucacuuguuagu

SEQ ID NO: 183662 - RNA, 32 nt, Homo Sapiens
uaaaaauaauucucuuguauuuuggagaugaa

SEQ ID NO: 183663 - RNA, 32 nt, Homo Sapiens
uaucugaagauaaugaugacuuuuuaauguaa

SEQ ID NO: 183664 - RNA, 32 nt, Homo Sapiens
guuuuuuguucuagucuucccuuucauggagg

SEQ ID NO: 183665 - RNA, 32 nt, Homo Sapiens
gggcccggccgccgcuuccggcagcucaccug

SEQ ID NO: 183666 - RNA, 32 nt, Homo Sapiens
ggaggaggccccagcacagccucaucuccaug

SEQ ID NO: 183667 - RNA, 29 nt, Homo Sapiens
gaguauauauguauauaccauguauauga

SEQ ID NO: 183668 - RNA, 32 nt, Homo Sapiens
gccaggccugcgcugccgugcuuuuaguguuc

SEQ ID NO: 183669 - RNA, 32 nt, Homo Sapiens
ccugguaugcgugcgggcucggaauacggauc

SEQ ID NO: 183670 - RNA, 32 nt, Homo Sapiens
guagcaggcaaucauacacagauuuccugagc

SEQ ID NO: 183671 - RNA, 32 nt, Homo Sapiens
gcuucccccaggaacuccauguaacagaacag

SEQ ID NO: 183672 - RNA, 32 nt, Homo Sapiens
uggggcgggagacggggcgguucugucuggca

SEQ ID NO: 183673 - RNA, 32 nt, Homo Sapiens
acaguucguagggucaggcgucuugcgguagg

SEQ ID NO: 183674 - RNA, 32 nt, Homo Sapiens
gcggcggucgcugugauagccacggggcuggg

SEQ ID NO: 183675 - RNA, 32 nt, Homo Sapiens
gcuaccaggacagcauuuauaauuguagaaug

SEQ ID NO: 183676 - RNA, 32 nt, Homo Sapiens
gccucagcugccucugggagcuucccgggaau

SEQ ID NO: 183677 - RNA, 32 nt, Homo Sapiens
gaaaacgacagcacguguucuuuuucacuagu

SEQ ID NO: 183678 - RNA, 32 nt, Homo Sapiens
cagagcccuggccgcuggagacucuuaaagcc

SEQ ID NO: 183679 - RNA, 32 nt, Homo Sapiens
aucaaaucauauauuuguuuacuguauauuuu

SEQ ID NO: 183680 - RNA, 32 nt, Homo Sapiens
gaagugugcagggcagccuggacacaagcuua

SEQ ID NO: 183681 - RNA, 32 nt, Homo Sapiens
uuguggcagucuucagccuccucuacccuaca

SEQ ID NO: 183682 - RNA, 32 nt, Homo Sapiens
ccgcgggcaccuugcuugcaugccucuuccuc

SEQ ID NO: 183683 - RNA, 32 nt, Homo Sapiens
uaaacauuucgcauugaauauuuacauggaga

SEQ ID NO: 183684 - RNA, 32 nt, Homo Sapiens
gauauuuuucucuauuugcuagauuuguuuug

SEQ ID NO: 183685 - RNA, 32 nt, Homo Sapiens
gaaaauaggcugagauauaaggugauauugcu

SEQ ID NO: 183686 - RNA, 32 nt, Homo Sapiens
cuccuuccugcagaagcacgccgacccgcucc

SEQ ID NO: 183687 - RNA, 32 nt, Homo Sapiens
ccgcgccgcccggcucuguccacaccugcuuu

SEQ ID NO: 183688 - RNA, 32 nt, Homo Sapiens
acucgucucuuacauacucucaucuucucccc

SEQ ID NO: 183689 - RNA, 32 nt, Homo Sapiens
cucuucaagaacccgggcugcaaaggaaaucu

SEQ ID NO: 183690 - RNA, 32 nt, Homo Sapiens
uaaauaucaaaggaguuagauuguguucugac

SEQ ID NO: 183691 - RNA, 32 nt, Homo Sapiens
ccuauacaugucaaggguuuggaugggauuug

SEQ ID NO: 183692 - RNA, 32 nt, Homo Sapiens
auaaucuucugccuucucaugauccaacuaau

SEQ ID NO: 183693 - RNA, 32 nt, Homo Sapiens
uugaugaauugcaagcuggccuugcagaugga

SEQ ID NO: 183694 - RNA, 32 nt, Homo Sapiens
aaaaagagauggguuuucgccauguugcccag

SEQ ID NO: 183695 - RNA, 32 nt, Homo Sapiens
aaaauauugcagugacuuuuuaggcaggagug

SEQ ID NO: 183696 - RNA, 32 nt, Homo Sapiens
ucagaggaagcaguauuguacagaacacggua

SEQ ID NO: 183697 - RNA, 32 nt, Homo Sapiens
uuucaguacuuugguccgaaaugauggaauca

SEQ ID NO: 183698 - RNA, 32 nt, Homo Sapiens
uuucaguugggaagaaaggagagggguggcgc

SEQ ID NO: 183699 - RNA, 32 nt, Homo Sapiens
ucuagggaccugccucacggaccuuagggaaa

SEQ ID NO: 183700 - RNA, 32 nt, Homo Sapiens
uucugucuugucauagccaagcacgcugcuuc

SEQ ID NO: 183701 - RNA, 32 nt, Homo Sapiens
cagcgauugcuuucuuccuggcauaguaaaca

SEQ ID NO: 183702 - RNA, 32 nt, Homo Sapiens
uuuuggggagcauguauauuucccuccuguga

SEQ ID NO: 183703 - RNA, 32 nt, Homo Sapiens
agccccacugggugcaggagcugcuggcuguc

SEQ ID NO: 183704 - RNA, 32 nt, Homo Sapiens
gguggcugucggggggcgcgcggggaagcagc

SEQ ID NO: 183705 - RNA, 32 nt, Homo Sapiens
gcagaacgccgcggcgucuuccggggccuggc

SEQ ID NO: 183706 - RNA, 32 nt, Homo Sapiens
uaagucccugucacuaauucuccaccccccuc

SEQ ID NO: 183707 - RNA, 32 nt, Homo Sapiens
agaguggagaucugggauaaagcaaggaaaua

SEQ ID NO: 183708 - RNA, 32 nt, Homo Sapiens
augaugaauugaaaacuaaauuguauuguccu

SEQ ID NO: 183709 - RNA, 32 nt, Homo Sapiens
gauuuaaauauauuuguaauucuugugucacu

SEQ ID NO: 183710 - RNA, 32 nt, Homo Sapiens
auacuuucuaguugaucuggauaaucaagaua

SEQ ID NO: 183711 - RNA, 32 nt, Homo Sapiens
aagcgugcgaggggguugggguggaaauagcg

SEQ ID NO: 183712 - RNA, 32 nt, Homo Sapiens
uauuuuccauccaacagcaguguguagagaga

SEQ ID NO: 183713 - RNA, 32 nt, Homo Sapiens
ggauguauaaaauggucauggggaugaaagga

SEQ ID NO: 183714 - RNA, 32 nt, Homo Sapiens
cgggcggcgggcccggcgcuauuccggccagg

SEQ ID NO: 183715 - RNA, 32 nt, Homo Sapiens
acaagucuguuguagcacuuaucacauccugc

SEQ ID NO: 183716 - RNA, 32 nt, Homo Sapiens
cccuucaagcccccggccuuguggggaagggg

SEQ ID NO: 183717 - RNA, 32 nt, Homo Sapiens
guuuagcuugacugaggaauuaaauuuugauu

SEQ ID NO: 183718 - RNA, 32 nt, Homo Sapiens
cugaggccacgagcuccuggguagcugugauc

SEQ ID NO: 183719 - RNA, 32 nt, Homo Sapiens
cuauugcuaauagauacguauaguauacaggg

SEQ ID NO: 183720 - RNA, 32 nt, Homo Sapiens
uaacacacuggaccgaggaaaagucagauuuc

SEQ ID NO: 183721 - RNA, 32 nt, Homo Sapiens
ggguaaaagaugcauaaggccuuuucuagcuc

SEQ ID NO: 183722 - RNA, 32 nt, Homo Sapiens
acacaucagugcugcaucuacuuuucuccuuu

SEQ ID NO: 183723 - RNA, 28 nt, Homo Sapiens
ccggcugggcggccccgagcucuguggc

SEQ ID NO: 183724 - RNA, 32 nt, Homo Sapiens
gugauuuaaacaaacaaacaaacaaacagaag

SEQ ID NO: 183725 - RNA, 32 nt, Homo Sapiens
agucaauauuugguauuucaauaaaaguaaag

SEQ ID NO: 183726 - RNA, 32 nt, Homo Sapiens
aggggccucuacugccugucgcuggaccaccc

SEQ ID NO: 183727 - RNA, 32 nt, Homo Sapiens
auagccuauaaaauguaugggagauguuggua

SEQ ID NO: 183728 - RNA, 32 nt, Homo Sapiens
uggugaugaugaugaaagcaguaaugaaccug

SEQ ID NO: 183729 - RNA, 32 nt, Homo Sapiens
agcagcccccggcuaccuccccuggaggcaca

SEQ ID NO: 183730 - RNA, 31 nt, Homo Sapiens
ucucuacaaaaauaaagaaaauuuaaaaauc

SEQ ID NO: 183731 - RNA, 32 nt, Homo Sapiens
uuuaauuccaugaauguuccugccuccuugau

SEQ ID NO: 183732 - RNA, 32 nt, Homo Sapiens
guucagugcccauuucucauuuuacauuuuaa

SEQ ID NO: 183733 - RNA, 32 nt, Homo Sapiens
cucccggcaugggaaagccaccucucccucaa

SEQ ID NO: 183734 - RNA, 32 nt, Homo Sapiens
cacucaccagccuccuucuuuuguucaccagc

SEQ ID NO: 183735 - RNA, 32 nt, Homo Sapiens
uugacaacagcgacaacguggugcugcggcag

SEQ ID NO: 183736 - RNA, 32 nt, Homo Sapiens
aauucuuaguaaaaugcugaucaguaaaccaa

SEQ ID NO: 183737 - RNA, 32 nt, Homo Sapiens
cgaugcucugugagaggcauucacuaguauga

SEQ ID NO: 183738 - RNA, 32 nt, Homo Sapiens
aaugugggguuauguugcauuuucucagcucc

SEQ ID NO: 183739 - RNA, 32 nt, Homo Sapiens
gcaagcauagauggaaagugcauauugaacac

SEQ ID NO: 183740 - RNA, 32 nt, Homo Sapiens
uuguaaaucuaaauucuucugcucuuggccag

SEQ ID NO: 183741 - RNA, 32 nt, Homo Sapiens
gaagaaacacacccagaagagagaugcacuaa

SEQ ID NO: 183742 - RNA, 32 nt, Homo Sapiens
caccagccugcguccccggcgcggcgggccau

SEQ ID NO: 183743 - RNA, 32 nt, Homo Sapiens
ucccuucugaccacucuccugccuccagagaa

SEQ ID NO: 183744 - RNA, 32 nt, Homo Sapiens
aaucaaggacauucccauggagcccaagauua

SEQ ID NO: 183745 - RNA, 32 nt, Homo Sapiens
uugcagccuauaccucaauaaaacagggauau

SEQ ID NO: 183746 - RNA, 32 nt, Homo Sapiens
ccugcccgucuucugggagugccgucucaccc

SEQ ID NO: 183747 - RNA, 32 nt, Homo Sapiens
cuuucguccacagcuuccuguccccaucuguc

SEQ ID NO: 183748 - RNA, 32 nt, Homo Sapiens
uuguauuuuuuauuuauauguaccucaaagau

SEQ ID NO: 183749 - RNA, 32 nt, Homo Sapiens
gacucuccggugccgccgcugccugcucccgc

SEQ ID NO: 183750 - RNA, 32 nt, Homo Sapiens
aaugcacucugcaggccuggcagaagaguccu

SEQ ID NO: 183751 - RNA, 32 nt, Homo Sapiens
ccaaaacgggagugugcagucagggccugcgg

SEQ ID NO: 183752 - RNA, 32 nt, Homo Sapiens
uaaauuuacuuugaauuguaaauaacaugaag

SEQ ID NO: 183753 - RNA, 32 nt, Homo Sapiens
uggucggaccucaucacccacauuccaccaag

SEQ ID NO: 183754 - RNA, 32 nt, Homo Sapiens
aacaguuuugucacggaugcaaagcuuccuga

SEQ ID NO: 183755 - RNA, 32 nt, Homo Sapiens
ucgcuggacuuccacauuugggacgaguuggc

SEQ ID NO: 183756 - RNA, 32 nt, Homo Sapiens
ccuggcggggcugaaauuggaaccugggccuc

SEQ ID NO: 183757 - RNA, 32 nt, Homo Sapiens
cuguaucuuuuuccucuucaguagauacccuu

SEQ ID NO: 183758 - RNA, 32 nt, Homo Sapiens
ccucccccacgcucuucaccacguuccuggag

SEQ ID NO: 183759 - RNA, 32 nt, Homo Sapiens
uuuuuagcuuagugccauuaugucauuuugau

SEQ ID NO: 183760 - RNA, 32 nt, Homo Sapiens
gccgaagagugagaagcagagggccuuacccg

SEQ ID NO: 183761 - RNA, 32 nt, Homo Sapiens
cagccccagcccagccagacggaaucccccca

SEQ ID NO: 183762 - RNA, 32 nt, Homo Sapiens
caagggaacggguguggaaggaggcggggcaa

SEQ ID NO: 183763 - RNA, 29 nt, Homo Sapiens
caguauugacauuuccugcagagucugua

SEQ ID NO: 183764 - RNA, 32 nt, Homo Sapiens
aaccacuaugagaacuaccguguuagugguuu

SEQ ID NO: 183765 - RNA, 31 nt, Homo Sapiens
cuacugcugccgguguuugcguguggcaggg

SEQ ID NO: 183766 - RNA, 32 nt, Homo Sapiens
gccuaguaaacuaugaaaguaaacucggcaca

SEQ ID NO: 183767 - RNA, 32 nt, Homo Sapiens
auuggcucagaauuuuaauauaaacaucacac

SEQ ID NO: 183768 - RNA, 32 nt, Homo Sapiens
ugagcagugaucuggcugggaaaggggaccag

SEQ ID NO: 183769 - RNA, 32 nt, Homo Sapiens
uaaaaauacacuccccucccccaccgccacac

SEQ ID NO: 183770 - RNA, 32 nt, Homo Sapiens
uuuggccaagauuuugaagacaguucaaugua

SEQ ID NO: 183771 - RNA, 32 nt, Homo Sapiens
acuuuguuacuuaagguuguucaccuuguacc

SEQ ID NO: 183772 - RNA, 32 nt, Homo Sapiens
uuuguuuaugcacuuuuuccuuacugugcauc

SEQ ID NO: 183773 - RNA, 32 nt, Homo Sapiens
acguuaaauauguuuuauuggccaguuaauca

SEQ ID NO: 183774 - RNA, 32 nt, Homo Sapiens
gguccgggcccucgggaagccuuggacagaac

SEQ ID NO: 183775 - RNA, 32 nt, Homo Sapiens
caaacuucgcauuuuccaagaccacccuggcu

SEQ ID NO: 183776 - RNA, 32 nt, Homo Sapiens
acuccccuaacccauagcacaggcugaguccc

SEQ ID NO: 183777 - RNA, 32 nt, Homo Sapiens
uggcugauuuuaaccugaaauuuuaaauccac

SEQ ID NO: 183778 - RNA, 32 nt, Homo Sapiens
auguuacuucuuguuauguacgcggaggaacc

SEQ ID NO: 183779 - RNA, 32 nt, Homo Sapiens
uuucucuuaugaccuuaaaauaaaguguuuga

SEQ ID NO: 183780 - RNA, 32 nt, Homo Sapiens
uuucucucuuaauaaaaauguaugauguuuac

SEQ ID NO: 183781 - RNA, 31 nt, Homo Sapiens
aucauuggcuuaugccaaccauggcaauccc

SEQ ID NO: 183782 - RNA, 32 nt, Homo Sapiens
uugugguguaaauuuuuuuuuauuacaccaaa

SEQ ID NO: 183783 - RNA, 32 nt, Homo Sapiens
auaagggucaggcgagcuuucuggaugcucga

SEQ ID NO: 183784 - RNA, 32 nt, Homo Sapiens
gcccuccuccccggcccucccuggcccggcca

SEQ ID NO: 183785 - RNA, 32 nt, Homo Sapiens
agccagagugaccccucgaccugucagccaug

SEQ ID NO: 183786 - RNA, 32 nt, Homo Sapiens
gcuguguugcuuauuccuuacaaaguuuauac

SEQ ID NO: 183787 - RNA, 32 nt, Homo Sapiens
gguauaguuuugucacaauuauagauuagauc

SEQ ID NO: 183788 - RNA, 32 nt, Homo Sapiens
uuaugguugcuguugccauauuuacugaaggu

SEQ ID NO: 183789 - RNA, 32 nt, Homo Sapiens
uauacgugaaaauuauuugaaaacauauaaag

SEQ ID NO: 183790 - RNA, 32 nt, Homo Sapiens
uuuguucuuuauucuuuuaucccagugaaaau

SEQ ID NO: 183791 - RNA, 32 nt, Homo Sapiens
ugaaagaccagagggacacuaggaaucaaaac

SEQ ID NO: 183792 - RNA, 32 nt, Homo Sapiens
ggaauauugcagcuuuugguuaaacuuaaugc

SEQ ID NO: 183793 - RNA, 32 nt, Homo Sapiens
ggcuugcagacccugacccagccccugugguc

SEQ ID NO: 183794 - RNA, 32 nt, Homo Sapiens
ucuuugcuuggcauuuuauaguuaaauuaauu

SEQ ID NO: 183795 - RNA, 32 nt, Homo Sapiens
cggcugcagcgggcuuguagguguccggcuuu

SEQ ID NO: 183796 - RNA, 32 nt, Homo Sapiens
uuuuuaccaaaauguuaaggcugaaguauuuu

SEQ ID NO: 183797 - RNA, 32 nt, Homo Sapiens
aaaauuuaauagguauuuuacaauaguagccg

SEQ ID NO: 183798 - RNA, 32 nt, Homo Sapiens
gagaugugcaggguugcugggcaccuggcaga

SEQ ID NO: 183799 - RNA, 32 nt, Homo Sapiens
ugggccccccuccugggaucaagccccuccca

SEQ ID NO: 183800 - RNA, 32 nt, Homo Sapiens
caaaaugaaggggauaugcuccccauaaauac

SEQ ID NO: 183801 - RNA, 32 nt, Homo Sapiens
gggcuagacaagauucuuuuccaaauaucaaa

SEQ ID NO: 183802 - RNA, 32 nt, Homo Sapiens
cgugggucaggagccagagcccucugcucuag

SEQ ID NO: 183803 - RNA, 32 nt, Homo Sapiens
uccauggaaggagaaucuuuugaaagaaagca

SEQ ID NO: 183804 - RNA, 32 nt, Homo Sapiens
auggccuaccucuucaccaucaucaacagccu

SEQ ID NO: 183805 - RNA, 32 nt, Homo Sapiens
gcagcuaagaucugcauaggucgggauuggca

SEQ ID NO: 183806 - RNA, 32 nt, Homo Sapiens
aacccauggacuuugccuccauuuucagcucc

SEQ ID NO: 183807 - RNA, 32 nt, Homo Sapiens
cagucuucguucuuccuccccucaguggcagu

SEQ ID NO: 183808 - RNA, 32 nt, Homo Sapiens
cagcuaucaauacaugcaucuuuaucagcagc

SEQ ID NO: 183809 - RNA, 32 nt, Homo Sapiens
ucccaccuccccacccccauguacuucuuccu

SEQ ID NO: 183810 - RNA, 30 nt, Homo Sapiens
cggagcuggggcgacgaggcgauugcgggg

SEQ ID NO: 183811 - RNA, 32 nt, Homo Sapiens
acaaaauuugguuaauuuuuuauuucuaacuc

SEQ ID NO: 183812 - RNA, 32 nt, Homo Sapiens
acuucuaucaagaaacaaaacugcccuugcag

SEQ ID NO: 183813 - RNA, 32 nt, Homo Sapiens
uggagccuuggaagccucuccuguccuuggcu

SEQ ID NO: 183814 - RNA, 32 nt, Homo Sapiens
ccaguuccaagcauggaggcucauucugaagc

SEQ ID NO: 183815 - RNA, 32 nt, Homo Sapiens
cugaccacauucaugcuggaauggaaaccacu

SEQ ID NO: 183816 - RNA, 32 nt, Homo Sapiens
aucaacaugccuuguuaauguccucugcccug

SEQ ID NO: 183817 - RNA, 32 nt, Homo Sapiens
ucccacccugucauuccuaauagcccaaacgc

SEQ ID NO: 183818 - RNA, 32 nt, Homo Sapiens
auagaggagaggaaaagguauaggccugccuu

SEQ ID NO: 183819 - RNA, 32 nt, Homo Sapiens
gggccuagugcugcgccgcggggccggcccca

SEQ ID NO: 183820 - RNA, 32 nt, Homo Sapiens
uuccuuuccuucccagagaguuuuaccguaug

SEQ ID NO: 183821 - RNA, 32 nt, Homo Sapiens
ugagucccgcugagcuguccccggugccgccg

SEQ ID NO: 183822 - RNA, 32 nt, Homo Sapiens
ucguuagagacagggauucaccauguuggccu

SEQ ID NO: 183823 - RNA, 32 nt, Homo Sapiens
ucacaguaauuuuuugucuguauauauuugag

SEQ ID NO: 183824 - RNA, 32 nt, Homo Sapiens
gucucuccucuuccccgcaguugccuccuucu

SEQ ID NO: 183825 - RNA, 32 nt, Homo Sapiens
guuauuauuuuuccuuuggaaugugaaggucu

SEQ ID NO: 183826 - RNA, 32 nt, Homo Sapiens
gugggacucugcaguggccccugugagauggc

SEQ ID NO: 183827 - RNA, 32 nt, Homo Sapiens
aagagucucaugucugauauuuagacaugaug

SEQ ID NO: 183828 - RNA, 32 nt, Homo Sapiens
ggagccuggcgcgggggcugcgagcacaggcc

SEQ ID NO: 183829 - RNA, 32 nt, Homo Sapiens
ucgggaggaucaggcugcuucugaugcuugga

SEQ ID NO: 183830 - RNA, 31 nt, Homo Sapiens
uacuccaugauugugaacaaucucuugaaac

SEQ ID NO: 183831 - RNA, 32 nt, Homo Sapiens
caagcaccuuggccuccucucagcucgccgag

SEQ ID NO: 183832 - RNA, 32 nt, Homo Sapiens
cagacaaggggagaggcagcagcucuuugucc

SEQ ID NO: 183833 - RNA, 32 nt, Homo Sapiens
ggaacccugcuccucucuguccugccucaggc

SEQ ID NO: 183834 - RNA, 32 nt, Homo Sapiens
uuucugccagcuucuuaugguccugaggcgag

SEQ ID NO: 183835 - RNA, 32 nt, Homo Sapiens
aucaagagcuacugcuggcccuggcuccgcag

SEQ ID NO: 183836 - RNA, 32 nt, Homo Sapiens
cuucugccaaaauaaaaauuuacuauuuccuu

SEQ ID NO: 183837 - RNA, 32 nt, Homo Sapiens
uguugacaauaggucuuaaugcaguguuuucc

SEQ ID NO: 183838 - RNA, 32 nt, Homo Sapiens
cuuugggaaggccaugaccuccuccuuugggg

SEQ ID NO: 183839 - RNA, 32 nt, Homo Sapiens
agaggcccugaagauagaagccaggcccgaag

SEQ ID NO: 183840 - RNA, 32 nt, Homo Sapiens
uggggcggcuggccaggcagggggcugacccc

SEQ ID NO: 183841 - RNA, 32 nt, Homo Sapiens
aaaauaauuuaaaagguuuuguuucaguuugu

SEQ ID NO: 183842 - RNA, 32 nt, Homo Sapiens
gcauguuaucaugggagggaagucaaauaaga

SEQ ID NO: 183843 - RNA, 32 nt, Homo Sapiens
cucaaucccugggcagggaaaaggggguccuc

SEQ ID NO: 183844 - RNA, 32 nt, Homo Sapiens
ggacacuggcuccuuccacgucucaccaggca

SEQ ID NO: 183845 - RNA, 32 nt, Homo Sapiens
ucccggcggcgguagcggcggcggcggugcga

SEQ ID NO: 183846 - RNA, 32 nt, Homo Sapiens
gcccuccgccccacgcaggagcgaggacucug

SEQ ID NO: 183847 - RNA, 32 nt, Homo Sapiens
auuaacuuacacauuguauaaaaccgaccaaa

SEQ ID NO: 183848 - RNA, 32 nt, Homo Sapiens
acugcagagcagcccugugacuuuacaaaaua

SEQ ID NO: 183849 - RNA, 32 nt, Homo Sapiens
ugucccaucacagauuuuuaaaauaaauauga

SEQ ID NO: 183850 - RNA, 32 nt, Homo Sapiens
cccucucugcccgggcgccccagacgcauccu

SEQ ID NO: 183851 - RNA, 27 nt, Homo Sapiens
ccaugucgcucuuguucgucagcaugg

SEQ ID NO: 183852 - RNA, 32 nt, Homo Sapiens
aucaaauuacccacccaaggcuucuagaagga

SEQ ID NO: 183853 - RNA, 32 nt, Homo Sapiens
aggcccccgcccccgccgcauccaccuccucc

SEQ ID NO: 183854 - RNA, 32 nt, Homo Sapiens
aucaagugaagauaggugugucuaaaagugau

SEQ ID NO: 183855 - RNA, 32 nt, Homo Sapiens
uauauuagacauuuuggagggaccaggaaaug

SEQ ID NO: 183856 - RNA, 32 nt, Homo Sapiens
agagcccugcaugcaucagaccuacagcagac

SEQ ID NO: 183857 - RNA, 32 nt, Homo Sapiens
ucacgcccaccccgcuuuccacucccacugcu

SEQ ID NO: 183858 - RNA, 32 nt, Homo Sapiens
ucagagauuuaaaaaacugaaaagguauaccu

SEQ ID NO: 183859 - RNA, 32 nt, Homo Sapiens
augguuucauuucugagaauagaguuggucug

SEQ ID NO: 183860 - RNA, 32 nt, Homo Sapiens
acauugugcagcaaagaaaugguuauggagaa

SEQ ID NO: 183861 - RNA, 32 nt, Homo Sapiens
cagaagauuuuggguuaagcaguuaucauuag

SEQ ID NO: 183862 - RNA, 32 nt, Homo Sapiens
cugccuccgagagcgcggucuggccccacccu

SEQ ID NO: 183863 - RNA, 32 nt, Homo Sapiens
uuuuaaugacaaugaagugacacuuugacauu

SEQ ID NO: 183864 - RNA, 32 nt, Homo Sapiens
cucaaaauagcuacguaaauaaaauuagcagg

SEQ ID NO: 183865 - RNA, 32 nt, Homo Sapiens
uaagagauacucaaaugauuaaauuaaaauug

SEQ ID NO: 183866 - RNA, 32 nt, Homo Sapiens
ccgcugccuugauggauuauacacuugaccuc

SEQ ID NO: 183867 - RNA, 32 nt, Homo Sapiens
auggaaaagaccuuuuacaaaugauaccaauu

SEQ ID NO: 183868 - RNA, 32 nt, Homo Sapiens
gaaauguacuuuauuauuaaauuuguaaugca

SEQ ID NO: 183869 - RNA, 32 nt, Homo Sapiens
cucccucccucccccuggcaccggcuccaguc

SEQ ID NO: 183870 - RNA, 27 nt, Homo Sapiens
ccauggcuucugaccuagagaguagcc

SEQ ID NO: 183871 - RNA, 32 nt, Homo Sapiens
gcaggaggcagacuugcagagcuuguuuuguu

SEQ ID NO: 183872 - RNA, 32 nt, Homo Sapiens
gaagcaggcccgggcacucugcucuccugucc

SEQ ID NO: 183873 - RNA, 32 nt, Homo Sapiens
aaacuuuguucaauaucagggaauuuauauug

SEQ ID NO: 183874 - RNA, 32 nt, Homo Sapiens
uccccaagacugccaccagucuacacauacag

SEQ ID NO: 183875 - RNA, 32 nt, Homo Sapiens
cggggcgagcgccggugacgcggccguugcca

SEQ ID NO: 183876 - RNA, 32 nt, Homo Sapiens
cugcugggcacugggagcagggggcggccaaa

SEQ ID NO: 183877 - RNA, 32 nt, Homo Sapiens
auuuaucauccuguuaaugaugauuuucccga

SEQ ID NO: 183878 - RNA, 32 nt, Homo Sapiens
gcuguccggcuggcagagccugacgugucucu

SEQ ID NO: 183879 - RNA, 32 nt, Homo Sapiens
ggcagcggguggcauccaggcugcccgugugu

SEQ ID NO: 183880 - RNA, 32 nt, Homo Sapiens
agccccugcuuccccacccccuccucaggcuc

SEQ ID NO: 183881 - RNA, 29 nt, Homo Sapiens
ccccaugagcgcggcgccccuggugggcu

SEQ ID NO: 183882 - RNA, 32 nt, Homo Sapiens
gggugacaugugugcauugaguaaauccagac

SEQ ID NO: 183883 - RNA, 32 nt, Homo Sapiens
uuaacuuuauuaugaggccacacauauuuucc

SEQ ID NO: 183884 - RNA, 28 nt, Homo Sapiens
gauuuggcuucugguauguguuucugau

SEQ ID NO: 183885 - RNA, 32 nt, Homo Sapiens
cugagcugggccguguggccuacgugaauuuc

SEQ ID NO: 183886 - RNA, 32 nt, Homo Sapiens
aggcugccugucaucccgggccugccagcucc

SEQ ID NO: 183887 - RNA, 32 nt, Homo Sapiens
ccugcuuugaaaauugauacaaacagaaucag

SEQ ID NO: 183888 - RNA, 32 nt, Homo Sapiens
caggcggugccgcggcgccgggacccgacuca

SEQ ID NO: 183889 - RNA, 32 nt, Homo Sapiens
guuguugugauuguugugauuuccugucucgu

SEQ ID NO: 183890 - RNA, 32 nt, Homo Sapiens
uuuuucuaaacacaauuguuauagccagagga

SEQ ID NO: 183891 - RNA, 32 nt, Homo Sapiens
ucaccuguuucaucugaggauuucaguucuga

SEQ ID NO: 183892 - RNA, 32 nt, Homo Sapiens
uccaggggcccugccucugugcccccuccccu

SEQ ID NO: 183893 - RNA, 32 nt, Homo Sapiens
gggagacgaugaugauguccauugcuguguga

SEQ ID NO: 183894 - RNA, 32 nt, Homo Sapiens
ggaacgcggccacagcggccggcgcuuugccc

SEQ ID NO: 183895 - RNA, 32 nt, Homo Sapiens
uaggcuccugacgcgacccugguccugauggc

SEQ ID NO: 183896 - RNA, 32 nt, Homo Sapiens
gugccaagugcuuguguagaaacuguguucug

SEQ ID NO: 183897 - RNA, 32 nt, Homo Sapiens
agauugucagaauuauccaaaugaaaugguac

SEQ ID NO: 183898 - RNA, 32 nt, Homo Sapiens
uuuucuuugcccagccagauaagcaggacuuu

SEQ ID NO: 183899 - RNA, 32 nt, Homo Sapiens
uucuguuuggugugucccauugguguugucau

SEQ ID NO: 183900 - RNA, 32 nt, Homo Sapiens
ucaagcaagaugagcugugcgcugcucugcag

SEQ ID NO: 183901 - RNA, 32 nt, Homo Sapiens
cucggccgucuucacucgcccccggguuuggc

SEQ ID NO: 183902 - RNA, 32 nt, Homo Sapiens
gcuaaaaacaauuguaucauguagucgggcag

SEQ ID NO: 183903 - RNA, 32 nt, Homo Sapiens
cuagaggagcauugaccccccugaaucagcuc

SEQ ID NO: 183904 - RNA, 32 nt, Homo Sapiens
gugaagauggggccgcgccgauggggaggcag

SEQ ID NO: 183905 - RNA, 32 nt, Homo Sapiens
gccuuaagauugguaagcuagcaaugaaugcu

SEQ ID NO: 183906 - RNA, 32 nt, Homo Sapiens
ucucaggugaggggcgcgcgagcggcuccugg

SEQ ID NO: 183907 - RNA, 32 nt, Homo Sapiens
aauauggagcccugcgaucuggauuggcucau

SEQ ID NO: 183908 - RNA, 32 nt, Homo Sapiens
gcucagagcagccccaggaagugggccauguc

SEQ ID NO: 183909 - RNA, 32 nt, Homo Sapiens
cguggccaaggaccagugccaccuuauggcaa

SEQ ID NO: 183910 - RNA, 32 nt, Homo Sapiens
uggagaagcaggcccugcugcaggcccagcug

SEQ ID NO: 183911 - RNA, 32 nt, Homo Sapiens
uccucagccgcgggugaucguagcucggaaau

SEQ ID NO: 183912 - RNA, 32 nt, Homo Sapiens
uuggcauaaagauagacacauagaccaaugga

SEQ ID NO: 183913 - RNA, 32 nt, Homo Sapiens
ucaagcagauccaacuuuuuugaaagcuggug

SEQ ID NO: 183914 - RNA, 32 nt, Homo Sapiens
gugauuuuuuaaaauaugguaaaaaagacaaa

SEQ ID NO: 183915 - RNA, 32 nt, Homo Sapiens
aagcgugccuccccaccccuccccucacggcg

SEQ ID NO: 183916 - RNA, 32 nt, Homo Sapiens
agaggaggauccagcaacacgugggagaggag

SEQ ID NO: 183917 - RNA, 32 nt, Homo Sapiens
agccccccgcggcugcggcgcaggugcccucg

SEQ ID NO: 183918 - RNA, 32 nt, Homo Sapiens
guggcgcagaggagcaggcugcugcccaggcc

SEQ ID NO: 183919 - RNA, 32 nt, Homo Sapiens
aguaaaauuaugucucauuuuauuuuuucagc

SEQ ID NO: 183920 - RNA, 32 nt, Homo Sapiens
gauauuuuaaacaccuaacaaaguaaagggcu

SEQ ID NO: 183921 - RNA, 31 nt, Homo Sapiens
uucuauaaauaaaaacauaaguauauucagu

SEQ ID NO: 183922 - RNA, 32 nt, Homo Sapiens
gauuguuuuaaauucuaaacuauaaguuuguu

SEQ ID NO: 183923 - RNA, 31 nt, Homo Sapiens
gggcagagggcggugccaagugccacaucuu

SEQ ID NO: 183924 - RNA, 32 nt, Homo Sapiens
uuuaccauauguauuuuaaauguauucucuua

SEQ ID NO: 183925 - RNA, 32 nt, Homo Sapiens
cuuugaauauauugcuuuauaugcuuugcugg

SEQ ID NO: 183926 - RNA, 32 nt, Homo Sapiens
aguccaggcgccuccacgcugcaccgugagga

SEQ ID NO: 183927 - RNA, 32 nt, Homo Sapiens
ggggcagcgcagggcgcagagcacacccgcug

SEQ ID NO: 183928 - RNA, 32 nt, Homo Sapiens
aaaggaaugaaaacugaugauauaagcgcaca

SEQ ID NO: 183929 - RNA, 32 nt, Homo Sapiens
uuguuuugauuuuuuuuuuuuaaagcggguaa

SEQ ID NO: 183930 - RNA, 32 nt, Homo Sapiens
acuaccuuagaacauguugaucugugagugcc

SEQ ID NO: 183931 - RNA, 32 nt, Homo Sapiens
agagcugauccucuccucucuugaguuaaccc

SEQ ID NO: 183932 - RNA, 32 nt, Homo Sapiens
uucuugaaccugcaaaugaaauaaaaaaucuu

SEQ ID NO: 183933 - RNA, 32 nt, Homo Sapiens
cccagccugcaaggaggcgccaccggaccugc

SEQ ID NO: 183934 - RNA, 32 nt, Homo Sapiens
cgcccaaguccuccccgcgccgccuccucugu

SEQ ID NO: 183935 - RNA, 32 nt, Homo Sapiens
ugggccuacaaggcuuccaggggaugccaucc

SEQ ID NO: 183936 - RNA, 32 nt, Homo Sapiens
acggcuccacccucucuccccuggaaaggaca

SEQ ID NO: 183937 - RNA, 32 nt, Homo Sapiens
cccgccagcccacaggguucccccaccucaga

SEQ ID NO: 183938 - RNA, 32 nt, Homo Sapiens
gccgcagcgaggagguagagggggcggggguc

SEQ ID NO: 183939 - RNA, 32 nt, Homo Sapiens
gcguuuguaucuauuacuaaaauguauuuuuu

SEQ ID NO: 183940 - RNA, 27 nt, Homo Sapiens
cauuaggccuucuuccuauccccaucu

SEQ ID NO: 183941 - RNA, 32 nt, Homo Sapiens
cuuauuaucucauagauucugugggucaagag

SEQ ID NO: 183942 - RNA, 32 nt, Homo Sapiens
uugaggcccucccaaggcccucuacugcccuc

SEQ ID NO: 183943 - RNA, 32 nt, Homo Sapiens
uggguaucaagacauagcauccaaguggcaua

SEQ ID NO: 183944 - RNA, 31 nt, Homo Sapiens
cgggaagcagcagccccuccaagggccaggg

SEQ ID NO: 183945 - RNA, 32 nt, Homo Sapiens
cacccagaaugaauucuggcuguggcagaaaa

SEQ ID NO: 183946 - RNA, 32 nt, Homo Sapiens
cucuucucggcgggauccguggagaguccuuu

SEQ ID NO: 183947 - RNA, 32 nt, Homo Sapiens
aggggcugcggggagcgccgcgcaggccgugc

SEQ ID NO: 183948 - RNA, 32 nt, Homo Sapiens
aaaaguuauuucccuuuagcuguguuauuaua

SEQ ID NO: 183949 - RNA, 32 nt, Homo Sapiens
gugcugggauuauaggcagcacuacaccuggc

SEQ ID NO: 183950 - RNA, 32 nt, Homo Sapiens
uugugggcagccccuccagagcccugagucac

SEQ ID NO: 183951 - RNA, 32 nt, Homo Sapiens
gagccggcgagcggagcgcccgcucgggaccg

SEQ ID NO: 183952 - RNA, 32 nt, Homo Sapiens
acagacuuuuucuuuuguaccuagcaguacuu

SEQ ID NO: 183953 - RNA, 32 nt, Homo Sapiens
auucacuccucuuuuucuuauuuuuuuuggaa

SEQ ID NO: 183954 - RNA, 32 nt, Homo Sapiens
ucagcaagaagcuuaucuccaauaaacaucua

SEQ ID NO: 183955 - RNA, 31 nt, Homo Sapiens
gcaguggcaguuguagggccaagggcgguug

SEQ ID NO: 183956 - RNA, 32 nt, Homo Sapiens
ucccccuucuccuucacccccaagugucuccc

SEQ ID NO: 183957 - RNA, 32 nt, Homo Sapiens
gagccgacucgcgcuccgcuccuggcaguaug

SEQ ID NO: 183958 - RNA, 32 nt, Homo Sapiens
uucaguacagcgcuuugcagaucgaugggucu

SEQ ID NO: 183959 - RNA, 32 nt, Homo Sapiens
ucaggauaguguuugacuccacugcugcgaaa

SEQ ID NO: 183960 - RNA, 32 nt, Homo Sapiens
cagcgccggccgcguggggcugagccgagccc

SEQ ID NO: 183961 - RNA, 32 nt, Homo Sapiens
ugcuggugggcacucccugcucaugcccacag

SEQ ID NO: 183962 - RNA, 32 nt, Homo Sapiens
aaauccgcgggcccgagccacgcgccugugaa

SEQ ID NO: 183963 - RNA, 32 nt, Homo Sapiens
aaauaggguugugggggaagggcgugcaaaaa

SEQ ID NO: 183964 - RNA, 32 nt, Homo Sapiens
augcaccuugguuaagccccacccccuauggc

SEQ ID NO: 183965 - RNA, 32 nt, Homo Sapiens
uguucaugugcgcgugcacacacacacaugag

SEQ ID NO: 183966 - RNA, 32 nt, Homo Sapiens
ggaaaacaguaacuaaagauuaaauucaaagg

SEQ ID NO: 183967 - RNA, 32 nt, Homo Sapiens
cccuccccugccaucccuccccggacuccggc

SEQ ID NO: 183968 - RNA, 32 nt, Homo Sapiens
aagcaagccaaggacuugcuccuaugucuguu

SEQ ID NO: 183969 - RNA, 32 nt, Homo Sapiens
uucugaaagccgcuggcggaccgcgcgcagcg

SEQ ID NO: 183970 - RNA, 32 nt, Homo Sapiens
ccagcgcccugggucucgccccgggaacgccu

SEQ ID NO: 183971 - RNA, 32 nt, Homo Sapiens
cccuggcacccagcgccccgccgcccgcaagc

SEQ ID NO: 183972 - RNA, 32 nt, Homo Sapiens
gcucucaccgcggcgggggaaggagcuugcca

SEQ ID NO: 183973 - RNA, 32 nt, Homo Sapiens
caagauuucuaaagcugaaauuuuuguguaaa

SEQ ID NO: 183974 - RNA, 32 nt, Homo Sapiens
uucacagguaguguuucagacucugaaagccc

SEQ ID NO: 183975 - RNA, 32 nt, Homo Sapiens
cgcugcgccgacggugcggggcgcuggggcag

SEQ ID NO: 183976 - RNA, 32 nt, Homo Sapiens
gauacuagguagugaugguggaucuagagaca

SEQ ID NO: 183977 - RNA, 32 nt, Homo Sapiens
aaggaaguuaguuuuuaaucucuccaccuucc

SEQ ID NO: 183978 - RNA, 32 nt, Homo Sapiens
uaacacuuugauuagccaugaacuugccaauc

SEQ ID NO: 183979 - RNA, 32 nt, Homo Sapiens
gugcagagguccugagcccacccuaguugggc

SEQ ID NO: 183980 - RNA, 32 nt, Homo Sapiens
aaacggaggcauuuaaacacuuggauuuacac

SEQ ID NO: 183981 - RNA, 32 nt, Homo Sapiens
auuuguuguaaaugccaauaaaauauucacca

SEQ ID NO: 183982 - RNA, 32 nt, Homo Sapiens
gacuugacaagccuucuguucugcccaggccu

SEQ ID NO: 183983 - RNA, 29 nt, Homo Sapiens
uuuuuaaaaaguuuaaaguuucuagcaau

SEQ ID NO: 183984 - RNA, 32 nt, Homo Sapiens
ugauucauucgagacaacauguguguaugugu

SEQ ID NO: 183985 - RNA, 32 nt, Homo Sapiens
gaccagccagacaagcacuuuauaagccugac

SEQ ID NO: 183986 - RNA, 32 nt, Homo Sapiens
caaccacaagcauaccuauuaagagaagccca

SEQ ID NO: 183987 - RNA, 32 nt, Homo Sapiens
aauuuucugucuuuuuuuuuuuuuuuguaucc

SEQ ID NO: 183988 - RNA, 32 nt, Homo Sapiens
auguuuuccuuccuggagggcagccccacagg

SEQ ID NO: 183989 - RNA, 32 nt, Homo Sapiens
gggcgaggagggcacgaggccagguucccaag

SEQ ID NO: 183990 - RNA, 32 nt, Homo Sapiens
ucacuccuggaaacauuuuuccacuuggcuuc

SEQ ID NO: 183991 - RNA, 32 nt, Homo Sapiens
ggcucggcuccuagagcugccacggccauggc

SEQ ID NO: 183992 - RNA, 32 nt, Homo Sapiens
uucggacagcccagccccgcccuuuggguucu

SEQ ID NO: 183993 - RNA, 32 nt, Homo Sapiens
guaggaaaaugaaucauuuggacucuucaaug

SEQ ID NO: 183994 - RNA, 32 nt, Homo Sapiens
cuuucucuuuugcauuccaugucuucuauuca

SEQ ID NO: 183995 - RNA, 30 nt, Homo Sapiens
acugcucuggacugacauugcucagguucg

SEQ ID NO: 183996 - RNA, 32 nt, Homo Sapiens
ucagugcuguuguuuuugacagggagaacauc

SEQ ID NO: 183997 - RNA, 32 nt, Homo Sapiens
auguguaaaagcucugugcaauugaaaucauu

SEQ ID NO: 183998 - RNA, 32 nt, Homo Sapiens
agcuugaaaucauacuuuuugaucagugccgu

SEQ ID NO: 183999 - RNA, 32 nt, Homo Sapiens
uggacucagggugcuccagcgcuggggagugg

SEQ ID NO: 184000 - RNA, 32 nt, Homo Sapiens
ggugacgacucuugcgcgcacacacacauaca

SEQ ID NO: 184001 - RNA, 32 nt, Homo Sapiens
agugcagugggacagcgcuggugcggagacug

SEQ ID NO: 184002 - RNA, 32 nt, Homo Sapiens
uuaaaaaggcuuuuguuuauuucuuugguuug

SEQ ID NO: 184003 - RNA, 31 nt, Homo Sapiens
gggaguggcccaggccugccccuucgcuccu

SEQ ID NO: 184004 - RNA, 32 nt, Homo Sapiens
gaggaagcccauagacccccaagccccacuga

SEQ ID NO: 184005 - RNA, 32 nt, Homo Sapiens
agagcucgcgguggacuccgacccggcgcaac

SEQ ID NO: 184006 - RNA, 32 nt, Homo Sapiens
aaggcagggguggaggggagggaccagcccgg

SEQ ID NO: 184007 - RNA, 32 nt, Homo Sapiens
auuuuaugaguucuguauaauuuuuugugguu

SEQ ID NO: 184008 - RNA, 32 nt, Homo Sapiens
gcggugugguggcagcaggcgcagcccagccu

SEQ ID NO: 184009 - RNA, 32 nt, Homo Sapiens
gcagcagggcagaggagacuauggggagccca

SEQ ID NO: 184010 - RNA, 32 nt, Homo Sapiens
ucuguaacgugaagacuucugcucuuuuuucu

SEQ ID NO: 184011 - RNA, 32 nt, Homo Sapiens
gaaaucacagaccuuuuaauucuuaagacaaa

SEQ ID NO: 184012 - RNA, 32 nt, Homo Sapiens
ucgcccgaagcccucccucguuacuguccgca

SEQ ID NO: 184013 - RNA, 32 nt, Homo Sapiens
acucggauuggcucuccuugcuccucaaacuu

SEQ ID NO: 184014 - RNA, 32 nt, Homo Sapiens
uuucaaaauaugugggaagcauuugauuuuca

SEQ ID NO: 184015 - RNA, 32 nt, Homo Sapiens
gauuuguauuucagaaacuaaaaaauaaaaug

SEQ ID NO: 184016 - RNA, 32 nt, Homo Sapiens
agagagugaacaugacauugguguguggccag

SEQ ID NO: 184017 - RNA, 32 nt, Homo Sapiens
aggugcggcggcgcccgaggcccgaggcggaa

SEQ ID NO: 184018 - RNA, 32 nt, Homo Sapiens
gccccugccgcaccgcugcagugagcucagcc

SEQ ID NO: 184019 - RNA, 32 nt, Homo Sapiens
ggcaagcaguggaauaagauuuuuguaaagaa

SEQ ID NO: 184020 - RNA, 32 nt, Homo Sapiens
uucauuuuggugaccaucaaggugcugggaga

SEQ ID NO: 184021 - RNA, 32 nt, Homo Sapiens
cccaagguuguuauaucuucauguccucauuu

SEQ ID NO: 184022 - RNA, 32 nt, Homo Sapiens
auaaaugaguccugaaacuuugaaaacugcug

SEQ ID NO: 184023 - RNA, 32 nt, Homo Sapiens
uaaaggacauauauauaacccuuuaaaaaaaa

SEQ ID NO: 184024 - RNA, 32 nt, Homo Sapiens
uuucguuauagauuuuaucuuaucuuuuggug

SEQ ID NO: 184025 - RNA, 32 nt, Homo Sapiens
augauguuguacagacaagagauaaacaguga

SEQ ID NO: 184026 - RNA, 32 nt, Homo Sapiens
ucugcccuccccacccugcauccuguggcccc

SEQ ID NO: 184027 - RNA, 32 nt, Homo Sapiens
ugcacugauuuuucacaggaaagcagaagaca

SEQ ID NO: 184028 - RNA, 32 nt, Homo Sapiens
ugacuuccugaacaucagcuucaauccuccau

SEQ ID NO: 184029 - RNA, 32 nt, Homo Sapiens
ggcgagagaaagacauuuggcuaugcauaaau

SEQ ID NO: 184030 - RNA, 32 nt, Homo Sapiens
ugucgacauguuuuuauaugucuaauaucuua

SEQ ID NO: 184031 - RNA, 32 nt, Homo Sapiens
aauuagggcuagauuugagcugcuuguaaguc

SEQ ID NO: 184032 - RNA, 32 nt, Homo Sapiens
ccugcugugcacccagcuccagugucucagcu

SEQ ID NO: 184033 - RNA, 32 nt, Homo Sapiens
gaaacccccauguuggccaggcuggucucaaa

SEQ ID NO: 184034 - RNA, 32 nt, Homo Sapiens
ucagccucccgaguaggugggaccacaggcau

SEQ ID NO: 184035 - RNA, 30 nt, Homo Sapiens
ugcgcgucugguggcggcggcgugauguuc

SEQ ID NO: 184036 - RNA, 32 nt, Homo Sapiens
gccuguuccaugaaugcuggcuaccuaugugu

SEQ ID NO: 184037 - RNA, 32 nt, Homo Sapiens
cucugagagguggucugggucugcuuccagaa

SEQ ID NO: 184038 - RNA, 32 nt, Homo Sapiens
uuuuuaccaaccccaacuaaacugggaguaag

SEQ ID NO: 184039 - RNA, 32 nt, Homo Sapiens
uuauuugaaacacuuuucuggcucuguuagug

SEQ ID NO: 184040 - RNA, 32 nt, Homo Sapiens
ucccugccaucuggcccuucccuuugucucag

SEQ ID NO: 184041 - RNA, 32 nt, Homo Sapiens
gauauacauuuuacuucuguguauguauggua

SEQ ID NO: 184042 - RNA, 32 nt, Homo Sapiens
uaaacaccaacugguccauacccauucauuaa

SEQ ID NO: 184043 - RNA, 32 nt, Homo Sapiens
uuauucuguaaaaaggugacuguuuuauaaau

SEQ ID NO: 184044 - RNA, 32 nt, Homo Sapiens
gugggcggccugggcagaagggcggcuggcug

SEQ ID NO: 184045 - RNA, 32 nt, Homo Sapiens
ugaggcuguguuacucuacucauuccaaacga

SEQ ID NO: 184046 - RNA, 32 nt, Homo Sapiens
auguguccauuucugcacacacguauaccucg

SEQ ID NO: 184047 - RNA, 32 nt, Homo Sapiens
ccuuggaggggccuggaugaccaagggguccg

SEQ ID NO: 184048 - RNA, 32 nt, Homo Sapiens
ugagacuaaaguugauccuugguuuuacauua

SEQ ID NO: 184049 - RNA, 32 nt, Homo Sapiens
uccagcaaguccagccagagccuuuugcauuc

SEQ ID NO: 184050 - RNA, 32 nt, Homo Sapiens
uuuaaauaaaaagucgaggacacggcggucgu

SEQ ID NO: 184051 - RNA, 32 nt, Homo Sapiens
gagagaagaaacaaagucaccuuucucuccag

SEQ ID NO: 184052 - RNA, 32 nt, Homo Sapiens
uuauguuaaucuaccuaccaucgcucugugua

SEQ ID NO: 184053 - RNA, 32 nt, Homo Sapiens
uugcuugguuugguggggcugcggccacuuaa

SEQ ID NO: 184054 - RNA, 32 nt, Homo Sapiens
cuucccugucuccaccccccacauucccguuu

SEQ ID NO: 184055 - RNA, 32 nt, Homo Sapiens
gucacugagccugggaagcucauggcggaggu

SEQ ID NO: 184056 - RNA, 31 nt, Homo Sapiens
ugcgcacacagcugccugccucgccagaugc

SEQ ID NO: 184057 - RNA, 32 nt, Homo Sapiens
aaugcccgugcagcagaagcaugcgacuuuca

SEQ ID NO: 184058 - RNA, 32 nt, Homo Sapiens
auuuuagguggacuuuucugagaucuuguaga

SEQ ID NO: 184059 - RNA, 32 nt, Homo Sapiens
gauucccuacuuuaaccuacuuacuuuauuaa

SEQ ID NO: 184060 - RNA, 32 nt, Homo Sapiens
acgaggucaggagaucgagaccauccuggaua

SEQ ID NO: 184061 - RNA, 30 nt, Homo Sapiens
cacguucuggacugucuucucccugcacaa

SEQ ID NO: 184062 - RNA, 32 nt, Homo Sapiens
ccaaucuccagggcuccuggggccacugcuga

SEQ ID NO: 184063 - RNA, 32 nt, Homo Sapiens
ugggcuuccagccccagcccucgaguccccug

SEQ ID NO: 184064 - RNA, 32 nt, Homo Sapiens
cucccggcggggucguaucggcguggacaugg

SEQ ID NO: 184065 - RNA, 32 nt, Homo Sapiens
ucaaaauuuuuagggcaugguuuuccugcagg

SEQ ID NO: 184066 - RNA, 32 nt, Homo Sapiens
gaaaacccagagaauuuacaccaccgugucau

SEQ ID NO: 184067 - RNA, 32 nt, Homo Sapiens
cucacuuuaaacaacuuuucaaauccaaagga

SEQ ID NO: 184068 - RNA, 30 nt, Homo Sapiens
aggggugucugugugugaaucucuguuugg

SEQ ID NO: 184069 - RNA, 32 nt, Homo Sapiens
uaauuaauuuaaacaaugucaaaauccuuuag

SEQ ID NO: 184070 - RNA, 32 nt, Homo Sapiens
agaucaaguaugcuaauuuuaagcaaauguaa

SEQ ID NO: 184071 - RNA, 32 nt, Homo Sapiens
gaugcgcccugcccggcgucgcggcggccgaa

SEQ ID NO: 184072 - RNA, 32 nt, Homo Sapiens
agcaggagaaaguugagguucuucaccuacca

SEQ ID NO: 184073 - RNA, 32 nt, Homo Sapiens
cucccugaucccacccccuccucccccagugu

SEQ ID NO: 184074 - RNA, 32 nt, Homo Sapiens
aaucagcccaacccagcccagacugggcuuuu

SEQ ID NO: 184075 - RNA, 32 nt, Homo Sapiens
cugacuguuuccucugccuggaccccacuugc

SEQ ID NO: 184076 - RNA, 32 nt, Homo Sapiens
uaaauaaucauuccucauguugcucucacggg

SEQ ID NO: 184077 - RNA, 32 nt, Homo Sapiens
ggacaugguaugcuuuggggcugggguagcau

SEQ ID NO: 184078 - RNA, 32 nt, Homo Sapiens
caacgaaggaggaggguggcggagauggagau

SEQ ID NO: 184079 - RNA, 28 nt, Homo Sapiens
gucauggcggccugcagguacugcugcu

SEQ ID NO: 184080 - RNA, 32 nt, Homo Sapiens
cauuaacaagcccucuaacaaaaacuuuacaa

SEQ ID NO: 184081 - RNA, 32 nt, Homo Sapiens
aaacucugucucccauguggcaugaccagccu

SEQ ID NO: 184082 - RNA, 32 nt, Homo Sapiens
gacaaacccauacauagcauucacuauaguga

SEQ ID NO: 184083 - RNA, 32 nt, Homo Sapiens
uuuaaaaacugggaggucaauaaaauuuaaac

SEQ ID NO: 184084 - RNA, 32 nt, Homo Sapiens
ggaguggagcucugccuauuuuagaggcaaag

SEQ ID NO: 184085 - RNA, 32 nt, Homo Sapiens
uucuaaagggcaugccaaguccugcuguauca

SEQ ID NO: 184086 - RNA, 32 nt, Homo Sapiens
aagugguacuuucacaauccaaagauuuuuag

SEQ ID NO: 184087 - RNA, 32 nt, Homo Sapiens
cugugaaacaggaagcuaaaugucuggaaagu

SEQ ID NO: 184088 - RNA, 32 nt, Homo Sapiens
ggggagcggagguggcggcggcggcgguagcg

SEQ ID NO: 184089 - RNA, 32 nt, Homo Sapiens
aacaaaauauugcauucuuuguuuggauucug

SEQ ID NO: 184090 - RNA, 32 nt, Homo Sapiens
acguaagggacuuuauagaugaacuaguggaa

SEQ ID NO: 184091 - RNA, 32 nt, Homo Sapiens
ugagacugcgguaguguuuuccuucuuuccuu

SEQ ID NO: 184092 - RNA, 32 nt, Homo Sapiens
cuucccccaguagaagagagccaggucuguag

SEQ ID NO: 184093 - RNA, 32 nt, Homo Sapiens
cagcuccuauuaugacuaauccuccuguagaa

SEQ ID NO: 184094 - RNA, 32 nt, Homo Sapiens
gagcaucugccgccgcgccgccgccacccucc

SEQ ID NO: 184095 - RNA, 32 nt, Homo Sapiens
ugcuagguaaccccaaacccagcuaaaacugu

SEQ ID NO: 184096 - RNA, 32 nt, Homo Sapiens
acacuauccaacaguggggaaauguuuaaguc

SEQ ID NO: 184097 - RNA, 32 nt, Homo Sapiens
ccgagccuacagagccgggagcagcugagccg

SEQ ID NO: 184098 - RNA, 32 nt, Homo Sapiens
augagugcaauaacaauacaagauauugaaua

SEQ ID NO: 184099 - RNA, 32 nt, Homo Sapiens
cggauccgggcaaugcuucguuuucuaaagga

SEQ ID NO: 184100 - RNA, 32 nt, Homo Sapiens
auuuaaauucugccucucuggaucugcuuccu

SEQ ID NO: 184101 - RNA, 32 nt, Homo Sapiens
cucccucaccccacccugcuuuuaaaaauucu

SEQ ID NO: 184102 - RNA, 32 nt, Homo Sapiens
aaucccuguuuuuguccaugaacuaagaauuu

SEQ ID NO: 184103 - RNA, 32 nt, Homo Sapiens
uuuauuugaaggacuuuaauauguaaaaauaa

SEQ ID NO: 184104 - RNA, 32 nt, Homo Sapiens
gcugggaggguggaggcccaggaaugggcggg

SEQ ID NO: 184105 - RNA, 32 nt, Homo Sapiens
gccgccugaggcgggcgggcgguauagagcgg

SEQ ID NO: 184106 - RNA, 30 nt, Homo Sapiens
ccaaaauaucaccacaaggguccucauaag

SEQ ID NO: 184107 - RNA, 32 nt, Homo Sapiens
ccccgcccgccagugccaaagcgcccggucgg

SEQ ID NO: 184108 - RNA, 32 nt, Homo Sapiens
ggugaggcgaggggcuugagaggaacgcccac

SEQ ID NO: 184109 - RNA, 32 nt, Homo Sapiens
cucggugcucccuuuggagauuuuuuaauccu

SEQ ID NO: 184110 - RNA, 32 nt, Homo Sapiens
aagacgccgggcgcggcggcgcgcggagaagu

SEQ ID NO: 184111 - RNA, 32 nt, Homo Sapiens
agcugagggccucccccuccacagcaaccaau

SEQ ID NO: 184112 - RNA, 32 nt, Homo Sapiens
accuaaacagugccgugcugcugcugggaagu

SEQ ID NO: 184113 - RNA, 32 nt, Homo Sapiens
auccaguggaggugaugcugaaguggcagccc

SEQ ID NO: 184114 - RNA, 32 nt, Homo Sapiens
gaggccacccccacgccgcgggcuuccagcgc

SEQ ID NO: 184115 - RNA, 29 nt, Homo Sapiens
aaaguugcuuguuucagcagugauauugu

SEQ ID NO: 184116 - RNA, 32 nt, Homo Sapiens
uuuguuuauauuucacaaacuccaccuacugc

SEQ ID NO: 184117 - RNA, 32 nt, Homo Sapiens
cgugcccugcaugcgguacuacggcaucugcg

SEQ ID NO: 184118 - RNA, 32 nt, Homo Sapiens
auaaaugaaugaugauaagucagucacucaug

SEQ ID NO: 184119 - RNA, 32 nt, Homo Sapiens
uaaccacauaucuauugaugugcuuugcuggu

SEQ ID NO: 184120 - RNA, 32 nt, Homo Sapiens
uccaagaugagccccaguguucuugccuccua

SEQ ID NO: 184121 - RNA, 32 nt, Homo Sapiens
agcuaagcaccugccccgggcuccacacuucc

SEQ ID NO: 184122 - RNA, 32 nt, Homo Sapiens
uuaucacuguaguguuaauaaaacaguauuuu

SEQ ID NO: 184123 - RNA, 32 nt, Homo Sapiens
ccccgggugucuauaauuaagcaagccuaagc

SEQ ID NO: 184124 - RNA, 32 nt, Homo Sapiens
guccguggcucccagggcacccguuccagggc

SEQ ID NO: 184125 - RNA, 32 nt, Homo Sapiens
cacucacccacccacacugguaagggaggaga

SEQ ID NO: 184126 - RNA, 32 nt, Homo Sapiens
ugccuuccuggccacugauuucugcaugggua

SEQ ID NO: 184127 - RNA, 32 nt, Homo Sapiens
aaaucaaccccagacucaaacucaaggucaac

SEQ ID NO: 184128 - RNA, 32 nt, Homo Sapiens
uccuguuuugcucaucccgcaccaccccaccc

SEQ ID NO: 184129 - RNA, 32 nt, Homo Sapiens
ucugcaaugacaagcugccuccccucuaugug

SEQ ID NO: 184130 - RNA, 32 nt, Homo Sapiens
ugcgcgccugcuccacguucucuucugucugu

SEQ ID NO: 184131 - RNA, 32 nt, Homo Sapiens
gccaggugguggccuguguggagggcugcuuc

SEQ ID NO: 184132 - RNA, 32 nt, Homo Sapiens
ggcugggcgugguggcucucgccuguaauccc

SEQ ID NO: 184133 - RNA, 32 nt, Homo Sapiens
cacggagaccuaucugagguacaggauggggc

SEQ ID NO: 184134 - RNA, 32 nt, Homo Sapiens
uucaggagaaaaguaaccauugguuuaaauau

SEQ ID NO: 184135 - RNA, 29 nt, Homo Sapiens
uugucuuguaaaguauauuuuaaaauaca

SEQ ID NO: 184136 - RNA, 32 nt, Homo Sapiens
agacucgcccucgccagugguguuacacauug

SEQ ID NO: 184137 - RNA, 32 nt, Homo Sapiens
accacuccgggagaggcggcgcugggcgucuu

SEQ ID NO: 184138 - RNA, 32 nt, Homo Sapiens
ccggggcagcccucccugccccgggagaagac

SEQ ID NO: 184139 - RNA, 32 nt, Homo Sapiens
gggaugggagaugcagagggcuggauggacug

SEQ ID NO: 184140 - RNA, 32 nt, Homo Sapiens
augucaaaaauauuuaggaauuuaauaaccuu

SEQ ID NO: 184141 - RNA, 32 nt, Homo Sapiens
cuguucugcuccauaaaauaggguaauaaagg

SEQ ID NO: 184142 - RNA, 32 nt, Homo Sapiens
ggcggcgcccaacgaugaccgcucccuggcgg

SEQ ID NO: 184143 - RNA, 32 nt, Homo Sapiens
guaacuuguaaaaacuaaaaguugcuugucua

SEQ ID NO: 184144 - RNA, 32 nt, Homo Sapiens
ugagaagcacaaggagacgacacgcgcauugu

SEQ ID NO: 184145 - RNA, 31 nt, Homo Sapiens
gccagcuucgcggcgcugccccgcggcggga

SEQ ID NO: 184146 - RNA, 32 nt, Homo Sapiens
ucacuuggaaaacauaucgcuuaggauaaaau

SEQ ID NO: 184147 - RNA, 32 nt, Homo Sapiens
uagugauguaaauaaacauguucucuuucaaa

SEQ ID NO: 184148 - RNA, 32 nt, Homo Sapiens
ccuauucccccucccagcgcuucagacaccuc

SEQ ID NO: 184149 - RNA, 32 nt, Homo Sapiens
acuaagaucucauaaagaaguaaucuggauuc

SEQ ID NO: 184150 - RNA, 32 nt, Homo Sapiens
aggcucccagacaugacagccaucaucaaaga

SEQ ID NO: 184151 - RNA, 31 nt, Homo Sapiens
agcuuuuauugagcauugucaaauuuguaag

SEQ ID NO: 184152 - RNA, 32 nt, Homo Sapiens
cacgucucggaaggucugugacugcugaaaac

SEQ ID NO: 184153 - RNA, 32 nt, Homo Sapiens
agucuccaacugggagagcugcagcugccgag

SEQ ID NO: 184154 - RNA, 32 nt, Homo Sapiens
ucugauaagcaaggauuguuucccguaugauu

SEQ ID NO: 184155 - RNA, 31 nt, Homo Sapiens
gaggaucauuugagugcaggaguucaaggac

SEQ ID NO: 184156 - RNA, 32 nt, Homo Sapiens
aauuuauugcuaaagaaaauaaauaugaucaa

SEQ ID NO: 184157 - RNA, 32 nt, Homo Sapiens
aguggcaccccuccccucaccacagaugcuga

SEQ ID NO: 184158 - RNA, 32 nt, Homo Sapiens
ggcuugcuuccggagagcgggaaggcuaaaac

SEQ ID NO: 184159 - RNA, 32 nt, Homo Sapiens
ucagaaaagaugugcagauaucacagaggccu

SEQ ID NO: 184160 - RNA, 32 nt, Homo Sapiens
guaaacagauucgaauuuuacuucugaacgaa

SEQ ID NO: 184161 - RNA, 27 nt, Homo Sapiens
ccaugccucacucguacccagcccuuu

SEQ ID NO: 184162 - RNA, 32 nt, Homo Sapiens
aggcaggugaauuguuugaaccugggaggugg

SEQ ID NO: 184163 - RNA, 32 nt, Homo Sapiens
gagaaaaaucaucaaacaucaacaauuaucaa

SEQ ID NO: 184164 - RNA, 32 nt, Homo Sapiens
uccccagccccgcuccucccucuguggacaca

SEQ ID NO: 184165 - RNA, 32 nt, Homo Sapiens
caacucccugucauuccuaaccuaaccuuaga

SEQ ID NO: 184166 - RNA, 32 nt, Homo Sapiens
ccuggaccuuccucgacuuuggccucgaccug

SEQ ID NO: 184167 - RNA, 32 nt, Homo Sapiens
aauuuaccuucacaccagcaguguauaggcgu

SEQ ID NO: 184168 - RNA, 32 nt, Homo Sapiens
ugagggcagaccagggccagguagacggggcu

SEQ ID NO: 184169 - RNA, 32 nt, Homo Sapiens
aguugaaaagaaacagaaguaagauaaauagc

SEQ ID NO: 184170 - RNA, 32 nt, Homo Sapiens
guuuaacccaaauaucugaauggucaucuggu

SEQ ID NO: 184171 - RNA, 32 nt, Homo Sapiens
cggcagggagacggggcuccuggggugguuaa

SEQ ID NO: 184172 - RNA, 32 nt, Homo Sapiens
ggcaucuggcccggccgcuccucgcugcgcuu

SEQ ID NO: 184173 - RNA, 32 nt, Homo Sapiens
ugugaagaguaauuugguacaaugaaggcagu

SEQ ID NO: 184174 - RNA, 32 nt, Homo Sapiens
cuggaucugucucucccuuccccuccugggac

SEQ ID NO: 184175 - RNA, 32 nt, Homo Sapiens
cuucccaggccuuuuguuccugucccggaaag

SEQ ID NO: 184176 - RNA, 32 nt, Homo Sapiens
caucagauuguuaagggcauuuuuauacucag

SEQ ID NO: 184177 - RNA, 32 nt, Homo Sapiens
uugcccuagaccagcuccucuccaauccugag

SEQ ID NO: 184178 - RNA, 32 nt, Homo Sapiens
cuuugggaggcugaggcggguggaucaagagg

SEQ ID NO: 184179 - RNA, 32 nt, Homo Sapiens
aaagaggcugguuuugcucccacucuuaguug

SEQ ID NO: 184180 - RNA, 32 nt, Homo Sapiens
caggcugugcgcgguuugcacggcgguccgcg

SEQ ID NO: 184181 - RNA, 32 nt, Homo Sapiens
cugucaucuauuauuuuaacaggaguuaaaau

SEQ ID NO: 184182 - RNA, 32 nt, Homo Sapiens
uaggagcccccucccugcugugguccugcccu

SEQ ID NO: 184183 - RNA, 32 nt, Homo Sapiens
gccgggggaggagggggcgcaccgggacugac

SEQ ID NO: 184184 - RNA, 32 nt, Homo Sapiens
gcuaccucuccugcuuuucucuaauuauuacg

SEQ ID NO: 184185 - RNA, 32 nt, Homo Sapiens
cagccccgccccagccccugcucaggucugag

SEQ ID NO: 184186 - RNA, 32 nt, Homo Sapiens
cucuaaacaacaacagugugcgaaggcccagg

SEQ ID NO: 184187 - RNA, 32 nt, Homo Sapiens
uggggcaggcacacacaccucccgccagcucc

SEQ ID NO: 184188 - RNA, 32 nt, Homo Sapiens
agacggucggggcugcuugcuaacuccaggaa

SEQ ID NO: 184189 - RNA, 32 nt, Homo Sapiens
ccacagccccaccgcccgcccgcggaccuuca

SEQ ID NO: 184190 - RNA, 32 nt, Homo Sapiens
ucuuccauagacagaagcuuagucuguuuuca

SEQ ID NO: 184191 - RNA, 30 nt, Homo Sapiens
gcucgcuucugugcugaagaugcuuugcaa

SEQ ID NO: 184192 - RNA, 32 nt, Homo Sapiens
gagaauguuaaauuauuuugaugugaacugca

SEQ ID NO: 184193 - RNA, 32 nt, Homo Sapiens
ucaaugccagcauggagacgauacagaagucc

SEQ ID NO: 184194 - RNA, 32 nt, Homo Sapiens
aauacucucaucaaaaucaggguauuaacauu

SEQ ID NO: 184195 - RNA, 32 nt, Homo Sapiens
ggugcugcuuuuucucccuccuccucaaguuc

SEQ ID NO: 184196 - RNA, 32 nt, Homo Sapiens
gcugccuucucccuguccuccuccuggauugu

SEQ ID NO: 184197 - RNA, 32 nt, Homo Sapiens
ccuuacuuuuuuguuuuccuuccugaggugaa

SEQ ID NO: 184198 - RNA, 32 nt, Homo Sapiens
agcuaagguucugaaauauucuauguauauau

SEQ ID NO: 184199 - RNA, 32 nt, Homo Sapiens
uccugugugcuugucuuguugcuucaaugagg

SEQ ID NO: 184200 - RNA, 32 nt, Homo Sapiens
caaaguucagcucaaagagauuuugauuaauu

SEQ ID NO: 184201 - RNA, 32 nt, Homo Sapiens
acaguaguguugauuucuuaaucuugacaaau

SEQ ID NO: 184202 - RNA, 32 nt, Homo Sapiens
uucuuggagcaaaaacuaaaugcugaacuaag

SEQ ID NO: 184203 - RNA, 32 nt, Homo Sapiens
ugucggacgcccgcgccgcuucaccggcugcc

SEQ ID NO: 184204 - RNA, 32 nt, Homo Sapiens
acauccuuuuccucagcgucaggaucuuaguc

SEQ ID NO: 184205 - RNA, 32 nt, Homo Sapiens
cggccgcgguuuccaggaggaagcaaggaugc

SEQ ID NO: 184206 - RNA, 32 nt, Homo Sapiens
auaggagcccaugcuagaaguacggucucuca

SEQ ID NO: 184207 - RNA, 32 nt, Homo Sapiens
ugugccccgaguuccgcccacccgcacccucu

SEQ ID NO: 184208 - RNA, 32 nt, Homo Sapiens
acagccucugugacugcaguggagcggcgaau

SEQ ID NO: 184209 - RNA, 32 nt, Homo Sapiens
accugggugcgguggcucacgccuguaauccc

SEQ ID NO: 184210 - RNA, 31 nt, Homo Sapiens
ugcauggagccccaguagacagaaagugaag

SEQ ID NO: 184211 - RNA, 32 nt, Homo Sapiens
caccaaagcuggcugcgcuucuccggguauuu

SEQ ID NO: 184212 - RNA, 32 nt, Homo Sapiens
cauccaaaaagcaaaguggcuuauaaguaaau

SEQ ID NO: 184213 - RNA, 32 nt, Homo Sapiens
aaacagagaugugguucuuaauguuuaacaga

SEQ ID NO: 184214 - RNA, 32 nt, Homo Sapiens
gccucucacagcaguuggccacaguuacaggg

SEQ ID NO: 184215 - RNA, 32 nt, Homo Sapiens
caaggucguggucgugcugguccucgugcuga

SEQ ID NO: 184216 - RNA, 32 nt, Homo Sapiens
auagggguugcuggcaugaaaauguauaacuu

SEQ ID NO: 184217 - RNA, 32 nt, Homo Sapiens
ucaagucauccuuaaacaaaaugauccaccua

SEQ ID NO: 184218 - RNA, 32 nt, Homo Sapiens
cccagaacccucacuacuguaacauacaacgg

SEQ ID NO: 184219 - RNA, 32 nt, Homo Sapiens
uugcuaugaugaugguguuuuggggaugagag

SEQ ID NO: 184220 - RNA, 32 nt, Homo Sapiens
ccagcuuuccgugguuauugggcccccucugc

SEQ ID NO: 184221 - RNA, 32 nt, Homo Sapiens
gcuggggcggguggcaucauggacgagaaggu

SEQ ID NO: 184222 - RNA, 32 nt, Homo Sapiens
ucuuuuuguuacuuuuuuguccguguccucuc

SEQ ID NO: 184223 - RNA, 32 nt, Homo Sapiens
gcucuggaggagugggggcggcugcguagcug

SEQ ID NO: 184224 - RNA, 32 nt, Homo Sapiens
uaaaugucuucuuuugagaagugucuguucau

SEQ ID NO: 184225 - RNA, 32 nt, Homo Sapiens
cgcaugacaccuuaucaccucccuccuugggu

SEQ ID NO: 184226 - RNA, 32 nt, Homo Sapiens
uaagauggcgagaccccaagagggaucucaua

SEQ ID NO: 184227 - RNA, 32 nt, Homo Sapiens
ggguucuaauaaauuaaaaauuaaacuugaaa

SEQ ID NO: 184228 - RNA, 32 nt, Homo Sapiens
ggcaggagggcgguccgaacgugcccccaccc

SEQ ID NO: 184229 - RNA, 32 nt, Homo Sapiens
augguuugucugucuuuuuuccucugaucagu

SEQ ID NO: 184230 - RNA, 32 nt, Homo Sapiens
ccccaaggccaccccaccagaagugccccugc

SEQ ID NO: 184231 - RNA, 32 nt, Homo Sapiens
ccaacacaaaaauaaagaacuucaaauaggga

SEQ ID NO: 184232 - RNA, 32 nt, Homo Sapiens
ccugagcccucccagggccagguuccugacag

SEQ ID NO: 184233 - RNA, 32 nt, Homo Sapiens
gcgggccagccugggccccagcccacaccuuc

SEQ ID NO: 184234 - RNA, 32 nt, Homo Sapiens
ccucuagcugggugugguggcaugcaccugua

SEQ ID NO: 184235 - RNA, 32 nt, Homo Sapiens
auucugugaaaauauuuguucuuaugucaaag

SEQ ID NO: 184236 - RNA, 32 nt, Homo Sapiens
cccacucccccuccaccggacacggcuggggc

SEQ ID NO: 184237 - RNA, 32 nt, Homo Sapiens
ucugguuguaaaucugguuacagcauaacuag

SEQ ID NO: 184238 - RNA, 32 nt, Homo Sapiens
uccuccgcgucccucgccccagcccccugccc

SEQ ID NO: 184239 - RNA, 32 nt, Homo Sapiens
aaaauacaaaaauuagccagguauggugguga

SEQ ID NO: 184240 - RNA, 32 nt, Homo Sapiens
accucgagggacgcgagcgggcggcggggcug

SEQ ID NO: 184241 - RNA, 32 nt, Homo Sapiens
ggucagcggugacaucccaaagggcaggcccg

SEQ ID NO: 184242 - RNA, 32 nt, Homo Sapiens
uuucaaaaagccacgucgugcugcugcuggaa

SEQ ID NO: 184243 - RNA, 32 nt, Homo Sapiens
auucuuacacgacuacaguacuucaaauggca

SEQ ID NO: 184244 - RNA, 32 nt, Homo Sapiens
ugcgcgcuugcugccgggccuacgcgcucacc

SEQ ID NO: 184245 - RNA, 32 nt, Homo Sapiens
ccucaagauaaaacucugucauucagaagaug

SEQ ID NO: 184246 - RNA, 32 nt, Homo Sapiens
ugaggaaugcaaaauaagcauggauuaaguga

SEQ ID NO: 184247 - RNA, 32 nt, Homo Sapiens
gcuggccuuuuaaaucgacgucucucucacca

SEQ ID NO: 184248 - RNA, 32 nt, Homo Sapiens
caauauacaaauaaaagacaucccuguagcau

SEQ ID NO: 184249 - RNA, 32 nt, Homo Sapiens
cucuguaauguuucugauugcauguuucuuca

SEQ ID NO: 184250 - RNA, 32 nt, Homo Sapiens
cucugcauuuacacacacaccacacacgcaca

SEQ ID NO: 184251 - RNA, 32 nt, Homo Sapiens
uggcagggcacgugcgggaggaaguggagcuc

SEQ ID NO: 184252 - RNA, 32 nt, Homo Sapiens
ccauccaaucuauuauuucucuaauuaugcaa

SEQ ID NO: 184253 - RNA, 32 nt, Homo Sapiens
aaaaaguaaaagaccgaagaaggaggcuggag

SEQ ID NO: 184254 - RNA, 32 nt, Homo Sapiens
agccccugccagccaccugcaccugcugcccu

SEQ ID NO: 184255 - RNA, 32 nt, Homo Sapiens
gagucaucacuaggugcuuuguccuuuuugua

SEQ ID NO: 184256 - RNA, 32 nt, Homo Sapiens
cuggaauucuggucucccacucgaucccuucg

SEQ ID NO: 184257 - RNA, 32 nt, Homo Sapiens
cggacccagccaggacccacagcccuccccag

SEQ ID NO: 184258 - RNA, 32 nt, Homo Sapiens
ggugacuaucagacuuaagaugcugaacuuug

SEQ ID NO: 184259 - RNA, 32 nt, Homo Sapiens
caggaggcaaauguuaucacuacacauggaaa

SEQ ID NO: 184260 - RNA, 32 nt, Homo Sapiens
ccuccagccgggcuccuccaccgggccuugca

SEQ ID NO: 184261 - RNA, 32 nt, Homo Sapiens
aaggcgcgcgccccuccccgccugccucccgg

SEQ ID NO: 184262 - RNA, 32 nt, Homo Sapiens
gcaaauguaaguauuuuaaauagaaucauaug

SEQ ID NO: 184263 - RNA, 32 nt, Homo Sapiens
ucaucucuccccauuucuuucuucccauaaag

SEQ ID NO: 184264 - RNA, 32 nt, Homo Sapiens
aacgucucacggugcugguccaccuggcagau

SEQ ID NO: 184265 - RNA, 32 nt, Homo Sapiens
ggucaaaaaucagauuauuuucauucaaauga

SEQ ID NO: 184266 - RNA, 32 nt, Homo Sapiens
gauuuuuguuagcagaagaauuuuaccuauug

SEQ ID NO: 184267 - RNA, 32 nt, Homo Sapiens
uauuugaauuuaugggugauuuagagcuugug

SEQ ID NO: 184268 - RNA, 32 nt, Homo Sapiens
auuuuuuggaaucucaccacauauacuuuguu

SEQ ID NO: 184269 - RNA, 32 nt, Homo Sapiens
uagguugauggugcuuaacaaacaugaaguau

SEQ ID NO: 184270 - RNA, 32 nt, Homo Sapiens
cagaaagauggagaggcaugggggcccaaagg

SEQ ID NO: 184271 - RNA, 32 nt, Homo Sapiens
ucuuugcacacacuccacgggcaguuggaggu

SEQ ID NO: 184272 - RNA, 32 nt, Homo Sapiens
gcuuaucauacaugcacauaaaacacuucuug

SEQ ID NO: 184273 - RNA, 32 nt, Homo Sapiens
gcccugcccucccaggaguccagccaggggcu

SEQ ID NO: 184274 - RNA, 32 nt, Homo Sapiens
aguggccuugcucugugugagccccgugcgag

SEQ ID NO: 184275 - RNA, 32 nt, Homo Sapiens
gccuagcaagcuccagccccagccgcugaccc

SEQ ID NO: 184276 - RNA, 32 nt, Homo Sapiens
uaggcauguacuuauucauacuggucagaggc

SEQ ID NO: 184277 - RNA, 32 nt, Homo Sapiens
aaaauaacuucucugcaagauuucauaauuga

SEQ ID NO: 184278 - RNA, 32 nt, Homo Sapiens
agccaagcugcugcgcgccccggcgcccagcu

SEQ ID NO: 184279 - RNA, 32 nt, Homo Sapiens
guuuguuucuucacuuauccuguucucugaag

SEQ ID NO: 184280 - RNA, 32 nt, Homo Sapiens
ggugcgggcagacaccaauuuaggcaacauau

SEQ ID NO: 184281 - RNA, 32 nt, Homo Sapiens
agaaguacaugaagagcagcuggucaaccugc

SEQ ID NO: 184282 - RNA, 32 nt, Homo Sapiens
cuguaaaacacacacacacacacacacacaca

SEQ ID NO: 184283 - RNA, 32 nt, Homo Sapiens
ccgccgucgggggaagggcgccacaggccggg

SEQ ID NO: 184284 - RNA, 32 nt, Homo Sapiens
acucugauuuucaagcuccucauuuacggcuc

SEQ ID NO: 184285 - RNA, 32 nt, Homo Sapiens
guaauuaaaggcacuuaucaaauugucuuugu

SEQ ID NO: 184286 - RNA, 32 nt, Homo Sapiens
ggugcucagugcuuguuucugucguggguggc

SEQ ID NO: 184287 - RNA, 30 nt, Homo Sapiens
cucaaagggacagaggacagauucauaauu

SEQ ID NO: 184288 - RNA, 32 nt, Homo Sapiens
gaagagaaaaauacuguaaaacgugucgugaa

SEQ ID NO: 184289 - RNA, 32 nt, Homo Sapiens
uugcuagccaucuugaucuguguuuuauugac

SEQ ID NO: 184290 - RNA, 32 nt, Homo Sapiens
uucaagcuggguuuguguagacaacucuguua

SEQ ID NO: 184291 - RNA, 32 nt, Homo Sapiens
ucugcccuguguuucggaaaccagagcacagu

SEQ ID NO: 184292 - RNA, 32 nt, Homo Sapiens
cccuccuuuccaccacaugugcacaugcacgu

SEQ ID NO: 184293 - RNA, 32 nt, Homo Sapiens
gaaaagggagggcucugcgggcggcggcggcg

SEQ ID NO: 184294 - RNA, 32 nt, Homo Sapiens
augaccccauccccgccuccuuccucgcuccu

SEQ ID NO: 184295 - RNA, 32 nt, Homo Sapiens
agaaaugcaaagcuuccaggcuccacuuuuca

SEQ ID NO: 184296 - RNA, 32 nt, Homo Sapiens
uaaauccuuuuuguccuucuaagauguccuau

SEQ ID NO: 184297 - RNA, 32 nt, Homo Sapiens
ggcggugggaggaggauggccgggggugcugg

SEQ ID NO: 184298 - RNA, 32 nt, Homo Sapiens
ccugaacuucggggcaccugggcugcugcccu

SEQ ID NO: 184299 - RNA, 30 nt, Homo Sapiens
gauuuguggggaaagcugauaugcaguaac

SEQ ID NO: 184300 - RNA, 32 nt, Homo Sapiens
ucuaaaguuuauugauacuucccuuuuaugua

SEQ ID NO: 184301 - RNA, 32 nt, Homo Sapiens
uguucccagcugagggagggcuggggcggggg

SEQ ID NO: 184302 - RNA, 32 nt, Homo Sapiens
ggaggagcacauuuuucuugacccucaccuac

SEQ ID NO: 184303 - RNA, 32 nt, Homo Sapiens
gcucugaagaugugucacauuauauuauaaac

SEQ ID NO: 184304 - RNA, 32 nt, Homo Sapiens
caccaugucugguacaguguaggugcucaagg

SEQ ID NO: 184305 - RNA, 32 nt, Homo Sapiens
ucccaggcacccggccuuucuuucucccucuu

SEQ ID NO: 184306 - RNA, 32 nt, Homo Sapiens
acuuucauggauguaugugacaguguucaagu

SEQ ID NO: 184307 - RNA, 32 nt, Homo Sapiens
uaggaaauaccaauuaaaaauauaauaaauag

SEQ ID NO: 184308 - RNA, 32 nt, Homo Sapiens
ggccuggcaaaauaaaacauguugaauucccc

SEQ ID NO: 184309 - RNA, 32 nt, Homo Sapiens
cacuuucaaagauuguaaauaguucauucaau

SEQ ID NO: 184310 - RNA, 32 nt, Homo Sapiens
augagcagccucagccucagaauuaccaggag

SEQ ID NO: 184311 - RNA, 29 nt, Homo Sapiens
guauuuccgguccggggcacccccuguca

SEQ ID NO: 184312 - RNA, 32 nt, Homo Sapiens
ugauucuacuuauggacuauaaguacuuuauu

SEQ ID NO: 184313 - RNA, 32 nt, Homo Sapiens
aaagauaucccugcucuagacuccauggucua

SEQ ID NO: 184314 - RNA, 32 nt, Homo Sapiens
cauccuucagcauagacuuaacucccuuaagc

SEQ ID NO: 184315 - RNA, 30 nt, Homo Sapiens
uuucaugucuguggcucaccagcuuuuccc

SEQ ID NO: 184316 - RNA, 32 nt, Homo Sapiens
ucauacacaagcgugucaggcugucaguguuu

SEQ ID NO: 184317 - RNA, 32 nt, Homo Sapiens
aagagcucucacacuuuuuuuuccuuggcguc

SEQ ID NO: 184318 - RNA, 32 nt, Homo Sapiens
gguggggccccuccuccuccugagcuguaagg

SEQ ID NO: 184319 - RNA, 32 nt, Homo Sapiens
ccacuuccccaguccccaacccugccagugga

SEQ ID NO: 184320 - RNA, 32 nt, Homo Sapiens
cauucagcaaaguggcauaaaaaucaccuggu

SEQ ID NO: 184321 - RNA, 32 nt, Homo Sapiens
cagccccagaucuggcggaagaagauggagaa

SEQ ID NO: 184322 - RNA, 32 nt, Homo Sapiens
cucccuucccccuguuugugaccugaauuuac

SEQ ID NO: 184323 - RNA, 32 nt, Homo Sapiens
acuccggucugagcgacagagcaagaaucugu

SEQ ID NO: 184324 - RNA, 32 nt, Homo Sapiens
aaauauuguuuccucccaugagguuuccaauu

SEQ ID NO: 184325 - RNA, 32 nt, Homo Sapiens
gugcuauacacacacacacacacacacacaca

SEQ ID NO: 184326 - RNA, 32 nt, Homo Sapiens
gcaacagucagugcucuagaggaggcaggaau

SEQ ID NO: 184327 - RNA, 31 nt, Homo Sapiens
agaagaaauuaaaaacauguaaauacaaagg

SEQ ID NO: 184328 - RNA, 32 nt, Homo Sapiens
gccuguuccggugauguagacaauaauuaaca

SEQ ID NO: 184329 - RNA, 32 nt, Homo Sapiens
cauagcaggagagggcucccagacacaggccc

SEQ ID NO: 184330 - RNA, 32 nt, Homo Sapiens
caaugugucauaugucuuuucuuagcaaaagg

SEQ ID NO: 184331 - RNA, 32 nt, Homo Sapiens
ugagcuagacgguuuccuuccuccccucucaa

SEQ ID NO: 184332 - RNA, 32 nt, Homo Sapiens
gaagcaccuuggcauagagcacccaggcaucg

SEQ ID NO: 184333 - RNA, 32 nt, Homo Sapiens
uuguuuaaaaacaauacaaguuuuagaaaaca

SEQ ID NO: 184334 - RNA, 32 nt, Homo Sapiens
uuccuggccuucccuuuaacacaguucugcug

SEQ ID NO: 184335 - RNA, 32 nt, Homo Sapiens
auugugugcacccacccacccaccacacugga

SEQ ID NO: 184336 - RNA, 32 nt, Homo Sapiens
agcaguaauuauugaguaaaucuugcauucua

SEQ ID NO: 184337 - RNA, 32 nt, Homo Sapiens
uuucucuaaguugguuguccugucccagugug

SEQ ID NO: 184338 - RNA, 32 nt, Homo Sapiens
gcaugugacuggcuccgugcugccggguuccc

SEQ ID NO: 184339 - RNA, 32 nt, Homo Sapiens
acacggaaaaagaugaaaaaacagcucacaac

SEQ ID NO: 184340 - RNA, 32 nt, Homo Sapiens
guuguccgagggugugcccugcgguuccuguc

SEQ ID NO: 184341 - RNA, 32 nt, Homo Sapiens
ugcuggaggaggagagagcucugcuggcauga

SEQ ID NO: 184342 - RNA, 32 nt, Homo Sapiens
guaaauuuguuucacguaaaucuuaauuuuca

SEQ ID NO: 184343 - RNA, 32 nt, Homo Sapiens
caaacaggauggugugguagagggucccagga

SEQ ID NO: 184344 - RNA, 32 nt, Homo Sapiens
aaucauuaucccaguuauaaccuugaccaaag

SEQ ID NO: 184345 - RNA, 32 nt, Homo Sapiens
ccuacaacccgucccugccccauccugaguuc

SEQ ID NO: 184346 - RNA, 32 nt, Homo Sapiens
gugaaaauauaaaaugcaaaaugcuuuuguca

SEQ ID NO: 184347 - RNA, 32 nt, Homo Sapiens
cuuaucuugagacucuuaaaagcaucagucug

SEQ ID NO: 184348 - RNA, 32 nt, Homo Sapiens
cgcuccggccuggcccggugccccggaccuga

SEQ ID NO: 184349 - RNA, 32 nt, Homo Sapiens
ccgaaacuucggggcccgaggaccagggaaga

SEQ ID NO: 184350 - RNA, 32 nt, Homo Sapiens
cucuggcccuggauuccccauccaucucauug

SEQ ID NO: 184351 - RNA, 32 nt, Homo Sapiens
cggcgcccgcggcaccaugaucuccaccaagg

SEQ ID NO: 184352 - RNA, 32 nt, Homo Sapiens
cccuggaggagaagggccucaaacugugcaug

SEQ ID NO: 184353 - RNA, 32 nt, Homo Sapiens
uuauugguauacuguuauauccucaacuugga

SEQ ID NO: 184354 - RNA, 32 nt, Homo Sapiens
uacaaaaaaugcaaaaauaaaaaauauaguac

SEQ ID NO: 184355 - RNA, 32 nt, Homo Sapiens
acaugugugcaguugucuucugccagccaugg

SEQ ID NO: 184356 - RNA, 32 nt, Homo Sapiens
ucgaucuacguuccaauuggggccguaccaug

SEQ ID NO: 184357 - RNA, 32 nt, Homo Sapiens
gauauuucaaggaauaaagccggagcuccuga

SEQ ID NO: 184358 - RNA, 32 nt, Homo Sapiens
aggcugcggcggaggagguggcggcggccgaa

SEQ ID NO: 184359 - RNA, 32 nt, Homo Sapiens
cugggaaaaaaguuuugaugaaauucuugaag

SEQ ID NO: 184360 - RNA, 32 nt, Homo Sapiens
ccuucuacccugguggcaaacacaugaaagcu

SEQ ID NO: 184361 - RNA, 32 nt, Homo Sapiens
uuuacccaacuggcaagucgugcuaacccgaa

SEQ ID NO: 184362 - RNA, 32 nt, Homo Sapiens
cccaccuacuguggaggcugaggugagaggau

SEQ ID NO: 184363 - RNA, 32 nt, Homo Sapiens
acccccagcucccauccaaucaccgucccucc

SEQ ID NO: 184364 - RNA, 32 nt, Homo Sapiens
agcauuguauaugugaagcaaacucuaaaauu

SEQ ID NO: 184365 - RNA, 32 nt, Homo Sapiens
gaauguggcagagcuuuuaaccaguccgcaaa

SEQ ID NO: 184366 - RNA, 32 nt, Homo Sapiens
uguauucuaaaaccucuuuguuuaguuaguac

SEQ ID NO: 184367 - RNA, 32 nt, Homo Sapiens
gcuaaugugcaaacauguacagaagaaauaga

SEQ ID NO: 184368 - RNA, 32 nt, Homo Sapiens
ggggugcccucccagacccccuugcccaggcc

SEQ ID NO: 184369 - RNA, 32 nt, Homo Sapiens
cuggcaaagggagggcccugggcugggugcag

SEQ ID NO: 184370 - RNA, 32 nt, Homo Sapiens
caugccaagagucagugccaucugauuggcug

SEQ ID NO: 184371 - RNA, 32 nt, Homo Sapiens
gaccucaggugauccgcccaccucagccuccc

SEQ ID NO: 184372 - RNA, 32 nt, Homo Sapiens
aaccucaggugauccgcccaccucggccuccc

SEQ ID NO: 184373 - RNA, 32 nt, Homo Sapiens
gaccucaggugaucugcccaccccagccuccc

SEQ ID NO: 184374 - RNA, 32 nt, Homo Sapiens
aagggugaauucucucuuccagagcugugaca

SEQ ID NO: 184375 - RNA, 32 nt, Homo Sapiens
cgggacgcgggccuggcccguguguguccugg

SEQ ID NO: 184376 - RNA, 32 nt, Homo Sapiens
ccaacaggccgggaagacaguugacuucaccc

SEQ ID NO: 184377 - RNA, 32 nt, Homo Sapiens
cuuccuuucccgccgccgcccagccgccgucc

SEQ ID NO: 184378 - RNA, 32 nt, Homo Sapiens
gaacauuucaaauugaauuugcacgguuugug

SEQ ID NO: 184379 - RNA, 32 nt, Homo Sapiens
gaaaggaggcugggaccaggggaccagguagu

SEQ ID NO: 184380 - RNA, 32 nt, Homo Sapiens
uguccugaccccacgguuccugucccaugacc

SEQ ID NO: 184381 - RNA, 32 nt, Homo Sapiens
ucucagcacaggugcugugugacggccucggg

SEQ ID NO: 184382 - RNA, 32 nt, Homo Sapiens
gcggagaccugugcgccgcgccucugaggcgc

SEQ ID NO: 184383 - RNA, 32 nt, Homo Sapiens
gcugauggugcuggagcuguuaucauagcuag

SEQ ID NO: 184384 - RNA, 29 nt, Homo Sapiens
aaucuuucagugauguuuuagaauuuuuu

SEQ ID NO: 184385 - RNA, 32 nt, Homo Sapiens
ucuguaauucuauugugccuaugauaaauuca

SEQ ID NO: 184386 - RNA, 32 nt, Homo Sapiens
cagguuuccuucccuuucccaagccucucucu

SEQ ID NO: 184387 - RNA, 32 nt, Homo Sapiens
uuucaucauguucauuugauacacaagugaac

SEQ ID NO: 184388 - RNA, 32 nt, Homo Sapiens
ugcccgcccucccccuaggcccagagcucuac

SEQ ID NO: 184389 - RNA, 32 nt, Homo Sapiens
uuaaaacauuggagaauagcuuguuauaaaau

SEQ ID NO: 184390 - RNA, 32 nt, Homo Sapiens
auagaggaaauucccuaugccccaaaguuucu

SEQ ID NO: 184391 - RNA, 32 nt, Homo Sapiens
ggcaguuaucuaaaggaugcacuggagcugga

SEQ ID NO: 184392 - RNA, 32 nt, Homo Sapiens
cagagaggagguggcuaugucuucuuaagccu

SEQ ID NO: 184393 - RNA, 32 nt, Homo Sapiens
ucauaagauaaugcugcagcuuacgguggaca

SEQ ID NO: 184394 - RNA, 32 nt, Homo Sapiens
agaugauaaaauuuauaauauacauagaagug

SEQ ID NO: 184395 - RNA, 32 nt, Homo Sapiens
accaggggccccagcaccaccccgggggccua

SEQ ID NO: 184396 - RNA, 32 nt, Homo Sapiens
cacuguccgccugcuccaucauguauagcgcc

SEQ ID NO: 184397 - RNA, 32 nt, Homo Sapiens
gauauacuggagauaaaaccuuuaaauguaaa

SEQ ID NO: 184398 - RNA, 32 nt, Homo Sapiens
ccggacucaagccccggacucaggcccccacc

SEQ ID NO: 184399 - RNA, 32 nt, Homo Sapiens
accaccuccagaagugagaagcugggaguggc

SEQ ID NO: 184400 - RNA, 32 nt, Homo Sapiens
guacagauguguaugggaaaccccaaccccua

SEQ ID NO: 184401 - RNA, 32 nt, Homo Sapiens
cuugccugcccccagcucacacucagcguggg

SEQ ID NO: 184402 - RNA, 32 nt, Homo Sapiens
ccccagcccugcucgugagauugggcugggua

SEQ ID NO: 184403 - RNA, 32 nt, Homo Sapiens
gcacuaaguccucccuguuuucuucuguaauu

SEQ ID NO: 184404 - RNA, 26 nt, Homo Sapiens
gauggagagaaagaagaugagucugg

SEQ ID NO: 184405 - RNA, 32 nt, Homo Sapiens
ucuuuagguucaaaauggugaauuucuuuauu

SEQ ID NO: 184406 - RNA, 32 nt, Homo Sapiens
gcuucagggugggaguaguuggagcauugggg

SEQ ID NO: 184407 - RNA, 32 nt, Homo Sapiens
cguuucuuuucucaugaaacacaagagccgaa

SEQ ID NO: 184408 - RNA, 32 nt, Homo Sapiens
augagugcaauuucuaagacuuugaaacucag

SEQ ID NO: 184409 - RNA, 32 nt, Homo Sapiens
agaacagaacacuggaauauuacaagaugaga

SEQ ID NO: 184410 - RNA, 32 nt, Homo Sapiens
aaagugaacaauuuagugguauuuagugcauu

SEQ ID NO: 184411 - RNA, 32 nt, Homo Sapiens
agagaagaggggcuggagugcggcuggucugc

SEQ ID NO: 184412 - RNA, 32 nt, Homo Sapiens
ugcucggagcggcaggcagggcccguggacga

SEQ ID NO: 184413 - RNA, 32 nt, Homo Sapiens
auaugaauauauaucauguguuaauauugaga

SEQ ID NO: 184414 - RNA, 32 nt, Homo Sapiens
gaggaaauaguuacagauacagugugauuuga

SEQ ID NO: 184415 - RNA, 31 nt, Homo Sapiens
gcucagcagcgcaacugcgaggacaugaucc

SEQ ID NO: 184416 - RNA, 32 nt, Homo Sapiens
ccgauuguguccucacuaacauaagguccccu

SEQ ID NO: 184417 - RNA, 32 nt, Homo Sapiens
aguacgcaucucggcgaugcugucugccuugg

SEQ ID NO: 184418 - RNA, 32 nt, Homo Sapiens
aaucaauccagaaaaacuuauagauauccaga

SEQ ID NO: 184419 - RNA, 32 nt, Homo Sapiens
aagugcagcgccccgcgccuggcuccaggugg

SEQ ID NO: 184420 - RNA, 32 nt, Homo Sapiens
gaccaccugaagacagagaaaagggaaucuug

SEQ ID NO: 184421 - RNA, 32 nt, Homo Sapiens
auaauccacgaggcuuccaggagaugaaggau

SEQ ID NO: 184422 - RNA, 32 nt, Homo Sapiens
cuacuaaaaaauacaaaaauuagccaggcaug

SEQ ID NO: 184423 - RNA, 32 nt, Homo Sapiens
cuaugggaaaggaaauuuaauuagcacuggcg

SEQ ID NO: 184424 - RNA, 31 nt, Homo Sapiens
caaggugcaaggugagggguacgucgguguc

SEQ ID NO: 184425 - RNA, 32 nt, Homo Sapiens
gcccccagugaguuucugaacccaagugaaug

SEQ ID NO: 184426 - RNA, 32 nt, Homo Sapiens
uuuuuaucuaauuugucuauguuuucucuguu

SEQ ID NO: 184427 - RNA, 32 nt, Homo Sapiens
aaggccaaaggaauaaaauucuuuuauauaaa

SEQ ID NO: 184428 - RNA, 30 nt, Homo Sapiens
aaccugggagguggagguugcagugggcca

SEQ ID NO: 184429 - RNA, 32 nt, Homo Sapiens
acagguaucugaccuauucuuauuuaguuaac

SEQ ID NO: 184430 - RNA, 32 nt, Homo Sapiens
gacugacacguuucccacuguacuggaacucu

SEQ ID NO: 184431 - RNA, 32 nt, Homo Sapiens
aaccucuccaugaaaagcacagggccagaguc

SEQ ID NO: 184432 - RNA, 32 nt, Homo Sapiens
ccaauugccuggaucuccuccccucucccuuc

SEQ ID NO: 184433 - RNA, 32 nt, Homo Sapiens
aaaugauggugaugauauaauuuaucacacug

SEQ ID NO: 184434 - RNA, 32 nt, Homo Sapiens
ucugcaucucaucguagagcuugguggccgag

SEQ ID NO: 184435 - RNA, 32 nt, Homo Sapiens
aaaaaucaaaaggagaauaauauuuuauagca

SEQ ID NO: 184436 - RNA, 32 nt, Homo Sapiens
gacggacggacggaaggcgacucgagggccgg

SEQ ID NO: 184437 - RNA, 32 nt, Homo Sapiens
ugcuaacagcugggccacauguguguaucuag

SEQ ID NO: 184438 - RNA, 32 nt, Homo Sapiens
acucccagagaccgacucaggcuguccucagg

SEQ ID NO: 184439 - RNA, 32 nt, Homo Sapiens
aaauugcaucucaaauuguaauccccaugugu

SEQ ID NO: 184440 - RNA, 32 nt, Homo Sapiens
ucgccagagacaggaagugcgcugccuccacg

SEQ ID NO: 184441 - RNA, 32 nt, Homo Sapiens
ugcagacaucaagaagcaggcaggaaaaugga

SEQ ID NO: 184442 - RNA, 32 nt, Homo Sapiens
aggcgcggccgggccaguucucuuggaaguga

SEQ ID NO: 184443 - RNA, 32 nt, Homo Sapiens
augggacauugcuuguagcaucagaaauguau

SEQ ID NO: 184444 - RNA, 32 nt, Homo Sapiens
gagaaucuaagucaaacucacuauuuauaaug

SEQ ID NO: 184445 - RNA, 32 nt, Homo Sapiens
augcaaugccagugacucucagugucccccug

SEQ ID NO: 184446 - RNA, 32 nt, Homo Sapiens
ccucccccgcugugugucacuccaccccuucu

SEQ ID NO: 184447 - RNA, 32 nt, Homo Sapiens
agaucugcagauucaugcagcauuccauauuu

SEQ ID NO: 184448 - RNA, 32 nt, Homo Sapiens
auuaaaggggcugucucccaaugaaagaggca

SEQ ID NO: 184449 - RNA, 32 nt, Homo Sapiens
caggcggacggggcuucggccgggccauugcu

SEQ ID NO: 184450 - RNA, 32 nt, Homo Sapiens
cuucccagccccuccccuccccuaccagucuu

SEQ ID NO: 184451 - RNA, 32 nt, Homo Sapiens
accucugggcuuugggccucagcuuaugcauc

SEQ ID NO: 184452 - RNA, 27 nt, Homo Sapiens
ccaugggggcggccagcugcgaggaug

SEQ ID NO: 184453 - RNA, 32 nt, Homo Sapiens
cagaacagaaaagaguaacagcugaggucaag

SEQ ID NO: 184454 - RNA, 32 nt, Homo Sapiens
cuauacaacuuguuuuaaccuuugagaacauu

SEQ ID NO: 184455 - RNA, 32 nt, Homo Sapiens
agcuccuugguggccgccugcacgggaagcug

SEQ ID NO: 184456 - RNA, 32 nt, Homo Sapiens
cacaaccggcggcuaccucagccccacggcuc

SEQ ID NO: 184457 - RNA, 32 nt, Homo Sapiens
aaggcagaaggucuugguggcccuggaucuug

SEQ ID NO: 184458 - RNA, 32 nt, Homo Sapiens
aaaaggaacaaagggauguucacuguaugccu

SEQ ID NO: 184459 - RNA, 32 nt, Homo Sapiens
aggcaaagagggugggugaaccaggccauaca

SEQ ID NO: 184460 - RNA, 31 nt, Homo Sapiens
gcugccaggcacugccugcccccaucugagu

SEQ ID NO: 184461 - RNA, 32 nt, Homo Sapiens
cugcuguccgucugcucugugagucauccccu

SEQ ID NO: 184462 - RNA, 32 nt, Homo Sapiens
agcauuugaguggguuucuuuauuuaaaaaau

SEQ ID NO: 184463 - RNA, 32 nt, Homo Sapiens
aauaaauguaguauauuuucugagaugauuuu

SEQ ID NO: 184464 - RNA, 27 nt, Homo Sapiens
ucccuguccuucuacagaaccugaggg

SEQ ID NO: 184465 - RNA, 32 nt, Homo Sapiens
uguuuuacaaaacaccagacauguuggcauca

SEQ ID NO: 184466 - RNA, 32 nt, Homo Sapiens
ccgccccucagcugcccggcccggagcccgag

SEQ ID NO: 184467 - RNA, 32 nt, Homo Sapiens
caggacccaggguccccuccccagcucccuug

SEQ ID NO: 184468 - RNA, 32 nt, Homo Sapiens
caucacugaagacugccuggaaggggccgcgc

SEQ ID NO: 184469 - RNA, 32 nt, Homo Sapiens
auccagugaacaggauguuuugcuuuagcagc

SEQ ID NO: 184470 - RNA, 32 nt, Homo Sapiens
ucaccuagcagucuguuuuuuauuuuauguau

SEQ ID NO: 184471 - RNA, 31 nt, Homo Sapiens
ugcccgcaggugccugcaggaguccuggggc

SEQ ID NO: 184472 - RNA, 32 nt, Homo Sapiens
ugcuuguuugcuuaguuuuguuuucuaauuau

SEQ ID NO: 184473 - RNA, 32 nt, Homo Sapiens
agugauucugguuuuugguuuuuagaaauauu

SEQ ID NO: 184474 - RNA, 32 nt, Homo Sapiens
agcgguguccuguggagcugccgccauggccc

SEQ ID NO: 184475 - RNA, 32 nt, Homo Sapiens
gccgcguccaggguuucggccguaagugagcc

SEQ ID NO: 184476 - RNA, 32 nt, Homo Sapiens
ugaaugaacccaugugugaacugcacagagca

SEQ ID NO: 184477 - RNA, 32 nt, Homo Sapiens
aucuagguucugcggcacgggauggcggaggc

SEQ ID NO: 184478 - RNA, 32 nt, Homo Sapiens
gaagcaauuuuaacauucuuaauaugucaucu

SEQ ID NO: 184479 - RNA, 32 nt, Homo Sapiens
caggacuuucuggccaagcugcacugugugcg

SEQ ID NO: 184480 - RNA, 32 nt, Homo Sapiens
gcacaugacaacacuucagaagggucccccug

SEQ ID NO: 184481 - RNA, 32 nt, Homo Sapiens
uuuuuuagcugccauuuaagcauuccuguggc

SEQ ID NO: 184482 - RNA, 32 nt, Homo Sapiens
cauugaauccugaaacgugguugaaagcugac

SEQ ID NO: 184483 - RNA, 32 nt, Homo Sapiens
uggggaggucucuggagaagagcuuggggcag

SEQ ID NO: 184484 - RNA, 32 nt, Homo Sapiens
ugaucccuucggcgccagcagcuccaaaacug

SEQ ID NO: 184485 - RNA, 32 nt, Homo Sapiens
guuauggcauuuguaggcuuggagguaaagaa

SEQ ID NO: 184486 - RNA, 32 nt, Homo Sapiens
aguccccacagcugcgccggugacugaggggc

SEQ ID NO: 184487 - RNA, 32 nt, Homo Sapiens
ugauacuucuucauuauguccugcgcugcagu

SEQ ID NO: 184488 - RNA, 32 nt, Homo Sapiens
augaauuuagauguacuuuaagagagaaagac

SEQ ID NO: 184489 - RNA, 32 nt, Homo Sapiens
gacugaagaaagacauaauaaauaguuaaagg

SEQ ID NO: 184490 - RNA, 32 nt, Homo Sapiens
agucccagccccaccaguaucugcuucuguag

SEQ ID NO: 184491 - RNA, 32 nt, Homo Sapiens
gccuggcacaccuggggugcucggggguaggg

SEQ ID NO: 184492 - RNA, 32 nt, Homo Sapiens
aaaauaaaaaauacugaaaagaaaagacugaa

SEQ ID NO: 184493 - RNA, 32 nt, Homo Sapiens
uuguuuuauguaaaaggaaaaucuuguauggc

SEQ ID NO: 184494 - RNA, 32 nt, Homo Sapiens
ugugcgcccuccugggcacuagccuggagagg

SEQ ID NO: 184495 - RNA, 32 nt, Homo Sapiens
auuuauuguugcaccuguuugagacccaagga

SEQ ID NO: 184496 - RNA, 32 nt, Homo Sapiens
ggacagaucggggaagggguguguaccaggcu

SEQ ID NO: 184497 - RNA, 32 nt, Homo Sapiens
ugcgccggacagaguggggagcuccuaguuug

SEQ ID NO: 184498 - RNA, 32 nt, Homo Sapiens
acuuacggggugggggcgggggugaggguagg

SEQ ID NO: 184499 - RNA, 32 nt, Homo Sapiens
ucagaaacucaagagaggcauuucucugcuuu

SEQ ID NO: 184500 - RNA, 32 nt, Homo Sapiens
cgccuugaaugugugaauagcucuucgggacg

SEQ ID NO: 184501 - RNA, 32 nt, Homo Sapiens
uuuuuuuuuuuugccuuuuuuauucuugauga

SEQ ID NO: 184502 - RNA, 32 nt, Homo Sapiens
cugcaagcggcgcgugcucggugucggcagag

SEQ ID NO: 184503 - RNA, 32 nt, Homo Sapiens
cucugcugucucucuggcucucagcggugggg

SEQ ID NO: 184504 - RNA, 32 nt, Homo Sapiens
aguucuuucuucaggcuugugucuuuaguugc

SEQ ID NO: 184505 - RNA, 32 nt, Homo Sapiens
uugaggucuagggauugagaccagccuggcca

SEQ ID NO: 184506 - RNA, 32 nt, Homo Sapiens
gucccuggucaccaucagaguacuggaauacg

SEQ ID NO: 184507 - RNA, 32 nt, Homo Sapiens
gagucaggccccagcagcccuccugcccccaa

SEQ ID NO: 184508 - RNA, 32 nt, Homo Sapiens
cuucggcucacgcagcgcuucccgcgggccgc

SEQ ID NO: 184509 - RNA, 32 nt, Homo Sapiens
caggcagucucccgccgccgccgccgcugccg

SEQ ID NO: 184510 - RNA, 32 nt, Homo Sapiens
gaugugggucauuguggagacagaggugucug

SEQ ID NO: 184511 - RNA, 32 nt, Homo Sapiens
cuuggauaaaauguucccgcaugaggccacag

SEQ ID NO: 184512 - RNA, 32 nt, Homo Sapiens
cagggaaauguuucaggcuuuccccggagacu

SEQ ID NO: 184513 - RNA, 32 nt, Homo Sapiens
cgaguauguucuauguugggccuccugcugca

SEQ ID NO: 184514 - RNA, 32 nt, Homo Sapiens
uuccaggagugguggcucugaggugugacccu

SEQ ID NO: 184515 - RNA, 32 nt, Homo Sapiens
gguccauuucaaagcgcaaacugugcuugucc

SEQ ID NO: 184516 - RNA, 30 nt, Homo Sapiens
uuuugaaggaauacuuccuaacucauucua

SEQ ID NO: 184517 - RNA, 32 nt, Homo Sapiens
cugguacggguggaaugggggugagacaccac

SEQ ID NO: 184518 - RNA, 32 nt, Homo Sapiens
cuugcuccacccccauccccuacugugacuug

SEQ ID NO: 184519 - RNA, 32 nt, Homo Sapiens
acuuggaccucauuuuauuaaaacagaaauua

SEQ ID NO: 184520 - RNA, 32 nt, Homo Sapiens
ggaagaggagaaggcggcgcgcggguccccgc

SEQ ID NO: 184521 - RNA, 32 nt, Homo Sapiens
uuuuacgacaguuugcagaacacugauuugaa

SEQ ID NO: 184522 - RNA, 31 nt, Homo Sapiens
acucaggugaucugccugccucggccucaca

SEQ ID NO: 184523 - RNA, 32 nt, Homo Sapiens
acuaugaauaauaaauaauuauccugaggaga

SEQ ID NO: 184524 - RNA, 32 nt, Homo Sapiens
ggagccggaaguaucgcuucgagauccccaaa

SEQ ID NO: 184525 - RNA, 32 nt, Homo Sapiens
ggccuuauuucccucccuccccacuccccugg

SEQ ID NO: 184526 - RNA, 32 nt, Homo Sapiens
cugagaaagcagccugucuccgggacucacgg

SEQ ID NO: 184527 - RNA, 32 nt, Homo Sapiens
ggcugggccugcggugagcaucaggcgaugcg

SEQ ID NO: 184528 - RNA, 32 nt, Homo Sapiens
gucuacacaccuguacagcacguuacuguacu

SEQ ID NO: 184529 - RNA, 32 nt, Homo Sapiens
gugacccagucaaguugacacaugacacuaac

SEQ ID NO: 184530 - RNA, 32 nt, Homo Sapiens
cugucugaguuaaaaauccuguucaagaaaaa

SEQ ID NO: 184531 - RNA, 32 nt, Homo Sapiens
uauuuaccagggugggggcgacuggccuuuuu

SEQ ID NO: 184532 - RNA, 32 nt, Homo Sapiens
gcacauuuuccacuuuguuuuccccaaaacau

SEQ ID NO: 184533 - RNA, 32 nt, Homo Sapiens
aaaaaguggaaacaacccaaaugucuaccaac

SEQ ID NO: 184534 - RNA, 32 nt, Homo Sapiens
uuuguauccagcugcaagcucagggcagaguc

SEQ ID NO: 184535 - RNA, 32 nt, Homo Sapiens
caaaacgucuuacugaagcaacaaucgaaaaa

SEQ ID NO: 184536 - RNA, 27 nt, Homo Sapiens
cucguguccuucucaugcccggcgacg

SEQ ID NO: 184537 - RNA, 32 nt, Homo Sapiens
cuuggaggagauguccaggcugaaggugguga

SEQ ID NO: 184538 - RNA, 32 nt, Homo Sapiens
uccuggcccccggccacugucucggggcccac

SEQ ID NO: 184539 - RNA, 31 nt, Homo Sapiens
gaaauguguaacauuuaaaguagcauggaac

SEQ ID NO: 184540 - RNA, 28 nt, Homo Sapiens
cucaugcacucagcauacacagagcacc

SEQ ID NO: 184541 - RNA, 32 nt, Homo Sapiens
gccacuaguggacgccagguccagccagcccc

SEQ ID NO: 184542 - RNA, 32 nt, Homo Sapiens
aaggaaaaggguaauccugaggacuuugugga

SEQ ID NO: 184543 - RNA, 32 nt, Homo Sapiens
uugcucgagguauuacaccuauuuuauuuuuc

SEQ ID NO: 184544 - RNA, 31 nt, Homo Sapiens
guuauuugcauaguuuuuaaguuugauuuug

SEQ ID NO: 184545 - RNA, 32 nt, Homo Sapiens
uccggccucuuuggccuacccccguuggcucc

SEQ ID NO: 184546 - RNA, 32 nt, Homo Sapiens
ccuuaucaaggauuuucauguugaugacucga

SEQ ID NO: 184547 - RNA, 32 nt, Homo Sapiens
uguucuuaucccaugguuagccuuucaaggcc

SEQ ID NO: 184548 - RNA, 32 nt, Homo Sapiens
ccgccgccugcgcaagccaggcaugaaugcug

SEQ ID NO: 184549 - RNA, 32 nt, Homo Sapiens
cauauaauucauauacuuuuauaaaagccuuu

SEQ ID NO: 184550 - RNA, 32 nt, Homo Sapiens
gcgccgggcgaccacggaugggugcugaacca

SEQ ID NO: 184551 - RNA, 29 nt, Homo Sapiens
gcaggguuugucugggcaccgucggggua

SEQ ID NO: 184552 - RNA, 30 nt, Homo Sapiens
caauaaacauuuccaguaauuucuuaaaaa

SEQ ID NO: 184553 - RNA, 32 nt, Homo Sapiens
aaaacauugaaaacagaacaaaugagaaaaga

SEQ ID NO: 184554 - RNA, 30 nt, Homo Sapiens
ugcugcuuagcugaucccgcccugacccag

SEQ ID NO: 184555 - RNA, 32 nt, Homo Sapiens
caacacaaaaaccaacacaaaacauaacacaa

SEQ ID NO: 184556 - RNA, 32 nt, Homo Sapiens
cugugggaccuugagcuggcugcugcaacacu

SEQ ID NO: 184557 - RNA, 32 nt, Homo Sapiens
ccugcucgcucuggggacccugccagggaagg

SEQ ID NO: 184558 - RNA, 32 nt, Homo Sapiens
cucccagggaaagggagacucccuuugccggu

SEQ ID NO: 184559 - RNA, 32 nt, Homo Sapiens
agccuguauaucuauuaaaaauuucaacuucc

SEQ ID NO: 184560 - RNA, 32 nt, Homo Sapiens
uucuucaaauguuuaaaccacuaguugaugua

SEQ ID NO: 184561 - RNA, 32 nt, Homo Sapiens
cauacaaaccaucuagaucuauagagaugcca

SEQ ID NO: 184562 - RNA, 32 nt, Homo Sapiens
gagggcuggggcgggggccgggcuuggaacga

SEQ ID NO: 184563 - RNA, 32 nt, Homo Sapiens
uuuuuauacauucagucacucuguaaauauac

SEQ ID NO: 184564 - RNA, 32 nt, Homo Sapiens
cugcaggugucaugugcuggcccugugauuuu

SEQ ID NO: 184565 - RNA, 32 nt, Homo Sapiens
gugcgcgccucccgccuucccagagacguggc

SEQ ID NO: 184566 - RNA, 32 nt, Homo Sapiens
gaaacgauucccccagucauucugggaacaug

SEQ ID NO: 184567 - RNA, 32 nt, Homo Sapiens
agcaaaauuacauuuuacuauuuuacauaacc

SEQ ID NO: 184568 - RNA, 32 nt, Homo Sapiens
cccuucccgagcugaagccacagaguaggaga

SEQ ID NO: 184569 - RNA, 32 nt, Homo Sapiens
cuagccgggcgacgccucggaggaggccgcgg

SEQ ID NO: 184570 - RNA, 32 nt, Homo Sapiens
uggcucacaccuguaauuccagcacuuuguga

SEQ ID NO: 184571 - RNA, 32 nt, Homo Sapiens
uuguuuggcugcuuagugggacugguggccca

SEQ ID NO: 184572 - RNA, 32 nt, Homo Sapiens
ccggagcuucgaguccguccccggugcugccu

SEQ ID NO: 184573 - RNA, 32 nt, Homo Sapiens
ugucucauggauuuuuaauaugucuuugcauc

SEQ ID NO: 184574 - RNA, 32 nt, Homo Sapiens
uuuuccagcucuuuuuucuagaauccucauua

SEQ ID NO: 184575 - RNA, 32 nt, Homo Sapiens
cucuaaauguaggcuuuuuuuuuuuuuuuuuu

SEQ ID NO: 184576 - RNA, 32 nt, Homo Sapiens
gcuguugaugaauuguuucauuauuaaauaua

SEQ ID NO: 184577 - RNA, 32 nt, Homo Sapiens
uuguuacuauacauuuucucugagacuccagc

SEQ ID NO: 184578 - RNA, 32 nt, Homo Sapiens
gguggcaucuggacaaaugccaccacagcagg

SEQ ID NO: 184579 - RNA, 32 nt, Homo Sapiens
cacaaccuggauuuuuuuuuuauacaauacug

SEQ ID NO: 184580 - RNA, 32 nt, Homo Sapiens
uaggcuguaaaaacaaaacaauguagaguuuu

SEQ ID NO: 184581 - RNA, 32 nt, Homo Sapiens
ggcucacugcagccuucaccucccggguucaa

SEQ ID NO: 184582 - RNA, 32 nt, Homo Sapiens
agccuggugugguggcucaugccuguaauccc

SEQ ID NO: 184583 - RNA, 32 nt, Homo Sapiens
uccccacccuggggagcacauaaagaagcuug

SEQ ID NO: 184584 - RNA, 32 nt, Homo Sapiens
uuuaaagcaauauauguccuuauuuuccugac

SEQ ID NO: 184585 - RNA, 32 nt, Homo Sapiens
cccuuucugaaauuucucauaaaccacggucc

SEQ ID NO: 184586 - RNA, 32 nt, Homo Sapiens
uggcugaugagggguggaaccgagggaagaag

SEQ ID NO: 184587 - RNA, 32 nt, Homo Sapiens
ccgacucuccugccgcaccccuggccauugua

SEQ ID NO: 184588 - RNA, 32 nt, Homo Sapiens
gagguauauuggaagaggcagagccugaggug

SEQ ID NO: 184589 - RNA, 32 nt, Homo Sapiens
aguggcugccagcgggggcuccucgcccuuug

SEQ ID NO: 184590 - RNA, 32 nt, Homo Sapiens
gcagggagaggggaggcggggacggugugccc

SEQ ID NO: 184591 - RNA, 32 nt, Homo Sapiens
agcuuaacuuauaaugaaugggcauuguguua

SEQ ID NO: 184592 - RNA, 32 nt, Homo Sapiens
gcuagaaagcauccauuaauuaaugagacaca

SEQ ID NO: 184593 - RNA, 31 nt, Homo Sapiens
ccgugugcagucgccccgcgccccgcgcgac

SEQ ID NO: 184594 - RNA, 32 nt, Homo Sapiens
cuauuucuggucuuuucagaggauggcuucac

SEQ ID NO: 184595 - RNA, 32 nt, Homo Sapiens
cucagagcagacgaguccauggauaagucugu

SEQ ID NO: 184596 - RNA, 32 nt, Homo Sapiens
uucccaguucucuccuucacuuuggcaucagu

SEQ ID NO: 184597 - RNA, 32 nt, Homo Sapiens
guuucuuuccgucuuuguugucacuaucuuug

SEQ ID NO: 184598 - RNA, 32 nt, Homo Sapiens
uguguguuugucuguauuugcacauguguuug

SEQ ID NO: 184599 - RNA, 32 nt, Homo Sapiens
acucucccucugcuacugcugcugaucugaau

SEQ ID NO: 184600 - RNA, 32 nt, Homo Sapiens
uguuguuuucuuuauacaaagcaagauaacgg

SEQ ID NO: 184601 - RNA, 32 nt, Homo Sapiens
ugcugguuuuaaucuaaugaugggauauccaa

SEQ ID NO: 184602 - RNA, 32 nt, Homo Sapiens
auauaugugggaaauacaggggaaugagcaaa

SEQ ID NO: 184603 - RNA, 32 nt, Homo Sapiens
aucucccggcccggccgcagcagccgccgccg

SEQ ID NO: 184604 - RNA, 32 nt, Homo Sapiens
ggugaaggcgcgcgccccuccccgccugccuc

SEQ ID NO: 184605 - RNA, 32 nt, Homo Sapiens
uaaggaaguaaaugcaggccaggggguuguga

SEQ ID NO: 184606 - RNA, 32 nt, Homo Sapiens
ccugugcugugacucgagucacacucaaggga

SEQ ID NO: 184607 - RNA, 32 nt, Homo Sapiens
uugccgggaaaacagccccuccucuucuuucu

SEQ ID NO: 184608 - RNA, 32 nt, Homo Sapiens
gaacgccugaccucagaugauccacccaccuu

SEQ ID NO: 184609 - RNA, 32 nt, Homo Sapiens
ugcagcaauuaaugccaguuucagucaguaca

SEQ ID NO: 184610 - RNA, 32 nt, Homo Sapiens
uauuuuccuacagcccuuuguacuucaaaaua

SEQ ID NO: 184611 - RNA, 32 nt, Homo Sapiens
gcgcacaguggcugagcgcccgccucucuuuc

SEQ ID NO: 184612 - RNA, 32 nt, Homo Sapiens
ucaacuaguuuaucuaaauuugugauugcuua

SEQ ID NO: 184613 - RNA, 32 nt, Homo Sapiens
gggccaggugggaacaguguguccucugcccc

SEQ ID NO: 184614 - RNA, 32 nt, Homo Sapiens
auucuuuguucauucuaauguugauacugugu

SEQ ID NO: 184615 - RNA, 32 nt, Homo Sapiens
acguugaaaaauacuucugaaguguucugcuc

SEQ ID NO: 184616 - RNA, 32 nt, Homo Sapiens
aggaaagaccugccggccgcgguggcucaugc

SEQ ID NO: 184617 - RNA, 32 nt, Homo Sapiens
gcgagcaugaacuggcccggaggacccagcuc

SEQ ID NO: 184618 - RNA, 32 nt, Homo Sapiens
auugcauuuucguacauuuuaagcaaacuagg

SEQ ID NO: 184619 - RNA, 32 nt, Homo Sapiens
uaacuaccgucuuuuugcuaagacuuaaacgg

SEQ ID NO: 184620 - RNA, 32 nt, Homo Sapiens
ccgacuccagacucucugcaucaggucucccc

SEQ ID NO: 184621 - RNA, 32 nt, Homo Sapiens
caggcagccuccuggggggacggaagggggug

SEQ ID NO: 184622 - RNA, 32 nt, Homo Sapiens
aaaacugauacuaauauaauuaaguucaucuu

SEQ ID NO: 184623 - RNA, 32 nt, Homo Sapiens
gggacucuauaauagcagcuugagaucagugu

SEQ ID NO: 184624 - RNA, 32 nt, Homo Sapiens
gguuccuuuuuccuuaacaacuucuucugcaa

SEQ ID NO: 184625 - RNA, 32 nt, Homo Sapiens
ggagccucucccuccgagauacccacccagcu

SEQ ID NO: 184626 - RNA, 32 nt, Homo Sapiens
ccaagggaaagacuuucuggccugcugagguc

SEQ ID NO: 184627 - RNA, 32 nt, Homo Sapiens
uugaugcuaugaaaauuugcguuuucuguaac

SEQ ID NO: 184628 - RNA, 32 nt, Homo Sapiens
caaaggcuuguuuuuucuugagcaguugaaag

SEQ ID NO: 184629 - RNA, 32 nt, Homo Sapiens
ucuaucccuuauaaguuugucuuuucuuucag

SEQ ID NO: 184630 - RNA, 32 nt, Homo Sapiens
cuuguguucaaauuauuucuucaauugucaua

SEQ ID NO: 184631 - RNA, 32 nt, Homo Sapiens
ccaauaauaaaccaaauguauuuagaguauuu

SEQ ID NO: 184632 - RNA, 32 nt, Homo Sapiens
uaaaucgugugagcgucgccgacaccucugag

SEQ ID NO: 184633 - RNA, 32 nt, Homo Sapiens
ucuguguuccagaugcaugaaauugggugagg

SEQ ID NO: 184634 - RNA, 32 nt, Homo Sapiens
uccgcagccccggccuggcugcggugcucgcg

SEQ ID NO: 184635 - RNA, 32 nt, Homo Sapiens
aaguugcucuggcuguuugggaggaagcccag

SEQ ID NO: 184636 - RNA, 32 nt, Homo Sapiens
uuaguguccuggggaagaaagaaauuacagua

SEQ ID NO: 184637 - RNA, 32 nt, Homo Sapiens
ugcucugguccgaggcugcugcucuugaccuc

SEQ ID NO: 184638 - RNA, 32 nt, Homo Sapiens
ugagauccuuccugcuggcucagugcuggcug

SEQ ID NO: 184639 - RNA, 32 nt, Homo Sapiens
ggggacuguuuucucucggaggccggagcgga

SEQ ID NO: 184640 - RNA, 32 nt, Homo Sapiens
uuguuuguauccucuuuuauuuccuugagcag

SEQ ID NO: 184641 - RNA, 32 nt, Homo Sapiens
uaaugaucaaugacauugcuaacuaguuauaa

SEQ ID NO: 184642 - RNA, 32 nt, Homo Sapiens
auucuucuggucuaggcugggcuuguuuguuu

SEQ ID NO: 184643 - RNA, 32 nt, Homo Sapiens
ucucugcgccucagucucccaagccugucacc

SEQ ID NO: 184644 - RNA, 32 nt, Homo Sapiens
ccgugggcagugccuuccuccagccucacaac

SEQ ID NO: 184645 - RNA, 32 nt, Homo Sapiens
gguguaggaaauggaagaaaaagauucagcca

SEQ ID NO: 184646 - RNA, 32 nt, Homo Sapiens
agcaugcggagccagcaggccucccugaaaca

SEQ ID NO: 184647 - RNA, 32 nt, Homo Sapiens
cccucauagaaagacaaaagcauccauccccu

SEQ ID NO: 184648 - RNA, 32 nt, Homo Sapiens
uugccuccgagcucuggcuucaaggggagcuc

SEQ ID NO: 184649 - RNA, 32 nt, Homo Sapiens
agaaggcagaaucuagcaacuucuagguccua

SEQ ID NO: 184650 - RNA, 32 nt, Homo Sapiens
uuacuaagccauuuagaucuuaccaaacaaau

SEQ ID NO: 184651 - RNA, 32 nt, Homo Sapiens
ccgaggagaccacgcuccuggagcucugcugu

SEQ ID NO: 184652 - RNA, 32 nt, Homo Sapiens
gucuccaccccccuccccccgccccgcacucc

SEQ ID NO: 184653 - RNA, 32 nt, Homo Sapiens
ucuucuaggaccaggcuccugguauuucaggg

SEQ ID NO: 184654 - RNA, 32 nt, Homo Sapiens
cccccgcccccgagaucuggagcccagggacu

SEQ ID NO: 184655 - RNA, 32 nt, Homo Sapiens
ucgacaguccuguggugccagcaagaauccaa

SEQ ID NO: 184656 - RNA, 32 nt, Homo Sapiens
ggucuaugucauugguuucugaugcuuguaca

SEQ ID NO: 184657 - RNA, 32 nt, Homo Sapiens
ugucuuccccaagucagggggcucucugagug

SEQ ID NO: 184658 - RNA, 32 nt, Homo Sapiens
gaccugacuacuuaaccuuagagaccugcuuu

SEQ ID NO: 184659 - RNA, 32 nt, Homo Sapiens
aagagauaaaaauaaaaguaucucaugaagga

SEQ ID NO: 184660 - RNA, 32 nt, Homo Sapiens
aaugcuuuuuauacuuuuuuuauuuguaauuu

SEQ ID NO: 184661 - RNA, 32 nt, Homo Sapiens
gccuguaaucccaacauuuugggaggccaagg

SEQ ID NO: 184662 - RNA, 32 nt, Homo Sapiens
cagaggaaaccacggaggcuguguguauacgu

SEQ ID NO: 184663 - RNA, 32 nt, Homo Sapiens
ugugcgaucguaaaauuugugcaauguaaugu

SEQ ID NO: 184664 - RNA, 32 nt, Homo Sapiens
ccuuuucugccagcuuggaagggcaaccccau

SEQ ID NO: 184665 - RNA, 32 nt, Homo Sapiens
ucuuagaagagaaucacuaaccagagacgaga

SEQ ID NO: 184666 - RNA, 32 nt, Homo Sapiens
auggaaugggugcuauccuguuuauguguguc

SEQ ID NO: 184667 - RNA, 30 nt, Homo Sapiens
ugagagaauaucccagaacccucucuccaa

SEQ ID NO: 184668 - RNA, 32 nt, Homo Sapiens
auuuccaaggccccuaaaacugcacaaaauag

SEQ ID NO: 184669 - RNA, 32 nt, Homo Sapiens
agaggcacauaaauaggaucugcaucagcagu

SEQ ID NO: 184670 - RNA, 32 nt, Homo Sapiens
ccccggcgccgcgcgggcagguucgaccaggc

SEQ ID NO: 184671 - RNA, 32 nt, Homo Sapiens
uuuuauguucauugguuuuucucugugaagca

SEQ ID NO: 184672 - RNA, 32 nt, Homo Sapiens
ugguugagggagcagacaaacacacaggcuuc

SEQ ID NO: 184673 - RNA, 32 nt, Homo Sapiens
gaagccgccgcgcagagcucgccuggcggggg

SEQ ID NO: 184674 - RNA, 32 nt, Homo Sapiens
cauucaagcauucaaaguauauuuucaaugaa

SEQ ID NO: 184675 - RNA, 32 nt, Homo Sapiens
gguggcccaagccuguagucccagcuacucgg

SEQ ID NO: 184676 - RNA, 30 nt, Homo Sapiens
uaaauuguuucagccauagaagcuccauua

SEQ ID NO: 184677 - RNA, 32 nt, Homo Sapiens
gaucacacuuuauaauaagaucagaggcagag

SEQ ID NO: 184678 - RNA, 32 nt, Homo Sapiens
uucuugagaacaaagacuaaauaaugacauaa

SEQ ID NO: 184679 - RNA, 32 nt, Homo Sapiens
gaggguacauaguacaccauggagcacgguuu

SEQ ID NO: 184680 - RNA, 32 nt, Homo Sapiens
agcuccagccgcacugccccgauggcucccua

SEQ ID NO: 184681 - RNA, 32 nt, Homo Sapiens
cauguaaauaaauguuuuccuguagucauaga

SEQ ID NO: 184682 - RNA, 32 nt, Homo Sapiens
cauagaggccccacaggacagcaaccagaaau

SEQ ID NO: 184683 - RNA, 32 nt, Homo Sapiens
caucucccaggagaggcgggaagauuuuugag

SEQ ID NO: 184684 - RNA, 30 nt, Homo Sapiens
gccaagguguucccugccuaaacuuauugc

SEQ ID NO: 184685 - RNA, 32 nt, Homo Sapiens
aguguguauaauguaaaguaguuuugcauauu

SEQ ID NO: 184686 - RNA, 32 nt, Homo Sapiens
uugugcaauguauuuuuguaaaugcuuuucaa

SEQ ID NO: 184687 - RNA, 32 nt, Homo Sapiens
gaggguuuccgcgcccgggacgcguuucggcu

SEQ ID NO: 184688 - RNA, 32 nt, Homo Sapiens
aaauuguacuaaaagucauuuaagaaauacca

SEQ ID NO: 184689 - RNA, 32 nt, Homo Sapiens
ucuuggaacuuggcagcuuucauaaauacaug

SEQ ID NO: 184690 - RNA, 32 nt, Homo Sapiens
uucauagaguagauuauauugauugauuuucu

SEQ ID NO: 184691 - RNA, 32 nt, Homo Sapiens
uuuaccagaacagcauaacaagggcaggucug

SEQ ID NO: 184692 - RNA, 32 nt, Homo Sapiens
augcaauggaagagggcuucaagcaggcucuu

SEQ ID NO: 184693 - RNA, 32 nt, Homo Sapiens
uauuguuaauccugccagucuuucucuucaag

SEQ ID NO: 184694 - RNA, 32 nt, Homo Sapiens
guuauaauagauucuuuuuuuuaauuuuguga

SEQ ID NO: 184695 - RNA, 32 nt, Homo Sapiens
ucuccuugacccccagugcuguaaguaauaga

SEQ ID NO: 184696 - RNA, 32 nt, Homo Sapiens
uaucaagauguauauuuaugggauagauacau

SEQ ID NO: 184697 - RNA, 32 nt, Homo Sapiens
aaguuaguuaaacuuuggauagauuguauaau

SEQ ID NO: 184698 - RNA, 32 nt, Homo Sapiens
ugggagcuuuuguagaagucacauuccugaac

SEQ ID NO: 184699 - RNA, 32 nt, Homo Sapiens
ccaagcuggugccugguuccucuggguuggga

SEQ ID NO: 184700 - RNA, 32 nt, Homo Sapiens
ucugcucuaagagucucccucccuuuauagaa

SEQ ID NO: 184701 - RNA, 32 nt, Homo Sapiens
gucuucuuugaucauuugauuuuggauccaag

SEQ ID NO: 184702 - RNA, 32 nt, Homo Sapiens
aaccgcagcugauguuuauaauaaucguaugu

SEQ ID NO: 184703 - RNA, 32 nt, Homo Sapiens
cauuuguguuucuacagccucugauuacuauu

SEQ ID NO: 184704 - RNA, 32 nt, Homo Sapiens
gucacauccugcgcgggugggcggcgggccag

SEQ ID NO: 184705 - RNA, 32 nt, Homo Sapiens
ggaucguuaggauggcucuauaauuaggauag

SEQ ID NO: 184706 - RNA, 32 nt, Homo Sapiens
cauccugaagaacuaauguucuguggaacaua

SEQ ID NO: 184707 - RNA, 32 nt, Homo Sapiens
agucuuggugaaauauaaugaauuuguuccua

SEQ ID NO: 184708 - RNA, 32 nt, Homo Sapiens
gcccgcccagccccccugugccccacagcucg

SEQ ID NO: 184709 - RNA, 32 nt, Homo Sapiens
gggcugcuccacgagugggaauuugcuccagc

SEQ ID NO: 184710 - RNA, 32 nt, Homo Sapiens
cuuugaggagcauggaacucgaggggagaagu

SEQ ID NO: 184711 - RNA, 32 nt, Homo Sapiens
ugaggaugaaacaaagaagauguucucuuuuc

SEQ ID NO: 184712 - RNA, 32 nt, Homo Sapiens
uaaaauaguugaugagaacuagacuuaugacu

SEQ ID NO: 184713 - RNA, 32 nt, Homo Sapiens
uauaggcugccaaauuugcuguuuaacauuua

SEQ ID NO: 184714 - RNA, 32 nt, Homo Sapiens
uguugucuauagagcaguuuacagacuugugu

SEQ ID NO: 184715 - RNA, 32 nt, Homo Sapiens
uggggccugcccgugcccgccucagggauggc

SEQ ID NO: 184716 - RNA, 32 nt, Homo Sapiens
uaaaauaucucacccaagacuuaaaggaagaa

SEQ ID NO: 184717 - RNA, 31 nt, Homo Sapiens
ugaaauacgaagaaaaauguguguucaggag

SEQ ID NO: 184718 - RNA, 32 nt, Homo Sapiens
agugacagucaccuccaugcccugcccucauu

SEQ ID NO: 184719 - RNA, 32 nt, Homo Sapiens
guaaauauuugaagauaaaaccacuauagcuu

SEQ ID NO: 184720 - RNA, 32 nt, Homo Sapiens
ucacucuuaaggaaacaucagauuauucaucu

SEQ ID NO: 184721 - RNA, 32 nt, Homo Sapiens
aucuaagguauuuuaaacuguacaccugcauc

SEQ ID NO: 184722 - RNA, 32 nt, Homo Sapiens
ucacuggcagcaugaaguuagccaccaagucc

SEQ ID NO: 184723 - RNA, 32 nt, Homo Sapiens
gaucuggaguccguugaaggguaaaggccucg

SEQ ID NO: 184724 - RNA, 32 nt, Homo Sapiens
cccaacuucuaaaaauguaucacuaccgggau

SEQ ID NO: 184725 - RNA, 32 nt, Homo Sapiens
acccggggccuggccacgcucuggggcaacug

SEQ ID NO: 184726 - RNA, 32 nt, Homo Sapiens
gggcuuauggguggagguugggaagaggauga

SEQ ID NO: 184727 - RNA, 32 nt, Homo Sapiens
uuaagucccuugugcuggccagauggcguggc

SEQ ID NO: 184728 - RNA, 32 nt, Homo Sapiens
guuguacagauauggugacugauguaguuauu

SEQ ID NO: 184729 - RNA, 28 nt, Homo Sapiens
ccugaggggcggccagcgcgaggguuuc

SEQ ID NO: 184730 - RNA, 32 nt, Homo Sapiens
gcggcugccagucugcacggccucggcacggc

SEQ ID NO: 184731 - RNA, 32 nt, Homo Sapiens
aaaacagaaaaguuucaagaagcaggaagaaa

SEQ ID NO: 184732 - RNA, 32 nt, Homo Sapiens
cuggccccuggcccaucucuucugugccuuag

SEQ ID NO: 184733 - RNA, 32 nt, Homo Sapiens
ccgugggaggaaggccaggcucgggggagccu

SEQ ID NO: 184734 - RNA, 32 nt, Homo Sapiens
agaaucauuuaaauaaauaccuuaaauugaca

SEQ ID NO: 184735 - RNA, 32 nt, Homo Sapiens
uccgccccaacccgggaacccuggacugaggc

SEQ ID NO: 184736 - RNA, 32 nt, Homo Sapiens
aagucucaggcugccgagagccauguaugggc

SEQ ID NO: 184737 - RNA, 32 nt, Homo Sapiens
gcuucgcccgcgagcccuccccgacccaccgc

SEQ ID NO: 184738 - RNA, 32 nt, Homo Sapiens
acgucuccgggcgcgccgccccccgccagcaa

SEQ ID NO: 184739 - RNA, 32 nt, Homo Sapiens
aagaugaacaguauuuguuuucuuguuuccau

SEQ ID NO: 184740 - RNA, 32 nt, Homo Sapiens
ggcacgaggccgugcuccgccgggaagauggg

SEQ ID NO: 184741 - RNA, 32 nt, Homo Sapiens
cuacuuacaucauaaugcacaauuuuauauac

SEQ ID NO: 184742 - RNA, 32 nt, Homo Sapiens
ucuuuggguucaguuaauuugcuagaguggcu

SEQ ID NO: 184743 - RNA, 32 nt, Homo Sapiens
cgaggccgccgggcucccgguuuaaaugugau

SEQ ID NO: 184744 - RNA, 32 nt, Homo Sapiens
cgagagguggccugggccgggaauguccagcu

SEQ ID NO: 184745 - RNA, 32 nt, Homo Sapiens
aggagagucugugccgacaagauggcggacgg

SEQ ID NO: 184746 - RNA, 25 nt, Homo Sapiens
agaaaaacuaaauuauugaaaaauu

SEQ ID NO: 184747 - RNA, 32 nt, Homo Sapiens
caagugcccucgggucuguccuccccgucugg

SEQ ID NO: 184748 - RNA, 32 nt, Homo Sapiens
ucuccugcuggucccugccggcgugccucuag

SEQ ID NO: 184749 - RNA, 32 nt, Homo Sapiens
gaaauugaacuucagggaggguggucauugcc

SEQ ID NO: 184750 - RNA, 32 nt, Homo Sapiens
aacgaauacaagcaaacauauuugcugguugg

SEQ ID NO: 184751 - RNA, 32 nt, Homo Sapiens
gagaauccacauauucacggaccacgacauga

SEQ ID NO: 184752 - RNA, 32 nt, Homo Sapiens
gacggaguuucgcucuugucgcccaggcugua

SEQ ID NO: 184753 - RNA, 32 nt, Homo Sapiens
agcguagcgucuuuuccuugugguuccuuucu

SEQ ID NO: 184754 - RNA, 32 nt, Homo Sapiens
uccuagguaccaaugaaaaagccaagugaacg

SEQ ID NO: 184755 - RNA, 32 nt, Homo Sapiens
cggauuuugggaacuggcacguuuuauuuuug

SEQ ID NO: 184756 - RNA, 32 nt, Homo Sapiens
aaucuauaguagcaguuuauauuuucaugauu

SEQ ID NO: 184757 - RNA, 32 nt, Homo Sapiens
uggcaaugaugcagcccuccugccccaguguc

SEQ ID NO: 184758 - RNA, 32 nt, Homo Sapiens
cacuaaagaacuuauguaaccaaauaccaccu

SEQ ID NO: 184759 - RNA, 32 nt, Homo Sapiens
ugugccgugaacugcgugccaguguccccacg

SEQ ID NO: 184760 - RNA, 28 nt, Homo Sapiens
ugguguggcuuacccaggauggaaacac

SEQ ID NO: 184761 - RNA, 32 nt, Homo Sapiens
uauuugacuaaaucauuguuucacaacugaau

SEQ ID NO: 184762 - RNA, 32 nt, Homo Sapiens
gcaagaacugaaacgaauggggauugaacugc

SEQ ID NO: 184763 - RNA, 32 nt, Homo Sapiens
auauaaauguuuacaaacagcuuaaagauuug

SEQ ID NO: 184764 - RNA, 32 nt, Homo Sapiens
auuuauguucuucugccuuggcuccagcuggu

SEQ ID NO: 184765 - RNA, 32 nt, Homo Sapiens
uuuuuugaaaaacaaaaggcaagucuccaaca

SEQ ID NO: 184766 - RNA, 32 nt, Homo Sapiens
agaagacacgcaaagugagauaaaggaaaaau

SEQ ID NO: 184767 - RNA, 32 nt, Homo Sapiens
guuaaaaguccaucaggacuugaaagaccuga

SEQ ID NO: 184768 - RNA, 32 nt, Homo Sapiens
ugcccccauccccugcucuccucaguagggca

SEQ ID NO: 184769 - RNA, 32 nt, Homo Sapiens
uccuccccaucccacccuuuggaaacucccca

SEQ ID NO: 184770 - RNA, 32 nt, Homo Sapiens
auaaacaugcguguuaauggcuguucgagaga

SEQ ID NO: 184771 - RNA, 32 nt, Homo Sapiens
uugugaggggaagagcucuauagaggaagaca

SEQ ID NO: 184772 - RNA, 32 nt, Homo Sapiens
guucauuguacauuuuaacagcagcuggugua

SEQ ID NO: 184773 - RNA, 32 nt, Homo Sapiens
uucugauuuuuccacuauuuaaauaaugcugu

SEQ ID NO: 184774 - RNA, 32 nt, Homo Sapiens
uuagucccgagcucaggaaaugagagccuaua

SEQ ID NO: 184775 - RNA, 32 nt, Homo Sapiens
aauguuuacauaucuggguuucuauuuuguag

SEQ ID NO: 184776 - RNA, 32 nt, Homo Sapiens
ucugaccuaccuuugccuuuuucugucaugga

SEQ ID NO: 184777 - RNA, 32 nt, Homo Sapiens
cagaggagaugggggcuggcucugccggccaa

SEQ ID NO: 184778 - RNA, 32 nt, Homo Sapiens
ugggaagucucucccagucaggaggcacaggg

SEQ ID NO: 184779 - RNA, 32 nt, Homo Sapiens
uuuuucuguauauauggguuuuguaaagaugg

SEQ ID NO: 184780 - RNA, 32 nt, Homo Sapiens
cucagauauuuugugugauacucugugguguu

SEQ ID NO: 184781 - RNA, 32 nt, Homo Sapiens
aaguaucuacacaacuaauaaucucauucuau

SEQ ID NO: 184782 - RNA, 32 nt, Homo Sapiens
gguggccugccgggccuggcgccggugagcgg

SEQ ID NO: 184783 - RNA, 32 nt, Homo Sapiens
aaaaauuccgcacuauauaauucgcacacauu

SEQ ID NO: 184784 - RNA, 32 nt, Homo Sapiens
cuuuaaaaaaaauuaauuuauuauuauaauga

SEQ ID NO: 184785 - RNA, 32 nt, Homo Sapiens
uguacaaaaugaauugccuuugauaauucuua

SEQ ID NO: 184786 - RNA, 32 nt, Homo Sapiens
acagacucugcuuuccucucuucgugguuugu

SEQ ID NO: 184787 - RNA, 32 nt, Homo Sapiens
aaaauguuugaguaccugaugaaaaugaauag

SEQ ID NO: 184788 - RNA, 32 nt, Homo Sapiens
gguuuucugggguugcuggcuauugaauguca

SEQ ID NO: 184789 - RNA, 32 nt, Homo Sapiens
guaucucacccgccgccacuagguguccccaa

SEQ ID NO: 184790 - RNA, 32 nt, Homo Sapiens
uugagccgccgacggggcgggugggcuuugcu

SEQ ID NO: 184791 - RNA, 32 nt, Homo Sapiens
ggggcccagaacccugggagccaggaaggugg

SEQ ID NO: 184792 - RNA, 32 nt, Homo Sapiens
uagagauucugcagcucuuugcucuuaagagc

SEQ ID NO: 184793 - RNA, 32 nt, Homo Sapiens
auugaccccucuaauucucuuacccagaauau

SEQ ID NO: 184794 - RNA, 32 nt, Homo Sapiens
agaagcaggugcgcagagaauuccuugaaaga

SEQ ID NO: 184795 - RNA, 32 nt, Homo Sapiens
ugaccagacuggaagcuccaagagggcaggca

SEQ ID NO: 184796 - RNA, 31 nt, Homo Sapiens
cucgccaugucggcugcagaggcggggggug

SEQ ID NO: 184797 - RNA, 32 nt, Homo Sapiens
cagcugggguggccccgauggcgcugcugucu

SEQ ID NO: 184798 - RNA, 32 nt, Homo Sapiens
aucuaugguguuggauucuguuucuuaaauaa

SEQ ID NO: 184799 - RNA, 32 nt, Homo Sapiens
gaugugggcagcuuagggcccuggaggcggug

SEQ ID NO: 184800 - RNA, 32 nt, Homo Sapiens
caccagacucugacaugcuacauccugcccaa

SEQ ID NO: 184801 - RNA, 32 nt, Homo Sapiens
gaccuccuuucuaccacuuccugccuagguca

SEQ ID NO: 184802 - RNA, 32 nt, Homo Sapiens
uuauguuuugcuaaauucgaauaauguuugaa

SEQ ID NO: 184803 - RNA, 32 nt, Homo Sapiens
acccgagggcuugaaagguggcugggagcgcc

SEQ ID NO: 184804 - RNA, 32 nt, Homo Sapiens
gaaagcaaaaagagaaggcagaugaacuacaa

SEQ ID NO: 184805 - RNA, 32 nt, Homo Sapiens
agaaaugccuacugaguuuagggaauugcuug

SEQ ID NO: 184806 - RNA, 32 nt, Homo Sapiens
cagugaagaucauaccucacuacauccgugaa

SEQ ID NO: 184807 - RNA, 32 nt, Homo Sapiens
aucuauuugagucuggaaauaacuaauguguu

SEQ ID NO: 184808 - RNA, 32 nt, Homo Sapiens
cauauggacauauagacaaacacauagacaca

SEQ ID NO: 184809 - RNA, 32 nt, Homo Sapiens
uuucaguuggguuuuucuuuuuuuuugccacc

SEQ ID NO: 184810 - RNA, 32 nt, Homo Sapiens
gacacagucaacagggugaaaagacacgcaca

SEQ ID NO: 184811 - RNA, 32 nt, Homo Sapiens
cgguauaauccucucuugucuaaugggacaca

SEQ ID NO: 184812 - RNA, 27 nt, Homo Sapiens
uucaugucuuuuuucagcccucucaga

SEQ ID NO: 184813 - RNA, 32 nt, Homo Sapiens
acagaggcagauuuuucuucauugcuuaguug

SEQ ID NO: 184814 - RNA, 32 nt, Homo Sapiens
cauaacauugaaacagaaggaaaugcugugga

SEQ ID NO: 184815 - RNA, 32 nt, Homo Sapiens
agcuuuagcuaauuacauucauuucuccaggu

SEQ ID NO: 184816 - RNA, 32 nt, Homo Sapiens
uuguaugcaacacuaaccuuuugacugcuaau

SEQ ID NO: 184817 - RNA, 32 nt, Homo Sapiens
ggcagaaguauuuucaucuuugucauacgaaa

SEQ ID NO: 184818 - RNA, 32 nt, Homo Sapiens
agccccuuccuucugcccacccgcccuucuuc

SEQ ID NO: 184819 - RNA, 32 nt, Homo Sapiens
gagagaaagggagucaggcacacugggaaucg

SEQ ID NO: 184820 - RNA, 32 nt, Homo Sapiens
ucuuccuccaugagcccagccagagccuccac

SEQ ID NO: 184821 - RNA, 32 nt, Homo Sapiens
acucccagcagcagcacaguucagcauugugu

SEQ ID NO: 184822 - RNA, 32 nt, Homo Sapiens
cagcaccauuccuggucacgcaaaacagaacc

SEQ ID NO: 184823 - RNA, 32 nt, Homo Sapiens
ccaugugcuggcacguggaugauuagaaaaaa

SEQ ID NO: 184824 - RNA, 32 nt, Homo Sapiens
auauauugauucaugucaccaccaccguaauc

SEQ ID NO: 184825 - RNA, 32 nt, Homo Sapiens
guugggaguuuuguuuccuacuuaagcucagg

SEQ ID NO: 184826 - RNA, 32 nt, Homo Sapiens
gcccugggaaaggccuggugcgauucucagua

SEQ ID NO: 184827 - RNA, 30 nt, Homo Sapiens
gccagaggcaggccuggguuuauugcaggu

SEQ ID NO: 184828 - RNA, 32 nt, Homo Sapiens
ccugucuggugccuggaggugugggagggaag

SEQ ID NO: 184829 - RNA, 32 nt, Homo Sapiens
gauauauuccaagaugcuacaugcagcagaca

SEQ ID NO: 184830 - RNA, 32 nt, Homo Sapiens
auuucaggagaugucaggguuuuucuauucug

SEQ ID NO: 184831 - RNA, 32 nt, Homo Sapiens
cacuuuaaauuaaaagugguuuauuacuuguu

SEQ ID NO: 184832 - RNA, 32 nt, Homo Sapiens
aaguuagcugggugugguggcgugugccugua

SEQ ID NO: 184833 - RNA, 32 nt, Homo Sapiens
cccggcggggcgauggaggcgcugcucuccac

SEQ ID NO: 184834 - RNA, 32 nt, Homo Sapiens
auuuaucccuuuccucuagguuuuccaauuug

SEQ ID NO: 184835 - RNA, 32 nt, Homo Sapiens
cgggcuggcucgccgucggcugccgggggguu

SEQ ID NO: 184836 - RNA, 32 nt, Homo Sapiens
gggcuucccuaacuccuccccuugccccuacc

SEQ ID NO: 184837 - RNA, 32 nt, Homo Sapiens
guguuuguuuuuguccuuucuuuuugaagagg

SEQ ID NO: 184838 - RNA, 32 nt, Homo Sapiens
cuucaaacucuuaaguuuuuuuuuuuuaauac

SEQ ID NO: 184839 - RNA, 32 nt, Homo Sapiens
ucuugcucguccucgaacacggcgccgcccac

SEQ ID NO: 184840 - RNA, 32 nt, Homo Sapiens
ggccggaugcgguggcucaugccuguaauccc

SEQ ID NO: 184841 - RNA, 32 nt, Homo Sapiens
ggcugggcgcggugauucacgccuguaauccc

SEQ ID NO: 184842 - RNA, 32 nt, Homo Sapiens
uuucugcuuuuguauaauacaaauuuucauua

SEQ ID NO: 184843 - RNA, 32 nt, Homo Sapiens
guauuaagaaugcuauuaagccuaauugauua

SEQ ID NO: 184844 - RNA, 32 nt, Homo Sapiens
uuaugagaaagauggaggcuugaguuaugaaa

SEQ ID NO: 184845 - RNA, 32 nt, Homo Sapiens
aaagggccacgccugccccugggagggguauu

SEQ ID NO: 184846 - RNA, 32 nt, Homo Sapiens
acaaauugcggacaacucucuauguacacuua

SEQ ID NO: 184847 - RNA, 32 nt, Homo Sapiens
ccgagaucgugucacugcacuccagccugggu

SEQ ID NO: 184848 - RNA, 32 nt, Homo Sapiens
ccgagacugugucauugcacuccagccugggc

SEQ ID NO: 184849 - RNA, 32 nt, Homo Sapiens
agcauauugccucauggaugaaagacuuguag

SEQ ID NO: 184850 - RNA, 32 nt, Homo Sapiens
caagcccuggaaaccuguguuauucuguguug

SEQ ID NO: 184851 - RNA, 32 nt, Homo Sapiens
uuacagagaaaacuuaucugugaacuuuacua

SEQ ID NO: 184852 - RNA, 32 nt, Homo Sapiens
ggaggcacaaugcggggcugcagaggagacgc

SEQ ID NO: 184853 - RNA, 32 nt, Homo Sapiens
cacuagaaugcuguucuuaauuuuaauagugu

SEQ ID NO: 184854 - RNA, 32 nt, Homo Sapiens
ggccgaagcggcccgcgaggcgcgggaggcau

SEQ ID NO: 184855 - RNA, 32 nt, Homo Sapiens
aauacaaguuuguagcucuaugugcaucuauu

SEQ ID NO: 184856 - RNA, 32 nt, Homo Sapiens
uguucaucucaaaccuagauguauacagcucu

SEQ ID NO: 184857 - RNA, 32 nt, Homo Sapiens
ucagugugauuuuugucuucugcuccuucuac

SEQ ID NO: 184858 - RNA, 32 nt, Homo Sapiens
auaaacaacugaaagcuugcucugccaaaagg

SEQ ID NO: 184859 - RNA, 32 nt, Homo Sapiens
cugucuccaaaauaaucucuuguuaugcaggg

SEQ ID NO: 184860 - RNA, 32 nt, Homo Sapiens
cuagcaggaucuguccaugcccugcccauauc

SEQ ID NO: 184861 - RNA, 32 nt, Homo Sapiens
guguaccuguguacauaacucuguaaaaacac

SEQ ID NO: 184862 - RNA, 32 nt, Homo Sapiens
uugcuauuuuccauugaggggugucugauugu

SEQ ID NO: 184863 - RNA, 32 nt, Homo Sapiens
aaguagguauucaagucuuuuauucacauuuu

SEQ ID NO: 184864 - RNA, 32 nt, Homo Sapiens
ccauucaucucccuccucccaccgugucaguu

SEQ ID NO: 184865 - RNA, 32 nt, Homo Sapiens
uauagucgcucuucagccaugccuuugcugca

SEQ ID NO: 184866 - RNA, 32 nt, Homo Sapiens
cucaaaguagccaggcucacugggugagagga

SEQ ID NO: 184867 - RNA, 32 nt, Homo Sapiens
cuccgguuugaaaaaagcucugguggcugagu

SEQ ID NO: 184868 - RNA, 32 nt, Homo Sapiens
ccacuccugcggugaacaguacugccuccugc

SEQ ID NO: 184869 - RNA, 32 nt, Homo Sapiens
cagguggaacucagaacacagcuccuagacaa

SEQ ID NO: 184870 - RNA, 32 nt, Homo Sapiens
cggaggaagaacacugaugagcgagcucugua

SEQ ID NO: 184871 - RNA, 32 nt, Homo Sapiens
acgagucccugcucagccccagcagugcggug

SEQ ID NO: 184872 - RNA, 32 nt, Homo Sapiens
ccacaauggugggacagguuccccagucccua

SEQ ID NO: 184873 - RNA, 32 nt, Homo Sapiens
ccggacacgacggcgccggcgagaggacagcu

SEQ ID NO: 184874 - RNA, 32 nt, Homo Sapiens
uugcuuggaauucugcccacucugcggaguua

SEQ ID NO: 184875 - RNA, 28 nt, Homo Sapiens
ggaggaggaacaggaccaaggggugagc

SEQ ID NO: 184876 - RNA, 32 nt, Homo Sapiens
uauuuccuuuuggugugagucuggguuguugg

SEQ ID NO: 184877 - RNA, 32 nt, Homo Sapiens
ccgcaugauguuucccucuccuuccaacaaaa

SEQ ID NO: 184878 - RNA, 32 nt, Homo Sapiens
cacgccacauaacagacaaaaauacacacacg

SEQ ID NO: 184879 - RNA, 32 nt, Homo Sapiens
uugcaaauaaaccacuuucuaauuuuuuccug

SEQ ID NO: 184880 - RNA, 32 nt, Homo Sapiens
uuuaauuuggcaggauaauauagugcaaauua

SEQ ID NO: 184881 - RNA, 32 nt, Homo Sapiens
gaugauugacagugacucuacuaugcagggcu

SEQ ID NO: 184882 - RNA, 32 nt, Homo Sapiens
cuuucagcguagcaaugcugccggcgaagaag

SEQ ID NO: 184883 - RNA, 32 nt, Homo Sapiens
ccucaaaaggaauaaaacuuuucugcugauaa

SEQ ID NO: 184884 - RNA, 32 nt, Homo Sapiens
cgaccccggccccgucccgcagcccucacccg

SEQ ID NO: 184885 - RNA, 32 nt, Homo Sapiens
cuggcacuugagaggcagcagcuccuugaagg

SEQ ID NO: 184886 - RNA, 32 nt, Homo Sapiens
ugacaguuuuucccccagggaagugcuuuugc

SEQ ID NO: 184887 - RNA, 32 nt, Homo Sapiens
uggaucugcucccgccgccgccgccgccgccg

SEQ ID NO: 184888 - RNA, 32 nt, Homo Sapiens
uagcgccugaaauaaacaaaauaugggcaugc

SEQ ID NO: 184889 - RNA, 32 nt, Homo Sapiens
ucagccccacccaggcaagcccuggaucuuca

SEQ ID NO: 184890 - RNA, 30 nt, Homo Sapiens
ggaagaugguggccgcaaagaagacgaaaa

SEQ ID NO: 184891 - RNA, 32 nt, Homo Sapiens
uucugaagugcacuccucccagcccagcucca

SEQ ID NO: 184892 - RNA, 32 nt, Homo Sapiens
uggcaucucaggugcuuuacgugcauucguga

SEQ ID NO: 184893 - RNA, 32 nt, Homo Sapiens
gcauucaugccagcuuuucucauguucuagga

SEQ ID NO: 184894 - RNA, 32 nt, Homo Sapiens
ucccucuggugccucagcagauaccagagcuu

SEQ ID NO: 184895 - RNA, 32 nt, Homo Sapiens
uagaaagaauuccacaucugcuucuggagcac

SEQ ID NO: 184896 - RNA, 32 nt, Homo Sapiens
cuuuuuuaauauaugaaagcugugauaaaaau

SEQ ID NO: 184897 - RNA, 32 nt, Homo Sapiens
gugugcuuguccuccuccuccucccaccccau

SEQ ID NO: 184898 - RNA, 32 nt, Homo Sapiens
gcccuccucagccccagcccugccugcccugc

SEQ ID NO: 184899 - RNA, 32 nt, Homo Sapiens
cugagcugccagcagccaagcuguccugauga

SEQ ID NO: 184900 - RNA, 32 nt, Homo Sapiens
agaagggcaggagaggaagauuugucuacuug

SEQ ID NO: 184901 - RNA, 29 nt, Homo Sapiens
ugguuuucuauccaaacgaccaaaaaacc

SEQ ID NO: 184902 - RNA, 32 nt, Homo Sapiens
ugguauguaucauauuuuuauguuucuggugu

SEQ ID NO: 184903 - RNA, 32 nt, Homo Sapiens
uagcagcagugacuuugacuucuggucuuaaa

SEQ ID NO: 184904 - RNA, 32 nt, Homo Sapiens
auugcguuuagcgcccucccguucuguccauu

SEQ ID NO: 184905 - RNA, 32 nt, Homo Sapiens
ggcugugggaauaagauggcggggaagaagaa

SEQ ID NO: 184906 - RNA, 30 nt, Homo Sapiens
ggagggugggggcgcgcgggccacuugcac

SEQ ID NO: 184907 - RNA, 32 nt, Homo Sapiens
ugcuuuguuguccugauauggcaaaaauuaaa

SEQ ID NO: 184908 - RNA, 32 nt, Homo Sapiens
aucagcuugauuggcuuccccgagggccagca

SEQ ID NO: 184909 - RNA, 32 nt, Homo Sapiens
gguaagagcucuccauuauaaaauaguugcau

SEQ ID NO: 184910 - RNA, 32 nt, Homo Sapiens
cuccucauuuccccuggcuagcugcccccuag

SEQ ID NO: 184911 - RNA, 32 nt, Homo Sapiens
agcguccuguucuccuucugugcugucccagg

SEQ ID NO: 184912 - RNA, 32 nt, Homo Sapiens
aggcagggcugggguuggccuccaucaccucc

SEQ ID NO: 184913 - RNA, 32 nt, Homo Sapiens
gggcgucucgccaugcugcuccugggccugcu

SEQ ID NO: 184914 - RNA, 32 nt, Homo Sapiens
accaaaaaccaaaacaaacaaacaaaaaaaac

SEQ ID NO: 184915 - RNA, 32 nt, Homo Sapiens
aacacacacacacacacacacacacacacacc

SEQ ID NO: 184916 - RNA, 32 nt, Homo Sapiens
ggagaaccacaguuaagcuggugucucugggu

SEQ ID NO: 184917 - RNA, 32 nt, Homo Sapiens
gaggaucagcagcagcagcaguacucagugau

SEQ ID NO: 184918 - RNA, 32 nt, Homo Sapiens
cuccugcccaaccugguagagcugagggcaug

SEQ ID NO: 184919 - RNA, 32 nt, Homo Sapiens
agaacggagaucuggguuucagagcuuuccca

SEQ ID NO: 184920 - RNA, 31 nt, Homo Sapiens
aagcauaaaaagaaaaucuuuguugccaacu

SEQ ID NO: 184921 - RNA, 32 nt, Homo Sapiens
gccugaaagucacacuacaugcacugccuuug

SEQ ID NO: 184922 - RNA, 32 nt, Homo Sapiens
gcgcaguagugggcugggccggggcaccaguc

SEQ ID NO: 184923 - RNA, 32 nt, Homo Sapiens
auucuccucacagggcguucugcaaacucggc

SEQ ID NO: 184924 - RNA, 32 nt, Homo Sapiens
guuggggaggugaggcccgagcagcucuuguu

SEQ ID NO: 184925 - RNA, 32 nt, Homo Sapiens
agccuuccuugcuggccugagagagcugugug

SEQ ID NO: 184926 - RNA, 32 nt, Homo Sapiens
guuaguuucucauuuuaauuuuauuuugguau

SEQ ID NO: 184927 - RNA, 32 nt, Homo Sapiens
ccagauauggaugagagauucuauucagugga

SEQ ID NO: 184928 - RNA, 32 nt, Homo Sapiens
gugccaccagugcuccugcagugcaaggcggc

SEQ ID NO: 184929 - RNA, 32 nt, Homo Sapiens
aacaccuauuacaguuaaauuaugcaaaucau

SEQ ID NO: 184930 - RNA, 32 nt, Homo Sapiens
ugaagggggucuaaauuggauguaucuuacuu

SEQ ID NO: 184931 - RNA, 32 nt, Homo Sapiens
gcuaaggccaaacaaacaaaaaacacuugcuu

SEQ ID NO: 184932 - RNA, 32 nt, Homo Sapiens
agggaugcuuaggagauuaauuugauuccuga

SEQ ID NO: 184933 - RNA, 32 nt, Homo Sapiens
gacacccucacucccacaccccgggaagaaca

SEQ ID NO: 184934 - RNA, 32 nt, Homo Sapiens
uagcuacaguguucauaguuuauauuaaaguu

SEQ ID NO: 184935 - RNA, 32 nt, Homo Sapiens
cucccuggccccaggcagcccuuuucccucca

SEQ ID NO: 184936 - RNA, 32 nt, Homo Sapiens
ggcacccguuuucucagcauucagcccaggga

SEQ ID NO: 184937 - RNA, 32 nt, Homo Sapiens
gauccgcgaguguauuauaucaacacuucugu

SEQ ID NO: 184938 - RNA, 32 nt, Homo Sapiens
aacugaauauuuaggaaaucugccuaaucugc

SEQ ID NO: 184939 - RNA, 32 nt, Homo Sapiens
gcaguaagguugggcugcuggcacgacccuua

SEQ ID NO: 184940 - RNA, 32 nt, Homo Sapiens
cugaggucaggagcucgagccagccuggccaa

SEQ ID NO: 184941 - RNA, 30 nt, Homo Sapiens
ccacgucuauacucagcccaucuuggcagg

SEQ ID NO: 184942 - RNA, 32 nt, Homo Sapiens
ccuccgagccgcgcccguggaagugcugcaug

SEQ ID NO: 184943 - RNA, 32 nt, Homo Sapiens
cauucuagcauuucuguucugugcugugcuaa

SEQ ID NO: 184944 - RNA, 32 nt, Homo Sapiens
ccgggugucccuagcccgcggcguggggcagu

SEQ ID NO: 184945 - RNA, 32 nt, Homo Sapiens
acaguuggcuccuggcagcugcugugagccgu

SEQ ID NO: 184946 - RNA, 32 nt, Homo Sapiens
aaucauuuuaguuuuucuuuguuuauaucuuu

SEQ ID NO: 184947 - RNA, 32 nt, Homo Sapiens
augaacucaggaauagcuucccucuggacugu

SEQ ID NO: 184948 - RNA, 32 nt, Homo Sapiens
cagcggccagacgcugcgggagcacugcuggg

SEQ ID NO: 184949 - RNA, 32 nt, Homo Sapiens
cuaaggcggcggcagugagggcggcggugccc

SEQ ID NO: 184950 - RNA, 32 nt, Homo Sapiens
gagagcugcggccagggaggugcggagcagcu

SEQ ID NO: 184951 - RNA, 32 nt, Homo Sapiens
gcuccaagccccagacagcaguucagaagucu

SEQ ID NO: 184952 - RNA, 32 nt, Homo Sapiens
gcuauuagcguagaggauccggguucgguugc

SEQ ID NO: 184953 - RNA, 32 nt, Homo Sapiens
uuacauguucuuccaucuccccagccaccuga

SEQ ID NO: 184954 - RNA, 32 nt, Homo Sapiens
uccugguucgcagugucuuuugacuugggugg

SEQ ID NO: 184955 - RNA, 32 nt, Homo Sapiens
aggccacacuggcccgccccagcucucagagg

SEQ ID NO: 184956 - RNA, 32 nt, Homo Sapiens
caguuugccacagguccggaccucucccucca

SEQ ID NO: 184957 - RNA, 30 nt, Homo Sapiens
gagagaggcaggcagaccugggccucccag

SEQ ID NO: 184958 - RNA, 32 nt, Homo Sapiens
cuggguaccgaggcugcugcgcggcggacagc

SEQ ID NO: 184959 - RNA, 32 nt, Homo Sapiens
gcuccgagucccuuccucuccccguccuguga

SEQ ID NO: 184960 - RNA, 32 nt, Homo Sapiens
uacuaauaguuuuauuugauuaggauugaaca

SEQ ID NO: 184961 - RNA, 28 nt, Homo Sapiens
agcggggcggccuccaggaagcggaaaa

SEQ ID NO: 184962 - RNA, 32 nt, Homo Sapiens
ccuuuggcagugacuagauuuccacuaaugug

SEQ ID NO: 184963 - RNA, 32 nt, Homo Sapiens
agccaccguuuucaggucaucugaagucaaga

SEQ ID NO: 184964 - RNA, 32 nt, Homo Sapiens
cuggcuugucuccucagaacuccuucuccaac

SEQ ID NO: 184965 - RNA, 32 nt, Homo Sapiens
uauguuuuaaacauuuucaagguguuagagac

SEQ ID NO: 184966 - RNA, 32 nt, Homo Sapiens
acgcgcggguuguggcagcugcagcgggaccg

SEQ ID NO: 184967 - RNA, 32 nt, Homo Sapiens
acagacagggacccuccacccccacggucuag

SEQ ID NO: 184968 - RNA, 32 nt, Homo Sapiens
cuccggcagaggggcgaggaccgagcgcccaa

SEQ ID NO: 184969 - RNA, 32 nt, Homo Sapiens
uagaucaaauuuagcugaaaaggucaggcuaa

SEQ ID NO: 184970 - RNA, 32 nt, Homo Sapiens
agcagcuguauccccuuugccauggugauagc

SEQ ID NO: 184971 - RNA, 32 nt, Homo Sapiens
ggccggugggagagggaggcgagccgaccccu

SEQ ID NO: 184972 - RNA, 32 nt, Homo Sapiens
auugcuaaucuuacuaacaccuaugauguuac

SEQ ID NO: 184973 - RNA, 32 nt, Homo Sapiens
gacgcagagacggcccggccgggcgcccucgc

SEQ ID NO: 184974 - RNA, 32 nt, Homo Sapiens
aguaguagcuucuucuacaauguaaaaauaaa

SEQ ID NO: 184975 - RNA, 32 nt, Homo Sapiens
ggcuuuacauaaaugaagaugcuugugauucc

SEQ ID NO: 184976 - RNA, 32 nt, Homo Sapiens
caacugcuuugcaacaguugcugguauauuua

SEQ ID NO: 184977 - RNA, 32 nt, Homo Sapiens
auuuugaggggagggaaagaaacaauaccuuu

SEQ ID NO: 184978 - RNA, 32 nt, Homo Sapiens
ccgccgcugccgccuccuccucuccggcgagg

SEQ ID NO: 184979 - RNA, 32 nt, Homo Sapiens
ggaacauuauaaaaaacuuaugagccaggccc

SEQ ID NO: 184980 - RNA, 32 nt, Homo Sapiens
ccauccugcugucucuguccugucccaaguuu

SEQ ID NO: 184981 - RNA, 32 nt, Homo Sapiens
acccgacccgccgcaccccacccaggccaggu

SEQ ID NO: 184982 - RNA, 32 nt, Homo Sapiens
gcgccgcauccucuccuccucgccggugcugg

SEQ ID NO: 184983 - RNA, 32 nt, Homo Sapiens
aaguggaagcuugaccagugucugcucgccuu

SEQ ID NO: 184984 - RNA, 32 nt, Homo Sapiens
uucccuccaagagcaaaacugggcaaggggac

SEQ ID NO: 184985 - RNA, 32 nt, Homo Sapiens
uagggacagaggcaaagaagggcaggacgguc

SEQ ID NO: 184986 - RNA, 32 nt, Homo Sapiens
ggucgggucugcuuccgcgcuguggagguuuu

SEQ ID NO: 184987 - RNA, 32 nt, Homo Sapiens
agggagagggcuuucuggggcagggggagccc

SEQ ID NO: 184988 - RNA, 32 nt, Homo Sapiens
uccugccaucuacaaugacccuccucauuucc

SEQ ID NO: 184989 - RNA, 32 nt, Homo Sapiens
gcuuccacaguuuuccucccccuuuucacuug

SEQ ID NO: 184990 - RNA, 32 nt, Homo Sapiens
cccaggucucccuccgcagcccugacucgcgc

SEQ ID NO: 184991 - RNA, 32 nt, Homo Sapiens
auaugagacaucuauuuauuuggaaaaaaaua

SEQ ID NO: 184992 - RNA, 32 nt, Homo Sapiens
accuaggaaugggaguugagcccuggaauggg

SEQ ID NO: 184993 - RNA, 32 nt, Homo Sapiens
uauuuugagggagagggugggauggggcuaag

SEQ ID NO: 184994 - RNA, 32 nt, Homo Sapiens
cugcgcacagaccacccgcagacgcccggcag

SEQ ID NO: 184995 - RNA, 32 nt, Homo Sapiens
uuccucuuuaaaccugucuggugggcccccag

SEQ ID NO: 184996 - RNA, 32 nt, Homo Sapiens
gcuggggugauuaugugguuaagggcuccuga

SEQ ID NO: 184997 - RNA, 32 nt, Homo Sapiens
aaagcacaaccacccauguuuguuuuuucaaa

SEQ ID NO: 184998 - RNA, 32 nt, Homo Sapiens
uuuaccuaggcgcuugucuaagaucaaauuuu

SEQ ID NO: 184999 - RNA, 32 nt, Homo Sapiens
gugccccucagcucagccccagcaagugugug

SEQ ID NO: 185000 - RNA, 32 nt, Homo Sapiens
ccaggcccaucugagggaccaagacgcuguua

SEQ ID NO: 185001 - RNA, 32 nt, Homo Sapiens
uuguacaucugcuauuugagaacugcugaagc

SEQ ID NO: 185002 - RNA, 32 nt, Homo Sapiens
gacuuacaaaucuuguuucucaucacuaaaau

SEQ ID NO: 185003 - RNA, 32 nt, Homo Sapiens
uuccucgcaccuccuuguccucacccaguucc

SEQ ID NO: 185004 - RNA, 32 nt, Homo Sapiens
aacuucagggaagagggagaguaagagggaag

SEQ ID NO: 185005 - RNA, 32 nt, Homo Sapiens
cuuccccuagaagucuugaggguguggacaac

SEQ ID NO: 185006 - RNA, 32 nt, Homo Sapiens
aggcgcggcggccccguggagcagcgcaguau

SEQ ID NO: 185007 - RNA, 32 nt, Homo Sapiens
gugaucuccaguccguguggugaugcuggugg

SEQ ID NO: 185008 - RNA, 32 nt, Homo Sapiens
aaugaccacccuaaaacaaauacugaaugccu

SEQ ID NO: 185009 - RNA, 32 nt, Homo Sapiens
ugucgaguggcucuuccuggcugcugaggcgg

SEQ ID NO: 185010 - RNA, 32 nt, Homo Sapiens
agagcugggcagccuuccuccaugggaaccug

SEQ ID NO: 185011 - RNA, 32 nt, Homo Sapiens
uaaguguccccucugguuuccucggugguggc

SEQ ID NO: 185012 - RNA, 32 nt, Homo Sapiens
gcauuuggaaaacacagaaucagcccucaggg

SEQ ID NO: 185013 - RNA, 32 nt, Homo Sapiens
ggcugggacgcuguuugugcucagcggggaca

SEQ ID NO: 185014 - RNA, 32 nt, Homo Sapiens
gaauuaagaaaucuggcgaaaagcagcuguuc

SEQ ID NO: 185015 - RNA, 32 nt, Homo Sapiens
cuugucuacauauuuggagagaauaugacuuu

SEQ ID NO: 185016 - RNA, 32 nt, Homo Sapiens
auaguuaacauucaaaaaacuuguuuucacau

SEQ ID NO: 185017 - RNA, 32 nt, Homo Sapiens
uacugugaggaagauaaaaugauaaaauaaua

SEQ ID NO: 185018 - RNA, 32 nt, Homo Sapiens
ccucgcucggugccgcggaggugccuggccac

SEQ ID NO: 185019 - RNA, 32 nt, Homo Sapiens
agcuuggcuggggcagaaauaaaccauauugg

SEQ ID NO: 185020 - RNA, 31 nt, Homo Sapiens
gcaaaccggcacugaagggcugccccgcccc

SEQ ID NO: 185021 - RNA, 32 nt, Homo Sapiens
auaggcucuuucgugcuguguuaucuuuauag

SEQ ID NO: 185022 - RNA, 32 nt, Homo Sapiens
aagugcugccagccgaggaagcccccagcacu

SEQ ID NO: 185023 - RNA, 32 nt, Homo Sapiens
guaucucaagcaagugcuacaaugcaacagua

SEQ ID NO: 185024 - RNA, 32 nt, Homo Sapiens
ccacaugaacagagacaccaggaugcucuccu

SEQ ID NO: 185025 - RNA, 32 nt, Homo Sapiens
gaaccaaggggaggggugggauggcacuuuuu

SEQ ID NO: 185026 - RNA, 32 nt, Homo Sapiens
aguuaccuggggauccuggcuggcccaccuuc

SEQ ID NO: 185027 - RNA, 27 nt, Homo Sapiens
ccucccucucgccucagccccuucagu

SEQ ID NO: 185028 - RNA, 32 nt, Homo Sapiens
uggguuccgcccacuucuucccuuucaguuuu

SEQ ID NO: 185029 - RNA, 32 nt, Homo Sapiens
gaugucugauaaguauugucagugugcaaaag

SEQ ID NO: 185030 - RNA, 32 nt, Homo Sapiens
aaccagggccugcggcacuugcgggccucccu

SEQ ID NO: 185031 - RNA, 32 nt, Homo Sapiens
cccugaacuuggauaagcugggccgcugaugg

SEQ ID NO: 185032 - RNA, 32 nt, Homo Sapiens
cucauuucuuuggaauuauuucaguccagcaa

SEQ ID NO: 185033 - RNA, 32 nt, Homo Sapiens
cagugcgcuccuugugcaagcuuaucuuccug

SEQ ID NO: 185034 - RNA, 30 nt, Homo Sapiens
gcgccauguccucugagucauccaccaugg

SEQ ID NO: 185035 - RNA, 30 nt, Homo Sapiens
gguggucgugucccugcccucaauucuuga

SEQ ID NO: 185036 - RNA, 32 nt, Homo Sapiens
aaagucuuccaggaucuagucccggccuaccu

SEQ ID NO: 185037 - RNA, 32 nt, Homo Sapiens
ugaaagccagccagcccuuccuccuucccuca

SEQ ID NO: 185038 - RNA, 32 nt, Homo Sapiens
acccaagaaaagacaugggacaggccugcagg

SEQ ID NO: 185039 - RNA, 32 nt, Homo Sapiens
agguaagaaaauacuuuuuuauauuuguuacu

SEQ ID NO: 185040 - RNA, 32 nt, Homo Sapiens
aacuuagcuaaguuuuguuuuguuuuucagcg

SEQ ID NO: 185041 - RNA, 32 nt, Homo Sapiens
ugaagauccagcugccuauugauuuaagcuuu

SEQ ID NO: 185042 - RNA, 32 nt, Homo Sapiens
agaaaccagagauugagacaaaaaagacacuc

SEQ ID NO: 185043 - RNA, 30 nt, Homo Sapiens
uccagaaggaagcuuggcugagcuggccuu

SEQ ID NO: 185044 - RNA, 32 nt, Homo Sapiens
gauaguagaucucgagcguuuaucucgggcuu

SEQ ID NO: 185045 - RNA, 32 nt, Homo Sapiens
aguacuauauuuguaucacagaucuuauugug

SEQ ID NO: 185046 - RNA, 32 nt, Homo Sapiens
ccugcagaauaaaacaacauacagaaaaguga

SEQ ID NO: 185047 - RNA, 32 nt, Homo Sapiens
uguccaacagaugucacuguguuuccuucgca

SEQ ID NO: 185048 - RNA, 32 nt, Homo Sapiens
cccccagagcaacguggacuuugaccugaugc

SEQ ID NO: 185049 - RNA, 32 nt, Homo Sapiens
cuaggagauaauguguauguagguuuauguga

SEQ ID NO: 185050 - RNA, 32 nt, Homo Sapiens
agauagguucuuuugucuuuuucugucuucuc

SEQ ID NO: 185051 - RNA, 32 nt, Homo Sapiens
uggcaguuaaaaugcuuuuuacucugguguau

SEQ ID NO: 185052 - RNA, 32 nt, Homo Sapiens
caccuuacuccagcagccuccaggugcuuuca

SEQ ID NO: 185053 - RNA, 32 nt, Homo Sapiens
auagaaaggugcuucgggagggggagagacug

SEQ ID NO: 185054 - RNA, 32 nt, Homo Sapiens
ugguuuugcauucgcguuuuuguggcucucca

SEQ ID NO: 185055 - RNA, 32 nt, Homo Sapiens
cuccuccuggaaacgcugcccggcuacagucu

SEQ ID NO: 185056 - RNA, 32 nt, Homo Sapiens
ugucgccgccaccaccaccaucggagucacga

SEQ ID NO: 185057 - RNA, 32 nt, Homo Sapiens
auauauauuuuuucuuuuuuuagagacagucu

SEQ ID NO: 185058 - RNA, 32 nt, Homo Sapiens
guggugaggcguccucaccuccccccaccaca

SEQ ID NO: 185059 - RNA, 32 nt, Homo Sapiens
ucauuaacaguacuggaaaguaguuguguggc

SEQ ID NO: 185060 - RNA, 32 nt, Homo Sapiens
uuucucuguuccugagcccccacauucucuag

SEQ ID NO: 185061 - RNA, 31 nt, Homo Sapiens
uuuggagauggaauaaauguuuucucauuca

SEQ ID NO: 185062 - RNA, 32 nt, Homo Sapiens
ggcggccucugcgccucgggcgggcgggagag

SEQ ID NO: 185063 - RNA, 32 nt, Homo Sapiens
cgccggccgaggaggagggguggggguagcgg

SEQ ID NO: 185064 - RNA, 32 nt, Homo Sapiens
agcuggucucuuguggcucagcgccgugcgga

SEQ ID NO: 185065 - RNA, 32 nt, Homo Sapiens
gugucggggggccuguucagccucaccgucca

SEQ ID NO: 185066 - RNA, 32 nt, Homo Sapiens
gguaggcauuugccccggugggacgccuugcc

SEQ ID NO: 185067 - RNA, 32 nt, Homo Sapiens
cagugagcucacugccuagcacggagcccgua

SEQ ID NO: 185068 - RNA, 32 nt, Homo Sapiens
ggcugcgccuccucgccaugggcccccucucg

SEQ ID NO: 185069 - RNA, 32 nt, Homo Sapiens
cgugguggaagaggggacaggucccucaccca

SEQ ID NO: 185070 - RNA, 32 nt, Homo Sapiens
ucuccuccucccuccgccccacucaggaugug

SEQ ID NO: 185071 - RNA, 32 nt, Homo Sapiens
aaaagccgauucuccuguucccuccguggugg

SEQ ID NO: 185072 - RNA, 32 nt, Homo Sapiens
gcccucugcuaagggucccagcaccauggagg

SEQ ID NO: 185073 - RNA, 32 nt, Homo Sapiens
ucuccuagauauauauucaacagaaaugcaug

SEQ ID NO: 185074 - RNA, 32 nt, Homo Sapiens
ugguaucagaguuacauuaaauuugcaaaaug

SEQ ID NO: 185075 - RNA, 32 nt, Homo Sapiens
gccgcgaccccauuugggaggugaggagcaac

SEQ ID NO: 185076 - RNA, 32 nt, Homo Sapiens
aucagagcaaggcagccagagaagccccugag

SEQ ID NO: 185077 - RNA, 32 nt, Homo Sapiens
aguuguucugaaaugucaguucugauauggaa

SEQ ID NO: 185078 - RNA, 32 nt, Homo Sapiens
ucuuaaaaacaaucucuucuguaauagcuuua

SEQ ID NO: 185079 - RNA, 32 nt, Homo Sapiens
uugacuguacuauucagauggcuuuaugcuuu

SEQ ID NO: 185080 - RNA, 32 nt, Homo Sapiens
cugucggcggccugggaugguccgccacgagg

SEQ ID NO: 185081 - RNA, 32 nt, Homo Sapiens
cuuaguuaucauuaauguaguuccucauugaa

SEQ ID NO: 185082 - RNA, 29 nt, Homo Sapiens
cuagugaugaagaacaggaggaagaggaa

SEQ ID NO: 185083 - RNA, 32 nt, Homo Sapiens
ucagauuaaaagacagacggcaacacuggggu

SEQ ID NO: 185084 - RNA, 32 nt, Homo Sapiens
uugcacaucauagaacauacacaggggagaaa

SEQ ID NO: 185085 - RNA, 32 nt, Homo Sapiens
ucggugggcucugacugcggggcucacgggcc

SEQ ID NO: 185086 - RNA, 32 nt, Homo Sapiens
cugcggacccagcccucugugcaaucccacgg

SEQ ID NO: 185087 - RNA, 32 nt, Homo Sapiens
agaucucugcagauuugaugcuacagaugaag

SEQ ID NO: 185088 - RNA, 32 nt, Homo Sapiens
cccuguaugacaugugcaaggcugucagcagg

SEQ ID NO: 185089 - RNA, 32 nt, Homo Sapiens
auuauaaucaguaugucauaguguuaaaggug

SEQ ID NO: 185090 - RNA, 32 nt, Homo Sapiens
aagaggaggaggagggccgaucguccugggcc

SEQ ID NO: 185091 - RNA, 32 nt, Homo Sapiens
ccauggcccucccagugccuccuagccccuuc

SEQ ID NO: 185092 - RNA, 32 nt, Homo Sapiens
accccuccgcgccucccugaagccguugccag

SEQ ID NO: 185093 - RNA, 32 nt, Homo Sapiens
uucaguauuaauucuuuuuuuuuaaaguaaau

SEQ ID NO: 185094 - RNA, 32 nt, Homo Sapiens
cgcgccucgggcgguacccagccaguccccag

SEQ ID NO: 185095 - RNA, 32 nt, Homo Sapiens
cagagggguuccagagaagaugcugggcaccg

SEQ ID NO: 185096 - RNA, 27 nt, Homo Sapiens
auuuuucaguaaacgcgggaaaccuca

SEQ ID NO: 185097 - RNA, 32 nt, Homo Sapiens
aggccuauuuuuaaaaggaaucugaaauuuaa

SEQ ID NO: 185098 - RNA, 32 nt, Homo Sapiens
ccaccaucccagaugcugagcaucguggggag

SEQ ID NO: 185099 - RNA, 32 nt, Homo Sapiens
uauggacaguauauggcaaauggguggcaagu

SEQ ID NO: 185100 - RNA, 32 nt, Homo Sapiens
ggcaagcugugcucugaguuucggguucugcu

SEQ ID NO: 185101 - RNA, 32 nt, Homo Sapiens
cgcucuugcgucaggacggcgccgccggggcc

SEQ ID NO: 185102 - RNA, 32 nt, Homo Sapiens
ucugaggcacaccagcagcaugacaaacucau

SEQ ID NO: 185103 - RNA, 32 nt, Homo Sapiens
cuucccaaagaucaugagacagcugggcaagg

SEQ ID NO: 185104 - RNA, 32 nt, Homo Sapiens
agugggagaaaguucacacacagauaucaccu

SEQ ID NO: 185105 - RNA, 32 nt, Homo Sapiens
aacuaucagggcagcucugccuccuccuccca

SEQ ID NO: 185106 - RNA, 32 nt, Homo Sapiens
ucaagugguaacgccggugucugggaaggcac

SEQ ID NO: 185107 - RNA, 31 nt, Homo Sapiens
caggacuauugagcccagagagagcuguccu

SEQ ID NO: 185108 - RNA, 32 nt, Homo Sapiens
gcuguugaugacgaguugucuugaauaaauca

SEQ ID NO: 185109 - RNA, 32 nt, Homo Sapiens
ccuggucagggugagcccauguggagucagcc

SEQ ID NO: 185110 - RNA, 32 nt, Homo Sapiens
ccuucgcugcgcacgccccucguguuucaggg

SEQ ID NO: 185111 - RNA, 32 nt, Homo Sapiens
uuuuucuuuuugcaguuuuaccuagugcuggg

SEQ ID NO: 185112 - RNA, 32 nt, Homo Sapiens
uuugcugccugcgagcgcguccgcgggcuggg

SEQ ID NO: 185113 - RNA, 32 nt, Homo Sapiens
uuuauacuuuuguauuugaauaguuauguuuc

SEQ ID NO: 185114 - RNA, 32 nt, Homo Sapiens
ccuuggcccagcugggaccaaacucugaucag

SEQ ID NO: 185115 - RNA, 32 nt, Homo Sapiens
agcuagugaauaauucaagugacuaagcuaga

SEQ ID NO: 185116 - RNA, 32 nt, Homo Sapiens
gcuucaggacuuccgaugauuccuccuuagag

SEQ ID NO: 185117 - RNA, 32 nt, Homo Sapiens
acuuagucaaaauaaauaaauaaauaaguaaa

SEQ ID NO: 185118 - RNA, 32 nt, Homo Sapiens
cagggucucaacucuguuacccaggcuggagu

SEQ ID NO: 185119 - RNA, 32 nt, Homo Sapiens
acgcuucucccgcuccgggccccgcaauggcc

SEQ ID NO: 185120 - RNA, 32 nt, Homo Sapiens
accuuuaauguuuuauugauuuuacuggcacu

SEQ ID NO: 185121 - RNA, 32 nt, Homo Sapiens
ugcaaaccaucccagcacugcaccccaggcag

SEQ ID NO: 185122 - RNA, 32 nt, Homo Sapiens
ggguuuuugacuguuugaaugagagucucauc

SEQ ID NO: 185123 - RNA, 32 nt, Homo Sapiens
aaaucuuacaaauuauuuuuaaaaccuuguga

SEQ ID NO: 185124 - RNA, 32 nt, Homo Sapiens
aacaaagggaagaacuuuuuaugaacuccaca

SEQ ID NO: 185125 - RNA, 32 nt, Homo Sapiens
ugauuuuaaagccauuugauagagaagggaca

SEQ ID NO: 185126 - RNA, 31 nt, Homo Sapiens
gcugguccaaggagaaaguggaccagcuccc

SEQ ID NO: 185127 - RNA, 32 nt, Homo Sapiens
acaauaauaaaaauaaagcuuguuagaucauu

SEQ ID NO: 185128 - RNA, 32 nt, Homo Sapiens
agaauuugaagaagugugugcacaaagacgga

SEQ ID NO: 185129 - RNA, 32 nt, Homo Sapiens
gccggcaggacacugccuggaacgccuggagc

SEQ ID NO: 185130 - RNA, 32 nt, Homo Sapiens
auuuuauuucuuuuaaaggcuaaauaauguuc

SEQ ID NO: 185131 - RNA, 32 nt, Homo Sapiens
gauuggaaaucuguagcaagaugcuguuuaaa

SEQ ID NO: 185132 - RNA, 32 nt, Homo Sapiens
aaaagaaauccugguuuguaauguuugucagu

SEQ ID NO: 185133 - RNA, 32 nt, Homo Sapiens
cagguggagaauaaugcaagagaguuuguaau

SEQ ID NO: 185134 - RNA, 32 nt, Homo Sapiens
gggguggccccagggccuggccccacucuccc

SEQ ID NO: 185135 - RNA, 32 nt, Homo Sapiens
caugaucuauugggauuuuucuuaaggauuca

SEQ ID NO: 185136 - RNA, 32 nt, Homo Sapiens
uuauaaauucccacagaagaaaaaugugaaag

SEQ ID NO: 185137 - RNA, 32 nt, Homo Sapiens
ucugugucaggggacagcuugugucaccacgc

SEQ ID NO: 185138 - RNA, 32 nt, Homo Sapiens
ccccaccccccuccucccccuuugggguagac

SEQ ID NO: 185139 - RNA, 32 nt, Homo Sapiens
cccagcuuggaguugucugucacgcacaugug

SEQ ID NO: 185140 - RNA, 32 nt, Homo Sapiens
aaacagccacaguguggggcucugccaugagg

SEQ ID NO: 185141 - RNA, 32 nt, Homo Sapiens
cauucagagguggggucuggggccuggggguu

SEQ ID NO: 185142 - RNA, 32 nt, Homo Sapiens
uuucuaaauuaacuucuuucuguugaaauaaa

SEQ ID NO: 185143 - RNA, 32 nt, Homo Sapiens
guccugccugucacaggugcugaguagagaga

SEQ ID NO: 185144 - RNA, 32 nt, Homo Sapiens
uaaggacuugugccucuugggagacguccacc

SEQ ID NO: 185145 - RNA, 32 nt, Homo Sapiens
auacagcagacacacuuagaacacucacugca

SEQ ID NO: 185146 - RNA, 32 nt, Homo Sapiens
gaaaaagucaacauagaagcuuuagcauucac

SEQ ID NO: 185147 - RNA, 32 nt, Homo Sapiens
ccuuuccucugucuucaagcaccacgcagaaa

SEQ ID NO: 185148 - RNA, 32 nt, Homo Sapiens
aaugucugcucuggggggcacaggccaacuau

SEQ ID NO: 185149 - RNA, 32 nt, Homo Sapiens
ccagcagagccggggacugcagugcuuuggca

SEQ ID NO: 185150 - RNA, 32 nt, Homo Sapiens
acuuccaggauacacaauguaaaauacaugcu

SEQ ID NO: 185151 - RNA, 32 nt, Homo Sapiens
cauagaccaaaauggaaacguugaauacaugu

SEQ ID NO: 185152 - RNA, 32 nt, Homo Sapiens
uagaaaauccuccauuuuuaugguaaauagua

SEQ ID NO: 185153 - RNA, 32 nt, Homo Sapiens
gcucucccacccucaggcuccucgguggccuc

SEQ ID NO: 185154 - RNA, 32 nt, Homo Sapiens
uaaaaccuuguacuucucuauugcgccgccau

SEQ ID NO: 185155 - RNA, 32 nt, Homo Sapiens
agaagaagaaaagaauggacauugauagaacu

SEQ ID NO: 185156 - RNA, 32 nt, Homo Sapiens
cauagggagagccgccggaaguauugacggaa

SEQ ID NO: 185157 - RNA, 32 nt, Homo Sapiens
ccuguucacaugcuggggaccagcacagcacc

SEQ ID NO: 185158 - RNA, 32 nt, Homo Sapiens
agggaggagacguggagaaauauuuuggaggc

SEQ ID NO: 185159 - RNA, 32 nt, Homo Sapiens
gggaugcggcggggcggcagccugagcgcccc

SEQ ID NO: 185160 - RNA, 32 nt, Homo Sapiens
gauucaagggcuucaucaggcuugucagcugg

SEQ ID NO: 185161 - RNA, 32 nt, Homo Sapiens
ccaguuacuuggaucuugcauuccugauuuau

SEQ ID NO: 185162 - RNA, 32 nt, Homo Sapiens
ggagggaggagcugguagggagaugcuggcuu

SEQ ID NO: 185163 - RNA, 32 nt, Homo Sapiens
augggaauauucaaauaucuaugguaauauuu

SEQ ID NO: 185164 - RNA, 32 nt, Homo Sapiens
ugcaaggaucuuggccugaaaacugcuccgug

SEQ ID NO: 185165 - RNA, 32 nt, Homo Sapiens
cuguccgcaucuccacaggggucaccaagcgc

SEQ ID NO: 185166 - RNA, 32 nt, Homo Sapiens
agccagaucccggacccaaaccauguucccug

SEQ ID NO: 185167 - RNA, 32 nt, Homo Sapiens
auguagcugccaaauggacaccucccuccuga

SEQ ID NO: 185168 - RNA, 32 nt, Homo Sapiens
ggcauggacuguaucuuaugcaucucuguauu

SEQ ID NO: 185169 - RNA, 32 nt, Homo Sapiens
gggaacuaagagcagcagcacuuucagauuca

SEQ ID NO: 185170 - RNA, 32 nt, Homo Sapiens
gccuuggcggcugagggaggagggugaagaug

SEQ ID NO: 185171 - RNA, 32 nt, Homo Sapiens
ucacuuuguugguacaaaguuauuucaagaua

SEQ ID NO: 185172 - RNA, 32 nt, Homo Sapiens
ccccaccgccuggccucuugccuggguuggaa

SEQ ID NO: 185173 - RNA, 32 nt, Homo Sapiens
gagcagccgcggcugucccggucgccacccuu

SEQ ID NO: 185174 - RNA, 32 nt, Homo Sapiens
ggggcuggaucauuauucugucuuaugggagu

SEQ ID NO: 185175 - RNA, 32 nt, Homo Sapiens
cucgugcagaucugcuggcagaggacaaucaa

SEQ ID NO: 185176 - RNA, 32 nt, Homo Sapiens
ggauuuuugcaguucugcccuccaccuugcua

SEQ ID NO: 185177 - RNA, 32 nt, Homo Sapiens
uagcugggauuacaagcaugcgccaccaugcc

SEQ ID NO: 185178 - RNA, 32 nt, Homo Sapiens
uuaaacaugauucuaguuaaauguagaagaga

SEQ ID NO: 185179 - RNA, 32 nt, Homo Sapiens
ugcgacagcagcuggauagcggugcuggcaaa

SEQ ID NO: 185180 - RNA, 32 nt, Homo Sapiens
cagcagcccagcuguuuagguugcuggaggcc

SEQ ID NO: 185181 - RNA, 32 nt, Homo Sapiens
gggcagcagggccagugucaccugcugaccuc

SEQ ID NO: 185182 - RNA, 32 nt, Homo Sapiens
gaggcgcagcucccgcugcaccgcgaucgacg

SEQ ID NO: 185183 - RNA, 32 nt, Homo Sapiens
caagcccuucgucuucacccagggccacuccg

SEQ ID NO: 185184 - RNA, 32 nt, Homo Sapiens
ugaucuuuugaaaugguaaauaaaucuggugc

SEQ ID NO: 185185 - RNA, 32 nt, Homo Sapiens
gguagagaggagacgagaggcuuuuucagugg

SEQ ID NO: 185186 - RNA, 32 nt, Homo Sapiens
auuuauuuuaucaguuauucuuuauccuguac

SEQ ID NO: 185187 - RNA, 31 nt, Homo Sapiens
accagagcacagugucugccccggccaagga

SEQ ID NO: 185188 - RNA, 32 nt, Homo Sapiens
cagauggcgcccggugagggcgggccccacag

SEQ ID NO: 185189 - RNA, 27 nt, Homo Sapiens
gauuguuuuuucuucagccuccucuga

SEQ ID NO: 185190 - RNA, 30 nt, Homo Sapiens
gcucagcagucccugggggaagccauugac

SEQ ID NO: 185191 - RNA, 32 nt, Homo Sapiens
ucggcagcggcgcgcgcugugcucuuccgcgg

SEQ ID NO: 185192 - RNA, 30 nt, Homo Sapiens
uuuguggguuccccaucagccaggccuugg

SEQ ID NO: 185193 - RNA, 32 nt, Homo Sapiens
ugcaacagaugccuccuagaaaaugcuguuug

SEQ ID NO: 185194 - RNA, 32 nt, Homo Sapiens
gccgucuccuggucgggugccgcggccagagg

SEQ ID NO: 185195 - RNA, 30 nt, Homo Sapiens
agugugucuugugcugcagagggaagcacc

SEQ ID NO: 185196 - RNA, 32 nt, Homo Sapiens
gcuggcccagcgggguguggggacgccucuac

SEQ ID NO: 185197 - RNA, 32 nt, Homo Sapiens
agcccucccuccccagguccuuccuacccucc

SEQ ID NO: 185198 - RNA, 32 nt, Homo Sapiens
gaagcaauacuuuuaagaugauaauauagaga

SEQ ID NO: 185199 - RNA, 32 nt, Homo Sapiens
aacugaagaaaauauuugcaaacuacucaucu

SEQ ID NO: 185200 - RNA, 32 nt, Homo Sapiens
agaaacagguuggguuaggagcagaaagaaau

SEQ ID NO: 185201 - RNA, 32 nt, Homo Sapiens
uaggaggcauauaaagagguaaaagaaagcag

SEQ ID NO: 185202 - RNA, 32 nt, Homo Sapiens
uccccuuuucuuuccagugcccaguaugcugu

SEQ ID NO: 185203 - RNA, 32 nt, Homo Sapiens
uaugcacacagcacucgcucuuaacuccucug

SEQ ID NO: 185204 - RNA, 32 nt, Homo Sapiens
uggucuaugcauauauuaagugaauauuugag

SEQ ID NO: 185205 - RNA, 32 nt, Homo Sapiens
gaccuccgcucccgcccaccgcccuggagccg

SEQ ID NO: 185206 - RNA, 32 nt, Homo Sapiens
cgcugggugggacuuggcucggcggccauggg

SEQ ID NO: 185207 - RNA, 32 nt, Homo Sapiens
uauucaggccucccuccaccaccuuguucuuu

SEQ ID NO: 185208 - RNA, 32 nt, Homo Sapiens
auaaggagauuuuuuaaaaauuaaacuucaac

SEQ ID NO: 185209 - RNA, 32 nt, Homo Sapiens
gagcuagguccuugaucuuuucuuuagauuga

SEQ ID NO: 185210 - RNA, 32 nt, Homo Sapiens
uacuucaugcuguuuuccagcaugguauuauu

SEQ ID NO: 185211 - RNA, 27 nt, Homo Sapiens
caaugucuggagccccugauguccugc

SEQ ID NO: 185212 - RNA, 32 nt, Homo Sapiens
cuuccugaaacaccccugaagaggguugcuua

SEQ ID NO: 185213 - RNA, 32 nt, Homo Sapiens
acuuaauucaacuuaacuaucauguuauucag

SEQ ID NO: 185214 - RNA, 32 nt, Homo Sapiens
cuugcuggacgcacauuaaagaauaaagcucc

SEQ ID NO: 185215 - RNA, 32 nt, Homo Sapiens
gagauauaaaauugugcagcuauuuuaaaagu

SEQ ID NO: 185216 - RNA, 32 nt, Homo Sapiens
gccaugcggcggugacaggagcgcgaccgaca

SEQ ID NO: 185217 - RNA, 32 nt, Homo Sapiens
ucaaaaagcaaccucagaccaauacccagaga

SEQ ID NO: 185218 - RNA, 32 nt, Homo Sapiens
cugccuccccugcccuuucucagcugccuccc

SEQ ID NO: 185219 - RNA, 32 nt, Homo Sapiens
uugucucugaugcuagaacuaguuugguaacu

SEQ ID NO: 185220 - RNA, 32 nt, Homo Sapiens
auucaguuccucaugggcuauuagagugaggg

SEQ ID NO: 185221 - RNA, 32 nt, Homo Sapiens
gaggaccaggaggagcucaucuuuggugagug

SEQ ID NO: 185222 - RNA, 32 nt, Homo Sapiens
gauugcucugauauuguaaacacaauagaugu

SEQ ID NO: 185223 - RNA, 32 nt, Homo Sapiens
ccgccucucuaucgagucagugcugugcgugu

SEQ ID NO: 185224 - RNA, 32 nt, Homo Sapiens
gagccugcaauaagggaaaaaugggaacugga

SEQ ID NO: 185225 - RNA, 27 nt, Homo Sapiens
ucccuucuuccgcccagccccccagcc

SEQ ID NO: 185226 - RNA, 32 nt, Homo Sapiens
cagaaagagaauaaagacauauguuuauggau

SEQ ID NO: 185227 - RNA, 32 nt, Homo Sapiens
guaaacaucugaaagcacauuucagccuauuu

SEQ ID NO: 185228 - RNA, 32 nt, Homo Sapiens
uccgaggaagggucagcgcgcguguccgcacc

SEQ ID NO: 185229 - RNA, 32 nt, Homo Sapiens
gucuuugauuaugacaguaacaaaauugacag

SEQ ID NO: 185230 - RNA, 32 nt, Homo Sapiens
aguuggauuaagacagaagauggcuggaagag

SEQ ID NO: 185231 - RNA, 32 nt, Homo Sapiens
ucacuggcaaugauuucuuuuagaauauggga

SEQ ID NO: 185232 - RNA, 32 nt, Homo Sapiens
cugggagggggagaggggggugaugggccagg

SEQ ID NO: 185233 - RNA, 32 nt, Homo Sapiens
uguuugcuaguagauucacagaagaugacgag

SEQ ID NO: 185234 - RNA, 32 nt, Homo Sapiens
augggacaaccacugaagccgucaguugaaac

SEQ ID NO: 185235 - RNA, 32 nt, Homo Sapiens
ggucccagccaguccucaggaccuccccacgg

SEQ ID NO: 185236 - RNA, 32 nt, Homo Sapiens
gggcgcggugggugcugucucgggggcaucug

SEQ ID NO: 185237 - RNA, 32 nt, Homo Sapiens
cccauggcgucccuggucuaggcggagaaccg

SEQ ID NO: 185238 - RNA, 32 nt, Homo Sapiens
acuuaucauuccaguaugcaucuuuaagauaa

SEQ ID NO: 185239 - RNA, 32 nt, Homo Sapiens
ugugguuuaauuuuugacuuuuacagguaagu

SEQ ID NO: 185240 - RNA, 32 nt, Homo Sapiens
cugaggauauauaacggaaagaggcucaauaa

SEQ ID NO: 185241 - RNA, 32 nt, Homo Sapiens
uaacuugaugauuaaacuuuaugugaguuaaa

SEQ ID NO: 185242 - RNA, 32 nt, Homo Sapiens
aaagauaaaaauuucagugaagaagaaaguaa

SEQ ID NO: 185243 - RNA, 30 nt, Homo Sapiens
uccaacuguggaugcauccgucccguuuga

SEQ ID NO: 185244 - RNA, 32 nt, Homo Sapiens
uuauugcuauuuuuaugucaguuuccauuuac

SEQ ID NO: 185245 - RNA, 32 nt, Homo Sapiens
uuuaacugugguauugagacaugaugagaagc

SEQ ID NO: 185246 - RNA, 32 nt, Homo Sapiens
gguguuuccaacaaggugcuucucuacuucca

SEQ ID NO: 185247 - RNA, 32 nt, Homo Sapiens
guggacucuggugaccuguuugggugccaggu

SEQ ID NO: 185248 - RNA, 32 nt, Homo Sapiens
gugagacccacccucccgagcggccaaucgca

SEQ ID NO: 185249 - RNA, 32 nt, Homo Sapiens
ggcuggagugcaguggugugaucauagccaau

SEQ ID NO: 185250 - RNA, 32 nt, Homo Sapiens
auaguguaaucuuugggaccuaugccauguuc

SEQ ID NO: 185251 - RNA, 32 nt, Homo Sapiens
ugaggagcugcaagagccuggcugggaagcac

SEQ ID NO: 185252 - RNA, 32 nt, Homo Sapiens
uaaauuggaaucugugaaucuaaaggggccag

SEQ ID NO: 185253 - RNA, 32 nt, Homo Sapiens
cuuuguuuucuuccuuuaucguuuuuagguuu

SEQ ID NO: 185254 - RNA, 32 nt, Homo Sapiens
guccaaguuguaugugcacugaacuaaucagg

SEQ ID NO: 185255 - RNA, 29 nt, Homo Sapiens
aacauuauucggaagugaaaguuaaaaau

SEQ ID NO: 185256 - RNA, 32 nt, Homo Sapiens
cucuucccuuuccgggugcacggcgaggagaa

SEQ ID NO: 185257 - RNA, 32 nt, Homo Sapiens
gaugagaucuucuggcucaccuugaucuucac

SEQ ID NO: 185258 - RNA, 32 nt, Homo Sapiens
uaaagcacuagguuuuaaaucaguggguauca

SEQ ID NO: 185259 - RNA, 32 nt, Homo Sapiens
ugacauuucccucucuuuccuuuauuucgaug

SEQ ID NO: 185260 - RNA, 32 nt, Homo Sapiens
gcgcuggggacgggaggccggcgagccucggg

SEQ ID NO: 185261 - RNA, 32 nt, Homo Sapiens
agcuucuccaucgccugccuucugaccuuuuc

SEQ ID NO: 185262 - RNA, 32 nt, Homo Sapiens
ccuuaaugauguacauaaaauaaaacaaauga

SEQ ID NO: 185263 - RNA, 32 nt, Homo Sapiens
agauuuuuaaaauaaauaugauuugaaguagu

SEQ ID NO: 185264 - RNA, 32 nt, Homo Sapiens
uccacaccuuucacagccccagcccucagagc

SEQ ID NO: 185265 - RNA, 32 nt, Homo Sapiens
cccaagucuuacguuucccaauaaagaaaaaa

SEQ ID NO: 185266 - RNA, 32 nt, Homo Sapiens
ggcgggaggagcugcccgaggcucuggguggg

SEQ ID NO: 185267 - RNA, 32 nt, Homo Sapiens
ugacugggcgaugggagcugcccaccagagug

SEQ ID NO: 185268 - RNA, 32 nt, Homo Sapiens
uggaaaugagggcaacugcugcuugauggcag

SEQ ID NO: 185269 - RNA, 32 nt, Homo Sapiens
uaagaccugcaccuaaguggccauguuugcuc

SEQ ID NO: 185270 - RNA, 32 nt, Homo Sapiens
cuccccagcuggaaggccgaugacuggguggu

SEQ ID NO: 185271 - RNA, 32 nt, Homo Sapiens
ugaggaaacuggggcacagagaggugauguca

SEQ ID NO: 185272 - RNA, 32 nt, Homo Sapiens
ccugugucaucugggcugggccccacaaacac

SEQ ID NO: 185273 - RNA, 32 nt, Homo Sapiens
gccucgcucuccccgggacucucacgcucaag

SEQ ID NO: 185274 - RNA, 32 nt, Homo Sapiens
gagagguaucggcaggggcagcgcugccgccg

SEQ ID NO: 185275 - RNA, 32 nt, Homo Sapiens
uccuggaccccccaaccccgggcccgccagcc

SEQ ID NO: 185276 - RNA, 32 nt, Homo Sapiens
caccccgaccccagcccccagccucagccccg

SEQ ID NO: 185277 - RNA, 32 nt, Homo Sapiens
cgggcucagaucuggccaggugccugcguugu

SEQ ID NO: 185278 - RNA, 32 nt, Homo Sapiens
agucacugucuccccagcagugacaucauuag

SEQ ID NO: 185279 - RNA, 32 nt, Homo Sapiens
uuucccuuuuugugcacaccuauauuaccuua

SEQ ID NO: 185280 - RNA, 32 nt, Homo Sapiens
agcuccucugagugcuggccgggaugcagcac

SEQ ID NO: 185281 - RNA, 32 nt, Homo Sapiens
cacuaggaaugggcugggacgccacccucugc

SEQ ID NO: 185282 - RNA, 32 nt, Homo Sapiens
aguagacugugcuaucuccugaacacagauuu

SEQ ID NO: 185283 - RNA, 32 nt, Homo Sapiens
aauaaauacagcucaucuugaagaagaacuau

SEQ ID NO: 185284 - RNA, 32 nt, Homo Sapiens
cacagcgugggaagcagcucugggggagcucg

SEQ ID NO: 185285 - RNA, 32 nt, Homo Sapiens
accuguucaaccagaagcaaaagacaguagcc

SEQ ID NO: 185286 - RNA, 32 nt, Homo Sapiens
gcagagguuauaccuuaugauacuuuuaugcu

SEQ ID NO: 185287 - RNA, 32 nt, Homo Sapiens
uugcuccuuuuugaaucuacagauaaugcaug

SEQ ID NO: 185288 - RNA, 32 nt, Homo Sapiens
ggaucuugggaggacucuggcuccuugggaug

SEQ ID NO: 185289 - RNA, 32 nt, Homo Sapiens
guagaagaggaaguuuuaaauagaccuuaagc

SEQ ID NO: 185290 - RNA, 32 nt, Homo Sapiens
aagacagaguacccuuuuuuucuauuuuuuau

SEQ ID NO: 185291 - RNA, 32 nt, Homo Sapiens
ggaucaggacagcucuguucuccaaggccaag

SEQ ID NO: 185292 - RNA, 32 nt, Homo Sapiens
cccuacaucuucucuucugacuuuggcuacau

SEQ ID NO: 185293 - RNA, 32 nt, Homo Sapiens
ggagcagccccggcugcgggucgcgacggcgg

SEQ ID NO: 185294 - RNA, 32 nt, Homo Sapiens
gugggagggagagaggcggggaaaagcagcgu

SEQ ID NO: 185295 - RNA, 32 nt, Homo Sapiens
uuugcuaauuuuacuacacucuuuuguuaugu

SEQ ID NO: 185296 - RNA, 32 nt, Homo Sapiens
guacaccauacauagacaagcaucauaaaggc

SEQ ID NO: 185297 - RNA, 32 nt, Homo Sapiens
ucagauaaugccuaagaaugaccgcugaagaa

SEQ ID NO: 185298 - RNA, 32 nt, Homo Sapiens
agagaagcuaccccaaaacuguuacccguggu

SEQ ID NO: 185299 - RNA, 32 nt, Homo Sapiens
gcgccuccggcggcgagaugcagaggugaccc

SEQ ID NO: 185300 - RNA, 32 nt, Homo Sapiens
guugauggacauuuggguuguuaccagguuuu

SEQ ID NO: 185301 - RNA, 32 nt, Homo Sapiens
ccaucuagcugcuaugccaagugucccuaaag

SEQ ID NO: 185302 - RNA, 32 nt, Homo Sapiens
gucaacugggagggggagaggggggugauggg

SEQ ID NO: 185303 - RNA, 32 nt, Homo Sapiens
cggcccgggcgaggggcgaccggggugaagcc

SEQ ID NO: 185304 - RNA, 32 nt, Homo Sapiens
uaaaggaaaaucacagcagccuuaauuuccug

SEQ ID NO: 185305 - RNA, 32 nt, Homo Sapiens
ugagcuugggagcugcagaugccuccgccccu

SEQ ID NO: 185306 - RNA, 32 nt, Homo Sapiens
uugccugccugccugccaauggcccugaaucc

SEQ ID NO: 185307 - RNA, 32 nt, Homo Sapiens
gcccaugcuggucuggcaaacacaccuuucug

SEQ ID NO: 185308 - RNA, 32 nt, Homo Sapiens
ugccgcugggcucgcuggugaccgccacagcc

SEQ ID NO: 185309 - RNA, 32 nt, Homo Sapiens
cccucacgccuggcccggucccuuccagggca

SEQ ID NO: 185310 - RNA, 32 nt, Homo Sapiens
ccugaggguuuaggaggucugaacacacacag

SEQ ID NO: 185311 - RNA, 32 nt, Homo Sapiens
agagccggccgacgggagccgcggcggagccu

SEQ ID NO: 185312 - RNA, 32 nt, Homo Sapiens
uaucaggaaaucuacaugugugcacagagaga

SEQ ID NO: 185313 - RNA, 32 nt, Homo Sapiens
ucgaggauuucuuuuccauugugucggugucu

SEQ ID NO: 185314 - RNA, 32 nt, Homo Sapiens
gagaagagggucugguuuuugcugggggugag

SEQ ID NO: 185315 - RNA, 32 nt, Homo Sapiens
cuagaaagaaauguuaaaaauagauuguuggc

SEQ ID NO: 185316 - RNA, 32 nt, Homo Sapiens
ggacacagcucuucuccaggcuguaucccaug

SEQ ID NO: 185317 - RNA, 32 nt, Homo Sapiens
auaaaaggccuaaaaguaagacccacaaggau

SEQ ID NO: 185318 - RNA, 32 nt, Homo Sapiens
ucccugacgaggggcucuguccucauacuucc

SEQ ID NO: 185319 - RNA, 32 nt, Homo Sapiens
agaacaugccccaaguuauucgucagugaggc

SEQ ID NO: 185320 - RNA, 32 nt, Homo Sapiens
auuugcuaacauugauuuuuuauuuucuuucc

SEQ ID NO: 185321 - RNA, 32 nt, Homo Sapiens
uugcaugauugauuucuacccuguucccucug

SEQ ID NO: 185322 - RNA, 32 nt, Homo Sapiens
gugugccgguccagcccuccgagaugccacaa

SEQ ID NO: 185323 - RNA, 30 nt, Homo Sapiens
uccuggggcaggcgugcucucucucccaua

SEQ ID NO: 185324 - RNA, 32 nt, Homo Sapiens
ugccuagcaugcccagccccagccagcugucc

SEQ ID NO: 185325 - RNA, 32 nt, Homo Sapiens
uugggcuuucucuggaggggaagguggaugcu

SEQ ID NO: 185326 - RNA, 32 nt, Homo Sapiens
uguugcaugaacaacaguuugcuauaagaaac

SEQ ID NO: 185327 - RNA, 30 nt, Homo Sapiens
ugccgggacuggcgcgcggggacacugggc

SEQ ID NO: 185328 - RNA, 32 nt, Homo Sapiens
uuuuuuuuuuucucuuuuuuuuaaccaaaguu

SEQ ID NO: 185329 - RNA, 30 nt, Homo Sapiens
aaagaauaggccccugccuggcuccuggga

SEQ ID NO: 185330 - RNA, 32 nt, Homo Sapiens
uguuuguauuuuuuggcuucacucaugguggu

SEQ ID NO: 185331 - RNA, 32 nt, Homo Sapiens
aggacccccucgcggaugcugacgcagaaugg

SEQ ID NO: 185332 - RNA, 32 nt, Homo Sapiens
caugccauaauaauauaagugcuuuagaaauu

SEQ ID NO: 185333 - RNA, 32 nt, Homo Sapiens
guuagaugucauaaaccauuuguauuuguugu

SEQ ID NO: 185334 - RNA, 32 nt, Homo Sapiens
uuguaauauuucuguaaauuuauugugauauu

SEQ ID NO: 185335 - RNA, 32 nt, Homo Sapiens
uuuauuacaaaauuauguucuauuuuaaaguc

SEQ ID NO: 185336 - RNA, 30 nt, Homo Sapiens
ggaagauggcggcguccgcagcugccgcug

SEQ ID NO: 185337 - RNA, 32 nt, Homo Sapiens
acaaguguguggaauaccuccaucuucugcuu

SEQ ID NO: 185338 - RNA, 32 nt, Homo Sapiens
cgcauuucuucugcucagauccguauuccgag

SEQ ID NO: 185339 - RNA, 32 nt, Homo Sapiens
cuagcaguuugcagucuauguuuaaugaaugg

SEQ ID NO: 185340 - RNA, 32 nt, Homo Sapiens
gugaauuccgguccuuucuccuccccuagcug

SEQ ID NO: 185341 - RNA, 32 nt, Homo Sapiens
uaguucuauacucugaauuucucuacagaaau

SEQ ID NO: 185342 - RNA, 32 nt, Homo Sapiens
cuuucuguaacacuuaaagaauucccucauuc

SEQ ID NO: 185343 - RNA, 32 nt, Homo Sapiens
ugagaagaauccacgaggugcuaucuggccag

SEQ ID NO: 185344 - RNA, 30 nt, Homo Sapiens
gcgcagacucccaagccgccggcagcaggg

SEQ ID NO: 185345 - RNA, 32 nt, Homo Sapiens
ggguccucauuaggagcccccaucccuguguu

SEQ ID NO: 185346 - RNA, 32 nt, Homo Sapiens
uguuugcgaucgccgcggccggggcugcgaac

SEQ ID NO: 185347 - RNA, 32 nt, Homo Sapiens
ucguuuuaggcguagcauggccaggcagaaga

SEQ ID NO: 185348 - RNA, 32 nt, Homo Sapiens
cguacugaaucuuuuuaaugaauuuccugaga

SEQ ID NO: 185349 - RNA, 32 nt, Homo Sapiens
ccccaggccggagcuuccuuccuuagccggga

SEQ ID NO: 185350 - RNA, 32 nt, Homo Sapiens
aaggacaaccugccccuccccagcccuuugca

SEQ ID NO: 185351 - RNA, 32 nt, Homo Sapiens
cugcugagcugcuuggcagccucuguaggcca

SEQ ID NO: 185352 - RNA, 32 nt, Homo Sapiens
ucaucaucauauaugaaguuuauuuugagaag

SEQ ID NO: 185353 - RNA, 32 nt, Homo Sapiens
guauccugagucugcuggcuuccagacugaac

SEQ ID NO: 185354 - RNA, 32 nt, Homo Sapiens
uauaaauaaauauuucaaaauuuugauucgga

SEQ ID NO: 185355 - RNA, 32 nt, Homo Sapiens
gcgcaccccgcuaggagcugcccggccagccc

SEQ ID NO: 185356 - RNA, 32 nt, Homo Sapiens
aaacauuaaaaaguucugcaucuuauaauggu

SEQ ID NO: 185357 - RNA, 32 nt, Homo Sapiens
uuugaaaguuuaaagaaacuugaccaaaacac

SEQ ID NO: 185358 - RNA, 32 nt, Homo Sapiens
gccuagcuuugaggguaaaugaaaauauaacc

SEQ ID NO: 185359 - RNA, 32 nt, Homo Sapiens
uucagacacguaaauguuguuuaauucuguag

SEQ ID NO: 185360 - RNA, 32 nt, Homo Sapiens
agacaucggugggaucaagugaaaaggaggac

SEQ ID NO: 185361 - RNA, 32 nt, Homo Sapiens
ggaggcuggaaggggacgguacucaccagaau

SEQ ID NO: 185362 - RNA, 32 nt, Homo Sapiens
agcucucggccgcggacccgggccgcguguga

SEQ ID NO: 185363 - RNA, 32 nt, Homo Sapiens
uccaaggacauuggagagauagagucacuauu

SEQ ID NO: 185364 - RNA, 32 nt, Homo Sapiens
cuacuguacccccaagagccugcagaccagcc

SEQ ID NO: 185365 - RNA, 32 nt, Homo Sapiens
gagguuuccuucccaggacagcugcaggguag

SEQ ID NO: 185366 - RNA, 32 nt, Homo Sapiens
aaagucuucaggaucagacucucugaaacugc

SEQ ID NO: 185367 - RNA, 32 nt, Homo Sapiens
ccugcccugcccugcacugcccggcccggcac

SEQ ID NO: 185368 - RNA, 32 nt, Homo Sapiens
cccuccugcauuguucuuccagcccucgcccc

SEQ ID NO: 185369 - RNA, 32 nt, Homo Sapiens
acuuaaaaggugggauggaucaugauuacugu

SEQ ID NO: 185370 - RNA, 32 nt, Homo Sapiens
ggcauuaccauaucaguuuuuauuuuuauguu

SEQ ID NO: 185371 - RNA, 32 nt, Homo Sapiens
ggcugggcagccagcccuuccccuucuguuuc

SEQ ID NO: 185372 - RNA, 32 nt, Homo Sapiens
cgcccaguagugagcaggccugucccauucca

SEQ ID NO: 185373 - RNA, 32 nt, Homo Sapiens
cccggccguggcgccuccgggccagacgcgcu

SEQ ID NO: 185374 - RNA, 32 nt, Homo Sapiens
ugcccugggaaccacacgcagagucgcccuug

SEQ ID NO: 185375 - RNA, 32 nt, Homo Sapiens
aaguauguuuaagagggagagaggggaggcaa

SEQ ID NO: 185376 - RNA, 32 nt, Homo Sapiens
cugugacaaccuggccagacauagggcucacg

SEQ ID NO: 185377 - RNA, 32 nt, Homo Sapiens
gcaagcuuacacaagaagugagggaaggaugu

SEQ ID NO: 185378 - RNA, 30 nt, Homo Sapiens
guagaaccacuuggcugcucauuccuucug

SEQ ID NO: 185379 - RNA, 30 nt, Homo Sapiens
gccucgucucccagcggcggcgggaggcgc

SEQ ID NO: 185380 - RNA, 32 nt, Homo Sapiens
ugugucacaaaacauuacucauuugauuuccc

SEQ ID NO: 185381 - RNA, 30 nt, Homo Sapiens
aauacaaauaaaauaauaaagaaaugaccc

SEQ ID NO: 185382 - RNA, 32 nt, Homo Sapiens
ggcgcagacgucagagagcccgcggcuuaaag

SEQ ID NO: 185383 - RNA, 32 nt, Homo Sapiens
aacccucgccugggcgggcugggggauccuca

SEQ ID NO: 185384 - RNA, 32 nt, Homo Sapiens
gagggggcaucccacccaagaccucugauucc

SEQ ID NO: 185385 - RNA, 32 nt, Homo Sapiens
gcggcgugccgaaguuccucuucucugccccg

SEQ ID NO: 185386 - RNA, 32 nt, Homo Sapiens
agauugagaugaugacggugaugacgacuggg

SEQ ID NO: 185387 - RNA, 32 nt, Homo Sapiens
ugucaauuaucuuuuguauuuauuucaaugau

SEQ ID NO: 185388 - RNA, 32 nt, Homo Sapiens
uaucggagcgcgccaguaaguaucaggcauau

SEQ ID NO: 185389 - RNA, 32 nt, Homo Sapiens
cagcucagagcggcgcacgcggcggccggggc

SEQ ID NO: 185390 - RNA, 32 nt, Homo Sapiens
gauuugagcugagacuugaaugcccaggaguu

SEQ ID NO: 185391 - RNA, 32 nt, Homo Sapiens
ggagccaugccagcuggacacacacuucuucc

SEQ ID NO: 185392 - RNA, 32 nt, Homo Sapiens
ugcggggggaggaggccggacucagcgggugg

SEQ ID NO: 185393 - RNA, 32 nt, Homo Sapiens
gacauaaaauuccauguuaaauaagcauauau

SEQ ID NO: 185394 - RNA, 32 nt, Homo Sapiens
acaauaaacaucuauuugagacaauuaaaauc

SEQ ID NO: 185395 - RNA, 32 nt, Homo Sapiens
cugagguugguucccuguuggauucagguacu

SEQ ID NO: 185396 - RNA, 32 nt, Homo Sapiens
aaaugcugauucauuagggauuauuacagcgg

SEQ ID NO: 185397 - RNA, 32 nt, Homo Sapiens
uucaugccuugggccgagccugccuccugcuu

SEQ ID NO: 185398 - RNA, 32 nt, Homo Sapiens
gucccaggauccccggcacccaguucucuucc

SEQ ID NO: 185399 - RNA, 32 nt, Homo Sapiens
cugcugucacccccggccgcugcugcccuccc

SEQ ID NO: 185400 - RNA, 32 nt, Homo Sapiens
uuuauuauauauauuuaugugggugauuugau

SEQ ID NO: 185401 - RNA, 32 nt, Homo Sapiens
gagggcuuugagagugcagcugugaugauguu

SEQ ID NO: 185402 - RNA, 32 nt, Homo Sapiens
uccagccuggccccagucccagcccccaccuu

SEQ ID NO: 185403 - RNA, 32 nt, Homo Sapiens
uuuuucacuguuuucuaaaaucaaaaaggguu

SEQ ID NO: 185404 - RNA, 32 nt, Homo Sapiens
acuaugaguuuaagcacugccuauggauaaag

SEQ ID NO: 185405 - RNA, 32 nt, Homo Sapiens
cauggacgcugcuguugccgcugcugcugcgg

SEQ ID NO: 185406 - RNA, 32 nt, Homo Sapiens
uacagaaagcugcuugccauucucuugcauug

SEQ ID NO: 185407 - RNA, 32 nt, Homo Sapiens
gcauaggagcccacuugcauuuucauaguuuu

SEQ ID NO: 185408 - RNA, 32 nt, Homo Sapiens
uggccacagccuggucccugguggaggccgcu

SEQ ID NO: 185409 - RNA, 32 nt, Homo Sapiens
uugcaacugguuggagguggcggccgcugcag

SEQ ID NO: 185410 - RNA, 32 nt, Homo Sapiens
cuuuauauauaagccuuugaaucuuguugcug

SEQ ID NO: 185411 - RNA, 32 nt, Homo Sapiens
agcagacuaauagagggauuaaagauaaaaau

SEQ ID NO: 185412 - RNA, 32 nt, Homo Sapiens
agucccauucuuccuuuucaauaccuaccccc

SEQ ID NO: 185413 - RNA, 32 nt, Homo Sapiens
uugauuuucugggauuggugaagaaacugcau

SEQ ID NO: 185414 - RNA, 32 nt, Homo Sapiens
cauagccgacagaccggagcgacagggaguug

SEQ ID NO: 185415 - RNA, 32 nt, Homo Sapiens
gcagcgacugugaggccacagcuccucagauu

SEQ ID NO: 185416 - RNA, 32 nt, Homo Sapiens
ugcuuauuuuaaaagaaauauucugauucaua

SEQ ID NO: 185417 - RNA, 29 nt, Homo Sapiens
aagcuggacccggcagcucaggcggccgc

SEQ ID NO: 185418 - RNA, 32 nt, Homo Sapiens
gucaaggaggcuuuuccgcacaugaaggacgc

SEQ ID NO: 185419 - RNA, 32 nt, Homo Sapiens
caaguauuugcuauugugaacagugcugcaau

SEQ ID NO: 185420 - RNA, 32 nt, Homo Sapiens
ucucauguuccccucacccaucaugccagcca

SEQ ID NO: 185421 - RNA, 32 nt, Homo Sapiens
cuauguagcagauguuuuaaacuuuuuauucc

SEQ ID NO: 185422 - RNA, 32 nt, Homo Sapiens
uucaaauaaaaaggaagcuaaauuugcacaaa

SEQ ID NO: 185423 - RNA, 32 nt, Homo Sapiens
ugaggccgcugcgacccggcccugcaggcucc

SEQ ID NO: 185424 - RNA, 32 nt, Homo Sapiens
agucaguuugcucgcuuuuguuuacuuaaaug

SEQ ID NO: 185425 - RNA, 32 nt, Homo Sapiens
uuuauauauagcaaacaauuugaaagaauaca

SEQ ID NO: 185426 - RNA, 32 nt, Homo Sapiens
acuuuuucuguaaaaggccaaauagacuguau

SEQ ID NO: 185427 - RNA, 32 nt, Homo Sapiens
ggagucuaaaaauuauuagcuguuacaaaugg

SEQ ID NO: 185428 - RNA, 32 nt, Homo Sapiens
guaggaauccauucugaacaaacuacaaaaau

SEQ ID NO: 185429 - RNA, 32 nt, Homo Sapiens
accuugagcaaguggaagagaggccagggucc

SEQ ID NO: 185430 - RNA, 32 nt, Homo Sapiens
cucucccuccuaacccucuccuugccugacag

SEQ ID NO: 185431 - RNA, 32 nt, Homo Sapiens
uggggaggagggagggugggcgguauggcucu

SEQ ID NO: 185432 - RNA, 32 nt, Homo Sapiens
uaauguaugucuaugauuucaucugcuuauug

SEQ ID NO: 185433 - RNA, 32 nt, Homo Sapiens
aguauugagaaccuggccugugguaggcacug

SEQ ID NO: 185434 - RNA, 32 nt, Homo Sapiens
aauugauuuuuggggggagcuuaagugagccu

SEQ ID NO: 185435 - RNA, 32 nt, Homo Sapiens
uuggggcaggguggagaggugggcucuuccug

SEQ ID NO: 185436 - RNA, 32 nt, Homo Sapiens
aaauguacaaaauaaagcuacaaugcugguca

SEQ ID NO: 185437 - RNA, 32 nt, Homo Sapiens
aggccaaguccucccuccccauugaggccaag

SEQ ID NO: 185438 - RNA, 32 nt, Homo Sapiens
gcccucgagacggggacggacacaccagcccc

SEQ ID NO: 185439 - RNA, 32 nt, Homo Sapiens
ucguccccaggggugggcgcgcgacgcgggca

SEQ ID NO: 185440 - RNA, 32 nt, Homo Sapiens
agcucuuaauuuguuuuugauucugaaaaacu

SEQ ID NO: 185441 - RNA, 32 nt, Homo Sapiens
uagaugaaaagagagcaugauauuuuaagccc

SEQ ID NO: 185442 - RNA, 30 nt, Homo Sapiens
aucucacuggacugcagacccggccuggug

SEQ ID NO: 185443 - RNA, 32 nt, Homo Sapiens
ggaccagccccauggucuggcuccugucaccu

SEQ ID NO: 185444 - RNA, 32 nt, Homo Sapiens
gacacuguccagggaaagagccaggaauggca

SEQ ID NO: 185445 - RNA, 32 nt, Homo Sapiens
cuuguuucaggaugcucugugguaccucaggg

SEQ ID NO: 185446 - RNA, 32 nt, Homo Sapiens
ucauaguaguauaaaaagagauacauuucccu

SEQ ID NO: 185447 - RNA, 32 nt, Homo Sapiens
aggguggggucucaggagucaggcagggccag

SEQ ID NO: 185448 - RNA, 32 nt, Homo Sapiens
cgcgcccucgccccgccaugcuccugcugcug

SEQ ID NO: 185449 - RNA, 32 nt, Homo Sapiens
uagaaaaaagugcuuacuagggccuaagaguu

SEQ ID NO: 185450 - RNA, 32 nt, Homo Sapiens
cuccuccgcccgggccgccucaccugcgggca

SEQ ID NO: 185451 - RNA, 32 nt, Homo Sapiens
uuaaacaggucuuugggcuucggcgaccucgc

SEQ ID NO: 185452 - RNA, 32 nt, Homo Sapiens
ggagagaccaggcccaggaugccucgccuguu

SEQ ID NO: 185453 - RNA, 32 nt, Homo Sapiens
ccacagacacgcaugcacacacgcagaggugc

SEQ ID NO: 185454 - RNA, 32 nt, Homo Sapiens
auggccuuccucuuccaccaccaccaccggcu

SEQ ID NO: 185455 - RNA, 32 nt, Homo Sapiens
ucaugcuguagggaaagggucuuaggaggacc

SEQ ID NO: 185456 - RNA, 32 nt, Homo Sapiens
cacccaagccccugcuggccuccugcccccca

SEQ ID NO: 185457 - RNA, 32 nt, Homo Sapiens
acuaacagagcgcagucugcacacgcagguuc

SEQ ID NO: 185458 - RNA, 32 nt, Homo Sapiens
aaugcaaaugucaagaaggaugucagcuguga

SEQ ID NO: 185459 - RNA, 32 nt, Homo Sapiens
uugagccugcagcacacacuaggccaccugca

SEQ ID NO: 185460 - RNA, 32 nt, Homo Sapiens
agaccucaugaacgcgaugagugcccuuacac

SEQ ID NO: 185461 - RNA, 32 nt, Homo Sapiens
auuaucuugccaaauuuugaaacuacacacaa

SEQ ID NO: 185462 - RNA, 32 nt, Homo Sapiens
gaagccaggaaugaaggguagauggagccugg

SEQ ID NO: 185463 - RNA, 31 nt, Homo Sapiens
cuuguucaggccagccaacauacgacaguuu

SEQ ID NO: 185464 - RNA, 32 nt, Homo Sapiens
guucaauauugauauauuuuaucaccaacauu

SEQ ID NO: 185465 - RNA, 32 nt, Homo Sapiens
cccaccaacucuuuucuagcaaucauguccug

SEQ ID NO: 185466 - RNA, 32 nt, Homo Sapiens
aaaauuaacacacacaugaacugcacaccuuc

SEQ ID NO: 185467 - RNA, 32 nt, Homo Sapiens
ccugccggucccgcgccgcgcguccgcacucc

SEQ ID NO: 185468 - RNA, 32 nt, Homo Sapiens
acagauggcguagaagucacaagucuguuaau

SEQ ID NO: 185469 - RNA, 32 nt, Homo Sapiens
cuuaauuuaaaagacagaggcuccaaaaugau

SEQ ID NO: 185470 - RNA, 32 nt, Homo Sapiens
agcucuuuaagugauccucguucugguggcuu

SEQ ID NO: 185471 - RNA, 32 nt, Homo Sapiens
cuuguucuuaggaucacagaauacuaaagcac

SEQ ID NO: 185472 - RNA, 32 nt, Homo Sapiens
uacuguauuucuuuaaaaacucuaaaucuuua

SEQ ID NO: 185473 - RNA, 32 nt, Homo Sapiens
cagccgaagggauaaaacaguuuacuuguuau

SEQ ID NO: 185474 - RNA, 29 nt, Homo Sapiens
cugcaugaggcccucgucuucaguuucug

SEQ ID NO: 185475 - RNA, 32 nt, Homo Sapiens
ggccagcugugguuuucuuuugccaugacaac

SEQ ID NO: 185476 - RNA, 32 nt, Homo Sapiens
ggcgccuuuuuccucagcugucuuccaaguau

SEQ ID NO: 185477 - RNA, 32 nt, Homo Sapiens
aaagaguaugccugggagccuccagcuguuaa

SEQ ID NO: 185478 - RNA, 32 nt, Homo Sapiens
ccagauuccucaguuaauaguuucauauuuuc

SEQ ID NO: 185479 - RNA, 32 nt, Homo Sapiens
aaguaggaauuaacauaaggcauaucacgugg

SEQ ID NO: 185480 - RNA, 32 nt, Homo Sapiens
aguggauagaaugacccauucuguggauacca

SEQ ID NO: 185481 - RNA, 32 nt, Homo Sapiens
ccaugaagccccagagguagaagggaccucaa

SEQ ID NO: 185482 - RNA, 32 nt, Homo Sapiens
auaacauaaaauuuacuauguuaacaauuuua

SEQ ID NO: 185483 - RNA, 32 nt, Homo Sapiens
cuggcaccgccagcugcuacuuggcccucgcc

SEQ ID NO: 185484 - RNA, 32 nt, Homo Sapiens
gcuggcccacccaaggagcagugccggacaac

SEQ ID NO: 185485 - RNA, 32 nt, Homo Sapiens
uaauuucugucaaccacggacguuugccuuca

SEQ ID NO: 185486 - RNA, 32 nt, Homo Sapiens
aaacgaucuucaacccuuacuauacauaaaau

SEQ ID NO: 185487 - RNA, 32 nt, Homo Sapiens
accacccaguuuggggacccagugggaccagg

SEQ ID NO: 185488 - RNA, 32 nt, Homo Sapiens
ggcuguccuugauugucccuggauggagugca

SEQ ID NO: 185489 - RNA, 32 nt, Homo Sapiens
gcaugguggggcugggucuccagcugguuggg

SEQ ID NO: 185490 - RNA, 32 nt, Homo Sapiens
agacagaucuucugugacagccuccuuaugca

SEQ ID NO: 185491 - RNA, 32 nt, Homo Sapiens
ugcuuguccaggaaacacaauuugagagucau

SEQ ID NO: 185492 - RNA, 32 nt, Homo Sapiens
gaagauuauuaaggcagccucauagucaaucc

SEQ ID NO: 185493 - RNA, 32 nt, Homo Sapiens
uucccagcccucggagcccccaucccuuaucu

SEQ ID NO: 185494 - RNA, 30 nt, Homo Sapiens
ggcgagaugccggggccgccggcguugcgg

SEQ ID NO: 185495 - RNA, 32 nt, Homo Sapiens
uccuguuaagggggaaguuuguauugccaagu

SEQ ID NO: 185496 - RNA, 32 nt, Homo Sapiens
agcucuuucccucuccguuugcugcuuuuuuc

SEQ ID NO: 185497 - RNA, 32 nt, Homo Sapiens
augauuccaaaauaaagauuuauaugacuggu

SEQ ID NO: 185498 - RNA, 32 nt, Homo Sapiens
uuacaaauuggaacagcuuuggugugucguaa

SEQ ID NO: 185499 - RNA, 32 nt, Homo Sapiens
gcuccuucccauguagcuuccacacagcccuu

SEQ ID NO: 185500 - RNA, 32 nt, Homo Sapiens
uuuguuguggaaugguuauuccagucaucucu

SEQ ID NO: 185501 - RNA, 32 nt, Homo Sapiens
cacuaaggagagagggucaggagccagaguug

SEQ ID NO: 185502 - RNA, 28 nt, Homo Sapiens
uaccuauaaauaaaaacaaauaugaguu

SEQ ID NO: 185503 - RNA, 32 nt, Homo Sapiens
ccgccccggcgcccaggcucggugcuggagag

SEQ ID NO: 185504 - RNA, 32 nt, Homo Sapiens
aucuuuuggcugcauaaaugcaugucaccuug

SEQ ID NO: 185505 - RNA, 25 nt, Homo Sapiens
augcggcugucggucgcugcagcga

SEQ ID NO: 185506 - RNA, 32 nt, Homo Sapiens
uucagccuggaggccgcugagguccuggugga

SEQ ID NO: 185507 - RNA, 32 nt, Homo Sapiens
uuauuauuaaaauaaacaggguugguuauauu

SEQ ID NO: 185508 - RNA, 32 nt, Homo Sapiens
guuaccccuugcccccggccccgcccccuuuu

SEQ ID NO: 185509 - RNA, 32 nt, Homo Sapiens
uucccggacucuuuuuaaaugucucccccuaa

SEQ ID NO: 185510 - RNA, 32 nt, Homo Sapiens
cuucaguccauccauguuagauggacagaaau

SEQ ID NO: 185511 - RNA, 32 nt, Homo Sapiens
uaaaugcauguuaccauagaaacuauuaaagu

SEQ ID NO: 185512 - RNA, 32 nt, Homo Sapiens
cuugaccaccucuggaccacuaacaaguucuc

SEQ ID NO: 185513 - RNA, 31 nt, Homo Sapiens
caguuaacuaauuguaaauaugcuguuaacc

SEQ ID NO: 185514 - RNA, 32 nt, Homo Sapiens
ucaucaucaagaucgugcuggcgcuguugggg

SEQ ID NO: 185515 - RNA, 32 nt, Homo Sapiens
aauacugauuaauuagaacuaauuguauuuuu

SEQ ID NO: 185516 - RNA, 32 nt, Homo Sapiens
gucccuuacaggaaccggcagcagcuaggcag

SEQ ID NO: 185517 - RNA, 32 nt, Homo Sapiens
uguucuguauaaacaauuaagauguaaccauu

SEQ ID NO: 185518 - RNA, 32 nt, Homo Sapiens
uuucugucaaauuuauuuagaaaucaaaauua

SEQ ID NO: 185519 - RNA, 32 nt, Homo Sapiens
cggcccgagcccagccccauggcgcgggggga

SEQ ID NO: 185520 - RNA, 32 nt, Homo Sapiens
aacacuuguccuguuucuugagaggaaguuau

SEQ ID NO: 185521 - RNA, 32 nt, Homo Sapiens
ggacaggaaggggcaugugagcguaaauagag

SEQ ID NO: 185522 - RNA, 32 nt, Homo Sapiens
uaacagcgucuuccgcgccgcgcauggagccu

SEQ ID NO: 185523 - RNA, 32 nt, Homo Sapiens
cagccccugccagaccuccugcuaccguccca

SEQ ID NO: 185524 - RNA, 32 nt, Homo Sapiens
ucagcggacgacccucucgcuccggggcugag

SEQ ID NO: 185525 - RNA, 32 nt, Homo Sapiens
aauauuuuaagagcuucuuucgaaaguuucuu

SEQ ID NO: 185526 - RNA, 32 nt, Homo Sapiens
auauugagcagaaacugaauuaauaugcuucc

SEQ ID NO: 185527 - RNA, 31 nt, Homo Sapiens
uuggauuauugagcuagauagucaagggaca

SEQ ID NO: 185528 - RNA, 32 nt, Homo Sapiens
ugcugcugccccagcucuacacugcgcccugg

SEQ ID NO: 185529 - RNA, 32 nt, Homo Sapiens
ugauaccauucaagauggucuuuccuucaaag

SEQ ID NO: 185530 - RNA, 32 nt, Homo Sapiens
guguguccaaccagcuguucucuccucaaagc

SEQ ID NO: 185531 - RNA, 32 nt, Homo Sapiens
aacuccucuggcccuccuucccucaauuaaaa

SEQ ID NO: 185532 - RNA, 32 nt, Homo Sapiens
uccacguaaccaaaaaccacuuguacuguaag

SEQ ID NO: 185533 - RNA, 32 nt, Homo Sapiens
cuucacuuccuguaaaccacuccauagauuug

SEQ ID NO: 185534 - RNA, 32 nt, Homo Sapiens
gggaggcccuuaagaaaauauagcaggcugaa

SEQ ID NO: 185535 - RNA, 32 nt, Homo Sapiens
ggcaccgcgagcugggagacggcggcagccca

SEQ ID NO: 185536 - RNA, 32 nt, Homo Sapiens
uggagagacuugcgaaggcggcugggguguuc

SEQ ID NO: 185537 - RNA, 32 nt, Homo Sapiens
aucuucuccgcccccgcuaccggcgccuccuc

SEQ ID NO: 185538 - RNA, 32 nt, Homo Sapiens
ccagagccagcaugcagaacagucacagcgga

SEQ ID NO: 185539 - RNA, 32 nt, Homo Sapiens
ggcuuccuggucuaagaguugcuggcaagaag

SEQ ID NO: 185540 - RNA, 32 nt, Homo Sapiens
aaaggacaauuuuuaaacugcugaaauaaaau

SEQ ID NO: 185541 - RNA, 31 nt, Homo Sapiens
uccagagauuaaaaacagaaauauggaaaag

SEQ ID NO: 185542 - RNA, 32 nt, Homo Sapiens
ggguuaaacaggucuuugggcuucggcgaccu

SEQ ID NO: 185543 - RNA, 32 nt, Homo Sapiens
uaggaaauggcucucccucccccuguccccca

SEQ ID NO: 185544 - RNA, 32 nt, Homo Sapiens
gcagaaggccccagccucgugccugugagucc

SEQ ID NO: 185545 - RNA, 32 nt, Homo Sapiens
ccaccuuaaggguuaggauuucaacacaugaa

SEQ ID NO: 185546 - RNA, 32 nt, Homo Sapiens
gggaaagggggacuauuuauucugccuuaaau

SEQ ID NO: 185547 - RNA, 32 nt, Homo Sapiens
uacccggcccagagaccccuuccuuuccucug

SEQ ID NO: 185548 - RNA, 32 nt, Homo Sapiens
aaggccaaaaaauuauugugccugaaauuucc

SEQ ID NO: 185549 - RNA, 32 nt, Homo Sapiens
ucccuuccuugagcccagcaguuugagaccaa

SEQ ID NO: 185550 - RNA, 32 nt, Homo Sapiens
caaaguauucaugcugguguaaaccauaucaa

SEQ ID NO: 185551 - RNA, 32 nt, Homo Sapiens
auaguuuaaauacuguauauaagauaaugaaa

SEQ ID NO: 185552 - RNA, 32 nt, Homo Sapiens
ggguaggggaggggccgggcccggggucccaa

SEQ ID NO: 185553 - RNA, 32 nt, Homo Sapiens
uauaauaaaaauuaucaaagaaaaaaaaaaaa

SEQ ID NO: 185554 - RNA, 32 nt, Homo Sapiens
ggccagaccugccugcauucugagacaaagca

SEQ ID NO: 185555 - RNA, 32 nt, Homo Sapiens
cgccgcagccgcccccucccccacacccccuc

SEQ ID NO: 185556 - RNA, 32 nt, Homo Sapiens
aucccccaaacccaccaaacacuaagggagag

SEQ ID NO: 185557 - RNA, 32 nt, Homo Sapiens
guccuugguugauguaucugggucuccucugg

SEQ ID NO: 185558 - RNA, 32 nt, Homo Sapiens
agagaauuggcagcugacugcacugccaggag

SEQ ID NO: 185559 - RNA, 32 nt, Homo Sapiens
gaaaguguuguacagaauuuaucauggauuau

SEQ ID NO: 185560 - RNA, 32 nt, Homo Sapiens
gcagcugucccgagacucucggcaagggcaga

SEQ ID NO: 185561 - RNA, 32 nt, Homo Sapiens
cguauguaaggccuugagaggacccugcaggc

SEQ ID NO: 185562 - RNA, 32 nt, Homo Sapiens
ggaugggauaggacuagcaccauuuuaagucc

SEQ ID NO: 185563 - RNA, 32 nt, Homo Sapiens
uuuggaagcuuggaucucauuaaacuucaugu

SEQ ID NO: 185564 - RNA, 32 nt, Homo Sapiens
ggacuauggcugcauguccucugcuugcccgg

SEQ ID NO: 185565 - RNA, 32 nt, Homo Sapiens
gacgucguugugcucuuuuguaagaggaauuu

SEQ ID NO: 185566 - RNA, 32 nt, Homo Sapiens
caacuaaaaauauuuuaauggcagacugauua

SEQ ID NO: 185567 - RNA, 32 nt, Homo Sapiens
augaugaagauauugaugacaucuaauugaac

SEQ ID NO: 185568 - RNA, 32 nt, Homo Sapiens
aauaaaagcucuucuuuuuuaauauaaaaaaa

SEQ ID NO: 185569 - RNA, 32 nt, Homo Sapiens
acaauuaaaaauuaauuuucuaacaaaaaaaa

SEQ ID NO: 185570 - RNA, 32 nt, Homo Sapiens
aucuggccagucuccaggccacggccagcgug

SEQ ID NO: 185571 - RNA, 32 nt, Homo Sapiens
aaucauggcaacaaauacauacaggauucuuu

SEQ ID NO: 185572 - RNA, 32 nt, Homo Sapiens
gcgcgaggagccggcaugagcgcagacagcag

SEQ ID NO: 185573 - RNA, 29 nt, Homo Sapiens
ccagaugugggcggcggggcgcugggggc

SEQ ID NO: 185574 - RNA, 32 nt, Homo Sapiens
gggcaacucugcaagcucaccugcuggacgug

SEQ ID NO: 185575 - RNA, 32 nt, Homo Sapiens
caauaauaaaaaguuguuuuacgcuaaagaug

SEQ ID NO: 185576 - RNA, 32 nt, Homo Sapiens
auuucacguuaucagugcaguuccguucucgg

SEQ ID NO: 185577 - RNA, 32 nt, Homo Sapiens
uuccuugggcagccaguaauucccaggcaagg

SEQ ID NO: 185578 - RNA, 32 nt, Homo Sapiens
gagcugguuuccauccuggcaccacggcacac

SEQ ID NO: 185579 - RNA, 32 nt, Homo Sapiens
ggcacgaggggguuuggugcggccacuccaag

SEQ ID NO: 185580 - RNA, 32 nt, Homo Sapiens
gcgcagcucggccacggcggcccgcagcgccu

SEQ ID NO: 185581 - RNA, 32 nt, Homo Sapiens
guauguauauauacacacauauauauguauau

SEQ ID NO: 185582 - RNA, 32 nt, Homo Sapiens
uguguuaaacauuccgucccuguuugagacau

SEQ ID NO: 185583 - RNA, 32 nt, Homo Sapiens
cucuuggggaugucagugaggcugggagcagg

SEQ ID NO: 185584 - RNA, 32 nt, Homo Sapiens
uaguuggaucauguauauuuuacuucuaaagg

SEQ ID NO: 185585 - RNA, 32 nt, Homo Sapiens
ugaggcuggggauagucaggggcuggaucacc

SEQ ID NO: 185586 - RNA, 32 nt, Homo Sapiens
gggcccaggaagcucggaggaagggcgagcgg

SEQ ID NO: 185587 - RNA, 32 nt, Homo Sapiens
gugucaacucaggauccagugauucgaguagg

SEQ ID NO: 185588 - RNA, 32 nt, Homo Sapiens
uaucuuuugguauccaguuuuauuuuuggccu

SEQ ID NO: 185589 - RNA, 32 nt, Homo Sapiens
gaaggugguaaauuauuuuaaauuucucaaug

SEQ ID NO: 185590 - RNA, 32 nt, Homo Sapiens
uuccucuguccccuucuccccagcuaagaaug

SEQ ID NO: 185591 - RNA, 32 nt, Homo Sapiens
cuggcccgccuggcccuagccauggagcugag

SEQ ID NO: 185592 - RNA, 32 nt, Homo Sapiens
gaggccacauaaagacagaggcagagacugaa

SEQ ID NO: 185593 - RNA, 32 nt, Homo Sapiens
accaauacuuuuugaaauugauguacuuaguu

SEQ ID NO: 185594 - RNA, 32 nt, Homo Sapiens
gaggggcacguaccggcgcuacggcuuccugc

SEQ ID NO: 185595 - RNA, 32 nt, Homo Sapiens
ugagccuagaaugaugguuagacuuguaguca

SEQ ID NO: 185596 - RNA, 32 nt, Homo Sapiens
uaugcugccacuucacauccacucaccacauc

SEQ ID NO: 185597 - RNA, 32 nt, Homo Sapiens
uuagguauuauuucucgauuuugugcugaugg

SEQ ID NO: 185598 - RNA, 32 nt, Homo Sapiens
agaagcccaagcaagggagcccucagaggugg

SEQ ID NO: 185599 - RNA, 32 nt, Homo Sapiens
cagcggagcucggcguugaaggaggcacgugg

SEQ ID NO: 185600 - RNA, 32 nt, Homo Sapiens
ccccaggacgccacucauuucaucucauuuaa

SEQ ID NO: 185601 - RNA, 32 nt, Homo Sapiens
uuuuaauuucucaugugagauaccagaaugga

SEQ ID NO: 185602 - RNA, 32 nt, Homo Sapiens
uuugaaauauccagacuuguagggaagaaaac

SEQ ID NO: 185603 - RNA, 32 nt, Homo Sapiens
auuuuggagagccuaauaaacuguuauuacag

SEQ ID NO: 185604 - RNA, 32 nt, Homo Sapiens
aggacuggagggcuugaggaaugugguggucc

SEQ ID NO: 185605 - RNA, 32 nt, Homo Sapiens
ucccugcaaccucaguccaaggaaccugcuac

SEQ ID NO: 185606 - RNA, 32 nt, Homo Sapiens
acuguagucaacauguagagucugcuucccuc

SEQ ID NO: 185607 - RNA, 32 nt, Homo Sapiens
cuggccugggggugggggaccuggauguguag

SEQ ID NO: 185608 - RNA, 30 nt, Homo Sapiens
uaaccuggggaggacgcgggucccugcaag

SEQ ID NO: 185609 - RNA, 30 nt, Homo Sapiens
aggagcuuggacugcucuggcuaggacccc

SEQ ID NO: 185610 - RNA, 32 nt, Homo Sapiens
ccagauuaagggugaagucugaucucauaccc

SEQ ID NO: 185611 - RNA, 32 nt, Homo Sapiens
cacccagcuagcgccucccccaucaggagcac

SEQ ID NO: 185612 - RNA, 32 nt, Homo Sapiens
gcacuggaagcagaugggaagagaauagcugu

SEQ ID NO: 185613 - RNA, 32 nt, Homo Sapiens
caaauugccaacuuuaaggaaauauucucuug

SEQ ID NO: 185614 - RNA, 32 nt, Homo Sapiens
cugggaaaggggacaagaggcuuuucgugccc

SEQ ID NO: 185615 - RNA, 32 nt, Homo Sapiens
cuauuaaucgugucuucaauuaaaagaccaca

SEQ ID NO: 185616 - RNA, 32 nt, Homo Sapiens
cuggaguuuaccauuugucuuuuaauuggcaa

SEQ ID NO: 185617 - RNA, 32 nt, Homo Sapiens
gcucagagcagugccagccccaccgcaacugc

SEQ ID NO: 185618 - RNA, 32 nt, Homo Sapiens
ugaaggcccagccugccccugagacgcugugu

SEQ ID NO: 185619 - RNA, 32 nt, Homo Sapiens
uacgcgcagcuagugcagcgcggcuggggcag

SEQ ID NO: 185620 - RNA, 32 nt, Homo Sapiens
cgcacccagcccaugugucuuggucuuuuuua

SEQ ID NO: 185621 - RNA, 32 nt, Homo Sapiens
gcaaccuccgccucuuggguucaagcaauucu

SEQ ID NO: 185622 - RNA, 32 nt, Homo Sapiens
uagaaaacaacuuaguuuuucuuuuuuccuga

SEQ ID NO: 185623 - RNA, 32 nt, Homo Sapiens
uacuggcuucgcugguggcucaucucgaacau

SEQ ID NO: 185624 - RNA, 32 nt, Homo Sapiens
uaaaagaaauauauuuguguuuuguuuguacu

SEQ ID NO: 185625 - RNA, 32 nt, Homo Sapiens
uaagguacaguaugugaagauacauugcagau

SEQ ID NO: 185626 - RNA, 32 nt, Homo Sapiens
gaggcaagcacuggugagucuaggacagauuu

SEQ ID NO: 185627 - RNA, 32 nt, Homo Sapiens
guuaccccuaaaacaaagcuauuaaagggaca

SEQ ID NO: 185628 - RNA, 32 nt, Homo Sapiens
ugggaacuucagagccagcaguguggcucagg

SEQ ID NO: 185629 - RNA, 32 nt, Homo Sapiens
uaccuagccucagagacagagaaggagagggg

SEQ ID NO: 185630 - RNA, 32 nt, Homo Sapiens
aacaugguccagaagaaguaugcaaaaaugua

SEQ ID NO: 185631 - RNA, 32 nt, Homo Sapiens
ugauggcccaaccaacuggaguaguggccugu

SEQ ID NO: 185632 - RNA, 32 nt, Homo Sapiens
cuucucggcgagugcuggccggcucgcgcguu

SEQ ID NO: 185633 - RNA, 32 nt, Homo Sapiens
ccauagagccuggccuggccccuggccuuggc

SEQ ID NO: 185634 - RNA, 32 nt, Homo Sapiens
aaaugaggcugagaccugccgggcugcauucc

SEQ ID NO: 185635 - RNA, 32 nt, Homo Sapiens
aagacuuccuucccuccucccaaaaugccucc

SEQ ID NO: 185636 - RNA, 32 nt, Homo Sapiens
ccuagggccuaggcccgggccaccauggcgcu

SEQ ID NO: 185637 - RNA, 32 nt, Homo Sapiens
ccucuacaccaauuaauguagcugcuagcuau

SEQ ID NO: 185638 - RNA, 32 nt, Homo Sapiens
uggaaugaacugugcaaaaucuguaggaaacu

SEQ ID NO: 185639 - RNA, 32 nt, Homo Sapiens
ccggagcagcgccaccgccgccgcccccacug

SEQ ID NO: 185640 - RNA, 32 nt, Homo Sapiens
gggacuggucaucuccugaggaccuguacaug

SEQ ID NO: 185641 - RNA, 32 nt, Homo Sapiens
gggacaagaagccacaggaauccugccucugu

SEQ ID NO: 185642 - RNA, 32 nt, Homo Sapiens
cugaggcccagcugggccaggacuccauccuu

SEQ ID NO: 185643 - RNA, 32 nt, Homo Sapiens
ccagcuauuuugcugccucggccaucuguucc

SEQ ID NO: 185644 - RNA, 32 nt, Homo Sapiens
guggcagagaguccgagcauggagcgauucca

SEQ ID NO: 185645 - RNA, 32 nt, Homo Sapiens
cuucggcacccucgcccucccucccgacucaa

SEQ ID NO: 185646 - RNA, 32 nt, Homo Sapiens
uuccuguaaauauuuuguaauauuuuacuugu

SEQ ID NO: 185647 - RNA, 32 nt, Homo Sapiens
aauaaaaagacaacccacccccugcccuuuug

SEQ ID NO: 185648 - RNA, 32 nt, Homo Sapiens
gucaaggagcagcagaccuggcacuggaacag

SEQ ID NO: 185649 - RNA, 32 nt, Homo Sapiens
ugccccgcugcucuaggggagcauacagacag

SEQ ID NO: 185650 - RNA, 32 nt, Homo Sapiens
ccccuucuucugaaucucugggcaguccccau

SEQ ID NO: 185651 - RNA, 32 nt, Homo Sapiens
ucuccaguccuuucccaacagcgaugugguug

SEQ ID NO: 185652 - RNA, 32 nt, Homo Sapiens
ccuuccauuuuagccuuccacccagcuuccac

SEQ ID NO: 185653 - RNA, 32 nt, Homo Sapiens
acagccccagcccggagcccagcccccugccc

SEQ ID NO: 185654 - RNA, 32 nt, Homo Sapiens
gacagccaguguugcuggcuggagaggcagca

SEQ ID NO: 185655 - RNA, 32 nt, Homo Sapiens
ggacccacaaagcaggcagagguaaugcagaa

SEQ ID NO: 185656 - RNA, 32 nt, Homo Sapiens
auuacaaguugcaugacugaaaaaaugcuuua

SEQ ID NO: 185657 - RNA, 32 nt, Homo Sapiens
gaauaaaauucuuuuauauaaauaggaaaaca

SEQ ID NO: 185658 - RNA, 32 nt, Homo Sapiens
gaaggagauucgauuucugaaaaaauauagug

SEQ ID NO: 185659 - RNA, 32 nt, Homo Sapiens
agcucauugcagccuucaauuccugggcucag

SEQ ID NO: 185660 - RNA, 32 nt, Homo Sapiens
gcgcccagcuggacguccaggauggagugagc

SEQ ID NO: 185661 - RNA, 32 nt, Homo Sapiens
gcagaugcauuugcucccuggaugcauagcag

SEQ ID NO: 185662 - RNA, 32 nt, Homo Sapiens
gauuuuuuggaaggugauacaguaugugggua

SEQ ID NO: 185663 - RNA, 32 nt, Homo Sapiens
gauugccuucuacuggaagauugggaauuagu

SEQ ID NO: 185664 - RNA, 32 nt, Homo Sapiens
caguauugacuucuuuuuggcauuaucucuuu

SEQ ID NO: 185665 - RNA, 32 nt, Homo Sapiens
gauggacauuuggguugguuccaggucuuugc

SEQ ID NO: 185666 - RNA, 32 nt, Homo Sapiens
acaaugaagauaaaaagacauucuuccaaaaa

SEQ ID NO: 185667 - RNA, 32 nt, Homo Sapiens
ugugccuggugcccugcuggguagagaacaca

SEQ ID NO: 185668 - RNA, 32 nt, Homo Sapiens
gucugcaacauuuuuguuuucuuuuuuaaugu

SEQ ID NO: 185669 - RNA, 32 nt, Homo Sapiens
ggcaucuccucauugugccuucaucagagcug

SEQ ID NO: 185670 - RNA, 30 nt, Homo Sapiens
ggcccggcgcccgauuuccgccuuccgacc

SEQ ID NO: 185671 - RNA, 32 nt, Homo Sapiens
gccaaagaauaugaaaauauuuaaguaaaaac

SEQ ID NO: 185672 - RNA, 32 nt, Homo Sapiens
uuauaguuauuuaaaaacuacaacuacucaau

SEQ ID NO: 185673 - RNA, 32 nt, Homo Sapiens
gagggcuccgcaucgcaaccauggcgcugcgc

SEQ ID NO: 185674 - RNA, 32 nt, Homo Sapiens
acacgagggcaacccugugacaauggcaggua

SEQ ID NO: 185675 - RNA, 32 nt, Homo Sapiens
cuuaggcaaauuauuacaccacagggguguga

SEQ ID NO: 185676 - RNA, 32 nt, Homo Sapiens
ggcagacagacgcccaccugcuccccgaccuc

SEQ ID NO: 185677 - RNA, 32 nt, Homo Sapiens
gugggggcaugggaggggcaggcauucugcug

SEQ ID NO: 185678 - RNA, 32 nt, Homo Sapiens
aagagauauaauuuagauucucauugauguuc

SEQ ID NO: 185679 - RNA, 32 nt, Homo Sapiens
uauaacaaaaacuuuguggauuucauaaaaau

SEQ ID NO: 185680 - RNA, 32 nt, Homo Sapiens
guccgcccagcgccagcuccgcgucccgaccg

SEQ ID NO: 185681 - RNA, 32 nt, Homo Sapiens
cuucuacagcuaugcgcaauguggcauugggg

SEQ ID NO: 185682 - RNA, 32 nt, Homo Sapiens
aauugguuagacagcaauagaaaacuaauaaa

SEQ ID NO: 185683 - RNA, 32 nt, Homo Sapiens
uccugaugccucauuugagcaccuggauuuag

SEQ ID NO: 185684 - RNA, 32 nt, Homo Sapiens
auauccguguucauaccacuuuucuuauguga

SEQ ID NO: 185685 - RNA, 32 nt, Homo Sapiens
auaacuuuuugccaacauauaaucaucaucaa

SEQ ID NO: 185686 - RNA, 32 nt, Homo Sapiens
guuacauguccucauguuuucuguuuucuguu

SEQ ID NO: 185687 - RNA, 32 nt, Homo Sapiens
cugcuucagaaagcgccugugugcaacucaaa

SEQ ID NO: 185688 - RNA, 32 nt, Homo Sapiens
ugcgugcugucuguggagugugucucaugcuu

SEQ ID NO: 185689 - RNA, 32 nt, Homo Sapiens
uguuuuugagacggagucucgcucugucggcc

SEQ ID NO: 185690 - RNA, 27 nt, Homo Sapiens
aagaucuccuucuuagccccccagccc

SEQ ID NO: 185691 - RNA, 32 nt, Homo Sapiens
acguaugugcaacccuucugcuaguagugcac

SEQ ID NO: 185692 - RNA, 32 nt, Homo Sapiens
ggagaucgagaccaucccggcuaacaugguga

SEQ ID NO: 185693 - RNA, 32 nt, Homo Sapiens
gggauacucaaucccaacuuuuuuccuucucu

SEQ ID NO: 185694 - RNA, 32 nt, Homo Sapiens
auuuucaauuaaaaagcacacuucuacaaaag

SEQ ID NO: 185695 - RNA, 32 nt, Homo Sapiens
agcuccggguagcucucaaacucgaggcugcg

SEQ ID NO: 185696 - RNA, 32 nt, Homo Sapiens
uagcuguguuuguugaccacauucuuuggcag

SEQ ID NO: 185697 - RNA, 32 nt, Homo Sapiens
cucucccaacccuggggccuagcuguauagga

SEQ ID NO: 185698 - RNA, 32 nt, Homo Sapiens
cuaugggacacacacuacgaaaaggaugccuu

SEQ ID NO: 185699 - RNA, 32 nt, Homo Sapiens
cauuguuggggaucaucuuuggagcugugugc

SEQ ID NO: 185700 - RNA, 32 nt, Homo Sapiens
uaaaaguguacuuuccauuaauuauuagccga

SEQ ID NO: 185701 - RNA, 32 nt, Homo Sapiens
aaauacagucucuguagggauuuuaaaagauu

SEQ ID NO: 185702 - RNA, 32 nt, Homo Sapiens
caccagccagucaucuacaacaaaucugccug

SEQ ID NO: 185703 - RNA, 32 nt, Homo Sapiens
ugccuuuaucuaggaacauauaucaagauuug

SEQ ID NO: 185704 - RNA, 32 nt, Homo Sapiens
uccgcguccucugugggggcugccggaagaca

SEQ ID NO: 185705 - RNA, 32 nt, Homo Sapiens
uacagcagcuuuugacuguuucccggacacaa

SEQ ID NO: 185706 - RNA, 32 nt, Homo Sapiens
ggcagggaagaugccugucggguuuuuagcac

SEQ ID NO: 185707 - RNA, 32 nt, Homo Sapiens
auuuuuccaucccacccuuuucuuaaucgcuu

SEQ ID NO: 185708 - RNA, 32 nt, Homo Sapiens
agcaggaaaucagugcuggggguggugggcgg

SEQ ID NO: 185709 - RNA, 32 nt, Homo Sapiens
ugggcagggugcccagcucagcagccacggcc

SEQ ID NO: 185710 - RNA, 32 nt, Homo Sapiens
acuguccauucuuaauauuucuauccuccauu

SEQ ID NO: 185711 - RNA, 32 nt, Homo Sapiens
gccacggcucugccaugcagcuccugcuggcc

SEQ ID NO: 185712 - RNA, 32 nt, Homo Sapiens
accagcagcucuugcccagagcugugcagugc

SEQ ID NO: 185713 - RNA, 32 nt, Homo Sapiens
cucuugggcaaaugacuguugguaccaggacc

SEQ ID NO: 185714 - RNA, 32 nt, Homo Sapiens
cuguagugguauaugucaggggcugguaagcc

SEQ ID NO: 185715 - RNA, 32 nt, Homo Sapiens
aacugguaauaaaaucagguacgacuccaaaa

SEQ ID NO: 185716 - RNA, 30 nt, Homo Sapiens
acucaggauaaaacuuuauguguauaggga

SEQ ID NO: 185717 - RNA, 32 nt, Homo Sapiens
aagucuuuuaucauauuuauacugcuguccaa

SEQ ID NO: 185718 - RNA, 32 nt, Homo Sapiens
cuaagcccuggaaaaauauuugaaagaauggc

SEQ ID NO: 185719 - RNA, 32 nt, Homo Sapiens
gcagcggagagcagcucugugugcccucaacc

SEQ ID NO: 185720 - RNA, 32 nt, Homo Sapiens
acaugcaaaauauuucuuagccacuuuuaagc

SEQ ID NO: 185721 - RNA, 32 nt, Homo Sapiens
cucuuucccuucggugugccacugaagauccu

SEQ ID NO: 185722 - RNA, 32 nt, Homo Sapiens
cugccccagcugccuccacagacugcugucuc

SEQ ID NO: 185723 - RNA, 32 nt, Homo Sapiens
ugacaauugguaguuguugcuguuaucaaccu

SEQ ID NO: 185724 - RNA, 32 nt, Homo Sapiens
gucaguaaauguuugcuaaaauacugagcaac

SEQ ID NO: 185725 - RNA, 32 nt, Homo Sapiens
ccucagccuucgccucagcgccgcccgcucgc

SEQ ID NO: 185726 - RNA, 32 nt, Homo Sapiens
aaaucggaugguugccgugucuguguagaaag

SEQ ID NO: 185727 - RNA, 32 nt, Homo Sapiens
gaguuagguacggucugaaguuaugucuagau

SEQ ID NO: 185728 - RNA, 32 nt, Homo Sapiens
ugcaaaaagugaauucuuccaacaacuacgug

SEQ ID NO: 185729 - RNA, 32 nt, Homo Sapiens
cucucuccguguggcggccccggagcaggcgg

SEQ ID NO: 185730 - RNA, 32 nt, Homo Sapiens
gucacaaauuaauuuacauauuugagaaguug

SEQ ID NO: 185731 - RNA, 32 nt, Homo Sapiens
auuuaggagacuuuuuacccaggggcaaaagg

SEQ ID NO: 185732 - RNA, 32 nt, Homo Sapiens
cagcguggggagaggaaaauagacuuggcaag

SEQ ID NO: 185733 - RNA, 32 nt, Homo Sapiens
uggacacuggacugcaugcacuuuacauauca

SEQ ID NO: 185734 - RNA, 32 nt, Homo Sapiens
agcgguacuuuuuuaaauugacaaauuuuaag

SEQ ID NO: 185735 - RNA, 32 nt, Homo Sapiens
gcaaauuugucaacuaaauuuaauuuaaaagu

SEQ ID NO: 185736 - RNA, 32 nt, Homo Sapiens
uaaugagaccucugugugaagcaagugaagua

SEQ ID NO: 185737 - RNA, 32 nt, Homo Sapiens
uguggggaucuugggcaaccacugcuucccuu

SEQ ID NO: 185738 - RNA, 32 nt, Homo Sapiens
uuuggguuucuacuuuuuggcuauuaugaauu

SEQ ID NO: 185739 - RNA, 32 nt, Homo Sapiens
acgccccgccggggcccuaauccuggacccgg

SEQ ID NO: 185740 - RNA, 32 nt, Homo Sapiens
uaaaauauugaaaacuaacauaauauguugag

SEQ ID NO: 185741 - RNA, 32 nt, Homo Sapiens
ccacgggcccccagccccagccccucuccugu

SEQ ID NO: 185742 - RNA, 32 nt, Homo Sapiens
gcaauggagaagaaaaguugcuggagaccaug

SEQ ID NO: 185743 - RNA, 32 nt, Homo Sapiens
uauuuguuaguuuauagucaccaccauaugga

SEQ ID NO: 185744 - RNA, 32 nt, Homo Sapiens
augcaguuuauaggugcuaaguauugugugug

SEQ ID NO: 185745 - RNA, 32 nt, Homo Sapiens
aggaaagagauuagaacauuuaauaauguaug

SEQ ID NO: 185746 - RNA, 32 nt, Homo Sapiens
caaagaggagagaucagaugauuaaaggggcu

SEQ ID NO: 185747 - RNA, 32 nt, Homo Sapiens
gcacucacucccucccggccccucacagggcc

SEQ ID NO: 185748 - RNA, 32 nt, Homo Sapiens
aaucacaguuuaaugacaguuuauguauauau

SEQ ID NO: 185749 - RNA, 32 nt, Homo Sapiens
aacacacgcucgccugcgucccaaagggaaac

SEQ ID NO: 185750 - RNA, 32 nt, Homo Sapiens
auccuuccuucccauguuacuaaauuaauuua

SEQ ID NO: 185751 - RNA, 32 nt, Homo Sapiens
uucuagagaucgucuguucaaauauauccuau

SEQ ID NO: 185752 - RNA, 32 nt, Homo Sapiens
cuaauuuauaauuuaaauuuauuuguguuucu

SEQ ID NO: 185753 - RNA, 32 nt, Homo Sapiens
gcuucuggcgccccacccaccccacaccugca

SEQ ID NO: 185754 - RNA, 32 nt, Homo Sapiens
uggaggaccugauugggaccaacagccgaggg

SEQ ID NO: 185755 - RNA, 32 nt, Homo Sapiens
ccaccgccaccggagucgcgggccagccgggc

SEQ ID NO: 185756 - RNA, 32 nt, Homo Sapiens
agcaauaccuuucuguacccguggugagacaa

SEQ ID NO: 185757 - RNA, 32 nt, Homo Sapiens
ugaggaaccuagaaagauuguacaaugaaugg

SEQ ID NO: 185758 - RNA, 29 nt, Homo Sapiens
gaggugagcaucugggcgccgggacgcug

SEQ ID NO: 185759 - RNA, 32 nt, Homo Sapiens
ugauaggagggaagaggcugggugugguggcu

SEQ ID NO: 185760 - RNA, 32 nt, Homo Sapiens
uacaauaauucacuugcccuagguuccaaagc

SEQ ID NO: 185761 - RNA, 32 nt, Homo Sapiens
gggaggaggggaggagggucucagacagcuuu

SEQ ID NO: 185762 - RNA, 32 nt, Homo Sapiens
auucguugguuuugauucucuuauucucuugu

SEQ ID NO: 185763 - RNA, 32 nt, Homo Sapiens
gaaucaggggagaggagaggccugauggggca

SEQ ID NO: 185764 - RNA, 32 nt, Homo Sapiens
ugcuggggcagacaacgcugcagagcccaggg

SEQ ID NO: 185765 - RNA, 32 nt, Homo Sapiens
caauggagcugcuggagcccgguacccacuca

SEQ ID NO: 185766 - RNA, 32 nt, Homo Sapiens
cccccgggagacgcaggcaauggggccucgca

SEQ ID NO: 185767 - RNA, 32 nt, Homo Sapiens
cauccugauggggugagcuggugucucauggu

SEQ ID NO: 185768 - RNA, 32 nt, Homo Sapiens
aauucagaauggcaaugauacaugauaucaug

SEQ ID NO: 185769 - RNA, 32 nt, Homo Sapiens
acaaaaagggggaggagaagguucuucgucca

SEQ ID NO: 185770 - RNA, 32 nt, Homo Sapiens
cucacaugccgcccccagcagcuccccugggg

SEQ ID NO: 185771 - RNA, 32 nt, Homo Sapiens
auaaaagccagcagacccuuugaaaaaaaaaa

SEQ ID NO: 185772 - RNA, 32 nt, Homo Sapiens
acuaggauaaucgguacaguuauucuuaaaga

SEQ ID NO: 185773 - RNA, 32 nt, Homo Sapiens
ggggugaagauggcggccuucuccgagauggg

SEQ ID NO: 185774 - RNA, 32 nt, Homo Sapiens
auaaucuggauaauuugcuaugaaguuaugag

SEQ ID NO: 185775 - RNA, 32 nt, Homo Sapiens
acuagucaacuuucuuaauagucugcauauuu

SEQ ID NO: 185776 - RNA, 32 nt, Homo Sapiens
ccauccccaguuuauggauaugcugcuuuaaa

SEQ ID NO: 185777 - RNA, 32 nt, Homo Sapiens
caggagggucagaggagaagcagccuccgccc

SEQ ID NO: 185778 - RNA, 32 nt, Homo Sapiens
cccggguauucgcgccgccgccgcccgccaug

SEQ ID NO: 185779 - RNA, 32 nt, Homo Sapiens
uccauaacaaauauuucuaguuuguucacuca

SEQ ID NO: 185780 - RNA, 32 nt, Homo Sapiens
ggaggggaggcgagggcggggcggucacguga

SEQ ID NO: 185781 - RNA, 32 nt, Homo Sapiens
ggcuccaaacuccacguaguaacagcagcuga

SEQ ID NO: 185782 - RNA, 32 nt, Homo Sapiens
cuggucugucuggagcagcugcagccgcagcu

SEQ ID NO: 185783 - RNA, 31 nt, Homo Sapiens
gagauugucacugcuguuccaagggcacacg

SEQ ID NO: 185784 - RNA, 32 nt, Homo Sapiens
uaaagugacccuuuccucuucugcccuauucu

SEQ ID NO: 185785 - RNA, 32 nt, Homo Sapiens
ggcaaagcccuuucucucccaagccccaggca

SEQ ID NO: 185786 - RNA, 32 nt, Homo Sapiens
cuuaugguagugggcuaacauaacagccccuu

SEQ ID NO: 185787 - RNA, 32 nt, Homo Sapiens
ugauaacuauacauuguauguaaauucaggga

SEQ ID NO: 185788 - RNA, 32 nt, Homo Sapiens
uaaggaaaaaugaaauuacuuuccugugcaca

SEQ ID NO: 185789 - RNA, 32 nt, Homo Sapiens
uuugcuuguuuauuucugaaaaagaacuguau

SEQ ID NO: 185790 - RNA, 32 nt, Homo Sapiens
cuaggauaaaaagccagggcuggagaacaaga

SEQ ID NO: 185791 - RNA, 27 nt, Homo Sapiens
ccugucucagccuucagccccucccgg

SEQ ID NO: 185792 - RNA, 32 nt, Homo Sapiens
cacugagauaaaauagucuuuguuauuuucaa

SEQ ID NO: 185793 - RNA, 32 nt, Homo Sapiens
uccaugucccuacaaaggacaugaacucaucg

SEQ ID NO: 185794 - RNA, 32 nt, Homo Sapiens
aaaaguugacauuuuuguaggucaaaaacaau

SEQ ID NO: 185795 - RNA, 32 nt, Homo Sapiens
aauugugccgggggucccugcggugcugcucu

SEQ ID NO: 185796 - RNA, 32 nt, Homo Sapiens
gcuucauugcauguauuguuaagcauguaaug

SEQ ID NO: 185797 - RNA, 30 nt, Homo Sapiens
gagguccuaaaguguuacaagaguacaguc

SEQ ID NO: 185798 - RNA, 31 nt, Homo Sapiens
agcauggagaugacucucagaacacugggag

SEQ ID NO: 185799 - RNA, 32 nt, Homo Sapiens
caguacccagaacuaaauuugcccacuuacaa

SEQ ID NO: 185800 - RNA, 32 nt, Homo Sapiens
agugguuccagaugaagaugugacauucagga

SEQ ID NO: 185801 - RNA, 32 nt, Homo Sapiens
uguuaucccucccccaaccugccucuguuuuc

SEQ ID NO: 185802 - RNA, 32 nt, Homo Sapiens
cauaucugaugauggggauuuguaggacuuua

SEQ ID NO: 185803 - RNA, 32 nt, Homo Sapiens
agcauggagagccagcagcuucauuucuaagg

SEQ ID NO: 185804 - RNA, 32 nt, Homo Sapiens
ugagugauaaguagucauguuguuuucaucca

SEQ ID NO: 185805 - RNA, 32 nt, Homo Sapiens
cugcuuugacuucagccauggaugaggagugg

SEQ ID NO: 185806 - RNA, 32 nt, Homo Sapiens
aguggcucuaacaagugccauuuuuccuuguu

SEQ ID NO: 185807 - RNA, 32 nt, Homo Sapiens
uggggcggguccgaggcagcggcgggacguac

SEQ ID NO: 185808 - RNA, 32 nt, Homo Sapiens
gccggugagccugggaagcagcagccacaccg

SEQ ID NO: 185809 - RNA, 32 nt, Homo Sapiens
aagugacugcgggaguggagccggcgagagag

SEQ ID NO: 185810 - RNA, 32 nt, Homo Sapiens
auuauaccaaaauguugcugaaaaaugggcac

SEQ ID NO: 185811 - RNA, 32 nt, Homo Sapiens
ugaugagggucuccaucgccgucuccagcuca

SEQ ID NO: 185812 - RNA, 32 nt, Homo Sapiens
gauguuuuauagaacauuucuuuaauauaaag

SEQ ID NO: 185813 - RNA, 32 nt, Homo Sapiens
gcaaccagcuggaagguacuaugccaguccua

SEQ ID NO: 185814 - RNA, 32 nt, Homo Sapiens
ugugaauuacucuuccuccccuucucugaaau

SEQ ID NO: 185815 - RNA, 32 nt, Homo Sapiens
uacccaagugucuuauacaagcuucugguguc

SEQ ID NO: 185816 - RNA, 32 nt, Homo Sapiens
uucagagccuguucccucuccucccaagugau

SEQ ID NO: 185817 - RNA, 32 nt, Homo Sapiens
aggccugagugaguguuuggccgaggccugca

SEQ ID NO: 185818 - RNA, 29 nt, Homo Sapiens
uauauauaguguuucaugagguguauaua

SEQ ID NO: 185819 - RNA, 32 nt, Homo Sapiens
gagaagcuuugaccaauuugacuuagagaugg

SEQ ID NO: 185820 - RNA, 32 nt, Homo Sapiens
acuaugaggcugaaacaauccuugugaugaag

SEQ ID NO: 185821 - RNA, 32 nt, Homo Sapiens
ggugcaauggcgucuuaugacucucagaaagc

SEQ ID NO: 185822 - RNA, 32 nt, Homo Sapiens
aaugauucacacucacagcaaugaugagugac

SEQ ID NO: 185823 - RNA, 32 nt, Homo Sapiens
ggguuuucauuucccauugggggaauuguuuu

SEQ ID NO: 185824 - RNA, 30 nt, Homo Sapiens
cucccccaugcucaauuugugugaaaaguc

SEQ ID NO: 185825 - RNA, 32 nt, Homo Sapiens
aauuuucuuuugcauugggcaggcauggcccu

SEQ ID NO: 185826 - RNA, 32 nt, Homo Sapiens
ggccucccggcggccucugcaggcccaaaacg

SEQ ID NO: 185827 - RNA, 32 nt, Homo Sapiens
ccugaugauggucauuggggugguugucaugu

SEQ ID NO: 185828 - RNA, 32 nt, Homo Sapiens
gaagcccggguggcccgagggcgcgauggcug

SEQ ID NO: 185829 - RNA, 32 nt, Homo Sapiens
ggucaauaaaauuuaaacugcuuaacuaugaa

SEQ ID NO: 185830 - RNA, 32 nt, Homo Sapiens
ccuggagcaugugagcagcggcuggucucuuc

SEQ ID NO: 185831 - RNA, 32 nt, Homo Sapiens
ugaucaaaaucauguuuuuucuuaaaaaaaaa

SEQ ID NO: 185832 - RNA, 32 nt, Homo Sapiens
gguccuuggcgagguagccccugccuuaaucc

SEQ ID NO: 185833 - RNA, 32 nt, Homo Sapiens
cugguacaaucucauaaaaugggcuccagugu

SEQ ID NO: 185834 - RNA, 32 nt, Homo Sapiens
accucaauucuaugaguuuugacuuuugucau

SEQ ID NO: 185835 - RNA, 32 nt, Homo Sapiens
ccgauaauacugacucuagcccauguugccuu

SEQ ID NO: 185836 - RNA, 32 nt, Homo Sapiens
ccccgucuugcuuuuucuuaucuuuuggugcc

SEQ ID NO: 185837 - RNA, 32 nt, Homo Sapiens
gcucuaaaauacacaaggagcuuucuuguuuc

SEQ ID NO: 185838 - RNA, 32 nt, Homo Sapiens
cuuagauaaucccagaucauggccgggcacag

SEQ ID NO: 185839 - RNA, 32 nt, Homo Sapiens
uugauuauauugcuucugugcuaugguaccag

SEQ ID NO: 185840 - RNA, 29 nt, Homo Sapiens
uucuugucauaugaguuacgggcagcaga

SEQ ID NO: 185841 - RNA, 29 nt, Homo Sapiens
uuccuuugcagacagaggauucggagagc

SEQ ID NO: 185842 - RNA, 32 nt, Homo Sapiens
gguggauguuugggauuguauuauuauuuuac

SEQ ID NO: 185843 - RNA, 32 nt, Homo Sapiens
uucuggagaugggacuggggucgcgcggccuu

SEQ ID NO: 185844 - RNA, 32 nt, Homo Sapiens
ugugucaguuuggccuggccugacacuggcug

SEQ ID NO: 185845 - RNA, 32 nt, Homo Sapiens
gccuggauaauuuuuucuuauuuuuaguagag

SEQ ID NO: 185846 - RNA, 32 nt, Homo Sapiens
aaacuccccccucccuuuuugguagcuguuuc

SEQ ID NO: 185847 - RNA, 32 nt, Homo Sapiens
cagagcgagcgcggcgcgggccaccauggggg

SEQ ID NO: 185848 - RNA, 32 nt, Homo Sapiens
aauguaaagggucuguuaauucuuauauuuuu

SEQ ID NO: 185849 - RNA, 32 nt, Homo Sapiens
acaucgagagcaaacacaucggagacaaauuu

SEQ ID NO: 185850 - RNA, 32 nt, Homo Sapiens
cgggggugcugcgcggcggccgugauggcugg

SEQ ID NO: 185851 - RNA, 32 nt, Homo Sapiens
gauauugguucuuuaaaauauaucugaaagua

SEQ ID NO: 185852 - RNA, 32 nt, Homo Sapiens
ucuuuuuucuuuucuuuuuuuuuuacuuuuuu

SEQ ID NO: 185853 - RNA, 31 nt, Homo Sapiens
uauaccggcuggcucuuucagaaucaugugc

SEQ ID NO: 185854 - RNA, 32 nt, Homo Sapiens
uuauuuuguaagugaacauuccagcuguuuuu

SEQ ID NO: 185855 - RNA, 32 nt, Homo Sapiens
aaccggggagacggagguugcagugagccgag

SEQ ID NO: 185856 - RNA, 32 nt, Homo Sapiens
gcugcaauuuucucuuuaucuuguuucaacuu

SEQ ID NO: 185857 - RNA, 32 nt, Homo Sapiens
cuuuaagaacuaauuuuaccacuguuauaggu

SEQ ID NO: 185858 - RNA, 29 nt, Homo Sapiens
ggaaauuaaaguuuaccuuucuguuaauc

SEQ ID NO: 185859 - RNA, 31 nt, Homo Sapiens
uugggggaauaaaaagauguucagucauuuu

SEQ ID NO: 185860 - RNA, 32 nt, Homo Sapiens
uuuguggauucuguguuuuaaaacagagcugg

SEQ ID NO: 185861 - RNA, 32 nt, Homo Sapiens
guugggguuauuugucuguguuccugcacuuu

SEQ ID NO: 185862 - RNA, 26 nt, Homo Sapiens
auaauaaaaacucagucugcaaaggg

SEQ ID NO: 185863 - RNA, 32 nt, Homo Sapiens
cgaguacccagcugacugagcccccucugacc

SEQ ID NO: 185864 - RNA, 32 nt, Homo Sapiens
uuucguauuucccccacugcuuuuuauuugua

SEQ ID NO: 185865 - RNA, 32 nt, Homo Sapiens
uuuaaaaaagcaauucuuagaauacuuccuuu

SEQ ID NO: 185866 - RNA, 32 nt, Homo Sapiens
uuaccuugauuucucauuuauuuuuuccacuu

SEQ ID NO: 185867 - RNA, 32 nt, Homo Sapiens
aaauuuaauauuuggaguuguguuuuauuuuc

SEQ ID NO: 185868 - RNA, 32 nt, Homo Sapiens
cucuuccccgcaggcucuggcuggccgcaggc

SEQ ID NO: 185869 - RNA, 32 nt, Homo Sapiens
guuuguuacuuggacuaacaaggcaguagauu

SEQ ID NO: 185870 - RNA, 32 nt, Homo Sapiens
ggugugggguggcaauagcauugugccauuuu

SEQ ID NO: 185871 - RNA, 32 nt, Homo Sapiens
cggguccugaccagccucugaugcagcaucug

SEQ ID NO: 185872 - RNA, 32 nt, Homo Sapiens
agcuggagcaaguagaauuucucuaaauacca

SEQ ID NO: 185873 - RNA, 32 nt, Homo Sapiens
caaagaauuaucuuugugaucaauuguuuaca

SEQ ID NO: 185874 - RNA, 32 nt, Homo Sapiens
agccccauucugcaugagaauuugguguuugg

SEQ ID NO: 185875 - RNA, 32 nt, Homo Sapiens
cuuaaaagacaaugacuacugaugaaggugcc

SEQ ID NO: 185876 - RNA, 32 nt, Homo Sapiens
ccugcuuccuucauggucggcccgcuggagcc

SEQ ID NO: 185877 - RNA, 32 nt, Homo Sapiens
ggaauuuuuuuuucuuuuuuuuuuuuugguuc

SEQ ID NO: 185878 - RNA, 32 nt, Homo Sapiens
ggcuacagauuugggaagcuguguguaauggu

SEQ ID NO: 185879 - RNA, 32 nt, Homo Sapiens
ggcugaucucaaacuccugauacacccgccuc

SEQ ID NO: 185880 - RNA, 32 nt, Homo Sapiens
cgucauccucaccagcagcagcagcagcagca

SEQ ID NO: 185881 - RNA, 32 nt, Homo Sapiens
cagaguggagagggagagacggagccccagaa

SEQ ID NO: 185882 - RNA, 32 nt, Homo Sapiens
gugugucucgguuuccccaucuguaauaugag

SEQ ID NO: 185883 - RNA, 32 nt, Homo Sapiens
gcuccuuccuucccaauuucuccuuuguagca

SEQ ID NO: 185884 - RNA, 32 nt, Homo Sapiens
agaaacacaggagaggaagaauuuggaaugaa

SEQ ID NO: 185885 - RNA, 32 nt, Homo Sapiens
aagacugagugcccggggcacggcacagaagc

SEQ ID NO: 185886 - RNA, 32 nt, Homo Sapiens
ccccauuaaagcucagcaggcagugggaaaaa

SEQ ID NO: 185887 - RNA, 32 nt, Homo Sapiens
gagcccccucuccugaagcagugucgccgucc

SEQ ID NO: 185888 - RNA, 32 nt, Homo Sapiens
cccccgcccccuccgagagagaccgggaucug

SEQ ID NO: 185889 - RNA, 32 nt, Homo Sapiens
aaauaugugaugucacauauuucagugacagc

SEQ ID NO: 185890 - RNA, 32 nt, Homo Sapiens
gcaggcaggcucccagggacaccugggagaaa

SEQ ID NO: 185891 - RNA, 32 nt, Homo Sapiens
ucaagcggguggcucugggauccugggggccu

SEQ ID NO: 185892 - RNA, 32 nt, Homo Sapiens
gacaaaaaccagcagccaaauauuagaggucu

SEQ ID NO: 185893 - RNA, 32 nt, Homo Sapiens
aagcccccggcgagccgaggcugggagcgcgg

SEQ ID NO: 185894 - RNA, 32 nt, Homo Sapiens
acgcugucccgcgcgcucccaggccgccccga

SEQ ID NO: 185895 - RNA, 32 nt, Homo Sapiens
ugagcgguaaggaaagugaugccaagucuucg

SEQ ID NO: 185896 - RNA, 32 nt, Homo Sapiens
cuugcugaacaaauggcuggaugagugaaaca

SEQ ID NO: 185897 - RNA, 32 nt, Homo Sapiens
aggaauugcucugaagagaaauccccacaaac

SEQ ID NO: 185898 - RNA, 32 nt, Homo Sapiens
caccuccccgguucaagcaauucuccugccuc

SEQ ID NO: 185899 - RNA, 32 nt, Homo Sapiens
gggguauuuauuuuguuauuuauuucagucug

SEQ ID NO: 185900 - RNA, 32 nt, Homo Sapiens
ggugauuugcaccguggaaaagaaauugcaga

SEQ ID NO: 185901 - RNA, 32 nt, Homo Sapiens
auaagccccuccccagggccccacccugccau

SEQ ID NO: 185902 - RNA, 32 nt, Homo Sapiens
ccgaucggcuccuggccuccugcuucuuucuu

SEQ ID NO: 185903 - RNA, 32 nt, Homo Sapiens
aagcacaaagauucacaaaacuguagcuuuua

SEQ ID NO: 185904 - RNA, 32 nt, Homo Sapiens
cuuuaggguuuagaaucuaaccucaagaauaa

SEQ ID NO: 185905 - RNA, 32 nt, Homo Sapiens
agccugcauaauguuucuggauuuacauacug

SEQ ID NO: 185906 - RNA, 32 nt, Homo Sapiens
gcuuccacuuuuuuuuuuuuuagacauaaagc

SEQ ID NO: 185907 - RNA, 32 nt, Homo Sapiens
caccgugcagaggcggcgggcuggggagggag

SEQ ID NO: 185908 - RNA, 32 nt, Homo Sapiens
cguuugguguuggcccacagacacccgugaag

SEQ ID NO: 185909 - RNA, 32 nt, Homo Sapiens
uagguuuaagcuguauaugaaauauuuaugcg

SEQ ID NO: 185910 - RNA, 32 nt, Homo Sapiens
uauugggaggcuucuuuuuuauuacagaaagu

SEQ ID NO: 185911 - RNA, 32 nt, Homo Sapiens
cugggcagccaguggcucuuguagagaagacu

SEQ ID NO: 185912 - RNA, 32 nt, Homo Sapiens
guggcaggaggaggaguuaaggugaucuugug

SEQ ID NO: 185913 - RNA, 32 nt, Homo Sapiens
caaggcccugcgugccugcugcuggccgggca

SEQ ID NO: 185914 - RNA, 30 nt, Homo Sapiens
guaacaguucaccacuuccagagugugguc

SEQ ID NO: 185915 - RNA, 32 nt, Homo Sapiens
gccgcggccaggacaaaccaaccucaggcuga

SEQ ID NO: 185916 - RNA, 32 nt, Homo Sapiens
aaaaauaaaaaauaaaguuuauaggcugggcg

SEQ ID NO: 185917 - RNA, 32 nt, Homo Sapiens
aagcagacacuacuccaguaugucccaguaga

SEQ ID NO: 185918 - RNA, 32 nt, Homo Sapiens
gguggaacagagcuauaauuuauuagagugaa

SEQ ID NO: 185919 - RNA, 32 nt, Homo Sapiens
aaggugacagcagucgguuggaggaagcuucc

SEQ ID NO: 185920 - RNA, 32 nt, Homo Sapiens
acuuugggagacugaggcgggcggaucaugag

SEQ ID NO: 185921 - RNA, 32 nt, Homo Sapiens
gauggaccuugcacucuagaagggacaaugga

SEQ ID NO: 185922 - RNA, 32 nt, Homo Sapiens
ccgcaguguuugugucccugauuacuugagau

SEQ ID NO: 185923 - RNA, 32 nt, Homo Sapiens
acaauagaaagcuguagaagcuguagagauag

SEQ ID NO: 185924 - RNA, 32 nt, Homo Sapiens
agcccagcccgggaacaagacggacuuccucu

SEQ ID NO: 185925 - RNA, 32 nt, Homo Sapiens
ccaaggacugcugaguuuuucuucaugggggg

SEQ ID NO: 185926 - RNA, 32 nt, Homo Sapiens
auaaucccauucuuuauaauccucuguaaaaa

SEQ ID NO: 185927 - RNA, 32 nt, Homo Sapiens
cguggauggcagccucaggacacacaccccug

SEQ ID NO: 185928 - RNA, 32 nt, Homo Sapiens
gucccaaaugcauuagaggaacuguaaaaauc

SEQ ID NO: 185929 - RNA, 32 nt, Homo Sapiens
cuccugaugcuguugcagggcaggucugagag

SEQ ID NO: 185930 - RNA, 32 nt, Homo Sapiens
auaucagagaugcauacaaagaauuauauaua

SEQ ID NO: 185931 - RNA, 32 nt, Homo Sapiens
aggaagaauaaggauauguuagaacuaucuua

SEQ ID NO: 185932 - RNA, 32 nt, Homo Sapiens
aagcacacaaaacacuccaaguuucagcaguu

SEQ ID NO: 185933 - RNA, 32 nt, Homo Sapiens
ggacggugaugaugaagaugaugcagaagaug

SEQ ID NO: 185934 - RNA, 32 nt, Homo Sapiens
gccccgcccuccccccaccuccacgacuauuu

SEQ ID NO: 185935 - RNA, 32 nt, Homo Sapiens
ugaaaacauguaauaaaaaguauauguuagga

SEQ ID NO: 185936 - RNA, 32 nt, Homo Sapiens
gggugcgcuggccgcccucuucugccuacagu

SEQ ID NO: 185937 - RNA, 32 nt, Homo Sapiens
guucaccaccagcgaguucacacuggagaaag

SEQ ID NO: 185938 - RNA, 32 nt, Homo Sapiens
ugagcuaaauggaaaugauaucaucccaacaa

SEQ ID NO: 185939 - RNA, 32 nt, Homo Sapiens
cguccaacagagcauccguguaccauuccggc

SEQ ID NO: 185940 - RNA, 32 nt, Homo Sapiens
agccuuaacaacauguuuuugcugcagauaau

SEQ ID NO: 185941 - RNA, 32 nt, Homo Sapiens
cagccuuauagcagcaccuuguccucauugga

SEQ ID NO: 185942 - RNA, 32 nt, Homo Sapiens
ggggcggaggacccgcgguugaaggaggcagc

SEQ ID NO: 185943 - RNA, 32 nt, Homo Sapiens
ggugcucuguggugaauggguggccugugaug

SEQ ID NO: 185944 - RNA, 32 nt, Homo Sapiens
ucccgagaggauguuuggcauuguaaaaauca

SEQ ID NO: 185945 - RNA, 30 nt, Homo Sapiens
gacuggucugcugcugcaggcuucaucuaa

SEQ ID NO: 185946 - RNA, 32 nt, Homo Sapiens
auccugguaaccaaauauuaaagauucucuuu

SEQ ID NO: 185947 - RNA, 32 nt, Homo Sapiens
gguucuccuccugggggcccaggccgugagga

SEQ ID NO: 185948 - RNA, 32 nt, Homo Sapiens
cuccuuuuuugcgccuccuagugaaacuuaac

SEQ ID NO: 185949 - RNA, 32 nt, Homo Sapiens
ccuccgccgccccuuccccagcccugcccccg

SEQ ID NO: 185950 - RNA, 32 nt, Homo Sapiens
cuuuuauguggguauaggauugcuguguguga

SEQ ID NO: 185951 - RNA, 32 nt, Homo Sapiens
aaggccuugagugcccucugccgaccggcuuc

SEQ ID NO: 185952 - RNA, 32 nt, Homo Sapiens
ucccaggaauacugacuugaugaaaaagucac

SEQ ID NO: 185953 - RNA, 32 nt, Homo Sapiens
uguuggccauucuuuucagggauaaugcuuaa

SEQ ID NO: 185954 - RNA, 32 nt, Homo Sapiens
cuuucucagggagcguagaagcagccagggcc

SEQ ID NO: 185955 - RNA, 32 nt, Homo Sapiens
aagacaauagccuauauuugugucucacuaau

SEQ ID NO: 185956 - RNA, 32 nt, Homo Sapiens
gagggcauuggcggccgcccuggcgugacccc

SEQ ID NO: 185957 - RNA, 32 nt, Homo Sapiens
uggcuaguucauucccuccccagccaggugca

SEQ ID NO: 185958 - RNA, 32 nt, Homo Sapiens
gucccugccacgaauuucugugcccuccugac

SEQ ID NO: 185959 - RNA, 32 nt, Homo Sapiens
gccccuuggcagcagaguguugccagaacaaa

SEQ ID NO: 185960 - RNA, 32 nt, Homo Sapiens
uaaacuaugacagcuuuuuuuuuucucuuucc

SEQ ID NO: 185961 - RNA, 32 nt, Homo Sapiens
uauuuuaucuuuuaucuagaauccacauaucu

SEQ ID NO: 185962 - RNA, 32 nt, Homo Sapiens
cuugcuuuuggaaaauacauuuuuaauaguaa

SEQ ID NO: 185963 - RNA, 32 nt, Homo Sapiens
uaguagaacagguaauugggcagcaaaccaau

SEQ ID NO: 185964 - RNA, 32 nt, Homo Sapiens
uagagggacauccagggaucagggcaugagug

SEQ ID NO: 185965 - RNA, 32 nt, Homo Sapiens
gacuuuuucuucuaaaucuggaugucauugac

SEQ ID NO: 185966 - RNA, 32 nt, Homo Sapiens
agcaagucuccuggccucuccuccucauccuc

SEQ ID NO: 185967 - RNA, 32 nt, Homo Sapiens
cucguccucugccccaggcccggccccgcccc

SEQ ID NO: 185968 - RNA, 32 nt, Homo Sapiens
gugaaaaccaacaaauaaugcuuaaaggccac

SEQ ID NO: 185969 - RNA, 32 nt, Homo Sapiens
cagggcuaaagcaaccaucuccccucaaaauu

SEQ ID NO: 185970 - RNA, 32 nt, Homo Sapiens
gauuauuugcaaugucaggcuuugaaaacuua

SEQ ID NO: 185971 - RNA, 32 nt, Homo Sapiens
gucaaugagagaagaguuugaauaugaaauuu

SEQ ID NO: 185972 - RNA, 32 nt, Homo Sapiens
cuaggagagaguggagaugggaagacagggaa

SEQ ID NO: 185973 - RNA, 32 nt, Homo Sapiens
acaguuucauaugaaccuuuuacuucucuauu

SEQ ID NO: 185974 - RNA, 32 nt, Homo Sapiens
ccacagauauaaggguguuaugcugaauccug

SEQ ID NO: 185975 - RNA, 32 nt, Homo Sapiens
ccaggguguuaggaaggcaggggugcaagguc

SEQ ID NO: 185976 - RNA, 32 nt, Homo Sapiens
gugaagcuguguuuacagggcauuccaaguga

SEQ ID NO: 185977 - RNA, 32 nt, Homo Sapiens
agaauauccgggcccagcuggcacgcugugca

SEQ ID NO: 185978 - RNA, 32 nt, Homo Sapiens
cagaaacugccuuguccacgggccccgccuca

SEQ ID NO: 185979 - RNA, 32 nt, Homo Sapiens
gugguggggaagagccuugucuucuuagcugu

SEQ ID NO: 185980 - RNA, 32 nt, Homo Sapiens
auggugcucaggugauuauccuucgcucguuu

SEQ ID NO: 185981 - RNA, 32 nt, Homo Sapiens
uguauaagugauuggcuagugauucuuguuuu

SEQ ID NO: 185982 - RNA, 32 nt, Homo Sapiens
gugucccccugaaacucuuaugcuggaguccu

SEQ ID NO: 185983 - RNA, 32 nt, Homo Sapiens
agcauggggcccaagaguaugcauucuuacca

SEQ ID NO: 185984 - RNA, 32 nt, Homo Sapiens
uauauaguucuaugacuguugaaacaucaagg

SEQ ID NO: 185985 - RNA, 32 nt, Homo Sapiens
agugacaaacacacacugaaggccugagggaa

SEQ ID NO: 185986 - RNA, 32 nt, Homo Sapiens
aaacacaggacugcuauucugcucuccugccc

SEQ ID NO: 185987 - RNA, 32 nt, Homo Sapiens
agcuugaggccgagacgaauguugacaccggc

SEQ ID NO: 185988 - RNA, 32 nt, Homo Sapiens
gcuuucugcagacagggccuccccuggauggg

SEQ ID NO: 185989 - RNA, 32 nt, Homo Sapiens
aggcaauacuuauuauacacccaguaacagug

SEQ ID NO: 185990 - RNA, 32 nt, Homo Sapiens
agccagcccuuaaggcacuuggagcaaagguc

SEQ ID NO: 185991 - RNA, 31 nt, Homo Sapiens
augaagacagucugccuuagagccugcuauu

SEQ ID NO: 185992 - RNA, 32 nt, Homo Sapiens
guugggcuaaaauaaugauaucagggguaaac

SEQ ID NO: 185993 - RNA, 32 nt, Homo Sapiens
caccccugcgccggcccgcgggcuucgcaggc

SEQ ID NO: 185994 - RNA, 32 nt, Homo Sapiens
cgggcaccgcguccugugggcggccgccugcc

SEQ ID NO: 185995 - RNA, 32 nt, Homo Sapiens
cgcacggcacugccccaccuccgcccggaccc

SEQ ID NO: 185996 - RNA, 32 nt, Homo Sapiens
aagugaugggcagaaggagagaaggauguuuu

SEQ ID NO: 185997 - RNA, 32 nt, Homo Sapiens
uggagccguagcggcaagugggcuugcggcua

SEQ ID NO: 185998 - RNA, 32 nt, Homo Sapiens
gcaucauaaauauuacugucaaguaaauaaga

SEQ ID NO: 185999 - RNA, 32 nt, Homo Sapiens
uucucuaaguuuucagaggauuuuuuaaauca

SEQ ID NO: 186000 - RNA, 32 nt, Homo Sapiens
gcccgcggccccaagcgguucccgagcccagg

SEQ ID NO: 186001 - RNA, 30 nt, Homo Sapiens
ugguuuucugcucgcugugaccgaacaaag

SEQ ID NO: 186002 - RNA, 32 nt, Homo Sapiens
acacgccuccucacuucgagggccccccucca

SEQ ID NO: 186003 - RNA, 32 nt, Homo Sapiens
uuccugagaacaaaauaaaaggauuuuucugu

SEQ ID NO: 186004 - RNA, 30 nt, Homo Sapiens
gcagcugugugggcugcagauuuccugugu

SEQ ID NO: 186005 - RNA, 32 nt, Homo Sapiens
agcagaauuuaucacacacaaaaguuacacca

SEQ ID NO: 186006 - RNA, 32 nt, Homo Sapiens
ugcucugcacaggggagauuucuuauaccagc

SEQ ID NO: 186007 - RNA, 32 nt, Homo Sapiens
uccuuucugagcuccagccccagccccucgaa

SEQ ID NO: 186008 - RNA, 32 nt, Homo Sapiens
accccugagugggacaagaagggccuugagug

SEQ ID NO: 186009 - RNA, 32 nt, Homo Sapiens
ucgagauguucugcuauuuacucugugguuuu

SEQ ID NO: 186010 - RNA, 32 nt, Homo Sapiens
guuaacugugucaucaacuuauccuaguaccu

SEQ ID NO: 186011 - RNA, 32 nt, Homo Sapiens
gcgcagugcagguauuagucauuuagagguau

SEQ ID NO: 186012 - RNA, 30 nt, Homo Sapiens
cuggcugguugcucuagcgcccugaaggag

SEQ ID NO: 186013 - RNA, 32 nt, Homo Sapiens
auuuauacuuuuuaaugaguuaauuuuaagug

SEQ ID NO: 186014 - RNA, 32 nt, Homo Sapiens
uauuggcauuuagaagacuuuaccauuauuuc

SEQ ID NO: 186015 - RNA, 32 nt, Homo Sapiens
gacgggugguggcagagugagaaggccacugg

SEQ ID NO: 186016 - RNA, 32 nt, Homo Sapiens
ucuuuacugaugaaaggguguucauguuaguu

SEQ ID NO: 186017 - RNA, 32 nt, Homo Sapiens
uuacucuguuaccaugagaaaaguuugggugu

SEQ ID NO: 186018 - RNA, 32 nt, Homo Sapiens
uucuguggcaucuaaggccuagcagggguggg

SEQ ID NO: 186019 - RNA, 32 nt, Homo Sapiens
cccccgcccacccaccacgggugucgcuuuaa

SEQ ID NO: 186020 - RNA, 32 nt, Homo Sapiens
agugccccacccugcacccccaccuugggaau

SEQ ID NO: 186021 - RNA, 32 nt, Homo Sapiens
gccaaggcggguggaucacgaggucaggagau

SEQ ID NO: 186022 - RNA, 32 nt, Homo Sapiens
aguuaagacaccuuaccauugcuuauuugguu

SEQ ID NO: 186023 - RNA, 32 nt, Homo Sapiens
ccaaaggagcagcuugaccuggagggaugagg

SEQ ID NO: 186024 - RNA, 32 nt, Homo Sapiens
cguuggaugaauugcacaggcugaaacucgag

SEQ ID NO: 186025 - RNA, 32 nt, Homo Sapiens
ccucccagucccagcccugcuuccggcugcga

SEQ ID NO: 186026 - RNA, 32 nt, Homo Sapiens
agaacccgcagacgaggccgagcugcugccgu

SEQ ID NO: 186027 - RNA, 32 nt, Homo Sapiens
auugaugaugaaaugucuuacgaugaucauuu

SEQ ID NO: 186028 - RNA, 32 nt, Homo Sapiens
auagagccagcuugaaggggcucccacuggcc

SEQ ID NO: 186029 - RNA, 32 nt, Homo Sapiens
aaggcaccauucucaucuuucucaguggcagg

SEQ ID NO: 186030 - RNA, 32 nt, Homo Sapiens
gcuuugcugcaacccuucagcucugugcgugu

SEQ ID NO: 186031 - RNA, 32 nt, Homo Sapiens
gacauaaauauuagaauggagguaauacauac

SEQ ID NO: 186032 - RNA, 32 nt, Homo Sapiens
gugugucuuuacuccuucuuccucuccauaga

SEQ ID NO: 186033 - RNA, 32 nt, Homo Sapiens
caacuucuaauccagggacuuuucucacugug

SEQ ID NO: 186034 - RNA, 32 nt, Homo Sapiens
caaauuacugauaucagaguuauuuaaaaauu

SEQ ID NO: 186035 - RNA, 32 nt, Homo Sapiens
cggguuugcgcggcuccgaggccuaaccaggc

SEQ ID NO: 186036 - RNA, 32 nt, Homo Sapiens
uuagcugggugcccagcucccugcaucagaau

SEQ ID NO: 186037 - RNA, 32 nt, Homo Sapiens
ccagagccgggcgcggcuggggcccgaggcua

SEQ ID NO: 186038 - RNA, 32 nt, Homo Sapiens
ugcugagugucugugucugauuuuuucaugcu

SEQ ID NO: 186039 - RNA, 27 nt, Homo Sapiens
aucuucugugucuucagcgcccagccc

SEQ ID NO: 186040 - RNA, 32 nt, Homo Sapiens
cuggcuacucuuguuuucccucaugauaauaa

SEQ ID NO: 186041 - RNA, 32 nt, Homo Sapiens
caugcaacagucuucucugugcauuuccccaa

SEQ ID NO: 186042 - RNA, 32 nt, Homo Sapiens
aagugggaagccagcagcugcccgcucccucc

SEQ ID NO: 186043 - RNA, 32 nt, Homo Sapiens
agauugugugagaaacaaaggcaugugagguc

SEQ ID NO: 186044 - RNA, 32 nt, Homo Sapiens
ucagaccaaacugauucauguacaaauaauaa

SEQ ID NO: 186045 - RNA, 32 nt, Homo Sapiens
gcuacacccggcucugucucuuucaaagcaca

SEQ ID NO: 186046 - RNA, 32 nt, Homo Sapiens
auucacccuacauuccucuccucuucacuagc

SEQ ID NO: 186047 - RNA, 32 nt, Homo Sapiens
acaagaaaaaagaaugcaagauuuaaaaauga

SEQ ID NO: 186048 - RNA, 32 nt, Homo Sapiens
ucuucagaccuagaauaauacuagucuuauaa

SEQ ID NO: 186049 - RNA, 32 nt, Homo Sapiens
aauuguuguaaaucucuguaugcacuuugcuu

SEQ ID NO: 186050 - RNA, 32 nt, Homo Sapiens
gcaggcuggggagcuccucccccucgaaaaag

SEQ ID NO: 186051 - RNA, 32 nt, Homo Sapiens
acccaccacauuaaaacaaaagucugagaugg

SEQ ID NO: 186052 - RNA, 32 nt, Homo Sapiens
auuuucuuuaccaguauccuuaaucaaguagg

SEQ ID NO: 186053 - RNA, 32 nt, Homo Sapiens
cagcuacuucggggacugaggugggaggauca

SEQ ID NO: 186054 - RNA, 32 nt, Homo Sapiens
aacauuuuuuaaaucgugauuucggccuauuu

SEQ ID NO: 186055 - RNA, 32 nt, Homo Sapiens
gaagaggcggugcagaauggcgcacggguucg

SEQ ID NO: 186056 - RNA, 31 nt, Homo Sapiens
aaaaaacaaaccaaaaacggauaugauaaac

SEQ ID NO: 186057 - RNA, 32 nt, Homo Sapiens
ugaucguagaucucaaaggaucuugcuuuaac

SEQ ID NO: 186058 - RNA, 32 nt, Homo Sapiens
cuguguauaauaaugaagaaacacauggucaa

SEQ ID NO: 186059 - RNA, 32 nt, Homo Sapiens
auuguguaugcuucaucaccuauauuaggcaa

SEQ ID NO: 186060 - RNA, 32 nt, Homo Sapiens
uuaaaacaaauuacaguuuuguauggauuuuu

SEQ ID NO: 186061 - RNA, 32 nt, Homo Sapiens
cuuggccaagccagcugcaaaccuggccagag

SEQ ID NO: 186062 - RNA, 32 nt, Homo Sapiens
acgggugagcagagccuggagccccgggcagg

SEQ ID NO: 186063 - RNA, 32 nt, Homo Sapiens
gaugccgccgacgcggugcugcugccgccgcu

SEQ ID NO: 186064 - RNA, 32 nt, Homo Sapiens
aaaacauuuuaaaggcuagauuuuuagaauau

SEQ ID NO: 186065 - RNA, 32 nt, Homo Sapiens
ggccggcggcgaagguccgggguggaaucgac

SEQ ID NO: 186066 - RNA, 32 nt, Homo Sapiens
ugggcaacuuccagaauaguuaugacauugau

SEQ ID NO: 186067 - RNA, 32 nt, Homo Sapiens
cuacugccaccgugugcucugcaugcgucacc

SEQ ID NO: 186068 - RNA, 32 nt, Homo Sapiens
ugcuccuggcuacuccaugaucauuaaacacc

SEQ ID NO: 186069 - RNA, 32 nt, Homo Sapiens
uuggaguccuggucccccuccucccuggcccu

SEQ ID NO: 186070 - RNA, 32 nt, Homo Sapiens
uagaggacauugcuuuuucacuuccaaggugc

SEQ ID NO: 186071 - RNA, 31 nt, Homo Sapiens
uuuaaaacaaauuuaaaggaucuguuaauuc

SEQ ID NO: 186072 - RNA, 32 nt, Homo Sapiens
gugaagucaggagaucgagaccauccuggcua

SEQ ID NO: 186073 - RNA, 32 nt, Homo Sapiens
acgcugcuccgagcuccgcgucgcgucgcgua

SEQ ID NO: 186074 - RNA, 32 nt, Homo Sapiens
gggcagaggagggcggggacucggggcggcuc

SEQ ID NO: 186075 - RNA, 32 nt, Homo Sapiens
ucauuugcuguaaucaguuuuuaaaagucaga

SEQ ID NO: 186076 - RNA, 32 nt, Homo Sapiens
guuucuuuuucaucaguagauuucugggcucc

SEQ ID NO: 186077 - RNA, 32 nt, Homo Sapiens
uagcuuuugucuaggcaacuagugguuauacu

SEQ ID NO: 186078 - RNA, 32 nt, Homo Sapiens
aagccagugcuugggcucugcugcugggaguc

SEQ ID NO: 186079 - RNA, 32 nt, Homo Sapiens
agccugugggaaacggggcuugccagagacac

SEQ ID NO: 186080 - RNA, 32 nt, Homo Sapiens
aaaagcugaggcugacaauaauuuaagcaaaa

SEQ ID NO: 186081 - RNA, 30 nt, Homo Sapiens
agcugggccgagccgucgccggcgccacgc

SEQ ID NO: 186082 - RNA, 32 nt, Homo Sapiens
auuucgauucagaauauuucaaauuuagcaau

SEQ ID NO: 186083 - RNA, 32 nt, Homo Sapiens
agcuuggacuuagugggaguguuuacaccaug

SEQ ID NO: 186084 - RNA, 32 nt, Homo Sapiens
ggagugacagaaaaaucaggaacugaaagaua

SEQ ID NO: 186085 - RNA, 32 nt, Homo Sapiens
cuccgcuuucccuguucuucuguuucucacac

SEQ ID NO: 186086 - RNA, 32 nt, Homo Sapiens
uugaacauuuaguuauuuuuuagcucauaguu

SEQ ID NO: 186087 - RNA, 32 nt, Homo Sapiens
auagacccgagccuccaggagggcgcccugug

SEQ ID NO: 186088 - RNA, 32 nt, Homo Sapiens
uuucugccuccauuuuaaucaugcauaaaaug

SEQ ID NO: 186089 - RNA, 32 nt, Homo Sapiens
accaggggccagggcugcggcgacagcagcuc

SEQ ID NO: 186090 - RNA, 32 nt, Homo Sapiens
cacaauugcuaaugguuguuuucugugagucc

SEQ ID NO: 186091 - RNA, 32 nt, Homo Sapiens
cuggccaucaggugcugcugacgcugccgcuc

SEQ ID NO: 186092 - RNA, 32 nt, Homo Sapiens
caugcauuacauaaagugugacaacuucaaaa

SEQ ID NO: 186093 - RNA, 32 nt, Homo Sapiens
uauucaguauaaauuuuaugaagcuuguuucu

SEQ ID NO: 186094 - RNA, 32 nt, Homo Sapiens
cagccggcgcugccuccggcuuccuggggaag

SEQ ID NO: 186095 - RNA, 32 nt, Homo Sapiens
aucuucccaucccuuuuucccauucugcaaau

SEQ ID NO: 186096 - RNA, 32 nt, Homo Sapiens
uugacauuguaauaaacuuguuauuaaaaaaa

SEQ ID NO: 186097 - RNA, 32 nt, Homo Sapiens
auaaggaaggcacaagacguucuccucugccc

SEQ ID NO: 186098 - RNA, 32 nt, Homo Sapiens
uuucuuuaauaaauauuuuucuacuuguaaca

SEQ ID NO: 186099 - RNA, 32 nt, Homo Sapiens
caccagaaaaccuucauauaaaaauucaggcc

SEQ ID NO: 186100 - RNA, 32 nt, Homo Sapiens
uauacugcuguaaaguauuuuuugaagagaga

SEQ ID NO: 186101 - RNA, 32 nt, Homo Sapiens
cuuucuuccagcggcaggcugugcaccagagg

SEQ ID NO: 186102 - RNA, 32 nt, Homo Sapiens
uucugcuguggcucugcccuuuccagguugag

SEQ ID NO: 186103 - RNA, 32 nt, Homo Sapiens
cggacuccggugcgcagccaguggagcucuuu

SEQ ID NO: 186104 - RNA, 32 nt, Homo Sapiens
cauuugguuggcaagggcucucguccuguccu

SEQ ID NO: 186105 - RNA, 32 nt, Homo Sapiens
uugacuugaugagggaggguuauacguacaac

SEQ ID NO: 186106 - RNA, 32 nt, Homo Sapiens
ccagacaaggccuuggagcccacacaugggau

SEQ ID NO: 186107 - RNA, 32 nt, Homo Sapiens
cuccuagagcagagucugcugcugucuguucu

SEQ ID NO: 186108 - RNA, 32 nt, Homo Sapiens
uaaacuuaaagcuauuugaggacuguguagua

SEQ ID NO: 186109 - RNA, 32 nt, Homo Sapiens
aguuuuguaaaagaaaucauguccauacacuu

SEQ ID NO: 186110 - RNA, 32 nt, Homo Sapiens
ugcccacuuucagaguugaacucuuuaagccc

SEQ ID NO: 186111 - RNA, 32 nt, Homo Sapiens
aaaucacacuacuauuugaagcucauuuucua

SEQ ID NO: 186112 - RNA, 32 nt, Homo Sapiens
cuaaaacccaaguuuucugaauccuaaucuag

SEQ ID NO: 186113 - RNA, 32 nt, Homo Sapiens
acccucaaacuccucaauaaacgcuuucucug

SEQ ID NO: 186114 - RNA, 31 nt, Homo Sapiens
guggcgcagcgcagcgucccuagcaccgagc

SEQ ID NO: 186115 - RNA, 32 nt, Homo Sapiens
aaccuaagauccuaccuuaguuuaccucucag

SEQ ID NO: 186116 - RNA, 32 nt, Homo Sapiens
uuuaaaguugucuacaaaucugagccuuguaa

SEQ ID NO: 186117 - RNA, 32 nt, Homo Sapiens
uuagaaaguggaaaugagguugcuauggaaac

SEQ ID NO: 186118 - RNA, 32 nt, Homo Sapiens
caccaacggcccccuugcccuugcagaggcag

SEQ ID NO: 186119 - RNA, 32 nt, Homo Sapiens
cccauccccucuauaucccaccccugaagucu

SEQ ID NO: 186120 - RNA, 32 nt, Homo Sapiens
ucuggauuguuguauucaguacucagcauugc

SEQ ID NO: 186121 - RNA, 32 nt, Homo Sapiens
ccccagcccggccaucugcgccccacagcccc

SEQ ID NO: 186122 - RNA, 32 nt, Homo Sapiens
gagagauguuuuuaguagcagaauuaacacag

SEQ ID NO: 186123 - RNA, 31 nt, Homo Sapiens
cuccagcuccacugccgcccccgcgcccacc

SEQ ID NO: 186124 - RNA, 27 nt, Homo Sapiens
ugccccuugugcuucugguaugcauga

SEQ ID NO: 186125 - RNA, 32 nt, Homo Sapiens
gauaccuaacauucuuuuuuuuuuuuuuuuuu

SEQ ID NO: 186126 - RNA, 32 nt, Homo Sapiens
ugccuguaaucucagcacuuugggaggccggg

SEQ ID NO: 186127 - RNA, 32 nt, Homo Sapiens
agaaguuccagccccagcuccugcucaggaac

SEQ ID NO: 186128 - RNA, 32 nt, Homo Sapiens
cucaucccagggcagcgagagacugggcaugu

SEQ ID NO: 186129 - RNA, 32 nt, Homo Sapiens
ggggaggguggcagugggaggggcuguaugga

SEQ ID NO: 186130 - RNA, 32 nt, Homo Sapiens
uauguugcuauuacuauugcaggaauauaaau

SEQ ID NO: 186131 - RNA, 32 nt, Homo Sapiens
acagauauucacauuugauuauagaaacuuaa

SEQ ID NO: 186132 - RNA, 32 nt, Homo Sapiens
caaauuuaauguauauauguauauagguagua

SEQ ID NO: 186133 - RNA, 32 nt, Homo Sapiens
guauaauaguccuaauaagugauuucaaguau

SEQ ID NO: 186134 - RNA, 31 nt, Homo Sapiens
uagaggauguuucaugggaucccagccacgc

SEQ ID NO: 186135 - RNA, 32 nt, Homo Sapiens
aaaucguaaccuaugaaguuuauuuucuauuu

SEQ ID NO: 186136 - RNA, 32 nt, Homo Sapiens
gaaaccauggcaccuuccagagccguggucuc

SEQ ID NO: 186137 - RNA, 32 nt, Homo Sapiens
uuaaccugauauucuuuuuaauuguuuuaaau

SEQ ID NO: 186138 - RNA, 32 nt, Homo Sapiens
gaaacaaagcaucuaucucugaaagcuguuug

SEQ ID NO: 186139 - RNA, 32 nt, Homo Sapiens
aaacuagaauagccaguauuuauguuuuuuau

SEQ ID NO: 186140 - RNA, 32 nt, Homo Sapiens
ccauccccaucccugcucaguguaaacccagg

SEQ ID NO: 186141 - RNA, 32 nt, Homo Sapiens
ggcacuuccuuccuguuaaaccccuguuaacu

SEQ ID NO: 186142 - RNA, 32 nt, Homo Sapiens
ugcagaacuuugggggaccugagaggggagug

SEQ ID NO: 186143 - RNA, 32 nt, Homo Sapiens
acugaggauugugacuccauggagccuggccc

SEQ ID NO: 186144 - RNA, 32 nt, Homo Sapiens
ugggaccuuuucugccccugccccuuagcuac

SEQ ID NO: 186145 - RNA, 32 nt, Homo Sapiens
agaucuggaaccuggugaggugccuucugauu

SEQ ID NO: 186146 - RNA, 31 nt, Homo Sapiens
gcuggccauaagaaaaauauauauugaugug

SEQ ID NO: 186147 - RNA, 32 nt, Homo Sapiens
acgcguccggcagcugcagcagcuacgggagu

SEQ ID NO: 186148 - RNA, 32 nt, Homo Sapiens
aacauugccauacugcuuuuuaucuugaugaa

SEQ ID NO: 186149 - RNA, 32 nt, Homo Sapiens
caugugacuaaaaaugcaucuggcuacuuuuu

SEQ ID NO: 186150 - RNA, 32 nt, Homo Sapiens
cauagaacaugugucuaucugcuuuugccuac

SEQ ID NO: 186151 - RNA, 32 nt, Homo Sapiens
gggccuuccuuccucaugucugcccugagcgc

SEQ ID NO: 186152 - RNA, 28 nt, Homo Sapiens
ugagauuguauuucuauguguuuguauc

SEQ ID NO: 186153 - RNA, 32 nt, Homo Sapiens
ucuuagggaaaggggacuuuguacugggguac

SEQ ID NO: 186154 - RNA, 32 nt, Homo Sapiens
uugccugcaccugauggcgaugaaucaggaag

SEQ ID NO: 186155 - RNA, 32 nt, Homo Sapiens
guugagagcagguucauuaaauuuguaagaug

SEQ ID NO: 186156 - RNA, 32 nt, Homo Sapiens
ucuuucuuuuuuucuuuuuuuuuuuuuuuuuu

SEQ ID NO: 186157 - RNA, 30 nt, Homo Sapiens
aaaggagacugugcugcagcuuuggcucuc

SEQ ID NO: 186158 - RNA, 32 nt, Homo Sapiens
uuuuuccugcuuccucuuauuaaugaacgagu

SEQ ID NO: 186159 - RNA, 32 nt, Homo Sapiens
ggcccccugugcuguuugaggcgugaaacuca

SEQ ID NO: 186160 - RNA, 32 nt, Homo Sapiens
gugguuccugcguccuuccccagggcaggaga

SEQ ID NO: 186161 - RNA, 32 nt, Homo Sapiens
aaccagcgguccuauuugaauccugggguuag

SEQ ID NO: 186162 - RNA, 32 nt, Homo Sapiens
aucaggaaguagagaaagugcagccuccaggc

SEQ ID NO: 186163 - RNA, 32 nt, Homo Sapiens
ccuucugcccguuuuucuugaccuagauaaau

SEQ ID NO: 186164 - RNA, 32 nt, Homo Sapiens
cggcugcggcggucuggcucgggaggcguucc

SEQ ID NO: 186165 - RNA, 32 nt, Homo Sapiens
ugagcuggagggccucuagggaaccguggggc

SEQ ID NO: 186166 - RNA, 32 nt, Homo Sapiens
caacuauuucuuuaggccuguuuggcuccgaa

SEQ ID NO: 186167 - RNA, 32 nt, Homo Sapiens
gaggcuugaagaacaguaagugcugacgucua

SEQ ID NO: 186168 - RNA, 32 nt, Homo Sapiens
auauagauucagaaagguucauauuuuucuaa

SEQ ID NO: 186169 - RNA, 27 nt, Homo Sapiens
agcugugcugcuuucagcccuccugug

SEQ ID NO: 186170 - RNA, 32 nt, Homo Sapiens
gggcagacaucauugguguuauggccaggguc

SEQ ID NO: 186171 - RNA, 32 nt, Homo Sapiens
agagucucgcucugucacccaggcuguaguac

SEQ ID NO: 186172 - RNA, 32 nt, Homo Sapiens
gaacuaaacacaucuguaaaacuaaauauagc

SEQ ID NO: 186173 - RNA, 32 nt, Homo Sapiens
gcgacccccucccccaaccccucucccuuuuc

SEQ ID NO: 186174 - RNA, 32 nt, Homo Sapiens
cuggcuaggaccaggcccuggcucugcagcca

SEQ ID NO: 186175 - RNA, 32 nt, Homo Sapiens
uuucaguaacugcuguacacacagcaacucag

SEQ ID NO: 186176 - RNA, 32 nt, Homo Sapiens
gcgcggacggcugggcugcugcugggcggccg

SEQ ID NO: 186177 - RNA, 32 nt, Homo Sapiens
uaccucgggggacaccucuccuccccacuugu

SEQ ID NO: 186178 - RNA, 32 nt, Homo Sapiens
uagccucccagguagcugggaauacaagcgug

SEQ ID NO: 186179 - RNA, 32 nt, Homo Sapiens
auccccacaguuugguccuccucccagcuacc

SEQ ID NO: 186180 - RNA, 32 nt, Homo Sapiens
uucucucagaagauuaaacaucuccuagaagg

SEQ ID NO: 186181 - RNA, 32 nt, Homo Sapiens
guuauggaagcagugaacccacaauccacaau

SEQ ID NO: 186182 - RNA, 32 nt, Homo Sapiens
cgcccucgcuccacgcaacaccugcugcugcc

SEQ ID NO: 186183 - RNA, 29 nt, Homo Sapiens
ccuuuaggacgucucugcugacgguccca

SEQ ID NO: 186184 - RNA, 32 nt, Homo Sapiens
cugccgcagcgcgggcggucagcgcgcagccc

SEQ ID NO: 186185 - RNA, 32 nt, Homo Sapiens
caauacaaucaucaaacacugcucaccucaau

SEQ ID NO: 186186 - RNA, 32 nt, Homo Sapiens
gugggcauuugaugcgggagguggguggugug

SEQ ID NO: 186187 - RNA, 32 nt, Homo Sapiens
gccacuucuaacuuuuuguauuaugaauuugg

SEQ ID NO: 186188 - RNA, 31 nt, Homo Sapiens
caggugcggcgcagccaacccugagccugca

SEQ ID NO: 186189 - RNA, 32 nt, Homo Sapiens
cuuacaaauaguuuuuaaauucuggagaaaua

SEQ ID NO: 186190 - RNA, 32 nt, Homo Sapiens
cccauuucacuccagccugggcgacaagagug

SEQ ID NO: 186191 - RNA, 32 nt, Homo Sapiens
gaaacauucaaauugcaaauggaaacuugaaa

SEQ ID NO: 186192 - RNA, 32 nt, Homo Sapiens
caagcaccccucugcccuuucucuguccuuau

SEQ ID NO: 186193 - RNA, 32 nt, Homo Sapiens
aauaguuguucuuuauuucaguuuacuucaug

SEQ ID NO: 186194 - RNA, 32 nt, Homo Sapiens
ggccgccacaccggcgcuggcucccugcccgg

SEQ ID NO: 186195 - RNA, 32 nt, Homo Sapiens
ggcuauggcccugugugacuccaggucccagg

SEQ ID NO: 186196 - RNA, 32 nt, Homo Sapiens
ugacacacauucaugucaacauauguagcaaa

SEQ ID NO: 186197 - RNA, 31 nt, Homo Sapiens
accugagcccucuccauucagaguuguucuc

SEQ ID NO: 186198 - RNA, 32 nt, Homo Sapiens
aggcugggcccgaacuccuggaccucaaguga

SEQ ID NO: 186199 - RNA, 32 nt, Homo Sapiens
uuccugcuccgucuuugggguccucaaggcug

SEQ ID NO: 186200 - RNA, 32 nt, Homo Sapiens
cuguccacucugcucagggccgcggccgacau

SEQ ID NO: 186201 - RNA, 32 nt, Homo Sapiens
cugacggcccacuccaccuggagcuguccccu

SEQ ID NO: 186202 - RNA, 32 nt, Homo Sapiens
cugagauggcaccucccuuucagccauucuuc

SEQ ID NO: 186203 - RNA, 32 nt, Homo Sapiens
accaugccuggcuaauuuuuuauauuuuuagu

SEQ ID NO: 186204 - RNA, 32 nt, Homo Sapiens
uuaccacgaucagggccuggaacaggcagagu

SEQ ID NO: 186205 - RNA, 32 nt, Homo Sapiens
agcaaauggcacaaagguugcuuuuuagugga

SEQ ID NO: 186206 - RNA, 32 nt, Homo Sapiens
uguggacgaggaggaugcgguaggggcccuca

SEQ ID NO: 186207 - RNA, 32 nt, Homo Sapiens
caugcugcagagggcugaaggaggcgggggug

SEQ ID NO: 186208 - RNA, 32 nt, Homo Sapiens
gugggggcgcgccggucucccggagcgggacc

SEQ ID NO: 186209 - RNA, 32 nt, Homo Sapiens
uuuuuuuguuuuugguuuuuuaugguuuuuua

SEQ ID NO: 186210 - RNA, 30 nt, Homo Sapiens
gcgucugguggcggcggcgugauguucucg

SEQ ID NO: 186211 - RNA, 32 nt, Homo Sapiens
agcuugcuguacaaaggcaacagcaacuuaaa

SEQ ID NO: 186212 - RNA, 32 nt, Homo Sapiens
ccugagucgacucugcgccgcccgccgcgaug

SEQ ID NO: 186213 - RNA, 32 nt, Homo Sapiens
agagcgggccccgcccugaaggggcaccgugg

SEQ ID NO: 186214 - RNA, 32 nt, Homo Sapiens
cccgucuggucuggcugaagaaugggaaggug

SEQ ID NO: 186215 - RNA, 32 nt, Homo Sapiens
aacuguggcugacaccaauaaacaguaugaag

SEQ ID NO: 186216 - RNA, 32 nt, Homo Sapiens
gccaggccgggcggcguuguuggcgggggccc

SEQ ID NO: 186217 - RNA, 32 nt, Homo Sapiens
acaacaaauuaaaaacaaaaacaacucaugcc

SEQ ID NO: 186218 - RNA, 32 nt, Homo Sapiens
guccgucgcucgccugggugccuggagcugag

SEQ ID NO: 186219 - RNA, 32 nt, Homo Sapiens
aauuacuguacccaccugaggaagcagugugg

SEQ ID NO: 186220 - RNA, 32 nt, Homo Sapiens
uguccuuugugauuuuuuguuaauuggcuaau

SEQ ID NO: 186221 - RNA, 32 nt, Homo Sapiens
cggcgaaggaggagcgcggccggggcgaugcg

SEQ ID NO: 186222 - RNA, 32 nt, Homo Sapiens
uugcaacugcuguuccagauaugacuacugau

SEQ ID NO: 186223 - RNA, 32 nt, Homo Sapiens
gagacaaaaaagacauucccucaaagacuacu

SEQ ID NO: 186224 - RNA, 32 nt, Homo Sapiens
agauugcucauuggaacgcaaugccaccuggu

SEQ ID NO: 186225 - RNA, 32 nt, Homo Sapiens
agcugucacucacugagcacuggccauagccc

SEQ ID NO: 186226 - RNA, 32 nt, Homo Sapiens
caggcggcuggaggggugaggggggugcggcg

SEQ ID NO: 186227 - RNA, 32 nt, Homo Sapiens
uuaucaggcuguguguuaauucugggccaguc

SEQ ID NO: 186228 - RNA, 32 nt, Homo Sapiens
cagacuauucucuggagaaaaauaaaacggaa

SEQ ID NO: 186229 - RNA, 32 nt, Homo Sapiens
ggcauuccauucccuguugccauccucacugu

SEQ ID NO: 186230 - RNA, 32 nt, Homo Sapiens
agagguuuaauuggcucacaguucuucaggau

SEQ ID NO: 186231 - RNA, 32 nt, Homo Sapiens
gcgauugguugaggcgccgccggggguuugaa

SEQ ID NO: 186232 - RNA, 32 nt, Homo Sapiens
gccugccuguuucugucugggugucugaguuc

SEQ ID NO: 186233 - RNA, 32 nt, Homo Sapiens
aagcacuggggauauggcaggaaucaaaauaa

SEQ ID NO: 186234 - RNA, 31 nt, Homo Sapiens
acccccaugugcaggacuccaagggcuuugc

SEQ ID NO: 186235 - RNA, 32 nt, Homo Sapiens
gagaagaaccccggggaacuugcccagcacaa

SEQ ID NO: 186236 - RNA, 32 nt, Homo Sapiens
gccaaaucuguggugcaaccacuaucuccagu

SEQ ID NO: 186237 - RNA, 31 nt, Homo Sapiens
agcuggccuaccugccugccccaggccaugc

SEQ ID NO: 186238 - RNA, 32 nt, Homo Sapiens
gcuguggaccccuucaggugcacuauaauggg

SEQ ID NO: 186239 - RNA, 32 nt, Homo Sapiens
cuguguuucuuucauuuuuaauaaaaaauuaa

SEQ ID NO: 186240 - RNA, 32 nt, Homo Sapiens
cccccaauuguucaccugagaacuguguucag

SEQ ID NO: 186241 - RNA, 32 nt, Homo Sapiens
aaucaugaauguuugugauauuuuaaauaucu

SEQ ID NO: 186242 - RNA, 32 nt, Homo Sapiens
ucccuuccuggacaaggcccccugccuuugcc

SEQ ID NO: 186243 - RNA, 32 nt, Homo Sapiens
ugaagguucaucaaguaacaaacauaccacuc

SEQ ID NO: 186244 - RNA, 32 nt, Homo Sapiens
gugauuuuuuaaaagaauuugaauuuggcuuc

SEQ ID NO: 186245 - RNA, 32 nt, Homo Sapiens
aaagucuuuucucaucaguagaaucuauuuug

SEQ ID NO: 186246 - RNA, 31 nt, Homo Sapiens
cuagugacgccccagaguccacguggaggaa

SEQ ID NO: 186247 - RNA, 32 nt, Homo Sapiens
auucaguauuaaaggggggagggggagggggu

SEQ ID NO: 186248 - RNA, 32 nt, Homo Sapiens
cccgggugcccccagguccaugcagacugggg

SEQ ID NO: 186249 - RNA, 32 nt, Homo Sapiens
guggugagaagaacuaaauaaaaggaaacacu

SEQ ID NO: 186250 - RNA, 32 nt, Homo Sapiens
guuuuguacaucagccuucuccugucuccaug

SEQ ID NO: 186251 - RNA, 32 nt, Homo Sapiens
uuguuuuugaacuuauuguuuuguuauuuaag

SEQ ID NO: 186252 - RNA, 32 nt, Homo Sapiens
cgccuccgcccggcucccugggcccugcucca

SEQ ID NO: 186253 - RNA, 32 nt, Homo Sapiens
accagccgcugagucaggauccugucaguucc

SEQ ID NO: 186254 - RNA, 32 nt, Homo Sapiens
caacagcuuaggaugugucccuuucaacucag

SEQ ID NO: 186255 - RNA, 32 nt, Homo Sapiens
guccuugccgugggucauccuugcuguggguc

SEQ ID NO: 186256 - RNA, 32 nt, Homo Sapiens
ccugggacaccgugagccagccaggccuggcc

SEQ ID NO: 186257 - RNA, 32 nt, Homo Sapiens
ggaaaauuuuucugcugcuacuacaguuucac

SEQ ID NO: 186258 - RNA, 32 nt, Homo Sapiens
agggucuuugcaaauauaaucaaguuaagaug

SEQ ID NO: 186259 - RNA, 32 nt, Homo Sapiens
ugacuagaaaauaaauagauaguggccauuuu

SEQ ID NO: 186260 - RNA, 32 nt, Homo Sapiens
gcuccuuccgccucgcggaccccggaagcgcg

SEQ ID NO: 186261 - RNA, 32 nt, Homo Sapiens
guuugcccuucagauuuuagauuucaccaagg

SEQ ID NO: 186262 - RNA, 32 nt, Homo Sapiens
ucggcgggcuggcauccggcccgggggaaagc

SEQ ID NO: 186263 - RNA, 32 nt, Homo Sapiens
aaauggaugguauuuucuuaaaauugugccac

SEQ ID NO: 186264 - RNA, 32 nt, Homo Sapiens
gccuugcagaaucgagguggccccgacuggcc

SEQ ID NO: 186265 - RNA, 32 nt, Homo Sapiens
auuaugccuuauugauaaauagauaaaccaau

SEQ ID NO: 186266 - RNA, 32 nt, Homo Sapiens
gguauucaugaauauaaugauaagcuugauuc

SEQ ID NO: 186267 - RNA, 32 nt, Homo Sapiens
cuggcuguggagggccgggugguggcucugag

SEQ ID NO: 186268 - RNA, 32 nt, Homo Sapiens
auaaauuuguuuuaaccuguuccuuaauggca

SEQ ID NO: 186269 - RNA, 30 nt, Homo Sapiens
gccgcggcucuuggcggcgggagaggcgca

SEQ ID NO: 186270 - RNA, 32 nt, Homo Sapiens
aaguccaacuucagccagaaggaaaaaaguuu

SEQ ID NO: 186271 - RNA, 32 nt, Homo Sapiens
gaaauguguuuguggcauauaggacugugggg

SEQ ID NO: 186272 - RNA, 32 nt, Homo Sapiens
cuucgggagccgcgcgccuucuccggcguccg

SEQ ID NO: 186273 - RNA, 32 nt, Homo Sapiens
cgccuguucucccugucugaagagggagauga

SEQ ID NO: 186274 - RNA, 32 nt, Homo Sapiens
aagagccccuggaugucgaccucucccgcugu

SEQ ID NO: 186275 - RNA, 32 nt, Homo Sapiens
cuaaaaaugugaaaguugaauuuaguagauga

SEQ ID NO: 186276 - RNA, 32 nt, Homo Sapiens
gcuggacuucggggccggggccggggccgugc

SEQ ID NO: 186277 - RNA, 32 nt, Homo Sapiens
ucuuuucauacacuucuuaaaaugugaaaauc

SEQ ID NO: 186278 - RNA, 32 nt, Homo Sapiens
cuggcuuagcagcugcaggcaagcauuaugcu

SEQ ID NO: 186279 - RNA, 32 nt, Homo Sapiens
cccaggcuggagaccccagguccuaggagccu

SEQ ID NO: 186280 - RNA, 32 nt, Homo Sapiens
guuggagugcuuuucacaugagcauuagcccc

SEQ ID NO: 186281 - RNA, 32 nt, Homo Sapiens
ugagaagaaucuggagcuaaaagcagagaugu

SEQ ID NO: 186282 - RNA, 32 nt, Homo Sapiens
ggcagaggcgguguggcucggaggaaccucug

SEQ ID NO: 186283 - RNA, 32 nt, Homo Sapiens
acuccauucuauuugccuggaguuaguauacu

SEQ ID NO: 186284 - RNA, 32 nt, Homo Sapiens
aaaaagcacaagaagcgugagacgccaccauu

SEQ ID NO: 186285 - RNA, 32 nt, Homo Sapiens
ggacugaaaacugcagcagucuggccagcucc

SEQ ID NO: 186286 - RNA, 32 nt, Homo Sapiens
gggaccugggcccugcccuuggcucaccuuuc

SEQ ID NO: 186287 - RNA, 32 nt, Homo Sapiens
cugccaaggggaggaguuggagagcacaguug

SEQ ID NO: 186288 - RNA, 32 nt, Homo Sapiens
cgagaggaauguccauuucuuaaacugccuua

SEQ ID NO: 186289 - RNA, 32 nt, Homo Sapiens
ugcggcucuaugcgguacuaaagagcagaaga

SEQ ID NO: 186290 - RNA, 32 nt, Homo Sapiens
acgcacagaaucucgcagauaguugggacuaa

SEQ ID NO: 186291 - RNA, 32 nt, Homo Sapiens
cugguauuucugcaguuagauaccagaugcac

SEQ ID NO: 186292 - RNA, 32 nt, Homo Sapiens
cguugaaagggaguaguuaguggguaggcaag

SEQ ID NO: 186293 - RNA, 32 nt, Homo Sapiens
uacaugcugagcgcgcacacguaguacaccgc

SEQ ID NO: 186294 - RNA, 32 nt, Homo Sapiens
ggagggguagccagaccauguauaagaauaga

SEQ ID NO: 186295 - RNA, 32 nt, Homo Sapiens
cagcuuucaguuuuagcaaaaauacacgugaa

SEQ ID NO: 186296 - RNA, 32 nt, Homo Sapiens
ccuuguuucgccccacggccaagcccgccgcg

SEQ ID NO: 186297 - RNA, 32 nt, Homo Sapiens
uucggcugcgguacaucucggcacucuagcug

SEQ ID NO: 186298 - RNA, 32 nt, Homo Sapiens
ugucugcugguggcugcugaggccuuggugga

SEQ ID NO: 186299 - RNA, 32 nt, Homo Sapiens
aggcucuguuaucagcugggcagugccagcca

SEQ ID NO: 186300 - RNA, 32 nt, Homo Sapiens
auuuuaguaaggaaacaaacaacuuugugugu

SEQ ID NO: 186301 - RNA, 32 nt, Homo Sapiens
acaucuuggugcaaaaucauuuuuuuacauuu

SEQ ID NO: 186302 - RNA, 32 nt, Homo Sapiens
ugaugaugaugaugaugaugaugauaacuaga

SEQ ID NO: 186303 - RNA, 32 nt, Homo Sapiens
ggugagagaggcacagguauuuuugaauaauu

SEQ ID NO: 186304 - RNA, 32 nt, Homo Sapiens
agauggagaaugccuagugguuucuaaaggcc

SEQ ID NO: 186305 - RNA, 32 nt, Homo Sapiens
uaaggaggagguugggggugacugcugcuuau

SEQ ID NO: 186306 - RNA, 32 nt, Homo Sapiens
ccuuuugucaccaguuuguuugcaauccaccu

SEQ ID NO: 186307 - RNA, 32 nt, Homo Sapiens
uaauaaaauucauaguuaccaaugcaauaaaa

SEQ ID NO: 186308 - RNA, 32 nt, Homo Sapiens
uuugcugauguucaauuaguaaaauuaauggc

SEQ ID NO: 186309 - RNA, 32 nt, Homo Sapiens
uuucucuuucucccuuuuuuuuuuaaauuuuu

SEQ ID NO: 186310 - RNA, 32 nt, Homo Sapiens
cgccugucaucucagcacuuugggaggccaag

SEQ ID NO: 186311 - RNA, 32 nt, Homo Sapiens
uaugccaagcggaaguggaaaauaucacuuuu

SEQ ID NO: 186312 - RNA, 32 nt, Homo Sapiens
auuugccucuucugcccuguucuguuuuuucu

SEQ ID NO: 186313 - RNA, 32 nt, Homo Sapiens
uccucccugugcucagggcuggagagagggug

SEQ ID NO: 186314 - RNA, 32 nt, Homo Sapiens
gcccauuuguaggugguaaaaucaauuguuuu

SEQ ID NO: 186315 - RNA, 32 nt, Homo Sapiens
gagcucaucauucauuuauagauggugccaaa

SEQ ID NO: 186316 - RNA, 32 nt, Homo Sapiens
caggccaugguuccuugccccaugguguccug

SEQ ID NO: 186317 - RNA, 28 nt, Homo Sapiens
uuggaugagugcagcauuauaagaccuu

SEQ ID NO: 186318 - RNA, 32 nt, Homo Sapiens
ugguacuuugccaccuuggagcucccuccuuu

SEQ ID NO: 186319 - RNA, 32 nt, Homo Sapiens
guggacacagaaaugcacaggggacacuuacg

SEQ ID NO: 186320 - RNA, 32 nt, Homo Sapiens
ggaggacagaggggcgcggagggggcgccugu

SEQ ID NO: 186321 - RNA, 32 nt, Homo Sapiens
auuguagauuggcccuuagaguaucuuuucag

SEQ ID NO: 186322 - RNA, 32 nt, Homo Sapiens
uguucuugaaagagggucacgggucaacaagg

SEQ ID NO: 186323 - RNA, 32 nt, Homo Sapiens
aucaaccugccagcuggccuugugaggagcug

SEQ ID NO: 186324 - RNA, 32 nt, Homo Sapiens
aguggaaaggaugaggaauuugaaagacaggg

SEQ ID NO: 186325 - RNA, 32 nt, Homo Sapiens
caccagauguguccccagauccacagcaggca

SEQ ID NO: 186326 - RNA, 32 nt, Homo Sapiens
cuauuuuccuuccgacugcuguacgguauaaa

SEQ ID NO: 186327 - RNA, 32 nt, Homo Sapiens
uuguacccacugaaugccauuuuuuguguuuu

SEQ ID NO: 186328 - RNA, 32 nt, Homo Sapiens
cuaugguacuaaaaguuuguuuuauuuuauca

SEQ ID NO: 186329 - RNA, 32 nt, Homo Sapiens
gccuccccgccagcgcgccaccaugggcaguc

SEQ ID NO: 186330 - RNA, 32 nt, Homo Sapiens
auuuguguucuuccuuuaaccaaagcaacauc

SEQ ID NO: 186331 - RNA, 32 nt, Homo Sapiens
aaacuguucugauguuguuucuuaauucauua

SEQ ID NO: 186332 - RNA, 32 nt, Homo Sapiens
uccuucgugucucucccaccccggccuccacu

SEQ ID NO: 186333 - RNA, 32 nt, Homo Sapiens
ucgagcaucaaggggacgcugugugugcugca

SEQ ID NO: 186334 - RNA, 32 nt, Homo Sapiens
ccgcacccgccagcaccgcggcaauguccagc

SEQ ID NO: 186335 - RNA, 32 nt, Homo Sapiens
ccuuccaagucugugcccagaauggggggcgg

SEQ ID NO: 186336 - RNA, 32 nt, Homo Sapiens
ccacaaggacaaaguauggauguggcagaguc

SEQ ID NO: 186337 - RNA, 32 nt, Homo Sapiens
ugcaagcacccgucuacccagcucuaacuugu

SEQ ID NO: 186338 - RNA, 32 nt, Homo Sapiens
acaucaguuacucugaagggcaucaugcaucu

SEQ ID NO: 186339 - RNA, 32 nt, Homo Sapiens
aacauucaacacaaaaucauggaggugcucua

SEQ ID NO: 186340 - RNA, 32 nt, Homo Sapiens
aaaggagcuggauuccuucucugaggcucuga

SEQ ID NO: 186341 - RNA, 32 nt, Homo Sapiens
uuaucaacccuaucuaucuccaaauacagucc

SEQ ID NO: 186342 - RNA, 32 nt, Homo Sapiens
cccagccccaucccaaacccuucagugccaaa

SEQ ID NO: 186343 - RNA, 32 nt, Homo Sapiens
cugagcagccgccagcugggagcacuggugug

SEQ ID NO: 186344 - RNA, 32 nt, Homo Sapiens
ugcacuguugaugcgcuggaaugccuucucuu

SEQ ID NO: 186345 - RNA, 32 nt, Homo Sapiens
cuugaccauuuucucucuccuuuugcuuagau

SEQ ID NO: 186346 - RNA, 32 nt, Homo Sapiens
uuuuaaaagauaaacauuauauugugaaccau

SEQ ID NO: 186347 - RNA, 32 nt, Homo Sapiens
gggcugggagucuaaugucaccccccuagacc

SEQ ID NO: 186348 - RNA, 32 nt, Homo Sapiens
cgccgggcucccggccggccugacccggaagg

SEQ ID NO: 186349 - RNA, 32 nt, Homo Sapiens
gcagcugugugggcugcagauuuccugugugg

SEQ ID NO: 186350 - RNA, 32 nt, Homo Sapiens
guuuuuauuuagagaugggguuuugccauguu

SEQ ID NO: 186351 - RNA, 31 nt, Homo Sapiens
caugcaaugcugagcacugggguggugagcu

SEQ ID NO: 186352 - RNA, 32 nt, Homo Sapiens
ggcagcgacugcauccgacauaaaggaacagu

SEQ ID NO: 186353 - RNA, 32 nt, Homo Sapiens
cgguccucgucgcgaccggcccgggccgcagg

SEQ ID NO: 186354 - RNA, 32 nt, Homo Sapiens
uugauuucuuauuuauuauuagacauuacuac

SEQ ID NO: 186355 - RNA, 32 nt, Homo Sapiens
cucccagaggcccguggaggagcccaccagcc

SEQ ID NO: 186356 - RNA, 32 nt, Homo Sapiens
cccucaccucccacccacugauuauuaauaaa

SEQ ID NO: 186357 - RNA, 32 nt, Homo Sapiens
uccuugcgccggcucauguucccuuuaguuua

SEQ ID NO: 186358 - RNA, 32 nt, Homo Sapiens
gcccgcgggcugaggcagcggcuguggcggcg

SEQ ID NO: 186359 - RNA, 32 nt, Homo Sapiens
acuccaaguucugguacaacuccaccagcggc

SEQ ID NO: 186360 - RNA, 32 nt, Homo Sapiens
ucucgcuuugggucuuuuuuuuguuucuuucu

SEQ ID NO: 186361 - RNA, 32 nt, Homo Sapiens
caagaguguggugcgaucuccaggcuuuuguc

SEQ ID NO: 186362 - RNA, 32 nt, Homo Sapiens
aucucugccgacaucauagaaauuguucaagu

SEQ ID NO: 186363 - RNA, 32 nt, Homo Sapiens
aauguuaacuuucuaacacauuucaugcauag

SEQ ID NO: 186364 - RNA, 32 nt, Homo Sapiens
uugggagaaauauuuguuuaauaacuucuaau

SEQ ID NO: 186365 - RNA, 32 nt, Homo Sapiens
uggacucuagaagaugcucugauucaagagga

SEQ ID NO: 186366 - RNA, 32 nt, Homo Sapiens
caauuuaaaacguuuuuuuuuauugcagguug

SEQ ID NO: 186367 - RNA, 32 nt, Homo Sapiens
ugcgcgucccccggcucuggcgcugcaggggu

SEQ ID NO: 186368 - RNA, 32 nt, Homo Sapiens
guuuuugcgucagcuuccuuuuagaggagaug

SEQ ID NO: 186369 - RNA, 32 nt, Homo Sapiens
uugaguaauaaaucuuaucuuuucaaggcacc

SEQ ID NO: 186370 - RNA, 32 nt, Homo Sapiens
ccuaugcagaucuccagacccuucuacccauc

SEQ ID NO: 186371 - RNA, 32 nt, Homo Sapiens
uaauaauggaaugauugaaauaauaaacauuu

SEQ ID NO: 186372 - RNA, 32 nt, Homo Sapiens
cacuuuuacagaaauuuucugaagaugcaaua

SEQ ID NO: 186373 - RNA, 32 nt, Homo Sapiens
acauuucuguagcucagcuuuaauuuuccagu

SEQ ID NO: 186374 - RNA, 31 nt, Homo Sapiens
aguaugugcccagucaucuuuuuucacaggu

SEQ ID NO: 186375 - RNA, 32 nt, Homo Sapiens
gcuucaugguguuccuggaaggcagaugagcu

SEQ ID NO: 186376 - RNA, 32 nt, Homo Sapiens
uucuacugggaucucaucaucauccuuaguca

SEQ ID NO: 186377 - RNA, 32 nt, Homo Sapiens
uuauuaaauuccaaaucaggaaucaaaacugc

SEQ ID NO: 186378 - RNA, 32 nt, Homo Sapiens
guagaaagcaaugguucuuguuucuuauuuuu

SEQ ID NO: 186379 - RNA, 32 nt, Homo Sapiens
uguuuugcaaaauaaaacuuguuuugucacaa

SEQ ID NO: 186380 - RNA, 32 nt, Homo Sapiens
ucagauguacacaacuuccuuaaagucaaaug

SEQ ID NO: 186381 - RNA, 32 nt, Homo Sapiens
cucccaugaaaacaccguagucugcuuuuccu

SEQ ID NO: 186382 - RNA, 32 nt, Homo Sapiens
aagccugcucguuuaaaaguuguuuguuguug

SEQ ID NO: 186383 - RNA, 32 nt, Homo Sapiens
ccucacugccagcccaccuccccuacagcccu

SEQ ID NO: 186384 - RNA, 32 nt, Homo Sapiens
cggaucugaccgagccgccgccgcgggaugga

SEQ ID NO: 186385 - RNA, 32 nt, Homo Sapiens
uggugaaaauuccagaaauaugcaucacuucc

SEQ ID NO: 186386 - RNA, 32 nt, Homo Sapiens
uaacaucuaaaauuauuauauuuugaagcaag

SEQ ID NO: 186387 - RNA, 32 nt, Homo Sapiens
agaccucugguuuucuuugaccucaagauuga

SEQ ID NO: 186388 - RNA, 32 nt, Homo Sapiens
gagcugaugacaggauuaaaggaauacacaca

SEQ ID NO: 186389 - RNA, 32 nt, Homo Sapiens
gaaggcggcugcugggcagagccgguggcaag

SEQ ID NO: 186390 - RNA, 32 nt, Homo Sapiens
ugccgcacccucaacauaggccauguggggag

SEQ ID NO: 186391 - RNA, 32 nt, Homo Sapiens
ugggcucauggucagaguucccaguuaaguaa

SEQ ID NO: 186392 - RNA, 32 nt, Homo Sapiens
augaggggauccuggggcuuugccugcaggag

SEQ ID NO: 186393 - RNA, 32 nt, Homo Sapiens
aauaacauuuuuguuucuuuuuuuuaaacaaa

SEQ ID NO: 186394 - RNA, 32 nt, Homo Sapiens
ucaacaaguaguuggugaugauagcgugcccu

SEQ ID NO: 186395 - RNA, 31 nt, Homo Sapiens
agauguccucgaguaaaguccauugugagga

SEQ ID NO: 186396 - RNA, 32 nt, Homo Sapiens
guaggcucuaggcuccaaaguaccuggguauu

SEQ ID NO: 186397 - RNA, 32 nt, Homo Sapiens
uucccgccggcgaggauuguuaaaaugagucu

SEQ ID NO: 186398 - RNA, 32 nt, Homo Sapiens
ccggacucgccgcuccuucccucagucagaga

SEQ ID NO: 186399 - RNA, 32 nt, Homo Sapiens
ccccucuguauauauaaucuaccucugccucu

SEQ ID NO: 186400 - RNA, 32 nt, Homo Sapiens
gcacaguugcuuaguacaggcuucucacuucc

SEQ ID NO: 186401 - RNA, 32 nt, Homo Sapiens
gggguuggggagggaugaagggcgagugaauc

SEQ ID NO: 186402 - RNA, 32 nt, Homo Sapiens
uucaggauguuugauagagacacgcggaggga

SEQ ID NO: 186403 - RNA, 32 nt, Homo Sapiens
agucuuguggguuuucuguuugaaaaggaguc

SEQ ID NO: 186404 - RNA, 32 nt, Homo Sapiens
gccgugccugugccuggagggcuggucugcga

SEQ ID NO: 186405 - RNA, 32 nt, Homo Sapiens
guggaaauuggaagcuggauauugugauaccu

SEQ ID NO: 186406 - RNA, 28 nt, Homo Sapiens
cccauggaggcgcugaacacggcgcagg

SEQ ID NO: 186407 - RNA, 32 nt, Homo Sapiens
ccugcgugugguuuuggcaacccugggugugg

SEQ ID NO: 186408 - RNA, 32 nt, Homo Sapiens
cagaugccccacugaauugaagucaagaaaug

SEQ ID NO: 186409 - RNA, 32 nt, Homo Sapiens
gggcggcggcggcaggaugaacagcaucaaga

SEQ ID NO: 186410 - RNA, 32 nt, Homo Sapiens
gugaggucaggaguucgagacuagccuggcca

SEQ ID NO: 186411 - RNA, 32 nt, Homo Sapiens
gaggcaaacuuguguuuauccaaaccugaucc

SEQ ID NO: 186412 - RNA, 32 nt, Homo Sapiens
gaagcgcgugucugcugucugugccagugcuc

SEQ ID NO: 186413 - RNA, 32 nt, Homo Sapiens
gccacgcagcccagaccacaccugccacgguc

SEQ ID NO: 186414 - RNA, 32 nt, Homo Sapiens
cuagcagguagacugcuguaggauuucaaauu

SEQ ID NO: 186415 - RNA, 32 nt, Homo Sapiens
cagucuugcugagacucugucuggauuugccu

SEQ ID NO: 186416 - RNA, 32 nt, Homo Sapiens
gcaccgccccgcacgcucgcucgcucgggaga

SEQ ID NO: 186417 - RNA, 32 nt, Homo Sapiens
gugggagaacacacucuggaauucucuauucu

SEQ ID NO: 186418 - RNA, 32 nt, Homo Sapiens
agguugugccuugcucucggcggccguguccu

SEQ ID NO: 186419 - RNA, 32 nt, Homo Sapiens
aaaaugaaggauuuaauuugcuuuugcuccua

SEQ ID NO: 186420 - RNA, 32 nt, Homo Sapiens
gaugaacacacagauauguguaaacgcauucu

SEQ ID NO: 186421 - RNA, 30 nt, Homo Sapiens
uaggagcucugcucaaagccagacguaucc

SEQ ID NO: 186422 - RNA, 32 nt, Homo Sapiens
gcaggacugcagagcagauggcagaugcacau

SEQ ID NO: 186423 - RNA, 32 nt, Homo Sapiens
gcuugggcucugccgcuuuugcaaaagccaag

SEQ ID NO: 186424 - RNA, 32 nt, Homo Sapiens
ugccaggggaggaggagaagccagcaggcacc

SEQ ID NO: 186425 - RNA, 32 nt, Homo Sapiens
cgaugacgucagcucuuguugccaaccucccc

SEQ ID NO: 186426 - RNA, 32 nt, Homo Sapiens
guucuguucacuuuuccggggcacaaguuuuu

SEQ ID NO: 186427 - RNA, 32 nt, Homo Sapiens
uggaaucuuuugccucucccagccaccuccuc

SEQ ID NO: 186428 - RNA, 32 nt, Homo Sapiens
cccucucugugcccucccccgccccccgaacc

SEQ ID NO: 186429 - RNA, 32 nt, Homo Sapiens
ccugcgcgcgguucgcuccgggggagggagga

SEQ ID NO: 186430 - RNA, 32 nt, Homo Sapiens
uuucuauugcugcugcaaccaacagcuacaga

SEQ ID NO: 186431 - RNA, 32 nt, Homo Sapiens
ugcuugcccugccccaggcagcccacccacgc

SEQ ID NO: 186432 - RNA, 32 nt, Homo Sapiens
aagaucaagaauuuauaguauuucaggauuga

SEQ ID NO: 186433 - RNA, 32 nt, Homo Sapiens
ugccuucuaccuuguuugaaaccugaauccua

SEQ ID NO: 186434 - RNA, 32 nt, Homo Sapiens
aaggaguucauuuuaugaagauauuugcuuua

SEQ ID NO: 186435 - RNA, 32 nt, Homo Sapiens
ugcggagcucggcgccggggcccaugcccgug

SEQ ID NO: 186436 - RNA, 32 nt, Homo Sapiens
augccggcgucccgcgcuucaggagcaggugc

SEQ ID NO: 186437 - RNA, 32 nt, Homo Sapiens
ccuccugagcgcggugaccagagcuuagaggc

SEQ ID NO: 186438 - RNA, 32 nt, Homo Sapiens
caaaaacuaauagaagacugggugugguggcu

SEQ ID NO: 186439 - RNA, 32 nt, Homo Sapiens
auaagcuucauuuuugauauauuguuuacagc

SEQ ID NO: 186440 - RNA, 32 nt, Homo Sapiens
acguuguucaaauauaucaaaggauuucucuc

SEQ ID NO: 186441 - RNA, 32 nt, Homo Sapiens
cugaugugugugcaugagcuguauguacacau

SEQ ID NO: 186442 - RNA, 32 nt, Homo Sapiens
cucaccucgccgcuccucccgggccgccaucc

SEQ ID NO: 186443 - RNA, 32 nt, Homo Sapiens
uuucuggaaaggaaacauugccauguaacuau

SEQ ID NO: 186444 - RNA, 32 nt, Homo Sapiens
ucaccgaccuucccuagccgcuggaagauugu

SEQ ID NO: 186445 - RNA, 32 nt, Homo Sapiens
gcucaggcuccagcccuccagugagccgccuc

SEQ ID NO: 186446 - RNA, 32 nt, Homo Sapiens
auguucaugagguggagcaguuccuguguugc

SEQ ID NO: 186447 - RNA, 32 nt, Homo Sapiens
guguuaucugacaagauaguuauuuaagaaac

SEQ ID NO: 186448 - RNA, 32 nt, Homo Sapiens
uacagagaaaauuuuuuguuaaaaccaaguga

SEQ ID NO: 186449 - RNA, 31 nt, Homo Sapiens
uugcuuuugugcuuaggcaagugcaaaauac

SEQ ID NO: 186450 - RNA, 32 nt, Homo Sapiens
uguuuauuuuuacuuuuagaauugguccuaug

SEQ ID NO: 186451 - RNA, 32 nt, Homo Sapiens
agaagcaaauauuuucacuuugaaagaaaacu

SEQ ID NO: 186452 - RNA, 32 nt, Homo Sapiens
ccgcagggcugcucuggccgggacccgcuggc

SEQ ID NO: 186453 - RNA, 32 nt, Homo Sapiens
caaauggcaaggauuuuugcuaccaauauuug

SEQ ID NO: 186454 - RNA, 32 nt, Homo Sapiens
aaaaaugcauauauucacauucacagaaacau

SEQ ID NO: 186455 - RNA, 32 nt, Homo Sapiens
caccuuaagccaccacccucagccacaauuug

SEQ ID NO: 186456 - RNA, 32 nt, Homo Sapiens
gccaggccgugugcuccuggaggcuggcuggc

SEQ ID NO: 186457 - RNA, 32 nt, Homo Sapiens
ggcuccauugggagagcagcugccaacucagc

SEQ ID NO: 186458 - RNA, 32 nt, Homo Sapiens
cugcccgggagauguggacgccgggcggaccc

SEQ ID NO: 186459 - RNA, 31 nt, Homo Sapiens
gcgccgcgcggacuccugccccgaggguccg

SEQ ID NO: 186460 - RNA, 32 nt, Homo Sapiens
agacucucgcugucccugugcugcugguauuu

SEQ ID NO: 186461 - RNA, 32 nt, Homo Sapiens
uuagaaacuuuuucuuuuugaaugucugaaag

SEQ ID NO: 186462 - RNA, 32 nt, Homo Sapiens
guauugcaaaaauagauaauaauuuauauaac

SEQ ID NO: 186463 - RNA, 32 nt, Homo Sapiens
ugugcucuuaugaaguuaacuguucacagaug

SEQ ID NO: 186464 - RNA, 32 nt, Homo Sapiens
ggccucagauccugggaccccugggccgugcc

SEQ ID NO: 186465 - RNA, 32 nt, Homo Sapiens
cgcgggcaggugccgggacgcugggccuggcg

SEQ ID NO: 186466 - RNA, 32 nt, Homo Sapiens
gaacacacuagcgcuacugaaaagauacuuau

SEQ ID NO: 186467 - RNA, 32 nt, Homo Sapiens
gggcccugcgucaccccgccucgggaaagcug

SEQ ID NO: 186468 - RNA, 32 nt, Homo Sapiens
auuaguuucuuagaucaagaaaaggaaauguu

SEQ ID NO: 186469 - RNA, 32 nt, Homo Sapiens
aguuuccaguuuuugaugaauuuuggauugua

SEQ ID NO: 186470 - RNA, 32 nt, Homo Sapiens
agggcuggcccagccugugcuccccgggcugc

SEQ ID NO: 186471 - RNA, 32 nt, Homo Sapiens
guagacagaccccacccucacccaggccagcu

SEQ ID NO: 186472 - RNA, 32 nt, Homo Sapiens
gccuucucuucucauaugcaauaucagucauu

SEQ ID NO: 186473 - RNA, 32 nt, Homo Sapiens
gggaguauugguuuuuggagucuuuuugguac

SEQ ID NO: 186474 - RNA, 32 nt, Homo Sapiens
uuuuugaauagagacuccauggaguuggucau

SEQ ID NO: 186475 - RNA, 32 nt, Homo Sapiens
ccugcugcauguuguacagaggggaugugguc

SEQ ID NO: 186476 - RNA, 32 nt, Homo Sapiens
guguguaucaguaguccauuuauuuuccugaa

SEQ ID NO: 186477 - RNA, 32 nt, Homo Sapiens
uuuugagcugucuucagacaagaagauuaaau

SEQ ID NO: 186478 - RNA, 32 nt, Homo Sapiens
acaagggcaaggaaauaagaaugacgguggag

SEQ ID NO: 186479 - RNA, 32 nt, Homo Sapiens
augaaggaagguaaauaaaaaugcuaaauaga

SEQ ID NO: 186480 - RNA, 32 nt, Homo Sapiens
aaaaauuggaaacuaaaaguguguacuagguu

SEQ ID NO: 186481 - RNA, 32 nt, Homo Sapiens
agccugucgagcgguagcugcccaucagcuau

SEQ ID NO: 186482 - RNA, 32 nt, Homo Sapiens
gcggcagcuguggaagcucaggcgcugcgcgu

SEQ ID NO: 186483 - RNA, 32 nt, Homo Sapiens
aguguuucagauauuucucuaauuauguacaa

SEQ ID NO: 186484 - RNA, 32 nt, Homo Sapiens
ucuagcucucggaggggcgaucaugagaaacc

SEQ ID NO: 186485 - RNA, 32 nt, Homo Sapiens
ucuguagaauaugaccuauuaaaagaaaaucu

SEQ ID NO: 186486 - RNA, 32 nt, Homo Sapiens
auguaaaaaaaauuauuauuauugaugcaaug

SEQ ID NO: 186487 - RNA, 32 nt, Homo Sapiens
ugcgagagccugugagcucauuguaacuucau

SEQ ID NO: 186488 - RNA, 32 nt, Homo Sapiens
gugcucagguccucacgcugcagacgcccccu

SEQ ID NO: 186489 - RNA, 32 nt, Homo Sapiens
uuuagcacuuuacuuccauuagguuccuuuag

SEQ ID NO: 186490 - RNA, 32 nt, Homo Sapiens
ccagcgccccaugcgcaagcgucuuucugccc

SEQ ID NO: 186491 - RNA, 32 nt, Homo Sapiens
cuacguaggugaacuuuuuuuucuaacuucag

SEQ ID NO: 186492 - RNA, 32 nt, Homo Sapiens
cuggguccuugccauggaugaaugugguuccc

SEQ ID NO: 186493 - RNA, 32 nt, Homo Sapiens
aucaagagcaggguuuacaaaauauauuaagg

SEQ ID NO: 186494 - RNA, 32 nt, Homo Sapiens
uggagggagacccagcauagccaggccaguau

SEQ ID NO: 186495 - RNA, 32 nt, Homo Sapiens
agagucugaacaggugcucugcugcuagaaac

SEQ ID NO: 186496 - RNA, 32 nt, Homo Sapiens
ccuggggucucuuuaauuaagguuauaaugcu

SEQ ID NO: 186497 - RNA, 32 nt, Homo Sapiens
ccuugcgggcaggccccaagggcgcgucaugg

SEQ ID NO: 186498 - RNA, 32 nt, Homo Sapiens
gagugcaccugagauuugauaagaucauuaaa

SEQ ID NO: 186499 - RNA, 32 nt, Homo Sapiens
cccagggccccggcagggccacgaguacccgc

SEQ ID NO: 186500 - RNA, 32 nt, Homo Sapiens
gacggauaauaaaccagcuaaaaaauaaaucu

SEQ ID NO: 186501 - RNA, 32 nt, Homo Sapiens
cggccgggucccucuccaccugccgggcggag

SEQ ID NO: 186502 - RNA, 30 nt, Homo Sapiens
agugagauuaucauguacaagagugagauu

SEQ ID NO: 186503 - RNA, 32 nt, Homo Sapiens
ucagccucgggccccaggguucccugggcaca

SEQ ID NO: 186504 - RNA, 32 nt, Homo Sapiens
auccacuuugguuuuaaaaccauucccgaaug

SEQ ID NO: 186505 - RNA, 32 nt, Homo Sapiens
cccuuaccuguuugccagccgugaccacccgc

SEQ ID NO: 186506 - RNA, 32 nt, Homo Sapiens
acuuggucuaugcagcucuucuuccagcaauu

SEQ ID NO: 186507 - RNA, 32 nt, Homo Sapiens
cgaaaacaaaaauuccauaucaaugugccuug

SEQ ID NO: 186508 - RNA, 32 nt, Homo Sapiens
guuauuaggaaaggggcugugcaugugggugc

SEQ ID NO: 186509 - RNA, 32 nt, Homo Sapiens
ucucccaggaggaaguggaggggacaucgcug

SEQ ID NO: 186510 - RNA, 32 nt, Homo Sapiens
ugcaagggaaauaaauccaaagggcauugcgc

SEQ ID NO: 186511 - RNA, 32 nt, Homo Sapiens
ucugaauguacaagaaauuauugcugacuaua

SEQ ID NO: 186512 - RNA, 32 nt, Homo Sapiens
acaaccgcaaacgcaacacaggcuacacagau

SEQ ID NO: 186513 - RNA, 32 nt, Homo Sapiens
uuguggaugauacauuuuaaccuucuagaaac

SEQ ID NO: 186514 - RNA, 32 nt, Homo Sapiens
ugaaggggauaugcuccccauaaauaccaccu

SEQ ID NO: 186515 - RNA, 32 nt, Homo Sapiens
aacuuacagcuacuauaagauguacuaaggag

SEQ ID NO: 186516 - RNA, 32 nt, Homo Sapiens
gggagucuccgagagaagaaaagcagguggaa

SEQ ID NO: 186517 - RNA, 32 nt, Homo Sapiens
uuugagauggaguuuugcucucguugccaagg

SEQ ID NO: 186518 - RNA, 32 nt, Homo Sapiens
ucuugguggaucuauuuuaugcaugaccuuuu

SEQ ID NO: 186519 - RNA, 32 nt, Homo Sapiens
ggcugaggugagaggagcaagugagcccagga

SEQ ID NO: 186520 - RNA, 32 nt, Homo Sapiens
gccguacucccagcggccccacaccacgaugg

SEQ ID NO: 186521 - RNA, 32 nt, Homo Sapiens
aggucacagucccugaguguuggugcugcugg

SEQ ID NO: 186522 - RNA, 32 nt, Homo Sapiens
cucgagcccggcgcugcugcccgggggucucc

SEQ ID NO: 186523 - RNA, 32 nt, Homo Sapiens
gccccucccgcuugcuccccagcccacccacc

SEQ ID NO: 186524 - RNA, 32 nt, Homo Sapiens
ugucagcagagccgcccugcaccaccaugugc

SEQ ID NO: 186525 - RNA, 32 nt, Homo Sapiens
cuuuuauguaaaucauuauaaauaauguucau

SEQ ID NO: 186526 - RNA, 31 nt, Homo Sapiens
ucuucuuuggggcuggaacagaauuaaauuu

SEQ ID NO: 186527 - RNA, 32 nt, Homo Sapiens
ucaucuccagggccccaccucagaucaaagca

SEQ ID NO: 186528 - RNA, 32 nt, Homo Sapiens
uccuuagcucagagcauccccggagcaucuua

SEQ ID NO: 186529 - RNA, 32 nt, Homo Sapiens
ggcucccauuuucucugcuggcguuucugcug

SEQ ID NO: 186530 - RNA, 32 nt, Homo Sapiens
uaugggacagagucuuuuuuuuuuaaugugga

SEQ ID NO: 186531 - RNA, 32 nt, Homo Sapiens
gcggggcucgcugcccccugcugccgacugcg

SEQ ID NO: 186532 - RNA, 32 nt, Homo Sapiens
uuaccccaacgacaccuccuccccuuuccaac

SEQ ID NO: 186533 - RNA, 32 nt, Homo Sapiens
ccuccggggacaccggccccgcccucagccca

SEQ ID NO: 186534 - RNA, 32 nt, Homo Sapiens
ugauguaaauguuuuacuuucaacuguguucu

SEQ ID NO: 186535 - RNA, 32 nt, Homo Sapiens
auuuucaugggaauguaguuaucaccaagucc

SEQ ID NO: 186536 - RNA, 32 nt, Homo Sapiens
aucugaauuccuuccucaaaaaacagacacuc

SEQ ID NO: 186537 - RNA, 32 nt, Homo Sapiens
gaccacaggcaggccguguacugcaccacugg

SEQ ID NO: 186538 - RNA, 32 nt, Homo Sapiens
cgcaucuccuccacgcucaaugaugaaugcug

SEQ ID NO: 186539 - RNA, 32 nt, Homo Sapiens
cuuguggacaccuugauuuugguccagugaga

SEQ ID NO: 186540 - RNA, 32 nt, Homo Sapiens
cgccuugaagaaagaggccuaggagagcagcc

SEQ ID NO: 186541 - RNA, 32 nt, Homo Sapiens
gcacaggacagaggcaauauacaacucugggu

SEQ ID NO: 186542 - RNA, 32 nt, Homo Sapiens
auaaaaaucugugccaucauggugauuuuauc

SEQ ID NO: 186543 - RNA, 27 nt, Homo Sapiens
gcccucuccuucuuucuccuucaaggu

SEQ ID NO: 186544 - RNA, 32 nt, Homo Sapiens
aucacaauuucuguucagcgggcaggaauagg

SEQ ID NO: 186545 - RNA, 32 nt, Homo Sapiens
gcacgaggcucgggucaaaugcgcgccucgga

SEQ ID NO: 186546 - RNA, 32 nt, Homo Sapiens
uugcuguuacuaaaauacaugcacugcucauu

SEQ ID NO: 186547 - RNA, 32 nt, Homo Sapiens
ucuccgaccccaccccaccccauccagugucc

SEQ ID NO: 186548 - RNA, 32 nt, Homo Sapiens
ucuucucaaucccagaaauauuuuacuggcau

SEQ ID NO: 186549 - RNA, 32 nt, Homo Sapiens
acagcagggcuuuggccaagcccuugucuuca

SEQ ID NO: 186550 - RNA, 32 nt, Homo Sapiens
ucagugcguggggggcgcagggcccccgaugc

SEQ ID NO: 186551 - RNA, 32 nt, Homo Sapiens
gagccagacgcugcccccggcgcggggagaag

SEQ ID NO: 186552 - RNA, 32 nt, Homo Sapiens
uguuuauggaaauauuaagaacauuuuauaaa

SEQ ID NO: 186553 - RNA, 32 nt, Homo Sapiens
aauguggaaaaaauauuuuaaacuacugauug

SEQ ID NO: 186554 - RNA, 32 nt, Homo Sapiens
accaguuuaguauuuucuuaguguauuuaacc

SEQ ID NO: 186555 - RNA, 32 nt, Homo Sapiens
uuaggcuuauacaucuacauuuaaaagcaucu

SEQ ID NO: 186556 - RNA, 32 nt, Homo Sapiens
guggagcuccugugccagcagcugcgccccgg

SEQ ID NO: 186557 - RNA, 32 nt, Homo Sapiens
ggccaggcgugguggcucaaaugccuguaauc

SEQ ID NO: 186558 - RNA, 32 nt, Homo Sapiens
ugaucgccgcggcgaugccggaggaggguucg

SEQ ID NO: 186559 - RNA, 32 nt, Homo Sapiens
ugggcuggccccagccuuccucuucuuccugc

SEQ ID NO: 186560 - RNA, 32 nt, Homo Sapiens
ccucguccucgucgucguccucgggcuccagg

SEQ ID NO: 186561 - RNA, 32 nt, Homo Sapiens
uagaauucuuagaguuuuuggcaaauuuaaaa

SEQ ID NO: 186562 - RNA, 32 nt, Homo Sapiens
ccuggcggccgcgaccccggcucccgccccgg

SEQ ID NO: 186563 - RNA, 32 nt, Homo Sapiens
cuguagguuucauuucuaugaggaaucgagga

SEQ ID NO: 186564 - RNA, 32 nt, Homo Sapiens
guugcguuguaauaaaccugaggcugggaagu

SEQ ID NO: 186565 - RNA, 32 nt, Homo Sapiens
uuuuaauggauauuuguaaaucuuccacuuaa

SEQ ID NO: 186566 - RNA, 32 nt, Homo Sapiens
ucagggucuccuuucuuucucacuucugucuu

SEQ ID NO: 186567 - RNA, 32 nt, Homo Sapiens
ugaaucccauccccaagaaucucaucaaccag

SEQ ID NO: 186568 - RNA, 32 nt, Homo Sapiens
cacagaauuccuggacccaugcgguggcuccg

SEQ ID NO: 186569 - RNA, 32 nt, Homo Sapiens
cagacgauacugugauaaaugcaucaaagucu

SEQ ID NO: 186570 - RNA, 32 nt, Homo Sapiens
aggugccugauguugaagaaguaaauuuauau

SEQ ID NO: 186571 - RNA, 32 nt, Homo Sapiens
ugacacacagucaaaucauacaugggcuguca

SEQ ID NO: 186572 - RNA, 32 nt, Homo Sapiens
ccucaaacauggaagaugaaagggcaggggau

SEQ ID NO: 186573 - RNA, 32 nt, Homo Sapiens
aaauaggaacagaguucuuguccuuuaguccc

SEQ ID NO: 186574 - RNA, 32 nt, Homo Sapiens
ggaaaagagauuacagacacagaaaaugucag

SEQ ID NO: 186575 - RNA, 32 nt, Homo Sapiens
acggguuucccucggcguuagucccuagccgc

SEQ ID NO: 186576 - RNA, 32 nt, Homo Sapiens
gacgccugcccuccccagagcacugguugcag

SEQ ID NO: 186577 - RNA, 32 nt, Homo Sapiens
aacacuguucucugcccuccaagaccuucucc

SEQ ID NO: 186578 - RNA, 32 nt, Homo Sapiens
cccuuucaaaaguguuuguaaaccaaguucaa

SEQ ID NO: 186579 - RNA, 32 nt, Homo Sapiens
cuacgugaccuuuaguccucuaccucagagcc

SEQ ID NO: 186580 - RNA, 32 nt, Homo Sapiens
cagauccugccccguggccgcggccgucucgu

SEQ ID NO: 186581 - RNA, 32 nt, Homo Sapiens
uagugacaauguggggggaggggggaggggug

SEQ ID NO: 186582 - RNA, 32 nt, Homo Sapiens
gagcuggggugcuggggugcggggaaguuggg

SEQ ID NO: 186583 - RNA, 32 nt, Homo Sapiens
gcggucgcaccucuucuguccaggccucggcc

SEQ ID NO: 186584 - RNA, 32 nt, Homo Sapiens
aagauaaaacaauggaggugaugaggaggaau

SEQ ID NO: 186585 - RNA, 32 nt, Homo Sapiens
caacaaaaaaucagaaaagagccuugacuguc

SEQ ID NO: 186586 - RNA, 32 nt, Homo Sapiens
augccuguaucccagcacuuugggaggccaag

SEQ ID NO: 186587 - RNA, 32 nt, Homo Sapiens
aggcgggucccaggcccggcccggagcgaguc

SEQ ID NO: 186588 - RNA, 32 nt, Homo Sapiens
acaaaggcaaagucaaauggggaccagaauaa

SEQ ID NO: 186589 - RNA, 32 nt, Homo Sapiens
agggugugcaggggcugcuggccaagcugcug

SEQ ID NO: 186590 - RNA, 32 nt, Homo Sapiens
gagcagccaagggcuuccugagcaagccacug

SEQ ID NO: 186591 - RNA, 32 nt, Homo Sapiens
gacacuucuguaaaugugauuggauuguuuga

SEQ ID NO: 186592 - RNA, 32 nt, Homo Sapiens
gcacggagccagccuuccacuuuucccagugg

SEQ ID NO: 186593 - RNA, 32 nt, Homo Sapiens
uccggcugcccccgaaggcgcugcccaccccg

SEQ ID NO: 186594 - RNA, 32 nt, Homo Sapiens
guuucggagacgggaccgggccgcuagauggg

SEQ ID NO: 186595 - RNA, 32 nt, Homo Sapiens
cuuaagucuuuuaauauguuuaauuuucuaag

SEQ ID NO: 186596 - RNA, 32 nt, Homo Sapiens
cgaauuugauaaaauaauccaugcuucauggu

SEQ ID NO: 186597 - RNA, 32 nt, Homo Sapiens
cuacugaaauaaaauaugcauuuuaagauaaa

SEQ ID NO: 186598 - RNA, 32 nt, Homo Sapiens
gacggccgagcgcggcacacacgacggccguu

SEQ ID NO: 186599 - RNA, 32 nt, Homo Sapiens
aaagaucguuuuuaaaaggcaagaaacaaaag

SEQ ID NO: 186600 - RNA, 32 nt, Homo Sapiens
uacuauagggacuguaguaucuaugacguagc

SEQ ID NO: 186601 - RNA, 32 nt, Homo Sapiens
uuugagaaacuucuuaacaauuacaaucgagc

SEQ ID NO: 186602 - RNA, 32 nt, Homo Sapiens
ugaaggacaagacuuccuggcauccccaucag

SEQ ID NO: 186603 - RNA, 32 nt, Homo Sapiens
aggcaguugaggaggagggagcgcuugagggg

SEQ ID NO: 186604 - RNA, 32 nt, Homo Sapiens
ugagaaggaaagcuucuuucugggcagccaga

SEQ ID NO: 186605 - RNA, 31 nt, Homo Sapiens
caguauuugucaacauagaauuugccgauuu

SEQ ID NO: 186606 - RNA, 32 nt, Homo Sapiens
augcacaggaggagggacgcaggacgcaagac

SEQ ID NO: 186607 - RNA, 30 nt, Homo Sapiens
ccuucguggcccgugcccugcgcauccgca

SEQ ID NO: 186608 - RNA, 32 nt, Homo Sapiens
uauagcuuguucauuucuuuuguuuuuaguuu

SEQ ID NO: 186609 - RNA, 32 nt, Homo Sapiens
gugggguacucgggaagcuggagcgggccggc

SEQ ID NO: 186610 - RNA, 32 nt, Homo Sapiens
ccgucggcguguguuuugggguugccaucggc

SEQ ID NO: 186611 - RNA, 32 nt, Homo Sapiens
ugaacgcacaguguauguggaguuacuuccca

SEQ ID NO: 186612 - RNA, 31 nt, Homo Sapiens
gggagggagggccgccugcccgcgccacagc

SEQ ID NO: 186613 - RNA, 32 nt, Homo Sapiens
cccauuccuggacuccucccaccucucacccc

SEQ ID NO: 186614 - RNA, 32 nt, Homo Sapiens
ggugggaaccccggcuggcguccgguaggggg

SEQ ID NO: 186615 - RNA, 32 nt, Homo Sapiens
uggggagaagacuucuuagccagcuugauguu

SEQ ID NO: 186616 - RNA, 32 nt, Homo Sapiens
ccacauccggggccagcuccggcguguguuca

SEQ ID NO: 186617 - RNA, 32 nt, Homo Sapiens
cagcuuucaguuuuuguuuuuguuuuuuaacc

SEQ ID NO: 186618 - RNA, 32 nt, Homo Sapiens
ccuccggugcgcccucagcagugacccucgug

SEQ ID NO: 186619 - RNA, 32 nt, Homo Sapiens
uugagcuuuuauuuguuagaaaucucucuugg

SEQ ID NO: 186620 - RNA, 32 nt, Homo Sapiens
auuucauuuuuccuauauaguagaaaacacga

SEQ ID NO: 186621 - RNA, 32 nt, Homo Sapiens
augauaagucucacucaagauuuuuuauguau

SEQ ID NO: 186622 - RNA, 32 nt, Homo Sapiens
caccagcgcuuugccaagaugggauggggagg

SEQ ID NO: 186623 - RNA, 32 nt, Homo Sapiens
cuagaauagaaagucacuaaugguuuacguuc

SEQ ID NO: 186624 - RNA, 32 nt, Homo Sapiens
gagggugggccugggaagggaccgcggccuga

SEQ ID NO: 186625 - RNA, 32 nt, Homo Sapiens
gcaccauuuuuguaggccugcauuguauuaua

SEQ ID NO: 186626 - RNA, 32 nt, Homo Sapiens
aaauacuuauauauuucuauuacaaagcagug

SEQ ID NO: 186627 - RNA, 32 nt, Homo Sapiens
caacacuuucccuuuuuucccaaaaugaguag

SEQ ID NO: 186628 - RNA, 32 nt, Homo Sapiens
augcugaauaugcuucuggacucaugucuccc

SEQ ID NO: 186629 - RNA, 32 nt, Homo Sapiens
uggcaggucgucaagagaacugugucauucca

SEQ ID NO: 186630 - RNA, 32 nt, Homo Sapiens
ccuuaaaaugaugagucuauauuaucuagcuu

SEQ ID NO: 186631 - RNA, 32 nt, Homo Sapiens
ucuacuuuuaguucuuuuuuuuguuuuuuuuu

SEQ ID NO: 186632 - RNA, 32 nt, Homo Sapiens
ccggauccucgccgcccucccuaggccgcccc

SEQ ID NO: 186633 - RNA, 32 nt, Homo Sapiens
gauggaggcucacucugucacccaggcuggag

SEQ ID NO: 186634 - RNA, 32 nt, Homo Sapiens
cgcuuuggaaauuuauuccaguuuucagccua

SEQ ID NO: 186635 - RNA, 32 nt, Homo Sapiens
ugcuuugaaggcggaggcuccauguugucccc

SEQ ID NO: 186636 - RNA, 32 nt, Homo Sapiens
gcggcauccgagggcugggccggcgcccuggg

SEQ ID NO: 186637 - RNA, 32 nt, Homo Sapiens
uuuggcaauacauuucuguuuucuagguaauu

SEQ ID NO: 186638 - RNA, 32 nt, Homo Sapiens
gcucggguugggcuugccacugccuggaacau

SEQ ID NO: 186639 - RNA, 32 nt, Homo Sapiens
gcacucgggcgcggagggagcggcggcaggcu

SEQ ID NO: 186640 - RNA, 32 nt, Homo Sapiens
ucuaauccgggagcggcugcugccagcggagg

SEQ ID NO: 186641 - RNA, 32 nt, Homo Sapiens
cccaggacucggccccauggggacgccgccgg

SEQ ID NO: 186642 - RNA, 32 nt, Homo Sapiens
cugaguccccauucccccuuuauuuuccuuuu

SEQ ID NO: 186643 - RNA, 32 nt, Homo Sapiens
ggggcugggccuaagcuggugcccuggugcgg

SEQ ID NO: 186644 - RNA, 32 nt, Homo Sapiens
cccugugcuuugcuugucucaaauggcucggu

SEQ ID NO: 186645 - RNA, 32 nt, Homo Sapiens
acagucuuuacuauauuagguuuauaaacagu

SEQ ID NO: 186646 - RNA, 32 nt, Homo Sapiens
ggcguuaaaaaauuaucugacaguuacauggu

SEQ ID NO: 186647 - RNA, 32 nt, Homo Sapiens
uuugugacuuuuuuuuuuuuuaaauuuaaauc

SEQ ID NO: 186648 - RNA, 32 nt, Homo Sapiens
uuuaaauagaaagcacuucaaaacuaaaauac

SEQ ID NO: 186649 - RNA, 32 nt, Homo Sapiens
agauggggguggcaagggggagacgggugggg

SEQ ID NO: 186650 - RNA, 32 nt, Homo Sapiens
gcauuucaaagcaaauacagacaucuacagca

SEQ ID NO: 186651 - RNA, 32 nt, Homo Sapiens
ggaugauggaccgccggacucuuuucugcagc

SEQ ID NO: 186652 - RNA, 32 nt, Homo Sapiens
ucagaggcacugggcauuccuggcaccaugga

SEQ ID NO: 186653 - RNA, 32 nt, Homo Sapiens
gggcguguaucuagcuaacagcagccauuaac

SEQ ID NO: 186654 - RNA, 32 nt, Homo Sapiens
ccuccuggguucaagcaguucucccgccucag

SEQ ID NO: 186655 - RNA, 32 nt, Homo Sapiens
uaaggccaagacuggguagauuuuaaagauuc

SEQ ID NO: 186656 - RNA, 32 nt, Homo Sapiens
agagggagggagaggaucgugaggucgaagag

SEQ ID NO: 186657 - RNA, 32 nt, Homo Sapiens
auuucuuugaaauuguguacaaugaaaggcuu

SEQ ID NO: 186658 - RNA, 32 nt, Homo Sapiens
gucauuggggaaaauuuagaaacuguaaaugu

SEQ ID NO: 186659 - RNA, 32 nt, Homo Sapiens
cugucuuccagcaauggguggcugggagacca

SEQ ID NO: 186660 - RNA, 32 nt, Homo Sapiens
aagugguggaacauggugcccuggacagcucc

SEQ ID NO: 186661 - RNA, 32 nt, Homo Sapiens
ugauaacaaauuuggaucuacuuacucaaguc

SEQ ID NO: 186662 - RNA, 28 nt, Homo Sapiens
ugaguguugucuaauguagugauuaauc

SEQ ID NO: 186663 - RNA, 32 nt, Homo Sapiens
cccccuccccugugccaggaggaugcaaaaau

SEQ ID NO: 186664 - RNA, 32 nt, Homo Sapiens
ccugcucugcagcuggccaaguauacgagcau

SEQ ID NO: 186665 - RNA, 32 nt, Homo Sapiens
aauuuucugagggcuuuuuuuuuuuuuggugg

SEQ ID NO: 186666 - RNA, 32 nt, Homo Sapiens
cagauuauuuuuccucuggcuccuuggaugua

SEQ ID NO: 186667 - RNA, 31 nt, Homo Sapiens
caaaacuaaaacagacccugaguuaauuggg

SEQ ID NO: 186668 - RNA, 32 nt, Homo Sapiens
ucugucaucuuacugaaaggaauaacacuucu

SEQ ID NO: 186669 - RNA, 32 nt, Homo Sapiens
uugacagcauauaacuuaaagugaaaauguuu

SEQ ID NO: 186670 - RNA, 32 nt, Homo Sapiens
gcgcgguggagggaaacgccuccgucucuaua

SEQ ID NO: 186671 - RNA, 32 nt, Homo Sapiens
agaaugaaaaggagggugauuagccuucauaa

SEQ ID NO: 186672 - RNA, 32 nt, Homo Sapiens
cuuuuacaaaauuuuuaaagaguagguaaugu

SEQ ID NO: 186673 - RNA, 32 nt, Homo Sapiens
guugaaggaacgagagggcaucugcuaaaguu

SEQ ID NO: 186674 - RNA, 32 nt, Homo Sapiens
aguaagggggaggccagagggcucagauggac

SEQ ID NO: 186675 - RNA, 32 nt, Homo Sapiens
ucgcacugcaaaugccgcucucacguaugcgc

SEQ ID NO: 186676 - RNA, 32 nt, Homo Sapiens
acuccugacaaugcaaaaauggucuucaaagc

SEQ ID NO: 186677 - RNA, 32 nt, Homo Sapiens
uugaauuuuuaaaauguguaucguuuaaaaaa

SEQ ID NO: 186678 - RNA, 32 nt, Homo Sapiens
ggguccucccacccucucuccucccaccccac

SEQ ID NO: 186679 - RNA, 32 nt, Homo Sapiens
ggauuuaaaaauuuuaaacaaucauuuacuau

SEQ ID NO: 186680 - RNA, 32 nt, Homo Sapiens
ccucaggcucugccuuggccuggccuugucca

SEQ ID NO: 186681 - RNA, 32 nt, Homo Sapiens
ccaagcuaaucacugcggucuuucagagccgg

SEQ ID NO: 186682 - RNA, 32 nt, Homo Sapiens
gugugacuuacaggucuuuguaucucacacag

SEQ ID NO: 186683 - RNA, 32 nt, Homo Sapiens
uccgguuugcaucacccggaccgggggauuag

SEQ ID NO: 186684 - RNA, 32 nt, Homo Sapiens
aacaucaaagauugugaaagcaaguauaaaua

SEQ ID NO: 186685 - RNA, 30 nt, Homo Sapiens
cgccugcgcgcgccgcuuccguugccauag

SEQ ID NO: 186686 - RNA, 32 nt, Homo Sapiens
cgccuaccagugccgggcgcuccccaccccuc

SEQ ID NO: 186687 - RNA, 32 nt, Homo Sapiens
cauaaaguaauuuuuccaaccuuuuuuuuaaa

SEQ ID NO: 186688 - RNA, 32 nt, Homo Sapiens
ucuucaaguuagcuuuuuggccugcugguuuu

SEQ ID NO: 186689 - RNA, 32 nt, Homo Sapiens
ucacuggcuggccugagcaacaucucgggagu

SEQ ID NO: 186690 - RNA, 32 nt, Homo Sapiens
guuugauguuugucucuaguugucuguguaua

SEQ ID NO: 186691 - RNA, 32 nt, Homo Sapiens
cagagucggaguugagacuggcuuguugcugg

SEQ ID NO: 186692 - RNA, 30 nt, Homo Sapiens
ggugggaugcgggugggggaaaacuggggu

SEQ ID NO: 186693 - RNA, 31 nt, Homo Sapiens
gaagcaggugaugcgcaaccauaguuucaag

SEQ ID NO: 186694 - RNA, 32 nt, Homo Sapiens
auuaaacacacacacacacacacacacauaca

SEQ ID NO: 186695 - RNA, 32 nt, Homo Sapiens
ugcagagaccuuuguuucugugauguaccaac

SEQ ID NO: 186696 - RNA, 32 nt, Homo Sapiens
uaauaaggaaaauauuuuauuaucucaaguua

SEQ ID NO: 186697 - RNA, 32 nt, Homo Sapiens
ccaucugacccugugacaggcauagcucauaa

SEQ ID NO: 186698 - RNA, 32 nt, Homo Sapiens
cagcauuuuugcaucugacauuuuaccuaaaa

SEQ ID NO: 186699 - RNA, 32 nt, Homo Sapiens
ccccaacagauaccagcguguacacggaacuu

SEQ ID NO: 186700 - RNA, 32 nt, Homo Sapiens
gagaaaagcaccacagagagccaggcccugcc

SEQ ID NO: 186701 - RNA, 31 nt, Homo Sapiens
caauacucgcucugccugccuuugcccugcg

SEQ ID NO: 186702 - RNA, 32 nt, Homo Sapiens
guggaguucuuuacaaagggcuuaggcugcau

SEQ ID NO: 186703 - RNA, 32 nt, Homo Sapiens
aauguucaucuguugccuuucuuuccugcugu

SEQ ID NO: 186704 - RNA, 32 nt, Homo Sapiens
ucuuaauuaugguaccucugucuauaggacuu

SEQ ID NO: 186705 - RNA, 32 nt, Homo Sapiens
cucuucccgucccaggcaccaacagcacagag

SEQ ID NO: 186706 - RNA, 32 nt, Homo Sapiens
ggagucacuguuucuugguagcagccaauugg

SEQ ID NO: 186707 - RNA, 32 nt, Homo Sapiens
cccaguaaaaauuguugaaaauguuaaagguc

SEQ ID NO: 186708 - RNA, 32 nt, Homo Sapiens
cccgccuccuuccccuccucggccauggccac

SEQ ID NO: 186709 - RNA, 32 nt, Homo Sapiens
ugccuguaaguguccaagguuaugacaguaaa

SEQ ID NO: 186710 - RNA, 32 nt, Homo Sapiens
gcuucugaugacccggccgccgccgccgcccu

SEQ ID NO: 186711 - RNA, 32 nt, Homo Sapiens
aagcaaagcuaauugcaaauaguauuaggcuc

SEQ ID NO: 186712 - RNA, 32 nt, Homo Sapiens
ggagggugaugaagcagaugaggaaacugaag

SEQ ID NO: 186713 - RNA, 32 nt, Homo Sapiens
gguggcuguggcggcggcagggggauggggac

SEQ ID NO: 186714 - RNA, 32 nt, Homo Sapiens
agggaagaggcaugagugucauuggcagagug

SEQ ID NO: 186715 - RNA, 32 nt, Homo Sapiens
agagacccagcuuuugagagacaggguguggg

SEQ ID NO: 186716 - RNA, 32 nt, Homo Sapiens
guguccacaguuucugaugacauauggcauug

SEQ ID NO: 186717 - RNA, 32 nt, Homo Sapiens
cuggggccggccugggaccaugggcggacaug

SEQ ID NO: 186718 - RNA, 31 nt, Homo Sapiens
uuucugguuccccaaaguguauuuuucucua

SEQ ID NO: 186719 - RNA, 32 nt, Homo Sapiens
ucuauuaaaaauaaaugugagagucguuaaug

SEQ ID NO: 186720 - RNA, 32 nt, Homo Sapiens
acuucuaggugacaaggcaacagguuagcucu

SEQ ID NO: 186721 - RNA, 31 nt, Homo Sapiens
cagccagagucauauauuugaguuaauauau

SEQ ID NO: 186722 - RNA, 32 nt, Homo Sapiens
auggucagccuucagcugggaaucuucaacua

SEQ ID NO: 186723 - RNA, 30 nt, Homo Sapiens
caacgaaucuauuauucccaucuuacagau

SEQ ID NO: 186724 - RNA, 32 nt, Homo Sapiens
uaaagacauuugcuuagcggcuuaccaacaac

SEQ ID NO: 186725 - RNA, 32 nt, Homo Sapiens
gccaagcucacccagaaauaaccccgugcaua

SEQ ID NO: 186726 - RNA, 32 nt, Homo Sapiens
gaggaggaugacuggguccggucgccaggacu

SEQ ID NO: 186727 - RNA, 32 nt, Homo Sapiens
aagauuuacgccauuauaacccuaauauauuc

SEQ ID NO: 186728 - RNA, 31 nt, Homo Sapiens
uugcccaggcuggugucgaauuccuggucuc

SEQ ID NO: 186729 - RNA, 32 nt, Homo Sapiens
uuuuguagcugggaaaagaaaaaaggaaaaaa

SEQ ID NO: 186730 - RNA, 32 nt, Homo Sapiens
aaacuccauggacuuguaaguggguccuguga

SEQ ID NO: 186731 - RNA, 32 nt, Homo Sapiens
caggaagaagacuccuuuuuuauuucgcacua

SEQ ID NO: 186732 - RNA, 32 nt, Homo Sapiens
cugagucuuuaacaggugaguacgcaguucca

SEQ ID NO: 186733 - RNA, 32 nt, Homo Sapiens
ugucuuaaugguuuuuuuuaaaaaaaaaaaaa

SEQ ID NO: 186734 - RNA, 32 nt, Homo Sapiens
ucgaguuccuuccuguguacagcccuucugag

SEQ ID NO: 186735 - RNA, 31 nt, Homo Sapiens
accuuagaaccccagaaccaucuaagacaug

SEQ ID NO: 186736 - RNA, 32 nt, Homo Sapiens
uguggaaugcaagcuucaaggauuuacccagg

SEQ ID NO: 186737 - RNA, 32 nt, Homo Sapiens
agcccgggcccgaccgucauggagcggugcgg

SEQ ID NO: 186738 - RNA, 32 nt, Homo Sapiens
uguaucuauuuuuuacuucuucaauuugaaac

SEQ ID NO: 186739 - RNA, 30 nt, Homo Sapiens
gagcaauggcucucuucacuccguggaagu

SEQ ID NO: 186740 - RNA, 32 nt, Homo Sapiens
ggucacaugcuuuuaaaauaguagcaaguuaa

SEQ ID NO: 186741 - RNA, 32 nt, Homo Sapiens
guuuauggggagauugaaucaacgauuggucu

SEQ ID NO: 186742 - RNA, 32 nt, Homo Sapiens
ccaagugauacugccccugggguguccuaacc

SEQ ID NO: 186743 - RNA, 32 nt, Homo Sapiens
aguuagaaaguaagagaaucaugguucggaua

SEQ ID NO: 186744 - RNA, 32 nt, Homo Sapiens
cuugccgcuuccucagaauauuaacgacgguc

SEQ ID NO: 186745 - RNA, 32 nt, Homo Sapiens
ggagccggcacugcauguuccuggacaccacc

SEQ ID NO: 186746 - RNA, 32 nt, Homo Sapiens
auucuaagaaauaauuaauguuaugauauauc

SEQ ID NO: 186747 - RNA, 32 nt, Homo Sapiens
aaauugauuuguuaugguuacauauuuagcgc

SEQ ID NO: 186748 - RNA, 32 nt, Homo Sapiens
caggaucucagccccaggcugguuguuucuac

SEQ ID NO: 186749 - RNA, 32 nt, Homo Sapiens
cccggggaaugguguggugcuaaucucaacac

SEQ ID NO: 186750 - RNA, 32 nt, Homo Sapiens
uaauggaaaaagauccagucugugguaucaug

SEQ ID NO: 186751 - RNA, 32 nt, Homo Sapiens
aagaaagagcagaguuauucaugacuguucuu

SEQ ID NO: 186752 - RNA, 32 nt, Homo Sapiens
caguuuccccagggaccccaccccccuuuggg

SEQ ID NO: 186753 - RNA, 32 nt, Homo Sapiens
gacuggacugacggcgagugaauucucuagac

SEQ ID NO: 186754 - RNA, 32 nt, Homo Sapiens
gcuaauucuuugaccuguugggagugaggaug

SEQ ID NO: 186755 - RNA, 32 nt, Homo Sapiens
ggagagauugcuaucuagcauuauuacauguu

SEQ ID NO: 186756 - RNA, 32 nt, Homo Sapiens
aaaaucucgacucccagaggcccuuaaacagc

SEQ ID NO: 186757 - RNA, 32 nt, Homo Sapiens
auccagcggcgucuggccuccugggcacugcu

SEQ ID NO: 186758 - RNA, 32 nt, Homo Sapiens
ucgcccgcgggaagaccaggcugcgaccgcga

SEQ ID NO: 186759 - RNA, 32 nt, Homo Sapiens
aaaggccugggcuaugccuccauggugaucgu

SEQ ID NO: 186760 - RNA, 32 nt, Homo Sapiens
ugaaaaguauacacaaagggcucugaagcuca

SEQ ID NO: 186761 - RNA, 32 nt, Homo Sapiens
aauguuucuggaauucuucacuugcuuuugaa

SEQ ID NO: 186762 - RNA, 32 nt, Homo Sapiens
aauuccaggaacuggccuuaggagauccaaau

SEQ ID NO: 186763 - RNA, 32 nt, Homo Sapiens
agggccuagagcaaguagcccugguauaggac

SEQ ID NO: 186764 - RNA, 32 nt, Homo Sapiens
gcccugcacggacccucgucuuuaccacgcuc

SEQ ID NO: 186765 - RNA, 32 nt, Homo Sapiens
gacccuugaguacacauacacacacacacaca

SEQ ID NO: 186766 - RNA, 32 nt, Homo Sapiens
uccugcauuguugggagggagugcaaauuuac

SEQ ID NO: 186767 - RNA, 32 nt, Homo Sapiens
uaucuuccaguagcuuccugagaaaguguaua

SEQ ID NO: 186768 - RNA, 32 nt, Homo Sapiens
agagcuucaaggaaaccacuucacuguuguuc

SEQ ID NO: 186769 - RNA, 32 nt, Homo Sapiens
aggcaggaagcagaaggaagggcaaugggcaa

SEQ ID NO: 186770 - RNA, 32 nt, Homo Sapiens
ggcgggauccggugggagccggagucccgccg

SEQ ID NO: 186771 - RNA, 32 nt, Homo Sapiens
cucucccauuuucucucuugggagcaaugguc

SEQ ID NO: 186772 - RNA, 32 nt, Homo Sapiens
cgccgccuccgccgcugccucaggagcggaac

SEQ ID NO: 186773 - RNA, 32 nt, Homo Sapiens
gagaagaaacaagaagcauaaaggacugcagg

SEQ ID NO: 186774 - RNA, 32 nt, Homo Sapiens
gauaauuuguaucuuuuaauauaaaagaagcu

SEQ ID NO: 186775 - RNA, 32 nt, Homo Sapiens
aaaguggagacggaccugagcccgaggaagag

SEQ ID NO: 186776 - RNA, 32 nt, Homo Sapiens
cuugcccugguuauuagcacaaaacauuacua

SEQ ID NO: 186777 - RNA, 32 nt, Homo Sapiens
auaguuguuuuugucccuuucuuggaaauguu

SEQ ID NO: 186778 - RNA, 32 nt, Homo Sapiens
cuuugcuguuuuaugguugugaagaacgagag

SEQ ID NO: 186779 - RNA, 32 nt, Homo Sapiens
guaucucagugucaagaaucaacaguuccaug

SEQ ID NO: 186780 - RNA, 32 nt, Homo Sapiens
gacaggcuuuuuaugaguaacacacaccauau

SEQ ID NO: 186781 - RNA, 31 nt, Homo Sapiens
auaccuuggaggagaaaguaauuucuaaaua

SEQ ID NO: 186782 - RNA, 32 nt, Homo Sapiens
ccgggcagccucggggucagcggcaccaugaa

SEQ ID NO: 186783 - RNA, 32 nt, Homo Sapiens
cccgcgccaucccccaggauccuccggccugg

SEQ ID NO: 186784 - RNA, 32 nt, Homo Sapiens
auuuauaauaucuauuuuuuguuauuucaaua

SEQ ID NO: 186785 - RNA, 32 nt, Homo Sapiens
agggggcaaggcuggaggaaaauguugagaug

SEQ ID NO: 186786 - RNA, 32 nt, Homo Sapiens
aaagaauaaauuucauuuuuuauugcauuuca

SEQ ID NO: 186787 - RNA, 32 nt, Homo Sapiens
ugguuuuguggcggcugcugcuagagcuggag

SEQ ID NO: 186788 - RNA, 32 nt, Homo Sapiens
ccccuggggcuuuggcuguccucaaugagagu

SEQ ID NO: 186789 - RNA, 32 nt, Homo Sapiens
uuuugugcuuugcaugaacaggggccacguug

SEQ ID NO: 186790 - RNA, 32 nt, Homo Sapiens
ugauucuguggugccaugaaauuuaagguaau

SEQ ID NO: 186791 - RNA, 32 nt, Homo Sapiens
agaugaggacauugaggagaagagacuuaccc

SEQ ID NO: 186792 - RNA, 32 nt, Homo Sapiens
uaagaagaugagaguacacgguuguuaugaac

SEQ ID NO: 186793 - RNA, 32 nt, Homo Sapiens
acuuggccucagcuggcuguauggaaaugcac

SEQ ID NO: 186794 - RNA, 32 nt, Homo Sapiens
agagaguggggcgggaggaagaauuggcaccu

SEQ ID NO: 186795 - RNA, 32 nt, Homo Sapiens
aaaucauuuagugacuuaauucuuucuaaaga

SEQ ID NO: 186796 - RNA, 29 nt, Homo Sapiens
guuaauaaacuuauccaaggucacauuuc

SEQ ID NO: 186797 - RNA, 32 nt, Homo Sapiens
guaaaacaaaaauucugauggaaauaaaugcu

SEQ ID NO: 186798 - RNA, 32 nt, Homo Sapiens
ggagcagcucaccugagagacggagccccggc

SEQ ID NO: 186799 - RNA, 32 nt, Homo Sapiens
auucaucaaagucuacauugaaguguaugcau

SEQ ID NO: 186800 - RNA, 32 nt, Homo Sapiens
caggcgucaccauccaccuucccuucuacaag

SEQ ID NO: 186801 - RNA, 32 nt, Homo Sapiens
aggucccacuaaguggcaacacuugugcuggg

SEQ ID NO: 186802 - RNA, 32 nt, Homo Sapiens
ucaggauccaaguuuaaaaagaaaugguguaa

SEQ ID NO: 186803 - RNA, 32 nt, Homo Sapiens
aaaacauguuuugagucuuacucugugccuga

SEQ ID NO: 186804 - RNA, 32 nt, Homo Sapiens
gcccaguccuggccagugacaagcagucugcu

SEQ ID NO: 186805 - RNA, 32 nt, Homo Sapiens
uauuuuuuaaacaaucccagaauacugugugu

SEQ ID NO: 186806 - RNA, 32 nt, Homo Sapiens
aucaauaaugucaaaugucauuguguaugcau

SEQ ID NO: 186807 - RNA, 32 nt, Homo Sapiens
cuucccauguugagacuauccgaguacuaaag

SEQ ID NO: 186808 - RNA, 32 nt, Homo Sapiens
aucacaacccaccaaaaauagaugccucuccc

SEQ ID NO: 186809 - RNA, 32 nt, Homo Sapiens
aacaccaaagauuucucugaagcagaucucca

SEQ ID NO: 186810 - RNA, 32 nt, Homo Sapiens
uucauggcuaggucuguucgcuccucacguuc

SEQ ID NO: 186811 - RNA, 32 nt, Homo Sapiens
aacacacugaagauuacugcccaauuacuaag

SEQ ID NO: 186812 - RNA, 32 nt, Homo Sapiens
cccugucuuaaagacccugaccucaagugauc

SEQ ID NO: 186813 - RNA, 32 nt, Homo Sapiens
uggugcuggugguugugguggcagaugauauu

SEQ ID NO: 186814 - RNA, 32 nt, Homo Sapiens
caagcaucuuugcagucagaaaacauauauuu

SEQ ID NO: 186815 - RNA, 32 nt, Homo Sapiens
ggaguguucuuggggggaaaaauccgcacaca

SEQ ID NO: 186816 - RNA, 32 nt, Homo Sapiens
ucuguggcucugcaguguuccuccaccccagg

SEQ ID NO: 186817 - RNA, 32 nt, Homo Sapiens
aaguuaugcaugauguaaaaaauacaaacauu

SEQ ID NO: 186818 - RNA, 32 nt, Homo Sapiens
uuuucuuuggcuuuuccaguugugacccguuu

SEQ ID NO: 186819 - RNA, 32 nt, Homo Sapiens
uguacuaguugaugaaggaguuuuuuuuaacc

SEQ ID NO: 186820 - RNA, 31 nt, Homo Sapiens
acaugugccccacgccugcccccagcacucu

SEQ ID NO: 186821 - RNA, 32 nt, Homo Sapiens
caucaccacaguguauaugcaauucuaugcau

SEQ ID NO: 186822 - RNA, 32 nt, Homo Sapiens
auuaacuuuuuuucuuuuuuaauucuaauuca

SEQ ID NO: 186823 - RNA, 32 nt, Homo Sapiens
gccaggcauacuuuuucauguuugguguugag

SEQ ID NO: 186824 - RNA, 32 nt, Homo Sapiens
acacuggcauuccauuugucagagcaucccgg

SEQ ID NO: 186825 - RNA, 32 nt, Homo Sapiens
auguggaugggggcacguuguccgugauaaaa

SEQ ID NO: 186826 - RNA, 32 nt, Homo Sapiens
augcaaaaccaucauaugcaaaauccaaagga

SEQ ID NO: 186827 - RNA, 32 nt, Homo Sapiens
ccuuuugcugcuaccugccagguggcccccac

SEQ ID NO: 186828 - RNA, 32 nt, Homo Sapiens
cauuuaaagcuauuuuaaauguguuuuuauuu

SEQ ID NO: 186829 - RNA, 32 nt, Homo Sapiens
acaacuucaaaauaaaauacauuuuuagguuu

SEQ ID NO: 186830 - RNA, 32 nt, Homo Sapiens
ucugccccacugggucuggcagcccucccggg

SEQ ID NO: 186831 - RNA, 32 nt, Homo Sapiens
ccacaaagccccaggugacuuacacugcaggg

SEQ ID NO: 186832 - RNA, 32 nt, Homo Sapiens
cucuagaauggauguugaaaucuuugccuccu

SEQ ID NO: 186833 - RNA, 32 nt, Homo Sapiens
gaguucaggacacccugaaacuaugcgaccag

SEQ ID NO: 186834 - RNA, 32 nt, Homo Sapiens
gcaaaacugauccaugguguuagaagccaggg

SEQ ID NO: 186835 - RNA, 32 nt, Homo Sapiens
gaggaggaaaaaguggauuacacaaugacaug

SEQ ID NO: 186836 - RNA, 32 nt, Homo Sapiens
aggucccuucugggcccccggcggagguggga

SEQ ID NO: 186837 - RNA, 32 nt, Homo Sapiens
auaaacuugcucucacuuuacucugugaacuc

SEQ ID NO: 186838 - RNA, 32 nt, Homo Sapiens
uaccccaaggcuucuuuuuuuuuuuuuuuuuu

SEQ ID NO: 186839 - RNA, 32 nt, Homo Sapiens
cagcugcugaggcggcggcuggggcuggggcg

SEQ ID NO: 186840 - RNA, 32 nt, Homo Sapiens
ggcuaauguggacugggagacacacgggaccu

SEQ ID NO: 186841 - RNA, 32 nt, Homo Sapiens
ugggagaaaagggcauucuuagcugauugaaa

SEQ ID NO: 186842 - RNA, 29 nt, Homo Sapiens
aaacaugaugagaagucuauaaaaauugu

SEQ ID NO: 186843 - RNA, 32 nt, Homo Sapiens
cgaggguuaagauggcggcugggcugcggaaa

SEQ ID NO: 186844 - RNA, 32 nt, Homo Sapiens
cucgccacuccagcugcgccuccggcugcagc

SEQ ID NO: 186845 - RNA, 32 nt, Homo Sapiens
gucugugccugggggucaggaccgggccugau

SEQ ID NO: 186846 - RNA, 32 nt, Homo Sapiens
agagaagcugucuguacuuuggggacuacauu

SEQ ID NO: 186847 - RNA, 32 nt, Homo Sapiens
aaaguaggcauuugauaaauggcucuuugagu

SEQ ID NO: 186848 - RNA, 32 nt, Homo Sapiens
agagcuccgcucggcgucccgcgcgccucccu

SEQ ID NO: 186849 - RNA, 32 nt, Homo Sapiens
gaucgcuuuuauucauuuuuccuuucuuuguc

SEQ ID NO: 186850 - RNA, 32 nt, Homo Sapiens
ugaagugcuucuuuaauaugcacugucuuguc

SEQ ID NO: 186851 - RNA, 32 nt, Homo Sapiens
agaggucagaacuguuaauaaaaguuaaagga

SEQ ID NO: 186852 - RNA, 32 nt, Homo Sapiens
ucguucuugugcuugguucuuacuguguuugu

SEQ ID NO: 186853 - RNA, 32 nt, Homo Sapiens
ggagauguuugugaagauaccuucaaagaguu

SEQ ID NO: 186854 - RNA, 32 nt, Homo Sapiens
guggggaggguggggaggcagcgcgagggugc

SEQ ID NO: 186855 - RNA, 32 nt, Homo Sapiens
ucugauuguuugcuaaaaucccauucaaagcu

SEQ ID NO: 186856 - RNA, 28 nt, Homo Sapiens
ccauuguuguaaaacauguguuuugcuc

SEQ ID NO: 186857 - RNA, 32 nt, Homo Sapiens
ggaacuucucugcuccuccuugucuuuguaaa

SEQ ID NO: 186858 - RNA, 32 nt, Homo Sapiens
cugcuccugcgguuggugagauuaccuggguc

SEQ ID NO: 186859 - RNA, 32 nt, Homo Sapiens
ugccuggagcccaggaaccccauccuugcuuc

SEQ ID NO: 186860 - RNA, 32 nt, Homo Sapiens
gaucaggaaagacuuccuggccaacaugaggu

SEQ ID NO: 186861 - RNA, 32 nt, Homo Sapiens
cuuaguagaacaaauauucagaaguaacuuga

SEQ ID NO: 186862 - RNA, 32 nt, Homo Sapiens
uggcaccccccucccgucucagccaggaugcc

SEQ ID NO: 186863 - RNA, 32 nt, Homo Sapiens
cagcuccggcccggcggcgauggcgcggagcg

SEQ ID NO: 186864 - RNA, 32 nt, Homo Sapiens
ucaucucaaugccaaaaagauaguuucuacac

SEQ ID NO: 186865 - RNA, 32 nt, Homo Sapiens
ugcugcggucagggccggggccagcaaagucc

SEQ ID NO: 186866 - RNA, 32 nt, Homo Sapiens
gugcaccugugcugcugggagccuggaguacu

SEQ ID NO: 186867 - RNA, 32 nt, Homo Sapiens
aaauuauucacuugguaaguguucaagucuuu

SEQ ID NO: 186868 - RNA, 22 nt, Homo Sapiens
ccacggagaaagaaaaaaguua

SEQ ID NO: 186869 - RNA, 32 nt, Homo Sapiens
ggacaguugcuguucucauguuccaagucuga

SEQ ID NO: 186870 - RNA, 32 nt, Homo Sapiens
gaaaagaauauuaaaugccuuuggaaacauga

SEQ ID NO: 186871 - RNA, 32 nt, Homo Sapiens
gccuucaccugcucuaggccagcccugucacc

SEQ ID NO: 186872 - RNA, 32 nt, Homo Sapiens
agauggaaacacuugugaaaagaaauaaguag

SEQ ID NO: 186873 - RNA, 32 nt, Homo Sapiens
ugagcaggcggaguuccagggcuggucagugc

SEQ ID NO: 186874 - RNA, 32 nt, Homo Sapiens
ugaagagaugacucaaacauuuaaauaauuug

SEQ ID NO: 186875 - RNA, 32 nt, Homo Sapiens
ggcggcaccgcgucccgagagccccagaaguc

SEQ ID NO: 186876 - RNA, 32 nt, Homo Sapiens
ucaaagagaauguucacacacaauauaauuuc

SEQ ID NO: 186877 - RNA, 32 nt, Homo Sapiens
aucugcagugaguaaaggguguggcuuggauu

SEQ ID NO: 186878 - RNA, 32 nt, Homo Sapiens
uccuguuucagcgccugcuccagcuugcccgc

SEQ ID NO: 186879 - RNA, 32 nt, Homo Sapiens
gauuguuacuaaaauucacuuuguauuaucuu

SEQ ID NO: 186880 - RNA, 32 nt, Homo Sapiens
caccagcaccaucaaccucuaugggauccugu

SEQ ID NO: 186881 - RNA, 32 nt, Homo Sapiens
cuucagccuccgccgccuccucagcccucggc

SEQ ID NO: 186882 - RNA, 32 nt, Homo Sapiens
ggacugggaaccgcggcagcgggauaaguggc

SEQ ID NO: 186883 - RNA, 32 nt, Homo Sapiens
augccaacccccaccccguuucccuggugccc

SEQ ID NO: 186884 - RNA, 32 nt, Homo Sapiens
cuggcuguggggcugggaacuguuccuggacc

SEQ ID NO: 186885 - RNA, 32 nt, Homo Sapiens
ccaaggauaaaugaaacuuauuuagggauaaa

SEQ ID NO: 186886 - RNA, 32 nt, Homo Sapiens
auuuccugcuuccgccgcucucccggggucac

SEQ ID NO: 186887 - RNA, 32 nt, Homo Sapiens
gaaggggaggccacauuugcccggcccccugg

SEQ ID NO: 186888 - RNA, 32 nt, Homo Sapiens
guagaucuuuugccuugcaaauugcugccugg

SEQ ID NO: 186889 - RNA, 32 nt, Homo Sapiens
uguguugcaauaaagggaaagaccauguucau

SEQ ID NO: 186890 - RNA, 32 nt, Homo Sapiens
cacugcaggaugcccaccugggccacaccugc

SEQ ID NO: 186891 - RNA, 32 nt, Homo Sapiens
gacuuacuguggaaagcuggaacugcccgaua

SEQ ID NO: 186892 - RNA, 32 nt, Homo Sapiens
guucgccaacgcgcgccggcgccucaagaagg

SEQ ID NO: 186893 - RNA, 32 nt, Homo Sapiens
cagguggccccggccuagaccugccuaggacu

SEQ ID NO: 186894 - RNA, 32 nt, Homo Sapiens
ugguggaacauugccaaucaguucuuaaugag

SEQ ID NO: 186895 - RNA, 32 nt, Homo Sapiens
ccaggcacaacacagcuaacacaaggccccgc

SEQ ID NO: 186896 - RNA, 32 nt, Homo Sapiens
uauaaaaaacaaaacaauaaaaagagucugau

SEQ ID NO: 186897 - RNA, 32 nt, Homo Sapiens
uaagccagaaaaguacccuaggaccagcccgu

SEQ ID NO: 186898 - RNA, 32 nt, Homo Sapiens
auuaccaaggucucugccuaugcaaaaauuca

SEQ ID NO: 186899 - RNA, 31 nt, Homo Sapiens
ucgacgcggcacucgcuacgcacgugccgga

SEQ ID NO: 186900 - RNA, 32 nt, Homo Sapiens
ggccuggaggaggcgccgcgcggccagggagc

SEQ ID NO: 186901 - RNA, 32 nt, Homo Sapiens
guucccauuuuucuugacaacaauaaauacca

SEQ ID NO: 186902 - RNA, 32 nt, Homo Sapiens
ucccgacccggagacgcggggccacagccccc

SEQ ID NO: 186903 - RNA, 32 nt, Homo Sapiens
gccacagugggucucuuaauuugauugugggg

SEQ ID NO: 186904 - RNA, 31 nt, Homo Sapiens
uccaacuuggcgggaaaguccuucucuacag

SEQ ID NO: 186905 - RNA, 32 nt, Homo Sapiens
cgggcaccaugacuuugaggcuuuuagaagac

SEQ ID NO: 186906 - RNA, 32 nt, Homo Sapiens
guagagagccgggcuccugcggaugggggcug

SEQ ID NO: 186907 - RNA, 32 nt, Homo Sapiens
uguucuggaagcggcacucacugcacagacuu

SEQ ID NO: 186908 - RNA, 32 nt, Homo Sapiens
uuuggccaugaggaagagaacccacgaacauu

SEQ ID NO: 186909 - RNA, 32 nt, Homo Sapiens
ggcuuugccauucaaaccacucgacuguuugc

SEQ ID NO: 186910 - RNA, 32 nt, Homo Sapiens
aauguuaaacacaaaaacuacaugacugaaga

SEQ ID NO: 186911 - RNA, 32 nt, Homo Sapiens
aacagagucucauucugucacccaggcuggag

SEQ ID NO: 186912 - RNA, 32 nt, Homo Sapiens
guuuuuaauucuggucucggugcaaauguuag

SEQ ID NO: 186913 - RNA, 32 nt, Homo Sapiens
cugugacccuccccgaggccccgcccccacgg

SEQ ID NO: 186914 - RNA, 32 nt, Homo Sapiens
aagaaggacuaaaaauaucaacuuuugcuuuu

SEQ ID NO: 186915 - RNA, 32 nt, Homo Sapiens
agaacugggcugacuccaggaccuccaggaug

SEQ ID NO: 186916 - RNA, 32 nt, Homo Sapiens
gagugguccagcugcccggccuguucacacac

SEQ ID NO: 186917 - RNA, 32 nt, Homo Sapiens
ugugggcuagaaugccugcgcauuuaguuaaa

SEQ ID NO: 186918 - RNA, 32 nt, Homo Sapiens
uggaaaaaauuuuuggcugauuuuuuaaaaau

SEQ ID NO: 186919 - RNA, 32 nt, Homo Sapiens
cagcgcgccggcccgagccccuggacgaggcc

SEQ ID NO: 186920 - RNA, 32 nt, Homo Sapiens
ucuaguuccucauagaucuuauguuucaacca

SEQ ID NO: 186921 - RNA, 32 nt, Homo Sapiens
ccacagcauagccagcaggccacuuuucacua

SEQ ID NO: 186922 - RNA, 32 nt, Homo Sapiens
ucugccucuucaauccaucuuaccacacaaua

SEQ ID NO: 186923 - RNA, 30 nt, Homo Sapiens
gacugagagaagcagaggagucacacucca

SEQ ID NO: 186924 - RNA, 32 nt, Homo Sapiens
gcuggaguuaggucauuugauuuuauacucug

SEQ ID NO: 186925 - RNA, 32 nt, Homo Sapiens
ggauagauccaucuccuucugccacugaauuu

SEQ ID NO: 186926 - RNA, 32 nt, Homo Sapiens
guuugaguuuuuucuuuuuuuuuuuuuuuugu

SEQ ID NO: 186927 - RNA, 32 nt, Homo Sapiens
gcguccuuuccucuccucucuggaagguuuug

SEQ ID NO: 186928 - RNA, 32 nt, Homo Sapiens
acaccuuagcugcuuagcuggugcuggccuga

SEQ ID NO: 186929 - RNA, 32 nt, Homo Sapiens
uugagagaguaauaagcagagagacaaagcag

SEQ ID NO: 186930 - RNA, 32 nt, Homo Sapiens
caaacaccuacccacaccugcuuugugccaag

SEQ ID NO: 186931 - RNA, 32 nt, Homo Sapiens
ucccugcgcccucgcccuccgccccgcuguac

SEQ ID NO: 186932 - RNA, 32 nt, Homo Sapiens
uauaugcacagacauggagagaauuaguuuuu

SEQ ID NO: 186933 - RNA, 32 nt, Homo Sapiens
cggcucacuguagccuccaccucccccaauca

SEQ ID NO: 186934 - RNA, 32 nt, Homo Sapiens
aaggagucuuaccaacuggagaaaauuugccu

SEQ ID NO: 186935 - RNA, 32 nt, Homo Sapiens
uguagggguuaacuuggucagagccacucuau

SEQ ID NO: 186936 - RNA, 32 nt, Homo Sapiens
ugguucuaacaaguaacaagcaaguuuuaaaa

SEQ ID NO: 186937 - RNA, 32 nt, Homo Sapiens
aguuggagaacauggaacagguuggugcagga

SEQ ID NO: 186938 - RNA, 32 nt, Homo Sapiens
ucucauuggggaagaaaaggggagggggaagg

SEQ ID NO: 186939 - RNA, 32 nt, Homo Sapiens
gauauaggaccaaaacagaauauuguagaugg

SEQ ID NO: 186940 - RNA, 32 nt, Homo Sapiens
uuaaaggaugguuuaacuagugagauuccuau

SEQ ID NO: 186941 - RNA, 32 nt, Homo Sapiens
gacgugagaggcaucucccagccccucugcug

SEQ ID NO: 186942 - RNA, 32 nt, Homo Sapiens
accccccacagggacccccaccccucccagcc

SEQ ID NO: 186943 - RNA, 32 nt, Homo Sapiens
uauuucauuuuucaauagcacauauggaauuu

SEQ ID NO: 186944 - RNA, 32 nt, Homo Sapiens
ccucaggguugaugcguggagaaggacuuuga

SEQ ID NO: 186945 - RNA, 32 nt, Homo Sapiens
acuguuguggccucucaguucucuuugagucu

SEQ ID NO: 186946 - RNA, 32 nt, Homo Sapiens
cacgugagagcacguggcggcuucugggggcc

SEQ ID NO: 186947 - RNA, 32 nt, Homo Sapiens
cguggugccugccaggugauguggggcaaagc

SEQ ID NO: 186948 - RNA, 32 nt, Homo Sapiens
uugcuguuaaaaaacuaagacucaaaaccaaa

SEQ ID NO: 186949 - RNA, 32 nt, Homo Sapiens
ucucuggucaacggugaugacauguuugcaac

SEQ ID NO: 186950 - RNA, 32 nt, Homo Sapiens
uguaggugggaacuuaagggaaugggagagcg

SEQ ID NO: 186951 - RNA, 32 nt, Homo Sapiens
acccucugcggcgugucaugggcccgcgccgc

SEQ ID NO: 186952 - RNA, 32 nt, Homo Sapiens
ccagccccauccccagccccagccccagccca

SEQ ID NO: 186953 - RNA, 32 nt, Homo Sapiens
uuuagccuccccacccccucugaaugcuugaa

SEQ ID NO: 186954 - RNA, 32 nt, Homo Sapiens
gcagacuguggacuguaauaaaguauauaaau

SEQ ID NO: 186955 - RNA, 32 nt, Homo Sapiens
ggccagugaugaugagguccaucuuccugcca

SEQ ID NO: 186956 - RNA, 31 nt, Homo Sapiens
guacucacaaagauuaagaaagaaauguauu

SEQ ID NO: 186957 - RNA, 32 nt, Homo Sapiens
gcuuuccuuucugcccccacccacgcugccuc

SEQ ID NO: 186958 - RNA, 32 nt, Homo Sapiens
uuuuggucuaauuuccucucuguuuuuaacua

SEQ ID NO: 186959 - RNA, 32 nt, Homo Sapiens
gacgcuucagggcagagcugccuuuuaauuuu

SEQ ID NO: 186960 - RNA, 32 nt, Homo Sapiens
guggcccagucaacuugacacauaaaguuaac

SEQ ID NO: 186961 - RNA, 32 nt, Homo Sapiens
aaugugucuggaauugguggguucuuggucuu

SEQ ID NO: 186962 - RNA, 32 nt, Homo Sapiens
cagggagaaccugggagguccuggagagggcc

SEQ ID NO: 186963 - RNA, 32 nt, Homo Sapiens
uuacaagcagcaugaauuccagccaaauauca

SEQ ID NO: 186964 - RNA, 32 nt, Homo Sapiens
aaaaauaaaaacaaaaaaguuggaaggcagaa

SEQ ID NO: 186965 - RNA, 32 nt, Homo Sapiens
uaaacuacagcuuugaguuggaaagaagucac

SEQ ID NO: 186966 - RNA, 32 nt, Homo Sapiens
gagguagaauacuguuugcuggucuuaaaaac

SEQ ID NO: 186967 - RNA, 32 nt, Homo Sapiens
guuuuaaguccuggguggacugagagaugguu

SEQ ID NO: 186968 - RNA, 32 nt, Homo Sapiens
caccaugccugcuaauuuuuuauuuuuaguag

SEQ ID NO: 186969 - RNA, 32 nt, Homo Sapiens
gcucagaauguggccccagagaagggcagagg

SEQ ID NO: 186970 - RNA, 32 nt, Homo Sapiens
acaggggccgcaggcuucggggacccggaccc

SEQ ID NO: 186971 - RNA, 32 nt, Homo Sapiens
gcaucaugugggaauaaaugaggcugcaugug

SEQ ID NO: 186972 - RNA, 31 nt, Homo Sapiens
gugaagaagcgcagcccugccagacgcgcua

SEQ ID NO: 186973 - RNA, 31 nt, Homo Sapiens
gggagacagcgcagccauagaggaagugaaa

SEQ ID NO: 186974 - RNA, 32 nt, Homo Sapiens
uggaugagcugguguggugcugccgcuacacc

SEQ ID NO: 186975 - RNA, 32 nt, Homo Sapiens
caggagcugccucuggaagcagauggggcucu

SEQ ID NO: 186976 - RNA, 32 nt, Homo Sapiens
cgggcucggcggcggcggccaggucccugcug

SEQ ID NO: 186977 - RNA, 32 nt, Homo Sapiens
uuuuaaggcaggucugucauuuuugaauacug

SEQ ID NO: 186978 - RNA, 32 nt, Homo Sapiens
acccuggccaaccuggugaaaccccgucucua

SEQ ID NO: 186979 - RNA, 32 nt, Homo Sapiens
acagagguauuuugguuccagaucucaaguga

SEQ ID NO: 186980 - RNA, 32 nt, Homo Sapiens
gcccggcgccacgccgccuccucuggguucgg

SEQ ID NO: 186981 - RNA, 32 nt, Homo Sapiens
gguuggggaaaggacuugggaucugaaugaac

SEQ ID NO: 186982 - RNA, 32 nt, Homo Sapiens
uaauugucaguuuuacaaaaccaucuguguuc

SEQ ID NO: 186983 - RNA, 32 nt, Homo Sapiens
agacaggagacauaaugcaaaggggcucagac

SEQ ID NO: 186984 - RNA, 32 nt, Homo Sapiens
gcugcuggaucuuuggggggaaauacaggauc

SEQ ID NO: 186985 - RNA, 32 nt, Homo Sapiens
cugggauuacagauccugguggcuguggucgg

SEQ ID NO: 186986 - RNA, 28 nt, Homo Sapiens
caguaaccaaaauaaaguucuauauuuu

SEQ ID NO: 186987 - RNA, 32 nt, Homo Sapiens
cuaucuaugguaaugcgggaaccuggcuuugu

SEQ ID NO: 186988 - RNA, 27 nt, Homo Sapiens
cuauggcugacagccgggaucccgcca

SEQ ID NO: 186989 - RNA, 32 nt, Homo Sapiens
gaaaccugcgaccccuucuccucagccuucuc

SEQ ID NO: 186990 - RNA, 32 nt, Homo Sapiens
uucuggaaacaaugaccgauaaaacagagaag

SEQ ID NO: 186991 - RNA, 32 nt, Homo Sapiens
caaacuauucauuuuuuuuucuugauuuuucu

SEQ ID NO: 186992 - RNA, 29 nt, Homo Sapiens
guacaguaaaguuuuuauauuuucuauca

SEQ ID NO: 186993 - RNA, 32 nt, Homo Sapiens
cgagucagaauauuuuugaaagcuacgcagac

SEQ ID NO: 186994 - RNA, 32 nt, Homo Sapiens
gccgcgugagaggacgggcuccgcgcgcuccg

SEQ ID NO: 186995 - RNA, 32 nt, Homo Sapiens
acaggaaagcauuuauacuugagaaaaauugu

SEQ ID NO: 186996 - RNA, 32 nt, Homo Sapiens
uaacugcuggacugcagcgaaacccgaccccu

SEQ ID NO: 186997 - RNA, 30 nt, Homo Sapiens
auuuuaacuuuggugggggaaagaguuaua

SEQ ID NO: 186998 - RNA, 32 nt, Homo Sapiens
aaugacccuaaaauguauauccucuuuccuga

SEQ ID NO: 186999 - RNA, 32 nt, Homo Sapiens
caaucucugcguuaauuaaaugccuuuaagag

SEQ ID NO: 187000 - RNA, 32 nt, Homo Sapiens
acaaacaaaaauacaaaaaauuagccgggcgu

SEQ ID NO: 187001 - RNA, 30 nt, Homo Sapiens
ugaaaggcuauugccaccugucaaaaucuu

SEQ ID NO: 187002 - RNA, 32 nt, Homo Sapiens
guugcuuagcuucuuuguguuucuuugccuuu

SEQ ID NO: 187003 - RNA, 32 nt, Homo Sapiens
auaauaauaugucuuauucugauuccaagaca

SEQ ID NO: 187004 - RNA, 32 nt, Homo Sapiens
ggaggaagcuaagcccuugguucuugccaucc

SEQ ID NO: 187005 - RNA, 32 nt, Homo Sapiens
acccccuccuccccucccccaauacaagguuu

SEQ ID NO: 187006 - RNA, 32 nt, Homo Sapiens
cccaaaaucaucuuauccaauuuuauugguua

SEQ ID NO: 187007 - RNA, 32 nt, Homo Sapiens
auguuugaaaauuuaauuaaaaauauuuguuu

SEQ ID NO: 187008 - RNA, 32 nt, Homo Sapiens
cccugguaaguacaguauuucaagagcacgcu

SEQ ID NO: 187009 - RNA, 32 nt, Homo Sapiens
cugcucuccccguuccuccccaccuccacuga

SEQ ID NO: 187010 - RNA, 32 nt, Homo Sapiens
gugaagcuccggcuccucccuccaucuuccuc

SEQ ID NO: 187011 - RNA, 32 nt, Homo Sapiens
uaguucucaguugaagcagagaaaugccacug

SEQ ID NO: 187012 - RNA, 32 nt, Homo Sapiens
gaugauacagcuuuugcuucuguguaguauac

SEQ ID NO: 187013 - RNA, 32 nt, Homo Sapiens
accucagcuggccacgacccagcccucccccg

SEQ ID NO: 187014 - RNA, 32 nt, Homo Sapiens
auauuaugaauuucuuguuuucuaguuggaca

SEQ ID NO: 187015 - RNA, 32 nt, Homo Sapiens
ggcccugcuugccuggccccagaagcuguuuu

SEQ ID NO: 187016 - RNA, 32 nt, Homo Sapiens
aauacauuauucuccuuuucuucuuagaaaaa

SEQ ID NO: 187017 - RNA, 32 nt, Homo Sapiens
gaaaugugcagguuuguuguuucaugucauau

SEQ ID NO: 187018 - RNA, 32 nt, Homo Sapiens
aauuaagaagcuaggaagauggagcacggcac

SEQ ID NO: 187019 - RNA, 32 nt, Homo Sapiens
ucuacuuuuuauuuuuguuuuuucacuuucua

SEQ ID NO: 187020 - RNA, 32 nt, Homo Sapiens
cuccgggguuugcaugggagaauccucuuucc

SEQ ID NO: 187021 - RNA, 32 nt, Homo Sapiens
gaauugaagguuuuugauagcauuguaagcgu

SEQ ID NO: 187022 - RNA, 32 nt, Homo Sapiens
agggcccaggauuuucccuugacgcagcugcc

SEQ ID NO: 187023 - RNA, 32 nt, Homo Sapiens
ucagagacaugaauuuuauuccuuauuucuuu

SEQ ID NO: 187024 - RNA, 32 nt, Homo Sapiens
uucggagugucugaacaggaugcugauguuug

SEQ ID NO: 187025 - RNA, 32 nt, Homo Sapiens
cggcaagacagagcgucuccaucuaaaauucc

SEQ ID NO: 187026 - RNA, 32 nt, Homo Sapiens
uguuucuuguuguuuuucucuuugcaaagaca

SEQ ID NO: 187027 - RNA, 32 nt, Homo Sapiens
gagacugugcuccagccugggcgacagagcga

SEQ ID NO: 187028 - RNA, 32 nt, Homo Sapiens
cgcgggcgagcucagcagcccggagcgaccgc

SEQ ID NO: 187029 - RNA, 32 nt, Homo Sapiens
cgaccguccccacgccugccgccccgcgaccc

SEQ ID NO: 187030 - RNA, 32 nt, Homo Sapiens
uggcugcagcugcugcagcugcugugaccccu

SEQ ID NO: 187031 - RNA, 32 nt, Homo Sapiens
cuuauucauaaauuauuaaaaauuucaaggug

SEQ ID NO: 187032 - RNA, 32 nt, Homo Sapiens
cuaaucagaucuuuuuacaguauccauuuauu

SEQ ID NO: 187033 - RNA, 32 nt, Homo Sapiens
cccuagaaauguucccuuuaaucuucaaguuc

SEQ ID NO: 187034 - RNA, 32 nt, Homo Sapiens
uggggagcggagccuccaccgccccccucauu

SEQ ID NO: 187035 - RNA, 32 nt, Homo Sapiens
ggaugaagcaagcucacuuggauggaauugcu

SEQ ID NO: 187036 - RNA, 32 nt, Homo Sapiens
acccucaaucccacauacgcagggggaaggcu

SEQ ID NO: 187037 - RNA, 32 nt, Homo Sapiens
gcuuguucucuuggggauguguguguuuuuau

SEQ ID NO: 187038 - RNA, 32 nt, Homo Sapiens
caauaaaauguauuuguuuguauuuuguguuc

SEQ ID NO: 187039 - RNA, 32 nt, Homo Sapiens
uucuguuauaguaacaaaauagaguuauguag

SEQ ID NO: 187040 - RNA, 32 nt, Homo Sapiens
acuccuucuccaccacccauucucccaauggu

SEQ ID NO: 187041 - RNA, 32 nt, Homo Sapiens
guuuccuuugguuuccuuccuccccaaauugu

SEQ ID NO: 187042 - RNA, 32 nt, Homo Sapiens
cacaguggguuagccuggagaaaaugagaggc

SEQ ID NO: 187043 - RNA, 32 nt, Homo Sapiens
cucagcccuuuucucucccggccgagccgcgg

SEQ ID NO: 187044 - RNA, 32 nt, Homo Sapiens
auaaagauuguuuugagugcugauuuguuuac

SEQ ID NO: 187045 - RNA, 32 nt, Homo Sapiens
gugauaagguaacaugggguuuuucugggcca

SEQ ID NO: 187046 - RNA, 32 nt, Homo Sapiens
ucgggaaucaccgucgcugccaucaacauguc

SEQ ID NO: 187047 - RNA, 32 nt, Homo Sapiens
uccaccucagaaccccccccccggucuagggg

SEQ ID NO: 187048 - RNA, 32 nt, Homo Sapiens
gagaaccuccucggcccucccagucccucgcu

SEQ ID NO: 187049 - RNA, 32 nt, Homo Sapiens
uguuuuuaaaaauuagccuaagauauacuugu

SEQ ID NO: 187050 - RNA, 32 nt, Homo Sapiens
gagagaagggagagggugggccugcuguggac

SEQ ID NO: 187051 - RNA, 32 nt, Homo Sapiens
aggaaaccaacccugucuccaccuugauauug

SEQ ID NO: 187052 - RNA, 30 nt, Homo Sapiens
acacugcgcgcgccuccaggcaccggcguu

SEQ ID NO: 187053 - RNA, 32 nt, Homo Sapiens
ggggagauggagaggagagguggacaaaguac

SEQ ID NO: 187054 - RNA, 32 nt, Homo Sapiens
gagaaaaccucuuuuccaccaauaccaugaag

SEQ ID NO: 187055 - RNA, 32 nt, Homo Sapiens
ccuguauuuacuguauuuaaaugaguaaagga

SEQ ID NO: 187056 - RNA, 32 nt, Homo Sapiens
uggaaggcugcuuugaaaauggcuguuuuacc

SEQ ID NO: 187057 - RNA, 32 nt, Homo Sapiens
agggccauuuccccagucccuaucucccccau

SEQ ID NO: 187058 - RNA, 32 nt, Homo Sapiens
ccgagcguguugcggcagcggcugggcuugca

SEQ ID NO: 187059 - RNA, 32 nt, Homo Sapiens
uccaaaucuccuguguccucccggccccgccg

SEQ ID NO: 187060 - RNA, 32 nt, Homo Sapiens
cuuaaauuugucgagugauuuuuagccucuga

SEQ ID NO: 187061 - RNA, 32 nt, Homo Sapiens
ccagugaaauauguauuucugaacuaaaacuc

SEQ ID NO: 187062 - RNA, 32 nt, Homo Sapiens
gcggcaaucauggcgccaccugugagauacug

SEQ ID NO: 187063 - RNA, 32 nt, Homo Sapiens
gugguggcgggugccuguagucccagcuacuc

SEQ ID NO: 187064 - RNA, 32 nt, Homo Sapiens
auauuacuauauauuuuccccuuuaauaaaca

SEQ ID NO: 187065 - RNA, 32 nt, Homo Sapiens
accagcguuuccgacccggcccggaacagggg

SEQ ID NO: 187066 - RNA, 32 nt, Homo Sapiens
guguccaguuuagaagugagagacuuccauuu

SEQ ID NO: 187067 - RNA, 32 nt, Homo Sapiens
uauuuuguuuuaaagaguuguaugcuuggggu

SEQ ID NO: 187068 - RNA, 32 nt, Homo Sapiens
cauaaauauggacuuaauagcccuuaaccuuc

SEQ ID NO: 187069 - RNA, 32 nt, Homo Sapiens
ucuaagcuuuccucaguugucaucucuuccca

SEQ ID NO: 187070 - RNA, 32 nt, Homo Sapiens
augauaccuuccauuccaauaccuuauguuuc

SEQ ID NO: 187071 - RNA, 32 nt, Homo Sapiens
gcccgcgccucccgggcacuucuccccaccuc

SEQ ID NO: 187072 - RNA, 32 nt, Homo Sapiens
gagaagggguggccucgccggagcuagggagc

SEQ ID NO: 187073 - RNA, 32 nt, Homo Sapiens
agggugggaaggggcugcugcccgugcgcugg

SEQ ID NO: 187074 - RNA, 32 nt, Homo Sapiens
ccagcugcagacccuccaggcuggaggaccag

SEQ ID NO: 187075 - RNA, 32 nt, Homo Sapiens
caagaaauaaauucacauccucagaaagugca

SEQ ID NO: 187076 - RNA, 32 nt, Homo Sapiens
uagggugggcggugcgagcggcgguuagcucc

SEQ ID NO: 187077 - RNA, 32 nt, Homo Sapiens
uaguggucaaggaaccauuacauuuuguuuua

SEQ ID NO: 187078 - RNA, 32 nt, Homo Sapiens
guuuucuuuugccaugacaacuucuaauugcc

SEQ ID NO: 187079 - RNA, 32 nt, Homo Sapiens
guaagcacuccaguguucucuuaaugaggcac

SEQ ID NO: 187080 - RNA, 32 nt, Homo Sapiens
acggcgccggcgagaggacagcuaccaugucc

SEQ ID NO: 187081 - RNA, 32 nt, Homo Sapiens
gccagccccgccuucucuuccuccuccuccgu

SEQ ID NO: 187082 - RNA, 32 nt, Homo Sapiens
uucaguaacauuuauuugauaauuaguuucug

SEQ ID NO: 187083 - RNA, 32 nt, Homo Sapiens
gucaaagcuccucuccuuccuuuuccuuccua

SEQ ID NO: 187084 - RNA, 32 nt, Homo Sapiens
aaggagugaaaagccaagaggacgaagucuuu

SEQ ID NO: 187085 - RNA, 32 nt, Homo Sapiens
acacaccacacacaccccacuggcagcuuugu

SEQ ID NO: 187086 - RNA, 32 nt, Homo Sapiens
aaaggggacauuagccacucuccagcaacagc

SEQ ID NO: 187087 - RNA, 32 nt, Homo Sapiens
cugcgacuagcuggagggcggaggaaggagaa

SEQ ID NO: 187088 - RNA, 32 nt, Homo Sapiens
aucaccgcgggccucgaccccgaaauggcgcu

SEQ ID NO: 187089 - RNA, 32 nt, Homo Sapiens
cauuaauauggauuuuuaaaucacaugucauu

SEQ ID NO: 187090 - RNA, 32 nt, Homo Sapiens
ccgccuaucgaacucuuaauucauuaugucau

SEQ ID NO: 187091 - RNA, 32 nt, Homo Sapiens
ugaggcuccacagagagaaauuccuggaaucu

SEQ ID NO: 187092 - RNA, 31 nt, Homo Sapiens
ucauugugaaacagacucuagagugguucua

SEQ ID NO: 187093 - RNA, 32 nt, Homo Sapiens
cagagccugcgguugaucccgaccaugaacca

SEQ ID NO: 187094 - RNA, 32 nt, Homo Sapiens
uuuaaauccaaauugauaauaaugaucucaaa

SEQ ID NO: 187095 - RNA, 32 nt, Homo Sapiens
ucuccugccucuucuucugcaauccucacucc

SEQ ID NO: 187096 - RNA, 32 nt, Homo Sapiens
auuggcuggugcccuuucugguacuggaggcc

SEQ ID NO: 187097 - RNA, 32 nt, Homo Sapiens
caugggcuguguggcccccugauucuagccca

SEQ ID NO: 187098 - RNA, 32 nt, Homo Sapiens
ugggggaggauggugaaccauguauuucagug

SEQ ID NO: 187099 - RNA, 32 nt, Homo Sapiens
gcuaaauuucuucauacucaacuuucagauuc

SEQ ID NO: 187100 - RNA, 30 nt, Homo Sapiens
cuaggggggugggugggggaagcagacagg

SEQ ID NO: 187101 - RNA, 32 nt, Homo Sapiens
cuaagauggcggcggcggcggcggcggccgug

SEQ ID NO: 187102 - RNA, 32 nt, Homo Sapiens
cugcugcauccagggagugugcaugugacuua

SEQ ID NO: 187103 - RNA, 32 nt, Homo Sapiens
cuuucugugaugacagaaauguucuauaucug

SEQ ID NO: 187104 - RNA, 32 nt, Homo Sapiens
ggugcuguuccgugguucugcauuaaccccug

SEQ ID NO: 187105 - RNA, 32 nt, Homo Sapiens
acaucguuaugaguucaggugcacuaaauaca

SEQ ID NO: 187106 - RNA, 32 nt, Homo Sapiens
uucuauauacuguguuuaguacacuaauuuug

SEQ ID NO: 187107 - RNA, 32 nt, Homo Sapiens
aaggggagaggcuuuuauaacaauagauuuga

SEQ ID NO: 187108 - RNA, 32 nt, Homo Sapiens
auggcggcugccguugucauugucuccaaaaa

SEQ ID NO: 187109 - RNA, 32 nt, Homo Sapiens
aauauguagacuauuuuugguggccaaugcua

SEQ ID NO: 187110 - RNA, 32 nt, Homo Sapiens
ccgccaucuuccgguaauucgccaaaaugacg

SEQ ID NO: 187111 - RNA, 32 nt, Homo Sapiens
ugaugguaaucuuuuuauucauggguguaaac

SEQ ID NO: 187112 - RNA, 32 nt, Homo Sapiens
uucagcgcgcucaccgcguccaggcgucagug

SEQ ID NO: 187113 - RNA, 32 nt, Homo Sapiens
auuuuuuaaugauaauggagaugucuggaccc

SEQ ID NO: 187114 - RNA, 32 nt, Homo Sapiens
ccuccccuuucugccugaccuuaggacacguc

SEQ ID NO: 187115 - RNA, 32 nt, Homo Sapiens
uaacggcccuccccugcaacauccgucuugga

SEQ ID NO: 187116 - RNA, 32 nt, Homo Sapiens
acacagagcuggcgacugcagcugcaccauca

SEQ ID NO: 187117 - RNA, 27 nt, Homo Sapiens
caugaccauuaauuacugaguagaaau

SEQ ID NO: 187118 - RNA, 32 nt, Homo Sapiens
ccugaugaccagaugcccugcuccaucacaac

SEQ ID NO: 187119 - RNA, 32 nt, Homo Sapiens
uuaguaucaucagauagcucuuauacgaguaa

SEQ ID NO: 187120 - RNA, 32 nt, Homo Sapiens
uuaauacauccaauuaaugaugucugacaugc

SEQ ID NO: 187121 - RNA, 32 nt, Homo Sapiens
cgccgcagcuggacgcggucgguugaguccag

SEQ ID NO: 187122 - RNA, 32 nt, Homo Sapiens
ggccggcgcggggcggggaggggcgggaaguu

SEQ ID NO: 187123 - RNA, 32 nt, Homo Sapiens
uuuacaagagcuuuccucuccucucucuugcu

SEQ ID NO: 187124 - RNA, 32 nt, Homo Sapiens
guaccucccgguuuuuuacaccgcaugggccc

SEQ ID NO: 187125 - RNA, 32 nt, Homo Sapiens
cugccugccugccugcccgcccagagcugugg

SEQ ID NO: 187126 - RNA, 32 nt, Homo Sapiens
cuuggcugggugugggccuggaggaagguccu

SEQ ID NO: 187127 - RNA, 32 nt, Homo Sapiens
ggauuuggcagugauccggguacucuaccuaa

SEQ ID NO: 187128 - RNA, 32 nt, Homo Sapiens
gaagaggcacuguagcagcugcugcuguugcu

SEQ ID NO: 187129 - RNA, 32 nt, Homo Sapiens
ggcagcggcugcagcaucauucgcgggcagcg

SEQ ID NO: 187130 - RNA, 32 nt, Homo Sapiens
gagcggcggcccagcccuaaccgccacucauc

SEQ ID NO: 187131 - RNA, 32 nt, Homo Sapiens
uggugaaaaugaagggauuucauuugaaauua

SEQ ID NO: 187132 - RNA, 32 nt, Homo Sapiens
cucauucucuacaggcagaucacacuuuguaa

SEQ ID NO: 187133 - RNA, 32 nt, Homo Sapiens
aggaugaaagacuagaaagcugccucuauguu

SEQ ID NO: 187134 - RNA, 32 nt, Homo Sapiens
auuuuccuugugcaauucagacuuaagcaucg

SEQ ID NO: 187135 - RNA, 32 nt, Homo Sapiens
uucauggaaggggagauuuaugggcuuuccug

SEQ ID NO: 187136 - RNA, 32 nt, Homo Sapiens
ggccccauggaguuaugagcucccuuggaauu

SEQ ID NO: 187137 - RNA, 32 nt, Homo Sapiens
cauaaauggaaauucaccaucuuguuaccuag

SEQ ID NO: 187138 - RNA, 32 nt, Homo Sapiens
aagggcccagggugggucaggcgugugcacug

SEQ ID NO: 187139 - RNA, 30 nt, Homo Sapiens
uugaguccguccgugccgcuggggccgagg

SEQ ID NO: 187140 - RNA, 32 nt, Homo Sapiens
gaggaaagggccugcgcaguccugguccuggc

SEQ ID NO: 187141 - RNA, 32 nt, Homo Sapiens
gcaccgggaccuucgcgacacaccagauccuc

SEQ ID NO: 187142 - RNA, 32 nt, Homo Sapiens
agcccaccaagaccgaaacuggagaagggcug

SEQ ID NO: 187143 - RNA, 32 nt, Homo Sapiens
aauauuuugugcuuaccccaauauaugugugu

SEQ ID NO: 187144 - RNA, 32 nt, Homo Sapiens
ccagauuugccggcagcgcccgccgugcacgc

SEQ ID NO: 187145 - RNA, 32 nt, Homo Sapiens
gugugcucuucugggccacagcagccagggcu

SEQ ID NO: 187146 - RNA, 32 nt, Homo Sapiens
auuguucauuuucuuuucucauuauguuacuu

SEQ ID NO: 187147 - RNA, 32 nt, Homo Sapiens
aagugaaauuuaaaugugagauugaacugaac

SEQ ID NO: 187148 - RNA, 32 nt, Homo Sapiens
gcagaucagugagagugcaaccccacccucca

SEQ ID NO: 187149 - RNA, 32 nt, Homo Sapiens
aaugcuuuuguuaugaaucaauuaaaauucuu

SEQ ID NO: 187150 - RNA, 32 nt, Homo Sapiens
ugcuaacuagacuucaggggagccacuucugu

SEQ ID NO: 187151 - RNA, 32 nt, Homo Sapiens
guagggauuaaaugagauaauaugaguggcag

SEQ ID NO: 187152 - RNA, 32 nt, Homo Sapiens
aaaaaaaauauggguuugauaaucacacacau

SEQ ID NO: 187153 - RNA, 30 nt, Homo Sapiens
cuaccaggcaggcacgugcacaucgccauc

SEQ ID NO: 187154 - RNA, 32 nt, Homo Sapiens
gcccagcagccucgguggccaagcccagacac

SEQ ID NO: 187155 - RNA, 32 nt, Homo Sapiens
uuauacacagaaauacaaauagagcuuuuucu

SEQ ID NO: 187156 - RNA, 32 nt, Homo Sapiens
uuucauuguuuuauuucuuaauugcuaugcuu

SEQ ID NO: 187157 - RNA, 32 nt, Homo Sapiens
ccaucccagcagacccaccuccccgccuggug

SEQ ID NO: 187158 - RNA, 32 nt, Homo Sapiens
auggacuuuccuucccucuccugcuuccucuu

SEQ ID NO: 187159 - RNA, 32 nt, Homo Sapiens
auuuucacguugguuaucacagugauuuagua

SEQ ID NO: 187160 - RNA, 32 nt, Homo Sapiens
caaacuugcgcagcgcgggggcugggauucac

SEQ ID NO: 187161 - RNA, 32 nt, Homo Sapiens
aaacuauaaaauggcuaaagcuugaagacuga

SEQ ID NO: 187162 - RNA, 32 nt, Homo Sapiens
ccgcccggacugucgcggcccgcgguggcgac

SEQ ID NO: 187163 - RNA, 32 nt, Homo Sapiens
auacuaaaauauuauuugaucauaucuuggau

SEQ ID NO: 187164 - RNA, 32 nt, Homo Sapiens
uacugauaagcacuuauguucugccuucugcu

SEQ ID NO: 187165 - RNA, 32 nt, Homo Sapiens
ccgaacccaagccucacuuuucugugccuucc

SEQ ID NO: 187166 - RNA, 32 nt, Homo Sapiens
ugcuguccuugaccgauggcaggggaacuccc

SEQ ID NO: 187167 - RNA, 32 nt, Homo Sapiens
gagccguaggacacuccuggcuccucaguagg

SEQ ID NO: 187168 - RNA, 32 nt, Homo Sapiens
gggucgcagggccagcgcuuuagugcgcccca

SEQ ID NO: 187169 - RNA, 32 nt, Homo Sapiens
acccuccaaccuggacugcccgccaccagcgc

SEQ ID NO: 187170 - RNA, 32 nt, Homo Sapiens
ucauuuugcuuguggcuccacacacacaaaaa

SEQ ID NO: 187171 - RNA, 32 nt, Homo Sapiens
aaaucaguuucauuuucauauuucauagauca

SEQ ID NO: 187172 - RNA, 32 nt, Homo Sapiens
uugcauauaaauaacaugcucauaggcaaguu

SEQ ID NO: 187173 - RNA, 32 nt, Homo Sapiens
gucccugcccaggccucuggcuuuuuauauug

SEQ ID NO: 187174 - RNA, 32 nt, Homo Sapiens
ccgcgugacagagccucugcccggcccucccg

SEQ ID NO: 187175 - RNA, 32 nt, Homo Sapiens
cuccuccugccagcucugucacccuggccacc

SEQ ID NO: 187176 - RNA, 32 nt, Homo Sapiens
gcucuggagaggaaacaaaccugaagccacag

SEQ ID NO: 187177 - RNA, 32 nt, Homo Sapiens
ugucacagagucuggggugcgcuguguuguuc

SEQ ID NO: 187178 - RNA, 32 nt, Homo Sapiens
agggggagccuagggcugcccgaggguuccca

SEQ ID NO: 187179 - RNA, 32 nt, Homo Sapiens
ggggaaaggcucacgccccccaucuuagcccc

SEQ ID NO: 187180 - RNA, 32 nt, Homo Sapiens
uuuguuuuaaccuguuccuuaauggcauauaa

SEQ ID NO: 187181 - RNA, 32 nt, Homo Sapiens
cuucccugaagccccaucucagucaccauugu

SEQ ID NO: 187182 - RNA, 32 nt, Homo Sapiens
uugagcgcgcucucaggcugagaacacggucu

SEQ ID NO: 187183 - RNA, 32 nt, Homo Sapiens
agcagcuaagguuguuucuguugagugcugaa

SEQ ID NO: 187184 - RNA, 32 nt, Homo Sapiens
uuaauuucuugcaauuugaagguacgaguaga

SEQ ID NO: 187185 - RNA, 32 nt, Homo Sapiens
uuuucucuuuucuccucuugauccuuucaagc

SEQ ID NO: 187186 - RNA, 29 nt, Homo Sapiens
aacuguauuaaacuuaucuacuggacccc

SEQ ID NO: 187187 - RNA, 32 nt, Homo Sapiens
cggggagaaggcgggccggcccgggagccgcu

SEQ ID NO: 187188 - RNA, 32 nt, Homo Sapiens
ccugccucauauauuucuccucaaaacguugg

SEQ ID NO: 187189 - RNA, 32 nt, Homo Sapiens
aaacaauuuaugcgaaccuaugucuaaauuca

SEQ ID NO: 187190 - RNA, 32 nt, Homo Sapiens
ggcacgaggcgccggccgccauguggagcugc

SEQ ID NO: 187191 - RNA, 32 nt, Homo Sapiens
acagaucuauagaacccaggagccacggccug

SEQ ID NO: 187192 - RNA, 32 nt, Homo Sapiens
uagcagcuuggaagcagauuuggaaugguuua

SEQ ID NO: 187193 - RNA, 32 nt, Homo Sapiens
ugguuucucuuaguucuucucuaacauaguac

SEQ ID NO: 187194 - RNA, 32 nt, Homo Sapiens
uuugcaccaaaauaaacugauacaaaucuguu

SEQ ID NO: 187195 - RNA, 32 nt, Homo Sapiens
guuuccaucccauguugguuugucccagucua

SEQ ID NO: 187196 - RNA, 32 nt, Homo Sapiens
ggaggcagcgggggaagauggcggcggccguu

SEQ ID NO: 187197 - RNA, 32 nt, Homo Sapiens
guagugaaggcggucuccuggaccccagaagc

SEQ ID NO: 187198 - RNA, 32 nt, Homo Sapiens
ggcugguccugaaugccugaccucaagugauu

SEQ ID NO: 187199 - RNA, 32 nt, Homo Sapiens
cuguucauauccuaaagauagacuucuccugc

SEQ ID NO: 187200 - RNA, 32 nt, Homo Sapiens
acugagccaacccccaguguguggccccaccc

SEQ ID NO: 187201 - RNA, 32 nt, Homo Sapiens
gggacuccaacagcaucugcccggcccccucc

SEQ ID NO: 187202 - RNA, 30 nt, Homo Sapiens
guaaggaugugcgaggaggccucuugaaga

SEQ ID NO: 187203 - RNA, 32 nt, Homo Sapiens
cagcucuacuccaggcuuccacacuucugggc

SEQ ID NO: 187204 - RNA, 30 nt, Homo Sapiens
uggcugauuguuccgaugugcccggcugga

SEQ ID NO: 187205 - RNA, 32 nt, Homo Sapiens
guggcgcgaucucagcugcugcaaccuccacc

SEQ ID NO: 187206 - RNA, 32 nt, Homo Sapiens
accccgucuccgcccuggccccgcggaggagc

SEQ ID NO: 187207 - RNA, 32 nt, Homo Sapiens
cacgccccccaagggaggacuacuuccuuuuu

SEQ ID NO: 187208 - RNA, 32 nt, Homo Sapiens
cgccgccgccguugcgcagauccgggccgcgg

SEQ ID NO: 187209 - RNA, 32 nt, Homo Sapiens
cuccagagcucuucuuucuaccuuucugcucc

SEQ ID NO: 187210 - RNA, 32 nt, Homo Sapiens
agaaagugagaggagguuccagcugggcuucc

SEQ ID NO: 187211 - RNA, 32 nt, Homo Sapiens
gccuuugacucaugaggccuagagaaaaguau

SEQ ID NO: 187212 - RNA, 32 nt, Homo Sapiens
gcggccaggcucuggagggacccaggagcugc

SEQ ID NO: 187213 - RNA, 31 nt, Homo Sapiens
guuccaauuaaaaaacauuuuccuauuaaaa

SEQ ID NO: 187214 - RNA, 32 nt, Homo Sapiens
cggucuugccuucccccuccccacaggcucuc

SEQ ID NO: 187215 - RNA, 32 nt, Homo Sapiens
acuuuacuccaggcagggccccugccccuguu

SEQ ID NO: 187216 - RNA, 32 nt, Homo Sapiens
auuaauaauccaauuaaagaugggcaaaagau

SEQ ID NO: 187217 - RNA, 32 nt, Homo Sapiens
gcggggugggcucagaccugcagacucccgca

SEQ ID NO: 187218 - RNA, 28 nt, Homo Sapiens
caaggccgauggcucaggaugauggggc

SEQ ID NO: 187219 - RNA, 32 nt, Homo Sapiens
cugucacauucugcagaaaaagaaauugaggc

SEQ ID NO: 187220 - RNA, 32 nt, Homo Sapiens
aaggcauuuauacccucaggagggauuucuuc

SEQ ID NO: 187221 - RNA, 32 nt, Homo Sapiens
auaaauauguacuuauuuacuaacguauuauc

SEQ ID NO: 187222 - RNA, 32 nt, Homo Sapiens
uaaaauaaaauuuuauuuuaaauuuuaaaaaa

SEQ ID NO: 187223 - RNA, 32 nt, Homo Sapiens
cucgcugcaaccuccgccucccggguucaagu

SEQ ID NO: 187224 - RNA, 32 nt, Homo Sapiens
gcugagguggauuagucaaagaggaacgccuc

SEQ ID NO: 187225 - RNA, 32 nt, Homo Sapiens
ccccccacuguucuccucaucuccagccucag

SEQ ID NO: 187226 - RNA, 32 nt, Homo Sapiens
gagccucugcacugccuaugaauuugaccaac

SEQ ID NO: 187227 - RNA, 32 nt, Homo Sapiens
accuuuggugccugcauuguauuagguacuua

SEQ ID NO: 187228 - RNA, 32 nt, Homo Sapiens
auuauaucuugaugauacauuacuuguucaau

SEQ ID NO: 187229 - RNA, 32 nt, Homo Sapiens
gccaaaggaggagaggcauuaugaggagcagu

SEQ ID NO: 187230 - RNA, 32 nt, Homo Sapiens
aguuuaucaugacugccuccagugacaccacu

SEQ ID NO: 187231 - RNA, 32 nt, Homo Sapiens
guaguuuguuugaccuaguuagauuguggugu

SEQ ID NO: 187232 - RNA, 32 nt, Homo Sapiens
auggauucuuugauuuucuuuugaggaucaau

SEQ ID NO: 187233 - RNA, 32 nt, Homo Sapiens
aggcuggaggagagacggggcugggcgcaagg

SEQ ID NO: 187234 - RNA, 32 nt, Homo Sapiens
uauguggcuccuuuuccaucacuacaucuuuu

SEQ ID NO: 187235 - RNA, 32 nt, Homo Sapiens
aagaacacuauaaaaacagcuccucuauauuu

SEQ ID NO: 187236 - RNA, 32 nt, Homo Sapiens
uuucuauaaaaugggcauaauaaaaucuaucu

SEQ ID NO: 187237 - RNA, 32 nt, Homo Sapiens
uuuccugugacuccaccagccaucaugggugc

SEQ ID NO: 187238 - RNA, 32 nt, Homo Sapiens
ggcacuugucauugacaauggcuccagcacau

SEQ ID NO: 187239 - RNA, 32 nt, Homo Sapiens
ugucgggucccggccccgcucugcccacagac

SEQ ID NO: 187240 - RNA, 32 nt, Homo Sapiens
gucaccaccauccacaccccggacacccagug

SEQ ID NO: 187241 - RNA, 32 nt, Homo Sapiens
gagagcuguaaggccauucuuuagucauucca

SEQ ID NO: 187242 - RNA, 32 nt, Homo Sapiens
gcaguccuccaguucugacacccagaccccgg

SEQ ID NO: 187243 - RNA, 32 nt, Homo Sapiens
ggggagcauuucugcuggcuccaggacuuugg

SEQ ID NO: 187244 - RNA, 32 nt, Homo Sapiens
ccaggauuuuaacguucugcuggacugagcug

SEQ ID NO: 187245 - RNA, 32 nt, Homo Sapiens
agcaggagcccuggacucaucaucaauaaaca

SEQ ID NO: 187246 - RNA, 32 nt, Homo Sapiens
uaaucaccaaaggcucucuccugauagucuuu

SEQ ID NO: 187247 - RNA, 32 nt, Homo Sapiens
uccucacccuccugaggcccaguggggaagaa

SEQ ID NO: 187248 - RNA, 32 nt, Homo Sapiens
ggagccccuccgcuccuaucuccagcagacag

SEQ ID NO: 187249 - RNA, 29 nt, Homo Sapiens
cuucauggugucuucagaggcagacaccu

SEQ ID NO: 187250 - RNA, 32 nt, Homo Sapiens
cagcaucucccucuccucccaaucuccauagg

SEQ ID NO: 187251 - RNA, 27 nt, Homo Sapiens
uauugguccuucucucauucuccgaac

SEQ ID NO: 187252 - RNA, 30 nt, Homo Sapiens
gaagaggauaucccuuccuacaguaaaggg

SEQ ID NO: 187253 - RNA, 32 nt, Homo Sapiens
uacaaaagugaacacaacgcugcguuagucug

SEQ ID NO: 187254 - RNA, 32 nt, Homo Sapiens
ucacuuugauuuuucuuuuuccucccuuagaa

SEQ ID NO: 187255 - RNA, 32 nt, Homo Sapiens
acaucaugcuggaaccugcaaaaaauacuuuu

SEQ ID NO: 187256 - RNA, 32 nt, Homo Sapiens
cccgcgagccuggccagcgaggguagccgcgg

SEQ ID NO: 187257 - RNA, 32 nt, Homo Sapiens
uugggcaggugagucauguuuuaaccacaagc

SEQ ID NO: 187258 - RNA, 32 nt, Homo Sapiens
acacugugugaggcugugucucugccauccaa

SEQ ID NO: 187259 - RNA, 32 nt, Homo Sapiens
agauuaucaaggaaaacggggaucgcugcucc

SEQ ID NO: 187260 - RNA, 32 nt, Homo Sapiens
agaguuugucccguuagauccaggcgugaagg

SEQ ID NO: 187261 - RNA, 32 nt, Homo Sapiens
auuuuauuugaaaagaaucugguuuaaauggc

SEQ ID NO: 187262 - RNA, 32 nt, Homo Sapiens
uuauauaaugacccuccuaggaccuaagaaua

SEQ ID NO: 187263 - RNA, 31 nt, Homo Sapiens
ugaaguuugugcuugaaugaagaguguaucu

SEQ ID NO: 187264 - RNA, 32 nt, Homo Sapiens
ucaguguucaggcuucaguuauauaauguaag

SEQ ID NO: 187265 - RNA, 32 nt, Homo Sapiens
ucacuugcaguaugcuuauccuugacugcaca

SEQ ID NO: 187266 - RNA, 32 nt, Homo Sapiens
gcagcaccagggccuccaccgugcuguggcag

SEQ ID NO: 187267 - RNA, 32 nt, Homo Sapiens
cagagccuucccagcaggccaggccgcugggc

SEQ ID NO: 187268 - RNA, 32 nt, Homo Sapiens
caggaauucuucauaacaguaucuuacaaaaa

SEQ ID NO: 187269 - RNA, 32 nt, Homo Sapiens
aacuaacucugcagauggggcuaggacugugg

SEQ ID NO: 187270 - RNA, 32 nt, Homo Sapiens
caugcuuugacaaauuacaaaaggcucguuug

SEQ ID NO: 187271 - RNA, 30 nt, Homo Sapiens
uaguuuacaaaaauaaaacgcacagaucuu

SEQ ID NO: 187272 - RNA, 32 nt, Homo Sapiens
gcugugcagauguguauggccuugggucacag

SEQ ID NO: 187273 - RNA, 32 nt, Homo Sapiens
aaccccaaguaucucaucagccagggaagagu

SEQ ID NO: 187274 - RNA, 32 nt, Homo Sapiens
uguguaagcagcccuuuuuuuuuuuggucucc

SEQ ID NO: 187275 - RNA, 30 nt, Homo Sapiens
cagcugggcaggcgggcggccugagggcgc

SEQ ID NO: 187276 - RNA, 32 nt, Homo Sapiens
cagauuuguaggcuugaaugugaauguuauuu

SEQ ID NO: 187277 - RNA, 28 nt, Homo Sapiens
acuugugggguuaccaggagugugcguc

SEQ ID NO: 187278 - RNA, 32 nt, Homo Sapiens
cugccuccgagcucagcuagaagacugcgcgc

SEQ ID NO: 187279 - RNA, 32 nt, Homo Sapiens
ccaugagcuuccauccacggaaccucaccaug

SEQ ID NO: 187280 - RNA, 32 nt, Homo Sapiens
aaggaaaacaacaaaacaaaugggaaaaagau

SEQ ID NO: 187281 - RNA, 32 nt, Homo Sapiens
cuuugcagagagaacagcgauguugugcgccc

SEQ ID NO: 187282 - RNA, 32 nt, Homo Sapiens
agucucuuuccuuuuuugcugaugugugcucu

SEQ ID NO: 187283 - RNA, 32 nt, Homo Sapiens
cugagccccaguuuguccaguuuaauggagga

SEQ ID NO: 187284 - RNA, 32 nt, Homo Sapiens
ugauaaagcaaagggcugggaauacaauggaa

SEQ ID NO: 187285 - RNA, 32 nt, Homo Sapiens
cugcgggaauaggugcagcgggcccuuggcgg

SEQ ID NO: 187286 - RNA, 32 nt, Homo Sapiens
uuuucuuaguggaguggaauguucuaucccca

SEQ ID NO: 187287 - RNA, 32 nt, Homo Sapiens
gauauuucaucaaauaaggaugaugaagaaaa

SEQ ID NO: 187288 - RNA, 32 nt, Homo Sapiens
gacuuacccaguacuucccaauaaucuuaucc

SEQ ID NO: 187289 - RNA, 32 nt, Homo Sapiens
acuaauuccagcauucucuccucuuugccuuu

SEQ ID NO: 187290 - RNA, 32 nt, Homo Sapiens
acgagguggagauucccugcuccaagucuucu

SEQ ID NO: 187291 - RNA, 32 nt, Homo Sapiens
ccagcuagcccuuggccuccccgccccacccg

SEQ ID NO: 187292 - RNA, 32 nt, Homo Sapiens
cucuauuuuuaaaaucucaaaaucaugucccc

SEQ ID NO: 187293 - RNA, 30 nt, Homo Sapiens
caggcgcuggacugcagcaggauggggaag

SEQ ID NO: 187294 - RNA, 28 nt, Homo Sapiens
ccgccugggacgccgccgaguggucugu

SEQ ID NO: 187295 - RNA, 32 nt, Homo Sapiens
gugguguugcggcagaggcggcuggaggagcu

SEQ ID NO: 187296 - RNA, 32 nt, Homo Sapiens
ggaaccaagcaccccguccccaucccccuccc

SEQ ID NO: 187297 - RNA, 32 nt, Homo Sapiens
cccguguggagagaaggcaaccccagaucccc

SEQ ID NO: 187298 - RNA, 32 nt, Homo Sapiens
gucgguauuucccccaggggaaacacaagaac

SEQ ID NO: 187299 - RNA, 32 nt, Homo Sapiens
cacguucgcacgcggcggccggcgcgcuggac

SEQ ID NO: 187300 - RNA, 32 nt, Homo Sapiens
cgaauccggccgcauucggccccggucuagcc

SEQ ID NO: 187301 - RNA, 32 nt, Homo Sapiens
uccaguaaauuaacuuuauuucuaaagcauau

SEQ ID NO: 187302 - RNA, 32 nt, Homo Sapiens
cuauguuuuggcuucugcaguacuuuuauuau

SEQ ID NO: 187303 - RNA, 32 nt, Homo Sapiens
ggcccuccaugacacacccccgauuccuggac

SEQ ID NO: 187304 - RNA, 32 nt, Homo Sapiens
aacaacugccagcccggccuggccacagguga

SEQ ID NO: 187305 - RNA, 32 nt, Homo Sapiens
cuuaccugcccccauccuuuuuuguauaugau

SEQ ID NO: 187306 - RNA, 32 nt, Homo Sapiens
caaacaaaaauauugauuucugcuuuuagggc

SEQ ID NO: 187307 - RNA, 32 nt, Homo Sapiens
uguuuucuguuucauuauguccauuguuuucu

SEQ ID NO: 187308 - RNA, 32 nt, Homo Sapiens
acaguucccagugagagaaaugcugaaaguac

SEQ ID NO: 187309 - RNA, 32 nt, Homo Sapiens
aguggccugcuuuggcaggugugugcaggaua

SEQ ID NO: 187310 - RNA, 32 nt, Homo Sapiens
uauguccggaguuuguuuccacccggagagga

SEQ ID NO: 187311 - RNA, 31 nt, Homo Sapiens
gggccacuuuucauuaccugaguuauuugua

SEQ ID NO: 187312 - RNA, 32 nt, Homo Sapiens
cgagugaccucggcccgggaugccccucggcu

SEQ ID NO: 187313 - RNA, 32 nt, Homo Sapiens
gguuccaagucucuccuuuccuggcaggucuu

SEQ ID NO: 187314 - RNA, 32 nt, Homo Sapiens
ucuguggauucuuuaaaccugugugcuaauaa

SEQ ID NO: 187315 - RNA, 32 nt, Homo Sapiens
uauccugugggaagguaggaaugggcuaagua

SEQ ID NO: 187316 - RNA, 32 nt, Homo Sapiens
auauuaauguguaagcuuauauugugucauug

SEQ ID NO: 187317 - RNA, 32 nt, Homo Sapiens
uccaguugauaaaugaaaaucacuggccuaug

SEQ ID NO: 187318 - RNA, 32 nt, Homo Sapiens
ucggugccgcgcuccccucccgcggcccggga

SEQ ID NO: 187319 - RNA, 27 nt, Homo Sapiens
aauaaguccuucuguuuucucuuuaac

SEQ ID NO: 187320 - RNA, 32 nt, Homo Sapiens
gcacagguguugccaguaugcagggaucuggg

SEQ ID NO: 187321 - RNA, 32 nt, Homo Sapiens
gcacuuugcuuuuuuauuaaacguacuccaag

SEQ ID NO: 187322 - RNA, 32 nt, Homo Sapiens
auuagcaaaaggaaaaguggucucaaccuaac

SEQ ID NO: 187323 - RNA, 32 nt, Homo Sapiens
augggaccgaggggcuggaggagaggcggagc

SEQ ID NO: 187324 - RNA, 32 nt, Homo Sapiens
aguguaaaacaaagagaauuaaugaugagguu

SEQ ID NO: 187325 - RNA, 32 nt, Homo Sapiens
gccggcuggugcgcgagacgccgccgagaguu

SEQ ID NO: 187326 - RNA, 32 nt, Homo Sapiens
agcaaaacauaauagaauaaaagccagagacu

SEQ ID NO: 187327 - RNA, 32 nt, Homo Sapiens
gauguuuuauguucuuuuuuggacuuuaucuu

SEQ ID NO: 187328 - RNA, 32 nt, Homo Sapiens
uacagacaaguugcugcuuuuacaaugaguuc

SEQ ID NO: 187329 - RNA, 27 nt, Homo Sapiens
cgauguugaacauguggaaggugcgcg

SEQ ID NO: 187330 - RNA, 27 nt, Homo Sapiens
uucgugucugucuucagcccccaccug

SEQ ID NO: 187331 - RNA, 32 nt, Homo Sapiens
gugauuccauuuccagacagaaagcagauuag

SEQ ID NO: 187332 - RNA, 32 nt, Homo Sapiens
auggaagcagugaacccacaauccacaauccc

SEQ ID NO: 187333 - RNA, 32 nt, Homo Sapiens
cugcuggcuuugauuucucugggucuucaauu

SEQ ID NO: 187334 - RNA, 32 nt, Homo Sapiens
aauuuggaaaauaauauguucauccuuugaaa

SEQ ID NO: 187335 - RNA, 32 nt, Homo Sapiens
uccuucaaggcacaauuuuaaugcaaaagauc

SEQ ID NO: 187336 - RNA, 30 nt, Homo Sapiens
gcuacggcgcccggcuggucagcagcacag

SEQ ID NO: 187337 - RNA, 32 nt, Homo Sapiens
auauucuuuacuaacaugguuaccugcagcca

SEQ ID NO: 187338 - RNA, 31 nt, Homo Sapiens
ccauggaaauaaaaacguaggugugccuucu

SEQ ID NO: 187339 - RNA, 32 nt, Homo Sapiens
aacggguguuuccaaccccuuucaugggggag

SEQ ID NO: 187340 - RNA, 32 nt, Homo Sapiens
ggcugcgagugcugcuggccggcgaggccgcg

SEQ ID NO: 187341 - RNA, 32 nt, Homo Sapiens
guccccaccaggcugcccuugggauggaccuu

SEQ ID NO: 187342 - RNA, 29 nt, Homo Sapiens
agugcauaaaguuugaauuauuuuguucu

SEQ ID NO: 187343 - RNA, 32 nt, Homo Sapiens
agcaggagacuacuccaaagguggcuaugcug

SEQ ID NO: 187344 - RNA, 32 nt, Homo Sapiens
ccaucaucuuccuuuuucauuccaguccuuau

SEQ ID NO: 187345 - RNA, 32 nt, Homo Sapiens
cuucagcugccucagcugggacugaagaccua

SEQ ID NO: 187346 - RNA, 32 nt, Homo Sapiens
ugcguccaggcccuuccccguccguccacagg

SEQ ID NO: 187347 - RNA, 32 nt, Homo Sapiens
caauauuucugcaaucaguuuggcaauuuuug

SEQ ID NO: 187348 - RNA, 30 nt, Homo Sapiens
ucauuaaaaguauaagccuaacuuugucgc

SEQ ID NO: 187349 - RNA, 32 nt, Homo Sapiens
uucugauggaaauaaaugcuuauuugguagga

SEQ ID NO: 187350 - RNA, 32 nt, Homo Sapiens
gcuuccucuuugcauggacucuguggguuaca

SEQ ID NO: 187351 - RNA, 32 nt, Homo Sapiens
cagaugcuuaggauccuggugcuggguuagcu

SEQ ID NO: 187352 - RNA, 32 nt, Homo Sapiens
auuuuucugugcuauauaugaaaaauaauugc

SEQ ID NO: 187353 - RNA, 32 nt, Homo Sapiens
agagguuggcgauauaaucaucuuucacauuc

SEQ ID NO: 187354 - RNA, 32 nt, Homo Sapiens
cgaaccgagccgaguccuguccuuccaggccg

SEQ ID NO: 187355 - RNA, 32 nt, Homo Sapiens
cugaauuauuuucucucgugaguauauugauc

SEQ ID NO: 187356 - RNA, 32 nt, Homo Sapiens
cuacccgccucggccucccaaagugcugggau

SEQ ID NO: 187357 - RNA, 32 nt, Homo Sapiens
uagggccuccccuucucauccuccccaccccc

SEQ ID NO: 187358 - RNA, 32 nt, Homo Sapiens
uacagcuggaaaggcugcuugcggaagugcca

SEQ ID NO: 187359 - RNA, 32 nt, Homo Sapiens
aagaaacagaauuauaaaaauuauauuuugcu

SEQ ID NO: 187360 - RNA, 32 nt, Homo Sapiens
gcccgcaccgagauccaccugcucuucgauca

SEQ ID NO: 187361 - RNA, 32 nt, Homo Sapiens
ucgcggccgcgugcagaggugcaggcagagca

SEQ ID NO: 187362 - RNA, 32 nt, Homo Sapiens
cacuguacuccagccugggugacagagcgaga

SEQ ID NO: 187363 - RNA, 32 nt, Homo Sapiens
auaaaugaaggggauauucgacuguauaacca

SEQ ID NO: 187364 - RNA, 32 nt, Homo Sapiens
aacacagucugauuuucaaacccauaugcuuc

SEQ ID NO: 187365 - RNA, 32 nt, Homo Sapiens
cuuguauuccuuuuucucuccucuccccauga

SEQ ID NO: 187366 - RNA, 32 nt, Homo Sapiens
aguauuguauuaaauguaaaucuuaaaaagau

SEQ ID NO: 187367 - RNA, 32 nt, Homo Sapiens
cucgagacugguaucugacuagugguucuuuc

SEQ ID NO: 187368 - RNA, 32 nt, Homo Sapiens
aacugaauacuuguuuuauagaaaaugcaugg

SEQ ID NO: 187369 - RNA, 32 nt, Homo Sapiens
cuuauugacaguauuaauaaacuauuauuuug

SEQ ID NO: 187370 - RNA, 32 nt, Homo Sapiens
ugaaagcugcacggcgcagagacauggaugug

SEQ ID NO: 187371 - RNA, 32 nt, Homo Sapiens
uucccacugcaggagagcugcccccuuucacg

SEQ ID NO: 187372 - RNA, 30 nt, Homo Sapiens
cgggugcgguggcuuaugcaaaauggcucc

SEQ ID NO: 187373 - RNA, 32 nt, Homo Sapiens
gacuuagagaagaggaagagaauaggaaaacc

SEQ ID NO: 187374 - RNA, 32 nt, Homo Sapiens
uuucacuuuguaacaaaguaucuuucaguuuu

SEQ ID NO: 187375 - RNA, 32 nt, Homo Sapiens
gcaccugccugucuccucucccagagcacagu

SEQ ID NO: 187376 - RNA, 32 nt, Homo Sapiens
ggcgcuggaaaacacgcagggcagguugggca

SEQ ID NO: 187377 - RNA, 32 nt, Homo Sapiens
ugggcuuggggcuuccuaacugcuacaaauac

SEQ ID NO: 187378 - RNA, 32 nt, Homo Sapiens
aagaagauaaccucaaucauggccauaccgag

SEQ ID NO: 187379 - RNA, 32 nt, Homo Sapiens
ccucugccuccacucucauucagacacucagc

SEQ ID NO: 187380 - RNA, 32 nt, Homo Sapiens
cugugugccucccuggcugcugcugcugcagg

SEQ ID NO: 187381 - RNA, 30 nt, Homo Sapiens
acauucuaucaccagcaagagaauauguaa

SEQ ID NO: 187382 - RNA, 32 nt, Homo Sapiens
gaagguuuguaaaaauaugccugcugcuuuuc

SEQ ID NO: 187383 - RNA, 29 nt, Homo Sapiens
ucagauucuaaauguuugggaucauuccu

SEQ ID NO: 187384 - RNA, 32 nt, Homo Sapiens
aagcugcaauguaacauagguaucuuuuucua

SEQ ID NO: 187385 - RNA, 32 nt, Homo Sapiens
cucaucugguggccacagcagccaagccuaga

SEQ ID NO: 187386 - RNA, 32 nt, Homo Sapiens
aucgucaggacccuaaagaauggccgagccuu

SEQ ID NO: 187387 - RNA, 32 nt, Homo Sapiens
aaggagggugagagggcggcgaggcgagggcc

SEQ ID NO: 187388 - RNA, 32 nt, Homo Sapiens
uuaccaucuaagaacucugugguuuauuauua

SEQ ID NO: 187389 - RNA, 32 nt, Homo Sapiens
agccagggaguucacagcugugugguggcaca

SEQ ID NO: 187390 - RNA, 32 nt, Homo Sapiens
gacugggguggguugguggcaccaauggcagc

SEQ ID NO: 187391 - RNA, 32 nt, Homo Sapiens
uuggcuggcaacugacggacgcagcgggcagc

SEQ ID NO: 187392 - RNA, 32 nt, Homo Sapiens
ccacccagcugcugccuauucccugccccuuc

SEQ ID NO: 187393 - RNA, 32 nt, Homo Sapiens
guguguggugugcagcauggggaccaguccug

SEQ ID NO: 187394 - RNA, 32 nt, Homo Sapiens
agguguagggaagaggaaaucggagaucccag

SEQ ID NO: 187395 - RNA, 32 nt, Homo Sapiens
ccucgcucccugcuccuccaggaauucccagc

SEQ ID NO: 187396 - RNA, 32 nt, Homo Sapiens
uuuaugaaagguacuauuccuucuuucacauu

SEQ ID NO: 187397 - RNA, 32 nt, Homo Sapiens
uuuagagucaaguaugagacacagcuggccau

SEQ ID NO: 187398 - RNA, 32 nt, Homo Sapiens
gccagcagcuccggcgccaccucgggccggcg

SEQ ID NO: 187399 - RNA, 32 nt, Homo Sapiens
ucaaggcccaacugugcccagcccucugcagc

SEQ ID NO: 187400 - RNA, 32 nt, Homo Sapiens
ucggaggccuuucucucccaugggcccugcaa

SEQ ID NO: 187401 - RNA, 32 nt, Homo Sapiens
uugcuuuugccccgcucuggcuuaccagaggu

SEQ ID NO: 187402 - RNA, 32 nt, Homo Sapiens
acgcauuggggaauuguguguauuuucuagca

SEQ ID NO: 187403 - RNA, 32 nt, Homo Sapiens
uuacaccgcucccgggccugccccgcuguccc

SEQ ID NO: 187404 - RNA, 32 nt, Homo Sapiens
ugcccuuacuagacauaagauaauucguacug

SEQ ID NO: 187405 - RNA, 32 nt, Homo Sapiens
augugguagaugaaaaucauggcaugaauucc

SEQ ID NO: 187406 - RNA, 32 nt, Homo Sapiens
ucccuuccccacuuucacuagagcauccugcc

SEQ ID NO: 187407 - RNA, 32 nt, Homo Sapiens
aaaauagccagguguagcgacacacaccugua

SEQ ID NO: 187408 - RNA, 32 nt, Homo Sapiens
cuagaggagcccaucccagcuuucuuuacugc

SEQ ID NO: 187409 - RNA, 31 nt, Homo Sapiens
ucuagagcagagagcagaccauagauuuuag

SEQ ID NO: 187410 - RNA, 32 nt, Homo Sapiens
cuucuuguggcaauugugaaugggauugcauu

SEQ ID NO: 187411 - RNA, 32 nt, Homo Sapiens
uuauuuuuuguauuuucuuuugguaaucucuu

SEQ ID NO: 187412 - RNA, 32 nt, Homo Sapiens
gccggcgggucgugcccuggaaggugagcgcg

SEQ ID NO: 187413 - RNA, 29 nt, Homo Sapiens
uugguuccggucccgguaccuuguuaacc

SEQ ID NO: 187414 - RNA, 32 nt, Homo Sapiens
ucucacuauuugaaaauucaugcugaaaaacu

SEQ ID NO: 187415 - RNA, 30 nt, Homo Sapiens
aacacgaggcuugccaccaucuuggaagca

SEQ ID NO: 187416 - RNA, 32 nt, Homo Sapiens
auuccuuaguccugcuggccuugggcuggagc

SEQ ID NO: 187417 - RNA, 32 nt, Homo Sapiens
gauccgccucccuccgccaggacccgcacaga

SEQ ID NO: 187418 - RNA, 32 nt, Homo Sapiens
uucuauucuuucacuauauauagaaauacaau

SEQ ID NO: 187419 - RNA, 32 nt, Homo Sapiens
auucuugcugcuuaagaugaaaagcauugguu

SEQ ID NO: 187420 - RNA, 32 nt, Homo Sapiens
cgaguaaacgagcacuucaucuagcgccgggc

SEQ ID NO: 187421 - RNA, 32 nt, Homo Sapiens
cgggaugccggggcggccaggcuggcccaacg

SEQ ID NO: 187422 - RNA, 32 nt, Homo Sapiens
ccucugaccugccguguccuuugcaggaagga

SEQ ID NO: 187423 - RNA, 32 nt, Homo Sapiens
cgugguugccaggagagcugcgccggcgagaa

SEQ ID NO: 187424 - RNA, 32 nt, Homo Sapiens
cuuccugggagccuuucccacccccuucccug

SEQ ID NO: 187425 - RNA, 32 nt, Homo Sapiens
ccauauuccuuuucuuuuucucuugugccaaa

SEQ ID NO: 187426 - RNA, 32 nt, Homo Sapiens
caugugacuuccccuuucccuucccacucgcu

SEQ ID NO: 187427 - RNA, 32 nt, Homo Sapiens
auauuuauuaaauaaaacaaaacaaguucucc

SEQ ID NO: 187428 - RNA, 32 nt, Homo Sapiens
aacaaaggcagacugagcgccagagaggacgu

SEQ ID NO: 187429 - RNA, 32 nt, Homo Sapiens
ugggugggaaggagggcgguggauuuaaugga

SEQ ID NO: 187430 - RNA, 32 nt, Homo Sapiens
ugaauuguuuuaaaugcuucuuaaagucuggc

SEQ ID NO: 187431 - RNA, 32 nt, Homo Sapiens
ugaauuccaagcccaggguuuggcuccuuaaa

SEQ ID NO: 187432 - RNA, 32 nt, Homo Sapiens
agaggggccgacccuccucgggaaccggccag

SEQ ID NO: 187433 - RNA, 32 nt, Homo Sapiens
guuggaaaaacacaauuaugacaccgaaaagc

SEQ ID NO: 187434 - RNA, 32 nt, Homo Sapiens
ucuggccccccucuucugaaacaggaugugca

SEQ ID NO: 187435 - RNA, 32 nt, Homo Sapiens
ucuaugaaugaaauacugauuuuaacaggcug

SEQ ID NO: 187436 - RNA, 32 nt, Homo Sapiens
aaaaugaucacgucucugaauuuuuucuuuaa

SEQ ID NO: 187437 - RNA, 32 nt, Homo Sapiens
cuuugagaacagaguaccuugaucaauuaaau

SEQ ID NO: 187438 - RNA, 32 nt, Homo Sapiens
gcagggaggguguggcugggcugggcugggcg

SEQ ID NO: 187439 - RNA, 32 nt, Homo Sapiens
uccuucacaucccuuuuuccugagcucgaacu

SEQ ID NO: 187440 - RNA, 32 nt, Homo Sapiens
ugcauuugaagaauguauguagcacuuuccua

SEQ ID NO: 187441 - RNA, 32 nt, Homo Sapiens
uaaaacaggaccauauuuauuuacuucuguca

SEQ ID NO: 187442 - RNA, 32 nt, Homo Sapiens
agccuuauacccauccugcgggcaucucccca

SEQ ID NO: 187443 - RNA, 30 nt, Homo Sapiens
gucucgugggguggcaucggggcugcgggg

SEQ ID NO: 187444 - RNA, 29 nt, Homo Sapiens
ugggaugcuguucucaguuugacuguggg

SEQ ID NO: 187445 - RNA, 32 nt, Homo Sapiens
gugcauggcagccucaagugggaaauaccacc

SEQ ID NO: 187446 - RNA, 32 nt, Homo Sapiens
cccaacuacuagggaggcugaggugggaggau

SEQ ID NO: 187447 - RNA, 32 nt, Homo Sapiens
cugucaauaaacgguuugaggauugcagaaaa

SEQ ID NO: 187448 - RNA, 32 nt, Homo Sapiens
cccacuucuagcugcuucuccucuuguuucug

SEQ ID NO: 187449 - RNA, 32 nt, Homo Sapiens
uggggguguccaaaagcaccacagcacaucca

SEQ ID NO: 187450 - RNA, 32 nt, Homo Sapiens
uucucucaauggcuuguguugaggacucuggg

SEQ ID NO: 187451 - RNA, 32 nt, Homo Sapiens
uccgcgacgcggcccgccucggucaccgcggc

SEQ ID NO: 187452 - RNA, 32 nt, Homo Sapiens
cggcggcggccccucgggcagcuaccaguccc

SEQ ID NO: 187453 - RNA, 32 nt, Homo Sapiens
cuuuagaaauacccucugcaccaccugcuuca

SEQ ID NO: 187454 - RNA, 32 nt, Homo Sapiens
auucuuuuacacaaauuuauaaauaaauuuug

SEQ ID NO: 187455 - RNA, 32 nt, Homo Sapiens
cugcccaccgcccucccuccccgcccugccgc

SEQ ID NO: 187456 - RNA, 32 nt, Homo Sapiens
cugggucagggugacugaggcauuuuguggcc

SEQ ID NO: 187457 - RNA, 32 nt, Homo Sapiens
guauauugcuauagauuuuucuuuaacaagcu

SEQ ID NO: 187458 - RNA, 32 nt, Homo Sapiens
uguauguaguugauuugacagauuuuaucuga

SEQ ID NO: 187459 - RNA, 32 nt, Homo Sapiens
ccagcucaaccgggagugccugcugcaccucu

SEQ ID NO: 187460 - RNA, 32 nt, Homo Sapiens
uacuuucaauaaaaacccucuaucuugccucc

SEQ ID NO: 187461 - RNA, 28 nt, Homo Sapiens
gcugguuuucuuggaauguguuuacgau

SEQ ID NO: 187462 - RNA, 32 nt, Homo Sapiens
augguccacagugguucaauaucucaugcagc

SEQ ID NO: 187463 - RNA, 32 nt, Homo Sapiens
gggaauuuguauccccuucuacagauggagaa

SEQ ID NO: 187464 - RNA, 32 nt, Homo Sapiens
gucaccuccuuccccagcucccccaggcagaa

SEQ ID NO: 187465 - RNA, 32 nt, Homo Sapiens
agcugcaaggccaacagcugugcaaagccaca

SEQ ID NO: 187466 - RNA, 32 nt, Homo Sapiens
uggggcgggcugaugagcaccuggauuuucac

SEQ ID NO: 187467 - RNA, 32 nt, Homo Sapiens
accgggcccucucuccuucuauauguucagca

SEQ ID NO: 187468 - RNA, 32 nt, Homo Sapiens
acucucugggccugggauauuuugcggggagc

SEQ ID NO: 187469 - RNA, 32 nt, Homo Sapiens
agacuguaaugauccauucaugagcugguaug

SEQ ID NO: 187470 - RNA, 32 nt, Homo Sapiens
cucaaaaucuucugaugucuuccaauuucaac

SEQ ID NO: 187471 - RNA, 32 nt, Homo Sapiens
gcccaacucuggaugccuguuauacugggaca

SEQ ID NO: 187472 - RNA, 32 nt, Homo Sapiens
cuggaagaggauguuauauuggacucguuauu

SEQ ID NO: 187473 - RNA, 32 nt, Homo Sapiens
caaaucuauaugugccaguuuauauugacucc

SEQ ID NO: 187474 - RNA, 32 nt, Homo Sapiens
gguagagcagcaugcaucgaggccugagggug

SEQ ID NO: 187475 - RNA, 32 nt, Homo Sapiens
aacaugaaaacaauucuuauugacucauacac

SEQ ID NO: 187476 - RNA, 32 nt, Homo Sapiens
aacccuggaaauucuccaacccugccaucuca

SEQ ID NO: 187477 - RNA, 32 nt, Homo Sapiens
uucuugccaaaauaaguguuaacuguguuuca

SEQ ID NO: 187478 - RNA, 32 nt, Homo Sapiens
cuucccuugcccucuccagcuccaccucaccc

SEQ ID NO: 187479 - RNA, 32 nt, Homo Sapiens
auguaaauaaacaauagauccagcuuuaaaaa

SEQ ID NO: 187480 - RNA, 32 nt, Homo Sapiens
gagcuucucugccuauggaguagucauucuuu

SEQ ID NO: 187481 - RNA, 32 nt, Homo Sapiens
uauacagacaaaaacaugaaaacugcaaacgc

SEQ ID NO: 187482 - RNA, 32 nt, Homo Sapiens
gaaugggauguauucuucugcugcugcuuauu

SEQ ID NO: 187483 - RNA, 32 nt, Homo Sapiens
gcaguguccaggcucucgcccgccggugccug

SEQ ID NO: 187484 - RNA, 32 nt, Homo Sapiens
cacauagcauauaaacaugucuguagcacaua

SEQ ID NO: 187485 - RNA, 32 nt, Homo Sapiens
uucuaaguuuuacuuuuuguauguuaccugua

SEQ ID NO: 187486 - RNA, 32 nt, Homo Sapiens
cauauagugucugucuucuuucacuaguaugu

SEQ ID NO: 187487 - RNA, 32 nt, Homo Sapiens
ucauuuguuucaugggcaaacacuauccagga

SEQ ID NO: 187488 - RNA, 32 nt, Homo Sapiens
cuuaaucugaaauauaauuuaacuugugaacu

SEQ ID NO: 187489 - RNA, 32 nt, Homo Sapiens
cuggucuuaaagccaccugcuuccuccacccc

SEQ ID NO: 187490 - RNA, 32 nt, Homo Sapiens
aaauuauguuuccucuguuuuuuauuuuaucu

SEQ ID NO: 187491 - RNA, 32 nt, Homo Sapiens
ggcaugguggcguggcacgugccuguaguccc

SEQ ID NO: 187492 - RNA, 32 nt, Homo Sapiens
uaagggguguaaaccccaagaguaucugagac

SEQ ID NO: 187493 - RNA, 32 nt, Homo Sapiens
cagcgccccgaucccggcgccccaacccccac

SEQ ID NO: 187494 - RNA, 32 nt, Homo Sapiens
uguagagacguauacauauauauagacacacu

SEQ ID NO: 187495 - RNA, 32 nt, Homo Sapiens
cccuucaccucagcucaacaaacaaacucuug

SEQ ID NO: 187496 - RNA, 32 nt, Homo Sapiens
guuccuuagagcucgagagcucgucuccuauc

SEQ ID NO: 187497 - RNA, 32 nt, Homo Sapiens
uuuggagcaaggggaaggguugccagaguccu

SEQ ID NO: 187498 - RNA, 32 nt, Homo Sapiens
uuuuuggaagcagucgcuuguaaccuaaguug

SEQ ID NO: 187499 - RNA, 32 nt, Homo Sapiens
uuaaaaauaggucuuuuuuuuauauuuuggaa

SEQ ID NO: 187500 - RNA, 32 nt, Homo Sapiens
uggugucguggguguuacgugcaggaacgugg

SEQ ID NO: 187501 - RNA, 32 nt, Homo Sapiens
ccgggcccucucuccuucuauauguucagcac

SEQ ID NO: 187502 - RNA, 32 nt, Homo Sapiens
ccucccccaucccuacccuuguccacaggcuc

SEQ ID NO: 187503 - RNA, 32 nt, Homo Sapiens
ucucucccugucacacacuggaccccacuggc

SEQ ID NO: 187504 - RNA, 32 nt, Homo Sapiens
ccccgcccgcccugcccuccccucccgauccc

SEQ ID NO: 187505 - RNA, 32 nt, Homo Sapiens
ugaaauacguauuuuuaaaacauggcuuuuga

SEQ ID NO: 187506 - RNA, 32 nt, Homo Sapiens
uauacccauaauagaauuauggcacucauuuc

SEQ ID NO: 187507 - RNA, 32 nt, Homo Sapiens
aaauggcggggaagcugaaaccucugaaugug

SEQ ID NO: 187508 - RNA, 32 nt, Homo Sapiens
uagcugggaucaugcuagucacuuccugcccc

SEQ ID NO: 187509 - RNA, 32 nt, Homo Sapiens
agccucuugagaaauuguuacucauugaacug

SEQ ID NO: 187510 - RNA, 32 nt, Homo Sapiens
ugagccagaccgagucccucaaggcugccuuc

SEQ ID NO: 187511 - RNA, 32 nt, Homo Sapiens
ggggaagggacucuguaacauaaacuugaguu

SEQ ID NO: 187512 - RNA, 32 nt, Homo Sapiens
accgcagggucggugaggggcugggcuggaca

SEQ ID NO: 187513 - RNA, 32 nt, Homo Sapiens
gagccggcugcuagugaggcugccggggaugc

SEQ ID NO: 187514 - RNA, 32 nt, Homo Sapiens
gacucggaccgcucgggagagccccaggagag

SEQ ID NO: 187515 - RNA, 32 nt, Homo Sapiens
cggggaaaccgaaagugggcggcggccgcggc

SEQ ID NO: 187516 - RNA, 32 nt, Homo Sapiens
ugggcagggacugugucuuuuuucaucuuugu

SEQ ID NO: 187517 - RNA, 32 nt, Homo Sapiens
uucuccucuuugcuuccauucaucucuguugg

SEQ ID NO: 187518 - RNA, 32 nt, Homo Sapiens
gagggugguagccccuccccagccuucuuucu

SEQ ID NO: 187519 - RNA, 32 nt, Homo Sapiens
cccggugcgggugggagucagggcgcccggaa

SEQ ID NO: 187520 - RNA, 32 nt, Homo Sapiens
gauagcuugacaaggagugcugucuguccuua

SEQ ID NO: 187521 - RNA, 32 nt, Homo Sapiens
agauauaaauguuuauggcugaaauguuaugg

SEQ ID NO: 187522 - RNA, 32 nt, Homo Sapiens
cccaggaggcggaguuugcagugagcugagau

SEQ ID NO: 187523 - RNA, 32 nt, Homo Sapiens
caagcgaagucaaaacugaugaaaauuuauuu

SEQ ID NO: 187524 - RNA, 32 nt, Homo Sapiens
cacagaaacaagcagaugcacaugucaacagu

SEQ ID NO: 187525 - RNA, 32 nt, Homo Sapiens
agaaggggggcucccccuuccuuccauguauc

SEQ ID NO: 187526 - RNA, 32 nt, Homo Sapiens
uuguauuuguggcgauuuuaauaaaaaggaua

SEQ ID NO: 187527 - RNA, 32 nt, Homo Sapiens
cuucauagguagugccugggggcuguggcggu

SEQ ID NO: 187528 - RNA, 32 nt, Homo Sapiens
uguccuuccucccauuuccucccuuuggcccg

SEQ ID NO: 187529 - RNA, 32 nt, Homo Sapiens
cagcaucuauacguaauuuaaacaaauuuaga

SEQ ID NO: 187530 - RNA, 32 nt, Homo Sapiens
uccaucuauugcaacuuucucaagcauuuuca

SEQ ID NO: 187531 - RNA, 32 nt, Homo Sapiens
auugauccggguuuuaucccucuucuuuuuuc

SEQ ID NO: 187532 - RNA, 32 nt, Homo Sapiens
ugcuucuguuccccuaaaaccaaaaaaugaac

SEQ ID NO: 187533 - RNA, 32 nt, Homo Sapiens
ggcugcagagggagcacuguggcugccauccc

SEQ ID NO: 187534 - RNA, 32 nt, Homo Sapiens
cgcgggcccgggggcgggaacgcgccgcggcc

SEQ ID NO: 187535 - RNA, 32 nt, Homo Sapiens
uucauuuuaaacaaaagcagaguacaccggua

SEQ ID NO: 187536 - RNA, 32 nt, Homo Sapiens
caggcucucucuccccagcaguguuuacccau

SEQ ID NO: 187537 - RNA, 32 nt, Homo Sapiens
auugaaggaagacaugugucuuuccuuuuugu

SEQ ID NO: 187538 - RNA, 32 nt, Homo Sapiens
aagguuuaaaauguacuaauaaaaacuggaga

SEQ ID NO: 187539 - RNA, 32 nt, Homo Sapiens
cagcaccuauauauuuuucugugagugacuau

SEQ ID NO: 187540 - RNA, 32 nt, Homo Sapiens
aauuagucuuuuguguuguuuauuuucuaccu

SEQ ID NO: 187541 - RNA, 32 nt, Homo Sapiens
gauuggcagccucagcaucaccuaguagcuug

SEQ ID NO: 187542 - RNA, 32 nt, Homo Sapiens
aucacuugagaucaggaccagccuggucaaga

SEQ ID NO: 187543 - RNA, 32 nt, Homo Sapiens
uccuuuuagagauauuuuuaaaacuuguuuaa

SEQ ID NO: 187544 - RNA, 32 nt, Homo Sapiens
cguaaaaauauaacagaagaaauaauguaaaa

SEQ ID NO: 187545 - RNA, 32 nt, Homo Sapiens
ggagcugggccagccgcccacccccaccccca

SEQ ID NO: 187546 - RNA, 32 nt, Homo Sapiens
caugagcccagccccagcucaccugccaaucc

SEQ ID NO: 187547 - RNA, 32 nt, Homo Sapiens
auaauuuuucuuuucuccaggucccaagauaa

SEQ ID NO: 187548 - RNA, 32 nt, Homo Sapiens
ggcccuauuuuucuuaaacaaaacagugacaa

SEQ ID NO: 187549 - RNA, 32 nt, Homo Sapiens
gacaccaugagcucaggaucugugugaggugu

SEQ ID NO: 187550 - RNA, 32 nt, Homo Sapiens
ccaagaaccuagagacccugccucagaauggg

SEQ ID NO: 187551 - RNA, 32 nt, Homo Sapiens
aaauuagagaauaagauuauuuugaaugacuu

SEQ ID NO: 187552 - RNA, 32 nt, Homo Sapiens
gguacaggcagacaacccugguaggagagaug

SEQ ID NO: 187553 - RNA, 32 nt, Homo Sapiens
ucgacaaaaaauuuaaaaauuagcugggcaug

SEQ ID NO: 187554 - RNA, 32 nt, Homo Sapiens
caauggaggagaaagucgcgcuugguuagucu

SEQ ID NO: 187555 - RNA, 32 nt, Homo Sapiens
uggcaaauugagaucaaugaggccaaaaggaa

SEQ ID NO: 187556 - RNA, 32 nt, Homo Sapiens
guaggcucauuuccauuugcacagaaaguuuc

SEQ ID NO: 187557 - RNA, 32 nt, Homo Sapiens
gguuggaaagacuuggaaauccagcaugugug

SEQ ID NO: 187558 - RNA, 32 nt, Homo Sapiens
aguagaaaauauauaucuuuuacauauguaug

SEQ ID NO: 187559 - RNA, 32 nt, Homo Sapiens
cccuauauacgacacuugauaauuaagaugau

SEQ ID NO: 187560 - RNA, 32 nt, Homo Sapiens
augaucacuuuaucucuaguagccucaguucu

SEQ ID NO: 187561 - RNA, 32 nt, Homo Sapiens
uggcuuuucugagagaugaaucaauaaugaaa

SEQ ID NO: 187562 - RNA, 32 nt, Homo Sapiens
gauauauuugucaauggaauguuuccacauau

SEQ ID NO: 187563 - RNA, 32 nt, Homo Sapiens
ccuggugccgcccacaccuccucaccccagcc

SEQ ID NO: 187564 - RNA, 32 nt, Homo Sapiens
aaaacucacaguggggaagcggugccggaacc

SEQ ID NO: 187565 - RNA, 32 nt, Homo Sapiens
cuaggaaaauacacaaagagaggaccagacca

SEQ ID NO: 187566 - RNA, 32 nt, Homo Sapiens
aacaaaccaaaauuuaaaugaucagaauuggc

SEQ ID NO: 187567 - RNA, 32 nt, Homo Sapiens
gacaagacucugacuauaaacagaacauccac

SEQ ID NO: 187568 - RNA, 32 nt, Homo Sapiens
uauuugauagguaaauauaguuuuauugucac

SEQ ID NO: 187569 - RNA, 32 nt, Homo Sapiens
uucuaggccuggcgaccgggcagcgaggaccg

SEQ ID NO: 187570 - RNA, 32 nt, Homo Sapiens
guguggacagugccgcacccucaacauaggcc

SEQ ID NO: 187571 - RNA, 32 nt, Homo Sapiens
cuggaguguacugugugguaacugugguagug

SEQ ID NO: 187572 - RNA, 32 nt, Homo Sapiens
cuccgggacccacggggaccaaggucacacgu

SEQ ID NO: 187573 - RNA, 32 nt, Homo Sapiens
aaggcccaauuaucccgcucucauggacaacu

SEQ ID NO: 187574 - RNA, 32 nt, Homo Sapiens
uuaaugggugcagcacaccagcauggcacaug

SEQ ID NO: 187575 - RNA, 32 nt, Homo Sapiens
cuggucucuucucuccucuuccauaagaauag

SEQ ID NO: 187576 - RNA, 32 nt, Homo Sapiens
acaaacagaaaaguuggaaaaggauaauacag

SEQ ID NO: 187577 - RNA, 32 nt, Homo Sapiens
agaccagaugaaccccaccugacucacaugag

SEQ ID NO: 187578 - RNA, 32 nt, Homo Sapiens
agcuccgccucccggguucucaccauucuccu

SEQ ID NO: 187579 - RNA, 28 nt, Homo Sapiens
uggauggagaaccuccggcgagcggugc

SEQ ID NO: 187580 - RNA, 32 nt, Homo Sapiens
uggacacccagccccagcucugccugaaggga

SEQ ID NO: 187581 - RNA, 32 nt, Homo Sapiens
ggaauguccccuugcaguucucuucucuuuuu

SEQ ID NO: 187582 - RNA, 32 nt, Homo Sapiens
aaaggggaggguagcgggaggguagcagguga

SEQ ID NO: 187583 - RNA, 32 nt, Homo Sapiens
auuaaggauucuguccucuccucauuccuuug

SEQ ID NO: 187584 - RNA, 32 nt, Homo Sapiens
uccuuucucuuuugccuauuaaaccucugcuc

SEQ ID NO: 187585 - RNA, 32 nt, Homo Sapiens
cagguauaaaaaauauuuuaauuauaguuuug

SEQ ID NO: 187586 - RNA, 32 nt, Homo Sapiens
cccacagcccuggcugcaggcaucaugaccca

SEQ ID NO: 187587 - RNA, 32 nt, Homo Sapiens
aggggccgugacaaauuacucaauugcacuca

SEQ ID NO: 187588 - RNA, 32 nt, Homo Sapiens
auuuccuggguuuuccucuucccuaucucccc

SEQ ID NO: 187589 - RNA, 32 nt, Homo Sapiens
auauccagcauacauuuccauguggcugccau

SEQ ID NO: 187590 - RNA, 32 nt, Homo Sapiens
ugcgacagcauuaaagacugaugcuaaaccuc

SEQ ID NO: 187591 - RNA, 32 nt, Homo Sapiens
cggaagugcaaggagcuguagauggaaggugu

SEQ ID NO: 187592 - RNA, 32 nt, Homo Sapiens
cgagccagccccgacugcuccuccucuuccuc

SEQ ID NO: 187593 - RNA, 32 nt, Homo Sapiens
ggaccccagugccuuguugagggcgccauucu

SEQ ID NO: 187594 - RNA, 32 nt, Homo Sapiens
agcagacauugcuaaucaauccucugccauga

SEQ ID NO: 187595 - RNA, 32 nt, Homo Sapiens
uggaaggaaacaaaacaaaacaaaacucacuc

SEQ ID NO: 187596 - RNA, 32 nt, Homo Sapiens
gcggagcgcugagggcagcggcuggcucugcu

SEQ ID NO: 187597 - RNA, 32 nt, Homo Sapiens
augguuuaaaagacuuugaagcaggaauguug

SEQ ID NO: 187598 - RNA, 32 nt, Homo Sapiens
gcuaacaauugaauccagaaaucuacuuucuc

SEQ ID NO: 187599 - RNA, 32 nt, Homo Sapiens
gcaggauucagggcagggguccucuugccgag

SEQ ID NO: 187600 - RNA, 32 nt, Homo Sapiens
ucuccuuuguuugauggagcugugauuagcac

SEQ ID NO: 187601 - RNA, 32 nt, Homo Sapiens
ccugaugcuaaccccugacucaacucucaccc

SEQ ID NO: 187602 - RNA, 32 nt, Homo Sapiens
gcauaggagcaucucagccuccagguccucuc

SEQ ID NO: 187603 - RNA, 32 nt, Homo Sapiens
cuucaggccgccccaguguccuccuccuucuc

SEQ ID NO: 187604 - RNA, 29 nt, Homo Sapiens
ugacuuguuuaaauaaauucagcaaaugg

SEQ ID NO: 187605 - RNA, 32 nt, Homo Sapiens
gaaguugauucuuauuugauggugguauugug

SEQ ID NO: 187606 - RNA, 32 nt, Homo Sapiens
gauggaaugucacgagggauccagccaccccc

SEQ ID NO: 187607 - RNA, 32 nt, Homo Sapiens
ugucgguagguuccgugaugccccacaagccg

SEQ ID NO: 187608 - RNA, 32 nt, Homo Sapiens
gacuggcgccacgcgccgcgcuucgugacgcc

SEQ ID NO: 187609 - RNA, 32 nt, Homo Sapiens
ugccuacucccacaguaaaaugcuguccaacc

SEQ ID NO: 187610 - RNA, 30 nt, Homo Sapiens
cagaguccaaguuguaugcaaaaaaucuau

SEQ ID NO: 187611 - RNA, 32 nt, Homo Sapiens
ucaggagagugcagaucugugcucaucggaga

SEQ ID NO: 187612 - RNA, 32 nt, Homo Sapiens
uugaacauuauuuuuguuguucuauuauaaag

SEQ ID NO: 187613 - RNA, 32 nt, Homo Sapiens
guaugcuugagugauggguccccagcccaagc

SEQ ID NO: 187614 - RNA, 32 nt, Homo Sapiens
cucuuggaaagugaaaacuuuagaugaaauuc

SEQ ID NO: 187615 - RNA, 32 nt, Homo Sapiens
acaccgaggccggcgugcaggcgugcgggugu

SEQ ID NO: 187616 - RNA, 31 nt, Homo Sapiens
aaccagugaaacaucuuuuuauucuugcagg

SEQ ID NO: 187617 - RNA, 32 nt, Homo Sapiens
aggcucugcccccgggcuccgguggugcgggg

SEQ ID NO: 187618 - RNA, 32 nt, Homo Sapiens
gauggacucuagcucugucacccaggcuggag

SEQ ID NO: 187619 - RNA, 32 nt, Homo Sapiens
aucugacgcgccgagagccuggcgcgggguga

SEQ ID NO: 187620 - RNA, 32 nt, Homo Sapiens
auguuauguaaggggugagacacaacagucug

SEQ ID NO: 187621 - RNA, 32 nt, Homo Sapiens
aucgauggccuggccuuggcuucugauuauuu

SEQ ID NO: 187622 - RNA, 32 nt, Homo Sapiens
uuugcugaggugcaauuuggaacucugcaaga

SEQ ID NO: 187623 - RNA, 32 nt, Homo Sapiens
ggggcugcucggugcugcuguuaagacgugag

SEQ ID NO: 187624 - RNA, 32 nt, Homo Sapiens
uuuucacugcuuuaguuuccuguuugcuggug

SEQ ID NO: 187625 - RNA, 32 nt, Homo Sapiens
ugguuucuggaaagauucuuugucaacauuag

SEQ ID NO: 187626 - RNA, 32 nt, Homo Sapiens
cugaucaucgucucggcagagacggccggcaa

SEQ ID NO: 187627 - RNA, 32 nt, Homo Sapiens
uggugcccacccagggcacacugucggaguuc

SEQ ID NO: 187628 - RNA, 32 nt, Homo Sapiens
ccuggggaacagagcgagacuccaucucaaaa

SEQ ID NO: 187629 - RNA, 32 nt, Homo Sapiens
guuuuuucugauucuucuugcuccucauccua

SEQ ID NO: 187630 - RNA, 32 nt, Homo Sapiens
ggaagcugccucggggccaccccuugcaaaag

SEQ ID NO: 187631 - RNA, 32 nt, Homo Sapiens
gaauugcuggaaccugggaggcggagguugca

SEQ ID NO: 187632 - RNA, 31 nt, Homo Sapiens
agcggcuagggcagccaaggccacuggaaca

SEQ ID NO: 187633 - RNA, 32 nt, Homo Sapiens
acgguccccucuagaagacuauucccuccaua

SEQ ID NO: 187634 - RNA, 32 nt, Homo Sapiens
cgggacaggcuuuauuauuuauuuuucagcau

SEQ ID NO: 187635 - RNA, 32 nt, Homo Sapiens
uuuacauugggccaugcucaugucuuggauga

SEQ ID NO: 187636 - RNA, 32 nt, Homo Sapiens
gaacacaggaccaguuugccaucccaaggccg

SEQ ID NO: 187637 - RNA, 32 nt, Homo Sapiens
cugccuuccccaugucucuccucuccuuggcc

SEQ ID NO: 187638 - RNA, 32 nt, Homo Sapiens
gccaugcauuuauuauuaagcauuuucuaccg

SEQ ID NO: 187639 - RNA, 32 nt, Homo Sapiens
uauuaaaauggcauauggaaaagcuuuguauu

SEQ ID NO: 187640 - RNA, 32 nt, Homo Sapiens
caucuacagccacaacucugcccaccaccaca

SEQ ID NO: 187641 - RNA, 32 nt, Homo Sapiens
guugcaggcagacggagcagagcggucaggga

SEQ ID NO: 187642 - RNA, 32 nt, Homo Sapiens
gccagacugcaagaggaggcgaggcggagcca

SEQ ID NO: 187643 - RNA, 32 nt, Homo Sapiens
uguaagcaaaccacugaugaccacugguccgu

SEQ ID NO: 187644 - RNA, 32 nt, Homo Sapiens
ucucgaccuagugguuucuacucucaccgacu

SEQ ID NO: 187645 - RNA, 32 nt, Homo Sapiens
auuagcauuuacugccuaaaggagaaaaacca

SEQ ID NO: 187646 - RNA, 32 nt, Homo Sapiens
gagcacagacugcguuccccucccuggcuguu

SEQ ID NO: 187647 - RNA, 32 nt, Homo Sapiens
cagccccagcugcuccuccucaagcccccaag

SEQ ID NO: 187648 - RNA, 32 nt, Homo Sapiens
ggggccauggaagauuggaaacaaagauuuua

SEQ ID NO: 187649 - RNA, 32 nt, Homo Sapiens
aagcugucuuggauuuaaaucuguaaaaucag

SEQ ID NO: 187650 - RNA, 32 nt, Homo Sapiens
gugcacucaucccauuggcauggugcuagccg

SEQ ID NO: 187651 - RNA, 32 nt, Homo Sapiens
acuacucgcuguacuugccgcucuggucagug

SEQ ID NO: 187652 - RNA, 32 nt, Homo Sapiens
gagagccggggccagcagcagcccgugcccgg

SEQ ID NO: 187653 - RNA, 32 nt, Homo Sapiens
acuuguuaagaaugaaacuguaaccaaaauuu

SEQ ID NO: 187654 - RNA, 32 nt, Homo Sapiens
ucgcuuggaacagcagagccugcuccuugcgu

SEQ ID NO: 187655 - RNA, 32 nt, Homo Sapiens
gcugaggagagaaagggaggcgugccugagaa

SEQ ID NO: 187656 - RNA, 32 nt, Homo Sapiens
aaccaaaauauuagaacgaaaacagaaacaug

SEQ ID NO: 187657 - RNA, 32 nt, Homo Sapiens
gucagaaaacaaguauugucauguauucucug

SEQ ID NO: 187658 - RNA, 32 nt, Homo Sapiens
cucacucugugucuucaacagcaucuuucuuu

SEQ ID NO: 187659 - RNA, 32 nt, Homo Sapiens
ccuccagcuuuccuguauuucuucccaagagc

SEQ ID NO: 187660 - RNA, 32 nt, Homo Sapiens
uuacccccauucucuucuguuugucugagucu

SEQ ID NO: 187661 - RNA, 32 nt, Homo Sapiens
cagcgcuuuuucugaaacccgaggcuggccag

SEQ ID NO: 187662 - RNA, 32 nt, Homo Sapiens
ugcccuuuuguuuguaacuggauguauugugg

SEQ ID NO: 187663 - RNA, 32 nt, Homo Sapiens
cacuuguucaaccgucuaaacaguguugugca

SEQ ID NO: 187664 - RNA, 32 nt, Homo Sapiens
uuuaauacacgucauuggagggcugcguauuu

SEQ ID NO: 187665 - RNA, 32 nt, Homo Sapiens
gccuuuccuacuucuucagugccucuuucacc

SEQ ID NO: 187666 - RNA, 32 nt, Homo Sapiens
aacguauccacccaccuugggugauuagaaga

SEQ ID NO: 187667 - RNA, 32 nt, Homo Sapiens
cuuauuuuuaggccucuuucuugagagaggug

SEQ ID NO: 187668 - RNA, 32 nt, Homo Sapiens
acugggccugcagcucccuucuccugggacuu

SEQ ID NO: 187669 - RNA, 32 nt, Homo Sapiens
guuugauacucuaguauguaagcuguauuuau

SEQ ID NO: 187670 - RNA, 32 nt, Homo Sapiens
aggucagaggacgcaaagcagcagccauguag

SEQ ID NO: 187671 - RNA, 32 nt, Homo Sapiens
aggaaaucuauuuuuucccuucauguuuucuc

SEQ ID NO: 187672 - RNA, 32 nt, Homo Sapiens
agacacagcugagaguugauggguguguaaug

SEQ ID NO: 187673 - RNA, 32 nt, Homo Sapiens
uaauauuuuauaucuagaucuaaugcuaugga

SEQ ID NO: 187674 - RNA, 32 nt, Homo Sapiens
ucuuuuuaauguuuauacuuagauuuucuuuu

SEQ ID NO: 187675 - RNA, 32 nt, Homo Sapiens
cugccugcugcuagggucuguugccaagguca

SEQ ID NO: 187676 - RNA, 32 nt, Homo Sapiens
aacuguuugugaucuuccguauucacugaaaa

SEQ ID NO: 187677 - RNA, 32 nt, Homo Sapiens
ucuucugccgcucugucuucucucuucaguuu

SEQ ID NO: 187678 - RNA, 32 nt, Homo Sapiens
ugugcggggggcggaggcuugaugcaaucccg

SEQ ID NO: 187679 - RNA, 32 nt, Homo Sapiens
caccuucgacccccgcucgggaaacaugguag

SEQ ID NO: 187680 - RNA, 32 nt, Homo Sapiens
ugaagaaauacugacauauuaagguacuuugu

SEQ ID NO: 187681 - RNA, 32 nt, Homo Sapiens
ugguccucaaucccaagccaccugcacaccug

SEQ ID NO: 187682 - RNA, 32 nt, Homo Sapiens
uuaauaaaacaaaacauaccuguauacacaca

SEQ ID NO: 187683 - RNA, 32 nt, Homo Sapiens
gagcgaguugucuacacgauguccuggaccgg

SEQ ID NO: 187684 - RNA, 32 nt, Homo Sapiens
ucccaaagaauauuuuuguggaauauaagauu

SEQ ID NO: 187685 - RNA, 32 nt, Homo Sapiens
guuuuuacaaauucuuuuuuuuuuuuuuuuuu

SEQ ID NO: 187686 - RNA, 32 nt, Homo Sapiens
caggaagaaagagcuugaggugggagcggggc

SEQ ID NO: 187687 - RNA, 32 nt, Homo Sapiens
gauuacaaauccuuauuuuuuauguuauuuua

SEQ ID NO: 187688 - RNA, 32 nt, Homo Sapiens
ggcugccugagcaccucccagccccugccccu

SEQ ID NO: 187689 - RNA, 32 nt, Homo Sapiens
ugacgcccgccugcguugccccccgccuccag

SEQ ID NO: 187690 - RNA, 32 nt, Homo Sapiens
ggcuacugaaacauuaaaaugugaauucccaa

SEQ ID NO: 187691 - RNA, 32 nt, Homo Sapiens
cucgucguccucguccuccgcggccccggcga

SEQ ID NO: 187692 - RNA, 32 nt, Homo Sapiens
ggcgccaugagggugcgcuaggcggcuguucg

SEQ ID NO: 187693 - RNA, 32 nt, Homo Sapiens
uuucagcuccagcagccagcuauuuaaaaaau

SEQ ID NO: 187694 - RNA, 32 nt, Homo Sapiens
cucugauagugucaucgcuaccauccaggagu

SEQ ID NO: 187695 - RNA, 32 nt, Homo Sapiens
ccuggccuccagcucccacucccuuuccaacc

SEQ ID NO: 187696 - RNA, 32 nt, Homo Sapiens
uuccagcaucugagcucuggcucucaccccug

SEQ ID NO: 187697 - RNA, 32 nt, Homo Sapiens
ggaaaagggaauucauuaaacauaucauccuu

SEQ ID NO: 187698 - RNA, 32 nt, Homo Sapiens
gccagucucgggggcgagguacaggccuggaa

SEQ ID NO: 187699 - RNA, 32 nt, Homo Sapiens
gauguggaggaauacacauacacacacaaaca

SEQ ID NO: 187700 - RNA, 32 nt, Homo Sapiens
gggaacguggagcuccuucugccuccuuuccu

SEQ ID NO: 187701 - RNA, 32 nt, Homo Sapiens
acuguccaucaaauuuaaaaccacuuugauac

SEQ ID NO: 187702 - RNA, 32 nt, Homo Sapiens
caggcgcgcccgaguccacaguucugaaacau

SEQ ID NO: 187703 - RNA, 32 nt, Homo Sapiens
ugagcaccuuguuuuucuuccaagguucguag

SEQ ID NO: 187704 - RNA, 32 nt, Homo Sapiens
uugccaaaaauguuuuacacucacaaagauau

SEQ ID NO: 187705 - RNA, 32 nt, Homo Sapiens
uuuuggaccccauggggcccagacagagcaca

SEQ ID NO: 187706 - RNA, 32 nt, Homo Sapiens
guuucucuagcgcugagcuaucuccuaacuuu

SEQ ID NO: 187707 - RNA, 32 nt, Homo Sapiens
uaggcacauuauaaaaaguauacagcauagaa

SEQ ID NO: 187708 - RNA, 32 nt, Homo Sapiens
gacauugugggcggcccgagaugggcucaggg

SEQ ID NO: 187709 - RNA, 32 nt, Homo Sapiens
ccuggcuaucuggccuggccucugggcugggg

SEQ ID NO: 187710 - RNA, 32 nt, Homo Sapiens
guugaugguauugauugaaacuaucugagcca

SEQ ID NO: 187711 - RNA, 30 nt, Homo Sapiens
gagggguuucugcugggggaaaagaaauuu

SEQ ID NO: 187712 - RNA, 32 nt, Homo Sapiens
cuugucuuuuuuguauuuuuuauuuuguauua

SEQ ID NO: 187713 - RNA, 32 nt, Homo Sapiens
ccaucacuccgcccuuuguccacacaucuccu

SEQ ID NO: 187714 - RNA, 31 nt, Homo Sapiens
gugacgagggcggggucacagcucgcgcacc

SEQ ID NO: 187715 - RNA, 27 nt, Homo Sapiens
aaaccaauuaauaaaaaaugucaugga

SEQ ID NO: 187716 - RNA, 32 nt, Homo Sapiens
cacccacggacguggcuuggugcugaggauag

SEQ ID NO: 187717 - RNA, 32 nt, Homo Sapiens
cugaagagugacacauggugaucauaauuucu

SEQ ID NO: 187718 - RNA, 32 nt, Homo Sapiens
cugugugccccggucaccuagcaagcugccga

SEQ ID NO: 187719 - RNA, 32 nt, Homo Sapiens
uuuaaaaacccagaaacaaaagguagaauagg

SEQ ID NO: 187720 - RNA, 32 nt, Homo Sapiens
aauacuuugugauuuccuauuaagcuuuaaaa

SEQ ID NO: 187721 - RNA, 29 nt, Homo Sapiens
gcugaagggagugucagaggcacguugau

SEQ ID NO: 187722 - RNA, 32 nt, Homo Sapiens
gaauugggagcacuggcgggagcccauggucc

SEQ ID NO: 187723 - RNA, 32 nt, Homo Sapiens
ccuucacuuuaguggucuaaucaacagauaaa

SEQ ID NO: 187724 - RNA, 32 nt, Homo Sapiens
ugugcaagaggaaggguaccuguagagagcuu

SEQ ID NO: 187725 - RNA, 32 nt, Homo Sapiens
uccauuuaaugauuuaugucuuugcuuguaac

SEQ ID NO: 187726 - RNA, 32 nt, Homo Sapiens
ucguuuacaccuggcagcacggcagccacaca

SEQ ID NO: 187727 - RNA, 32 nt, Homo Sapiens
gcucuccucaacaugagagcugcaccccuccu

SEQ ID NO: 187728 - RNA, 32 nt, Homo Sapiens
ggggccuuccaagcacagccacggccaugggg

SEQ ID NO: 187729 - RNA, 32 nt, Homo Sapiens
aagccucaguccuucaccuugccaggugccgu

SEQ ID NO: 187730 - RNA, 32 nt, Homo Sapiens
cucaaaucccuugaagcggcuacauugucugg

SEQ ID NO: 187731 - RNA, 32 nt, Homo Sapiens
cucgcccagccgccgccuccaagccccugagg

SEQ ID NO: 187732 - RNA, 32 nt, Homo Sapiens
uggaaaugagcccagauagaaacuucaaaugc

SEQ ID NO: 187733 - RNA, 32 nt, Homo Sapiens
gccacccccacucucacccccaagcucuaagc

SEQ ID NO: 187734 - RNA, 32 nt, Homo Sapiens
ggcacgagggagaggucaggggucagcaggag

SEQ ID NO: 187735 - RNA, 28 nt, Homo Sapiens
cuaguauugggaggaccaagcgaagagu

SEQ ID NO: 187736 - RNA, 32 nt, Homo Sapiens
aaaugaugaauacucauaauucuuaucucuau

SEQ ID NO: 187737 - RNA, 32 nt, Homo Sapiens
gcccaaagcacguaguauuugcugaugauuca

SEQ ID NO: 187738 - RNA, 32 nt, Homo Sapiens
auuucuuaaaauuuagcauuacuuuaaauagc

SEQ ID NO: 187739 - RNA, 32 nt, Homo Sapiens
gguggcugugucuguugcaucaucauaagaag

SEQ ID NO: 187740 - RNA, 32 nt, Homo Sapiens
guggcucccugccuaugccucuaagcuguauu

SEQ ID NO: 187741 - RNA, 32 nt, Homo Sapiens
cccuccgcgcucuccagccagagcgccaguuc

SEQ ID NO: 187742 - RNA, 32 nt, Homo Sapiens
aaugaugaagcaaaugaccagaaauuauagaa

SEQ ID NO: 187743 - RNA, 32 nt, Homo Sapiens
ugggacgaguguguggacaggggggauggcug

SEQ ID NO: 187744 - RNA, 32 nt, Homo Sapiens
ggggacacugacccucccccagggaggagaga

SEQ ID NO: 187745 - RNA, 32 nt, Homo Sapiens
cccucccugccggagccggcucugccagcccc

SEQ ID NO: 187746 - RNA, 32 nt, Homo Sapiens
ggaaacuugaacuaaugauagauaguauuuuu

SEQ ID NO: 187747 - RNA, 32 nt, Homo Sapiens
cccauggcccuaugcggcccagccccgaaugc

SEQ ID NO: 187748 - RNA, 32 nt, Homo Sapiens
ugucucuucuaaaaauacaaauauuagcuggg

SEQ ID NO: 187749 - RNA, 32 nt, Homo Sapiens
gcucugagccccacguggagggaguggcucug

SEQ ID NO: 187750 - RNA, 32 nt, Homo Sapiens
gccgugagccggagcugcgcgcggggcaugcg

SEQ ID NO: 187751 - RNA, 32 nt, Homo Sapiens
cuaguuugucucuaucagcacccaggcccugg

SEQ ID NO: 187752 - RNA, 32 nt, Homo Sapiens
ggugacauagcaagacccugucuuaaaagaaa

SEQ ID NO: 187753 - RNA, 32 nt, Homo Sapiens
ucccuuggcuccugcuuucugcuugggcccug

SEQ ID NO: 187754 - RNA, 32 nt, Homo Sapiens
ggucugggaacccugccuguaccugggguuca

SEQ ID NO: 187755 - RNA, 32 nt, Homo Sapiens
gaggaugggacgcgggaagcagcuaaggugcg

SEQ ID NO: 187756 - RNA, 32 nt, Homo Sapiens
gaauauguuaggcuggggcauucuuuacaccu

SEQ ID NO: 187757 - RNA, 32 nt, Homo Sapiens
gcaucagagaucaugagagccuguaccaccaa

SEQ ID NO: 187758 - RNA, 32 nt, Homo Sapiens
agugagaugggauuuggcgucucguuuuuggc

SEQ ID NO: 187759 - RNA, 32 nt, Homo Sapiens
cacuucucacuuuuuauuguauuuuaucuucc

SEQ ID NO: 187760 - RNA, 32 nt, Homo Sapiens
gccucauugcuccuguaauuuuggccuuucga

SEQ ID NO: 187761 - RNA, 30 nt, Homo Sapiens
cccagaugcccgccccgccccaucccagga

SEQ ID NO: 187762 - RNA, 32 nt, Homo Sapiens
cagugcccugucaucaagacaaacccacgguc

SEQ ID NO: 187763 - RNA, 32 nt, Homo Sapiens
uuuaacuuaccauaguuuuacuacauaaaaua

SEQ ID NO: 187764 - RNA, 29 nt, Homo Sapiens
uggaugcggggacagggaugcgcaggaau

SEQ ID NO: 187765 - RNA, 32 nt, Homo Sapiens
uguugucuuuaguuccuaaaguuucuucuacu

SEQ ID NO: 187766 - RNA, 32 nt, Homo Sapiens
gacuuucucgcacccccuugccugucccaccu

SEQ ID NO: 187767 - RNA, 32 nt, Homo Sapiens
ugguguuuacacaaccaaauuugaugcgaucu

SEQ ID NO: 187768 - RNA, 32 nt, Homo Sapiens
cccgagcuucgggcgcagaauucuucaccuuc

SEQ ID NO: 187769 - RNA, 32 nt, Homo Sapiens
gccgcugcugcuagccaggccuguuucccaca

SEQ ID NO: 187770 - RNA, 32 nt, Homo Sapiens
gaugguuaccacauugggaggaaccaguuucc

SEQ ID NO: 187771 - RNA, 32 nt, Homo Sapiens
ccccacuucuggaaugagccugcccgcccccu

SEQ ID NO: 187772 - RNA, 27 nt, Homo Sapiens
acauggaccuggaaaacaaagugaaga

SEQ ID NO: 187773 - RNA, 32 nt, Homo Sapiens
acugaaguuugaugaagucugguuuaaggcac

SEQ ID NO: 187774 - RNA, 32 nt, Homo Sapiens
guggcuacggaggggcgcgggaggaagaggag

SEQ ID NO: 187775 - RNA, 32 nt, Homo Sapiens
cuucuccccaucuuuucuucuacauuuuguua

SEQ ID NO: 187776 - RNA, 32 nt, Homo Sapiens
cagugucacaugccuguaaacccagcuauuca

SEQ ID NO: 187777 - RNA, 32 nt, Homo Sapiens
cugagggcugggcaugcugagggauuuuggga

SEQ ID NO: 187778 - RNA, 32 nt, Homo Sapiens
auucaggcugggugcaguggcucacacuugua

SEQ ID NO: 187779 - RNA, 32 nt, Homo Sapiens
ccccaaccuguuuugguagacacaccagcucc

SEQ ID NO: 187780 - RNA, 32 nt, Homo Sapiens
auauuugcccucacagguaaguauaaguagcu

SEQ ID NO: 187781 - RNA, 32 nt, Homo Sapiens
ggagaaaaguucccugggacugcacaaguuua

SEQ ID NO: 187782 - RNA, 32 nt, Homo Sapiens
cccuccacaccuccccgcaaucagagggaacc

SEQ ID NO: 187783 - RNA, 32 nt, Homo Sapiens
ucacacgcgaguuuucacaguuauuucuaucc

SEQ ID NO: 187784 - RNA, 32 nt, Homo Sapiens
uucugguuugggucagagacacccaguggccc

SEQ ID NO: 187785 - RNA, 32 nt, Homo Sapiens
acaugugcauguguagauauguguguauaugu

SEQ ID NO: 187786 - RNA, 31 nt, Homo Sapiens
agagugacagugagaaaguucagccacuucc

SEQ ID NO: 187787 - RNA, 32 nt, Homo Sapiens
gcucucuuccugcuccuccagauucugcugcu

SEQ ID NO: 187788 - RNA, 32 nt, Homo Sapiens
ccuccccguccuccccuuucccggguuccagc

SEQ ID NO: 187789 - RNA, 32 nt, Homo Sapiens
cugcuccagguggacacacgggccagcagccg

SEQ ID NO: 187790 - RNA, 32 nt, Homo Sapiens
ggaaauaguccauuuuaacggcaauuucauaa

SEQ ID NO: 187791 - RNA, 32 nt, Homo Sapiens
aaauaagucaguaugagaagucacugucaaug

SEQ ID NO: 187792 - RNA, 32 nt, Homo Sapiens
aagucgcacugacacugagccgggccagaggg

SEQ ID NO: 187793 - RNA, 32 nt, Homo Sapiens
ugggacaguugccaggaggauaccaacuugau

SEQ ID NO: 187794 - RNA, 32 nt, Homo Sapiens
gcagccucucccuccgcucagggcuugaaggu

SEQ ID NO: 187795 - RNA, 32 nt, Homo Sapiens
gcgccucccuccccgccgcccguggacucuga

SEQ ID NO: 187796 - RNA, 32 nt, Homo Sapiens
aucaugaucuucaugaugcucuguagaaaaau

SEQ ID NO: 187797 - RNA, 32 nt, Homo Sapiens
caccaauauuuuacuuuguugaguauuauuuu

SEQ ID NO: 187798 - RNA, 32 nt, Homo Sapiens
guauuaucgguaaguuacaagauggaagaaga

SEQ ID NO: 187799 - RNA, 30 nt, Homo Sapiens
acagcgaucgcccagcaccaaguccgcuuc

SEQ ID NO: 187800 - RNA, 32 nt, Homo Sapiens
ccugauacccuuuccuucuccaugucaguauc

SEQ ID NO: 187801 - RNA, 32 nt, Homo Sapiens
caaugugauucuaaugucuucauuucauugua

SEQ ID NO: 187802 - RNA, 32 nt, Homo Sapiens
ucagguccuccagacccuuccauccucccugu

SEQ ID NO: 187803 - RNA, 32 nt, Homo Sapiens
ggagccccaagccuuggcgguccuugcugcga

SEQ ID NO: 187804 - RNA, 32 nt, Homo Sapiens
aggcaucuccaggcacccacgcccucuccacc

SEQ ID NO: 187805 - RNA, 32 nt, Homo Sapiens
auuugagggcuuuuaguauuaauuucucauuc

SEQ ID NO: 187806 - RNA, 32 nt, Homo Sapiens
caugccccuuauuuaugggaaccauuucauuc

SEQ ID NO: 187807 - RNA, 32 nt, Homo Sapiens
cagcucaauuguaucugacccuucuuuaaguu

SEQ ID NO: 187808 - RNA, 32 nt, Homo Sapiens
ugcacccuccgggcauccucuccgggcccagc

SEQ ID NO: 187809 - RNA, 32 nt, Homo Sapiens
uuaguuaguuuaggauuuuuaaaaagcauauc

SEQ ID NO: 187810 - RNA, 32 nt, Homo Sapiens
uagccgaggagguagucacgcggcacgcgccg

SEQ ID NO: 187811 - RNA, 32 nt, Homo Sapiens
gcuggcucucaguccccgccucgcggggguga

SEQ ID NO: 187812 - RNA, 32 nt, Homo Sapiens
uacacugggccugggcacugcccgccgggaca

SEQ ID NO: 187813 - RNA, 32 nt, Homo Sapiens
aucaucucucacucacagugacaaugcugcuc

SEQ ID NO: 187814 - RNA, 32 nt, Homo Sapiens
ggcauuuucuaaccuuguuuuguuggcuacaa

SEQ ID NO: 187815 - RNA, 32 nt, Homo Sapiens
caagugcagcuagcacugggacacagauccuu

SEQ ID NO: 187816 - RNA, 32 nt, Homo Sapiens
cuucauauucucaucgcccauuuuucaaacuu

SEQ ID NO: 187817 - RNA, 32 nt, Homo Sapiens
cucaagcagugggaggaggagaaggaggagga

SEQ ID NO: 187818 - RNA, 32 nt, Homo Sapiens
ugaccccauauaaagaaauguguuauguaugu

SEQ ID NO: 187819 - RNA, 32 nt, Homo Sapiens
auauugcaaaaauuuuuggaaauuugcaacaa

SEQ ID NO: 187820 - RNA, 32 nt, Homo Sapiens
cccagcaaggcacaggcuccuguauuugagac

SEQ ID NO: 187821 - RNA, 32 nt, Homo Sapiens
agcuccggggccagcccugaaacccugguuac

SEQ ID NO: 187822 - RNA, 32 nt, Homo Sapiens
ugcauuugacuucauuugacauuaguugaagu

SEQ ID NO: 187823 - RNA, 32 nt, Homo Sapiens
auuuaugugaaaauucauuuaacauauaagcu

SEQ ID NO: 187824 - RNA, 32 nt, Homo Sapiens
ccuaauuuuuaaaguuuuuuaaugcuauuuaa

SEQ ID NO: 187825 - RNA, 32 nt, Homo Sapiens
guugggcugcaggccuggccgugagcgggggc

SEQ ID NO: 187826 - RNA, 32 nt, Homo Sapiens
cauggcuccuccccgcucucuuggcuucugcc

SEQ ID NO: 187827 - RNA, 32 nt, Homo Sapiens
gccaggaguuugggggcccaccuuccugggcu

SEQ ID NO: 187828 - RNA, 32 nt, Homo Sapiens
cggcugcccgcaccccagccccacuccgggcc

SEQ ID NO: 187829 - RNA, 32 nt, Homo Sapiens
cagccgcacaguucccaccuccuggcaccucc

SEQ ID NO: 187830 - RNA, 32 nt, Homo Sapiens
ucggcggcgguggcggaggcgaccucgcgacc

SEQ ID NO: 187831 - RNA, 32 nt, Homo Sapiens
ccgcagcgcucauggcgggcggaggagccggg

SEQ ID NO: 187832 - RNA, 32 nt, Homo Sapiens
ucggggaaggauuugcuucuuagaagcucaug

SEQ ID NO: 187833 - RNA, 32 nt, Homo Sapiens
ccccaaucuguuccuuuuuuuuuuugaaaugg

SEQ ID NO: 187834 - RNA, 32 nt, Homo Sapiens
cuccaggaacucccagcacgcagaauccaucu

SEQ ID NO: 187835 - RNA, 32 nt, Homo Sapiens
accccuccugugugcuggcccugugcuagaca

SEQ ID NO: 187836 - RNA, 32 nt, Homo Sapiens
gacacuaggaccagucugugggauagaaugaa

SEQ ID NO: 187837 - RNA, 32 nt, Homo Sapiens
ucacucucugaacauagucugcaaaucucucc

SEQ ID NO: 187838 - RNA, 32 nt, Homo Sapiens
uccuugccaacccuccuccccugcccacaacu

SEQ ID NO: 187839 - RNA, 32 nt, Homo Sapiens
guuaccaucugcuacauauauaaauagacuug

SEQ ID NO: 187840 - RNA, 32 nt, Homo Sapiens
uaccccuuccucgaggccccccaccccugauu

SEQ ID NO: 187841 - RNA, 32 nt, Homo Sapiens
ugaucacgaucauauuguagucucucaaagug

SEQ ID NO: 187842 - RNA, 32 nt, Homo Sapiens
accuauaaucccaacacuuucggaggccaagg

SEQ ID NO: 187843 - RNA, 32 nt, Homo Sapiens
acacagugcaucauuuuuuaagggcagauuau

SEQ ID NO: 187844 - RNA, 32 nt, Homo Sapiens
gggcccggggccuggggcgucagcugggauau

SEQ ID NO: 187845 - RNA, 32 nt, Homo Sapiens
augugaggacucuggagagaaaugaauccaga

SEQ ID NO: 187846 - RNA, 32 nt, Homo Sapiens
aaaagucaccacuuuagucccuggccaccagc

SEQ ID NO: 187847 - RNA, 32 nt, Homo Sapiens
uuagaacagugccuggaacauaaaaacacuua

SEQ ID NO: 187848 - RNA, 32 nt, Homo Sapiens
aguuaucaucugagugauauguuucuugaccu

SEQ ID NO: 187849 - RNA, 32 nt, Homo Sapiens
ccccaccccuccccauuagcuuucaauuccgu

SEQ ID NO: 187850 - RNA, 32 nt, Homo Sapiens
uccgaggccucgcgccagcagcgcucagugcc

SEQ ID NO: 187851 - RNA, 32 nt, Homo Sapiens
agcaaaacaaacaaacaaaaacaaauuuuaag

SEQ ID NO: 187852 - RNA, 32 nt, Homo Sapiens
ucagagguuucaaugugauuuuuggcuuggcu

SEQ ID NO: 187853 - RNA, 32 nt, Homo Sapiens
ugagagaccugcccucucugcgcugaggccca

SEQ ID NO: 187854 - RNA, 32 nt, Homo Sapiens
guucagccagcagcagcagcagcuccagcaac

SEQ ID NO: 187855 - RNA, 32 nt, Homo Sapiens
ccccaccccccucucuuucucugguggucuuc

SEQ ID NO: 187856 - RNA, 30 nt, Homo Sapiens
agaaaguucuggugggccggcaggauugcc

SEQ ID NO: 187857 - RNA, 32 nt, Homo Sapiens
gagagaaaaugaaauuaucuuugauaaauuuu

SEQ ID NO: 187858 - RNA, 32 nt, Homo Sapiens
cagaagugaagauaggaagcucaucagauaga

SEQ ID NO: 187859 - RNA, 32 nt, Homo Sapiens
aaaaaaccaguauauauagucuguucauaugu

SEQ ID NO: 187860 - RNA, 32 nt, Homo Sapiens
agguggagaccgugucccagcaguaccucccg

SEQ ID NO: 187861 - RNA, 32 nt, Homo Sapiens
auuggggaaggggauuuguuuguucuguucuu

SEQ ID NO: 187862 - RNA, 32 nt, Homo Sapiens
cggguggggaaggaggcccagacucugcuucg

SEQ ID NO: 187863 - RNA, 32 nt, Homo Sapiens
gacggccugaugcucccuccccugcccugguc

SEQ ID NO: 187864 - RNA, 32 nt, Homo Sapiens
ucaaaaccaucuuccuucaauucaaaauaagu

SEQ ID NO: 187865 - RNA, 32 nt, Homo Sapiens
uuuuugcauugaucguuaugaauaccagacca

SEQ ID NO: 187866 - RNA, 32 nt, Homo Sapiens
uucgguccuaugucgcgccgggcccuccggag

SEQ ID NO: 187867 - RNA, 32 nt, Homo Sapiens
acacagauaaauuuauacuuauaaauggauau

SEQ ID NO: 187868 - RNA, 32 nt, Homo Sapiens
gaagucagauuguagagguccuggcggcugau

SEQ ID NO: 187869 - RNA, 32 nt, Homo Sapiens
cauuggaaucuagucagaaaugucugucagau

SEQ ID NO: 187870 - RNA, 32 nt, Homo Sapiens
ugaauucaucugcuagcucucaucucauuagu

SEQ ID NO: 187871 - RNA, 31 nt, Homo Sapiens
aaacuaagaugcugccugcccagugcacaca

SEQ ID NO: 187872 - RNA, 32 nt, Homo Sapiens
gaagccauagccccccugggaccuccggacug

SEQ ID NO: 187873 - RNA, 32 nt, Homo Sapiens
acuaacuuuuucuuuaaaaaauguagauacag

SEQ ID NO: 187874 - RNA, 32 nt, Homo Sapiens
gagaaagucucgcugugucacccaggcuggag

SEQ ID NO: 187875 - RNA, 32 nt, Homo Sapiens
gaggggggcagagggaaacagggccgucaggg

SEQ ID NO: 187876 - RNA, 32 nt, Homo Sapiens
gcuuuuuagcuaaauauauacucuucucuagu

SEQ ID NO: 187877 - RNA, 32 nt, Homo Sapiens
ggaggccgcgcgcguguccgcuaggggccgcc

SEQ ID NO: 187878 - RNA, 32 nt, Homo Sapiens
guuccagaauuacuggagucuccugaugcuga

SEQ ID NO: 187879 - RNA, 31 nt, Homo Sapiens
auggaccgucugggcugcggaguccacgggc

SEQ ID NO: 187880 - RNA, 32 nt, Homo Sapiens
gaaggacucagcgccccuggacccccaaaugc

SEQ ID NO: 187881 - RNA, 32 nt, Homo Sapiens
uguguuuuaguuuugcagaagaacacuguugu

SEQ ID NO: 187882 - RNA, 32 nt, Homo Sapiens
cugugguugcugugacaguuucguuuucugaa

SEQ ID NO: 187883 - RNA, 32 nt, Homo Sapiens
uuaccuuuuuaaagugcucuauugcugcgauu

SEQ ID NO: 187884 - RNA, 32 nt, Homo Sapiens
acagaagucuaaccugcccgggacgcccgcac

SEQ ID NO: 187885 - RNA, 32 nt, Homo Sapiens
uuggcgucccuuucuaucaauaaaaggcccuu

SEQ ID NO: 187886 - RNA, 32 nt, Homo Sapiens
cauuuuucuugauguaauuuaucaccauaaaa

SEQ ID NO: 187887 - RNA, 32 nt, Homo Sapiens
gaagaaagugggcaacggcagcucgaaggaga

SEQ ID NO: 187888 - RNA, 32 nt, Homo Sapiens
acgggauuuuaaaaauauauacauuuuacaac

SEQ ID NO: 187889 - RNA, 32 nt, Homo Sapiens
cuuaucugaucagagcaugaucuguuuggcca

SEQ ID NO: 187890 - RNA, 32 nt, Homo Sapiens
cgcccgcgcggggucucccccauggugcagcg

SEQ ID NO: 187891 - RNA, 30 nt, Homo Sapiens
gcaugucacagugcugcagagauuuuguuu

SEQ ID NO: 187892 - RNA, 32 nt, Homo Sapiens
cuuagccuaccuagaccagcaagcauucauuu

SEQ ID NO: 187893 - RNA, 32 nt, Homo Sapiens
uuaauaugugaaaagaaauuguaccaauuuua

SEQ ID NO: 187894 - RNA, 32 nt, Homo Sapiens
gcaccucacucugggcagcucuaggcucagca

SEQ ID NO: 187895 - RNA, 32 nt, Homo Sapiens
uccacagcuuccccucucuccuccugcccacc

SEQ ID NO: 187896 - RNA, 32 nt, Homo Sapiens
ccuuccagcucuucugcugugaccugcccaug

SEQ ID NO: 187897 - RNA, 32 nt, Homo Sapiens
agcaauaaaaacacuaauuuguggguauuuaa

SEQ ID NO: 187898 - RNA, 32 nt, Homo Sapiens
ccccccaaccucaagcugaggaccaaggcgug

SEQ ID NO: 187899 - RNA, 32 nt, Homo Sapiens
cggcuagcgggcguccgcgccauggagcgcua

SEQ ID NO: 187900 - RNA, 32 nt, Homo Sapiens
aagguucuuuugugagccaggaucucagacug

SEQ ID NO: 187901 - RNA, 32 nt, Homo Sapiens
gccccgggcccgcguaugaaucuccuggaccc

SEQ ID NO: 187902 - RNA, 32 nt, Homo Sapiens
auuacuuuuuaaaugguuuuaauuuguauauc

SEQ ID NO: 187903 - RNA, 32 nt, Homo Sapiens
uuauucuguuaaacagaauugaagaaagagua

SEQ ID NO: 187904 - RNA, 32 nt, Homo Sapiens
uuaaagagauccuggggacugcccagucugug

SEQ ID NO: 187905 - RNA, 30 nt, Homo Sapiens
ucggcaucaguaggcggcggcguggggucu

SEQ ID NO: 187906 - RNA, 32 nt, Homo Sapiens
uucauuucuggaaugcagaaaacauuuuaaag

SEQ ID NO: 187907 - RNA, 32 nt, Homo Sapiens
ucccccagcucuuucuuuucugcuguuuccca

SEQ ID NO: 187908 - RNA, 28 nt, Homo Sapiens
cggcggcggcggccgggaagugaaaggu

SEQ ID NO: 187909 - RNA, 32 nt, Homo Sapiens
agagaaccuggagcuuccugaagaagcaaagc

SEQ ID NO: 187910 - RNA, 32 nt, Homo Sapiens
ugguccucuuagcucugugcucucaccagaca

SEQ ID NO: 187911 - RNA, 32 nt, Homo Sapiens
uucauuguuuuacuuuugucuuccucacuagu

SEQ ID NO: 187912 - RNA, 32 nt, Homo Sapiens
aagcgccuccguggacacgcacuuccugcgag

SEQ ID NO: 187913 - RNA, 32 nt, Homo Sapiens
gccgccuccaggagcacgcagauggugcaggc

SEQ ID NO: 187914 - RNA, 32 nt, Homo Sapiens
ucccuuugaucaauauggcuuuuuuccaaauu

SEQ ID NO: 187915 - RNA, 32 nt, Homo Sapiens
cucccaggagccuuccccauguccuugccuug

SEQ ID NO: 187916 - RNA, 32 nt, Homo Sapiens
cccgggccgcgugugagcgcccuuugcaccuc

SEQ ID NO: 187917 - RNA, 32 nt, Homo Sapiens
ugaauaacccucacuuggagaaccaagagaau

SEQ ID NO: 187918 - RNA, 32 nt, Homo Sapiens
ugacauuugcagauacaaaagauggaaauuuu

SEQ ID NO: 187919 - RNA, 32 nt, Homo Sapiens
auuuagagaaugccaguguuacuccagcaggc

SEQ ID NO: 187920 - RNA, 32 nt, Homo Sapiens
uagaaguuuuaucauuugauagucugugaucc

SEQ ID NO: 187921 - RNA, 32 nt, Homo Sapiens
agauuucagaauuacagcccuccucccaccaa

SEQ ID NO: 187922 - RNA, 30 nt, Homo Sapiens
ugucugcuccuaaugggggcccaaagcuca

SEQ ID NO: 187923 - RNA, 32 nt, Homo Sapiens
ugcuaaacugugaguucucaugguguuuuugu

SEQ ID NO: 187924 - RNA, 32 nt, Homo Sapiens
cuucuuuaaauuucuuucuaggauguucacuu

SEQ ID NO: 187925 - RNA, 32 nt, Homo Sapiens
acaaauuuaaacaagccuggaucugacagugc

SEQ ID NO: 187926 - RNA, 32 nt, Homo Sapiens
uaaauaaugcuguuauuuguuuaugugauuua

SEQ ID NO: 187927 - RNA, 32 nt, Homo Sapiens
cuguuuauuuuuguuaguuuuuaauugaagau

SEQ ID NO: 187928 - RNA, 32 nt, Homo Sapiens
agaucgacagccccuuccuccuccucccuccu

SEQ ID NO: 187929 - RNA, 32 nt, Homo Sapiens
aauccaaguaaaagugccaaaacuacauuucu

SEQ ID NO: 187930 - RNA, 32 nt, Homo Sapiens
guauaacaaaggaaauaaaaaucaccacaacu

SEQ ID NO: 187931 - RNA, 32 nt, Homo Sapiens
guaucaauaaccuccaaaaaauaguuguuaau

SEQ ID NO: 187932 - RNA, 32 nt, Homo Sapiens
aaaccacgccuguguagggcgcggcgggggag

SEQ ID NO: 187933 - RNA, 32 nt, Homo Sapiens
ccacccagggccaccaucagacaacucccugc

SEQ ID NO: 187934 - RNA, 32 nt, Homo Sapiens
aaaugguuugaaaucuccugcugcuggccgaa

SEQ ID NO: 187935 - RNA, 32 nt, Homo Sapiens
cgcgucgguguccgcgucgaggagccggggca

SEQ ID NO: 187936 - RNA, 32 nt, Homo Sapiens
gaucuggccucugccagggaccucugaguagc

SEQ ID NO: 187937 - RNA, 32 nt, Homo Sapiens
gcuaugucaauaaauuuucuuaaaggacaaag

SEQ ID NO: 187938 - RNA, 32 nt, Homo Sapiens
aaagaaagauucggcuuuuggcaaucacggac

SEQ ID NO: 187939 - RNA, 32 nt, Homo Sapiens
gaucaagugccuagagggaugugugugccagc

SEQ ID NO: 187940 - RNA, 32 nt, Homo Sapiens
acacuuucccaugaaaagggugaauguauaua

SEQ ID NO: 187941 - RNA, 32 nt, Homo Sapiens
ugaggauggaugcgggcgcuguccuugccggg

SEQ ID NO: 187942 - RNA, 32 nt, Homo Sapiens
cauccgccugacgcuggacgugaccuucgggg

SEQ ID NO: 187943 - RNA, 31 nt, Homo Sapiens
uuguugugaaacacugcaaagccaauuuuuc

SEQ ID NO: 187944 - RNA, 32 nt, Homo Sapiens
agagauguucccuccgggguccagggaggaga

SEQ ID NO: 187945 - RNA, 32 nt, Homo Sapiens
gaccugguccuaguccacaaggguggcaggag

SEQ ID NO: 187946 - RNA, 32 nt, Homo Sapiens
gagauuguccucuuccugucacaugugacacu

SEQ ID NO: 187947 - RNA, 32 nt, Homo Sapiens
ggaagcauacaaccucuuuugugugaauuuug

SEQ ID NO: 187948 - RNA, 32 nt, Homo Sapiens
ggaauuuuggaaugccauucucucuguaucuu

SEQ ID NO: 187949 - RNA, 32 nt, Homo Sapiens
gguuaaauccuacagcauaaucaauaacucgc

SEQ ID NO: 187950 - RNA, 32 nt, Homo Sapiens
uguacguucuuguacacagagguaaagauuug

SEQ ID NO: 187951 - RNA, 32 nt, Homo Sapiens
ucugcaucucagccugagacgcacagagaggu

SEQ ID NO: 187952 - RNA, 32 nt, Homo Sapiens
gggcaggcacagcguggggaccacgugccgag

SEQ ID NO: 187953 - RNA, 32 nt, Homo Sapiens
uccaacuagugaagaacgauugugaaauggga

SEQ ID NO: 187954 - RNA, 32 nt, Homo Sapiens
auggcucuaggcuucuccugcugaguccuggu

SEQ ID NO: 187955 - RNA, 32 nt, Homo Sapiens
gccucggucucucucuucggcggcgagccgcg

SEQ ID NO: 187956 - RNA, 32 nt, Homo Sapiens
uccuccccccgcagaacacgcugggccccggg

SEQ ID NO: 187957 - RNA, 32 nt, Homo Sapiens
gagggaacccacccugaauaaauaaaguaacc

SEQ ID NO: 187958 - RNA, 32 nt, Homo Sapiens
gccucggucgguacccugggcgcggacgagcu

SEQ ID NO: 187959 - RNA, 32 nt, Homo Sapiens
ccuucucucccugauccucagaauauauauug

SEQ ID NO: 187960 - RNA, 32 nt, Homo Sapiens
acucaguaaaacaaaaauuuauggucaaaauu

SEQ ID NO: 187961 - RNA, 32 nt, Homo Sapiens
ggacccagugacuuguccaaguuuacacacga

SEQ ID NO: 187962 - RNA, 32 nt, Homo Sapiens
aguguuuccuuccugucuccucaagucaccuu

SEQ ID NO: 187963 - RNA, 32 nt, Homo Sapiens
uuuggcccaguuuccucaacaaugaaauggga

SEQ ID NO: 187964 - RNA, 32 nt, Homo Sapiens
aaaguaguccauagaaauguuucuguuucaua

SEQ ID NO: 187965 - RNA, 32 nt, Homo Sapiens
ccuuuuacaaauaaccacagauagagaucuca

SEQ ID NO: 187966 - RNA, 32 nt, Homo Sapiens
cuaggagucaaaauggcggcgaggggaaccug

SEQ ID NO: 187967 - RNA, 32 nt, Homo Sapiens
cuuaguuugucaaauaaauaccauauauuuaa

SEQ ID NO: 187968 - RNA, 32 nt, Homo Sapiens
gcggcucuacagcagcgggcggcgggacccgg

SEQ ID NO: 187969 - RNA, 32 nt, Homo Sapiens
ugcuaccauuuucuuuugggccgcuugcaaag

SEQ ID NO: 187970 - RNA, 32 nt, Homo Sapiens
auuauacuaagucuuauauuuuauagccuuga

SEQ ID NO: 187971 - RNA, 32 nt, Homo Sapiens
gagcaggagaggcaggcuauggcugccacccu

SEQ ID NO: 187972 - RNA, 32 nt, Homo Sapiens
gggugaacauuagucauuuuuaaaagacaccu

SEQ ID NO: 187973 - RNA, 32 nt, Homo Sapiens
gaggauuccuucccuucaaguacuggauucuu

SEQ ID NO: 187974 - RNA, 32 nt, Homo Sapiens
ccaacaccaaacugacacaucuccagguguac

SEQ ID NO: 187975 - RNA, 32 nt, Homo Sapiens
ugucuccgggcagcugcagcauaacacggagu

SEQ ID NO: 187976 - RNA, 32 nt, Homo Sapiens
uucuacauuuuucuuaaauaaauuagggagua

SEQ ID NO: 187977 - RNA, 32 nt, Homo Sapiens
agcaucccacccccaaaccaccgacucucauu

SEQ ID NO: 187978 - RNA, 32 nt, Homo Sapiens
ugagaugaggcuuuuaaaaugaaccaggaguc

SEQ ID NO: 187979 - RNA, 32 nt, Homo Sapiens
uaaccuucaaggacguaucuguggacuucacu

SEQ ID NO: 187980 - RNA, 32 nt, Homo Sapiens
ccccuguaaucccagcacuuugugaggccaag

SEQ ID NO: 187981 - RNA, 32 nt, Homo Sapiens
ggcaccguugcugggcggcgccggcggcaugu

SEQ ID NO: 187982 - RNA, 32 nt, Homo Sapiens
ugaauuacagaaauucuaaaacaaaagcuggc

SEQ ID NO: 187983 - RNA, 32 nt, Homo Sapiens
acagccucuaaaggcucagagggaaucugccu

SEQ ID NO: 187984 - RNA, 32 nt, Homo Sapiens
uggcaaccaaccaaaaucauuuuuaaucauuu

SEQ ID NO: 187985 - RNA, 32 nt, Homo Sapiens
ccacgccgcucccagaccuggggccagaggcc

SEQ ID NO: 187986 - RNA, 32 nt, Homo Sapiens
uguaccauguuuuuauuauuucuauuuuuaau

SEQ ID NO: 187987 - RNA, 32 nt, Homo Sapiens
gcgcagggggucgggcagcugggcucgggcgg

SEQ ID NO: 187988 - RNA, 32 nt, Homo Sapiens
uaacugagaaugguauaucuuuuuauacacug

SEQ ID NO: 187989 - RNA, 32 nt, Homo Sapiens
aauaugauuuuuuuuucuuacucauuucaccu

SEQ ID NO: 187990 - RNA, 32 nt, Homo Sapiens
acauauucuuguaccacagacaaaacaaaucu

SEQ ID NO: 187991 - RNA, 32 nt, Homo Sapiens
cuauuugauucaguugcuguuuucucacucuc

SEQ ID NO: 187992 - RNA, 32 nt, Homo Sapiens
aaaauauuucagccacuaauuaugacacagac

SEQ ID NO: 187993 - RNA, 32 nt, Homo Sapiens
uaugcaugcucacuuuccugcuuggauguguc

SEQ ID NO: 187994 - RNA, 32 nt, Homo Sapiens
uaccuggggcagcuggggcugccaucccauuu

SEQ ID NO: 187995 - RNA, 32 nt, Homo Sapiens
cagggacccgcgggcucggguugccguuuccc

SEQ ID NO: 187996 - RNA, 32 nt, Homo Sapiens
acuuuuuucuuacugucuuuuuucuaaaguaa

SEQ ID NO: 187997 - RNA, 32 nt, Homo Sapiens
uuuuacuauauaucuuuuuuuuguugucucua

SEQ ID NO: 187998 - RNA, 32 nt, Homo Sapiens
aacucuguaacccucagcaaguuucauuuuug

SEQ ID NO: 187999 - RNA, 32 nt, Homo Sapiens
cuguaugagaacccaaugucauaggaaauaug

SEQ ID NO: 188000 - RNA, 32 nt, Homo Sapiens
uucaaggacuuuuuauggucuuucucauaugc

SEQ ID NO: 188001 - RNA, 32 nt, Homo Sapiens
aacuccuggugccuuucugagccugcguggga

SEQ ID NO: 188002 - RNA, 32 nt, Homo Sapiens
ggacaggaacuaaauggggcuaaccacuucag

SEQ ID NO: 188003 - RNA, 32 nt, Homo Sapiens
aauacaaaaaucagccaggcaugguggugagu

SEQ ID NO: 188004 - RNA, 32 nt, Homo Sapiens
auucccccucaauuuccaaccccauccccauu

SEQ ID NO: 188005 - RNA, 32 nt, Homo Sapiens
uagaaacaccacgugggacccuggacccugca

SEQ ID NO: 188006 - RNA, 32 nt, Homo Sapiens
cccguggugcugaccuaggauauaacaaagcu

SEQ ID NO: 188007 - RNA, 32 nt, Homo Sapiens
gggaccaucuucuggccaaucaaggcuugcug

SEQ ID NO: 188008 - RNA, 32 nt, Homo Sapiens
uaugagcaauaaguuaugauagcuuuggauua

SEQ ID NO: 188009 - RNA, 32 nt, Homo Sapiens
cgcgacaggccagaacacgggcggcggcuucg

SEQ ID NO: 188010 - RNA, 32 nt, Homo Sapiens
agcauggauaccuggauauccuuggcuucuuu

SEQ ID NO: 188011 - RNA, 32 nt, Homo Sapiens
ggugauuuuaucagguccugggguugaacaau

SEQ ID NO: 188012 - RNA, 32 nt, Homo Sapiens
guggagaggaggagggacacggcaugggggga

SEQ ID NO: 188013 - RNA, 32 nt, Homo Sapiens
acacccccgggaagggaccccggacacggcuc

SEQ ID NO: 188014 - RNA, 32 nt, Homo Sapiens
ggagcgcagggccaagauacccuuuauaucaa

SEQ ID NO: 188015 - RNA, 32 nt, Homo Sapiens
guuauuauugcaaagcacugucaccggccuca

SEQ ID NO: 188016 - RNA, 32 nt, Homo Sapiens
auauugagugccuacuauguccuaaauauugg

SEQ ID NO: 188017 - RNA, 32 nt, Homo Sapiens
ccgucugagguuuuauacuucagguuaguuag

SEQ ID NO: 188018 - RNA, 32 nt, Homo Sapiens
cgccuuaaacacacagauauagacaugacacu

SEQ ID NO: 188019 - RNA, 32 nt, Homo Sapiens
aauccaauuacaucuggugacuccgacaucug

SEQ ID NO: 188020 - RNA, 32 nt, Homo Sapiens
uucaaggggagaccuaguucccugcccugccc

SEQ ID NO: 188021 - RNA, 27 nt, Homo Sapiens
uauauuuccaucuucagcccuuaaccc

SEQ ID NO: 188022 - RNA, 32 nt, Homo Sapiens
aaugguuuagagucauaagaugaccuauuuuu

SEQ ID NO: 188023 - RNA, 32 nt, Homo Sapiens
cuuuuaccaggaaagacuauugaaagauguuu

SEQ ID NO: 188024 - RNA, 32 nt, Homo Sapiens
gcuaacacucauuucuucuccuccaaaaguuu

SEQ ID NO: 188025 - RNA, 32 nt, Homo Sapiens
cuuuaauguacaaacaucuuuguuuacuuuga

SEQ ID NO: 188026 - RNA, 32 nt, Homo Sapiens
ugugagguguuuggagaagagaacugaaauga

SEQ ID NO: 188027 - RNA, 32 nt, Homo Sapiens
cacacacacacacacacacacacacacacccg

SEQ ID NO: 188028 - RNA, 31 nt, Homo Sapiens
uugugcaaauaaaaacguguguaucaaguau

SEQ ID NO: 188029 - RNA, 32 nt, Homo Sapiens
ugaggggcggccucgggcagccgcuccucuca

SEQ ID NO: 188030 - RNA, 32 nt, Homo Sapiens
cuuaccuggcccagcccugccucccucagcca

SEQ ID NO: 188031 - RNA, 32 nt, Homo Sapiens
ccuggccucacaggcgugugcccaugcagcca

SEQ ID NO: 188032 - RNA, 32 nt, Homo Sapiens
gcgacccuucgaaagcacagcugaaagcguug

SEQ ID NO: 188033 - RNA, 32 nt, Homo Sapiens
gacgcaggcagaccauggcagaguucucccag

SEQ ID NO: 188034 - RNA, 32 nt, Homo Sapiens
cuuaauuaaaaauuacuguuuaauugacauac

SEQ ID NO: 188035 - RNA, 32 nt, Homo Sapiens
acccgucguccuccccucguccuucagcgccc

SEQ ID NO: 188036 - RNA, 31 nt, Homo Sapiens
gagauuaaauauaugcauguauaucauacau

SEQ ID NO: 188037 - RNA, 32 nt, Homo Sapiens
uugguaauauucucaugguuacuauuuuauau

SEQ ID NO: 188038 - RNA, 32 nt, Homo Sapiens
cucaggcagucuacccaccucagccucccaaa

SEQ ID NO: 188039 - RNA, 32 nt, Homo Sapiens
uuggaguugcuuaaaauagacuccggccuuca

SEQ ID NO: 188040 - RNA, 32 nt, Homo Sapiens
agcccucuucccagacuaaauucauagccgag

SEQ ID NO: 188041 - RNA, 32 nt, Homo Sapiens
uugaaucaugagggcgggucuuucucaugcug

SEQ ID NO: 188042 - RNA, 32 nt, Homo Sapiens
ccacagccuccgccucccccagccccauuccc

SEQ ID NO: 188043 - RNA, 31 nt, Homo Sapiens
auccgccgccgcagccagcuuccgccgccgc

SEQ ID NO: 188044 - RNA, 32 nt, Homo Sapiens
gcugauugguacauaaaucuuuuacauggccu

SEQ ID NO: 188045 - RNA, 32 nt, Homo Sapiens
gugccucugagugcgcugcuguguguucucuc

SEQ ID NO: 188046 - RNA, 32 nt, Homo Sapiens
acuccccaacugaguucaagggcuguagguuc

SEQ ID NO: 188047 - RNA, 32 nt, Homo Sapiens
ucuaaauuugcauugacuauguuuuaguguau

SEQ ID NO: 188048 - RNA, 32 nt, Homo Sapiens
aguugaauucccucccccugggccgggcccuu

SEQ ID NO: 188049 - RNA, 32 nt, Homo Sapiens
aacacuauuguaacagaagaaauaaagacacu

SEQ ID NO: 188050 - RNA, 32 nt, Homo Sapiens
uggugcagcuccgggucauuccugggguggga

SEQ ID NO: 188051 - RNA, 32 nt, Homo Sapiens
acauugccauggguguuaaauaagcuuugagu

SEQ ID NO: 188052 - RNA, 32 nt, Homo Sapiens
aauuugcagaacuuaagaauauugauuuauaa

SEQ ID NO: 188053 - RNA, 29 nt, Homo Sapiens
auauacauauguauguauauacguaugua

SEQ ID NO: 188054 - RNA, 28 nt, Homo Sapiens
caauccgagaugaaucauuugaaguauu

SEQ ID NO: 188055 - RNA, 32 nt, Homo Sapiens
gggagaggaaacaaaagcuguguccuggcaga

SEQ ID NO: 188056 - RNA, 32 nt, Homo Sapiens
uuccgcugccgccgcggacaguucuuaaaggg

SEQ ID NO: 188057 - RNA, 32 nt, Homo Sapiens
acacgcugauucuccuccugccucucccguga

SEQ ID NO: 188058 - RNA, 32 nt, Homo Sapiens
gacauuacauauauuuuauuguuuauaauaaa

SEQ ID NO: 188059 - RNA, 32 nt, Homo Sapiens
ugcugggcauuuucccagauguuuacagacug

SEQ ID NO: 188060 - RNA, 32 nt, Homo Sapiens
uguguguggagugggaugugggggguggaggg

SEQ ID NO: 188061 - RNA, 32 nt, Homo Sapiens
cauaaaucucaaauccuauguugcuacaaggg

SEQ ID NO: 188062 - RNA, 32 nt, Homo Sapiens
cggcacugugaugggagcugguggcgacugag

SEQ ID NO: 188063 - RNA, 32 nt, Homo Sapiens
aaaacucuccuuucacuuuuuauccucccugg

SEQ ID NO: 188064 - RNA, 32 nt, Homo Sapiens
aauaaagugaauacauuuugcacaaaguaagc

SEQ ID NO: 188065 - RNA, 32 nt, Homo Sapiens
auauuuugcaaaaccagaaacaaaaucgcaga

SEQ ID NO: 188066 - RNA, 32 nt, Homo Sapiens
guugcuuuacuucuuuccuguuuugccuggac

SEQ ID NO: 188067 - RNA, 32 nt, Homo Sapiens
gucgcacagguauacacaugugggaugagugg

SEQ ID NO: 188068 - RNA, 32 nt, Homo Sapiens
uuucccauucaauuugugagccaggcagggua

SEQ ID NO: 188069 - RNA, 32 nt, Homo Sapiens
auaaagauuauaauaugugccuuaaguuuuag

SEQ ID NO: 188070 - RNA, 30 nt, Homo Sapiens
aguccaugauccucagcguccuggacacau

SEQ ID NO: 188071 - RNA, 32 nt, Homo Sapiens
agagagggaaggaaaagugccaugucaacccc

SEQ ID NO: 188072 - RNA, 32 nt, Homo Sapiens
acgcagcguuugcaugggaauccugagcaugg

SEQ ID NO: 188073 - RNA, 32 nt, Homo Sapiens
aaggaugaacgggaggagcaucaugaguagga

SEQ ID NO: 188074 - RNA, 32 nt, Homo Sapiens
aacuauaucacguaccuuuccucugacuguuu

SEQ ID NO: 188075 - RNA, 32 nt, Homo Sapiens
aaagcugaagacaaaaucuuacccuucugccc

SEQ ID NO: 188076 - RNA, 32 nt, Homo Sapiens
uuagaagccuacuuugugaccaaggagcucaa

SEQ ID NO: 188077 - RNA, 32 nt, Homo Sapiens
uaaaaagauagcuaguguauauuguuaugggu

SEQ ID NO: 188078 - RNA, 32 nt, Homo Sapiens
guauucuugcuuaaagucaagucuguuuugca

SEQ ID NO: 188079 - RNA, 32 nt, Homo Sapiens
agucaccuuuuaugaaaugagucucuguguua

SEQ ID NO: 188080 - RNA, 32 nt, Homo Sapiens
cccguguguuuacagcauuuccagguccagag

SEQ ID NO: 188081 - RNA, 32 nt, Homo Sapiens
ggugaggacagaggccccaguguucaugugac

SEQ ID NO: 188082 - RNA, 32 nt, Homo Sapiens
agagggagagccaggcuuaugcguagcuucau

SEQ ID NO: 188083 - RNA, 32 nt, Homo Sapiens
aguugguugaugccuuuuuuuucaugacauaa

SEQ ID NO: 188084 - RNA, 32 nt, Homo Sapiens
guuuuaccuaagcaauaaagguagcagagguu

SEQ ID NO: 188085 - RNA, 32 nt, Homo Sapiens
caguggguccuuugcauacaugugggcauuca

SEQ ID NO: 188086 - RNA, 32 nt, Homo Sapiens
auuuuguuugauucucuuucuccuucucucag

SEQ ID NO: 188087 - RNA, 32 nt, Homo Sapiens
gguggacgugagcguagagcugcuggccucac

SEQ ID NO: 188088 - RNA, 32 nt, Homo Sapiens
aaaauuuauuuuuauuucuauagugaugacug

SEQ ID NO: 188089 - RNA, 32 nt, Homo Sapiens
cacuugaaaacaugacaagggcccguaguugu

SEQ ID NO: 188090 - RNA, 32 nt, Homo Sapiens
uuucacugaaacauuuaacuaccuguaaaauc

SEQ ID NO: 188091 - RNA, 32 nt, Homo Sapiens
uauuuagaauguaccauauuuuuuguaaauua

SEQ ID NO: 188092 - RNA, 32 nt, Homo Sapiens
gccacucuggaaagcaguuuggcaguuucuug

SEQ ID NO: 188093 - RNA, 32 nt, Homo Sapiens
agcucagccagacguccaggaucccaccccuu

SEQ ID NO: 188094 - RNA, 32 nt, Homo Sapiens
cagcacacacacagaugucagggaccagccac

SEQ ID NO: 188095 - RNA, 32 nt, Homo Sapiens
ccaccuggugccuuaguccuugggcuggggga

SEQ ID NO: 188096 - RNA, 32 nt, Homo Sapiens
acagcuuuuagaggggcagagaauuagaggau

SEQ ID NO: 188097 - RNA, 32 nt, Homo Sapiens
aggacggagggaagggcggguugggguccgcg

SEQ ID NO: 188098 - RNA, 32 nt, Homo Sapiens
aaguauuuuuaaauguuucucaugugauuucu

SEQ ID NO: 188099 - RNA, 32 nt, Homo Sapiens
ccuuggggccagcuggccugcugcucuccagu

SEQ ID NO: 188100 - RNA, 32 nt, Homo Sapiens
aggaucaguggcggcggcacccgcggccccgc

SEQ ID NO: 188101 - RNA, 32 nt, Homo Sapiens
auuaguggcauaaaaaaguagcaucagggucu

SEQ ID NO: 188102 - RNA, 31 nt, Homo Sapiens
ugggucccacccucccuccagagccaccagu

SEQ ID NO: 188103 - RNA, 32 nt, Homo Sapiens
ccucgaagcaccuuuugguuugcaguugugua

SEQ ID NO: 188104 - RNA, 32 nt, Homo Sapiens
guuuuuguuguugcuguuguuguuuuuuaaaa

SEQ ID NO: 188105 - RNA, 32 nt, Homo Sapiens
gaccccccacccaaaauguuucgagucaacaa

SEQ ID NO: 188106 - RNA, 32 nt, Homo Sapiens
gccgggaaucggggccugcugcuccugcuggc

SEQ ID NO: 188107 - RNA, 32 nt, Homo Sapiens
gcaccagccaagggaaugccaccucuucucag

SEQ ID NO: 188108 - RNA, 32 nt, Homo Sapiens
ugagccuugugucuuuccaguuacaggcgaug

SEQ ID NO: 188109 - RNA, 32 nt, Homo Sapiens
uggaggacauuugguagaggucacacugcagc

SEQ ID NO: 188110 - RNA, 32 nt, Homo Sapiens
cuaguaaaaucagaagcucaccaaagcaacau

SEQ ID NO: 188111 - RNA, 32 nt, Homo Sapiens
ccuugaaccuccuuucaguuccgugguggucc

SEQ ID NO: 188112 - RNA, 32 nt, Homo Sapiens
gcaauaacugaauagacacaaaugaccacuug

SEQ ID NO: 188113 - RNA, 32 nt, Homo Sapiens
ccugcccuccagggacacgucuccaugguuuu

SEQ ID NO: 188114 - RNA, 32 nt, Homo Sapiens
ugauuuuggucaauuuuauuauuaauucuuaa

SEQ ID NO: 188115 - RNA, 32 nt, Homo Sapiens
aaaugaagauauaucauuaaauaauuaaccuu

SEQ ID NO: 188116 - RNA, 32 nt, Homo Sapiens
ugcgacccgggccgaggcgccgcgcgagcgcc

SEQ ID NO: 188117 - RNA, 32 nt, Homo Sapiens
cugcacuguuccccgguacuuccuccuuuauu

SEQ ID NO: 188118 - RNA, 32 nt, Homo Sapiens
aauuauuuugaugucuucugucucugucuguc

SEQ ID NO: 188119 - RNA, 32 nt, Homo Sapiens
gagucuugcuccauugcccaggcuggauuaca

SEQ ID NO: 188120 - RNA, 32 nt, Homo Sapiens
augucagagaauaaauaaauauucuaaguaga

SEQ ID NO: 188121 - RNA, 32 nt, Homo Sapiens
aacaacacccucgccugcccgcuccacaaccu

SEQ ID NO: 188122 - RNA, 32 nt, Homo Sapiens
agcuacuaggaagucuuggggguguaggggau

SEQ ID NO: 188123 - RNA, 32 nt, Homo Sapiens
uguguccuccucucuacugacuacaauauagg

SEQ ID NO: 188124 - RNA, 32 nt, Homo Sapiens
cgaggaagcagcaauuaauuagaucaacacuu

SEQ ID NO: 188125 - RNA, 32 nt, Homo Sapiens
cagagugagaugggaagaagaucuucuuugcc

SEQ ID NO: 188126 - RNA, 32 nt, Homo Sapiens
cuugaagccccugagaauauuuuguugagaac

SEQ ID NO: 188127 - RNA, 32 nt, Homo Sapiens
accugaggacgggugaucauuucugguccagu

SEQ ID NO: 188128 - RNA, 32 nt, Homo Sapiens
ggggagagcacucgguugucuuuacuuuuaaa

SEQ ID NO: 188129 - RNA, 32 nt, Homo Sapiens
uagauggaguuggagaccauuauucuaaguga

SEQ ID NO: 188130 - RNA, 32 nt, Homo Sapiens
uagaauaaacacauuucaguaaaaacugugga

SEQ ID NO: 188131 - RNA, 32 nt, Homo Sapiens
gcagacacaccugcccuccccagccagcuccu

SEQ ID NO: 188132 - RNA, 32 nt, Homo Sapiens
ggccugcaagguggaguucuagccccaucgcc

SEQ ID NO: 188133 - RNA, 32 nt, Homo Sapiens
cagacugcuggaaccuuuuggccaguaggucg

SEQ ID NO: 188134 - RNA, 32 nt, Homo Sapiens
uuaauaaaauuugagccuguuacguaaauuga

SEQ ID NO: 188135 - RNA, 32 nt, Homo Sapiens
uagagaacuuaaaugcaauuuaggcaauaacc

SEQ ID NO: 188136 - RNA, 32 nt, Homo Sapiens
gccacaugucacugauggucagauuccaaagu

SEQ ID NO: 188137 - RNA, 32 nt, Homo Sapiens
auggagccuucccaaguugugcuugagccagg

SEQ ID NO: 188138 - RNA, 32 nt, Homo Sapiens
uguuuggaauuuuuuucuuuuguuuuuuggaa

SEQ ID NO: 188139 - RNA, 32 nt, Homo Sapiens
uuucugcccuguauaagcacccuuuuuauuaa

SEQ ID NO: 188140 - RNA, 32 nt, Homo Sapiens
cuggacuuugugugagccuguuuaguugggaa

SEQ ID NO: 188141 - RNA, 32 nt, Homo Sapiens
acucugccucacaaaggucuauauuauauaaa

SEQ ID NO: 188142 - RNA, 32 nt, Homo Sapiens
gaauaguuuacauaguuuauucuagucuuuga

SEQ ID NO: 188143 - RNA, 32 nt, Homo Sapiens
uaguggaggagaagcgaucggauuuuggauau

SEQ ID NO: 188144 - RNA, 32 nt, Homo Sapiens
uguuugagcccagaugagucauggcuggacga

SEQ ID NO: 188145 - RNA, 32 nt, Homo Sapiens
ugaagcccacucauacgugaccucaaugagau

SEQ ID NO: 188146 - RNA, 32 nt, Homo Sapiens
uucaccccucagcccuauucucuuucuuagau

SEQ ID NO: 188147 - RNA, 32 nt, Homo Sapiens
gaccaagcgcugggcgcucccgggccgcgcgu

SEQ ID NO: 188148 - RNA, 32 nt, Homo Sapiens
uacgccuugucauuggaaacacugccuuuguc

SEQ ID NO: 188149 - RNA, 32 nt, Homo Sapiens
ugugaagacccagcaggaagccaggcugagug

SEQ ID NO: 188150 - RNA, 32 nt, Homo Sapiens
cuugccggaccucggcccccgccugcucccau

SEQ ID NO: 188151 - RNA, 32 nt, Homo Sapiens
auuggaggagcugccgugcugcugauacgggg

SEQ ID NO: 188152 - RNA, 32 nt, Homo Sapiens
ggcccgggcccauggcggcgucggcggcucug

SEQ ID NO: 188153 - RNA, 32 nt, Homo Sapiens
gagcaagaggggcauacuauugggcugggagg

SEQ ID NO: 188154 - RNA, 32 nt, Homo Sapiens
ccucagugacccccauaccucaucaugaaccc

SEQ ID NO: 188155 - RNA, 32 nt, Homo Sapiens
cugcccccuuccccggcccugggcuacccuug

SEQ ID NO: 188156 - RNA, 32 nt, Homo Sapiens
agugggaggggaggaagcacacagagcucccu

SEQ ID NO: 188157 - RNA, 32 nt, Homo Sapiens
aauuacauauucugaaagagcauuccgaaaga

SEQ ID NO: 188158 - RNA, 32 nt, Homo Sapiens
cugcccucugucaucccauucaagauugugcc

SEQ ID NO: 188159 - RNA, 32 nt, Homo Sapiens
aucucugcaucacucauuggaagugcuucuga

SEQ ID NO: 188160 - RNA, 32 nt, Homo Sapiens
gucgggaagggagagccgaguugcgagguagg

SEQ ID NO: 188161 - RNA, 32 nt, Homo Sapiens
gacacuuguaaaucuuuaugcaaaguaaugua

SEQ ID NO: 188162 - RNA, 31 nt, Homo Sapiens
acagagccgcagugccugcccugauccacgc

SEQ ID NO: 188163 - RNA, 32 nt, Homo Sapiens
guuuuacucaacaaaauaaugcuagaguaacu

SEQ ID NO: 188164 - RNA, 32 nt, Homo Sapiens
uucacagaugagaacacagggcauucgguuaa

SEQ ID NO: 188165 - RNA, 32 nt, Homo Sapiens
ccuccccuggauauacucuauagugcaccaaa

SEQ ID NO: 188166 - RNA, 32 nt, Homo Sapiens
uuauaugcacuuucuuccgaucuguaccugag

SEQ ID NO: 188167 - RNA, 32 nt, Homo Sapiens
uccuuuuuacaguuccuaucuagacaugaaag

SEQ ID NO: 188168 - RNA, 27 nt, Homo Sapiens
ccaccuucuuucuucagccgaggccgc

SEQ ID NO: 188169 - RNA, 32 nt, Homo Sapiens
gacacagaugaagaucaggaacccaaaacaga

SEQ ID NO: 188170 - RNA, 32 nt, Homo Sapiens
uaaacaagugaauaauugcacaacuaaaaaga

SEQ ID NO: 188171 - RNA, 32 nt, Homo Sapiens
cagcuguagguggcaaaggugcccuuauaaaa

SEQ ID NO: 188172 - RNA, 32 nt, Homo Sapiens
cuggagcggacuuauuuaccaagcauuggagg

SEQ ID NO: 188173 - RNA, 32 nt, Homo Sapiens
uccucccgcgcgcuccgcggcugcaccggccc

SEQ ID NO: 188174 - RNA, 32 nt, Homo Sapiens
gccacaccaguagaugcagggaugauguucug

SEQ ID NO: 188175 - RNA, 32 nt, Homo Sapiens
gaugagccuucuuuuuauuauugaguugggug

SEQ ID NO: 188176 - RNA, 32 nt, Homo Sapiens
cgcgcgcgugcacacacacacacacacacacg

SEQ ID NO: 188177 - RNA, 32 nt, Homo Sapiens
ugaagggguuuaggaauuuauaucacauggua

SEQ ID NO: 188178 - RNA, 32 nt, Homo Sapiens
cucaaaaugguagauucaaagcuccucucuug

SEQ ID NO: 188179 - RNA, 32 nt, Homo Sapiens
ggcggaguaggaugaggcccgcggccguggcu

SEQ ID NO: 188180 - RNA, 31 nt, Homo Sapiens
cacuucggggcuccggugccccgcgccaggc

SEQ ID NO: 188181 - RNA, 32 nt, Homo Sapiens
gauccuggggacugcccagucugugggcugua

SEQ ID NO: 188182 - RNA, 32 nt, Homo Sapiens
ugccugcauuuccagagcuggugccaggguca

SEQ ID NO: 188183 - RNA, 32 nt, Homo Sapiens
gcaacccagcgcgccgcccgcuccucacgugu

SEQ ID NO: 188184 - RNA, 32 nt, Homo Sapiens
gauaugcacaacauuaauccaagcauuauuua

SEQ ID NO: 188185 - RNA, 32 nt, Homo Sapiens
auauagguguaaaccaagaaccuagagacccu

SEQ ID NO: 188186 - RNA, 31 nt, Homo Sapiens
ucuaggguacuccagaaccagggaaaugaga

SEQ ID NO: 188187 - RNA, 32 nt, Homo Sapiens
guaucauucauucaaagcauauuuguuucauu

SEQ ID NO: 188188 - RNA, 30 nt, Homo Sapiens
ugaugggagaagcugcagaauuugagcccg

SEQ ID NO: 188189 - RNA, 32 nt, Homo Sapiens
aacaaauuugcuagggaaucuauuuguguaga

SEQ ID NO: 188190 - RNA, 32 nt, Homo Sapiens
gcuucaaaaaauauacuaauugcugguaauau

SEQ ID NO: 188191 - RNA, 32 nt, Homo Sapiens
uguucuuagugagaauggcuggccugagaauc

SEQ ID NO: 188192 - RNA, 32 nt, Homo Sapiens
aaggccuuacacaaguuaugugacaauucuua

SEQ ID NO: 188193 - RNA, 32 nt, Homo Sapiens
ggcucccaaccaaaaccacaccauaggguuuu

SEQ ID NO: 188194 - RNA, 31 nt, Homo Sapiens
uuccugcucggcaccgggccccgcgcgcccc

SEQ ID NO: 188195 - RNA, 32 nt, Homo Sapiens
aaaaauaaacauguauuuguguaauugguuug

SEQ ID NO: 188196 - RNA, 32 nt, Homo Sapiens
ccgcagcugcugucugcagagccugcucggau

SEQ ID NO: 188197 - RNA, 32 nt, Homo Sapiens
uuguuuuuggaaaaacaaaauuucuacaauua

SEQ ID NO: 188198 - RNA, 32 nt, Homo Sapiens
caaggugaaggcauugccaagugugugucgcu

SEQ ID NO: 188199 - RNA, 32 nt, Homo Sapiens
uuguguuuucccuuuguuuuucccuagcauug

SEQ ID NO: 188200 - RNA, 32 nt, Homo Sapiens
uuuccacaaggugcucaagggucuuuaugaga

SEQ ID NO: 188201 - RNA, 32 nt, Homo Sapiens
cuuccuguuuuguacauagauuuauuuuucag

SEQ ID NO: 188202 - RNA, 32 nt, Homo Sapiens
acguccuccaucccggccccgcugccuccgcc

SEQ ID NO: 188203 - RNA, 32 nt, Homo Sapiens
gcauauucaauggaaggucacucucaaucuua

SEQ ID NO: 188204 - RNA, 32 nt, Homo Sapiens
gugucuggagggggguugugggggugugcccg

SEQ ID NO: 188205 - RNA, 32 nt, Homo Sapiens
accugugaauuucaaaauguuauaaaaucucu

SEQ ID NO: 188206 - RNA, 32 nt, Homo Sapiens
auguaaaauaaaauaaaacacaucugccuucu

SEQ ID NO: 188207 - RNA, 32 nt, Homo Sapiens
aggauguucucugcgcucccaggccggcaucg

SEQ ID NO: 188208 - RNA, 32 nt, Homo Sapiens
ggugggaggugauugaaucaugggggugguuu

SEQ ID NO: 188209 - RNA, 32 nt, Homo Sapiens
agagaagaaaaguuuuuaucguauucauacua

SEQ ID NO: 188210 - RNA, 31 nt, Homo Sapiens
cgaccugcaaggucccagccagcaggacacc

SEQ ID NO: 188211 - RNA, 32 nt, Homo Sapiens
ccugacacugcccccugcuugaauugauuccg

SEQ ID NO: 188212 - RNA, 32 nt, Homo Sapiens
uaagaaaugcuguagcuguugucauucaaucu

SEQ ID NO: 188213 - RNA, 32 nt, Homo Sapiens
uccagccugcacugggccccagcccuccugcu

SEQ ID NO: 188214 - RNA, 32 nt, Homo Sapiens
acagccagccgggcugcccauucacgcagagc

SEQ ID NO: 188215 - RNA, 32 nt, Homo Sapiens
augagcucuuggaugagggugccaaguugcug

SEQ ID NO: 188216 - RNA, 32 nt, Homo Sapiens
gcguguucggugcgcucuggccgcucaggccg

SEQ ID NO: 188217 - RNA, 32 nt, Homo Sapiens
auuuaauaaaauuuauguuacaggauaacuuu

SEQ ID NO: 188218 - RNA, 32 nt, Homo Sapiens
agcuaaggggagagaaauuggggcugagugga

SEQ ID NO: 188219 - RNA, 32 nt, Homo Sapiens
cgcggugcaccgagaggcgcccgggcuggagc

SEQ ID NO: 188220 - RNA, 32 nt, Homo Sapiens
cuggcaacggcgguggcgcccggagcccgaga

SEQ ID NO: 188221 - RNA, 30 nt, Homo Sapiens
gcaugcucuaucaacagcggcaggauuuua

SEQ ID NO: 188222 - RNA, 32 nt, Homo Sapiens
uuguacauuucuaauacaaacauuccuuauuu

SEQ ID NO: 188223 - RNA, 32 nt, Homo Sapiens
guuuggugguugccauugggacagugagccuu

SEQ ID NO: 188224 - RNA, 32 nt, Homo Sapiens
cacaccucaagccccaugccgugcucauccua

SEQ ID NO: 188225 - RNA, 32 nt, Homo Sapiens
agauuuccauucuuuuuuggcauguccuuaaa

SEQ ID NO: 188226 - RNA, 31 nt, Homo Sapiens
uggaauaagccccagcccagccaaaccaaac

SEQ ID NO: 188227 - RNA, 32 nt, Homo Sapiens
acuuuguuaggaagggugagaauagaaucuug

SEQ ID NO: 188228 - RNA, 32 nt, Homo Sapiens
uuaaugugaggaaaagaaaugcucaauugaag

SEQ ID NO: 188229 - RNA, 31 nt, Homo Sapiens
ggcaggagggcgguccgaacgugcccccacc

SEQ ID NO: 188230 - RNA, 30 nt, Homo Sapiens
aggucucuggacuccaguuuuggccccucu

SEQ ID NO: 188231 - RNA, 32 nt, Homo Sapiens
ggcucugaacaaacuuuugaaaacuugguuga

SEQ ID NO: 188232 - RNA, 32 nt, Homo Sapiens
gaccuccccgucccaccucacugccaucccag

SEQ ID NO: 188233 - RNA, 32 nt, Homo Sapiens
ccuguugcgcgggcauccugugcguugcagga

SEQ ID NO: 188234 - RNA, 32 nt, Homo Sapiens
uaaaaugugauuuuguaacugcacuaaacauu

SEQ ID NO: 188235 - RNA, 32 nt, Homo Sapiens
accggcuucuccccgggcccucagcuugaagc

SEQ ID NO: 188236 - RNA, 32 nt, Homo Sapiens
aacacggugaggccccagcgccugcagccaaa

SEQ ID NO: 188237 - RNA, 32 nt, Homo Sapiens
auuuuacagaaggaugaggaucagcgcucaag

SEQ ID NO: 188238 - RNA, 32 nt, Homo Sapiens
caugaacauuucucuuguguuccugacuccuu

SEQ ID NO: 188239 - RNA, 32 nt, Homo Sapiens
guagaagcugguccuccugggucugagcuacc

SEQ ID NO: 188240 - RNA, 32 nt, Homo Sapiens
uaaaaaaaucugcacuggggucgggcacagug

SEQ ID NO: 188241 - RNA, 32 nt, Homo Sapiens
gcauguuacuauccugaagucaaugggcaauu

SEQ ID NO: 188242 - RNA, 32 nt, Homo Sapiens
gaucaaacgugcuuaagagcuaacucgugaca

SEQ ID NO: 188243 - RNA, 32 nt, Homo Sapiens
agcuuacagguaccaauaaagaggcuuuauuu

SEQ ID NO: 188244 - RNA, 32 nt, Homo Sapiens
ugucauugacugugacucagaucugcccucuc

SEQ ID NO: 188245 - RNA, 32 nt, Homo Sapiens
uaaaggguccugauugcuuguauuuuaagaca

SEQ ID NO: 188246 - RNA, 32 nt, Homo Sapiens
uagauauuuuugcccaccugaggaggaucuca

SEQ ID NO: 188247 - RNA, 32 nt, Homo Sapiens
gauggggaucuuucaccuuuagggaucucagc

SEQ ID NO: 188248 - RNA, 32 nt, Homo Sapiens
cuccuccccucauuaaaccauccaccugacac

SEQ ID NO: 188249 - RNA, 32 nt, Homo Sapiens
uaaaaguggagagacugaggcuaagguuacgc

SEQ ID NO: 188250 - RNA, 32 nt, Homo Sapiens
cucccgugggccgcacccuugccacugcccca

SEQ ID NO: 188251 - RNA, 32 nt, Homo Sapiens
ucgccgcgcucgccccgggcuacuccugcgcg

SEQ ID NO: 188252 - RNA, 32 nt, Homo Sapiens
auauagccgaaguggaaauagccaugacccag

SEQ ID NO: 188253 - RNA, 32 nt, Homo Sapiens
aggcuuguccuguggaggggccgggucuuggc

SEQ ID NO: 188254 - RNA, 31 nt, Homo Sapiens
ugggaggaaauucucaggagagccuguggaa

SEQ ID NO: 188255 - RNA, 32 nt, Homo Sapiens
aagcaagcuucgccuccucguuuuauuuuuug

SEQ ID NO: 188256 - RNA, 32 nt, Homo Sapiens
uuacuugggguuacuuuuuuuauuuugugaua

SEQ ID NO: 188257 - RNA, 32 nt, Homo Sapiens
cuuuguacugucaacugcauuaucuuuaauua

SEQ ID NO: 188258 - RNA, 32 nt, Homo Sapiens
ucccgacgcgucugcugagccccauggcccac

SEQ ID NO: 188259 - RNA, 32 nt, Homo Sapiens
auucagacaaacugaaaacuacagccuuaguc

SEQ ID NO: 188260 - RNA, 32 nt, Homo Sapiens
cccgcggagacuccggccgcccccuuccgcag

SEQ ID NO: 188261 - RNA, 32 nt, Homo Sapiens
acugucagucacucagacaacuacuguugaag

SEQ ID NO: 188262 - RNA, 32 nt, Homo Sapiens
aaggccaugcuucaguguuuucguuucuauuu

SEQ ID NO: 188263 - RNA, 30 nt, Homo Sapiens
cccucugucugugcuuguguuguugaccuc

SEQ ID NO: 188264 - RNA, 32 nt, Homo Sapiens
agaggucagcaggacccgccugggggugccgg

SEQ ID NO: 188265 - RNA, 32 nt, Homo Sapiens
gcagguguaccucccccugccuuccaaccccu

SEQ ID NO: 188266 - RNA, 32 nt, Homo Sapiens
ccugcucccagugcagggucagaugggccgua

SEQ ID NO: 188267 - RNA, 32 nt, Homo Sapiens
caagcaucaguucuacggaucaucaacaagau

SEQ ID NO: 188268 - RNA, 28 nt, Homo Sapiens
cuuuggaaccugaacauuauagaaaagc

SEQ ID NO: 188269 - RNA, 32 nt, Homo Sapiens
acucagaucuauguggaaaaggguugagcaaa

SEQ ID NO: 188270 - RNA, 32 nt, Homo Sapiens
gaggucauuuugggggcgugcaccgcuguucu

SEQ ID NO: 188271 - RNA, 32 nt, Homo Sapiens
aauacuuaagacaaaaugggcugggaucggug

SEQ ID NO: 188272 - RNA, 32 nt, Homo Sapiens
ucuguauuguacacaugaugaaaugaagcaga

SEQ ID NO: 188273 - RNA, 32 nt, Homo Sapiens
gagccuucccccugugcuguugaacucuggga

SEQ ID NO: 188274 - RNA, 32 nt, Homo Sapiens
uuucuguuucauaacacaaggcugguuguggc

SEQ ID NO: 188275 - RNA, 32 nt, Homo Sapiens
aauauagcauauaaauauuaugccaucauucc

SEQ ID NO: 188276 - RNA, 32 nt, Homo Sapiens
guugauccuuuuagauuaaaaauaaaaugucg

SEQ ID NO: 188277 - RNA, 32 nt, Homo Sapiens
cucucagaacaccagcaguuaaccuucaagac

SEQ ID NO: 188278 - RNA, 32 nt, Homo Sapiens
ugccugguuugugagagggacuccucgaccga

SEQ ID NO: 188279 - RNA, 32 nt, Homo Sapiens
agcugcgugcuggaguucuguccccaaaccaa

SEQ ID NO: 188280 - RNA, 32 nt, Homo Sapiens
uuuuucaaucaucaaaaaguaauuauaaauac

SEQ ID NO: 188281 - RNA, 32 nt, Homo Sapiens
gggcauagacugccuuccuuggacccuuccaa

SEQ ID NO: 188282 - RNA, 32 nt, Homo Sapiens
agccgucucaaguuuaaacuuacacgaaucgc

SEQ ID NO: 188283 - RNA, 32 nt, Homo Sapiens
auuuuuccugugcuacauaccaccacagcagc

SEQ ID NO: 188284 - RNA, 32 nt, Homo Sapiens
gacacagagaaggaagcagagacuggagggau

SEQ ID NO: 188285 - RNA, 32 nt, Homo Sapiens
guuagggagguuguauaacauaaaaaacacau

SEQ ID NO: 188286 - RNA, 32 nt, Homo Sapiens
ccucaaugggacauguggaagaacuugggguc

SEQ ID NO: 188287 - RNA, 32 nt, Homo Sapiens
guuuaauuuuauucuguguuuucucuuggcuc

SEQ ID NO: 188288 - RNA, 32 nt, Homo Sapiens
uguccccugcugcucacucuuaacucagcccu

SEQ ID NO: 188289 - RNA, 32 nt, Homo Sapiens
aaucaguuuucguuaaaguacuucuacuuccg

SEQ ID NO: 188290 - RNA, 32 nt, Homo Sapiens
ggcccaaguauucagauaucaacgauauaaau

SEQ ID NO: 188291 - RNA, 30 nt, Homo Sapiens
acaugaggcaggcagaggugcgggucaccc

SEQ ID NO: 188292 - RNA, 32 nt, Homo Sapiens
gagcuuucuacacagcuggacuucugaggugg

SEQ ID NO: 188293 - RNA, 32 nt, Homo Sapiens
ugugggggcaacugaaaauaucaaggaaggca

SEQ ID NO: 188294 - RNA, 32 nt, Homo Sapiens
gagauccugaaaccucugucauggaaaaguac

SEQ ID NO: 188295 - RNA, 32 nt, Homo Sapiens
uaaagguugcuguaguguuuagaacuuaggcu

SEQ ID NO: 188296 - RNA, 32 nt, Homo Sapiens
gcugggaggcacgggaguacugccggggcauc

SEQ ID NO: 188297 - RNA, 32 nt, Homo Sapiens
gacgccgcccucccgggguuggggacagagca

SEQ ID NO: 188298 - RNA, 32 nt, Homo Sapiens
uguucuagcuacuucacacauguguacgcgac

SEQ ID NO: 188299 - RNA, 32 nt, Homo Sapiens
cagcccccagaaaaaaggcaauaaagacgagu

SEQ ID NO: 188300 - RNA, 32 nt, Homo Sapiens
uggcuuccccggcgcgcaccacggcugagcgc

SEQ ID NO: 188301 - RNA, 32 nt, Homo Sapiens
cugacgggaacaauucuuaaacugauuaacua

SEQ ID NO: 188302 - RNA, 32 nt, Homo Sapiens
ggcuuccuggggaagaguuguacgcccaggca

SEQ ID NO: 188303 - RNA, 32 nt, Homo Sapiens
cugaugccccggugcugcugagcgccgugcgc

SEQ ID NO: 188304 - RNA, 32 nt, Homo Sapiens
ggaauuccgggaggagcggacgucggcuucuc

SEQ ID NO: 188305 - RNA, 30 nt, Homo Sapiens
aggaggguagguggcagcauggauucuagg

SEQ ID NO: 188306 - RNA, 32 nt, Homo Sapiens
cuuuuccuaaaaugauuuucuaaugggaacag

SEQ ID NO: 188307 - RNA, 32 nt, Homo Sapiens
ggagcugguaucuuggcccuucugggaggacg

SEQ ID NO: 188308 - RNA, 32 nt, Homo Sapiens
cuuccaucucccagcccaccagcccucugccc

SEQ ID NO: 188309 - RNA, 32 nt, Homo Sapiens
ccaaacccaggcccuuccuguucuuugcccua

SEQ ID NO: 188310 - RNA, 32 nt, Homo Sapiens
aggggaacacuggggacuuggccucucucuag

SEQ ID NO: 188311 - RNA, 32 nt, Homo Sapiens
uuaacaucuggauuauuuuuugcaauagcgcu

SEQ ID NO: 188312 - RNA, 32 nt, Homo Sapiens
aggucgcucaggcuugcagaugggucaagggu

SEQ ID NO: 188313 - RNA, 32 nt, Homo Sapiens
agucacaaaucagaacugcuuaccauacuuuu

SEQ ID NO: 188314 - RNA, 32 nt, Homo Sapiens
accagccacacuggcuuuugagcacuggauac

SEQ ID NO: 188315 - RNA, 32 nt, Homo Sapiens
guuguaagggaagaguuuaugcugacugcuua

SEQ ID NO: 188316 - RNA, 32 nt, Homo Sapiens
acaucaccaguguguggagccugccacaccca

SEQ ID NO: 188317 - RNA, 32 nt, Homo Sapiens
gugauucuauagaaagggaugcugcucaggaa

SEQ ID NO: 188318 - RNA, 31 nt, Homo Sapiens
uaccauuuacuagauuagccaaauagucuga

SEQ ID NO: 188319 - RNA, 32 nt, Homo Sapiens
aaacuacccaaguuguucuguugcacaucaau

SEQ ID NO: 188320 - RNA, 31 nt, Homo Sapiens
cccugugagaggagaaagaguccacuccagg

SEQ ID NO: 188321 - RNA, 32 nt, Homo Sapiens
uucugugaggaugugguccacacaauuccuuc

SEQ ID NO: 188322 - RNA, 32 nt, Homo Sapiens
gaaucuuccuucccucucucuggccgcaaaga

SEQ ID NO: 188323 - RNA, 30 nt, Homo Sapiens
ccgaacaccagcccagcggguccuggaccc

SEQ ID NO: 188324 - RNA, 32 nt, Homo Sapiens
auucugcgucugcuugcugaggaggcggauua

SEQ ID NO: 188325 - RNA, 32 nt, Homo Sapiens
cgucuccgccagaggccaccccggcccggccu

SEQ ID NO: 188326 - RNA, 32 nt, Homo Sapiens
guguuuuuuuuuucuuuuuuuauuuuaaguuc

SEQ ID NO: 188327 - RNA, 32 nt, Homo Sapiens
gcuugccucagaaaaagcuauagugcagcagc

SEQ ID NO: 188328 - RNA, 32 nt, Homo Sapiens
ggcaaugcucccuccuucucaggguccacggg

SEQ ID NO: 188329 - RNA, 32 nt, Homo Sapiens
acccagcccaaguuuucaucgucugcucaaua

SEQ ID NO: 188330 - RNA, 32 nt, Homo Sapiens
caagcugccacuggugucagcugcuggaguaa

SEQ ID NO: 188331 - RNA, 32 nt, Homo Sapiens
agagguccgugcuacaucuucacaguuccucc

SEQ ID NO: 188332 - RNA, 32 nt, Homo Sapiens
ggguuagcaaauuuuuucaauaaagggucaga

SEQ ID NO: 188333 - RNA, 32 nt, Homo Sapiens
cuaagucaugucugcugccugugagccuggga

SEQ ID NO: 188334 - RNA, 32 nt, Homo Sapiens
ucgugcggcagagcaucacaccauggcguaug

SEQ ID NO: 188335 - RNA, 31 nt, Homo Sapiens
uuucugcucugcagccaaagauggucagaag

SEQ ID NO: 188336 - RNA, 32 nt, Homo Sapiens
aagcggucagaaggccugaggacccaaggccc

SEQ ID NO: 188337 - RNA, 32 nt, Homo Sapiens
gcaacuuggaauggaagcuaaaguuaaaaccu

SEQ ID NO: 188338 - RNA, 32 nt, Homo Sapiens
gauagcucucucgcccucacuccaccacauga

SEQ ID NO: 188339 - RNA, 32 nt, Homo Sapiens
agcuggcaaaaagaagcaggaggaagcgcauu

SEQ ID NO: 188340 - RNA, 32 nt, Homo Sapiens
uguagagcuauuaagggaguauuuucacuugu

SEQ ID NO: 188341 - RNA, 31 nt, Homo Sapiens
cuuucuuugugcuaagguucuugcggugaac

SEQ ID NO: 188342 - RNA, 32 nt, Homo Sapiens
caucagaaauucuaccuuucugaugaacaugg

SEQ ID NO: 188343 - RNA, 32 nt, Homo Sapiens
agcugagaccucucuggagacccagauccccu

SEQ ID NO: 188344 - RNA, 29 nt, Homo Sapiens
gcguguaaagagauauauuuuuguaagag

SEQ ID NO: 188345 - RNA, 32 nt, Homo Sapiens
gcggcucuuguagaacaugacucugggacauc

SEQ ID NO: 188346 - RNA, 32 nt, Homo Sapiens
caacccuuggggagcugaucuaucuuguagcc

SEQ ID NO: 188347 - RNA, 32 nt, Homo Sapiens
aggagacccccgugggcacguguccacuuuua

SEQ ID NO: 188348 - RNA, 32 nt, Homo Sapiens
ccuaugugccccuuuucagaaaacagauagau

SEQ ID NO: 188349 - RNA, 32 nt, Homo Sapiens
uaaaauuuaggaccaauaccuccuccagauca

SEQ ID NO: 188350 - RNA, 32 nt, Homo Sapiens
ccuccucucccucccccagugguauguaagug

SEQ ID NO: 188351 - RNA, 32 nt, Homo Sapiens
ccaguugggugcccgcgcgucacguggugagg

SEQ ID NO: 188352 - RNA, 32 nt, Homo Sapiens
cuaauuuaauaaauuacaggauuggaacugcg

SEQ ID NO: 188353 - RNA, 32 nt, Homo Sapiens
gcuuuccugucacaucguuuccuuccacgcuc

SEQ ID NO: 188354 - RNA, 32 nt, Homo Sapiens
ccagaucacacuuuauaauaagaucagaggca

SEQ ID NO: 188355 - RNA, 32 nt, Homo Sapiens
aaguugugaacagacucgaucguuaggaaugg

SEQ ID NO: 188356 - RNA, 32 nt, Homo Sapiens
gcugacuccaugaagugguggaguggcagacc

SEQ ID NO: 188357 - RNA, 32 nt, Homo Sapiens
ucucuuucgcaccugccucucaucucaauccu

SEQ ID NO: 188358 - RNA, 32 nt, Homo Sapiens
uacuaaagugucuaguuuuuugaaaugcaaag

SEQ ID NO: 188359 - RNA, 32 nt, Homo Sapiens
auuugaaagugucaagcccauucagauaagcu

SEQ ID NO: 188360 - RNA, 32 nt, Homo Sapiens
cuuaccccgggacaggcccacgccucgccagg

SEQ ID NO: 188361 - RNA, 32 nt, Homo Sapiens
caaaggcaagguggacgcaguuaccauaaaag

SEQ ID NO: 188362 - RNA, 32 nt, Homo Sapiens
cuugugcuguucuccuuuuuucaacuuauagc

SEQ ID NO: 188363 - RNA, 25 nt, Homo Sapiens
augucugugcgcuuuucuucuaccu

SEQ ID NO: 188364 - RNA, 32 nt, Homo Sapiens
gcuugggaauuauuacaggaauuaaaaacaac

SEQ ID NO: 188365 - RNA, 32 nt, Homo Sapiens
ggcauagcugucuagaacaccaucucuaggaa

SEQ ID NO: 188366 - RNA, 32 nt, Homo Sapiens
ugcggugaagggcgagcggcgcggcggcugcg

SEQ ID NO: 188367 - RNA, 32 nt, Homo Sapiens
cccugccuacuuccuuccuguuggauaucaua

SEQ ID NO: 188368 - RNA, 32 nt, Homo Sapiens
aaccucuaacuguggcacucuagucuguugga

SEQ ID NO: 188369 - RNA, 30 nt, Homo Sapiens
auaaaucauucuugcggcggcgggucgaac

SEQ ID NO: 188370 - RNA, 32 nt, Homo Sapiens
gcgaguuaguuuucuagagacuugaaggaguc

SEQ ID NO: 188371 - RNA, 32 nt, Homo Sapiens
aagagaaucucuugagcucaggaggcagaggu

SEQ ID NO: 188372 - RNA, 32 nt, Homo Sapiens
cugcggggacgcccagcgcagcccagccccgc

SEQ ID NO: 188373 - RNA, 32 nt, Homo Sapiens
uuccacagugcgggccgcccaggcccacucca

SEQ ID NO: 188374 - RNA, 32 nt, Homo Sapiens
gggggaggagggcggucguccgggguuagguu

SEQ ID NO: 188375 - RNA, 32 nt, Homo Sapiens
ucugaggacauugauacccagccaccugccgg

SEQ ID NO: 188376 - RNA, 32 nt, Homo Sapiens
cuauaguuuuuaacuuuuuuuuauuuuaauaa

SEQ ID NO: 188377 - RNA, 32 nt, Homo Sapiens
ccaucgugucgcagaagaaggcagaugaagua

SEQ ID NO: 188378 - RNA, 32 nt, Homo Sapiens
augugucuggaagaagcagcguuagggacuuu

SEQ ID NO: 188379 - RNA, 32 nt, Homo Sapiens
ccccaucucuacaaaaagcauaaaaauuagcc

SEQ ID NO: 188380 - RNA, 32 nt, Homo Sapiens
ccuuuugaaacaucauuguaaaacagugcuuu

SEQ ID NO: 188381 - RNA, 32 nt, Homo Sapiens
aaguauaccauuuauauacaaacaaauagguu

SEQ ID NO: 188382 - RNA, 32 nt, Homo Sapiens
cacaagccaugaugaauuggugacucagacgc

SEQ ID NO: 188383 - RNA, 32 nt, Homo Sapiens
ccaagaggcuccugaggaacucggggugugaa

SEQ ID NO: 188384 - RNA, 32 nt, Homo Sapiens
ggucgacuugcaggaccacuuuuccagaaauc

SEQ ID NO: 188385 - RNA, 32 nt, Homo Sapiens
ccgguuccccgaccagguguggcaccuggagc

SEQ ID NO: 188386 - RNA, 32 nt, Homo Sapiens
gaugggaaaaccuggugacugauauaguuguu

SEQ ID NO: 188387 - RNA, 32 nt, Homo Sapiens
cacugucagugacaccaucuuggaauaccuuu

SEQ ID NO: 188388 - RNA, 32 nt, Homo Sapiens
ugaagucagagucuaucuccucugucacuucu

SEQ ID NO: 188389 - RNA, 32 nt, Homo Sapiens
ucacauuaguaaucugauuugcugacaguccu

SEQ ID NO: 188390 - RNA, 32 nt, Homo Sapiens
guuacugcucacuuacuagucccaauuguuuu

SEQ ID NO: 188391 - RNA, 32 nt, Homo Sapiens
guuaggauauauauuucuuucaucuaugacua

SEQ ID NO: 188392 - RNA, 32 nt, Homo Sapiens
auggugggaaaggggcuauaaugugguucauu

SEQ ID NO: 188393 - RNA, 32 nt, Homo Sapiens
gagacagccuguguuacccaggcugaucuuua

SEQ ID NO: 188394 - RNA, 30 nt, Homo Sapiens
cgggggucguagcugccgccgagccggggc

SEQ ID NO: 188395 - RNA, 32 nt, Homo Sapiens
cuuccugccucugagagaccugcuacaagcca

SEQ ID NO: 188396 - RNA, 32 nt, Homo Sapiens
gugggaagccugaugggugcugguggccuuuc

SEQ ID NO: 188397 - RNA, 32 nt, Homo Sapiens
ucuguccggucccagcaugccuucugagaccc

SEQ ID NO: 188398 - RNA, 32 nt, Homo Sapiens
cagcuggagcgcuacagccugcucucuucugc

SEQ ID NO: 188399 - RNA, 27 nt, Homo Sapiens
gggacucugggauucugguguagugga

SEQ ID NO: 188400 - RNA, 32 nt, Homo Sapiens
acaccguuccacuuacaguaucuagcuuccuc

SEQ ID NO: 188401 - RNA, 32 nt, Homo Sapiens
gggagcgcgcgagugcgccggaggacggggag

SEQ ID NO: 188402 - RNA, 32 nt, Homo Sapiens
cugugggccauuuaggagaaaagcauucaguc

SEQ ID NO: 188403 - RNA, 32 nt, Homo Sapiens
ccaugagagucauuguggaaagaaauaaaaua

SEQ ID NO: 188404 - RNA, 32 nt, Homo Sapiens
cagcccaaccucugggaacaggcagcuccuau

SEQ ID NO: 188405 - RNA, 32 nt, Homo Sapiens
ccucgcagcccgccagcucgcgcucgccccgc

SEQ ID NO: 188406 - RNA, 32 nt, Homo Sapiens
uggguuggagagagggcacgggaguuggucuu

SEQ ID NO: 188407 - RNA, 32 nt, Homo Sapiens
caagauggcagcaaacaccagcuccucagcuu

SEQ ID NO: 188408 - RNA, 32 nt, Homo Sapiens
aggcauauguaucuauuaaauaaaccaaagca

SEQ ID NO: 188409 - RNA, 32 nt, Homo Sapiens
cccuuucauucuccaaaccccagccugcaagu

SEQ ID NO: 188410 - RNA, 31 nt, Homo Sapiens
aaucugaaagcggaaggccaggcaagcugca

SEQ ID NO: 188411 - RNA, 32 nt, Homo Sapiens
aaacgcaguuggaaaguccuuauucauuuagu

SEQ ID NO: 188412 - RNA, 32 nt, Homo Sapiens
accacugguccucccaguguuuacaagauuuu

SEQ ID NO: 188413 - RNA, 32 nt, Homo Sapiens
uucgcucagagguggcagagcuucgucagcug

SEQ ID NO: 188414 - RNA, 32 nt, Homo Sapiens
gcgcgcgugggggcuccgcgagucgcucgccc

SEQ ID NO: 188415 - RNA, 32 nt, Homo Sapiens
cccuuccuggggaauggagugcucauuugcag

SEQ ID NO: 188416 - RNA, 32 nt, Homo Sapiens
cccgccauggagccggcuguguguguucauca

SEQ ID NO: 188417 - RNA, 32 nt, Homo Sapiens
ugaggugagaaacuggcgcugcugcugccucg

SEQ ID NO: 188418 - RNA, 32 nt, Homo Sapiens
gaggcagccaucuggggguagcgggcacucuu

SEQ ID NO: 188419 - RNA, 32 nt, Homo Sapiens
agcggcagucgcggggguccgcggcggccuga

SEQ ID NO: 188420 - RNA, 32 nt, Homo Sapiens
uuaaauauauugcuauguaauuuuccaauuuu

SEQ ID NO: 188421 - RNA, 32 nt, Homo Sapiens
auggaggcuucuggauugugauugaugagaaa

SEQ ID NO: 188422 - RNA, 32 nt, Homo Sapiens
agcacuguggugaggucccuuccacuguguac

SEQ ID NO: 188423 - RNA, 32 nt, Homo Sapiens
uaguggaaagcaggugugggacaguuaagaaa

SEQ ID NO: 188424 - RNA, 32 nt, Homo Sapiens
ucccacaggcuccuggccgccgcgagcccgcg

SEQ ID NO: 188425 - RNA, 32 nt, Homo Sapiens
gcaucaggaaaaauguaguuagucuuuucuua

SEQ ID NO: 188426 - RNA, 32 nt, Homo Sapiens
cucaguguauuuuuguaaaaaauauauaaagg

SEQ ID NO: 188427 - RNA, 32 nt, Homo Sapiens
uagagcuuguggaccacuggcuugccucacug

SEQ ID NO: 188428 - RNA, 32 nt, Homo Sapiens
acaccagggcuggugaggcaaccaguuuugau

SEQ ID NO: 188429 - RNA, 32 nt, Homo Sapiens
aaggacaaaaggaagggaaaacugauggccaa

SEQ ID NO: 188430 - RNA, 32 nt, Homo Sapiens
auacaugugagguuuucuuuugcuugagugga

SEQ ID NO: 188431 - RNA, 32 nt, Homo Sapiens
ccccagugucucuuguucuccucugaguaucc

SEQ ID NO: 188432 - RNA, 32 nt, Homo Sapiens
ccugagcggugacaaccgaggcgagaugaugg

SEQ ID NO: 188433 - RNA, 32 nt, Homo Sapiens
uaacaaacugguuuuugguuuuuuuuuccccu

SEQ ID NO: 188434 - RNA, 32 nt, Homo Sapiens
gaguccauuaaaccucuuuucccuuauaaauu

SEQ ID NO: 188435 - RNA, 32 nt, Homo Sapiens
aggaauuaagacaaauauuucagacuggugua

SEQ ID NO: 188436 - RNA, 32 nt, Homo Sapiens
gaaagcucuaggaaacaccagucuugagaggu

SEQ ID NO: 188437 - RNA, 32 nt, Homo Sapiens
gaccacagcuaaggggagucaucacagggcuu

SEQ ID NO: 188438 - RNA, 32 nt, Homo Sapiens
ggguuccaguguugcuugguuagauaagcuga

SEQ ID NO: 188439 - RNA, 32 nt, Homo Sapiens
ccgcgcccagagcagcagcaacagcgaagaug

SEQ ID NO: 188440 - RNA, 32 nt, Homo Sapiens
uagguuuuuuaaaauaauguaaauagggaguc

SEQ ID NO: 188441 - RNA, 32 nt, Homo Sapiens
ggggagggaaagggcaccaggcagcccguggu

SEQ ID NO: 188442 - RNA, 32 nt, Homo Sapiens
uguaauuggacaaugccuggaacauaauagac

SEQ ID NO: 188443 - RNA, 32 nt, Homo Sapiens
ccaggagcugggcccugccacccaggccgggc

SEQ ID NO: 188444 - RNA, 32 nt, Homo Sapiens
agacguuuagacaggacagguuaauuuagcgg

SEQ ID NO: 188445 - RNA, 32 nt, Homo Sapiens
ccagcugcucuaauuuggaagagcagcucuuu

SEQ ID NO: 188446 - RNA, 32 nt, Homo Sapiens
cuuuuuucucuccgguuucucaucacuccaac

SEQ ID NO: 188447 - RNA, 32 nt, Homo Sapiens
cauuugacagagcuccaugcgucccuggagag

SEQ ID NO: 188448 - RNA, 31 nt, Homo Sapiens
ggccugccccacagccugcccuuugcugaag

SEQ ID NO: 188449 - RNA, 32 nt, Homo Sapiens
cugcagaaggagcagacuuacgcacuguggau

SEQ ID NO: 188450 - RNA, 32 nt, Homo Sapiens
gacggucugcauacucgcugcccgccggcucc

SEQ ID NO: 188451 - RNA, 32 nt, Homo Sapiens
uuucuuuacugauacaucacugaacauaagcu

SEQ ID NO: 188452 - RNA, 32 nt, Homo Sapiens
aggugaggccaggcuggggaaccaccgcauua

SEQ ID NO: 188453 - RNA, 32 nt, Homo Sapiens
aaaucagaaaacaaaaugaugugcuuugguca

SEQ ID NO: 188454 - RNA, 32 nt, Homo Sapiens
uagaauaggcucucuacccagcuagaacaccu

SEQ ID NO: 188455 - RNA, 32 nt, Homo Sapiens
aacaaggaaaaugcuguaaauauugcauauuu

SEQ ID NO: 188456 - RNA, 32 nt, Homo Sapiens
gcacccacggggcaugcaugccaggcacaccc

SEQ ID NO: 188457 - RNA, 32 nt, Homo Sapiens
ucucacaucuuacagaucuauaaggucacaug

SEQ ID NO: 188458 - RNA, 31 nt, Homo Sapiens
gggcugcggcacugccacacauccuuucccu

SEQ ID NO: 188459 - RNA, 32 nt, Homo Sapiens
cuuugcugauaaaacagauugcaguaaagaag

SEQ ID NO: 188460 - RNA, 32 nt, Homo Sapiens
ugaggccuccccagccacuuggaacuagaugg

SEQ ID NO: 188461 - RNA, 32 nt, Homo Sapiens
ggcagggaggcagucgcccugcggugcaagcu

SEQ ID NO: 188462 - RNA, 32 nt, Homo Sapiens
uaggccuuuuauucauugauaucuuuucccaa

SEQ ID NO: 188463 - RNA, 32 nt, Homo Sapiens
gcacugcucggggcucccaaggagguugugug

SEQ ID NO: 188464 - RNA, 32 nt, Homo Sapiens
aaaacuugaacaacauuuuaaaauagcuugag

SEQ ID NO: 188465 - RNA, 32 nt, Homo Sapiens
accuauccucacugcccuccccagucucucuu

SEQ ID NO: 188466 - RNA, 32 nt, Homo Sapiens
aaauuaaggggaacuccauguauuuuaccuac

SEQ ID NO: 188467 - RNA, 32 nt, Homo Sapiens
ccgaggaugcucucauugugcacugcguagau

SEQ ID NO: 188468 - RNA, 32 nt, Homo Sapiens
ggcccaggacgagguggccaggcggcccccau

SEQ ID NO: 188469 - RNA, 32 nt, Homo Sapiens
agagaacuggacaugccuggagacuugagauc

SEQ ID NO: 188470 - RNA, 32 nt, Homo Sapiens
ccucagcugcaccuccuccccuccaaggauga

SEQ ID NO: 188471 - RNA, 32 nt, Homo Sapiens
uuguaguuggaguaauaggagcuuccagcucu

SEQ ID NO: 188472 - RNA, 32 nt, Homo Sapiens
uugcaggugugagccaccacacccagccauga

SEQ ID NO: 188473 - RNA, 32 nt, Homo Sapiens
caaggcgcagagcaacuaucagggcagcucug

SEQ ID NO: 188474 - RNA, 32 nt, Homo Sapiens
auuuacccccugccuuucugcacugucauuuu

SEQ ID NO: 188475 - RNA, 32 nt, Homo Sapiens
uggacucuuaaaccuccuaaucgaacauggcc

SEQ ID NO: 188476 - RNA, 32 nt, Homo Sapiens
uaacauucuggcaaauaacaauuagaaaagau

SEQ ID NO: 188477 - RNA, 32 nt, Homo Sapiens
agucucugccucugccucucccuuccaagcuc

SEQ ID NO: 188478 - RNA, 32 nt, Homo Sapiens
agucucccuccccucgccgacugccgccccag

SEQ ID NO: 188479 - RNA, 30 nt, Homo Sapiens
gccgaggccguucaccccgccgaggccccu

SEQ ID NO: 188480 - RNA, 32 nt, Homo Sapiens
gcaagggaggauuuucccggccgcagcacagc

SEQ ID NO: 188481 - RNA, 32 nt, Homo Sapiens
gagauccuaccuuuuaggagcagccugccccu

SEQ ID NO: 188482 - RNA, 32 nt, Homo Sapiens
aagugaagguauuaauaagaggucuggcaggu

SEQ ID NO: 188483 - RNA, 32 nt, Homo Sapiens
ccgggaguggagcagccgccgcggcgggacug

SEQ ID NO: 188484 - RNA, 32 nt, Homo Sapiens
caagcccacuggccagcucuggcucagggccc

SEQ ID NO: 188485 - RNA, 32 nt, Homo Sapiens
aguguguggauaggcugaugcuauagguugcu

SEQ ID NO: 188486 - RNA, 30 nt, Homo Sapiens
ucacagcugacgaugggggaccccagcaag

SEQ ID NO: 188487 - RNA, 32 nt, Homo Sapiens
acuuuuuugaguuuuccuggccaggcgcagug

SEQ ID NO: 188488 - RNA, 32 nt, Homo Sapiens
aagcaaagcacccaacaaugguaaauguuuuu

SEQ ID NO: 188489 - RNA, 32 nt, Homo Sapiens
uuccuuagcuggccaggagugcccuaagggua

SEQ ID NO: 188490 - RNA, 32 nt, Homo Sapiens
uuuccuggcuggaagagaugggugugcaagau

SEQ ID NO: 188491 - RNA, 29 nt, Homo Sapiens
auguauauauguauauagguaguauucag

SEQ ID NO: 188492 - RNA, 32 nt, Homo Sapiens
ucuuuuuuuuuucuuuuuuuuauuauacucua

SEQ ID NO: 188493 - RNA, 32 nt, Homo Sapiens
ucgccgcgggaccggggccgcuggggucugga

SEQ ID NO: 188494 - RNA, 32 nt, Homo Sapiens
ggccuggcuggcucuucugugcuuuccacaaa

SEQ ID NO: 188495 - RNA, 32 nt, Homo Sapiens
gagucugaugcuuuugcaguacucugaucgca

SEQ ID NO: 188496 - RNA, 32 nt, Homo Sapiens
ucccuggacuagaagcaaaaccacagaaacaa

SEQ ID NO: 188497 - RNA, 32 nt, Homo Sapiens
ccacaggcugaccccucagcugcucagccagg

SEQ ID NO: 188498 - RNA, 32 nt, Homo Sapiens
cagccaccuugauaaaugacaggguggggaac

SEQ ID NO: 188499 - RNA, 32 nt, Homo Sapiens
agccccacaaaacaccuucaguagagccuuga

SEQ ID NO: 188500 - RNA, 32 nt, Homo Sapiens
ggccagugggucuauugugccaaaaaugcuga

SEQ ID NO: 188501 - RNA, 32 nt, Homo Sapiens
ugcaguggugugaucucggcucacuguaaccu

SEQ ID NO: 188502 - RNA, 32 nt, Homo Sapiens
agcuuggguuugggggccucagugcaggacau

SEQ ID NO: 188503 - RNA, 32 nt, Homo Sapiens
ugagauauuucugaauuacuguuguaauggcu

SEQ ID NO: 188504 - RNA, 25 nt, Homo Sapiens
caauuaaaaauauuuuaagaacugg

SEQ ID NO: 188505 - RNA, 32 nt, Homo Sapiens
cuauauauguauauaaacaaacacauuaucua

SEQ ID NO: 188506 - RNA, 32 nt, Homo Sapiens
gcacaaacauucccuuacaccauuccacucuu

SEQ ID NO: 188507 - RNA, 32 nt, Homo Sapiens
ggacagucgggcggggagcucggcggcggcgg

SEQ ID NO: 188508 - RNA, 32 nt, Homo Sapiens
aacuuuggaucaauuucuuuuucauaggggug

SEQ ID NO: 188509 - RNA, 32 nt, Homo Sapiens
aaccucaaacuuuuacauaacaucucaggagg

SEQ ID NO: 188510 - RNA, 32 nt, Homo Sapiens
uuucaguagcuacuuucauuggauugacccua

SEQ ID NO: 188511 - RNA, 32 nt, Homo Sapiens
uuacacuguuuauauuuuccuguccuucaauu

SEQ ID NO: 188512 - RNA, 32 nt, Homo Sapiens
cgcgcccccuccccccgagccucaccuuuuau

SEQ ID NO: 188513 - RNA, 32 nt, Homo Sapiens
uggagcacaugccguaaaauggcuguuuaccc

SEQ ID NO: 188514 - RNA, 32 nt, Homo Sapiens
acuacauuucugaauaucccaaggcgagguca

SEQ ID NO: 188515 - RNA, 32 nt, Homo Sapiens
gcuccuggaguccaauggcugcuuagagucag

SEQ ID NO: 188516 - RNA, 32 nt, Homo Sapiens
agcggaagggaagaauaagggaccccuggaga

SEQ ID NO: 188517 - RNA, 28 nt, Homo Sapiens
uacuaagaaauucaucauuugaaacgua

SEQ ID NO: 188518 - RNA, 32 nt, Homo Sapiens
ugaaaaugaaaacaagugcugaagaugaaaug

SEQ ID NO: 188519 - RNA, 32 nt, Homo Sapiens
uggagaacaaaaugcagaagugaugcuguucc

SEQ ID NO: 188520 - RNA, 32 nt, Homo Sapiens
aggauuccaugaugauuuuaaugucuuucuca

SEQ ID NO: 188521 - RNA, 32 nt, Homo Sapiens
uccuguugcucccuccauccacagaauaauag

SEQ ID NO: 188522 - RNA, 32 nt, Homo Sapiens
ugaccuauagaggcuaaaaaacagcaaggaaa

SEQ ID NO: 188523 - RNA, 32 nt, Homo Sapiens
uugaugccaaccccaacagacccauaggggag

SEQ ID NO: 188524 - RNA, 32 nt, Homo Sapiens
caagcacacuuugguuccuucuccgggcggcu

SEQ ID NO: 188525 - RNA, 32 nt, Homo Sapiens
gagggcuugagagcucagccugccugggagag

SEQ ID NO: 188526 - RNA, 32 nt, Homo Sapiens
auuuguugacuucaccaguuuuaggagguuga

SEQ ID NO: 188527 - RNA, 32 nt, Homo Sapiens
cgacagucuuccaggauuauggaguuucugag

SEQ ID NO: 188528 - RNA, 32 nt, Homo Sapiens
uugugguuccagauuuuuuuuaaucuccuacu

SEQ ID NO: 188529 - RNA, 32 nt, Homo Sapiens
ccuucgcagccgccgccuccuccgcgccgcgc

SEQ ID NO: 188530 - RNA, 32 nt, Homo Sapiens
gccgagcagaccuugggaccugugagcgcugc

SEQ ID NO: 188531 - RNA, 32 nt, Homo Sapiens
uuucuuuuucuuucuuuuuuucuuuuuuuuug

SEQ ID NO: 188532 - RNA, 32 nt, Homo Sapiens
aaaugugacauugaguacauuuuguguugcug

SEQ ID NO: 188533 - RNA, 32 nt, Homo Sapiens
cccucuuccaacauggccgccgcugccucugu

SEQ ID NO: 188534 - RNA, 32 nt, Homo Sapiens
gauuccuccgcgggagguggcccucagcuggg

SEQ ID NO: 188535 - RNA, 32 nt, Homo Sapiens
gagaaaauggcaugaaaauauuaaauugucuu

SEQ ID NO: 188536 - RNA, 32 nt, Homo Sapiens
cgggcugaccgugccgagcggcagcugcaggu

SEQ ID NO: 188537 - RNA, 32 nt, Homo Sapiens
uggcaagagucagcuucuguaugggucuggug

SEQ ID NO: 188538 - RNA, 32 nt, Homo Sapiens
acauuaaucuucagacccggcuuuuucgacgc

SEQ ID NO: 188539 - RNA, 32 nt, Homo Sapiens
gacccacuugcuguugcccccggaccuugccg

SEQ ID NO: 188540 - RNA, 32 nt, Homo Sapiens
uacugucuauugucagcaucauuuucaucugu

SEQ ID NO: 188541 - RNA, 32 nt, Homo Sapiens
agagucucugcaccccacuuggaaccauaugc

SEQ ID NO: 188542 - RNA, 32 nt, Homo Sapiens
auggcuuggugucuuucuuuucuaauuaugca

SEQ ID NO: 188543 - RNA, 32 nt, Homo Sapiens
auuguuauuguaaaaugauuauuugccauguc

SEQ ID NO: 188544 - RNA, 32 nt, Homo Sapiens
uuuccccaggacuucgcuauuuugcuuuuuua

SEQ ID NO: 188545 - RNA, 32 nt, Homo Sapiens
gguuuugccaucagcaacaucauuccugucag

SEQ ID NO: 188546 - RNA, 32 nt, Homo Sapiens
uuaucuucccccuugucguuugagguuuugau

SEQ ID NO: 188547 - RNA, 32 nt, Homo Sapiens
uccaucugcuuuuuucugaaauacacuaagag

SEQ ID NO: 188548 - RNA, 32 nt, Homo Sapiens
ggggcagcacugggccuggccccccggguauu

SEQ ID NO: 188549 - RNA, 32 nt, Homo Sapiens
uuaggugaggccgccgugggccccaucuuccg

SEQ ID NO: 188550 - RNA, 32 nt, Homo Sapiens
ugcugugguccucgugauaagagugaccuuuu

SEQ ID NO: 188551 - RNA, 32 nt, Homo Sapiens
guauaccaccgggaguggggcugguguggagc

SEQ ID NO: 188552 - RNA, 32 nt, Homo Sapiens
guacccgcgcggugcgggccucagucugcggc

SEQ ID NO: 188553 - RNA, 32 nt, Homo Sapiens
cccugcugcaccuggucugcaggggugcccca

SEQ ID NO: 188554 - RNA, 32 nt, Homo Sapiens
aauaaaucugcuccuauaauugaggcauacug

SEQ ID NO: 188555 - RNA, 32 nt, Homo Sapiens
ccagcuccuucgcuucuccagaauagggguuu

SEQ ID NO: 188556 - RNA, 32 nt, Homo Sapiens
uccuccagccccagcagguccacuccugguuc

SEQ ID NO: 188557 - RNA, 32 nt, Homo Sapiens
cagcauccuggccacaaguucuuccuuccauu

SEQ ID NO: 188558 - RNA, 32 nt, Homo Sapiens
uucuauuuuauuuuuaauucucucuucuccuc

SEQ ID NO: 188559 - RNA, 32 nt, Homo Sapiens
cauuuugccccugcacgagauauuuguagaac

SEQ ID NO: 188560 - RNA, 32 nt, Homo Sapiens
uaauuaugacaaaaacaaaaacaacaacaaaa

SEQ ID NO: 188561 - RNA, 32 nt, Homo Sapiens
ccgaggcccucccugccuggguucuccccagc

SEQ ID NO: 188562 - RNA, 32 nt, Homo Sapiens
uucagaaaauggaaacaagacuauaaaugaua

SEQ ID NO: 188563 - RNA, 32 nt, Homo Sapiens
ugcugguaacccucagaaaccuucuccaagug

SEQ ID NO: 188564 - RNA, 32 nt, Homo Sapiens
aguuugaccuggaugugauugcuguggugaac

SEQ ID NO: 188565 - RNA, 32 nt, Homo Sapiens
agguuagagucuuuucuacagacuaagagugu

SEQ ID NO: 188566 - RNA, 32 nt, Homo Sapiens
gaaaacguuuuaaguugucaugugacagaaac

SEQ ID NO: 188567 - RNA, 32 nt, Homo Sapiens
cgcggcugaggcgcccgagugcgguacuggcg

SEQ ID NO: 188568 - RNA, 32 nt, Homo Sapiens
ggggucagguguggagaucagggucggggagg

SEQ ID NO: 188569 - RNA, 32 nt, Homo Sapiens
ccacaagagucuuauaauuaucaguucugacu

SEQ ID NO: 188570 - RNA, 32 nt, Homo Sapiens
agguuucagcauauggucaacaaaagaacauu

SEQ ID NO: 188571 - RNA, 32 nt, Homo Sapiens
acuuugauaaaaccacuuuauuuaaccacaug

SEQ ID NO: 188572 - RNA, 32 nt, Homo Sapiens
cggcugccagcauggcuggaaaaagcaggcag

SEQ ID NO: 188573 - RNA, 32 nt, Homo Sapiens
gccgcgccagcgccuggagcggagagcagagg

SEQ ID NO: 188574 - RNA, 32 nt, Homo Sapiens
ccaaauuugggccagaacuggcacuuccgagu

SEQ ID NO: 188575 - RNA, 32 nt, Homo Sapiens
aguaguuaaugaugauaacaaugguguaacuu

SEQ ID NO: 188576 - RNA, 32 nt, Homo Sapiens
cucaaggucucugagacccagccuuugcauuu

SEQ ID NO: 188577 - RNA, 32 nt, Homo Sapiens
uccggauccccgcucucuccccggaguggcgc

SEQ ID NO: 188578 - RNA, 32 nt, Homo Sapiens
acaggguuggccucuuccuccuccccugccag

SEQ ID NO: 188579 - RNA, 32 nt, Homo Sapiens
augccacugucaaucccggcacuuugggaggc

SEQ ID NO: 188580 - RNA, 32 nt, Homo Sapiens
gcguggacgggguucagggcccggggcccaga

SEQ ID NO: 188581 - RNA, 32 nt, Homo Sapiens
cuuuccagacacaacugcagcaaacuggauug

SEQ ID NO: 188582 - RNA, 30 nt, Homo Sapiens
uauuuaaaguguggaaagcaaaauaacaaa

SEQ ID NO: 188583 - RNA, 32 nt, Homo Sapiens
ugccacagaagccccagagggcuggcccuugu

SEQ ID NO: 188584 - RNA, 32 nt, Homo Sapiens
acgagacuccucgggcaagggccgugcccgcc

SEQ ID NO: 188585 - RNA, 32 nt, Homo Sapiens
gcucuaugggggugcgggggugucaugucuug

SEQ ID NO: 188586 - RNA, 32 nt, Homo Sapiens
gcucgagggaccgcggacccgggagguccggc

SEQ ID NO: 188587 - RNA, 32 nt, Homo Sapiens
cuuugggcccuuguauccauuauccuuaugac

SEQ ID NO: 188588 - RNA, 32 nt, Homo Sapiens
aagaagucacauuuuuugauaaauuguauuga

SEQ ID NO: 188589 - RNA, 32 nt, Homo Sapiens
guccgcaaacuccuugccgcccgccccgggcu

SEQ ID NO: 188590 - RNA, 32 nt, Homo Sapiens
ugggauuggaagaaacacauggucaugaauag

SEQ ID NO: 188591 - RNA, 32 nt, Homo Sapiens
uucuaagaaaauguaguuagcuccauaaagua

SEQ ID NO: 188592 - RNA, 32 nt, Homo Sapiens
gggcaccaggggugccuuggggccuccagcag

SEQ ID NO: 188593 - RNA, 32 nt, Homo Sapiens
acgggucgcuggcggguuagguggcugcgugg

SEQ ID NO: 188594 - RNA, 32 nt, Homo Sapiens
cuggucccggugccacacugcggugcuuggug

SEQ ID NO: 188595 - RNA, 32 nt, Homo Sapiens
uaaaggaugguauaaaaugacucucaaccacu

SEQ ID NO: 188596 - RNA, 30 nt, Homo Sapiens
aggcagagcaggcgcugcgguccgggaggc

SEQ ID NO: 188597 - RNA, 32 nt, Homo Sapiens
accuuuuucagaagcuauuucuacuuuuagac

SEQ ID NO: 188598 - RNA, 32 nt, Homo Sapiens
ggacaacaaaaauaauuuuaaaaaguuauuuu

SEQ ID NO: 188599 - RNA, 32 nt, Homo Sapiens
uacuuuguaaaaauagggaaauuauuugaagu

SEQ ID NO: 188600 - RNA, 32 nt, Homo Sapiens
ucgccgucagcgccugcuucccucgaccucgu

SEQ ID NO: 188601 - RNA, 32 nt, Homo Sapiens
uggcuuugcaaacaccugccucaugacacugg

SEQ ID NO: 188602 - RNA, 28 nt, Homo Sapiens
guaggugucuaaaccaggaugugagcua

SEQ ID NO: 188603 - RNA, 32 nt, Homo Sapiens
caagucccaggccccaggcaucuuugccugcc

SEQ ID NO: 188604 - RNA, 32 nt, Homo Sapiens
gcuccuagcagcaucaacaucuauuugucgcu

SEQ ID NO: 188605 - RNA, 32 nt, Homo Sapiens
ggucucaccuggagggaccccagagcacagaa

SEQ ID NO: 188606 - RNA, 32 nt, Homo Sapiens
gcugggcuuggcuuauggguacaacuuucagu

SEQ ID NO: 188607 - RNA, 32 nt, Homo Sapiens
ugcaugcaccucagcuggcaggaggccaagcc

SEQ ID NO: 188608 - RNA, 32 nt, Homo Sapiens
uuggggccaaacucuucugucacuaucagugu

SEQ ID NO: 188609 - RNA, 32 nt, Homo Sapiens
uccacugggagauugaucugcacuagacuauu

SEQ ID NO: 188610 - RNA, 32 nt, Homo Sapiens
auuagguaguuuacagaucuuuauaagguguu

SEQ ID NO: 188611 - RNA, 32 nt, Homo Sapiens
gccugcuguugcuccuccaucuccagaucgga

SEQ ID NO: 188612 - RNA, 32 nt, Homo Sapiens
gauuuuacaucaugauguaaucaccacuggag

SEQ ID NO: 188613 - RNA, 31 nt, Homo Sapiens
cuaauuuugaggcaaaguucagugcccucug

SEQ ID NO: 188614 - RNA, 32 nt, Homo Sapiens
guggugcccaugagccccugcuccucagccag

SEQ ID NO: 188615 - RNA, 31 nt, Homo Sapiens
aucugagugccccagaauugggaaucuauuc

SEQ ID NO: 188616 - RNA, 32 nt, Homo Sapiens
aaucugcccgcaccuccuauccuggccacugg

SEQ ID NO: 188617 - RNA, 32 nt, Homo Sapiens
cuuuccuggcuaaacccaucuaccauucuuaa

SEQ ID NO: 188618 - RNA, 32 nt, Homo Sapiens
uaaagagggcaaggcugcuuuuauucaaggug

SEQ ID NO: 188619 - RNA, 32 nt, Homo Sapiens
gcucagaauuaaucucuuaaaauauuuuacag

SEQ ID NO: 188620 - RNA, 32 nt, Homo Sapiens
aucaccauccccaaccgcggcggccgagaucc

SEQ ID NO: 188621 - RNA, 32 nt, Homo Sapiens
cagcuggggguggaagcugagccagggacagu

SEQ ID NO: 188622 - RNA, 32 nt, Homo Sapiens
agacaagaugaggagguacaaaaguuacuauu

SEQ ID NO: 188623 - RNA, 32 nt, Homo Sapiens
uuuuaauaauuugauuugauacauauguagug

SEQ ID NO: 188624 - RNA, 32 nt, Homo Sapiens
caugugacauuuuuuucuuucuguuuggugag

SEQ ID NO: 188625 - RNA, 32 nt, Homo Sapiens
uacccaccauucuccucuguacuucucuaagg

SEQ ID NO: 188626 - RNA, 32 nt, Homo Sapiens
ucuuuguagugucuuuugauaacuagagcauu

SEQ ID NO: 188627 - RNA, 31 nt, Homo Sapiens
guaagggcccggucagcuccaaggagcgcgc

SEQ ID NO: 188628 - RNA, 32 nt, Homo Sapiens
gcagugcauggccagcacugcucccggcacug

SEQ ID NO: 188629 - RNA, 32 nt, Homo Sapiens
aacacuaacuuuuuuuuuuuuaaaaaaaaaaa

SEQ ID NO: 188630 - RNA, 32 nt, Homo Sapiens
guuguuauuuuuguugcuucuuucagugaggu

SEQ ID NO: 188631 - RNA, 32 nt, Homo Sapiens
uuuucucccacuuugucauuaaaaucacaugu

SEQ ID NO: 188632 - RNA, 32 nt, Homo Sapiens
aauaaaaucuguuugauucaguucuccuacau

SEQ ID NO: 188633 - RNA, 32 nt, Homo Sapiens
uguagucuuucaguacgagacaaaguuucuua

SEQ ID NO: 188634 - RNA, 32 nt, Homo Sapiens
aagcucagccucagccuucaggccugagcaag

SEQ ID NO: 188635 - RNA, 32 nt, Homo Sapiens
ccaggcucaagcacuuuuccugucucagccuu

SEQ ID NO: 188636 - RNA, 32 nt, Homo Sapiens
uucaaagaacuuggaagcuggugagggauuac

SEQ ID NO: 188637 - RNA, 32 nt, Homo Sapiens
ugggaacucucguccucgguccccagggcgca

SEQ ID NO: 188638 - RNA, 32 nt, Homo Sapiens
accucgcaaccacugcuuugucucugaaguga

SEQ ID NO: 188639 - RNA, 32 nt, Homo Sapiens
gccagaccugcucuugcugcugcucagguaga

SEQ ID NO: 188640 - RNA, 32 nt, Homo Sapiens
ccucagcucgacacggaggcggcggccggacc

SEQ ID NO: 188641 - RNA, 32 nt, Homo Sapiens
cgcgggcccuaggacccuaggaugccauucuu

SEQ ID NO: 188642 - RNA, 32 nt, Homo Sapiens
uccuguuccuccccgggacuccagaauuucuc

SEQ ID NO: 188643 - RNA, 32 nt, Homo Sapiens
aaggagggaugaaacagaagugaaacagcaga

SEQ ID NO: 188644 - RNA, 32 nt, Homo Sapiens
ugcugggaauuggggcagccccaggcgucccc

SEQ ID NO: 188645 - RNA, 32 nt, Homo Sapiens
uuuuuucuuuuaaauauuuucuuaauauuuug

SEQ ID NO: 188646 - RNA, 32 nt, Homo Sapiens
aaacaaugcccauucaccuccuccuucagcac

SEQ ID NO: 188647 - RNA, 32 nt, Homo Sapiens
uaugcagaggggcagaucggaggcuguggaag

SEQ ID NO: 188648 - RNA, 32 nt, Homo Sapiens
gcaggcagacugccggccgccgcgauggcgag

SEQ ID NO: 188649 - RNA, 32 nt, Homo Sapiens
cacaguuaucagagacccugucuuccuuguuc

SEQ ID NO: 188650 - RNA, 32 nt, Homo Sapiens
uaaaucaaucugcaguuuaacaaaauccucag

SEQ ID NO: 188651 - RNA, 32 nt, Homo Sapiens
aaaagccaagccggcugcagcugccacauccc

SEQ ID NO: 188652 - RNA, 31 nt, Homo Sapiens
auucaagaggggugccugcccccgcugacuc

SEQ ID NO: 188653 - RNA, 32 nt, Homo Sapiens
auugucaccaacucccuuugcauggugaugcg

SEQ ID NO: 188654 - RNA, 32 nt, Homo Sapiens
caucuucucccgagaccacaaacaccaggauc

SEQ ID NO: 188655 - RNA, 32 nt, Homo Sapiens
gccucauuaccuugugcuaauccucuuuuucu

SEQ ID NO: 188656 - RNA, 32 nt, Homo Sapiens
gccucuccugcccacacccucugggcugaguu

SEQ ID NO: 188657 - RNA, 32 nt, Homo Sapiens
gccaucuccgcggagcuggaggccaccacccu

SEQ ID NO: 188658 - RNA, 32 nt, Homo Sapiens
ucuaagcucugcuuaugccuaucuugagaugc

SEQ ID NO: 188659 - RNA, 32 nt, Homo Sapiens
ccaguacgaguugaaucauuguucaaauaagg

SEQ ID NO: 188660 - RNA, 32 nt, Homo Sapiens
ugcugaccuuuggcuccagagagacugugaga

SEQ ID NO: 188661 - RNA, 32 nt, Homo Sapiens
cucagcacagugccaccuccucagcucucagc

SEQ ID NO: 188662 - RNA, 32 nt, Homo Sapiens
uuuggacaagcaguuugcgcuuugaaauaaac

SEQ ID NO: 188663 - RNA, 32 nt, Homo Sapiens
acaagaauauccaacuugauauuuauaaaagg

SEQ ID NO: 188664 - RNA, 32 nt, Homo Sapiens
gcugucucucugaaccuccuuaucgcugucug

SEQ ID NO: 188665 - RNA, 32 nt, Homo Sapiens
gccgucggcucccggagcccagcccuuuccua

SEQ ID NO: 188666 - RNA, 32 nt, Homo Sapiens
gacccagccaagggcacgaagcucugggaagg

SEQ ID NO: 188667 - RNA, 32 nt, Homo Sapiens
caguauguguugcagagcucacagccaggaac

SEQ ID NO: 188668 - RNA, 32 nt, Homo Sapiens
cgcgaggagggaaggggcgucugugggcggga

SEQ ID NO: 188669 - RNA, 32 nt, Homo Sapiens
ugggagcgcagcgaggacgcgcggcugcugcg

SEQ ID NO: 188670 - RNA, 32 nt, Homo Sapiens
uggggaugugggcgcucugugguccuccccuc

SEQ ID NO: 188671 - RNA, 32 nt, Homo Sapiens
aucccgcgcgcugcagccucaugugcccgauc

SEQ ID NO: 188672 - RNA, 32 nt, Homo Sapiens
uugggugcaccuguaguucuguuuauugguca

SEQ ID NO: 188673 - RNA, 32 nt, Homo Sapiens
ggaggcuggugccgcucugcaggguauuugaa

SEQ ID NO: 188674 - RNA, 32 nt, Homo Sapiens
gccuccggcccggcccagcgaccuccucucgg

SEQ ID NO: 188675 - RNA, 32 nt, Homo Sapiens
uuccucuauaucaugccuggaguuccaucaua

SEQ ID NO: 188676 - RNA, 32 nt, Homo Sapiens
gcuuagauuuucuggaugcaauuccacugagc

SEQ ID NO: 188677 - RNA, 32 nt, Homo Sapiens
aaaauacaaaaauuagcuggcugugguggugg

SEQ ID NO: 188678 - RNA, 32 nt, Homo Sapiens
cgcucccuggaaaauuccacuccugugcuagc

SEQ ID NO: 188679 - RNA, 32 nt, Homo Sapiens
cucaccaaggaccuuggaagagcaagggacag

SEQ ID NO: 188680 - RNA, 32 nt, Homo Sapiens
guuuaauuuuuggcuuuuguuuuuguuuaaaa

SEQ ID NO: 188681 - RNA, 32 nt, Homo Sapiens
gaguuccauucuggaagcagcaugucauugug

SEQ ID NO: 188682 - RNA, 32 nt, Homo Sapiens
guacacuuggggauuugcaaugguuuuuaccc

SEQ ID NO: 188683 - RNA, 32 nt, Homo Sapiens
uacccguauuaaaagagccucauuuuagaaag

SEQ ID NO: 188684 - RNA, 29 nt, Homo Sapiens
uaccaggagucacucaguuugacaagggc

SEQ ID NO: 188685 - RNA, 32 nt, Homo Sapiens
ugauccgcccaauccgcccaccucggccuccc

SEQ ID NO: 188686 - RNA, 32 nt, Homo Sapiens
uugugggagacggaauagagccaaguaagugg

SEQ ID NO: 188687 - RNA, 32 nt, Homo Sapiens
cacacagagucaggccguugcuagucaguucu

SEQ ID NO: 188688 - RNA, 32 nt, Homo Sapiens
uggguaggagggcuuaucaucaacacugauuu

SEQ ID NO: 188689 - RNA, 32 nt, Homo Sapiens
uuccaagaacacacuggauacugcucuuacaa

SEQ ID NO: 188690 - RNA, 32 nt, Homo Sapiens
cucuccuacuuggcagaaugaucuuggggaaa

SEQ ID NO: 188691 - RNA, 32 nt, Homo Sapiens
cuacaggcacuugggaaacuaacuuaagacuu

SEQ ID NO: 188692 - RNA, 32 nt, Homo Sapiens
gucacagcugaaugacugaagagcugaaccag

SEQ ID NO: 188693 - RNA, 32 nt, Homo Sapiens
uuguggaucacagcacacacauacauacaccc

SEQ ID NO: 188694 - RNA, 32 nt, Homo Sapiens
uuuuaaacaaaguauauguaaaaggugaaagg

SEQ ID NO: 188695 - RNA, 32 nt, Homo Sapiens
ucacaggcucugcauacacaugcacucagugu

SEQ ID NO: 188696 - RNA, 27 nt, Homo Sapiens
aauuaaauauauucugugguuuauaug

SEQ ID NO: 188697 - RNA, 32 nt, Homo Sapiens
ucauaaaucuucuuauuaaaucaaucuuguaa

SEQ ID NO: 188698 - RNA, 32 nt, Homo Sapiens
uguucugcgucugugucuacacugccuccucu

SEQ ID NO: 188699 - RNA, 32 nt, Homo Sapiens
acuuaaguuguaucucuuuccuuuuuguacuu

SEQ ID NO: 188700 - RNA, 32 nt, Homo Sapiens
gacaauauuuuccuaacuuuagcaauccaaau

SEQ ID NO: 188701 - RNA, 32 nt, Homo Sapiens
aacugccuggcucugcucgcuccggcgcuccg

SEQ ID NO: 188702 - RNA, 32 nt, Homo Sapiens
aaaaaagucugugacaaaacggugcauuagua

SEQ ID NO: 188703 - RNA, 32 nt, Homo Sapiens
uuguuguuguucuuguuuuuuauauguaaaau

SEQ ID NO: 188704 - RNA, 32 nt, Homo Sapiens
cccaguuuuucccuuccagcggccucuccggg

SEQ ID NO: 188705 - RNA, 32 nt, Homo Sapiens
uuuugagauuguaaguuuuucaaagauauuuu

SEQ ID NO: 188706 - RNA, 32 nt, Homo Sapiens
acagauagauagaugaguaucaacacuuacaa

SEQ ID NO: 188707 - RNA, 32 nt, Homo Sapiens
cccugacuuuuguaaaauuuuacuaaauaaaa

SEQ ID NO: 188708 - RNA, 32 nt, Homo Sapiens
gccuuuuuuaucauuucuacugaaguugggaa

SEQ ID NO: 188709 - RNA, 32 nt, Homo Sapiens
ggacauggaugaaacuggaaaccaucauucuc

SEQ ID NO: 188710 - RNA, 32 nt, Homo Sapiens
ucgagaccagccuggccaacguggugaaaccc

SEQ ID NO: 188711 - RNA, 32 nt, Homo Sapiens
ugaaccgccgacggagacccguagugggggag

SEQ ID NO: 188712 - RNA, 32 nt, Homo Sapiens
agucagucaucuccaguaggucuauuuuaguc

SEQ ID NO: 188713 - RNA, 32 nt, Homo Sapiens
cccugaagucaacacuccauggagaagcgugu

SEQ ID NO: 188714 - RNA, 32 nt, Homo Sapiens
auuucauugugaacaaggacuuacugcagaaa

SEQ ID NO: 188715 - RNA, 32 nt, Homo Sapiens
gaucacaggcaaaaagcaaaacuuugaagugg

SEQ ID NO: 188716 - RNA, 32 nt, Homo Sapiens
augagcucagagcgagagaugacacaaugccu

SEQ ID NO: 188717 - RNA, 32 nt, Homo Sapiens
ccuggggaccucuggagccucagccagaagua

SEQ ID NO: 188718 - RNA, 32 nt, Homo Sapiens
aguggccucgcguccgcccauucagcggagac

SEQ ID NO: 188719 - RNA, 32 nt, Homo Sapiens
cuuccuggccuaucucggacugagagaaagag

SEQ ID NO: 188720 - RNA, 32 nt, Homo Sapiens
uggggggcgggggguauuggaaaggcugauca

SEQ ID NO: 188721 - RNA, 32 nt, Homo Sapiens
cugaucaacaaugagcagaaacaucaucaguc

SEQ ID NO: 188722 - RNA, 32 nt, Homo Sapiens
uuagguguuguccuaagcgauaacaaucacac

SEQ ID NO: 188723 - RNA, 32 nt, Homo Sapiens
cagccacgaugaacaccagaucuuuaugcaca

SEQ ID NO: 188724 - RNA, 32 nt, Homo Sapiens
gcuccaucucgcugccuauuggacaucuggga

SEQ ID NO: 188725 - RNA, 32 nt, Homo Sapiens
ggccccagcccugccuccccagccagucacag

SEQ ID NO: 188726 - RNA, 32 nt, Homo Sapiens
caaugggugagucuuucucacccuccauuucu

SEQ ID NO: 188727 - RNA, 32 nt, Homo Sapiens
cuuuguacauguuguuaauuaagggcauauaa

SEQ ID NO: 188728 - RNA, 32 nt, Homo Sapiens
uuuugcuuuuuggcauuucagacuuugaucag

SEQ ID NO: 188729 - RNA, 32 nt, Homo Sapiens
auaaucauaucucauggauuuauuuucuccac

SEQ ID NO: 188730 - RNA, 32 nt, Homo Sapiens
agaaggaaggagccagcucccagcccacucau

SEQ ID NO: 188731 - RNA, 32 nt, Homo Sapiens
cgcugaauauuuuugagcaauuucuauaugau

SEQ ID NO: 188732 - RNA, 32 nt, Homo Sapiens
uuuucucugugcuucaauuaauaaaaaaugga

SEQ ID NO: 188733 - RNA, 32 nt, Homo Sapiens
gaggugucucagcugggguucugcugugugug

SEQ ID NO: 188734 - RNA, 32 nt, Homo Sapiens
uccaugugugagugucuccucuuucuugccug

SEQ ID NO: 188735 - RNA, 32 nt, Homo Sapiens
aaaucaugucccuauuucuaccccggccagaa

SEQ ID NO: 188736 - RNA, 32 nt, Homo Sapiens
gcauuuccagccccggcguugguuguggaugc

SEQ ID NO: 188737 - RNA, 32 nt, Homo Sapiens
gauuucuuuguuucuuuuuaauuaaaauacaa

SEQ ID NO: 188738 - RNA, 32 nt, Homo Sapiens
gcugcaugggucacucucggccucucaauucu

SEQ ID NO: 188739 - RNA, 32 nt, Homo Sapiens
cacggcuuguggcugcccuuggcuggaagucc

SEQ ID NO: 188740 - RNA, 32 nt, Homo Sapiens
ucaucauauugcauaaaaccuuaaaguucugu

SEQ ID NO: 188741 - RNA, 32 nt, Homo Sapiens
gcacaguguucccuccuggcagcaauuaaggg

SEQ ID NO: 188742 - RNA, 32 nt, Homo Sapiens
aucugagaccucucuggggaucaggaaccaca

SEQ ID NO: 188743 - RNA, 32 nt, Homo Sapiens
acgcaccacccauuuuauccccugcagagaug

SEQ ID NO: 188744 - RNA, 32 nt, Homo Sapiens
cggggucugcagacacccuucuccagcuggag

SEQ ID NO: 188745 - RNA, 32 nt, Homo Sapiens
gauugaugguggccuggauuagcaaagaggaa

SEQ ID NO: 188746 - RNA, 32 nt, Homo Sapiens
gcccggcccucccuggcgccccagcccagugc

SEQ ID NO: 188747 - RNA, 32 nt, Homo Sapiens
guugcuuuugaacagaacccuauauuacucuc

SEQ ID NO: 188748 - RNA, 32 nt, Homo Sapiens
ugacagcugaauauuucuguuacucaguacuu

SEQ ID NO: 188749 - RNA, 32 nt, Homo Sapiens
ccccaggaauuuccugugacuccaccagccau

SEQ ID NO: 188750 - RNA, 32 nt, Homo Sapiens
cuauuuaaaaauacguggaauacguaucuaag

SEQ ID NO: 188751 - RNA, 32 nt, Homo Sapiens
auaaccugguuucguuagaggugucuacaguc

SEQ ID NO: 188752 - RNA, 30 nt, Homo Sapiens
acccccgcgcucccgcaccaguugggcgcu

SEQ ID NO: 188753 - RNA, 32 nt, Homo Sapiens
gggcagaggaggagagagccuggcagcggagg

SEQ ID NO: 188754 - RNA, 32 nt, Homo Sapiens
ccccuccccacuuuccugguuguuucuccuac

SEQ ID NO: 188755 - RNA, 32 nt, Homo Sapiens
agaaggccaagagccagcuucugcguucucaa

SEQ ID NO: 188756 - RNA, 32 nt, Homo Sapiens
aacuaaaugcuuuccuacuaagaucaggaaca

SEQ ID NO: 188757 - RNA, 32 nt, Homo Sapiens
cucccacacggucuucaacggggccucuucca

SEQ ID NO: 188758 - RNA, 31 nt, Homo Sapiens
gccucgcggcacugccgguguccccagagca

SEQ ID NO: 188759 - RNA, 32 nt, Homo Sapiens
cugccuagugcgccagcugcaucuggaggaac

SEQ ID NO: 188760 - RNA, 32 nt, Homo Sapiens
auauuuaauaaacugaauauuuucucagcccu

SEQ ID NO: 188761 - RNA, 32 nt, Homo Sapiens
cucaggcccuccccccggaguacuucagaaug

SEQ ID NO: 188762 - RNA, 31 nt, Homo Sapiens
cuacguaaauaaaauuagcaggauuaucaga

SEQ ID NO: 188763 - RNA, 32 nt, Homo Sapiens
gcuuuuccauuaccaggccauuuuacuuaaau

SEQ ID NO: 188764 - RNA, 32 nt, Homo Sapiens
ccccucguagcaccugccugccccacacggac

SEQ ID NO: 188765 - RNA, 32 nt, Homo Sapiens
ggagugaaacccuauaaaugucagugugggaa

SEQ ID NO: 188766 - RNA, 32 nt, Homo Sapiens
ggggcaacacugaccauuuggugcugagcgcu

SEQ ID NO: 188767 - RNA, 32 nt, Homo Sapiens
aguccccagaugguagagagcagucauaucuu

SEQ ID NO: 188768 - RNA, 32 nt, Homo Sapiens
ugacaggcccaggcccgggaggauccccccac

SEQ ID NO: 188769 - RNA, 32 nt, Homo Sapiens
agcagcgacuacucgacccggagccacagccg

SEQ ID NO: 188770 - RNA, 32 nt, Homo Sapiens
gucagcuacucuccgugcccacuuccccccac

SEQ ID NO: 188771 - RNA, 32 nt, Homo Sapiens
uggauuuucuucauuauuuacuuuuucuuacu

SEQ ID NO: 188772 - RNA, 28 nt, Homo Sapiens
gacgagaaagauucuguuucgaauauag

SEQ ID NO: 188773 - RNA, 32 nt, Homo Sapiens
cccuuccuaaacacaaggauccccagcuggac

SEQ ID NO: 188774 - RNA, 32 nt, Homo Sapiens
uggaaaagacauuaaaucauguugaaauauuu

SEQ ID NO: 188775 - RNA, 32 nt, Homo Sapiens
gcggcgcgcgcugugcucuuccgcggacucug

SEQ ID NO: 188776 - RNA, 32 nt, Homo Sapiens
uuuuuguuuugaagcuuuacuaaucuaccaga

SEQ ID NO: 188777 - RNA, 32 nt, Homo Sapiens
caggccccugacgcccagcuuggcucccccug

SEQ ID NO: 188778 - RNA, 32 nt, Homo Sapiens
aucgucuuucuuugcuuuuuuaucacagcaga

SEQ ID NO: 188779 - RNA, 32 nt, Homo Sapiens
gaguuagagcacggacucucuccaccugcacg

SEQ ID NO: 188780 - RNA, 32 nt, Homo Sapiens
uauugugguuuucuauucucugucugaacucu

SEQ ID NO: 188781 - RNA, 32 nt, Homo Sapiens
acuuacuaaauggcuuuuaauuccuauuauaa

SEQ ID NO: 188782 - RNA, 32 nt, Homo Sapiens
uuuuuauauaaaaugugguuggaagguguacu

SEQ ID NO: 188783 - RNA, 32 nt, Homo Sapiens
aagcucgggcacccucccucuccggggcuccu

SEQ ID NO: 188784 - RNA, 32 nt, Homo Sapiens
aacaccuuuuucugauggguaacuugcaggaa

SEQ ID NO: 188785 - RNA, 32 nt, Homo Sapiens
ccgggggcacgcugagugccggagccgcggcc

SEQ ID NO: 188786 - RNA, 32 nt, Homo Sapiens
cccgagccucccguggccccagcgaggcuucc

SEQ ID NO: 188787 - RNA, 32 nt, Homo Sapiens
auuuggcaguucuaauaauaaaacaggaaugu

SEQ ID NO: 188788 - RNA, 32 nt, Homo Sapiens
uacugaaauaaaauaugcauuuuaagauaaaa

SEQ ID NO: 188789 - RNA, 32 nt, Homo Sapiens
guccagagcugcuggugcucccguuccccaga

SEQ ID NO: 188790 - RNA, 32 nt, Homo Sapiens
augacagugggucuuucucucauguucacucu

SEQ ID NO: 188791 - RNA, 32 nt, Homo Sapiens
uuccagaagcaaaaacaaaccaugacugaggc

SEQ ID NO: 188792 - RNA, 32 nt, Homo Sapiens
uccagcuggcaggccucaugggcuucccucca

SEQ ID NO: 188793 - RNA, 32 nt, Homo Sapiens
uccucucucaccuuccucccccgauucugacu

SEQ ID NO: 188794 - RNA, 31 nt, Homo Sapiens
auggcgcggcacuggccgagcacugcggggg

SEQ ID NO: 188795 - RNA, 32 nt, Homo Sapiens
aauauucuugaguucuagucucuucuuuauuu

SEQ ID NO: 188796 - RNA, 29 nt, Homo Sapiens
aggucgacucguauguaccaauggggaug

SEQ ID NO: 188797 - RNA, 32 nt, Homo Sapiens
cuaagggcaguuccucugauauccucacagca

SEQ ID NO: 188798 - RNA, 32 nt, Homo Sapiens
ccuauccugugugcaacguggagcagacagcc

SEQ ID NO: 188799 - RNA, 32 nt, Homo Sapiens
gugccaggccccagugccccuggccaacaggc

SEQ ID NO: 188800 - RNA, 32 nt, Homo Sapiens
gggccuggcggacgcggcgccaucgcagucag

SEQ ID NO: 188801 - RNA, 32 nt, Homo Sapiens
cagaggcugcagggcuggggcugggugagggu

SEQ ID NO: 188802 - RNA, 32 nt, Homo Sapiens
gaugauauuucuguuauauuaauguccuuuua

SEQ ID NO: 188803 - RNA, 32 nt, Homo Sapiens
caaagaaagggggacaugaggggacugcaugc

SEQ ID NO: 188804 - RNA, 32 nt, Homo Sapiens
uguguuagucaugcacacacauaccuaugaaa

SEQ ID NO: 188805 - RNA, 32 nt, Homo Sapiens
acccauuuaauuuuuguagcuuacagguggua

SEQ ID NO: 188806 - RNA, 32 nt, Homo Sapiens
acacauguuuucagagaagcucugcuaaggac

SEQ ID NO: 188807 - RNA, 32 nt, Homo Sapiens
cgagcgccauugugagcagagccggcggggca

SEQ ID NO: 188808 - RNA, 30 nt, Homo Sapiens
cuccgggcacacgugccgccugaccgggcg

SEQ ID NO: 188809 - RNA, 32 nt, Homo Sapiens
gcugaaguguauuuccugugcauuccaagugu

SEQ ID NO: 188810 - RNA, 32 nt, Homo Sapiens
uuccgggcgagggccgggcaggaggagcgggc

SEQ ID NO: 188811 - RNA, 32 nt, Homo Sapiens
guuuaaaauaaaacuuucucaugauuucuuga

SEQ ID NO: 188812 - RNA, 32 nt, Homo Sapiens
uuucuccaaaaauaagaaacuaaaugaagaca

SEQ ID NO: 188813 - RNA, 32 nt, Homo Sapiens
gcaauaucguauaaaaaucugcucauauuaga

SEQ ID NO: 188814 - RNA, 32 nt, Homo Sapiens
uuauaugaauauauuuugauaacguaggucua

SEQ ID NO: 188815 - RNA, 32 nt, Homo Sapiens
cuaacaagguaaguugccaugaacuaaacaug

SEQ ID NO: 188816 - RNA, 32 nt, Homo Sapiens
agcugcagauguuuggccuuuggaccuccaag

SEQ ID NO: 188817 - RNA, 32 nt, Homo Sapiens
ugcgaggcggcccgugcaguccgugcgcagga

SEQ ID NO: 188818 - RNA, 32 nt, Homo Sapiens
aggggguagccuagccagacaucauguaaucu

SEQ ID NO: 188819 - RNA, 32 nt, Homo Sapiens
auuaagggguuuugguuuuguuuucuguuuac

SEQ ID NO: 188820 - RNA, 32 nt, Homo Sapiens
aggggucgcggaagaggaggcugagaggguca

SEQ ID NO: 188821 - RNA, 32 nt, Homo Sapiens
ggaguaugaaaguuuggguacaaacucauugc

SEQ ID NO: 188822 - RNA, 32 nt, Homo Sapiens
aauauuaaaaauuauuuauguaucagagaacu

SEQ ID NO: 188823 - RNA, 32 nt, Homo Sapiens
guaauagaguuaaauuugauacuuccugcuuu

SEQ ID NO: 188824 - RNA, 32 nt, Homo Sapiens
ucccuguggucuucuucaagcagacccauacc

SEQ ID NO: 188825 - RNA, 32 nt, Homo Sapiens
uaaaauuuguacacauuuguauaauaaucugu

SEQ ID NO: 188826 - RNA, 32 nt, Homo Sapiens
agcaaaagaguguuuuuaaaaaauaucaaagu

SEQ ID NO: 188827 - RNA, 32 nt, Homo Sapiens
uagaaauccugaguuuucaacuguauauaucu

SEQ ID NO: 188828 - RNA, 32 nt, Homo Sapiens
guuucucaucuggaaucaauguguguaugagu

SEQ ID NO: 188829 - RNA, 32 nt, Homo Sapiens
ggcuguucccaccucaaaccacuucuuagcuu

SEQ ID NO: 188830 - RNA, 32 nt, Homo Sapiens
ccggccccgcccgcggccccaccaaccuccgu

SEQ ID NO: 188831 - RNA, 32 nt, Homo Sapiens
ccagcagaugacccguugccuccccgggaaug

SEQ ID NO: 188832 - RNA, 32 nt, Homo Sapiens
ucagccaggaccaucgcccuuucucagagcag

SEQ ID NO: 188833 - RNA, 32 nt, Homo Sapiens
uaaacaauauaaaguuggcaguuuguaguagu

SEQ ID NO: 188834 - RNA, 32 nt, Homo Sapiens
cgaggcucgcacucacacccgggcgcaggagg

SEQ ID NO: 188835 - RNA, 32 nt, Homo Sapiens
uuuauugaauuuauuucuuauuaaaauaugua

SEQ ID NO: 188836 - RNA, 32 nt, Homo Sapiens
cacaaacuuuucccccacggaccucccuuuau

SEQ ID NO: 188837 - RNA, 32 nt, Homo Sapiens
cacugucucaggugcuagcauuauggugcuga

SEQ ID NO: 188838 - RNA, 32 nt, Homo Sapiens
auuaugacuuaaaugucaaacaucuuaacuaa

SEQ ID NO: 188839 - RNA, 32 nt, Homo Sapiens
aguucuucaccaccguugggguuguuuuguga

SEQ ID NO: 188840 - RNA, 32 nt, Homo Sapiens
uggguuugaaagauuuugaauuauagacagug

SEQ ID NO: 188841 - RNA, 32 nt, Homo Sapiens
ugggcaggagcaaaccacaggaaggcuucaua

SEQ ID NO: 188842 - RNA, 32 nt, Homo Sapiens
ggaacagaacagagaaaugcccuuggaagaag

SEQ ID NO: 188843 - RNA, 32 nt, Homo Sapiens
uugccugucgccaucuuggggccuucaccaga

SEQ ID NO: 188844 - RNA, 32 nt, Homo Sapiens
caccuagauggauugccaaucuucugccauca

SEQ ID NO: 188845 - RNA, 32 nt, Homo Sapiens
aacagcaaaggaacuagaaagaaggacccaga

SEQ ID NO: 188846 - RNA, 32 nt, Homo Sapiens
ccagccucauuucuuaaaugacuaggaauuuu

SEQ ID NO: 188847 - RNA, 31 nt, Homo Sapiens
gggcuccagcgcaguucuccauuauucagau

SEQ ID NO: 188848 - RNA, 32 nt, Homo Sapiens
ucguacccauaaagagauacaaaugcauuugu

SEQ ID NO: 188849 - RNA, 32 nt, Homo Sapiens
uuuugaauggguaugucagaaaaggaugaguu

SEQ ID NO: 188850 - RNA, 32 nt, Homo Sapiens
uuucaguuauuuauauguaguuguuuuguuuu

SEQ ID NO: 188851 - RNA, 32 nt, Homo Sapiens
aauauuuggcauuuaaauuuguuaccuagaag

SEQ ID NO: 188852 - RNA, 32 nt, Homo Sapiens
ucaccucccuccccaccucaguguuuugucug

SEQ ID NO: 188853 - RNA, 32 nt, Homo Sapiens
cuucucugggaaauguugcugcugaugcugcu

SEQ ID NO: 188854 - RNA, 32 nt, Homo Sapiens
ccacuaaugcugucucaguguuuucucucucu

SEQ ID NO: 188855 - RNA, 32 nt, Homo Sapiens
uggcuucuccagggcucuggggugucuggagc

SEQ ID NO: 188856 - RNA, 32 nt, Homo Sapiens
gcaaucaccaaaaugaagacugcuuuaauuuu

SEQ ID NO: 188857 - RNA, 32 nt, Homo Sapiens
uucucccagaguuuucuuuggagaacagaaag

SEQ ID NO: 188858 - RNA, 32 nt, Homo Sapiens
ucccccauuucccaugucuucccuuuccaacu

SEQ ID NO: 188859 - RNA, 32 nt, Homo Sapiens
augauggagagcccuguggccacacagaggag

SEQ ID NO: 188860 - RNA, 32 nt, Homo Sapiens
cuggaauagaaagcaacuuacauacaagaaca

SEQ ID NO: 188861 - RNA, 32 nt, Homo Sapiens
augucuucaugucgguaauuauagaacuacau

SEQ ID NO: 188862 - RNA, 32 nt, Homo Sapiens
aauuugucugcaagauauccaccuggauccag

SEQ ID NO: 188863 - RNA, 32 nt, Homo Sapiens
ugccagaugcuggcuucccaucagcgcagaag

SEQ ID NO: 188864 - RNA, 32 nt, Homo Sapiens
cucagccucacacgaugucgugccgcuccuac

SEQ ID NO: 188865 - RNA, 32 nt, Homo Sapiens
uuucagcuuuaaagaugggucauauagccaaa

SEQ ID NO: 188866 - RNA, 32 nt, Homo Sapiens
cccacaagcuccuggggggcuggggcuccugg

SEQ ID NO: 188867 - RNA, 32 nt, Homo Sapiens
gagcugcugucauuucagcugccuuggcuucg

SEQ ID NO: 188868 - RNA, 32 nt, Homo Sapiens
aagauggaagcagccaccaaccaagaccaaga

SEQ ID NO: 188869 - RNA, 32 nt, Homo Sapiens
gacggcagaaugccuccaaaggugacuucaga

SEQ ID NO: 188870 - RNA, 32 nt, Homo Sapiens
uccuccugacccauuacaugcacauguacuca

SEQ ID NO: 188871 - RNA, 32 nt, Homo Sapiens
ugcuguacuuguucuauacaauaaaacagaua

SEQ ID NO: 188872 - RNA, 32 nt, Homo Sapiens
agcuagaaaaagaaaugggagcuggucacaca

SEQ ID NO: 188873 - RNA, 32 nt, Homo Sapiens
uaaaugggcagacaguuguguuguuggcacua

SEQ ID NO: 188874 - RNA, 32 nt, Homo Sapiens
gaaaccagcaccccugcacccacagccuuuug

SEQ ID NO: 188875 - RNA, 32 nt, Homo Sapiens
ccuucucggaccagccuucuuccucccaccau

SEQ ID NO: 188876 - RNA, 32 nt, Homo Sapiens
gugcucagggcgaggagauggugcuggagcca

SEQ ID NO: 188877 - RNA, 32 nt, Homo Sapiens
gcagaucccagggaucucgaaauucugagaaa

SEQ ID NO: 188878 - RNA, 32 nt, Homo Sapiens
caggcauaaagaaaacgauacuaauggcagcg

SEQ ID NO: 188879 - RNA, 32 nt, Homo Sapiens
aagaugugauucucuuuuuuauccuuaauguu

SEQ ID NO: 188880 - RNA, 32 nt, Homo Sapiens
auuugauaaccaaggaagucaagucagauggc

SEQ ID NO: 188881 - RNA, 32 nt, Homo Sapiens
ccagccuugagcgcacgcacacaccacacaca

SEQ ID NO: 188882 - RNA, 32 nt, Homo Sapiens
cucgcgagugccuucuugcaauuaccugccuu

SEQ ID NO: 188883 - RNA, 32 nt, Homo Sapiens
uuucucaauguacuuaccuaacuuuuuaguaa

SEQ ID NO: 188884 - RNA, 32 nt, Homo Sapiens
gaccccacugggagaggcgccgugccucgggc

SEQ ID NO: 188885 - RNA, 32 nt, Homo Sapiens
aagaacacacagaugggaaaucuuaugcaugu

SEQ ID NO: 188886 - RNA, 32 nt, Homo Sapiens
acuaccccugaacuuggucccaauggcggccc

SEQ ID NO: 188887 - RNA, 32 nt, Homo Sapiens
gucugcaaauaggacaguuuuacuucuucuuu

SEQ ID NO: 188888 - RNA, 32 nt, Homo Sapiens
gaagcuuguagcuuggcaaggcugaugcuucu

SEQ ID NO: 188889 - RNA, 32 nt, Homo Sapiens
ugcaaaagucuaccucuaccagaugggggaga

SEQ ID NO: 188890 - RNA, 32 nt, Homo Sapiens
uuuuuguaaaauguagcuuaaucauaaucuca

SEQ ID NO: 188891 - RNA, 32 nt, Homo Sapiens
gacgcccccucgcgcgccagcguccggcgcga

SEQ ID NO: 188892 - RNA, 32 nt, Homo Sapiens
aggggacggacgcgcgcacagucgcccaguua

SEQ ID NO: 188893 - RNA, 32 nt, Homo Sapiens
gaauuucuuuuacuccacgaggcugcuuggag

SEQ ID NO: 188894 - RNA, 32 nt, Homo Sapiens
ccggagcgcucgcccagccgccgccuccaagc

SEQ ID NO: 188895 - RNA, 32 nt, Homo Sapiens
cccucggugcgcccggccgccugcacccccag

SEQ ID NO: 188896 - RNA, 32 nt, Homo Sapiens
uaccuccgucuucgccaaggccccgcccgagc

SEQ ID NO: 188897 - RNA, 32 nt, Homo Sapiens
ugagccagacugacaugggaaccuaccgcugc

SEQ ID NO: 188898 - RNA, 32 nt, Homo Sapiens
aagagccaaaacugaaauaaaucauuuggauu

SEQ ID NO: 188899 - RNA, 32 nt, Homo Sapiens
aacaccuacuaauuccucuccacuccuucaug

SEQ ID NO: 188900 - RNA, 32 nt, Homo Sapiens
augucuugaguuucauuuuucauuuucucucc

SEQ ID NO: 188901 - RNA, 32 nt, Homo Sapiens
aguaucuaaaagcauaauuuaauagcauuguc

SEQ ID NO: 188902 - RNA, 32 nt, Homo Sapiens
ucccugccccaccuuugccccauccuagcccc

SEQ ID NO: 188903 - RNA, 32 nt, Homo Sapiens
ugaggaaaagaacuccugggggcaagcaaacu

SEQ ID NO: 188904 - RNA, 32 nt, Homo Sapiens
guuuaaaaagagaaacaaacugaguuccacug

SEQ ID NO: 188905 - RNA, 32 nt, Homo Sapiens
ugcgccuaggucccuucuuugugccuugguuu

SEQ ID NO: 188906 - RNA, 32 nt, Homo Sapiens
ggcccagacgccagcccuucccuguguggcug

SEQ ID NO: 188907 - RNA, 32 nt, Homo Sapiens
ggugucugacuucaaaaguuuucagaaaugcc

SEQ ID NO: 188908 - RNA, 32 nt, Homo Sapiens
agaaacaaucauauuuuuauacaaaauuaugu

SEQ ID NO: 188909 - RNA, 32 nt, Homo Sapiens
gcggauaacaucuuauacuacucuuguauucu

SEQ ID NO: 188910 - RNA, 32 nt, Homo Sapiens
ccugcccagcugcuccucccaccuggccauga

SEQ ID NO: 188911 - RNA, 30 nt, Homo Sapiens
gagcaauaaagucagcuggcuuucucaaaa

SEQ ID NO: 188912 - RNA, 32 nt, Homo Sapiens
uugccuggcccuggggauccagcccuggauag

SEQ ID NO: 188913 - RNA, 32 nt, Homo Sapiens
agcguuccgggggccaaggcgccgggccccgg

SEQ ID NO: 188914 - RNA, 32 nt, Homo Sapiens
uuguauauugaagagaaaauauacucgggaaa

SEQ ID NO: 188915 - RNA, 32 nt, Homo Sapiens
ucuugacggugaccuggaaggcagaugguacc

SEQ ID NO: 188916 - RNA, 32 nt, Homo Sapiens
gagagagccauggaaaagcugcugcggcugug

SEQ ID NO: 188917 - RNA, 32 nt, Homo Sapiens
uugagcucuagccaucucucggucacuggcaa

SEQ ID NO: 188918 - RNA, 32 nt, Homo Sapiens
gugcccuucuaaaagaggcauugggagagacc

SEQ ID NO: 188919 - RNA, 32 nt, Homo Sapiens
cuuuauggaagccaaaucaugugcaugugugu

SEQ ID NO: 188920 - RNA, 32 nt, Homo Sapiens
uagcuuuucuggacauuuuuuauuauuucuug

SEQ ID NO: 188921 - RNA, 32 nt, Homo Sapiens
aaaugaagaacaagagaaaauacauucauggu

SEQ ID NO: 188922 - RNA, 32 nt, Homo Sapiens
cuagcugugcaagaccuagugcucuuaagccu

SEQ ID NO: 188923 - RNA, 32 nt, Homo Sapiens
caggagugcagggcaccugcugaggacucacc

SEQ ID NO: 188924 - RNA, 32 nt, Homo Sapiens
acaaggacagugaagagcuagcaccaggaccu

SEQ ID NO: 188925 - RNA, 32 nt, Homo Sapiens
cuuguccguuuuuacacauguaucugaacucu

SEQ ID NO: 188926 - RNA, 32 nt, Homo Sapiens
ugcaggagcagugggaggagcugucgagucag

SEQ ID NO: 188927 - RNA, 30 nt, Homo Sapiens
agcagugucugugguguaggauguaauccc

SEQ ID NO: 188928 - RNA, 32 nt, Homo Sapiens
augugacaaagccuuuaaauggcugucacacu

SEQ ID NO: 188929 - RNA, 32 nt, Homo Sapiens
cuggccagcccuggaaaccaaccuccuuucuu

SEQ ID NO: 188930 - RNA, 32 nt, Homo Sapiens
aaguauuacgaugaaauuguuaggguauuaau

SEQ ID NO: 188931 - RNA, 32 nt, Homo Sapiens
aauucaucccuuccucccacuccccccuuggc

SEQ ID NO: 188932 - RNA, 32 nt, Homo Sapiens
ccuugcguagacugcauagaaggaaugaacaa

SEQ ID NO: 188933 - RNA, 32 nt, Homo Sapiens
agaccgaggcgcauagagaccgaggcacagcc

SEQ ID NO: 188934 - RNA, 32 nt, Homo Sapiens
uuguuccccuuacagacaaaaugaagacuauc

SEQ ID NO: 188935 - RNA, 32 nt, Homo Sapiens
ccaaguccuggcaggagcugggcuugcuggcu

SEQ ID NO: 188936 - RNA, 32 nt, Homo Sapiens
cuagucaggaggaacaaaaacaggcacugagu

SEQ ID NO: 188937 - RNA, 32 nt, Homo Sapiens
guccaccuucuuaaauuuuuaagaugaacuua

SEQ ID NO: 188938 - RNA, 32 nt, Homo Sapiens
caaccgagccccuuugccccaacacacucuuc

SEQ ID NO: 188939 - RNA, 32 nt, Homo Sapiens
aaauuuucaaaguacuagaucaccuuaaaauu

SEQ ID NO: 188940 - RNA, 32 nt, Homo Sapiens
ucaguuuuacuuugaaauugcucaacuucugc

SEQ ID NO: 188941 - RNA, 32 nt, Homo Sapiens
ggagacacugucagccugguguucaccaggcc

SEQ ID NO: 188942 - RNA, 32 nt, Homo Sapiens
cucaaacacauuguccugugcacgggaugcug

SEQ ID NO: 188943 - RNA, 32 nt, Homo Sapiens
guuucugugggcuaauuaaauaaaucacuaau

SEQ ID NO: 188944 - RNA, 32 nt, Homo Sapiens
aggacaggagaaaaccacggacuggcucccuc

SEQ ID NO: 188945 - RNA, 32 nt, Homo Sapiens
ccaagccuggccgccaccuugguuucacccug

SEQ ID NO: 188946 - RNA, 32 nt, Homo Sapiens
ggcucgcgccgcuccauguagccccggcuccc

SEQ ID NO: 188947 - RNA, 32 nt, Homo Sapiens
uccucuuccuuccuccuccagccgccgccgaa

SEQ ID NO: 188948 - RNA, 32 nt, Homo Sapiens
uccuuauaaacugggccuuaugcuggcaucuu

SEQ ID NO: 188949 - RNA, 32 nt, Homo Sapiens
aaaccucagggugccucugucucaagugccug

SEQ ID NO: 188950 - RNA, 32 nt, Homo Sapiens
cugcagccuaaaacuucaccuaaggccugaug

SEQ ID NO: 188951 - RNA, 32 nt, Homo Sapiens
aagaacacauucaaauggugcauguguuuggu

SEQ ID NO: 188952 - RNA, 32 nt, Homo Sapiens
aggcacucagggugggggacagcaggaucaag

SEQ ID NO: 188953 - RNA, 28 nt, Homo Sapiens
aauguagagaugucaaagugcuuaggcu

SEQ ID NO: 188954 - RNA, 32 nt, Homo Sapiens
cugugauaagcagaacuagaaaauccaccagg

SEQ ID NO: 188955 - RNA, 32 nt, Homo Sapiens
aaucauacauaaacuucccaauauuugugaac

SEQ ID NO: 188956 - RNA, 32 nt, Homo Sapiens
auuaaaccauguaaagaacauaaauaacaaau

SEQ ID NO: 188957 - RNA, 32 nt, Homo Sapiens
uccugcagaaaagagugugaggagccagggaa

SEQ ID NO: 188958 - RNA, 32 nt, Homo Sapiens
gcacuuguauaaaauucaguuuuggaacuaaa

SEQ ID NO: 188959 - RNA, 32 nt, Homo Sapiens
ucccugggcaacacuggucaggcauucauuca

SEQ ID NO: 188960 - RNA, 32 nt, Homo Sapiens
gaccaggcacuaggcaaccagggguaguaccu

SEQ ID NO: 188961 - RNA, 32 nt, Homo Sapiens
gcuccaaaacccaguuucugguaaaugagagu

SEQ ID NO: 188962 - RNA, 32 nt, Homo Sapiens
uuaucccuaaccgagacagcugucuuauaucu

SEQ ID NO: 188963 - RNA, 32 nt, Homo Sapiens
uggcagcagcggggacgcggcgcgggaguccg

SEQ ID NO: 188964 - RNA, 32 nt, Homo Sapiens
ucucuucuugguaacaucuacuacuccaaccu

SEQ ID NO: 188965 - RNA, 32 nt, Homo Sapiens
uaggaaauacucagcaacuguuagcugggaag

SEQ ID NO: 188966 - RNA, 32 nt, Homo Sapiens
guugguuguaucuaacuuuuaagggacagagc

SEQ ID NO: 188967 - RNA, 32 nt, Homo Sapiens
gucgccucuggggggcugcugcaccgcguuuc

SEQ ID NO: 188968 - RNA, 32 nt, Homo Sapiens
accaggcauacuuauauuugcuaguuggaaaa

SEQ ID NO: 188969 - RNA, 32 nt, Homo Sapiens
cuguggguuauuuuugugaacagccugauguu

SEQ ID NO: 188970 - RNA, 32 nt, Homo Sapiens
gggcugcccucccagccccuguucucccagcu

SEQ ID NO: 188971 - RNA, 32 nt, Homo Sapiens
aauaaccccagcugcaccaugagccgcguucg

SEQ ID NO: 188972 - RNA, 32 nt, Homo Sapiens
auucuuuaaucaugucuuucugaaauguguau

SEQ ID NO: 188973 - RNA, 32 nt, Homo Sapiens
gggaggagagaaaagccauggccgacaagguc

SEQ ID NO: 188974 - RNA, 32 nt, Homo Sapiens
cuugggcgaugaugcagaacuguuuaucacua

SEQ ID NO: 188975 - RNA, 32 nt, Homo Sapiens
ugauuuauauauggcauauuuauauuguauau

SEQ ID NO: 188976 - RNA, 32 nt, Homo Sapiens
uugaaaauuacaucaacagucuacgucacagc

SEQ ID NO: 188977 - RNA, 32 nt, Homo Sapiens
guagcuucuuguccuuuccccucagcugucuu

SEQ ID NO: 188978 - RNA, 32 nt, Homo Sapiens
acccuugccucuugugccccagcaccuucucu

SEQ ID NO: 188979 - RNA, 32 nt, Homo Sapiens
gcccugcccucccaagucccacccucuuccca

SEQ ID NO: 188980 - RNA, 30 nt, Homo Sapiens
cacagaguguggcuucaccagucagaggga

SEQ ID NO: 188981 - RNA, 32 nt, Homo Sapiens
uccucagaugucagcaucucaaggcagcacag

SEQ ID NO: 188982 - RNA, 32 nt, Homo Sapiens
agcugagauuguggcacugcacuccagucugg

SEQ ID NO: 188983 - RNA, 32 nt, Homo Sapiens
gguggccaguggacaagaacaccucagucucu

SEQ ID NO: 188984 - RNA, 32 nt, Homo Sapiens
cacgggcaccugcagcugcugcuguggcugcc

SEQ ID NO: 188985 - RNA, 32 nt, Homo Sapiens
caaggguuuaaacuugauacaaaaccuuuuau

SEQ ID NO: 188986 - RNA, 32 nt, Homo Sapiens
caaacugggugccugccugcccuucuaggaau

SEQ ID NO: 188987 - RNA, 32 nt, Homo Sapiens
gaacagggaacaguaacaguagcauauuagaa

SEQ ID NO: 188988 - RNA, 32 nt, Homo Sapiens
gaugucuuuuauacaauucuuuugagaaugau

SEQ ID NO: 188989 - RNA, 32 nt, Homo Sapiens
gcgcugcgguuggcaccuccuuccucacuccc

SEQ ID NO: 188990 - RNA, 32 nt, Homo Sapiens
uuauauuuugcuacauaaaggcauguacaaca

SEQ ID NO: 188991 - RNA, 32 nt, Homo Sapiens
aaaacaaaacaaaacaaaacacuguaucagcu

SEQ ID NO: 188992 - RNA, 32 nt, Homo Sapiens
gguggcaauauggccaguggucuccaugccaa

SEQ ID NO: 188993 - RNA, 32 nt, Homo Sapiens
cgugccuguagccccagcuacuugggaggcug

SEQ ID NO: 188994 - RNA, 32 nt, Homo Sapiens
auucuuuuauggaguucccuggaguggcagag

SEQ ID NO: 188995 - RNA, 32 nt, Homo Sapiens
ccaaggcugagcggcagaaacuugucucauaa

SEQ ID NO: 188996 - RNA, 32 nt, Homo Sapiens
cgagcgagcagccuauggagguggagcugugg

SEQ ID NO: 188997 - RNA, 32 nt, Homo Sapiens
uaguuaguuaccugauaacagucuuguuauuu

SEQ ID NO: 188998 - RNA, 32 nt, Homo Sapiens
uauugguuugccauccuuguucauuacaacug

SEQ ID NO: 188999 - RNA, 32 nt, Homo Sapiens
uguauggguucugucugugucaaugucccagc

SEQ ID NO: 189000 - RNA, 32 nt, Homo Sapiens
cacagcaggggagggguuaaugcagauggcaa

SEQ ID NO: 189001 - RNA, 32 nt, Homo Sapiens
cccaagcuugucugcugccugaguuccagaga

SEQ ID NO: 189002 - RNA, 32 nt, Homo Sapiens
uuccaccaaacaauguaaacuuugaaagugau

SEQ ID NO: 189003 - RNA, 32 nt, Homo Sapiens
uuaaauuauaaucguuaaauguuuggaagaua

SEQ ID NO: 189004 - RNA, 32 nt, Homo Sapiens
gcuucgugaacagcuuggcgaccgccucagug

SEQ ID NO: 189005 - RNA, 32 nt, Homo Sapiens
gucucuggccccccaacacugccuucuggggg

SEQ ID NO: 189006 - RNA, 32 nt, Homo Sapiens
caguguuuacuuuaccuagauggcuuauauaa

SEQ ID NO: 189007 - RNA, 32 nt, Homo Sapiens
uuaccaaaaugaaugaauaaaugaaugaauga

SEQ ID NO: 189008 - RNA, 32 nt, Homo Sapiens
aggcgucaguggcugcgccuccaugccugcgc

SEQ ID NO: 189009 - RNA, 32 nt, Homo Sapiens
gcucaggaagccugcccugugcuugagaguuc

SEQ ID NO: 189010 - RNA, 32 nt, Homo Sapiens
gccggagcucuuguugccagguggaauacaag

SEQ ID NO: 189011 - RNA, 32 nt, Homo Sapiens
cugcuuaugugguuccuucucuagagcugcuu

SEQ ID NO: 189012 - RNA, 32 nt, Homo Sapiens
gcugguggaaaacuauaugauaucccugacgu

SEQ ID NO: 189013 - RNA, 32 nt, Homo Sapiens
uggcuucucccucucagugcgaggcuucaccc

SEQ ID NO: 189014 - RNA, 31 nt, Homo Sapiens
caggagagccacugccuccccugccuccccu

SEQ ID NO: 189015 - RNA, 32 nt, Homo Sapiens
ucuucauucagcaaacacuuauuugagagcuu

SEQ ID NO: 189016 - RNA, 32 nt, Homo Sapiens
auugagccaaagcccaggcucccuuugggaau

SEQ ID NO: 189017 - RNA, 32 nt, Homo Sapiens
auggaugucucagcaguucuuaaaagaagaaa

SEQ ID NO: 189018 - RNA, 32 nt, Homo Sapiens
aacguggaacccagaaucaugguucacucggu

SEQ ID NO: 189019 - RNA, 32 nt, Homo Sapiens
gcccaugaacuguguuuccauccuuugcauuu

SEQ ID NO: 189020 - RNA, 32 nt, Homo Sapiens
cugccccgccgggacuccgcgucugugcguca

SEQ ID NO: 189021 - RNA, 32 nt, Homo Sapiens
cuuaacgcuucauuuuaacuuaguaaacccaa

SEQ ID NO: 189022 - RNA, 32 nt, Homo Sapiens
uuugcauuauaguccucauuaagcaaauuaaa

SEQ ID NO: 189023 - RNA, 32 nt, Homo Sapiens
ucagaggcccagcaagccccccugcccccgca

SEQ ID NO: 189024 - RNA, 29 nt, Homo Sapiens
agauuaaaaugaauuuuaguacuaaagug

SEQ ID NO: 189025 - RNA, 32 nt, Homo Sapiens
uuguccaucccaugaguuagaguucgucuuga

SEQ ID NO: 189026 - RNA, 32 nt, Homo Sapiens
cuuuauuaaaagacaguugcaacaauugcaug

SEQ ID NO: 189027 - RNA, 32 nt, Homo Sapiens
ugucccucacaauuuuugaaauccaucucauc

SEQ ID NO: 189028 - RNA, 32 nt, Homo Sapiens
ugaccugagagccacacucagcuccucaaggg

SEQ ID NO: 189029 - RNA, 32 nt, Homo Sapiens
cucuaauggcugggguagauccgcggagauac

SEQ ID NO: 189030 - RNA, 32 nt, Homo Sapiens
aucaugguaaggaaaccuuaauccguugaaac

SEQ ID NO: 189031 - RNA, 32 nt, Homo Sapiens
ggucuccgaaaggaccggccccugcccccacc

SEQ ID NO: 189032 - RNA, 32 nt, Homo Sapiens
gcccagucugagcagcagggugaggcagcccu

SEQ ID NO: 189033 - RNA, 32 nt, Homo Sapiens
ccauuagaaaaugugaaacuguucuuaugagc

SEQ ID NO: 189034 - RNA, 32 nt, Homo Sapiens
caacuggaaaauuuuaugcaucccaugaagcc

SEQ ID NO: 189035 - RNA, 32 nt, Homo Sapiens
caaaagggcagacaugcugaaguaugucauca

SEQ ID NO: 189036 - RNA, 32 nt, Homo Sapiens
guguggccaccaagcccuccagggcagugcua

SEQ ID NO: 189037 - RNA, 32 nt, Homo Sapiens
cuggaagaccuggauuucuuucuggaagacac

SEQ ID NO: 189038 - RNA, 32 nt, Homo Sapiens
cagcaguuccccuccuucuucgacugcuccuc

SEQ ID NO: 189039 - RNA, 32 nt, Homo Sapiens
caauuuuauugaccucuuuauacagaauuuua

SEQ ID NO: 189040 - RNA, 32 nt, Homo Sapiens
guaauuucuuugaucuggacagaacauuuaua

SEQ ID NO: 189041 - RNA, 32 nt, Homo Sapiens
gcuaagguuguguggaaggcgcugcuccccgg

SEQ ID NO: 189042 - RNA, 32 nt, Homo Sapiens
uacuguguuguaauaaacauguuuguauguug

SEQ ID NO: 189043 - RNA, 29 nt, Homo Sapiens
gagauuauauguauguaaaauguacagaa

SEQ ID NO: 189044 - RNA, 32 nt, Homo Sapiens
ucaugacaccucccccuaccagcccuccucuu

SEQ ID NO: 189045 - RNA, 32 nt, Homo Sapiens
uagugcauuucccacugggucuuuugggaggc

SEQ ID NO: 189046 - RNA, 32 nt, Homo Sapiens
uaagccacuggaggcauuauaucaccaaauaa

SEQ ID NO: 189047 - RNA, 30 nt, Homo Sapiens
ugaggucgagugguucugccccccgcugcc

SEQ ID NO: 189048 - RNA, 27 nt, Homo Sapiens
gcagcuuccuccuucagccaccuggcc

SEQ ID NO: 189049 - RNA, 31 nt, Homo Sapiens
cucucuuauugagccaauuaaauugacauug

SEQ ID NO: 189050 - RNA, 32 nt, Homo Sapiens
uauuuauuuuuuucuuuuuuuucauuuuuuuu

SEQ ID NO: 189051 - RNA, 32 nt, Homo Sapiens
uauuuuuuauuugcuuuuuuuuuauauaacac

SEQ ID NO: 189052 - RNA, 32 nt, Homo Sapiens
uaggaucuuuauuauuauuccaaauuagcaag

SEQ ID NO: 189053 - RNA, 32 nt, Homo Sapiens
auuucuuauugcagugccuggugcuaggaagu

SEQ ID NO: 189054 - RNA, 32 nt, Homo Sapiens
gucugcauguguauauguucgugugugaaaug

SEQ ID NO: 189055 - RNA, 32 nt, Homo Sapiens
cucugccacggguuaaauuuucaggugaagag

SEQ ID NO: 189056 - RNA, 32 nt, Homo Sapiens
gagugguugaccaagaacacugcacaaauaua

SEQ ID NO: 189057 - RNA, 32 nt, Homo Sapiens
uggcugagaggcucccagcugcagcguccccg

SEQ ID NO: 189058 - RNA, 32 nt, Homo Sapiens
agagauggagucugugaagcgccuggugcaag

SEQ ID NO: 189059 - RNA, 29 nt, Homo Sapiens
uugguauaaaguuuggguuuuugucucaa

SEQ ID NO: 189060 - RNA, 32 nt, Homo Sapiens
ggccgccugcuacaagacccagcccgcacacu

SEQ ID NO: 189061 - RNA, 32 nt, Homo Sapiens
acagcuuccuucccuuucuguguagcagucuu

SEQ ID NO: 189062 - RNA, 32 nt, Homo Sapiens
guaguuuguagggacgcagcucuccacgugcg

SEQ ID NO: 189063 - RNA, 32 nt, Homo Sapiens
gaggcccgaccggccuggcagggcucgcccgg

SEQ ID NO: 189064 - RNA, 32 nt, Homo Sapiens
auguaaacuuacaguuaaaaacaaagguaaua

SEQ ID NO: 189065 - RNA, 32 nt, Homo Sapiens
acugagacgugugaaucagaacauucauuuca

SEQ ID NO: 189066 - RNA, 32 nt, Homo Sapiens
acuagaaaacaaaaagauguuagaaaaauaaa

SEQ ID NO: 189067 - RNA, 32 nt, Homo Sapiens
ggggggucucccuccggaccuaccucagggag

SEQ ID NO: 189068 - RNA, 32 nt, Homo Sapiens
cccaccuggagacuccacgggcucccggcagc

SEQ ID NO: 189069 - RNA, 31 nt, Homo Sapiens
uccgucccggcugcccugcccccugcuguag

SEQ ID NO: 189070 - RNA, 32 nt, Homo Sapiens
augaauaguguguuuauuguaacuccucauac

SEQ ID NO: 189071 - RNA, 32 nt, Homo Sapiens
aguuugaggcuuagaagcuggaucuccugccg

SEQ ID NO: 189072 - RNA, 32 nt, Homo Sapiens
gagcggccgcgggugacucccaggcgcggcgg

SEQ ID NO: 189073 - RNA, 32 nt, Homo Sapiens
caggaugaugguagaacggagaucuggguuuc

SEQ ID NO: 189074 - RNA, 32 nt, Homo Sapiens
gcaugcacagcaugaucaguuagcucucguaa

SEQ ID NO: 189075 - RNA, 32 nt, Homo Sapiens
gcuauuacaacaacccaagugagaaaugauga

SEQ ID NO: 189076 - RNA, 32 nt, Homo Sapiens
acccugccaucccaucccaaccccagcucacu

SEQ ID NO: 189077 - RNA, 32 nt, Homo Sapiens
gccuguugauaugagcucccaguugggaacug

SEQ ID NO: 189078 - RNA, 32 nt, Homo Sapiens
cugcaguggacagcggcggggagaggcugccu

SEQ ID NO: 189079 - RNA, 32 nt, Homo Sapiens
cgggacgggguggaaguggggguggggggagg

SEQ ID NO: 189080 - RNA, 32 nt, Homo Sapiens
uggcacuccucugguggaccgcccccaucggc

SEQ ID NO: 189081 - RNA, 31 nt, Homo Sapiens
gcuuggugagagguuugguuugauaccucug

SEQ ID NO: 189082 - RNA, 32 nt, Homo Sapiens
gccuacuucuucaugaacaauuccauuuuauu

SEQ ID NO: 189083 - RNA, 32 nt, Homo Sapiens
cuguggggccccagcagcacuguggccugcag

SEQ ID NO: 189084 - RNA, 32 nt, Homo Sapiens
cauauuuuacccccgcaaaccaaauacuuuga

SEQ ID NO: 189085 - RNA, 32 nt, Homo Sapiens
ccuagccagccaccuugucuccaguccugguu

SEQ ID NO: 189086 - RNA, 32 nt, Homo Sapiens
cagcggcggcggugaccgcgagugggucggca

SEQ ID NO: 189087 - RNA, 32 nt, Homo Sapiens
gcgaguccacaggccccuccccggagucaccu

SEQ ID NO: 189088 - RNA, 32 nt, Homo Sapiens
ucaucuuggagaaacaccuugguuucuaggau

SEQ ID NO: 189089 - RNA, 32 nt, Homo Sapiens
auccauuguauauacuaguuucuuucaugcua

SEQ ID NO: 189090 - RNA, 32 nt, Homo Sapiens
gccaauggauacuauuguguuuagauuguuca

SEQ ID NO: 189091 - RNA, 32 nt, Homo Sapiens
uugggcuuggcuccagcaguggcaccaauacc

SEQ ID NO: 189092 - RNA, 32 nt, Homo Sapiens
agccucagggacccgguggccacagcacccuc

SEQ ID NO: 189093 - RNA, 32 nt, Homo Sapiens
aaaggccaagaagaggguuaaauggcucucuu

SEQ ID NO: 189094 - RNA, 28 nt, Homo Sapiens
aucaauaaaguuaaucauuugaaagaaa

SEQ ID NO: 189095 - RNA, 32 nt, Homo Sapiens
uucgcaggaagaaaaaucauaguguuaaugaa

SEQ ID NO: 189096 - RNA, 32 nt, Homo Sapiens
cacuaaccuuuugauuugauaaguuauaaauu

SEQ ID NO: 189097 - RNA, 32 nt, Homo Sapiens
ggaccagcacugugucccucccccugcccccg

SEQ ID NO: 189098 - RNA, 32 nt, Homo Sapiens
agccaagccgcaagguuacaaggcauccucac

SEQ ID NO: 189099 - RNA, 32 nt, Homo Sapiens
acuauuuuacuuuuuuaaaaucauaaaacggc

SEQ ID NO: 189100 - RNA, 32 nt, Homo Sapiens
cauauauauaaaaagucaaaauuguaauaacu

SEQ ID NO: 189101 - RNA, 32 nt, Homo Sapiens
aaugguuaaaagagguuuuucuuaaauaauaa

SEQ ID NO: 189102 - RNA, 32 nt, Homo Sapiens
uuagugaacuauuaauaauccaauuaaauaaa

SEQ ID NO: 189103 - RNA, 32 nt, Homo Sapiens
aagucuguauuauauugaugucuccagauuca

SEQ ID NO: 189104 - RNA, 32 nt, Homo Sapiens
agcauuuccuucccuuuccagugaaggagcag

SEQ ID NO: 189105 - RNA, 32 nt, Homo Sapiens
gccugcugcccucuugcgcgcgggaagcagca

SEQ ID NO: 189106 - RNA, 32 nt, Homo Sapiens
ucccugacaacagaaacugaagagauugccug

SEQ ID NO: 189107 - RNA, 32 nt, Homo Sapiens
aguaaaagcuaucaucagcaucaucuuagacu

SEQ ID NO: 189108 - RNA, 29 nt, Homo Sapiens
uccgagcgcgggcgcuggacgccgccaag

SEQ ID NO: 189109 - RNA, 32 nt, Homo Sapiens
cgggagcugucggccccggcccgacucuauca

SEQ ID NO: 189110 - RNA, 32 nt, Homo Sapiens
cgcguggccaaucagauccccccugagauccu

SEQ ID NO: 189111 - RNA, 32 nt, Homo Sapiens
gucugccgcgcccuuguuccugcagcugucca

SEQ ID NO: 189112 - RNA, 32 nt, Homo Sapiens
uugcuggauucugcagcacaagucuucaugaa

SEQ ID NO: 189113 - RNA, 32 nt, Homo Sapiens
gcuuuauucuuugcuuggcuuugguaacuagg

SEQ ID NO: 189114 - RNA, 32 nt, Homo Sapiens
gcucugcgccucuccaccuggcuucacugauu

SEQ ID NO: 189115 - RNA, 32 nt, Homo Sapiens
cacauaaauaugauuucugauuagcgcuagga

SEQ ID NO: 189116 - RNA, 32 nt, Homo Sapiens
caacauuuuaaauuauuauaaacagaauacua

SEQ ID NO: 189117 - RNA, 32 nt, Homo Sapiens
cguagguuuggaaugucuugucccaguucuuc

SEQ ID NO: 189118 - RNA, 32 nt, Homo Sapiens
cuuccucagaacuuucuaguugcccucuaccu

SEQ ID NO: 189119 - RNA, 32 nt, Homo Sapiens
uguauucugcgcacuucuguuaugaagggagu

SEQ ID NO: 189120 - RNA, 32 nt, Homo Sapiens
uguccuggaaacuguagaauugaauaaaucac

SEQ ID NO: 189121 - RNA, 32 nt, Homo Sapiens
uuucccaacucccacaccccuggaucuaggca

SEQ ID NO: 189122 - RNA, 32 nt, Homo Sapiens
cgcugacgccccgacgccgauccggccgagcc

SEQ ID NO: 189123 - RNA, 32 nt, Homo Sapiens
ugguggugguggccaggggcuguggggaggga

SEQ ID NO: 189124 - RNA, 28 nt, Homo Sapiens
aagaugccugaagacaaucggaggggua

SEQ ID NO: 189125 - RNA, 32 nt, Homo Sapiens
ggagagggccuggccucuccgagggauggagg

SEQ ID NO: 189126 - RNA, 32 nt, Homo Sapiens
gggggaaagugggggaacgacacacacuucac

SEQ ID NO: 189127 - RNA, 32 nt, Homo Sapiens
aaacugucucuuaaccuugagaguggauuucu

SEQ ID NO: 189128 - RNA, 32 nt, Homo Sapiens
caccacugcuaagggacucuauccauugagca

SEQ ID NO: 189129 - RNA, 32 nt, Homo Sapiens
ucugccagggacccacggccgaauaccgugag

SEQ ID NO: 189130 - RNA, 32 nt, Homo Sapiens
cucguauggggugguuuuugcauuaaauccug

SEQ ID NO: 189131 - RNA, 32 nt, Homo Sapiens
gcccagccucaauuauuuuaaucuuugaauaa

SEQ ID NO: 189132 - RNA, 32 nt, Homo Sapiens
aaucuaaacccagcagaagagaaaguuuaaga

SEQ ID NO: 189133 - RNA, 32 nt, Homo Sapiens
uaaaacuugacauuuuaaccuguggcauuuag

SEQ ID NO: 189134 - RNA, 32 nt, Homo Sapiens
gauuuuguuguuguuguuguuuugagacaggg

SEQ ID NO: 189135 - RNA, 32 nt, Homo Sapiens
uacccuuuucuuuuccuugaaaauguugcagu

SEQ ID NO: 189136 - RNA, 32 nt, Homo Sapiens
agcaccccaagccccagccugagggcugguca

SEQ ID NO: 189137 - RNA, 32 nt, Homo Sapiens
guguaagauaaaaaccccuugcuauuucaaaa

SEQ ID NO: 189138 - RNA, 32 nt, Homo Sapiens
ugugauuucauuugcacagaaacuagaaaucc

SEQ ID NO: 189139 - RNA, 32 nt, Homo Sapiens
uggaaccugagcaaagggaauaggugggauga

SEQ ID NO: 189140 - RNA, 32 nt, Homo Sapiens
cacaaauaaaggaaacacucaucacuaguauc

SEQ ID NO: 189141 - RNA, 32 nt, Homo Sapiens
ugcgaucgcucgccccaggauggccgcggcuc

SEQ ID NO: 189142 - RNA, 32 nt, Homo Sapiens
caacucccgcggacgcugaacaauggccucca

SEQ ID NO: 189143 - RNA, 32 nt, Homo Sapiens
gcucagcuguccccagaccccaucccuucucc

SEQ ID NO: 189144 - RNA, 32 nt, Homo Sapiens
aaaccacccacccccaucaugaccugggggca

SEQ ID NO: 189145 - RNA, 32 nt, Homo Sapiens
augaucauuugcacagaauggguuuccuucac

SEQ ID NO: 189146 - RNA, 32 nt, Homo Sapiens
ucccaccggcucgcugcagagccgggcccagc

SEQ ID NO: 189147 - RNA, 32 nt, Homo Sapiens
cucucccccagggcugccccuccaggugagcc

SEQ ID NO: 189148 - RNA, 32 nt, Homo Sapiens
gcgcacagccagcggccgcgccggcgaugcgg

SEQ ID NO: 189149 - RNA, 32 nt, Homo Sapiens
aaacacugugcugcugaguucaucucaaacau

SEQ ID NO: 189150 - RNA, 31 nt, Homo Sapiens
cagccagcgggcccuggucaggaaacucuaa

SEQ ID NO: 189151 - RNA, 32 nt, Homo Sapiens
ucccagcaucuucccuucuuguucuguuccuu

SEQ ID NO: 189152 - RNA, 32 nt, Homo Sapiens
acagggaccuugcugcaguaaauaccaucuca

SEQ ID NO: 189153 - RNA, 32 nt, Homo Sapiens
ucuagacgcccccagacaccucucaggcacag

SEQ ID NO: 189154 - RNA, 32 nt, Homo Sapiens
gugcccucaaagaaugagaaccucaagcaucu

SEQ ID NO: 189155 - RNA, 32 nt, Homo Sapiens
gucuugccccacuaugcuagggucuucgccuu

SEQ ID NO: 189156 - RNA, 32 nt, Homo Sapiens
cuggauaaagaagucgcuguuuuuguacugcu

SEQ ID NO: 189157 - RNA, 32 nt, Homo Sapiens
ugagcaaaugguuuaauuuuuaucuuaaaaau

SEQ ID NO: 189158 - RNA, 32 nt, Homo Sapiens
gugggguggggaggaggggcagugcaggugga

SEQ ID NO: 189159 - RNA, 32 nt, Homo Sapiens
acuuuuuuuauuaaguuuuuaauucauaguca

SEQ ID NO: 189160 - RNA, 32 nt, Homo Sapiens
uugaggucaggaguucgggaccauccuggcca

SEQ ID NO: 189161 - RNA, 32 nt, Homo Sapiens
accugcagaagcauuuuuaauaccucauucug

SEQ ID NO: 189162 - RNA, 32 nt, Homo Sapiens
aauaaagauacuuuuuacuggguuuguuuuuc

SEQ ID NO: 189163 - RNA, 32 nt, Homo Sapiens
cguuuuagaaucugguaaaugucuugagaagg

SEQ ID NO: 189164 - RNA, 32 nt, Homo Sapiens
guccggucucacggugaccucccgcuggcgcc

SEQ ID NO: 189165 - RNA, 32 nt, Homo Sapiens
uagacugugugcccuccuccaggauggcauua

SEQ ID NO: 189166 - RNA, 32 nt, Homo Sapiens
cagggaugacaagagggacaugcugaaacagg

SEQ ID NO: 189167 - RNA, 32 nt, Homo Sapiens
agaauuuuuaucacuaucuguuauguucucau

SEQ ID NO: 189168 - RNA, 32 nt, Homo Sapiens
agcgauucucaugucucagccuccucaguagc

SEQ ID NO: 189169 - RNA, 32 nt, Homo Sapiens
gagugccgcgcgcggcccggggacuugcacgg

SEQ ID NO: 189170 - RNA, 32 nt, Homo Sapiens
gcugccucggaacgcugcagcccaggcuuccu

SEQ ID NO: 189171 - RNA, 32 nt, Homo Sapiens
aaguccuccucugucucuauguuucuuggaau

SEQ ID NO: 189172 - RNA, 32 nt, Homo Sapiens
caacccccaggcucacagcaguggcuucuagg

SEQ ID NO: 189173 - RNA, 32 nt, Homo Sapiens
gauaaaugauuuucuuuuuuucuuuucuuucu

SEQ ID NO: 189174 - RNA, 32 nt, Homo Sapiens
uagccuguaucuaucauuuaaaugcauggaaa

SEQ ID NO: 189175 - RNA, 32 nt, Homo Sapiens
uuuaagcgugcccuuccucaccuccuggagca

SEQ ID NO: 189176 - RNA, 32 nt, Homo Sapiens
uugggaggggcuccccggaaaccuggaugcug

SEQ ID NO: 189177 - RNA, 32 nt, Homo Sapiens
agaauuuaaaauuuauaccacagaaaacauuu

SEQ ID NO: 189178 - RNA, 32 nt, Homo Sapiens
guacuauggauuuaaugaaauuauaugucauu

SEQ ID NO: 189179 - RNA, 32 nt, Homo Sapiens
cauuuagguaaaacuuuguaggcaccuucugc

SEQ ID NO: 189180 - RNA, 32 nt, Homo Sapiens
ucauggaaugacaugaaucaacuuuuuucuuu

SEQ ID NO: 189181 - RNA, 32 nt, Homo Sapiens
aagaggaaaaauacuaagagauuugcuuuuuc

SEQ ID NO: 189182 - RNA, 32 nt, Homo Sapiens
cugcaagcccucggucaagauauagucaaaua

SEQ ID NO: 189183 - RNA, 32 nt, Homo Sapiens
ccugccucagaaugucagugagcaccaugcug

SEQ ID NO: 189184 - RNA, 32 nt, Homo Sapiens
uuugagcuccgggucucuucuaccugcauucu

SEQ ID NO: 189185 - RNA, 32 nt, Homo Sapiens
cucugggaggcugaggcggguggaucacgagg

SEQ ID NO: 189186 - RNA, 32 nt, Homo Sapiens
ucaccacaauaaugugaauauugcaauaaagc

SEQ ID NO: 189187 - RNA, 32 nt, Homo Sapiens
ugcgaaucuuuggucuucucgacaggugcccu

SEQ ID NO: 189188 - RNA, 32 nt, Homo Sapiens
caacccggguccgcggggcacccgccggaugc

SEQ ID NO: 189189 - RNA, 32 nt, Homo Sapiens
gcaccaccucauccuggcccgccgaaccuuga

SEQ ID NO: 189190 - RNA, 32 nt, Homo Sapiens
cacugccuggaaagacuuucucucaauucgua

SEQ ID NO: 189191 - RNA, 32 nt, Homo Sapiens
cguugcggccgccggcgccgcgggagguggug

SEQ ID NO: 189192 - RNA, 30 nt, Homo Sapiens
gccuauaaucccagcuauucuggaggcuga

SEQ ID NO: 189193 - RNA, 32 nt, Homo Sapiens
ugcaagauauaggugagacucccuuuggaugc

SEQ ID NO: 189194 - RNA, 32 nt, Homo Sapiens
acuuugucuuuaaagguccuaugaauucuuuu

SEQ ID NO: 189195 - RNA, 32 nt, Homo Sapiens
ccggaggggguggagaaggggagcgcaggagc

SEQ ID NO: 189196 - RNA, 32 nt, Homo Sapiens
aaaggcucuugguaucuuucuguuggaaugau

SEQ ID NO: 189197 - RNA, 32 nt, Homo Sapiens
auguuuuauccuuuucuggagaguagucuaga

SEQ ID NO: 189198 - RNA, 32 nt, Homo Sapiens
uuuuuuacacgacuuuuuucagaagcccugac

SEQ ID NO: 189199 - RNA, 32 nt, Homo Sapiens
uuauauauuauuguggggaagaaccagccagu

SEQ ID NO: 189200 - RNA, 32 nt, Homo Sapiens
cagguuuccugccuauggugagaucagaugug

SEQ ID NO: 189201 - RNA, 32 nt, Homo Sapiens
gaaucucauaauuuauacaggucauauuaaua

SEQ ID NO: 189202 - RNA, 32 nt, Homo Sapiens
uuauaugguauauaaaacuuuguuuucaucag

SEQ ID NO: 189203 - RNA, 32 nt, Homo Sapiens
acaaggcaucagguaccugaaaaagaagagau

SEQ ID NO: 189204 - RNA, 32 nt, Homo Sapiens
uauugaaguuaaagguuacuuuggaguuuguu

SEQ ID NO: 189205 - RNA, 32 nt, Homo Sapiens
auggcguaagaucucuacuaagauccauuugg

SEQ ID NO: 189206 - RNA, 32 nt, Homo Sapiens
ugcccacccccgcuaccuuucccagccucugg

SEQ ID NO: 189207 - RNA, 32 nt, Homo Sapiens
cagaccugccccccggggccccacagugcuca

SEQ ID NO: 189208 - RNA, 32 nt, Homo Sapiens
gcuuccauaccuucugggcucccuuugcugac

SEQ ID NO: 189209 - RNA, 29 nt, Homo Sapiens
uuucaaucuauccaucugacaaaggucua

SEQ ID NO: 189210 - RNA, 32 nt, Homo Sapiens
ccaucaguacucaagcacuauaagccuuagau

SEQ ID NO: 189211 - RNA, 32 nt, Homo Sapiens
ucuaugucccuacaaaggacaugaacucauuc

SEQ ID NO: 189212 - RNA, 32 nt, Homo Sapiens
aacuccagcuggaaaagguaaaggugaccuuu

SEQ ID NO: 189213 - RNA, 32 nt, Homo Sapiens
aaaaaagauugaagaguaaggaauggaccugg

SEQ ID NO: 189214 - RNA, 32 nt, Homo Sapiens
uccaucaguucaccuugugucaucucauaaug

SEQ ID NO: 189215 - RNA, 32 nt, Homo Sapiens
aagagggaccuggaaggcauucgggaaucccu

SEQ ID NO: 189216 - RNA, 32 nt, Homo Sapiens
ucgcucacucccucacuccccacuuugaagcc

SEQ ID NO: 189217 - RNA, 32 nt, Homo Sapiens
gaccccagucugccuccacaucccuggaauag

SEQ ID NO: 189218 - RNA, 32 nt, Homo Sapiens
ugaccccgcgccccccggacuccagcagcagu

SEQ ID NO: 189219 - RNA, 32 nt, Homo Sapiens
acuaccucguuaacccuuuucuuaaaauauuc

SEQ ID NO: 189220 - RNA, 32 nt, Homo Sapiens
cauggagaccuccuauggaaaaaugaucagcc

SEQ ID NO: 189221 - RNA, 32 nt, Homo Sapiens
cgggaucggaggaggcggcgaagcgacuccga

SEQ ID NO: 189222 - RNA, 32 nt, Homo Sapiens
aagcacaauauaaaaaacaauuagaccaguua

SEQ ID NO: 189223 - RNA, 32 nt, Homo Sapiens
caagaaaauauauuuuuaaagcuuucauuuuu

SEQ ID NO: 189224 - RNA, 32 nt, Homo Sapiens
augaccuccucccacccucccccugcucccca

SEQ ID NO: 189225 - RNA, 32 nt, Homo Sapiens
gcccagccaaggaaauaucuuuauagaugucu

SEQ ID NO: 189226 - RNA, 32 nt, Homo Sapiens
ccaaaugaguccuugugaaccacaacugaucc

SEQ ID NO: 189227 - RNA, 32 nt, Homo Sapiens
gcccucccuggcggccucacccugccaccggu

SEQ ID NO: 189228 - RNA, 30 nt, Homo Sapiens
cuacaggagaagcuuggcgaggugaaggag

SEQ ID NO: 189229 - RNA, 31 nt, Homo Sapiens
caugggaagugaagccaaccgaggcagaggu

SEQ ID NO: 189230 - RNA, 32 nt, Homo Sapiens
cacaccugccuggcccccuccucccuccacac

SEQ ID NO: 189231 - RNA, 27 nt, Homo Sapiens
auugcauucuucuucacuuuuugaaga

SEQ ID NO: 189232 - RNA, 32 nt, Homo Sapiens
ucaacauagucccagugauuaauagcccaacu

SEQ ID NO: 189233 - RNA, 32 nt, Homo Sapiens
acccugccuuggcgggaccagcgggcauuugu

SEQ ID NO: 189234 - RNA, 32 nt, Homo Sapiens
uccucaagaacacagcccugcuucugacauaa

SEQ ID NO: 189235 - RNA, 32 nt, Homo Sapiens
gaaggggagaucguagauuugcugcugaugaa

SEQ ID NO: 189236 - RNA, 32 nt, Homo Sapiens
ucuguccauccauuccuccauccacccaucug

SEQ ID NO: 189237 - RNA, 32 nt, Homo Sapiens
ccccaccugaccaagcccgggacagucaaggc

SEQ ID NO: 189238 - RNA, 32 nt, Homo Sapiens
gccuugguuccuugccugaaaaaugaaagagg

SEQ ID NO: 189239 - RNA, 32 nt, Homo Sapiens
gagcgcaggacagcgcaggagccccggcgcau

SEQ ID NO: 189240 - RNA, 32 nt, Homo Sapiens
uaaauacauauguacauagauauaugggccuc

SEQ ID NO: 189241 - RNA, 32 nt, Homo Sapiens
augugcauuugugaaagucuugugcaggguga

SEQ ID NO: 189242 - RNA, 32 nt, Homo Sapiens
uaaugaaguuauaaauaucagcuuguucaucc

SEQ ID NO: 189243 - RNA, 32 nt, Homo Sapiens
gaauaaacaccccguauauaaaaagggaaaga

SEQ ID NO: 189244 - RNA, 32 nt, Homo Sapiens
ccaggagaaacacuuacauucuggugccuugu

SEQ ID NO: 189245 - RNA, 32 nt, Homo Sapiens
auuagcauuuuucuaauuguuagaauaucugu

SEQ ID NO: 189246 - RNA, 32 nt, Homo Sapiens
acaaucauuuuuugaaaauauuucuguacaug

SEQ ID NO: 189247 - RNA, 32 nt, Homo Sapiens
cuuaagaaaaggaagaagcagcagcuacaugg

SEQ ID NO: 189248 - RNA, 32 nt, Homo Sapiens
aaucuccaacuuuauuuugaauguaccucuau

SEQ ID NO: 189249 - RNA, 32 nt, Homo Sapiens
uaagccaagaucgcaugcuacugcacuccagc

SEQ ID NO: 189250 - RNA, 32 nt, Homo Sapiens
ggggaguaguggggcacggcuccuaagaucca

SEQ ID NO: 189251 - RNA, 32 nt, Homo Sapiens
agaugugacuacugagggcagaucugaguguu

SEQ ID NO: 189252 - RNA, 32 nt, Homo Sapiens
gcacuccaacauugcauccuuucuggggugaa

SEQ ID NO: 189253 - RNA, 32 nt, Homo Sapiens
gaggaggugccgggcagccgggggcgaggcag

SEQ ID NO: 189254 - RNA, 32 nt, Homo Sapiens
uugcagaacagaaagugagaaaacacugccag

SEQ ID NO: 189255 - RNA, 32 nt, Homo Sapiens
agugcuggaaaaccuggcaugccuuugaacuu

SEQ ID NO: 189256 - RNA, 32 nt, Homo Sapiens
uggaaaugcaaauaauaccaaguaaaauaaua

SEQ ID NO: 189257 - RNA, 32 nt, Homo Sapiens
uuccagcuaaggagcuggccuugcccaguggc

SEQ ID NO: 189258 - RNA, 32 nt, Homo Sapiens
gucaucacagcuuuuguaaagaaaguauccuu

SEQ ID NO: 189259 - RNA, 32 nt, Homo Sapiens
guuugcuauugugaauguacauauacuuuccu

SEQ ID NO: 189260 - RNA, 32 nt, Homo Sapiens
ggccagacgccggcuuccuccucccucucccg

SEQ ID NO: 189261 - RNA, 32 nt, Homo Sapiens
cguccuucccguccagccccagcccugggccu

SEQ ID NO: 189262 - RNA, 32 nt, Homo Sapiens
cucccgcaccccgauguggaccucuacuuucc

SEQ ID NO: 189263 - RNA, 32 nt, Homo Sapiens
uugaagaaaaggagguuccagccuuggcaaga

SEQ ID NO: 189264 - RNA, 32 nt, Homo Sapiens
ccuccgcacacaccccaccccagccugcuaua

SEQ ID NO: 189265 - RNA, 32 nt, Homo Sapiens
aaguggauauuguugccaucaaugaccccuuc

SEQ ID NO: 189266 - RNA, 32 nt, Homo Sapiens
uguaagauuaaagagaggcauuuucguuucua

SEQ ID NO: 189267 - RNA, 32 nt, Homo Sapiens
cacacacacacgagcacacacacacacacaca

SEQ ID NO: 189268 - RNA, 32 nt, Homo Sapiens
gaaauugaucugcaucagcuuauuuauaaaag

SEQ ID NO: 189269 - RNA, 32 nt, Homo Sapiens
gccgaccacgccccaggaccuccggagcgccc

SEQ ID NO: 189270 - RNA, 32 nt, Homo Sapiens
uguggccauggagcuccugggugagcagcugc

SEQ ID NO: 189271 - RNA, 32 nt, Homo Sapiens
ccugccgacggagccacuggggugggaggggg

SEQ ID NO: 189272 - RNA, 32 nt, Homo Sapiens
uuaaauggcauuauuuucaaagggugaaaaac

SEQ ID NO: 189273 - RNA, 32 nt, Homo Sapiens
aaagaucuuuugcccuggagauaugguccuga

SEQ ID NO: 189274 - RNA, 32 nt, Homo Sapiens
cacgucccggaccuguggggccccagagaggg

SEQ ID NO: 189275 - RNA, 32 nt, Homo Sapiens
cccagcggaggccaggcgcgcaaccucgggcg

SEQ ID NO: 189276 - RNA, 32 nt, Homo Sapiens
acucaacugccaccaguccccagcugcagacc

SEQ ID NO: 189277 - RNA, 32 nt, Homo Sapiens
cagauucaaacccaccacacacaccacggggc

SEQ ID NO: 189278 - RNA, 32 nt, Homo Sapiens
ucgcuacauuuauguguaacaauuuauguaga

SEQ ID NO: 189279 - RNA, 32 nt, Homo Sapiens
accucucuggggccccucugguauccaggaag

SEQ ID NO: 189280 - RNA, 32 nt, Homo Sapiens
cugaagucucaucccacccauccguuaucagu

SEQ ID NO: 189281 - RNA, 32 nt, Homo Sapiens
caugcauccaacuucagugauaccuucuagcu

SEQ ID NO: 189282 - RNA, 32 nt, Homo Sapiens
aucccauauuaaaauauacauuguaccugacc

SEQ ID NO: 189283 - RNA, 32 nt, Homo Sapiens
gauauuuuuuauuuguuucauucauucuguuc

SEQ ID NO: 189284 - RNA, 31 nt, Homo Sapiens
cuguggcccugugaccugcccccuggaagcc

SEQ ID NO: 189285 - RNA, 32 nt, Homo Sapiens
aaccuggacccgggcccggcccggcgagauca

SEQ ID NO: 189286 - RNA, 32 nt, Homo Sapiens
cuuccgggguggccuccaccuccuggcugggg

SEQ ID NO: 189287 - RNA, 32 nt, Homo Sapiens
caugcccacaccuacgcccuccccuccccggc

SEQ ID NO: 189288 - RNA, 27 nt, Homo Sapiens
cuauggaaagauuucgucuggagaaga

SEQ ID NO: 189289 - RNA, 32 nt, Homo Sapiens
gacucugaggaaauaaaaguuguuuggaaaaa

SEQ ID NO: 189290 - RNA, 32 nt, Homo Sapiens
cagagccaguguucccuccaugggaccuaaag

SEQ ID NO: 189291 - RNA, 32 nt, Homo Sapiens
cccagggggaggagggaucuuuuuugcauuuu

SEQ ID NO: 189292 - RNA, 32 nt, Homo Sapiens
cccuucucuccuccccaaaucaauacacuagu

SEQ ID NO: 189293 - RNA, 32 nt, Homo Sapiens
uugggaacuucagauggaccuaguacccacug

SEQ ID NO: 189294 - RNA, 32 nt, Homo Sapiens
ccgcucugugccaagggcucuggggcccuggg

SEQ ID NO: 189295 - RNA, 32 nt, Homo Sapiens
cgccugggccccaggcuucuccauggccacau

SEQ ID NO: 189296 - RNA, 32 nt, Homo Sapiens
cuuucccauuguucuguugcuccaccuuauug

SEQ ID NO: 189297 - RNA, 32 nt, Homo Sapiens
ggcgaucccgccgcgcagcauccguggggacc

SEQ ID NO: 189298 - RNA, 32 nt, Homo Sapiens
ucucuuaacacggaugcucaaguaaaacuaga

SEQ ID NO: 189299 - RNA, 32 nt, Homo Sapiens
cauguuuuaaccucuuuuuuuuuucuaauuau

SEQ ID NO: 189300 - RNA, 32 nt, Homo Sapiens
ugugaggguccagagagaagggaguggguggg

SEQ ID NO: 189301 - RNA, 32 nt, Homo Sapiens
ugaaucugccgcaggcccgcgggccgcccggg

SEQ ID NO: 189302 - RNA, 32 nt, Homo Sapiens
ugcccagacuuucucugaaacuccgccggagu

SEQ ID NO: 189303 - RNA, 32 nt, Homo Sapiens
aaaagaaauggcaacugugguccauuuuuggu

SEQ ID NO: 189304 - RNA, 32 nt, Homo Sapiens
ugcucuuuuuuuuuucucacuccacaaacucu

SEQ ID NO: 189305 - RNA, 32 nt, Homo Sapiens
auuuaaauauuuauguguuuuuccuguuaggu

SEQ ID NO: 189306 - RNA, 32 nt, Homo Sapiens
gugcuuagcauguguggaauguuuuccauauu

SEQ ID NO: 189307 - RNA, 31 nt, Homo Sapiens
ccaaggagcugagaagaacgaagaagcuuuc

SEQ ID NO: 189308 - RNA, 32 nt, Homo Sapiens
aggcagaaauauaaacacauuaaaagacaaau

SEQ ID NO: 189309 - RNA, 32 nt, Homo Sapiens
cucuugugauacuaguuugagccaagggcagc

SEQ ID NO: 189310 - RNA, 32 nt, Homo Sapiens
cuaaaauuguggauuauaucaugugaaaguuc

SEQ ID NO: 189311 - RNA, 32 nt, Homo Sapiens
acagggcaugccuugucuccagugguucccca

SEQ ID NO: 189312 - RNA, 32 nt, Homo Sapiens
cuguugcucgggagccucuuguaaccuucuug

SEQ ID NO: 189313 - RNA, 32 nt, Homo Sapiens
uggaacaucucaccuuuuuaaauccuaaaaaa

SEQ ID NO: 189314 - RNA, 32 nt, Homo Sapiens
cuguuaauucuuauauuuuucuuuacuaauca

SEQ ID NO: 189315 - RNA, 32 nt, Homo Sapiens
ucccaugaagcugaaccguuacucucugccaa

SEQ ID NO: 189316 - RNA, 32 nt, Homo Sapiens
agcuacggccggaagauggcggcggccgcaga

SEQ ID NO: 189317 - RNA, 32 nt, Homo Sapiens
ggcaagguugacucccaaugggauggcagacu

SEQ ID NO: 189318 - RNA, 32 nt, Homo Sapiens
gagaaguugaagagcuuuugccuauugaaggu

SEQ ID NO: 189319 - RNA, 32 nt, Homo Sapiens
gcugcugggcaguucugcucuguggaggggcg

SEQ ID NO: 189320 - RNA, 32 nt, Homo Sapiens
acuuccccagggugcccggcccgcacaugguc

SEQ ID NO: 189321 - RNA, 32 nt, Homo Sapiens
uccaggauagugcuccucccccagcuccaggg

SEQ ID NO: 189322 - RNA, 32 nt, Homo Sapiens
uguuuauaaaguaggaaguuaagugaaucaua

SEQ ID NO: 189323 - RNA, 32 nt, Homo Sapiens
aauguaagaauauuuuuuaaauaggcuuacug

SEQ ID NO: 189324 - RNA, 32 nt, Homo Sapiens
cugugccuaaaaguggagagccaggggagugu

SEQ ID NO: 189325 - RNA, 30 nt, Homo Sapiens
ccucucuggccugugccgccucagcagccc

SEQ ID NO: 189326 - RNA, 32 nt, Homo Sapiens
caagcagauuggaaacaaauacuacuaccacu

SEQ ID NO: 189327 - RNA, 32 nt, Homo Sapiens
cugucuuuccugcgugcucucccuuugaccug

SEQ ID NO: 189328 - RNA, 32 nt, Homo Sapiens
gugacagguuggaaaagaugguuuggauuauu

SEQ ID NO: 189329 - RNA, 32 nt, Homo Sapiens
aguuauaugaucucaaguauaauacccuuugg

SEQ ID NO: 189330 - RNA, 32 nt, Homo Sapiens
ggcugcuccagaacucagcaguguuggagggg

SEQ ID NO: 189331 - RNA, 32 nt, Homo Sapiens
ccucugaguggccaacugcagcucccagggac

SEQ ID NO: 189332 - RNA, 32 nt, Homo Sapiens
ccgccgccacgaccgacuccggagccacgcgc

SEQ ID NO: 189333 - RNA, 32 nt, Homo Sapiens
ugucgucccaggcuagcagagauggauagcuu

SEQ ID NO: 189334 - RNA, 32 nt, Homo Sapiens
gcguguguuuuaaauauguucuacuuugauca

SEQ ID NO: 189335 - RNA, 32 nt, Homo Sapiens
aacacaaucaccuuuacuuuguacucugugug

SEQ ID NO: 189336 - RNA, 32 nt, Homo Sapiens
cuucguuccuucccagccugcgccggagccac

SEQ ID NO: 189337 - RNA, 32 nt, Homo Sapiens
cacggaaauucaagaaacuuuacuucaaaaua

SEQ ID NO: 189338 - RNA, 32 nt, Homo Sapiens
aggaguugagagagugcaggcuggggucagga

SEQ ID NO: 189339 - RNA, 32 nt, Homo Sapiens
auuucuugcuauuuguuuuucuacauuaagag

SEQ ID NO: 189340 - RNA, 32 nt, Homo Sapiens
ugagaaaaaguaaaaauuagaacacuguaugu

SEQ ID NO: 189341 - RNA, 32 nt, Homo Sapiens
gguguugguguuggggcagcccucagggucuc

SEQ ID NO: 189342 - RNA, 32 nt, Homo Sapiens
cccucccgccccaggucguccucucagcaugg

SEQ ID NO: 189343 - RNA, 32 nt, Homo Sapiens
cuccugucucucaggacucuccgagggucaag

SEQ ID NO: 189344 - RNA, 32 nt, Homo Sapiens
cuccuaaugcuaucccuccccccuucccccac

SEQ ID NO: 189345 - RNA, 32 nt, Homo Sapiens
ucacacucgccuuuuggcgcgugguggguuuu

SEQ ID NO: 189346 - RNA, 32 nt, Homo Sapiens
cuugaucguguguuucauuuucugccucuuug

SEQ ID NO: 189347 - RNA, 32 nt, Homo Sapiens
ccccccaggaggaggaggaggacgagggccua

SEQ ID NO: 189348 - RNA, 31 nt, Homo Sapiens
auauuucauuugacuguugaucaaucauuca

SEQ ID NO: 189349 - RNA, 32 nt, Homo Sapiens
cucuccguuauuuuaggaggucccuggccaaa

SEQ ID NO: 189350 - RNA, 32 nt, Homo Sapiens
uaaaguugugugauuauauauuugacauuuua

SEQ ID NO: 189351 - RNA, 32 nt, Homo Sapiens
uccuggugguggcuggcuguagccuagugcac

SEQ ID NO: 189352 - RNA, 32 nt, Homo Sapiens
aggauggagaggcacugggcugucccaaagca

SEQ ID NO: 189353 - RNA, 32 nt, Homo Sapiens
cacuaaacaacccuagcagagacuucaguauc

SEQ ID NO: 189354 - RNA, 32 nt, Homo Sapiens
uguuugagagaguuuuguucaacaucacagug

SEQ ID NO: 189355 - RNA, 32 nt, Homo Sapiens
gguugaaaaugaaaauuccuugaacuuugagu

SEQ ID NO: 189356 - RNA, 32 nt, Homo Sapiens
uaaacaaggacuugacaaagcugaagaguuau

SEQ ID NO: 189357 - RNA, 32 nt, Homo Sapiens
agcgcagcagccauggcaagccgucuccugcu

SEQ ID NO: 189358 - RNA, 32 nt, Homo Sapiens
aaaaaugcugucagcucuuucccuaccuucaa

SEQ ID NO: 189359 - RNA, 32 nt, Homo Sapiens
cagcccccaagccuggaucaaaucccagcucu

SEQ ID NO: 189360 - RNA, 32 nt, Homo Sapiens
cagcaaaaucuuacuaaagauaccuuacagug

SEQ ID NO: 189361 - RNA, 32 nt, Homo Sapiens
aauuagcccgguguggugguaugcgccugugc

SEQ ID NO: 189362 - RNA, 32 nt, Homo Sapiens
ugcugcuggcuguggcuagagcccccuggggc

SEQ ID NO: 189363 - RNA, 32 nt, Homo Sapiens
agguguucugaggaauauauuuuugugcauua

SEQ ID NO: 189364 - RNA, 32 nt, Homo Sapiens
agaggaagaagacagccaaaagagagaaguau

SEQ ID NO: 189365 - RNA, 32 nt, Homo Sapiens
guacucgugcccauauacaaucucuuaguggc

SEQ ID NO: 189366 - RNA, 29 nt, Homo Sapiens
ccggugauagugauuaugaaguaauuuca

SEQ ID NO: 189367 - RNA, 32 nt, Homo Sapiens
gagauacugccugguguuuugcuuuuuuaucu

SEQ ID NO: 189368 - RNA, 32 nt, Homo Sapiens
gcuucuuuguacuuuuucuacuuuuccuacuu

SEQ ID NO: 189369 - RNA, 32 nt, Homo Sapiens
guucguccgagccaugaucgauucuggugcuu

SEQ ID NO: 189370 - RNA, 32 nt, Homo Sapiens
gaggggcgcugggcucggaccugccaaggcca

SEQ ID NO: 189371 - RNA, 32 nt, Homo Sapiens
cuggccccuccccaggcucccuggacacugcg

SEQ ID NO: 189372 - RNA, 32 nt, Homo Sapiens
cugauauggcaaaaauuaaauaaauucuuuuu

SEQ ID NO: 189373 - RNA, 32 nt, Homo Sapiens
aaggacagauauauuucuuuaggcauucuugg

SEQ ID NO: 189374 - RNA, 32 nt, Homo Sapiens
cucacucgcacaaguggaccgggguguugggu

SEQ ID NO: 189375 - RNA, 32 nt, Homo Sapiens
cggacccgccuggcguccucgccugcggcggg

SEQ ID NO: 189376 - RNA, 32 nt, Homo Sapiens
aacguccgggccgcaucucggcggcggcgagg

SEQ ID NO: 189377 - RNA, 28 nt, Homo Sapiens
gcccgagggcggccgcagaacggucaau

SEQ ID NO: 189378 - RNA, 32 nt, Homo Sapiens
ucuucccucucuccagaucaggugucucuagc

SEQ ID NO: 189379 - RNA, 32 nt, Homo Sapiens
aaaauuauauuuugaacaacucgaaucacuca

SEQ ID NO: 189380 - RNA, 32 nt, Homo Sapiens
aguaccuuuccacugaaaauaugagcaugccc

SEQ ID NO: 189381 - RNA, 32 nt, Homo Sapiens
guagauuaauugauuugcuaucuuuuaguuuu

SEQ ID NO: 189382 - RNA, 32 nt, Homo Sapiens
gguguugagaccagcuuuguccaugguaugau

SEQ ID NO: 189383 - RNA, 32 nt, Homo Sapiens
uaaaaucacuggaaguuuuucaugauaacuua

SEQ ID NO: 189384 - RNA, 32 nt, Homo Sapiens
cugagaggggagagagacuggagcuggcaagg

SEQ ID NO: 189385 - RNA, 32 nt, Homo Sapiens
gagggucccgaaccccggggcggcaggaaggg

SEQ ID NO: 189386 - RNA, 32 nt, Homo Sapiens
caauucaggcaggaagcagaaggaagggcaau

SEQ ID NO: 189387 - RNA, 32 nt, Homo Sapiens
aucucaaguacauuggccuuugcugggagcug

SEQ ID NO: 189388 - RNA, 32 nt, Homo Sapiens
cuccacugccagccggccccccugccucgguu

SEQ ID NO: 189389 - RNA, 32 nt, Homo Sapiens
gcuauaccuucuuuuccaaaccaaugggcuag

SEQ ID NO: 189390 - RNA, 32 nt, Homo Sapiens
cuuucucuauagaaccacuaacauauggcuau

SEQ ID NO: 189391 - RNA, 32 nt, Homo Sapiens
ugugucugucuccugcccacaucucccuuccu

SEQ ID NO: 189392 - RNA, 32 nt, Homo Sapiens
gaguuuugucacucuaaaauuaaacaagaaaa

SEQ ID NO: 189393 - RNA, 32 nt, Homo Sapiens
acuagagccuucugccuaucccagggauccuc

SEQ ID NO: 189394 - RNA, 32 nt, Homo Sapiens
cuccuucucccucugucaacuccaaauccccu

SEQ ID NO: 189395 - RNA, 32 nt, Homo Sapiens
gggugcccgagcuugggacaagggagaggucu

SEQ ID NO: 189396 - RNA, 32 nt, Homo Sapiens
ugguugugcagguguaauuuuuucccuuuuug

SEQ ID NO: 189397 - RNA, 32 nt, Homo Sapiens
uuuaaaauaauuucuuuuucuuuuguuuaugc

SEQ ID NO: 189398 - RNA, 32 nt, Homo Sapiens
ccaggccgccgggggccugcugcgcccggaug

SEQ ID NO: 189399 - RNA, 32 nt, Homo Sapiens
uauauuuugugauuuugccaucauacugguua

SEQ ID NO: 189400 - RNA, 32 nt, Homo Sapiens
uaagagaugcccucuguuucauuagcucuagu

SEQ ID NO: 189401 - RNA, 32 nt, Homo Sapiens
ccaggacuggacauggggggagcacugcgaac

SEQ ID NO: 189402 - RNA, 32 nt, Homo Sapiens
ccagcccaggccugguggagggggaggggaga

SEQ ID NO: 189403 - RNA, 32 nt, Homo Sapiens
gcuguucuguagccgggaugacagcucucgcc

SEQ ID NO: 189404 - RNA, 32 nt, Homo Sapiens
acccugugcccguguucccaauaaaaacaaau

SEQ ID NO: 189405 - RNA, 32 nt, Homo Sapiens
auuuuuuaguucuuaaauuuuaugcuuguauu

SEQ ID NO: 189406 - RNA, 32 nt, Homo Sapiens
gugaugcuuugaugaacagcuuuguagguuca

SEQ ID NO: 189407 - RNA, 32 nt, Homo Sapiens
agcuuugagauacuaagcaagcgagggacuuc

SEQ ID NO: 189408 - RNA, 32 nt, Homo Sapiens
ccucccucaggagauggugagaugguuaugau

SEQ ID NO: 189409 - RNA, 32 nt, Homo Sapiens
ugaauuaaauuaaaaauguugcagcucauaaa

SEQ ID NO: 189410 - RNA, 32 nt, Homo Sapiens
agacaaaguuuaucuuggccuuacuguauaaa

SEQ ID NO: 189411 - RNA, 32 nt, Homo Sapiens
gcuaucugcuaagacaaaaaauguuaccucag

SEQ ID NO: 189412 - RNA, 32 nt, Homo Sapiens
gcaaaagcauaaaucuuagaaaaccuaugaaa

SEQ ID NO: 189413 - RNA, 32 nt, Homo Sapiens
uuaaagcuggcugcgcccccagccccacucuu

SEQ ID NO: 189414 - RNA, 32 nt, Homo Sapiens
acuguacucugcagccugccuuccuagaguug

SEQ ID NO: 189415 - RNA, 32 nt, Homo Sapiens
aggagucuggggcacaacuggauguugugggc

SEQ ID NO: 189416 - RNA, 32 nt, Homo Sapiens
gugccucacuggguccugcuuaccucauuucu

SEQ ID NO: 189417 - RNA, 32 nt, Homo Sapiens
agacguccacuggccugaguugggucuggggc

SEQ ID NO: 189418 - RNA, 32 nt, Homo Sapiens
gacucugccggggacccuggcagccccccugu

SEQ ID NO: 189419 - RNA, 32 nt, Homo Sapiens
agcauugugucugagguuaagaugaacaaacg

SEQ ID NO: 189420 - RNA, 32 nt, Homo Sapiens
gacaccguggcgucucaugugaacuuuccugg

SEQ ID NO: 189421 - RNA, 32 nt, Homo Sapiens
gucagcaccugugauucuuuuacuuauuuuuu

SEQ ID NO: 189422 - RNA, 32 nt, Homo Sapiens
caucuuuuauuuauuucauuauguuggccaac

SEQ ID NO: 189423 - RNA, 32 nt, Homo Sapiens
ccugagcauuacaguucuuagcacugaacucg

SEQ ID NO: 189424 - RNA, 32 nt, Homo Sapiens
ccacacuuugcugaaagagaugcugggacaua

SEQ ID NO: 189425 - RNA, 32 nt, Homo Sapiens
ccugccuaggucugcugauuccuguccuggug

SEQ ID NO: 189426 - RNA, 32 nt, Homo Sapiens
agccuucacagcacaccauccuuagcacucug

SEQ ID NO: 189427 - RNA, 32 nt, Homo Sapiens
gaauugccugccauggcugugacacagacgga

SEQ ID NO: 189428 - RNA, 32 nt, Homo Sapiens
gacucuuugccuguuuggauagguaauagaag

SEQ ID NO: 189429 - RNA, 32 nt, Homo Sapiens
ccucagguccuucuccagcucuccuucuggcu

SEQ ID NO: 189430 - RNA, 32 nt, Homo Sapiens
agcgcccucacagggcuuggacacuucacagc

SEQ ID NO: 189431 - RNA, 32 nt, Homo Sapiens
gcagugaugauuaaauugcugcaguccauaau

SEQ ID NO: 189432 - RNA, 32 nt, Homo Sapiens
agucccgagcgaagguacggaauagauggagc

SEQ ID NO: 189433 - RNA, 32 nt, Homo Sapiens
gggcgacaagcugccggagcugcaaugggccg

SEQ ID NO: 189434 - RNA, 32 nt, Homo Sapiens
aaaccuugcugccuauggaggaagacuguguu

SEQ ID NO: 189435 - RNA, 32 nt, Homo Sapiens
aucagcagaggguaaacuaacuugaauuacac

SEQ ID NO: 189436 - RNA, 32 nt, Homo Sapiens
ccaccucagccucccaaagagcugggauuaca

SEQ ID NO: 189437 - RNA, 32 nt, Homo Sapiens
gcgcugggagaggaugggcagcucccacugcc

SEQ ID NO: 189438 - RNA, 32 nt, Homo Sapiens
cccugaaaacauccuucucagugaaacaagcc

SEQ ID NO: 189439 - RNA, 32 nt, Homo Sapiens
cccuaaaaaaauuuacaccaggugcugugaug

SEQ ID NO: 189440 - RNA, 32 nt, Homo Sapiens
uaucucuuguaaauguguaaacacggauuugc

SEQ ID NO: 189441 - RNA, 32 nt, Homo Sapiens
cgcuugcccugaguuuagaagagcagccgcug

SEQ ID NO: 189442 - RNA, 32 nt, Homo Sapiens
ccuggaaaguuggacauguguguggcucaaca

SEQ ID NO: 189443 - RNA, 32 nt, Homo Sapiens
uguaaaaugauuuuuucugguuuuaaagagau

SEQ ID NO: 189444 - RNA, 32 nt, Homo Sapiens
cccacuuucaugcaucucugggaaaugauagg

SEQ ID NO: 189445 - RNA, 32 nt, Homo Sapiens
agcggcuccucgccgcgucucugcccccacuc

SEQ ID NO: 189446 - RNA, 32 nt, Homo Sapiens
ugagagaaagacuggaagaccugaaagccacu

SEQ ID NO: 189447 - RNA, 32 nt, Homo Sapiens
ugcaucaguugaggucuagggauugagaccag

SEQ ID NO: 189448 - RNA, 32 nt, Homo Sapiens
aguaugauaaaauuauuuugguugcuuuaaag

SEQ ID NO: 189449 - RNA, 32 nt, Homo Sapiens
gaagugcaaaauaaacagaacaauaugguggg

SEQ ID NO: 189450 - RNA, 32 nt, Homo Sapiens
uuauggggaaaggguugacuauugauguauua

SEQ ID NO: 189451 - RNA, 32 nt, Homo Sapiens
gggccaccgcagcuccgccaacuccguugugg

SEQ ID NO: 189452 - RNA, 32 nt, Homo Sapiens
ccugguggccccagcacacacuugggauuaug

SEQ ID NO: 189453 - RNA, 31 nt, Homo Sapiens
ggucacacgcgcagccagccggccgccuccc

SEQ ID NO: 189454 - RNA, 32 nt, Homo Sapiens
acgggaguggaggccauggggguggaggccac

SEQ ID NO: 189455 - RNA, 32 nt, Homo Sapiens
cccgaaguuuugcgguacgaugagaagcucca

SEQ ID NO: 189456 - RNA, 32 nt, Homo Sapiens
caagggucaguggguggcagggggcuggcaau

SEQ ID NO: 189457 - RNA, 32 nt, Homo Sapiens
auaauuuugaguuuuaaaguccauggagguga

SEQ ID NO: 189458 - RNA, 32 nt, Homo Sapiens
gucucaagcuuugaaaagagccagaugccaaa

SEQ ID NO: 189459 - RNA, 32 nt, Homo Sapiens
acgggcgugcgcgcuugugcggagccggaggu

SEQ ID NO: 189460 - RNA, 32 nt, Homo Sapiens
auuuuacaaaacugaggcuuagugagguucag

SEQ ID NO: 189461 - RNA, 32 nt, Homo Sapiens
ggaaggacuugcugggaggcugagagaggcuu

SEQ ID NO: 189462 - RNA, 32 nt, Homo Sapiens
caggucggggggcacaugagcgugaugaagua

SEQ ID NO: 189463 - RNA, 32 nt, Homo Sapiens
uccaaauaauucuuuuguuucuaaucaaauuc

SEQ ID NO: 189464 - RNA, 32 nt, Homo Sapiens
accgccgcccccgagggacgagugacagcggc

SEQ ID NO: 189465 - RNA, 32 nt, Homo Sapiens
gaauaacauuuuuuccuucuucaggguggcug

SEQ ID NO: 189466 - RNA, 32 nt, Homo Sapiens
gcacaggccgguucgccgucugcgucuccccc

SEQ ID NO: 189467 - RNA, 32 nt, Homo Sapiens
ugaccggccgcgucuggcauggucagagaaag

SEQ ID NO: 189468 - RNA, 32 nt, Homo Sapiens
acgaugggaaagggccuauuuaacuccuaaua

SEQ ID NO: 189469 - RNA, 32 nt, Homo Sapiens
gccucccugugacgcucuggccuucucugcac

SEQ ID NO: 189470 - RNA, 32 nt, Homo Sapiens
cacaccggagccuccgaggcgaggggcaagug

SEQ ID NO: 189471 - RNA, 32 nt, Homo Sapiens
gagguccuggcaggcucuggccccuguugaga

SEQ ID NO: 189472 - RNA, 32 nt, Homo Sapiens
ucugaaccaaaggcucucaaguucaucuuucu

SEQ ID NO: 189473 - RNA, 32 nt, Homo Sapiens
cugaaucagguggagaaaguaaucuccuugca

SEQ ID NO: 189474 - RNA, 32 nt, Homo Sapiens
aaccaccuggaggugacuguggccauggcucu

SEQ ID NO: 189475 - RNA, 32 nt, Homo Sapiens
aaaccauccaaauaaugauaaagucuauucau

SEQ ID NO: 189476 - RNA, 32 nt, Homo Sapiens
gcuugcaccacccaccugggaggccgaggagg

SEQ ID NO: 189477 - RNA, 32 nt, Homo Sapiens
augaaguucaacaaaaugaugcagguaaagca

SEQ ID NO: 189478 - RNA, 32 nt, Homo Sapiens
agcuucuugagaccgaggaccgaaaucccggc

SEQ ID NO: 189479 - RNA, 32 nt, Homo Sapiens
uucuuagcuaucauugcuuccuccuccccaac

SEQ ID NO: 189480 - RNA, 32 nt, Homo Sapiens
acaauugaaaugacuaaaaaacaaagaagaca

SEQ ID NO: 189481 - RNA, 32 nt, Homo Sapiens
acacaggcccguccucggaagagccuugagag

SEQ ID NO: 189482 - RNA, 32 nt, Homo Sapiens
gagcucggcggacgagagccugcagguuuccu

SEQ ID NO: 189483 - RNA, 32 nt, Homo Sapiens
cucugacaggggaugccugggcuuaauccugg

SEQ ID NO: 189484 - RNA, 32 nt, Homo Sapiens
agcgcgagagggcagugccauguuccucucca

SEQ ID NO: 189485 - RNA, 32 nt, Homo Sapiens
acuuccuucugggccccgggcuccucccacaa

SEQ ID NO: 189486 - RNA, 32 nt, Homo Sapiens
acacccgggcccggcuaagcgccgccgccgcu

SEQ ID NO: 189487 - RNA, 32 nt, Homo Sapiens
guuuauggagaauggguuccuguggagaaaaa

SEQ ID NO: 189488 - RNA, 32 nt, Homo Sapiens
uaaguuuaauaaauaacuuuuuuguugacuuu

SEQ ID NO: 189489 - RNA, 32 nt, Homo Sapiens
cugucugcccuucucccuccugcuucugaggu

SEQ ID NO: 189490 - RNA, 32 nt, Homo Sapiens
gcuggucugggguuggccagggcccuaguggc

SEQ ID NO: 189491 - RNA, 32 nt, Homo Sapiens
ggccgauuaucugcaccuggacguaauggacg

SEQ ID NO: 189492 - RNA, 32 nt, Homo Sapiens
cagaaaggccucgggcccaucagcacagcccc

SEQ ID NO: 189493 - RNA, 32 nt, Homo Sapiens
cugaggaugggccugcccugucugggguaugc

SEQ ID NO: 189494 - RNA, 32 nt, Homo Sapiens
gauuuuauuaggaaacaaagcuuagcaggaga

SEQ ID NO: 189495 - RNA, 32 nt, Homo Sapiens
gcacugggagacgugcgguuccgggucgcugc

SEQ ID NO: 189496 - RNA, 32 nt, Homo Sapiens
aaagggucuucuuggcagcuuaacauugacuu

SEQ ID NO: 189497 - RNA, 32 nt, Homo Sapiens
cagcauggccuggccagaggcacccugggagg

SEQ ID NO: 189498 - RNA, 32 nt, Homo Sapiens
gcggaggccgcgaagcagcugcagccgccgcc

SEQ ID NO: 189499 - RNA, 32 nt, Homo Sapiens
aagcccacaccacugcccugcuccaucuccca

SEQ ID NO: 189500 - RNA, 32 nt, Homo Sapiens
ggcgccgguuccuccccaccacguccugcgcu

SEQ ID NO: 189501 - RNA, 32 nt, Homo Sapiens
gaacaguuaccuuuagcugaccccuuuccuca

SEQ ID NO: 189502 - RNA, 32 nt, Homo Sapiens
agcugagcugcugacaaguccacacauauucu

SEQ ID NO: 189503 - RNA, 32 nt, Homo Sapiens
gccuuuuggagguccugcuggaugcuaagcac

SEQ ID NO: 189504 - RNA, 27 nt, Homo Sapiens
ugaauuuccuucuucacacaccccaca

SEQ ID NO: 189505 - RNA, 32 nt, Homo Sapiens
ggaggcccuaaaaugaagaagcuucggccuga

SEQ ID NO: 189506 - RNA, 32 nt, Homo Sapiens
auacucauuuuucaugauaaugaacagaacau

SEQ ID NO: 189507 - RNA, 32 nt, Homo Sapiens
caggccgcagggcgcggagagauccugggauc

SEQ ID NO: 189508 - RNA, 32 nt, Homo Sapiens
uuagagccaaaauggauuugaggaugaguauu

SEQ ID NO: 189509 - RNA, 32 nt, Homo Sapiens
uauuuuggacuucuagcaagggcauucagugu

SEQ ID NO: 189510 - RNA, 32 nt, Homo Sapiens
caggaggguggcgaggccccucccucacuggc

SEQ ID NO: 189511 - RNA, 32 nt, Homo Sapiens
uggcucuugugcuuuuauguugggacagcugc

SEQ ID NO: 189512 - RNA, 32 nt, Homo Sapiens
ccccgcgccgcgccgcgccaugucggugaaca

SEQ ID NO: 189513 - RNA, 32 nt, Homo Sapiens
gagcucagagcggggggcgcggagagcgaagc

SEQ ID NO: 189514 - RNA, 32 nt, Homo Sapiens
agcggcugccccaccauggcuaccugggcccu

SEQ ID NO: 189515 - RNA, 32 nt, Homo Sapiens
ugcagaccuuugcggugaguguuacagcucau

SEQ ID NO: 189516 - RNA, 32 nt, Homo Sapiens
agacuucagaagugcaaagaugcugaaacaga

SEQ ID NO: 189517 - RNA, 32 nt, Homo Sapiens
cggccggcggggcauuuaaaccccgcugacag

SEQ ID NO: 189518 - RNA, 32 nt, Homo Sapiens
acagacauggggagggugaacaguccccacag

SEQ ID NO: 189519 - RNA, 32 nt, Homo Sapiens
gccugugugggggacagggagggcccugcaug

SEQ ID NO: 189520 - RNA, 32 nt, Homo Sapiens
ggggcuacuguuuaugagacacauccaggagu

SEQ ID NO: 189521 - RNA, 32 nt, Homo Sapiens
uuccgcuuucgucucgcccuggcgguucuuag

SEQ ID NO: 189522 - RNA, 32 nt, Homo Sapiens
ucggugggucugacagcgggucugcguaggcg

SEQ ID NO: 189523 - RNA, 32 nt, Homo Sapiens
gagagaagaugaugugaaggcacaggaaggau

SEQ ID NO: 189524 - RNA, 32 nt, Homo Sapiens
aaaaaaaaauccuaaaaacaaacaaacaaaaa

SEQ ID NO: 189525 - RNA, 32 nt, Homo Sapiens
aauucuugagacaaaaggugguuaaguagcau

SEQ ID NO: 189526 - RNA, 32 nt, Homo Sapiens
uguuuucggucggcccggguguucugcaagcu

SEQ ID NO: 189527 - RNA, 32 nt, Homo Sapiens
gcugcuaaacacacugcaggagggacucugaa

SEQ ID NO: 189528 - RNA, 30 nt, Homo Sapiens
ggccgaggcaggcggaucccgaggucagga

SEQ ID NO: 189529 - RNA, 28 nt, Homo Sapiens
gguuguggaccugucaggaugacagauu

SEQ ID NO: 189530 - RNA, 32 nt, Homo Sapiens
caaggagaguucuggaggguucaaaggaugaa

SEQ ID NO: 189531 - RNA, 32 nt, Homo Sapiens
auuguccacuucaccuuuuuuauuauaucagu

SEQ ID NO: 189532 - RNA, 32 nt, Homo Sapiens
gggaggaggaggaguggugcugcgaggggaag

SEQ ID NO: 189533 - RNA, 32 nt, Homo Sapiens
aguccauauugcaauuaugauuuuagaaggaa

SEQ ID NO: 189534 - RNA, 32 nt, Homo Sapiens
ucuaacuuucuuuacuccaucauggcugguug

SEQ ID NO: 189535 - RNA, 32 nt, Homo Sapiens
auugcaugagagauuacaaggaacaauccaau

SEQ ID NO: 189536 - RNA, 32 nt, Homo Sapiens
cacuuauuugaaaacaaagaugaagucucacc

SEQ ID NO: 189537 - RNA, 31 nt, Homo Sapiens
agacagcucugcagccaacuggugcuuuggc

SEQ ID NO: 189538 - RNA, 32 nt, Homo Sapiens
caugcuugcuacuuccaaaauacguuugugaa

SEQ ID NO: 189539 - RNA, 32 nt, Homo Sapiens
cauggcggaugcugaggccacagcuggugaac

SEQ ID NO: 189540 - RNA, 32 nt, Homo Sapiens
gaucagucgaggagaucaacugcaugguuacc

SEQ ID NO: 189541 - RNA, 32 nt, Homo Sapiens
cgggcagccccucuccguccucagggcugugc

SEQ ID NO: 189542 - RNA, 32 nt, Homo Sapiens
ggguuauuucuacaauuauucuuagacgauua

SEQ ID NO: 189543 - RNA, 32 nt, Homo Sapiens
ucugaagagaugcuacugccuggagacugggg

SEQ ID NO: 189544 - RNA, 32 nt, Homo Sapiens
acugagacaaauaacaucacacaauuguagga

SEQ ID NO: 189545 - RNA, 32 nt, Homo Sapiens
gucucgccgccugagcccggaccucuccuggg

SEQ ID NO: 189546 - RNA, 32 nt, Homo Sapiens
aggcaaaagcuacugaauuuagugaauuugug

SEQ ID NO: 189547 - RNA, 32 nt, Homo Sapiens
cccagccauuuaggaaguauuauaaaggcccu

SEQ ID NO: 189548 - RNA, 32 nt, Homo Sapiens
gucugguccuccugcguguccuccccuccacu

SEQ ID NO: 189549 - RNA, 32 nt, Homo Sapiens
cugaccagguaguccagguguucccuguguuu

SEQ ID NO: 189550 - RNA, 32 nt, Homo Sapiens
acugcggccccgguccguagcacuccgcccuc

SEQ ID NO: 189551 - RNA, 32 nt, Homo Sapiens
uccaagggcccacugggaaaagauacugucgg

SEQ ID NO: 189552 - RNA, 32 nt, Homo Sapiens
ucuacucucucuuuauccuccucccagauacc

SEQ ID NO: 189553 - RNA, 32 nt, Homo Sapiens
uuccaagaacagaagcggcauguugagaaaau

SEQ ID NO: 189554 - RNA, 32 nt, Homo Sapiens
augcaugugugaagauuauaaaagccaaauag

SEQ ID NO: 189555 - RNA, 32 nt, Homo Sapiens
cuuuuaauauauuggcaguacuuauuauauaa

SEQ ID NO: 189556 - RNA, 32 nt, Homo Sapiens
ccaccgccccgggcugcccagccgggaaguuc

SEQ ID NO: 189557 - RNA, 32 nt, Homo Sapiens
cuaaaccaguccuuagcaaggggcucagaaca

SEQ ID NO: 189558 - RNA, 32 nt, Homo Sapiens
agcccuauuuuuguuuccacauaaagaucagc

SEQ ID NO: 189559 - RNA, 32 nt, Homo Sapiens
uuucauuguugaccacccuagugcuuggugga

SEQ ID NO: 189560 - RNA, 32 nt, Homo Sapiens
ugggguauauuugaauccuagcaagaauaauc

SEQ ID NO: 189561 - RNA, 32 nt, Homo Sapiens
gcuugcagaaaaggaaagggggcuggccuaaa

SEQ ID NO: 189562 - RNA, 32 nt, Homo Sapiens
ucucuucuggaaccacucccaagccuccacca

SEQ ID NO: 189563 - RNA, 32 nt, Homo Sapiens
auauauaaaaauuuacauuuuuagaacauuag

SEQ ID NO: 189564 - RNA, 32 nt, Homo Sapiens
ccaauuugccauccaugagagugggccgucuc

SEQ ID NO: 189565 - RNA, 32 nt, Homo Sapiens
ucaguaaggcuacuaucuagacucgaaugcuu

SEQ ID NO: 189566 - RNA, 32 nt, Homo Sapiens
gccagcugccccaccccugcccaugccugucc

SEQ ID NO: 189567 - RNA, 32 nt, Homo Sapiens
uucacccccacuuugccucaggcauuuucuac

SEQ ID NO: 189568 - RNA, 32 nt, Homo Sapiens
ucagaguuuaauguaaaugaaucuagaugauu

SEQ ID NO: 189569 - RNA, 32 nt, Homo Sapiens
gacauucguagcagcagcugccccccaagcau

SEQ ID NO: 189570 - RNA, 32 nt, Homo Sapiens
aaaaacguugauuugcagauaucgugagaaug

SEQ ID NO: 189571 - RNA, 32 nt, Homo Sapiens
uugacguccuugcaguuaacugugcaaaauug

SEQ ID NO: 189572 - RNA, 32 nt, Homo Sapiens
cacuucuuuucucugaguggugggacaacugc

SEQ ID NO: 189573 - RNA, 32 nt, Homo Sapiens
cuuagcaaccacagagucagugaccucgucug

SEQ ID NO: 189574 - RNA, 32 nt, Homo Sapiens
aaugaagcaaaacaggaauuugguuuucuuuu

SEQ ID NO: 189575 - RNA, 32 nt, Homo Sapiens
cacaugaacccacauuuuauuuuuuauuacca

SEQ ID NO: 189576 - RNA, 32 nt, Homo Sapiens
agccccuccuccccgcgagacucucaggcuga

SEQ ID NO: 189577 - RNA, 32 nt, Homo Sapiens
ccaggccccuccggggacccggccagccugaa

SEQ ID NO: 189578 - RNA, 32 nt, Homo Sapiens
uuuagagucuguuacauuauuuucucaaaagg

SEQ ID NO: 189579 - RNA, 32 nt, Homo Sapiens
auaaaucacuagguacaauccugguaucauug

SEQ ID NO: 189580 - RNA, 32 nt, Homo Sapiens
cgcgugaggccgagggaggggcggcggcgcga

SEQ ID NO: 189581 - RNA, 32 nt, Homo Sapiens
gccgcccggggagcggcugcgcgaggaugcgc

SEQ ID NO: 189582 - RNA, 32 nt, Homo Sapiens
aagcacauuuuacuguaaauguuuggguuucu

SEQ ID NO: 189583 - RNA, 32 nt, Homo Sapiens
uugguugauucauauccucuuuccuuuaugga

SEQ ID NO: 189584 - RNA, 32 nt, Homo Sapiens
ccggguccucucagucuuuccccucccccaac

SEQ ID NO: 189585 - RNA, 32 nt, Homo Sapiens
cccgguuauuuccucagcuguuuccaccaaau

SEQ ID NO: 189586 - RNA, 32 nt, Homo Sapiens
gggucacggccuccuccugguucccaagaccc

SEQ ID NO: 189587 - RNA, 32 nt, Homo Sapiens
cgaagagcaaagcaucucuggaaaugaaacca

SEQ ID NO: 189588 - RNA, 32 nt, Homo Sapiens
guggggaagugauaaacuauuugccuucugga

SEQ ID NO: 189589 - RNA, 32 nt, Homo Sapiens
ucuguuggccagugaaaauacuuuugggcugg

SEQ ID NO: 189590 - RNA, 32 nt, Homo Sapiens
ucugaagaggaagaggagaaagccagagaguc

SEQ ID NO: 189591 - RNA, 32 nt, Homo Sapiens
auuguguuuguuuuuucaguacuuguuuuucu

SEQ ID NO: 189592 - RNA, 32 nt, Homo Sapiens
aauucgggcuucgagaaagggcccggcaggag

SEQ ID NO: 189593 - RNA, 32 nt, Homo Sapiens
cgguuguauaggagcugaaauccaugcugagc

SEQ ID NO: 189594 - RNA, 32 nt, Homo Sapiens
augcggagccgcaggaggccgacuaccugagc

SEQ ID NO: 189595 - RNA, 32 nt, Homo Sapiens
gaccccgcggccccgcuuugcugccgacugga

SEQ ID NO: 189596 - RNA, 32 nt, Homo Sapiens
cugaucaugguaguugauuuauuugcucaggu

SEQ ID NO: 189597 - RNA, 30 nt, Homo Sapiens
gacgcaggcaggcugcgguuacccaagcgg

SEQ ID NO: 189598 - RNA, 29 nt, Homo Sapiens
gaauauuuauucuucagagguaacaugca

SEQ ID NO: 189599 - RNA, 32 nt, Homo Sapiens
aacagcuuucccucaucauaauguagauaaaa

SEQ ID NO: 189600 - RNA, 32 nt, Homo Sapiens
ggaaagccugucuuugguuaggcucguguacu

SEQ ID NO: 189601 - RNA, 32 nt, Homo Sapiens
gccggccgguccccaaacaggaaccccagccc

SEQ ID NO: 189602 - RNA, 32 nt, Homo Sapiens
aucuacuucuauuggaguccauguugcauuuc

SEQ ID NO: 189603 - RNA, 32 nt, Homo Sapiens
gcagagacaccauguccuuaggaggcaguacc

SEQ ID NO: 189604 - RNA, 32 nt, Homo Sapiens
aucuccccacgccccgucucuuucucaccuuu

SEQ ID NO: 189605 - RNA, 32 nt, Homo Sapiens
ggucggcgggcaggggcgggggaugaggcgga

SEQ ID NO: 189606 - RNA, 32 nt, Homo Sapiens
acgcaacugccacaacgguguaggugaagcag

SEQ ID NO: 189607 - RNA, 32 nt, Homo Sapiens
uaccuccucgccugcccuccaagccccagcug

SEQ ID NO: 189608 - RNA, 32 nt, Homo Sapiens
auuauacaccaauuugcuuaucuuacuaguuu

SEQ ID NO: 189609 - RNA, 32 nt, Homo Sapiens
ucaggcagcuggagagaagagaaggcagcagc

SEQ ID NO: 189610 - RNA, 32 nt, Homo Sapiens
cuggcacuucaucccggcaggcgcucagccug

SEQ ID NO: 189611 - RNA, 32 nt, Homo Sapiens
uuaucuaaggcacagccauucuguucucacuu

SEQ ID NO: 189612 - RNA, 32 nt, Homo Sapiens
acugugcaugcccaaagaaaaauacgagcccc

SEQ ID NO: 189613 - RNA, 32 nt, Homo Sapiens
gcuguucgugcagcuggggaggcccagaagca

SEQ ID NO: 189614 - RNA, 32 nt, Homo Sapiens
auauauauauauauuuaucugaaacgugauau

SEQ ID NO: 189615 - RNA, 32 nt, Homo Sapiens
gugaagcggagcagcccgaggcggggcagccu

SEQ ID NO: 189616 - RNA, 32 nt, Homo Sapiens
cuucgccgcccggccucgaguccccgcccgcc

SEQ ID NO: 189617 - RNA, 32 nt, Homo Sapiens
accgcccaccgagccauccugccucgccuccc

SEQ ID NO: 189618 - RNA, 32 nt, Homo Sapiens
ugggaaagugacaugagaaggccuggaggcug

SEQ ID NO: 189619 - RNA, 32 nt, Homo Sapiens
uccucaaaucauaucccucuuauuuuuuauga

SEQ ID NO: 189620 - RNA, 32 nt, Homo Sapiens
ucaagcgcugggccgcccacuccugccucccu

SEQ ID NO: 189621 - RNA, 32 nt, Homo Sapiens
agcagaaccgcacagccagagccccaggucag

SEQ ID NO: 189622 - RNA, 32 nt, Homo Sapiens
ccucccagugauugugauacauacuaaaguuu

SEQ ID NO: 189623 - RNA, 32 nt, Homo Sapiens
ugagcgacgguggauccugcucccuguccacg

SEQ ID NO: 189624 - RNA, 32 nt, Homo Sapiens
ugaucugcucuccucagccucccaaaguacug

SEQ ID NO: 189625 - RNA, 32 nt, Homo Sapiens
uuaagggaguaugggggaccucugccaccucc

SEQ ID NO: 189626 - RNA, 32 nt, Homo Sapiens
gaccugcccccgcaucucgccggcgccaggca

SEQ ID NO: 189627 - RNA, 32 nt, Homo Sapiens
agccagcccucccuguccuuuccagaggcccu

SEQ ID NO: 189628 - RNA, 32 nt, Homo Sapiens
cuguggaauaaagaagcggggagaaggaucag

SEQ ID NO: 189629 - RNA, 30 nt, Homo Sapiens
aagggggacgccgugccgugggccuggggu

SEQ ID NO: 189630 - RNA, 32 nt, Homo Sapiens
gagucgugacugccggccgccgggacccgaag

SEQ ID NO: 189631 - RNA, 32 nt, Homo Sapiens
gcccggagcccggcccugcgcucggcucgacu

SEQ ID NO: 189632 - RNA, 32 nt, Homo Sapiens
ucggcugcccgacgccaggaccccgcuccauc

SEQ ID NO: 189633 - RNA, 28 nt, Homo Sapiens
caaguauguuuuagcauguguuugguuc

SEQ ID NO: 189634 - RNA, 32 nt, Homo Sapiens
ucuucagcaugaacaaauauuaaugucgauaa

SEQ ID NO: 189635 - RNA, 32 nt, Homo Sapiens
cugcucugaggaaaacaaaacaaaacaaaaca

SEQ ID NO: 189636 - RNA, 32 nt, Homo Sapiens
uuaacuccucaauuccaacacugauuuccccu

SEQ ID NO: 189637 - RNA, 32 nt, Homo Sapiens
guccugaacaacaucacugugguuacucaucc

SEQ ID NO: 189638 - RNA, 32 nt, Homo Sapiens
uuuguucaaaagacauaaaugaauuaggcacc

SEQ ID NO: 189639 - RNA, 32 nt, Homo Sapiens
cagccugaucuuccucuucucccuugccagcc

SEQ ID NO: 189640 - RNA, 32 nt, Homo Sapiens
guauuuccuaaaacauaggggaaaaaacgagg

SEQ ID NO: 189641 - RNA, 32 nt, Homo Sapiens
ugcauuuucucuccagagaugcugucugguua

SEQ ID NO: 189642 - RNA, 32 nt, Homo Sapiens
aaaagccuccaugucauuugaccuacgaauuc

SEQ ID NO: 189643 - RNA, 32 nt, Homo Sapiens
uuccuuuuuuaaauuucuuuuuccaagucuug

SEQ ID NO: 189644 - RNA, 32 nt, Homo Sapiens
gggccaggacuccacagcgcuuucucagucac

SEQ ID NO: 189645 - RNA, 32 nt, Homo Sapiens
ucucuucugaucccacggauccugcagagcgu

SEQ ID NO: 189646 - RNA, 32 nt, Homo Sapiens
uguuguuuuucugcacuuccugaccacucuua

SEQ ID NO: 189647 - RNA, 32 nt, Homo Sapiens
gcuuaucuuggguuaaauuugagagugauucu

SEQ ID NO: 189648 - RNA, 32 nt, Homo Sapiens
cgcuucuccggcgccugaggggcccgccucgg

SEQ ID NO: 189649 - RNA, 32 nt, Homo Sapiens
gggugcugcuccaguauuauggcaugauggag

SEQ ID NO: 189650 - RNA, 32 nt, Homo Sapiens
uucucaguucccuccaggcuucuagaagcauc

SEQ ID NO: 189651 - RNA, 32 nt, Homo Sapiens
ugggacccacccauguuuucugggacucaggc

SEQ ID NO: 189652 - RNA, 29 nt, Homo Sapiens
gcggccagcgggcggcggacgccgucaug

SEQ ID NO: 189653 - RNA, 32 nt, Homo Sapiens
gucacguccgcgcgcgcccccggggcuugcgu

SEQ ID NO: 189654 - RNA, 32 nt, Homo Sapiens
ugagucugcauaaacuucaucuucaaccuuaa

SEQ ID NO: 189655 - RNA, 32 nt, Homo Sapiens
ugaccagugacccacacccgcgcggacgccua

SEQ ID NO: 189656 - RNA, 32 nt, Homo Sapiens
ugcagggcugucgguagcuauuaagugaguca

SEQ ID NO: 189657 - RNA, 32 nt, Homo Sapiens
gccugccgggcgggcuccgguggccgcagcaa

SEQ ID NO: 189658 - RNA, 32 nt, Homo Sapiens
cagacucugccagcgcguccugcccgcuuccc

SEQ ID NO: 189659 - RNA, 32 nt, Homo Sapiens
caucugugcagggcugguuuguucugacuuuu

SEQ ID NO: 189660 - RNA, 32 nt, Homo Sapiens
cccgggcugcacgcacuucucccgcggcccag

SEQ ID NO: 189661 - RNA, 32 nt, Homo Sapiens
aacgaagcugaaaucuauucucauucuuguuu

SEQ ID NO: 189662 - RNA, 32 nt, Homo Sapiens
acaaaccaggauauuggaguuacucuauccug

SEQ ID NO: 189663 - RNA, 32 nt, Homo Sapiens
cugagguagaugggcggcggggcgcgcggcgg

SEQ ID NO: 189664 - RNA, 32 nt, Homo Sapiens
gcguucuccagauguuuauugaagauacagau

SEQ ID NO: 189665 - RNA, 32 nt, Homo Sapiens
cuagaaaugauaauuugcuaaaguuuagugcu

SEQ ID NO: 189666 - RNA, 32 nt, Homo Sapiens
gauaaagacuaaaaguguuugaugcuggaggu

SEQ ID NO: 189667 - RNA, 32 nt, Homo Sapiens
gccucccggcgcccagaugcccgccaugcccu

SEQ ID NO: 189668 - RNA, 32 nt, Homo Sapiens
acuaaugagauguauuaaaauaaacaugguau

SEQ ID NO: 189669 - RNA, 31 nt, Homo Sapiens
cugggcuuugagaccaccgugagaacggacc

SEQ ID NO: 189670 - RNA, 32 nt, Homo Sapiens
uaaaggaugcuuucggaaaacacgcuguauac

SEQ ID NO: 189671 - RNA, 32 nt, Homo Sapiens
aauacagaaaggaaacauggcgucggggagag

SEQ ID NO: 189672 - RNA, 32 nt, Homo Sapiens
uggggcagcauggauaaauggaugcugcacag

SEQ ID NO: 189673 - RNA, 32 nt, Homo Sapiens
gggaugcauuaggacuggccuaugcaucgaaa

SEQ ID NO: 189674 - RNA, 32 nt, Homo Sapiens
ugagaacauuuuacaaauaaaaauaugagguu

SEQ ID NO: 189675 - RNA, 32 nt, Homo Sapiens
aacgauucaaggaaacaaaguacagguaguuu

SEQ ID NO: 189676 - RNA, 32 nt, Homo Sapiens
uuuccagugucuaccuggaaugaaacgaaugg

SEQ ID NO: 189677 - RNA, 32 nt, Homo Sapiens
ucggaccgugcagguuuguaggucuguuggcc

SEQ ID NO: 189678 - RNA, 32 nt, Homo Sapiens
ucucugccuuguaucugaaagggcucuaaaau

SEQ ID NO: 189679 - RNA, 32 nt, Homo Sapiens
agaaguguaauuucuuuuuugguuuguuuuuu

SEQ ID NO: 189680 - RNA, 32 nt, Homo Sapiens
gcaccauaguuccagcacuuugcaaauauccc

SEQ ID NO: 189681 - RNA, 32 nt, Homo Sapiens
caaugccgcagguuggacagguccuucugugu

SEQ ID NO: 189682 - RNA, 32 nt, Homo Sapiens
cagcugccgagccucuugggguugucccuccc

SEQ ID NO: 189683 - RNA, 32 nt, Homo Sapiens
caaugcccagcacacucgcucugcuccacaca

SEQ ID NO: 189684 - RNA, 32 nt, Homo Sapiens
gaccccuggcccaagcuccccuugcuggcggg

SEQ ID NO: 189685 - RNA, 32 nt, Homo Sapiens
uuauggagaacauuaggacaaaaagucaccaa

SEQ ID NO: 189686 - RNA, 32 nt, Homo Sapiens
uuuaccuuuugaaauauggcuacauuuaaaac

SEQ ID NO: 189687 - RNA, 32 nt, Homo Sapiens
acuuccccaagccuggcaggggauccagcuca

SEQ ID NO: 189688 - RNA, 32 nt, Homo Sapiens
uggggcccugacgcaccugcugcucucuggga

SEQ ID NO: 189689 - RNA, 32 nt, Homo Sapiens
aguagaugagccuggggugaagucggugaagg

SEQ ID NO: 189690 - RNA, 32 nt, Homo Sapiens
agaaggcuggagcacaguguaaaccauucugg

SEQ ID NO: 189691 - RNA, 32 nt, Homo Sapiens
cuucucguuguaagagaauucacaccggagaa

SEQ ID NO: 189692 - RNA, 32 nt, Homo Sapiens
acccugagcagaaagaggccuucuggauggcc

SEQ ID NO: 189693 - RNA, 32 nt, Homo Sapiens
cgcgggccgcggcugccgagacaagccggugc

SEQ ID NO: 189694 - RNA, 32 nt, Homo Sapiens
ccaaacccagcccccuugagccaggcccugcc

SEQ ID NO: 189695 - RNA, 32 nt, Homo Sapiens
gagguguguugcacuuuguaacugucuagagc

SEQ ID NO: 189696 - RNA, 32 nt, Homo Sapiens
uugagcaugcacagcugcuuguccugcucucu

SEQ ID NO: 189697 - RNA, 32 nt, Homo Sapiens
ccagugguucccuccuuguccaaguccucguu

SEQ ID NO: 189698 - RNA, 32 nt, Homo Sapiens
ggagcccagcucgcgcgcgucuguggggccgc

SEQ ID NO: 189699 - RNA, 32 nt, Homo Sapiens
uggcacccucuucagcgcugcgcuagaaagaa

SEQ ID NO: 189700 - RNA, 32 nt, Homo Sapiens
guguggggacgccucuacuagcagcuuugccc

SEQ ID NO: 189701 - RNA, 32 nt, Homo Sapiens
cauguaagacaugauuuguuccuccuugucuu

SEQ ID NO: 189702 - RNA, 32 nt, Homo Sapiens
auguacaaaugaaugccucauggcucuuagcu

SEQ ID NO: 189703 - RNA, 32 nt, Homo Sapiens
gguacuaauaaauauuuauagaugagugaaug

SEQ ID NO: 189704 - RNA, 32 nt, Homo Sapiens
ccucggaggacgggcuucggcugcgcggaggc

SEQ ID NO: 189705 - RNA, 32 nt, Homo Sapiens
ggcugcggccuggcccugggagggauuucaga

SEQ ID NO: 189706 - RNA, 32 nt, Homo Sapiens
ggccuucaugggagaagggcugaccucugagg

SEQ ID NO: 189707 - RNA, 32 nt, Homo Sapiens
gaguuucccagcgccccucggguccgacccuu

SEQ ID NO: 189708 - RNA, 32 nt, Homo Sapiens
cuucuucaagaauguggaaaucucuaauuuug

SEQ ID NO: 189709 - RNA, 32 nt, Homo Sapiens
ugcaguggugcgaucucagcucccuuuaaccu

SEQ ID NO: 189710 - RNA, 32 nt, Homo Sapiens
acuguuagaaugugguuauauaaaccuuuuaa

SEQ ID NO: 189711 - RNA, 32 nt, Homo Sapiens
ggaaaaagagcgaaacaaaacuugagccagca

SEQ ID NO: 189712 - RNA, 32 nt, Homo Sapiens
caggauauuuuuucuuuuuuuuuuuuuuuuuu

SEQ ID NO: 189713 - RNA, 32 nt, Homo Sapiens
uaucuaaauaauuuauauuuucaaaaaauaau

SEQ ID NO: 189714 - RNA, 32 nt, Homo Sapiens
uccugcucgcgccccgccgccauggcugccuc

SEQ ID NO: 189715 - RNA, 31 nt, Homo Sapiens
ugagugggaaagagagugagagccugugcag

SEQ ID NO: 189716 - RNA, 32 nt, Homo Sapiens
cuccuaauuccacuucaccuuuugccaccccc

SEQ ID NO: 189717 - RNA, 32 nt, Homo Sapiens
ucuggaccaacccccagccagcacagacuucc

SEQ ID NO: 189718 - RNA, 32 nt, Homo Sapiens
aauaaauuugaaauaaaauauuuugaugcucc

SEQ ID NO: 189719 - RNA, 32 nt, Homo Sapiens
auucugugagagagauaugaaauauuuuauag

SEQ ID NO: 189720 - RNA, 32 nt, Homo Sapiens
ccagcuccccgggaccccgguucccggacaag

SEQ ID NO: 189721 - RNA, 32 nt, Homo Sapiens
cucuucuccccgcacaucaucucugagagggu

SEQ ID NO: 189722 - RNA, 32 nt, Homo Sapiens
gcaucauuugaaaauaccaaggaggaaauacc

SEQ ID NO: 189723 - RNA, 32 nt, Homo Sapiens
ccacgccugacucuccaucacccaggccuuga

SEQ ID NO: 189724 - RNA, 28 nt, Homo Sapiens
uggacggggcggcuggccgggcggagag

SEQ ID NO: 189725 - RNA, 32 nt, Homo Sapiens
acucaaguacccauucuguuuucccccagcaa

SEQ ID NO: 189726 - RNA, 32 nt, Homo Sapiens
cucaggaaauuugagugaaggacugcaaaaga

SEQ ID NO: 189727 - RNA, 32 nt, Homo Sapiens
ggauggcuugggcugacacaguuucuucccag

SEQ ID NO: 189728 - RNA, 32 nt, Homo Sapiens
cucuucuaaccaaugaaguguuugucaguaug

SEQ ID NO: 189729 - RNA, 32 nt, Homo Sapiens
guuaguagguguaggagugcugaugagaggca

SEQ ID NO: 189730 - RNA, 32 nt, Homo Sapiens
aggcucugcgcauguucgccguguaggcgugg

SEQ ID NO: 189731 - RNA, 30 nt, Homo Sapiens
cacgagcuggcaggcaugcaaaaaaaaaaa

SEQ ID NO: 189732 - RNA, 32 nt, Homo Sapiens
caagacgcauacgggacgucaucaauguguuu

SEQ ID NO: 189733 - RNA, 32 nt, Homo Sapiens
cuccuucaaggaagcugcagcucggucagcag

SEQ ID NO: 189734 - RNA, 32 nt, Homo Sapiens
cucauaugcccuaccugaaacuugccuguauu

SEQ ID NO: 189735 - RNA, 32 nt, Homo Sapiens
uuuacucagagccacucuccaaugcaggucac

SEQ ID NO: 189736 - RNA, 32 nt, Homo Sapiens
gucugcacgccacagagcuggcuccccacagc

SEQ ID NO: 189737 - RNA, 32 nt, Homo Sapiens
uguuuuguguguuuuucacauguauuauagaa

SEQ ID NO: 189738 - RNA, 32 nt, Homo Sapiens
gguuuuucuucauuuuaauccuuuucaagugg

SEQ ID NO: 189739 - RNA, 32 nt, Homo Sapiens
caccuggcgaggcugaaggcgagggguggagg

SEQ ID NO: 189740 - RNA, 32 nt, Homo Sapiens
cagcaucacggcacucugggacaggcacggag

SEQ ID NO: 189741 - RNA, 32 nt, Homo Sapiens
gauuagaaaaauuucaacuguaggugccuuug

SEQ ID NO: 189742 - RNA, 32 nt, Homo Sapiens
ggcaucccuuuuauacccaugauuuccccaag

SEQ ID NO: 189743 - RNA, 32 nt, Homo Sapiens
guggauagaacuugggagcccggggguuggga

SEQ ID NO: 189744 - RNA, 32 nt, Homo Sapiens
uuuuguuuuguuuuguuuuucuugaugguuuc

SEQ ID NO: 189745 - RNA, 32 nt, Homo Sapiens
uauuuauuccccuccgcguccuacacaggcug

SEQ ID NO: 189746 - RNA, 32 nt, Homo Sapiens
aacaagccuccacuuccccacacuucccauuu

SEQ ID NO: 189747 - RNA, 29 nt, Homo Sapiens
augaacgugguugucagaggcgggggaca

SEQ ID NO: 189748 - RNA, 32 nt, Homo Sapiens
cagagccccugcguuuguguccgguugauaac

SEQ ID NO: 189749 - RNA, 32 nt, Homo Sapiens
ccucagaggacgggggcagagaagugaugaag

SEQ ID NO: 189750 - RNA, 32 nt, Homo Sapiens
agcugaagucauagaggggaaauaucccacuc

SEQ ID NO: 189751 - RNA, 32 nt, Homo Sapiens
ucggggguggccagggcgggggcggggugcau

SEQ ID NO: 189752 - RNA, 27 nt, Homo Sapiens
caccuguccuucuggggucuuacuccu

SEQ ID NO: 189753 - RNA, 32 nt, Homo Sapiens
ccuaccggcugggauuggccuccuggaaguac

SEQ ID NO: 189754 - RNA, 32 nt, Homo Sapiens
uauacaguggggcacagaaaacaaaugaaaac

SEQ ID NO: 189755 - RNA, 32 nt, Homo Sapiens
aaguugccugacauccugucuuaccaaggugg

SEQ ID NO: 189756 - RNA, 32 nt, Homo Sapiens
uuuucgguggcucagcuggguaaccggggauc

SEQ ID NO: 189757 - RNA, 32 nt, Homo Sapiens
ucccgcggccccaaggugccuguuguucacac

SEQ ID NO: 189758 - RNA, 32 nt, Homo Sapiens
uauuccuucuguaguguauuaaucucugugug

SEQ ID NO: 189759 - RNA, 32 nt, Homo Sapiens
ggcccuguccccagccccuccugccccagccc

SEQ ID NO: 189760 - RNA, 32 nt, Homo Sapiens
ucagauggugaagugacugcuacccgguugcc

SEQ ID NO: 189761 - RNA, 32 nt, Homo Sapiens
ucugcucccaugcucauaccucuucuuacucc

SEQ ID NO: 189762 - RNA, 32 nt, Homo Sapiens
uuuccauuuugaguaauaaaugucugagucug

SEQ ID NO: 189763 - RNA, 32 nt, Homo Sapiens
ucccuuuucccucuccugggcccuuccuuagg

SEQ ID NO: 189764 - RNA, 32 nt, Homo Sapiens
ccgccgcggagggcacuggggguggcggcacg

SEQ ID NO: 189765 - RNA, 32 nt, Homo Sapiens
ucucugcacuccugggguuuuguuacauggcu

SEQ ID NO: 189766 - RNA, 32 nt, Homo Sapiens
acacuuuagaaaguaauaacaaacauuauuau

SEQ ID NO: 189767 - RNA, 32 nt, Homo Sapiens
uuuguaucuacaucuuuuuucacaaauuuguc

SEQ ID NO: 189768 - RNA, 32 nt, Homo Sapiens
ugggcaagccccagcgccuauauuaggcacaa

SEQ ID NO: 189769 - RNA, 32 nt, Homo Sapiens
ucauacaauagaaucuugaaauuuauaaaaau

SEQ ID NO: 189770 - RNA, 32 nt, Homo Sapiens
aagguggagggaagaagggaagaauuacaaug

SEQ ID NO: 189771 - RNA, 32 nt, Homo Sapiens
guuggaugcggaacccaaauuacguguacuac

SEQ ID NO: 189772 - RNA, 32 nt, Homo Sapiens
cgaggacuggccuagagcaagcacuggaaaag

SEQ ID NO: 189773 - RNA, 32 nt, Homo Sapiens
aauuuugaaagccacuacuuugaaaccauucu

SEQ ID NO: 189774 - RNA, 32 nt, Homo Sapiens
ggauacaguuuaggaaaugggacauuucugcu

SEQ ID NO: 189775 - RNA, 32 nt, Homo Sapiens
uugcgagcaagggaguguauauacuaaaugcc

SEQ ID NO: 189776 - RNA, 32 nt, Homo Sapiens
cccccucagcugcccggggcccgggugcuggu

SEQ ID NO: 189777 - RNA, 32 nt, Homo Sapiens
cagaaaaugaggauuauuaaaggucaguugcu

SEQ ID NO: 189778 - RNA, 32 nt, Homo Sapiens
aaugaauuuuuuaaagggaacuuucuaugcaa

SEQ ID NO: 189779 - RNA, 32 nt, Homo Sapiens
aagauauguggaagaaagaacucagggcguua

SEQ ID NO: 189780 - RNA, 32 nt, Homo Sapiens
uguagaacuccaggccucgcugccggucagcu

SEQ ID NO: 189781 - RNA, 32 nt, Homo Sapiens
agucuuuaugguuuuuuucuauuucauguuau

SEQ ID NO: 189782 - RNA, 32 nt, Homo Sapiens
uguguuuuuuguuuuuguuuuccugugagcuc

SEQ ID NO: 189783 - RNA, 32 nt, Homo Sapiens
gaaaccgcccccggggcacugugcaguguggc

SEQ ID NO: 189784 - RNA, 32 nt, Homo Sapiens
ugcuaauauugagaaugugucaaguuuguaaa

SEQ ID NO: 189785 - RNA, 32 nt, Homo Sapiens
cauuuuaguugauuuucaguacuauuuacaua

SEQ ID NO: 189786 - RNA, 32 nt, Homo Sapiens
gcaagcagcugccuaggggguguccaaggagc

SEQ ID NO: 189787 - RNA, 32 nt, Homo Sapiens
uuucccuccuucccaggucugggucgcuugcg

SEQ ID NO: 189788 - RNA, 32 nt, Homo Sapiens
gggggccugugaagguuaggacccuucccaca

SEQ ID NO: 189789 - RNA, 32 nt, Homo Sapiens
caaagcacaaccucggccauugcagguuucac

SEQ ID NO: 189790 - RNA, 32 nt, Homo Sapiens
auaauauauguaaagcacuuuaacacagcacc

SEQ ID NO: 189791 - RNA, 32 nt, Homo Sapiens
uagacagggucucacacugucgccaggcugga

SEQ ID NO: 189792 - RNA, 32 nt, Homo Sapiens
agaauuuauugaauauuuauacuauaaaaugc

SEQ ID NO: 189793 - RNA, 32 nt, Homo Sapiens
augcugcugccucaggcagagcccuggaaaau

SEQ ID NO: 189794 - RNA, 32 nt, Homo Sapiens
ucccaccccagacgucaccacagggaccagaa

SEQ ID NO: 189795 - RNA, 32 nt, Homo Sapiens
ccacugcauuuuccaaaguuaagcaaaugaca

SEQ ID NO: 189796 - RNA, 32 nt, Homo Sapiens
ccucuguucccucucuucgcggagcggcgccg

SEQ ID NO: 189797 - RNA, 32 nt, Homo Sapiens
aucccuguuuuguccugaaauuuuagucuguu

SEQ ID NO: 189798 - RNA, 32 nt, Homo Sapiens
uuguaaucucauaacuuuccaagcuccaccac

SEQ ID NO: 189799 - RNA, 32 nt, Homo Sapiens
guugcucauaggguccuucucuagggagaaac

SEQ ID NO: 189800 - RNA, 32 nt, Homo Sapiens
uuuguccaauuaaauuauuccaauggcggaug

SEQ ID NO: 189801 - RNA, 32 nt, Homo Sapiens
ccaggagagcggcguggacgcgugcgggccua

SEQ ID NO: 189802 - RNA, 32 nt, Homo Sapiens
caucggcgcggauggcuaugcuggggucccag

SEQ ID NO: 189803 - RNA, 32 nt, Homo Sapiens
gaggaggaaaagugcuucggacucugggugug

SEQ ID NO: 189804 - RNA, 32 nt, Homo Sapiens
gcccaccaucuaggaacaggggccaggcagag

SEQ ID NO: 189805 - RNA, 32 nt, Homo Sapiens
acaugauacccacugggaauuuuuugugucaa

SEQ ID NO: 189806 - RNA, 32 nt, Homo Sapiens
ggcagcacccuuuaucggagaaggcucuacag

SEQ ID NO: 189807 - RNA, 32 nt, Homo Sapiens
gaacacuguucgcuucgccuccggccaagucg

SEQ ID NO: 189808 - RNA, 32 nt, Homo Sapiens
acccccugaugacaaaaucuucaacugcucaa

SEQ ID NO: 189809 - RNA, 32 nt, Homo Sapiens
uugcuugaguggugggggcccugcauccucuc

SEQ ID NO: 189810 - RNA, 32 nt, Homo Sapiens
cacagguccgagggggcgggggcagggccaag

SEQ ID NO: 189811 - RNA, 32 nt, Homo Sapiens
cuucuagucuuagguauuauuucucgauuuug

SEQ ID NO: 189812 - RNA, 32 nt, Homo Sapiens
cagaagcaucaccagcagcacaaggggagguc

SEQ ID NO: 189813 - RNA, 32 nt, Homo Sapiens
aaucuaccacagcagagaugccgccgccacug

SEQ ID NO: 189814 - RNA, 32 nt, Homo Sapiens
uggcucggcaggccggccauggagccaggcag

SEQ ID NO: 189815 - RNA, 32 nt, Homo Sapiens
gcggcccgagaccaacugggcugaccgaggcc

SEQ ID NO: 189816 - RNA, 32 nt, Homo Sapiens
gccacugcacucuaaccugggcgacagaguga

SEQ ID NO: 189817 - RNA, 32 nt, Homo Sapiens
aaucgacugucaacccuugcacgccaucguag

SEQ ID NO: 189818 - RNA, 32 nt, Homo Sapiens
uaaaaauccccaaaacagaaacauacaagagu

SEQ ID NO: 189819 - RNA, 32 nt, Homo Sapiens
cagggagcagacccucugccucaugggguagg

SEQ ID NO: 189820 - RNA, 32 nt, Homo Sapiens
aggcgggcgaggccggcccacccccucgcugg

SEQ ID NO: 189821 - RNA, 32 nt, Homo Sapiens
gaggaagcugcaggaagggaggguggcgaggg

SEQ ID NO: 189822 - RNA, 31 nt, Homo Sapiens
gcaugugguaccuaauggauaugauagaaau

SEQ ID NO: 189823 - RNA, 32 nt, Homo Sapiens
cagucugaauggcggcacgcugaaggaaacgu

SEQ ID NO: 189824 - RNA, 32 nt, Homo Sapiens
aauaaaggaugauaauagauauuauuuuuucu

SEQ ID NO: 189825 - RNA, 32 nt, Homo Sapiens
uguacauaaaauuuucuagaaauacacuuuuu

SEQ ID NO: 189826 - RNA, 32 nt, Homo Sapiens
gcuggcuguggcggcggccaggaucaugucgg

SEQ ID NO: 189827 - RNA, 32 nt, Homo Sapiens
guugaaauauugaaaaaagaugaccugcaucc

SEQ ID NO: 189828 - RNA, 32 nt, Homo Sapiens
auaaaaauacaauaaacuuacuauaaagauaa

SEQ ID NO: 189829 - RNA, 32 nt, Homo Sapiens
ugauuguauuucaaaauugauuauuugcggua

SEQ ID NO: 189830 - RNA, 32 nt, Homo Sapiens
caauaaaaggccgccccgacccgcccccgcgc

SEQ ID NO: 189831 - RNA, 32 nt, Homo Sapiens
auuuucuugaaacagcucuagcugcagguucu

SEQ ID NO: 189832 - RNA, 32 nt, Homo Sapiens
cgggagagcgcgcucugccugccgccugccug

SEQ ID NO: 189833 - RNA, 32 nt, Homo Sapiens
acucaauuuuaaaaaauuauuaaucuguugcu

SEQ ID NO: 189834 - RNA, 32 nt, Homo Sapiens
gauuuuauuaaugagaaauacaguaccccucc

SEQ ID NO: 189835 - RNA, 32 nt, Homo Sapiens
auaugggaaacacuuuuauucugccaaguuau

SEQ ID NO: 189836 - RNA, 32 nt, Homo Sapiens
uucaugauuaugauuaugauugaaugauagcu

SEQ ID NO: 189837 - RNA, 32 nt, Homo Sapiens
aaacuacuuaggaagccuguggugagaacaac

SEQ ID NO: 189838 - RNA, 32 nt, Homo Sapiens
gaaagugaugaagaagaguggcugggagucaa

SEQ ID NO: 189839 - RNA, 32 nt, Homo Sapiens
ugcgccugccauuggccuccucacagcggaaa

SEQ ID NO: 189840 - RNA, 32 nt, Homo Sapiens
ucucauacucccucauuguccagcugaacuac

SEQ ID NO: 189841 - RNA, 32 nt, Homo Sapiens
aucccgggcggcgcuccggacgcccuccccuc

SEQ ID NO: 189842 - RNA, 32 nt, Homo Sapiens
guuucuggaauauuuucuuagacuuuuuggau

SEQ ID NO: 189843 - RNA, 32 nt, Homo Sapiens
gcagguauggcugagggcgugugagcgccgag

SEQ ID NO: 189844 - RNA, 32 nt, Homo Sapiens
ucccuagugggcucuccuccccaggauaugca

SEQ ID NO: 189845 - RNA, 32 nt, Homo Sapiens
gugaaaaaugauuuguagagcuaacaugugaa

SEQ ID NO: 189846 - RNA, 32 nt, Homo Sapiens
uuccguguacaaguuuccugugagggagggca

SEQ ID NO: 189847 - RNA, 32 nt, Homo Sapiens
cugcagcccaggggcgucugcugugccccgcc

SEQ ID NO: 189848 - RNA, 32 nt, Homo Sapiens
cuucagggguacggaaagcauucuuuacauuu

SEQ ID NO: 189849 - RNA, 32 nt, Homo Sapiens
caagacauuuuuccuguuuuagaaaauauagc

SEQ ID NO: 189850 - RNA, 32 nt, Homo Sapiens
gcccagaugagcucugccugcuugucaucuuu

SEQ ID NO: 189851 - RNA, 32 nt, Homo Sapiens
ccuccaaguccucccugucgccacagagaccc

SEQ ID NO: 189852 - RNA, 32 nt, Homo Sapiens
aacucucugugcuaguaaccacguucuccuga

SEQ ID NO: 189853 - RNA, 32 nt, Homo Sapiens
uuggggccuggggcagugagggggccggcggg

SEQ ID NO: 189854 - RNA, 32 nt, Homo Sapiens
acaggccccaguuauugugaaaacagaagaag

SEQ ID NO: 189855 - RNA, 32 nt, Homo Sapiens
gccccggcugcggucucagcccgggggcccug

SEQ ID NO: 189856 - RNA, 32 nt, Homo Sapiens
ucgcccggcccggcuuccgaggggagaggacg

SEQ ID NO: 189857 - RNA, 32 nt, Homo Sapiens
aacugguggcuuaaugacucugcaccuuuuuc

SEQ ID NO: 189858 - RNA, 32 nt, Homo Sapiens
ccccugcaccccgguaggugcauacuucugcc

SEQ ID NO: 189859 - RNA, 32 nt, Homo Sapiens
aguuguugucgaagucuggggguugggacugg

SEQ ID NO: 189860 - RNA, 30 nt, Homo Sapiens
gugacagcgucgcggccgccggacgcagcg

SEQ ID NO: 189861 - RNA, 32 nt, Homo Sapiens
uagaacuguauaucaguugccaaaacauuaaa

SEQ ID NO: 189862 - RNA, 32 nt, Homo Sapiens
ccacgacagggagagguguagaugccaccauc

SEQ ID NO: 189863 - RNA, 32 nt, Homo Sapiens
ugaaauccucaccuuucagacguauuuucuuu

SEQ ID NO: 189864 - RNA, 32 nt, Homo Sapiens
aauaacuucuaaaagguauuuuuauaagcagu

SEQ ID NO: 189865 - RNA, 32 nt, Homo Sapiens
uuccgggcggugccggcagcaccgcccccucc

SEQ ID NO: 189866 - RNA, 32 nt, Homo Sapiens
aaacuggauuuaucuuaagcguaguacaaaca

SEQ ID NO: 189867 - RNA, 32 nt, Homo Sapiens
gugcuggggagaggccggcggcucuggaacca

SEQ ID NO: 189868 - RNA, 32 nt, Homo Sapiens
uaaacauaacaaaguugccuaguugauguaac

SEQ ID NO: 189869 - RNA, 32 nt, Homo Sapiens
auuuguaaaguuucuuuuuguuuuaucuuaug

SEQ ID NO: 189870 - RNA, 32 nt, Homo Sapiens
ugagccugcuggccucuugaccucugaccccu

SEQ ID NO: 189871 - RNA, 32 nt, Homo Sapiens
uuguggacaaaacaaucuuaaguugggcagcu

SEQ ID NO: 189872 - RNA, 32 nt, Homo Sapiens
cgugcaugucugggucuguggguuucuguugg

SEQ ID NO: 189873 - RNA, 32 nt, Homo Sapiens
aaugauucaaguauauuuuaaaucagaaguau

SEQ ID NO: 189874 - RNA, 32 nt, Homo Sapiens
uucugcugcuuuuugaggaaaacaggugauau

SEQ ID NO: 189875 - RNA, 32 nt, Homo Sapiens
ucugcucugaagaccgcguccugaauuucuuc

SEQ ID NO: 189876 - RNA, 32 nt, Homo Sapiens
acccgggcccugaccuucucccucuucccuuc

SEQ ID NO: 189877 - RNA, 32 nt, Homo Sapiens
auuagcuaccagcccagcaucuuccccccuuc

SEQ ID NO: 189878 - RNA, 32 nt, Homo Sapiens
gcgcacgcgccggaagagcuggcggaaggugg

SEQ ID NO: 189879 - RNA, 32 nt, Homo Sapiens
gggacuggcagagcaagaggccaucagaagga

SEQ ID NO: 189880 - RNA, 31 nt, Homo Sapiens
cccccaccgccuccgccccaggcaaggccgg

SEQ ID NO: 189881 - RNA, 32 nt, Homo Sapiens
auaacaguagagcuauuuuuuauaaauuagcc

SEQ ID NO: 189882 - RNA, 32 nt, Homo Sapiens
agcuuccaaauuaugcuuuauagcuguauaaa

SEQ ID NO: 189883 - RNA, 32 nt, Homo Sapiens
cucagaaaacaccugugagagccccgcaggca

SEQ ID NO: 189884 - RNA, 32 nt, Homo Sapiens
aaauaaauaaaauaaaauaaagcaccauuuug

SEQ ID NO: 189885 - RNA, 32 nt, Homo Sapiens
aagcacuguuuuucuucagucguuuaaauaaa

SEQ ID NO: 189886 - RNA, 32 nt, Homo Sapiens
aucacauguguaccacauuuaacuuuaucagg

SEQ ID NO: 189887 - RNA, 32 nt, Homo Sapiens
gcagggagaaauauuaacuuuuuuaacccuuu

SEQ ID NO: 189888 - RNA, 32 nt, Homo Sapiens
uggcuuagaaauuuuuucaugcacacuguugg

SEQ ID NO: 189889 - RNA, 32 nt, Homo Sapiens
agaagaagaucuuauucugcaauguagacaau

SEQ ID NO: 189890 - RNA, 32 nt, Homo Sapiens
guugaaaaucuacaauauaugcugcauuuaau

SEQ ID NO: 189891 - RNA, 32 nt, Homo Sapiens
aacccccgccccaacuuuuggauuguaauaaa

SEQ ID NO: 189892 - RNA, 32 nt, Homo Sapiens
uuggccccaagcucagcucuaagaaccgcccc

SEQ ID NO: 189893 - RNA, 32 nt, Homo Sapiens
aaagucauucgcguggcucgggacgcucaugu

SEQ ID NO: 189894 - RNA, 32 nt, Homo Sapiens
guggccuuguccaauggccuguguguuacaau

SEQ ID NO: 189895 - RNA, 32 nt, Homo Sapiens
uuuuuuuuaaacaaaauuaagugugcuuagag

SEQ ID NO: 189896 - RNA, 32 nt, Homo Sapiens
cauucuaauagauauuaagaacaagccaaagu

SEQ ID NO: 189897 - RNA, 32 nt, Homo Sapiens
ggggcugcagguuccggaccggaccggcccug

SEQ ID NO: 189898 - RNA, 32 nt, Homo Sapiens
ggaggcacguucuuggucacuguuccauugca

SEQ ID NO: 189899 - RNA, 32 nt, Homo Sapiens
uugggagagcuucaaggaaaccacuucacugu

SEQ ID NO: 189900 - RNA, 32 nt, Homo Sapiens
uaauuuuucuauauuuuaaaaacuacaguuuc

SEQ ID NO: 189901 - RNA, 32 nt, Homo Sapiens
aagagcucaaaauaaauuggaaaugugaaucg

SEQ ID NO: 189902 - RNA, 32 nt, Homo Sapiens
ucuccgucaaguccuuccugugauacugccau

SEQ ID NO: 189903 - RNA, 32 nt, Homo Sapiens
ugauccccagcaugaauguuauuuucauggaa

SEQ ID NO: 189904 - RNA, 32 nt, Homo Sapiens
uggaacgcgguugccaccgaggaggcggcggc

SEQ ID NO: 189905 - RNA, 32 nt, Homo Sapiens
ucaaaaacaugaaagcacucucuagagggaga

SEQ ID NO: 189906 - RNA, 32 nt, Homo Sapiens
gagcugcugcaggcuccgcggcggcggcaacg

SEQ ID NO: 189907 - RNA, 32 nt, Homo Sapiens
cacagacccacggagcucucuguguuuggccu

SEQ ID NO: 189908 - RNA, 29 nt, Homo Sapiens
uagcuuuauucuucagauacaaacugcag

SEQ ID NO: 189909 - RNA, 32 nt, Homo Sapiens
ccgggcugcugagacucgggauuagaagaaag

SEQ ID NO: 189910 - RNA, 32 nt, Homo Sapiens
ccacccucucagcucagcccagcccuguccug

SEQ ID NO: 189911 - RNA, 32 nt, Homo Sapiens
uggauguugggucucugugcggacggugacaa

SEQ ID NO: 189912 - RNA, 32 nt, Homo Sapiens
gaggcagguggguggagggggaugcugggaau

SEQ ID NO: 189913 - RNA, 32 nt, Homo Sapiens
uuaaaacuuuuguauuagaaaugcgcauacau

SEQ ID NO: 189914 - RNA, 32 nt, Homo Sapiens
ccauuucaccaucaaaacuggguggauuuccu

SEQ ID NO: 189915 - RNA, 32 nt, Homo Sapiens
uaccaaaauaaaccucuauucuauuggcacug

SEQ ID NO: 189916 - RNA, 32 nt, Homo Sapiens
gaauuagaaaugauguaaauguuuacgcagga

SEQ ID NO: 189917 - RNA, 32 nt, Homo Sapiens
caacagggcuucucuuuuuagauguagcacug

SEQ ID NO: 189918 - RNA, 32 nt, Homo Sapiens
acacaagaaagauggcaaauuuaugcuauucc

SEQ ID NO: 189919 - RNA, 32 nt, Homo Sapiens
ggaaagccuucagaucugccucacaccuuuga

SEQ ID NO: 189920 - RNA, 32 nt, Homo Sapiens
uggaagaugcugucauugcacuccaugaucca

SEQ ID NO: 189921 - RNA, 32 nt, Homo Sapiens
acucagaaggauuugcuuucccaaggagcuuu

SEQ ID NO: 189922 - RNA, 32 nt, Homo Sapiens
gcggaggcggguggauccauugaggucaggag

SEQ ID NO: 189923 - RNA, 30 nt, Homo Sapiens
cgcuggccugaacauugucacaggagauga

SEQ ID NO: 189924 - RNA, 32 nt, Homo Sapiens
ugaugcuuucacuaaauucaucaaauagauug

SEQ ID NO: 189925 - RNA, 32 nt, Homo Sapiens
uguccccugcccagcccccucgccgcccuuga

SEQ ID NO: 189926 - RNA, 32 nt, Homo Sapiens
acaggaugggaagggacaauauuacccacaca

SEQ ID NO: 189927 - RNA, 32 nt, Homo Sapiens
gaaaggguguugcauuuuuacauuucccuaau

SEQ ID NO: 189928 - RNA, 32 nt, Homo Sapiens
gcaucagcguuuuaaaugauaauugcuaauag

SEQ ID NO: 189929 - RNA, 32 nt, Homo Sapiens
aaguaugaaaagcaggggaggauacuuggguu

SEQ ID NO: 189930 - RNA, 32 nt, Homo Sapiens
ucaauucuagaacuaugccauaaaaaaaaagg

SEQ ID NO: 189931 - RNA, 32 nt, Homo Sapiens
agagcuuggguuccucucuccucucccccucu

SEQ ID NO: 189932 - RNA, 32 nt, Homo Sapiens
cccauauuccuccuagucccaucaucagaacc

SEQ ID NO: 189933 - RNA, 30 nt, Homo Sapiens
gccgaaaguccggagucgcuguaaaaccug

SEQ ID NO: 189934 - RNA, 32 nt, Homo Sapiens
ucuggugcugcugggguauguucugggcuuaa

SEQ ID NO: 189935 - RNA, 32 nt, Homo Sapiens
guaugauauaaagaaaacuuuuuugugcuaaa

SEQ ID NO: 189936 - RNA, 32 nt, Homo Sapiens
caugugagagaagccuacaucuucuuauucua

SEQ ID NO: 189937 - RNA, 32 nt, Homo Sapiens
ccgcccccugcugcgucuuucuaggcccuucu

SEQ ID NO: 189938 - RNA, 32 nt, Homo Sapiens
cuguuuucuccaacuuggucuuucacaguggu

SEQ ID NO: 189939 - RNA, 32 nt, Homo Sapiens
agaaagaggaagagugggugggcuggaagaau

SEQ ID NO: 189940 - RNA, 32 nt, Homo Sapiens
aacccucguguccugcuguccuggacaaugcu

SEQ ID NO: 189941 - RNA, 32 nt, Homo Sapiens
agggcggugggcuuuuccugugcagagggaga

SEQ ID NO: 189942 - RNA, 32 nt, Homo Sapiens
gauuucggccuggcccgggccuaugguguccc

SEQ ID NO: 189943 - RNA, 32 nt, Homo Sapiens
ccucugagaaggaaaaugguuacugaugggga

SEQ ID NO: 189944 - RNA, 32 nt, Homo Sapiens
aucuuagcugggucuuuccugcuguucagccc

SEQ ID NO: 189945 - RNA, 32 nt, Homo Sapiens
cugggaagagguggcgguccucggguuuaagg

SEQ ID NO: 189946 - RNA, 32 nt, Homo Sapiens
ggccaaacccaccugcuagugugaauuaaagu

SEQ ID NO: 189947 - RNA, 32 nt, Homo Sapiens
auuaauaaacacauacaaugaagaaaacagau

SEQ ID NO: 189948 - RNA, 32 nt, Homo Sapiens
cuauaagggaagauugucaauauuuuguggua

SEQ ID NO: 189949 - RNA, 32 nt, Homo Sapiens
uuaaauuaucuaaaaucugcuagggaauauca

SEQ ID NO: 189950 - RNA, 32 nt, Homo Sapiens
uguaguagacauuggcuaaggggcuuacugaa

SEQ ID NO: 189951 - RNA, 32 nt, Homo Sapiens
gagccgggacgcccggguucagagcgaaggag

SEQ ID NO: 189952 - RNA, 32 nt, Homo Sapiens
ucugcuuggccauuuuauccuuuucuccuacu

SEQ ID NO: 189953 - RNA, 32 nt, Homo Sapiens
gaccccgcgggaguugggccggcggccccuuu

SEQ ID NO: 189954 - RNA, 32 nt, Homo Sapiens
cuccugagcugcgccgugccaggccgcccgcc

SEQ ID NO: 189955 - RNA, 32 nt, Homo Sapiens
ugaacagggcuuucucucccuccaccccuugc

SEQ ID NO: 189956 - RNA, 32 nt, Homo Sapiens
gggcaccacggcugggaucaccaccauugagg

SEQ ID NO: 189957 - RNA, 32 nt, Homo Sapiens
uguggcugguucuggggugugcggccagccau

SEQ ID NO: 189958 - RNA, 32 nt, Homo Sapiens
aacggaugaaugugagauacagcaaaucacug

SEQ ID NO: 189959 - RNA, 32 nt, Homo Sapiens
cauacaugugaaaucugauuuuuauguguguu

SEQ ID NO: 189960 - RNA, 32 nt, Homo Sapiens
cauucuaaaaagucagcgcccucaggcccgcg

SEQ ID NO: 189961 - RNA, 32 nt, Homo Sapiens
cagacaugcagucauggguugcuggcgcaacu

SEQ ID NO: 189962 - RNA, 32 nt, Homo Sapiens
aacuuuaaacacuuuuuaaaucuucaaauauu

SEQ ID NO: 189963 - RNA, 32 nt, Homo Sapiens
gauucaucaguucacuuguuuguuucagaaac

SEQ ID NO: 189964 - RNA, 32 nt, Homo Sapiens
uaaaugaaguaaaguucuugggaaauacuuuu

SEQ ID NO: 189965 - RNA, 32 nt, Homo Sapiens
aaugaguuguuguuuuuuuuuaaaugggggua

SEQ ID NO: 189966 - RNA, 32 nt, Homo Sapiens
gugcagacgccauggaguuggugcuggucuuc

SEQ ID NO: 189967 - RNA, 32 nt, Homo Sapiens
agcuucugcauccuagucuccucccuggaaug

SEQ ID NO: 189968 - RNA, 32 nt, Homo Sapiens
aguuuacagaucuggagagcaggaggccagga

SEQ ID NO: 189969 - RNA, 32 nt, Homo Sapiens
cgcacuagaacgaucaugaacuucugaaggga

SEQ ID NO: 189970 - RNA, 32 nt, Homo Sapiens
uguaccugacacagaagcuggggagccuagga

SEQ ID NO: 189971 - RNA, 32 nt, Homo Sapiens
augcuguuaagauacuuuuguaaaacuguagg

SEQ ID NO: 189972 - RNA, 32 nt, Homo Sapiens
uacgggggccacccuacccaccccacaggaac

SEQ ID NO: 189973 - RNA, 32 nt, Homo Sapiens
acggaaguguagguuacggucugagacaucac

SEQ ID NO: 189974 - RNA, 32 nt, Homo Sapiens
aaucgcggcguucuucguacccgcccauccuc

SEQ ID NO: 189975 - RNA, 32 nt, Homo Sapiens
aaagugcccccucccguucaccuaccacccaa

SEQ ID NO: 189976 - RNA, 32 nt, Homo Sapiens
caaucccuccaaguagaaugggugcaccuaaa

SEQ ID NO: 189977 - RNA, 32 nt, Homo Sapiens
uaccaagauguacaacagaacaugauagccca

SEQ ID NO: 189978 - RNA, 32 nt, Homo Sapiens
aggaucugcuucccuucucuccaggaccugcc

SEQ ID NO: 189979 - RNA, 32 nt, Homo Sapiens
ugguguugcuugaccuggccccccuggccccg

SEQ ID NO: 189980 - RNA, 32 nt, Homo Sapiens
accaucuuuuauucuuuuuuuuuuuuuuuuuu

SEQ ID NO: 189981 - RNA, 31 nt, Homo Sapiens
aaugcugcuugcugccugcccugcccuccga

SEQ ID NO: 189982 - RNA, 32 nt, Homo Sapiens
agcacaggagaucugcuggcucgggggaaggg

SEQ ID NO: 189983 - RNA, 32 nt, Homo Sapiens
aaguaggcgcggacgugcccggugccuggcgc

SEQ ID NO: 189984 - RNA, 32 nt, Homo Sapiens
ucaaucugcaggcuucuuaaagugacaguauc

SEQ ID NO: 189985 - RNA, 32 nt, Homo Sapiens
aaagcagucugcuuccuuccaugaaugaacag

SEQ ID NO: 189986 - RNA, 32 nt, Homo Sapiens
acccugcccugagguccuuguguggccgcccu

SEQ ID NO: 189987 - RNA, 32 nt, Homo Sapiens
ggucccccagugcagugccauccaccguggcu

SEQ ID NO: 189988 - RNA, 32 nt, Homo Sapiens
cgaauuuauuuuuugggcuggguggacauuug

SEQ ID NO: 189989 - RNA, 32 nt, Homo Sapiens
gguguuuucucccauccuuucccuuuaacccu

SEQ ID NO: 189990 - RNA, 32 nt, Homo Sapiens
uaguagacucggguccuguccacagcccuagc

SEQ ID NO: 189991 - RNA, 32 nt, Homo Sapiens
caguccaauaaauuauuuaacuaauuaaaaaa

SEQ ID NO: 189992 - RNA, 32 nt, Homo Sapiens
cgauccucagcucguccuccccgccccgcacc

SEQ ID NO: 189993 - RNA, 32 nt, Homo Sapiens
gagcagcgcuuucagcuggaccacucaggccu

SEQ ID NO: 189994 - RNA, 32 nt, Homo Sapiens
cauuucacuccagccuggccccagucccagcc

SEQ ID NO: 189995 - RNA, 32 nt, Homo Sapiens
uaaaaccgcaugccuaccuuuugcuuaguauu

SEQ ID NO: 189996 - RNA, 32 nt, Homo Sapiens
gacgagggcaggaugugcaucaacacagagug

SEQ ID NO: 189997 - RNA, 32 nt, Homo Sapiens
agcagacuuuuguauaauauuacuucaaagau

SEQ ID NO: 189998 - RNA, 32 nt, Homo Sapiens
gcacauuccaccuugacaaaaugguugacuga

SEQ ID NO: 189999 - RNA, 32 nt, Homo Sapiens
aucccacggagaggagcagcuuugggaacugu

SEQ ID NO: 190000 - RNA, 32 nt, Homo Sapiens
caguuugggagaggagaaaagaucugagaaug

SEQ ID NO: 190001 - RNA, 32 nt, Homo Sapiens
cgccgcgcggcccagccaccuccggagucgcc

SEQ ID NO: 190002 - RNA, 32 nt, Homo Sapiens
ugaacuugcuucccuuuucacuaauuuugcua

SEQ ID NO: 190003 - RNA, 32 nt, Homo Sapiens
uuuccuaagugauuuugcucucuuccaaucua

SEQ ID NO: 190004 - RNA, 32 nt, Homo Sapiens
cgugagaugugccaacucuacaauacuaaacc

SEQ ID NO: 190005 - RNA, 32 nt, Homo Sapiens
uccguggaaaauuucaguccagaagaauugac

SEQ ID NO: 190006 - RNA, 32 nt, Homo Sapiens
cagcagccucugcucuguggcuccauucaggc

SEQ ID NO: 190007 - RNA, 30 nt, Homo Sapiens
cugcuguuuaaagccacccagcuuauagug

SEQ ID NO: 190008 - RNA, 32 nt, Homo Sapiens
cauuaucaauguauuuaauaccacugaauugu

SEQ ID NO: 190009 - RNA, 32 nt, Homo Sapiens
agcugucggugcugcugcugcugcugggccgc

SEQ ID NO: 190010 - RNA, 32 nt, Homo Sapiens
agaaguuugugauucuccaaauaugccuagau

SEQ ID NO: 190011 - RNA, 32 nt, Homo Sapiens
ggugaggcgaguagaggcuggugcggaacuug

SEQ ID NO: 190012 - RNA, 32 nt, Homo Sapiens
cagaagucaguggcugcucaccagagaggggc

SEQ ID NO: 190013 - RNA, 32 nt, Homo Sapiens
gguucuuggggaucuggaaaggaucaguauag

SEQ ID NO: 190014 - RNA, 32 nt, Homo Sapiens
ugaacuguacacguuaaaaugguuaguuguau

SEQ ID NO: 190015 - RNA, 32 nt, Homo Sapiens
gacaagaaaaucaacaggcuuucagccuugag

SEQ ID NO: 190016 - RNA, 32 nt, Homo Sapiens
gcccugcaggucugcuggccgcgcauauagcc

SEQ ID NO: 190017 - RNA, 32 nt, Homo Sapiens
ugcggcggacgggucggaucgugcucguggcc

SEQ ID NO: 190018 - RNA, 32 nt, Homo Sapiens
agccugaagccuuggaggaagaaacaggaaug

SEQ ID NO: 190019 - RNA, 32 nt, Homo Sapiens
ucuuuuuaugaaggcuuguauauucuguauag

SEQ ID NO: 190020 - RNA, 32 nt, Homo Sapiens
cauuuuggccccagcauucuuaauuucaaagc

SEQ ID NO: 190021 - RNA, 32 nt, Homo Sapiens
uggucuuugucaacccagguggccacuauuac

SEQ ID NO: 190022 - RNA, 32 nt, Homo Sapiens
ggguggaggguggcaggagggugaagauugaa

SEQ ID NO: 190023 - RNA, 32 nt, Homo Sapiens
gcugcgcucccucgcuccuucccugagcuccc

SEQ ID NO: 190024 - RNA, 32 nt, Homo Sapiens
gcucauuccaguaaugucuuugaaagcaaaac

SEQ ID NO: 190025 - RNA, 32 nt, Homo Sapiens
caaagaugcagccgacuugauugugguggaug

SEQ ID NO: 190026 - RNA, 32 nt, Homo Sapiens
gggauacggaaaacagaauagaagcacagaac

SEQ ID NO: 190027 - RNA, 32 nt, Homo Sapiens
ccaaacuaaaagaucaaggcauguauuagaca

SEQ ID NO: 190028 - RNA, 32 nt, Homo Sapiens
uguugguuuauuuuaaugguauguacaaguug

SEQ ID NO: 190029 - RNA, 32 nt, Homo Sapiens
aaccaaucucugagccccacagaugguauucu

SEQ ID NO: 190030 - RNA, 32 nt, Homo Sapiens
ucuuucuuugucauucaguucuaggccuuucc

SEQ ID NO: 190031 - RNA, 32 nt, Homo Sapiens
ccacaccacugcacuucacuuccacuucagac

SEQ ID NO: 190032 - RNA, 32 nt, Homo Sapiens
gccgggagcggcggccggugagcuaccgcgag

SEQ ID NO: 190033 - RNA, 32 nt, Homo Sapiens
ggaauuggugguuuuucugaagugugggggaa

SEQ ID NO: 190034 - RNA, 32 nt, Homo Sapiens
uuuuuaaagacuaaaugugaaaaaauaaucac

SEQ ID NO: 190035 - RNA, 32 nt, Homo Sapiens
uaugaaagugacaaauuuuuacuggugugaau

SEQ ID NO: 190036 - RNA, 32 nt, Homo Sapiens
cuaaugccaaccucagcgucaugccagaaugc

SEQ ID NO: 190037 - RNA, 32 nt, Homo Sapiens
cuuacaucauggcggggcuuugaaaaucuccc

SEQ ID NO: 190038 - RNA, 32 nt, Homo Sapiens
ugcuacgguucagugagagaggcagacaucug

SEQ ID NO: 190039 - RNA, 32 nt, Homo Sapiens
aaggccucagagaaucucuuuggauccuggcu

SEQ ID NO: 190040 - RNA, 32 nt, Homo Sapiens
auacaccaaccauuuuaaucggacacaaaaga

SEQ ID NO: 190041 - RNA, 32 nt, Homo Sapiens
acaucuuccagaaaagucuuaaagcugccuua

SEQ ID NO: 190042 - RNA, 32 nt, Homo Sapiens
ucggggcccuucccucuaagcagcccaaacgu

SEQ ID NO: 190043 - RNA, 32 nt, Homo Sapiens
uugccacgugcagcugugcucaccccagguca

SEQ ID NO: 190044 - RNA, 32 nt, Homo Sapiens
cacuguacuccagccugggugacagggcaaga

SEQ ID NO: 190045 - RNA, 32 nt, Homo Sapiens
cgugcucugucaacugguagauuuguaauucu

SEQ ID NO: 190046 - RNA, 32 nt, Homo Sapiens
acacuacguuuacgggaucugcuaguggcuug

SEQ ID NO: 190047 - RNA, 31 nt, Homo Sapiens
gcagggaugcuagcagcaaggaccccaaaga

SEQ ID NO: 190048 - RNA, 32 nt, Homo Sapiens
ccucaagucccaccaguucugcucucccauca

SEQ ID NO: 190049 - RNA, 32 nt, Homo Sapiens
cccaacccgccgcuccgccgcggugguacgcu

SEQ ID NO: 190050 - RNA, 32 nt, Homo Sapiens
uauucgggcggcggcuucgggcggccucggcc

SEQ ID NO: 190051 - RNA, 32 nt, Homo Sapiens
ugaacucugaccaggccccucacuugagccuu

SEQ ID NO: 190052 - RNA, 32 nt, Homo Sapiens
aauuuucaauguuuauuauacuguugaaagca

SEQ ID NO: 190053 - RNA, 31 nt, Homo Sapiens
gccgccauggcccgcuggaucccgaccaaga

SEQ ID NO: 190054 - RNA, 32 nt, Homo Sapiens
cccucggaggcagaggaaggaaaauggggaug

SEQ ID NO: 190055 - RNA, 32 nt, Homo Sapiens
cuucauaacugggaauuugauuugaagaaguc

SEQ ID NO: 190056 - RNA, 32 nt, Homo Sapiens
ucuuaguaaaaagcccuaugugaaaagauccc

SEQ ID NO: 190057 - RNA, 32 nt, Homo Sapiens
ccaaacaggcugcuuaaaauggucuguuaaag

SEQ ID NO: 190058 - RNA, 32 nt, Homo Sapiens
gauguauagcuuucccaagaugaugguaaaac

SEQ ID NO: 190059 - RNA, 32 nt, Homo Sapiens
agauucuacauauuuuuccuuccaaugcagag

SEQ ID NO: 190060 - RNA, 32 nt, Homo Sapiens
cccuugcagccagcuguuggccacggccccug

SEQ ID NO: 190061 - RNA, 32 nt, Homo Sapiens
gacaaagcccucgcgucggacccuugccagaa

SEQ ID NO: 190062 - RNA, 32 nt, Homo Sapiens
acgguggcaagggaggaggcuaacuuucaaau

SEQ ID NO: 190063 - RNA, 32 nt, Homo Sapiens
ugucacugucuccauguuaaaaugccaaaaau

SEQ ID NO: 190064 - RNA, 32 nt, Homo Sapiens
ccccacagacugcgagacugaaccgccgcuac

SEQ ID NO: 190065 - RNA, 32 nt, Homo Sapiens
ccucucucuguggccccggccccugcccaggu

SEQ ID NO: 190066 - RNA, 32 nt, Homo Sapiens
cccuuccccacuuuuccccccuuuuccaauca

SEQ ID NO: 190067 - RNA, 32 nt, Homo Sapiens
caccugugaucccagcacuuugggaggccgag

SEQ ID NO: 190068 - RNA, 32 nt, Homo Sapiens
caccuguaaucccagcacuuugggaggccgaa

SEQ ID NO: 190069 - RNA, 32 nt, Homo Sapiens
uuuaaaagaugugggaccaaaaauauauuuau

SEQ ID NO: 190070 - RNA, 32 nt, Homo Sapiens
aaaauauucuauuugguagaauacaaaugugg

SEQ ID NO: 190071 - RNA, 30 nt, Homo Sapiens
gccugcgugaccuccccgccggcgggaugu

SEQ ID NO: 190072 - RNA, 32 nt, Homo Sapiens
gaggguccgggcggaggcccgcucguguggaa

SEQ ID NO: 190073 - RNA, 32 nt, Homo Sapiens
ccagccucauuucaaaaugugaaagaggagug

SEQ ID NO: 190074 - RNA, 32 nt, Homo Sapiens
uaaaauguauaaaaauagaccugaucaacauc

SEQ ID NO: 190075 - RNA, 32 nt, Homo Sapiens
ccagcauggcagacagaagaaaaauaguuugg

SEQ ID NO: 190076 - RNA, 32 nt, Homo Sapiens
guuugaaucagauuucagaacaucucauucau

SEQ ID NO: 190077 - RNA, 32 nt, Homo Sapiens
cccagacagaggcugcagggcuggggcugggu

SEQ ID NO: 190078 - RNA, 32 nt, Homo Sapiens
acauugaagcuaaaacuguuaagcaaaacaau

SEQ ID NO: 190079 - RNA, 32 nt, Homo Sapiens
uauguuucuggugugugaacuuuaugguaacu

SEQ ID NO: 190080 - RNA, 32 nt, Homo Sapiens
ucaaagcccuccccguccccgcauuuccaggc

SEQ ID NO: 190081 - RNA, 32 nt, Homo Sapiens
aagcugaaauucacauaacauaaaauuagcug

SEQ ID NO: 190082 - RNA, 32 nt, Homo Sapiens
ugggggucgccugcuuccuucccggacagggu

SEQ ID NO: 190083 - RNA, 32 nt, Homo Sapiens
ugaaaacuuacauugggaaauaugcagacaag

SEQ ID NO: 190084 - RNA, 32 nt, Homo Sapiens
cccuggggccugggcugcugcugguucuucau

SEQ ID NO: 190085 - RNA, 32 nt, Homo Sapiens
cuggagucaagcgauucuccugccucagccac

SEQ ID NO: 190086 - RNA, 32 nt, Homo Sapiens
guaaaucuaggcuauuugaaaaauacaguuga

SEQ ID NO: 190087 - RNA, 27 nt, Homo Sapiens
gaaugaauauccauaugaagagaaaaa

SEQ ID NO: 190088 - RNA, 32 nt, Homo Sapiens
gugaaaaguuuacuaucugaaaauauuugaau

SEQ ID NO: 190089 - RNA, 32 nt, Homo Sapiens
uucuuaucuuuuguugaaaucaccuguuaucc

SEQ ID NO: 190090 - RNA, 32 nt, Homo Sapiens
cccaugccccacucugcugaggccagaggaag

SEQ ID NO: 190091 - RNA, 32 nt, Homo Sapiens
ugcccucuccccggggaccuuagggugagcuu

SEQ ID NO: 190092 - RNA, 32 nt, Homo Sapiens
gaaaccccaucucuacuaaaaauagaaaccuu

SEQ ID NO: 190093 - RNA, 32 nt, Homo Sapiens
cucacaggaaguagcugcaaaggucagggaaa

SEQ ID NO: 190094 - RNA, 32 nt, Homo Sapiens
ugaaaauaauuuccucaaagcccaagucaaua

SEQ ID NO: 190095 - RNA, 32 nt, Homo Sapiens
uugccagucuuaagcagugcugauggaggugu

SEQ ID NO: 190096 - RNA, 32 nt, Homo Sapiens
ugccccagccccacccacccuggcccacucca

SEQ ID NO: 190097 - RNA, 32 nt, Homo Sapiens
aguuuuaucuauuaagauuuuaucuuaaugau

SEQ ID NO: 190098 - RNA, 32 nt, Homo Sapiens
uucuuuaucucaccccauaggcugaguggaag

SEQ ID NO: 190099 - RNA, 32 nt, Homo Sapiens
uuccauugaaagccugcaaaucuuaaauuaaa

SEQ ID NO: 190100 - RNA, 32 nt, Homo Sapiens
cgccuguaaucccagcacuuugggaggcggag

SEQ ID NO: 190101 - RNA, 32 nt, Homo Sapiens
guggcugguaguggcauugcugauguuuuggu

SEQ ID NO: 190102 - RNA, 32 nt, Homo Sapiens
caccccagcuguuacccagcccggggcaggug

SEQ ID NO: 190103 - RNA, 32 nt, Homo Sapiens
ugcugacaagguggggaacaauccuugccaga

SEQ ID NO: 190104 - RNA, 32 nt, Homo Sapiens
auuuuugcuccuuacagcaagauuaguagguu

SEQ ID NO: 190105 - RNA, 32 nt, Homo Sapiens
agauaugugaaugaaguguugguguccucacc

SEQ ID NO: 190106 - RNA, 32 nt, Homo Sapiens
guugcuaucaucaucaucaucaucauccucau

SEQ ID NO: 190107 - RNA, 29 nt, Homo Sapiens
ccuuucuuuaaauaaaagguauaucucuc

SEQ ID NO: 190108 - RNA, 32 nt, Homo Sapiens
ucaaaauacaaaugcauagauaguaaaugaua

SEQ ID NO: 190109 - RNA, 32 nt, Homo Sapiens
gcccgcuucagcgaguucaagagccacucagg

SEQ ID NO: 190110 - RNA, 32 nt, Homo Sapiens
acaaaauaugguuaauuuuuuauuucuaauuc

SEQ ID NO: 190111 - RNA, 32 nt, Homo Sapiens
cccgcgggcggugcgccugggaggaaggggga

SEQ ID NO: 190112 - RNA, 32 nt, Homo Sapiens
ccuuuaacuucucaaacagauaccagggccua

SEQ ID NO: 190113 - RNA, 32 nt, Homo Sapiens
cccagcccgcggcacuaacgacaggcgaggcc

SEQ ID NO: 190114 - RNA, 32 nt, Homo Sapiens
cccgccuccgcuauagccccaggccaccagga

SEQ ID NO: 190115 - RNA, 32 nt, Homo Sapiens
gccccuggaaaacuuuugaugacuuccccuac

SEQ ID NO: 190116 - RNA, 29 nt, Homo Sapiens
cauugugauuuguuccugccccacccuaa

SEQ ID NO: 190117 - RNA, 32 nt, Homo Sapiens
ucucaaaaaccauuacaaaaucuuaaccuuca

SEQ ID NO: 190118 - RNA, 32 nt, Homo Sapiens
cagccucaaaaauauuuuuuaaaagaaaagag

SEQ ID NO: 190119 - RNA, 32 nt, Homo Sapiens
ugaacucuucgaccgauuugugggaguuuaug

SEQ ID NO: 190120 - RNA, 32 nt, Homo Sapiens
ugucuuucuuuuuuuucuuuuguuucaugauu

SEQ ID NO: 190121 - RNA, 32 nt, Homo Sapiens
uacuuugcuuggauugcugugauucuuaaaaa

SEQ ID NO: 190122 - RNA, 32 nt, Homo Sapiens
uacaaacuagaauuuuaauauaaagaaaugug

SEQ ID NO: 190123 - RNA, 32 nt, Homo Sapiens
cucgccgcccucccuaggccgccccgccgcca

SEQ ID NO: 190124 - RNA, 32 nt, Homo Sapiens
guggaucaccugaguucgagaccagccuaacc

SEQ ID NO: 190125 - RNA, 32 nt, Homo Sapiens
ucccugaagcaucuccagggcuggagggacga

SEQ ID NO: 190126 - RNA, 32 nt, Homo Sapiens
aucuucaguguaaauaaugaucuacugaagac

SEQ ID NO: 190127 - RNA, 32 nt, Homo Sapiens
uggguuacaccuguaaucccagcacuuuggga

SEQ ID NO: 190128 - RNA, 32 nt, Homo Sapiens
aagaaauguguuugcccuguuuuguuugguuu

SEQ ID NO: 190129 - RNA, 30 nt, Homo Sapiens
caccagcccugcuuuaaggcaguguuugga

SEQ ID NO: 190130 - RNA, 32 nt, Homo Sapiens
accccgcagccugguccucggcucucccacag

SEQ ID NO: 190131 - RNA, 31 nt, Homo Sapiens
auuacauacuaaauaagaggauauguuaaua

SEQ ID NO: 190132 - RNA, 32 nt, Homo Sapiens
ccaaccugccccucccugacccggggcccccu

SEQ ID NO: 190133 - RNA, 32 nt, Homo Sapiens
aguaauagccccacacagaucucaucauuguu

SEQ ID NO: 190134 - RNA, 32 nt, Homo Sapiens
uuuuuauugcuaguauuugaauuaaaacuucu

SEQ ID NO: 190135 - RNA, 32 nt, Homo Sapiens
caaagaagccuuaauguucaagcuuuagaaag

SEQ ID NO: 190136 - RNA, 32 nt, Homo Sapiens
ccuugggugcucccggccgccgcgcuuaagaa

SEQ ID NO: 190137 - RNA, 32 nt, Homo Sapiens
gguguccucccucccccacugucugggacaca

SEQ ID NO: 190138 - RNA, 32 nt, Homo Sapiens
ggcuccagugacccucccgccuuagugucuca

SEQ ID NO: 190139 - RNA, 32 nt, Homo Sapiens
aggcggaggcugugcuccgccauggugucccg

SEQ ID NO: 190140 - RNA, 32 nt, Homo Sapiens
agcauaaaauauuuucagauauuuuccagggu

SEQ ID NO: 190141 - RNA, 32 nt, Homo Sapiens
guaccgagucaucuccgaaaacaucagcgagu

SEQ ID NO: 190142 - RNA, 32 nt, Homo Sapiens
aacucagcugucuguggcuucccaugucuuuc

SEQ ID NO: 190143 - RNA, 32 nt, Homo Sapiens
uuauacuggcuuucuuuuugguaguccacuga

SEQ ID NO: 190144 - RNA, 32 nt, Homo Sapiens
ucggccccgccggucccgggccccacaaccgc

SEQ ID NO: 190145 - RNA, 32 nt, Homo Sapiens
ugguuuaucuucuguucuuccuaccuugugcu

SEQ ID NO: 190146 - RNA, 32 nt, Homo Sapiens
gcgucccaagaccucaucugccugcagcguca

SEQ ID NO: 190147 - RNA, 32 nt, Homo Sapiens
auguauuaaugauuaccuuaaaauuaucugcu

SEQ ID NO: 190148 - RNA, 32 nt, Homo Sapiens
aagcaccggccgccaguucggcgggucuggag

SEQ ID NO: 190149 - RNA, 30 nt, Homo Sapiens
cucccagguucaggcuauucuccugcucag

SEQ ID NO: 190150 - RNA, 32 nt, Homo Sapiens
uuguguauugcuucuuuuuggauccucauucu

SEQ ID NO: 190151 - RNA, 32 nt, Homo Sapiens
gcagaacccacuuuucuaccucucccaagugc

SEQ ID NO: 190152 - RNA, 32 nt, Homo Sapiens
gucgcugcgggcccgggccccaagccgugccg

SEQ ID NO: 190153 - RNA, 32 nt, Homo Sapiens
acuuucuuggggucaauuuaauauuaauaagu

SEQ ID NO: 190154 - RNA, 32 nt, Homo Sapiens
guaaaaugcugaguccagucccggguauggag

SEQ ID NO: 190155 - RNA, 32 nt, Homo Sapiens
uagucagacauuccugcagagggucgguggag

SEQ ID NO: 190156 - RNA, 32 nt, Homo Sapiens
ggaaaccauaaugcagagugggcccccuacuc

SEQ ID NO: 190157 - RNA, 32 nt, Homo Sapiens
caagagagucagcccuuaauucucaggugaac

SEQ ID NO: 190158 - RNA, 32 nt, Homo Sapiens
gguacgauuccggagaaucgcgaggcagagcg

SEQ ID NO: 190159 - RNA, 30 nt, Homo Sapiens
acaguaugaugaugaagaucccauggggca

SEQ ID NO: 190160 - RNA, 32 nt, Homo Sapiens
aaguucuaucuuuggguucgcaggacuuugag

SEQ ID NO: 190161 - RNA, 32 nt, Homo Sapiens
gcggcuggcggagcugcagcggcgcuacaagg

SEQ ID NO: 190162 - RNA, 32 nt, Homo Sapiens
cuuuuuaaaaaauuauuuucaguaacaguguu

SEQ ID NO: 190163 - RNA, 29 nt, Homo Sapiens
gaguucuagauguuugauuuucuaauuaa

SEQ ID NO: 190164 - RNA, 32 nt, Homo Sapiens
caucuuggcaggcaacaugcauuuaucaccac

SEQ ID NO: 190165 - RNA, 32 nt, Homo Sapiens
ccucucacugaacacgagccacugacucuucc

SEQ ID NO: 190166 - RNA, 32 nt, Homo Sapiens
gaucccaauuuuguguuuuucuuucuauauau

SEQ ID NO: 190167 - RNA, 32 nt, Homo Sapiens
ggaggcgguggcgcagggaggggcccgacgcu

SEQ ID NO: 190168 - RNA, 32 nt, Homo Sapiens
ugcuaaguaauuuagaagauauuauuugucuu

SEQ ID NO: 190169 - RNA, 32 nt, Homo Sapiens
cucgcugagacuuccuggaccccgcaccaggc

SEQ ID NO: 190170 - RNA, 32 nt, Homo Sapiens
uuauuuucuucuaguauuuucuuauuucacuu

SEQ ID NO: 190171 - RNA, 32 nt, Homo Sapiens
gauccagcagagagggcuggagacgggacgaa

SEQ ID NO: 190172 - RNA, 32 nt, Homo Sapiens
ucaauugggaacauuuggaagaacaacagucu

SEQ ID NO: 190173 - RNA, 32 nt, Homo Sapiens
ucaagagaauaaagcugcaggacagucacaag

SEQ ID NO: 190174 - RNA, 32 nt, Homo Sapiens
aaaagaaagugauucuauuuuuuaaagaaagc

SEQ ID NO: 190175 - RNA, 32 nt, Homo Sapiens
cucuggugauugggugguggauagaagaggua

SEQ ID NO: 190176 - RNA, 32 nt, Homo Sapiens
cacggaggcuccugggucccgcgcgcccucuc

SEQ ID NO: 190177 - RNA, 32 nt, Homo Sapiens
gcuccagccuccccgcgaggguccagccccac

SEQ ID NO: 190178 - RNA, 32 nt, Homo Sapiens
guccuuguugagggugagggggugcuggggua

SEQ ID NO: 190179 - RNA, 32 nt, Homo Sapiens
cggagcgaggacccgguccggcgcagucuuca

SEQ ID NO: 190180 - RNA, 32 nt, Homo Sapiens
gccugaaaacaucauuugcauggcuggaguug

SEQ ID NO: 190181 - RNA, 32 nt, Homo Sapiens
uccuacugucuuuucuuugacuccauggagga

SEQ ID NO: 190182 - RNA, 32 nt, Homo Sapiens
gcugagcugggguuggguguacggguucuguu

SEQ ID NO: 190183 - RNA, 32 nt, Homo Sapiens
aucccgggacugaaccccuccucccuuucaca

SEQ ID NO: 190184 - RNA, 32 nt, Homo Sapiens
gccccucaacugcuccuccuggcucggcugcc

SEQ ID NO: 190185 - RNA, 32 nt, Homo Sapiens
aaaguuuguugaaaagaauauugucuuauucu

SEQ ID NO: 190186 - RNA, 32 nt, Homo Sapiens
uacauagcuugcauuuuaauucuuugguucuu

SEQ ID NO: 190187 - RNA, 32 nt, Homo Sapiens
ugggcagaaagauaaaaagauuacaucaguca

SEQ ID NO: 190188 - RNA, 32 nt, Homo Sapiens
ugucuuuccagaugaagcaauguacuucuuaa

SEQ ID NO: 190189 - RNA, 32 nt, Homo Sapiens
uuguaguuauuuacaaucagucuuucccccac

SEQ ID NO: 190190 - RNA, 32 nt, Homo Sapiens
aauuaaucacuauuuuguauaauuacauauug

SEQ ID NO: 190191 - RNA, 32 nt, Homo Sapiens
gcggagacccauccccucccccuucucgcacc

SEQ ID NO: 190192 - RNA, 32 nt, Homo Sapiens
aacagucuaaucucaugaucuguuccauccuu

SEQ ID NO: 190193 - RNA, 32 nt, Homo Sapiens
aguggcuauuccagaacgacauaaagaauuuc

SEQ ID NO: 190194 - RNA, 32 nt, Homo Sapiens
gccaggcagcggggcgcgucugcguugcgccc

SEQ ID NO: 190195 - RNA, 32 nt, Homo Sapiens
uagcugggauuacaggaacgcgccaccacgcc

SEQ ID NO: 190196 - RNA, 32 nt, Homo Sapiens
agcacgcucaggcuuccucugcuuugucucuu

SEQ ID NO: 190197 - RNA, 32 nt, Homo Sapiens
gagaccgcgccggccgagcugaggacugcacg

SEQ ID NO: 190198 - RNA, 32 nt, Homo Sapiens
uuuauuaauauuugaaaggcauucauucagug

SEQ ID NO: 190199 - RNA, 32 nt, Homo Sapiens
uuauaaaacugggaacagcuggaaugcuucuu

SEQ ID NO: 190200 - RNA, 32 nt, Homo Sapiens
ccgcccugccccagcucagcgcucccuggcgg

SEQ ID NO: 190201 - RNA, 32 nt, Homo Sapiens
ucugacuccaguuccuucuccccucuccagug

SEQ ID NO: 190202 - RNA, 32 nt, Homo Sapiens
ugggagagagguaugggacagauucuuuucuc

SEQ ID NO: 190203 - RNA, 32 nt, Homo Sapiens
cuucucccacucaucccuguaccugaggcaca

SEQ ID NO: 190204 - RNA, 32 nt, Homo Sapiens
aggacuugucuccuaaucuucguaucaacucc

SEQ ID NO: 190205 - RNA, 32 nt, Homo Sapiens
gagguggugggaagaagaaaguugagcuuuuu

SEQ ID NO: 190206 - RNA, 32 nt, Homo Sapiens
cgaccccucugucugucuccagcccugucuuu

SEQ ID NO: 190207 - RNA, 32 nt, Homo Sapiens
gugaccaaaucaacagcucuuuccaagaaaaa

SEQ ID NO: 190208 - RNA, 32 nt, Homo Sapiens
gaaauguaccuagcaagcugguucuugcuuau

SEQ ID NO: 190209 - RNA, 32 nt, Homo Sapiens
aaaauuaaaaauuuuacuugauucccaucuau

SEQ ID NO: 190210 - RNA, 32 nt, Homo Sapiens
auuuccguuuaagguaucuguuugcaggucag

SEQ ID NO: 190211 - RNA, 32 nt, Homo Sapiens
uaaauuguuaaaaucugaugcauuuugcauga

SEQ ID NO: 190212 - RNA, 32 nt, Homo Sapiens
cgccccuucaggccuggcaagcugggggccca

SEQ ID NO: 190213 - RNA, 32 nt, Homo Sapiens
ccccuggccugcccuccccggugggggccagg

SEQ ID NO: 190214 - RNA, 32 nt, Homo Sapiens
auacuguguauauaaacuauauauaauguaua

SEQ ID NO: 190215 - RNA, 30 nt, Homo Sapiens
gcucggcgcgcgcagguggagccagcgaga

SEQ ID NO: 190216 - RNA, 32 nt, Homo Sapiens
uuaaagcucuguuggauuuguaccucaaaaaa

SEQ ID NO: 190217 - RNA, 32 nt, Homo Sapiens
accuugggccgguaucuccggcagcuggcacg

SEQ ID NO: 190218 - RNA, 32 nt, Homo Sapiens
caccuagccucuauuuguuuuacaaaagagaa

SEQ ID NO: 190219 - RNA, 32 nt, Homo Sapiens
gacggugugaccuugggaccgagacgugcagc

SEQ ID NO: 190220 - RNA, 32 nt, Homo Sapiens
uccaccacaguuugaagaaaacaggucugaaa

SEQ ID NO: 190221 - RNA, 31 nt, Homo Sapiens
cugugcccagccaccaaaugcaguugaaaag

SEQ ID NO: 190222 - RNA, 32 nt, Homo Sapiens
ugugagcccggugauggagccgggcccgacag

SEQ ID NO: 190223 - RNA, 32 nt, Homo Sapiens
ggauuucugucucuauggauaggucuuggaga

SEQ ID NO: 190224 - RNA, 32 nt, Homo Sapiens
aagacuagaccuggcuaacaaacauaggagac

SEQ ID NO: 190225 - RNA, 32 nt, Homo Sapiens
gagugcaguggugcaaucuuggcucacugcaa

SEQ ID NO: 190226 - RNA, 32 nt, Homo Sapiens
uuggccuaggacacgccccguuuccccgaguc

SEQ ID NO: 190227 - RNA, 32 nt, Homo Sapiens
guugaagacagagcugggguccuucuucacgg

SEQ ID NO: 190228 - RNA, 32 nt, Homo Sapiens
ccagcucucugccagacugagagggcaagccg

SEQ ID NO: 190229 - RNA, 32 nt, Homo Sapiens
uuuugcacuuaucagaaauauuugaugugugc

SEQ ID NO: 190230 - RNA, 32 nt, Homo Sapiens
aaaaguggaugucuuuuucagagauucaucau

SEQ ID NO: 190231 - RNA, 32 nt, Homo Sapiens
caaucauauccuuccugccucaccuuagguca

SEQ ID NO: 190232 - RNA, 32 nt, Homo Sapiens
ugguuuguuuguuucuuuguucguccugagac

SEQ ID NO: 190233 - RNA, 32 nt, Homo Sapiens
ccuauugcugcucugcucuccucccuucuugg

SEQ ID NO: 190234 - RNA, 32 nt, Homo Sapiens
cucgcgcgagugccgcgcucuugcccuagcgg

SEQ ID NO: 190235 - RNA, 30 nt, Homo Sapiens
aaucuccgacuugccauggucgucuuuguc

SEQ ID NO: 190236 - RNA, 32 nt, Homo Sapiens
cucccagcacacccccggggccggcucacaag

SEQ ID NO: 190237 - RNA, 32 nt, Homo Sapiens
gaaguaggggagaggagaggacucagcgggcc

SEQ ID NO: 190238 - RNA, 32 nt, Homo Sapiens
aagcuguuuuguucuguuggucucucugucua

SEQ ID NO: 190239 - RNA, 32 nt, Homo Sapiens
uugucacgccuggcauagagguugggcuggag

SEQ ID NO: 190240 - RNA, 32 nt, Homo Sapiens
guuuuuauuguaaaaaaugaaaggcuguugau

SEQ ID NO: 190241 - RNA, 32 nt, Homo Sapiens
ugccuccaguuaccuccagaucagcaggcaca

SEQ ID NO: 190242 - RNA, 32 nt, Homo Sapiens
augcagggaagcugccaggggccgugggcagc

SEQ ID NO: 190243 - RNA, 32 nt, Homo Sapiens
gcagggaauuaugggagaagugggggcagccc

SEQ ID NO: 190244 - RNA, 32 nt, Homo Sapiens
gagacaugcugguggccccggcggagcggaga

SEQ ID NO: 190245 - RNA, 32 nt, Homo Sapiens
cccuugcacuguaucauuucaugcuuugauuu

SEQ ID NO: 190246 - RNA, 32 nt, Homo Sapiens
acuuugagaggccaaggcaggcagguggauca

SEQ ID NO: 190247 - RNA, 30 nt, Homo Sapiens
uucugggucugugccgacaaagccuccagu

SEQ ID NO: 190248 - RNA, 32 nt, Homo Sapiens
ugguucacaccuguaauccaagcacuuuggga

SEQ ID NO: 190249 - RNA, 32 nt, Homo Sapiens
cgcgcgccgggcgggcgccauggaggagggcu

SEQ ID NO: 190250 - RNA, 32 nt, Homo Sapiens
agcuuuuccuuccccaccccccagccuuagau

SEQ ID NO: 190251 - RNA, 32 nt, Homo Sapiens
uugcaggaggagaagagaaggggugcaagcgc

SEQ ID NO: 190252 - RNA, 32 nt, Homo Sapiens
aaguguaauauggauuacuuugaaacuuagca

SEQ ID NO: 190253 - RNA, 32 nt, Homo Sapiens
cgacgugccacccacccggagccggugagugc

SEQ ID NO: 190254 - RNA, 32 nt, Homo Sapiens
uggcucaggaggaaggagcugaacccuaagaa

SEQ ID NO: 190255 - RNA, 32 nt, Homo Sapiens
uuuuguuuuggcuucauagaguaucucaaauu

SEQ ID NO: 190256 - RNA, 32 nt, Homo Sapiens
cccgaucuccuugcccgccgccgccucccgga

SEQ ID NO: 190257 - RNA, 32 nt, Homo Sapiens
ggucagagguaguucucucugcuagaggugag

SEQ ID NO: 190258 - RNA, 32 nt, Homo Sapiens
caucucaguucacugcaacuucugccucccga

SEQ ID NO: 190259 - RNA, 32 nt, Homo Sapiens
ggggccgguggcggcuccggggaccucaucuu

SEQ ID NO: 190260 - RNA, 32 nt, Homo Sapiens
uaauuacuuuuuauuuauuuuauuuaguacgu

SEQ ID NO: 190261 - RNA, 32 nt, Homo Sapiens
ggaauaugcuagaaagaaauguuaaaaauaga

SEQ ID NO: 190262 - RNA, 32 nt, Homo Sapiens
ggacuuuuuaaaugaauggugucugcagguag

SEQ ID NO: 190263 - RNA, 32 nt, Homo Sapiens
guguuaauauuuuuguuuaccucgcuagcuuc

SEQ ID NO: 190264 - RNA, 32 nt, Homo Sapiens
gccucccagagccccaggacugggccagagca

SEQ ID NO: 190265 - RNA, 32 nt, Homo Sapiens
auugcgggggccugggcuagcugcuggcuacc

SEQ ID NO: 190266 - RNA, 32 nt, Homo Sapiens
ccugaccuugggcauuugucaaccugucugaa

SEQ ID NO: 190267 - RNA, 32 nt, Homo Sapiens
agccguguggggcgcuccgggcggcgacggcg

SEQ ID NO: 190268 - RNA, 32 nt, Homo Sapiens
uuagagucuauuucuaugagauaguuuaccaa

SEQ ID NO: 190269 - RNA, 32 nt, Homo Sapiens
aaccauuuacuuuugaugcucauuggcauuuu

SEQ ID NO: 190270 - RNA, 32 nt, Homo Sapiens
aaaguuagaccucagcuggggaacuuuccugu

SEQ ID NO: 190271 - RNA, 32 nt, Homo Sapiens
gaggcgcgcgccccgccgagauguacggugug

SEQ ID NO: 190272 - RNA, 32 nt, Homo Sapiens
accugggaaaauaccagaaaaugagggccgcu

SEQ ID NO: 190273 - RNA, 32 nt, Homo Sapiens
agaccugccuccaugauucaguuaccucccac

SEQ ID NO: 190274 - RNA, 32 nt, Homo Sapiens
cugcuucacuuugggcuuccucuucuucguac

SEQ ID NO: 190275 - RNA, 32 nt, Homo Sapiens
aacacugcacuccagccugggcgacagagcaa

SEQ ID NO: 190276 - RNA, 32 nt, Homo Sapiens
ucucgagagcugggcucugagcguccucaucc

SEQ ID NO: 190277 - RNA, 32 nt, Homo Sapiens
cucaucagcugagggcagggaauggaacuuua

SEQ ID NO: 190278 - RNA, 32 nt, Homo Sapiens
aagagguucgagaauguggucaauuguauaga

SEQ ID NO: 190279 - RNA, 32 nt, Homo Sapiens
ccaaccaccuucuuccucucaacucuguccca

SEQ ID NO: 190280 - RNA, 32 nt, Homo Sapiens
augcgugcguguaugcgugugugaaagcaggu

SEQ ID NO: 190281 - RNA, 32 nt, Homo Sapiens
uuacauugcaggaaacugcucuuccaauggcc

SEQ ID NO: 190282 - RNA, 32 nt, Homo Sapiens
aggccugucggacaucagcagugugcuaaaaa

SEQ ID NO: 190283 - RNA, 32 nt, Homo Sapiens
aaaacugcagggaaauaaaaaauacauaucaa

SEQ ID NO: 190284 - RNA, 32 nt, Homo Sapiens
uucuuucucuauaacuaacacagggaucacug

SEQ ID NO: 190285 - RNA, 32 nt, Homo Sapiens
ucuguagauucucuccucucccaucccagaaa

SEQ ID NO: 190286 - RNA, 32 nt, Homo Sapiens
cgcccgccgccgccugcgccuccagcuccuuc

SEQ ID NO: 190287 - RNA, 32 nt, Homo Sapiens
acagaaauaaagauguucuuugaaaccaauga

SEQ ID NO: 190288 - RNA, 32 nt, Homo Sapiens
uguuuccacuaaaaauacaaaaaauuagccgg

SEQ ID NO: 190289 - RNA, 32 nt, Homo Sapiens
ugccccgagugcuuguuuuguggggucccugg

SEQ ID NO: 190290 - RNA, 32 nt, Homo Sapiens
gauuucaagaaugaccaaaauggccucuaaaa

SEQ ID NO: 190291 - RNA, 32 nt, Homo Sapiens
uugagaagggccaagaggcucuuuccugagug

SEQ ID NO: 190292 - RNA, 32 nt, Homo Sapiens
uugcggccgcguggacugcgacccgcgccgcg

SEQ ID NO: 190293 - RNA, 32 nt, Homo Sapiens
cuggggguagagaugaggggagggaguaaguu

SEQ ID NO: 190294 - RNA, 32 nt, Homo Sapiens
aaguaguaugguucuacuguuuuguuuuaauu

SEQ ID NO: 190295 - RNA, 32 nt, Homo Sapiens
ggcaagaaguagcagugucuguaaaagagccu

SEQ ID NO: 190296 - RNA, 32 nt, Homo Sapiens
aaacugaaaaagagaacgaagacuaaacaaag

SEQ ID NO: 190297 - RNA, 32 nt, Homo Sapiens
cuaccccucccggucccggcccuggcccagcc

SEQ ID NO: 190298 - RNA, 32 nt, Homo Sapiens
ccugagucaucccacacacagccugccccagc

SEQ ID NO: 190299 - RNA, 32 nt, Homo Sapiens
ggaaaagggggugacagacaacuuuugagagg

SEQ ID NO: 190300 - RNA, 32 nt, Homo Sapiens
agcucaucuugaagaagaacuauucacuguau

SEQ ID NO: 190301 - RNA, 32 nt, Homo Sapiens
cccccgcaccugguggccuuguccuugaggug

SEQ ID NO: 190302 - RNA, 32 nt, Homo Sapiens
cgucucacaguagcuuccugagaacggggacc

SEQ ID NO: 190303 - RNA, 32 nt, Homo Sapiens
gcugaagaugcauuguaaaagguaaugcuaua

SEQ ID NO: 190304 - RNA, 32 nt, Homo Sapiens
aacccggggccucccgccuccucccccauccc

SEQ ID NO: 190305 - RNA, 32 nt, Homo Sapiens
acgaggaggcgauggcccugcugcuggugcuc

SEQ ID NO: 190306 - RNA, 32 nt, Homo Sapiens
uauuacuucuguucuccaacuacuucaguggc

SEQ ID NO: 190307 - RNA, 32 nt, Homo Sapiens
uaaagaagaugugaauuuaacuucuacuucau

SEQ ID NO: 190308 - RNA, 32 nt, Homo Sapiens
ugcaggcccgucugcgguccccaucgagcauc

SEQ ID NO: 190309 - RNA, 32 nt, Homo Sapiens
aaauaauaugcacccaugagaacucuccauga

SEQ ID NO: 190310 - RNA, 30 nt, Homo Sapiens
auuugacagaagcuugaaacucuggcaucu

SEQ ID NO: 190311 - RNA, 32 nt, Homo Sapiens
uuuuuauauucuuuuauaccguggugaugacu

SEQ ID NO: 190312 - RNA, 32 nt, Homo Sapiens
aggugugacuagaggucagcucugcucagcag

SEQ ID NO: 190313 - RNA, 32 nt, Homo Sapiens
ggauuugcuucuaggcccauuauuuuuauuaa

SEQ ID NO: 190314 - RNA, 32 nt, Homo Sapiens
accagaacgcaccccacugggagagcuggugg

SEQ ID NO: 190315 - RNA, 32 nt, Homo Sapiens
ggagagugacaagaggcgacggggaggaaacg

SEQ ID NO: 190316 - RNA, 32 nt, Homo Sapiens
aggcagagucgggcguccgcguccucccggcc

SEQ ID NO: 190317 - RNA, 32 nt, Homo Sapiens
acuguggaacagagcugagaccccggcccccc

SEQ ID NO: 190318 - RNA, 32 nt, Homo Sapiens
uuaaaaugaauuuaaacuuaagcaagcaagcg

SEQ ID NO: 190319 - RNA, 32 nt, Homo Sapiens
uauugaauuuaaaaagauagguaacuaaguag

SEQ ID NO: 190320 - RNA, 32 nt, Homo Sapiens
auaaaagucuaauaaaaauguuaaauauguga

SEQ ID NO: 190321 - RNA, 32 nt, Homo Sapiens
uugaaguuaugaacuauaaaauguuaaaacau

SEQ ID NO: 190322 - RNA, 32 nt, Homo Sapiens
ucacacaggauccggagcuggugcugauaaca

SEQ ID NO: 190323 - RNA, 32 nt, Homo Sapiens
cccuggugggcgcgaggcagggggagggggag

SEQ ID NO: 190324 - RNA, 32 nt, Homo Sapiens
uaguauccuugacuuuggcagucaccuuuuug

SEQ ID NO: 190325 - RNA, 30 nt, Homo Sapiens
ucucggucaguugggcgcggcagggcggga

SEQ ID NO: 190326 - RNA, 32 nt, Homo Sapiens
cgcccccgccgggauuuauuauuuggacugga

SEQ ID NO: 190327 - RNA, 32 nt, Homo Sapiens
auacaauaaaauugcacuguauggcaaauaug

SEQ ID NO: 190328 - RNA, 32 nt, Homo Sapiens
cugagguccgacugucucugccugcagcaugc

SEQ ID NO: 190329 - RNA, 32 nt, Homo Sapiens
uccagaggggucacguguaggagugagaagaa

SEQ ID NO: 190330 - RNA, 32 nt, Homo Sapiens
acaaccuucuucccuucugcaccacugcccgu

SEQ ID NO: 190331 - RNA, 32 nt, Homo Sapiens
cccacuaauugggauuauuuuuuaaaagaggu

SEQ ID NO: 190332 - RNA, 32 nt, Homo Sapiens
ggcgcgcugggcggggcuggaugggcuguggu

SEQ ID NO: 190333 - RNA, 32 nt, Homo Sapiens
aauugucuugugccggcagcugggugacucac

SEQ ID NO: 190334 - RNA, 32 nt, Homo Sapiens
guggugagaacacuuaaaauugucucuuuuag

SEQ ID NO: 190335 - RNA, 32 nt, Homo Sapiens
cuuuugagaaaguacuguguauacccuacgag

SEQ ID NO: 190336 - RNA, 32 nt, Homo Sapiens
aaaaauaagucaacaguaaaccacugaaaaaa

SEQ ID NO: 190337 - RNA, 32 nt, Homo Sapiens
ucuuuuuccuuuucuuuuucuuuuuuuccuuc

SEQ ID NO: 190338 - RNA, 32 nt, Homo Sapiens
cauaguugauaaaggaagaacauguaaggcaa

SEQ ID NO: 190339 - RNA, 32 nt, Homo Sapiens
uacuaaccuauaagaaguugcucugagcccau

SEQ ID NO: 190340 - RNA, 32 nt, Homo Sapiens
gauucaaaggcuaauguggaaguaaagaauga

SEQ ID NO: 190341 - RNA, 32 nt, Homo Sapiens
cugguuuucaaagcaaaacauaaaauauuguu

SEQ ID NO: 190342 - RNA, 32 nt, Homo Sapiens
auacauugccuugcugugggcugccucuucuu

SEQ ID NO: 190343 - RNA, 32 nt, Homo Sapiens
aucucucugaauaugauucgaauugcagccuu

SEQ ID NO: 190344 - RNA, 32 nt, Homo Sapiens
cuucaugcccuucugauuccccuccaccaaac

SEQ ID NO: 190345 - RNA, 32 nt, Homo Sapiens
uaguuuuuauaaauaucccggaugugccugau

SEQ ID NO: 190346 - RNA, 32 nt, Homo Sapiens
uggcccaucuucugccucacaguggccacuca

SEQ ID NO: 190347 - RNA, 32 nt, Homo Sapiens
uugcuucaucaguucauagaaaagauuauuug

SEQ ID NO: 190348 - RNA, 32 nt, Homo Sapiens
guuaacaucuaaucuggaggaagacccuggaa

SEQ ID NO: 190349 - RNA, 32 nt, Homo Sapiens
cagacgagauuuccuucuuaucgccugccuca

SEQ ID NO: 190350 - RNA, 32 nt, Homo Sapiens
guuagacgcgcgcugcaggagcgcggaacaug

SEQ ID NO: 190351 - RNA, 32 nt, Homo Sapiens
aggacuccccaggagcacccaggcuugggcag

SEQ ID NO: 190352 - RNA, 32 nt, Homo Sapiens
gcccggcccucccgcccccgaccugaccacgc

SEQ ID NO: 190353 - RNA, 32 nt, Homo Sapiens
aagcugaaucucugggggugccaggcaccccc

SEQ ID NO: 190354 - RNA, 32 nt, Homo Sapiens
caauuugaugguaaauauauacauuggaauca

SEQ ID NO: 190355 - RNA, 32 nt, Homo Sapiens
gugggagaggugguguguggauaccucugucu

SEQ ID NO: 190356 - RNA, 32 nt, Homo Sapiens
ccggguuggccaggcuggucuugaacuccuga

SEQ ID NO: 190357 - RNA, 32 nt, Homo Sapiens
gccguagauaaugugguucugaugguuguugu

SEQ ID NO: 190358 - RNA, 30 nt, Homo Sapiens
gagacggcgcccgcagcgcccugcgcgggu

SEQ ID NO: 190359 - RNA, 32 nt, Homo Sapiens
cccaagaccuucagccagagcagggcaucaaa

SEQ ID NO: 190360 - RNA, 32 nt, Homo Sapiens
ggacuauuucuguggaggaaaaaagugaagau

SEQ ID NO: 190361 - RNA, 32 nt, Homo Sapiens
acagggaggcggcugccgggaccgucagcccu

SEQ ID NO: 190362 - RNA, 31 nt, Homo Sapiens
ccucuucccaacucagcuccaaaaccacaca

SEQ ID NO: 190363 - RNA, 32 nt, Homo Sapiens
aguaauaguuguuuacuagugugcuagaugaa

SEQ ID NO: 190364 - RNA, 32 nt, Homo Sapiens
uguuaacucagauucagagaauuuauaaugua

SEQ ID NO: 190365 - RNA, 32 nt, Homo Sapiens
ugcugucccucccccuugucuuucccuucagu

SEQ ID NO: 190366 - RNA, 32 nt, Homo Sapiens
uaaugaaugaauucugguaaaaauucaaaagg

SEQ ID NO: 190367 - RNA, 32 nt, Homo Sapiens
caaaaagauuuaacaaauacauucauaaggaa

SEQ ID NO: 190368 - RNA, 32 nt, Homo Sapiens
cauguaacccuuucuguaaaacugauuaggua

SEQ ID NO: 190369 - RNA, 32 nt, Homo Sapiens
gcuuguugggggugggggugcgugauaaaggg

SEQ ID NO: 190370 - RNA, 32 nt, Homo Sapiens
gcaucaugagccaauuugauagguguuuuaaa

SEQ ID NO: 190371 - RNA, 32 nt, Homo Sapiens
accugcuggcccucugugacuacuuccaccac

SEQ ID NO: 190372 - RNA, 32 nt, Homo Sapiens
uuaggucaugaggguggagaucaugaaugggg

SEQ ID NO: 190373 - RNA, 32 nt, Homo Sapiens
uuucuuuuuuaaaaauauguggcugugaacuu

SEQ ID NO: 190374 - RNA, 32 nt, Homo Sapiens
uccacgcgcgcccggacgcggcggccaggcuu

SEQ ID NO: 190375 - RNA, 32 nt, Homo Sapiens
agcgugguuccgaguugagacaaauuacgacc

SEQ ID NO: 190376 - RNA, 32 nt, Homo Sapiens
gcucauguuaguagcagugacuuaaggcuaag

SEQ ID NO: 190377 - RNA, 32 nt, Homo Sapiens
gcaucuuacuggauuuaggacuucugagaugc

SEQ ID NO: 190378 - RNA, 32 nt, Homo Sapiens
ggcccagaguggccugcccccgggagccaaag

SEQ ID NO: 190379 - RNA, 32 nt, Homo Sapiens
ccaagcuuauuaugaauaauauugcagugugu

SEQ ID NO: 190380 - RNA, 32 nt, Homo Sapiens
aaaugagaaaccccuagggaaaaaauauauau

SEQ ID NO: 190381 - RNA, 32 nt, Homo Sapiens
uggaaacuaaaauaaaaccuaguuggaaaucc

SEQ ID NO: 190382 - RNA, 32 nt, Homo Sapiens
gucugaaaccucagaaacauaacguugaacuu

SEQ ID NO: 190383 - RNA, 32 nt, Homo Sapiens
uggacagacaccucccccuacccauaucccuc

SEQ ID NO: 190384 - RNA, 32 nt, Homo Sapiens
ggaucuguuucauuuauaaaagguccaguuuu

SEQ ID NO: 190385 - RNA, 32 nt, Homo Sapiens
aggcuaccuaacuucacauaucugcaaccaga

SEQ ID NO: 190386 - RNA, 32 nt, Homo Sapiens
gcccgccccucgccccagcccaguccaacccg

SEQ ID NO: 190387 - RNA, 32 nt, Homo Sapiens
acuaauuuugugccuuuugucugcuuucuuaa

SEQ ID NO: 190388 - RNA, 32 nt, Homo Sapiens
ugagccugugcagcugcuggagcacggcccaa

SEQ ID NO: 190389 - RNA, 32 nt, Homo Sapiens
aacuguuaucccauugaaaagaccgagccuug

SEQ ID NO: 190390 - RNA, 32 nt, Homo Sapiens
ccuucugccugccugugucugcugagauucug

SEQ ID NO: 190391 - RNA, 32 nt, Homo Sapiens
uagcaauguuccaggaaugaaauauagauguu

SEQ ID NO: 190392 - RNA, 32 nt, Homo Sapiens
agaaugauucugcagauuucugcauuuucucc

SEQ ID NO: 190393 - RNA, 32 nt, Homo Sapiens
cacaaugagauaaguauuggcauuaguguuca

SEQ ID NO: 190394 - RNA, 32 nt, Homo Sapiens
gcguuccccucgcgucucgggaguaggugcua

SEQ ID NO: 190395 - RNA, 32 nt, Homo Sapiens
uuugcauaacuggauguacuuagauaauguga

SEQ ID NO: 190396 - RNA, 32 nt, Homo Sapiens
agaucacugucaaguugcacuuuacuggguuu

SEQ ID NO: 190397 - RNA, 32 nt, Homo Sapiens
uaugugcacuguauaagagaguacucuuacau

SEQ ID NO: 190398 - RNA, 32 nt, Homo Sapiens
accuuugccucugccuuggagggaggggaggu

SEQ ID NO: 190399 - RNA, 28 nt, Homo Sapiens
cagcaaguagaagaccauuugaaaaguc

SEQ ID NO: 190400 - RNA, 32 nt, Homo Sapiens
ccaugucuccuuucaaggucuucugggcccug

SEQ ID NO: 190401 - RNA, 32 nt, Homo Sapiens
uccaaacagagacaccccuccuguacgacugg

SEQ ID NO: 190402 - RNA, 32 nt, Homo Sapiens
gccuauugacauuuuuuaagguuucagauuuu

SEQ ID NO: 190403 - RNA, 32 nt, Homo Sapiens
ggugcuagcauuauggugcugaauaagacagg

SEQ ID NO: 190404 - RNA, 32 nt, Homo Sapiens
aauguuucggaguccaggacuggcaggacagg

SEQ ID NO: 190405 - RNA, 32 nt, Homo Sapiens
uugauuuugcuugugcagaaaauaguuuccag

SEQ ID NO: 190406 - RNA, 32 nt, Homo Sapiens
gauauaugauauucuguaaauauuguacaauu

SEQ ID NO: 190407 - RNA, 32 nt, Homo Sapiens
gccaggcagacauaacaacaaacuacuaaaag

SEQ ID NO: 190408 - RNA, 32 nt, Homo Sapiens
uugcagacuaaauuauuuuauaaggcuguugc

SEQ ID NO: 190409 - RNA, 32 nt, Homo Sapiens
ucugaguucaccccagcccacccccgcaccca

SEQ ID NO: 190410 - RNA, 32 nt, Homo Sapiens
cuggagaaggugaguuccuggaccucagggag

SEQ ID NO: 190411 - RNA, 32 nt, Homo Sapiens
uaggguaugaaauaaacuauaacuaaaauggu

SEQ ID NO: 190412 - RNA, 32 nt, Homo Sapiens
cauuuuguguguauauuuuuacagugagguac

SEQ ID NO: 190413 - RNA, 32 nt, Homo Sapiens
uaaauuaaguguaaucuauuaaggcaagguau

SEQ ID NO: 190414 - RNA, 32 nt, Homo Sapiens
ucccacagcucuuuagggugagaucugcugua

SEQ ID NO: 190415 - RNA, 32 nt, Homo Sapiens
uaucuagccuuuggauuucaagaauaucauag

SEQ ID NO: 190416 - RNA, 32 nt, Homo Sapiens
cauucuaugacauuuuuuucugauuuguccug

SEQ ID NO: 190417 - RNA, 32 nt, Homo Sapiens
cgggggcugcuacccccuccccugccccugcc

SEQ ID NO: 190418 - RNA, 32 nt, Homo Sapiens
gugugagacaggacgcagcgggccccuggugg

SEQ ID NO: 190419 - RNA, 32 nt, Homo Sapiens
gcccaggucaucccaaacccuucuguuauuua

SEQ ID NO: 190420 - RNA, 32 nt, Homo Sapiens
aggcgggcucugcagggcagugggccgggacc

SEQ ID NO: 190421 - RNA, 32 nt, Homo Sapiens
gcuggacccucauacacaguguguguauccaa

SEQ ID NO: 190422 - RNA, 32 nt, Homo Sapiens
cacgggccgacccagccacaaguacuggagua

SEQ ID NO: 190423 - RNA, 30 nt, Homo Sapiens
uaggcgaggcgagagucgccggcgugcgua

SEQ ID NO: 190424 - RNA, 32 nt, Homo Sapiens
ugguaucuaaaauaaacaagcugugguaugau

SEQ ID NO: 190425 - RNA, 32 nt, Homo Sapiens
ugaaaugagacaccuugaccaauaugcuuugg

SEQ ID NO: 190426 - RNA, 32 nt, Homo Sapiens
uuccaacaguuugccagugguuccucacuaca

SEQ ID NO: 190427 - RNA, 32 nt, Homo Sapiens
caugcuuggcaaggaacagaccacguggcauc

SEQ ID NO: 190428 - RNA, 32 nt, Homo Sapiens
ccuccucccccuccucucuggcagggaucuca

SEQ ID NO: 190429 - RNA, 32 nt, Homo Sapiens
gggccgcaaguuucccucuccagccgcccgcc

SEQ ID NO: 190430 - RNA, 32 nt, Homo Sapiens
ggaacccagaaaguaguggggaggaggcgaga

SEQ ID NO: 190431 - RNA, 32 nt, Homo Sapiens
agugcuaauuuugaaaaacugcucauaugaug

SEQ ID NO: 190432 - RNA, 32 nt, Homo Sapiens
cccugccuggaacagggugauuugcuggaaug

SEQ ID NO: 190433 - RNA, 32 nt, Homo Sapiens
ccggcccguccucguccuggguaccccaccuu

SEQ ID NO: 190434 - RNA, 32 nt, Homo Sapiens
auauuucucacagaugugcagugcacaugcag

SEQ ID NO: 190435 - RNA, 32 nt, Homo Sapiens
ugcauauuauguuuauacucacuucagcacuu

SEQ ID NO: 190436 - RNA, 32 nt, Homo Sapiens
cacgugcacagaucacacacaugcacacacgu

SEQ ID NO: 190437 - RNA, 32 nt, Homo Sapiens
ggccagcccccuccuuagggggugggcgagga

SEQ ID NO: 190438 - RNA, 32 nt, Homo Sapiens
uuuuguccgaguugaauucccucccccugggc

SEQ ID NO: 190439 - RNA, 32 nt, Homo Sapiens
gaagcugaggcucagagacaucaugaggaugc

SEQ ID NO: 190440 - RNA, 32 nt, Homo Sapiens
ccaugaaauuccuaggucaguugaauaauaac

SEQ ID NO: 190441 - RNA, 32 nt, Homo Sapiens
cuacccacuccagccaacucugaggccaugug

SEQ ID NO: 190442 - RNA, 32 nt, Homo Sapiens
caaaugcuuuacuuuuucauuucuguaaguuc

SEQ ID NO: 190443 - RNA, 32 nt, Homo Sapiens
agaaaggaauccauccagauuuuccuccacug

SEQ ID NO: 190444 - RNA, 32 nt, Homo Sapiens
uuuaaacauuuauguuuaaaaguaagaagaaa

SEQ ID NO: 190445 - RNA, 32 nt, Homo Sapiens
ugacaaagcuuggaagagccugcaggugccuu

SEQ ID NO: 190446 - RNA, 32 nt, Homo Sapiens
agcuugccccauuccuuguccgccaacccacc

SEQ ID NO: 190447 - RNA, 32 nt, Homo Sapiens
cacguaguucccauuuacuccuuaaucugauu

SEQ ID NO: 190448 - RNA, 32 nt, Homo Sapiens
gcagcuaucccaaugugaaauguauuuuggau

SEQ ID NO: 190449 - RNA, 32 nt, Homo Sapiens
uugugauuuugcauauuuuuaaaaguacuuuu

SEQ ID NO: 190450 - RNA, 32 nt, Homo Sapiens
cucugccggagccccagucuccgcaguggaga

SEQ ID NO: 190451 - RNA, 32 nt, Homo Sapiens
gggcagcccgcugucgggucucucuaggccua

SEQ ID NO: 190452 - RNA, 32 nt, Homo Sapiens
uuauugaagauuccaugguuauguuuuuuaaa

SEQ ID NO: 190453 - RNA, 32 nt, Homo Sapiens
gucaacaaaauauugcuauaaaacuuuauucu

SEQ ID NO: 190454 - RNA, 32 nt, Homo Sapiens
augaugacccugacaagccaucuuuuaaacgc

SEQ ID NO: 190455 - RNA, 32 nt, Homo Sapiens
uucccaacagaucauaugguaggacccucgag

SEQ ID NO: 190456 - RNA, 32 nt, Homo Sapiens
cuaggauguguugggugagauguuucagaucu

SEQ ID NO: 190457 - RNA, 32 nt, Homo Sapiens
agagcuagcuguccgccgcggcccccgcacgc

SEQ ID NO: 190458 - RNA, 32 nt, Homo Sapiens
acucaaccucccccggaacucaacccccgucg

SEQ ID NO: 190459 - RNA, 32 nt, Homo Sapiens
gaggcggugagcagaagcuuguccuccauauu

SEQ ID NO: 190460 - RNA, 32 nt, Homo Sapiens
cgggaagagcuuugggaagcaaaggcagaggc

SEQ ID NO: 190461 - RNA, 30 nt, Homo Sapiens
cucuguccugugucugcagaauggggcugc

SEQ ID NO: 190462 - RNA, 32 nt, Homo Sapiens
uuaagaaaaugguucugugaaaagugaaugau

SEQ ID NO: 190463 - RNA, 32 nt, Homo Sapiens
ggaguuuaauacuguuuggccaccgguuacag

SEQ ID NO: 190464 - RNA, 32 nt, Homo Sapiens
uauucuucaaggaaaaugaaccccacacuagg

SEQ ID NO: 190465 - RNA, 32 nt, Homo Sapiens
gugcuuaauucuguugaaaccaaaaagauuug

SEQ ID NO: 190466 - RNA, 32 nt, Homo Sapiens
guccuggcuccaaggggugcugugugggccca

SEQ ID NO: 190467 - RNA, 32 nt, Homo Sapiens
aggguacacuugguaacgugccacagcucuca

SEQ ID NO: 190468 - RNA, 32 nt, Homo Sapiens
cgguccugcccugcgaaccagcgcggcccccu

SEQ ID NO: 190469 - RNA, 32 nt, Homo Sapiens
guuuaggaaacaagcauagaagcauuauguca

SEQ ID NO: 190470 - RNA, 32 nt, Homo Sapiens
uccugccauuuucucuccugcggucugagagu

SEQ ID NO: 190471 - RNA, 32 nt, Homo Sapiens
ggggcuggaggguggggugccaaaggcccuga

SEQ ID NO: 190472 - RNA, 32 nt, Homo Sapiens
uuggaagagguugagaagacuccugggcuuca

SEQ ID NO: 190473 - RNA, 32 nt, Homo Sapiens
ucuucuaaaaacaacuaaguaaagacuuaaau

SEQ ID NO: 190474 - RNA, 32 nt, Homo Sapiens
gaccccacugcucuuuccuccuccccagcuga

SEQ ID NO: 190475 - RNA, 32 nt, Homo Sapiens
guguagauaaucuaguugggaauacuuuuaag

SEQ ID NO: 190476 - RNA, 32 nt, Homo Sapiens
uacuuguaaccaguguaacaaacauuuuaguc

SEQ ID NO: 190477 - RNA, 32 nt, Homo Sapiens
cuguaaaaugcaacaaaugaaauccacaugua

SEQ ID NO: 190478 - RNA, 32 nt, Homo Sapiens
cgacugauacucaauuacgugaagccaagaaa

SEQ ID NO: 190479 - RNA, 32 nt, Homo Sapiens
aagguuacaucauaugaagaaaucauugaaug

SEQ ID NO: 190480 - RNA, 32 nt, Homo Sapiens
acacuccuaucaucagcacuuccaccauguau

SEQ ID NO: 190481 - RNA, 32 nt, Homo Sapiens
ggcucugccgugguggccggcugcguccccag

SEQ ID NO: 190482 - RNA, 32 nt, Homo Sapiens
ccagacagagugcuaggcaugggggcagaggu

SEQ ID NO: 190483 - RNA, 32 nt, Homo Sapiens
uugggcugacaggugcugcugccucugagccc

SEQ ID NO: 190484 - RNA, 32 nt, Homo Sapiens
guuugccuccaagagacuaucaguuccuuggg

SEQ ID NO: 190485 - RNA, 32 nt, Homo Sapiens
aguggggagcggaagcgcggccgcggcggcgg

SEQ ID NO: 190486 - RNA, 32 nt, Homo Sapiens
cagggccaucauggucagcccuugugaguaag

SEQ ID NO: 190487 - RNA, 32 nt, Homo Sapiens
guaaacuuggagcaaaaguaaauucauuaaaa

SEQ ID NO: 190488 - RNA, 30 nt, Homo Sapiens
agcugccaucugggcuauucugggguagaa

SEQ ID NO: 190489 - RNA, 32 nt, Homo Sapiens
aaagacaggaggaaagagggccaugggagccg

SEQ ID NO: 190490 - RNA, 32 nt, Homo Sapiens
gacuuuuccuguuguuguacacacacaacaga

SEQ ID NO: 190491 - RNA, 32 nt, Homo Sapiens
ucaggacacacagggaacggcugcauaaggag

SEQ ID NO: 190492 - RNA, 32 nt, Homo Sapiens
cuuuuauuucaguccuuauauuucauauacuu

SEQ ID NO: 190493 - RNA, 32 nt, Homo Sapiens
caguuguacuuugaauggugggguggaaguuu

SEQ ID NO: 190494 - RNA, 32 nt, Homo Sapiens
cagcggcgcaguugcgccuguuucgauaggcg

SEQ ID NO: 190495 - RNA, 32 nt, Homo Sapiens
gguacugcgccugcgccgcgaccgccaacgcg

SEQ ID NO: 190496 - RNA, 32 nt, Homo Sapiens
cacgacccuacucugcuccacccaggcuccgg

SEQ ID NO: 190497 - RNA, 32 nt, Homo Sapiens
uuguuucaauauuuuccuucucucucaauuuu

SEQ ID NO: 190498 - RNA, 32 nt, Homo Sapiens
uugggcugaacaugugugugguggugacucau

SEQ ID NO: 190499 - RNA, 29 nt, Homo Sapiens
aaaaugcauaauuuugcuauaaaauguac

SEQ ID NO: 190500 - RNA, 32 nt, Homo Sapiens
cggcugugcuccauguggcaagguggaaggca

SEQ ID NO: 190501 - RNA, 27 nt, Homo Sapiens
caggcuuccuucuuccuuucccuuugg

SEQ ID NO: 190502 - RNA, 32 nt, Homo Sapiens
uguguaggaaugcaggauaugcuugcugaaug

SEQ ID NO: 190503 - RNA, 32 nt, Homo Sapiens
gagugugacaauaugaauaucugcucaaucau

SEQ ID NO: 190504 - RNA, 32 nt, Homo Sapiens
gcgcaguggcccggcgaugucgcucgugcugc

SEQ ID NO: 190505 - RNA, 32 nt, Homo Sapiens
caccuugucuucuccuuugcuccucuguguua

SEQ ID NO: 190506 - RNA, 32 nt, Homo Sapiens
ucacaaucauggcaagccaacgccacuuaucc

SEQ ID NO: 190507 - RNA, 32 nt, Homo Sapiens
ugugucuauauuuggucuggcugaucggcugg

SEQ ID NO: 190508 - RNA, 32 nt, Homo Sapiens
guggggcagagaggcagcugccugcuggaacu

SEQ ID NO: 190509 - RNA, 32 nt, Homo Sapiens
aagcuggggagcccugcguggagucagcccaa

SEQ ID NO: 190510 - RNA, 32 nt, Homo Sapiens
auuuuuauggagaagaaauauggccauauuau

SEQ ID NO: 190511 - RNA, 32 nt, Homo Sapiens
gcuccucucgcacccagccucugccccagcag

SEQ ID NO: 190512 - RNA, 32 nt, Homo Sapiens
caggaaguuugggcccccucccugccccagcu

SEQ ID NO: 190513 - RNA, 32 nt, Homo Sapiens
gcccccuuucuuccuggccucggcugcuggaa

SEQ ID NO: 190514 - RNA, 32 nt, Homo Sapiens
cccacuuacagaucuaucuccucccuugggaa

SEQ ID NO: 190515 - RNA, 32 nt, Homo Sapiens
acccaccccccgccccgagcccuguaccacug

SEQ ID NO: 190516 - RNA, 32 nt, Homo Sapiens
aaagaggcgcggugacaucaacagugacucag

SEQ ID NO: 190517 - RNA, 32 nt, Homo Sapiens
uucuuuuuguuguuuauugcugcuuccagacc

SEQ ID NO: 190518 - RNA, 32 nt, Homo Sapiens
gucuuuucuaacuguguagguugaguuuugaa

SEQ ID NO: 190519 - RNA, 32 nt, Homo Sapiens
cgagacugucuccucccuccccgccuguaaug

SEQ ID NO: 190520 - RNA, 32 nt, Homo Sapiens
ccugacagccuggccccagggacuucacggau

SEQ ID NO: 190521 - RNA, 32 nt, Homo Sapiens
ccuugaccgcucucugugggccccacccacuc

SEQ ID NO: 190522 - RNA, 30 nt, Homo Sapiens
gagucucauuucccugccugcucuuuaggc

SEQ ID NO: 190523 - RNA, 32 nt, Homo Sapiens
cucccaucuuugauuggcuugguauuuggagc

SEQ ID NO: 190524 - RNA, 32 nt, Homo Sapiens
cgcggcugcgucgagcucccuugcaguccccu

SEQ ID NO: 190525 - RNA, 32 nt, Homo Sapiens
gcuguaaaaaugacuuaaauguuuauauccua

SEQ ID NO: 190526 - RNA, 32 nt, Homo Sapiens
gccaguugaaaauaccagcuuugguuggacaa

SEQ ID NO: 190527 - RNA, 32 nt, Homo Sapiens
ucuuucucaucccacgcacuccaugagcaccc

SEQ ID NO: 190528 - RNA, 32 nt, Homo Sapiens
agucuuaagaaguguacagaaaaaagaaaucu

SEQ ID NO: 190529 - RNA, 32 nt, Homo Sapiens
gccacugccucccaggaccugccucuugcucc

SEQ ID NO: 190530 - RNA, 32 nt, Homo Sapiens
gauucugaacgucuuaaaaucuguucauuauc

SEQ ID NO: 190531 - RNA, 32 nt, Homo Sapiens
gacauauuucugcuucauuuugaaaguugaga

SEQ ID NO: 190532 - RNA, 32 nt, Homo Sapiens
gcguugcauaaauagccaugugaauuccacaa

SEQ ID NO: 190533 - RNA, 31 nt, Homo Sapiens
gaagcccaagccaggccugguugagggugau

SEQ ID NO: 190534 - RNA, 32 nt, Homo Sapiens
aggcugggacagagacuccccaaggaccccau

SEQ ID NO: 190535 - RNA, 32 nt, Homo Sapiens
acaguggcggguggucugugcggccagggaag

SEQ ID NO: 190536 - RNA, 32 nt, Homo Sapiens
uacaguccauauuuaaauuucucugguuauuu

SEQ ID NO: 190537 - RNA, 32 nt, Homo Sapiens
aauaucugggcaccccacaacccagucaaauu

SEQ ID NO: 190538 - RNA, 32 nt, Homo Sapiens
gcaaaacaaaccaauuaacaaacaaccacaag

SEQ ID NO: 190539 - RNA, 31 nt, Homo Sapiens
uaugccuauugagugauuguggcaagaaaag

SEQ ID NO: 190540 - RNA, 32 nt, Homo Sapiens
aguuuuugcauuggcaucuuuggauuucaguc

SEQ ID NO: 190541 - RNA, 32 nt, Homo Sapiens
gauaagguagcagucugcauucuuauggccau

SEQ ID NO: 190542 - RNA, 32 nt, Homo Sapiens
uuguuucguuuuuguagccuugacauucaccc

SEQ ID NO: 190543 - RNA, 32 nt, Homo Sapiens
caggcuaugugcucuucuggugcccuagggac

SEQ ID NO: 190544 - RNA, 32 nt, Homo Sapiens
aaaaauuguuuuaucaggauaauugucucaug

SEQ ID NO: 190545 - RNA, 32 nt, Homo Sapiens
uggccagcgugcagggggcggaggcggggcgu

SEQ ID NO: 190546 - RNA, 32 nt, Homo Sapiens
gucauggcauguccaaggaauuaaaugggagu

SEQ ID NO: 190547 - RNA, 32 nt, Homo Sapiens
cuguaggcuuuuauuucuuuuuuauuuuuuga

SEQ ID NO: 190548 - RNA, 32 nt, Homo Sapiens
aggcauuucuucccuuccuuccuuccuucauc

SEQ ID NO: 190549 - RNA, 32 nt, Homo Sapiens
uucccugcauuaacugcacaaacaauauguuu

SEQ ID NO: 190550 - RNA, 32 nt, Homo Sapiens
acuugucuuuuugugacuggcuuauuucacuu

SEQ ID NO: 190551 - RNA, 32 nt, Homo Sapiens
ugucccagauucaaaugaggaguaagagccca

SEQ ID NO: 190552 - RNA, 32 nt, Homo Sapiens
acccucugggugcauugaaaagaauccguuuu

SEQ ID NO: 190553 - RNA, 32 nt, Homo Sapiens
guucacgcccuucuccugccucagccucccga

SEQ ID NO: 190554 - RNA, 32 nt, Homo Sapiens
ggaacucggccgcgggacauccacggggcgcg

SEQ ID NO: 190555 - RNA, 32 nt, Homo Sapiens
cuguucucagcccagcuggguuccaacggggg

SEQ ID NO: 190556 - RNA, 32 nt, Homo Sapiens
gcggauuuccaggaugauuuccugucaagguu

SEQ ID NO: 190557 - RNA, 32 nt, Homo Sapiens
aucaaggaucucuuccacauuccuccuucuua

SEQ ID NO: 190558 - RNA, 32 nt, Homo Sapiens
accaucgcugcuggagcagcugccuucaggcc

SEQ ID NO: 190559 - RNA, 30 nt, Homo Sapiens
cgcccuguucugggggaagccaguguccag

SEQ ID NO: 190560 - RNA, 31 nt, Homo Sapiens
cucagaagaugcagccugccccugcugaugg

SEQ ID NO: 190561 - RNA, 32 nt, Homo Sapiens
gggccagccugcccggccccagcaugcgggag

SEQ ID NO: 190562 - RNA, 32 nt, Homo Sapiens
ccgaggcgcccggcccggcuccauugagcuga

SEQ ID NO: 190563 - RNA, 32 nt, Homo Sapiens
ucuugugugugauuuuguucugaugccagcua

SEQ ID NO: 190564 - RNA, 32 nt, Homo Sapiens
gcacaaccagcuuuugcaggugaggcagggaa

SEQ ID NO: 190565 - RNA, 32 nt, Homo Sapiens
ccagaaggccccacacacccaagugccccuca

SEQ ID NO: 190566 - RNA, 32 nt, Homo Sapiens
cauuuuauaugaugaagucucuuauuccauag

SEQ ID NO: 190567 - RNA, 32 nt, Homo Sapiens
auugaacuugguuuuucuuucccagcaucgug

SEQ ID NO: 190568 - RNA, 32 nt, Homo Sapiens
ugacucucuugauggaacacagaugggcugcu

SEQ ID NO: 190569 - RNA, 32 nt, Homo Sapiens
uuauuuuguaaaauaacaugauguuaguguug

SEQ ID NO: 190570 - RNA, 32 nt, Homo Sapiens
uuuguuuuccuuugaaacccagcccuauugua

SEQ ID NO: 190571 - RNA, 32 nt, Homo Sapiens
gacagggacaaacacgaggacuuuaggagcgg

SEQ ID NO: 190572 - RNA, 32 nt, Homo Sapiens
uaaaagacuucaguucuuaauguaacuguacc

SEQ ID NO: 190573 - RNA, 32 nt, Homo Sapiens
uuggcuuuaaaaagagaacauauuuuaacaaa

SEQ ID NO: 190574 - RNA, 32 nt, Homo Sapiens
cagauguuaaaauaaaugguuuggugcuuuuu

SEQ ID NO: 190575 - RNA, 32 nt, Homo Sapiens
cgaggcgcgggcucuggcggccucgaccgacu

SEQ ID NO: 190576 - RNA, 32 nt, Homo Sapiens
cugagccccggggguagacaguccucagugag

SEQ ID NO: 190577 - RNA, 30 nt, Homo Sapiens
agcccagagaagcuugggagccucaacuau

SEQ ID NO: 190578 - RNA, 32 nt, Homo Sapiens
ugaguuguccgcgaggccccgcgcucaagccg

SEQ ID NO: 190579 - RNA, 32 nt, Homo Sapiens
uaguuuuguuuauaaauuggagaugcaaauag

SEQ ID NO: 190580 - RNA, 32 nt, Homo Sapiens
aaacuagccaagggcaccuguaacugggaauc

SEQ ID NO: 190581 - RNA, 32 nt, Homo Sapiens
uggccgcgucccggcugucgccgcccgagccc

SEQ ID NO: 190582 - RNA, 32 nt, Homo Sapiens
uuccacuuugucuggacccauccagcugagug

SEQ ID NO: 190583 - RNA, 32 nt, Homo Sapiens
cugugggagguaggcuuuguagugucaagagg

SEQ ID NO: 190584 - RNA, 32 nt, Homo Sapiens
uucacgcuuucagcgaaugacaaaaucaucuu

SEQ ID NO: 190585 - RNA, 32 nt, Homo Sapiens
cggcggcggcgguggcggcgacggucgcagga

SEQ ID NO: 190586 - RNA, 32 nt, Homo Sapiens
aaggugcaugcuugauugauagauauugauug

SEQ ID NO: 190587 - RNA, 31 nt, Homo Sapiens
aggguccggcccugccugcccucgcuggggc

SEQ ID NO: 190588 - RNA, 32 nt, Homo Sapiens
ccaacaguucccuucucugacagggggccauc

SEQ ID NO: 190589 - RNA, 32 nt, Homo Sapiens
ggcucauguucaggcagaaccggucccagccu

SEQ ID NO: 190590 - RNA, 32 nt, Homo Sapiens
ugugcuguuuccuccgcccccacucccguguu

SEQ ID NO: 190591 - RNA, 32 nt, Homo Sapiens
aaauuauuugcugaaaccaaaacaagucauug

SEQ ID NO: 190592 - RNA, 32 nt, Homo Sapiens
aacuccgaaaauuuuguuuauccaaaggcuca

SEQ ID NO: 190593 - RNA, 30 nt, Homo Sapiens
gugacucuggacuauaucaguuuuuggaaa

SEQ ID NO: 190594 - RNA, 32 nt, Homo Sapiens
uuaaugauacuaagauaacugaaaauaggcau

SEQ ID NO: 190595 - RNA, 32 nt, Homo Sapiens
aaagaaaaaaucaaaaugcagaaaaugugugg

SEQ ID NO: 190596 - RNA, 32 nt, Homo Sapiens
auucuuuucaccagcacccaucgcccaagggg

SEQ ID NO: 190597 - RNA, 32 nt, Homo Sapiens
uguguuuuugguuuuucuaaauauccaauugg

SEQ ID NO: 190598 - RNA, 32 nt, Homo Sapiens
gggaucuuccuuuggacuuucucuaaguuggg

SEQ ID NO: 190599 - RNA, 32 nt, Homo Sapiens
uggcuccuccaugccuguccauuaucugucuc

SEQ ID NO: 190600 - RNA, 32 nt, Homo Sapiens
uggugggccccggggggcuggggauccaggag

SEQ ID NO: 190601 - RNA, 32 nt, Homo Sapiens
caucuacgacuacuccggcuacggugccagcg

SEQ ID NO: 190602 - RNA, 32 nt, Homo Sapiens
acacaacuuacucauguaacaaaccugugcau

SEQ ID NO: 190603 - RNA, 32 nt, Homo Sapiens
gcccuuucuuguaguuuguuuccuuguuugag

SEQ ID NO: 190604 - RNA, 32 nt, Homo Sapiens
uucagccuggaaauugcuugccuuuuaaagaa

SEQ ID NO: 190605 - RNA, 32 nt, Homo Sapiens
aacucggguugaaacuuuuggcuuucggggga

SEQ ID NO: 190606 - RNA, 30 nt, Homo Sapiens
uuacuggauaaaaacaguugugucaguguc

SEQ ID NO: 190607 - RNA, 32 nt, Homo Sapiens
aguacaaucccacuuuuauaaaacaagacaaa

SEQ ID NO: 190608 - RNA, 32 nt, Homo Sapiens
gcgagcgaggcgggcuccggagggagcugacg

SEQ ID NO: 190609 - RNA, 32 nt, Homo Sapiens
gcaugucugucuagccucuuccucccucccuc

SEQ ID NO: 190610 - RNA, 32 nt, Homo Sapiens
uccuccugcagagcugcaggcaagagcagagc

SEQ ID NO: 190611 - RNA, 32 nt, Homo Sapiens
gcuauuuuagaaaaauacaauaacucagaguu

SEQ ID NO: 190612 - RNA, 32 nt, Homo Sapiens
gcacguccacacucacauuaaacgaaagcuuu

SEQ ID NO: 190613 - RNA, 32 nt, Homo Sapiens
cggccggcugggcgcgcacucucgggauggag

SEQ ID NO: 190614 - RNA, 32 nt, Homo Sapiens
ggauggagcagccaccccggcccgggacuggc

SEQ ID NO: 190615 - RNA, 32 nt, Homo Sapiens
agugcagcggcgggcugaagggcuccucaagc

SEQ ID NO: 190616 - RNA, 32 nt, Homo Sapiens
aaguuuaauuuucagcuccucuguuggacaug

SEQ ID NO: 190617 - RNA, 32 nt, Homo Sapiens
gagaugaaaaacugaggcccagagagcugaca

SEQ ID NO: 190618 - RNA, 32 nt, Homo Sapiens
aaaggacggaggccgccccacccccuucccuu

SEQ ID NO: 190619 - RNA, 32 nt, Homo Sapiens
cagcauaaaaaauuuuaaaccacuauugauac

SEQ ID NO: 190620 - RNA, 32 nt, Homo Sapiens
agacggaccccucguccucccccagcgguggu

SEQ ID NO: 190621 - RNA, 32 nt, Homo Sapiens
ucaugugaaacacaaauggugugaugaaagac

SEQ ID NO: 190622 - RNA, 32 nt, Homo Sapiens
gcauuacccaaauaaacugugcauaugaaaug

SEQ ID NO: 190623 - RNA, 32 nt, Homo Sapiens
uacuaagcugucuguuguauuuccgaacgaau

SEQ ID NO: 190624 - RNA, 32 nt, Homo Sapiens
uccugguaguucuugagguuuacuucucaaau

SEQ ID NO: 190625 - RNA, 32 nt, Homo Sapiens
cucucuccaccccuccuccauccacccugagg

SEQ ID NO: 190626 - RNA, 32 nt, Homo Sapiens
aagaagaaaauaauggauugcauauuaguugu

SEQ ID NO: 190627 - RNA, 32 nt, Homo Sapiens
uugguuucugccugcugcccacuucccuagac

SEQ ID NO: 190628 - RNA, 32 nt, Homo Sapiens
cccaccucagcccaucuugacaaaaucuaagg

SEQ ID NO: 190629 - RNA, 32 nt, Homo Sapiens
cauuuagauacuuuuuacuguuugccaaaaca

SEQ ID NO: 190630 - RNA, 32 nt, Homo Sapiens
aagguaucuccccucccuucaggaauaacuua

SEQ ID NO: 190631 - RNA, 27 nt, Homo Sapiens
aucuuuuccuucuucccucuccagaag

SEQ ID NO: 190632 - RNA, 32 nt, Homo Sapiens
ggagcgcaggccucgugccguuacggccauca

SEQ ID NO: 190633 - RNA, 32 nt, Homo Sapiens
ccuugaagggagcauggcgagacccauuggau

SEQ ID NO: 190634 - RNA, 32 nt, Homo Sapiens
uuuuuuaguugaauuuuuuuuaacauuccuca

SEQ ID NO: 190635 - RNA, 32 nt, Homo Sapiens
uuggugccagugaagaguugggcuugcugcug

SEQ ID NO: 190636 - RNA, 32 nt, Homo Sapiens
cuccgacgaaaaccugcauuuauuugcuggcg

SEQ ID NO: 190637 - RNA, 32 nt, Homo Sapiens
ggaagauaccaagauacucuuaaaagagaaga

SEQ ID NO: 190638 - RNA, 32 nt, Homo Sapiens
cagcugagguuuuuccucugucucucuaggaa

SEQ ID NO: 190639 - RNA, 32 nt, Homo Sapiens
uuuaaaaguauuuuaauuuccauauuggcuuu

SEQ ID NO: 190640 - RNA, 32 nt, Homo Sapiens
ugcaacuaccauucuucaguaguuucauaaau

SEQ ID NO: 190641 - RNA, 32 nt, Homo Sapiens
aaauguuuucuuucgaauuuuuauguguauug

SEQ ID NO: 190642 - RNA, 32 nt, Homo Sapiens
cggccacccgggggucgcucccucgugcccac

SEQ ID NO: 190643 - RNA, 32 nt, Homo Sapiens
cagcaugcgccacgccguggcucccaccagca

SEQ ID NO: 190644 - RNA, 32 nt, Homo Sapiens
acacuuuacuauuugcuaacuucguugguugg

SEQ ID NO: 190645 - RNA, 32 nt, Homo Sapiens
aggaacaaacuccagacggcgccaccuuaaga

SEQ ID NO: 190646 - RNA, 32 nt, Homo Sapiens
gugcccuucccucuccucagcccagaguguuc

SEQ ID NO: 190647 - RNA, 32 nt, Homo Sapiens
auguggacuuccugggggaccgccugcaugcu

SEQ ID NO: 190648 - RNA, 32 nt, Homo Sapiens
gaugagacaggaagaagguacacagugaccag

SEQ ID NO: 190649 - RNA, 32 nt, Homo Sapiens
cuaggcaaaaggaaauggauuugguuaaaaga

SEQ ID NO: 190650 - RNA, 32 nt, Homo Sapiens
cuggaacaauucagauucacccgcccugaugc

SEQ ID NO: 190651 - RNA, 32 nt, Homo Sapiens
ccauuauagucucuucuuucugagaaaaugug

SEQ ID NO: 190652 - RNA, 32 nt, Homo Sapiens
cgggaggagagccacacggucaaguugcacag

SEQ ID NO: 190653 - RNA, 32 nt, Homo Sapiens
aagacagucugcuuaacuggugaaauauacug

SEQ ID NO: 190654 - RNA, 28 nt, Homo Sapiens
gggaucugguuuaccaggagggcacaug

SEQ ID NO: 190655 - RNA, 31 nt, Homo Sapiens
gucccuuaauaaaaauauauauuacuacucc

SEQ ID NO: 190656 - RNA, 32 nt, Homo Sapiens
uuuuuuaagaauuuucauaacuuuuuagccug

SEQ ID NO: 190657 - RNA, 32 nt, Homo Sapiens
ugaggcccaggucgccgccgcggcgcguuuuu

SEQ ID NO: 190658 - RNA, 32 nt, Homo Sapiens
uucccagauaagcaagggagccagguacuacc

SEQ ID NO: 190659 - RNA, 32 nt, Homo Sapiens
cccugagcauggacaagggcuucugggccagc

SEQ ID NO: 190660 - RNA, 32 nt, Homo Sapiens
auuccaguaacuucacauccuagccaacacuu

SEQ ID NO: 190661 - RNA, 32 nt, Homo Sapiens
cccugagcauccuggcugggccccacccagga

SEQ ID NO: 190662 - RNA, 32 nt, Homo Sapiens
auuugacauaucuuuugggggacacaauucua

SEQ ID NO: 190663 - RNA, 32 nt, Homo Sapiens
ccuucccgacccagccagcugcacugcagggc

SEQ ID NO: 190664 - RNA, 32 nt, Homo Sapiens
gacagaguauccuggggguggugguggggugg

SEQ ID NO: 190665 - RNA, 32 nt, Homo Sapiens
uuuuccaucuguuagcauuucagacauuuuau

SEQ ID NO: 190666 - RNA, 32 nt, Homo Sapiens
ggccacuguuugcggacauucggaacuggaag

SEQ ID NO: 190667 - RNA, 32 nt, Homo Sapiens
uagauguacgaaaauauaacuuuauuucucua

SEQ ID NO: 190668 - RNA, 32 nt, Homo Sapiens
gagaugauguaaaccgccuugcaagauuguag

SEQ ID NO: 190669 - RNA, 30 nt, Homo Sapiens
uguguuagggugcagcaccggccgucacag

SEQ ID NO: 190670 - RNA, 32 nt, Homo Sapiens
aauguacaaaaauaauaggagggaauauuuau

SEQ ID NO: 190671 - RNA, 32 nt, Homo Sapiens
uuuugugggugauuuuuaaauauacugggcug

SEQ ID NO: 190672 - RNA, 32 nt, Homo Sapiens
caugauuggagaaaugauucauugggugauga

SEQ ID NO: 190673 - RNA, 28 nt, Homo Sapiens
gccaugccuuaccucuaccgggccccag

SEQ ID NO: 190674 - RNA, 32 nt, Homo Sapiens
aaauagggggguaaugauguaggggccaagca

SEQ ID NO: 190675 - RNA, 30 nt, Homo Sapiens
aaauauuuggucaugggggaagaauguagg

SEQ ID NO: 190676 - RNA, 32 nt, Homo Sapiens
gggauucccguccaagcuaucucgagccugca

SEQ ID NO: 190677 - RNA, 32 nt, Homo Sapiens
accuucuuggaagaaaucaugucugagggugu

SEQ ID NO: 190678 - RNA, 32 nt, Homo Sapiens
gcucgagcagagcugaggaucccaucguggcc

SEQ ID NO: 190679 - RNA, 32 nt, Homo Sapiens
ucuucagccuucuucagcucagcccucuucua

SEQ ID NO: 190680 - RNA, 32 nt, Homo Sapiens
ucuagaaauauguacuuuaauuauuuguuuuu

SEQ ID NO: 190681 - RNA, 32 nt, Homo Sapiens
auuuuaucuagaaaucuuucugacuuuuucca

SEQ ID NO: 190682 - RNA, 32 nt, Homo Sapiens
cacgagcugcgagggcgccuggagcggcugga

SEQ ID NO: 190683 - RNA, 32 nt, Homo Sapiens
ugaguaggagguguucacacauccucuugugu

SEQ ID NO: 190684 - RNA, 32 nt, Homo Sapiens
accauucuccaaguggaauucccacuuagggc

SEQ ID NO: 190685 - RNA, 32 nt, Homo Sapiens
cggcggcggcggcggcagcggcccagcaguug

SEQ ID NO: 190686 - RNA, 32 nt, Homo Sapiens
ucaucaguuaagguuaggaagaacaagaugcc

SEQ ID NO: 190687 - RNA, 32 nt, Homo Sapiens
ucucccuggccggggucuggcucuccgggacc

SEQ ID NO: 190688 - RNA, 32 nt, Homo Sapiens
acuuuaagcccgguaggaaagagagaggagga

SEQ ID NO: 190689 - RNA, 32 nt, Homo Sapiens
gaaaucugacauaagaaaauauuguuuucacu

SEQ ID NO: 190690 - RNA, 32 nt, Homo Sapiens
uggcugacaccuguaaucccagcacuuuggga

SEQ ID NO: 190691 - RNA, 32 nt, Homo Sapiens
gggagagacgagccaugaaccccccacagccu

SEQ ID NO: 190692 - RNA, 32 nt, Homo Sapiens
ccggggcuggagcggcucgggcgggcucuuga

SEQ ID NO: 190693 - RNA, 32 nt, Homo Sapiens
aaggaaguaagccaagcagagggaggauagaa

SEQ ID NO: 190694 - RNA, 32 nt, Homo Sapiens
cuugagcccaaguuaauuucucggggaguucu

SEQ ID NO: 190695 - RNA, 32 nt, Homo Sapiens
cacaaacucacugugcacgugccuggggcggg

SEQ ID NO: 190696 - RNA, 32 nt, Homo Sapiens
cuaacauauuggccucuuuguacuggaaaagu

SEQ ID NO: 190697 - RNA, 32 nt, Homo Sapiens
ugcauggugacagucucccccaaacauggccu

SEQ ID NO: 190698 - RNA, 32 nt, Homo Sapiens
guguccuuugucgaccccugcacucaaccacu

SEQ ID NO: 190699 - RNA, 32 nt, Homo Sapiens
aggccgcccgcgccgcgccggaguccgcuguc

SEQ ID NO: 190700 - RNA, 27 nt, Homo Sapiens
uagaaacacaucuucagccuccuccug

SEQ ID NO: 190701 - RNA, 32 nt, Homo Sapiens
aaugcagcacuugguuagcagauguuuaauuu

SEQ ID NO: 190702 - RNA, 32 nt, Homo Sapiens
caauggagggugguguugcgcggggcugggau

SEQ ID NO: 190703 - RNA, 32 nt, Homo Sapiens
aguugagauugugccacugcacucuagccugg

SEQ ID NO: 190704 - RNA, 32 nt, Homo Sapiens
aguugagauugugccauugcacuccagccugg

SEQ ID NO: 190705 - RNA, 32 nt, Homo Sapiens
guccucucugccagaucgcgggccugucggug

SEQ ID NO: 190706 - RNA, 32 nt, Homo Sapiens
aaaacuuaaugaugauuuuguguuuaaguucc

SEQ ID NO: 190707 - RNA, 32 nt, Homo Sapiens
guucugagaugaagcagggaaugcaggccugg

SEQ ID NO: 190708 - RNA, 32 nt, Homo Sapiens
agugaaugauauuuuucuuuuacauguaaaca

SEQ ID NO: 190709 - RNA, 32 nt, Homo Sapiens
uaaugagacaccuuugggaaguuugucaaagg

SEQ ID NO: 190710 - RNA, 32 nt, Homo Sapiens
cuguggcuuuucugcuggcucgaagaucggcc

SEQ ID NO: 190711 - RNA, 32 nt, Homo Sapiens
augugcagcaaccuggauuuggcuuugacuau

SEQ ID NO: 190712 - RNA, 32 nt, Homo Sapiens
agauguacuagauuuucauuguucauugauau

SEQ ID NO: 190713 - RNA, 32 nt, Homo Sapiens
ugguuuccuaaaugcuuuuacucugugcuuua

SEQ ID NO: 190714 - RNA, 32 nt, Homo Sapiens
cucucccaaccgccucgucgcacuccucaggc

SEQ ID NO: 190715 - RNA, 32 nt, Homo Sapiens
ggcgucauaaaacuuuuauuuauuuuuauuua

SEQ ID NO: 190716 - RNA, 32 nt, Homo Sapiens
uaugccuccgcgggcgcuuggcagcgucgccg

SEQ ID NO: 190717 - RNA, 32 nt, Homo Sapiens
ugggcgguacgcagacgcgcgcggcgagaccc

SEQ ID NO: 190718 - RNA, 32 nt, Homo Sapiens
gggaugguagagcggccugggcaggggcggag

SEQ ID NO: 190719 - RNA, 32 nt, Homo Sapiens
aauaaaauauaaauauaagauuaacacagugg

SEQ ID NO: 190720 - RNA, 32 nt, Homo Sapiens
augcuuuuacuuuauugcccuaacaauuuuuu

SEQ ID NO: 190721 - RNA, 32 nt, Homo Sapiens
uaaaacggccccaccccuaucucccuucgcug

SEQ ID NO: 190722 - RNA, 32 nt, Homo Sapiens
ccucugcauguauauuugauaacaugucuuuu

SEQ ID NO: 190723 - RNA, 32 nt, Homo Sapiens
gccucaaaggaguaaagucuacaggauagaag

SEQ ID NO: 190724 - RNA, 32 nt, Homo Sapiens
uaaggaacaccacaugccauuauuacuucaca

SEQ ID NO: 190725 - RNA, 32 nt, Homo Sapiens
gccuagaagagcuucugaggcgcugcuuuguc

SEQ ID NO: 190726 - RNA, 32 nt, Homo Sapiens
auccuaugggugagguggagggggugguccuc

SEQ ID NO: 190727 - RNA, 31 nt, Homo Sapiens
gaacagcagcgcaggggagcugugacagcag

SEQ ID NO: 190728 - RNA, 32 nt, Homo Sapiens
ggauuggucgccaucugcacgccaggcggcau

SEQ ID NO: 190729 - RNA, 28 nt, Homo Sapiens
ucugcggacccggcgccgaggcggccac

SEQ ID NO: 190730 - RNA, 32 nt, Homo Sapiens
ccccggcaccccagccucccguccccagcccg

SEQ ID NO: 190731 - RNA, 32 nt, Homo Sapiens
cuuuggaccuuuccaaugcgucucuuucuccu

SEQ ID NO: 190732 - RNA, 32 nt, Homo Sapiens
guucccauuuuucauguuuuucacaaauaguu

SEQ ID NO: 190733 - RNA, 32 nt, Homo Sapiens
aucccccagccuccuaggauccccuuggccug

SEQ ID NO: 190734 - RNA, 29 nt, Homo Sapiens
ccggagcuggcacagaggauccucggccg

SEQ ID NO: 190735 - RNA, 32 nt, Homo Sapiens
auacaggguuauaaaaucauaggcugggaaaa

SEQ ID NO: 190736 - RNA, 32 nt, Homo Sapiens
ccgaggaggagcucucugccugccagaagagu

SEQ ID NO: 190737 - RNA, 32 nt, Homo Sapiens
cugugugugucccuguggcccgcagccugccc

SEQ ID NO: 190738 - RNA, 32 nt, Homo Sapiens
caaaacagaaaagagaaacacaagcucaccuc

SEQ ID NO: 190739 - RNA, 30 nt, Homo Sapiens
ucgggguggcggcgcgcgugugggacgcgg

SEQ ID NO: 190740 - RNA, 32 nt, Homo Sapiens
aaccugaagaucuggacugcgggcgcccugag

SEQ ID NO: 190741 - RNA, 32 nt, Homo Sapiens
ccaaaucuagcucacuaucuguuuuuguaaau

SEQ ID NO: 190742 - RNA, 32 nt, Homo Sapiens
uggaaauuauaaaauucuaacuuuacauguau

SEQ ID NO: 190743 - RNA, 32 nt, Homo Sapiens
gugugguccccugacuucugcacaguguagaa

SEQ ID NO: 190744 - RNA, 32 nt, Homo Sapiens
ugcugucucuggacugagcaagagggaggagg

SEQ ID NO: 190745 - RNA, 32 nt, Homo Sapiens
aauacauaucuguguccuuuucugggaugagg

SEQ ID NO: 190746 - RNA, 32 nt, Homo Sapiens
acucagcaugguuuuugucaguucaccucuuc

SEQ ID NO: 190747 - RNA, 32 nt, Homo Sapiens
cagcucuggugccguuucucaagccugggcuu

SEQ ID NO: 190748 - RNA, 32 nt, Homo Sapiens
cgcgccgcccuguagcuugaggaggcgccggg

SEQ ID NO: 190749 - RNA, 32 nt, Homo Sapiens
gacaugcacccagugcaagacgguugugggug

SEQ ID NO: 190750 - RNA, 32 nt, Homo Sapiens
gguggcucacgucuguaaucccagcaauuugg

SEQ ID NO: 190751 - RNA, 32 nt, Homo Sapiens
caggugagagggggcggggagggccugaccga

SEQ ID NO: 190752 - RNA, 29 nt, Homo Sapiens
gcuagaaggggacagaggugucccugauu

SEQ ID NO: 190753 - RNA, 32 nt, Homo Sapiens
gcucggcggcgguggcguccugcgcgggcaag

SEQ ID NO: 190754 - RNA, 32 nt, Homo Sapiens
cccuuccuuuugcuccaaauuccuccucugcg

SEQ ID NO: 190755 - RNA, 32 nt, Homo Sapiens
agaagaucuggccaugcuggggcucacauucu

SEQ ID NO: 190756 - RNA, 32 nt, Homo Sapiens
cauugagcagcccauucccagcccugaggccc

SEQ ID NO: 190757 - RNA, 32 nt, Homo Sapiens
uucacacuaugaaacagaaagaucuguccaag

SEQ ID NO: 190758 - RNA, 32 nt, Homo Sapiens
uguuacaacgguuucuuuuucauuuuagccua

SEQ ID NO: 190759 - RNA, 32 nt, Homo Sapiens
cccagagcgggcccgccccgcugcggcuccca

SEQ ID NO: 190760 - RNA, 32 nt, Homo Sapiens
augaugcgcaagacgagcugccugcaguaucu

SEQ ID NO: 190761 - RNA, 32 nt, Homo Sapiens
gugaaagggcuuuggaaauaaucacgcaccaa

SEQ ID NO: 190762 - RNA, 32 nt, Homo Sapiens
uaagguauuucauacugccuuacuuaaaaguu

SEQ ID NO: 190763 - RNA, 32 nt, Homo Sapiens
acauggaugauuacagaaauucuaguaauggc

SEQ ID NO: 190764 - RNA, 32 nt, Homo Sapiens
cucuuuccuguggaaauagaacugucguaaag

SEQ ID NO: 190765 - RNA, 32 nt, Homo Sapiens
aaaauacugaaagcacaggggcagggacagac

SEQ ID NO: 190766 - RNA, 32 nt, Homo Sapiens
auuaucauuucccaugaugccguuacuuaaga

SEQ ID NO: 190767 - RNA, 32 nt, Homo Sapiens
gcucugcgcgccccgcggaggucggcggcgac

SEQ ID NO: 190768 - RNA, 32 nt, Homo Sapiens
auuuugcggaggggcggccugggaggggagga

SEQ ID NO: 190769 - RNA, 32 nt, Homo Sapiens
acuuugcauccaguuuacauuuaggcauuauu

SEQ ID NO: 190770 - RNA, 32 nt, Homo Sapiens
cccaccucuaaagcuggcaguggagucucugc

SEQ ID NO: 190771 - RNA, 32 nt, Homo Sapiens
guucguuccaaguuacuuucugagguauuuua

SEQ ID NO: 190772 - RNA, 32 nt, Homo Sapiens
acauacacugugaacucaaucuccagggcucc

SEQ ID NO: 190773 - RNA, 32 nt, Homo Sapiens
gggucccaccgccgccaccaugccucggggaa

SEQ ID NO: 190774 - RNA, 32 nt, Homo Sapiens
uaaaaaauaacacuuggaauaagauuuguaag

SEQ ID NO: 190775 - RNA, 32 nt, Homo Sapiens
ugccggagccuggccuggugcucugggcucug

SEQ ID NO: 190776 - RNA, 32 nt, Homo Sapiens
cggcggccugccuaagcagagccccuuccugu

SEQ ID NO: 190777 - RNA, 32 nt, Homo Sapiens
aacaacagcaacaaaaucuguuuuuaaaaugu

SEQ ID NO: 190778 - RNA, 32 nt, Homo Sapiens
ugguagcaggcgacauuaaggcugguccagcc

SEQ ID NO: 190779 - RNA, 32 nt, Homo Sapiens
gagaaucucacuuuuccuacucucguauuuua

SEQ ID NO: 190780 - RNA, 32 nt, Homo Sapiens
uugaucaaauuugaacuucauuuuggggggua

SEQ ID NO: 190781 - RNA, 32 nt, Homo Sapiens
ucagggguacucaagauucuucagcugugcca

SEQ ID NO: 190782 - RNA, 32 nt, Homo Sapiens
uacuacuuggucauugugaaauaaugauuugc

SEQ ID NO: 190783 - RNA, 32 nt, Homo Sapiens
gaggaggaggugaaccagcugcaccagcguua

SEQ ID NO: 190784 - RNA, 32 nt, Homo Sapiens
cggugaggacguggggaaccggagcccugugc

SEQ ID NO: 190785 - RNA, 32 nt, Homo Sapiens
agugggaugaaggaccugucuuggugggccgg

SEQ ID NO: 190786 - RNA, 32 nt, Homo Sapiens
agucucuuucaguuucauuuuuucucauccca

SEQ ID NO: 190787 - RNA, 31 nt, Homo Sapiens
gcugcaccaggacugcaaggaguccccacac

SEQ ID NO: 190788 - RNA, 32 nt, Homo Sapiens
ucuggggcuggggggcggggcuggaggggaag

SEQ ID NO: 190789 - RNA, 32 nt, Homo Sapiens
agccuuacguuaaauuuucaguccaguuauga

SEQ ID NO: 190790 - RNA, 32 nt, Homo Sapiens
gauucuguaauguauuugcaaauaauggauca

SEQ ID NO: 190791 - RNA, 32 nt, Homo Sapiens
ccacacccgacuaauuuuuuuauuuuuaguag

SEQ ID NO: 190792 - RNA, 32 nt, Homo Sapiens
caaagcgcccucuggaggcugcgcagcagaac

SEQ ID NO: 190793 - RNA, 32 nt, Homo Sapiens
gccauuacauugcuuuuucuuguuuguuuaaa

SEQ ID NO: 190794 - RNA, 32 nt, Homo Sapiens
ccuccggauuccccggcgccucgggaaaaugg

SEQ ID NO: 190795 - RNA, 32 nt, Homo Sapiens
aaggccacauaaaaagcccuaaaaaugaaaaa

SEQ ID NO: 190796 - RNA, 32 nt, Homo Sapiens
cugaucaagggagaggccaggcgcagcucacu

SEQ ID NO: 190797 - RNA, 32 nt, Homo Sapiens
guagccacgacggcggcggcgccgggaggcug

SEQ ID NO: 190798 - RNA, 32 nt, Homo Sapiens
cggccguggcaccgcuggagggggcggccugg

SEQ ID NO: 190799 - RNA, 32 nt, Homo Sapiens
auuacccagauuggcuccauggaaaaggagga

SEQ ID NO: 190800 - RNA, 32 nt, Homo Sapiens
uuaguuguuugagaugcuaagcaggauaauaa

SEQ ID NO: 190801 - RNA, 28 nt, Homo Sapiens
acagguggggugaccaggaugggaggaa

SEQ ID NO: 190802 - RNA, 32 nt, Homo Sapiens
acuuugccgaggggcugcuccggaccccguug

SEQ ID NO: 190803 - RNA, 32 nt, Homo Sapiens
cuuagaccuugauggcugaaauguccugaaac

SEQ ID NO: 190804 - RNA, 32 nt, Homo Sapiens
ccuggccuccgacuucaacgacuucauaaggc

SEQ ID NO: 190805 - RNA, 32 nt, Homo Sapiens
gcuucagccccggcucaggucgccgcagcccg

SEQ ID NO: 190806 - RNA, 30 nt, Homo Sapiens
ugcgggcgcgcgcaagcggcggcguggaag

SEQ ID NO: 190807 - RNA, 32 nt, Homo Sapiens
ccgauccuggucuuucagguccaucagggucc

SEQ ID NO: 190808 - RNA, 32 nt, Homo Sapiens
gaauuguuaacauuuuaauuuuuacaauugau

SEQ ID NO: 190809 - RNA, 32 nt, Homo Sapiens
auggccauaggggacagcacacuugugguugu

SEQ ID NO: 190810 - RNA, 32 nt, Homo Sapiens
caucaacuucucucaggaggaaugggaauauc

SEQ ID NO: 190811 - RNA, 32 nt, Homo Sapiens
caucuacuucgggccagcuuucugccucugua

SEQ ID NO: 190812 - RNA, 32 nt, Homo Sapiens
ugccucugccagcaaggaggggccggccagcu

SEQ ID NO: 190813 - RNA, 32 nt, Homo Sapiens
accuuuugaggacaaucuguaugguaaagcuc

SEQ ID NO: 190814 - RNA, 32 nt, Homo Sapiens
cuuccguugagcaccaagcaagauggcagcuu

SEQ ID NO: 190815 - RNA, 32 nt, Homo Sapiens
ugugaagacaucuggaacuuccguccuguacc

SEQ ID NO: 190816 - RNA, 32 nt, Homo Sapiens
cacaaaauacucaagaacaaaccaagaaauga

SEQ ID NO: 190817 - RNA, 32 nt, Homo Sapiens
ggcacgggaggguggcugugcgagguacugcc

SEQ ID NO: 190818 - RNA, 32 nt, Homo Sapiens
gcgccccugaagugucuccagcagaagagaug

SEQ ID NO: 190819 - RNA, 31 nt, Homo Sapiens
ggaggaggccacagccaaccaugacagugcu

SEQ ID NO: 190820 - RNA, 32 nt, Homo Sapiens
uaccuaucaaggaaaaacucuacaaggaacuu

SEQ ID NO: 190821 - RNA, 32 nt, Homo Sapiens
augcagaugcacuaaaacaaagaaaugguaaa

SEQ ID NO: 190822 - RNA, 32 nt, Homo Sapiens
cccauguggaacuuaccauugggauuguguuu

SEQ ID NO: 190823 - RNA, 32 nt, Homo Sapiens
cuguugugagaaauguuuauuuuuguggcacu

SEQ ID NO: 190824 - RNA, 32 nt, Homo Sapiens
caggaacuuccacuguucucacacacccaggu

SEQ ID NO: 190825 - RNA, 32 nt, Homo Sapiens
cucccagcugcccccaggacacugcccgggga

SEQ ID NO: 190826 - RNA, 32 nt, Homo Sapiens
gucuauccauccugcauagagcacaagucaca

SEQ ID NO: 190827 - RNA, 32 nt, Homo Sapiens
cugccaacucccucugccccagccccacccuu

SEQ ID NO: 190828 - RNA, 32 nt, Homo Sapiens
uccgaguauaguuuucuuuuuaucuuauuuuu

SEQ ID NO: 190829 - RNA, 32 nt, Homo Sapiens
cuuaaacacacagauauagacaugacacuggg

SEQ ID NO: 190830 - RNA, 32 nt, Homo Sapiens
uauauauaaaagaaacaaagguuuuuaaugau

SEQ ID NO: 190831 - RNA, 32 nt, Homo Sapiens
uuugucuuuaaguguaaauauuuuaaaauuug

SEQ ID NO: 190832 - RNA, 32 nt, Homo Sapiens
acuauuuaaaucuugauauuuuauucagcugg

SEQ ID NO: 190833 - RNA, 32 nt, Homo Sapiens
caauugagaaccaaaucaauaaauauccucaa

SEQ ID NO: 190834 - RNA, 32 nt, Homo Sapiens
aggacagagcaaagccaugaacaucauccuag

SEQ ID NO: 190835 - RNA, 32 nt, Homo Sapiens
ucacucaggcguagaagaaaagacacauauuu

SEQ ID NO: 190836 - RNA, 32 nt, Homo Sapiens
uucacugaccauacauuuuucuuagccccuca

SEQ ID NO: 190837 - RNA, 32 nt, Homo Sapiens
ugaugaugaugaugaugauaucuagaacucca

SEQ ID NO: 190838 - RNA, 32 nt, Homo Sapiens
ugagaauaaaaagccgcgagcccacagugacg

SEQ ID NO: 190839 - RNA, 32 nt, Homo Sapiens
ccucauaaauggaccagaggcuaauggacuag

SEQ ID NO: 190840 - RNA, 32 nt, Homo Sapiens
agcacggcucagccuccugcuauccccugacu

SEQ ID NO: 190841 - RNA, 32 nt, Homo Sapiens
agccuggugguuuuccucucccagugaaaaaa

SEQ ID NO: 190842 - RNA, 32 nt, Homo Sapiens
agcaacaauaggauggaaugcauaaaauccuu

SEQ ID NO: 190843 - RNA, 31 nt, Homo Sapiens
ugcaggaugaacugucgcucggaggugcugg

SEQ ID NO: 190844 - RNA, 32 nt, Homo Sapiens
uauuuauuuaaccuugaauauucaagaacauu

SEQ ID NO: 190845 - RNA, 32 nt, Homo Sapiens
augccucugaagaaauuuuaaacuggugauuu

SEQ ID NO: 190846 - RNA, 32 nt, Homo Sapiens
cugguuuguuuuuguuuuuacucucaaaauca

SEQ ID NO: 190847 - RNA, 32 nt, Homo Sapiens
aauuccaaagacagaagcagcugcuggcuucu

SEQ ID NO: 190848 - RNA, 32 nt, Homo Sapiens
cggcuuccgcggggcgcugggccgccagccuc

SEQ ID NO: 190849 - RNA, 32 nt, Homo Sapiens
ccuagugagcagggcucuggcccugaggaguc

SEQ ID NO: 190850 - RNA, 32 nt, Homo Sapiens
ccuacuuugucaacaaagaugcuauuuacccu

SEQ ID NO: 190851 - RNA, 32 nt, Homo Sapiens
augaccggaacacagcugaggacccuuguccu

SEQ ID NO: 190852 - RNA, 32 nt, Homo Sapiens
gccacugcacuccagccagggcgaaggaguga

SEQ ID NO: 190853 - RNA, 32 nt, Homo Sapiens
ugugaaagaauuagcaguaaaauacaugagau

SEQ ID NO: 190854 - RNA, 32 nt, Homo Sapiens
gaagcagcccauugcuggcccgccauguugua

SEQ ID NO: 190855 - RNA, 32 nt, Homo Sapiens
guucucuugguguuaaaacacuucuguccugu

SEQ ID NO: 190856 - RNA, 32 nt, Homo Sapiens
cuagauauuuagucuuugagaaucucaaagca

SEQ ID NO: 190857 - RNA, 32 nt, Homo Sapiens
uuauuuaacauuguuucuuuuagcuuuauuuu

SEQ ID NO: 190858 - RNA, 32 nt, Homo Sapiens
cugcggccccggcucgcugcuccagcugccca

SEQ ID NO: 190859 - RNA, 32 nt, Homo Sapiens
aagcauaaguguaacucccauccaccagggaa

SEQ ID NO: 190860 - RNA, 32 nt, Homo Sapiens
cuugcugagugcccucuuaguuggugugugag

SEQ ID NO: 190861 - RNA, 32 nt, Homo Sapiens
aagagcaaagauuuauaauuuaauguguaugu

SEQ ID NO: 190862 - RNA, 32 nt, Homo Sapiens
ugaguuagucccagccccaggcuccggccuug

SEQ ID NO: 190863 - RNA, 32 nt, Homo Sapiens
gcccgcgggaucagcacagcccggcccgcggc

SEQ ID NO: 190864 - RNA, 32 nt, Homo Sapiens
gucuucuccaauaaauggggugucaaccuuaa

SEQ ID NO: 190865 - RNA, 32 nt, Homo Sapiens
cacucugccgacaucauagaaauuguucaagu

SEQ ID NO: 190866 - RNA, 32 nt, Homo Sapiens
uguguagguuaucauaacuuguccugaucucc

SEQ ID NO: 190867 - RNA, 32 nt, Homo Sapiens
guuauaauuugguguuacuaagaugcuccuac

SEQ ID NO: 190868 - RNA, 31 nt, Homo Sapiens
accuaggcgcgcagccgccacgagauggcgc

SEQ ID NO: 190869 - RNA, 32 nt, Homo Sapiens
uguuauuauuuuuccuuuggaaugugaagguc

SEQ ID NO: 190870 - RNA, 32 nt, Homo Sapiens
uggcaugggagaugucugugcuuggagguacc

SEQ ID NO: 190871 - RNA, 32 nt, Homo Sapiens
accccaggcaaggcuuggggccccugucugcu

SEQ ID NO: 190872 - RNA, 32 nt, Homo Sapiens
caacugcucuuccucagcuguaguccccaaca

SEQ ID NO: 190873 - RNA, 32 nt, Homo Sapiens
gcuccgcccaaccagguggugcugagcuuccg

SEQ ID NO: 190874 - RNA, 32 nt, Homo Sapiens
gcggugcaugacgcgccucgggggcgguccuc

SEQ ID NO: 190875 - RNA, 32 nt, Homo Sapiens
cggaaaagacugccugccuuggaggggucaca

SEQ ID NO: 190876 - RNA, 32 nt, Homo Sapiens
caggagcaaccucggcgcccagggucugaggc

SEQ ID NO: 190877 - RNA, 32 nt, Homo Sapiens
aaacaaaaacaaaaaacuauaguuagaaaaau

SEQ ID NO: 190878 - RNA, 32 nt, Homo Sapiens
aagaccugcggcggcgggaggagagcuguggc

SEQ ID NO: 190879 - RNA, 32 nt, Homo Sapiens
cucgaggccccggagggcugggguccgacacc

SEQ ID NO: 190880 - RNA, 32 nt, Homo Sapiens
cucuuaaauaaucagucacuuggcuggacagg

SEQ ID NO: 190881 - RNA, 32 nt, Homo Sapiens
ucagauuauuugaguauggcugugauaagucu

SEQ ID NO: 190882 - RNA, 32 nt, Homo Sapiens
guguugugaugauguguuuuaaaaguugcacu

SEQ ID NO: 190883 - RNA, 32 nt, Homo Sapiens
ugaaagccgacagauacugcaagugcugggau

SEQ ID NO: 190884 - RNA, 32 nt, Homo Sapiens
gggccgcggcggugcggguucuagggcggcgg

SEQ ID NO: 190885 - RNA, 32 nt, Homo Sapiens
ggagcgagggaaacggacucggcggcgccggc

SEQ ID NO: 190886 - RNA, 32 nt, Homo Sapiens
cggcgggccccggcugcccgaucccccucgcu

SEQ ID NO: 190887 - RNA, 30 nt, Homo Sapiens
cggcuggcagggagugcggguccccgcccc

SEQ ID NO: 190888 - RNA, 32 nt, Homo Sapiens
agucauuaacgugauccaagcugacuccgguc

SEQ ID NO: 190889 - RNA, 32 nt, Homo Sapiens
cucacuuccauacagcucuacguggcaaauua

SEQ ID NO: 190890 - RNA, 32 nt, Homo Sapiens
guuauacagucuuuuuaaugaggauugguagg

SEQ ID NO: 190891 - RNA, 32 nt, Homo Sapiens
ugucuuucucucucccucucccacaccucaca

SEQ ID NO: 190892 - RNA, 32 nt, Homo Sapiens
gggaaaauucuauuacauguuuaaguccauuu

SEQ ID NO: 190893 - RNA, 32 nt, Homo Sapiens
uucugagggcagccccucuggugccaagagcu

SEQ ID NO: 190894 - RNA, 32 nt, Homo Sapiens
gagugcugcuggguguacgcugcaccugccca

SEQ ID NO: 190895 - RNA, 32 nt, Homo Sapiens
uuauuuuuccccaaaaagaaugggaugaucgu

SEQ ID NO: 190896 - RNA, 32 nt, Homo Sapiens
auguauuucuaaaaacuugugucuauauguau

SEQ ID NO: 190897 - RNA, 32 nt, Homo Sapiens
uucucucaugaaaaaauaaauugaugaaacua

SEQ ID NO: 190898 - RNA, 32 nt, Homo Sapiens
ucuuuuuaaaauuuaauugaucaggauuguac

SEQ ID NO: 190899 - RNA, 32 nt, Homo Sapiens
ggccuggaggcacaaaggagcuguguagugca

SEQ ID NO: 190900 - RNA, 32 nt, Homo Sapiens
uggcuccgugcagcuacagccaggccggcugc

SEQ ID NO: 190901 - RNA, 32 nt, Homo Sapiens
gauuccuggacccccuucuccuuuccuuucuu

SEQ ID NO: 190902 - RNA, 32 nt, Homo Sapiens
ccuagcggcgcgucgcugccaagccggccucc

SEQ ID NO: 190903 - RNA, 32 nt, Homo Sapiens
uaccuugucacacagcucuaaccugcugucug

SEQ ID NO: 190904 - RNA, 32 nt, Homo Sapiens
aauccugcauuacaguagcaucugcaauaagg

SEQ ID NO: 190905 - RNA, 32 nt, Homo Sapiens
gaaaaaugauaaaggcuuaaauugaggauuaa

SEQ ID NO: 190906 - RNA, 32 nt, Homo Sapiens
agcugccgcgcgcaggcuuagcucauuccucu

SEQ ID NO: 190907 - RNA, 32 nt, Homo Sapiens
ggacaaggcugugccaggcugggaggcucggg

SEQ ID NO: 190908 - RNA, 32 nt, Homo Sapiens
gaggaaguggcaguuauauaaaaacuacugug

SEQ ID NO: 190909 - RNA, 32 nt, Homo Sapiens
uggccuggagucggguggggcugggaguguaa

SEQ ID NO: 190910 - RNA, 32 nt, Homo Sapiens
ugccgcguccccuucgcagcgacgagacuucc

SEQ ID NO: 190911 - RNA, 32 nt, Homo Sapiens
uuuuauccaaaauaaaccuccagaagaaacua

SEQ ID NO: 190912 - RNA, 32 nt, Homo Sapiens
cucagcucuugccagcuucucugacacuuggg

SEQ ID NO: 190913 - RNA, 32 nt, Homo Sapiens
aagacagauuaggacaucgaaaaggaggaugg

SEQ ID NO: 190914 - RNA, 31 nt, Homo Sapiens
gcagagguuucagugagccaagauugcacua

SEQ ID NO: 190915 - RNA, 32 nt, Homo Sapiens
cguaucacccucggugcuuccucugucuccuc

SEQ ID NO: 190916 - RNA, 32 nt, Homo Sapiens
caugacugacagucccaguacugaaagaacau

SEQ ID NO: 190917 - RNA, 32 nt, Homo Sapiens
ccagacucagaauagcuccaauaugguaucua

SEQ ID NO: 190918 - RNA, 32 nt, Homo Sapiens
ccuccugaagcacuuuagauauuuuauacaua

SEQ ID NO: 190919 - RNA, 32 nt, Homo Sapiens
acuguacuuuuuuaaaaagaaacuauuuuugu

SEQ ID NO: 190920 - RNA, 32 nt, Homo Sapiens
uucaagugacugcagcagcagcgcagcgccuc

SEQ ID NO: 190921 - RNA, 32 nt, Homo Sapiens
gcgccccaugcgcaagcgucuuucugccccag

SEQ ID NO: 190922 - RNA, 32 nt, Homo Sapiens
ggcugugggaugcacccagcuguagccugggg

SEQ ID NO: 190923 - RNA, 32 nt, Homo Sapiens
cugaauacagugaucacguuguccuccaagga

SEQ ID NO: 190924 - RNA, 32 nt, Homo Sapiens
agaccagccugggaaacgcaaagcgaccccac

SEQ ID NO: 190925 - RNA, 32 nt, Homo Sapiens
gugaggggugcagcagccaggaggcgggcgga

SEQ ID NO: 190926 - RNA, 28 nt, Homo Sapiens
ucaggggugacaggaccagggcagagcc

SEQ ID NO: 190927 - RNA, 32 nt, Homo Sapiens
gauuuuguauaaaugaagugcuggacuuuacc

SEQ ID NO: 190928 - RNA, 32 nt, Homo Sapiens
cguuugaagaaagaucuaggguccugggucuc

SEQ ID NO: 190929 - RNA, 32 nt, Homo Sapiens
ucaagagaauuccacagagacauugcccagga

SEQ ID NO: 190930 - RNA, 32 nt, Homo Sapiens
ccccagagggccucauuuuuuauuaaguugac

SEQ ID NO: 190931 - RNA, 32 nt, Homo Sapiens
guccuauuugagaugaacuauauccuguaccu

SEQ ID NO: 190932 - RNA, 32 nt, Homo Sapiens
acaggagucaauccgaaucaggcccuaacaau

SEQ ID NO: 190933 - RNA, 32 nt, Homo Sapiens
ggaaaauaacuuuuuuuuuuuaagagacaggg

SEQ ID NO: 190934 - RNA, 32 nt, Homo Sapiens
aggaugugauuaauauaaauaauagcagauau

SEQ ID NO: 190935 - RNA, 32 nt, Homo Sapiens
uauggaacccaccuccuuugaagauacagagu

SEQ ID NO: 190936 - RNA, 32 nt, Homo Sapiens
ccuagaaaaugguuguugaaugguucugacca

SEQ ID NO: 190937 - RNA, 32 nt, Homo Sapiens
ugaaguacuguacaggguuguacaaugagaac

SEQ ID NO: 190938 - RNA, 32 nt, Homo Sapiens
uacccacgugguuuccucauucucuuccacca

SEQ ID NO: 190939 - RNA, 32 nt, Homo Sapiens
agacccacaauuuugagcaagcuuuuacucuu

SEQ ID NO: 190940 - RNA, 29 nt, Homo Sapiens
accuuugaaauuuuauauuguucugguac

SEQ ID NO: 190941 - RNA, 32 nt, Homo Sapiens
aauuugaauagugaaguuuugaaaauacuuug

SEQ ID NO: 190942 - RNA, 32 nt, Homo Sapiens
aggcgucggcccggcagcggcagcggcagcgg

SEQ ID NO: 190943 - RNA, 32 nt, Homo Sapiens
ccugcaggcagacggugccagggagguggcgg

SEQ ID NO: 190944 - RNA, 32 nt, Homo Sapiens
ugaauacugaagauuucuuagucaguuuuuag

SEQ ID NO: 190945 - RNA, 32 nt, Homo Sapiens
cugcuugcaauuuuuguucagucauugcacaa

SEQ ID NO: 190946 - RNA, 32 nt, Homo Sapiens
ccagucuguaugcacaaggcgggaugugaagu

SEQ ID NO: 190947 - RNA, 32 nt, Homo Sapiens
cgacgugguaaaaccccaucuauauuaaaaau

SEQ ID NO: 190948 - RNA, 32 nt, Homo Sapiens
ugaaaauagccaugcagacaagucucucaucu

SEQ ID NO: 190949 - RNA, 32 nt, Homo Sapiens
cagaccgugggccccucccagcccucagaccc

SEQ ID NO: 190950 - RNA, 32 nt, Homo Sapiens
cccauucacagcaucgcacucccaguccuuaa

SEQ ID NO: 190951 - RNA, 32 nt, Homo Sapiens
uggugaaugguguuuaaaaugccagaugccaa

SEQ ID NO: 190952 - RNA, 32 nt, Homo Sapiens
aucucauuuagggaaacuacagagcacuguug

SEQ ID NO: 190953 - RNA, 32 nt, Homo Sapiens
ggguuucccagcugcuuccugcucagcugggc

SEQ ID NO: 190954 - RNA, 30 nt, Homo Sapiens
ccuagucuggacugcuuccccaucagccuu

SEQ ID NO: 190955 - RNA, 32 nt, Homo Sapiens
cuuugcugcuaagaaggcgugcccaguggggu

SEQ ID NO: 190956 - RNA, 32 nt, Homo Sapiens
aagagacccagcugagcaacuccaagcaggag

SEQ ID NO: 190957 - RNA, 32 nt, Homo Sapiens
uuugcccucuguuccuuccagagacuaugugc

SEQ ID NO: 190958 - RNA, 32 nt, Homo Sapiens
ugccccugcuccauguccuuguguggcugcuc

SEQ ID NO: 190959 - RNA, 32 nt, Homo Sapiens
gaggcgcggcccggcagcucccgcaugcgcag

SEQ ID NO: 190960 - RNA, 32 nt, Homo Sapiens
cuauuaaucuuucuuuugauaaauccucuauu

SEQ ID NO: 190961 - RNA, 32 nt, Homo Sapiens
gcguccccuccgcgagcuuucggugacccacg

SEQ ID NO: 190962 - RNA, 32 nt, Homo Sapiens
gccaccgagaaguccuucccacugcacucccc

SEQ ID NO: 190963 - RNA, 32 nt, Homo Sapiens
guagcauuaaaauggagaaaagaaaguuuucu

SEQ ID NO: 190964 - RNA, 32 nt, Homo Sapiens
uggcacccucaggcugagggccccaauguaug

SEQ ID NO: 190965 - RNA, 32 nt, Homo Sapiens
ucgccguggccccggaggcagacgccauugga

SEQ ID NO: 190966 - RNA, 32 nt, Homo Sapiens
aaggcugcuucuuguguggcuuucuaugcugc

SEQ ID NO: 190967 - RNA, 32 nt, Homo Sapiens
uaaguaaggguuuuuucuuaacuuucguuaaa

SEQ ID NO: 190968 - RNA, 32 nt, Homo Sapiens
ucguggucccgggccuggcccaggggccccuu

SEQ ID NO: 190969 - RNA, 32 nt, Homo Sapiens
ugggggccggggggagcggggaggggguggag

SEQ ID NO: 190970 - RNA, 32 nt, Homo Sapiens
ccaccgccuuccccggcugcccggcagccucc

SEQ ID NO: 190971 - RNA, 32 nt, Homo Sapiens
ucauaaucccacugcauagaaauaacaagcgu

SEQ ID NO: 190972 - RNA, 32 nt, Homo Sapiens
gcccaaggcagggaagaaggaugugugugucc

SEQ ID NO: 190973 - RNA, 32 nt, Homo Sapiens
agaagaaauguggauuugauaaacuagugccu

SEQ ID NO: 190974 - RNA, 32 nt, Homo Sapiens
acuuaucaaucacaacagguaauagcaauaga

SEQ ID NO: 190975 - RNA, 28 nt, Homo Sapiens
ucaagauaagauuaaaauuggaggguaa

SEQ ID NO: 190976 - RNA, 32 nt, Homo Sapiens
gacugugcgggaagcuggggguggaugcaugg

SEQ ID NO: 190977 - RNA, 32 nt, Homo Sapiens
ugcaaugguuuguaggaauuuuaauaaaugua

SEQ ID NO: 190978 - RNA, 32 nt, Homo Sapiens
aacgguguuuguuauguuacauuuuaucuggc

SEQ ID NO: 190979 - RNA, 32 nt, Homo Sapiens
agaggggauugcuaaagugcugaaucgcgugu

SEQ ID NO: 190980 - RNA, 32 nt, Homo Sapiens
guuucccugcgguuacguccaagcccgccugc

SEQ ID NO: 190981 - RNA, 32 nt, Homo Sapiens
aaugacuauauaaucuugauauuuuuacuuuu

SEQ ID NO: 190982 - RNA, 32 nt, Homo Sapiens
guccuaaagcgcgggcuaagccugcaggaaag

SEQ ID NO: 190983 - RNA, 32 nt, Homo Sapiens
ccccccgccugccaccuccccccacaagugcc

SEQ ID NO: 190984 - RNA, 32 nt, Homo Sapiens
uacuggaaagugcaauuuuaaaaugaguaaaa

SEQ ID NO: 190985 - RNA, 32 nt, Homo Sapiens
auguacagagaaguacagaaaggcugggagca

SEQ ID NO: 190986 - RNA, 32 nt, Homo Sapiens
aaaauacaaaaauuagccaggugugauggugc

SEQ ID NO: 190987 - RNA, 32 nt, Homo Sapiens
agcccccggccgcggguccccgagugacgcug

SEQ ID NO: 190988 - RNA, 32 nt, Homo Sapiens
aacauguuggggaaacaaaaaaaaaaaaaaaa

SEQ ID NO: 190989 - RNA, 32 nt, Homo Sapiens
guacauguacuuuagauuaugguuuguauugu

SEQ ID NO: 190990 - RNA, 32 nt, Homo Sapiens
gaguauaugcacauuuaaaaaauaucauauag

SEQ ID NO: 190991 - RNA, 32 nt, Homo Sapiens
gagccauccagaccgaacagcgcccuccacgg

SEQ ID NO: 190992 - RNA, 32 nt, Homo Sapiens
guaacuaaacacacaugcaaacaugugaaugg

SEQ ID NO: 190993 - RNA, 32 nt, Homo Sapiens
uguuucuuagcuuggggagaugauggacuuag

SEQ ID NO: 190994 - RNA, 32 nt, Homo Sapiens
ugaggaaauggcaacacauggaagugaagucc

SEQ ID NO: 190995 - RNA, 32 nt, Homo Sapiens
uggguccgcgcgaagcccacucacgugugauc

SEQ ID NO: 190996 - RNA, 32 nt, Homo Sapiens
aggucucucuccagaggcccaggccuggacac

SEQ ID NO: 190997 - RNA, 32 nt, Homo Sapiens
acgagccgugcaggcugaaaaaauggcgccac

SEQ ID NO: 190998 - RNA, 32 nt, Homo Sapiens
aacaacuuacagguuaaaaaacaaacccaaag

SEQ ID NO: 190999 - RNA, 32 nt, Homo Sapiens
ccgcagcgcucgcccugacgcggccgccaugg

SEQ ID NO: 191000 - RNA, 32 nt, Homo Sapiens
accgagcgguuauagcugggccugcaggggac

SEQ ID NO: 191001 - RNA, 32 nt, Homo Sapiens
uacggcaccgccgcucggcccgcgucgcgugg

SEQ ID NO: 191002 - RNA, 32 nt, Homo Sapiens
gaagaauucgcaggaagaaaaaucauaguguu

SEQ ID NO: 191003 - RNA, 32 nt, Homo Sapiens
ugccugugaucccagcacuuuggguggcugag

SEQ ID NO: 191004 - RNA, 32 nt, Homo Sapiens
ggcgaggugcauagguuccaugugacaguggc

SEQ ID NO: 191005 - RNA, 32 nt, Homo Sapiens
uacccaggaagggaggcugucuggccagccuc

SEQ ID NO: 191006 - RNA, 32 nt, Homo Sapiens
aacugcaucuucuccccuugccaccccauggc

SEQ ID NO: 191007 - RNA, 32 nt, Homo Sapiens
cauugcacuccagccugggcgacagggugaga

SEQ ID NO: 191008 - RNA, 32 nt, Homo Sapiens
uuuugcacagaaaacacauuaucuggagagaa

SEQ ID NO: 191009 - RNA, 32 nt, Homo Sapiens
ucgccacucucccaccccccagcccccaccuc

SEQ ID NO: 191010 - RNA, 32 nt, Homo Sapiens
aauacccagcaauccagcguaaaauuaucaua

SEQ ID NO: 191011 - RNA, 32 nt, Homo Sapiens
uuaacaaauuagucuuugcugaguaaaagggg

SEQ ID NO: 191012 - RNA, 32 nt, Homo Sapiens
gaagagcggggcaaagaggauggaaaucauaa

SEQ ID NO: 191013 - RNA, 32 nt, Homo Sapiens
ucggagacaagcauggugcugcugcuucugcu

SEQ ID NO: 191014 - RNA, 32 nt, Homo Sapiens
agggcaaaguuaucuuuuuuuuuugcaaaauu

SEQ ID NO: 191015 - RNA, 32 nt, Homo Sapiens
gagaggggagggaugccugggaagugguuaac

SEQ ID NO: 191016 - RNA, 32 nt, Homo Sapiens
aaagugcucagggauuuauauuuuaaaacaaa

SEQ ID NO: 191017 - RNA, 32 nt, Homo Sapiens
ggacuuaaaacaaaccuugugcucuuuucaag

SEQ ID NO: 191018 - RNA, 30 nt, Homo Sapiens
cacacaucacuugcccaucuggcacuaaag

SEQ ID NO: 191019 - RNA, 32 nt, Homo Sapiens
acagcaaaaauucggacccuagcugaaacaga

SEQ ID NO: 191020 - RNA, 30 nt, Homo Sapiens
cacucucaugaaaugggggaagaagguagc

SEQ ID NO: 191021 - RNA, 32 nt, Homo Sapiens
accuucccugcccugcugggggugcucuuugg

SEQ ID NO: 191022 - RNA, 32 nt, Homo Sapiens
cccuccgagauggucagugugucaugggaagc

SEQ ID NO: 191023 - RNA, 32 nt, Homo Sapiens
cucccacugcaccccuucuccuccaagaauag

SEQ ID NO: 191024 - RNA, 31 nt, Homo Sapiens
ucagcgcugccgguucuuuaccaaaugugcu

SEQ ID NO: 191025 - RNA, 32 nt, Homo Sapiens
uauugcuagcccaaaaaucccaggggcaaaau

SEQ ID NO: 191026 - RNA, 32 nt, Homo Sapiens
gacacucugggaacugauuugaccucgaaugc

SEQ ID NO: 191027 - RNA, 30 nt, Homo Sapiens
gcugagaacaucucugccuaauuuaccaaa

SEQ ID NO: 191028 - RNA, 31 nt, Homo Sapiens
ggcuccgugaacacucuggcaacuggggagu

SEQ ID NO: 191029 - RNA, 29 nt, Homo Sapiens
cuucuguaaaguuuugucuucucguuuuu

SEQ ID NO: 191030 - RNA, 32 nt, Homo Sapiens
ggcuucagaaagauucauuaaacuacuuucca

SEQ ID NO: 191031 - RNA, 32 nt, Homo Sapiens
uggaguguggugccggcagcugccagcgccug

SEQ ID NO: 191032 - RNA, 32 nt, Homo Sapiens
gugaacauucuuuucuuuuccauuguuucuau

SEQ ID NO: 191033 - RNA, 32 nt, Homo Sapiens
cuggcagcagagaaacaaagucuggacccacu

SEQ ID NO: 191034 - RNA, 32 nt, Homo Sapiens
gccggggccaugagcgccgcccggccccaguu

SEQ ID NO: 191035 - RNA, 32 nt, Homo Sapiens
cuauaagugcuuuagaugggugucucgcugug

SEQ ID NO: 191036 - RNA, 32 nt, Homo Sapiens
uaaacuaaaaauuuacaagagaagaaagugaa

SEQ ID NO: 191037 - RNA, 31 nt, Homo Sapiens
aggucucauuugacuccgugcuuagguagau

SEQ ID NO: 191038 - RNA, 32 nt, Homo Sapiens
auuugaagggaaggucugaauaagcuuaccug

SEQ ID NO: 191039 - RNA, 32 nt, Homo Sapiens
cugugaagugggcgggcauggcugggacuaag

SEQ ID NO: 191040 - RNA, 32 nt, Homo Sapiens
gccugcuaaaaauacccgacuggaggagcaua

SEQ ID NO: 191041 - RNA, 32 nt, Homo Sapiens
ugcuauaaaauggaagacauugacauuguggu

SEQ ID NO: 191042 - RNA, 29 nt, Homo Sapiens
gaagaugaccgcgggcgccggcgugcucc

SEQ ID NO: 191043 - RNA, 32 nt, Homo Sapiens
aaaccucuacccaaaaguggccuuaagcaccg

SEQ ID NO: 191044 - RNA, 32 nt, Homo Sapiens
aggcggccagaggccugggaacaucauccugg

SEQ ID NO: 191045 - RNA, 32 nt, Homo Sapiens
uguaugcaaagacaaaacaauuaggucacagg

SEQ ID NO: 191046 - RNA, 32 nt, Homo Sapiens
cuuaucugcuccagauccauucaguagucacu

SEQ ID NO: 191047 - RNA, 32 nt, Homo Sapiens
agcuuggcugagcccgaugcuucucaagguga

SEQ ID NO: 191048 - RNA, 32 nt, Homo Sapiens
gacaguaguuuauuaugucaguauacauacau

SEQ ID NO: 191049 - RNA, 32 nt, Homo Sapiens
uaaaauugugugcacacacacacacaccuaga

SEQ ID NO: 191050 - RNA, 32 nt, Homo Sapiens
caaaucuauuuucucugcuguguauuaaauuc

SEQ ID NO: 191051 - RNA, 32 nt, Homo Sapiens
uaggaguaccacuggaggagacucagugcaga

SEQ ID NO: 191052 - RNA, 32 nt, Homo Sapiens
ccgcugcaggaauucggcccuccagcuccccu

SEQ ID NO: 191053 - RNA, 32 nt, Homo Sapiens
ucucauguacucuaccuucaagaagcauuuca

SEQ ID NO: 191054 - RNA, 32 nt, Homo Sapiens
aauuagccgggcgguaguggcaugcgccugua

SEQ ID NO: 191055 - RNA, 28 nt, Homo Sapiens
cucaccuuagggauucauuugaaugaug

SEQ ID NO: 191056 - RNA, 32 nt, Homo Sapiens
gcucuugucagccucugguucuccucgagucc

SEQ ID NO: 191057 - RNA, 32 nt, Homo Sapiens
uuggaauauaucaagacuagcuggcugaguug

SEQ ID NO: 191058 - RNA, 32 nt, Homo Sapiens
cccuucugauucuggucccccauccuagaauu

SEQ ID NO: 191059 - RNA, 32 nt, Homo Sapiens
cgauacucagaaugaagauguagagaaacaag

SEQ ID NO: 191060 - RNA, 27 nt, Homo Sapiens
gcaucgucauucuucaggauugcccua

SEQ ID NO: 191061 - RNA, 29 nt, Homo Sapiens
auguaaaugauguuauauuuuguaucuuu

SEQ ID NO: 191062 - RNA, 32 nt, Homo Sapiens
guuggaaacuguaaaaugauacuguagaaccu

SEQ ID NO: 191063 - RNA, 32 nt, Homo Sapiens
gauggaaaaaaaaaacaaaaaaauuuaaaaag

SEQ ID NO: 191064 - RNA, 32 nt, Homo Sapiens
uaguagacaugccuaugggaacauuacuucca

SEQ ID NO: 191065 - RNA, 32 nt, Homo Sapiens
uagcccaguucucucuuauuuucagcuuuaca

SEQ ID NO: 191066 - RNA, 32 nt, Homo Sapiens
cgugcucacagcacacgcacccacgcguggcu

SEQ ID NO: 191067 - RNA, 32 nt, Homo Sapiens
gucuacagcuaaugauugugucuuuauucuau

SEQ ID NO: 191068 - RNA, 32 nt, Homo Sapiens
cccucaaacucagucaugugguuccaaacuac

SEQ ID NO: 191069 - RNA, 32 nt, Homo Sapiens
ggcgcuggugcauucuguuuccucuugaucuc

SEQ ID NO: 191070 - RNA, 32 nt, Homo Sapiens
ccuagggcuggaaggcggcugcggcucaggaa

SEQ ID NO: 191071 - RNA, 32 nt, Homo Sapiens
acaaaacuuuuaaaauacaauuagugcugaua

SEQ ID NO: 191072 - RNA, 32 nt, Homo Sapiens
cagccuggaccacuccucauagcaauacuugg

SEQ ID NO: 191073 - RNA, 32 nt, Homo Sapiens
ugagcagcccgcgagggcggaagugggagcug

SEQ ID NO: 191074 - RNA, 32 nt, Homo Sapiens
ccagaaauuuaugguuggaccuugaagcaaga

SEQ ID NO: 191075 - RNA, 32 nt, Homo Sapiens
gugccggaccucugaaaagaucugcaggggcc

SEQ ID NO: 191076 - RNA, 32 nt, Homo Sapiens
cucccuccucaauaucuagccuauucaugcac

SEQ ID NO: 191077 - RNA, 30 nt, Homo Sapiens
agucaucuggacugcuuugugcuauaugaa

SEQ ID NO: 191078 - RNA, 32 nt, Homo Sapiens
cugccaggugccagcuguacugugcaccugca

SEQ ID NO: 191079 - RNA, 32 nt, Homo Sapiens
uaaagauugguaguuaucugagcuuaaacauu

SEQ ID NO: 191080 - RNA, 32 nt, Homo Sapiens
auguuccaugcauacucgggcaucaugcuaau

SEQ ID NO: 191081 - RNA, 32 nt, Homo Sapiens
acgaacgcacgcccugccccagcccgucucuc

SEQ ID NO: 191082 - RNA, 32 nt, Homo Sapiens
guggcuacugcuuuccucccagugucugcugu

SEQ ID NO: 191083 - RNA, 32 nt, Homo Sapiens
cacaaaggggggcuacgcagucacugacuucc

SEQ ID NO: 191084 - RNA, 32 nt, Homo Sapiens
guggcucugggcccuccugccccgugccuagg

SEQ ID NO: 191085 - RNA, 32 nt, Homo Sapiens
uucucgcccgcgaggcuucuccgggugggauc

SEQ ID NO: 191086 - RNA, 32 nt, Homo Sapiens
accuggagauaaauccugaugauuccauuauu

SEQ ID NO: 191087 - RNA, 32 nt, Homo Sapiens
cuguacagacccagcucuggcuuggaacagcc

SEQ ID NO: 191088 - RNA, 32 nt, Homo Sapiens
cuggcaaagaugaucaguaugaaaaugucauu

SEQ ID NO: 191089 - RNA, 32 nt, Homo Sapiens
uaagggaggcggcggcagcgcggcgguggggc

SEQ ID NO: 191090 - RNA, 32 nt, Homo Sapiens
cagugauuucggaaaugugucaaggcaauucc

SEQ ID NO: 191091 - RNA, 32 nt, Homo Sapiens
aguaaauuacaaauauaagauuaaagugaaaa

SEQ ID NO: 191092 - RNA, 32 nt, Homo Sapiens
gagugugguccggagaaagaaggcguggagaa

SEQ ID NO: 191093 - RNA, 32 nt, Homo Sapiens
gcggauggaaggacggaugcuucuuucucuuc

SEQ ID NO: 191094 - RNA, 32 nt, Homo Sapiens
cagccggcgggcgucccggaggcgguggcgca

SEQ ID NO: 191095 - RNA, 32 nt, Homo Sapiens
uuccuuccucaauaguccuguugguggcucac

SEQ ID NO: 191096 - RNA, 32 nt, Homo Sapiens
ucucccugccagcaugccugccugacccaccu

SEQ ID NO: 191097 - RNA, 32 nt, Homo Sapiens
cuccaggaaggggaggaggcgaggggagcccg

SEQ ID NO: 191098 - RNA, 32 nt, Homo Sapiens
cagcuguaugugggagccacuagcucaagcag

SEQ ID NO: 191099 - RNA, 30 nt, Homo Sapiens
cagcuccgucucggcggcggcgggcaguug

SEQ ID NO: 191100 - RNA, 31 nt, Homo Sapiens
gguagaggcacuagagcaccauagauacaaa

SEQ ID NO: 191101 - RNA, 32 nt, Homo Sapiens
uuacgaaagagcacagcacauaaaaaccaaau

SEQ ID NO: 191102 - RNA, 32 nt, Homo Sapiens
uuaauaagguggcaugcagauacauuggauag

SEQ ID NO: 191103 - RNA, 32 nt, Homo Sapiens
cccugggaccucagucccacucagccuccucc

SEQ ID NO: 191104 - RNA, 32 nt, Homo Sapiens
aaaaugaaaaaauaaaaaugaacagguauaaa

SEQ ID NO: 191105 - RNA, 32 nt, Homo Sapiens
ggcgaggguggccccgagcagcuccuccagcu

SEQ ID NO: 191106 - RNA, 32 nt, Homo Sapiens
uauacuccuguucccaggaucuugagcuuuag

SEQ ID NO: 191107 - RNA, 32 nt, Homo Sapiens
uuuucuuacccauauaucuuauguuaaaggag

SEQ ID NO: 191108 - RNA, 32 nt, Homo Sapiens
uguucagagaguaaauauauauccauuuaaug

SEQ ID NO: 191109 - RNA, 32 nt, Homo Sapiens
ugaaagacagcuuaaaugggaauauccagaau

SEQ ID NO: 191110 - RNA, 32 nt, Homo Sapiens
uaauugugucuaaagaaaauuaugaacugguc

SEQ ID NO: 191111 - RNA, 32 nt, Homo Sapiens
ugccugcgagcgcguccgcgggcugggcguuu

SEQ ID NO: 191112 - RNA, 32 nt, Homo Sapiens
uaauuauauccgaggucugggauuguuuuguc

SEQ ID NO: 191113 - RNA, 32 nt, Homo Sapiens
gguauggccccggccccuccccaccuuuccca

SEQ ID NO: 191114 - RNA, 32 nt, Homo Sapiens
ugucuagauuuaugugugcucugacaagaaau

SEQ ID NO: 191115 - RNA, 32 nt, Homo Sapiens
aauuuaggagaaaugugguaaaacuuagcaaa

SEQ ID NO: 191116 - RNA, 32 nt, Homo Sapiens
aggcagcgcugcuggggaacucgggggaacgc

SEQ ID NO: 191117 - RNA, 32 nt, Homo Sapiens
ugcaucuguggccagagcuggacagccaccca

SEQ ID NO: 191118 - RNA, 32 nt, Homo Sapiens
agucauuguauauaguucuaauaaacaaaucc

SEQ ID NO: 191119 - RNA, 32 nt, Homo Sapiens
aagaaauaaaacacccaaaacaauauaaaguu

SEQ ID NO: 191120 - RNA, 32 nt, Homo Sapiens
uuuuagacacaagcgagaggaucauggcggau

SEQ ID NO: 191121 - RNA, 32 nt, Homo Sapiens
uggaaucugugaauaugucaucuuacacauca

SEQ ID NO: 191122 - RNA, 32 nt, Homo Sapiens
augagaggaaaugagaacgaggcuuuggagca

SEQ ID NO: 191123 - RNA, 32 nt, Homo Sapiens
acuaaugucaaacuguaucaucaaaaacaaag

SEQ ID NO: 191124 - RNA, 32 nt, Homo Sapiens
ccaggagcgggcccgugugaacggugaugaau

SEQ ID NO: 191125 - RNA, 32 nt, Homo Sapiens
agguugauguuaaggaaaauagcauuuuguaa

SEQ ID NO: 191126 - RNA, 32 nt, Homo Sapiens
gggaccgagucucggcgccgccggggaacggg

SEQ ID NO: 191127 - RNA, 32 nt, Homo Sapiens
uuagaacuagaaaaauuuauagucuuuaaucu

SEQ ID NO: 191128 - RNA, 32 nt, Homo Sapiens
cugacccucccuccccugggcagaagaaacgc

SEQ ID NO: 191129 - RNA, 32 nt, Homo Sapiens
cuuccuuccccuccauagggccaggcauuuuu

SEQ ID NO: 191130 - RNA, 32 nt, Homo Sapiens
cuuuccgaguuggcugcagauuuguggugcgu

SEQ ID NO: 191131 - RNA, 32 nt, Homo Sapiens
acauaguaaaagacaacacugauaauuauacc

SEQ ID NO: 191132 - RNA, 32 nt, Homo Sapiens
uucaagagaguuccagacuggcacuuucaccc

SEQ ID NO: 191133 - RNA, 32 nt, Homo Sapiens
gaaggagccguuuaugagacacuccguggcgc

SEQ ID NO: 191134 - RNA, 32 nt, Homo Sapiens
ggcucacgccuguaaccucagcacuuugggag

SEQ ID NO: 191135 - RNA, 32 nt, Homo Sapiens
cagauuagaaaagaguuauuagagagagaugg

SEQ ID NO: 191136 - RNA, 32 nt, Homo Sapiens
acccgaccgcugccggccgcgcucccgcugcu

SEQ ID NO: 191137 - RNA, 32 nt, Homo Sapiens
cacgugguucccuccacccagguccccaucac

SEQ ID NO: 191138 - RNA, 32 nt, Homo Sapiens
uauacagguguuggcugaaguccgugccucac

SEQ ID NO: 191139 - RNA, 32 nt, Homo Sapiens
ucacauguacgaaguucucaccccagcuccuu

SEQ ID NO: 191140 - RNA, 32 nt, Homo Sapiens
ggucuuccugaacaguuucgucccgaggcucu

SEQ ID NO: 191141 - RNA, 32 nt, Homo Sapiens
gggaugagcgacugccuagcaagcaacccacu

SEQ ID NO: 191142 - RNA, 32 nt, Homo Sapiens
cucagauuuaucaguauuacuaccguucugua

SEQ ID NO: 191143 - RNA, 32 nt, Homo Sapiens
gcuccugugcucucgaccuggacucggccugc

SEQ ID NO: 191144 - RNA, 32 nt, Homo Sapiens
cauccugccagauuucuguuucucuugcuggg

SEQ ID NO: 191145 - RNA, 32 nt, Homo Sapiens
gcaggggaaggggcgggucggcgcugccugag

SEQ ID NO: 191146 - RNA, 30 nt, Homo Sapiens
acaggguuucacccuguuagccaggauggu

SEQ ID NO: 191147 - RNA, 32 nt, Homo Sapiens
acugaaaugagcaugcauuuucuuguaugaua

SEQ ID NO: 191148 - RNA, 32 nt, Homo Sapiens
ucacugagucccauaaugugguaaauguauaa

SEQ ID NO: 191149 - RNA, 32 nt, Homo Sapiens
aacuauaauaauauccgacacuuugauagaaa

SEQ ID NO: 191150 - RNA, 32 nt, Homo Sapiens
ggaaaggggcugcagguuccggaccggaccgg

SEQ ID NO: 191151 - RNA, 32 nt, Homo Sapiens
gggggauggccauggaaggguugaggggcccc

SEQ ID NO: 191152 - RNA, 32 nt, Homo Sapiens
caacauuugcuaagucucuacuguaugccagg

SEQ ID NO: 191153 - RNA, 32 nt, Homo Sapiens
aagguaaaugcuucagcaccggccauaauagc

SEQ ID NO: 191154 - RNA, 32 nt, Homo Sapiens
uauguuuguacaaaagaagauuguuaugggug

SEQ ID NO: 191155 - RNA, 32 nt, Homo Sapiens
cuaggaugauaauucagaagacugaucugugc

SEQ ID NO: 191156 - RNA, 32 nt, Homo Sapiens
ugucucucuuucucuccuuuuaauuuuggugu

SEQ ID NO: 191157 - RNA, 30 nt, Homo Sapiens
uguggugucuguguguaugaugucagugug

SEQ ID NO: 191158 - RNA, 32 nt, Homo Sapiens
cugcagucuucaacuccugaccucaagcaauu

SEQ ID NO: 191159 - RNA, 32 nt, Homo Sapiens
aaugggcuugacgaggccggcccgggagauga

SEQ ID NO: 191160 - RNA, 32 nt, Homo Sapiens
aaucucucucugaacacccccauucuccaccu

SEQ ID NO: 191161 - RNA, 32 nt, Homo Sapiens
gagauggcagcagugaagcagcagccaccagg

SEQ ID NO: 191162 - RNA, 28 nt, Homo Sapiens
ccggguccugcaggaccaggugccagcc

SEQ ID NO: 191163 - RNA, 32 nt, Homo Sapiens
gucuucgguuugcacagcuagaggccgcgcag

SEQ ID NO: 191164 - RNA, 32 nt, Homo Sapiens
cccacagggccccucugcagccugcccucccu

SEQ ID NO: 191165 - RNA, 32 nt, Homo Sapiens
uugcagggggagagauggaaaggcuagcagcu

SEQ ID NO: 191166 - RNA, 32 nt, Homo Sapiens
uuaagcacaaaauacauagaaauuggaaugug

SEQ ID NO: 191167 - RNA, 32 nt, Homo Sapiens
aguauagaaaaaacgccggguaugguggcuca

SEQ ID NO: 191168 - RNA, 32 nt, Homo Sapiens
caggggcuguuugaggauauauuuucacuuug

SEQ ID NO: 191169 - RNA, 32 nt, Homo Sapiens
ggccaagguccuuaacccuccuccagagcaac

SEQ ID NO: 191170 - RNA, 32 nt, Homo Sapiens
gcugccccguuuuuacuaauugcauuugcauu

SEQ ID NO: 191171 - RNA, 32 nt, Homo Sapiens
agauuuguuuauuuuuaccugucuuuauucaa

SEQ ID NO: 191172 - RNA, 32 nt, Homo Sapiens
gcuucggcaggcccagcucccgccugccagug

SEQ ID NO: 191173 - RNA, 32 nt, Homo Sapiens
gcuuuggcaggcccagcuccugccugccagug

SEQ ID NO: 191174 - RNA, 32 nt, Homo Sapiens
aaaauaaauaaauaaauuauggcugcuuuauu

SEQ ID NO: 191175 - RNA, 32 nt, Homo Sapiens
uccaguugucuccugcuagcaauauguacagu

SEQ ID NO: 191176 - RNA, 32 nt, Homo Sapiens
gcgggaguucccuccccuccacaucaggagcu

SEQ ID NO: 191177 - RNA, 32 nt, Homo Sapiens
ccagagauagaaugugaagacacgcgcuagaa

SEQ ID NO: 191178 - RNA, 32 nt, Homo Sapiens
uuaaaaaaugaaauagugauguuguccuaacu

SEQ ID NO: 191179 - RNA, 32 nt, Homo Sapiens
cacauaaugauuuuucucuucuaauuuguugg

SEQ ID NO: 191180 - RNA, 32 nt, Homo Sapiens
aaacaacauaauguuuaauuuacaacuuacau

SEQ ID NO: 191181 - RNA, 32 nt, Homo Sapiens
aucuuggaacuaaaugacuuuucuccucucag

SEQ ID NO: 191182 - RNA, 32 nt, Homo Sapiens
ugaguaacaaaauaaaguaguauuggguuaua

SEQ ID NO: 191183 - RNA, 32 nt, Homo Sapiens
uaagacguggacaggggccgcgcagauccggg

SEQ ID NO: 191184 - RNA, 32 nt, Homo Sapiens
caaggagcaggcggccgggccgucgcccgcgg

SEQ ID NO: 191185 - RNA, 32 nt, Homo Sapiens
ccacacccauucccaacccaauacuggggccu

SEQ ID NO: 191186 - RNA, 32 nt, Homo Sapiens
ucauucuaaaagaaucuucagaaagaaaaacu

SEQ ID NO: 191187 - RNA, 28 nt, Homo Sapiens
uuagaguugucuaaguugggugcaaauu

SEQ ID NO: 191188 - RNA, 32 nt, Homo Sapiens
cagcugagaggagaggcgcccccggggacgca

SEQ ID NO: 191189 - RNA, 32 nt, Homo Sapiens
ugucuuuuucuuuuccaaaucucucgucccac

SEQ ID NO: 191190 - RNA, 32 nt, Homo Sapiens
ugcagccacgguacggcagccggagcgccccc

SEQ ID NO: 191191 - RNA, 32 nt, Homo Sapiens
cccguuggcaauuggcggcuccugagaguccc

SEQ ID NO: 191192 - RNA, 32 nt, Homo Sapiens
agaauguugcuaaaaaguaguguuauggcuga

SEQ ID NO: 191193 - RNA, 32 nt, Homo Sapiens
uaauuaaagaaccuaguuugcuaugcuuaaaa

SEQ ID NO: 191194 - RNA, 32 nt, Homo Sapiens
gcuggcucauccugccggggcccuccacugcc

SEQ ID NO: 191195 - RNA, 32 nt, Homo Sapiens
gcaugggcagugccuucccugccugugggggu

SEQ ID NO: 191196 - RNA, 32 nt, Homo Sapiens
ggaugcauccccagcccaagucuccagcccaa

SEQ ID NO: 191197 - RNA, 32 nt, Homo Sapiens
uaaagcagaaaagacggagugaguaggaaaga

SEQ ID NO: 191198 - RNA, 32 nt, Homo Sapiens
uucaugucaucacuuuucaaugaagggagugc

SEQ ID NO: 191199 - RNA, 32 nt, Homo Sapiens
gcccagccaggccccaggcagggccaacccuu

SEQ ID NO: 191200 - RNA, 32 nt, Homo Sapiens
cuccaauccccucuccuuugguccaguaggag

SEQ ID NO: 191201 - RNA, 32 nt, Homo Sapiens
ugccggcggggacagcgccgcggcuggggccu

SEQ ID NO: 191202 - RNA, 32 nt, Homo Sapiens
cuguggucuuauucuccaugcacgggagcauc

SEQ ID NO: 191203 - RNA, 32 nt, Homo Sapiens
ccuugauuuagcuccaagaaauugaguaggga

SEQ ID NO: 191204 - RNA, 32 nt, Homo Sapiens
agagguugggcgggguggggacaguaggucau

SEQ ID NO: 191205 - RNA, 32 nt, Homo Sapiens
gagacacagcagugacucagagcuggucgcac

SEQ ID NO: 191206 - RNA, 32 nt, Homo Sapiens
aguugcaguuuucaggcuaauacagaaaaaga

SEQ ID NO: 191207 - RNA, 32 nt, Homo Sapiens
uggcgcauuccacacccgccucauggagccag

SEQ ID NO: 191208 - RNA, 32 nt, Homo Sapiens
gccgggaugggaccagcgacugagagagccag

SEQ ID NO: 191209 - RNA, 32 nt, Homo Sapiens
cgguccaggcggcuacauucggcccggccaug

SEQ ID NO: 191210 - RNA, 32 nt, Homo Sapiens
ggggcucccagggcuuccaaaccacgaaacgc

SEQ ID NO: 191211 - RNA, 32 nt, Homo Sapiens
aucagaaagggagggcucugaggcgccccaac

SEQ ID NO: 191212 - RNA, 32 nt, Homo Sapiens
aagacaacauucaauuugauagaaaucuugcc

SEQ ID NO: 191213 - RNA, 32 nt, Homo Sapiens
aauauuuuccccuguuuuauucugagaguuuu

SEQ ID NO: 191214 - RNA, 32 nt, Homo Sapiens
ggcugcuggugccaaccuucaacgggaucacu

SEQ ID NO: 191215 - RNA, 32 nt, Homo Sapiens
cccuuaaaaauauguguauacuacuuuggcuc

SEQ ID NO: 191216 - RNA, 32 nt, Homo Sapiens
gagcgccgggcuugggggcggggagcaggcgg

SEQ ID NO: 191217 - RNA, 32 nt, Homo Sapiens
uagaaaggaggcgacuccuagauccagggaua

SEQ ID NO: 191218 - RNA, 32 nt, Homo Sapiens
aucaaguguuccaaauacaauuugcacuaaaa

SEQ ID NO: 191219 - RNA, 32 nt, Homo Sapiens
acuuaccaccagagcauagaaaagcaugcaag

SEQ ID NO: 191220 - RNA, 32 nt, Homo Sapiens
aggaucccccucuggaugggaggagcagcaau

SEQ ID NO: 191221 - RNA, 32 nt, Homo Sapiens
ccaccucucccgcaguucccaaggacuuguca

SEQ ID NO: 191222 - RNA, 32 nt, Homo Sapiens
ugugcggaucucuggagugagcucuguuucgg

SEQ ID NO: 191223 - RNA, 32 nt, Homo Sapiens
gauuuuauaaucucuguaaaaaugaagauaaa

SEQ ID NO: 191224 - RNA, 32 nt, Homo Sapiens
cuuccugaccccuccuucucccucuccugggu

SEQ ID NO: 191225 - RNA, 32 nt, Homo Sapiens
gcaaugcaaccucacugaggagcacaauuggg

SEQ ID NO: 191226 - RNA, 32 nt, Homo Sapiens
ccagucugccaacgcuccuggcugaauaaaaa

SEQ ID NO: 191227 - RNA, 32 nt, Homo Sapiens
gagaaagccacuuuguuucucauuucuuuuuu

SEQ ID NO: 191228 - RNA, 32 nt, Homo Sapiens
ggugaaauuuaaaagcauuguuugagagagua

SEQ ID NO: 191229 - RNA, 28 nt, Homo Sapiens
ccccagcagggcccuccgagguggaaca

SEQ ID NO: 191230 - RNA, 32 nt, Homo Sapiens
guaguuaccgcggcggcgggagagcaagcgag

SEQ ID NO: 191231 - RNA, 32 nt, Homo Sapiens
cugcggccagagcggcuuugagcucggcugcg

SEQ ID NO: 191232 - RNA, 32 nt, Homo Sapiens
gggcacuuuggaaaacagaggcaguggcaaau

SEQ ID NO: 191233 - RNA, 32 nt, Homo Sapiens
ugccuguaaucugagcacuuugggagaccaag

SEQ ID NO: 191234 - RNA, 32 nt, Homo Sapiens
aaaguggccuuaaaacauuucagacacuauua

SEQ ID NO: 191235 - RNA, 32 nt, Homo Sapiens
ugaccaguggcuauggccugugcgaucccacc

SEQ ID NO: 191236 - RNA, 32 nt, Homo Sapiens
uccgcugaagauggagggggcuggggucacag

SEQ ID NO: 191237 - RNA, 32 nt, Homo Sapiens
uuuauuacuagauucuuaaguucaugggggaa

SEQ ID NO: 191238 - RNA, 32 nt, Homo Sapiens
acugggaaauggcuuaauaaaaauagauacaa

SEQ ID NO: 191239 - RNA, 32 nt, Homo Sapiens
uuuaaauggaguuauuuguagguccuuucuua

SEQ ID NO: 191240 - RNA, 32 nt, Homo Sapiens
gguccccucccucugucuucaggcucugccca

SEQ ID NO: 191241 - RNA, 32 nt, Homo Sapiens
uucuguguagcggcuuuaacccacguaugucu

SEQ ID NO: 191242 - RNA, 32 nt, Homo Sapiens
gaauggaauuaucacuacuguaucaugagugg

SEQ ID NO: 191243 - RNA, 32 nt, Homo Sapiens
augggaaaaaagaugggagugacugcauaaug

SEQ ID NO: 191244 - RNA, 32 nt, Homo Sapiens
gugcccgagacaagguugauauuuccaaaaua

SEQ ID NO: 191245 - RNA, 32 nt, Homo Sapiens
cugagucugaaauaccugggaaaccaguuaga

SEQ ID NO: 191246 - RNA, 32 nt, Homo Sapiens
cagaggaugugaguuaucgucuacacacuggc

SEQ ID NO: 191247 - RNA, 32 nt, Homo Sapiens
cucacugcauggucccuggggugucuggcuca

SEQ ID NO: 191248 - RNA, 32 nt, Homo Sapiens
aauuaacauuaccaccugagcuccaccuccug

SEQ ID NO: 191249 - RNA, 32 nt, Homo Sapiens
auauagcuucaaaaacaaaaacaaauguguua

SEQ ID NO: 191250 - RNA, 32 nt, Homo Sapiens
uucuauuauaaaccucuauuuucagggguuuc

SEQ ID NO: 191251 - RNA, 32 nt, Homo Sapiens
uugguaaaugucacucuguuuguuaggagaug

SEQ ID NO: 191252 - RNA, 32 nt, Homo Sapiens
gcucuuuucguucugucgccugcccgauggac

SEQ ID NO: 191253 - RNA, 32 nt, Homo Sapiens
ggcgggggcaaggcccgggccuuggagaugga

SEQ ID NO: 191254 - RNA, 32 nt, Homo Sapiens
acgaacaguuuaguggacaacuaaaucagacu

SEQ ID NO: 191255 - RNA, 32 nt, Homo Sapiens
ugcagcccaaaaccacuuugaccuccagauag

SEQ ID NO: 191256 - RNA, 32 nt, Homo Sapiens
gacauuuuguaucuggcugagcaacaaggaac

SEQ ID NO: 191257 - RNA, 32 nt, Homo Sapiens
acugccugggcugaccccgguggcggccccag

SEQ ID NO: 191258 - RNA, 31 nt, Homo Sapiens
cuguggacacacugccugcucuuccauauca

SEQ ID NO: 191259 - RNA, 32 nt, Homo Sapiens
uauggguccaugaacacacuugugaccuuagu

SEQ ID NO: 191260 - RNA, 32 nt, Homo Sapiens
aauauuuucuuuguuaaaauagaaugguauca

SEQ ID NO: 191261 - RNA, 32 nt, Homo Sapiens
cuggugguaagaggcccggcucggugucgagc

SEQ ID NO: 191262 - RNA, 32 nt, Homo Sapiens
uuuauauuaaaaaguuuauuuagcucauaguu

SEQ ID NO: 191263 - RNA, 32 nt, Homo Sapiens
ucugaauuccaaguagaauugauuucccuucu

SEQ ID NO: 191264 - RNA, 32 nt, Homo Sapiens
auuaauuuuggaaacagaaggagaagcacugc

SEQ ID NO: 191265 - RNA, 32 nt, Homo Sapiens
aacuugaaaugcaaauucauggucaucugguu

SEQ ID NO: 191266 - RNA, 32 nt, Homo Sapiens
cgggauggcugagaaagcggcgcuaggacccc

SEQ ID NO: 191267 - RNA, 32 nt, Homo Sapiens
ugaagagaaauauuuggaaaauaagauuucga

SEQ ID NO: 191268 - RNA, 32 nt, Homo Sapiens
auaaauggaaaaucauuuuacacaucauaccu

SEQ ID NO: 191269 - RNA, 32 nt, Homo Sapiens
cuucuuccacugggcucuggauuaaucaauua

SEQ ID NO: 191270 - RNA, 32 nt, Homo Sapiens
uaggaguuuuauguuuaccaugugaguccugc

SEQ ID NO: 191271 - RNA, 32 nt, Homo Sapiens
gauugguguaaaccucuuguugugcauccuca

SEQ ID NO: 191272 - RNA, 32 nt, Homo Sapiens
gagccagcuaagagaaaagaaauauuuggagg

SEQ ID NO: 191273 - RNA, 32 nt, Homo Sapiens
guccuggaaaauuuauugaaucacacagggua

SEQ ID NO: 191274 - RNA, 32 nt, Homo Sapiens
uuugauuuucuggacaauugguaaauguauua

SEQ ID NO: 191275 - RNA, 32 nt, Homo Sapiens
gggcuuuguacugggcccagggugcugagcuu

SEQ ID NO: 191276 - RNA, 32 nt, Homo Sapiens
uacuuagaaaauaauuucuaggcuuaucuugu

SEQ ID NO: 191277 - RNA, 32 nt, Homo Sapiens
ugccacaggaggaggaggaggacaugggguuu

SEQ ID NO: 191278 - RNA, 32 nt, Homo Sapiens
ucacgggacuauuuccaccacccccaguuagc

SEQ ID NO: 191279 - RNA, 32 nt, Homo Sapiens
caggucugaguggguccaggauucuguguuuc

SEQ ID NO: 191280 - RNA, 32 nt, Homo Sapiens
ucacacuguuugcucugggaaugccuguuucg

SEQ ID NO: 191281 - RNA, 32 nt, Homo Sapiens
uuagauguuguaaugagguuagcuuugcuuca

SEQ ID NO: 191282 - RNA, 32 nt, Homo Sapiens
agcugaaaaaggaaacuaaaguuagagacaga

SEQ ID NO: 191283 - RNA, 32 nt, Homo Sapiens
cgcgugaccccggcgcgcuagcguccgggacc

SEQ ID NO: 191284 - RNA, 32 nt, Homo Sapiens
ggcaccuccagaucauucacuucgcacguggg

SEQ ID NO: 191285 - RNA, 32 nt, Homo Sapiens
cugccugccucggcuuugaguuccggaagcac

SEQ ID NO: 191286 - RNA, 32 nt, Homo Sapiens
cggcugugggcacaaugcugcagaagucacag

SEQ ID NO: 191287 - RNA, 32 nt, Homo Sapiens
caauaaacccagccuggugggccccggccccu

SEQ ID NO: 191288 - RNA, 32 nt, Homo Sapiens
cagcuaccuccgggccauccaggccggcugcu

SEQ ID NO: 191289 - RNA, 32 nt, Homo Sapiens
uaaucaugcuaauaaacuuuuuuggagaugac

SEQ ID NO: 191290 - RNA, 32 nt, Homo Sapiens
gugcccuugguuggggggcgcgggcauauaac

SEQ ID NO: 191291 - RNA, 32 nt, Homo Sapiens
guauaauaaaaucagcaaaaagaucaaaaaaa

SEQ ID NO: 191292 - RNA, 32 nt, Homo Sapiens
aucaaauucuauaucccagauaccuucccuug

SEQ ID NO: 191293 - RNA, 32 nt, Homo Sapiens
aaggggcucugcaacgugauagaguugggcca

SEQ ID NO: 191294 - RNA, 32 nt, Homo Sapiens
cgggacugccagcugcuccccaaaagccacuu

SEQ ID NO: 191295 - RNA, 32 nt, Homo Sapiens
acccagaaaucugugauuuagcacugagaacu

SEQ ID NO: 191296 - RNA, 32 nt, Homo Sapiens
cgcuggcccccuccccggagggauaauauggu

SEQ ID NO: 191297 - RNA, 32 nt, Homo Sapiens
uaaaauguaucuaagaauaauaaaaucacguu

SEQ ID NO: 191298 - RNA, 32 nt, Homo Sapiens
ugaaugcuuuuuaauagcauucauuagcauua

SEQ ID NO: 191299 - RNA, 32 nt, Homo Sapiens
aaauguauguuaccauuaauuucuauuugacc

SEQ ID NO: 191300 - RNA, 32 nt, Homo Sapiens
cgucuaccuggccauccucuuucucuuccgga

SEQ ID NO: 191301 - RNA, 32 nt, Homo Sapiens
uaauaugguuacauagauucacggcucauggc

SEQ ID NO: 191302 - RNA, 32 nt, Homo Sapiens
guaagauaaaagggacuuuaauaaucaagauu

SEQ ID NO: 191303 - RNA, 32 nt, Homo Sapiens
gaguuuguuguacagauuauugcaucacccau

SEQ ID NO: 191304 - RNA, 31 nt, Homo Sapiens
gggcaggcucuuggccugccccaggcccaga

SEQ ID NO: 191305 - RNA, 32 nt, Homo Sapiens
cucagccuuuugggaauaauagcacaugauuu

SEQ ID NO: 191306 - RNA, 32 nt, Homo Sapiens
cacuuaugaaagauggauuuccaagguuaauu

SEQ ID NO: 191307 - RNA, 32 nt, Homo Sapiens
ggggaaggguggcauggagccucuccggcugc

SEQ ID NO: 191308 - RNA, 32 nt, Homo Sapiens
uuuaggggucguggugaugcuggaaugucaag

SEQ ID NO: 191309 - RNA, 32 nt, Homo Sapiens
aagcccggaaggaggggcagggggcgguggcu

SEQ ID NO: 191310 - RNA, 32 nt, Homo Sapiens
guuugagucacauggccaaugauucaaucaau

SEQ ID NO: 191311 - RNA, 32 nt, Homo Sapiens
aaguacaguguauaucucuggagaaauaacau

SEQ ID NO: 191312 - RNA, 32 nt, Homo Sapiens
uugggcuggucccaggguggcaccacccaggc

SEQ ID NO: 191313 - RNA, 32 nt, Homo Sapiens
cugccuggagaacauccaggcucagugaggaa

SEQ ID NO: 191314 - RNA, 32 nt, Homo Sapiens
ggaaagugagggugggggcucugcagucagac

SEQ ID NO: 191315 - RNA, 32 nt, Homo Sapiens
acuuaacaggccuguucaguauggaagacauu

SEQ ID NO: 191316 - RNA, 32 nt, Homo Sapiens
gauuauauugauugauuuucugauguuaagcc

SEQ ID NO: 191317 - RNA, 32 nt, Homo Sapiens
uaugcugacauggguguuccacuuccugcaaa

SEQ ID NO: 191318 - RNA, 32 nt, Homo Sapiens
uccagggagacugaauuucuucugccagucag

SEQ ID NO: 191319 - RNA, 32 nt, Homo Sapiens
cugggauacacaaaaauaccaauaugaugugu

SEQ ID NO: 191320 - RNA, 32 nt, Homo Sapiens
gagccucugguuuuccucugcuccucugccug

SEQ ID NO: 191321 - RNA, 32 nt, Homo Sapiens
gacugucaggguggcagugcccaucauguggc

SEQ ID NO: 191322 - RNA, 32 nt, Homo Sapiens
gugauuccaaaauaaaucucauccaagcaagu

SEQ ID NO: 191323 - RNA, 32 nt, Homo Sapiens
uagcugaucuucauuaauuacaucuuaauuag

SEQ ID NO: 191324 - RNA, 30 nt, Homo Sapiens
aaagaggagaugcuugaugagggcauggau

SEQ ID NO: 191325 - RNA, 32 nt, Homo Sapiens
ugccuucaagacaugucguuuuguagucagag

SEQ ID NO: 191326 - RNA, 32 nt, Homo Sapiens
cugaugcauuauggcacagaugagauaaugga

SEQ ID NO: 191327 - RNA, 32 nt, Homo Sapiens
aguaagucaauacaauuuuaucacucuuaucu

SEQ ID NO: 191328 - RNA, 29 nt, Homo Sapiens
cauuucaugggcaugucuaucagaggugg

SEQ ID NO: 191329 - RNA, 32 nt, Homo Sapiens
gcggccuugcgguggugcuuucugggcagcca

SEQ ID NO: 191330 - RNA, 32 nt, Homo Sapiens
gccaaaugaagaugaaguaaaucaggacucgg

SEQ ID NO: 191331 - RNA, 32 nt, Homo Sapiens
gcccugaagggagagacccaggccuggcagcc

SEQ ID NO: 191332 - RNA, 32 nt, Homo Sapiens
aaagaaaaacuaaaaaugaaccaaagugaaag

SEQ ID NO: 191333 - RNA, 32 nt, Homo Sapiens
guaauuauugugaacaccuugcuuugugguca

SEQ ID NO: 191334 - RNA, 32 nt, Homo Sapiens
cugguucugcagagacccacucugaccccacu

SEQ ID NO: 191335 - RNA, 32 nt, Homo Sapiens
agguggaggccggcagggcggaggcggagccc

SEQ ID NO: 191336 - RNA, 32 nt, Homo Sapiens
cagccuccuccuccccugccagccucuuccuu

SEQ ID NO: 191337 - RNA, 32 nt, Homo Sapiens
aaggugacagccgucccaacccugcccagccu

SEQ ID NO: 191338 - RNA, 32 nt, Homo Sapiens
uauacauauguaucuuuuuuucaucaaaauuu

SEQ ID NO: 191339 - RNA, 32 nt, Homo Sapiens
aaggagacgcagccuuucaacaccuggcaggg

SEQ ID NO: 191340 - RNA, 31 nt, Homo Sapiens
gcuuccuccaccucagcucagagcacaguga

SEQ ID NO: 191341 - RNA, 32 nt, Homo Sapiens
aaucccuucauuguaaacuagcaccaucuuua

SEQ ID NO: 191342 - RNA, 32 nt, Homo Sapiens
cgcggcuuggccgccauccgggacgcuuccag

SEQ ID NO: 191343 - RNA, 32 nt, Homo Sapiens
uuaccggagcugcgauuggggcugggaccaaa

SEQ ID NO: 191344 - RNA, 32 nt, Homo Sapiens
uauaaacaaaaauuauaauaaggagcagcuuu

SEQ ID NO: 191345 - RNA, 32 nt, Homo Sapiens
gaggggaggggagaggccauggccgucccagc

SEQ ID NO: 191346 - RNA, 32 nt, Homo Sapiens
aucagggaaugggagaagaugggagcuaagaa

SEQ ID NO: 191347 - RNA, 31 nt, Homo Sapiens
aaggaaauagcaaaacaggauuucugcuccu

SEQ ID NO: 191348 - RNA, 30 nt, Homo Sapiens
ucuucauggaagccuuucccagcccugguc

SEQ ID NO: 191349 - RNA, 32 nt, Homo Sapiens
uauugucuccgaggauagaaaagcugugugau

SEQ ID NO: 191350 - RNA, 32 nt, Homo Sapiens
cccuugccacuaccucgcccccccacccagcc

SEQ ID NO: 191351 - RNA, 31 nt, Homo Sapiens
gacugccaagccacccuaagaccuugggagg

SEQ ID NO: 191352 - RNA, 32 nt, Homo Sapiens
uccaaagugucugcaauggacaacaauugaag

SEQ ID NO: 191353 - RNA, 32 nt, Homo Sapiens
ucaccugcucaacauguaauuauuuaauaaaa

SEQ ID NO: 191354 - RNA, 32 nt, Homo Sapiens
cccccuuggaguuuugucaguuucacacuguu

SEQ ID NO: 191355 - RNA, 32 nt, Homo Sapiens
gagugacagcuaugugccagacugcauaaagg

SEQ ID NO: 191356 - RNA, 32 nt, Homo Sapiens
ucuccaugucugauuacaaacagucuccacau

SEQ ID NO: 191357 - RNA, 30 nt, Homo Sapiens
cuccuggucugugcugcccugcucugggga

SEQ ID NO: 191358 - RNA, 31 nt, Homo Sapiens
aggcugugaaacacacauacagcccuguuag

SEQ ID NO: 191359 - RNA, 32 nt, Homo Sapiens
gggggagggaggagguauauuggaacucuucu

SEQ ID NO: 191360 - RNA, 32 nt, Homo Sapiens
uccccgcuucccuccagccccccauccuuggc

SEQ ID NO: 191361 - RNA, 32 nt, Homo Sapiens
ggcggccucagaguccacggagcucgcggcga

SEQ ID NO: 191362 - RNA, 32 nt, Homo Sapiens
ugaacuugcuggaaauacaaauccucaggccc

SEQ ID NO: 191363 - RNA, 32 nt, Homo Sapiens
agaauguaucuagguggcaguaucugcucuua

SEQ ID NO: 191364 - RNA, 32 nt, Homo Sapiens
ccaacuccucuggacccucgcggccgugggca

SEQ ID NO: 191365 - RNA, 28 nt, Homo Sapiens
guucuauguuuauagauguguuuucaga

SEQ ID NO: 191366 - RNA, 32 nt, Homo Sapiens
ccaagucgaccuggcaucagguccuggcugcc

SEQ ID NO: 191367 - RNA, 32 nt, Homo Sapiens
cgacugcccuccccaccccacccccgccaccc

SEQ ID NO: 191368 - RNA, 32 nt, Homo Sapiens
uaucggcuaggcgugguggugcaugccuguaa

SEQ ID NO: 191369 - RNA, 32 nt, Homo Sapiens
cggccucgggggaguuuccgcggccgccgggg

SEQ ID NO: 191370 - RNA, 32 nt, Homo Sapiens
gcuuccugaugauggucauuggggugguuguc

SEQ ID NO: 191371 - RNA, 32 nt, Homo Sapiens
uuuauuucuguucuaaccuauuacuguauaac

SEQ ID NO: 191372 - RNA, 32 nt, Homo Sapiens
ggcuuucuggcuccuccuccgugcagaguugu

SEQ ID NO: 191373 - RNA, 32 nt, Homo Sapiens
ggagaaaaggauuuuugcauguuuagaaauca

SEQ ID NO: 191374 - RNA, 32 nt, Homo Sapiens
aagccugucaguggcccucccuggugcacugu

SEQ ID NO: 191375 - RNA, 32 nt, Homo Sapiens
ccuagaauucauacgaugaaaucuucacucuc

SEQ ID NO: 191376 - RNA, 32 nt, Homo Sapiens
acuugugaaugggagaagcugccccaggaauc

SEQ ID NO: 191377 - RNA, 32 nt, Homo Sapiens
ccguuaccccaacuccuccccauccgcuccua

SEQ ID NO: 191378 - RNA, 32 nt, Homo Sapiens
gcggugggucauggcuggcugcacccgcaaac

SEQ ID NO: 191379 - RNA, 32 nt, Homo Sapiens
cuggcuggggacgaucacaaagccucucuggu

SEQ ID NO: 191380 - RNA, 32 nt, Homo Sapiens
agccauggcuccuggggcgcuuccaggcauuc

SEQ ID NO: 191381 - RNA, 32 nt, Homo Sapiens
agcuucagcccggaagacaggcugcucucuca

SEQ ID NO: 191382 - RNA, 32 nt, Homo Sapiens
uagagggauuuuuuuuuuuuuaaugaaaaaaa

SEQ ID NO: 191383 - RNA, 32 nt, Homo Sapiens
acaugaaugaucuggacagcgccuuggugccg

SEQ ID NO: 191384 - RNA, 32 nt, Homo Sapiens
agaucuuuucauuuuucuuauuuucagcuuua

SEQ ID NO: 191385 - RNA, 32 nt, Homo Sapiens
uuuaaaggaaaagaaggaaggacuuaaauagc

SEQ ID NO: 191386 - RNA, 32 nt, Homo Sapiens
cuuaagggccgcggaaucggagcgaccuuggu

SEQ ID NO: 191387 - RNA, 32 nt, Homo Sapiens
gacauucugaaugcuucuaaguaaauacaauu

SEQ ID NO: 191388 - RNA, 32 nt, Homo Sapiens
ugacacugcgucugcgcacacuucguugcuca

SEQ ID NO: 191389 - RNA, 31 nt, Homo Sapiens
agcgggcggugcccgcggcggcguuuccugg

SEQ ID NO: 191390 - RNA, 32 nt, Homo Sapiens
cccugacucagagggaacccaggcuggaugcu

SEQ ID NO: 191391 - RNA, 32 nt, Homo Sapiens
agagaaaagagcgacaaggaaaaguuaggacu

SEQ ID NO: 191392 - RNA, 32 nt, Homo Sapiens
agcaugcacaugccacugucaccaaaacaaac

SEQ ID NO: 191393 - RNA, 32 nt, Homo Sapiens
uuauagcauguaauauuaaauuccuccugucu

SEQ ID NO: 191394 - RNA, 32 nt, Homo Sapiens
cugaaccaccugaaagguugauguuaaggaaa

SEQ ID NO: 191395 - RNA, 32 nt, Homo Sapiens
guuuccauuuucuucaucucgaaggugagggg

SEQ ID NO: 191396 - RNA, 32 nt, Homo Sapiens
aaguuggugcuuuugagaaccaaguaaaacaa

SEQ ID NO: 191397 - RNA, 32 nt, Homo Sapiens
ucgccggaaacaucgugcgccacaucccggac

SEQ ID NO: 191398 - RNA, 32 nt, Homo Sapiens
uaaacauuugagaacaguguuacucugagcag

SEQ ID NO: 191399 - RNA, 32 nt, Homo Sapiens
ucccugguaccucgaggcaccauuccagccag

SEQ ID NO: 191400 - RNA, 32 nt, Homo Sapiens
aaaaaagaaauacuuaaaagaauauguugguu

SEQ ID NO: 191401 - RNA, 32 nt, Homo Sapiens
caccgggcgccccuuccaccuuccaaggagcu

SEQ ID NO: 191402 - RNA, 30 nt, Homo Sapiens
ccacaaggcaggcguggaccuccagccuug

SEQ ID NO: 191403 - RNA, 32 nt, Homo Sapiens
gcuccacuuggcccccgcucccggcccgcccc

SEQ ID NO: 191404 - RNA, 32 nt, Homo Sapiens
cuccgccggcccccugccucgcagugguuucu

SEQ ID NO: 191405 - RNA, 31 nt, Homo Sapiens
ggcagcaggcgcagcccagccucgaaaugca

SEQ ID NO: 191406 - RNA, 32 nt, Homo Sapiens
uuuacuccugugauuauguuggaauauuugga

SEQ ID NO: 191407 - RNA, 32 nt, Homo Sapiens
uaaucuuagugucaauaaauauuaaaaaugua

SEQ ID NO: 191408 - RNA, 30 nt, Homo Sapiens
gcucacuguuuaguuggggaaaccauuugu

SEQ ID NO: 191409 - RNA, 32 nt, Homo Sapiens
ugucacuagagcaaaauuguagagauaaugcu

SEQ ID NO: 191410 - RNA, 32 nt, Homo Sapiens
ggagacgcccccacggauucgccccgccgcgc

SEQ ID NO: 191411 - RNA, 32 nt, Homo Sapiens
aaagcugcacagggcccuacgcggccgccuca

SEQ ID NO: 191412 - RNA, 32 nt, Homo Sapiens
gagcaaauacucagauuuaaaauuacuuuaaa

SEQ ID NO: 191413 - RNA, 32 nt, Homo Sapiens
uccuggggaaaagaagcacccagaccccgcgc

SEQ ID NO: 191414 - RNA, 32 nt, Homo Sapiens
caccugacugguuuucguauuuuuuuggugga

SEQ ID NO: 191415 - RNA, 32 nt, Homo Sapiens
aacaggaaagcaaaccugaaaauacacuaucc

SEQ ID NO: 191416 - RNA, 32 nt, Homo Sapiens
gugcuuggccuagggugagccuucaaccuaga

SEQ ID NO: 191417 - RNA, 32 nt, Homo Sapiens
ggacagccaaaagaagacccagagagugucac

SEQ ID NO: 191418 - RNA, 32 nt, Homo Sapiens
uaagacagauguugcaccuaggacugaggccg

SEQ ID NO: 191419 - RNA, 32 nt, Homo Sapiens
ugagagguggccaggggcaggcagaugguugc

SEQ ID NO: 191420 - RNA, 32 nt, Homo Sapiens
auacuggagagaaaccguacagaugaaugugu

SEQ ID NO: 191421 - RNA, 32 nt, Homo Sapiens
cuucgggcuguccccaggcgucgugcccgcgu

SEQ ID NO: 191422 - RNA, 32 nt, Homo Sapiens
uuacuuauauaagguaacucauuuucucauua

SEQ ID NO: 191423 - RNA, 32 nt, Homo Sapiens
cuagguuugaaacaaccuccuucucucuuuug

SEQ ID NO: 191424 - RNA, 32 nt, Homo Sapiens
uuggccccauccccacaccccuuuucugcucu

SEQ ID NO: 191425 - RNA, 32 nt, Homo Sapiens
aacuauuauucugaaacaaaaugugacaauuc

SEQ ID NO: 191426 - RNA, 32 nt, Homo Sapiens
auggcucauucucuccuuccagcucuuuacau

SEQ ID NO: 191427 - RNA, 32 nt, Homo Sapiens
ggcaggauggagaacagugccuguuuggggga

SEQ ID NO: 191428 - RNA, 32 nt, Homo Sapiens
gaauugcaugcugggaagcaucaguugucaaa

SEQ ID NO: 191429 - RNA, 32 nt, Homo Sapiens
ucuaacaaaucuuuuuagucaucuuuuauaua

SEQ ID NO: 191430 - RNA, 32 nt, Homo Sapiens
gcacgcuugaguuugaaaaacacugaguaugu

SEQ ID NO: 191431 - RNA, 32 nt, Homo Sapiens
caccucauuuccccccuugaccacugggccag

SEQ ID NO: 191432 - RNA, 32 nt, Homo Sapiens
uaaaguauaagacuuuaaaauaauacaaaaca

SEQ ID NO: 191433 - RNA, 32 nt, Homo Sapiens
acucucaucaguggcagauuuugguguaacau

SEQ ID NO: 191434 - RNA, 32 nt, Homo Sapiens
cuucauaaaaauuuuacuuaaaaucuguaacg

SEQ ID NO: 191435 - RNA, 32 nt, Homo Sapiens
cucuguaugcugucacaccuauauuauuaaac

SEQ ID NO: 191436 - RNA, 32 nt, Homo Sapiens
caaggagccagaggccaugcaguggcucaggg

SEQ ID NO: 191437 - RNA, 30 nt, Homo Sapiens
gcucagggacggcuugaugggagaggcugg

SEQ ID NO: 191438 - RNA, 32 nt, Homo Sapiens
uaaccauaguauaauuguuauauuaaggaguu

SEQ ID NO: 191439 - RNA, 32 nt, Homo Sapiens
uguucaaaacaaaauguuacaacaauaaacga

SEQ ID NO: 191440 - RNA, 32 nt, Homo Sapiens
gggcuuagggagaggagggaggcaugccuggg

SEQ ID NO: 191441 - RNA, 29 nt, Homo Sapiens
acgccagcgguccggguagcagcuccagg

SEQ ID NO: 191442 - RNA, 32 nt, Homo Sapiens
gcaaggaguuggggagcggggaggaggccggc

SEQ ID NO: 191443 - RNA, 32 nt, Homo Sapiens
ucauugcaugagaugagaaagaaggacaaacu

SEQ ID NO: 191444 - RNA, 32 nt, Homo Sapiens
cagaugggaaacugaggcccagcaagaggcag

SEQ ID NO: 191445 - RNA, 32 nt, Homo Sapiens
ccaguguuugcuugcucuauguuucaguagca

SEQ ID NO: 191446 - RNA, 32 nt, Homo Sapiens
caccuggcggacgaggcgcugcugcuaccgcu

SEQ ID NO: 191447 - RNA, 32 nt, Homo Sapiens
ggcuuccuccugcucucggcgccgcugggcga

SEQ ID NO: 191448 - RNA, 32 nt, Homo Sapiens
cccugacucccacaguagacuagucuuauggg

SEQ ID NO: 191449 - RNA, 32 nt, Homo Sapiens
caccuccccgguuccagcgauucuccugccuc

SEQ ID NO: 191450 - RNA, 32 nt, Homo Sapiens
uguuguaguuuauguaguaagugacuuggcac

SEQ ID NO: 191451 - RNA, 32 nt, Homo Sapiens
ccucuugaguuugauuugacaagaugccuucc

SEQ ID NO: 191452 - RNA, 32 nt, Homo Sapiens
cugugcuuggagaggggagguggcucuccagu

SEQ ID NO: 191453 - RNA, 32 nt, Homo Sapiens
guauuuguuguuuagccaaaacagaaaaugau

SEQ ID NO: 191454 - RNA, 32 nt, Homo Sapiens
ucugggaugcaauacuaggaaguaaagugaag

SEQ ID NO: 191455 - RNA, 32 nt, Homo Sapiens
cugcgccaagggcgacauccccccgccgcugc

SEQ ID NO: 191456 - RNA, 32 nt, Homo Sapiens
cagauggcagagcuaucucucucauagcuuuu

SEQ ID NO: 191457 - RNA, 32 nt, Homo Sapiens
gguuuuccguuuacugugaugugcuacuguaa

SEQ ID NO: 191458 - RNA, 32 nt, Homo Sapiens
uguguagauauguguguauauguaucaggaaa

SEQ ID NO: 191459 - RNA, 32 nt, Homo Sapiens
cauuuggggagcuuuuuauauuguuuauuuca

SEQ ID NO: 191460 - RNA, 32 nt, Homo Sapiens
uguaauaacaaccacaagaaaagccauacauc

SEQ ID NO: 191461 - RNA, 32 nt, Homo Sapiens
ggcacgagggacacacgcgaggcgcuguccuu

SEQ ID NO: 191462 - RNA, 32 nt, Homo Sapiens
cucacuucaaaauuauuuuaugcuaugugaau

SEQ ID NO: 191463 - RNA, 32 nt, Homo Sapiens
uuuacuaaaaauacaaaaaacuagccaggcgu

SEQ ID NO: 191464 - RNA, 32 nt, Homo Sapiens
cccagagcugucagcaccggccucagcccagg

SEQ ID NO: 191465 - RNA, 32 nt, Homo Sapiens
auucuucucaccggccucggccccaacguguc

SEQ ID NO: 191466 - RNA, 32 nt, Homo Sapiens
gacaggcgccgugggucucccgggccuccgua

SEQ ID NO: 191467 - RNA, 32 nt, Homo Sapiens
cguuugcugcuuugcaucuucuccaggcccug

SEQ ID NO: 191468 - RNA, 32 nt, Homo Sapiens
cugcguuccccucccuguccugccaguugacg

SEQ ID NO: 191469 - RNA, 32 nt, Homo Sapiens
gcagaagaucacaguuccuuucuggggcagca

SEQ ID NO: 191470 - RNA, 32 nt, Homo Sapiens
gauguauuugauuuucuaauaaagguaauguu

SEQ ID NO: 191471 - RNA, 32 nt, Homo Sapiens
gcucccuaccuccuaaaccaacaacccagugc

SEQ ID NO: 191472 - RNA, 32 nt, Homo Sapiens
ugaugaauauaaaaaguaaccaaccucauugg

SEQ ID NO: 191473 - RNA, 31 nt, Homo Sapiens
agccguccccgagucgcuccuaggucacugg

SEQ ID NO: 191474 - RNA, 32 nt, Homo Sapiens
aaggucgauuguaauggauugccguuuguacc

SEQ ID NO: 191475 - RNA, 32 nt, Homo Sapiens
gagccguccauucuucagugucucuguuuuuu

SEQ ID NO: 191476 - RNA, 32 nt, Homo Sapiens
gacuucaaaaauuaauaaaaagaaaagaaaaa

SEQ ID NO: 191477 - RNA, 32 nt, Homo Sapiens
guauuuuaguucaaaugauguauaaaguuuua

SEQ ID NO: 191478 - RNA, 32 nt, Homo Sapiens
cagcccugacagcacgcuccagcccucuggga

SEQ ID NO: 191479 - RNA, 32 nt, Homo Sapiens
ggcacagccagcccaaaccuugggcccuggaa

SEQ ID NO: 191480 - RNA, 32 nt, Homo Sapiens
caaacuccaggcuccggucgcgcacgggacga

SEQ ID NO: 191481 - RNA, 32 nt, Homo Sapiens
uaauauugaaaacgacgauauaauuauuauaa

SEQ ID NO: 191482 - RNA, 32 nt, Homo Sapiens
cacuuugaaagauaacauuuuauuaugauggu

SEQ ID NO: 191483 - RNA, 32 nt, Homo Sapiens
ugacagaguggccuuggagacacaauggcucc

SEQ ID NO: 191484 - RNA, 32 nt, Homo Sapiens
gcacaggccccuccccuggcacuuaguggguc

SEQ ID NO: 191485 - RNA, 32 nt, Homo Sapiens
gagcuuccaagcccuugagguccagcuguggg

SEQ ID NO: 191486 - RNA, 32 nt, Homo Sapiens
ugcaguggcacaaucucggcucccugcaaccu

SEQ ID NO: 191487 - RNA, 32 nt, Homo Sapiens
uucugcauugccauccugacgucggccacagg

SEQ ID NO: 191488 - RNA, 32 nt, Homo Sapiens
cugcaugugaguucucaagaaaaggaaaggga

SEQ ID NO: 191489 - RNA, 32 nt, Homo Sapiens
uauucaauacuagauuugcgagugacuaugcc

SEQ ID NO: 191490 - RNA, 32 nt, Homo Sapiens
uaguuggaaguacccagaauuaucagaaacga

SEQ ID NO: 191491 - RNA, 32 nt, Homo Sapiens
cauauuuauagaaugcugaacucaaugugcaa

SEQ ID NO: 191492 - RNA, 32 nt, Homo Sapiens
gauuucaaaacacuuuacaaacacugccauua

SEQ ID NO: 191493 - RNA, 32 nt, Homo Sapiens
auuucucaggagaccagaacugaucugccagc

SEQ ID NO: 191494 - RNA, 32 nt, Homo Sapiens
gaugcuguuuauuuucccuuucuuggaaaugg

SEQ ID NO: 191495 - RNA, 32 nt, Homo Sapiens
uaccuuuuuuuucuuuuuuucuuaaaaaaaua

SEQ ID NO: 191496 - RNA, 28 nt, Homo Sapiens
agcggggcggcgcguggagugcggcguc

SEQ ID NO: 191497 - RNA, 32 nt, Homo Sapiens
cgacagguguggaacccgccguccccgcuaug

SEQ ID NO: 191498 - RNA, 32 nt, Homo Sapiens
guacagagccugacagcgcagcuccugaggac

SEQ ID NO: 191499 - RNA, 32 nt, Homo Sapiens
ggauggagaaaguggacacugggucugaggcu

SEQ ID NO: 191500 - RNA, 32 nt, Homo Sapiens
ccacugaugacgaugaugcacucgcggaaauu

SEQ ID NO: 191501 - RNA, 32 nt, Homo Sapiens
ucaucuggguggucugaauauuaaagcucuuc

SEQ ID NO: 191502 - RNA, 32 nt, Homo Sapiens
cuauccugacuucuaauaucauucacuagcuu

SEQ ID NO: 191503 - RNA, 32 nt, Homo Sapiens
caaacagaaaaagaagguugagggcaauggac

SEQ ID NO: 191504 - RNA, 32 nt, Homo Sapiens
cgcagcgcccucgggccugggccacacgcagg

SEQ ID NO: 191505 - RNA, 32 nt, Homo Sapiens
gucucuggccagugccuggugcucuggccccu

SEQ ID NO: 191506 - RNA, 32 nt, Homo Sapiens
ccucucauucugugucccuugacuccacgacg

SEQ ID NO: 191507 - RNA, 32 nt, Homo Sapiens
gcuucccccagcuaauuuuuuauauuuuagua

SEQ ID NO: 191508 - RNA, 32 nt, Homo Sapiens
uacuuaauauaaaaugucccuuggauuuugcu

SEQ ID NO: 191509 - RNA, 32 nt, Homo Sapiens
gcaccuacugaauuaaaauacauaaaaucauu

SEQ ID NO: 191510 - RNA, 32 nt, Homo Sapiens
guccgaacggcuucggaggggcgagaagccag

SEQ ID NO: 191511 - RNA, 31 nt, Homo Sapiens
ggcaaaugauuuguguuuucagugugugggg

SEQ ID NO: 191512 - RNA, 32 nt, Homo Sapiens
uuggauauuacuguuuuuauuaucaucaacau

SEQ ID NO: 191513 - RNA, 32 nt, Homo Sapiens
ccggccgaguccacgcagcaagcuguacugga

SEQ ID NO: 191514 - RNA, 32 nt, Homo Sapiens
aaaaauguaaaugcugccuuuaugguauaaaa

SEQ ID NO: 191515 - RNA, 32 nt, Homo Sapiens
uuuauuucaguaauaaugucuuucucaccuuc

SEQ ID NO: 191516 - RNA, 32 nt, Homo Sapiens
gcauaaauacuaguauaguuuuuuaguuaagc

SEQ ID NO: 191517 - RNA, 32 nt, Homo Sapiens
auauauaaacuccaauuuuaaaucuuaaaauu

SEQ ID NO: 191518 - RNA, 32 nt, Homo Sapiens
uuuuagaccgaauauuccuuugaaaacaugaa

SEQ ID NO: 191519 - RNA, 32 nt, Homo Sapiens
cagaaagguuaggcaagaagugagauaaaauc

SEQ ID NO: 191520 - RNA, 32 nt, Homo Sapiens
ugugagggggcuugcuugguaugcuuaccugg

SEQ ID NO: 191521 - RNA, 32 nt, Homo Sapiens
acuuuaggguuugugcugugggauaaacggaa

SEQ ID NO: 191522 - RNA, 32 nt, Homo Sapiens
ugaccuguggaggaugggaggggugagcagca

SEQ ID NO: 191523 - RNA, 32 nt, Homo Sapiens
guuugcccucaucaagucucauguugagcuuu

SEQ ID NO: 191524 - RNA, 32 nt, Homo Sapiens
uguaucaaacuccuaauuggucggaacacuuu

SEQ ID NO: 191525 - RNA, 32 nt, Homo Sapiens
uuuccaauauauuuuuguuuuauuguuauuac

SEQ ID NO: 191526 - RNA, 32 nt, Homo Sapiens
guuguggacaaaaucauacaauucagucaauu

SEQ ID NO: 191527 - RNA, 32 nt, Homo Sapiens
ugugccacccucaauccgacaaucgaagaaau

SEQ ID NO: 191528 - RNA, 32 nt, Homo Sapiens
gaguaucuucccuccaccacucagccgccacc

SEQ ID NO: 191529 - RNA, 32 nt, Homo Sapiens
cauguccuuaggaggcaguaccccaagagugg

SEQ ID NO: 191530 - RNA, 32 nt, Homo Sapiens
acuccugcagugugcguccggccgccugagca

SEQ ID NO: 191531 - RNA, 29 nt, Homo Sapiens
aagcucggagcacucaggacgccgcgcgc

SEQ ID NO: 191532 - RNA, 32 nt, Homo Sapiens
ucuucauauaaaauuaaaaacugagauggaau

SEQ ID NO: 191533 - RNA, 32 nt, Homo Sapiens
aguugcauugacguuuuccuccccuuccuuuu

SEQ ID NO: 191534 - RNA, 32 nt, Homo Sapiens
aacuggggaaaguggaauugaaaucccauaaa

SEQ ID NO: 191535 - RNA, 32 nt, Homo Sapiens
aagagaugaauaauuccaugggccaguaugcc

SEQ ID NO: 191536 - RNA, 32 nt, Homo Sapiens
cuagugucuuuuuuuucuucaccucacuugug

SEQ ID NO: 191537 - RNA, 32 nt, Homo Sapiens
gaccccaaagauuccuguugguggucuggguc

SEQ ID NO: 191538 - RNA, 32 nt, Homo Sapiens
aagaagugacuuccguugcauaccaaagccga

SEQ ID NO: 191539 - RNA, 32 nt, Homo Sapiens
ccccgcagccucgggaggccugcccaggcucc

SEQ ID NO: 191540 - RNA, 31 nt, Homo Sapiens
gaucauggcucucccugucagaauugugugc

SEQ ID NO: 191541 - RNA, 32 nt, Homo Sapiens
gcaggauaagccaauuuuaacuuucuacaaug

SEQ ID NO: 191542 - RNA, 32 nt, Homo Sapiens
gaggaggcgauggcccugcugcuggugcuccu

SEQ ID NO: 191543 - RNA, 32 nt, Homo Sapiens
gggaccgggugagcgcugagaaucgcggccgc

SEQ ID NO: 191544 - RNA, 29 nt, Homo Sapiens
cacagugagaagguggccgucugcaagcc

SEQ ID NO: 191545 - RNA, 32 nt, Homo Sapiens
uaaaauuuuuaaaaauaaauguauucucugac

SEQ ID NO: 191546 - RNA, 32 nt, Homo Sapiens
gugcggccccucggcuguuccuccccuguagg

SEQ ID NO: 191547 - RNA, 32 nt, Homo Sapiens
aucccgggcaaggacacagaugugcuacagca

SEQ ID NO: 191548 - RNA, 32 nt, Homo Sapiens
uucuaaauauuuucauuuucuguguucuaaau

SEQ ID NO: 191549 - RNA, 32 nt, Homo Sapiens
accacuaaagucccagauagcaucauauuuac

SEQ ID NO: 191550 - RNA, 32 nt, Homo Sapiens
gcaguguaguagacuuacauauuguuguuuau

SEQ ID NO: 191551 - RNA, 32 nt, Homo Sapiens
uguuuuguucuucagcuccucaucaggaucuu

SEQ ID NO: 191552 - RNA, 32 nt, Homo Sapiens
uggacaccaaggaaacagauaucauagagcug

SEQ ID NO: 191553 - RNA, 32 nt, Homo Sapiens
uccacucuggggaucuuagaaagauccauaaa

SEQ ID NO: 191554 - RNA, 32 nt, Homo Sapiens
aagaaggaguuccaccugaugcucgggucagg

SEQ ID NO: 191555 - RNA, 32 nt, Homo Sapiens
cagcuuuguaaauucuuaacauuuuuauauug

SEQ ID NO: 191556 - RNA, 32 nt, Homo Sapiens
ggcccaggagcggcagcagagacugcagggcc

SEQ ID NO: 191557 - RNA, 32 nt, Homo Sapiens
cagucucgucugcugugacgcuucucggugcg

SEQ ID NO: 191558 - RNA, 32 nt, Homo Sapiens
uaaaguggcguuugcugugugcuugagaguaa

SEQ ID NO: 191559 - RNA, 32 nt, Homo Sapiens
cgaauuccugugccgaagaggccugcaguggg

SEQ ID NO: 191560 - RNA, 32 nt, Homo Sapiens
uacucaucgggcagccacgugcucucuggagg

SEQ ID NO: 191561 - RNA, 32 nt, Homo Sapiens
ggucagggguagugaauguuuccuuaaguucc

SEQ ID NO: 191562 - RNA, 32 nt, Homo Sapiens
gcccuucccagggacucgggauucuaggaacc

SEQ ID NO: 191563 - RNA, 32 nt, Homo Sapiens
cuuaacuuugugucucugggaccuccagggac

SEQ ID NO: 191564 - RNA, 32 nt, Homo Sapiens
gguaugauuagagugaaaauggcagccagcaa

SEQ ID NO: 191565 - RNA, 32 nt, Homo Sapiens
auucuggaccagagacuuggugcgggguuaac

SEQ ID NO: 191566 - RNA, 32 nt, Homo Sapiens
aucgcagugcugcucgcgggucuggcuaguca

SEQ ID NO: 191567 - RNA, 32 nt, Homo Sapiens
uauaaggaaggggaugggauuuuccauucuaa

SEQ ID NO: 191568 - RNA, 32 nt, Homo Sapiens
cguagaaaaauauuguguuacuuguuuguugu

SEQ ID NO: 191569 - RNA, 32 nt, Homo Sapiens
uuuauaaaguagccuacacauuuucaaagauu

SEQ ID NO: 191570 - RNA, 32 nt, Homo Sapiens
guuggcgaggaaaaacaaaacaaacaaaaaaa

SEQ ID NO: 191571 - RNA, 32 nt, Homo Sapiens
aaaagcaugccacuuaucugguaaaauccccc

SEQ ID NO: 191572 - RNA, 32 nt, Homo Sapiens
uccugccccgguucuuuccuccagggccgcau

SEQ ID NO: 191573 - RNA, 32 nt, Homo Sapiens
uuggacaccugccuucucauguggacaucauc

SEQ ID NO: 191574 - RNA, 32 nt, Homo Sapiens
aacccgguaccacgaggcgccauuuugcggau

SEQ ID NO: 191575 - RNA, 32 nt, Homo Sapiens
aaaagaagguauuuuuccaaucacaguguuau

SEQ ID NO: 191576 - RNA, 32 nt, Homo Sapiens
uuuauauuugacuuuuuuuuuaauagcauuaa

SEQ ID NO: 191577 - RNA, 32 nt, Homo Sapiens
ucuucugaaaugaaacaaauaaucacauugac

SEQ ID NO: 191578 - RNA, 32 nt, Homo Sapiens
cugcccuuggauuucaggaucccaggcuguug

SEQ ID NO: 191579 - RNA, 32 nt, Homo Sapiens
guauagaacuuccaaauucagaaugagaagaa

SEQ ID NO: 191580 - RNA, 32 nt, Homo Sapiens
cucccggccccggccccggcaucggcaucgcg

SEQ ID NO: 191581 - RNA, 32 nt, Homo Sapiens
aaagcaacauucaaaaugcaggagauuuugug

SEQ ID NO: 191582 - RNA, 32 nt, Homo Sapiens
ggaguccgagacccgggcccgcagcccgagug

SEQ ID NO: 191583 - RNA, 32 nt, Homo Sapiens
uuauuucauuuaucuuuauucuuaauguacga

SEQ ID NO: 191584 - RNA, 32 nt, Homo Sapiens
ugaaccuucccucuccuuccucucgcagauua

SEQ ID NO: 191585 - RNA, 32 nt, Homo Sapiens
cccaccagaaaaggguaggaaugagcaaguug

SEQ ID NO: 191586 - RNA, 32 nt, Homo Sapiens
aagaaccaucugcgaaaggacacacacaggaa

SEQ ID NO: 191587 - RNA, 31 nt, Homo Sapiens
cuagguggauggauguuggugcuguuuaguu

SEQ ID NO: 191588 - RNA, 31 nt, Homo Sapiens
gacccauggcagcagaaccaggauggagcug

SEQ ID NO: 191589 - RNA, 32 nt, Homo Sapiens
aguccugugggaggcccuggggucuuauuagu

SEQ ID NO: 191590 - RNA, 32 nt, Homo Sapiens
gugccugcucagcagagccucguuucugcuuu

SEQ ID NO: 191591 - RNA, 32 nt, Homo Sapiens
auuugagaauuuguaagacuaauuaugguaac

SEQ ID NO: 191592 - RNA, 32 nt, Homo Sapiens
cuuggugcugugugccccacuccagccugggg

SEQ ID NO: 191593 - RNA, 32 nt, Homo Sapiens
uaucagaauggcaacagacagaaguacuuugu

SEQ ID NO: 191594 - RNA, 32 nt, Homo Sapiens
ucugugagucacaucuugaaaaacacugagag

SEQ ID NO: 191595 - RNA, 32 nt, Homo Sapiens
gggaguucccgaggggccccagcuuucaaggg

SEQ ID NO: 191596 - RNA, 30 nt, Homo Sapiens
ugcccgccuccgaggccgccggccgcuucu

SEQ ID NO: 191597 - RNA, 32 nt, Homo Sapiens
cgggcagcggggacggcaugcccgagaagagg

SEQ ID NO: 191598 - RNA, 32 nt, Homo Sapiens
uucagcaguccuggagacccaggcgugccuag

SEQ ID NO: 191599 - RNA, 32 nt, Homo Sapiens
auauugaggaaaacuucugucaugcucauucc

SEQ ID NO: 191600 - RNA, 32 nt, Homo Sapiens
gggcggccgcggcgcuuccgaucgcgacgcgg

SEQ ID NO: 191601 - RNA, 28 nt, Homo Sapiens
ccaccaguggaguccaggaugagcuuca

SEQ ID NO: 191602 - RNA, 32 nt, Homo Sapiens
cccaggggccgagcguaccuucugccucucac

SEQ ID NO: 191603 - RNA, 32 nt, Homo Sapiens
augcauguccagugacucuuguguuugcugcu

SEQ ID NO: 191604 - RNA, 32 nt, Homo Sapiens
ucccaagccugcaaccccggcgaccccucugc

SEQ ID NO: 191605 - RNA, 32 nt, Homo Sapiens
uggauaaacuuuucuuuuuucccugaguuugu

SEQ ID NO: 191606 - RNA, 32 nt, Homo Sapiens
gcagcgagggucagggacagagccuaagggga

SEQ ID NO: 191607 - RNA, 32 nt, Homo Sapiens
cugucacaugugcccagcacuccgccccaugc

SEQ ID NO: 191608 - RNA, 32 nt, Homo Sapiens
cuucaaaggaccagguccuguuccucuuucuc

SEQ ID NO: 191609 - RNA, 32 nt, Homo Sapiens
aaauguuuuuauguauuucagauuauucccuu

SEQ ID NO: 191610 - RNA, 32 nt, Homo Sapiens
cgcccagccugccagugagcugcgacgggcac

SEQ ID NO: 191611 - RNA, 31 nt, Homo Sapiens
gaaccucuugguauuauaugaguaggaagua

SEQ ID NO: 191612 - RNA, 32 nt, Homo Sapiens
uguguuuucugcaauguggaguugacuuagcu

SEQ ID NO: 191613 - RNA, 32 nt, Homo Sapiens
ugcucuugagguuuucugugcuuugagaggga

SEQ ID NO: 191614 - RNA, 32 nt, Homo Sapiens
guggccauugcaugguaauauggcauaguauu

SEQ ID NO: 191615 - RNA, 32 nt, Homo Sapiens
gaggggaagagggggcgaucgcggcggagcug

SEQ ID NO: 191616 - RNA, 32 nt, Homo Sapiens
agcuuucugcuucuuucuuuuuggggaaagga

SEQ ID NO: 191617 - RNA, 32 nt, Homo Sapiens
aauauuuuaaaauaaacuuucuuaauauuuuu

SEQ ID NO: 191618 - RNA, 32 nt, Homo Sapiens
uaaauucacaaacuuguucaaccaucaccacu

SEQ ID NO: 191619 - RNA, 32 nt, Homo Sapiens
ccaccccgccccacccccagcccuggcccuug

SEQ ID NO: 191620 - RNA, 32 nt, Homo Sapiens
cgaguagugucugagacucugcucugcagggc

SEQ ID NO: 191621 - RNA, 32 nt, Homo Sapiens
guaccgccgggcggagggcgcgcuacuagcag

SEQ ID NO: 191622 - RNA, 32 nt, Homo Sapiens
aggggugcaggggcuccuggcagcuacugggu

SEQ ID NO: 191623 - RNA, 32 nt, Homo Sapiens
uuccgaagagaugauuggaagauggaagugga

SEQ ID NO: 191624 - RNA, 32 nt, Homo Sapiens
cagcugccauugcucccugucuguuuccccac

SEQ ID NO: 191625 - RNA, 32 nt, Homo Sapiens
caaaccccaaaaaccucuggugggagauagga

SEQ ID NO: 191626 - RNA, 32 nt, Homo Sapiens
uuuuaugugaauguggcaauaaaggagaagag

SEQ ID NO: 191627 - RNA, 32 nt, Homo Sapiens
cgccucccgucuccgggcucugccgggcccuc

SEQ ID NO: 191628 - RNA, 32 nt, Homo Sapiens
ucuuguuuaaacagcucuauauggauuuauac

SEQ ID NO: 191629 - RNA, 32 nt, Homo Sapiens
gauuccagcccuugguccuuggauagauuucu

SEQ ID NO: 191630 - RNA, 32 nt, Homo Sapiens
cagccuaauucuucaauucuuaauaaacaauu

SEQ ID NO: 191631 - RNA, 32 nt, Homo Sapiens
acagggccagcuucccuugggggcccuuuaag

SEQ ID NO: 191632 - RNA, 32 nt, Homo Sapiens
auaaacuauugaugaauuguuuccugggucac

SEQ ID NO: 191633 - RNA, 32 nt, Homo Sapiens
cagagacuaucauaaccauuuauuuuucuaau

SEQ ID NO: 191634 - RNA, 32 nt, Homo Sapiens
uguugcuguugucauacucuuaggugccaaac

SEQ ID NO: 191635 - RNA, 32 nt, Homo Sapiens
caggcuguagaaaugaaagauauauucuaauu

SEQ ID NO: 191636 - RNA, 32 nt, Homo Sapiens
auucuugccuuauaccucagucuauucuguaa

SEQ ID NO: 191637 - RNA, 32 nt, Homo Sapiens
gguaccugucccagcaggucagauggggccag

SEQ ID NO: 191638 - RNA, 32 nt, Homo Sapiens
gccagagccaaccuggacuuccugucauuuuc

SEQ ID NO: 191639 - RNA, 32 nt, Homo Sapiens
ugacuggcacuagccaaugagcugugaggacg

SEQ ID NO: 191640 - RNA, 32 nt, Homo Sapiens
acuuugcaaaauucguaauaauuuagugaugg

SEQ ID NO: 191641 - RNA, 32 nt, Homo Sapiens
ggaggaggggccucucuuccaagccccacccu

SEQ ID NO: 191642 - RNA, 30 nt, Homo Sapiens
acuugaugcagcugacucaucugggccuga

SEQ ID NO: 191643 - RNA, 32 nt, Homo Sapiens
gagaggaugcccucguguccgugaugggcugu

SEQ ID NO: 191644 - RNA, 32 nt, Homo Sapiens
gggauuaauaugaaaacuuaugaccucuuccu

SEQ ID NO: 191645 - RNA, 32 nt, Homo Sapiens
ucgccuccacagcccugggagagacgagguuu

SEQ ID NO: 191646 - RNA, 32 nt, Homo Sapiens
cucggcccgccgacucccggcgccgccgccgc

SEQ ID NO: 191647 - RNA, 32 nt, Homo Sapiens
cauuugguuuauacuuuuuuuuuuuuuuuuuu

SEQ ID NO: 191648 - RNA, 31 nt, Homo Sapiens
guccccaugaugagagaauggguucugcuca

SEQ ID NO: 191649 - RNA, 32 nt, Homo Sapiens
cuuguguuauggaaauaaaaacaaauaaaacu

SEQ ID NO: 191650 - RNA, 32 nt, Homo Sapiens
cugaguggggagagguugggcagugagugagg

SEQ ID NO: 191651 - RNA, 32 nt, Homo Sapiens
guauuuuaaucuagcacuuacauauuguugau

SEQ ID NO: 191652 - RNA, 32 nt, Homo Sapiens
aacccagcagcgcuccaccuccaacuugacau

SEQ ID NO: 191653 - RNA, 32 nt, Homo Sapiens
ccccgcguggcucgcgcucgucugugaggaag

SEQ ID NO: 191654 - RNA, 32 nt, Homo Sapiens
uugccuggcaggugcccccgcugcuggccuca

SEQ ID NO: 191655 - RNA, 32 nt, Homo Sapiens
uugggucaagguuuuauuaaaagcuacauuuu

SEQ ID NO: 191656 - RNA, 32 nt, Homo Sapiens
ccacuuguugaaaaacugauuugaaggcaucu

SEQ ID NO: 191657 - RNA, 32 nt, Homo Sapiens
ggcggcccauggggcgggaggcgugaggccgc

SEQ ID NO: 191658 - RNA, 32 nt, Homo Sapiens
cugcuguggugcuggacaucagugacagacgg

SEQ ID NO: 191659 - RNA, 32 nt, Homo Sapiens
ugccagcuaagugacuuuuagaguaacagaua

SEQ ID NO: 191660 - RNA, 32 nt, Homo Sapiens
uagagaguuaggaucagaaagcaucaauuuag

SEQ ID NO: 191661 - RNA, 32 nt, Homo Sapiens
ucagaaagaguauuuuaccaugcuucacaugg

SEQ ID NO: 191662 - RNA, 32 nt, Homo Sapiens
aauccugcaaauguaaugaauuuggaaaaaca

SEQ ID NO: 191663 - RNA, 32 nt, Homo Sapiens
acuuaucuuuuggacauauuuuuauauuauuu

SEQ ID NO: 191664 - RNA, 32 nt, Homo Sapiens
aacuagcaaaaggaugauuuaacauuaccaaa

SEQ ID NO: 191665 - RNA, 32 nt, Homo Sapiens
cagcggcagggccggcaccugcgugccugugc

SEQ ID NO: 191666 - RNA, 32 nt, Homo Sapiens
cacgguggccccgacgcggugacccuccgagg

SEQ ID NO: 191667 - RNA, 32 nt, Homo Sapiens
ugcuugcgacaggagggaaaacggaggcucca

SEQ ID NO: 191668 - RNA, 32 nt, Homo Sapiens
augaaagaugacugaauguagcuauccugauu

SEQ ID NO: 191669 - RNA, 32 nt, Homo Sapiens
ggcagccuuuauguucaucaccagcuagaacc

SEQ ID NO: 191670 - RNA, 32 nt, Homo Sapiens
ucucucaaucuuguuggcccuccggcgaucuc

SEQ ID NO: 191671 - RNA, 32 nt, Homo Sapiens
uuuuagagaaacaaaacaacuuuguagcaaca

SEQ ID NO: 191672 - RNA, 32 nt, Homo Sapiens
ucaugggauggacccugccaaccuggccuggg

SEQ ID NO: 191673 - RNA, 32 nt, Homo Sapiens
acuccucuccuugccugcaggcugcccucucc

SEQ ID NO: 191674 - RNA, 32 nt, Homo Sapiens
auuccuaaagauugccauugcuuuguauaaaa

SEQ ID NO: 191675 - RNA, 32 nt, Homo Sapiens
uauuuugguuuaucuucuuuugaacaaaugac

SEQ ID NO: 191676 - RNA, 32 nt, Homo Sapiens
ugauuaaugacaaaacccuuuagauaauuauc

SEQ ID NO: 191677 - RNA, 32 nt, Homo Sapiens
ugggaacuggguggaacugaaaaggaagaaaa

SEQ ID NO: 191678 - RNA, 32 nt, Homo Sapiens
cagccagccccuccccauccuggaugggcugu

SEQ ID NO: 191679 - RNA, 32 nt, Homo Sapiens
cccccguuucccacccaaaagcauagggaggg

SEQ ID NO: 191680 - RNA, 32 nt, Homo Sapiens
auuugauguauaaaugcaaauaaaauuaguuu

SEQ ID NO: 191681 - RNA, 32 nt, Homo Sapiens
uuuuguauuguuuuaaaucccaaggauaguuu

SEQ ID NO: 191682 - RNA, 32 nt, Homo Sapiens
uggccgcggcggucuccccaagcagccaccag

SEQ ID NO: 191683 - RNA, 32 nt, Homo Sapiens
gccgcucgcugcuccccggcccgcgccaugcc

SEQ ID NO: 191684 - RNA, 32 nt, Homo Sapiens
accuuccagaugggugguagccaggcaucugg

SEQ ID NO: 191685 - RNA, 32 nt, Homo Sapiens
uuagguaaucucugggaaaacacaagauuuac

SEQ ID NO: 191686 - RNA, 31 nt, Homo Sapiens
cgaccgcugccggccgcgcucccgcugcucc

SEQ ID NO: 191687 - RNA, 32 nt, Homo Sapiens
auuagcugaaugucauuucguacaccacagcu

SEQ ID NO: 191688 - RNA, 32 nt, Homo Sapiens
auaaggagguggugagagcggcugaggaggcu

SEQ ID NO: 191689 - RNA, 32 nt, Homo Sapiens
cugguuuucuucagucccuuuaucuacaggca

SEQ ID NO: 191690 - RNA, 32 nt, Homo Sapiens
guggggucggagcccccacauagagucccuac

SEQ ID NO: 191691 - RNA, 32 nt, Homo Sapiens
ucuuggcgggugccggccauggcggcuucgcu

SEQ ID NO: 191692 - RNA, 32 nt, Homo Sapiens
cugucuccuccuccguguggcccacgcagagc

SEQ ID NO: 191693 - RNA, 32 nt, Homo Sapiens
cccccuucccccugccuugugaugaugaugag

SEQ ID NO: 191694 - RNA, 32 nt, Homo Sapiens
gcccagcugaaucuuggcuucuggaccuugac

SEQ ID NO: 191695 - RNA, 32 nt, Homo Sapiens
aggucaggcagccacuggccgaggccaccugg

SEQ ID NO: 191696 - RNA, 32 nt, Homo Sapiens
uccaaggucacuucuuuuuuuaugucuugcca

SEQ ID NO: 191697 - RNA, 30 nt, Homo Sapiens
aauuuguggcuaauggggaaggggaguaag

SEQ ID NO: 191698 - RNA, 32 nt, Homo Sapiens
aggaguuucauacuguugaacucucuaaaggc

SEQ ID NO: 191699 - RNA, 32 nt, Homo Sapiens
aaggaagcacaagcugaucaagauguguaguu

SEQ ID NO: 191700 - RNA, 32 nt, Homo Sapiens
cucggacgccaccaacgcucucccgggcucuu

SEQ ID NO: 191701 - RNA, 32 nt, Homo Sapiens
cagucgccucaguacuuuuucuuucuggauuu

SEQ ID NO: 191702 - RNA, 32 nt, Homo Sapiens
cacugccagugccagcaguguccuugggaaag

SEQ ID NO: 191703 - RNA, 32 nt, Homo Sapiens
ucugcccuccaagaccuucuccuucaccuuug

SEQ ID NO: 191704 - RNA, 32 nt, Homo Sapiens
aggugcuggaaagggagggaggacgcgagggg

SEQ ID NO: 191705 - RNA, 32 nt, Homo Sapiens
gacccauuccuguuccucuccccaccacuacu

SEQ ID NO: 191706 - RNA, 32 nt, Homo Sapiens
auugacuucugcuuauggaaaacaaagaaaca

SEQ ID NO: 191707 - RNA, 32 nt, Homo Sapiens
ggugagagaaagugaaaugaaagauaaguucu

SEQ ID NO: 191708 - RNA, 32 nt, Homo Sapiens
ggauccacuucgucccuuguuucuagccaggc

SEQ ID NO: 191709 - RNA, 32 nt, Homo Sapiens
ggagccgccagucuuggugccuguggcuucuc

SEQ ID NO: 191710 - RNA, 32 nt, Homo Sapiens
cugugcucuucauucucacgggcccgcaaccc

SEQ ID NO: 191711 - RNA, 32 nt, Homo Sapiens
cuuuauacaauuuuucuuugugcacuaaauga

SEQ ID NO: 191712 - RNA, 32 nt, Homo Sapiens
gaaaccccacccaaaagcccccuuuguuacuu

SEQ ID NO: 191713 - RNA, 32 nt, Homo Sapiens
aaacugaaacuugguguaagaauagaauugag

SEQ ID NO: 191714 - RNA, 32 nt, Homo Sapiens
cuccugggcaggcaggugccucucagaggcca

SEQ ID NO: 191715 - RNA, 32 nt, Homo Sapiens
caggacccggacccugaguggcugggauccuu

SEQ ID NO: 191716 - RNA, 32 nt, Homo Sapiens
aaagcacaaggcauugucacuugcuugagagc

SEQ ID NO: 191717 - RNA, 32 nt, Homo Sapiens
cacacacacacagacacacacacacacagaca

SEQ ID NO: 191718 - RNA, 32 nt, Homo Sapiens
cacacacagacacacagacacacacacacaca

SEQ ID NO: 191719 - RNA, 32 nt, Homo Sapiens
cacacacacagacacacagacacacacacaca

SEQ ID NO: 191720 - RNA, 32 nt, Homo Sapiens
uuuuucuuuuuuucuuuuuuucuuuuuuucuu

SEQ ID NO: 191721 - RNA, 32 nt, Homo Sapiens
uggggaccucaccugcuggggaccucaccugc

SEQ ID NO: 191722 - RNA, 32 nt, Homo Sapiens
cggccuggacaccccucggccuggacaccccu

SEQ ID NO: 191723 - RNA, 32 nt, Homo Sapiens
cacacacacacacacacacacacacacacaca

SEQ ID NO: 191724 - RNA, 32 nt, Homo Sapiens
cagacagacagacagacacacacacacacaca

SEQ ID NO: 191725 - RNA, 32 nt, Homo Sapiens
gacagacagacagacacacacacacacacaca

SEQ ID NO: 191726 - RNA, 32 nt, Homo Sapiens
ugggccguguggacguguaugggaccacuaag

SEQ ID NO: 191727 - RNA, 32 nt, Homo Sapiens
uugaauuuaggaccaccucgguucacaauggu

SEQ ID NO: 191728 - RNA, 32 nt, Homo Sapiens
cacgugcacuccccggccugcauccggcuugg

SEQ ID NO: 191729 - RNA, 32 nt, Homo Sapiens
gaauggaaggaaaaccacaugccuuuaaaacu

SEQ ID NO: 191730 - RNA, 31 nt, Homo Sapiens
ccugggaccaagggauguggaguccaggcug

SEQ ID NO: 191731 - RNA, 32 nt, Homo Sapiens
uuauccuuugauucuccuucagcccucacccc

SEQ ID NO: 191732 - RNA, 32 nt, Homo Sapiens
gccuguucugucaucaucugugcguuccugug

SEQ ID NO: 191733 - RNA, 32 nt, Homo Sapiens
gccuaggacucgccgcugcccgcgccccgccg

SEQ ID NO: 191734 - RNA, 32 nt, Homo Sapiens
aaauuuuaagcauuacucugguaagauuuuga

SEQ ID NO: 191735 - RNA, 32 nt, Homo Sapiens
aggcuccagcccagcccaggcccucucccccu

SEQ ID NO: 191736 - RNA, 32 nt, Homo Sapiens
accaccugcagggcugccuguuuauugacaaa

SEQ ID NO: 191737 - RNA, 32 nt, Homo Sapiens
agacacuuuuucuuuccuuuugcaauuacuga

SEQ ID NO: 191738 - RNA, 32 nt, Homo Sapiens
accuucccgucugauuguuccuccccagcccc

SEQ ID NO: 191739 - RNA, 32 nt, Homo Sapiens
gcggggcgggguggagcugggauguucucacc

SEQ ID NO: 191740 - RNA, 32 nt, Homo Sapiens
acuggggacgcaaaacaaguaagaucccuguu

SEQ ID NO: 191741 - RNA, 32 nt, Homo Sapiens
aauuuacagaucaagaaacugaagaccagaga

SEQ ID NO: 191742 - RNA, 32 nt, Homo Sapiens
cucacaggaaccuccgccucccagguucaaga

SEQ ID NO: 191743 - RNA, 32 nt, Homo Sapiens
aacuugaguggcgccgaucggcggcggagccu

SEQ ID NO: 191744 - RNA, 32 nt, Homo Sapiens
ucugucucuuucugagucacgucugccccugu

SEQ ID NO: 191745 - RNA, 32 nt, Homo Sapiens
ugucuggcggccugggugccggcuccugcagg

SEQ ID NO: 191746 - RNA, 32 nt, Homo Sapiens
uuuuugaaagguagucaaacuucuuuuuaguu

SEQ ID NO: 191747 - RNA, 32 nt, Homo Sapiens
gugauccgcccaucucaaccucccaaagcgcu

SEQ ID NO: 191748 - RNA, 32 nt, Homo Sapiens
agcaaucagggagacuccgugggcguaggacc

SEQ ID NO: 191749 - RNA, 32 nt, Homo Sapiens
auugaaaaaguaacuucuauaguuacuccuuc

SEQ ID NO: 191750 - RNA, 32 nt, Homo Sapiens
gcgggcugggaggcccgggguccccgggcgaa

SEQ ID NO: 191751 - RNA, 32 nt, Homo Sapiens
ugcuaaaugcaaacacuguguauuuauuaguu

SEQ ID NO: 191752 - RNA, 29 nt, Homo Sapiens
guccauggcugcagccaacaagggcaaca

SEQ ID NO: 191753 - RNA, 32 nt, Homo Sapiens
uccucucugacaccaccccggccugccucuuu

SEQ ID NO: 191754 - RNA, 32 nt, Homo Sapiens
uuuuugguaauuuuuauauuuucugucuuuuu

SEQ ID NO: 191755 - RNA, 32 nt, Homo Sapiens
ccuucuauuuguuauucagaucagaucuggcc

SEQ ID NO: 191756 - RNA, 32 nt, Homo Sapiens
acuuagcauagcuccuuugggugucugcccac

SEQ ID NO: 191757 - RNA, 27 nt, Homo Sapiens
aaucuucauuaauuugguucuuuacug

SEQ ID NO: 191758 - RNA, 32 nt, Homo Sapiens
cucucacaaaaauuaaagauaaauacgguccu

SEQ ID NO: 191759 - RNA, 32 nt, Homo Sapiens
cccaucccaucccaccacacucacucaccagc

SEQ ID NO: 191760 - RNA, 32 nt, Homo Sapiens
agggcccacagugacuuuugcugggcauuuuc

SEQ ID NO: 191761 - RNA, 32 nt, Homo Sapiens
uaggaauucucugauuuugauuugcugacgug

SEQ ID NO: 191762 - RNA, 32 nt, Homo Sapiens
uacauuaagaaacucucuauuauuguguugcu

SEQ ID NO: 191763 - RNA, 32 nt, Homo Sapiens
gcggagacgcagagggcgggucgcgcucgagg

SEQ ID NO: 191764 - RNA, 32 nt, Homo Sapiens
cucucagacucagaauuaaaccccgguguugg

SEQ ID NO: 191765 - RNA, 32 nt, Homo Sapiens
aggagaagaggacacgagggcauccccuccca

SEQ ID NO: 191766 - RNA, 32 nt, Homo Sapiens
uugccaggcaagagacacgaagugccgagaca

SEQ ID NO: 191767 - RNA, 32 nt, Homo Sapiens
aacgccuaccccgcuucgaccggagggugcgc

SEQ ID NO: 191768 - RNA, 32 nt, Homo Sapiens
aaugacuccugcuuaacuuaugaagaaaguua

SEQ ID NO: 191769 - RNA, 32 nt, Homo Sapiens
uugggaaagcuggugcugcugcugccugauuc

SEQ ID NO: 191770 - RNA, 32 nt, Homo Sapiens
ugugccacggaacucacgcaguggcacuuugu

SEQ ID NO: 191771 - RNA, 32 nt, Homo Sapiens
uuaccuugguggccaucugcagccagguggcc

SEQ ID NO: 191772 - RNA, 32 nt, Homo Sapiens
agggaagaggcugcucacucuuggcaucuuga

SEQ ID NO: 191773 - RNA, 32 nt, Homo Sapiens
cgcccaggggacgagcucagcccugcgccuug

SEQ ID NO: 191774 - RNA, 32 nt, Homo Sapiens
auuucugcucuucugaacaacuucugcuaccc

SEQ ID NO: 191775 - RNA, 32 nt, Homo Sapiens
gucagggccgggggcgcacgccggaacaccug

SEQ ID NO: 191776 - RNA, 32 nt, Homo Sapiens
cugcgguguuugucucgagcguccaacacacu

SEQ ID NO: 191777 - RNA, 32 nt, Homo Sapiens
auagcucuggagguggcgaguaggccagugug

SEQ ID NO: 191778 - RNA, 32 nt, Homo Sapiens
aaaacgccgcggcugcgauggcggcggacgug

SEQ ID NO: 191779 - RNA, 32 nt, Homo Sapiens
gcucagcacugugccaguggaagcagguguau

SEQ ID NO: 191780 - RNA, 32 nt, Homo Sapiens
aguaucugcaaaugcaugaaugguugaacucc

SEQ ID NO: 191781 - RNA, 32 nt, Homo Sapiens
cuccuaccuccccacaccucucucucaguccc

SEQ ID NO: 191782 - RNA, 32 nt, Homo Sapiens
cuucauuucuaucauugaucuaacuuuagaua

SEQ ID NO: 191783 - RNA, 32 nt, Homo Sapiens
ggaaggaggccacauuccugucugcagcagcc

SEQ ID NO: 191784 - RNA, 32 nt, Homo Sapiens
acugaucuuuaaacuauucagucuuacuggga

SEQ ID NO: 191785 - RNA, 32 nt, Homo Sapiens
acauugaggaggguccacauggcauugagagg

SEQ ID NO: 191786 - RNA, 32 nt, Homo Sapiens
aaaaauuaauguuuacugauauuuguugaagu

SEQ ID NO: 191787 - RNA, 32 nt, Homo Sapiens
aaacuuccaaaaagauuuauuaauuaaaccag

SEQ ID NO: 191788 - RNA, 32 nt, Homo Sapiens
ucuuccuggccucauagcuccuccucgccaag

SEQ ID NO: 191789 - RNA, 32 nt, Homo Sapiens
cgggcggcuaggggcuccgagagcggcggccc

SEQ ID NO: 191790 - RNA, 32 nt, Homo Sapiens
ucuuuuccuugacuaauuguagaacuuugugu

SEQ ID NO: 191791 - RNA, 32 nt, Homo Sapiens
ccccgccccucccgcugcagccccacagcaug

SEQ ID NO: 191792 - RNA, 32 nt, Homo Sapiens
gaauggccuuggccuggcccagcccaagaucc

SEQ ID NO: 191793 - RNA, 32 nt, Homo Sapiens
cucugccuaucuggaccccugccuagguggau

SEQ ID NO: 191794 - RNA, 32 nt, Homo Sapiens
ccacaaaaacucaugauccaaaaaagauuaag

SEQ ID NO: 191795 - RNA, 32 nt, Homo Sapiens
caagugaaguuugugacuaugcuugauuuaau

SEQ ID NO: 191796 - RNA, 32 nt, Homo Sapiens
agccucccgacaccaccuccccggagucuccc

SEQ ID NO: 191797 - RNA, 32 nt, Homo Sapiens
uuuaaggaagcagucuuaacaaaggcucuuuu

SEQ ID NO: 191798 - RNA, 32 nt, Homo Sapiens
uaaguaguaaauuuugauauauuguacauaca

SEQ ID NO: 191799 - RNA, 32 nt, Homo Sapiens
gacuuggcaacccgccucccccugcccaagga

SEQ ID NO: 191800 - RNA, 32 nt, Homo Sapiens
ucucgccuuccgggcucucuauuccucauccu

SEQ ID NO: 191801 - RNA, 32 nt, Homo Sapiens
ucccacagcguggcucucuggauucucccacu

SEQ ID NO: 191802 - RNA, 32 nt, Homo Sapiens
cauuggccccuuccccaaucccggcccugcug

SEQ ID NO: 191803 - RNA, 32 nt, Homo Sapiens
agagagccucagagacacgaaaugcaaaacag

SEQ ID NO: 191804 - RNA, 32 nt, Homo Sapiens
gcgcugagggcucugcaguggcugggaggacc

SEQ ID NO: 191805 - RNA, 32 nt, Homo Sapiens
gcuauauauuuauguagaagauuuagaaauug

SEQ ID NO: 191806 - RNA, 32 nt, Homo Sapiens
uuuuggucuagagucuucuccuccuuaaccuc

SEQ ID NO: 191807 - RNA, 32 nt, Homo Sapiens
caagcccgccgggaucccgggcccugggcccg

SEQ ID NO: 191808 - RNA, 32 nt, Homo Sapiens
ccaugugacuuucucuccucuaccuaugucaa

SEQ ID NO: 191809 - RNA, 32 nt, Homo Sapiens
cagaguuuuuauuucuuuaauuagucugagug

SEQ ID NO: 191810 - RNA, 32 nt, Homo Sapiens
auguuucugaaugaaucagccaauuaauaaaa

SEQ ID NO: 191811 - RNA, 32 nt, Homo Sapiens
uuuccuuuuauacagacuuugagacuugccau

SEQ ID NO: 191812 - RNA, 32 nt, Homo Sapiens
cccguucauguuuugcuucucucucagacugc

SEQ ID NO: 191813 - RNA, 32 nt, Homo Sapiens
ccaccccggcccgggccgcggugacagcugag

SEQ ID NO: 191814 - RNA, 32 nt, Homo Sapiens
ggcaccgcagccaccugcucccggcccagagg

SEQ ID NO: 191815 - RNA, 32 nt, Homo Sapiens
acccugcccacggccccuccccacccccaccc

SEQ ID NO: 191816 - RNA, 32 nt, Homo Sapiens
ggguggguaccaacucuauugcgcagcucgcu

SEQ ID NO: 191817 - RNA, 32 nt, Homo Sapiens
ggcucccagggccccaggggcggggaaggcau

SEQ ID NO: 191818 - RNA, 32 nt, Homo Sapiens
agucgggggcuggccuaggagauaucugaggg

SEQ ID NO: 191819 - RNA, 32 nt, Homo Sapiens
aaagacauaaaguggagaccaagaugaaguuc

SEQ ID NO: 191820 - RNA, 32 nt, Homo Sapiens
agacuuccacauuuggaagcaguugugauugg

SEQ ID NO: 191821 - RNA, 32 nt, Homo Sapiens
uaguauugauucagguacaccauuaagauaca

SEQ ID NO: 191822 - RNA, 32 nt, Homo Sapiens
acacugcuccuguggccuuccacagcagaaac

SEQ ID NO: 191823 - RNA, 32 nt, Homo Sapiens
ccaaggcagggcccagcauaauuccuccaguu

SEQ ID NO: 191824 - RNA, 32 nt, Homo Sapiens
acuggauggugguggcuccuugcagggagaac

SEQ ID NO: 191825 - RNA, 32 nt, Homo Sapiens
guagcugagauuacaggugcacaccaccacau

SEQ ID NO: 191826 - RNA, 32 nt, Homo Sapiens
gcgucacccagccccagauuccgaggggccug

SEQ ID NO: 191827 - RNA, 29 nt, Homo Sapiens
cuccugaguaucugggacuacagaugcgu

SEQ ID NO: 191828 - RNA, 32 nt, Homo Sapiens
gcugggagaggcugaggauggcagggcuggaa

SEQ ID NO: 191829 - RNA, 32 nt, Homo Sapiens
ccacccuuugggccuguagcucuucuuucuug

SEQ ID NO: 191830 - RNA, 32 nt, Homo Sapiens
uguuuuucauucuccacauuuucucaauccuc

SEQ ID NO: 191831 - RNA, 32 nt, Homo Sapiens
gggcuuguucuuccugccaaaugaucagagag

SEQ ID NO: 191832 - RNA, 32 nt, Homo Sapiens
gguaauauucuuccucaucuuccaccuagcuu

SEQ ID NO: 191833 - RNA, 31 nt, Homo Sapiens
accaucugugaacugaacagagccuguuccg

SEQ ID NO: 191834 - RNA, 32 nt, Homo Sapiens
cccuggcggagcaggggcaggauaugaagugg

SEQ ID NO: 191835 - RNA, 32 nt, Homo Sapiens
ucgggucgacggggccggcggcuuuccugcug

SEQ ID NO: 191836 - RNA, 32 nt, Homo Sapiens
ccuguacaugcucaguaaauguuuguugaaug

SEQ ID NO: 191837 - RNA, 29 nt, Homo Sapiens
uauacaugugaaauaaaacucaguauuuu

SEQ ID NO: 191838 - RNA, 32 nt, Homo Sapiens
cucagggcaggguggcaguuucccuugagcaa

SEQ ID NO: 191839 - RNA, 32 nt, Homo Sapiens
acgggucauaaucacucauauuuggcucagaa

SEQ ID NO: 191840 - RNA, 32 nt, Homo Sapiens
uuuuuuaaaaauuaauaaacaaauugucuaaa

SEQ ID NO: 191841 - RNA, 27 nt, Homo Sapiens
cuuuggaguaaauucuggugugacuaa

SEQ ID NO: 191842 - RNA, 32 nt, Homo Sapiens
ggccuggacgaccgcggcuggggcugcggcua

SEQ ID NO: 191843 - RNA, 32 nt, Homo Sapiens
gucuccaaggaccucgguuugugcgugcauau

SEQ ID NO: 191844 - RNA, 32 nt, Homo Sapiens
gcaggaguguccuggcugugaaugccaaagcc

SEQ ID NO: 191845 - RNA, 32 nt, Homo Sapiens
gaaagaggaaguguucacuuuuuuaauacacu

SEQ ID NO: 191846 - RNA, 31 nt, Homo Sapiens
gaugcagugggccccaggcagaggaaggccg

SEQ ID NO: 191847 - RNA, 32 nt, Homo Sapiens
ccagugaccuccccuccacaccugcugugauc

SEQ ID NO: 191848 - RNA, 32 nt, Homo Sapiens
cuccagguuugugugugcaggauguuggcaca

SEQ ID NO: 191849 - RNA, 32 nt, Homo Sapiens
acacaaaguaauuauaguucaccuuuauacac

SEQ ID NO: 191850 - RNA, 32 nt, Homo Sapiens
cuucccaagauuuuuguucuacauaaaaaguu

SEQ ID NO: 191851 - RNA, 32 nt, Homo Sapiens
gaagcugaaaauuuaaaaguaauuucccuuuu

SEQ ID NO: 191852 - RNA, 32 nt, Homo Sapiens
auggaaggagaugucugggauuugcuucaaaa

SEQ ID NO: 191853 - RNA, 32 nt, Homo Sapiens
agcgccuggcccagcccccagcccccagcccc

SEQ ID NO: 191854 - RNA, 32 nt, Homo Sapiens
auuuuguagucuaucuauaugaugccuauuuu

SEQ ID NO: 191855 - RNA, 29 nt, Homo Sapiens
caaacugguuguauguaucaugccgugga

SEQ ID NO: 191856 - RNA, 32 nt, Homo Sapiens
gaacacuguggcacaagcucaggccgcagacg

SEQ ID NO: 191857 - RNA, 32 nt, Homo Sapiens
cagucucauauauaaaugaaaacuuacauaug

SEQ ID NO: 191858 - RNA, 32 nt, Homo Sapiens
agggaauauauucgacuuuaggguugggagga

SEQ ID NO: 191859 - RNA, 32 nt, Homo Sapiens
acuugagccaaauauaaaauuguauuuacagc

SEQ ID NO: 191860 - RNA, 32 nt, Homo Sapiens
ccaggcuauuaaaggggaauguuacugcaaaa

SEQ ID NO: 191861 - RNA, 32 nt, Homo Sapiens
ucuguucuucaaucggcccacccauuaucccu

SEQ ID NO: 191862 - RNA, 32 nt, Homo Sapiens
cugcacaaccucacugugucaggcaggcaucu

SEQ ID NO: 191863 - RNA, 32 nt, Homo Sapiens
ccugcugcccagugcaaaccacuucuccaugc

SEQ ID NO: 191864 - RNA, 32 nt, Homo Sapiens
uguguggcccuccugucuggagugacaucuuc

SEQ ID NO: 191865 - RNA, 28 nt, Homo Sapiens
aaugguucugaaauaaacuucacugaag

SEQ ID NO: 191866 - RNA, 32 nt, Homo Sapiens
guaccgggacgcccccgcccaccugcggcggg

SEQ ID NO: 191867 - RNA, 28 nt, Homo Sapiens
aaugaagaagauuaauuuugggaguucu

SEQ ID NO: 191868 - RNA, 32 nt, Homo Sapiens
gcugaaguuaguaguacuguacuaagagcucu

SEQ ID NO: 191869 - RNA, 32 nt, Homo Sapiens
ugaauucuucauuuuugccaucuuuaacuguc

SEQ ID NO: 191870 - RNA, 32 nt, Homo Sapiens
ccuuguccgcgcccgcucucggcgcgacgucu

SEQ ID NO: 191871 - RNA, 32 nt, Homo Sapiens
uacucccucccucucccaucaccagccucaag

SEQ ID NO: 191872 - RNA, 32 nt, Homo Sapiens
cuguucgaggacucgcgggugugcagugcacc

SEQ ID NO: 191873 - RNA, 32 nt, Homo Sapiens
gaguuccacugggcgaucccagccccucccca

SEQ ID NO: 191874 - RNA, 32 nt, Homo Sapiens
ccuagcuuagagcauuuguaucuacaauacau

SEQ ID NO: 191875 - RNA, 32 nt, Homo Sapiens
agggugggaagacaucugcgggcgcguguccg

SEQ ID NO: 191876 - RNA, 32 nt, Homo Sapiens
aucugaggaggagaacagggguccuggugguc

SEQ ID NO: 191877 - RNA, 32 nt, Homo Sapiens
auucauucuagaugauacaacucuuauuucag

SEQ ID NO: 191878 - RNA, 31 nt, Homo Sapiens
cuaguuuguguggcccugccccuggugccca

SEQ ID NO: 191879 - RNA, 32 nt, Homo Sapiens
uacuccagacuccagucauccucccccaucca

SEQ ID NO: 191880 - RNA, 32 nt, Homo Sapiens
gacacuugaagaauuauguagguuauugcuga

SEQ ID NO: 191881 - RNA, 32 nt, Homo Sapiens
uggaaccauccuuauguagacacacaaaacug

SEQ ID NO: 191882 - RNA, 27 nt, Homo Sapiens
ccauaccccuucuuccacccccagacu

SEQ ID NO: 191883 - RNA, 32 nt, Homo Sapiens
uugucaucauccucaucucaccauuguauugc

SEQ ID NO: 191884 - RNA, 32 nt, Homo Sapiens
ggacacucccccuguuagcucaacagaucugc

SEQ ID NO: 191885 - RNA, 32 nt, Homo Sapiens
ggccggggaaagguuccccugaggucacucug

SEQ ID NO: 191886 - RNA, 32 nt, Homo Sapiens
auuucugaaaaacaagaaagugauguuauuaa

SEQ ID NO: 191887 - RNA, 32 nt, Homo Sapiens
cacccaggcagagacgcggggagaggcugacc

SEQ ID NO: 191888 - RNA, 32 nt, Homo Sapiens
agcggggaagcagcuugcaaauggcgucuccc

SEQ ID NO: 191889 - RNA, 32 nt, Homo Sapiens
gcagaacuggaaaagcuucuuagggcaucuca

SEQ ID NO: 191890 - RNA, 32 nt, Homo Sapiens
auuccauauugaugaagauguuuauugguaua

SEQ ID NO: 191891 - RNA, 32 nt, Homo Sapiens
gguuuuuuaaacagcaccuugccugaacauga

SEQ ID NO: 191892 - RNA, 32 nt, Homo Sapiens
caucccagagggugggcuucagggcgcacagc

SEQ ID NO: 191893 - RNA, 32 nt, Homo Sapiens
aaccuaccaaacaaaaacaucagaagcugcug

SEQ ID NO: 191894 - RNA, 32 nt, Homo Sapiens
ucagcccacuccgcgccgcccgcuccccugcg

SEQ ID NO: 191895 - RNA, 32 nt, Homo Sapiens
uuacguaccauauuuguaacuaucaacuuuua

SEQ ID NO: 191896 - RNA, 32 nt, Homo Sapiens
gcgguggcccucgcggaguccggucagccccg

SEQ ID NO: 191897 - RNA, 32 nt, Homo Sapiens
cugcuaauggugcccuuugaaagucaagcagu

SEQ ID NO: 191898 - RNA, 32 nt, Homo Sapiens
auugaaaaaugaauguugagugauuccuaaac

SEQ ID NO: 191899 - RNA, 32 nt, Homo Sapiens
agccauaaugagcaaauugacuaagagaagca

SEQ ID NO: 191900 - RNA, 32 nt, Homo Sapiens
ucaaauuuuugugcucagaugauccuuuucau

SEQ ID NO: 191901 - RNA, 32 nt, Homo Sapiens
gagaggguggguggagcuuggccucugcaguu

SEQ ID NO: 191902 - RNA, 32 nt, Homo Sapiens
gaaauaaacuucaacuagaaauccaguuagaa

SEQ ID NO: 191903 - RNA, 32 nt, Homo Sapiens
cucacugcaaccuccgccuaccggguucaagu

SEQ ID NO: 191904 - RNA, 32 nt, Homo Sapiens
cagccugagguagucaggucauuguuucaaug

SEQ ID NO: 191905 - RNA, 32 nt, Homo Sapiens
gacacuccugucauucagcuauguugcuaaag

SEQ ID NO: 191906 - RNA, 32 nt, Homo Sapiens
ccaguucugucauggaugcuguccugagaaua

SEQ ID NO: 191907 - RNA, 32 nt, Homo Sapiens
ccccuccugugcuggguggaggccacgggaca

SEQ ID NO: 191908 - RNA, 32 nt, Homo Sapiens
ucucgcaggaccagaugugucagcaggugaca

SEQ ID NO: 191909 - RNA, 32 nt, Homo Sapiens
ucagacuagaagcagccaaagaugauuaucga

SEQ ID NO: 191910 - RNA, 32 nt, Homo Sapiens
augccuccuucccaggacccaggucugcugcc

SEQ ID NO: 191911 - RNA, 32 nt, Homo Sapiens
gacagaaguuccaggacugguuuuccaguaca

SEQ ID NO: 191912 - RNA, 32 nt, Homo Sapiens
cuaauuuugugauguucugucauugucuccca

SEQ ID NO: 191913 - RNA, 32 nt, Homo Sapiens
aucagggacccuccccgcuuuccugggccucu

SEQ ID NO: 191914 - RNA, 32 nt, Homo Sapiens
uugccuucaaauaguguuuuacguuuuuuauc

SEQ ID NO: 191915 - RNA, 32 nt, Homo Sapiens
ucccugccucaucucuauucucauuccacuau

SEQ ID NO: 191916 - RNA, 32 nt, Homo Sapiens
gcagggaaaaauacacaaaaacugcagauacu

SEQ ID NO: 191917 - RNA, 32 nt, Homo Sapiens
cacuuucugcuggucuccgagagacugauuca

SEQ ID NO: 191918 - RNA, 32 nt, Homo Sapiens
gacacuugauauuuuuuaauuacaauggaagu

SEQ ID NO: 191919 - RNA, 32 nt, Homo Sapiens
auauaugcaguaaaguguauauauuaugcagu

SEQ ID NO: 191920 - RNA, 32 nt, Homo Sapiens
gcucucaggcuuugguuuacaaugagcucaag

SEQ ID NO: 191921 - RNA, 32 nt, Homo Sapiens
agacagaaacuuggucugaaaagugacacacg

SEQ ID NO: 191922 - RNA, 32 nt, Homo Sapiens
cuuaagauauauguguuaagauauauacauga

SEQ ID NO: 191923 - RNA, 32 nt, Homo Sapiens
uuaaucguccugcugcugcugccguuccggug

SEQ ID NO: 191924 - RNA, 32 nt, Homo Sapiens
gggacucaaauuucagaaaagcuaccaagucu

SEQ ID NO: 191925 - RNA, 32 nt, Homo Sapiens
uggccuggggagagugcggcgccaugccucgg

SEQ ID NO: 191926 - RNA, 32 nt, Homo Sapiens
aucuaauaaguacaugggaaagaugcuaaugg

SEQ ID NO: 191927 - RNA, 32 nt, Homo Sapiens
uggccucagcuggcuuuuggggugcucugcag

SEQ ID NO: 191928 - RNA, 30 nt, Homo Sapiens
guuguucagagagaggcugagucugauugu

SEQ ID NO: 191929 - RNA, 32 nt, Homo Sapiens
uugcuuucuaaagauguauaacaaucauguau

SEQ ID NO: 191930 - RNA, 32 nt, Homo Sapiens
caggauagauuauuuuauuuuacuuuuuaaca

SEQ ID NO: 191931 - RNA, 32 nt, Homo Sapiens
gcgaggccccgcgacccgcgagggaggcggcg

SEQ ID NO: 191932 - RNA, 32 nt, Homo Sapiens
ucuucccaucccaauuuguaugaauggaguua

SEQ ID NO: 191933 - RNA, 32 nt, Homo Sapiens
gucccgcccgacccgcgcccgcgaugcuggcg

SEQ ID NO: 191934 - RNA, 32 nt, Homo Sapiens
gaauagagcgugugcuguugauaauaucucuc

SEQ ID NO: 191935 - RNA, 32 nt, Homo Sapiens
auuggagaugaccccaucaaccccagggcucc

SEQ ID NO: 191936 - RNA, 32 nt, Homo Sapiens
ccagcacgacuguguccucuacuuccaugagg

SEQ ID NO: 191937 - RNA, 32 nt, Homo Sapiens
aucuuuguaaauuauuuuaugucauaguuuaa

SEQ ID NO: 191938 - RNA, 32 nt, Homo Sapiens
auccucaggcggauaaaagggugcauuuuaaa

SEQ ID NO: 191939 - RNA, 32 nt, Homo Sapiens
uguucuagaagcacaugguuguccuccuguug

SEQ ID NO: 191940 - RNA, 32 nt, Homo Sapiens
ucggcaccagugccucagugcugcaauugagg

SEQ ID NO: 191941 - RNA, 32 nt, Homo Sapiens
accugguggggaggaggccguguuacaaaccc

SEQ ID NO: 191942 - RNA, 32 nt, Homo Sapiens
gcaguggacgugagggcggcgagcggcggggc

SEQ ID NO: 191943 - RNA, 32 nt, Homo Sapiens
ucuguggguuucuaagugacacuugagcaugc

SEQ ID NO: 191944 - RNA, 32 nt, Homo Sapiens
cagagccccguccugauugaucgcaucgcggg

SEQ ID NO: 191945 - RNA, 32 nt, Homo Sapiens
ggcucaguccauggccacucccugcccccagc

SEQ ID NO: 191946 - RNA, 32 nt, Homo Sapiens
acagagggcuccuggcgcugacagaugggaca

SEQ ID NO: 191947 - RNA, 32 nt, Homo Sapiens
uucaggagccagcagaggaagaacgagauggc

SEQ ID NO: 191948 - RNA, 32 nt, Homo Sapiens
guugagcaaaaauauccucauuuuggcagaag

SEQ ID NO: 191949 - RNA, 32 nt, Homo Sapiens
aaaaguggcaaagcuuugcuuaucucagcaaa

SEQ ID NO: 191950 - RNA, 32 nt, Homo Sapiens
acaugcgaauaaauugauacugaaacuuagca

SEQ ID NO: 191951 - RNA, 32 nt, Homo Sapiens
aacuuuagaguugggaaagcaguuggacuaga

SEQ ID NO: 191952 - RNA, 32 nt, Homo Sapiens
ccacgcguccgggaacccccgacaacacuacu

SEQ ID NO: 191953 - RNA, 32 nt, Homo Sapiens
gagagaggggggcagggcguugggcagggguc

SEQ ID NO: 191954 - RNA, 32 nt, Homo Sapiens
cuccccugggcucgcguucaucgguccccgcc

SEQ ID NO: 191955 - RNA, 32 nt, Homo Sapiens
uuggcauccaacauuguuaaucugaccccaca

SEQ ID NO: 191956 - RNA, 32 nt, Homo Sapiens
ggccacugggucugcaaacaugacaaagaaaa

SEQ ID NO: 191957 - RNA, 32 nt, Homo Sapiens
cauugguaauuuuuauuuuuuauuuuugggac

SEQ ID NO: 191958 - RNA, 32 nt, Homo Sapiens
gauucagaacaaugagaucauaauaauucuca

SEQ ID NO: 191959 - RNA, 32 nt, Homo Sapiens
cacgagccaaccccggccuaggcucuccaccg

SEQ ID NO: 191960 - RNA, 32 nt, Homo Sapiens
gugaauuaucccauucuaguuacagaggagcu

SEQ ID NO: 191961 - RNA, 32 nt, Homo Sapiens
ccagauugcgaucgcgaugaggcuucggaacc

SEQ ID NO: 191962 - RNA, 32 nt, Homo Sapiens
uguaauucuuauuugcaguuuuaccagucuuc

SEQ ID NO: 191963 - RNA, 32 nt, Homo Sapiens
aggugcccaacaguagaaugggcuacugugag

SEQ ID NO: 191964 - RNA, 32 nt, Homo Sapiens
cagggcugccccgccaggccccgguggguuug

SEQ ID NO: 191965 - RNA, 32 nt, Homo Sapiens
ccuuuuuucuuuucuuuuucuuuugcuuuccg

SEQ ID NO: 191966 - RNA, 32 nt, Homo Sapiens
gucggugagcgcggcccgggccggacauggcg

SEQ ID NO: 191967 - RNA, 32 nt, Homo Sapiens
gugggucccucauaggcuaaaugugcagcucu

SEQ ID NO: 191968 - RNA, 32 nt, Homo Sapiens
aaguagaucagagcuccuggaacuuucucauc

SEQ ID NO: 191969 - RNA, 31 nt, Homo Sapiens
ggucgccggucgcggcggagccugggcgcug

SEQ ID NO: 191970 - RNA, 32 nt, Homo Sapiens
auccaucaaggagagcuggggguguguuucug

SEQ ID NO: 191971 - RNA, 32 nt, Homo Sapiens
ucucaucauauucacggguucuggagauuagc

SEQ ID NO: 191972 - RNA, 32 nt, Homo Sapiens
uuuuaauguuuccuucaaugagaucaagagcu

SEQ ID NO: 191973 - RNA, 32 nt, Homo Sapiens
gggucuaaauuaacaagaauaaauuaagaagg

SEQ ID NO: 191974 - RNA, 32 nt, Homo Sapiens
cucugccguccagggcgagggcccggaguccu

SEQ ID NO: 191975 - RNA, 32 nt, Homo Sapiens
uuaaaugucuaauuuuugguuauucuuggcaa

SEQ ID NO: 191976 - RNA, 32 nt, Homo Sapiens
ucaaaguuauuuauaaaaugcuagaauuuguu

SEQ ID NO: 191977 - RNA, 32 nt, Homo Sapiens
ggcacgccggucucuaugagugcucggccacc

SEQ ID NO: 191978 - RNA, 32 nt, Homo Sapiens
cuuuuggagaauuuuuuguaggcauuuuucug

SEQ ID NO: 191979 - RNA, 32 nt, Homo Sapiens
auaaucagaaaguuaacaucaauacacuugau

SEQ ID NO: 191980 - RNA, 32 nt, Homo Sapiens
uacuuuugaagaguuccuaacacauucaguca

SEQ ID NO: 191981 - RNA, 32 nt, Homo Sapiens
uagagcaaucugggcacuuuggccaauuuuag

SEQ ID NO: 191982 - RNA, 32 nt, Homo Sapiens
cguguuuaaccucuuugcgucucgcuucugaa

SEQ ID NO: 191983 - RNA, 32 nt, Homo Sapiens
ccacccaaacuuaacacagccuuuuuauacau

SEQ ID NO: 191984 - RNA, 32 nt, Homo Sapiens
gucuuggagccuguggggggagcccgccgcag

SEQ ID NO: 191985 - RNA, 32 nt, Homo Sapiens
guagagguggacaugagaagcauuggcaucag

SEQ ID NO: 191986 - RNA, 32 nt, Homo Sapiens
auauguaaaagucugcaugacucuuaacaaug

SEQ ID NO: 191987 - RNA, 32 nt, Homo Sapiens
aaaaguccgagugcagccgccgggcgcaggau

SEQ ID NO: 191988 - RNA, 32 nt, Homo Sapiens
ccccuucacagcauacacugccaugguaugua

SEQ ID NO: 191989 - RNA, 32 nt, Homo Sapiens
gcccacagguggggaccugacggugaagaugu

SEQ ID NO: 191990 - RNA, 32 nt, Homo Sapiens
ugaguugugcagcucacgcauggagggaucag

SEQ ID NO: 191991 - RNA, 31 nt, Homo Sapiens
ccuucgcggcacucggccuccucugcgucuc

SEQ ID NO: 191992 - RNA, 32 nt, Homo Sapiens
aaucuaggaaaugaaaguagcgucuuuuaaau

SEQ ID NO: 191993 - RNA, 32 nt, Homo Sapiens
gauucaggguuuuacucagucccuuuaccuua

SEQ ID NO: 191994 - RNA, 32 nt, Homo Sapiens
uaagugaagauuuuauuuuaaaaaccaguggg

SEQ ID NO: 191995 - RNA, 32 nt, Homo Sapiens
acagcuggagacggaggcucuccuggggcugg

SEQ ID NO: 191996 - RNA, 32 nt, Homo Sapiens
uccuuugguugcuccuccuugguuugauuuug

SEQ ID NO: 191997 - RNA, 32 nt, Homo Sapiens
aaauuaugaacaucccaaaaauuauggauuau

SEQ ID NO: 191998 - RNA, 30 nt, Homo Sapiens
aguugggaggucugacggauaugcucagcc

SEQ ID NO: 191999 - RNA, 32 nt, Homo Sapiens
ucuacuaaaaauacaaaaauuugcugggcuug

SEQ ID NO: 192000 - RNA, 32 nt, Homo Sapiens
cacugcuggcaucuacguggauggcgcaggcc

SEQ ID NO: 192001 - RNA, 32 nt, Homo Sapiens
ucagcugguauuuggacaacaccccaacagag

SEQ ID NO: 192002 - RNA, 32 nt, Homo Sapiens
aaaguagggcgugugguuucccugccccuguc

SEQ ID NO: 192003 - RNA, 32 nt, Homo Sapiens
agaagagguguugguggguggccccuuccucc

SEQ ID NO: 192004 - RNA, 32 nt, Homo Sapiens
gccauaaauaucagaaccaaagaucaagacau

SEQ ID NO: 192005 - RNA, 32 nt, Homo Sapiens
aauucagaacuaaaugcuuuuuuauuuagaau

SEQ ID NO: 192006 - RNA, 32 nt, Homo Sapiens
uagcugggauuacaggcgcgcgccaccaggau

SEQ ID NO: 192007 - RNA, 32 nt, Homo Sapiens
accgauugcaucagaaucucagagcaucagaa

SEQ ID NO: 192008 - RNA, 32 nt, Homo Sapiens
gagaaaaacaacagagguuugcggcagaagug

SEQ ID NO: 192009 - RNA, 32 nt, Homo Sapiens
cacuggaaggacuuaggcgcucgcguggacac

SEQ ID NO: 192010 - RNA, 32 nt, Homo Sapiens
cuuuuauguuccuugaguaguuucacucaagu

SEQ ID NO: 192011 - RNA, 32 nt, Homo Sapiens
auuaucaucauucaguuuauacagcagacuga

SEQ ID NO: 192012 - RNA, 32 nt, Homo Sapiens
acugugucuccaugugaauauggacgguuagc

SEQ ID NO: 192013 - RNA, 32 nt, Homo Sapiens
acauuuuauuuuuucuugcaaauaccuccucc

SEQ ID NO: 192014 - RNA, 31 nt, Homo Sapiens
ugguugcucugauaccccagagccugauugg

SEQ ID NO: 192015 - RNA, 32 nt, Homo Sapiens
aaaaccugccagagaagaauaaaccauccaag

SEQ ID NO: 192016 - RNA, 32 nt, Homo Sapiens
cauguaagaaauaaguuuuuuuaaaguguuau

SEQ ID NO: 192017 - RNA, 32 nt, Homo Sapiens
aguccuaugugaaugagcuuaucccuccacaa

SEQ ID NO: 192018 - RNA, 32 nt, Homo Sapiens
gggauuccuccuuagucgcugcaugcagaauu

SEQ ID NO: 192019 - RNA, 32 nt, Homo Sapiens
cccaagcugacggcgugcacgggagccugcgg

SEQ ID NO: 192020 - RNA, 32 nt, Homo Sapiens
aauaaguucuuugacagagcauauugcuuggu

SEQ ID NO: 192021 - RNA, 32 nt, Homo Sapiens
cacugcacuccagccuuggcgacagagggaga

SEQ ID NO: 192022 - RNA, 32 nt, Homo Sapiens
cugaugaaacuguuaacccacuaauugccuua

SEQ ID NO: 192023 - RNA, 32 nt, Homo Sapiens
augagaggugaugacacacuaauuaugggaag

SEQ ID NO: 192024 - RNA, 32 nt, Homo Sapiens
uuugcauccaaauauaccuuacauuuuaaucu

SEQ ID NO: 192025 - RNA, 32 nt, Homo Sapiens
ccagugaggacgcccgcugccucccaccugcc

SEQ ID NO: 192026 - RNA, 32 nt, Homo Sapiens
ccugaagaccacccucccgagaggaaccagcc

SEQ ID NO: 192027 - RNA, 32 nt, Homo Sapiens
cuacaaacuuaauuuuauuuauggaaauaaga

SEQ ID NO: 192028 - RNA, 32 nt, Homo Sapiens
uguguccgcauccccucuguaggaaaaagaac

SEQ ID NO: 192029 - RNA, 32 nt, Homo Sapiens
uugugacuuccacagcuuucuuuucuacagcu

SEQ ID NO: 192030 - RNA, 32 nt, Homo Sapiens
accguauauuuccauacaucuacuaugcucuu

SEQ ID NO: 192031 - RNA, 32 nt, Homo Sapiens
cccuccauauccucguggaggcuucagagagc

SEQ ID NO: 192032 - RNA, 32 nt, Homo Sapiens
agaaacaaacuccagacgcaccaccuuaagag

SEQ ID NO: 192033 - RNA, 32 nt, Homo Sapiens
guacaaauaguuugcuaggaagauuguuauua

SEQ ID NO: 192034 - RNA, 32 nt, Homo Sapiens
cuguugcucauuuuuccaaaagcuauuuaaua

SEQ ID NO: 192035 - RNA, 32 nt, Homo Sapiens
ugucgccagcagugaccacaguucuugaggcc

SEQ ID NO: 192036 - RNA, 32 nt, Homo Sapiens
gaccagccaccgagccccagagggaucuccau

SEQ ID NO: 192037 - RNA, 32 nt, Homo Sapiens
cacgcagucccggcccgagccgacgccuugca

SEQ ID NO: 192038 - RNA, 32 nt, Homo Sapiens
uugguauuguguuaguguauggaccaauacug

SEQ ID NO: 192039 - RNA, 32 nt, Homo Sapiens
caggcagaucucagcccucuacugagucccuu

SEQ ID NO: 192040 - RNA, 32 nt, Homo Sapiens
gcucuaucgcccaggcuggagugcaguggcgc

SEQ ID NO: 192041 - RNA, 32 nt, Homo Sapiens
uaugggguagccaaggucuuccagggcuccau

SEQ ID NO: 192042 - RNA, 32 nt, Homo Sapiens
uggggggccuucggggacgacggggcccugga

SEQ ID NO: 192043 - RNA, 32 nt, Homo Sapiens
gggaggagaaagaaugucuuuucgaggcggag

SEQ ID NO: 192044 - RNA, 32 nt, Homo Sapiens
cucagucuuccagccgccuggggagucucuac

SEQ ID NO: 192045 - RNA, 32 nt, Homo Sapiens
guucuguaauuugauguugaucuucucagcca

SEQ ID NO: 192046 - RNA, 30 nt, Homo Sapiens
uccgcguccacgcagccgccggccggccag

SEQ ID NO: 192047 - RNA, 32 nt, Homo Sapiens
uaggacugcagcccagccccagcuucucugcc

SEQ ID NO: 192048 - RNA, 28 nt, Homo Sapiens
cucgcgucgcggccgcggagacgugaag

SEQ ID NO: 192049 - RNA, 32 nt, Homo Sapiens
uaggcaccuuugcaugaugaugacucuugaac

SEQ ID NO: 192050 - RNA, 32 nt, Homo Sapiens
cucucugucgccaggcuucuccugccucagcc

SEQ ID NO: 192051 - RNA, 32 nt, Homo Sapiens
acaauguguucucauuaaaaaauacaucccga

SEQ ID NO: 192052 - RNA, 32 nt, Homo Sapiens
cuauuaaaaaauacaaaaauuagccaggcgug

SEQ ID NO: 192053 - RNA, 32 nt, Homo Sapiens
cugaaaaacaauuugcaaaugacuaguucauu

SEQ ID NO: 192054 - RNA, 32 nt, Homo Sapiens
gugaaugcagucaugaauaaaagaaugaaagu

SEQ ID NO: 192055 - RNA, 32 nt, Homo Sapiens
gcuguaaauaucuggcauuuucuuauauuguu

SEQ ID NO: 192056 - RNA, 32 nt, Homo Sapiens
uccaggccgggguggggacguggguggguccg

SEQ ID NO: 192057 - RNA, 32 nt, Homo Sapiens
ccagacagagcuggcaacaaaagcagacugcg

SEQ ID NO: 192058 - RNA, 32 nt, Homo Sapiens
cgcagacgagaccggcgggcacugcaaagcug

SEQ ID NO: 192059 - RNA, 32 nt, Homo Sapiens
uauaaaaauuaucaaaaagcuaaugugcaggg

SEQ ID NO: 192060 - RNA, 32 nt, Homo Sapiens
aggcccagggggaugggggucgcgagaggccc

SEQ ID NO: 192061 - RNA, 32 nt, Homo Sapiens
uccccgacccuggccuagccgggacccagggu

SEQ ID NO: 192062 - RNA, 32 nt, Homo Sapiens
gaggaagauccggagggcagggguguucccuc

SEQ ID NO: 192063 - RNA, 29 nt, Homo Sapiens
ucaggugagaagguggccgacccugacug

SEQ ID NO: 192064 - RNA, 32 nt, Homo Sapiens
auagcaacaguuccuccuagccucacaacuuc

SEQ ID NO: 192065 - RNA, 32 nt, Homo Sapiens
acuaccugcuccuggggccccacagaguccuu

SEQ ID NO: 192066 - RNA, 32 nt, Homo Sapiens
uaauuaugaugaugaaagugauagcgauacug

SEQ ID NO: 192067 - RNA, 32 nt, Homo Sapiens
aaucuacuaggauaccugaauuuuauaagcaa

SEQ ID NO: 192068 - RNA, 32 nt, Homo Sapiens
cacauuggucugacccaaaguccacauucuuu

SEQ ID NO: 192069 - RNA, 31 nt, Homo Sapiens
ccagaauguagcugcugaccccgcgcccccc

SEQ ID NO: 192070 - RNA, 32 nt, Homo Sapiens
auggccccggggagccgaggugagcguccagc

SEQ ID NO: 192071 - RNA, 32 nt, Homo Sapiens
gggccuggagaaugagggucaggguucugccu

SEQ ID NO: 192072 - RNA, 32 nt, Homo Sapiens
cgcacgcccucccgcgagucccgggccccucc

SEQ ID NO: 192073 - RNA, 32 nt, Homo Sapiens
aggagggcggacuccaggccccggcccagaga

SEQ ID NO: 192074 - RNA, 32 nt, Homo Sapiens
aagccagcuuacuagcacuuugagaaugaguc

SEQ ID NO: 192075 - RNA, 32 nt, Homo Sapiens
uuguuuguugcuguuuucccccacccauccag

SEQ ID NO: 192076 - RNA, 32 nt, Homo Sapiens
guguuguuugcuuuuucuuacgugauuuuaug

SEQ ID NO: 192077 - RNA, 32 nt, Homo Sapiens
ucuaaagauauuuguuucugugaccuuuugcu

SEQ ID NO: 192078 - RNA, 32 nt, Homo Sapiens
aacugggaaaacagugaaucuuaugguggaag

SEQ ID NO: 192079 - RNA, 32 nt, Homo Sapiens
cgaugaccgaaaguuaucaaaaauauuuaaaa

SEQ ID NO: 192080 - RNA, 32 nt, Homo Sapiens
agcgcccugugcugaguaaagcagccagucuu

SEQ ID NO: 192081 - RNA, 32 nt, Homo Sapiens
gucagcaucuuaaaguaaauguucauggaagc

SEQ ID NO: 192082 - RNA, 32 nt, Homo Sapiens
cccagggagacaauaguucagaguuauaagga

SEQ ID NO: 192083 - RNA, 32 nt, Homo Sapiens
uggaguaauacuguaccauacuggucuuugcu

SEQ ID NO: 192084 - RNA, 32 nt, Homo Sapiens
uaguugccaauaaccugaagaagcuggcauug

SEQ ID NO: 192085 - RNA, 32 nt, Homo Sapiens
uggaggacgggcggucgcgcggccuuucccac

SEQ ID NO: 192086 - RNA, 32 nt, Homo Sapiens
uuuacuuuguugaguauuauuuuaaugggagc

SEQ ID NO: 192087 - RNA, 30 nt, Homo Sapiens
ggggcuugcagagccggcgccggaggagac

SEQ ID NO: 192088 - RNA, 31 nt, Homo Sapiens
agccuucuugguauuagcuucuuuggguuag

SEQ ID NO: 192089 - RNA, 32 nt, Homo Sapiens
gggcagagggccucacuguuucccuggccugc

SEQ ID NO: 192090 - RNA, 32 nt, Homo Sapiens
gccagccccuucaucaccaucuccaucauuca

SEQ ID NO: 192091 - RNA, 32 nt, Homo Sapiens
cgccuguggccggaaggcgccaggggauuagc

SEQ ID NO: 192092 - RNA, 32 nt, Homo Sapiens
uacaguggcaugaucucggcucacugcaaccu

SEQ ID NO: 192093 - RNA, 32 nt, Homo Sapiens
ccuuccugaccuguccuuuucccacaggccuc

SEQ ID NO: 192094 - RNA, 32 nt, Homo Sapiens
ucccaccggaccaccuccaggacccccagcac

SEQ ID NO: 192095 - RNA, 32 nt, Homo Sapiens
ccuuucuggguguguucgcacauccugugugu

SEQ ID NO: 192096 - RNA, 28 nt, Homo Sapiens
auaacaguggcuacgcacgagauaacac

SEQ ID NO: 192097 - RNA, 32 nt, Homo Sapiens
gcgcccgugcgcgcgcucgcggccggguugca

SEQ ID NO: 192098 - RNA, 32 nt, Homo Sapiens
ccuucugcguuuccucacucucacauaccagc

SEQ ID NO: 192099 - RNA, 32 nt, Homo Sapiens
cgggggcggggcggggggaggugggugugaag

SEQ ID NO: 192100 - RNA, 32 nt, Homo Sapiens
uauuucccacugaccuaaacuuucagugauuu

SEQ ID NO: 192101 - RNA, 32 nt, Homo Sapiens
cccucaugucauuucaaacuguuuuccaaagg

SEQ ID NO: 192102 - RNA, 32 nt, Homo Sapiens
acaauuaauuuuccugcaguauaugaaguauu

SEQ ID NO: 192103 - RNA, 32 nt, Homo Sapiens
ucuuuuguguuccuauggaaacauuuuauacu

SEQ ID NO: 192104 - RNA, 32 nt, Homo Sapiens
aagggcuguuacucauauaacuugcuuuucuu

SEQ ID NO: 192105 - RNA, 32 nt, Homo Sapiens
gcccgcgggagaaauguugcugaagugcugcu

SEQ ID NO: 192106 - RNA, 32 nt, Homo Sapiens
cucagcccggaaagaugcucguucgguuguug

SEQ ID NO: 192107 - RNA, 30 nt, Homo Sapiens
uggacagagaagcuuuauuuuuaguaugag

SEQ ID NO: 192108 - RNA, 32 nt, Homo Sapiens
ucccgccugugccccuucuccucaccaugucu

SEQ ID NO: 192109 - RNA, 32 nt, Homo Sapiens
uucaaucauuaacuucaguguaaugaaagaca

SEQ ID NO: 192110 - RNA, 32 nt, Homo Sapiens
aaaauugcacuaguuuuaucugguacauacaa

SEQ ID NO: 192111 - RNA, 32 nt, Homo Sapiens
aggcagaauaugcugagugucuggagucagcc

SEQ ID NO: 192112 - RNA, 32 nt, Homo Sapiens
caggccauggggacccgggccgggccagcggu

SEQ ID NO: 192113 - RNA, 32 nt, Homo Sapiens
cuggucagugauuuuagguuuuuauacuucug

SEQ ID NO: 192114 - RNA, 32 nt, Homo Sapiens
ucacugacugguuuaccaaagucgaugugagg

SEQ ID NO: 192115 - RNA, 32 nt, Homo Sapiens
uuucuguuugcauuuucuuaaugccuuuuccc

SEQ ID NO: 192116 - RNA, 23 nt, Homo Sapiens
acggggggagguggguggaggug

SEQ ID NO: 192117 - RNA, 32 nt, Homo Sapiens
augaugcuaugaaauuggugggugguguauuu

SEQ ID NO: 192118 - RNA, 32 nt, Homo Sapiens
aggacaaguaaguagaacauagauaaugaaaa

SEQ ID NO: 192119 - RNA, 32 nt, Homo Sapiens
gguauuacaccuuuuccaccagaaaaugcaga

SEQ ID NO: 192120 - RNA, 32 nt, Homo Sapiens
gcagugaguguuacaguucuuaaagguggcau

SEQ ID NO: 192121 - RNA, 32 nt, Homo Sapiens
cgggagagccgcgggauuugcggccgccgcca

SEQ ID NO: 192122 - RNA, 32 nt, Homo Sapiens
ccggcagccgcggcgggaggagcggaaacugu

SEQ ID NO: 192123 - RNA, 32 nt, Homo Sapiens
uaggacagugaccugaucuccuccucaugacc

SEQ ID NO: 192124 - RNA, 32 nt, Homo Sapiens
agaugcccaccgugacagugccccagcuugag

SEQ ID NO: 192125 - RNA, 32 nt, Homo Sapiens
ucuguuuguaaggaugauuuuaauauuaauuc

SEQ ID NO: 192126 - RNA, 32 nt, Homo Sapiens
ggugcuggguggagaauggagagagcaugaug

SEQ ID NO: 192127 - RNA, 32 nt, Homo Sapiens
gcaacuguuugauuucuuucuggauacagcug

SEQ ID NO: 192128 - RNA, 31 nt, Homo Sapiens
cuacaucaucgcagccaccauggcacggacc

SEQ ID NO: 192129 - RNA, 32 nt, Homo Sapiens
ucuuccuccgcggcggguuugggugcagugga

SEQ ID NO: 192130 - RNA, 32 nt, Homo Sapiens
gaauccugcuacuuccugcuacucugcaucaa

SEQ ID NO: 192131 - RNA, 32 nt, Homo Sapiens
gaggagacagggcuacugcaggcgcagagcug

SEQ ID NO: 192132 - RNA, 32 nt, Homo Sapiens
aaaguuaaaaauugcuaggaguuacuauuccg

SEQ ID NO: 192133 - RNA, 32 nt, Homo Sapiens
ucacagcacccaaaccgcaggcccugcucugg

SEQ ID NO: 192134 - RNA, 29 nt, Homo Sapiens
uagaagucauaugaaugagggaucgugca

SEQ ID NO: 192135 - RNA, 32 nt, Homo Sapiens
cauaaguggcguggacuaucuaccuccagacu

SEQ ID NO: 192136 - RNA, 32 nt, Homo Sapiens
cuaccccgagacccaggaggcgcucugcccgc

SEQ ID NO: 192137 - RNA, 32 nt, Homo Sapiens
ugggccuaucugggugcauuauggaugguuug

SEQ ID NO: 192138 - RNA, 32 nt, Homo Sapiens
uucugccagaagcauccccaugauguugugac

SEQ ID NO: 192139 - RNA, 29 nt, Homo Sapiens
gauguuugcgguuugagaggcaagaaaau

SEQ ID NO: 192140 - RNA, 32 nt, Homo Sapiens
cauguuucucauaaaaaucagugggaucauuu

SEQ ID NO: 192141 - RNA, 32 nt, Homo Sapiens
aaaauuaauauaaagauauuuuccuauguaug

SEQ ID NO: 192142 - RNA, 32 nt, Homo Sapiens
caaccugacaaugauaauacuguaacuaugau

SEQ ID NO: 192143 - RNA, 32 nt, Homo Sapiens
gaaucaaaacaaauucaagaaugcaguauccg

SEQ ID NO: 192144 - RNA, 32 nt, Homo Sapiens
guggggcuuugcugcuuuugccugcagcaucc

SEQ ID NO: 192145 - RNA, 32 nt, Homo Sapiens
ggaaccacaacacugacuucaggagcaagaga

SEQ ID NO: 192146 - RNA, 32 nt, Homo Sapiens
cuaaauauuuuucccuguaauugagacagaau

SEQ ID NO: 192147 - RNA, 32 nt, Homo Sapiens
auucuccccuccccuaccccggaguuuacggc

SEQ ID NO: 192148 - RNA, 32 nt, Homo Sapiens
ccagauuuuccacaccacccagaggcucauau

SEQ ID NO: 192149 - RNA, 32 nt, Homo Sapiens
cuguuuuuauauaugugaaauaaaaguagaau

SEQ ID NO: 192150 - RNA, 32 nt, Homo Sapiens
uauaccuuaaauauauauacuuuuauguguca

SEQ ID NO: 192151 - RNA, 29 nt, Homo Sapiens
ccaacauucuaaucauaccacaguuuaac

SEQ ID NO: 192152 - RNA, 32 nt, Homo Sapiens
uuggauugcugcucaaaagucaccuuaucaaa

SEQ ID NO: 192153 - RNA, 32 nt, Homo Sapiens
accccaccccccacccccugcuuccccucacu

SEQ ID NO: 192154 - RNA, 32 nt, Homo Sapiens
cagaaacagaaagucaagcaaaaacucaaacu

SEQ ID NO: 192155 - RNA, 32 nt, Homo Sapiens
guucgcugcagggcaugguggacaguaaugcu

SEQ ID NO: 192156 - RNA, 32 nt, Homo Sapiens
cacgcccuuucuccccgccuuuuugcugggcu

SEQ ID NO: 192157 - RNA, 32 nt, Homo Sapiens
caaucuguccguggcucuggcuccaaagccuc

SEQ ID NO: 192158 - RNA, 32 nt, Homo Sapiens
gaugucuuggauucuuuuucuuucccauguuc

SEQ ID NO: 192159 - RNA, 32 nt, Homo Sapiens
aauuuagagucuuuuuugcccagaucuuuuaa

SEQ ID NO: 192160 - RNA, 32 nt, Homo Sapiens
cgccgccgccgccguuuucgccugcagcugcu

SEQ ID NO: 192161 - RNA, 32 nt, Homo Sapiens
acguuuguuucaucaggacaccaaacucuaaa

SEQ ID NO: 192162 - RNA, 32 nt, Homo Sapiens
aacuucaaaaaauuauccucaaguguagauuu

SEQ ID NO: 192163 - RNA, 32 nt, Homo Sapiens
uuguacacuaaaaaaugaaagaauuuagaaug

SEQ ID NO: 192164 - RNA, 31 nt, Homo Sapiens
cugcuguggaaaugccugcccgcgcgcuucu

SEQ ID NO: 192165 - RNA, 32 nt, Homo Sapiens
uguccgggcuccugguccgcaguggcagagcg

SEQ ID NO: 192166 - RNA, 32 nt, Homo Sapiens
agcccaugcagggcuuuagauuuggacacaca

SEQ ID NO: 192167 - RNA, 32 nt, Homo Sapiens
gcccaggugcugagauuacauguaugagccac

SEQ ID NO: 192168 - RNA, 32 nt, Homo Sapiens
aaucaugauguggugguaaaucuuggacgcua

SEQ ID NO: 192169 - RNA, 32 nt, Homo Sapiens
gauucuuuauuaaauguguaacucauggucac

SEQ ID NO: 192170 - RNA, 32 nt, Homo Sapiens
aaaguuccuucaugcauaagauuuuuuuccag

SEQ ID NO: 192171 - RNA, 32 nt, Homo Sapiens
caaggcaaagccaggcagagccaggggugaga

SEQ ID NO: 192172 - RNA, 32 nt, Homo Sapiens
ucuguucccagcuguaggcccuuccaccagcu

SEQ ID NO: 192173 - RNA, 32 nt, Homo Sapiens
aggcgcggagcugaggccgcgcggccgcgcuu

SEQ ID NO: 192174 - RNA, 32 nt, Homo Sapiens
uagaggccggacuggcugggaccagggcgggc

SEQ ID NO: 192175 - RNA, 32 nt, Homo Sapiens
uuuuuccacucuucuuuuuucucaucucuuuu

SEQ ID NO: 192176 - RNA, 32 nt, Homo Sapiens
aaacccgugcgcggcugcgcuuuccugucccc

SEQ ID NO: 192177 - RNA, 32 nt, Homo Sapiens
auuaaaaaauacugacuggcuggcaggcaggu

SEQ ID NO: 192178 - RNA, 32 nt, Homo Sapiens
ccauagcuuuuuucuuuuaaaaacagacuucc

SEQ ID NO: 192179 - RNA, 32 nt, Homo Sapiens
acuccagugauacauagccucuguaaaccugu

SEQ ID NO: 192180 - RNA, 32 nt, Homo Sapiens
uuuaaagcuuuuccauagagcuuauuuauauc

SEQ ID NO: 192181 - RNA, 32 nt, Homo Sapiens
acgcuggcggugggugggccuccagcuuggag

SEQ ID NO: 192182 - RNA, 32 nt, Homo Sapiens
uccaauucaauaaugggagauuucaaaugcaa

SEQ ID NO: 192183 - RNA, 32 nt, Homo Sapiens
ccagccucacaauacuucugacccuuccccau

SEQ ID NO: 192184 - RNA, 32 nt, Homo Sapiens
ucacuccugugcuugaagguggcugaggccgg

SEQ ID NO: 192185 - RNA, 32 nt, Homo Sapiens
aguggaauauuuuuaugacauuuuuaggaaau

SEQ ID NO: 192186 - RNA, 32 nt, Homo Sapiens
gcaggcaccagccccaggcggccagucggcca

SEQ ID NO: 192187 - RNA, 32 nt, Homo Sapiens
uuucacgcgcagcggcgccagacccugcagga

SEQ ID NO: 192188 - RNA, 32 nt, Homo Sapiens
gccgggcucaacgcgcugcugcugcugcucua

SEQ ID NO: 192189 - RNA, 32 nt, Homo Sapiens
aucaaugagguaucuucuuuaguggugguaug

SEQ ID NO: 192190 - RNA, 32 nt, Homo Sapiens
gguucagaaucaguucccuuucucugggacca

SEQ ID NO: 192191 - RNA, 32 nt, Homo Sapiens
uuccuauagaaagaacaguauugcuguaauuc

SEQ ID NO: 192192 - RNA, 29 nt, Homo Sapiens
ccucagaguaucuggaccucagagaccau

SEQ ID NO: 192193 - RNA, 32 nt, Homo Sapiens
aauuuaagggaagaagcaaaagcuaaacuguc

SEQ ID NO: 192194 - RNA, 32 nt, Homo Sapiens
cccaguccacuggcaguggaauugcuuuccug

SEQ ID NO: 192195 - RNA, 32 nt, Homo Sapiens
cuccugcaccccuggggugcuaccugacaccu

SEQ ID NO: 192196 - RNA, 32 nt, Homo Sapiens
ucuauuucaguuccucucuuuucaucggauug

SEQ ID NO: 192197 - RNA, 32 nt, Homo Sapiens
ucguguggcuggaagcgcugucgauaagcuuc

SEQ ID NO: 192198 - RNA, 32 nt, Homo Sapiens
cugcucccagccugcugagagcccccaccuug

SEQ ID NO: 192199 - RNA, 32 nt, Homo Sapiens
guugguagcuucuuuggagacuugugauaacc

SEQ ID NO: 192200 - RNA, 32 nt, Homo Sapiens
uucccaaaaggcggcacccagcuccucaaucg

SEQ ID NO: 192201 - RNA, 32 nt, Homo Sapiens
aagacaugggaaagcggaaccaccaaaaggag

SEQ ID NO: 192202 - RNA, 32 nt, Homo Sapiens
cugaggucaggaguuugagaccagccuggcca

SEQ ID NO: 192203 - RNA, 32 nt, Homo Sapiens
agauaacagaguagagugaaccagagaaagag

SEQ ID NO: 192204 - RNA, 32 nt, Homo Sapiens
gaagcaggcagacacuggcuggagcgccguaa

SEQ ID NO: 192205 - RNA, 32 nt, Homo Sapiens
ugguggauaaaaccauugaugcuuucacacca

SEQ ID NO: 192206 - RNA, 32 nt, Homo Sapiens
gaguuugcuucuuuauuucugucuauacuucc

SEQ ID NO: 192207 - RNA, 32 nt, Homo Sapiens
uguaucuacaguaaugaaauguuuacuaagug

SEQ ID NO: 192208 - RNA, 32 nt, Homo Sapiens
ggcguugcuggucuguccgaggaggugagggc

SEQ ID NO: 192209 - RNA, 32 nt, Homo Sapiens
ccgcauggacuucagccaucauugcguacgua

SEQ ID NO: 192210 - RNA, 32 nt, Homo Sapiens
caggguuguggauuaucuuccacacaugaauu

SEQ ID NO: 192211 - RNA, 32 nt, Homo Sapiens
cagcguccccgggcccucggccccaccgagug

SEQ ID NO: 192212 - RNA, 32 nt, Homo Sapiens
uuuuagugugauuuauacugaaaugugagcca

SEQ ID NO: 192213 - RNA, 32 nt, Homo Sapiens
ggaucagucucaagugucugguaacagcagca

SEQ ID NO: 192214 - RNA, 32 nt, Homo Sapiens
ugauuuuuucuuuaacagcauaaguaaagagg

SEQ ID NO: 192215 - RNA, 32 nt, Homo Sapiens
cucggagcucggcuccucuccuuccuuuucuu

SEQ ID NO: 192216 - RNA, 32 nt, Homo Sapiens
aagaggggcccccucgccccagccccacccca

SEQ ID NO: 192217 - RNA, 32 nt, Homo Sapiens
gguguuauuuuuauuuuuuuuuguaaagugau

SEQ ID NO: 192218 - RNA, 32 nt, Homo Sapiens
auuaaugcaauaaauuaacuuuguacacauuu

SEQ ID NO: 192219 - RNA, 32 nt, Homo Sapiens
agucuaggugcagcugcggauccuucagcguc

SEQ ID NO: 192220 - RNA, 30 nt, Homo Sapiens
ugagccaagguugccaccugucucuuaaca

SEQ ID NO: 192221 - RNA, 32 nt, Homo Sapiens
gaguauuuuuaaaauuuuggauagucucuuag

SEQ ID NO: 192222 - RNA, 32 nt, Homo Sapiens
uauuugcaauaccaccuaguggauauggcaac

SEQ ID NO: 192223 - RNA, 32 nt, Homo Sapiens
cuucucaguuuaaugugggauuaagagccaag

SEQ ID NO: 192224 - RNA, 32 nt, Homo Sapiens
ccuuuccccacaacuuuuccugcucaaaccca

SEQ ID NO: 192225 - RNA, 32 nt, Homo Sapiens
uacuugaggguggaggguggcaggagggugaa

SEQ ID NO: 192226 - RNA, 32 nt, Homo Sapiens
uaaggcggcgugaggcaggcgaggggggcagc

SEQ ID NO: 192227 - RNA, 32 nt, Homo Sapiens
gcugccacuguaauaaagcgugccuacacgcu

SEQ ID NO: 192228 - RNA, 32 nt, Homo Sapiens
gccuggugggccccggccccugaccccaaggc

SEQ ID NO: 192229 - RNA, 32 nt, Homo Sapiens
cuuuguuacugagaugcgcggcuguucguguu

SEQ ID NO: 192230 - RNA, 32 nt, Homo Sapiens
uacaaauuaacuuucauaaauuuuauggcaug

SEQ ID NO: 192231 - RNA, 32 nt, Homo Sapiens
guaguggcuguggccgggaggcguucggcagc

SEQ ID NO: 192232 - RNA, 32 nt, Homo Sapiens
agcugcauugagaagaaaauggcugucauuua

SEQ ID NO: 192233 - RNA, 32 nt, Homo Sapiens
ucucugucguucagcccacgucucucucauuu

SEQ ID NO: 192234 - RNA, 32 nt, Homo Sapiens
uuugagcaaugagaggcagcagcuagaaauga

SEQ ID NO: 192235 - RNA, 32 nt, Homo Sapiens
ucgauugauagaggugugacuaguccuuagca

SEQ ID NO: 192236 - RNA, 32 nt, Homo Sapiens
aauacuuaauguauauuugaaaugaauauaga

SEQ ID NO: 192237 - RNA, 32 nt, Homo Sapiens
accagauggaggggcccucccuggucucuggc

SEQ ID NO: 192238 - RNA, 32 nt, Homo Sapiens
aauguaugcaauuaagucuguuuaaaugauau

SEQ ID NO: 192239 - RNA, 32 nt, Homo Sapiens
gagaaaaagggagggggagagggcugccuuug

SEQ ID NO: 192240 - RNA, 32 nt, Homo Sapiens
cuuggagauugugggauugguuuuguuucugu

SEQ ID NO: 192241 - RNA, 32 nt, Homo Sapiens
caaaacaaaacagaacagaacacugaaugccu

SEQ ID NO: 192242 - RNA, 32 nt, Homo Sapiens
uacuuauauaaaagcuagaaauaaugugauuc

SEQ ID NO: 192243 - RNA, 32 nt, Homo Sapiens
cuuuguguuuuaggaaaagugaaucuugcugu

SEQ ID NO: 192244 - RNA, 32 nt, Homo Sapiens
cccugggcccauggcggcgccggcguuggcau

SEQ ID NO: 192245 - RNA, 32 nt, Homo Sapiens
caugcugacgaggcuccuccaguguuuccuug

SEQ ID NO: 192246 - RNA, 32 nt, Homo Sapiens
cuacacugucccacccagugcccuggcaccga

SEQ ID NO: 192247 - RNA, 32 nt, Homo Sapiens
ccugcauugaauaccuguuucuccauguguau

SEQ ID NO: 192248 - RNA, 32 nt, Homo Sapiens
ugagggagugaaaacuuugcauagaauccuca

SEQ ID NO: 192249 - RNA, 32 nt, Homo Sapiens
gagauccguuuuucagggagccaggcggcuca

SEQ ID NO: 192250 - RNA, 32 nt, Homo Sapiens
gccgagcgugacugcgugcauuuucucuccuu

SEQ ID NO: 192251 - RNA, 32 nt, Homo Sapiens
gaauuccgccgccgccggggcccccggcagca

SEQ ID NO: 192252 - RNA, 32 nt, Homo Sapiens
gcaaguggcccuccauucguguguguauuuag

SEQ ID NO: 192253 - RNA, 32 nt, Homo Sapiens
aguucuaauucuuuuucaucuauuugcacagc

SEQ ID NO: 192254 - RNA, 32 nt, Homo Sapiens
ggcgcagcuugcacgcuccuccggccauggac

SEQ ID NO: 192255 - RNA, 32 nt, Homo Sapiens
caauaacuaaugcuaagaaaugcugaaaauca

SEQ ID NO: 192256 - RNA, 32 nt, Homo Sapiens
cuauauuaucuuauauacuaauaucauguuuu

SEQ ID NO: 192257 - RNA, 32 nt, Homo Sapiens
cccacaagaagaggcgaccagguccuggguga

SEQ ID NO: 192258 - RNA, 32 nt, Homo Sapiens
cuggaaggccccagacaucaaggcucugaggg

SEQ ID NO: 192259 - RNA, 32 nt, Homo Sapiens
aagcagguacauguacuguugcuggaggagga

SEQ ID NO: 192260 - RNA, 32 nt, Homo Sapiens
guuaauuuuugugcaaaaacaaaccugaaaaa

SEQ ID NO: 192261 - RNA, 32 nt, Homo Sapiens
gugcugggcaagggcugcuucggccaggcuau

SEQ ID NO: 192262 - RNA, 32 nt, Homo Sapiens
auggggcccucccagaaccucagcauuuccuu

SEQ ID NO: 192263 - RNA, 32 nt, Homo Sapiens
gaggcagggccaggcgcccagaacccccaucc

SEQ ID NO: 192264 - RNA, 32 nt, Homo Sapiens
cagggggcguggucugguccccauugcgggcc

SEQ ID NO: 192265 - RNA, 32 nt, Homo Sapiens
gcuuuuugacuucaguuugcuauuuuucugug

SEQ ID NO: 192266 - RNA, 32 nt, Homo Sapiens
agguagauaacuguuuaaaaaauacaugucua

SEQ ID NO: 192267 - RNA, 32 nt, Homo Sapiens
uguaucgcucaguaaacauugcucuuacuuaa

SEQ ID NO: 192268 - RNA, 32 nt, Homo Sapiens
uaaaauauuuuaaguacauuuauuuuuggugu

SEQ ID NO: 192269 - RNA, 32 nt, Homo Sapiens
cgggacccgacgggccgcggcgcggaggccuc

SEQ ID NO: 192270 - RNA, 32 nt, Homo Sapiens
uuagaaaguaagagaaucaugguucggauaug

SEQ ID NO: 192271 - RNA, 32 nt, Homo Sapiens
cuugaucucccucuuccugucucuguccuggu

SEQ ID NO: 192272 - RNA, 32 nt, Homo Sapiens
cuggucucccggcccuagcgcccgccaaaccu

SEQ ID NO: 192273 - RNA, 32 nt, Homo Sapiens
uucagggcagagaugggcuugauuccaccugg

SEQ ID NO: 192274 - RNA, 32 nt, Homo Sapiens
agaagcugagacccuuccccagugucugaggc

SEQ ID NO: 192275 - RNA, 31 nt, Homo Sapiens
auaacuagaauuagaagcagagccugaaaac

SEQ ID NO: 192276 - RNA, 32 nt, Homo Sapiens
uuucagcaaccacuguaugaugcuuaugugaa

SEQ ID NO: 192277 - RNA, 32 nt, Homo Sapiens
gugaugaugacacuauuucuaaaagacagaca

SEQ ID NO: 192278 - RNA, 32 nt, Homo Sapiens
ccuuccuagagugauccugaauccagcugccu

SEQ ID NO: 192279 - RNA, 32 nt, Homo Sapiens
aguaagcuuccaugacccuuucuuggaggccu

SEQ ID NO: 192280 - RNA, 32 nt, Homo Sapiens
gcagaccgccgggcuccccgaggacaccucgc

SEQ ID NO: 192281 - RNA, 32 nt, Homo Sapiens
gagccaacagagcccccgucuugcuggcguga

SEQ ID NO: 192282 - RNA, 32 nt, Homo Sapiens
acauguacauguuuuugaaacggauuggaagg

SEQ ID NO: 192283 - RNA, 32 nt, Homo Sapiens
gucagggacgcgcgcagccagcccuucccccu

SEQ ID NO: 192284 - RNA, 32 nt, Homo Sapiens
ccuuuauuucucucccuuucucuucaccucug

SEQ ID NO: 192285 - RNA, 32 nt, Homo Sapiens
ucuggcugcgaugcuguuugaacucuuuuuca

SEQ ID NO: 192286 - RNA, 32 nt, Homo Sapiens
agggccggccccagccccugcauggauuccuu

SEQ ID NO: 192287 - RNA, 32 nt, Homo Sapiens
aacagaaacacacucucguuugugaaaugaau

SEQ ID NO: 192288 - RNA, 32 nt, Homo Sapiens
auaguuacauaaauagaccagagucgguuauu

SEQ ID NO: 192289 - RNA, 32 nt, Homo Sapiens
caccuggacugacuucugcacugaagccacag

SEQ ID NO: 192290 - RNA, 32 nt, Homo Sapiens
gcggcugcucauggccacuggaccucagccug

SEQ ID NO: 192291 - RNA, 32 nt, Homo Sapiens
gugugauuauauauuugacauuuuacauuuca

SEQ ID NO: 192292 - RNA, 32 nt, Homo Sapiens
ccauugaugugcggggagcuccucccgccacg

SEQ ID NO: 192293 - RNA, 32 nt, Homo Sapiens
agcuguguggacacuacccagcccuacuccuc

SEQ ID NO: 192294 - RNA, 32 nt, Homo Sapiens
cggcccgagucccggcgccagcagccagcccg

SEQ ID NO: 192295 - RNA, 32 nt, Homo Sapiens
ccaauguugugugaagacaggcagaugcugca

SEQ ID NO: 192296 - RNA, 32 nt, Homo Sapiens
uuuuuuuuuuccucauuuuucuuaaauccaag

SEQ ID NO: 192297 - RNA, 32 nt, Homo Sapiens
ucugcacuggcgcauuggcaugguagaugcca

SEQ ID NO: 192298 - RNA, 32 nt, Homo Sapiens
uauacaacuaaauuuaugcuggguuuuugguu

SEQ ID NO: 192299 - RNA, 32 nt, Homo Sapiens
guaauguuugucuucaaagaguuucuuuaucc

SEQ ID NO: 192300 - RNA, 32 nt, Homo Sapiens
cucagcugccccuccaacacagcccucugugg

SEQ ID NO: 192301 - RNA, 32 nt, Homo Sapiens
aucaauagaagguaaaacaugaaaauaaauac

SEQ ID NO: 192302 - RNA, 32 nt, Homo Sapiens
ucaccgcccgcccuucccugccccgggcuccu

SEQ ID NO: 192303 - RNA, 32 nt, Homo Sapiens
ccguuggucagcggcccgagccuggggcccuc

SEQ ID NO: 192304 - RNA, 32 nt, Homo Sapiens
cucacugcaaccuccgccucccgggcugaagc

SEQ ID NO: 192305 - RNA, 32 nt, Homo Sapiens
gaguuguuuccuucugguggguucauggucuc

SEQ ID NO: 192306 - RNA, 32 nt, Homo Sapiens
cagaguucagugugucccaaggaaaacccaaa

SEQ ID NO: 192307 - RNA, 32 nt, Homo Sapiens
ucucuacuuaggaguggaauuucuaagucauc

SEQ ID NO: 192308 - RNA, 32 nt, Homo Sapiens
aaaauucacacauacauagaaauugaacacac

SEQ ID NO: 192309 - RNA, 30 nt, Homo Sapiens
uucaagcugaccccuuugccuaacuucccu

SEQ ID NO: 192310 - RNA, 32 nt, Homo Sapiens
acugagaaggauuugcugcucuaugacuguau

SEQ ID NO: 192311 - RNA, 32 nt, Homo Sapiens
acagcucuaauuuuuaaauauuugguauaaca

SEQ ID NO: 192312 - RNA, 32 nt, Homo Sapiens
caucuccuuugacuaguuaucaacuuaccuuc

SEQ ID NO: 192313 - RNA, 32 nt, Homo Sapiens
gguagugaauggucucuuugccuucaggcugg

SEQ ID NO: 192314 - RNA, 32 nt, Homo Sapiens
gaaggcaauauuaaccuaaucaccauguaagc

SEQ ID NO: 192315 - RNA, 32 nt, Homo Sapiens
gcuugacaauuuuuuucuucuuuuucuucuuu

SEQ ID NO: 192316 - RNA, 32 nt, Homo Sapiens
gaaagauugaagagcagguuccugucaauguu

SEQ ID NO: 192317 - RNA, 32 nt, Homo Sapiens
uuaaaugcaaaguauauauuugaaauauuaac

SEQ ID NO: 192318 - RNA, 32 nt, Homo Sapiens
gcuccccgcucgccgccaccgcgcccuccgcu

SEQ ID NO: 192319 - RNA, 30 nt, Homo Sapiens
ugcggugucugcugcuauucuccgagcuuc

SEQ ID NO: 192320 - RNA, 32 nt, Homo Sapiens
ugucucuucugcgcaacgucuggcacaggagc

SEQ ID NO: 192321 - RNA, 32 nt, Homo Sapiens
aaugggcauuuuacaagaaguacgaaucuuau

SEQ ID NO: 192322 - RNA, 32 nt, Homo Sapiens
cuugucuacuuaggucucucucuucuugcugg

SEQ ID NO: 192323 - RNA, 32 nt, Homo Sapiens
cauuuuuacuauuguuacauuauguggaaaac

SEQ ID NO: 192324 - RNA, 32 nt, Homo Sapiens
agccucugcccuccccccacacagggcgggag

SEQ ID NO: 192325 - RNA, 32 nt, Homo Sapiens
aagcguguccuucaugagacaggauucaguac

SEQ ID NO: 192326 - RNA, 32 nt, Homo Sapiens
ucuucacuuaggaagaguguugugaaagccag

SEQ ID NO: 192327 - RNA, 32 nt, Homo Sapiens
uucacaguagugcuuuuuccuuucacuuggau

SEQ ID NO: 192328 - RNA, 32 nt, Homo Sapiens
gaugauacugaauagauauaaauuacauguac

SEQ ID NO: 192329 - RNA, 32 nt, Homo Sapiens
ccucugauuccccgugaauucuucccaauuua

SEQ ID NO: 192330 - RNA, 32 nt, Homo Sapiens
gugucacaguguuugguucuuuuguuuuguuu

SEQ ID NO: 192331 - RNA, 32 nt, Homo Sapiens
aaaauacugucaacauguauucauuaguuaca

SEQ ID NO: 192332 - RNA, 32 nt, Homo Sapiens
agauaauaguggcuucuuucugauugcuacug

SEQ ID NO: 192333 - RNA, 32 nt, Homo Sapiens
ggccaggagaucuucugucuucugcccuguag

SEQ ID NO: 192334 - RNA, 32 nt, Homo Sapiens
ugccuuuuucauuuuccaauacgacacugaaa

SEQ ID NO: 192335 - RNA, 32 nt, Homo Sapiens
ggcucaagccuggcccuggcccgcagcacacu

SEQ ID NO: 192336 - RNA, 32 nt, Homo Sapiens
aacuuucccacaaaggcauauaacaguaugaa

SEQ ID NO: 192337 - RNA, 30 nt, Homo Sapiens
caugaguaccacccugccugccuccccaac

SEQ ID NO: 192338 - RNA, 32 nt, Homo Sapiens
gugucagccucccuggcuguuaguaccuucuu

SEQ ID NO: 192339 - RNA, 32 nt, Homo Sapiens
agaccagccugggcaacauagcaagacccugu

SEQ ID NO: 192340 - RNA, 32 nt, Homo Sapiens
cuuugagguaucauaauuuauguaucuuaugu

SEQ ID NO: 192341 - RNA, 32 nt, Homo Sapiens
ggcggcuccgcgggcuacggucgcucccgccu

SEQ ID NO: 192342 - RNA, 32 nt, Homo Sapiens
cccaccuacagagacccuccccugcccccucc

SEQ ID NO: 192343 - RNA, 32 nt, Homo Sapiens
caaacaugugguuuuucugugugcuuucaacc

SEQ ID NO: 192344 - RNA, 25 nt, Homo Sapiens
augaggucgcggccggcgggucccg

SEQ ID NO: 192345 - RNA, 32 nt, Homo Sapiens
aucugugcugucuagguuugugcuucuagcca

SEQ ID NO: 192346 - RNA, 32 nt, Homo Sapiens
ccaggcaggcaaaaggagucauggcuucugau

SEQ ID NO: 192347 - RNA, 32 nt, Homo Sapiens
agugugcaauccaacaaugauugguauacuca

SEQ ID NO: 192348 - RNA, 32 nt, Homo Sapiens
uucuccuugagccccagaucccuucaagcugg

SEQ ID NO: 192349 - RNA, 32 nt, Homo Sapiens
acuguauagaaaaagaaaaaaggcuggguuua

SEQ ID NO: 192350 - RNA, 32 nt, Homo Sapiens
guuuuuucauaggcucuguuucauaggcuuug

SEQ ID NO: 192351 - RNA, 32 nt, Homo Sapiens
guacagguguauauaccucuauauuauauauc

SEQ ID NO: 192352 - RNA, 32 nt, Homo Sapiens
ggcauucccacccaccauggaagacuggauac

SEQ ID NO: 192353 - RNA, 32 nt, Homo Sapiens
caccugugacggaagcacuucuggaagugaac

SEQ ID NO: 192354 - RNA, 32 nt, Homo Sapiens
agcucuguccccaccccaugggccucaugaau

SEQ ID NO: 192355 - RNA, 32 nt, Homo Sapiens
auccgcugagcagugccuccucccgauucagc

SEQ ID NO: 192356 - RNA, 32 nt, Homo Sapiens
ucuucugacuuccagucuuucaccagaugacu

SEQ ID NO: 192357 - RNA, 32 nt, Homo Sapiens
aucgagcagagccgguaccaccacgugccaga

SEQ ID NO: 192358 - RNA, 32 nt, Homo Sapiens
cuuccuagauagucgcccacuccaccuccuac

SEQ ID NO: 192359 - RNA, 32 nt, Homo Sapiens
gcuagaauugguugguuggucacuugacaaga

SEQ ID NO: 192360 - RNA, 30 nt, Homo Sapiens
caggcagagaagcugcaggagcugcugcgg

SEQ ID NO: 192361 - RNA, 32 nt, Homo Sapiens
ucuuuggccgacagugguguaacugugugugu

SEQ ID NO: 192362 - RNA, 32 nt, Homo Sapiens
acauccgcuccuucccuaggccugcuggcucu

SEQ ID NO: 192363 - RNA, 32 nt, Homo Sapiens
agguggacgcugccuccggggcuggucgcgca

SEQ ID NO: 192364 - RNA, 32 nt, Homo Sapiens
gaggcgcgggcggccacgccgcggaaggcgcg

SEQ ID NO: 192365 - RNA, 32 nt, Homo Sapiens
cugcugcugcugcugcugcugcuucucgaacu

SEQ ID NO: 192366 - RNA, 32 nt, Homo Sapiens
aaucggugucuuaacagucuccaguguccacg

SEQ ID NO: 192367 - RNA, 32 nt, Homo Sapiens
agaaaucuuugccuaccucacauuaugaaaac

SEQ ID NO: 192368 - RNA, 32 nt, Homo Sapiens
aauuuauaaguugaccugaaaauaauguuuug

SEQ ID NO: 192369 - RNA, 32 nt, Homo Sapiens
uuuugucacaauaacuaaguauucaauuauau

SEQ ID NO: 192370 - RNA, 32 nt, Homo Sapiens
uguccaccccuuuaaucaaucagcuuuggcca

SEQ ID NO: 192371 - RNA, 32 nt, Homo Sapiens
gaaauuuaucugugcauagagcauaaaguuaa

SEQ ID NO: 192372 - RNA, 32 nt, Homo Sapiens
cuuugcuuugcuagugcugcuuuguguguaug

SEQ ID NO: 192373 - RNA, 32 nt, Homo Sapiens
aacuacuacuuuuggaggaaacuuggaacaag

SEQ ID NO: 192374 - RNA, 32 nt, Homo Sapiens
cgggucagggugccacccugcugcuggcccca

SEQ ID NO: 192375 - RNA, 32 nt, Homo Sapiens
caugauuuucuuugaaagauaaggauguaaug

SEQ ID NO: 192376 - RNA, 32 nt, Homo Sapiens
uucucggaccagccuucuuccucccaccaugg

SEQ ID NO: 192377 - RNA, 32 nt, Homo Sapiens
uuuguuuucuauuuuuuuuaauuuauauuuuu

SEQ ID NO: 192378 - RNA, 32 nt, Homo Sapiens
ccccuccucaccugggcucgcugcuggaguga

SEQ ID NO: 192379 - RNA, 32 nt, Homo Sapiens
acaccacgcucuccuccaccgaccaggugacc

SEQ ID NO: 192380 - RNA, 32 nt, Homo Sapiens
uuuaacaugauuuuaacaaacugcacuuauua

SEQ ID NO: 192381 - RNA, 32 nt, Homo Sapiens
ggggcccacuauuccugaauaagggacaugca

SEQ ID NO: 192382 - RNA, 32 nt, Homo Sapiens
caccacauuuucaaaacagauuuguaaaaauu

SEQ ID NO: 192383 - RNA, 32 nt, Homo Sapiens
auacugaaugagugaaugaauguagccccuga

SEQ ID NO: 192384 - RNA, 32 nt, Homo Sapiens
agacaguggggcuggugacagcugcggggauc

SEQ ID NO: 192385 - RNA, 31 nt, Homo Sapiens
gguuugaaauaaaaauguuucuuauccucaa

SEQ ID NO: 192386 - RNA, 32 nt, Homo Sapiens
gcuguagaaacauauaacaaagggcagcccuc

SEQ ID NO: 192387 - RNA, 32 nt, Homo Sapiens
ucucauucauucuccuuuucccugugcucugg

SEQ ID NO: 192388 - RNA, 32 nt, Homo Sapiens
gaaugacuuugccugccccugaugaaacuuca

SEQ ID NO: 192389 - RNA, 32 nt, Homo Sapiens
ccccacuggaggggcugcuguggccagggugc

SEQ ID NO: 192390 - RNA, 32 nt, Homo Sapiens
caggaagugucuaauuacgauuuuguggccug

SEQ ID NO: 192391 - RNA, 31 nt, Homo Sapiens
cggggcaggcauugcaguucgagccaaagcc

SEQ ID NO: 192392 - RNA, 32 nt, Homo Sapiens
caccaagauuuucagcaucugaaucaaacuaa

SEQ ID NO: 192393 - RNA, 32 nt, Homo Sapiens
agguacaauuacuguagaaacuaacauuagcu

SEQ ID NO: 192394 - RNA, 32 nt, Homo Sapiens
ccaauacuuaggauuuuggucuugguguuugu

SEQ ID NO: 192395 - RNA, 29 nt, Homo Sapiens
cacaaugacaacagugacagugaccacag

SEQ ID NO: 192396 - RNA, 32 nt, Homo Sapiens
ugacugcacagccugccuggaggaugggugcg

SEQ ID NO: 192397 - RNA, 32 nt, Homo Sapiens
ggugcaccgcggccgcgccccgggagggcugu

SEQ ID NO: 192398 - RNA, 32 nt, Homo Sapiens
uggcaaaagaaaugcagauuucccaguuaucu

SEQ ID NO: 192399 - RNA, 32 nt, Homo Sapiens
acucuaacagagcugcagaccccugcccugag

SEQ ID NO: 192400 - RNA, 32 nt, Homo Sapiens
gcuuggagcccgcacucgggcgcggagggagc

SEQ ID NO: 192401 - RNA, 32 nt, Homo Sapiens
agaaaacaaggugaagaccuauugcuucaaua

SEQ ID NO: 192402 - RNA, 32 nt, Homo Sapiens
aggcagguuuguggggaguaggauggugagag

SEQ ID NO: 192403 - RNA, 32 nt, Homo Sapiens
gucaagguacuguauagaaguuguguaaaauc

SEQ ID NO: 192404 - RNA, 32 nt, Homo Sapiens
ucuuuccuaaaauggagucgaguaaaaagaug

SEQ ID NO: 192405 - RNA, 32 nt, Homo Sapiens
ucacgcucucggggcggacucccggcccuccg

SEQ ID NO: 192406 - RNA, 32 nt, Homo Sapiens
accuggaaggucggacagggacagcagagaag

SEQ ID NO: 192407 - RNA, 32 nt, Homo Sapiens
agcaagccccacuuauuccccauucuuccuag

SEQ ID NO: 192408 - RNA, 32 nt, Homo Sapiens
ccuggcuggggcugcaggggcugggguguguu

SEQ ID NO: 192409 - RNA, 32 nt, Homo Sapiens
caaaaaacaaaauaaaaaggugugcaauugac

SEQ ID NO: 192410 - RNA, 32 nt, Homo Sapiens
aaaauguagaaaguuuuuuaaauucuaaacag

SEQ ID NO: 192411 - RNA, 32 nt, Homo Sapiens
gcuuuuggauucaaugagugggaaauacauug

SEQ ID NO: 192412 - RNA, 32 nt, Homo Sapiens
guuaaaaagugacaaagcuuguccuugaaccc

SEQ ID NO: 192413 - RNA, 32 nt, Homo Sapiens
cgucugcuggaacagagcuacgccuauggaac

SEQ ID NO: 192414 - RNA, 32 nt, Homo Sapiens
cucagugcacucggugucaugucugagccugg

SEQ ID NO: 192415 - RNA, 32 nt, Homo Sapiens
gucccucaggccucgagcgcaagcauuccagc

SEQ ID NO: 192416 - RNA, 32 nt, Homo Sapiens
auaaaucuugcuaguuauuuuaucuuuaucuu

SEQ ID NO: 192417 - RNA, 32 nt, Homo Sapiens
cgccaggaggccuggguguccugcaaguggag

SEQ ID NO: 192418 - RNA, 32 nt, Homo Sapiens
uuuuuaaguauuuuuuaaaaaccugcaaagau

SEQ ID NO: 192419 - RNA, 31 nt, Homo Sapiens
cuaccgcuguaucuguacauaauucuaacuu

SEQ ID NO: 192420 - RNA, 32 nt, Homo Sapiens
agcagucggaccgcgccgcccgccucccggcu

SEQ ID NO: 192421 - RNA, 32 nt, Homo Sapiens
uuuaaaucucaaauuuaaguuauuaugcaacu

SEQ ID NO: 192422 - RNA, 32 nt, Homo Sapiens
ggagggaggccacaacuccgagcugcccaccu

SEQ ID NO: 192423 - RNA, 32 nt, Homo Sapiens
ccucccccaagccguuccgcaccgcggccgcu

SEQ ID NO: 192424 - RNA, 32 nt, Homo Sapiens
aagccaugucaggcaucuccaccacggcuggg

SEQ ID NO: 192425 - RNA, 32 nt, Homo Sapiens
gugcccuggguugccgagugucagaauauacu

SEQ ID NO: 192426 - RNA, 32 nt, Homo Sapiens
ucacucacagaaacuccaagacagauuaaacu

SEQ ID NO: 192427 - RNA, 32 nt, Homo Sapiens
aguggccgccggggaacgggugguccgaagac

SEQ ID NO: 192428 - RNA, 32 nt, Homo Sapiens
aaagcagugucuaugcucuugauuaauaaaac

SEQ ID NO: 192429 - RNA, 32 nt, Homo Sapiens
uuucuaccuggauaaacuucuggaacuuggcu

SEQ ID NO: 192430 - RNA, 32 nt, Homo Sapiens
cccuggagcgguuuccuaccauucccuucuuu

SEQ ID NO: 192431 - RNA, 32 nt, Homo Sapiens
agaaaccuaccccuaacaccagcccuucccuc

SEQ ID NO: 192432 - RNA, 32 nt, Homo Sapiens
gucuauaagccuggagagaccaucagcaguaa

SEQ ID NO: 192433 - RNA, 32 nt, Homo Sapiens
cuuugucccguugucgagguuuuuucaaauag

SEQ ID NO: 192434 - RNA, 32 nt, Homo Sapiens
uaugaaacaagcuaaaaguaaguuucacuuag

SEQ ID NO: 192435 - RNA, 32 nt, Homo Sapiens
ccacuccccagccccagccccuuccaugguac

SEQ ID NO: 192436 - RNA, 32 nt, Homo Sapiens
uaacccaacugauagauuaaguauuagucaaa

SEQ ID NO: 192437 - RNA, 32 nt, Homo Sapiens
uuuuagacugguugucauaguuucugcaaagg

SEQ ID NO: 192438 - RNA, 32 nt, Homo Sapiens
cauauaaaacgcaggcuguuuagcauggagau

SEQ ID NO: 192439 - RNA, 32 nt, Homo Sapiens
agucugucaguauuacugguauuuuuaaauaa

SEQ ID NO: 192440 - RNA, 32 nt, Homo Sapiens
uacaauucaagaucuugaucuauauccauaga

SEQ ID NO: 192441 - RNA, 32 nt, Homo Sapiens
ggcgggaaaggcgaugaguaaaggccgggcag

SEQ ID NO: 192442 - RNA, 32 nt, Homo Sapiens
gaccuuaggaggaggaaggcgagggcggggug

SEQ ID NO: 192443 - RNA, 32 nt, Homo Sapiens
accagccucacaggcggugcacguugcagucg

SEQ ID NO: 192444 - RNA, 32 nt, Homo Sapiens
aaauaugauuuauguauuaaucuccuaaguga

SEQ ID NO: 192445 - RNA, 32 nt, Homo Sapiens
auagaaaaaaaauuauauccuagaaagacaga

SEQ ID NO: 192446 - RNA, 32 nt, Homo Sapiens
aguugugagcagugcaccuucacaagcaaagc

SEQ ID NO: 192447 - RNA, 32 nt, Homo Sapiens
agaaggcagaauuuauacaguauaucagcuga

SEQ ID NO: 192448 - RNA, 32 nt, Homo Sapiens
acccaccggcgcccaaguccuccccgcgccgc

SEQ ID NO: 192449 - RNA, 32 nt, Homo Sapiens
guccccacgggcuccccuggcuccucuggccu

SEQ ID NO: 192450 - RNA, 32 nt, Homo Sapiens
guucauuaaguacauagcuaagguaaugaaca

SEQ ID NO: 192451 - RNA, 32 nt, Homo Sapiens
ccuccacuccgucccccgcggucugcucugug

SEQ ID NO: 192452 - RNA, 32 nt, Homo Sapiens
uccuagaggagcuucuccuuaacaugcagaaa

SEQ ID NO: 192453 - RNA, 32 nt, Homo Sapiens
gagaggcccagcugccugugaggugugugcuu

SEQ ID NO: 192454 - RNA, 32 nt, Homo Sapiens
uuagugugaugauuaaccccuucuuucauguu

SEQ ID NO: 192455 - RNA, 32 nt, Homo Sapiens
gcuacuuguaaguaagaguaacugcaucugga

SEQ ID NO: 192456 - RNA, 32 nt, Homo Sapiens
ucauggaaagaugagaaaaaacaagaaaaagc

SEQ ID NO: 192457 - RNA, 32 nt, Homo Sapiens
cccugcuacuuugaaaccagaaaauaaugacu

SEQ ID NO: 192458 - RNA, 32 nt, Homo Sapiens
gcacagcccgcggcccggugccagcuccgccg

SEQ ID NO: 192459 - RNA, 32 nt, Homo Sapiens
uaugcugacaugccauccuuccagcaaacgua

SEQ ID NO: 192460 - RNA, 32 nt, Homo Sapiens
ucuguugugguuuauuuuauuaaauuuuuucc

SEQ ID NO: 192461 - RNA, 32 nt, Homo Sapiens
auccagaaauauuuucagcaaaacuuuccaac

SEQ ID NO: 192462 - RNA, 32 nt, Homo Sapiens
uuuaaaaauuuuucuuuuuuguuguuguuacu

SEQ ID NO: 192463 - RNA, 32 nt, Homo Sapiens
uuugggauuuuuauuuuuuacguguccgaaga

SEQ ID NO: 192464 - RNA, 32 nt, Homo Sapiens
agcccgcgaggugcgugcgccauggagcuagg

SEQ ID NO: 192465 - RNA, 32 nt, Homo Sapiens
ggcucuggugccccuccucccagcaugcucug

SEQ ID NO: 192466 - RNA, 32 nt, Homo Sapiens
cuaggggaguccuuggagcaucugagaggggu

SEQ ID NO: 192467 - RNA, 32 nt, Homo Sapiens
gcugggcugagcucagauccagggggaaaugc

SEQ ID NO: 192468 - RNA, 32 nt, Homo Sapiens
uucagugauguggucauagaauucucuccaga

SEQ ID NO: 192469 - RNA, 32 nt, Homo Sapiens
gaaaaagcccucagccucagcagcauuuccuu

SEQ ID NO: 192470 - RNA, 32 nt, Homo Sapiens
augcaucugaaaaacuguaaacaaagacaacc

SEQ ID NO: 192471 - RNA, 32 nt, Homo Sapiens
acgcgcagcuggagccggugagccugcggccg

SEQ ID NO: 192472 - RNA, 32 nt, Homo Sapiens
ggucacugccagcagaggucugggcacauggu

SEQ ID NO: 192473 - RNA, 32 nt, Homo Sapiens
gguggcuuuccagcacagccagcccucaaguu

SEQ ID NO: 192474 - RNA, 32 nt, Homo Sapiens
acaggagccaccuuccucucucucaccucccc

SEQ ID NO: 192475 - RNA, 32 nt, Homo Sapiens
caauuuaauauuuggggcuuuuauuucucauu

SEQ ID NO: 192476 - RNA, 32 nt, Homo Sapiens
cuuucaaccagaaguucuuaauauuuaugaug

SEQ ID NO: 192477 - RNA, 32 nt, Homo Sapiens
ccgacaauguaccaccugaugaaguucauucc

SEQ ID NO: 192478 - RNA, 32 nt, Homo Sapiens
cccagcaaacuccagcagaccugcagcaaagg

SEQ ID NO: 192479 - RNA, 32 nt, Homo Sapiens
aggaacaaggggcuugcucaccaccuucuccc

SEQ ID NO: 192480 - RNA, 32 nt, Homo Sapiens
cucgcggugaguguuacaguucuuaaggcggc

SEQ ID NO: 192481 - RNA, 32 nt, Homo Sapiens
caaggccagacuuuuccgucguuuauuuucaa

SEQ ID NO: 192482 - RNA, 32 nt, Homo Sapiens
acugcugggcaucauuugagaugugugguuca

SEQ ID NO: 192483 - RNA, 32 nt, Homo Sapiens
ugaagagaacuaaaauuuguuacagcucuaug

SEQ ID NO: 192484 - RNA, 32 nt, Homo Sapiens
cagcuacccagcuucgacugucucgcccaaca

SEQ ID NO: 192485 - RNA, 32 nt, Homo Sapiens
ggggccuggaccagcuguccuuuacaccaccu

SEQ ID NO: 192486 - RNA, 32 nt, Homo Sapiens
agaaauaagcuuuauagugguuuaccuucauu

SEQ ID NO: 192487 - RNA, 32 nt, Homo Sapiens
aguucccucccacaaguggacaucagugucuu

SEQ ID NO: 192488 - RNA, 32 nt, Homo Sapiens
ggguguccggccucuggcccgccccggagcag

SEQ ID NO: 192489 - RNA, 32 nt, Homo Sapiens
ugaggaacagagcaaauguagugauagaagcg

SEQ ID NO: 192490 - RNA, 32 nt, Homo Sapiens
uaaggaagauuccacaucaugaguacuugccu

SEQ ID NO: 192491 - RNA, 32 nt, Homo Sapiens
uaaugcuaucaaaguccuccuuugaaaauuaa

SEQ ID NO: 192492 - RNA, 32 nt, Homo Sapiens
ugagaacucaaguuuaaauugucccccaccac

SEQ ID NO: 192493 - RNA, 32 nt, Homo Sapiens
gagagagacagagagagcagggaucagguaaa

SEQ ID NO: 192494 - RNA, 32 nt, Homo Sapiens
cagagcggcuggcgccgccggagcgcggagcc

SEQ ID NO: 192495 - RNA, 32 nt, Homo Sapiens
ccaguguaaaugggcuacuugucauaagcccu

SEQ ID NO: 192496 - RNA, 30 nt, Homo Sapiens
ggcggcggcgcgcagcgugucaggcggaga

SEQ ID NO: 192497 - RNA, 32 nt, Homo Sapiens
auuuuccguguagggagcgggcggcggcgggg

SEQ ID NO: 192498 - RNA, 30 nt, Homo Sapiens
uacuaguaucaccaaauugagugauacaaa

SEQ ID NO: 192499 - RNA, 32 nt, Homo Sapiens
uuaaaaggaaaauuauuauuaugaaccuucag

SEQ ID NO: 192500 - RNA, 32 nt, Homo Sapiens
uuaacucaggaccuugagauuaugagacugac

SEQ ID NO: 192501 - RNA, 32 nt, Homo Sapiens
auuauaucuggagacccugagagacccugaga

SEQ ID NO: 192502 - RNA, 32 nt, Homo Sapiens
cuucccuuuuugaccuuuaguuuuccaccucc

SEQ ID NO: 192503 - RNA, 32 nt, Homo Sapiens
aagccauucuaacagcagcaccuugucggacc

SEQ ID NO: 192504 - RNA, 32 nt, Homo Sapiens
aacuucaggagcuucuuaggucuugccacaaa

SEQ ID NO: 192505 - RNA, 32 nt, Homo Sapiens
caacaucgcugggaacccugagguguagauau

SEQ ID NO: 192506 - RNA, 32 nt, Homo Sapiens
ucuugaacagaagccuaaaauuccugguucuc

SEQ ID NO: 192507 - RNA, 32 nt, Homo Sapiens
cuccaguggccuuggguccgggucucacugag

SEQ ID NO: 192508 - RNA, 32 nt, Homo Sapiens
uuaaucuguauauaauauuccauguugcauau

SEQ ID NO: 192509 - RNA, 32 nt, Homo Sapiens
ucaaaaugugugugucauacuucuuuugggag

SEQ ID NO: 192510 - RNA, 32 nt, Homo Sapiens
uuuagaguggaaaaguuuuugcacacauuuug

SEQ ID NO: 192511 - RNA, 30 nt, Homo Sapiens
ucaguuauuaaucuuuucuaacucugcuua

SEQ ID NO: 192512 - RNA, 32 nt, Homo Sapiens
gugggcagcaaaacgacacugcgcaucaccua

SEQ ID NO: 192513 - RNA, 32 nt, Homo Sapiens
uuucucuuacacaaaugauaguagucacauac

SEQ ID NO: 192514 - RNA, 32 nt, Homo Sapiens
gguaguuuuuauuuucuuccuucuacuucucu

SEQ ID NO: 192515 - RNA, 32 nt, Homo Sapiens
gggcaggggccaccccacggcaucuccccaga

SEQ ID NO: 192516 - RNA, 32 nt, Homo Sapiens
gaccacgcaccuccacgccacugccucccccg

SEQ ID NO: 192517 - RNA, 32 nt, Homo Sapiens
agggguuuuuuaaaugacuucucuggauuuca

SEQ ID NO: 192518 - RNA, 32 nt, Homo Sapiens
ggagaucgagaccauccuggcuaacaugguga

SEQ ID NO: 192519 - RNA, 32 nt, Homo Sapiens
aacccuugccccaguccugcccggccccuccc

SEQ ID NO: 192520 - RNA, 32 nt, Homo Sapiens
cccccacaaccacuggaucuugcuuguuccac

SEQ ID NO: 192521 - RNA, 32 nt, Homo Sapiens
cccugucucccucucugaacccgcccauuggg

SEQ ID NO: 192522 - RNA, 32 nt, Homo Sapiens
cacaccuggaauauuucuuaauuuuguuaaug

SEQ ID NO: 192523 - RNA, 32 nt, Homo Sapiens
acuguggcggccuggcugucgcugcuuuuugu

SEQ ID NO: 192524 - RNA, 32 nt, Homo Sapiens
uuaucaagcaugcugaucccauuuucaaugaa

SEQ ID NO: 192525 - RNA, 31 nt, Homo Sapiens
aggcaggccugcugccugcccucgaucuguc

SEQ ID NO: 192526 - RNA, 32 nt, Homo Sapiens
ggcgguagcgguggccuugguugucuuccagu

SEQ ID NO: 192527 - RNA, 32 nt, Homo Sapiens
ugcugaugguuccgaaucauggagcugcagag

SEQ ID NO: 192528 - RNA, 32 nt, Homo Sapiens
gauguguuuuuccaucuuuguuucauugccuu

SEQ ID NO: 192529 - RNA, 32 nt, Homo Sapiens
uugcccaggcugcucucacauuccuagccuua

SEQ ID NO: 192530 - RNA, 32 nt, Homo Sapiens
gcagagcugggguugaagaggcagcuuguccc

SEQ ID NO: 192531 - RNA, 32 nt, Homo Sapiens
ggaaugccggcaugcuggucuuuccgaccugg

SEQ ID NO: 192532 - RNA, 32 nt, Homo Sapiens
gccccacccaugcucaggggccccaggcacgu

SEQ ID NO: 192533 - RNA, 32 nt, Homo Sapiens
cucuuccaagccagccuaucugucccaggcug

SEQ ID NO: 192534 - RNA, 32 nt, Homo Sapiens
acuuguuuuagaucagaaacuugcuauuccac

SEQ ID NO: 192535 - RNA, 32 nt, Homo Sapiens
caaaagguuuguguccaggauguacaaagaac

SEQ ID NO: 192536 - RNA, 32 nt, Homo Sapiens
cucgcaccccagccgcccggcccgcgaccagg

SEQ ID NO: 192537 - RNA, 32 nt, Homo Sapiens
agcaagaaaugaauacuuuaaaaagugauaua

SEQ ID NO: 192538 - RNA, 32 nt, Homo Sapiens
uucaaaucuguuugucucuugaaacagugaca

SEQ ID NO: 192539 - RNA, 32 nt, Homo Sapiens
gagauaccugaagaagauccacuuccucuauc

SEQ ID NO: 192540 - RNA, 32 nt, Homo Sapiens
ucuucauuuuucugccuggaaugcaaauguga

SEQ ID NO: 192541 - RNA, 32 nt, Homo Sapiens
gccgcgcccccucccccuccagccggguaccc

SEQ ID NO: 192542 - RNA, 32 nt, Homo Sapiens
ucuagcuaccuguuugcauauuucaaguggca

SEQ ID NO: 192543 - RNA, 32 nt, Homo Sapiens
ggagucugggcucccuccuacccagggagggc

SEQ ID NO: 192544 - RNA, 32 nt, Homo Sapiens
agcucauaaaaauauaauaugacuugauaaag

SEQ ID NO: 192545 - RNA, 32 nt, Homo Sapiens
aaugaugguauuuuaucuuuuaaacuuaaaaa

SEQ ID NO: 192546 - RNA, 32 nt, Homo Sapiens
aaucauaguuuauuucuguuagagaaaggcaa

SEQ ID NO: 192547 - RNA, 30 nt, Homo Sapiens
auaaaauauaucccugucuacuuuucuaau

SEQ ID NO: 192548 - RNA, 32 nt, Homo Sapiens
gagacaaccaaagaagcauuaaggcagguuga

SEQ ID NO: 192549 - RNA, 32 nt, Homo Sapiens
uacccuugauauauuuuuuaaguaacauugaa

SEQ ID NO: 192550 - RNA, 32 nt, Homo Sapiens
uuauaaagagaguagucagucacuagguaaac

SEQ ID NO: 192551 - RNA, 32 nt, Homo Sapiens
aggaaaagccccacaaaauuccuguuacccgc

SEQ ID NO: 192552 - RNA, 32 nt, Homo Sapiens
auguuuuagggaacagaagaggagcacauauu

SEQ ID NO: 192553 - RNA, 32 nt, Homo Sapiens
gacgagggaaauaugagaaggcaaaugaugug

SEQ ID NO: 192554 - RNA, 32 nt, Homo Sapiens
uggcauagagagauucuuucugcuugaggaga

SEQ ID NO: 192555 - RNA, 32 nt, Homo Sapiens
uuaaagaaauguuuagcuaaacguuguugaac

SEQ ID NO: 192556 - RNA, 32 nt, Homo Sapiens
cauuuguugagaguuggcuaaacucuagauuc

SEQ ID NO: 192557 - RNA, 32 nt, Homo Sapiens
ucuaccuacauaugaaacuucucuaccuaugu

SEQ ID NO: 192558 - RNA, 30 nt, Homo Sapiens
uuggaguucugcucaaggaacguguguaau

SEQ ID NO: 192559 - RNA, 32 nt, Homo Sapiens
uggacucccgcaccgguacagcgcacugcaug

SEQ ID NO: 192560 - RNA, 32 nt, Homo Sapiens
uaaauuaaauguuuggguucauaccccaaaag

SEQ ID NO: 192561 - RNA, 32 nt, Homo Sapiens
gggaaaaaauuuggaaccauaaaguugaaaac

SEQ ID NO: 192562 - RNA, 32 nt, Homo Sapiens
gguggccgugguggucaugugccucgugucua

SEQ ID NO: 192563 - RNA, 32 nt, Homo Sapiens
auaauugcuguaaauuccuuuugauuuucuuu

SEQ ID NO: 192564 - RNA, 32 nt, Homo Sapiens
ugccuuguggguggaggcggggcagggcugug

SEQ ID NO: 192565 - RNA, 32 nt, Homo Sapiens
ucccuucccacugcccucugcuucccccaguc

SEQ ID NO: 192566 - RNA, 31 nt, Homo Sapiens
cccaccucuuccugaaaguccucccccacug

SEQ ID NO: 192567 - RNA, 32 nt, Homo Sapiens
gggaauuaagugugucccuaugugaccguaau

SEQ ID NO: 192568 - RNA, 32 nt, Homo Sapiens
uugcggaugggcaccggagauacaucaccgag

SEQ ID NO: 192569 - RNA, 32 nt, Homo Sapiens
uauccugaacucuucugcaaaaauggauauua

SEQ ID NO: 192570 - RNA, 32 nt, Homo Sapiens
auagggucccaacuugguuauuguaggcaacc

SEQ ID NO: 192571 - RNA, 32 nt, Homo Sapiens
uccaguuucuuuucuuuuuuuuuuuuuuuuuu

SEQ ID NO: 192572 - RNA, 32 nt, Homo Sapiens
gcucaccacauaaccucugggugcuggaaaug

SEQ ID NO: 192573 - RNA, 32 nt, Homo Sapiens
uuugugcugaacuggcagcuaucccaauguga

SEQ ID NO: 192574 - RNA, 32 nt, Homo Sapiens
ugcgggccugacgggagcccccaucaauacaa

SEQ ID NO: 192575 - RNA, 32 nt, Homo Sapiens
ccgccacccucgcgucaguugucgcuccgcgc

SEQ ID NO: 192576 - RNA, 28 nt, Homo Sapiens
uuauguuguauaaucauguguuuacuaa

SEQ ID NO: 192577 - RNA, 32 nt, Homo Sapiens
gccuuggguugcacccuaccuauggggccugg

SEQ ID NO: 192578 - RNA, 32 nt, Homo Sapiens
gaggugaucccgguggugggauccacgcuggg

SEQ ID NO: 192579 - RNA, 32 nt, Homo Sapiens
gaucuggacuuccuauaauacaaauacacaau

SEQ ID NO: 192580 - RNA, 32 nt, Homo Sapiens
ugagggaccuccccggccuucggcggaggugg

SEQ ID NO: 192581 - RNA, 32 nt, Homo Sapiens
ugggcacuaugaaggaacccccugcccccuca

SEQ ID NO: 192582 - RNA, 27 nt, Homo Sapiens
ccauggaggagcuccaggagccucuga

SEQ ID NO: 192583 - RNA, 32 nt, Homo Sapiens
auauuucuuuugcuagcuauccaucauguaac

SEQ ID NO: 192584 - RNA, 30 nt, Homo Sapiens
gacagcucgcccgugcuucgcccucgcagc

SEQ ID NO: 192585 - RNA, 32 nt, Homo Sapiens
accaggccuggaacaccuccagccacaaagaa

SEQ ID NO: 192586 - RNA, 32 nt, Homo Sapiens
cacuaagcggucccgggcuguugugugggcuu

SEQ ID NO: 192587 - RNA, 32 nt, Homo Sapiens
ccuuccccaccccugccagacggagucaggau

SEQ ID NO: 192588 - RNA, 32 nt, Homo Sapiens
ccucaguugauagaaaaaugcaaauuagcuca

SEQ ID NO: 192589 - RNA, 32 nt, Homo Sapiens
gcugcuuaauuaugugaacaucuuauaaugaa

SEQ ID NO: 192590 - RNA, 32 nt, Homo Sapiens
cgggcagacgcggcgcugcgcucggccaggcc

SEQ ID NO: 192591 - RNA, 32 nt, Homo Sapiens
acucaaggaugagcagauggggccugcccguc

SEQ ID NO: 192592 - RNA, 32 nt, Homo Sapiens
gugaagagaagcuacuguguuuggugcgggag

SEQ ID NO: 192593 - RNA, 30 nt, Homo Sapiens
cucugugucuguguuuacaguguuucuucc

SEQ ID NO: 192594 - RNA, 32 nt, Homo Sapiens
ugcggggcggggguccgcggacauggugcggg

SEQ ID NO: 192595 - RNA, 32 nt, Homo Sapiens
uuagcagccaggugcaguggcucacgccugua

SEQ ID NO: 192596 - RNA, 32 nt, Homo Sapiens
ugaaaugaaaacaaaauuauaaacacacacug

SEQ ID NO: 192597 - RNA, 32 nt, Homo Sapiens
gugaggucaggugccucccagcccugcccaga

SEQ ID NO: 192598 - RNA, 31 nt, Homo Sapiens
accauggaguaaaaacauauauucgaugauc

SEQ ID NO: 192599 - RNA, 32 nt, Homo Sapiens
uaaaacacagaaacuauaugcaaagaaaaaau

SEQ ID NO: 192600 - RNA, 32 nt, Homo Sapiens
acuuuuuuuuuuuuuucucaccaccccaagcc

SEQ ID NO: 192601 - RNA, 32 nt, Homo Sapiens
uuaaggggcaacugaaggagacacacuggcca

SEQ ID NO: 192602 - RNA, 32 nt, Homo Sapiens
cguacugccugcccggggcuuaggaggguggc

SEQ ID NO: 192603 - RNA, 32 nt, Homo Sapiens
aaccauuuacacagcaugaaagaaacagguug

SEQ ID NO: 192604 - RNA, 32 nt, Homo Sapiens
acacuccccucgcagcgucagugguacgaccc

SEQ ID NO: 192605 - RNA, 32 nt, Homo Sapiens
aucuuuaggcuuaugaaagguaacccgugguu

SEQ ID NO: 192606 - RNA, 32 nt, Homo Sapiens
gguagcagcucuuuucgucaugaauuggagug

SEQ ID NO: 192607 - RNA, 32 nt, Homo Sapiens
aaccaggccuuaccucccuggaccucaguggc

SEQ ID NO: 192608 - RNA, 32 nt, Homo Sapiens
aucggggcgccuugucgccgccagccacgugu

SEQ ID NO: 192609 - RNA, 32 nt, Homo Sapiens
auauauauauauauuucuauuuaaagaggauc

SEQ ID NO: 192610 - RNA, 31 nt, Homo Sapiens
uucugccucaggagaaagaauagucuucaug

SEQ ID NO: 192611 - RNA, 32 nt, Homo Sapiens
ggggucucgauuucacuaacguuguauaugaa

SEQ ID NO: 192612 - RNA, 32 nt, Homo Sapiens
ccugaauucaugcagaugccuggccauuccug

SEQ ID NO: 192613 - RNA, 28 nt, Homo Sapiens
ccuggccugggagccaggauggccaucc

SEQ ID NO: 192614 - RNA, 32 nt, Homo Sapiens
cagcuaagagauugcaccugcugaccuagaga

SEQ ID NO: 192615 - RNA, 32 nt, Homo Sapiens
cagcucccgugcaucugccucaucucuccuga

SEQ ID NO: 192616 - RNA, 32 nt, Homo Sapiens
acugaacacagucugacuguauggaggcaggu

SEQ ID NO: 192617 - RNA, 32 nt, Homo Sapiens
uccccagguucaagcgauucuuuugccucagc

SEQ ID NO: 192618 - RNA, 32 nt, Homo Sapiens
guaaaauaaaaagguauuaaauguguauuucu

SEQ ID NO: 192619 - RNA, 32 nt, Homo Sapiens
aaauauuuuuguguagaaauuuucgauuauaa

SEQ ID NO: 192620 - RNA, 32 nt, Homo Sapiens
cuuugugcgaacaacuugcauuucggaagcca

SEQ ID NO: 192621 - RNA, 32 nt, Homo Sapiens
caucuaccuccuguggauaagggcucagaaua

SEQ ID NO: 192622 - RNA, 32 nt, Homo Sapiens
ucaugucaaaagacaaaacuuauucaaaaaaa

SEQ ID NO: 192623 - RNA, 31 nt, Homo Sapiens
ccgcagacagcaguccuucagaauuaaaaua

SEQ ID NO: 192624 - RNA, 32 nt, Homo Sapiens
ucaauguuuguuucauauauuuugggcucuga

SEQ ID NO: 192625 - RNA, 32 nt, Homo Sapiens
gaguuccagggccagacaggcucuuccugggc

SEQ ID NO: 192626 - RNA, 32 nt, Homo Sapiens
uauuguaaauguucaaguauuguuaaugaaua

SEQ ID NO: 192627 - RNA, 31 nt, Homo Sapiens
auagguuguugagccaauuuaaguaaagcaa

SEQ ID NO: 192628 - RNA, 32 nt, Homo Sapiens
acucugagcuccuauuuuccaaggcuccgggc

SEQ ID NO: 192629 - RNA, 32 nt, Homo Sapiens
agcaggagccggagccgagcggaucucggcgc

SEQ ID NO: 192630 - RNA, 32 nt, Homo Sapiens
augaaaaguauuuuucuuguauauuauuaagu

SEQ ID NO: 192631 - RNA, 32 nt, Homo Sapiens
ggaugagaccgcaggaggaaauggcggggagg

SEQ ID NO: 192632 - RNA, 32 nt, Homo Sapiens
cagaagcacaacuccggccccuggacccgggc

SEQ ID NO: 192633 - RNA, 30 nt, Homo Sapiens
uggacggguucccugaauccccgggguccu

SEQ ID NO: 192634 - RNA, 32 nt, Homo Sapiens
gagguuggaggaacgaaggcgagguuccuccu

SEQ ID NO: 192635 - RNA, 32 nt, Homo Sapiens
guucuuuuugauguaauuuguagaaauguuuu

SEQ ID NO: 192636 - RNA, 32 nt, Homo Sapiens
acuggcucuuuuaugaaaggaagaugcuuuca

SEQ ID NO: 192637 - RNA, 32 nt, Homo Sapiens
ugcugccaauguaccgcacucccuuuguacuu

SEQ ID NO: 192638 - RNA, 32 nt, Homo Sapiens
gcucaggugguggugacuaaaccuggccuuac

SEQ ID NO: 192639 - RNA, 32 nt, Homo Sapiens
caggcugaacgcagcacagaagggcagcucac

SEQ ID NO: 192640 - RNA, 32 nt, Homo Sapiens
gaagggccuucauaauaaugugcuuaaagagu

SEQ ID NO: 192641 - RNA, 32 nt, Homo Sapiens
cuugaucccuaaagaaaacaaacaaacaaaca

SEQ ID NO: 192642 - RNA, 32 nt, Homo Sapiens
uccuggugagacauguggcuuaacucacagau

SEQ ID NO: 192643 - RNA, 32 nt, Homo Sapiens
gacaagggugacccgggagguuaaagauggga

SEQ ID NO: 192644 - RNA, 32 nt, Homo Sapiens
ggcuauugugaaaaacgaugcuauaaaugugg

SEQ ID NO: 192645 - RNA, 32 nt, Homo Sapiens
guucucuucccucucucccaauaaaagggcuc

SEQ ID NO: 192646 - RNA, 32 nt, Homo Sapiens
gaccuuuugauuuuaucuucgaagauagauuu

SEQ ID NO: 192647 - RNA, 32 nt, Homo Sapiens
uuguccucaccuuguuauaccugcguggcacc

SEQ ID NO: 192648 - RNA, 32 nt, Homo Sapiens
gaaagccagacacaaugcugcaaugaaagaca

SEQ ID NO: 192649 - RNA, 29 nt, Homo Sapiens
gugauauuugguuuccugccagagucuuc

SEQ ID NO: 192650 - RNA, 32 nt, Homo Sapiens
gcagagcaccucacuccuuugaagagcacaga

SEQ ID NO: 192651 - RNA, 32 nt, Homo Sapiens
cgaauuagaaaucagaauaaguaaaggaacgu

SEQ ID NO: 192652 - RNA, 32 nt, Homo Sapiens
gcucaggcuaccacgccaggcuccacucgcug

SEQ ID NO: 192653 - RNA, 32 nt, Homo Sapiens
ggcucuaggaggagagaggcaggcuccuguga

SEQ ID NO: 192654 - RNA, 28 nt, Homo Sapiens
cgcgcagggcggccgcccggagguagcu

SEQ ID NO: 192655 - RNA, 32 nt, Homo Sapiens
gaauuacagcuauagcggcaguguauauagga

SEQ ID NO: 192656 - RNA, 32 nt, Homo Sapiens
uugguauagauuuuuagaaaucaauaauugau

SEQ ID NO: 192657 - RNA, 32 nt, Homo Sapiens
gcaacugcugaauaauacacucaguuugucuu

SEQ ID NO: 192658 - RNA, 32 nt, Homo Sapiens
aggaaaaauaaucaacauauauucuccuuucg

SEQ ID NO: 192659 - RNA, 32 nt, Homo Sapiens
auuuguauuucuacuuuuuuuuuuuagcuauu

SEQ ID NO: 192660 - RNA, 32 nt, Homo Sapiens
ccaucugacaacauuaaugaauaaaaugguga

SEQ ID NO: 192661 - RNA, 32 nt, Homo Sapiens
gccgcucccagcugcacccugccccuaccugc

SEQ ID NO: 192662 - RNA, 32 nt, Homo Sapiens
aauaaaaugcaaaugucaagaaggaugucagc

SEQ ID NO: 192663 - RNA, 32 nt, Homo Sapiens
agaauggcagguggugcauaaaaguuaaagag

SEQ ID NO: 192664 - RNA, 32 nt, Homo Sapiens
gucucugccucccaggcucaagugauccuccc

SEQ ID NO: 192665 - RNA, 32 nt, Homo Sapiens
gcugaaaauaaucaacucaucucagucuuccu

SEQ ID NO: 192666 - RNA, 32 nt, Homo Sapiens
caguauuucuacauuacagccauauguaacau

SEQ ID NO: 192667 - RNA, 32 nt, Homo Sapiens
uuuguguuuuuuaauguacaauguucugauaa

SEQ ID NO: 192668 - RNA, 32 nt, Homo Sapiens
acacagaggcuuugggaccccgugccuccugc

SEQ ID NO: 192669 - RNA, 32 nt, Homo Sapiens
ccugugagauggucagcguggagcgcaagugc

SEQ ID NO: 192670 - RNA, 30 nt, Homo Sapiens
agggaucucccgugugccuaacgcaguagc

SEQ ID NO: 192671 - RNA, 32 nt, Homo Sapiens
ccagaccccucuauucugcuccaggacagcag

SEQ ID NO: 192672 - RNA, 32 nt, Homo Sapiens
uuguaugaagucugauuauuuuccuguaaguu

SEQ ID NO: 192673 - RNA, 32 nt, Homo Sapiens
cuccaaauauauuauuuuucaguguguauuua

SEQ ID NO: 192674 - RNA, 32 nt, Homo Sapiens
agcugagcuuccacaagacacuuuuucccuuu

SEQ ID NO: 192675 - RNA, 32 nt, Homo Sapiens
gugagauuacacaucagugcaagaugaccauu

SEQ ID NO: 192676 - RNA, 32 nt, Homo Sapiens
ugcauuacaaaacaguguucuuuugaaauguu

SEQ ID NO: 192677 - RNA, 32 nt, Homo Sapiens
uugaagcucaaguuuaaagaagcguugcagag

SEQ ID NO: 192678 - RNA, 32 nt, Homo Sapiens
aaaugaacacuuaauggaauuuuuaagucugu

SEQ ID NO: 192679 - RNA, 32 nt, Homo Sapiens
caugagccacugcgcccagucuacacacuaau

SEQ ID NO: 192680 - RNA, 32 nt, Homo Sapiens
ggucaaagaaagcuuuaaaucuguaaauagua

SEQ ID NO: 192681 - RNA, 32 nt, Homo Sapiens
gcagccgggggcggguggaaaccuuccuucga

SEQ ID NO: 192682 - RNA, 32 nt, Homo Sapiens
ccggcacguuuggagcugggaagaccacacug

SEQ ID NO: 192683 - RNA, 32 nt, Homo Sapiens
ucaucccggggcaaagcaggcaucaaaaccag

SEQ ID NO: 192684 - RNA, 32 nt, Homo Sapiens
cuggauguuuacugccuugggacacuguggga

SEQ ID NO: 192685 - RNA, 32 nt, Homo Sapiens
guagaauaaaaaggagguguaacccagaguuu

SEQ ID NO: 192686 - RNA, 28 nt, Homo Sapiens
gagcgggggcggcagcugacaggcgcuc

SEQ ID NO: 192687 - RNA, 32 nt, Homo Sapiens
auaaccugucuccaaaaccaugccauaauaau

SEQ ID NO: 192688 - RNA, 32 nt, Homo Sapiens
ugacuaugagaauguagaaguggcaucugaaa

SEQ ID NO: 192689 - RNA, 32 nt, Homo Sapiens
ccaguauuucagaacaaauugauucaaguuuc

SEQ ID NO: 192690 - RNA, 32 nt, Homo Sapiens
uggacucccuggauuaguacuagacagaaaag

SEQ ID NO: 192691 - RNA, 32 nt, Homo Sapiens
ugguggucgggagagcggcggcagcgagaggc

SEQ ID NO: 192692 - RNA, 32 nt, Homo Sapiens
cagcuccugcagugcuaauuaagggagggagc

SEQ ID NO: 192693 - RNA, 32 nt, Homo Sapiens
cugggcagucuuuugugucagugucuuaaagg

SEQ ID NO: 192694 - RNA, 32 nt, Homo Sapiens
aguugcuuggaaaagaugcuaauuaugaagag

SEQ ID NO: 192695 - RNA, 32 nt, Homo Sapiens
cuguggccacagggcauagaaacaagagguca

SEQ ID NO: 192696 - RNA, 32 nt, Homo Sapiens
guuaagaaaaacuacagcaucauugcauaauu

SEQ ID NO: 192697 - RNA, 32 nt, Homo Sapiens
auuucucuggcuccggccccuccccugccugg

SEQ ID NO: 192698 - RNA, 32 nt, Homo Sapiens
aaagcagggggaggagggccggaaaugcuccc

SEQ ID NO: 192699 - RNA, 32 nt, Homo Sapiens
cgaugaaugugcuugcucugcuggaggaaccg

SEQ ID NO: 192700 - RNA, 32 nt, Homo Sapiens
uaugugaauaaucagugagguugauuuuucuu

SEQ ID NO: 192701 - RNA, 32 nt, Homo Sapiens
gguaucauucauucuucaguuguugauuuagg

SEQ ID NO: 192702 - RNA, 32 nt, Homo Sapiens
acagacccugccuuggggguucugggaaugau

SEQ ID NO: 192703 - RNA, 32 nt, Homo Sapiens
cuuaaaacuguguggaauaagacuuuugccau

SEQ ID NO: 192704 - RNA, 32 nt, Homo Sapiens
gauggggccugccugcaccccggggcggaauu

SEQ ID NO: 192705 - RNA, 32 nt, Homo Sapiens
auauauugaauauuuuauauuguuauauccug

SEQ ID NO: 192706 - RNA, 32 nt, Homo Sapiens
gcaaugugaacaggucaggagucccucccguc

SEQ ID NO: 192707 - RNA, 32 nt, Homo Sapiens
uuaccauacuauuggacuggacucaggcugga

SEQ ID NO: 192708 - RNA, 32 nt, Homo Sapiens
cgcccaggagagccccaccuccuccaccccug

SEQ ID NO: 192709 - RNA, 32 nt, Homo Sapiens
ggaugaagccgacgaggggcucagucuagggg

SEQ ID NO: 192710 - RNA, 32 nt, Homo Sapiens
acacccggccccagcuccagccccagcccagg

SEQ ID NO: 192711 - RNA, 32 nt, Homo Sapiens
caucaggggcggcuucagguguagaagccgag

SEQ ID NO: 192712 - RNA, 32 nt, Homo Sapiens
acuggagcugucucagagcccagagccagggg

SEQ ID NO: 192713 - RNA, 32 nt, Homo Sapiens
cggccgcuucuaguaguuuccaggcgcugccg

SEQ ID NO: 192714 - RNA, 32 nt, Homo Sapiens
uuuugucggggcaaacaaaauuaugugaauug

SEQ ID NO: 192715 - RNA, 32 nt, Homo Sapiens
aggaaggcaucugucuccugcucguccuggca

SEQ ID NO: 192716 - RNA, 32 nt, Homo Sapiens
ucuccccacaguguugugccccuucacucauu

SEQ ID NO: 192717 - RNA, 32 nt, Homo Sapiens
ggcucagccccaccccagggcagccagggaga

SEQ ID NO: 192718 - RNA, 32 nt, Homo Sapiens
ggaaggaagauaaauaacacuaaacuaugcua

SEQ ID NO: 192719 - RNA, 30 nt, Homo Sapiens
ccccaaccccucuguccccaucuuguaugu

SEQ ID NO: 192720 - RNA, 32 nt, Homo Sapiens
uucuaaacaaauuuaucguauagguugaugaa

SEQ ID NO: 192721 - RNA, 32 nt, Homo Sapiens
ugugaucaaauuauacaccuaguucuguauga

SEQ ID NO: 192722 - RNA, 32 nt, Homo Sapiens
ugcuggguagagaagaaagcgagggugaggga

SEQ ID NO: 192723 - RNA, 32 nt, Homo Sapiens
uacugcccauccccgguugucccacuuuuguu

SEQ ID NO: 192724 - RNA, 32 nt, Homo Sapiens
cauuuaacaaaacauguaaagguaucugacuu

SEQ ID NO: 192725 - RNA, 32 nt, Homo Sapiens
uguggaaaagguugauuuuucuuaauagauuc

SEQ ID NO: 192726 - RNA, 32 nt, Homo Sapiens
aacgcaugcaagcuugauucaccuucaggggg

SEQ ID NO: 192727 - RNA, 32 nt, Homo Sapiens
gcugaucggcccuaggggccgcggcggcuguc

SEQ ID NO: 192728 - RNA, 32 nt, Homo Sapiens
uugaggcagggccaucccgauccuugcucuac

SEQ ID NO: 192729 - RNA, 32 nt, Homo Sapiens
cggcccgugggguggggggucaggaaaaacau

SEQ ID NO: 192730 - RNA, 32 nt, Homo Sapiens
uuauuaaaaagaaaacaaaacaaaaaaaaaag

SEQ ID NO: 192731 - RNA, 32 nt, Homo Sapiens
cgacccgcucggcuaccucccgcuacacggag

SEQ ID NO: 192732 - RNA, 32 nt, Homo Sapiens
acauugaaaaggaagaggcauagucaugauca

SEQ ID NO: 192733 - RNA, 32 nt, Homo Sapiens
ugccaccgccaccacaccccagaucccaccca

SEQ ID NO: 192734 - RNA, 32 nt, Homo Sapiens
augugcccccaaaaagugagccaggcaccucu

SEQ ID NO: 192735 - RNA, 32 nt, Homo Sapiens
agaugauugcaaguugucaugaagauaagaca

SEQ ID NO: 192736 - RNA, 32 nt, Homo Sapiens
agccagugaccugguccuaaguuaaggauuuu

SEQ ID NO: 192737 - RNA, 32 nt, Homo Sapiens
acucauuuacagcuaugucuagguucuccgcu

SEQ ID NO: 192738 - RNA, 32 nt, Homo Sapiens
ccacagucuccaugggucuuuugccgugacca

SEQ ID NO: 192739 - RNA, 32 nt, Homo Sapiens
guucccuccccucccccacaccagaaaggggu

SEQ ID NO: 192740 - RNA, 32 nt, Homo Sapiens
uuuuuggugauugaaaaauauuaaauucccaa

SEQ ID NO: 192741 - RNA, 32 nt, Homo Sapiens
auuccagugcugcaggaugaguggcgcugguc

SEQ ID NO: 192742 - RNA, 32 nt, Homo Sapiens
gugcgucagggcucuccgggcggcaauggggg

SEQ ID NO: 192743 - RNA, 32 nt, Homo Sapiens
aaucgugacaacacuuguguuaugaagcauuu

SEQ ID NO: 192744 - RNA, 32 nt, Homo Sapiens
gugcagauggggcuaagucacaaacuugcagc

SEQ ID NO: 192745 - RNA, 32 nt, Homo Sapiens
cagagcucccgggcucccccaaggcugaacuc

SEQ ID NO: 192746 - RNA, 32 nt, Homo Sapiens
uugguggagcagcacuuacuuacuacuggaaa

SEQ ID NO: 192747 - RNA, 32 nt, Homo Sapiens
ccucugccccucuccaggcgccggcgggcggg

SEQ ID NO: 192748 - RNA, 32 nt, Homo Sapiens
auacuucagaacuggcuucuuuucucaaacuc

SEQ ID NO: 192749 - RNA, 32 nt, Homo Sapiens
ccuggggagaucuggaaagggcaugacaggca

SEQ ID NO: 192750 - RNA, 32 nt, Homo Sapiens
cugcugcugcccacccuccgccgcccgggccc

SEQ ID NO: 192751 - RNA, 32 nt, Homo Sapiens
uuuaaaaaauuugggguuagagcaacuguuag

SEQ ID NO: 192752 - RNA, 32 nt, Homo Sapiens
ggccgggcgcccgcagaugagccccgcuaggg

SEQ ID NO: 192753 - RNA, 32 nt, Homo Sapiens
ccaucuugacuucugccccacaucugcuuuuu

SEQ ID NO: 192754 - RNA, 32 nt, Homo Sapiens
accuuauucagaaaauagagcaucauacucac

SEQ ID NO: 192755 - RNA, 32 nt, Homo Sapiens
ccacuuggcuaauucuucuccuccuucacauc

SEQ ID NO: 192756 - RNA, 32 nt, Homo Sapiens
aaacucuauuguuaccucugaguuguguucca

SEQ ID NO: 192757 - RNA, 32 nt, Homo Sapiens
ggugagccgcggcugcagaggccugagcgccu

SEQ ID NO: 192758 - RNA, 32 nt, Homo Sapiens
acugucccauucuccacucacugcauuugggg

SEQ ID NO: 192759 - RNA, 32 nt, Homo Sapiens
ggccagaugccugcccaccucugucuccugcc

SEQ ID NO: 192760 - RNA, 32 nt, Homo Sapiens
gcaucgccacccaagggacccuggacuuugcc

SEQ ID NO: 192761 - RNA, 32 nt, Homo Sapiens
gccagccuggggagcucuggccacugcuuccc

SEQ ID NO: 192762 - RNA, 32 nt, Homo Sapiens
ccccugccccugcugcggcgcggcgaggcgag

SEQ ID NO: 192763 - RNA, 32 nt, Homo Sapiens
gcucccucugauccuccaucagggccagaucu

SEQ ID NO: 192764 - RNA, 32 nt, Homo Sapiens
augccaagcacuucuuuuucucgcuguccuuu

SEQ ID NO: 192765 - RNA, 32 nt, Homo Sapiens
uaacaaacguugguugucacugucaucauugu

SEQ ID NO: 192766 - RNA, 32 nt, Homo Sapiens
aaggacuagguuuuuucccacccagcaguugg

SEQ ID NO: 192767 - RNA, 29 nt, Homo Sapiens
uugcugcaauguauguauuauaauggauu

SEQ ID NO: 192768 - RNA, 32 nt, Homo Sapiens
aaaagggcucugcagagcuugcacauaaagau

SEQ ID NO: 192769 - RNA, 32 nt, Homo Sapiens
cugccucucacagaauccuagcuuaaaacagc

SEQ ID NO: 192770 - RNA, 30 nt, Homo Sapiens
uccauggaugucccugcccuguagccacca

SEQ ID NO: 192771 - RNA, 32 nt, Homo Sapiens
cuccaugauuuagccugaggcucuucaaacau

SEQ ID NO: 192772 - RNA, 32 nt, Homo Sapiens
augguuuuuugucauauugccucuagauuuuc

SEQ ID NO: 192773 - RNA, 32 nt, Homo Sapiens
ccgcgccccucgcgccagcgcguagagcggcg

SEQ ID NO: 192774 - RNA, 32 nt, Homo Sapiens
gagcgacacggggcugaccaggcacggugguc

SEQ ID NO: 192775 - RNA, 32 nt, Homo Sapiens
ggucucaaacuccugaccucaugauccaccuc

SEQ ID NO: 192776 - RNA, 32 nt, Homo Sapiens
gaugaagagguuugaguagauguacaaaucaa

SEQ ID NO: 192777 - RNA, 32 nt, Homo Sapiens
cuccaggaagcaggcaggccuuggucugagac

SEQ ID NO: 192778 - RNA, 32 nt, Homo Sapiens
uaccuauuugucguauuaagaaauuauccagu

SEQ ID NO: 192779 - RNA, 32 nt, Homo Sapiens
guggcagcggcggcggcgggaccggcagcagc

SEQ ID NO: 192780 - RNA, 32 nt, Homo Sapiens
cccccuuuucuuuucaaagcagaacuacaaag

SEQ ID NO: 192781 - RNA, 32 nt, Homo Sapiens
guugauuaggccaagaggcauucauuucuuau

SEQ ID NO: 192782 - RNA, 32 nt, Homo Sapiens
gaguggucgcucgucagccgccgccccucagu

SEQ ID NO: 192783 - RNA, 32 nt, Homo Sapiens
cugguggucauucauacuacugcuuucagcca

SEQ ID NO: 192784 - RNA, 32 nt, Homo Sapiens
agagagagcaacaugacuggggcugcaccaca

SEQ ID NO: 192785 - RNA, 32 nt, Homo Sapiens
uccaucacauauauuauagaagcaagcgagca

SEQ ID NO: 192786 - RNA, 32 nt, Homo Sapiens
cucgggggguuggccugggagccuccuccgcu

SEQ ID NO: 192787 - RNA, 32 nt, Homo Sapiens
ugcuucuaaagaagcugugacugcuuugagaa

SEQ ID NO: 192788 - RNA, 32 nt, Homo Sapiens
cagaugcuguguucucuauguaaaacaguauu

SEQ ID NO: 192789 - RNA, 32 nt, Homo Sapiens
ggugugauggcggcgcacacguguaaucccag

SEQ ID NO: 192790 - RNA, 32 nt, Homo Sapiens
uguaaauaaaaagcccaagauaaagaaacaga

SEQ ID NO: 192791 - RNA, 32 nt, Homo Sapiens
auuucaacugcucaguagauacgugugguuag

SEQ ID NO: 192792 - RNA, 32 nt, Homo Sapiens
aaugagguacgcugaggccugggagucucuug

SEQ ID NO: 192793 - RNA, 32 nt, Homo Sapiens
agguggccaugucugugagcugaaaguaaaag

SEQ ID NO: 192794 - RNA, 32 nt, Homo Sapiens
gaaugaagcaaguacugaaaucaaauuaaaua

SEQ ID NO: 192795 - RNA, 32 nt, Homo Sapiens
cugacacccagccccaggagccagaccacucc

SEQ ID NO: 192796 - RNA, 32 nt, Homo Sapiens
gcgcucgccaugucgggcgagcucagcaacag

SEQ ID NO: 192797 - RNA, 32 nt, Homo Sapiens
uuuuuguauguaaauuauuuuccgaaggaggu

SEQ ID NO: 192798 - RNA, 32 nt, Homo Sapiens
gaacuuauuuaagaauuauuucaguauuuacc

SEQ ID NO: 192799 - RNA, 32 nt, Homo Sapiens
cacacaucccgcccccucccggaggcagcuuc

SEQ ID NO: 192800 - RNA, 31 nt, Homo Sapiens
auggccaggaacugggacucgagcuuucaga

SEQ ID NO: 192801 - RNA, 32 nt, Homo Sapiens
gcgaaggaagugaacgcugaaugugacgcauu

SEQ ID NO: 192802 - RNA, 32 nt, Homo Sapiens
aacaagaucugagccugaguguguguacgugc

SEQ ID NO: 192803 - RNA, 32 nt, Homo Sapiens
agaggcuccgagccuuccaaccucugacuggc

SEQ ID NO: 192804 - RNA, 32 nt, Homo Sapiens
cucuuaaaugaggaugaugaugaccaaccuag

SEQ ID NO: 192805 - RNA, 32 nt, Homo Sapiens
uuuguauuuuaaaauguaauccauuuuuacuu

SEQ ID NO: 192806 - RNA, 32 nt, Homo Sapiens
gugaugaguaccaugaagaagaauaaaugagg

SEQ ID NO: 192807 - RNA, 32 nt, Homo Sapiens
cgggcgagggcagaggacacugggagcaaggc

SEQ ID NO: 192808 - RNA, 32 nt, Homo Sapiens
guguaauguauuuaaacccuuauuuaaauaaa

SEQ ID NO: 192809 - RNA, 32 nt, Homo Sapiens
uucauuugacauuaguugaaguaaauuauuua

SEQ ID NO: 192810 - RNA, 32 nt, Homo Sapiens
gugcugggcagagggagguggugauauugugu

SEQ ID NO: 192811 - RNA, 32 nt, Homo Sapiens
aaaacucacuguccaauaaagagccaaagaaa

SEQ ID NO: 192812 - RNA, 32 nt, Homo Sapiens
aaagggguguuugggcagcuggggggcaccgg

SEQ ID NO: 192813 - RNA, 32 nt, Homo Sapiens
uuucugugccuggauuauuucauuuagcauaa

SEQ ID NO: 192814 - RNA, 32 nt, Homo Sapiens
gaaguguggggaagagauaggaaccagcagga

SEQ ID NO: 192815 - RNA, 32 nt, Homo Sapiens
guuuaauagcauuuauacuuuaagcacaacua

SEQ ID NO: 192816 - RNA, 32 nt, Homo Sapiens
ucaacaugaaaauuauaugaaauuuaaguuuu

SEQ ID NO: 192817 - RNA, 32 nt, Homo Sapiens
aaaccauccaaauauaaaccagcuaggaacau

SEQ ID NO: 192818 - RNA, 32 nt, Homo Sapiens
ccaccugcuuggagaacuggccugcagcccca

SEQ ID NO: 192819 - RNA, 32 nt, Homo Sapiens
auuacauaaccuggccagacagcugguacaug

SEQ ID NO: 192820 - RNA, 32 nt, Homo Sapiens
cgccuccacggcccgcgcucguacuggagcga

SEQ ID NO: 192821 - RNA, 32 nt, Homo Sapiens
cucccgugacucaucgaggagcuccagcuguu

SEQ ID NO: 192822 - RNA, 32 nt, Homo Sapiens
ccauuuuauuccauuccaaaacauguguuuau

SEQ ID NO: 192823 - RNA, 32 nt, Homo Sapiens
ggugacgugauggcggcagcggugcugacgga

SEQ ID NO: 192824 - RNA, 32 nt, Homo Sapiens
cugaauucugguuguaaaucugguuacagcau

SEQ ID NO: 192825 - RNA, 32 nt, Homo Sapiens
ggggcccagaacuucauaucaguuguauuauc

SEQ ID NO: 192826 - RNA, 32 nt, Homo Sapiens
gauuucaauugacuucugaaguaaaucugucu

SEQ ID NO: 192827 - RNA, 32 nt, Homo Sapiens
ccuuuuccuaacaaagaacaauuuuuaaaauu

SEQ ID NO: 192828 - RNA, 32 nt, Homo Sapiens
uagucaugagacuuauucaucuuuccagggaa

SEQ ID NO: 192829 - RNA, 32 nt, Homo Sapiens
gaaauauagcaagaccuuaucucuacaaaaaa

SEQ ID NO: 192830 - RNA, 32 nt, Homo Sapiens
ccaucuucaagaagcuacuuugaaagucuggc

SEQ ID NO: 192831 - RNA, 32 nt, Homo Sapiens
ugcauccuccgggcguccucuccgggcccagc

SEQ ID NO: 192832 - RNA, 32 nt, Homo Sapiens
cuuccuuugcagcuagggguggccgugucaca

SEQ ID NO: 192833 - RNA, 32 nt, Homo Sapiens
uugacuuuuauaaauacacuuacacaauuaca

SEQ ID NO: 192834 - RNA, 32 nt, Homo Sapiens
uugugugcucugcggugccuccuggcaaaggg

SEQ ID NO: 192835 - RNA, 32 nt, Homo Sapiens
gcgugcucggaacgccgggggcugcggagugc

SEQ ID NO: 192836 - RNA, 32 nt, Homo Sapiens
ccuucggauuugaucaaguuggauagaguugg

SEQ ID NO: 192837 - RNA, 32 nt, Homo Sapiens
caaaacccugaacgcaguagugcuggucccua

SEQ ID NO: 192838 - RNA, 32 nt, Homo Sapiens
ugccggccgcagagccgggccagagccuugcc

SEQ ID NO: 192839 - RNA, 32 nt, Homo Sapiens
gcgccgacucccugagucuggaccuccauccc

SEQ ID NO: 192840 - RNA, 32 nt, Homo Sapiens
augugccugcggucccagcugcucugauaaga

SEQ ID NO: 192841 - RNA, 32 nt, Homo Sapiens
guggggaaguuggugaauguggaauaacuuac

SEQ ID NO: 192842 - RNA, 32 nt, Homo Sapiens
uggacuggacguuaacucucuugcucaagguc

SEQ ID NO: 192843 - RNA, 32 nt, Homo Sapiens
uuuacaggucuucauacuuuuacuuaauuuuc

SEQ ID NO: 192844 - RNA, 32 nt, Homo Sapiens
ccuuguaaucaucaauacauccaccaaaaaua

SEQ ID NO: 192845 - RNA, 32 nt, Homo Sapiens
agcuuuguucuuccggcccugcugucugccuc

SEQ ID NO: 192846 - RNA, 32 nt, Homo Sapiens
uggagcugaucagaauaauguucagcaucaac

SEQ ID NO: 192847 - RNA, 32 nt, Homo Sapiens
acggccgucucuggagagcagcagccauggcc

SEQ ID NO: 192848 - RNA, 32 nt, Homo Sapiens
ugagaccugccccuccucucugcccuaaugcg

SEQ ID NO: 192849 - RNA, 32 nt, Homo Sapiens
uuaaagcaguguugauguugugagccuaaaug

SEQ ID NO: 192850 - RNA, 32 nt, Homo Sapiens
cggcggagacgcugcgcgugcgcgcagggcag

SEQ ID NO: 192851 - RNA, 32 nt, Homo Sapiens
gggcccugagcuccucacugccgcccgcucug

SEQ ID NO: 192852 - RNA, 32 nt, Homo Sapiens
acugagcacucaguggauaaacacuccuccag

SEQ ID NO: 192853 - RNA, 32 nt, Homo Sapiens
gggcaggauggcaaccagaccauugucucaga

SEQ ID NO: 192854 - RNA, 32 nt, Homo Sapiens
cacuuacuaaccccaagggaaucagccaauau

SEQ ID NO: 192855 - RNA, 32 nt, Homo Sapiens
ccuccuuccagguucuggcuccuuccagccau

SEQ ID NO: 192856 - RNA, 32 nt, Homo Sapiens
gggacagaggccgccaguggagaucauggcuu

SEQ ID NO: 192857 - RNA, 32 nt, Homo Sapiens
uuugcaaacauuaugaaaauauacugccacau

SEQ ID NO: 192858 - RNA, 32 nt, Homo Sapiens
aauaggauaauugguuuuagauaauaucuucu

SEQ ID NO: 192859 - RNA, 32 nt, Homo Sapiens
uccauucucacggcaggcaaaucagugagaaa

SEQ ID NO: 192860 - RNA, 32 nt, Homo Sapiens
aucaucuacccauuuuagcucauaaugcuuuu

SEQ ID NO: 192861 - RNA, 32 nt, Homo Sapiens
ccgcggccaccgaugcccggacccccucuguc

SEQ ID NO: 192862 - RNA, 32 nt, Homo Sapiens
ucuuuauaaagagcuucuucuucauguuuuaa

SEQ ID NO: 192863 - RNA, 32 nt, Homo Sapiens
cacagagagaucauuuaaauguaaaugauguu

SEQ ID NO: 192864 - RNA, 32 nt, Homo Sapiens
acuuuggagcgcgcucugcgauuggagcaggg

SEQ ID NO: 192865 - RNA, 32 nt, Homo Sapiens
accacugcacuccagccuuggcgacaaaccaa

SEQ ID NO: 192866 - RNA, 32 nt, Homo Sapiens
uuaaauauauaaauaauauggauacacaugug

SEQ ID NO: 192867 - RNA, 32 nt, Homo Sapiens
gaaaugaagagaaugaaaguuuuaaacugcag

SEQ ID NO: 192868 - RNA, 32 nt, Homo Sapiens
gugcuuuggcucaagauggccuucauuuacgu

SEQ ID NO: 192869 - RNA, 32 nt, Homo Sapiens
ugcaguggggggcggcagcuccauggccgcag

SEQ ID NO: 192870 - RNA, 32 nt, Homo Sapiens
gcccucugccuucaggacccugcgcugauaau

SEQ ID NO: 192871 - RNA, 32 nt, Homo Sapiens
agccaugaacaaaguggcaaaguugugcaauu

SEQ ID NO: 192872 - RNA, 32 nt, Homo Sapiens
ugauuuugaugaugacauucaugaugauauuc

SEQ ID NO: 192873 - RNA, 32 nt, Homo Sapiens
ccaguaucaauuugaaaugcugauuuaagucc

SEQ ID NO: 192874 - RNA, 32 nt, Homo Sapiens
uugaaguacaugccauuugagcauaauuaucu

SEQ ID NO: 192875 - RNA, 32 nt, Homo Sapiens
uaggaggcguuuaaaacaaagauccaguucau

SEQ ID NO: 192876 - RNA, 32 nt, Homo Sapiens
cggcggcgggacgcggccggccggacaaauuu

SEQ ID NO: 192877 - RNA, 32 nt, Homo Sapiens
cugggccgaguaccuuaaucugccauaaagcc

SEQ ID NO: 192878 - RNA, 32 nt, Homo Sapiens
cucugcagcgcgcaccccggcggggcuuuggc

SEQ ID NO: 192879 - RNA, 32 nt, Homo Sapiens
uugaaaaauuuaauuauuuaugcuauagguga

SEQ ID NO: 192880 - RNA, 32 nt, Homo Sapiens
ugcauccucccugccucacuccccucagcccc

SEQ ID NO: 192881 - RNA, 32 nt, Homo Sapiens
cccugugcagcaucagcuuaugcugccacaag

SEQ ID NO: 192882 - RNA, 32 nt, Homo Sapiens
ugugaaaaauaacugcgccuuugccugaauac

SEQ ID NO: 192883 - RNA, 32 nt, Homo Sapiens
ccccgggcucgucgcuuucuccaucccgaccc

SEQ ID NO: 192884 - RNA, 32 nt, Homo Sapiens
uuaccuuaguuagcauuuuucuuaucauuuuu

SEQ ID NO: 192885 - RNA, 32 nt, Homo Sapiens
auccaggacaauuuauuaguuuucucaguauu

SEQ ID NO: 192886 - RNA, 32 nt, Homo Sapiens
gucuuccugccagcuggguuuggccaggauuu

SEQ ID NO: 192887 - RNA, 32 nt, Homo Sapiens
uuuguuauaaauuuauaacuuuguuauuacau

SEQ ID NO: 192888 - RNA, 32 nt, Homo Sapiens
agcccgcgugacugagucaccgcugcuccagc

SEQ ID NO: 192889 - RNA, 32 nt, Homo Sapiens
aagagucgccugccuccggaccggagugcaga

SEQ ID NO: 192890 - RNA, 32 nt, Homo Sapiens
agcuuggagcccuccgcucaccuagaggagcc

SEQ ID NO: 192891 - RNA, 32 nt, Homo Sapiens
augggagaggccgcagguguuguguucugauc

SEQ ID NO: 192892 - RNA, 32 nt, Homo Sapiens
accuccccuccuccccgcgccgggcaugcggg

SEQ ID NO: 192893 - RNA, 32 nt, Homo Sapiens
caacagugcaacaugaagugggacaggcacca

SEQ ID NO: 192894 - RNA, 32 nt, Homo Sapiens
guggcgaugcuggcccgugcccggggcugccc

SEQ ID NO: 192895 - RNA, 32 nt, Homo Sapiens
aguacauaacaguuacuugguuagacauuaaa

SEQ ID NO: 192896 - RNA, 32 nt, Homo Sapiens
uccggccggcgcccauuguuccccgcgggggc

SEQ ID NO: 192897 - RNA, 32 nt, Homo Sapiens
agagaggcaggaagagguggcaaaggagugcu

SEQ ID NO: 192898 - RNA, 32 nt, Homo Sapiens
aggagauugagauaaacuuuugaaaucccaaa

SEQ ID NO: 192899 - RNA, 32 nt, Homo Sapiens
uccucuucucuggccugccuggggagcccgug

SEQ ID NO: 192900 - RNA, 32 nt, Homo Sapiens
acccagcgagcgccugaccuuccuccuccucu

SEQ ID NO: 192901 - RNA, 32 nt, Homo Sapiens
aacaucaauuuaaacaacuaucuaugcaugaa

SEQ ID NO: 192902 - RNA, 32 nt, Homo Sapiens
gaccucccuaaaauauuuggccugaaaggguu

SEQ ID NO: 192903 - RNA, 32 nt, Homo Sapiens
cugacagcuggugcgccugcccgggaacaucc

SEQ ID NO: 192904 - RNA, 32 nt, Homo Sapiens
cucagcagacagaguacagagaagggccucag

SEQ ID NO: 192905 - RNA, 32 nt, Homo Sapiens
aaaggcugcuaaggaagagagaauacaguuuu

SEQ ID NO: 192906 - RNA, 32 nt, Homo Sapiens
auuuccucuacagacauaguguuacaggaagu

SEQ ID NO: 192907 - RNA, 32 nt, Homo Sapiens
cccccuugccuggcuccugugguggcaggcug

SEQ ID NO: 192908 - RNA, 32 nt, Homo Sapiens
uuuguaaaguauuuaagguacauggaacacac

SEQ ID NO: 192909 - RNA, 32 nt, Homo Sapiens
accuuuggguggcaauuccagcuuagcaacgc

SEQ ID NO: 192910 - RNA, 32 nt, Homo Sapiens
gcuggccaguguuuggaggggaggaugagugc

SEQ ID NO: 192911 - RNA, 32 nt, Homo Sapiens
acccagggcuucccuaacuccuccccuugccc

SEQ ID NO: 192912 - RNA, 32 nt, Homo Sapiens
uccauuuuaguucuauggauggaaauauuuca

SEQ ID NO: 192913 - RNA, 32 nt, Homo Sapiens
ccgcuuugcucuugcagcaugacagcccccau

SEQ ID NO: 192914 - RNA, 32 nt, Homo Sapiens
gucugagaguacagugcagcccugcccuucug

SEQ ID NO: 192915 - RNA, 32 nt, Homo Sapiens
gaaucaaggugauugugauuauagugacaaug

SEQ ID NO: 192916 - RNA, 32 nt, Homo Sapiens
uacagguaugcgccaccacaccuggcuaauuu

SEQ ID NO: 192917 - RNA, 32 nt, Homo Sapiens
uacaggcaugcgccaccacacccggcuaauuu

SEQ ID NO: 192918 - RNA, 32 nt, Homo Sapiens
ccaagaguccuggccuggcaggcagggcucug

SEQ ID NO: 192919 - RNA, 32 nt, Homo Sapiens
cucacucucuggagccucuccuuccuguucuc

SEQ ID NO: 192920 - RNA, 32 nt, Homo Sapiens
ccgugucaccuggccugggccgcacagcuggu

SEQ ID NO: 192921 - RNA, 32 nt, Homo Sapiens
cgugucgugggaaggacccagugggagguaau

SEQ ID NO: 192922 - RNA, 32 nt, Homo Sapiens
uggaagggacugucaaguuuguaaggcuguag

SEQ ID NO: 192923 - RNA, 32 nt, Homo Sapiens
ggguccccucgccccaggcccugagccugcgu

SEQ ID NO: 192924 - RNA, 32 nt, Homo Sapiens
uuuuaguugccuuaucuggagagacguggagg

SEQ ID NO: 192925 - RNA, 32 nt, Homo Sapiens
accuuacaaagcugaagcuggaacuuuuccca

SEQ ID NO: 192926 - RNA, 32 nt, Homo Sapiens
uccccaacccaccuccagauaaugugagaaaa

SEQ ID NO: 192927 - RNA, 30 nt, Homo Sapiens
ucugaggguucccagggcuggccaggguug

SEQ ID NO: 192928 - RNA, 32 nt, Homo Sapiens
gguuggucccgcacgcaaccuuuguggagcca

SEQ ID NO: 192929 - RNA, 32 nt, Homo Sapiens
aggcaagucucugguccauuacacacuuccag

SEQ ID NO: 192930 - RNA, 32 nt, Homo Sapiens
gacauuggcuacaggcucuuccaucucucaug

SEQ ID NO: 192931 - RNA, 32 nt, Homo Sapiens
uauggcuugucuggaaacuucuguaaaucuua

SEQ ID NO: 192932 - RNA, 29 nt, Homo Sapiens
auugucugcuuugucagaggccagaauuc

SEQ ID NO: 192933 - RNA, 32 nt, Homo Sapiens
auaaaaaucuuguuaaaugccauuaggcacca

SEQ ID NO: 192934 - RNA, 32 nt, Homo Sapiens
uuauuaaaacaaaaggguguauaguguucaca

SEQ ID NO: 192935 - RNA, 32 nt, Homo Sapiens
ucaguuucuguuguuucuuuuauguggugguu

SEQ ID NO: 192936 - RNA, 32 nt, Homo Sapiens
ccacccaggcuuugggugaauucuggauggcu

SEQ ID NO: 192937 - RNA, 32 nt, Homo Sapiens
gcucgccggccgcggaagacuaggggugaggc

SEQ ID NO: 192938 - RNA, 32 nt, Homo Sapiens
uauuuauggaccucuggccaaaugguacaugu

SEQ ID NO: 192939 - RNA, 32 nt, Homo Sapiens
guggugucugaagagcagagaguggccuggcc

SEQ ID NO: 192940 - RNA, 32 nt, Homo Sapiens
uaacaccuggaaauuauguguuauauuauuua

SEQ ID NO: 192941 - RNA, 32 nt, Homo Sapiens
gaagccuugccuugcgccuuaggugagaagca

SEQ ID NO: 192942 - RNA, 32 nt, Homo Sapiens
ucgccggccccggucucccagggccucacccg

SEQ ID NO: 192943 - RNA, 32 nt, Homo Sapiens
auuugccucuccuugacuuccacaaugauuuu

SEQ ID NO: 192944 - RNA, 32 nt, Homo Sapiens
cucgggccuccgcggcagcuccagcggcuccg

SEQ ID NO: 192945 - RNA, 32 nt, Homo Sapiens
caacagagaaggaaacaaguccagcgaaaaaa

SEQ ID NO: 192946 - RNA, 32 nt, Homo Sapiens
uuucuuuagucacaaaaauuaaaauuaaacuu

SEQ ID NO: 192947 - RNA, 32 nt, Homo Sapiens
uuuucuuuucuuucaaauugcucacacaauuu

SEQ ID NO: 192948 - RNA, 32 nt, Homo Sapiens
agaaucuaccaagcauuagcaaggcugaaagu

SEQ ID NO: 192949 - RNA, 29 nt, Homo Sapiens
caaguuauauguauguauacgugugugug

SEQ ID NO: 192950 - RNA, 32 nt, Homo Sapiens
ucuggggagcgcagcagccauggcaagccguc

SEQ ID NO: 192951 - RNA, 32 nt, Homo Sapiens
uuuugcagacaagacccagagaaguccagacu

SEQ ID NO: 192952 - RNA, 27 nt, Homo Sapiens
aggagaucugcuuucagcccucaccua

SEQ ID NO: 192953 - RNA, 32 nt, Homo Sapiens
acuccagccugggccacauagcaagacccugu

SEQ ID NO: 192954 - RNA, 32 nt, Homo Sapiens
aaaaccuuuacuagcauuuagagcuuuucaga

SEQ ID NO: 192955 - RNA, 32 nt, Homo Sapiens
ccucccaaggcccccaggaaucccuuccuccc

SEQ ID NO: 192956 - RNA, 30 nt, Homo Sapiens
caccaacuguacugcaucuuacuggauuua

SEQ ID NO: 192957 - RNA, 32 nt, Homo Sapiens
uucuguacugucaugcccgucucuggaauguc

SEQ ID NO: 192958 - RNA, 32 nt, Homo Sapiens
caaccuaggaggaggaccagcccgguuccugu

SEQ ID NO: 192959 - RNA, 32 nt, Homo Sapiens
cuugaaggacaaaggugccagccuuuaugcuu

SEQ ID NO: 192960 - RNA, 32 nt, Homo Sapiens
cacccgggccgcgcgggccgugagcgucaugg

SEQ ID NO: 192961 - RNA, 32 nt, Homo Sapiens
ccccgcuuagccccgcugagcuuggaggaagu

SEQ ID NO: 192962 - RNA, 32 nt, Homo Sapiens
cugggugccugcccaggauggguaggaaaugc

SEQ ID NO: 192963 - RNA, 32 nt, Homo Sapiens
acccagauaaccucgguugucaccuuggagua

SEQ ID NO: 192964 - RNA, 32 nt, Homo Sapiens
accaaugagcgucagggccagcgacacgucug

SEQ ID NO: 192965 - RNA, 32 nt, Homo Sapiens
gccaggcccggcacccggaucccgagguccgc

SEQ ID NO: 192966 - RNA, 32 nt, Homo Sapiens
cagauccugucugcgcucagcuuccugcacgc

SEQ ID NO: 192967 - RNA, 32 nt, Homo Sapiens
uccugcccacccagacgucgcuucucccgggc

SEQ ID NO: 192968 - RNA, 32 nt, Homo Sapiens
cuccugcuugccccgcagccccggcccccugc

SEQ ID NO: 192969 - RNA, 32 nt, Homo Sapiens
auguauagaauauuuguauuuauuuuuuggac

SEQ ID NO: 192970 - RNA, 32 nt, Homo Sapiens
uuuaggagaucauggugucacaguguuugguu

SEQ ID NO: 192971 - RNA, 32 nt, Homo Sapiens
auuugauauucagguuaaagucuuaaacaggg

SEQ ID NO: 192972 - RNA, 32 nt, Homo Sapiens
agaguguaggcuuacacaaaucuagguggugu

SEQ ID NO: 192973 - RNA, 32 nt, Homo Sapiens
gaagcacaaauccuccuggcagaugggaagaa

SEQ ID NO: 192974 - RNA, 32 nt, Homo Sapiens
gugcauacauuuauauaaucuaaucuuggaag

SEQ ID NO: 192975 - RNA, 31 nt, Homo Sapiens
cucuugaagaaaaugucauuuuagacaauua

SEQ ID NO: 192976 - RNA, 32 nt, Homo Sapiens
cugugguagagugguuaacagauacaaguguc

SEQ ID NO: 192977 - RNA, 29 nt, Homo Sapiens
aagaguuggggacagaacucccauuacaa

SEQ ID NO: 192978 - RNA, 32 nt, Homo Sapiens
aacgcgccgcuaggcgggagagcgcggccaug

SEQ ID NO: 192979 - RNA, 32 nt, Homo Sapiens
cccagccucccucuccaccucccugccccccg

SEQ ID NO: 192980 - RNA, 32 nt, Homo Sapiens
uuucuguccauauucaagaccuuuuuauuugu

SEQ ID NO: 192981 - RNA, 32 nt, Homo Sapiens
uauucaucuauuuuaacucugugucuuuacau

SEQ ID NO: 192982 - RNA, 32 nt, Homo Sapiens
accuugcgagccgucuuccccaggccugcguc

SEQ ID NO: 192983 - RNA, 32 nt, Homo Sapiens
aauggaggaaaugucuugaaguauacuuuuuc

SEQ ID NO: 192984 - RNA, 32 nt, Homo Sapiens
gaagguguacuuaaaaaauguuuggacugcuu

SEQ ID NO: 192985 - RNA, 32 nt, Homo Sapiens
ugugggaugauuuauuuaauuuuuuaguuucc

SEQ ID NO: 192986 - RNA, 32 nt, Homo Sapiens
ucaucuuucuucauucaacacauuuauuggga

SEQ ID NO: 192987 - RNA, 32 nt, Homo Sapiens
agcgcgggacaaagggaagcgaagccggagcu

SEQ ID NO: 192988 - RNA, 32 nt, Homo Sapiens
gccuaaaggggcugccuucagagccaccaaga

SEQ ID NO: 192989 - RNA, 32 nt, Homo Sapiens
ugaccccgaggggcccaucacugcacaaaugc

SEQ ID NO: 192990 - RNA, 32 nt, Homo Sapiens
gucuacaggacacacgaaacgcaucgcauucc

SEQ ID NO: 192991 - RNA, 32 nt, Homo Sapiens
uagccuggauggucucgauuuucugaucuuau

SEQ ID NO: 192992 - RNA, 32 nt, Homo Sapiens
cacaugaccaaucauaugguauuuucaaggga

SEQ ID NO: 192993 - RNA, 32 nt, Homo Sapiens
agguuuguuguuguuuuuuuuaaaaaagaaau

SEQ ID NO: 192994 - RNA, 32 nt, Homo Sapiens
ucccccagcccaguccuccccaucugcaaggg

SEQ ID NO: 192995 - RNA, 32 nt, Homo Sapiens
aaggcuuugaacuugauguggcauuacauguu

SEQ ID NO: 192996 - RNA, 32 nt, Homo Sapiens
ggggcagcuccuggggagcaucagggaagagg

SEQ ID NO: 192997 - RNA, 32 nt, Homo Sapiens
uucugauacucuuuuuauuauuuucuuguaua

SEQ ID NO: 192998 - RNA, 32 nt, Homo Sapiens
cgcggacccagcugucaggcaagcccagugga

SEQ ID NO: 192999 - RNA, 32 nt, Homo Sapiens
gcgcccgcacaccacagacuccgcuuaccgua

SEQ ID NO: 193000 - RNA, 32 nt, Homo Sapiens
aaauuuguuuuacuguacacuuacgcaaaaua

SEQ ID NO: 193001 - RNA, 32 nt, Homo Sapiens
ccccucuucgcccuugcccccauccccacccg

SEQ ID NO: 193002 - RNA, 32 nt, Homo Sapiens
uuuguuuuucuuuuuaaaucacauuaaauguu

SEQ ID NO: 193003 - RNA, 32 nt, Homo Sapiens
aggaaucacaaggccgaguggacucucaccug

SEQ ID NO: 193004 - RNA, 32 nt, Homo Sapiens
ucacuaccaucccagaacucuguacuuacugc

SEQ ID NO: 193005 - RNA, 32 nt, Homo Sapiens
gcaugaaaaaauacuggcaaagucuucacuua

SEQ ID NO: 193006 - RNA, 32 nt, Homo Sapiens
uacacccgcacgaggagcggggacggcgggcg

SEQ ID NO: 193007 - RNA, 32 nt, Homo Sapiens
gggucccggggugagccgaaaccugggggucg

SEQ ID NO: 193008 - RNA, 32 nt, Homo Sapiens
uuaaguuacaauguuuuauggccuaaauuuau

SEQ ID NO: 193009 - RNA, 32 nt, Homo Sapiens
aacauuuucugguugacaauuguuugaguuug

SEQ ID NO: 193010 - RNA, 32 nt, Homo Sapiens
auaauauuagacauaaugauaauuuuuuccau

SEQ ID NO: 193011 - RNA, 32 nt, Homo Sapiens
aaaccuauuuuugacuuggagagacuugcuuu

SEQ ID NO: 193012 - RNA, 32 nt, Homo Sapiens
caagugcaagacugaaaacuacaaaauuggaa

SEQ ID NO: 193013 - RNA, 32 nt, Homo Sapiens
uuuaugugugcuggugcuauguguguucaugu

SEQ ID NO: 193014 - RNA, 32 nt, Homo Sapiens
ggggcggcgcccugggucuggaacgcgguugc

SEQ ID NO: 193015 - RNA, 32 nt, Homo Sapiens
cauuuuauuaaacauuuucaugcacaguagau

SEQ ID NO: 193016 - RNA, 32 nt, Homo Sapiens
uccuaauccaaauaucuuugacccuggccacu

SEQ ID NO: 193017 - RNA, 30 nt, Homo Sapiens
acugggcgcgcgcggcuccggcucgggacg

SEQ ID NO: 193018 - RNA, 32 nt, Homo Sapiens
uucagacagguaaagucuuugaaaauaugugu

SEQ ID NO: 193019 - RNA, 32 nt, Homo Sapiens
aaaagaaaaagaaaaagaaaaaauauuuuccc

SEQ ID NO: 193020 - RNA, 32 nt, Homo Sapiens
ugauuggccuuugcuucuuaauuuauuuuaau

SEQ ID NO: 193021 - RNA, 32 nt, Homo Sapiens
uaaagaauauaaagccucaaaucuuccuuacu

SEQ ID NO: 193022 - RNA, 32 nt, Homo Sapiens
agauacuaugagauaauaaauguuguuuuaag

SEQ ID NO: 193023 - RNA, 32 nt, Homo Sapiens
auaacggccgggcugugggaaccucuuccgag

SEQ ID NO: 193024 - RNA, 32 nt, Homo Sapiens
gggcagugaugaugacaugaaaugaggugggg

SEQ ID NO: 193025 - RNA, 32 nt, Homo Sapiens
aagcuaaguauuuuuucauucuuucagauuuu

SEQ ID NO: 193026 - RNA, 32 nt, Homo Sapiens
guauguuugcucugccccagccccacacuugc

SEQ ID NO: 193027 - RNA, 32 nt, Homo Sapiens
uuuaagaaauguuuugguuucauuuuuacuuu

SEQ ID NO: 193028 - RNA, 32 nt, Homo Sapiens
gcaaugagcugcuggagcacaggcauaacaca

SEQ ID NO: 193029 - RNA, 32 nt, Homo Sapiens
ccauaauagaaagaauggagaauuauugauug

SEQ ID NO: 193030 - RNA, 32 nt, Homo Sapiens
uuaugacaaaaauuacucugucuaaccacuug

SEQ ID NO: 193031 - RNA, 32 nt, Homo Sapiens
gagucuggaggggaggcacaguccucaggagc

SEQ ID NO: 193032 - RNA, 32 nt, Homo Sapiens
ugcccauugacagcggcgucugcagcucgcuu

SEQ ID NO: 193033 - RNA, 32 nt, Homo Sapiens
ucacacaggggagaggcgaggucgauggaacu

SEQ ID NO: 193034 - RNA, 32 nt, Homo Sapiens
gcacccaugcuucucagggucaaggcuuuaug

SEQ ID NO: 193035 - RNA, 32 nt, Homo Sapiens
accaaaggaucuuuuuacaaggcuuccugugg

SEQ ID NO: 193036 - RNA, 32 nt, Homo Sapiens
uccugggguuguaaguuuuguucauucaugag

SEQ ID NO: 193037 - RNA, 32 nt, Homo Sapiens
uucaucuuaggggaucgcucuuccucacacca

SEQ ID NO: 193038 - RNA, 32 nt, Homo Sapiens
agucugggaauguccagaaauaaccagugaga

SEQ ID NO: 193039 - RNA, 32 nt, Homo Sapiens
uuauuaaauaaucaaauauaucuacuacauug

SEQ ID NO: 193040 - RNA, 32 nt, Homo Sapiens
cccaucgagcugguuaccuuucugccugcccu

SEQ ID NO: 193041 - RNA, 32 nt, Homo Sapiens
acuuaaucauccuuaauccuuaucuuagggau

SEQ ID NO: 193042 - RNA, 32 nt, Homo Sapiens
gaaacauuuugaagaacacaauuccaugaaug

SEQ ID NO: 193043 - RNA, 32 nt, Homo Sapiens
gggccgucaauaaaugugaugaugaggaugaa

SEQ ID NO: 193044 - RNA, 32 nt, Homo Sapiens
guaagaggagcagagggcaggggugcugugga

SEQ ID NO: 193045 - RNA, 32 nt, Homo Sapiens
gcccucaucacggccucgagcuccucagaccu

SEQ ID NO: 193046 - RNA, 32 nt, Homo Sapiens
guuuucacucucaggcucugguaaguauucgu

SEQ ID NO: 193047 - RNA, 32 nt, Homo Sapiens
guaccuaggaggggggcauuccuucagguugg

SEQ ID NO: 193048 - RNA, 32 nt, Homo Sapiens
auuggcggcggggcccggggccgcgcgagcua

SEQ ID NO: 193049 - RNA, 32 nt, Homo Sapiens
cgccgccgccgccgcgccgcgccgcgccggau

SEQ ID NO: 193050 - RNA, 32 nt, Homo Sapiens
ggucugcaagcacugcugucaccucugccaaa

SEQ ID NO: 193051 - RNA, 32 nt, Homo Sapiens
uucugcauuugauauccugguuuaccuggcac

SEQ ID NO: 193052 - RNA, 32 nt, Homo Sapiens
cuauguuugugcuaguuuuucuuuuuuuucuc

SEQ ID NO: 193053 - RNA, 30 nt, Homo Sapiens
gggagaaucugugcugagaagacucagacc

SEQ ID NO: 193054 - RNA, 32 nt, Homo Sapiens
uuuuuauuuuaauaaacuuuauuuucaagaac

SEQ ID NO: 193055 - RNA, 32 nt, Homo Sapiens
uguugggccaggucugggggucgggaguaggc

SEQ ID NO: 193056 - RNA, 32 nt, Homo Sapiens
ccaguacagaaagguguuacuaaccagucuuu

SEQ ID NO: 193057 - RNA, 32 nt, Homo Sapiens
uaacaacacugggucuuauuuugugaauacag

SEQ ID NO: 193058 - RNA, 32 nt, Homo Sapiens
gaaggcguccaguuucauuacacacacagacg

SEQ ID NO: 193059 - RNA, 32 nt, Homo Sapiens
cucucucccuccccucaucccacaucucaaag

SEQ ID NO: 193060 - RNA, 32 nt, Homo Sapiens
uucuaccaaaacuacaaaaauuagccgggcuc

SEQ ID NO: 193061 - RNA, 32 nt, Homo Sapiens
uaaggaaugcuuuacuaguucuccuugguuuu

SEQ ID NO: 193062 - RNA, 32 nt, Homo Sapiens
auuucaucaaggcagcagcaucugaaaguuuu

SEQ ID NO: 193063 - RNA, 32 nt, Homo Sapiens
auaaaaauacauguucccuuuauuuuuucaga

SEQ ID NO: 193064 - RNA, 32 nt, Homo Sapiens
caagcccuuccuccccuccaucaagaucuuug

SEQ ID NO: 193065 - RNA, 32 nt, Homo Sapiens
uaacccuccuucugccuucuggucuccucgug

SEQ ID NO: 193066 - RNA, 32 nt, Homo Sapiens
ccuccuauaauuauaauaguguuuacaaacaa

SEQ ID NO: 193067 - RNA, 32 nt, Homo Sapiens
cuauugugcaauaggucuuaugcuguuuucac

SEQ ID NO: 193068 - RNA, 32 nt, Homo Sapiens
cagacuacuguguagcagcuguguguuuaaca

SEQ ID NO: 193069 - RNA, 32 nt, Homo Sapiens
cccucccccucgcggccauugggcugccccgc

SEQ ID NO: 193070 - RNA, 32 nt, Homo Sapiens
cugauaguauuaggaaggaaaaccggcuucua

SEQ ID NO: 193071 - RNA, 32 nt, Homo Sapiens
cgcugcggcucggguuugccugccccgacccc

SEQ ID NO: 193072 - RNA, 32 nt, Homo Sapiens
aacuaaaaggcagaaaugaaauccacaggcag

SEQ ID NO: 193073 - RNA, 32 nt, Homo Sapiens
auaaagcggccgccggccgccggcccccagac

SEQ ID NO: 193074 - RNA, 32 nt, Homo Sapiens
guccucugccugaguccugagagcagcgcaga

SEQ ID NO: 193075 - RNA, 32 nt, Homo Sapiens
ccauggacacaauaaagguccuggacaagguc

SEQ ID NO: 193076 - RNA, 32 nt, Homo Sapiens
agcucugguccuccccagcucuguuuccucua

SEQ ID NO: 193077 - RNA, 32 nt, Homo Sapiens
ucggagccuccacuuccucaucugccaguggu

SEQ ID NO: 193078 - RNA, 32 nt, Homo Sapiens
accaaacaaaaaugccauuuuaaaaaaggugu

SEQ ID NO: 193079 - RNA, 32 nt, Homo Sapiens
cucgcgagugccccccugcgacgcucgcaagc

SEQ ID NO: 193080 - RNA, 32 nt, Homo Sapiens
acuucacaaggcuguuucaaagguuaaaaaag

SEQ ID NO: 193081 - RNA, 32 nt, Homo Sapiens
cucgagccagccccggccccaacccuaccucc

SEQ ID NO: 193082 - RNA, 31 nt, Homo Sapiens
gaaauggaauaaaaacaaggauguuggauug

SEQ ID NO: 193083 - RNA, 32 nt, Homo Sapiens
auuauuuucuucauuacaaaagaaaugcaagu

SEQ ID NO: 193084 - RNA, 32 nt, Homo Sapiens
acuggccccacuuucaggccuggaggaagcau

SEQ ID NO: 193085 - RNA, 32 nt, Homo Sapiens
ccaaguuuauuaugaggacuauaugcucuaga

SEQ ID NO: 193086 - RNA, 32 nt, Homo Sapiens
uuuuauuuuuauuuuuugccuaacagcuuuug

SEQ ID NO: 193087 - RNA, 32 nt, Homo Sapiens
uuacaaccuggccagaggcauuuuuuaaauca

SEQ ID NO: 193088 - RNA, 28 nt, Homo Sapiens
ucagggguugguaccaggaggccugugg

SEQ ID NO: 193089 - RNA, 32 nt, Homo Sapiens
ggaggcgucuagcguuccugcuggcccuggga

SEQ ID NO: 193090 - RNA, 32 nt, Homo Sapiens
uagagacgcugaaagcaccauggacggguuuu

SEQ ID NO: 193091 - RNA, 32 nt, Homo Sapiens
auuugaguuccugcagccguggcaccaguaua

SEQ ID NO: 193092 - RNA, 32 nt, Homo Sapiens
ugucugugucugggaagggauggccaaggccg

SEQ ID NO: 193093 - RNA, 32 nt, Homo Sapiens
gaucgauguguucgcauugcugaaacacaaca

SEQ ID NO: 193094 - RNA, 32 nt, Homo Sapiens
aagccucacguaauucaugcuuuuuaaauuca

SEQ ID NO: 193095 - RNA, 32 nt, Homo Sapiens
gcgagcgcggucgagaucgccaugccuacccg

SEQ ID NO: 193096 - RNA, 32 nt, Homo Sapiens
gacuuucagcagagacuguccaguggucauug

SEQ ID NO: 193097 - RNA, 32 nt, Homo Sapiens
uuauccccauucuacuccccugcuaugcaagu

SEQ ID NO: 193098 - RNA, 32 nt, Homo Sapiens
accugaguaugcaauaaagaugugguggccac

SEQ ID NO: 193099 - RNA, 32 nt, Homo Sapiens
cggagaauuuguuaagcgggacuccaggcaau

SEQ ID NO: 193100 - RNA, 32 nt, Homo Sapiens
guauugcccuccccaccauccaucauagccag

SEQ ID NO: 193101 - RNA, 32 nt, Homo Sapiens
gaaaccugaugguuaucuuuaaaauuaauggu

SEQ ID NO: 193102 - RNA, 32 nt, Homo Sapiens
ccagaugucuccucauccaguuccuccacagu

SEQ ID NO: 193103 - RNA, 32 nt, Homo Sapiens
accccgucugucauccucaucccacccucgcc

SEQ ID NO: 193104 - RNA, 32 nt, Homo Sapiens
gaugggaacaacaugucuucaccuagggacuu

SEQ ID NO: 193105 - RNA, 32 nt, Homo Sapiens
uuauauagaguaucucugcugcuuuuguuuac

SEQ ID NO: 193106 - RNA, 32 nt, Homo Sapiens
gcugccacugcccauaccuccuccucccuucu

SEQ ID NO: 193107 - RNA, 32 nt, Homo Sapiens
caaagagugugccaaucuauuuuuguaucagc

SEQ ID NO: 193108 - RNA, 32 nt, Homo Sapiens
uuuaagaauuuuucuuuuuauuaaaaaaaugc

SEQ ID NO: 193109 - RNA, 32 nt, Homo Sapiens
gaucugagguucugccccaacugcacagcagu

SEQ ID NO: 193110 - RNA, 32 nt, Homo Sapiens
agcgaaggcagaccgguuugcagcaccugccg

SEQ ID NO: 193111 - RNA, 32 nt, Homo Sapiens
cacugcaaccuccuccucccggguucaagugg

SEQ ID NO: 193112 - RNA, 32 nt, Homo Sapiens
ucgugccccuccccggagaggcagccuucacg

SEQ ID NO: 193113 - RNA, 31 nt, Homo Sapiens
gacagcauggaggacuuucugcucuccaaug

SEQ ID NO: 193114 - RNA, 32 nt, Homo Sapiens
ccugugggaaagguugcugucugucucaguac

SEQ ID NO: 193115 - RNA, 32 nt, Homo Sapiens
guagauacugguuuucuauuaacucaaaaccu

SEQ ID NO: 193116 - RNA, 32 nt, Homo Sapiens
uuugagcucggcugcguccgcgcuaggcgcuu

SEQ ID NO: 193117 - RNA, 32 nt, Homo Sapiens
aaccuacacuuuuauauagacaugucauuauu

SEQ ID NO: 193118 - RNA, 32 nt, Homo Sapiens
ggguacaggacaccuagauuuagcuaaugggg

SEQ ID NO: 193119 - RNA, 32 nt, Homo Sapiens
ggggagacaaacaacauacaaaaguucucauc

SEQ ID NO: 193120 - RNA, 32 nt, Homo Sapiens
uauucuaccauuauacagucuuucucaagugg

SEQ ID NO: 193121 - RNA, 32 nt, Homo Sapiens
uuuucuucagacugaggccuuuugguagucgg

SEQ ID NO: 193122 - RNA, 32 nt, Homo Sapiens
ggacugacugugggggcagagaagggcgagau

SEQ ID NO: 193123 - RNA, 32 nt, Homo Sapiens
ccucuguauccaccugguuuuguucuuucccu

SEQ ID NO: 193124 - RNA, 32 nt, Homo Sapiens
guacacgaauacugagagugaaugcugaagga

SEQ ID NO: 193125 - RNA, 30 nt, Homo Sapiens
gagcagucguugcggccgccggcgccgcgg

SEQ ID NO: 193126 - RNA, 32 nt, Homo Sapiens
gaaguugcccucaggauuaagugaaggcccag

SEQ ID NO: 193127 - RNA, 32 nt, Homo Sapiens
uuuugguucgaguacuauugaacucucuccug

SEQ ID NO: 193128 - RNA, 32 nt, Homo Sapiens
cucugucaugguuuuucuguaaauuaucgugu

SEQ ID NO: 193129 - RNA, 32 nt, Homo Sapiens
cggguggagaggcgcagggaccccaagguguc

SEQ ID NO: 193130 - RNA, 32 nt, Homo Sapiens
agaacucccacuuugcggugcucugguacguc

SEQ ID NO: 193131 - RNA, 32 nt, Homo Sapiens
acucguauuucuggaaacagccagugcaggag

SEQ ID NO: 193132 - RNA, 32 nt, Homo Sapiens
aggcccucuacugcccucuggguccagcagag

SEQ ID NO: 193133 - RNA, 32 nt, Homo Sapiens
auuuguauauuaauuuaggacuauuuagaagu

SEQ ID NO: 193134 - RNA, 32 nt, Homo Sapiens
gcuccagugaagcuucuugggguugcuaggac

SEQ ID NO: 193135 - RNA, 32 nt, Homo Sapiens
ucuuugccuuuguguaaaaauaaaauggaaau

SEQ ID NO: 193136 - RNA, 32 nt, Homo Sapiens
cacucugaacaucuuccuauauuguuauugug

SEQ ID NO: 193137 - RNA, 32 nt, Homo Sapiens
aaauagaugggaguuuaaauuugagaaucaaa

SEQ ID NO: 193138 - RNA, 32 nt, Homo Sapiens
acagauauaggggauuaauauuauuaauauug

SEQ ID NO: 193139 - RNA, 32 nt, Homo Sapiens
cccgccagccacacuguguugcagcucaccgc

SEQ ID NO: 193140 - RNA, 32 nt, Homo Sapiens
uuauguauuacauuuuaaccuauauuaaauaa

SEQ ID NO: 193141 - RNA, 32 nt, Homo Sapiens
agcugcucauuucauuuuguccaaccaaaaag

SEQ ID NO: 193142 - RNA, 32 nt, Homo Sapiens
caggccucauucuccucuggccucuaauaguc

SEQ ID NO: 193143 - RNA, 32 nt, Homo Sapiens
cacugccgccggggauuccagguucgguuccc

SEQ ID NO: 193144 - RNA, 32 nt, Homo Sapiens
cgucggaagaggccuuuugagcaagcgccaau

SEQ ID NO: 193145 - RNA, 32 nt, Homo Sapiens
uaggaugccccggcuucagucaccccacuuua

SEQ ID NO: 193146 - RNA, 32 nt, Homo Sapiens
auccaagagcaccaggcugugcuuggguccuu

SEQ ID NO: 193147 - RNA, 32 nt, Homo Sapiens
aauuugauagagauuauauuauuuuuauuuua

SEQ ID NO: 193148 - RNA, 32 nt, Homo Sapiens
uuuauguguugcuuggagucuguggggucgua

SEQ ID NO: 193149 - RNA, 32 nt, Homo Sapiens
ggccggucgugguggcucaugccuguaauccc

SEQ ID NO: 193150 - RNA, 32 nt, Homo Sapiens
aucuguuucuugggaaggaggaucucugcugg

SEQ ID NO: 193151 - RNA, 32 nt, Homo Sapiens
uccucgcugcuuaggcuccgcggccuccaagc

SEQ ID NO: 193152 - RNA, 31 nt, Homo Sapiens
uauguggcgucgaagccuguggacauuuucg

SEQ ID NO: 193153 - RNA, 32 nt, Homo Sapiens
agguaggaggaucaccugagacuggagaugua

SEQ ID NO: 193154 - RNA, 32 nt, Homo Sapiens
auguagggaaaggggccugggcucuucauuua

SEQ ID NO: 193155 - RNA, 32 nt, Homo Sapiens
cgccacacacugggcguucccggcacgggaga

SEQ ID NO: 193156 - RNA, 32 nt, Homo Sapiens
acagaagcucuuugacgguuugaauacuaugg

SEQ ID NO: 193157 - RNA, 32 nt, Homo Sapiens
uaaaaagaaaaaaugcagggugauuucuuauu

SEQ ID NO: 193158 - RNA, 32 nt, Homo Sapiens
gcuccuguaacaguaagaacuaauucugaaau

SEQ ID NO: 193159 - RNA, 32 nt, Homo Sapiens
cugggcgcggccagauaaguuuuuaagguucc

SEQ ID NO: 193160 - RNA, 32 nt, Homo Sapiens
uuuacuagaauuaaacaacaaacaaaacgcaa

SEQ ID NO: 193161 - RNA, 32 nt, Homo Sapiens
gcccuccaacuuugcagauauuacaaaaagag

SEQ ID NO: 193162 - RNA, 32 nt, Homo Sapiens
gggagcaucgccaugcccugccaccugggucc

SEQ ID NO: 193163 - RNA, 32 nt, Homo Sapiens
ucucaagcuuguuuuccagaguucauggaugg

SEQ ID NO: 193164 - RNA, 30 nt, Homo Sapiens
aaccugcagcugaggucgccggcgccuuuu

SEQ ID NO: 193165 - RNA, 32 nt, Homo Sapiens
ugcccauguacaugcccacuuuacucggagau

SEQ ID NO: 193166 - RNA, 32 nt, Homo Sapiens
uaguaaucaaggaggcguguugagccaagugu

SEQ ID NO: 193167 - RNA, 32 nt, Homo Sapiens
ugcuuaagaugauaaacauauauccucuuuuu

SEQ ID NO: 193168 - RNA, 32 nt, Homo Sapiens
cugugaagugauucuuuuuuuaaaauguuuuu

SEQ ID NO: 193169 - RNA, 32 nt, Homo Sapiens
gcagcccaagcagauucccauccaucaugacu

SEQ ID NO: 193170 - RNA, 32 nt, Homo Sapiens
gacagcgccucugcugccccagccuucuacag

SEQ ID NO: 193171 - RNA, 32 nt, Homo Sapiens
auagguuuucuauuuucuuucauuuuaaaagc

SEQ ID NO: 193172 - RNA, 32 nt, Homo Sapiens
acaugagggaaacuccaagaaaaggaaaaucg

SEQ ID NO: 193173 - RNA, 31 nt, Homo Sapiens
acaauacucaacaguaauuccacucccauga

SEQ ID NO: 193174 - RNA, 32 nt, Homo Sapiens
uuucaagucuuaggugagcagaauugcauauu

SEQ ID NO: 193175 - RNA, 32 nt, Homo Sapiens
uuucugcauauuguuuguaaucuccuagauac

SEQ ID NO: 193176 - RNA, 32 nt, Homo Sapiens
ccucuccucaggcuccuccuugcccccaccuu

SEQ ID NO: 193177 - RNA, 32 nt, Homo Sapiens
cacuguggaaaacagauuggugauuucucaga

SEQ ID NO: 193178 - RNA, 32 nt, Homo Sapiens
uuaaagaguucuuuuuauuucuuucauaauug

SEQ ID NO: 193179 - RNA, 32 nt, Homo Sapiens
gcaauuauuguaauacaggaagacugccaaaa

SEQ ID NO: 193180 - RNA, 32 nt, Homo Sapiens
ucggcgugcagggcgggcuccaagcgcuuugc

SEQ ID NO: 193181 - RNA, 32 nt, Homo Sapiens
gacgcuugugcagcgcggcgccgcccuggugg

SEQ ID NO: 193182 - RNA, 32 nt, Homo Sapiens
aaugaggauccuguuuucaaugggucgcuuua

SEQ ID NO: 193183 - RNA, 32 nt, Homo Sapiens
uguuuuuaaugauuuugauacauuuuaauguu

SEQ ID NO: 193184 - RNA, 32 nt, Homo Sapiens
ggacaggcgccuaccugcuccucgggcaccag

SEQ ID NO: 193185 - RNA, 32 nt, Homo Sapiens
auguccuaaaauuaugauaauacauuucccaa

SEQ ID NO: 193186 - RNA, 32 nt, Homo Sapiens
cugaggugaaguuggaggaagagaacaggagc

SEQ ID NO: 193187 - RNA, 32 nt, Homo Sapiens
agauguuugacugaucauugaucugcauaugc

SEQ ID NO: 193188 - RNA, 32 nt, Homo Sapiens
aaguggacaaauuuaugugaaaauucauuuaa

SEQ ID NO: 193189 - RNA, 27 nt, Homo Sapiens
aacacuccuucuuucagccccaccucc

SEQ ID NO: 193190 - RNA, 32 nt, Homo Sapiens
aguaugaggguuugcauuggcuuuuggccaaa

SEQ ID NO: 193191 - RNA, 32 nt, Homo Sapiens
gaggcgcgcggcagcccucacuccuccgcucc

SEQ ID NO: 193192 - RNA, 32 nt, Homo Sapiens
ggccccuggguugacuggguucuuuguuuuau

SEQ ID NO: 193193 - RNA, 32 nt, Homo Sapiens
uaccugugaaauaacagugacuuuuuaaaaug

SEQ ID NO: 193194 - RNA, 32 nt, Homo Sapiens
accuuaguggcuacagaagaaaguugaccuug

SEQ ID NO: 193195 - RNA, 32 nt, Homo Sapiens
cuuauuuugcaccuuauaaaaaguauacuaau

SEQ ID NO: 193196 - RNA, 31 nt, Homo Sapiens
ggagcuguugagguaccuccaaggaccggcc

SEQ ID NO: 193197 - RNA, 32 nt, Homo Sapiens
uuaagauuauacacauccaacauauuaaaguu

SEQ ID NO: 193198 - RNA, 32 nt, Homo Sapiens
gcauauacacuuuuuucuuucauuuuuccaaa

SEQ ID NO: 193199 - RNA, 32 nt, Homo Sapiens
ccacagaaaauauuuaugaagacuauaaagca

SEQ ID NO: 193200 - RNA, 32 nt, Homo Sapiens
cccugaacucucucuugcucgggaccugccug

SEQ ID NO: 193201 - RNA, 32 nt, Homo Sapiens
gccccaggccgggagcgcgcgcggacuggcgu

SEQ ID NO: 193202 - RNA, 32 nt, Homo Sapiens
gacuucccacuuuucuuucucauucucugucc

SEQ ID NO: 193203 - RNA, 32 nt, Homo Sapiens
cauccccgucugaccaagggcugacuucucca

SEQ ID NO: 193204 - RNA, 32 nt, Homo Sapiens
cugagcgcgggccgggucgguggggcggucgg

SEQ ID NO: 193205 - RNA, 32 nt, Homo Sapiens
uuauuuuuucuuuucuuuacaaaccauuuugu

SEQ ID NO: 193206 - RNA, 32 nt, Homo Sapiens
cauccucaggggacccaguuccccucaccaac

SEQ ID NO: 193207 - RNA, 32 nt, Homo Sapiens
cccaacuuuguggcgcccucaggccgcggcga

SEQ ID NO: 193208 - RNA, 32 nt, Homo Sapiens
gguggagucggagcggcgcggcggcggucaug

SEQ ID NO: 193209 - RNA, 32 nt, Homo Sapiens
uaguggauugcagaauggaaacuuggcuuuug

SEQ ID NO: 193210 - RNA, 32 nt, Homo Sapiens
agcagauauuucaauauauuccaauuuagccg

SEQ ID NO: 193211 - RNA, 32 nt, Homo Sapiens
ugacccuauccuguuauuuaaaugugaacauu

SEQ ID NO: 193212 - RNA, 32 nt, Homo Sapiens
cuuuuaaaaaaauaaauuaauaucuaauugua

SEQ ID NO: 193213 - RNA, 32 nt, Homo Sapiens
cuccuucccauuggcuuucucuccuuggccuu

SEQ ID NO: 193214 - RNA, 32 nt, Homo Sapiens
aaaccuaugcucucaauucuuuuauauucuaa

SEQ ID NO: 193215 - RNA, 32 nt, Homo Sapiens
uguaguauuccaugguagagaugugccauagu

SEQ ID NO: 193216 - RNA, 32 nt, Homo Sapiens
gcuccuccucccagccccggcccauuccuccc

SEQ ID NO: 193217 - RNA, 32 nt, Homo Sapiens
acuacuuccuucccugccucccagcucaguau

SEQ ID NO: 193218 - RNA, 32 nt, Homo Sapiens
guaacguguuuuuguucauugggcuuccuugu

SEQ ID NO: 193219 - RNA, 32 nt, Homo Sapiens
cuccgccugcgcgcgccgcuuccguugccaua

SEQ ID NO: 193220 - RNA, 32 nt, Homo Sapiens
ggacuuuggugggauuuggagcuccgaggcag

SEQ ID NO: 193221 - RNA, 26 nt, Homo Sapiens
aauggcggcucaggcggcggcagcgg

SEQ ID NO: 193222 - RNA, 32 nt, Homo Sapiens
ucuucaguaacgcuacaaccauugcaaaucau

SEQ ID NO: 193223 - RNA, 32 nt, Homo Sapiens
cgaggggcgggagucgccggggcuucuuccug

SEQ ID NO: 193224 - RNA, 32 nt, Homo Sapiens
ccucaaaauauuagcaaaucaggaaugcaagg

SEQ ID NO: 193225 - RNA, 32 nt, Homo Sapiens
gcguuccauggcccugcccacccaggcacagg

SEQ ID NO: 193226 - RNA, 32 nt, Homo Sapiens
gccucccgcgccccgcggucgcccuggaguaa

SEQ ID NO: 193227 - RNA, 32 nt, Homo Sapiens
aaacccuuaaaaaaaaucauugggcucuuugg

SEQ ID NO: 193228 - RNA, 32 nt, Homo Sapiens
uuuugguaacucccauggcagcuccuaggauu

SEQ ID NO: 193229 - RNA, 32 nt, Homo Sapiens
aggaagagguaacaacaauuauaagauuauau

SEQ ID NO: 193230 - RNA, 32 nt, Homo Sapiens
aacgacacuucuggaggccacauccugaauau

SEQ ID NO: 193231 - RNA, 32 nt, Homo Sapiens
gcugcaggcgccccgggauagcugcaggugcc

SEQ ID NO: 193232 - RNA, 32 nt, Homo Sapiens
gucaaugacugggaugacaugaggaaaauaau

SEQ ID NO: 193233 - RNA, 32 nt, Homo Sapiens
ggaggaauggcuugcuggggagcccauccagg

SEQ ID NO: 193234 - RNA, 32 nt, Homo Sapiens
auaaucagaauauguugcuuugaaaaagccuc

SEQ ID NO: 193235 - RNA, 32 nt, Homo Sapiens
cccaguucaucucugcugaacauuuggaaacc

SEQ ID NO: 193236 - RNA, 32 nt, Homo Sapiens
uggaaaaugaucccggggccaggacagacaaa

SEQ ID NO: 193237 - RNA, 32 nt, Homo Sapiens
uguauugauuuuuuuuuuuuuaacuauauuga

SEQ ID NO: 193238 - RNA, 32 nt, Homo Sapiens
guccugucggagcccugucuccucucucugua

SEQ ID NO: 193239 - RNA, 32 nt, Homo Sapiens
ucuguugguuuaacuugccggagcuccugcau

SEQ ID NO: 193240 - RNA, 32 nt, Homo Sapiens
gaaagagcccagcgcaguggcucacaucugua

SEQ ID NO: 193241 - RNA, 32 nt, Homo Sapiens
ggagccggggagaggaagggugggugcaagag

SEQ ID NO: 193242 - RNA, 32 nt, Homo Sapiens
agcggaaaaacgcgagaaaagguuuccccguu

SEQ ID NO: 193243 - RNA, 32 nt, Homo Sapiens
uccaggggcugguggaggagcggcucaaggcc

SEQ ID NO: 193244 - RNA, 32 nt, Homo Sapiens
cauucugacaccugcauauagugugggaaauu

SEQ ID NO: 193245 - RNA, 32 nt, Homo Sapiens
auugccaaaaauuucuaccacuuuuuacuaga

SEQ ID NO: 193246 - RNA, 32 nt, Homo Sapiens
ugccagauaucaaaccugaggaaggcagaagu

SEQ ID NO: 193247 - RNA, 32 nt, Homo Sapiens
uucugcagguguucaagucuuaaaaaauaaag

SEQ ID NO: 193248 - RNA, 32 nt, Homo Sapiens
cuaacccauuuuccuccagcccuggcuacccg

SEQ ID NO: 193249 - RNA, 32 nt, Homo Sapiens
aagugacuggcggggaccaggaugcuggaggg

SEQ ID NO: 193250 - RNA, 30 nt, Homo Sapiens
aagucacagaagcuugcugggcuuuguacc

SEQ ID NO: 193251 - RNA, 32 nt, Homo Sapiens
ugagcccuuucugcacaaaaccagcaauugua

SEQ ID NO: 193252 - RNA, 32 nt, Homo Sapiens
gaagggcuugucugccagcaucagagugcccu

SEQ ID NO: 193253 - RNA, 32 nt, Homo Sapiens
uugauagagcagagauaaaauauuuugaugga

SEQ ID NO: 193254 - RNA, 32 nt, Homo Sapiens
uggcgagaccccaagagggaucucauagcacu

SEQ ID NO: 193255 - RNA, 32 nt, Homo Sapiens
uuuucaacccucaaaaucuguagagaagaaau

SEQ ID NO: 193256 - RNA, 32 nt, Homo Sapiens
ugccuuuguuuccaucucgaagugcaaauuua

SEQ ID NO: 193257 - RNA, 32 nt, Homo Sapiens
gggaagaggagaaugguguggauaugguucug

SEQ ID NO: 193258 - RNA, 32 nt, Homo Sapiens
cugugaacuugaaauuugaauuuuguguuaga

SEQ ID NO: 193259 - RNA, 32 nt, Homo Sapiens
caagggucucaaccaagugcauuuauuggcau

SEQ ID NO: 193260 - RNA, 32 nt, Homo Sapiens
uaacugaaaauauuuagcuaaauuuccauguu

SEQ ID NO: 193261 - RNA, 32 nt, Homo Sapiens
cauucuggagggcaccacggugacccgggcca

SEQ ID NO: 193262 - RNA, 32 nt, Homo Sapiens
ugggcccgauuugguaguugaggaaagcacag

SEQ ID NO: 193263 - RNA, 32 nt, Homo Sapiens
ggacgcccgccgcgcuccgccggcccuuuuuu

SEQ ID NO: 193264 - RNA, 32 nt, Homo Sapiens
auaugcuauuaauacauuauacuuuauaacua

SEQ ID NO: 193265 - RNA, 32 nt, Homo Sapiens
guccuccucacaggcaaccacgcccuuccucc

SEQ ID NO: 193266 - RNA, 32 nt, Homo Sapiens
uuuuaauagaaagccaggguuuuaaggaauuu

SEQ ID NO: 193267 - RNA, 32 nt, Homo Sapiens
cuguaaugccagcacuuugggaggccgaggcg

SEQ ID NO: 193268 - RNA, 32 nt, Homo Sapiens
ugcccacucugguucccuuguuuaucugaguc

SEQ ID NO: 193269 - RNA, 32 nt, Homo Sapiens
aaugguccaaaaaaugccuguuucagaaguuu

SEQ ID NO: 193270 - RNA, 32 nt, Homo Sapiens
gacccguagugggggaggcggcggcagcguua

SEQ ID NO: 193271 - RNA, 32 nt, Homo Sapiens
cugcgggcucugccuuggugucaugccugcug

SEQ ID NO: 193272 - RNA, 32 nt, Homo Sapiens
uucuaaggcggcggcugcagcagcggcuccau

SEQ ID NO: 193273 - RNA, 32 nt, Homo Sapiens
gauggccugcaagggaggggggcccggggccu

SEQ ID NO: 193274 - RNA, 32 nt, Homo Sapiens
cuccuucucucuccugcccccaucucggaccc

SEQ ID NO: 193275 - RNA, 32 nt, Homo Sapiens
gggugcagacacaggcugaggaccagcccugg

SEQ ID NO: 193276 - RNA, 32 nt, Homo Sapiens
uggauuuaaaacacagccgucuggccagcugc

SEQ ID NO: 193277 - RNA, 32 nt, Homo Sapiens
cccaacaggacccccaggaccccgcucccauu

SEQ ID NO: 193278 - RNA, 32 nt, Homo Sapiens
uuuuuuuuuuuuuuuucuuuuuuuuugagaca

SEQ ID NO: 193279 - RNA, 32 nt, Homo Sapiens
gggaaacgcccgcgcgguuuggggcaggcgug

SEQ ID NO: 193280 - RNA, 32 nt, Homo Sapiens
caaaguuguacuuuuuucuaguaguuauuuuu

SEQ ID NO: 193281 - RNA, 32 nt, Homo Sapiens
cucugccgucgucaaggcgccaucgggggugc

SEQ ID NO: 193282 - RNA, 32 nt, Homo Sapiens
ccggagagggucacaguaaugugugauaaaug

SEQ ID NO: 193283 - RNA, 32 nt, Homo Sapiens
gugcaggugaggggcgcugagaacgcgggcag

SEQ ID NO: 193284 - RNA, 32 nt, Homo Sapiens
cugugggccggggccccucuguggccugagag

SEQ ID NO: 193285 - RNA, 29 nt, Homo Sapiens
aaagaugacaacacgagagguggucaaag

SEQ ID NO: 193286 - RNA, 32 nt, Homo Sapiens
uuuaaaacuuggaugcuuaagaggccugcaua

SEQ ID NO: 193287 - RNA, 32 nt, Homo Sapiens
aagaacuuuuuaaauucaguacugauugguuc

SEQ ID NO: 193288 - RNA, 32 nt, Homo Sapiens
cauuuugcauuacuuguauccacucauguuug

SEQ ID NO: 193289 - RNA, 32 nt, Homo Sapiens
aaguuaccaaagguuuuuauucuuaccuaugu

SEQ ID NO: 193290 - RNA, 32 nt, Homo Sapiens
gaagguggggugggggcggggcuuggggccuc

SEQ ID NO: 193291 - RNA, 32 nt, Homo Sapiens
uauuguuuucuauuuaugccuugaugauuuaa

SEQ ID NO: 193292 - RNA, 32 nt, Homo Sapiens
ccuuaauaaaaauaaacguuugcggguuuuuu

SEQ ID NO: 193293 - RNA, 32 nt, Homo Sapiens
cauggcucucguuuuuggggucauggggaggg

SEQ ID NO: 193294 - RNA, 32 nt, Homo Sapiens
acauucccugaacauacucuuccaccagaauc

SEQ ID NO: 193295 - RNA, 32 nt, Homo Sapiens
ugggauuacaggcauaagccacagcacccggc

SEQ ID NO: 193296 - RNA, 32 nt, Homo Sapiens
cccgcaccugcgucccucgcccggcccgaugg

SEQ ID NO: 193297 - RNA, 32 nt, Homo Sapiens
gaggagcgccgcucgccggccgccgccacccu

SEQ ID NO: 193298 - RNA, 32 nt, Homo Sapiens
ggcugguccgcugcuccccaccuaccaggguc

SEQ ID NO: 193299 - RNA, 30 nt, Homo Sapiens
cuccaucgcgcgcacggcagccuagcgcaa

SEQ ID NO: 193300 - RNA, 32 nt, Homo Sapiens
uuuucuuuuuucuuuuuuuuuaaagaucauga

SEQ ID NO: 193301 - RNA, 32 nt, Homo Sapiens
ccuguggacauggagaucuaaugggccugugc

SEQ ID NO: 193302 - RNA, 28 nt, Homo Sapiens
uaaauugcccauuggcauuugaagguag

SEQ ID NO: 193303 - RNA, 32 nt, Homo Sapiens
uacugcuguaaaguauuuuuugaagagagaua

SEQ ID NO: 193304 - RNA, 32 nt, Homo Sapiens
gcggcagcugauuggacgcgggccgccccacc

SEQ ID NO: 193305 - RNA, 32 nt, Homo Sapiens
gacacaacagaaaagaaacuguagaccuuggg

SEQ ID NO: 193306 - RNA, 32 nt, Homo Sapiens
uuugccuuuuucugccaaaacaauaaucaaag

SEQ ID NO: 193307 - RNA, 32 nt, Homo Sapiens
cuagggcgcggcgggcgguuugaauuuugcuu

SEQ ID NO: 193308 - RNA, 32 nt, Homo Sapiens
aauauccuguugccuuugucacuuccucuuug

SEQ ID NO: 193309 - RNA, 32 nt, Homo Sapiens
ugcggggagacgggcgccggccccaaagcgac

SEQ ID NO: 193310 - RNA, 32 nt, Homo Sapiens
uaaaacacccuuucuacauuaagggauacuca

SEQ ID NO: 193311 - RNA, 32 nt, Homo Sapiens
gcauuucccagccccaguguccacaccucuca

SEQ ID NO: 193312 - RNA, 32 nt, Homo Sapiens
agauuguuucuuugauuauucccaaugcaagu

SEQ ID NO: 193313 - RNA, 32 nt, Homo Sapiens
agaagccuccaagccugccucccaagguccuc

SEQ ID NO: 193314 - RNA, 32 nt, Homo Sapiens
uggcuuuugaaugaggaugacaauggaagaga

SEQ ID NO: 193315 - RNA, 32 nt, Homo Sapiens
uuaggaugaaaacuaaaggacucauugccuuc

SEQ ID NO: 193316 - RNA, 32 nt, Homo Sapiens
ggagcguggaccgcggcgcugcucagcggugg

SEQ ID NO: 193317 - RNA, 32 nt, Homo Sapiens
ggaggacuggaugaggauguccuguuauaguu

SEQ ID NO: 193318 - RNA, 32 nt, Homo Sapiens
gcccuaugaaaacuuuaaaucucuaaaacauu

SEQ ID NO: 193319 - RNA, 32 nt, Homo Sapiens
cuggcaccuguucgguggucccggggcaucau

SEQ ID NO: 193320 - RNA, 32 nt, Homo Sapiens
cggcguccagucuucguccgccguuagguugc

SEQ ID NO: 193321 - RNA, 32 nt, Homo Sapiens
ugcucacccaagugcuagcucugcacuucgug

SEQ ID NO: 193322 - RNA, 32 nt, Homo Sapiens
ucuucugccaaggggguccuccuggcauugac

SEQ ID NO: 193323 - RNA, 32 nt, Homo Sapiens
ugauugugucuaagcuaugaugaccuucauau

SEQ ID NO: 193324 - RNA, 32 nt, Homo Sapiens
ggcaggaagauucaggaccaucaggucgugau

SEQ ID NO: 193325 - RNA, 32 nt, Homo Sapiens
aucugucuuggucaccccggccaggccccgga

SEQ ID NO: 193326 - RNA, 32 nt, Homo Sapiens
gccaacugguccugccucuuuaccacacagaa

SEQ ID NO: 193327 - RNA, 32 nt, Homo Sapiens
agccuccuuucuggcuuuggaagccaugugau

SEQ ID NO: 193328 - RNA, 32 nt, Homo Sapiens
cuccagagauaagaccacuuuuuuaucugagc

SEQ ID NO: 193329 - RNA, 32 nt, Homo Sapiens
agaggcugccagcaaagcccucuucaacccac

SEQ ID NO: 193330 - RNA, 32 nt, Homo Sapiens
cggugcauacacccccaccuccugcaauaaaa

SEQ ID NO: 193331 - RNA, 32 nt, Homo Sapiens
aguuauugcuuuauuugguuuuuuaauauaca

SEQ ID NO: 193332 - RNA, 32 nt, Homo Sapiens
uguggugcucguggcugaggcuccacagggcu

SEQ ID NO: 193333 - RNA, 32 nt, Homo Sapiens
gggccccgcggcgucaucggcggcgaggagcc

SEQ ID NO: 193334 - RNA, 32 nt, Homo Sapiens
uggcugggcauccccaacguccugcuggaggu

SEQ ID NO: 193335 - RNA, 32 nt, Homo Sapiens
uuacccacaaggaaacacuaauaauaaaccgg

SEQ ID NO: 193336 - RNA, 32 nt, Homo Sapiens
cuccgccccacuuccaacacaaccccaguaac

SEQ ID NO: 193337 - RNA, 32 nt, Homo Sapiens
ucccucguuucuucuuuuuuugggggagcugg

SEQ ID NO: 193338 - RNA, 32 nt, Homo Sapiens
cauuguacuuccauauaucuuuucauuaacuu

SEQ ID NO: 193339 - RNA, 32 nt, Homo Sapiens
caaaggcauagaagggauauuuuuguguagga

SEQ ID NO: 193340 - RNA, 32 nt, Homo Sapiens
gccuuggcgaggcggcagcucauuguuuacag

SEQ ID NO: 193341 - RNA, 32 nt, Homo Sapiens
acauagaaggcacauggcucaguaaauauuga

SEQ ID NO: 193342 - RNA, 32 nt, Homo Sapiens
cuguccucggaagaacucccccugcuucuuuc

SEQ ID NO: 193343 - RNA, 32 nt, Homo Sapiens
cccuccugggcucguuuucuccaggaggcugc

SEQ ID NO: 193344 - RNA, 32 nt, Homo Sapiens
uuuacucagacugucauguuucaucucuguaa

SEQ ID NO: 193345 - RNA, 29 nt, Homo Sapiens
cccgguucgguccgggggagauggcgcag

SEQ ID NO: 193346 - RNA, 32 nt, Homo Sapiens
cgggcagauuccaggaaugaagaauuaggcuu

SEQ ID NO: 193347 - RNA, 32 nt, Homo Sapiens
ccggccugccccggcgcaccacguguccgugc

SEQ ID NO: 193348 - RNA, 32 nt, Homo Sapiens
uguuauauacccaucuacucccaacauggaua

SEQ ID NO: 193349 - RNA, 32 nt, Homo Sapiens
acuauugcacucaagccugggcgacaaaagug

SEQ ID NO: 193350 - RNA, 27 nt, Homo Sapiens
uuggggcccuucuuccucaucacccug

SEQ ID NO: 193351 - RNA, 32 nt, Homo Sapiens
cagauugucagcugugcagaucagaccuuuuu

SEQ ID NO: 193352 - RNA, 30 nt, Homo Sapiens
caagcguggggcgacaagcugccggagcug

SEQ ID NO: 193353 - RNA, 32 nt, Homo Sapiens
uuccuagaagggcuacugcuccuggaagagug

SEQ ID NO: 193354 - RNA, 32 nt, Homo Sapiens
aaaacaauccggagaagauguagagcaguaca

SEQ ID NO: 193355 - RNA, 32 nt, Homo Sapiens
uggacuuaacuuucaggaaacaaaauuaaacu

SEQ ID NO: 193356 - RNA, 32 nt, Homo Sapiens
uguccaaaauuuauuucuuuggagcuauguag

SEQ ID NO: 193357 - RNA, 32 nt, Homo Sapiens
cugagccaacgccuucacggaccucccuagcc

SEQ ID NO: 193358 - RNA, 32 nt, Homo Sapiens
cccaaaggcaagacucucucugauggucacuu

SEQ ID NO: 193359 - RNA, 32 nt, Homo Sapiens
acuuggaaaaaaguuucuuuugcucucauaga

SEQ ID NO: 193360 - RNA, 32 nt, Homo Sapiens
uaaaaggcaaaguguuucugaaggcaauuucu

SEQ ID NO: 193361 - RNA, 32 nt, Homo Sapiens
uucugcccauucucaacaaacacucuugucug

SEQ ID NO: 193362 - RNA, 32 nt, Homo Sapiens
cgcacaggcuccuggagggcugccugggggag

SEQ ID NO: 193363 - RNA, 32 nt, Homo Sapiens
uauaaaaagccaggaccauguuagaauuagga

SEQ ID NO: 193364 - RNA, 32 nt, Homo Sapiens
ggcugggauugcgggcacaugcaccacgcccg

SEQ ID NO: 193365 - RNA, 32 nt, Homo Sapiens
uuuguuauuuuaaaaauacaacuauauuuugg

SEQ ID NO: 193366 - RNA, 32 nt, Homo Sapiens
gaugcugcacauaguaccuggugcuagggucu

SEQ ID NO: 193367 - RNA, 32 nt, Homo Sapiens
acggaaaggggagaggaaggcaggcccucccg

SEQ ID NO: 193368 - RNA, 32 nt, Homo Sapiens
uccacccuuaauucccaaaguaccucacucau

SEQ ID NO: 193369 - RNA, 32 nt, Homo Sapiens
uccccaucuguggccuggggguccuuccugac

SEQ ID NO: 193370 - RNA, 32 nt, Homo Sapiens
uuuucucucggcgaccccgccccgcacgcgcc

SEQ ID NO: 193371 - RNA, 32 nt, Homo Sapiens
agcccgugggcugcuggaccggaccggacagc

SEQ ID NO: 193372 - RNA, 29 nt, Homo Sapiens
uuacaauaaaguuuuuaauguguuuuacu

SEQ ID NO: 193373 - RNA, 31 nt, Homo Sapiens
ggauucacaaagaaaaaaguauguucauuuu

SEQ ID NO: 193374 - RNA, 32 nt, Homo Sapiens
aaugucugcuguuauuucuaauuccacagguc

SEQ ID NO: 193375 - RNA, 32 nt, Homo Sapiens
cugucuggaaaacugcaauuucaucuugagag

SEQ ID NO: 193376 - RNA, 32 nt, Homo Sapiens
caucaaguucauuugcagaaacaaauaacuga

SEQ ID NO: 193377 - RNA, 32 nt, Homo Sapiens
ugaccucucagcuuuccaacaggaaucuugua

SEQ ID NO: 193378 - RNA, 32 nt, Homo Sapiens
cuuugagaaauauuugaggaauauuuuggaga

SEQ ID NO: 193379 - RNA, 32 nt, Homo Sapiens
accuucccgaacacugaaaccaauggugaauu

SEQ ID NO: 193380 - RNA, 32 nt, Homo Sapiens
accuuagcuccacugcccuuugagggauggaa

SEQ ID NO: 193381 - RNA, 32 nt, Homo Sapiens
ccuccucugcccggccucuagcgcagucgcua

SEQ ID NO: 193382 - RNA, 32 nt, Homo Sapiens
uguaauugcuuacauaacucuuugaaaaugua

SEQ ID NO: 193383 - RNA, 32 nt, Homo Sapiens
uugggcauuuuaguucuauauuuuuugugccu

SEQ ID NO: 193384 - RNA, 32 nt, Homo Sapiens
ucaaacucucaauaaacacggauuaccagacc

SEQ ID NO: 193385 - RNA, 32 nt, Homo Sapiens
cugggucugggaggagggaggcugggaggccg

SEQ ID NO: 193386 - RNA, 32 nt, Homo Sapiens
gagugagaggggaaggggcgccaggcgagcac

SEQ ID NO: 193387 - RNA, 32 nt, Homo Sapiens
uuuauauaccuuuaaaaacuguaauuuaauug

SEQ ID NO: 193388 - RNA, 32 nt, Homo Sapiens
ccccaggcucugcugcucugccacucagcugc

SEQ ID NO: 193389 - RNA, 32 nt, Homo Sapiens
ucgugauccacccaccucaggaagugcuggga

SEQ ID NO: 193390 - RNA, 32 nt, Homo Sapiens
auuuccguaaggcagcuagaaaauaguaagua

SEQ ID NO: 193391 - RNA, 32 nt, Homo Sapiens
accagccuggccaauguagugaaaccccgucu

SEQ ID NO: 193392 - RNA, 32 nt, Homo Sapiens
ccaucuagccauugacucaugaccugggucaa

SEQ ID NO: 193393 - RNA, 32 nt, Homo Sapiens
cauuguuaaaauuugcacuuugaagguaagcu

SEQ ID NO: 193394 - RNA, 32 nt, Homo Sapiens
acagaggccacaacuuuuaaggugauguugga

SEQ ID NO: 193395 - RNA, 32 nt, Homo Sapiens
accuauggugccugcugaucguggcauuccua

SEQ ID NO: 193396 - RNA, 32 nt, Homo Sapiens
cagugguuuccacuucaccuguuuccacuuuu

SEQ ID NO: 193397 - RNA, 32 nt, Homo Sapiens
uuauuugcaucgcucuaauuugaaauguuugu

SEQ ID NO: 193398 - RNA, 32 nt, Homo Sapiens
caagaaucucaaaaauauucauauacuauaau

SEQ ID NO: 193399 - RNA, 32 nt, Homo Sapiens
aauaaacauuuuauacuguuuguauguauaaa

SEQ ID NO: 193400 - RNA, 32 nt, Homo Sapiens
ucuccguucccgacccccggcguggauucguu

SEQ ID NO: 193401 - RNA, 32 nt, Homo Sapiens
ccuaucgaugucuauuugugagaaguggagca

SEQ ID NO: 193402 - RNA, 32 nt, Homo Sapiens
cgacgucugcgugccgagugaucgcgucccgg

SEQ ID NO: 193403 - RNA, 32 nt, Homo Sapiens
ugcugggaccagagacccagaccccacuccag

SEQ ID NO: 193404 - RNA, 32 nt, Homo Sapiens
guuugccugugcuuuuucaucuguaaauggaa

SEQ ID NO: 193405 - RNA, 30 nt, Homo Sapiens
guggccgaaaguccggagucgcuguaaaac

SEQ ID NO: 193406 - RNA, 32 nt, Homo Sapiens
cacccccuuucugucccuggcacagaacccag

SEQ ID NO: 193407 - RNA, 32 nt, Homo Sapiens
uuuguuuccagcucacuuuguaccccucaccu

SEQ ID NO: 193408 - RNA, 32 nt, Homo Sapiens
guaaauuauugcuuuaauuagagcagcacauu

SEQ ID NO: 193409 - RNA, 32 nt, Homo Sapiens
ucuggcugcuccagccccaggaaggacccagg

SEQ ID NO: 193410 - RNA, 32 nt, Homo Sapiens
caccauggaugccauggauuagcugugcaacu

SEQ ID NO: 193411 - RNA, 32 nt, Homo Sapiens
uacgguugugaggauuaagugauuugaugcau

SEQ ID NO: 193412 - RNA, 32 nt, Homo Sapiens
cccggaggacuagcgcucccccugccuugccc

SEQ ID NO: 193413 - RNA, 32 nt, Homo Sapiens
aagugagaggagaguucucugcauccucccuc

SEQ ID NO: 193414 - RNA, 32 nt, Homo Sapiens
ccccgucucuacuaaaaauagaagcauuagcc

SEQ ID NO: 193415 - RNA, 32 nt, Homo Sapiens
gugggaugggagggcaggaggcggcgggcugc

SEQ ID NO: 193416 - RNA, 32 nt, Homo Sapiens
agguccccacuuucugcuuuccuugcccaugu

SEQ ID NO: 193417 - RNA, 32 nt, Homo Sapiens
cauggaggggcuggccuuuguuuucuggcauc

SEQ ID NO: 193418 - RNA, 32 nt, Homo Sapiens
agaaguuaacuguguauguacuuuaauuucaa

SEQ ID NO: 193419 - RNA, 32 nt, Homo Sapiens
cuucuaaacacuuuaaauuugauuugacauuu

SEQ ID NO: 193420 - RNA, 32 nt, Homo Sapiens
aucauccagaaaguucuccugugcuuucaugc

SEQ ID NO: 193421 - RNA, 32 nt, Homo Sapiens
ccuucggggaggaggagagggcgcacgcugcg

SEQ ID NO: 193422 - RNA, 32 nt, Homo Sapiens
ugugugcgugaggugguauuguaacauuuaug

SEQ ID NO: 193423 - RNA, 32 nt, Homo Sapiens
ugggucucugcgccuuugcaugagacuuuacg

SEQ ID NO: 193424 - RNA, 32 nt, Homo Sapiens
uuggccaauuuaauucagaggggucuuaaagc

SEQ ID NO: 193425 - RNA, 32 nt, Homo Sapiens
cugucaggauugcgagagauguguguugauac

SEQ ID NO: 193426 - RNA, 32 nt, Homo Sapiens
aaccuuugcuauuuuuaaucuucguuggcacu

SEQ ID NO: 193427 - RNA, 32 nt, Homo Sapiens
uccguuguuguuguuguuguuguuuucuagcc

SEQ ID NO: 193428 - RNA, 32 nt, Homo Sapiens
cgacugugccuggucuacacuccaggucugcc

SEQ ID NO: 193429 - RNA, 32 nt, Homo Sapiens
caggcagugucuggccauuauugcguucuaca

SEQ ID NO: 193430 - RNA, 32 nt, Homo Sapiens
cccgcagcccguuuuugggaggaggcggaggg

SEQ ID NO: 193431 - RNA, 32 nt, Homo Sapiens
ugcauccuggaaaguguuuggccuacacaauu

SEQ ID NO: 193432 - RNA, 32 nt, Homo Sapiens
aggcucacggugcagggugaaccuggccacag

SEQ ID NO: 193433 - RNA, 32 nt, Homo Sapiens
ccuaccucucguuucugcccagcccucugugg

SEQ ID NO: 193434 - RNA, 32 nt, Homo Sapiens
cacgaaaguaucuuucugaaaacuugcaaaac

SEQ ID NO: 193435 - RNA, 32 nt, Homo Sapiens
cuuccccauuccuuccucccccucgguaggaa

SEQ ID NO: 193436 - RNA, 32 nt, Homo Sapiens
cuacaguuuaguuuugucacaauuacacauau

SEQ ID NO: 193437 - RNA, 31 nt, Homo Sapiens
cauucuuugcccccagcaugaguuaacucgc

SEQ ID NO: 193438 - RNA, 30 nt, Homo Sapiens
ugauaggguucccaggcugccuggaguuac

SEQ ID NO: 193439 - RNA, 32 nt, Homo Sapiens
caaccccaaacacagaguuucauggaaacccc

SEQ ID NO: 193440 - RNA, 32 nt, Homo Sapiens
cuguguuugugauugucugugugucugucucc

SEQ ID NO: 193441 - RNA, 32 nt, Homo Sapiens
uuugaaugaaguguauuuuauaagcauuuaau

SEQ ID NO: 193442 - RNA, 32 nt, Homo Sapiens
aaggcuauaggaagucuguucuggagacaucu

SEQ ID NO: 193443 - RNA, 32 nt, Homo Sapiens
acuccagacuccugcccuuuuauuuucuccag

SEQ ID NO: 193444 - RNA, 32 nt, Homo Sapiens
ugccccucucuggccuggccggcaggcgucuu

SEQ ID NO: 193445 - RNA, 32 nt, Homo Sapiens
uccuucgugugagccaaccccacccgcuccac

SEQ ID NO: 193446 - RNA, 32 nt, Homo Sapiens
uggggaugaggaaaaucaaacaacaaccauuu

SEQ ID NO: 193447 - RNA, 32 nt, Homo Sapiens
aacugacaagcacacuuuuuuccuccccccuu

SEQ ID NO: 193448 - RNA, 32 nt, Homo Sapiens
ccacgcugaucccacauguguacaucaugcga

SEQ ID NO: 193449 - RNA, 32 nt, Homo Sapiens
ugacagagcagcugcgcuggcucacugucuuc

SEQ ID NO: 193450 - RNA, 27 nt, Homo Sapiens
uccugguccuucuccacucuccaccau

SEQ ID NO: 193451 - RNA, 32 nt, Homo Sapiens
uggaagucagguggguuuccugagagaguuag

SEQ ID NO: 193452 - RNA, 32 nt, Homo Sapiens
auuagagaacagaaacccucaaccauagcaug

SEQ ID NO: 193453 - RNA, 32 nt, Homo Sapiens
aaccuaaggggucuuuacaaaauguguuauaa

SEQ ID NO: 193454 - RNA, 32 nt, Homo Sapiens
uuucuuauuuucugccuguaacuucugucccc

SEQ ID NO: 193455 - RNA, 32 nt, Homo Sapiens
gggacccacgggcucuugugggugugguuuag

SEQ ID NO: 193456 - RNA, 32 nt, Homo Sapiens
uaccugggcacgccagucugcaccaugugucc

SEQ ID NO: 193457 - RNA, 32 nt, Homo Sapiens
cugaguaggaggaugagggucugaguuaggau

SEQ ID NO: 193458 - RNA, 32 nt, Homo Sapiens
uaauuaaauaauagcuagacuccaucauauga

SEQ ID NO: 193459 - RNA, 32 nt, Homo Sapiens
aacucccgcacgagucuugccagugcuuccaa

SEQ ID NO: 193460 - RNA, 30 nt, Homo Sapiens
ggccaggcgcccgguggcuccgaagcgggg

SEQ ID NO: 193461 - RNA, 32 nt, Homo Sapiens
caucuacucucuugagccuuuggacuucucuc

SEQ ID NO: 193462 - RNA, 32 nt, Homo Sapiens
gcccuacgcugcccagcgugacuggggccccc

SEQ ID NO: 193463 - RNA, 32 nt, Homo Sapiens
gagcggggagugggggcgaaaaggggggacag

SEQ ID NO: 193464 - RNA, 32 nt, Homo Sapiens
agcccaggcugagacuuuggggacaacaggag

SEQ ID NO: 193465 - RNA, 32 nt, Homo Sapiens
cuucacuguuugaagaaaaacugcuggcucua

SEQ ID NO: 193466 - RNA, 32 nt, Homo Sapiens
uuuguaaaaaucauuauuuguucaaaauguau

SEQ ID NO: 193467 - RNA, 32 nt, Homo Sapiens
aguuuguacuaaauuuaaccgugauauaaaaa

SEQ ID NO: 193468 - RNA, 32 nt, Homo Sapiens
cucccggcccgcccacuacgggcccaggcuag

SEQ ID NO: 193469 - RNA, 32 nt, Homo Sapiens
uccuggauuucccccuugcaacccaggucaga

SEQ ID NO: 193470 - RNA, 32 nt, Homo Sapiens
cgcucuacaccugagucacgagcugcugucca

SEQ ID NO: 193471 - RNA, 32 nt, Homo Sapiens
cauggcuugugcuggccggugugccauauucu

SEQ ID NO: 193472 - RNA, 30 nt, Homo Sapiens
auaccugucugugauuuucggagcuggggg

SEQ ID NO: 193473 - RNA, 30 nt, Homo Sapiens
gucagucuggacugaggaugccgggugccu

SEQ ID NO: 193474 - RNA, 32 nt, Homo Sapiens
ggcugggcuacaauuuguuaauuccuaugaag

SEQ ID NO: 193475 - RNA, 32 nt, Homo Sapiens
auuguccguuugcuaugccgaaugcagccaaa

SEQ ID NO: 193476 - RNA, 32 nt, Homo Sapiens
auuucuguaacacacuaacaaaagcaugaaaa

SEQ ID NO: 193477 - RNA, 32 nt, Homo Sapiens
gacggucuggucuugcaggcagaggcccagag

SEQ ID NO: 193478 - RNA, 32 nt, Homo Sapiens
ucggcugguccuguggggcccuggacgguggc

SEQ ID NO: 193479 - RNA, 32 nt, Homo Sapiens
augaaggccuacgagugcggcgcggccugaag

SEQ ID NO: 193480 - RNA, 31 nt, Homo Sapiens
uugcuucuugguauucauucagaguggauuu

SEQ ID NO: 193481 - RNA, 32 nt, Homo Sapiens
cagaccgagagcugcucugcggcggccagaga

SEQ ID NO: 193482 - RNA, 31 nt, Homo Sapiens
aaccgcgggagcagccaaguggacuggacuc

SEQ ID NO: 193483 - RNA, 32 nt, Homo Sapiens
ucccucugcccccaucccgcacccuuccaccu

SEQ ID NO: 193484 - RNA, 32 nt, Homo Sapiens
ugauuacguguauguuucuucuuucuuuuaag

SEQ ID NO: 193485 - RNA, 32 nt, Homo Sapiens
ccagagcgcuggccaccucgccgcccagcuca

SEQ ID NO: 193486 - RNA, 32 nt, Homo Sapiens
gcuuuacuaacauauugaaauggcucuaccca

SEQ ID NO: 193487 - RNA, 32 nt, Homo Sapiens
caacucccaaccccgaaucuuugcagccguuc

SEQ ID NO: 193488 - RNA, 32 nt, Homo Sapiens
uuuaaauacagcuuuuaaaaacaaaaacaggg

SEQ ID NO: 193489 - RNA, 32 nt, Homo Sapiens
uguacuugacuucuugacgcauggcugaccuc

SEQ ID NO: 193490 - RNA, 32 nt, Homo Sapiens
cuucagccaucuugcccgcucaucucuaaaau

SEQ ID NO: 193491 - RNA, 32 nt, Homo Sapiens
ugucggaagucgcuccucccccuuccuucgcu

SEQ ID NO: 193492 - RNA, 32 nt, Homo Sapiens
gauaaauucuaccauuuucauuucacuuucug

SEQ ID NO: 193493 - RNA, 29 nt, Homo Sapiens
uuuuguucuauccaggcuuucagaugauu

SEQ ID NO: 193494 - RNA, 32 nt, Homo Sapiens
uguauuuuucccuugcuuuuggggguucagag

SEQ ID NO: 193495 - RNA, 32 nt, Homo Sapiens
uagaccuagaauauuuguccuuucucaagagc

SEQ ID NO: 193496 - RNA, 32 nt, Homo Sapiens
gccaagaaauagauuaaaauauuuucaagacc

SEQ ID NO: 193497 - RNA, 32 nt, Homo Sapiens
guuacuacuucuuuuugguucuuucuuuucuu

SEQ ID NO: 193498 - RNA, 32 nt, Homo Sapiens
gaaaggcgcaggggcccaccuacgcgucucac

SEQ ID NO: 193499 - RNA, 32 nt, Homo Sapiens
accagccccucccccugccccaccuccucccu

SEQ ID NO: 193500 - RNA, 32 nt, Homo Sapiens
cggggggcgagggaggggagguggccgucggu

SEQ ID NO: 193501 - RNA, 32 nt, Homo Sapiens
cuaccaggcccucuggcauuugcuucaaaccc

SEQ ID NO: 193502 - RNA, 32 nt, Homo Sapiens
uaagucauaauuuaagaugcuauguaucuguu

SEQ ID NO: 193503 - RNA, 32 nt, Homo Sapiens
ggcuaauauggacacuuuggguauuucuaaug

SEQ ID NO: 193504 - RNA, 32 nt, Homo Sapiens
aagauuacccucggucauuccugucaacaagg

SEQ ID NO: 193505 - RNA, 28 nt, Homo Sapiens
agcaugcccgccagcgccccgccgcgcc

SEQ ID NO: 193506 - RNA, 32 nt, Homo Sapiens
uucaaucagguggagcaaggcccucuccuguc

SEQ ID NO: 193507 - RNA, 32 nt, Homo Sapiens
uuaaagaauuguauugaauucuuuuuagauca

SEQ ID NO: 193508 - RNA, 32 nt, Homo Sapiens
auuuugcacacuuuaaaauauuggguuguuuu

SEQ ID NO: 193509 - RNA, 32 nt, Homo Sapiens
cccagaguucccucugccccagccagcgccuc

SEQ ID NO: 193510 - RNA, 32 nt, Homo Sapiens
guguagucagcagggcuggcccugccccaagg

SEQ ID NO: 193511 - RNA, 32 nt, Homo Sapiens
acugucacuagggcaauaaaauuuauacucaa

SEQ ID NO: 193512 - RNA, 32 nt, Homo Sapiens
cuugucaaaugaugucccaucuuaccaugugc

SEQ ID NO: 193513 - RNA, 32 nt, Homo Sapiens
gggggcggggccuugccgcugcggaggccgga

SEQ ID NO: 193514 - RNA, 30 nt, Homo Sapiens
ccauggcuuugugcugcugagucgcucuca

SEQ ID NO: 193515 - RNA, 32 nt, Homo Sapiens
uaccagaagauucauacacuuuugagacucca

SEQ ID NO: 193516 - RNA, 31 nt, Homo Sapiens
uccauccuaaucugaauggugcuguuucuau

SEQ ID NO: 193517 - RNA, 32 nt, Homo Sapiens
caguaacuguggacuuuugcuuccucaccccu

SEQ ID NO: 193518 - RNA, 32 nt, Homo Sapiens
cuaacacuguguuuugucaguucguaaauucc

SEQ ID NO: 193519 - RNA, 32 nt, Homo Sapiens
ccccggcccaggugucucggaggguggcugcc

SEQ ID NO: 193520 - RNA, 32 nt, Homo Sapiens
cgcacugggaagcucggugaaggaccaccacc

SEQ ID NO: 193521 - RNA, 25 nt, Homo Sapiens
auggccauauguauggccauuugua

SEQ ID NO: 193522 - RNA, 32 nt, Homo Sapiens
cuaucuugcuggaagucaugguggcgggccgg

SEQ ID NO: 193523 - RNA, 32 nt, Homo Sapiens
uucuuucaguuauauuuuauggguguguuauu

SEQ ID NO: 193524 - RNA, 32 nt, Homo Sapiens
aagcagaguggaagugguggugcccaggacgc

SEQ ID NO: 193525 - RNA, 32 nt, Homo Sapiens
ccuccuccuaaaugcaggcacuugcuaggaag

SEQ ID NO: 193526 - RNA, 32 nt, Homo Sapiens
agcugaauaaauuuauaaauaucagcauuaag

SEQ ID NO: 193527 - RNA, 32 nt, Homo Sapiens
cacccucacuggaauucucaccaaaaauaguu

SEQ ID NO: 193528 - RNA, 32 nt, Homo Sapiens
gcccaaugccccagcuggccuuccccagccug

SEQ ID NO: 193529 - RNA, 32 nt, Homo Sapiens
uuccauaauuuuaugguauuacacagggaaag

SEQ ID NO: 193530 - RNA, 32 nt, Homo Sapiens
ccauuuccaaaaauaccccaguguuucagaac

SEQ ID NO: 193531 - RNA, 32 nt, Homo Sapiens
cccuaugauguuacagaagagucaauuaagga

SEQ ID NO: 193532 - RNA, 32 nt, Homo Sapiens
uuccugguugguguuaagagaauggcuuaacu

SEQ ID NO: 193533 - RNA, 27 nt, Homo Sapiens
gaaugaaacuaaacagggacauugaag

SEQ ID NO: 193534 - RNA, 32 nt, Homo Sapiens
gcuucugcugcucgccgcucuucggcagggcg

SEQ ID NO: 193535 - RNA, 32 nt, Homo Sapiens
ggagaggcaggcgucaguggcugcgccuccau

SEQ ID NO: 193536 - RNA, 32 nt, Homo Sapiens
ccaucuggccuguccccggagccccggccuca

SEQ ID NO: 193537 - RNA, 29 nt, Homo Sapiens
ucucauauaucuacuuaccauagauaccu

SEQ ID NO: 193538 - RNA, 32 nt, Homo Sapiens
auggcaauuuuuugggcggccccuggacgaag

SEQ ID NO: 193539 - RNA, 32 nt, Homo Sapiens
ccggagaaggugaaauucugugugcucccucc

SEQ ID NO: 193540 - RNA, 32 nt, Homo Sapiens
uguuucucaaggaaaaaaaaaaaaaaaaaaaa

SEQ ID NO: 193541 - RNA, 32 nt, Homo Sapiens
ggagaguggccgugagagugccauccgaaaga

SEQ ID NO: 193542 - RNA, 32 nt, Homo Sapiens
ugauuuauaugaaguuaaaauaaaaaaucagu

SEQ ID NO: 193543 - RNA, 32 nt, Homo Sapiens
cgucgccccagcccgaacccccggcccagggu

SEQ ID NO: 193544 - RNA, 32 nt, Homo Sapiens
uugccacaaaaaucugcaaauuugauaauucu

SEQ ID NO: 193545 - RNA, 32 nt, Homo Sapiens
ccgagcggacgggcucaugaugccucagaucu

SEQ ID NO: 193546 - RNA, 32 nt, Homo Sapiens
ggggagugugacugaggggcgaggguaggcac

SEQ ID NO: 193547 - RNA, 32 nt, Homo Sapiens
ccccgggacaccuguuggagggcggaugggau

SEQ ID NO: 193548 - RNA, 32 nt, Homo Sapiens
gugucccucacagacauucccacugaggauga

SEQ ID NO: 193549 - RNA, 32 nt, Homo Sapiens
aacaacaaaaacaguuaagugaaacaaacaaa

SEQ ID NO: 193550 - RNA, 32 nt, Homo Sapiens
cucugccuuucugcuuuggauguggucucuac

SEQ ID NO: 193551 - RNA, 32 nt, Homo Sapiens
auucaaaaauuaacauuuucaucucaguaagu

SEQ ID NO: 193552 - RNA, 32 nt, Homo Sapiens
uuacaaaauggcaaaacauuuucucuguauuc

SEQ ID NO: 193553 - RNA, 32 nt, Homo Sapiens
auggcucgcuguuguccuccccguuccucaag

SEQ ID NO: 193554 - RNA, 29 nt, Homo Sapiens
aaaugcacaggagugaggacgccgaugac

SEQ ID NO: 193555 - RNA, 32 nt, Homo Sapiens
ccacuguauaaaauaaaccuguuugcuucuua

SEQ ID NO: 193556 - RNA, 32 nt, Homo Sapiens
cccccaugauucaauuacccccaucccacaac

SEQ ID NO: 193557 - RNA, 32 nt, Homo Sapiens
ccaaucgcgaaaccgcgccggcggcggcggcg

SEQ ID NO: 193558 - RNA, 32 nt, Homo Sapiens
cggaggcugugggcugcacauuuugcacuguu

SEQ ID NO: 193559 - RNA, 32 nt, Homo Sapiens
cgucuggcugagcggcagcugcaggaggagca

SEQ ID NO: 193560 - RNA, 32 nt, Homo Sapiens
ccagggguggccucgugggccaggcgcccaug

SEQ ID NO: 193561 - RNA, 32 nt, Homo Sapiens
cauucacgucauccaacacaacauggcuuuca

SEQ ID NO: 193562 - RNA, 32 nt, Homo Sapiens
aucucuucaccucuccuccucuugguccacuu

SEQ ID NO: 193563 - RNA, 32 nt, Homo Sapiens
guaaauggaaaacaauacguaugucauggaua

SEQ ID NO: 193564 - RNA, 32 nt, Homo Sapiens
uaauauuuuuugucuguaaauauguuguuacc

SEQ ID NO: 193565 - RNA, 32 nt, Homo Sapiens
aaagagauacucucagaaaaaagucauuggcu

SEQ ID NO: 193566 - RNA, 32 nt, Homo Sapiens
uggcuaaauaaauuaauuuugcuggcuucucu

SEQ ID NO: 193567 - RNA, 32 nt, Homo Sapiens
aaauaauucuugguuuuuaucuaaucagauau

SEQ ID NO: 193568 - RNA, 32 nt, Homo Sapiens
gauuaggaugacugauacagguuuagcuuugu

SEQ ID NO: 193569 - RNA, 32 nt, Homo Sapiens
augacuuaauagugcuuuaaguuugguauauu

SEQ ID NO: 193570 - RNA, 32 nt, Homo Sapiens
gcuaggcugggucauaugacaagcauuagcca

SEQ ID NO: 193571 - RNA, 32 nt, Homo Sapiens
cuuauuaggauuucuguauuugccauuacgcu

SEQ ID NO: 193572 - RNA, 32 nt, Homo Sapiens
caggcuccuguccucagaucccgggaacguca

SEQ ID NO: 193573 - RNA, 32 nt, Homo Sapiens
gguggacgcugaacauaccugcuggagacucu

SEQ ID NO: 193574 - RNA, 32 nt, Homo Sapiens
aaauacucuuuucuuucauacaucucaaugug

SEQ ID NO: 193575 - RNA, 32 nt, Homo Sapiens
aagugccggccgcggaggguccuggccauuuu

SEQ ID NO: 193576 - RNA, 32 nt, Homo Sapiens
cugggacacacaccaagggcacuccugcaggu

SEQ ID NO: 193577 - RNA, 32 nt, Homo Sapiens
ggaggggggugcucgcgccgccgggagaggcg

SEQ ID NO: 193578 - RNA, 32 nt, Homo Sapiens
aggcauugcugagacugccuggcaacggcuga

SEQ ID NO: 193579 - RNA, 32 nt, Homo Sapiens
ugucuaaauauguuauuuuuugagaauauaua

SEQ ID NO: 193580 - RNA, 32 nt, Homo Sapiens
caguuacaagaugaaaucauguuuuuuuaaca

SEQ ID NO: 193581 - RNA, 32 nt, Homo Sapiens
guuaaaguuuuggcaguuuauugauuagucca

SEQ ID NO: 193582 - RNA, 32 nt, Homo Sapiens
ggguccccuuccccggcacccaugcgccgggc

SEQ ID NO: 193583 - RNA, 32 nt, Homo Sapiens
ugaucuuccaaauauuagccaaagaggcauuc

SEQ ID NO: 193584 - RNA, 32 nt, Homo Sapiens
gacaucaccacaucacuguggaggaugaaagc

SEQ ID NO: 193585 - RNA, 32 nt, Homo Sapiens
uucauauaggaauuauuuuuuuuuucauuuaa

SEQ ID NO: 193586 - RNA, 32 nt, Homo Sapiens
ucauauuucauuuaccaauaaacguauuuauu

SEQ ID NO: 193587 - RNA, 32 nt, Homo Sapiens
auuuggucaugaggcaccuugcuggagucuca

SEQ ID NO: 193588 - RNA, 32 nt, Homo Sapiens
gaaaauaaaaauuuagcaaauuguuagccuga

SEQ ID NO: 193589 - RNA, 32 nt, Homo Sapiens
gaagucaggcugcccccuccccagcccccagu

SEQ ID NO: 193590 - RNA, 32 nt, Homo Sapiens
ccgggucugcaccgugcccugacacugacagg

SEQ ID NO: 193591 - RNA, 32 nt, Homo Sapiens
cauuaccugggaaagcccuccucccuccugaa

SEQ ID NO: 193592 - RNA, 32 nt, Homo Sapiens
aagugcauucggugccaacauuuuuuagagcu

SEQ ID NO: 193593 - RNA, 32 nt, Homo Sapiens
gcuacugccccggcuggauugcccucaaaccc

SEQ ID NO: 193594 - RNA, 32 nt, Homo Sapiens
gagugccaggugcauccaagacuuucccuccc

SEQ ID NO: 193595 - RNA, 32 nt, Homo Sapiens
uuuggaauggaauauacuuaugcaaaaccuug

SEQ ID NO: 193596 - RNA, 32 nt, Homo Sapiens
ggagggcggcguggcccggccugguagcgacg

SEQ ID NO: 193597 - RNA, 32 nt, Homo Sapiens
ccuuuuguauaaacaaugugauauugcuucug

SEQ ID NO: 193598 - RNA, 32 nt, Homo Sapiens
gaccacgccgccgcgcgccgggagcugcugag

SEQ ID NO: 193599 - RNA, 32 nt, Homo Sapiens
gccggcggcggacaguggacgcggcggcgagc

SEQ ID NO: 193600 - RNA, 32 nt, Homo Sapiens
gcagccacgcaccucccggugagaagcagagc

SEQ ID NO: 193601 - RNA, 32 nt, Homo Sapiens
ucugagaaagacuauucaaacagucucaggaa

SEQ ID NO: 193602 - RNA, 32 nt, Homo Sapiens
augaacucaagguuagugacucugcaggacuu

SEQ ID NO: 193603 - RNA, 32 nt, Homo Sapiens
caucaaccugggagguaacaaacaggucccgc

SEQ ID NO: 193604 - RNA, 32 nt, Homo Sapiens
ucuauuugggagagaucuuccaauccagagga

SEQ ID NO: 193605 - RNA, 32 nt, Homo Sapiens
accacugcacuccagccugggcgacagaguga

SEQ ID NO: 193606 - RNA, 32 nt, Homo Sapiens
gccugcauucuagugcaaaacaucugaagagc

SEQ ID NO: 193607 - RNA, 32 nt, Homo Sapiens
auuguuuaaguacaggaucaagccuugcuuga

SEQ ID NO: 193608 - RNA, 32 nt, Homo Sapiens
cugcccagagcuccuggaccaaugcaucuucc

SEQ ID NO: 193609 - RNA, 32 nt, Homo Sapiens
ccuuccaugggaguuuccuucucugguaucac

SEQ ID NO: 193610 - RNA, 29 nt, Homo Sapiens
aguggaucuauccaacacagaaacugaac

SEQ ID NO: 193611 - RNA, 32 nt, Homo Sapiens
gcguuccgcccggcuccgcaggcacggccccu

SEQ ID NO: 193612 - RNA, 32 nt, Homo Sapiens
uccuggguucagaugauuccccugccucagcc

SEQ ID NO: 193613 - RNA, 32 nt, Homo Sapiens
uuaacaucuagaccgaacacaaagcauccuuc

SEQ ID NO: 193614 - RNA, 32 nt, Homo Sapiens
aaucugauaucaugugaaaugaggaaauaaga

SEQ ID NO: 193615 - RNA, 32 nt, Homo Sapiens
uggcgcugccuugugcccgcccagcgccuuug

SEQ ID NO: 193616 - RNA, 32 nt, Homo Sapiens
uuucgguagggugaccuuugccccuuggccuu

SEQ ID NO: 193617 - RNA, 32 nt, Homo Sapiens
ucuagacaagauauuguacauaaaagaauuuu

SEQ ID NO: 193618 - RNA, 32 nt, Homo Sapiens
ggcaggcccgugccugguuuugcgucuguucc

SEQ ID NO: 193619 - RNA, 32 nt, Homo Sapiens
ucccgugucagucccuggcccggagccaggcu

SEQ ID NO: 193620 - RNA, 32 nt, Homo Sapiens
uagucaaccccgugagaagcacagccggcccu

SEQ ID NO: 193621 - RNA, 32 nt, Homo Sapiens
aggaaggguccuuacacauuguguccuuugcu

SEQ ID NO: 193622 - RNA, 31 nt, Homo Sapiens
ugacagcagcgcagugccaaugcugaucaca

SEQ ID NO: 193623 - RNA, 32 nt, Homo Sapiens
cuauguaggcugugacuugcgcugcuuuuuua

SEQ ID NO: 193624 - RNA, 32 nt, Homo Sapiens
uggugguccaggucuucaugcugcugugggug

SEQ ID NO: 193625 - RNA, 32 nt, Homo Sapiens
guaaaaucaguaagaccaaaccacuggaaaac

SEQ ID NO: 193626 - RNA, 32 nt, Homo Sapiens
augauguaauauauuucuuuugacuaaaugug

SEQ ID NO: 193627 - RNA, 32 nt, Homo Sapiens
aaccaggauuaaaaguuuuuaaaaauauggua

SEQ ID NO: 193628 - RNA, 32 nt, Homo Sapiens
gaaagagaaaaaagucauacuaauuugcuucu

SEQ ID NO: 193629 - RNA, 32 nt, Homo Sapiens
ucaacucucacuuucuuagaguuuacagaaaa

SEQ ID NO: 193630 - RNA, 32 nt, Homo Sapiens
cugucucagggugaucgugggucucuagccag

SEQ ID NO: 193631 - RNA, 32 nt, Homo Sapiens
aaucaagaaaccccuuuuuuucugucccuucu

SEQ ID NO: 193632 - RNA, 32 nt, Homo Sapiens
ccaggcgcuguuaugacccagccaggugugug

SEQ ID NO: 193633 - RNA, 32 nt, Homo Sapiens
cacacccauggcaaagcaaaacaaaagaggca

SEQ ID NO: 193634 - RNA, 32 nt, Homo Sapiens
gcccgcuccuccccgccgagccggcgccccaa

SEQ ID NO: 193635 - RNA, 32 nt, Homo Sapiens
gagaaguccucugcgugcagugaacgggggag

SEQ ID NO: 193636 - RNA, 32 nt, Homo Sapiens
gcuccaccauagccagacgugccugcuuccac

SEQ ID NO: 193637 - RNA, 32 nt, Homo Sapiens
gugacucagaggcagagcggcgcaagggccaa

SEQ ID NO: 193638 - RNA, 32 nt, Homo Sapiens
uggccuccuuugcccaaguugaaacaggggcc

SEQ ID NO: 193639 - RNA, 32 nt, Homo Sapiens
gucuguuuucuuuuuuguaauguuaaauguua

SEQ ID NO: 193640 - RNA, 32 nt, Homo Sapiens
caaagauguauauuuucuuucuuaaugugauu

SEQ ID NO: 193641 - RNA, 32 nt, Homo Sapiens
auucauuuauucauucaacaaacaguggccga

SEQ ID NO: 193642 - RNA, 32 nt, Homo Sapiens
aaguuagagaauauauuuuugaugguaagacu

SEQ ID NO: 193643 - RNA, 32 nt, Homo Sapiens
ugaaaaucuggcuuucaguguagaacagaaag

SEQ ID NO: 193644 - RNA, 32 nt, Homo Sapiens
aguaacauacucaagacuuuguaucugugcag

SEQ ID NO: 193645 - RNA, 32 nt, Homo Sapiens
cgcugguucccaggggagagccagccgcugcc

SEQ ID NO: 193646 - RNA, 32 nt, Homo Sapiens
gcagagccccggccgggcccagcccucggagu

SEQ ID NO: 193647 - RNA, 32 nt, Homo Sapiens
ucuaugggacucucuguaaauguuuuaaauac

SEQ ID NO: 193648 - RNA, 32 nt, Homo Sapiens
gagccuguccaccagcaggcugcggucccagc

SEQ ID NO: 193649 - RNA, 32 nt, Homo Sapiens
caggaaucaaaauaaacuuaucuacuaagucc

SEQ ID NO: 193650 - RNA, 32 nt, Homo Sapiens
uaggaaaauaaaucaugcuguauguauacaau

SEQ ID NO: 193651 - RNA, 32 nt, Homo Sapiens
aucacugccucucgagucgccaugggcaugug

SEQ ID NO: 193652 - RNA, 32 nt, Homo Sapiens
ugucaggaaaacaaaagcuuaggcuguuaaau

SEQ ID NO: 193653 - RNA, 32 nt, Homo Sapiens
ggcagccacccaccccacgugccaacuucccc

SEQ ID NO: 193654 - RNA, 32 nt, Homo Sapiens
gcgggaugcuggccggccgcgccuggcuucuu

SEQ ID NO: 193655 - RNA, 32 nt, Homo Sapiens
uguagucgaggggccgggagggaggaggggag

SEQ ID NO: 193656 - RNA, 32 nt, Homo Sapiens
agggccuaggaggaccccgggcguggaccacc

SEQ ID NO: 193657 - RNA, 32 nt, Homo Sapiens
cacauaugcacacacacacacacacacccaca

SEQ ID NO: 193658 - RNA, 32 nt, Homo Sapiens
gcuuagaucugaauuuacuuugaaaaacaauu

SEQ ID NO: 193659 - RNA, 32 nt, Homo Sapiens
cacuuuguuuuaaauguggagaagauaacacu

SEQ ID NO: 193660 - RNA, 32 nt, Homo Sapiens
gugcucuucauucucacgggcccgcaaccccu

SEQ ID NO: 193661 - RNA, 32 nt, Homo Sapiens
aucuaagcugucugccacauugaguacagaaa

SEQ ID NO: 193662 - RNA, 27 nt, Homo Sapiens
aauaagcauuaauuuuuuauagccugu

SEQ ID NO: 193663 - RNA, 32 nt, Homo Sapiens
agggaccaaggugguggcgugaccuuaacucu

SEQ ID NO: 193664 - RNA, 32 nt, Homo Sapiens
ccgcagaugggaaccuuaaucuuucuuuucua

SEQ ID NO: 193665 - RNA, 32 nt, Homo Sapiens
uuuuaucauuaggaaacaaaaagaauuuagaa

SEQ ID NO: 193666 - RNA, 32 nt, Homo Sapiens
aagagauaaaauuugccuuaaaacuuaccugg

SEQ ID NO: 193667 - RNA, 32 nt, Homo Sapiens
gaaccugggcuguggcucucugucguuugugg

SEQ ID NO: 193668 - RNA, 32 nt, Homo Sapiens
uaaagaguuuuuguaaaaugauuuuguacaag

SEQ ID NO: 193669 - RNA, 32 nt, Homo Sapiens
gcauaucugaauguaauuugaacuggucauau

SEQ ID NO: 193670 - RNA, 32 nt, Homo Sapiens
gcacucaucccauuggcauggugcuagccgag

SEQ ID NO: 193671 - RNA, 32 nt, Homo Sapiens
uugaacaaauggugccauaguuauuuuucuca

SEQ ID NO: 193672 - RNA, 32 nt, Homo Sapiens
uugccguuggaggcggcugcugcggucuugug

SEQ ID NO: 193673 - RNA, 32 nt, Homo Sapiens
uuuuauuuuuuuucuuuuuuucuucaguggug

SEQ ID NO: 193674 - RNA, 32 nt, Homo Sapiens
uccuauuaggcacaagucggaguuacauuuaa

SEQ ID NO: 193675 - RNA, 32 nt, Homo Sapiens
cacuauccccucuggagggaagaggcaggaaa

SEQ ID NO: 193676 - RNA, 32 nt, Homo Sapiens
accacuggcuuuccugguucuccagcuucaag

SEQ ID NO: 193677 - RNA, 30 nt, Homo Sapiens
uccggacccaggcgcgccccucccgcccca

SEQ ID NO: 193678 - RNA, 32 nt, Homo Sapiens
cuucaucacaaggaauguuuugaaagugucug

SEQ ID NO: 193679 - RNA, 32 nt, Homo Sapiens
aagaaaaaacaaacuaaagacaugugacuuau

SEQ ID NO: 193680 - RNA, 32 nt, Homo Sapiens
uauguguuguacaaaaagaauuauuaaaaaga

SEQ ID NO: 193681 - RNA, 32 nt, Homo Sapiens
uuuaguuguaucuauuuagaaauauguaaaac

SEQ ID NO: 193682 - RNA, 32 nt, Homo Sapiens
cuucagcuccgucucccuugcucuccgcucuu

SEQ ID NO: 193683 - RNA, 32 nt, Homo Sapiens
gcuguuucuuucagaagcugggcugggaugag

SEQ ID NO: 193684 - RNA, 32 nt, Homo Sapiens
ccggaggcggccugggcgauggcggcggaguu

SEQ ID NO: 193685 - RNA, 32 nt, Homo Sapiens
uuaaggaggucugggagaaggguggugagaau

SEQ ID NO: 193686 - RNA, 32 nt, Homo Sapiens
ucucuugagccugggaccccccgguaggagca

SEQ ID NO: 193687 - RNA, 31 nt, Homo Sapiens
agcaagggagagcaagaacgcacaagauaug

SEQ ID NO: 193688 - RNA, 32 nt, Homo Sapiens
uuagaauuuuuaaaaagcacaaaacugcagga

SEQ ID NO: 193689 - RNA, 32 nt, Homo Sapiens
agcccaucaguucccaaauuuauuugguuuca

SEQ ID NO: 193690 - RNA, 32 nt, Homo Sapiens
auguuuuuuaucauucagucugcuuuugggca

SEQ ID NO: 193691 - RNA, 32 nt, Homo Sapiens
gaaacgcuauaagugugauguguguaguaagg

SEQ ID NO: 193692 - RNA, 32 nt, Homo Sapiens
gccggcacgcgcgaggccccccuucugcagag

SEQ ID NO: 193693 - RNA, 32 nt, Homo Sapiens
ccaaaagaggggcgacagaacaugauguugac

SEQ ID NO: 193694 - RNA, 32 nt, Homo Sapiens
ccgcccgcgccgggagaggagggacugccgag

SEQ ID NO: 193695 - RNA, 32 nt, Homo Sapiens
uacauguuugccaguuaauuagggaguuauuu

SEQ ID NO: 193696 - RNA, 32 nt, Homo Sapiens
ggugggcugugccucagcagggucgcaggcau

SEQ ID NO: 193697 - RNA, 32 nt, Homo Sapiens
cucuggcaguguuuaaaaguaucuguuuuucu

SEQ ID NO: 193698 - RNA, 32 nt, Homo Sapiens
uaccccaauguagacccccuuccacagucccc

SEQ ID NO: 193699 - RNA, 32 nt, Homo Sapiens
uuuaugugguuuccucugguuccugccaccac

SEQ ID NO: 193700 - RNA, 32 nt, Homo Sapiens
gucccacuguaauuuccaacuucagccuuccu

SEQ ID NO: 193701 - RNA, 32 nt, Homo Sapiens
cucccaucccuggccuggggccucugggacca

SEQ ID NO: 193702 - RNA, 32 nt, Homo Sapiens
ccacugacuccucuccucucccuuugauugua

SEQ ID NO: 193703 - RNA, 32 nt, Homo Sapiens
gcuagcaggaggcaggaugugauagucuaaga

SEQ ID NO: 193704 - RNA, 32 nt, Homo Sapiens
aacaucaauguuuggaucaaaacaagacccag

SEQ ID NO: 193705 - RNA, 32 nt, Homo Sapiens
uuaagucugggccacuuaauggcugccagcau

SEQ ID NO: 193706 - RNA, 32 nt, Homo Sapiens
cuuugacccagccacuguuagugucgccaccg

SEQ ID NO: 193707 - RNA, 32 nt, Homo Sapiens
aaauggaauuguaagugcuuucaaaggguaau

SEQ ID NO: 193708 - RNA, 32 nt, Homo Sapiens
gcuggugguggcgcgcggcgcggcgcggcgau

SEQ ID NO: 193709 - RNA, 32 nt, Homo Sapiens
ucaugcauaccccccucugugcucuucaaauc

SEQ ID NO: 193710 - RNA, 32 nt, Homo Sapiens
gacgagagggugggaggucccggaguaacuuc

SEQ ID NO: 193711 - RNA, 31 nt, Homo Sapiens
gcagccagaggcaccugcagagccucauggg

SEQ ID NO: 193712 - RNA, 32 nt, Homo Sapiens
cacauaaagcuuguaguuuaaaaaagaaaagc

SEQ ID NO: 193713 - RNA, 32 nt, Homo Sapiens
auggggcgccggacccuggcccugcccugggu

SEQ ID NO: 193714 - RNA, 32 nt, Homo Sapiens
ugagcaggccggaguggauggaugcuguccag

SEQ ID NO: 193715 - RNA, 32 nt, Homo Sapiens
uuccuaaaaaugaaaaguuuguuucauauagu

SEQ ID NO: 193716 - RNA, 32 nt, Homo Sapiens
guucccaggaggagggagugauggauaauguc

SEQ ID NO: 193717 - RNA, 32 nt, Homo Sapiens
cggugugcugucagccucccacaggugguaca

SEQ ID NO: 193718 - RNA, 31 nt, Homo Sapiens
cccagcaagcgcagcgaggcuguggggagac

SEQ ID NO: 193719 - RNA, 32 nt, Homo Sapiens
cccccuccacaccaguggccucgugguuauaa

SEQ ID NO: 193720 - RNA, 32 nt, Homo Sapiens
gucaccaucauuaggugagaaaacagccagcc

SEQ ID NO: 193721 - RNA, 32 nt, Homo Sapiens
gauggugcgccuguuccacacccagcaggcgc

SEQ ID NO: 193722 - RNA, 32 nt, Homo Sapiens
guagagaugaacugugugugaggccaaacugg

SEQ ID NO: 193723 - RNA, 32 nt, Homo Sapiens
ggagguuugcuacaauagcacaugugaucucc

SEQ ID NO: 193724 - RNA, 32 nt, Homo Sapiens
gaccauuucagauaccguccacagccaggacc

SEQ ID NO: 193725 - RNA, 32 nt, Homo Sapiens
gauggacggcaaacagguaaggaguuccaugc

SEQ ID NO: 193726 - RNA, 32 nt, Homo Sapiens
guggggcaagguggcucaugccuuuaauccca

SEQ ID NO: 193727 - RNA, 31 nt, Homo Sapiens
aaggugcaagagguuggcagcuucgauugaa

SEQ ID NO: 193728 - RNA, 32 nt, Homo Sapiens
ggcccggagcgcggcagcccccugcuccgagc

SEQ ID NO: 193729 - RNA, 32 nt, Homo Sapiens
gugucaggccccacacuaagugcucugcucug

SEQ ID NO: 193730 - RNA, 32 nt, Homo Sapiens
aauuuacccaauaauagauauuugaguguaca

SEQ ID NO: 193731 - RNA, 32 nt, Homo Sapiens
ugcuggucaugggacagcuucggggaccagug

SEQ ID NO: 193732 - RNA, 32 nt, Homo Sapiens
ggaggaguggggaccgggcgggggguggagga

SEQ ID NO: 193733 - RNA, 32 nt, Homo Sapiens
augcuacgcuuaaauuuuccuggaguccagau

SEQ ID NO: 193734 - RNA, 32 nt, Homo Sapiens
cugcugcuacugcugcugcugcugccgccgcc

SEQ ID NO: 193735 - RNA, 32 nt, Homo Sapiens
guuggcuuaugccuguaaucccagcacuuugc

SEQ ID NO: 193736 - RNA, 32 nt, Homo Sapiens
uacugggcggagcccugugguggcuguggugc

SEQ ID NO: 193737 - RNA, 32 nt, Homo Sapiens
gcaguggaugauugggcgggggugggggauua

SEQ ID NO: 193738 - RNA, 32 nt, Homo Sapiens
gaguucuagcuaaauauaagugcgacuguaaa

SEQ ID NO: 193739 - RNA, 32 nt, Homo Sapiens
cuuuacagcaaccuaugagguagauaauauug

SEQ ID NO: 193740 - RNA, 32 nt, Homo Sapiens
caccugaaaggacccagaggcauaaauaguau

SEQ ID NO: 193741 - RNA, 32 nt, Homo Sapiens
uguggcccuggcauccaaauggcugcuuuugu

SEQ ID NO: 193742 - RNA, 32 nt, Homo Sapiens
cucaagggcucuugucccgguggaagggacug

SEQ ID NO: 193743 - RNA, 32 nt, Homo Sapiens
augauaggacagaugauggauucuucaccacc

SEQ ID NO: 193744 - RNA, 32 nt, Homo Sapiens
uggugcuguauauaaugcuuugcaguaucugu

SEQ ID NO: 193745 - RNA, 32 nt, Homo Sapiens
uucaccugccagcccugccuccuccuuucucc

SEQ ID NO: 193746 - RNA, 32 nt, Homo Sapiens
gggggcggcuggcgcgagcagcccugggggug

SEQ ID NO: 193747 - RNA, 32 nt, Homo Sapiens
cucugccugccagcggccugcccugcaccgca

SEQ ID NO: 193748 - RNA, 32 nt, Homo Sapiens
augcuguguaauaucaaacacaauuaaaucuc

SEQ ID NO: 193749 - RNA, 32 nt, Homo Sapiens
aaauaagauucuucuuuccuucauuuuaugcu

SEQ ID NO: 193750 - RNA, 31 nt, Homo Sapiens
gggagacagcgcagccauagaggaaguguac

SEQ ID NO: 193751 - RNA, 32 nt, Homo Sapiens
cucauccuaagugccuggcagaugaaggaguu

SEQ ID NO: 193752 - RNA, 32 nt, Homo Sapiens
cacuaugacacauuaccuuuuuagcuauuuuu

SEQ ID NO: 193753 - RNA, 32 nt, Homo Sapiens
gcaaaaaucaguacgaauguaucuccuugaaa

SEQ ID NO: 193754 - RNA, 31 nt, Homo Sapiens
gagcagcugccggacgccugggucaggaauc

SEQ ID NO: 193755 - RNA, 32 nt, Homo Sapiens
acacugucugguuuuaggaucccggagccagg

SEQ ID NO: 193756 - RNA, 32 nt, Homo Sapiens
aaaaauuaaagugaaggaaaauacugaacucu

SEQ ID NO: 193757 - RNA, 32 nt, Homo Sapiens
uauccaguagccaggccaguaggcaguugggg

SEQ ID NO: 193758 - RNA, 32 nt, Homo Sapiens
uuccagaguccuccuuugccugauccuccaac

SEQ ID NO: 193759 - RNA, 32 nt, Homo Sapiens
aagguuuguaaaugcaccaaucagcacuccgu

SEQ ID NO: 193760 - RNA, 32 nt, Homo Sapiens
ccagaaggggagaagcauagagggccugugag

SEQ ID NO: 193761 - RNA, 32 nt, Homo Sapiens
gacccgaagggguggggagccaaggguggacu

SEQ ID NO: 193762 - RNA, 31 nt, Homo Sapiens
ucaccuuauuugacuuuuauaaauacacuua

SEQ ID NO: 193763 - RNA, 32 nt, Homo Sapiens
cuuaguccacaagguccggaugucacucaugu

SEQ ID NO: 193764 - RNA, 32 nt, Homo Sapiens
gccugucagaccuggugacaagugccaaaggc

SEQ ID NO: 193765 - RNA, 32 nt, Homo Sapiens
gaaaaugaaaguguuccuggggugcugucucu

SEQ ID NO: 193766 - RNA, 32 nt, Homo Sapiens
uuuaugaaaaagaugucuguacuaacaggugc

SEQ ID NO: 193767 - RNA, 32 nt, Homo Sapiens
auagaauugccccauccucucuagguuugacc

SEQ ID NO: 193768 - RNA, 32 nt, Homo Sapiens
aaacuggcuaguuaaaaguaaauggcauuuaa

SEQ ID NO: 193769 - RNA, 32 nt, Homo Sapiens
ggcaggcaggagcucugucucccggccuucuc

SEQ ID NO: 193770 - RNA, 32 nt, Homo Sapiens
uguuaccagaagucuacagauaccaaacuuuc

SEQ ID NO: 193771 - RNA, 32 nt, Homo Sapiens
ucccguguuuggggcugaggccugcuggacag

SEQ ID NO: 193772 - RNA, 32 nt, Homo Sapiens
gcugcauguguaggauguaugcuguuuguaca

SEQ ID NO: 193773 - RNA, 32 nt, Homo Sapiens
aauggauaaaaauuauuuugugaucauaacuc

SEQ ID NO: 193774 - RNA, 32 nt, Homo Sapiens
gccucgccacacaugcccuuuguugggcugaa

SEQ ID NO: 193775 - RNA, 32 nt, Homo Sapiens
uuuaaggcaggguuuguuccaaugcauccgug

SEQ ID NO: 193776 - RNA, 32 nt, Homo Sapiens
ucuugacuauaaguuuucccuuuuggaaaaau

SEQ ID NO: 193777 - RNA, 32 nt, Homo Sapiens
guccuggcucugccugucccccaccguuguuc

SEQ ID NO: 193778 - RNA, 32 nt, Homo Sapiens
gcaaccaggaugcaaggucugcgguccagaag

SEQ ID NO: 193779 - RNA, 32 nt, Homo Sapiens
uuuccauucuacuuauggagauccacacauca

SEQ ID NO: 193780 - RNA, 32 nt, Homo Sapiens
aggagggaggaggagacagagaaggcuuucca

SEQ ID NO: 193781 - RNA, 30 nt, Homo Sapiens
cacguccugucagugccgccgccucgccca

SEQ ID NO: 193782 - RNA, 32 nt, Homo Sapiens
augccuugccccaccuuaacugaugacauucc

SEQ ID NO: 193783 - RNA, 32 nt, Homo Sapiens
uguccccgggagggggcggggcagccucgggc

SEQ ID NO: 193784 - RNA, 32 nt, Homo Sapiens
caguuccguucuccucacgggccgaacggaac

SEQ ID NO: 193785 - RNA, 32 nt, Homo Sapiens
cgagcgcauggcggagcgcgacgagcccacgc

SEQ ID NO: 193786 - RNA, 32 nt, Homo Sapiens
cauaucucaacacaauaaaagucauauaaaac

SEQ ID NO: 193787 - RNA, 32 nt, Homo Sapiens
cuuccuuccauugcucccagugccaaacuugg

SEQ ID NO: 193788 - RNA, 32 nt, Homo Sapiens
ugcuguagcugggcaugucuccaggaaccaag

SEQ ID NO: 193789 - RNA, 32 nt, Homo Sapiens
accagagcaugugccagugguuucugucugua

SEQ ID NO: 193790 - RNA, 32 nt, Homo Sapiens
ccaguucuacaccacacccauguggcuucagu

SEQ ID NO: 193791 - RNA, 32 nt, Homo Sapiens
auacuuuuucuuuguucaauuucagagaucaa

SEQ ID NO: 193792 - RNA, 32 nt, Homo Sapiens
uguugcguggugaggccaaugcacgaaaccga

SEQ ID NO: 193793 - RNA, 32 nt, Homo Sapiens
uuguuguuaauguauuuaagcauuuuauaguu

SEQ ID NO: 193794 - RNA, 32 nt, Homo Sapiens
agugcuauguaauuaggagagaauuauuuuac

SEQ ID NO: 193795 - RNA, 32 nt, Homo Sapiens
ggagggcauuuuuaaauuuauuuucaaaauuu

SEQ ID NO: 193796 - RNA, 32 nt, Homo Sapiens
ccuugucuuaggauauucuguagauugauugc

SEQ ID NO: 193797 - RNA, 32 nt, Homo Sapiens
uucaucuuuccacugcgccuccagcgcccccg

SEQ ID NO: 193798 - RNA, 32 nt, Homo Sapiens
ucucucuucccacuuccauucuugcacaccuu

SEQ ID NO: 193799 - RNA, 32 nt, Homo Sapiens
cacacuuggacuggugucucaaaccugccggc

SEQ ID NO: 193800 - RNA, 32 nt, Homo Sapiens
acucggggagcgcucucagcugcgaggggccc

SEQ ID NO: 193801 - RNA, 32 nt, Homo Sapiens
ugccucugcgccucucggggaacacauuccgg

SEQ ID NO: 193802 - RNA, 32 nt, Homo Sapiens
cgucccccgacggccuggggccccaauccaga

SEQ ID NO: 193803 - RNA, 32 nt, Homo Sapiens
augauuacaaauaggugguuaugugggguggu

SEQ ID NO: 193804 - RNA, 32 nt, Homo Sapiens
cccuugggccccagccuccugcucaucccucc

SEQ ID NO: 193805 - RNA, 32 nt, Homo Sapiens
cgccaggacacccgggaagccgaggaauggug

SEQ ID NO: 193806 - RNA, 32 nt, Homo Sapiens
uaacuagagaauaaagcuuuugguuuuauuug

SEQ ID NO: 193807 - RNA, 32 nt, Homo Sapiens
cgggugccaucauggcggacgcggccagucag

SEQ ID NO: 193808 - RNA, 32 nt, Homo Sapiens
ccucggcgcuucuccauggaggaggcggugcg

SEQ ID NO: 193809 - RNA, 32 nt, Homo Sapiens
ugucgcccaagccuccacugccgcugccaccu

SEQ ID NO: 193810 - RNA, 32 nt, Homo Sapiens
gguccccugcaccucuccuguucgguuuagac

SEQ ID NO: 193811 - RNA, 32 nt, Homo Sapiens
cuccaggccaucucauuggcugcuugcaggcu

SEQ ID NO: 193812 - RNA, 32 nt, Homo Sapiens
acuguguguacuguagcaaacuaguuggaaug

SEQ ID NO: 193813 - RNA, 32 nt, Homo Sapiens
cugcugucaggagcaggcagaccuggacucac

SEQ ID NO: 193814 - RNA, 32 nt, Homo Sapiens
ucauuugucggacaccaauuucagaaguuuaa

SEQ ID NO: 193815 - RNA, 32 nt, Homo Sapiens
ggcucacaccuguaauaaucccagcacuuugg

SEQ ID NO: 193816 - RNA, 32 nt, Homo Sapiens
cuguucacuguucaaaaaauacacuuaaugga

SEQ ID NO: 193817 - RNA, 32 nt, Homo Sapiens
acuaaacauucaauuccagagaacccaaaauc

SEQ ID NO: 193818 - RNA, 32 nt, Homo Sapiens
cuugggcaggaggcagggagggguccauuccc

SEQ ID NO: 193819 - RNA, 32 nt, Homo Sapiens
aaagugucugcacaucaccgaacgaugagaga

SEQ ID NO: 193820 - RNA, 32 nt, Homo Sapiens
gcacuggguggaagaaggguaggagggcuauu

SEQ ID NO: 193821 - RNA, 32 nt, Homo Sapiens
ggucgagggaauguugugggcuggggcacacc

SEQ ID NO: 193822 - RNA, 32 nt, Homo Sapiens
gcaccaguuagcccagaugcuucucaucuuug

SEQ ID NO: 193823 - RNA, 32 nt, Homo Sapiens
auguauuuuuaaacuuguauuugggucucccu

SEQ ID NO: 193824 - RNA, 32 nt, Homo Sapiens
uauacccguuugucaucugguuuggcaggacc

SEQ ID NO: 193825 - RNA, 32 nt, Homo Sapiens
cccuuuucuguggcaucugaucugucaucucc

SEQ ID NO: 193826 - RNA, 32 nt, Homo Sapiens
ugggaaggaagagggaacggguccuggcggug

SEQ ID NO: 193827 - RNA, 32 nt, Homo Sapiens
gcacuggauccggauacgugugguggcucacg

SEQ ID NO: 193828 - RNA, 32 nt, Homo Sapiens
cucgcucguccagcccaaccgccccggcggcu

SEQ ID NO: 193829 - RNA, 32 nt, Homo Sapiens
ugggccagaaaagcuuugaggugggaggggcc

SEQ ID NO: 193830 - RNA, 32 nt, Homo Sapiens
agguggcccagcagcaggccgaggagcugccg

SEQ ID NO: 193831 - RNA, 32 nt, Homo Sapiens
uccuaaacauugcuguuauccuguucuuuuuu

SEQ ID NO: 193832 - RNA, 32 nt, Homo Sapiens
cuccgcggccccaagcgcccuccuuuccuccc

SEQ ID NO: 193833 - RNA, 32 nt, Homo Sapiens
augcacaggaggaugcuggcggcacagugagu

SEQ ID NO: 193834 - RNA, 32 nt, Homo Sapiens
caccagcagcaagaggcaaggcaugagacauu

SEQ ID NO: 193835 - RNA, 32 nt, Homo Sapiens
ucccuccucacagauaaaugaaaaguaaguau

SEQ ID NO: 193836 - RNA, 32 nt, Homo Sapiens
aauuauccagacaaaaauaucaauggugcuga

SEQ ID NO: 193837 - RNA, 32 nt, Homo Sapiens
ucugggugucuaggaaucccaccagcuugucu

SEQ ID NO: 193838 - RNA, 32 nt, Homo Sapiens
aucaagguaucuugaugguuauaugugguauu

SEQ ID NO: 193839 - RNA, 32 nt, Homo Sapiens
acccagcuaauuuuuguauuuucaguagagac

SEQ ID NO: 193840 - RNA, 32 nt, Homo Sapiens
gcucaucuguuaugcauagcuuugcacuucaa

SEQ ID NO: 193841 - RNA, 29 nt, Homo Sapiens
augugggguaaaauauauuuucuguucac

SEQ ID NO: 193842 - RNA, 32 nt, Homo Sapiens
cugagugcacuuuacaucuuuauuuaaauuuu

SEQ ID NO: 193843 - RNA, 32 nt, Homo Sapiens
gccugccuugcagaccaaugggcuccauguuc

SEQ ID NO: 193844 - RNA, 32 nt, Homo Sapiens
aacuucacuucaugcugaugauguaucaaauu

SEQ ID NO: 193845 - RNA, 32 nt, Homo Sapiens
ggcaccgcgcccggccccuccucccuuucaau

SEQ ID NO: 193846 - RNA, 32 nt, Homo Sapiens
ucccgccuugcucuucuuggggccugacaggc

SEQ ID NO: 193847 - RNA, 32 nt, Homo Sapiens
aaacaaaggggaggggcaacagagggucccug

SEQ ID NO: 193848 - RNA, 32 nt, Homo Sapiens
ggaaauccauucugcuggcccgccccaccucg

SEQ ID NO: 193849 - RNA, 32 nt, Homo Sapiens
aaugucuucuaaacaauauaaucuaaaaauaa

SEQ ID NO: 193850 - RNA, 32 nt, Homo Sapiens
ccugcuccgcgugcguagcagugucugugccu

SEQ ID NO: 193851 - RNA, 32 nt, Homo Sapiens
ggcccugucuguaauuuuuuuaaguugguuug

SEQ ID NO: 193852 - RNA, 32 nt, Homo Sapiens
cuugauuacugaugaguuugagcaauugucau

SEQ ID NO: 193853 - RNA, 32 nt, Homo Sapiens
gggccugugggcccgcuuucugccgagaugcc

SEQ ID NO: 193854 - RNA, 27 nt, Homo Sapiens
guaccugccuccuucagcccacuagua

SEQ ID NO: 193855 - RNA, 32 nt, Homo Sapiens
cuguuccuuugagugucuucuaacuuuauucu

SEQ ID NO: 193856 - RNA, 32 nt, Homo Sapiens
acccacucugcacccaggauccuaguccccug

SEQ ID NO: 193857 - RNA, 32 nt, Homo Sapiens
gcucccccuccucuccucuccccucugcagau

SEQ ID NO: 193858 - RNA, 32 nt, Homo Sapiens
ccaaugaaaugaaagaggcuggaaauuuggaa

SEQ ID NO: 193859 - RNA, 32 nt, Homo Sapiens
uuuuauaauuuugcuuuucauauuuaaguucu

SEQ ID NO: 193860 - RNA, 31 nt, Homo Sapiens
ugugguuucccauaaggaagcucuucuuccu

SEQ ID NO: 193861 - RNA, 32 nt, Homo Sapiens
cucaaauucaacauauggcucaucucaucuac

SEQ ID NO: 193862 - RNA, 32 nt, Homo Sapiens
gguucugguuguagcucuggccccucccugug

SEQ ID NO: 193863 - RNA, 32 nt, Homo Sapiens
gucagugccguuugcgccaguuggaaucgaag

SEQ ID NO: 193864 - RNA, 32 nt, Homo Sapiens
acaucccagcccauucugcaggucuugcuucu

SEQ ID NO: 193865 - RNA, 32 nt, Homo Sapiens
gggggcuuugcccaaugacuguagcauucaag

SEQ ID NO: 193866 - RNA, 32 nt, Homo Sapiens
ggucuggggcccuccgccgccccuaugcuggg

SEQ ID NO: 193867 - RNA, 32 nt, Homo Sapiens
uaacuauuugauuuuuacuuuaucuccucguu

SEQ ID NO: 193868 - RNA, 31 nt, Homo Sapiens
gcggggcaaagguccgcgggaccgacgcgau

SEQ ID NO: 193869 - RNA, 32 nt, Homo Sapiens
uuagcuggaggcgggcccggggguggagucaa

SEQ ID NO: 193870 - RNA, 32 nt, Homo Sapiens
gcgcgguugcuguuucuucucuggcuccggga

SEQ ID NO: 193871 - RNA, 32 nt, Homo Sapiens
gaauuccccacuucucuuucccacaggugcca

SEQ ID NO: 193872 - RNA, 32 nt, Homo Sapiens
gacuuuuagguaggaugagagcagaagguaga

SEQ ID NO: 193873 - RNA, 32 nt, Homo Sapiens
aagaacagccucuccacccccaagccaggcgg

SEQ ID NO: 193874 - RNA, 32 nt, Homo Sapiens
ucgccagauguccaaugucugacuccugcaua

SEQ ID NO: 193875 - RNA, 31 nt, Homo Sapiens
uuuuuaaugaucaccauucuaacugguguga

SEQ ID NO: 193876 - RNA, 32 nt, Homo Sapiens
aauuguaauguuuuagacuuuacagaaacuuu

SEQ ID NO: 193877 - RNA, 32 nt, Homo Sapiens
ggcagacuggccuggaggaaaugcuagagcag

SEQ ID NO: 193878 - RNA, 32 nt, Homo Sapiens
ggaggaugaugaugaugaugaugacuccucuu

SEQ ID NO: 193879 - RNA, 32 nt, Homo Sapiens
ccugugucuuggcugucauaacuuuuuauuuc

SEQ ID NO: 193880 - RNA, 32 nt, Homo Sapiens
gccugcaaaccacuggccuuguguguauuuaa

SEQ ID NO: 193881 - RNA, 32 nt, Homo Sapiens
uguuagugagcauuauuugaauguguuagaau

SEQ ID NO: 193882 - RNA, 32 nt, Homo Sapiens
aucuugcugcuccgucuuagcauuccaagaga

SEQ ID NO: 193883 - RNA, 28 nt, Homo Sapiens
cgccaagcccucgccaugugacgcccgg

SEQ ID NO: 193884 - RNA, 32 nt, Homo Sapiens
ccgguacggcgacauccgcaccuaccaccccc

SEQ ID NO: 193885 - RNA, 32 nt, Homo Sapiens
gacuuacgcuauagagccuagugaugcuuaca

SEQ ID NO: 193886 - RNA, 32 nt, Homo Sapiens
gaacaagaccugagacuaauuaaugaaggaga

SEQ ID NO: 193887 - RNA, 32 nt, Homo Sapiens
acggcgguguugcuccggcagcguuccuggga

SEQ ID NO: 193888 - RNA, 32 nt, Homo Sapiens
accugaugcuaaaauaugugccucggccacaa

SEQ ID NO: 193889 - RNA, 32 nt, Homo Sapiens
ucaaggcucuggaagcucccagguccuugaag

SEQ ID NO: 193890 - RNA, 32 nt, Homo Sapiens
acuugggcuacuuauuugaucaucauaacagg

SEQ ID NO: 193891 - RNA, 32 nt, Homo Sapiens
cgcugaggccgcggagagugacggcggcccgg

SEQ ID NO: 193892 - RNA, 32 nt, Homo Sapiens
uuauaagagaaauaaacucaaaaugcuguugg

SEQ ID NO: 193893 - RNA, 32 nt, Homo Sapiens
cucaucuuugguggcuagacugcuacggcagc

SEQ ID NO: 193894 - RNA, 32 nt, Homo Sapiens
ugagaagcuuugcagcgccaucugccgguguc

SEQ ID NO: 193895 - RNA, 32 nt, Homo Sapiens
gaaucccuggggaugguguucuccaccgucaa

SEQ ID NO: 193896 - RNA, 32 nt, Homo Sapiens
gacugaagcucuugcagccccugcagacgaga

SEQ ID NO: 193897 - RNA, 32 nt, Homo Sapiens
aaaaaggauuaaggaggaaggauugaaacugg

SEQ ID NO: 193898 - RNA, 32 nt, Homo Sapiens
aacucucccucauuugcuuugcccacagccua

SEQ ID NO: 193899 - RNA, 32 nt, Homo Sapiens
ggcucugagagccccaggacuggcugccccgu

SEQ ID NO: 193900 - RNA, 32 nt, Homo Sapiens
ucaacuccauugacccucuccuuucccagugu

SEQ ID NO: 193901 - RNA, 32 nt, Homo Sapiens
cgucaacaagcacuguucuggaaccuucucuc

SEQ ID NO: 193902 - RNA, 32 nt, Homo Sapiens
cuagccuguuaauuuucuuaguugauuucuga

SEQ ID NO: 193903 - RNA, 32 nt, Homo Sapiens
auccucugucuccuugcuccaauggaggcaga

SEQ ID NO: 193904 - RNA, 31 nt, Homo Sapiens
aacguggauuugacuuaaagaaguaaagagc

SEQ ID NO: 193905 - RNA, 32 nt, Homo Sapiens
caucuggagcuauuuuuaagauguguguguua

SEQ ID NO: 193906 - RNA, 32 nt, Homo Sapiens
ucccuccacccccauucugagucucuguccuu

SEQ ID NO: 193907 - RNA, 32 nt, Homo Sapiens
ugcaucgcgucccaccuccgcggcccugggcg

SEQ ID NO: 193908 - RNA, 32 nt, Homo Sapiens
ugucaucauacaguauauaacacauagagauu

SEQ ID NO: 193909 - RNA, 32 nt, Homo Sapiens
ccuuucucagucccggcccucacugcacccac

SEQ ID NO: 193910 - RNA, 32 nt, Homo Sapiens
gagcagaugcggagccgaguggagggcgcgag

SEQ ID NO: 193911 - RNA, 32 nt, Homo Sapiens
uuuugggaaaucuuuuuguagcuuuuaaagag

SEQ ID NO: 193912 - RNA, 32 nt, Homo Sapiens
ugccuguguaccucagcccaucuuuaaugucc

SEQ ID NO: 193913 - RNA, 32 nt, Homo Sapiens
ugaggagcacggaggagaaggacuggcagauc

SEQ ID NO: 193914 - RNA, 32 nt, Homo Sapiens
gugaccguacauuuuuauacaucuccacucua

SEQ ID NO: 193915 - RNA, 32 nt, Homo Sapiens
gagaacuuccccuaccucccccauggcuggcu

SEQ ID NO: 193916 - RNA, 32 nt, Homo Sapiens
cagagaggcagagggacuaucagggugaagcu

SEQ ID NO: 193917 - RNA, 32 nt, Homo Sapiens
uuuuguuauuuaacaucuuuaauagcacagca

SEQ ID NO: 193918 - RNA, 32 nt, Homo Sapiens
uccgcucgguugcggcgggagccccgggacgg

SEQ ID NO: 193919 - RNA, 32 nt, Homo Sapiens
gcugagggcacccuccuucucugcacccuugg

SEQ ID NO: 193920 - RNA, 32 nt, Homo Sapiens
uguggccggcacccaaaccagacgccauguga

SEQ ID NO: 193921 - RNA, 32 nt, Homo Sapiens
agccuuuucgcauuuuaaucaguuuacuggac

SEQ ID NO: 193922 - RNA, 30 nt, Homo Sapiens
auuucaggugcugcuaggcaaaauaaaacu

SEQ ID NO: 193923 - RNA, 30 nt, Homo Sapiens
ccuaugcgaccgguggcgccggcgcggcuu

SEQ ID NO: 193924 - RNA, 32 nt, Homo Sapiens
gcgccgguggggcggcggcgccagagcugcug

SEQ ID NO: 193925 - RNA, 32 nt, Homo Sapiens
gggaggugggaggggacgucuuauuaacaaac

SEQ ID NO: 193926 - RNA, 32 nt, Homo Sapiens
ccugcacccagcugggcgcagccuuggggccu

SEQ ID NO: 193927 - RNA, 32 nt, Homo Sapiens
ggucuuuaaucauugguucggcugcuuuuaug

SEQ ID NO: 193928 - RNA, 32 nt, Homo Sapiens
uagggauaguaaguacaacauuuuuaacucuc

SEQ ID NO: 193929 - RNA, 32 nt, Homo Sapiens
aucgcuggaaaacagcugcuguuagauguccu

SEQ ID NO: 193930 - RNA, 32 nt, Homo Sapiens
uugccuuucuucugcccuuuccuaggcccagg

SEQ ID NO: 193931 - RNA, 32 nt, Homo Sapiens
uccgaucaccuccagacaccacgcucuccuuu

SEQ ID NO: 193932 - RNA, 31 nt, Homo Sapiens
gcggggagggcgguucauccucuucugcuuc

SEQ ID NO: 193933 - RNA, 32 nt, Homo Sapiens
gcucaguccgcgcggcggcugcgaguaggaag

SEQ ID NO: 193934 - RNA, 32 nt, Homo Sapiens
ccaucgccccacuggucuagccaucaugacac

SEQ ID NO: 193935 - RNA, 32 nt, Homo Sapiens
gggugggcggcgggccaggccuucaguuguuu

SEQ ID NO: 193936 - RNA, 32 nt, Homo Sapiens
ggagaggaaugggaagagugccccagcacgug

SEQ ID NO: 193937 - RNA, 32 nt, Homo Sapiens
ggaaggggguacagaaccugguccugggggcc

SEQ ID NO: 193938 - RNA, 32 nt, Homo Sapiens
uucuuugucccuacauuuugcauugucuuaua

SEQ ID NO: 193939 - RNA, 32 nt, Homo Sapiens
cacgaauugcucacaaggaaguguagccauuu

SEQ ID NO: 193940 - RNA, 32 nt, Homo Sapiens
caugucuguuuuauuuuauuuauuuaucuuuu

SEQ ID NO: 193941 - RNA, 32 nt, Homo Sapiens
acggccgggcgggcggcauggaggcggcgcau

SEQ ID NO: 193942 - RNA, 32 nt, Homo Sapiens
uccagggaagcagaggcagcagcacagcugca

SEQ ID NO: 193943 - RNA, 32 nt, Homo Sapiens
uggcaaccaaggaaaaagaagaccauuuugaa

SEQ ID NO: 193944 - RNA, 32 nt, Homo Sapiens
uggccagagagacgggccucccggaguccagg

SEQ ID NO: 193945 - RNA, 32 nt, Homo Sapiens
uauggcuaaaugaauauacagauucuuaaaca

SEQ ID NO: 193946 - RNA, 32 nt, Homo Sapiens
ccccuccccaaacuuccaacccguuugcucca

SEQ ID NO: 193947 - RNA, 32 nt, Homo Sapiens
ucucuacuggauuagcccuacucuuuccuuuc

SEQ ID NO: 193948 - RNA, 32 nt, Homo Sapiens
cgucaauacaaagggauuuuacugagugggcu

SEQ ID NO: 193949 - RNA, 32 nt, Homo Sapiens
auuaggucaggaguucgagaccagccuggcca

SEQ ID NO: 193950 - RNA, 32 nt, Homo Sapiens
aagggggacaaagggguucagcauuuaagaau

SEQ ID NO: 193951 - RNA, 32 nt, Homo Sapiens
ugugaggacggcuggcggggccgugggagggg

SEQ ID NO: 193952 - RNA, 32 nt, Homo Sapiens
agaggauggcuuuuuuccccuagcauguauca

SEQ ID NO: 193953 - RNA, 32 nt, Homo Sapiens
aaauguuaaaacauacuugacuacuuucagaa

SEQ ID NO: 193954 - RNA, 29 nt, Homo Sapiens
uuuggcagagcuuuucugccgaauguuua

SEQ ID NO: 193955 - RNA, 32 nt, Homo Sapiens
cuauuuacugauuacaucaucugcauuuauag

SEQ ID NO: 193956 - RNA, 32 nt, Homo Sapiens
uuuauuuuucuauguguuuuuugcaacauaug

SEQ ID NO: 193957 - RNA, 32 nt, Homo Sapiens
gcagccgggagcgggggcgcagguguuacugg

SEQ ID NO: 193958 - RNA, 32 nt, Homo Sapiens
auuuaugaaugcaguuuuuucuuaaaauuuau

SEQ ID NO: 193959 - RNA, 32 nt, Homo Sapiens
auauugccuaaugugcaccugugagguguaac

SEQ ID NO: 193960 - RNA, 32 nt, Homo Sapiens
ccucaaguaucuucuauuuuuaucaugaauuc

SEQ ID NO: 193961 - RNA, 32 nt, Homo Sapiens
ugggcggccgcgucaaagagacuuggcccaga

SEQ ID NO: 193962 - RNA, 32 nt, Homo Sapiens
uagaauggaaaacugccuguuccuugaaucug

SEQ ID NO: 193963 - RNA, 32 nt, Homo Sapiens
uaggagaugcaaacagcaucaagugugcggag

SEQ ID NO: 193964 - RNA, 32 nt, Homo Sapiens
gccuucgccucccggguucaagugauucuccu

SEQ ID NO: 193965 - RNA, 31 nt, Homo Sapiens
aaaaaccucaauggcuuuuugcuuuugaagg

SEQ ID NO: 193966 - RNA, 32 nt, Homo Sapiens
aaaaucaaaaacaguaacuauuuuauauggaa

SEQ ID NO: 193967 - RNA, 32 nt, Homo Sapiens
ugcauuccugucauuacccauuguaacagagc

SEQ ID NO: 193968 - RNA, 32 nt, Homo Sapiens
aaugacggagugcuccuucuccaguuccgggu

SEQ ID NO: 193969 - RNA, 32 nt, Homo Sapiens
cuggggcccucccuccgcacccccucgccccg

SEQ ID NO: 193970 - RNA, 32 nt, Homo Sapiens
uuugggcuugccugccagcagugaugucccac

SEQ ID NO: 193971 - RNA, 30 nt, Homo Sapiens
caauaagagaaguucaugcaaaaugaacuu

SEQ ID NO: 193972 - RNA, 32 nt, Homo Sapiens
gucuucccgagccagugugcugagcucuccgc

SEQ ID NO: 193973 - RNA, 32 nt, Homo Sapiens
ucuucugucuuuauaaucuacuccuuguaaag

SEQ ID NO: 193974 - RNA, 32 nt, Homo Sapiens
aagauugcuguaaauauuaagauuuaagauau

SEQ ID NO: 193975 - RNA, 32 nt, Homo Sapiens
ucagcauaauucggaagggaaaacagucgauc

SEQ ID NO: 193976 - RNA, 32 nt, Homo Sapiens
agugccccgagacccacgcacauguuggggcu

SEQ ID NO: 193977 - RNA, 32 nt, Homo Sapiens
ccuuucucuaccagacucuaccucugaaugug

SEQ ID NO: 193978 - RNA, 32 nt, Homo Sapiens
gggaauaugggaagaacaaagcaggugagauc

SEQ ID NO: 193979 - RNA, 32 nt, Homo Sapiens
cgcuccuagaaaacggaaaugcacuuagauug

SEQ ID NO: 193980 - RNA, 30 nt, Homo Sapiens
gucuguugcucagagggggaaacugauguc

SEQ ID NO: 193981 - RNA, 32 nt, Homo Sapiens
gcccgccgagcagccaugagcgagacggucau

SEQ ID NO: 193982 - RNA, 32 nt, Homo Sapiens
cccucaagccccagugggagcacggcccagcu

SEQ ID NO: 193983 - RNA, 31 nt, Homo Sapiens
uuuaguaaaggcugucacucuaucuugggcg

SEQ ID NO: 193984 - RNA, 32 nt, Homo Sapiens
cuuagaguucccucucaggucuuucuggcucu

SEQ ID NO: 193985 - RNA, 32 nt, Homo Sapiens
ggcuuuugguucggcgcagagagacccggggg

SEQ ID NO: 193986 - RNA, 32 nt, Homo Sapiens
ucauaagaguaacagucaucauuuaucaucac

SEQ ID NO: 193987 - RNA, 32 nt, Homo Sapiens
agagaucaugaauuauauaauuuuccaguaua

SEQ ID NO: 193988 - RNA, 32 nt, Homo Sapiens
gcagaggugcucaagccuccucgcgguccgca

SEQ ID NO: 193989 - RNA, 32 nt, Homo Sapiens
gacguuucucauuuguuuuucucacuccuuuu

SEQ ID NO: 193990 - RNA, 32 nt, Homo Sapiens
uuauugaugccucuccucuucuuguucugcug

SEQ ID NO: 193991 - RNA, 32 nt, Homo Sapiens
augugacaucagcggcgccgggcgcuuggggc

SEQ ID NO: 193992 - RNA, 32 nt, Homo Sapiens
ccugacuucuggauaaacuucuuugcagaagc

SEQ ID NO: 193993 - RNA, 32 nt, Homo Sapiens
uccuggaaaaagaacucugaaaaccuggguca

SEQ ID NO: 193994 - RNA, 32 nt, Homo Sapiens
gggaaagaaaagcagaauacuugagaugaaag

SEQ ID NO: 193995 - RNA, 32 nt, Homo Sapiens
acacccucaagguaaacuuauaacuuauaauu

SEQ ID NO: 193996 - RNA, 32 nt, Homo Sapiens
ggugaggacaaggccugaagaugugccugcuu

SEQ ID NO: 193997 - RNA, 32 nt, Homo Sapiens
acugccucuuccugccucuccccacccugccc

SEQ ID NO: 193998 - RNA, 31 nt, Homo Sapiens
gguuauuuuguaaauuaauauuucuuugggg

SEQ ID NO: 193999 - RNA, 32 nt, Homo Sapiens
cuugcugccccugagccucucuaggcagccug

SEQ ID NO: 194000 - RNA, 32 nt, Homo Sapiens
ccacagggaggcaauuccauuucugcccggga

SEQ ID NO: 194001 - RNA, 32 nt, Homo Sapiens
cucgccgcagacuuacuuccccggcucagcag

SEQ ID NO: 194002 - RNA, 32 nt, Homo Sapiens
cuuuauauaccuuaacugggaauuuuuaucau

SEQ ID NO: 194003 - RNA, 32 nt, Homo Sapiens
cuuuuuacccccaagauaucugucuucaguag

SEQ ID NO: 194004 - RNA, 32 nt, Homo Sapiens
ucuaacuuuacuagaauuagguuauuaagcuu

SEQ ID NO: 194005 - RNA, 32 nt, Homo Sapiens
gaguauugugugccuguauuuugacugcgacc

SEQ ID NO: 194006 - RNA, 32 nt, Homo Sapiens
acccccggccaggaggccagaucggugaggug

SEQ ID NO: 194007 - RNA, 32 nt, Homo Sapiens
cuccccccaacgccccaccuccccuucauucc

SEQ ID NO: 194008 - RNA, 32 nt, Homo Sapiens
ugggaacccgcgguggagcgggacacgaacgu

SEQ ID NO: 194009 - RNA, 32 nt, Homo Sapiens
cuuuaccagaaagguagacaaaaaagaagcag

SEQ ID NO: 194010 - RNA, 32 nt, Homo Sapiens
cuccauuuugaucuguacuaagaaaaauuguu

SEQ ID NO: 194011 - RNA, 32 nt, Homo Sapiens
auaaauguauaaaaucuuuucugggugugacg

SEQ ID NO: 194012 - RNA, 29 nt, Homo Sapiens
augcuucuaagauauauccagcugggacu

SEQ ID NO: 194013 - RNA, 29 nt, Homo Sapiens
gggccucagucacagaggagcugggugcc

SEQ ID NO: 194014 - RNA, 32 nt, Homo Sapiens
cugcugggugaccgccauucugcguguguucc

SEQ ID NO: 194015 - RNA, 32 nt, Homo Sapiens
aaacuugucagaaagcacugaacaauuaagaa

SEQ ID NO: 194016 - RNA, 32 nt, Homo Sapiens
gagugggcugauaaacuuguaaauccacacac

SEQ ID NO: 194017 - RNA, 32 nt, Homo Sapiens
uucaggaggcacauggggcgcuuuauggaacg

SEQ ID NO: 194018 - RNA, 32 nt, Homo Sapiens
ugauaacacacacaggagauggaccccagaaa

SEQ ID NO: 194019 - RNA, 32 nt, Homo Sapiens
uuccagcuccagggucucgggcuucagcuuug

SEQ ID NO: 194020 - RNA, 32 nt, Homo Sapiens
uucaaaagaaagcuaaaugcugauugugguuu

SEQ ID NO: 194021 - RNA, 32 nt, Homo Sapiens
aaauuguacuagauugacaauauucaaaauug

SEQ ID NO: 194022 - RNA, 32 nt, Homo Sapiens
uaaugcuggguuugugcgugugugucugcuua

SEQ ID NO: 194023 - RNA, 32 nt, Homo Sapiens
guugauuucugcuuacccaucuucaaaugaaa

SEQ ID NO: 194024 - RNA, 32 nt, Homo Sapiens
aaguuuucauuauaaaccuuauaauaccaguc

SEQ ID NO: 194025 - RNA, 32 nt, Homo Sapiens
gacaacauccacgacgugaugucuagguuggu

SEQ ID NO: 194026 - RNA, 32 nt, Homo Sapiens
aggcucagccccagccuggccuuccuggugcc

SEQ ID NO: 194027 - RNA, 32 nt, Homo Sapiens
aaaaaagcuggguaugguggcuuaugccugua

SEQ ID NO: 194028 - RNA, 32 nt, Homo Sapiens
uugguuaaaagcuucuaaaauauuuuaaaaua

SEQ ID NO: 194029 - RNA, 32 nt, Homo Sapiens
agagacagucuugugagggagaucugggggag

SEQ ID NO: 194030 - RNA, 32 nt, Homo Sapiens
uaaauuaaaaacagaaaacaaagaaaagcuug

SEQ ID NO: 194031 - RNA, 32 nt, Homo Sapiens
cucauggaaucuuuaauuucaaugaacauuac

SEQ ID NO: 194032 - RNA, 30 nt, Homo Sapiens
cagcccugagcagugggggaaucggagacu

SEQ ID NO: 194033 - RNA, 32 nt, Homo Sapiens
ucgacagccuuugguaucuuggaguaugaccc

SEQ ID NO: 194034 - RNA, 32 nt, Homo Sapiens
cugggugucaagagaagaacugucuuuguuuc

SEQ ID NO: 194035 - RNA, 32 nt, Homo Sapiens
ugugaucaagggccuggucuccccucaagaca

SEQ ID NO: 194036 - RNA, 32 nt, Homo Sapiens
ugcugucauaagaaugaauaauaauuauccag

SEQ ID NO: 194037 - RNA, 32 nt, Homo Sapiens
acaacuggguagagggugggagggauuuacuu

SEQ ID NO: 194038 - RNA, 32 nt, Homo Sapiens
ugugcauuuuuacuuuugauagauauuggcaa

SEQ ID NO: 194039 - RNA, 32 nt, Homo Sapiens
accuggugagagauccugagccuguggacucc

SEQ ID NO: 194040 - RNA, 32 nt, Homo Sapiens
gcuauuguaauauuuauauauguaucaaucag

SEQ ID NO: 194041 - RNA, 32 nt, Homo Sapiens
guaguaacaacacuucuggaucuuaggcuuca

SEQ ID NO: 194042 - RNA, 32 nt, Homo Sapiens
auagguaaaaauuaaggauuaguaagaaaaaa

SEQ ID NO: 194043 - RNA, 32 nt, Homo Sapiens
ccgcucccgggccgccccggcgcggggcacag

SEQ ID NO: 194044 - RNA, 32 nt, Homo Sapiens
cucuuuggggacgcgccccccgccgcggcucg

SEQ ID NO: 194045 - RNA, 32 nt, Homo Sapiens
aaugugaguucauuuuccuccauccucagacc

SEQ ID NO: 194046 - RNA, 32 nt, Homo Sapiens
gagucaggaaauggacucgguggcuuuugagg

SEQ ID NO: 194047 - RNA, 32 nt, Homo Sapiens
cuggggagaggccuggggaggcgugguauggg

SEQ ID NO: 194048 - RNA, 32 nt, Homo Sapiens
gccauaaaaaagaauaagauccugucauuagc

SEQ ID NO: 194049 - RNA, 32 nt, Homo Sapiens
augagauggaucaguggauauuaagaugaggu

SEQ ID NO: 194050 - RNA, 32 nt, Homo Sapiens
uugcuuucggaacgcccuugugauuggccgag

SEQ ID NO: 194051 - RNA, 31 nt, Homo Sapiens
gggggagugagcucucucagacccuugaaga

SEQ ID NO: 194052 - RNA, 30 nt, Homo Sapiens
uuuaaagccacauucccccaucuuuauaau

SEQ ID NO: 194053 - RNA, 32 nt, Homo Sapiens
gacacaucucgcgguggcguugccagagugag

SEQ ID NO: 194054 - RNA, 32 nt, Homo Sapiens
gcucuggagcccacuguacuugcucuugaugc

SEQ ID NO: 194055 - RNA, 32 nt, Homo Sapiens
accaggaggcgagagcgcgcauggggagccuc

SEQ ID NO: 194056 - RNA, 32 nt, Homo Sapiens
ccauuuucugguaucacauuuauuuuucaaga

SEQ ID NO: 194057 - RNA, 32 nt, Homo Sapiens
agugguucuggccucccugggauuuggauccu

SEQ ID NO: 194058 - RNA, 32 nt, Homo Sapiens
uaaacuuuguauuuuaauuugcuuuggugaug

SEQ ID NO: 194059 - RNA, 32 nt, Homo Sapiens
gugaaggcgaggggcagaugggaggccacaua

SEQ ID NO: 194060 - RNA, 32 nt, Homo Sapiens
ccuaggccuuguugaaggcuucaucaggaaau

SEQ ID NO: 194061 - RNA, 32 nt, Homo Sapiens
aaggcagagguaugcuccugcuguaaucaggc

SEQ ID NO: 194062 - RNA, 32 nt, Homo Sapiens
cugccggugucugcucuaacagcuggaagaaa

SEQ ID NO: 194063 - RNA, 32 nt, Homo Sapiens
guggcaaacaacaucaggaagaggggggcauc

SEQ ID NO: 194064 - RNA, 32 nt, Homo Sapiens
ugagaauuccucccagugauggucaguauucu

SEQ ID NO: 194065 - RNA, 32 nt, Homo Sapiens
uaaggccucaccacucuaggaaaugaacuagc

SEQ ID NO: 194066 - RNA, 32 nt, Homo Sapiens
uccuuccaucuuccucucuuagaucagcuggu

SEQ ID NO: 194067 - RNA, 32 nt, Homo Sapiens
auacuuuccauaaugaauauaugacuuaauuu

SEQ ID NO: 194068 - RNA, 32 nt, Homo Sapiens
gagcccccguggcuccgccucccggcccuggg

SEQ ID NO: 194069 - RNA, 32 nt, Homo Sapiens
aaagaaaacuuacuguaucauauaacagaaug

SEQ ID NO: 194070 - RNA, 32 nt, Homo Sapiens
acuguauagauauauuuaaaauagagaauacu

SEQ ID NO: 194071 - RNA, 32 nt, Homo Sapiens
aagaagggaaauguggaucaucuuguggaagc

SEQ ID NO: 194072 - RNA, 32 nt, Homo Sapiens
uccccacaccaaucagccaggcugagccccca

SEQ ID NO: 194073 - RNA, 32 nt, Homo Sapiens
guuaugaaauauaauuuuuuuauaucaaagac

SEQ ID NO: 194074 - RNA, 32 nt, Homo Sapiens
agaggggaagcagaaauccaagcaccaccaaa

SEQ ID NO: 194075 - RNA, 32 nt, Homo Sapiens
ggaacuuugucuccgagucggagcagcaugga

SEQ ID NO: 194076 - RNA, 32 nt, Homo Sapiens
gacccaaacaaugcugaugacaaugaucagga

SEQ ID NO: 194077 - RNA, 32 nt, Homo Sapiens
cuaagucauuuucaggggauugaaagacuauu

SEQ ID NO: 194078 - RNA, 32 nt, Homo Sapiens
ccaggggcuccuuugaggaagagugaggucau

SEQ ID NO: 194079 - RNA, 32 nt, Homo Sapiens
aguuuaaacucccucuggcugcugcugcugcu

SEQ ID NO: 194080 - RNA, 32 nt, Homo Sapiens
gccagcaggaggaaugguuguggcccagcggu

SEQ ID NO: 194081 - RNA, 32 nt, Homo Sapiens
guugaauacuguuuuguuuucaucucaagggg

SEQ ID NO: 194082 - RNA, 32 nt, Homo Sapiens
cuggcuuuggaaaaaucucaugaugaaaauuc

SEQ ID NO: 194083 - RNA, 32 nt, Homo Sapiens
ccacaaggaacaauauuuuaaaaaauauuuac

SEQ ID NO: 194084 - RNA, 32 nt, Homo Sapiens
gcccgcccuuccagcccuuccccagccccucc

SEQ ID NO: 194085 - RNA, 32 nt, Homo Sapiens
acaggucaugcaaauuuaagaaaaggcuaaaa

SEQ ID NO: 194086 - RNA, 32 nt, Homo Sapiens
accuaaugucuccuacagaaacaccaucugau

SEQ ID NO: 194087 - RNA, 32 nt, Homo Sapiens
gaaagcccuuuggaauagcaguguuccagugu

SEQ ID NO: 194088 - RNA, 32 nt, Homo Sapiens
aaggugccgccgagcagucuccagcgcaggcu

SEQ ID NO: 194089 - RNA, 32 nt, Homo Sapiens
cgggagucguagggaggacgccgggacaccug

SEQ ID NO: 194090 - RNA, 32 nt, Homo Sapiens
cucuccggcgcgccgccgcguccccagacaaa

SEQ ID NO: 194091 - RNA, 32 nt, Homo Sapiens
aggcggcggcagcggcagcggcugcgggcagc

SEQ ID NO: 194092 - RNA, 32 nt, Homo Sapiens
aucauuucaaccaaaugaauuucaagcaacaa

SEQ ID NO: 194093 - RNA, 32 nt, Homo Sapiens
gccaacaugucuauccugaggaccuuugcugc

SEQ ID NO: 194094 - RNA, 32 nt, Homo Sapiens
ugcuggggcuccgaggcgacggccggggggcg

SEQ ID NO: 194095 - RNA, 32 nt, Homo Sapiens
gugguuuguagagaaaaacuacauuaacuaca

SEQ ID NO: 194096 - RNA, 32 nt, Homo Sapiens
agccgggcaccagacgggaggggcggcgcucg

SEQ ID NO: 194097 - RNA, 32 nt, Homo Sapiens
ccaggcagcggcugagucaguguguguggaau

SEQ ID NO: 194098 - RNA, 32 nt, Homo Sapiens
cuuccgaggggagaggacgggcuggcggggcu

SEQ ID NO: 194099 - RNA, 32 nt, Homo Sapiens
uuuucucacuaccaccugcagggugguguuac

SEQ ID NO: 194100 - RNA, 32 nt, Homo Sapiens
uccgugcucugggcccucuggucccacccaca

SEQ ID NO: 194101 - RNA, 32 nt, Homo Sapiens
gaccacgagagcaucgcgggaccgccaaagga

SEQ ID NO: 194102 - RNA, 32 nt, Homo Sapiens
cccagcacuuugugaggcugaggugggcagau

SEQ ID NO: 194103 - RNA, 32 nt, Homo Sapiens
cagacgcagguucgggaccaugaguuggauuc

SEQ ID NO: 194104 - RNA, 32 nt, Homo Sapiens
gcucccuucuccuggggugauugauggccuga

SEQ ID NO: 194105 - RNA, 32 nt, Homo Sapiens
ucacauccggaaauaaaauagaaauaugucuu

SEQ ID NO: 194106 - RNA, 32 nt, Homo Sapiens
acugcuuaauaaauguuaguaauuuuuaaaac

SEQ ID NO: 194107 - RNA, 32 nt, Homo Sapiens
aauacaagguuauaauaaaacuaagaacuacc

SEQ ID NO: 194108 - RNA, 32 nt, Homo Sapiens
cugugccucccuccccagugcaaaugcaugcu

SEQ ID NO: 194109 - RNA, 32 nt, Homo Sapiens
gagcccggagcucuacucaucauccccaucag

SEQ ID NO: 194110 - RNA, 32 nt, Homo Sapiens
auccagaagccugcccaccuccacccauucug

SEQ ID NO: 194111 - RNA, 32 nt, Homo Sapiens
auguggagcaguuuucucugguucauuugagu

SEQ ID NO: 194112 - RNA, 32 nt, Homo Sapiens
ugccuggugccaugugcuugaugcuguguagg

SEQ ID NO: 194113 - RNA, 32 nt, Homo Sapiens
ccaaaauuaaauuuauguaaaugucuauuuua

SEQ ID NO: 194114 - RNA, 32 nt, Homo Sapiens
ugagaucaccccagccugccccugagccuucu

SEQ ID NO: 194115 - RNA, 32 nt, Homo Sapiens
gucugaugggaggagucgugggagcccagcuc

SEQ ID NO: 194116 - RNA, 32 nt, Homo Sapiens
cucucugccauuucggucccaaggugagcuga

SEQ ID NO: 194117 - RNA, 32 nt, Homo Sapiens
auagccagcuccagagcagcgucugccaccgc

SEQ ID NO: 194118 - RNA, 32 nt, Homo Sapiens
ggauaucagauugguuucccccgguggagccu

SEQ ID NO: 194119 - RNA, 32 nt, Homo Sapiens
uuuccuuuuuuuucuuuuuuuuuuuuuuguua

SEQ ID NO: 194120 - RNA, 32 nt, Homo Sapiens
augagggggaagaaacaaaaacgugauggugc

SEQ ID NO: 194121 - RNA, 32 nt, Homo Sapiens
uacuuucaaccauaagcgguaauagcagagga

SEQ ID NO: 194122 - RNA, 32 nt, Homo Sapiens
aagacgcugaccuggcucucggaaacgcagga

SEQ ID NO: 194123 - RNA, 32 nt, Homo Sapiens
cuggaggacugccugcuugcuuucuggggaca

SEQ ID NO: 194124 - RNA, 31 nt, Homo Sapiens
auccuggaaguaacugcaggaguuggagguc

SEQ ID NO: 194125 - RNA, 32 nt, Homo Sapiens
ccagguucaaggaggcugcuuuuauuauuauu

SEQ ID NO: 194126 - RNA, 28 nt, Homo Sapiens
ggcaugcaacgcgggccgcugucgccca

SEQ ID NO: 194127 - RNA, 32 nt, Homo Sapiens
ugguggcuucguagagugggugcuguucccga

SEQ ID NO: 194128 - RNA, 32 nt, Homo Sapiens
aggggaugaagagggaugauguugacaauuca

SEQ ID NO: 194129 - RNA, 32 nt, Homo Sapiens
gcuaaauguacauuuuaauuuuagacuacuug

SEQ ID NO: 194130 - RNA, 32 nt, Homo Sapiens
gccuaaagcaucacauaguuaacagcagagau

SEQ ID NO: 194131 - RNA, 32 nt, Homo Sapiens
ugcaacauacauggcaacucauuuucacucac

SEQ ID NO: 194132 - RNA, 32 nt, Homo Sapiens
uccuagaaaacagcccugacaaaaaccacuuu

SEQ ID NO: 194133 - RNA, 32 nt, Homo Sapiens
agccuuugacccccaugcugcuuccugagagu

SEQ ID NO: 194134 - RNA, 32 nt, Homo Sapiens
gagccaugauuacuccacugcacuccagccug

SEQ ID NO: 194135 - RNA, 32 nt, Homo Sapiens
cauucucuuuaaccgucugcaggucuaaggau

SEQ ID NO: 194136 - RNA, 32 nt, Homo Sapiens
cuuucuaggaucugggaaugggguggagagga

SEQ ID NO: 194137 - RNA, 32 nt, Homo Sapiens
uucauuuauguccuccugaaaucuucaggaau

SEQ ID NO: 194138 - RNA, 31 nt, Homo Sapiens
caagacgacgacugccugccccuccucgcua

SEQ ID NO: 194139 - RNA, 32 nt, Homo Sapiens
cguuaguauuuuuucaauguuucuguuucagg

SEQ ID NO: 194140 - RNA, 32 nt, Homo Sapiens
agaucccucacaggacccagaagcucaccaaa

SEQ ID NO: 194141 - RNA, 32 nt, Homo Sapiens
ugaaguaacuuuguuugccaaaaaaguuguuu

SEQ ID NO: 194142 - RNA, 32 nt, Homo Sapiens
cuccgugacaucuguggaauuuuuuagcucuu

SEQ ID NO: 194143 - RNA, 32 nt, Homo Sapiens
cuagaaucuauaaaacaaaacugagaacuuca

SEQ ID NO: 194144 - RNA, 32 nt, Homo Sapiens
acucaucgcucuugccaaauaaguucagggua

SEQ ID NO: 194145 - RNA, 32 nt, Homo Sapiens
ucucccuuuagagcccaacuccaggucaaauc

SEQ ID NO: 194146 - RNA, 32 nt, Homo Sapiens
uuuacuuuggcaacaaauauuuauacauacaa

SEQ ID NO: 194147 - RNA, 32 nt, Homo Sapiens
cuccggagcuccccaaagccugcugagcaugg

SEQ ID NO: 194148 - RNA, 32 nt, Homo Sapiens
caaccugagcaagucccggcccugcccucagc

SEQ ID NO: 194149 - RNA, 32 nt, Homo Sapiens
cucgcacccgucugggaauccuggacagcucc

SEQ ID NO: 194150 - RNA, 32 nt, Homo Sapiens
cagaugauguuuccaucuccaaccccuucaug

SEQ ID NO: 194151 - RNA, 32 nt, Homo Sapiens
ucucugcccagcugcugcccuccccaggaggc

SEQ ID NO: 194152 - RNA, 32 nt, Homo Sapiens
uaaugugcucucaaaacauggaaaauaaguuu

SEQ ID NO: 194153 - RNA, 32 nt, Homo Sapiens
uucuccaaagaaugaugagugauucuugggaa

SEQ ID NO: 194154 - RNA, 32 nt, Homo Sapiens
uggauugccugaggucaggaguucaagaccag

SEQ ID NO: 194155 - RNA, 32 nt, Homo Sapiens
cugccucucacggcccucgcgaccacaagccc

SEQ ID NO: 194156 - RNA, 32 nt, Homo Sapiens
ggcagccacggucgcccucccuauuccucuua

SEQ ID NO: 194157 - RNA, 32 nt, Homo Sapiens
cuaccuguacuaugacagcugagcugaacacc

SEQ ID NO: 194158 - RNA, 32 nt, Homo Sapiens
accucccggacggggcggcuggccgggcaggg

SEQ ID NO: 194159 - RNA, 32 nt, Homo Sapiens
uuuauuuguaaaaaguuaaaugagaguggguc

SEQ ID NO: 194160 - RNA, 32 nt, Homo Sapiens
cagaagugaagagggggcuagaaggacucuga

SEQ ID NO: 194161 - RNA, 32 nt, Homo Sapiens
cuuuggaaucaaacagaguugcaaucaaaccu

SEQ ID NO: 194162 - RNA, 32 nt, Homo Sapiens
aucaagagcuacugugaggauauccuaagacg

SEQ ID NO: 194163 - RNA, 32 nt, Homo Sapiens
gccaagcagacacaccugcccuccccagccag

SEQ ID NO: 194164 - RNA, 32 nt, Homo Sapiens
cauucccacaugcugccaccggaugcggcagu

SEQ ID NO: 194165 - RNA, 32 nt, Homo Sapiens
accagugagugucuccgaguuccuccucuugg

SEQ ID NO: 194166 - RNA, 32 nt, Homo Sapiens
uggcuuuccugagacuugagguuguggcuuau

SEQ ID NO: 194167 - RNA, 32 nt, Homo Sapiens
guucggagggugggggcgcaggcccgggaggg

SEQ ID NO: 194168 - RNA, 32 nt, Homo Sapiens
cuuaacguuacuuuuccccgcuguaguguagc

SEQ ID NO: 194169 - RNA, 32 nt, Homo Sapiens
gcgcuguccgcccuuccccuagcguuacuucc

SEQ ID NO: 194170 - RNA, 32 nt, Homo Sapiens
cuccuaugugaugcugaagaccaagagaguga

SEQ ID NO: 194171 - RNA, 32 nt, Homo Sapiens
augguuccauucucucuccuguacuuuuucca

SEQ ID NO: 194172 - RNA, 32 nt, Homo Sapiens
ugaagaggcaguggcgcccgcggccgcagcgu

SEQ ID NO: 194173 - RNA, 32 nt, Homo Sapiens
ugggcucuaagucauuauucucucaguuacuc

SEQ ID NO: 194174 - RNA, 32 nt, Homo Sapiens
cuauaaaucuucauagguuauuuugauucuuc

SEQ ID NO: 194175 - RNA, 32 nt, Homo Sapiens
cccuguucuucccaacucuccucccuagcuag

SEQ ID NO: 194176 - RNA, 32 nt, Homo Sapiens
ggcugagaaacacugauagaccaagagguggc

SEQ ID NO: 194177 - RNA, 32 nt, Homo Sapiens
gucccaccuccccccacccccaucuccaggag

SEQ ID NO: 194178 - RNA, 32 nt, Homo Sapiens
cgaaguauauauaaaaggaauuacuguaaacu

SEQ ID NO: 194179 - RNA, 32 nt, Homo Sapiens
auaguagaagcagugaugauauucagauuguu

SEQ ID NO: 194180 - RNA, 32 nt, Homo Sapiens
agugccgucccggcgcccgaccgcccacccau

SEQ ID NO: 194181 - RNA, 32 nt, Homo Sapiens
cauuauuucugcauaucagggacuauuaguau

SEQ ID NO: 194182 - RNA, 32 nt, Homo Sapiens
uggguucucccucuuugccuaggcuagaguac

SEQ ID NO: 194183 - RNA, 32 nt, Homo Sapiens
cagucacuuuauuuauuuuaaaucucucuagg

SEQ ID NO: 194184 - RNA, 32 nt, Homo Sapiens
gagccaggcugccaggcgcccgggauccagcu

SEQ ID NO: 194185 - RNA, 32 nt, Homo Sapiens
cugccagagugaugggggcgcuuggcgaggcc

SEQ ID NO: 194186 - RNA, 32 nt, Homo Sapiens
acugacagaccccaggaccagcccuggggcuc

SEQ ID NO: 194187 - RNA, 32 nt, Homo Sapiens
gagugaggcccucggcagcugcagccggggug

SEQ ID NO: 194188 - RNA, 30 nt, Homo Sapiens
uccccacugucaaugggggauugucccagc

SEQ ID NO: 194189 - RNA, 32 nt, Homo Sapiens
gaaaccacaugugucuacuucauuucugucac

SEQ ID NO: 194190 - RNA, 32 nt, Homo Sapiens
acacuaacaaggaaacaaauucaaggacaacc

SEQ ID NO: 194191 - RNA, 32 nt, Homo Sapiens
cgcgcaggagggaggagaacugggggcgcggg

SEQ ID NO: 194192 - RNA, 32 nt, Homo Sapiens
cugcagccugcggggggacgccgaggagccua

SEQ ID NO: 194193 - RNA, 32 nt, Homo Sapiens
augagaauccaaagaaugauguguguaaggga

SEQ ID NO: 194194 - RNA, 32 nt, Homo Sapiens
aggaagaagauaagaaaauacagcuagccaag

SEQ ID NO: 194195 - RNA, 32 nt, Homo Sapiens
aauuuuuucuucaauuuuuaaguaaacgucuu

SEQ ID NO: 194196 - RNA, 32 nt, Homo Sapiens
auuuuggcuuugugauccucaguguccagugu

SEQ ID NO: 194197 - RNA, 32 nt, Homo Sapiens
agcugaacaaggaaacugaggaaucacccaaa

SEQ ID NO: 194198 - RNA, 32 nt, Homo Sapiens
ucccuucccucccccauaccuagcccgagucu

SEQ ID NO: 194199 - RNA, 32 nt, Homo Sapiens
guucagggccgcggccucgugcugcugccgca

SEQ ID NO: 194200 - RNA, 32 nt, Homo Sapiens
ccagcauguauauaacauaauuuuuagcauuu

SEQ ID NO: 194201 - RNA, 32 nt, Homo Sapiens
guaguucaucuaggaaacuguccugggaacca

SEQ ID NO: 194202 - RNA, 32 nt, Homo Sapiens
ucuuccccucugcggcuuucacugcugaguuu

SEQ ID NO: 194203 - RNA, 32 nt, Homo Sapiens
uugcacuuuuccccccuuuuuccauuaaaaca

SEQ ID NO: 194204 - RNA, 32 nt, Homo Sapiens
gagccuccgcgcccggcccccuugcaguucuc

SEQ ID NO: 194205 - RNA, 32 nt, Homo Sapiens
aggaacagcgggcccuggcagccccggaagca

SEQ ID NO: 194206 - RNA, 32 nt, Homo Sapiens
cgugagagcacuuuucugagcccgaguugcuu

SEQ ID NO: 194207 - RNA, 32 nt, Homo Sapiens
cucuuccccccaacacuuucucuucuuagucu

SEQ ID NO: 194208 - RNA, 32 nt, Homo Sapiens
acacauuggugcaugcacacacaccccacucu

SEQ ID NO: 194209 - RNA, 32 nt, Homo Sapiens
ccucaucuggucgggggcgggggcggcaggag

SEQ ID NO: 194210 - RNA, 32 nt, Homo Sapiens
guaggaauuuaaaaagccaaaauacuaauuau

SEQ ID NO: 194211 - RNA, 32 nt, Homo Sapiens
aaggaccaaacugcacccuuucuugggugagu

SEQ ID NO: 194212 - RNA, 31 nt, Homo Sapiens
ccccacgcacccucagucaggcgcaggcagc

SEQ ID NO: 194213 - RNA, 32 nt, Homo Sapiens
uaugucggugugccuagguagcuccucagccu

SEQ ID NO: 194214 - RNA, 32 nt, Homo Sapiens
ggaggugacagaguugcuucuaugauggugaa

SEQ ID NO: 194215 - RNA, 32 nt, Homo Sapiens
agaaaaaaaagacuuguuucugaucuaauauc

SEQ ID NO: 194216 - RNA, 32 nt, Homo Sapiens
caucggguuccuggcacagccccuccugucca

SEQ ID NO: 194217 - RNA, 32 nt, Homo Sapiens
ugaagacaggacuuaggucuccuccucccgaa

SEQ ID NO: 194218 - RNA, 32 nt, Homo Sapiens
ccuuuuccagcauccugugagagaccagagag

SEQ ID NO: 194219 - RNA, 32 nt, Homo Sapiens
aacuuugacagcugagagugggcuugcaagaa

SEQ ID NO: 194220 - RNA, 32 nt, Homo Sapiens
gugcaaguggcccaggcugguacucuaacaca

SEQ ID NO: 194221 - RNA, 32 nt, Homo Sapiens
ugaaguuuucccuuuuugccaguaaaccaaaa

SEQ ID NO: 194222 - RNA, 32 nt, Homo Sapiens
uuuguuuuuaauaaauacaaccugauuuaaga

SEQ ID NO: 194223 - RNA, 32 nt, Homo Sapiens
uuuuauccaaaagaaggaccuggaggaggaug

SEQ ID NO: 194224 - RNA, 32 nt, Homo Sapiens
cccuacgucuggaugccugggcuucacacaag

SEQ ID NO: 194225 - RNA, 32 nt, Homo Sapiens
gauuucuguuuaggaagaucacuggccaggcg

SEQ ID NO: 194226 - RNA, 32 nt, Homo Sapiens
gaauucagacuccugggcuuaagggauccuuc

SEQ ID NO: 194227 - RNA, 32 nt, Homo Sapiens
uuuuaguagagaugggguuuugccauauuggc

SEQ ID NO: 194228 - RNA, 32 nt, Homo Sapiens
acgcgcuugcagucgccgucucuugcuucccc

SEQ ID NO: 194229 - RNA, 32 nt, Homo Sapiens
acauuggacuacuaauuaguaagauuuuugua

SEQ ID NO: 194230 - RNA, 32 nt, Homo Sapiens
cagccucccaaguagcugggaccaccaugccc

SEQ ID NO: 194231 - RNA, 31 nt, Homo Sapiens
caauucaaauaaaaacgaaacugugucaguu

SEQ ID NO: 194232 - RNA, 32 nt, Homo Sapiens
cugaaggagugggaaacuuugcccaagcaaug

SEQ ID NO: 194233 - RNA, 32 nt, Homo Sapiens
ugaagaggaaaaaguucaaaaaauaauuacau

SEQ ID NO: 194234 - RNA, 32 nt, Homo Sapiens
gugaagugagcuugcugugacugcuucuucag

SEQ ID NO: 194235 - RNA, 32 nt, Homo Sapiens
aauggaacaacaaagcuuggaugacagcauau

SEQ ID NO: 194236 - RNA, 32 nt, Homo Sapiens
auaacuuguuuuuauuguuggugcauauuagu

SEQ ID NO: 194237 - RNA, 32 nt, Homo Sapiens
cuggggguggagaggccaucccggggcguccc

SEQ ID NO: 194238 - RNA, 32 nt, Homo Sapiens
uuuuuucacacaguaaaaauucuuaucauuca

SEQ ID NO: 194239 - RNA, 32 nt, Homo Sapiens
ucauguucuuguaagucauucuuaauugacca

SEQ ID NO: 194240 - RNA, 32 nt, Homo Sapiens
gucuaguaaaagcaggcaaacacauaucuuuc

SEQ ID NO: 194241 - RNA, 32 nt, Homo Sapiens
agcccggcuguguccccggcgccccggaccac

SEQ ID NO: 194242 - RNA, 32 nt, Homo Sapiens
guggugggucauuguagaaaauuuagagaaua

SEQ ID NO: 194243 - RNA, 32 nt, Homo Sapiens
uauuggugaaggaaacagcugcugcugcuucu

SEQ ID NO: 194244 - RNA, 32 nt, Homo Sapiens
uuucacaaucucagccagccugcggugugacc

SEQ ID NO: 194245 - RNA, 32 nt, Homo Sapiens
cagagcagaugaugaugaagaaaaugaaaguc

SEQ ID NO: 194246 - RNA, 32 nt, Homo Sapiens
cugugccuucagcuguugcagaugaaauguuc

SEQ ID NO: 194247 - RNA, 32 nt, Homo Sapiens
cgggcgucggagcugcccgcugugggagagag

SEQ ID NO: 194248 - RNA, 30 nt, Homo Sapiens
augacauggagaucugugcagaugagcuca

SEQ ID NO: 194249 - RNA, 32 nt, Homo Sapiens
cuagcuucccagccuacaucuuucucccaugc

SEQ ID NO: 194250 - RNA, 32 nt, Homo Sapiens
uuaaaagaucaaaacaaacaaacaaaaaaaac

SEQ ID NO: 194251 - RNA, 32 nt, Homo Sapiens
gggaggauuuauuaauaagaauauggaaggca

SEQ ID NO: 194252 - RNA, 32 nt, Homo Sapiens
gguaaucucacagauuuagaaauguuucgcca

SEQ ID NO: 194253 - RNA, 32 nt, Homo Sapiens
uuuuggaaggcacuucuccugccuccugggag

SEQ ID NO: 194254 - RNA, 32 nt, Homo Sapiens
aacucuacugaauaaucaaagaucaucuuaga

SEQ ID NO: 194255 - RNA, 31 nt, Homo Sapiens
gagagaucaaagaaagaauagaacgaguuaa

SEQ ID NO: 194256 - RNA, 32 nt, Homo Sapiens
gggcugugucuccucacuugguuucaggaaug

SEQ ID NO: 194257 - RNA, 32 nt, Homo Sapiens
cccgggcggcagcggcagcaguagcggcagcc

SEQ ID NO: 194258 - RNA, 32 nt, Homo Sapiens
agcuguaauaucuauuuuuguuuuugucuuuu

SEQ ID NO: 194259 - RNA, 32 nt, Homo Sapiens
agccauuucuaaaaugcccuuuaaccaguuaa

SEQ ID NO: 194260 - RNA, 32 nt, Homo Sapiens
aguaaggcuuuuguguauuuaauccuaaaggu

SEQ ID NO: 194261 - RNA, 32 nt, Homo Sapiens
cuggcuucuccuucagcccauccacucuccuc

SEQ ID NO: 194262 - RNA, 32 nt, Homo Sapiens
cagacauuuuuggcagagcauagaugaaaaug

SEQ ID NO: 194263 - RNA, 32 nt, Homo Sapiens
gaccuuccucgcgggccggagcgcggagcgcu

SEQ ID NO: 194264 - RNA, 32 nt, Homo Sapiens
cccuuaggguaggagucgcgccggcagcagcc

SEQ ID NO: 194265 - RNA, 32 nt, Homo Sapiens
gccaccccacccagcgcugccagggagccgcc

SEQ ID NO: 194266 - RNA, 32 nt, Homo Sapiens
uuuuauuuucaugauauguauuuuuucuaugu

SEQ ID NO: 194267 - RNA, 32 nt, Homo Sapiens
ggcaggagggguuggcggggcagcagggccgc

SEQ ID NO: 194268 - RNA, 32 nt, Homo Sapiens
gccuccucagcuuugcuucauguucgagcuua

SEQ ID NO: 194269 - RNA, 32 nt, Homo Sapiens
cgacuaccgagaaaauguguucaagcuccucc

SEQ ID NO: 194270 - RNA, 32 nt, Homo Sapiens
aaagcuauacugauuagaaaugucuggccucu

SEQ ID NO: 194271 - RNA, 32 nt, Homo Sapiens
gaagaguguugcacccuuuugggccuagaauu

SEQ ID NO: 194272 - RNA, 32 nt, Homo Sapiens
ugccccuuucaucucccagcagcccucaggag

SEQ ID NO: 194273 - RNA, 31 nt, Homo Sapiens
augcguuugugcuuccucucaguccacuuuc

SEQ ID NO: 194274 - RNA, 32 nt, Homo Sapiens
gguggagauuaccaggguagacucgcucuggc

SEQ ID NO: 194275 - RNA, 32 nt, Homo Sapiens
uagcagcuuccacuucuagggaggccucagga

SEQ ID NO: 194276 - RNA, 32 nt, Homo Sapiens
augauuuuuguuuuccuuuuucugggauguac

SEQ ID NO: 194277 - RNA, 32 nt, Homo Sapiens
caaggaaauguaccucuuucuucagaauuaaa

SEQ ID NO: 194278 - RNA, 32 nt, Homo Sapiens
auagauguucauauugaagcagucacauuugu

SEQ ID NO: 194279 - RNA, 32 nt, Homo Sapiens
ucauagaccaucagacgcuugucgaaggcagg

SEQ ID NO: 194280 - RNA, 32 nt, Homo Sapiens
caguggauggugcugucuaugcacagguguga

SEQ ID NO: 194281 - RNA, 32 nt, Homo Sapiens
ggggugaauauuuuauacuguaagugagcaau

SEQ ID NO: 194282 - RNA, 32 nt, Homo Sapiens
gagcugcugcaagccagagggaggaaggggga

SEQ ID NO: 194283 - RNA, 32 nt, Homo Sapiens
cuuuagcucccuccugcccuugcuagggucug

SEQ ID NO: 194284 - RNA, 32 nt, Homo Sapiens
gggcagcuguggcuucuaggggcccgcguggc

SEQ ID NO: 194285 - RNA, 32 nt, Homo Sapiens
agaacaugccagcagguuggcuaaugcuaugg

SEQ ID NO: 194286 - RNA, 32 nt, Homo Sapiens
gugcuguacgggggcgcccggggacaggaggg

SEQ ID NO: 194287 - RNA, 32 nt, Homo Sapiens
agaugcaacuuuuguuccuccucccccacccc

SEQ ID NO: 194288 - RNA, 32 nt, Homo Sapiens
accuguuaggauuggagggucugggugggccu

SEQ ID NO: 194289 - RNA, 32 nt, Homo Sapiens
agcaauaagaauguccuagaguuuacacaucu

SEQ ID NO: 194290 - RNA, 32 nt, Homo Sapiens
uguugcagguagagaggugcagcaaauagaga

SEQ ID NO: 194291 - RNA, 32 nt, Homo Sapiens
auccugcauucccacccagcgcgcagucucca

SEQ ID NO: 194292 - RNA, 32 nt, Homo Sapiens
augucuuuaaacagugccgguaguacagauaa

SEQ ID NO: 194293 - RNA, 32 nt, Homo Sapiens
gacgggcggcagccgccucugcgcggaccggg

SEQ ID NO: 194294 - RNA, 32 nt, Homo Sapiens
auauuaguaccagaaguagauacuauaaaucu

SEQ ID NO: 194295 - RNA, 32 nt, Homo Sapiens
cuuuucacucccauuccuuagcuuuagucuaa

SEQ ID NO: 194296 - RNA, 32 nt, Homo Sapiens
caugggucgggggugcccacucaggaugcagg

SEQ ID NO: 194297 - RNA, 32 nt, Homo Sapiens
cugucucucucgggccuuggcuccuugaacuu

SEQ ID NO: 194298 - RNA, 32 nt, Homo Sapiens
uuuuaaaucuaaauaaagagcaaauuaagcag

SEQ ID NO: 194299 - RNA, 32 nt, Homo Sapiens
cgcucagccuuggcuggaguagaauuaaguca

SEQ ID NO: 194300 - RNA, 32 nt, Homo Sapiens
caaacucauguuccagaaccagcaagugcucc

SEQ ID NO: 194301 - RNA, 32 nt, Homo Sapiens
cacuucuggggccagccccuccccgccuccuc

SEQ ID NO: 194302 - RNA, 32 nt, Homo Sapiens
uacuuauuagugaaacaaaaguguccagugac

SEQ ID NO: 194303 - RNA, 32 nt, Homo Sapiens
acaggcugcauucuugccuuacuguauagaaa

SEQ ID NO: 194304 - RNA, 32 nt, Homo Sapiens
gaggugcgcgggaggcgaagccaggcagcgca

SEQ ID NO: 194305 - RNA, 32 nt, Homo Sapiens
agcgcagcccucgcccuccagacauaaugcau

SEQ ID NO: 194306 - RNA, 32 nt, Homo Sapiens
aaacucuaccaucaguuagagcaagaaacagg

SEQ ID NO: 194307 - RNA, 32 nt, Homo Sapiens
gugggcuggcucucugccccaacccugggcac

SEQ ID NO: 194308 - RNA, 32 nt, Homo Sapiens
cuuugaguauuugugauuuucuuacuauauug

SEQ ID NO: 194309 - RNA, 32 nt, Homo Sapiens
ggcauggaggguggagugggccucgggucccc

SEQ ID NO: 194310 - RNA, 32 nt, Homo Sapiens
cauuuguauggauuuuuaaauaaucgaauacu

SEQ ID NO: 194311 - RNA, 32 nt, Homo Sapiens
ccauauggccacuggggugguggcccaucuca

SEQ ID NO: 194312 - RNA, 32 nt, Homo Sapiens
ggcuccugcacuuacuugcuuauuugacaacg

SEQ ID NO: 194313 - RNA, 32 nt, Homo Sapiens
cuguccgugcgcacgcagugcggcguggugcc

SEQ ID NO: 194314 - RNA, 32 nt, Homo Sapiens
aacuuccgcuggcccaaagaaacuauaauuuu

SEQ ID NO: 194315 - RNA, 32 nt, Homo Sapiens
auuguaacauuagcauggacaaaccuggcagg

SEQ ID NO: 194316 - RNA, 32 nt, Homo Sapiens
caaauuacaucauguaauuuggauugacuuug

SEQ ID NO: 194317 - RNA, 32 nt, Homo Sapiens
uuccuccuucuccucuuccuucuuauauaaug

SEQ ID NO: 194318 - RNA, 32 nt, Homo Sapiens
uuuugaaaauggugagauuggugaaucugagg

SEQ ID NO: 194319 - RNA, 32 nt, Homo Sapiens
caguggcacacgcugccaguuccagaccaagu

SEQ ID NO: 194320 - RNA, 32 nt, Homo Sapiens
uuguuuuauuuuauuuuauuuuuugagacaga

SEQ ID NO: 194321 - RNA, 32 nt, Homo Sapiens
cugccuggugcccugucccagccccagguccu

SEQ ID NO: 194322 - RNA, 32 nt, Homo Sapiens
ugucauacaaauuuauaaaggucugcacuccu

SEQ ID NO: 194323 - RNA, 32 nt, Homo Sapiens
gcccaggaaggggaguaacugugcaaaguuuu

SEQ ID NO: 194324 - RNA, 32 nt, Homo Sapiens
ugcccugucccucuccagauguggggcuuucu

SEQ ID NO: 194325 - RNA, 32 nt, Homo Sapiens
uuuucagccaucugaaaggcggguucuuucag

SEQ ID NO: 194326 - RNA, 32 nt, Homo Sapiens
ccucuggggacgggacacagggaagcccgaag

SEQ ID NO: 194327 - RNA, 32 nt, Homo Sapiens
acuagccuccagaucagggcuuccucaccagc

SEQ ID NO: 194328 - RNA, 32 nt, Homo Sapiens
caccccguccgcagccaggaaaagcacaaaga

SEQ ID NO: 194329 - RNA, 32 nt, Homo Sapiens
gauuuuccuauaguaaaagaucuccuaaaugg

SEQ ID NO: 194330 - RNA, 32 nt, Homo Sapiens
ugcuugagccugcagcagcugcaguaagccaa

SEQ ID NO: 194331 - RNA, 32 nt, Homo Sapiens
cagcggggccccagccccggcccccucucucc

SEQ ID NO: 194332 - RNA, 32 nt, Homo Sapiens
caagcccggcucggcccggcccugcucuguuc

SEQ ID NO: 194333 - RNA, 32 nt, Homo Sapiens
uguggggaauaaaaucaagacgugcaagagug

SEQ ID NO: 194334 - RNA, 32 nt, Homo Sapiens
aguaccuuguauuccaucacacagcaaaaucu

SEQ ID NO: 194335 - RNA, 32 nt, Homo Sapiens
ggcugaaacgcgcggcuuugccgucugcgcuc

SEQ ID NO: 194336 - RNA, 32 nt, Homo Sapiens
aauggaagaauauugggaaauaaaccuccucu

SEQ ID NO: 194337 - RNA, 32 nt, Homo Sapiens
uauuccaaguaguauauggacaguccagggcu

SEQ ID NO: 194338 - RNA, 32 nt, Homo Sapiens
acucuugaacagagcaaaaaacaaggaggauu

SEQ ID NO: 194339 - RNA, 32 nt, Homo Sapiens
uuuguuuuaaguauuucagccagaucugcugg

SEQ ID NO: 194340 - RNA, 28 nt, Homo Sapiens
uagacaggaaggccgccggguguuggcc

SEQ ID NO: 194341 - RNA, 32 nt, Homo Sapiens
gaaccccgcucccgcuccgcuucgguucucgc

SEQ ID NO: 194342 - RNA, 32 nt, Homo Sapiens
augcuuagaaggaaaagcuuaccaaaaauaua

SEQ ID NO: 194343 - RNA, 32 nt, Homo Sapiens
uguccgagcggcggucggagccugcugcggca

SEQ ID NO: 194344 - RNA, 32 nt, Homo Sapiens
cagggcagcagagcuaggguccucuuuuaccc

SEQ ID NO: 194345 - RNA, 32 nt, Homo Sapiens
caggcuggucagagggcggggcuggugagggu

SEQ ID NO: 194346 - RNA, 32 nt, Homo Sapiens
gggguugagaauggaauccucuguggaugacg

SEQ ID NO: 194347 - RNA, 32 nt, Homo Sapiens
aucacugcagggacugcagcuaugggauuuua

SEQ ID NO: 194348 - RNA, 32 nt, Homo Sapiens
gacugucauugguaggucaugauccuuggcag

SEQ ID NO: 194349 - RNA, 32 nt, Homo Sapiens
gcuacauuauuucaggauuauauccuacauuu

SEQ ID NO: 194350 - RNA, 30 nt, Homo Sapiens
gucugacaaucgucacgcaagaguacuuac

SEQ ID NO: 194351 - RNA, 32 nt, Homo Sapiens
gggcaggaaggggcaguguccugaagcccauc

SEQ ID NO: 194352 - RNA, 32 nt, Homo Sapiens
ggggacgggccgugggcccccggaacgaggca

SEQ ID NO: 194353 - RNA, 32 nt, Homo Sapiens
ggaagggaagguggcagaaagucucauuucag

SEQ ID NO: 194354 - RNA, 32 nt, Homo Sapiens
guggaaccaacccaaaugcccaucaaugagug

SEQ ID NO: 194355 - RNA, 27 nt, Homo Sapiens
cucucuuaugucuucagccacucacuu

SEQ ID NO: 194356 - RNA, 32 nt, Homo Sapiens
aaacaccauggugugugcaggcgcggagggca

SEQ ID NO: 194357 - RNA, 32 nt, Homo Sapiens
cuguugcccuguaauuaaacugcugcccguag

SEQ ID NO: 194358 - RNA, 32 nt, Homo Sapiens
gugugagugagacuuuuuuacugcgucccguc

SEQ ID NO: 194359 - RNA, 32 nt, Homo Sapiens
caguuuuuucuuuucuuccaaugguacuuuag

SEQ ID NO: 194360 - RNA, 32 nt, Homo Sapiens
uuuggacuacagagugagacuccaucucaaaa

SEQ ID NO: 194361 - RNA, 32 nt, Homo Sapiens
gggcuuggggaggggcuggggguuggacggga

SEQ ID NO: 194362 - RNA, 32 nt, Homo Sapiens
cagaggaagauaauguagugugaaguccccau

SEQ ID NO: 194363 - RNA, 32 nt, Homo Sapiens
guccuuuaaaaguuuaaugauacuucugaugu

SEQ ID NO: 194364 - RNA, 32 nt, Homo Sapiens
ugucucugcgcccgcgggggccgcccgagccg

SEQ ID NO: 194365 - RNA, 32 nt, Homo Sapiens
agcagaauauuuuuaaacauucgcaguuuuuu

SEQ ID NO: 194366 - RNA, 32 nt, Homo Sapiens
uauuuuuaaaagacuacucugaaaaacacucu

SEQ ID NO: 194367 - RNA, 32 nt, Homo Sapiens
agucauucaaaaucaaagccugcacaagaaag

SEQ ID NO: 194368 - RNA, 31 nt, Homo Sapiens
agcccugggucucgccugcccccgcccgguu

SEQ ID NO: 194369 - RNA, 32 nt, Homo Sapiens
uuggauugcuccugggggcccccuggugugcu

SEQ ID NO: 194370 - RNA, 32 nt, Homo Sapiens
cgcggcggcggcggcugcugcagcugcaggag

SEQ ID NO: 194371 - RNA, 26 nt, Homo Sapiens
cauggaggaaauuuaugcgaaguuug

SEQ ID NO: 194372 - RNA, 32 nt, Homo Sapiens
aauaauaguguuugaaaauauagaauccagug

SEQ ID NO: 194373 - RNA, 32 nt, Homo Sapiens
ugucagucuuucuuccaaauaaauagaacuuu

SEQ ID NO: 194374 - RNA, 32 nt, Homo Sapiens
aaacuuuugaaucuuucuuuuauugcuauuua

SEQ ID NO: 194375 - RNA, 32 nt, Homo Sapiens
aaaacccaaagugcugugauguguggcuguga

SEQ ID NO: 194376 - RNA, 32 nt, Homo Sapiens
aauaauguuguuaaagaggcuguuuagcacua

SEQ ID NO: 194377 - RNA, 32 nt, Homo Sapiens
ccagcugauuagcucuguucccaccaggcucg

SEQ ID NO: 194378 - RNA, 32 nt, Homo Sapiens
cggagcccggugccagugccgcccgcagcccg

SEQ ID NO: 194379 - RNA, 32 nt, Homo Sapiens
agccugaccaccauggagaaaccccgucucua

SEQ ID NO: 194380 - RNA, 32 nt, Homo Sapiens
ccacccaaacuuaacauagccuuuuuauacau

SEQ ID NO: 194381 - RNA, 32 nt, Homo Sapiens
agccggcccgccucuccucgguucaaggucac

SEQ ID NO: 194382 - RNA, 32 nt, Homo Sapiens
cagggccggaggagguguaggggcgagagggg

SEQ ID NO: 194383 - RNA, 32 nt, Homo Sapiens
uugaccuuuguacagcccagaggccaacacug

SEQ ID NO: 194384 - RNA, 32 nt, Homo Sapiens
gggccccggaagcuggggagggauggguaccg

SEQ ID NO: 194385 - RNA, 32 nt, Homo Sapiens
gauuucaccauguuggccaggcuggucucgaa

SEQ ID NO: 194386 - RNA, 32 nt, Homo Sapiens
caaaauaaaaauuuaacaaccaaggaauagua

SEQ ID NO: 194387 - RNA, 32 nt, Homo Sapiens
uuagaacaagacagaccugguuaugauuccug

SEQ ID NO: 194388 - RNA, 32 nt, Homo Sapiens
ccgagcggcggcugcgcagucccgcuggggga

SEQ ID NO: 194389 - RNA, 32 nt, Homo Sapiens
augagucuuacagguuucuuccaucuuuaaaa

SEQ ID NO: 194390 - RNA, 32 nt, Homo Sapiens
gguuucaccguguuggccaggcuggucucgaa

SEQ ID NO: 194391 - RNA, 32 nt, Homo Sapiens
cuaaugggaaagggcaccacucuccucagcca

SEQ ID NO: 194392 - RNA, 32 nt, Homo Sapiens
acggcggcggggggagcgcgccaugcccagca

SEQ ID NO: 194393 - RNA, 32 nt, Homo Sapiens
acuccacagggaacugguuucuuggcaauaca

SEQ ID NO: 194394 - RNA, 32 nt, Homo Sapiens
cagcuuccagcaugccccauagggaacauuuu

SEQ ID NO: 194395 - RNA, 31 nt, Homo Sapiens
ugccaugguaacaugcacauccuguuuacac

SEQ ID NO: 194396 - RNA, 32 nt, Homo Sapiens
ccuaaaacaaggaaacaaaaaauaucugugcu

SEQ ID NO: 194397 - RNA, 32 nt, Homo Sapiens
ucuucuuaagugccucuuucagugaucugagg

SEQ ID NO: 194398 - RNA, 32 nt, Homo Sapiens
aauugugaaaaguuuacuaucugaaaauauuu

SEQ ID NO: 194399 - RNA, 32 nt, Homo Sapiens
gaaaaaucuaaugaggaacuaagaggcaaacc

SEQ ID NO: 194400 - RNA, 32 nt, Homo Sapiens
agggacugcuccauaccccaugauggagcaca

SEQ ID NO: 194401 - RNA, 32 nt, Homo Sapiens
ucaaggaggaggagagagauuccgcgagccga

SEQ ID NO: 194402 - RNA, 32 nt, Homo Sapiens
gagcgaaaaguuugaggccggagggagcgagg

SEQ ID NO: 194403 - RNA, 32 nt, Homo Sapiens
auuuauuuuaaagauucaaaggauguucguau

SEQ ID NO: 194404 - RNA, 32 nt, Homo Sapiens
agccccugcuggcccggcgcgcggcgucgcca

SEQ ID NO: 194405 - RNA, 32 nt, Homo Sapiens
ggcacacaaccugaucucuucucaucccacuc

SEQ ID NO: 194406 - RNA, 32 nt, Homo Sapiens
uucaaaggaaaguuuuuaaaauguuuuuaaaa

SEQ ID NO: 194407 - RNA, 32 nt, Homo Sapiens
uuuauuccuucaagguaauauagugcgguggc

SEQ ID NO: 194408 - RNA, 32 nt, Homo Sapiens
gaccugcaagccuggguguccguggguccguc

SEQ ID NO: 194409 - RNA, 32 nt, Homo Sapiens
gucacuuugacaaagaaaagccaaauucuuuu

SEQ ID NO: 194410 - RNA, 32 nt, Homo Sapiens
ccaggagcucacgcugucugcagauccaccac

SEQ ID NO: 194411 - RNA, 32 nt, Homo Sapiens
ccagccccccaucuccgucccauccucccaug

SEQ ID NO: 194412 - RNA, 32 nt, Homo Sapiens
guggagcagcagugucagcaucagggcggaag

SEQ ID NO: 194413 - RNA, 32 nt, Homo Sapiens
ugauuucuuuugcuauuucauugcucuggcua

SEQ ID NO: 194414 - RNA, 32 nt, Homo Sapiens
aaucaaugcauuucugucucuuucuuuagagc

SEQ ID NO: 194415 - RNA, 32 nt, Homo Sapiens
cugccacccgcgcucagcugcccgccuccuca

SEQ ID NO: 194416 - RNA, 32 nt, Homo Sapiens
ugcuccuguggauaacauugcuagcgagccgc

SEQ ID NO: 194417 - RNA, 32 nt, Homo Sapiens
gaagaugaaacgcaggcagaggacacgucaau

SEQ ID NO: 194418 - RNA, 32 nt, Homo Sapiens
gguuuuugaccaaaauacaaugugaauuuauu

SEQ ID NO: 194419 - RNA, 32 nt, Homo Sapiens
uugguuuguaaaauucucuacucuuuuggaau

SEQ ID NO: 194420 - RNA, 32 nt, Homo Sapiens
cauccagccaucucccugggagcguuucauau

SEQ ID NO: 194421 - RNA, 32 nt, Homo Sapiens
acagcaauacuaguaacuucguggaagaacaa

SEQ ID NO: 194422 - RNA, 32 nt, Homo Sapiens
accccucagcucagccugguauggaaagcaag

SEQ ID NO: 194423 - RNA, 32 nt, Homo Sapiens
gccccgaccaccuggccuucucuucgcuucuu

SEQ ID NO: 194424 - RNA, 32 nt, Homo Sapiens
cggcccagcagcccccuuccucgcacgacgga

SEQ ID NO: 194425 - RNA, 32 nt, Homo Sapiens
ccuucccgcccucaggguccacggccaccaug

SEQ ID NO: 194426 - RNA, 32 nt, Homo Sapiens
caaguaugaagaggauggggccagcggggccu

SEQ ID NO: 194427 - RNA, 32 nt, Homo Sapiens
ugucaugugguggucagacugcucgcuggugg

SEQ ID NO: 194428 - RNA, 32 nt, Homo Sapiens
ugaaucucuuuauuuucccugguagagacauc

SEQ ID NO: 194429 - RNA, 32 nt, Homo Sapiens
cgcucccaagauccccgccuccccuuaagcac

SEQ ID NO: 194430 - RNA, 32 nt, Homo Sapiens
uuguauuucuucauuuuuuggucauuaguacc

SEQ ID NO: 194431 - RNA, 32 nt, Homo Sapiens
ccagaauggcacugaggccagcauggcugugg

SEQ ID NO: 194432 - RNA, 29 nt, Homo Sapiens
aacuuccuugcuauccaccacaaaauaag

SEQ ID NO: 194433 - RNA, 32 nt, Homo Sapiens
cccuccccaucccaccaccuuggagcugucau

SEQ ID NO: 194434 - RNA, 32 nt, Homo Sapiens
uggcuccccguccuggugcgggaccugugccc

SEQ ID NO: 194435 - RNA, 32 nt, Homo Sapiens
ugcuuuaugugauaaacaacugaaaccauuau

SEQ ID NO: 194436 - RNA, 32 nt, Homo Sapiens
cccagucuucagauucucugguaaguuaauaa

SEQ ID NO: 194437 - RNA, 32 nt, Homo Sapiens
caaaugaugauuaugaguucccuaaacaaaag

SEQ ID NO: 194438 - RNA, 32 nt, Homo Sapiens
aaacagcacugggauguguugaggagggggca

SEQ ID NO: 194439 - RNA, 31 nt, Homo Sapiens
gaggauccauugagcccaggaguccagccug

SEQ ID NO: 194440 - RNA, 32 nt, Homo Sapiens
cauggagcauccugaggccgugcagcagggag

SEQ ID NO: 194441 - RNA, 30 nt, Homo Sapiens
caaggagaauucccugcccacuuucuguuc

SEQ ID NO: 194442 - RNA, 32 nt, Homo Sapiens
uauggaagauggcauguauaaacuacugcauu

SEQ ID NO: 194443 - RNA, 32 nt, Homo Sapiens
gauacagucaacagaaugaaaaggcaaucuau

SEQ ID NO: 194444 - RNA, 30 nt, Homo Sapiens
cauguagaauacccugccuucuugaagcag

SEQ ID NO: 194445 - RNA, 32 nt, Homo Sapiens
uuuuuguuuuaacuuucuuguggcaagcuaua

SEQ ID NO: 194446 - RNA, 32 nt, Homo Sapiens
gucaaguaacugugugggguucuaaugccagu

SEQ ID NO: 194447 - RNA, 32 nt, Homo Sapiens
gaccaagcgagggagggugcgaggggaaaccg

SEQ ID NO: 194448 - RNA, 32 nt, Homo Sapiens
acaacaccaaaaugaauuuuggcaccauccua

SEQ ID NO: 194449 - RNA, 32 nt, Homo Sapiens
gccacugcacuccaggcugggcgacagagcga

SEQ ID NO: 194450 - RNA, 32 nt, Homo Sapiens
aaccacccaugcuugucuuaaaaauugauaag

SEQ ID NO: 194451 - RNA, 32 nt, Homo Sapiens
uacaugcauaugcaagugugaauuacguggua

SEQ ID NO: 194452 - RNA, 32 nt, Homo Sapiens
aacuuuuaaugaucuauucaggcaguagagcu

SEQ ID NO: 194453 - RNA, 32 nt, Homo Sapiens
accugggacccuugagaguaucaggucuccca

SEQ ID NO: 194454 - RNA, 32 nt, Homo Sapiens
gcagugaggagcuuuugauugcugaccugugu

SEQ ID NO: 194455 - RNA, 32 nt, Homo Sapiens
uauuuuuauuuuugggauuagugggggucuaa

SEQ ID NO: 194456 - RNA, 32 nt, Homo Sapiens
acugcccuggagcuguggugacugcugcguuu

SEQ ID NO: 194457 - RNA, 32 nt, Homo Sapiens
gaugggaaugcuuuuucuuuuguuuugggauu

SEQ ID NO: 194458 - RNA, 32 nt, Homo Sapiens
acacugcugggucgauggggucggauucugcc

SEQ ID NO: 194459 - RNA, 32 nt, Homo Sapiens
aaaccuauaaaggguugagcugucccaaguuu

SEQ ID NO: 194460 - RNA, 32 nt, Homo Sapiens
gauuaaaccaauuuaauuguauguuuucaggc

SEQ ID NO: 194461 - RNA, 32 nt, Homo Sapiens
ugcuagauacuugucaccuugcuaaaaugcaa

SEQ ID NO: 194462 - RNA, 32 nt, Homo Sapiens
acccucggggcugagucagaucugggucugcc

SEQ ID NO: 194463 - RNA, 32 nt, Homo Sapiens
ccgccaggcuucccggcccgccacucccgcug

SEQ ID NO: 194464 - RNA, 32 nt, Homo Sapiens
ggagagaaucauuuaaugaagccuauuuuucu

SEQ ID NO: 194465 - RNA, 32 nt, Homo Sapiens
agaaaaaacaaauguuaauaugcugcacaaaa

SEQ ID NO: 194466 - RNA, 32 nt, Homo Sapiens
aaguaguacuuugaaucauaguaugaaaugcu

SEQ ID NO: 194467 - RNA, 32 nt, Homo Sapiens
ucucaauggaaauucauccuuauaugcaagca

SEQ ID NO: 194468 - RNA, 32 nt, Homo Sapiens
aaugguuauugcagaauauuaagguacauguc

SEQ ID NO: 194469 - RNA, 32 nt, Homo Sapiens
auuagacuuccucuccuuccaccccucauuuc

SEQ ID NO: 194470 - RNA, 32 nt, Homo Sapiens
ucagaagguggggcagcugcuuccuuaggaag

SEQ ID NO: 194471 - RNA, 32 nt, Homo Sapiens
ugaaauaagaacucuuugugucugugagagag

SEQ ID NO: 194472 - RNA, 32 nt, Homo Sapiens
cagcccggggagaggugggcugggcugcaggu

SEQ ID NO: 194473 - RNA, 32 nt, Homo Sapiens
uacagauaauaacuaagugaaugaaaacaaaa

SEQ ID NO: 194474 - RNA, 32 nt, Homo Sapiens
ugaggagaauaaaagucucguguugacaucag

SEQ ID NO: 194475 - RNA, 32 nt, Homo Sapiens
cugggcggcaggugaugcugcacuaccugcua

SEQ ID NO: 194476 - RNA, 32 nt, Homo Sapiens
ugcgaaguccgcggcugcccccggggcccuag

SEQ ID NO: 194477 - RNA, 32 nt, Homo Sapiens
ccgcgggggcugugagcagcggugccucaaca

SEQ ID NO: 194478 - RNA, 32 nt, Homo Sapiens
ccccagugucuggcggggagccaggugacauc

SEQ ID NO: 194479 - RNA, 32 nt, Homo Sapiens
cgaagcuuaagugaaaaugauacauguuagaa

SEQ ID NO: 194480 - RNA, 32 nt, Homo Sapiens
uguuuuggggcacaacaauacuggauaaaaua

SEQ ID NO: 194481 - RNA, 32 nt, Homo Sapiens
ucagagcccucccaugaccaugggcuccggcu

SEQ ID NO: 194482 - RNA, 32 nt, Homo Sapiens
uucugcaacuaaaaaaggaauaaaaacuugug

SEQ ID NO: 194483 - RNA, 32 nt, Homo Sapiens
ggacccaggaccaugucucugucucgcucaga

SEQ ID NO: 194484 - RNA, 32 nt, Homo Sapiens
cuuuggggguuugagggugggguaagggauuu

SEQ ID NO: 194485 - RNA, 32 nt, Homo Sapiens
aguuucaucgucccgucauuguuucugauguc

SEQ ID NO: 194486 - RNA, 32 nt, Homo Sapiens
caaagggauaaaacuuagauggcagcuuguac

SEQ ID NO: 194487 - RNA, 32 nt, Homo Sapiens
cggccaccggcgaggaacacggcgcgaugcag

SEQ ID NO: 194488 - RNA, 32 nt, Homo Sapiens
ccuacuacgugcggcggcagcuggggcgggaa

SEQ ID NO: 194489 - RNA, 32 nt, Homo Sapiens
cggggagaugagaggaggcaugaagcugcagu

SEQ ID NO: 194490 - RNA, 32 nt, Homo Sapiens
cucccaagaucccacacugcagcuuuaucuuu

SEQ ID NO: 194491 - RNA, 32 nt, Homo Sapiens
uuaaacuccaauuuuaaucuaucauccaaggg

SEQ ID NO: 194492 - RNA, 32 nt, Homo Sapiens
gccccaggcagcagcuccuccuccucuucuga

SEQ ID NO: 194493 - RNA, 32 nt, Homo Sapiens
uggggcggggguauuuuucuuggagcuuggug

SEQ ID NO: 194494 - RNA, 32 nt, Homo Sapiens
cgcccuuaccccugcuggcccuugcaaggcgc

SEQ ID NO: 194495 - RNA, 32 nt, Homo Sapiens
uuguccuccuuccacauucuuaaagaaacuug

SEQ ID NO: 194496 - RNA, 32 nt, Homo Sapiens
gagagggcaagggggaaaagaucgacgaagua

SEQ ID NO: 194497 - RNA, 32 nt, Homo Sapiens
aagugggcaggugcccugguguucucgugggc

SEQ ID NO: 194498 - RNA, 32 nt, Homo Sapiens
auuuguuuaauuuuauucuguguuuucucuug

SEQ ID NO: 194499 - RNA, 32 nt, Homo Sapiens
aguuuaucagucuguaaccugcaaaugaugcu

SEQ ID NO: 194500 - RNA, 32 nt, Homo Sapiens
aggguccggaggucacccacgcuuacaacagc

SEQ ID NO: 194501 - RNA, 32 nt, Homo Sapiens
cacgucgugccucacuggguccugcuuaccuc

SEQ ID NO: 194502 - RNA, 32 nt, Homo Sapiens
uacaacgaugcacuuuacucguuugauguggg

SEQ ID NO: 194503 - RNA, 32 nt, Homo Sapiens
aggauccggggguggggugagguaggaccggc

SEQ ID NO: 194504 - RNA, 32 nt, Homo Sapiens
uucuacuuuuucuguaguuaauccuugcauau

SEQ ID NO: 194505 - RNA, 32 nt, Homo Sapiens
aacaauagacauuggggaccacuagauugggg

SEQ ID NO: 194506 - RNA, 28 nt, Homo Sapiens
ccucgggggcggcuguggcggaggaacg

SEQ ID NO: 194507 - RNA, 32 nt, Homo Sapiens
ggcugucugcaccugcccaccuaccuggcucu

SEQ ID NO: 194508 - RNA, 32 nt, Homo Sapiens
augcucgguugaggauaugaaaaaauacuucc

SEQ ID NO: 194509 - RNA, 32 nt, Homo Sapiens
ugggcugucuccugggauguggggggcggaug

SEQ ID NO: 194510 - RNA, 32 nt, Homo Sapiens
ccaaagucagugucacccuggaugcccagcag

SEQ ID NO: 194511 - RNA, 32 nt, Homo Sapiens
cugcugggaaggaaacaggccccauuuuguau

SEQ ID NO: 194512 - RNA, 32 nt, Homo Sapiens
ggggauugggcaguguggaagaacguguagac

SEQ ID NO: 194513 - RNA, 32 nt, Homo Sapiens
guaucauaauuucuucugucuucuuuaggcua

SEQ ID NO: 194514 - RNA, 32 nt, Homo Sapiens
uuaaugccaauagaaaaauucaagagauaaug

SEQ ID NO: 194515 - RNA, 32 nt, Homo Sapiens
cacaccagcaccagcucccugucucuucuagc

SEQ ID NO: 194516 - RNA, 32 nt, Homo Sapiens
guuuuuccugcauuuuaaaaguaauaaaauau

SEQ ID NO: 194517 - RNA, 32 nt, Homo Sapiens
auacacaaggacccuucagguguuacuagaag

SEQ ID NO: 194518 - RNA, 32 nt, Homo Sapiens
ugcuugggaaaugugaccuuugcucugggggg

SEQ ID NO: 194519 - RNA, 32 nt, Homo Sapiens
ccccggaucccggucugcgcauugccccccga

SEQ ID NO: 194520 - RNA, 32 nt, Homo Sapiens
gagccuuauagcaacugacuucccaguuaagu

SEQ ID NO: 194521 - RNA, 32 nt, Homo Sapiens
agggccccaggcagggcugugcagcgccagcc

SEQ ID NO: 194522 - RNA, 32 nt, Homo Sapiens
acaugaagaggauaggcuaaucaugaguaauu

SEQ ID NO: 194523 - RNA, 32 nt, Homo Sapiens
ggcaacuugugcuaccgcguggacuccaggac

SEQ ID NO: 194524 - RNA, 32 nt, Homo Sapiens
ggugaccccccgccccgcugcgcguuggacua

SEQ ID NO: 194525 - RNA, 32 nt, Homo Sapiens
ggaguuuacagagaauaaugaaugagauuaau

SEQ ID NO: 194526 - RNA, 32 nt, Homo Sapiens
agggucaagaacaggcuaaggauacuaaccaa

SEQ ID NO: 194527 - RNA, 32 nt, Homo Sapiens
ugcacacacauggaugagcacacacacaccaa

SEQ ID NO: 194528 - RNA, 32 nt, Homo Sapiens
ccgcucuccuaguuccuucucccuccucuagg

SEQ ID NO: 194529 - RNA, 30 nt, Homo Sapiens
ccugaguccgggaggcaccguccggcggcg

SEQ ID NO: 194530 - RNA, 32 nt, Homo Sapiens
gcauuuucaaacagcaaaguacuuugaaaacc

SEQ ID NO: 194531 - RNA, 32 nt, Homo Sapiens
ucagguagccgccgcgucccucgcacacgcag

SEQ ID NO: 194532 - RNA, 32 nt, Homo Sapiens
ggcacgagggcggcggccgcgaugagccuuca

SEQ ID NO: 194533 - RNA, 32 nt, Homo Sapiens
gaugucaguggagacaaaguuguggguuccuc

SEQ ID NO: 194534 - RNA, 32 nt, Homo Sapiens
agcuccuguauauauauuuuauugcaugcacu

SEQ ID NO: 194535 - RNA, 32 nt, Homo Sapiens
cauccauaauagagauugauaagauuuagcaa

SEQ ID NO: 194536 - RNA, 32 nt, Homo Sapiens
ucuuggaccuuccacuucuccuccaacuccuu

SEQ ID NO: 194537 - RNA, 32 nt, Homo Sapiens
gaugguggggagaugaugggcuaaacaggcaa

SEQ ID NO: 194538 - RNA, 32 nt, Homo Sapiens
cagguauuugaaaagaaaaugcuguucauuag

SEQ ID NO: 194539 - RNA, 32 nt, Homo Sapiens
gguggaaacuggguaaagcauauaggggaccu

SEQ ID NO: 194540 - RNA, 32 nt, Homo Sapiens
ccaguaggccuggccggggcccugaggggcga

SEQ ID NO: 194541 - RNA, 32 nt, Homo Sapiens
ccugugaaaaagaaacugaauaccuaagauuu

SEQ ID NO: 194542 - RNA, 32 nt, Homo Sapiens
aaguggauuucuuauuacauuaauaucagaca

SEQ ID NO: 194543 - RNA, 32 nt, Homo Sapiens
gagaagaaaagcuccaggaucccuguccccau

SEQ ID NO: 194544 - RNA, 32 nt, Homo Sapiens
gucaggggcuccuggcuucccgccgcagaaug

SEQ ID NO: 194545 - RNA, 32 nt, Homo Sapiens
ccuucuucaauccuuuucauacuacuuaauga

SEQ ID NO: 194546 - RNA, 32 nt, Homo Sapiens
uggcaccugcuggagacagcgaugacauuugc

SEQ ID NO: 194547 - RNA, 32 nt, Homo Sapiens
aaccaugauuuauguuugugaauuuacuggau

SEQ ID NO: 194548 - RNA, 32 nt, Homo Sapiens
gaccuuuauggugauccacuuccacuuaauag

SEQ ID NO: 194549 - RNA, 32 nt, Homo Sapiens
cagaggcggcccggccgcggcgcgccggcuuu

SEQ ID NO: 194550 - RNA, 32 nt, Homo Sapiens
ccuggcacuauaauguaagcucuacugaggug

SEQ ID NO: 194551 - RNA, 32 nt, Homo Sapiens
cuaguguuuaagucauuuuuuacuugaaucag

SEQ ID NO: 194552 - RNA, 32 nt, Homo Sapiens
ccacuuaaaggcauucuuaagccacaaacaau

SEQ ID NO: 194553 - RNA, 25 nt, Homo Sapiens
auggggcgcuggccgcccgcuguga

SEQ ID NO: 194554 - RNA, 32 nt, Homo Sapiens
caccuagcucugcgcaguggcucacaccuaua

SEQ ID NO: 194555 - RNA, 32 nt, Homo Sapiens
ugucagaaauaaauaaaaccacaagucucaag

SEQ ID NO: 194556 - RNA, 32 nt, Homo Sapiens
ggggcugaggaacugacguggagcgggguaug

SEQ ID NO: 194557 - RNA, 32 nt, Homo Sapiens
uccauccuuccaacauauauuuauugaguacc

SEQ ID NO: 194558 - RNA, 32 nt, Homo Sapiens
cugaauaguacaccccacccuccaucuguaug

SEQ ID NO: 194559 - RNA, 32 nt, Homo Sapiens
ggccccuggcuaugcacccccaccauuccuac

SEQ ID NO: 194560 - RNA, 32 nt, Homo Sapiens
ggugcaaaucaugacacagaagggcaguauga

SEQ ID NO: 194561 - RNA, 32 nt, Homo Sapiens
gggugucugcuacuuccccaucuuuaaaaugc

SEQ ID NO: 194562 - RNA, 32 nt, Homo Sapiens
gaaauagaauacuguuucauauuugaaucaga

SEQ ID NO: 194563 - RNA, 32 nt, Homo Sapiens
uaguuuggaaaacuauccuuaauagucuguuu

SEQ ID NO: 194564 - RNA, 32 nt, Homo Sapiens
uuucaaaacaaauuccaucugcuaagguuuga

SEQ ID NO: 194565 - RNA, 32 nt, Homo Sapiens
uucaguuagcaagugaauauugaaccuuaaau

SEQ ID NO: 194566 - RNA, 32 nt, Homo Sapiens
cugcggcaguggaggagcugcccgccgguauu

SEQ ID NO: 194567 - RNA, 32 nt, Homo Sapiens
ggcuggugugcgugccugcccagcggcauccg

SEQ ID NO: 194568 - RNA, 32 nt, Homo Sapiens
aagugggaggaucaccugagcucuggaggugg

SEQ ID NO: 194569 - RNA, 30 nt, Homo Sapiens
gcuagguggggcgacucuucugugagcugc

SEQ ID NO: 194570 - RNA, 32 nt, Homo Sapiens
ucgacguucucuccccuucucuccguggcccc

SEQ ID NO: 194571 - RNA, 32 nt, Homo Sapiens
cucagauggaaaugaggaacuuguuagcagcu

SEQ ID NO: 194572 - RNA, 32 nt, Homo Sapiens
ucuacuaaaaauacaaaauuagucaggcauug

SEQ ID NO: 194573 - RNA, 32 nt, Homo Sapiens
acuccagguucaggagggagaagagcaaagcc

SEQ ID NO: 194574 - RNA, 32 nt, Homo Sapiens
gguaaggcugacuuuuucaagaucaucagaau

SEQ ID NO: 194575 - RNA, 32 nt, Homo Sapiens
aggaggugccagcagcucuguuggcucaaguu

SEQ ID NO: 194576 - RNA, 32 nt, Homo Sapiens
uucccaacucauugaaggucuuauuuauauaa

SEQ ID NO: 194577 - RNA, 32 nt, Homo Sapiens
acagaaaccuuauguuauaaugguaaaacuag

SEQ ID NO: 194578 - RNA, 32 nt, Homo Sapiens
gcccauuuaagcuagaugugcaugucaccaca

SEQ ID NO: 194579 - RNA, 32 nt, Homo Sapiens
ucuucuguuuuaaagguuugaaucaccagcau

SEQ ID NO: 194580 - RNA, 32 nt, Homo Sapiens
gcggccgcgauggggccgaagcgcccgaagcc

SEQ ID NO: 194581 - RNA, 26 nt, Homo Sapiens
aaaaauaaaggaaaacaaaaaacuuu

SEQ ID NO: 194582 - RNA, 32 nt, Homo Sapiens
gaauacauuucuccuuugauaaaauaaaugag

SEQ ID NO: 194583 - RNA, 32 nt, Homo Sapiens
uaccguuagccccgcccuccccaaagucccgc

SEQ ID NO: 194584 - RNA, 32 nt, Homo Sapiens
ugguuucaguucuguguacauuuuaaaggaua

SEQ ID NO: 194585 - RNA, 32 nt, Homo Sapiens
gccugcggcauggcccggggcucggcgcuccc

SEQ ID NO: 194586 - RNA, 32 nt, Homo Sapiens
cugugaggucacugaggccuuauggacuaacu

SEQ ID NO: 194587 - RNA, 32 nt, Homo Sapiens
uguuaucacauugguuuuccuguaccuuuggu

SEQ ID NO: 194588 - RNA, 32 nt, Homo Sapiens
ugggauugacuuuauuuuuuuauagugcuuaa

SEQ ID NO: 194589 - RNA, 32 nt, Homo Sapiens
cauucuuccuuguuucucugguagaaaccauc

SEQ ID NO: 194590 - RNA, 32 nt, Homo Sapiens
acagaaaucuucuagcacuuuguaaacacagu

SEQ ID NO: 194591 - RNA, 32 nt, Homo Sapiens
cugaauugacuucuagcacaucaaaaauauuu

SEQ ID NO: 194592 - RNA, 32 nt, Homo Sapiens
cccaucgcuccacugaaacugcucuugucaag

SEQ ID NO: 194593 - RNA, 32 nt, Homo Sapiens
uuggggacucagcugggaaugcuggccauaga

SEQ ID NO: 194594 - RNA, 32 nt, Homo Sapiens
ccgagaaagggagagggaaucggagggagcag

SEQ ID NO: 194595 - RNA, 32 nt, Homo Sapiens
cuccacaggagaagcuggugccucuaggcaac

SEQ ID NO: 194596 - RNA, 32 nt, Homo Sapiens
cucccuuccgcaggucugcagaugaaggguuu

SEQ ID NO: 194597 - RNA, 32 nt, Homo Sapiens
gaugagcugcaccuccuuggacucuaccugua

SEQ ID NO: 194598 - RNA, 32 nt, Homo Sapiens
uucucaagcucuuguccaacccaaaggcucuu

SEQ ID NO: 194599 - RNA, 32 nt, Homo Sapiens
caauuauuuuuccuggugucucuucuugguac

SEQ ID NO: 194600 - RNA, 32 nt, Homo Sapiens
gcgggcagaucaacuggggucaggaguucaaa

SEQ ID NO: 194601 - RNA, 30 nt, Homo Sapiens
ccuggugucugugcucacccaggcugaggg

SEQ ID NO: 194602 - RNA, 32 nt, Homo Sapiens
guuuguuuguuuucucuuuuugccaaaauuaa

SEQ ID NO: 194603 - RNA, 32 nt, Homo Sapiens
uaugcaacaucauggagaagugaaggcauagg

SEQ ID NO: 194604 - RNA, 32 nt, Homo Sapiens
acaggcaggcccggcuucagcggcaccgccac

SEQ ID NO: 194605 - RNA, 32 nt, Homo Sapiens
guauuuuuaaacaagaaagaaaaccccagucc

SEQ ID NO: 194606 - RNA, 32 nt, Homo Sapiens
ccgcgccgcggcgggggguggaggaagagggc

SEQ ID NO: 194607 - RNA, 32 nt, Homo Sapiens
uuguuauuccgaaagcccugguuuggggccca

SEQ ID NO: 194608 - RNA, 32 nt, Homo Sapiens
ccccggagccugcacccuuccgagggccauag

SEQ ID NO: 194609 - RNA, 32 nt, Homo Sapiens
agcuugguuacgcuuaaaaugaucgccuacaa

SEQ ID NO: 194610 - RNA, 32 nt, Homo Sapiens
cugggcaacaagagugaaccuccaucacaaaa

SEQ ID NO: 194611 - RNA, 32 nt, Homo Sapiens
caacagcaauaaacuuccuucuccucgggcca

SEQ ID NO: 194612 - RNA, 32 nt, Homo Sapiens
uuccagcaucgggcacgaccugagagagcuga

SEQ ID NO: 194613 - RNA, 32 nt, Homo Sapiens
cacaggucaggggugacacagacucauccuga

SEQ ID NO: 194614 - RNA, 32 nt, Homo Sapiens
uccugaauccuccuuaauagcagaaccuuggu

SEQ ID NO: 194615 - RNA, 32 nt, Homo Sapiens
gcacucacugccauccuguggaagccaccauc

SEQ ID NO: 194616 - RNA, 32 nt, Homo Sapiens
ccucagcgccgccccggccgugucccggagga

SEQ ID NO: 194617 - RNA, 32 nt, Homo Sapiens
gcuuuuaggagauaguuucuauuuagucauug

SEQ ID NO: 194618 - RNA, 32 nt, Homo Sapiens
auuuuucuaaaguauugggaaaacuuucuuau

SEQ ID NO: 194619 - RNA, 32 nt, Homo Sapiens
cuggccuggacaccacggaccugugcaggggc

SEQ ID NO: 194620 - RNA, 32 nt, Homo Sapiens
auuuuguaaaauguauuauguccugugagaug

SEQ ID NO: 194621 - RNA, 32 nt, Homo Sapiens
ugccggcagcauauauaaggcagggacuauag

SEQ ID NO: 194622 - RNA, 32 nt, Homo Sapiens
caccuuuccuucucaccuguccugcuuuugcu

SEQ ID NO: 194623 - RNA, 32 nt, Homo Sapiens
cacacacaucuucuguugauucuguuucucug

SEQ ID NO: 194624 - RNA, 32 nt, Homo Sapiens
aagacgagcugccugcaguaucuggacgcccg

SEQ ID NO: 194625 - RNA, 32 nt, Homo Sapiens
ugaaacuauaaaauguauaaauaauuugcaaa

SEQ ID NO: 194626 - RNA, 31 nt, Homo Sapiens
cagaguugcuuaguucccccaagggccagua

SEQ ID NO: 194627 - RNA, 30 nt, Homo Sapiens
ugguuucuggacugucacccucccagcuga

SEQ ID NO: 194628 - RNA, 32 nt, Homo Sapiens
agguuauguaaccccaccaguaacucauuugg

SEQ ID NO: 194629 - RNA, 32 nt, Homo Sapiens
aaaaaugauagcuuagaaaacacuagaguuca

SEQ ID NO: 194630 - RNA, 32 nt, Homo Sapiens
guguugccaaaggagauuaacauuugagucag

SEQ ID NO: 194631 - RNA, 32 nt, Homo Sapiens
aaaaugggcaccucuagugacccaggcuggcu

SEQ ID NO: 194632 - RNA, 32 nt, Homo Sapiens
cugcucugccagcaagcuguggagcugccucc

SEQ ID NO: 194633 - RNA, 32 nt, Homo Sapiens
augcuucuuucuccaccugaggucuuggucug

SEQ ID NO: 194634 - RNA, 32 nt, Homo Sapiens
ggagcuauggaagcuauauugcagccauuaag

SEQ ID NO: 194635 - RNA, 32 nt, Homo Sapiens
ccugcuuuugugggaaaaauuuucuucuuccc

SEQ ID NO: 194636 - RNA, 32 nt, Homo Sapiens
uaaauacagaauguauugauauagaagauaag

SEQ ID NO: 194637 - RNA, 32 nt, Homo Sapiens
auuauccaccggguaacagugcuuacccacga

SEQ ID NO: 194638 - RNA, 32 nt, Homo Sapiens
gcuugauuugaaaacaaaaucugagaauggau

SEQ ID NO: 194639 - RNA, 32 nt, Homo Sapiens
ucugguaggcuacagcagcaagucucuaaaga

SEQ ID NO: 194640 - RNA, 32 nt, Homo Sapiens
ugggcuggguggcaucuggcagucauggauaa

SEQ ID NO: 194641 - RNA, 32 nt, Homo Sapiens
ggccguugauucacuucacgcuuucagcgaau

SEQ ID NO: 194642 - RNA, 32 nt, Homo Sapiens
auacuuaucaucauugccuuuccacuacucua

SEQ ID NO: 194643 - RNA, 32 nt, Homo Sapiens
cuaguagugacuguauucuugauucagccuga

SEQ ID NO: 194644 - RNA, 32 nt, Homo Sapiens
uguggcggacugaccacggcccgggcaugggc

SEQ ID NO: 194645 - RNA, 32 nt, Homo Sapiens
aggaagcucccucccucacuguggggcauuuc

SEQ ID NO: 194646 - RNA, 32 nt, Homo Sapiens
agaucccgugacucagccccccaauccacccu

SEQ ID NO: 194647 - RNA, 32 nt, Homo Sapiens
cgagaggaugagaggaggccggcccagcuccu

SEQ ID NO: 194648 - RNA, 32 nt, Homo Sapiens
caaguuccaccgaugcucgaggccugacuggg

SEQ ID NO: 194649 - RNA, 32 nt, Homo Sapiens
ugguaacuaagaccuacuuaugccacauaaga

SEQ ID NO: 194650 - RNA, 30 nt, Homo Sapiens
accgaagucugugcugggcuuggaagcgga

SEQ ID NO: 194651 - RNA, 32 nt, Homo Sapiens
uaaaaauguuuuauauuuuuuuuuaaguaaaa

SEQ ID NO: 194652 - RNA, 32 nt, Homo Sapiens
caaaacaucauucuauaagucaguauacuuuu

SEQ ID NO: 194653 - RNA, 32 nt, Homo Sapiens
uuuggauuccucaguuauuguuuacuuuucau

SEQ ID NO: 194654 - RNA, 32 nt, Homo Sapiens
uuguuuuuguuuguuuguuucuuaaauccuac

SEQ ID NO: 194655 - RNA, 32 nt, Homo Sapiens
caaaaacaguaauauuuacagcaucaguaaau

SEQ ID NO: 194656 - RNA, 32 nt, Homo Sapiens
gacuccaggaaaagccauuuugguuuuccuua

SEQ ID NO: 194657 - RNA, 32 nt, Homo Sapiens
aaagggccaagugauccaguucuaacuuuggg

SEQ ID NO: 194658 - RNA, 32 nt, Homo Sapiens
agaguuggugccuacugauccagcuccugaua

SEQ ID NO: 194659 - RNA, 32 nt, Homo Sapiens
ggcccaauccccuuccucuccuuuuaagggug

SEQ ID NO: 194660 - RNA, 32 nt, Homo Sapiens
gcugggcugcagccuucuguggcugccggagc

SEQ ID NO: 194661 - RNA, 30 nt, Homo Sapiens
cucccagguuccagcuauucuccugccuca

SEQ ID NO: 194662 - RNA, 32 nt, Homo Sapiens
acuuguagguguuuaagaauugguuuugggag

SEQ ID NO: 194663 - RNA, 32 nt, Homo Sapiens
ccuaaaccaccuccuguguuccugcuuccucu

SEQ ID NO: 194664 - RNA, 32 nt, Homo Sapiens
uagcccuucuaccccaccugaccucugcaaga

SEQ ID NO: 194665 - RNA, 32 nt, Homo Sapiens
ucucaguucccucucuucccacuaagccgugg

SEQ ID NO: 194666 - RNA, 32 nt, Homo Sapiens
cauucaauaucaaauuauucauaguggagaga

SEQ ID NO: 194667 - RNA, 30 nt, Homo Sapiens
gggggauggggaggagggacaugagcacuc

SEQ ID NO: 194668 - RNA, 32 nt, Homo Sapiens
ggauggcacuccggccaccuccuccaucucug

SEQ ID NO: 194669 - RNA, 32 nt, Homo Sapiens
gguucguugccccggugccgggaccgggccgg

SEQ ID NO: 194670 - RNA, 32 nt, Homo Sapiens
uuugaauaaaccagacaccgcacaugugucuu

SEQ ID NO: 194671 - RNA, 32 nt, Homo Sapiens
gaucugggagccagcagcuggaugcuguggcu

SEQ ID NO: 194672 - RNA, 32 nt, Homo Sapiens
ccgggccggguccgccacgucuggcgcgcuga

SEQ ID NO: 194673 - RNA, 32 nt, Homo Sapiens
cgucgccccguccacacgccgccacccucgcg

SEQ ID NO: 194674 - RNA, 32 nt, Homo Sapiens
uaauugauuaggaugcuugguagguuuuuuuc

SEQ ID NO: 194675 - RNA, 32 nt, Homo Sapiens
ucggccccgcggagagcgagagacccugcgca

SEQ ID NO: 194676 - RNA, 32 nt, Homo Sapiens
acaauuugaauuauguagaaugucaaucaagu

SEQ ID NO: 194677 - RNA, 32 nt, Homo Sapiens
ccauucccaagccccuggccacucuaagcugg

SEQ ID NO: 194678 - RNA, 32 nt, Homo Sapiens
ugacaugcaaugaccaaauauuucauuaagag

SEQ ID NO: 194679 - RNA, 32 nt, Homo Sapiens
aucaaaguguuuguauguucguagcuacauac

SEQ ID NO: 194680 - RNA, 31 nt, Homo Sapiens
cugacggcgucgagcccuggccagacauguc

SEQ ID NO: 194681 - RNA, 32 nt, Homo Sapiens
caucuucccucuaugccauugaguguaagaug

SEQ ID NO: 194682 - RNA, 32 nt, Homo Sapiens
gugccgcgcucuugcccuagcggcgucccccg

SEQ ID NO: 194683 - RNA, 32 nt, Homo Sapiens
cuuuucccagcaugacgaaaaauuggaguucu

SEQ ID NO: 194684 - RNA, 32 nt, Homo Sapiens
ccugggcccucccugucgucccaaagcccccg

SEQ ID NO: 194685 - RNA, 32 nt, Homo Sapiens
gaaagaaaauuuggaaaaugagagaaacagga

SEQ ID NO: 194686 - RNA, 32 nt, Homo Sapiens
cugccuggaagaugccgagaucgugcugcagc

SEQ ID NO: 194687 - RNA, 32 nt, Homo Sapiens
cacugcagcccagccagugguuccagguccag

SEQ ID NO: 194688 - RNA, 32 nt, Homo Sapiens
augaaguaggcuuuucauggggagagauuggg

SEQ ID NO: 194689 - RNA, 32 nt, Homo Sapiens
augacucaggcagggccccaggguggggugag

SEQ ID NO: 194690 - RNA, 32 nt, Homo Sapiens
ugcgaacuuguguugccuuuucugggccugcc

SEQ ID NO: 194691 - RNA, 32 nt, Homo Sapiens
uaggcuugguggccuguggaaaagaagagaga

SEQ ID NO: 194692 - RNA, 32 nt, Homo Sapiens
cagccccccagaguguucugccuugugcugcc

SEQ ID NO: 194693 - RNA, 32 nt, Homo Sapiens
cuaacaagaucugacccucuccccucacagug

SEQ ID NO: 194694 - RNA, 31 nt, Homo Sapiens
uuuauugggcuucacacucaagauuguuaau

SEQ ID NO: 194695 - RNA, 32 nt, Homo Sapiens
auuauggaacuguuuuuaauucuugcuuaaag

SEQ ID NO: 194696 - RNA, 32 nt, Homo Sapiens
gaugcuguauacgaauucgcuaauaaggacgc

SEQ ID NO: 194697 - RNA, 32 nt, Homo Sapiens
ggguuagccaccuggugauuuugucucuagug

SEQ ID NO: 194698 - RNA, 32 nt, Homo Sapiens
aacuugauaaacaagaaagaccucaaguaaca

SEQ ID NO: 194699 - RNA, 32 nt, Homo Sapiens
cccagauccaaggggaaacugcaggucaaggg

SEQ ID NO: 194700 - RNA, 28 nt, Homo Sapiens
gcgaggcggcggccgugacgaggcgcuc

SEQ ID NO: 194701 - RNA, 32 nt, Homo Sapiens
cugcagaaggcacacacuuuguaagaguagag

SEQ ID NO: 194702 - RNA, 32 nt, Homo Sapiens
gcacgccccucgccuccccgcggagugcggac

SEQ ID NO: 194703 - RNA, 32 nt, Homo Sapiens
gcuguuuagcauggagaugacucucagaacac

SEQ ID NO: 194704 - RNA, 32 nt, Homo Sapiens
gcugggaccgcggcgagcagcacggagcggaa

SEQ ID NO: 194705 - RNA, 32 nt, Homo Sapiens
acucugcugugcugcgggcauccuguggucag

SEQ ID NO: 194706 - RNA, 32 nt, Homo Sapiens
gccccgucccgcagcccucacccgcugaagag

SEQ ID NO: 194707 - RNA, 32 nt, Homo Sapiens
acuugugaucguuugggggaggucacacacgu

SEQ ID NO: 194708 - RNA, 32 nt, Homo Sapiens
aaggagacaaauuuaugguagaaauuagccuu

SEQ ID NO: 194709 - RNA, 32 nt, Homo Sapiens
cacaggaaaaggaacuguacuggcuauuacau

SEQ ID NO: 194710 - RNA, 32 nt, Homo Sapiens
uccgcaccuccugguccgcguucacguuagag

SEQ ID NO: 194711 - RNA, 32 nt, Homo Sapiens
cugaaccuaaaauggugagcgagagucaccau

SEQ ID NO: 194712 - RNA, 32 nt, Homo Sapiens
cugggcugggugcagggcgcgccaggaguccc

SEQ ID NO: 194713 - RNA, 32 nt, Homo Sapiens
ugagauagucgcggaugacaccucuuuuccug

SEQ ID NO: 194714 - RNA, 32 nt, Homo Sapiens
gugaccuugccucgcccucccccagugcucca

SEQ ID NO: 194715 - RNA, 32 nt, Homo Sapiens
cccauuccgccuuuucuucagcguccuacccg

SEQ ID NO: 194716 - RNA, 32 nt, Homo Sapiens
cugccugccucccaggcaggugcugccucaca

SEQ ID NO: 194717 - RNA, 32 nt, Homo Sapiens
guccuggcagcccuuccgcgcuucacacagug

SEQ ID NO: 194718 - RNA, 32 nt, Homo Sapiens
agacuugaccauucaccuccaguaccugaaua

SEQ ID NO: 194719 - RNA, 32 nt, Homo Sapiens
cuggaacuucugccuccaccucgcuggggagc

SEQ ID NO: 194720 - RNA, 32 nt, Homo Sapiens
uuuccgggcccgggcugcucucggagccauga

SEQ ID NO: 194721 - RNA, 32 nt, Homo Sapiens
uguagcugugcagcucugcagaucuaaaaucu

SEQ ID NO: 194722 - RNA, 30 nt, Homo Sapiens
gauucugauuaaagaggggaaacgaucauc

SEQ ID NO: 194723 - RNA, 32 nt, Homo Sapiens
ggugacagcugaggguccagagagccggcagg

SEQ ID NO: 194724 - RNA, 32 nt, Homo Sapiens
cccuugaggacagcguaggccuuuuccugucu

SEQ ID NO: 194725 - RNA, 32 nt, Homo Sapiens
gggacaggagggggcccuggggccugggcccc

SEQ ID NO: 194726 - RNA, 32 nt, Homo Sapiens
gcugcucagugugguucucaccccugcaagcu

SEQ ID NO: 194727 - RNA, 32 nt, Homo Sapiens
gugggggacugacuucggcggaacggaaaacu

SEQ ID NO: 194728 - RNA, 32 nt, Homo Sapiens
ggcucagccuggugauggagaagugcugaugg

SEQ ID NO: 194729 - RNA, 32 nt, Homo Sapiens
uaaaauugugguucugugaaccagcuauuagu

SEQ ID NO: 194730 - RNA, 32 nt, Homo Sapiens
guguacaguccugggcaugcgcuguuugagcu

SEQ ID NO: 194731 - RNA, 32 nt, Homo Sapiens
cugacugccccggcccggccucccgcccaugg

SEQ ID NO: 194732 - RNA, 32 nt, Homo Sapiens
gggauacaagaugugacacacccuucuuuauu

SEQ ID NO: 194733 - RNA, 32 nt, Homo Sapiens
aaggcagcagugcuccccugugacgugcucca

SEQ ID NO: 194734 - RNA, 28 nt, Homo Sapiens
ggcugagcaacgaggucgacgcggccgc

SEQ ID NO: 194735 - RNA, 32 nt, Homo Sapiens
cuggcugagugaauuuggauagauauaauaug

SEQ ID NO: 194736 - RNA, 31 nt, Homo Sapiens
caccguggggcgguggagucgccuccgccug

SEQ ID NO: 194737 - RNA, 31 nt, Homo Sapiens
aaccucaaaaagaaaaauacgacucuguugu

SEQ ID NO: 194738 - RNA, 32 nt, Homo Sapiens
gaauauuggguccucagcccugccacccucug

SEQ ID NO: 194739 - RNA, 32 nt, Homo Sapiens
auugaauugaaauaccagcaucagguuuaaug

SEQ ID NO: 194740 - RNA, 32 nt, Homo Sapiens
cuuucuuugcugucugcagcauuuaaaauaua

SEQ ID NO: 194741 - RNA, 32 nt, Homo Sapiens
ugucaggagggagagacagccuggguaugggc

SEQ ID NO: 194742 - RNA, 32 nt, Homo Sapiens
ccagagugcccugcuugccucugcucucccuu

SEQ ID NO: 194743 - RNA, 32 nt, Homo Sapiens
agcuguauuucugaagcugaaauaaauuauaa

SEQ ID NO: 194744 - RNA, 32 nt, Homo Sapiens
uggaggcccgucucuugcuguggggaagacug

SEQ ID NO: 194745 - RNA, 32 nt, Homo Sapiens
cgaggcugcccccaaguguaacuccagcacug

SEQ ID NO: 194746 - RNA, 32 nt, Homo Sapiens
cagccaacuguaaaugucuauuuugaaauucc

SEQ ID NO: 194747 - RNA, 32 nt, Homo Sapiens
agauagguucugaaguuuuuuuguuguuugcu

SEQ ID NO: 194748 - RNA, 32 nt, Homo Sapiens
caauccucggagucuguccacccccucuacuc

SEQ ID NO: 194749 - RNA, 32 nt, Homo Sapiens
uccuccauugguccuuuuuuuuucuuucauuu

SEQ ID NO: 194750 - RNA, 32 nt, Homo Sapiens
uugccaggcaggagcccuccccaagccuucag

SEQ ID NO: 194751 - RNA, 32 nt, Homo Sapiens
ucccccuauagauucaauuucuccaugauguu

SEQ ID NO: 194752 - RNA, 32 nt, Homo Sapiens
agagacccuagaaguggauccaaauagaaggg

SEQ ID NO: 194753 - RNA, 32 nt, Homo Sapiens
gcauuuccagcauucacacuugauacugcaca

SEQ ID NO: 194754 - RNA, 32 nt, Homo Sapiens
ugucacucaaaaauuucuuuuccaugucauuc

SEQ ID NO: 194755 - RNA, 32 nt, Homo Sapiens
ggaaagaguguugguguuggcuggggugucaa

SEQ ID NO: 194756 - RNA, 32 nt, Homo Sapiens
auugaggugucugaugaggaugugcuuuggug

SEQ ID NO: 194757 - RNA, 30 nt, Homo Sapiens
cccaccgcggccaggaccuaaggaugcagu

SEQ ID NO: 194758 - RNA, 32 nt, Homo Sapiens
aaggcccugagucaaagaagaugccucgaacu

SEQ ID NO: 194759 - RNA, 32 nt, Homo Sapiens
aauuauuacaguguuuauccuuucauauaguu

SEQ ID NO: 194760 - RNA, 32 nt, Homo Sapiens
gugaccacacccucacuggcucggcccugccc

SEQ ID NO: 194761 - RNA, 32 nt, Homo Sapiens
aggucucucgcaccacccaggcacauacucua

SEQ ID NO: 194762 - RNA, 32 nt, Homo Sapiens
ggcccuggagggugggguuggggggugggacu

SEQ ID NO: 194763 - RNA, 32 nt, Homo Sapiens
acgccccuucacccggcgcgggacgcagagcu

SEQ ID NO: 194764 - RNA, 32 nt, Homo Sapiens
uugggcagacaccagcaggaauaauuugaaau

SEQ ID NO: 194765 - RNA, 32 nt, Homo Sapiens
ugccucacaccuguaaucccagcacuuugggg

SEQ ID NO: 194766 - RNA, 32 nt, Homo Sapiens
auuguucagaaccugauuggaccguguccaau

SEQ ID NO: 194767 - RNA, 32 nt, Homo Sapiens
cucugaagggaagcaaggcaagacacacaagg

SEQ ID NO: 194768 - RNA, 32 nt, Homo Sapiens
ucgcuccccccgcccaccgugcccuccaucac

SEQ ID NO: 194769 - RNA, 32 nt, Homo Sapiens
cacuguuuucuuuauuucugggucuuuaauau

SEQ ID NO: 194770 - RNA, 32 nt, Homo Sapiens
agagaaaggagcuugucuuuccuucugcugug

SEQ ID NO: 194771 - RNA, 32 nt, Homo Sapiens
gaccuugaaaacagugugaugcagaagaaaau

SEQ ID NO: 194772 - RNA, 32 nt, Homo Sapiens
ccuuaccgagacccgcccggcccggcggugcg

SEQ ID NO: 194773 - RNA, 31 nt, Homo Sapiens
acguaacaagaggcugucaaucacgagcacc

SEQ ID NO: 194774 - RNA, 32 nt, Homo Sapiens
cgcuggcgcggcugcggccgcugcugccuacg

SEQ ID NO: 194775 - RNA, 32 nt, Homo Sapiens
ggagcccgugccgggcgggcccgagcgggugu

SEQ ID NO: 194776 - RNA, 32 nt, Homo Sapiens
accaagaugaaacauuuacccacaaaauguaa

SEQ ID NO: 194777 - RNA, 32 nt, Homo Sapiens
cggccuaacgggauuaggagggcgcgccaccc

SEQ ID NO: 194778 - RNA, 32 nt, Homo Sapiens
ccccagggccgcgaugagcuuccugagccgac

SEQ ID NO: 194779 - RNA, 32 nt, Homo Sapiens
cugauuuugucaggguuuuucuacguguaggc

SEQ ID NO: 194780 - RNA, 32 nt, Homo Sapiens
uauuaugauugugaaaaacagugcuucuucaa

SEQ ID NO: 194781 - RNA, 32 nt, Homo Sapiens
uucaauguuucauuccgcugccuccaucaugu

SEQ ID NO: 194782 - RNA, 32 nt, Homo Sapiens
gcugggccuggguggggaggcuagcaugcgug

SEQ ID NO: 194783 - RNA, 32 nt, Homo Sapiens
agcgucaggagcaaacaugacccguugggacu

SEQ ID NO: 194784 - RNA, 32 nt, Homo Sapiens
ucucccucuccugcugcccacccaccugccag

SEQ ID NO: 194785 - RNA, 31 nt, Homo Sapiens
cacauacaagagguuucuuucauugucaaau

SEQ ID NO: 194786 - RNA, 29 nt, Homo Sapiens
gcuguuuuguguuucaguaguucuccuug

SEQ ID NO: 194787 - RNA, 32 nt, Homo Sapiens
ggaauucguccacagcacacuauugaugccua

SEQ ID NO: 194788 - RNA, 32 nt, Homo Sapiens
aauaauuauuaacuuccuuguaauagaaauaa

SEQ ID NO: 194789 - RNA, 32 nt, Homo Sapiens
aauuauaaaaugucuacgucuuucuccaguuu

SEQ ID NO: 194790 - RNA, 30 nt, Homo Sapiens
cucuggagcugugcugcacugcuucccaga

SEQ ID NO: 194791 - RNA, 32 nt, Homo Sapiens
aaugcggccuggggagcugggcggcggcgggg

SEQ ID NO: 194792 - RNA, 30 nt, Homo Sapiens
gacuggguguugaugggggagggcaaaaug

SEQ ID NO: 194793 - RNA, 32 nt, Homo Sapiens
gaccggccgggcgcugacggaggcggcgcgac

SEQ ID NO: 194794 - RNA, 32 nt, Homo Sapiens
acaaaugaauuuuugguuauauuguuuucuug

SEQ ID NO: 194795 - RNA, 32 nt, Homo Sapiens
uuucugcuuuaauacaaaaacaaaaucuugua

SEQ ID NO: 194796 - RNA, 32 nt, Homo Sapiens
cagggcacagcagcggcggggagggcgccucu

SEQ ID NO: 194797 - RNA, 32 nt, Homo Sapiens
uuuaauacuaaaaauaaauguacaauaagcua

SEQ ID NO: 194798 - RNA, 32 nt, Homo Sapiens
aguccaacgaucucuucagugucauccaauaa

SEQ ID NO: 194799 - RNA, 32 nt, Homo Sapiens
gagucgagaucaugccauugcauuccagccua

SEQ ID NO: 194800 - RNA, 32 nt, Homo Sapiens
uugacagaaucuucuuuucuucuuagaaaucc

SEQ ID NO: 194801 - RNA, 32 nt, Homo Sapiens
ucuuagagaaguaugaguggaacuugaguaca

SEQ ID NO: 194802 - RNA, 32 nt, Homo Sapiens
uuuaaaaguaauuuaaugauuuacauuucucc

SEQ ID NO: 194803 - RNA, 32 nt, Homo Sapiens
gugggguguucccugcuauguuuuccagcauc

SEQ ID NO: 194804 - RNA, 32 nt, Homo Sapiens
auuuaggacaaagugaauuuauaaggacgaau

SEQ ID NO: 194805 - RNA, 32 nt, Homo Sapiens
gguggggccuggcauggguaaccaucagagga

SEQ ID NO: 194806 - RNA, 32 nt, Homo Sapiens
aagaagaaagaacugaagcaaagcagacaacu

SEQ ID NO: 194807 - RNA, 32 nt, Homo Sapiens
ggggacuucucacuuccccuugcaccccuucc

SEQ ID NO: 194808 - RNA, 32 nt, Homo Sapiens
gcucgcuccgaugggacgagggacgccggccc

SEQ ID NO: 194809 - RNA, 32 nt, Homo Sapiens
cugucauuugaaguacagguuaaagacugugu

SEQ ID NO: 194810 - RNA, 32 nt, Homo Sapiens
caaaugagcugauggaagaucuguuugaaacu

SEQ ID NO: 194811 - RNA, 32 nt, Homo Sapiens
gugguuucuggggcaucugaggucaggaguuc

SEQ ID NO: 194812 - RNA, 32 nt, Homo Sapiens
cgcuguggagacggggcguccuggcuugaguu

SEQ ID NO: 194813 - RNA, 32 nt, Homo Sapiens
uaggcugagauggucagcccucaugcuugcug

SEQ ID NO: 194814 - RNA, 32 nt, Homo Sapiens
uauaauuaaaucuauuuaauaaauaaaaauau

SEQ ID NO: 194815 - RNA, 32 nt, Homo Sapiens
acagaauuuucaagaugacagauccaaugaug

SEQ ID NO: 194816 - RNA, 32 nt, Homo Sapiens
augguuaaaaugguuauauguuaugugcauuc

SEQ ID NO: 194817 - RNA, 32 nt, Homo Sapiens
ugauggauuuuaugaccccugggaguuuaugg

SEQ ID NO: 194818 - RNA, 32 nt, Homo Sapiens
ugucucggccugccuccuuggccagcuccggc

SEQ ID NO: 194819 - RNA, 32 nt, Homo Sapiens
aagagacuuuauugccuauuauaauuauuuuu

SEQ ID NO: 194820 - RNA, 32 nt, Homo Sapiens
gcuucccccaccccacuggcucuucuuaauua

SEQ ID NO: 194821 - RNA, 32 nt, Homo Sapiens
uacagccacagcaggaagaaccacuggagaga

SEQ ID NO: 194822 - RNA, 32 nt, Homo Sapiens
ccuaggcccgucccacucaccuccccccugug

SEQ ID NO: 194823 - RNA, 32 nt, Homo Sapiens
uuuguagccaucuggccggucgcugggugcac

SEQ ID NO: 194824 - RNA, 32 nt, Homo Sapiens
agagggcacuguaugcaaacaucucuugaacu

SEQ ID NO: 194825 - RNA, 32 nt, Homo Sapiens
uaggagugcagggguucugcuucauugcauuu

SEQ ID NO: 194826 - RNA, 32 nt, Homo Sapiens
gagggaguauuacagccgccucauccaccaga

SEQ ID NO: 194827 - RNA, 32 nt, Homo Sapiens
gaagucauuaccagaagcuggccucggacccc

SEQ ID NO: 194828 - RNA, 32 nt, Homo Sapiens
cuguccacuuaugggacagucucugcaggaag

SEQ ID NO: 194829 - RNA, 32 nt, Homo Sapiens
gcagacguuuggucuguuuucuucgcugucau

SEQ ID NO: 194830 - RNA, 32 nt, Homo Sapiens
agagccccgugguugcuggcuugaauaaaaug

SEQ ID NO: 194831 - RNA, 32 nt, Homo Sapiens
cuuggcugccagccgcgcuugccugguagcaa

SEQ ID NO: 194832 - RNA, 32 nt, Homo Sapiens
gccccugggaacgaggccuacccacuauggac

SEQ ID NO: 194833 - RNA, 32 nt, Homo Sapiens
ugcucacgcccucccacccccacccuacagcc

SEQ ID NO: 194834 - RNA, 32 nt, Homo Sapiens
ggcgcugcgucuccgcguacaggaggcggcgg

SEQ ID NO: 194835 - RNA, 32 nt, Homo Sapiens
acauagaggguggacaguucaggccugugucu

SEQ ID NO: 194836 - RNA, 32 nt, Homo Sapiens
gaaauuagugaguuuccuucuacccgucacca

SEQ ID NO: 194837 - RNA, 32 nt, Homo Sapiens
aaaaaacaagauuuauacaacaauuacuuagg

SEQ ID NO: 194838 - RNA, 32 nt, Homo Sapiens
cucuaaagugauacucagaacaaaagaaaguc

SEQ ID NO: 194839 - RNA, 32 nt, Homo Sapiens
ugccugugcugcuugggcuugcuggccucaag

SEQ ID NO: 194840 - RNA, 32 nt, Homo Sapiens
cuggacuugcccccgccggccgccugucacag

SEQ ID NO: 194841 - RNA, 32 nt, Homo Sapiens
cucacaggggacgaugucaagcucuuccuggc

SEQ ID NO: 194842 - RNA, 32 nt, Homo Sapiens
agccagcuuccucuccucguuucucuccuucc

SEQ ID NO: 194843 - RNA, 32 nt, Homo Sapiens
ccucgaacccgcgucccugggggcugggcccc

SEQ ID NO: 194844 - RNA, 32 nt, Homo Sapiens
ugggccuucuaaagcggcgcuucacacaccuu

SEQ ID NO: 194845 - RNA, 32 nt, Homo Sapiens
acacacagcaaugcacagccacuucccuuccc

SEQ ID NO: 194846 - RNA, 32 nt, Homo Sapiens
caaacauuucucauauccuugcuguauuccau

SEQ ID NO: 194847 - RNA, 32 nt, Homo Sapiens
gccccacugguggcuccccuccuuccacgccu

SEQ ID NO: 194848 - RNA, 32 nt, Homo Sapiens
uuggagaaaaagaaaaaauauauacucaagag

SEQ ID NO: 194849 - RNA, 32 nt, Homo Sapiens
augccuccauuaugaaacuuaaccaggccagc

SEQ ID NO: 194850 - RNA, 32 nt, Homo Sapiens
gucuaggacgaaauauuuuaugugcuaaugca

SEQ ID NO: 194851 - RNA, 32 nt, Homo Sapiens
uuuuggaaggauuccuuuuucuguagaauacu

SEQ ID NO: 194852 - RNA, 32 nt, Homo Sapiens
uugccaaacacuuuacaguucuggaggaggag

SEQ ID NO: 194853 - RNA, 32 nt, Homo Sapiens
gcagcagccgcggcgacgucacuguccucucg

SEQ ID NO: 194854 - RNA, 32 nt, Homo Sapiens
uuugauuggaauugcauugacuuuacagucua

SEQ ID NO: 194855 - RNA, 32 nt, Homo Sapiens
cgggucucuggggccuucuccucccugcagug

SEQ ID NO: 194856 - RNA, 32 nt, Homo Sapiens
aagagugcuuugccuuuggcacaaggaucaga

SEQ ID NO: 194857 - RNA, 32 nt, Homo Sapiens
ccccgccgcugagggguacccgggccucgugg

SEQ ID NO: 194858 - RNA, 32 nt, Homo Sapiens
ugcccuuguuuaaguauaaaaguacaguucaa

SEQ ID NO: 194859 - RNA, 32 nt, Homo Sapiens
uggggguuggcaauuuuauuuuuaaagaaaac

SEQ ID NO: 194860 - RNA, 32 nt, Homo Sapiens
aaauacaaugcuagguguuuugaaauaaaacu

SEQ ID NO: 194861 - RNA, 32 nt, Homo Sapiens
agagggagcgcgcccgccccagccccgagucc

SEQ ID NO: 194862 - RNA, 32 nt, Homo Sapiens
ucuccacuggguggaggcugggggucccagca

SEQ ID NO: 194863 - RNA, 32 nt, Homo Sapiens
acuaguaaaaauacaagcagauuccucuacug

SEQ ID NO: 194864 - RNA, 32 nt, Homo Sapiens
gugcccggggcagcagcagcccugccccacac

SEQ ID NO: 194865 - RNA, 32 nt, Homo Sapiens
caugugaagcggggacaaaaccaugcagcuca

SEQ ID NO: 194866 - RNA, 32 nt, Homo Sapiens
agccgagauugugcugcugcacuccagccugg

SEQ ID NO: 194867 - RNA, 32 nt, Homo Sapiens
ccagcccuggcccaccccccagccuccagaga

SEQ ID NO: 194868 - RNA, 32 nt, Homo Sapiens
cacaugcacucugaaucaggguuuuucuauaa

SEQ ID NO: 194869 - RNA, 29 nt, Homo Sapiens
aaagaauaaaguuuuauuccauucugaaa

SEQ ID NO: 194870 - RNA, 32 nt, Homo Sapiens
auccggcccgaggcugcccuggcacacgcguu

SEQ ID NO: 194871 - RNA, 32 nt, Homo Sapiens
gugauuugagucugaggaagagcugagaguuu

SEQ ID NO: 194872 - RNA, 32 nt, Homo Sapiens
augcccucuccuccccgucuacaagaguugug

SEQ ID NO: 194873 - RNA, 32 nt, Homo Sapiens
gccuccuuuuucuacucauuuuugaaagcaaa

SEQ ID NO: 194874 - RNA, 32 nt, Homo Sapiens
cgccggggagagccuuccggacuccgggcggc

SEQ ID NO: 194875 - RNA, 32 nt, Homo Sapiens
uccaguauugggggugcagagaaggcacagga

SEQ ID NO: 194876 - RNA, 30 nt, Homo Sapiens
gucgccuccgguaccugauccauagaacag

SEQ ID NO: 194877 - RNA, 32 nt, Homo Sapiens
ggacuauuauuaccugaagagguggaggguug

SEQ ID NO: 194878 - RNA, 32 nt, Homo Sapiens
cuguuuaacugguuugaguuuaccaaagagug

SEQ ID NO: 194879 - RNA, 32 nt, Homo Sapiens
ugggggcagggagaggcuagaggggcaggaca

SEQ ID NO: 194880 - RNA, 32 nt, Homo Sapiens
uuggugcguggccugacauccggcuggaggcc

SEQ ID NO: 194881 - RNA, 32 nt, Homo Sapiens
gcacagccuguccggugcgcgcggggcuccuu

SEQ ID NO: 194882 - RNA, 32 nt, Homo Sapiens
uugaucugggccacuucccuccuuccagucau

SEQ ID NO: 194883 - RNA, 32 nt, Homo Sapiens
ugauugucuuaucaaaguaguguucuaacuuu

SEQ ID NO: 194884 - RNA, 32 nt, Homo Sapiens
cagacgcgguccucggccccacgugaaccagg

SEQ ID NO: 194885 - RNA, 32 nt, Homo Sapiens
ugaaacaaguucucaagaagucuuuacauuau

SEQ ID NO: 194886 - RNA, 32 nt, Homo Sapiens
aggagagggaggaggguaggaagacaguuugc

SEQ ID NO: 194887 - RNA, 32 nt, Homo Sapiens
uucaaaagcugauauuuccuaccuaagcaucu

SEQ ID NO: 194888 - RNA, 32 nt, Homo Sapiens
auuuugcugugcuagggagaaaugaaaacggg

SEQ ID NO: 194889 - RNA, 32 nt, Homo Sapiens
aaauuagaugaccgaacuguacgugaagguga

SEQ ID NO: 194890 - RNA, 32 nt, Homo Sapiens
gugcuggggggaggcccggccccgucgcugcc

SEQ ID NO: 194891 - RNA, 32 nt, Homo Sapiens
aauuuaguucgccuuuauucugcacaggacag

SEQ ID NO: 194892 - RNA, 32 nt, Homo Sapiens
uuuuuuuuuguuuuuuuuuuuaagagccugug

SEQ ID NO: 194893 - RNA, 32 nt, Homo Sapiens
aauuugaaagacuguaggaaacacuucaaugu

SEQ ID NO: 194894 - RNA, 32 nt, Homo Sapiens
ccccuccgcucuugacccugcauauccaggaa

SEQ ID NO: 194895 - RNA, 32 nt, Homo Sapiens
uacaggcaugcgccaccauacccaccagauuu

SEQ ID NO: 194896 - RNA, 32 nt, Homo Sapiens
cauaaugauguuucuuuuucaauuuaaauaag

SEQ ID NO: 194897 - RNA, 32 nt, Homo Sapiens
ucuauauccaacauuuuaucucaacauguagu

SEQ ID NO: 194898 - RNA, 32 nt, Homo Sapiens
uugccauuuaaaccuuuuuuuaaaaaaaaaaa

SEQ ID NO: 194899 - RNA, 32 nt, Homo Sapiens
ggcuguggccuuuggauaucuguccgacaggu

SEQ ID NO: 194900 - RNA, 32 nt, Homo Sapiens
aguuuagaagaaaagaaagcucuauaaauaua

SEQ ID NO: 194901 - RNA, 32 nt, Homo Sapiens
ggauuuugaaagacaucuuuucaucaugggac

SEQ ID NO: 194902 - RNA, 32 nt, Homo Sapiens
ggggccgcguuguaacggccccucccggccuc

SEQ ID NO: 194903 - RNA, 32 nt, Homo Sapiens
uacagaagccccauguguaccuacagagcagc

SEQ ID NO: 194904 - RNA, 32 nt, Homo Sapiens
aguuuuaaaaauuuaagaauauucacacaauc

SEQ ID NO: 194905 - RNA, 32 nt, Homo Sapiens
ggagcuuggcgcggcccggccuggaugcgcug

SEQ ID NO: 194906 - RNA, 32 nt, Homo Sapiens
cagacacacuguauugugaaaacugcugaaca

SEQ ID NO: 194907 - RNA, 32 nt, Homo Sapiens
guuggugcggguggguucggaacacggugcga

SEQ ID NO: 194908 - RNA, 32 nt, Homo Sapiens
ucuuguauuucaggaacaaaucaagguucucu

SEQ ID NO: 194909 - RNA, 32 nt, Homo Sapiens
gagaugagggucagauaggugggaggacuaac

SEQ ID NO: 194910 - RNA, 32 nt, Homo Sapiens
uugauaggaacccauuugauaaauuccuuaac

SEQ ID NO: 194911 - RNA, 32 nt, Homo Sapiens
acuuccuccgcgguuccucggagccgccucgc

SEQ ID NO: 194912 - RNA, 32 nt, Homo Sapiens
ccagcaggaggucuacugcucugguggcaaga

SEQ ID NO: 194913 - RNA, 32 nt, Homo Sapiens
ccuuggcccggugacaccugcagcccucacuc

SEQ ID NO: 194914 - RNA, 32 nt, Homo Sapiens
acgccuagcuaauuuuuauauuuuuaguagag

SEQ ID NO: 194915 - RNA, 32 nt, Homo Sapiens
uuagaguauacuuuuuucucaaauaaucaauu

SEQ ID NO: 194916 - RNA, 32 nt, Homo Sapiens
gucucguuucugucaugguggugcgucccguc

SEQ ID NO: 194917 - RNA, 32 nt, Homo Sapiens
ugacuccagcuugcccgucuguccuugggggc

SEQ ID NO: 194918 - RNA, 32 nt, Homo Sapiens
agcccucgcgucccagccccagccagggggcc

SEQ ID NO: 194919 - RNA, 32 nt, Homo Sapiens
caacccaggaggccaugacuucugccuggguc

SEQ ID NO: 194920 - RNA, 32 nt, Homo Sapiens
ccgcccggcacuuacgcgggggccccccaacc

SEQ ID NO: 194921 - RNA, 32 nt, Homo Sapiens
gcugcgguguccgcggacuggcuggggaguga

SEQ ID NO: 194922 - RNA, 32 nt, Homo Sapiens
ucaguuagauauauuuugugaacccuugauua

SEQ ID NO: 194923 - RNA, 32 nt, Homo Sapiens
cccccacacacacucgggacgucuucauugaa

SEQ ID NO: 194924 - RNA, 32 nt, Homo Sapiens
ggcaacuccgcggaagaccaggguccugggag

SEQ ID NO: 194925 - RNA, 32 nt, Homo Sapiens
agccuucaacacacucagaaaaugcaacagca

SEQ ID NO: 194926 - RNA, 31 nt, Homo Sapiens
cgcagcuagcgcagccagcccgagggccgcc

SEQ ID NO: 194927 - RNA, 32 nt, Homo Sapiens
ggugguguucgggcggccgccaggcuucccgg

SEQ ID NO: 194928 - RNA, 32 nt, Homo Sapiens
cacacagggaaggagcagcaucugguaugcag

SEQ ID NO: 194929 - RNA, 32 nt, Homo Sapiens
cggggguggcggcgccggaggucgccauggcu

SEQ ID NO: 194930 - RNA, 32 nt, Homo Sapiens
caaucuaguucccuccuuuccuccccaacaaa

SEQ ID NO: 194931 - RNA, 32 nt, Homo Sapiens
aacacggccccggccugguaccagcccaucag

SEQ ID NO: 194932 - RNA, 32 nt, Homo Sapiens
gggggaugacauucagugaauuauuucagugg

SEQ ID NO: 194933 - RNA, 32 nt, Homo Sapiens
cgggaaggggagagccugcgggugguguauca

SEQ ID NO: 194934 - RNA, 32 nt, Homo Sapiens
gucucaaucuaaaagcacuucaaggggucaaa

SEQ ID NO: 194935 - RNA, 32 nt, Homo Sapiens
gggacauacaauauuucugucuccagucuacc

SEQ ID NO: 194936 - RNA, 32 nt, Homo Sapiens
agcguaggccccagggagacuucuaaagcccc

SEQ ID NO: 194937 - RNA, 32 nt, Homo Sapiens
agccugagcgccccggauggcccgcggcgggg

SEQ ID NO: 194938 - RNA, 32 nt, Homo Sapiens
agcaaaguagacuaacuacaacaucaaugcca

SEQ ID NO: 194939 - RNA, 32 nt, Homo Sapiens
auucacuagaaaaugagaaaauugucuggguu

SEQ ID NO: 194940 - RNA, 32 nt, Homo Sapiens
guuugggauauucagggaaacuaccccaaugu

SEQ ID NO: 194941 - RNA, 32 nt, Homo Sapiens
acacucauuuuuccuuacaacaauucugagga

SEQ ID NO: 194942 - RNA, 32 nt, Homo Sapiens
gauucuccugccucggccuccugaguagcugg

SEQ ID NO: 194943 - RNA, 32 nt, Homo Sapiens
cacuguucauucuauuugauuuauucuacaac

SEQ ID NO: 194944 - RNA, 32 nt, Homo Sapiens
auucuuuaucccauuuuaucauccuuucaguu

SEQ ID NO: 194945 - RNA, 29 nt, Homo Sapiens
agaagcaaaaguacuuauuuucuacccua

SEQ ID NO: 194946 - RNA, 32 nt, Homo Sapiens
ggcgggcgcggccgggccgccauggaccacaa

SEQ ID NO: 194947 - RNA, 32 nt, Homo Sapiens
aauccgugaggaccaggucuuuuucagugugc

SEQ ID NO: 194948 - RNA, 32 nt, Homo Sapiens
gaucccagcucgcucuccccagugucagcaac

SEQ ID NO: 194949 - RNA, 32 nt, Homo Sapiens
gaggcggaggaggcgaggagcgccggguaccg

SEQ ID NO: 194950 - RNA, 32 nt, Homo Sapiens
aagaaauggaauuuauauacaaaaauauuuuc

SEQ ID NO: 194951 - RNA, 32 nt, Homo Sapiens
auuuauaauuuaaugauauguuagugccucug

SEQ ID NO: 194952 - RNA, 32 nt, Homo Sapiens
auuuccuuaggaugaauggucccuacacaaag

SEQ ID NO: 194953 - RNA, 32 nt, Homo Sapiens
ccacuucuggugguuaccacucaccuggggau

SEQ ID NO: 194954 - RNA, 32 nt, Homo Sapiens
gacggcaggaggcagaaggcgagaugggggaa

SEQ ID NO: 194955 - RNA, 32 nt, Homo Sapiens
cuaucaugauuuccucuucuauuccuauauuc

SEQ ID NO: 194956 - RNA, 32 nt, Homo Sapiens
agaauaagaguauucuauugagcauugaaacg

SEQ ID NO: 194957 - RNA, 32 nt, Homo Sapiens
ucaagacuguagcauggugaugucuagauuca

SEQ ID NO: 194958 - RNA, 32 nt, Homo Sapiens
auuuuuuaacuuuguuauguuuucgugcuuuc

SEQ ID NO: 194959 - RNA, 32 nt, Homo Sapiens
ggcacucuuccuccagcugggaucucaguggc

SEQ ID NO: 194960 - RNA, 32 nt, Homo Sapiens
uuugugguagaguauuugacaaucaggauacu

SEQ ID NO: 194961 - RNA, 32 nt, Homo Sapiens
cucccgccgagacccgccgcuccgguccugcc

SEQ ID NO: 194962 - RNA, 30 nt, Homo Sapiens
uaacagccgccgcugccgccgccgccagga

SEQ ID NO: 194963 - RNA, 32 nt, Homo Sapiens
aguuuagggaacaaguuaccuaccacauuuca

SEQ ID NO: 194964 - RNA, 32 nt, Homo Sapiens
cuuuugaugugucacugcuguaucauacuuuu

SEQ ID NO: 194965 - RNA, 32 nt, Homo Sapiens
cugagaauguguuuacgcuguuuaaugucugc

SEQ ID NO: 194966 - RNA, 32 nt, Homo Sapiens
gcaccuggcggacgaggcgcugcugcuaccgc

SEQ ID NO: 194967 - RNA, 32 nt, Homo Sapiens
uucgagcagguggucgccagcuuucuccgaaa

SEQ ID NO: 194968 - RNA, 32 nt, Homo Sapiens
uguaaucuguguucuuuuuuauuuggucauau

SEQ ID NO: 194969 - RNA, 32 nt, Homo Sapiens
augagccuggcagggaagggcaaccaacaucu

SEQ ID NO: 194970 - RNA, 32 nt, Homo Sapiens
auccuacuuuuuaguguaguucccaccucauu

SEQ ID NO: 194971 - RNA, 32 nt, Homo Sapiens
aagaaagcaaaauggaauagaucggaguagag

SEQ ID NO: 194972 - RNA, 32 nt, Homo Sapiens
aguccuggcccggcccgucgcacagcucugcu

SEQ ID NO: 194973 - RNA, 32 nt, Homo Sapiens
ggaagaccugucuacucuugguuucaccacua

SEQ ID NO: 194974 - RNA, 32 nt, Homo Sapiens
cagguccccgggcccggcggcgcggcggcggc

SEQ ID NO: 194975 - RNA, 32 nt, Homo Sapiens
gugcucugccccaccauucauauaugggccuc

SEQ ID NO: 194976 - RNA, 32 nt, Homo Sapiens
ccuuacaaaaauacuguguaacuauuucucaa

SEQ ID NO: 194977 - RNA, 32 nt, Homo Sapiens
uuucugcuggagauuauauuaggaaguuucau

SEQ ID NO: 194978 - RNA, 32 nt, Homo Sapiens
cccucggccucggcccgggacgucuaaaaucc

SEQ ID NO: 194979 - RNA, 32 nt, Homo Sapiens
acaugaaagucugaaaagagaaugagaaggag

SEQ ID NO: 194980 - RNA, 32 nt, Homo Sapiens
guggcgcggcccgggggcgcgccagggccuuu

SEQ ID NO: 194981 - RNA, 32 nt, Homo Sapiens
cagagguccuccguagggucuuucuugggaua

SEQ ID NO: 194982 - RNA, 32 nt, Homo Sapiens
ccccagagccgggcccuguuuccuuggacggg

SEQ ID NO: 194983 - RNA, 32 nt, Homo Sapiens
gugagccguagccggcguccccgcccagccga

SEQ ID NO: 194984 - RNA, 32 nt, Homo Sapiens
gugugugcuucuuuuauuauggaucacguuca

SEQ ID NO: 194985 - RNA, 32 nt, Homo Sapiens
gggaggcggaggaggcggcggcggcgauggag

SEQ ID NO: 194986 - RNA, 32 nt, Homo Sapiens
cccucugacaauuuuuuuuuuaaugugccuuu

SEQ ID NO: 194987 - RNA, 32 nt, Homo Sapiens
caggugcaccacuucccgccuccaugacucgu

SEQ ID NO: 194988 - RNA, 32 nt, Homo Sapiens
uaguuucucuacauaucuuauuucuaauucuc

SEQ ID NO: 194989 - RNA, 32 nt, Homo Sapiens
gaaggauacaaaugauaaaaauuacacuuuuu

SEQ ID NO: 194990 - RNA, 32 nt, Homo Sapiens
ggcuuccgccggguagcgcggcgcgcaggcuc

SEQ ID NO: 194991 - RNA, 32 nt, Homo Sapiens
accagcugcucuagaagagccuggacaggaug

SEQ ID NO: 194992 - RNA, 32 nt, Homo Sapiens
ggaccugcugcagcugcagccgccugggcgcu

SEQ ID NO: 194993 - RNA, 30 nt, Homo Sapiens
agcaaggccaggcgcgguggcucacgccug

SEQ ID NO: 194994 - RNA, 32 nt, Homo Sapiens
gcgcaugcgcgaguguacgcguugccggcgaa

SEQ ID NO: 194995 - RNA, 32 nt, Homo Sapiens
cuggggcugagcucagccugugggcagggugc

SEQ ID NO: 194996 - RNA, 32 nt, Homo Sapiens
gcaccauuuugucgcggcugcccgcucuccca

SEQ ID NO: 194997 - RNA, 32 nt, Homo Sapiens
ccacaguccuuccuggggcauuccaggcagag

SEQ ID NO: 194998 - RNA, 32 nt, Homo Sapiens
ucugaggauggcagcucugucccccacauuug

SEQ ID NO: 194999 - RNA, 32 nt, Homo Sapiens
gcgcacagaucgggaggucccuggacuuccac

SEQ ID NO: 195000 - RNA, 32 nt, Homo Sapiens
cucugguucugcugaauuuuaagggaggugag

SEQ ID NO: 195001 - RNA, 32 nt, Homo Sapiens
ccugccucagcggcugcccccgccagcgggcc

SEQ ID NO: 195002 - RNA, 32 nt, Homo Sapiens
acuauguaacaaggacuccuuuccuccacuuc

SEQ ID NO: 195003 - RNA, 32 nt, Homo Sapiens
ucucuuggagaaauaagggacucauucaauug

SEQ ID NO: 195004 - RNA, 32 nt, Homo Sapiens
cgcggccgcccgggccugcgggaagcgaugga

SEQ ID NO: 195005 - RNA, 32 nt, Homo Sapiens
ggugugggacggggcugcuucucuacacagcc

SEQ ID NO: 195006 - RNA, 32 nt, Homo Sapiens
ugcuucauagguacacaaacauuucuaaaacu

SEQ ID NO: 195007 - RNA, 32 nt, Homo Sapiens
uucuuucugccccucccugugucccgggaccu

SEQ ID NO: 195008 - RNA, 32 nt, Homo Sapiens
agacccagcuggaaaccuggcuucuccaugug

SEQ ID NO: 195009 - RNA, 29 nt, Homo Sapiens
cuuguauaguacuuguauuuucuuucgcu

SEQ ID NO: 195010 - RNA, 32 nt, Homo Sapiens
cugacuucacacucacuggcccucaauagcuu

SEQ ID NO: 195011 - RNA, 32 nt, Homo Sapiens
uccucucugggcagcgcaucuuugaaaaaagu

SEQ ID NO: 195012 - RNA, 32 nt, Homo Sapiens
cacucccauccacccuucuccaugcucauccc

SEQ ID NO: 195013 - RNA, 32 nt, Homo Sapiens
ugcuggaccaaggugcggaccggagcggcuga

SEQ ID NO: 195014 - RNA, 32 nt, Homo Sapiens
acaggaaagcauuuauacuugagaagaaaugu

SEQ ID NO: 195015 - RNA, 32 nt, Homo Sapiens
aucccggaggccgggacagaccaggagccacu

SEQ ID NO: 195016 - RNA, 32 nt, Homo Sapiens
cgcaggcccucccgagcccggccauccgugcc

SEQ ID NO: 195017 - RNA, 32 nt, Homo Sapiens
uuaucuagcugaguucauuucaucucucccuu

SEQ ID NO: 195018 - RNA, 32 nt, Homo Sapiens
cgccugcccuccccacccaccacccagcuguu

SEQ ID NO: 195019 - RNA, 32 nt, Homo Sapiens
gacauagugcuggcacugauauuauccaucau

SEQ ID NO: 195020 - RNA, 32 nt, Homo Sapiens
gucccacacugaaauccccucuagucacccau

SEQ ID NO: 195021 - RNA, 32 nt, Homo Sapiens
augggcauuguaguuaaugaugguugaugggu

SEQ ID NO: 195022 - RNA, 29 nt, Homo Sapiens
gaggauggagagcggcgacgaagcggcca

SEQ ID NO: 195023 - RNA, 32 nt, Homo Sapiens
ggcgccugccagcacgccuggcuaauuuuuug

SEQ ID NO: 195024 - RNA, 32 nt, Homo Sapiens
uuaaccugcauaaaaaggucuuuaaaauauug

SEQ ID NO: 195025 - RNA, 32 nt, Homo Sapiens
guguaccuguuuaucuguuaacuauuauccaa

SEQ ID NO: 195026 - RNA, 32 nt, Homo Sapiens
aauggaggccuacaaagaacaucguaauaaca

SEQ ID NO: 195027 - RNA, 32 nt, Homo Sapiens
uugagacggacuuugacaaaacacgaaauggu

SEQ ID NO: 195028 - RNA, 32 nt, Homo Sapiens
gguuuugcugucuacagccaacuauucuauua

SEQ ID NO: 195029 - RNA, 32 nt, Homo Sapiens
auggaaccaaaauuauucuuugguugauuuaa

SEQ ID NO: 195030 - RNA, 32 nt, Homo Sapiens
ucucuccuggaaaccaacuguaugcugguggg

SEQ ID NO: 195031 - RNA, 29 nt, Homo Sapiens
gcugcuguggggugcagaggcagaagaug

SEQ ID NO: 195032 - RNA, 32 nt, Homo Sapiens
ggacaucuacgaguggacuaagaucaauggcc

SEQ ID NO: 195033 - RNA, 32 nt, Homo Sapiens
gggcuaagaauauuuuauuguggacuuaauua

SEQ ID NO: 195034 - RNA, 32 nt, Homo Sapiens
cccggggcgcuuugggauccucagcaccgggc

SEQ ID NO: 195035 - RNA, 32 nt, Homo Sapiens
gcugacccgcaaaugcugcugccccagcucua

SEQ ID NO: 195036 - RNA, 32 nt, Homo Sapiens
cccugggcgagggaaccgccgggccggguccu

SEQ ID NO: 195037 - RNA, 32 nt, Homo Sapiens
ggaaacccucuccaucucccaaggcugccaga

SEQ ID NO: 195038 - RNA, 32 nt, Homo Sapiens
gcgucaggaucccuggcccccggagagcgaag

SEQ ID NO: 195039 - RNA, 32 nt, Homo Sapiens
cgacgccuggcccuccuucucaucuccagcaa

SEQ ID NO: 195040 - RNA, 32 nt, Homo Sapiens
cucugguuugguugggagguguguuuaccucu

SEQ ID NO: 195041 - RNA, 32 nt, Homo Sapiens
gagccuggagcagccccaggaugugcucccug

SEQ ID NO: 195042 - RNA, 32 nt, Homo Sapiens
ugauuuuuaaacaaaaagaaaauuuugccagc

SEQ ID NO: 195043 - RNA, 32 nt, Homo Sapiens
cucugggagcccacacuauuuauugguaaucc

SEQ ID NO: 195044 - RNA, 31 nt, Homo Sapiens
agcacacagccccaggaccacccuugaccgu

SEQ ID NO: 195045 - RNA, 32 nt, Homo Sapiens
cagccgcucagguggcucugcuggcaucggag

SEQ ID NO: 195046 - RNA, 32 nt, Homo Sapiens
gcugaccucacagaggcuugggggugaaaggg

SEQ ID NO: 195047 - RNA, 32 nt, Homo Sapiens
ggggagggucgcuccacccuggagcgggaaug

SEQ ID NO: 195048 - RNA, 32 nt, Homo Sapiens
guucgaaaccaucccaaggcauaggagccaua

SEQ ID NO: 195049 - RNA, 32 nt, Homo Sapiens
aucuguauugcuaagauaauuaaaugaaauac

SEQ ID NO: 195050 - RNA, 32 nt, Homo Sapiens
augauuuguuuuauaauuuauccaccaugucc

SEQ ID NO: 195051 - RNA, 28 nt, Homo Sapiens
gggauuuaggaccaacauuugaagaccc

SEQ ID NO: 195052 - RNA, 32 nt, Homo Sapiens
ucccagugccuggccgaaacugaggcuggaau

SEQ ID NO: 195053 - RNA, 32 nt, Homo Sapiens
uuguagagccuggggggcgccggguggcaaag

SEQ ID NO: 195054 - RNA, 32 nt, Homo Sapiens
uugguggaacucuggagagguaaagauggacc

SEQ ID NO: 195055 - RNA, 32 nt, Homo Sapiens
cagcaucuucccuccacacacguuaugugaag

SEQ ID NO: 195056 - RNA, 31 nt, Homo Sapiens
aaauggaugugacaccaaaaaaaaaaaaaaa

SEQ ID NO: 195057 - RNA, 32 nt, Homo Sapiens
cagcggcggugacccgagcugccgcccgacau

SEQ ID NO: 195058 - RNA, 32 nt, Homo Sapiens
gccauauaacugggcuucaaccauggcuggga

SEQ ID NO: 195059 - RNA, 32 nt, Homo Sapiens
uauuuuuucuucaugccugcucuagucucauc

SEQ ID NO: 195060 - RNA, 32 nt, Homo Sapiens
cugucgucaagcgcggcguugggccggcgggc

SEQ ID NO: 195061 - RNA, 32 nt, Homo Sapiens
ccacgcacugccgcacgucacuggcgggcucg

SEQ ID NO: 195062 - RNA, 32 nt, Homo Sapiens
ccaccggaccucguccucccccugcacggaug

SEQ ID NO: 195063 - RNA, 32 nt, Homo Sapiens
ugacucagcaaggcagaauggccaccccugcc

SEQ ID NO: 195064 - RNA, 32 nt, Homo Sapiens
cccauguggugaugaugugucuauauauguga

SEQ ID NO: 195065 - RNA, 32 nt, Homo Sapiens
ucugggcugggacgugcugaggucaucccaga

SEQ ID NO: 195066 - RNA, 32 nt, Homo Sapiens
gcccaguccuggcuccaaggggugcugugugg

SEQ ID NO: 195067 - RNA, 32 nt, Homo Sapiens
gaagaggguugacagcccuuuggaccucaaag

SEQ ID NO: 195068 - RNA, 32 nt, Homo Sapiens
cccccgccgccgccgccccaucagguguccua

SEQ ID NO: 195069 - RNA, 32 nt, Homo Sapiens
gccggggcggggcacugaagggggcgguccag

SEQ ID NO: 195070 - RNA, 32 nt, Homo Sapiens
aauuuuaacaagguccucaguuccuuagugac

SEQ ID NO: 195071 - RNA, 32 nt, Homo Sapiens
ucagauugaggagguaccgaaagggaaggagc

SEQ ID NO: 195072 - RNA, 32 nt, Homo Sapiens
ucccggagcuguucggccgccggcugcccggg

SEQ ID NO: 195073 - RNA, 32 nt, Homo Sapiens
agcaacgccucccauccgguuuuuugauggag

SEQ ID NO: 195074 - RNA, 31 nt, Homo Sapiens
gagcuugagcgcagccauagacaacuagagc

SEQ ID NO: 195075 - RNA, 32 nt, Homo Sapiens
uccagcccagugcuccuuccuguccuaucugg

SEQ ID NO: 195076 - RNA, 32 nt, Homo Sapiens
agaagauuuuuuaaauuccuguaaaugugaag

SEQ ID NO: 195077 - RNA, 32 nt, Homo Sapiens
cugaaaagggauagugcuuuugugaaauuuuu

SEQ ID NO: 195078 - RNA, 32 nt, Homo Sapiens
gugcgauuuuuagcacauccauaucuuuucua

SEQ ID NO: 195079 - RNA, 32 nt, Homo Sapiens
uccccagcgaggggguugggggauggaguuca

SEQ ID NO: 195080 - RNA, 32 nt, Homo Sapiens
uccugguccggugcuccggcgccugaucuagg

SEQ ID NO: 195081 - RNA, 32 nt, Homo Sapiens
aguuuagcauuguuauaaaccauuccauucga

SEQ ID NO: 195082 - RNA, 32 nt, Homo Sapiens
aucuggccuacgugcacguccaggcauaguac

SEQ ID NO: 195083 - RNA, 32 nt, Homo Sapiens
auaagaauauauuaucaauacaguuuuaugca

SEQ ID NO: 195084 - RNA, 32 nt, Homo Sapiens
uucuccccgcggccagcugggucuccggggac

SEQ ID NO: 195085 - RNA, 32 nt, Homo Sapiens
cuuaauuuuuaaaaacaaaaucuguaguguug

SEQ ID NO: 195086 - RNA, 32 nt, Homo Sapiens
cuagagaagggagaggggcgugugcaugggag

SEQ ID NO: 195087 - RNA, 32 nt, Homo Sapiens
uuucuaaagagaaguuugauauuuuguaugcu

SEQ ID NO: 195088 - RNA, 32 nt, Homo Sapiens
caccguggccugggcuuggcccgcggccugca

SEQ ID NO: 195089 - RNA, 32 nt, Homo Sapiens
gcaguagugccucugucuccucaccugcaccc

SEQ ID NO: 195090 - RNA, 32 nt, Homo Sapiens
ucugaggaaggggagaauggguggccaccugc

SEQ ID NO: 195091 - RNA, 32 nt, Homo Sapiens
agauguagauuuauuucaucauauuauacaga

SEQ ID NO: 195092 - RNA, 32 nt, Homo Sapiens
agcuguuguacuuuuugcuuuccaucuguuac

SEQ ID NO: 195093 - RNA, 32 nt, Homo Sapiens
cuaaagauaucccugcccuugaggagcuucau

SEQ ID NO: 195094 - RNA, 32 nt, Homo Sapiens
caaguuggugcccccaggaaccuggccagggg

SEQ ID NO: 195095 - RNA, 29 nt, Homo Sapiens
cauuuuucuauguuuuaccacaaguuaca

SEQ ID NO: 195096 - RNA, 32 nt, Homo Sapiens
aucuuuguauaaauaaauauuuuuggggcauc

SEQ ID NO: 195097 - RNA, 32 nt, Homo Sapiens
guuagagaagggaaagugacuuuuccaaagcu

SEQ ID NO: 195098 - RNA, 32 nt, Homo Sapiens
aaccagaaaagacuguuuuaaauaaaaccauu

SEQ ID NO: 195099 - RNA, 32 nt, Homo Sapiens
aacggaggcccggagauggcgaggccugcacc

SEQ ID NO: 195100 - RNA, 32 nt, Homo Sapiens
ccaccugcagcccccuuuugccuggcaguucu

SEQ ID NO: 195101 - RNA, 32 nt, Homo Sapiens
uuaaguguucccucuuuggggcaaauucuuau

SEQ ID NO: 195102 - RNA, 32 nt, Homo Sapiens
gagauugagauaaacuuuugaaaucccaaaaa

SEQ ID NO: 195103 - RNA, 32 nt, Homo Sapiens
cacagggaccucugcccuugaaagcaggguau

SEQ ID NO: 195104 - RNA, 32 nt, Homo Sapiens
gcauacagcaagugcuguacaagcauuaccaa

SEQ ID NO: 195105 - RNA, 29 nt, Homo Sapiens
uguggaguucagguuuauuuucuauuuaa

SEQ ID NO: 195106 - RNA, 32 nt, Homo Sapiens
caccagggaaauguaucuccacagguucuggg

SEQ ID NO: 195107 - RNA, 32 nt, Homo Sapiens
uaaaacaauuuaaauguuuuacugaaaguuua

SEQ ID NO: 195108 - RNA, 32 nt, Homo Sapiens
aaaaaaaaaaaauuaaaguuugagugugugug

SEQ ID NO: 195109 - RNA, 32 nt, Homo Sapiens
auaaugggaaagggccuggguguuacccaugu

SEQ ID NO: 195110 - RNA, 32 nt, Homo Sapiens
acggaaaucaugauuucccuguagaaagugag

SEQ ID NO: 195111 - RNA, 32 nt, Homo Sapiens
cgcagggaccucugcccuugaaagcgggguau

SEQ ID NO: 195112 - RNA, 32 nt, Homo Sapiens
cacuauauuuuuaugcuacuuuccuguuugca

SEQ ID NO: 195113 - RNA, 32 nt, Homo Sapiens
gggcucgccgguucuccagcccggacugcugc

SEQ ID NO: 195114 - RNA, 32 nt, Homo Sapiens
uuggauucaaauuguauuuacauaucagggaa

SEQ ID NO: 195115 - RNA, 32 nt, Homo Sapiens
acaggcucauaaacagaagagacuugcuuguc

SEQ ID NO: 195116 - RNA, 32 nt, Homo Sapiens
uacaguauuuauguuucuuuuuagauguguac

SEQ ID NO: 195117 - RNA, 32 nt, Homo Sapiens
augauuuuauuaugauuaauccugagucauuc

SEQ ID NO: 195118 - RNA, 32 nt, Homo Sapiens
gccgcucggcccgaccuccuucccgguccccu

SEQ ID NO: 195119 - RNA, 32 nt, Homo Sapiens
cuuuugugggggauuuuuuuuauauauauuuc

SEQ ID NO: 195120 - RNA, 32 nt, Homo Sapiens
ggagaaggugaccgugugggcuccaucggccg

SEQ ID NO: 195121 - RNA, 32 nt, Homo Sapiens
uuugaauuucaggucauuaaauuguauaacca

SEQ ID NO: 195122 - RNA, 32 nt, Homo Sapiens
ucauguugcuggcuuuuauaaacucuaagcga

SEQ ID NO: 195123 - RNA, 32 nt, Homo Sapiens
acagcagcagcccagauccuccccuggauuaa

SEQ ID NO: 195124 - RNA, 32 nt, Homo Sapiens
cucuaaauguguuucugcuccccucccaccca

SEQ ID NO: 195125 - RNA, 31 nt, Homo Sapiens
agucccuggugggaaaaguccacaauuuccc

SEQ ID NO: 195126 - RNA, 32 nt, Homo Sapiens
cccuggaggguggucacggccccuccccagau

SEQ ID NO: 195127 - RNA, 32 nt, Homo Sapiens
aguuauauucuuuaaauuuuuaucuuacuuuu

SEQ ID NO: 195128 - RNA, 32 nt, Homo Sapiens
ggcauuccccgcgccccuccagcccucgccgc

SEQ ID NO: 195129 - RNA, 32 nt, Homo Sapiens
aaaagcagaaucugugagucgccuggaggcag

SEQ ID NO: 195130 - RNA, 32 nt, Homo Sapiens
ugcugucagggccagcuccucuugaaagacag

SEQ ID NO: 195131 - RNA, 32 nt, Homo Sapiens
auaagccaugggguaggcagggguugugggug

SEQ ID NO: 195132 - RNA, 32 nt, Homo Sapiens
auagagguguggaaccugaggggccagcaggc

SEQ ID NO: 195133 - RNA, 30 nt, Homo Sapiens
ccggcguggggcguagcagcggccguauua

SEQ ID NO: 195134 - RNA, 32 nt, Homo Sapiens
agacuaaaucauucuuuuuuaugguucaaaaa

SEQ ID NO: 195135 - RNA, 32 nt, Homo Sapiens
uuaugcauuacgcucuuaauucuauuacaaaa

SEQ ID NO: 195136 - RNA, 32 nt, Homo Sapiens
uccaccgccucggccuaccgaagugcuaggau

SEQ ID NO: 195137 - RNA, 32 nt, Homo Sapiens
uuaaagguauauauuuucauaauuucuuucuc

SEQ ID NO: 195138 - RNA, 32 nt, Homo Sapiens
ucaaccccugucaguguccacugugggguggg

SEQ ID NO: 195139 - RNA, 32 nt, Homo Sapiens
cguguuuuuccacagguguuuaagcuucucug

SEQ ID NO: 195140 - RNA, 32 nt, Homo Sapiens
gcuauugcugcuaauuccaugagcugugaaga

SEQ ID NO: 195141 - RNA, 32 nt, Homo Sapiens
uucuuggagcccgaaacaccacccucugcucc

SEQ ID NO: 195142 - RNA, 32 nt, Homo Sapiens
cagacaacaggggaccccgggccggcggccca

SEQ ID NO: 195143 - RNA, 32 nt, Homo Sapiens
acaccccuugcugucucagcagaugggauaua

SEQ ID NO: 195144 - RNA, 32 nt, Homo Sapiens
ucuuccugccagcuggguuuggccaggauuuc

SEQ ID NO: 195145 - RNA, 32 nt, Homo Sapiens
gcaaguccgucuagcucacgggccccuccagu

SEQ ID NO: 195146 - RNA, 32 nt, Homo Sapiens
aaccagcagaaagaggaaagagguagcaagag

SEQ ID NO: 195147 - RNA, 32 nt, Homo Sapiens
ggcgucacguucaaaacaauccuuugacuaca

SEQ ID NO: 195148 - RNA, 32 nt, Homo Sapiens
aaugaagaaaucaauuagaugccccgaaaucu

SEQ ID NO: 195149 - RNA, 32 nt, Homo Sapiens
uuuagugauacaccaccuccgauaagcaaaaa

SEQ ID NO: 195150 - RNA, 32 nt, Homo Sapiens
cugcuuuugggggagccugggguuugggcucc

SEQ ID NO: 195151 - RNA, 31 nt, Homo Sapiens
agucaccagccagucaccugagcugccggag

SEQ ID NO: 195152 - RNA, 32 nt, Homo Sapiens
gcgugucucccugccaguuacccaggcuucac

SEQ ID NO: 195153 - RNA, 32 nt, Homo Sapiens
gcagcccccuuugaagaucuccagguggacuu

SEQ ID NO: 195154 - RNA, 32 nt, Homo Sapiens
ccuccagccgcugcgcccgcuccagcuccucc

SEQ ID NO: 195155 - RNA, 32 nt, Homo Sapiens
ucccccaagauugagcucucugcccuugauca

SEQ ID NO: 195156 - RNA, 32 nt, Homo Sapiens
guggaccucuccuccuucuccuugaccucucu

SEQ ID NO: 195157 - RNA, 32 nt, Homo Sapiens
cugauaaaaaucaaaugugauuaacugguggu

SEQ ID NO: 195158 - RNA, 32 nt, Homo Sapiens
uggccaucauauuguucuuuuauuuuuccaaa

SEQ ID NO: 195159 - RNA, 32 nt, Homo Sapiens
gcaggagcuggccgaggugcugagagagguga

SEQ ID NO: 195160 - RNA, 32 nt, Homo Sapiens
cguaggcgcgcggggcccgccauggcugcguc

SEQ ID NO: 195161 - RNA, 32 nt, Homo Sapiens
gaaguacuggggccuccuccacuggguccgaa

SEQ ID NO: 195162 - RNA, 32 nt, Homo Sapiens
cagcuguggaauuuuuguccaagcuucaaaug

SEQ ID NO: 195163 - RNA, 32 nt, Homo Sapiens
cagaggaggagagaacccgggacugggagggu

SEQ ID NO: 195164 - RNA, 32 nt, Homo Sapiens
aaacugauuuaaaagauguaaauuuaaaauug

SEQ ID NO: 195165 - RNA, 32 nt, Homo Sapiens
gagaauaucuucuguaauaauccuuccucugu

SEQ ID NO: 195166 - RNA, 32 nt, Homo Sapiens
ccugugcccaggugcuggaagcucagucuuca

SEQ ID NO: 195167 - RNA, 32 nt, Homo Sapiens
gugcaaaguauuuuuauacauauccuauugac

SEQ ID NO: 195168 - RNA, 32 nt, Homo Sapiens
uucagagaucauaagaacuugggcuuuucuac

SEQ ID NO: 195169 - RNA, 32 nt, Homo Sapiens
gguugcugucccccuccuccgucugggaccga

SEQ ID NO: 195170 - RNA, 32 nt, Homo Sapiens
aagaguuucuaaaacagacaauaauuuaacaa

SEQ ID NO: 195171 - RNA, 32 nt, Homo Sapiens
auauucagguggccagaagagcuugucagcaa

SEQ ID NO: 195172 - RNA, 32 nt, Homo Sapiens
ccuuaaccacagagccugauuuagagagguuu

SEQ ID NO: 195173 - RNA, 32 nt, Homo Sapiens
ggcuaccuuugugugucucuagaagagaaaag

SEQ ID NO: 195174 - RNA, 32 nt, Homo Sapiens
guuguacugugguaccagcugcauuguggaug

SEQ ID NO: 195175 - RNA, 32 nt, Homo Sapiens
caucccuuucuagauuugacccaaucauacac

SEQ ID NO: 195176 - RNA, 32 nt, Homo Sapiens
cccuaccucuuccacacccugcccuccuaucc

SEQ ID NO: 195177 - RNA, 32 nt, Homo Sapiens
aaaucccuaaacaaaauuaguugccauaaaau

SEQ ID NO: 195178 - RNA, 32 nt, Homo Sapiens
cucgacccgggccaggaggcccggggcgcuga

SEQ ID NO: 195179 - RNA, 32 nt, Homo Sapiens
auuucagcccucguaauucauacggcaauuca

SEQ ID NO: 195180 - RNA, 32 nt, Homo Sapiens
uucuggaaaaagaaucaaaaacuggaauacaa

SEQ ID NO: 195181 - RNA, 32 nt, Homo Sapiens
gaugugauaauuaucuauucuauaaagccgag

SEQ ID NO: 195182 - RNA, 32 nt, Homo Sapiens
gaucugcucucaguuuugggguguggggaaga

SEQ ID NO: 195183 - RNA, 32 nt, Homo Sapiens
gcaccgcugcuacggcggccuagcaaauuccg

SEQ ID NO: 195184 - RNA, 32 nt, Homo Sapiens
guaccugcuacauacauuguaagcaaagugag

SEQ ID NO: 195185 - RNA, 32 nt, Homo Sapiens
ugauugacccgccccgguauauccaagaccug

SEQ ID NO: 195186 - RNA, 30 nt, Homo Sapiens
cuaucaugaauaaaguugguaugaacaugu

SEQ ID NO: 195187 - RNA, 32 nt, Homo Sapiens
uguagggcccccagccucaccucugccccagg

SEQ ID NO: 195188 - RNA, 32 nt, Homo Sapiens
ggcagcaggaccaauuaccucuuuuuugcucu

SEQ ID NO: 195189 - RNA, 32 nt, Homo Sapiens
aaguacucaaauauuucugauacugcugaguc

SEQ ID NO: 195190 - RNA, 29 nt, Homo Sapiens
ucuauucauguggagugaaagcugguuuu

SEQ ID NO: 195191 - RNA, 32 nt, Homo Sapiens
uggcguccuguaccugcagaugggguagugga

SEQ ID NO: 195192 - RNA, 32 nt, Homo Sapiens
agccacccaagccugcuggcugcggcccccuc

SEQ ID NO: 195193 - RNA, 29 nt, Homo Sapiens
aguaacauauguauacaugugccaugcug

SEQ ID NO: 195194 - RNA, 32 nt, Homo Sapiens
ccuuuucuagaaugucauauaaauggagucac

SEQ ID NO: 195195 - RNA, 32 nt, Homo Sapiens
uugcaggaaaugacuuuggaagggcaggcucu

SEQ ID NO: 195196 - RNA, 32 nt, Homo Sapiens
ugaaugaaugaauuuagaaccacacaaugcca

SEQ ID NO: 195197 - RNA, 32 nt, Homo Sapiens
ccuaaacuuuuaguugcaauuguuuugcagug

SEQ ID NO: 195198 - RNA, 30 nt, Homo Sapiens
aaaaauaaacuuguuaugcaaaauaaaaaa

SEQ ID NO: 195199 - RNA, 32 nt, Homo Sapiens
ggcauggaccaccuuuauuuuauacaaaauua

SEQ ID NO: 195200 - RNA, 32 nt, Homo Sapiens
auaaaaaggcuuuuaaaauuuuguuuguuuua

SEQ ID NO: 195201 - RNA, 32 nt, Homo Sapiens
uauuauuaguuuagacaaauuucaauguacug

SEQ ID NO: 195202 - RNA, 29 nt, Homo Sapiens
ucaaaguuuauccaauacccuuucaaaaa

SEQ ID NO: 195203 - RNA, 32 nt, Homo Sapiens
gagcuugacaacacucugggaaugaggaacaa

SEQ ID NO: 195204 - RNA, 32 nt, Homo Sapiens
aagacagugacgaauccacauucuucagccag

SEQ ID NO: 195205 - RNA, 32 nt, Homo Sapiens
guuguaaaaucuuuuuacuuuuuugccccucu

SEQ ID NO: 195206 - RNA, 32 nt, Homo Sapiens
agaagcuuccaaacgacagugaucuuaccagc

SEQ ID NO: 195207 - RNA, 32 nt, Homo Sapiens
aggcuuuuuuaaaguacuguacauauuugcaa

SEQ ID NO: 195208 - RNA, 30 nt, Homo Sapiens
gugaucuggggaaggagggaaacccaagga

SEQ ID NO: 195209 - RNA, 32 nt, Homo Sapiens
ccaagguagaaagguacgaagauacaauacug

SEQ ID NO: 195210 - RNA, 32 nt, Homo Sapiens
uuuguuuuuuauuuuugaugaucuucagaugg

SEQ ID NO: 195211 - RNA, 32 nt, Homo Sapiens
ggcuccccgacggccgcgggaccuaccagugc

SEQ ID NO: 195212 - RNA, 32 nt, Homo Sapiens
caggaaaacaccuuugggaacaaacucuuccu

SEQ ID NO: 195213 - RNA, 32 nt, Homo Sapiens
caugauuaaacuagauagaccugguauacagu

SEQ ID NO: 195214 - RNA, 32 nt, Homo Sapiens
uaaggcuuacuacauauaagacaacucauacu

SEQ ID NO: 195215 - RNA, 30 nt, Homo Sapiens
agacaggccaggcgcggcggcucacuccug

SEQ ID NO: 195216 - RNA, 32 nt, Homo Sapiens
cugagggaccagcucuacuuccaccugaaguu

SEQ ID NO: 195217 - RNA, 32 nt, Homo Sapiens
caagauuuugguuuuuauuuuuuuauuugaac

SEQ ID NO: 195218 - RNA, 32 nt, Homo Sapiens
aaaguaaaauaaauaaaauuuuagcaagucaa

SEQ ID NO: 195219 - RNA, 32 nt, Homo Sapiens
cgcugacucgccggagcgcacagggguguggg

SEQ ID NO: 195220 - RNA, 32 nt, Homo Sapiens
gauugaggcuguuguuggaaauguccuagguu

SEQ ID NO: 195221 - RNA, 32 nt, Homo Sapiens
gagccccuccucugggguaaugagcagaagaa

SEQ ID NO: 195222 - RNA, 32 nt, Homo Sapiens
gagacggcgggggagguggaggugcgaguaua

SEQ ID NO: 195223 - RNA, 32 nt, Homo Sapiens
aacccugcccgccccugaaggcuaccuggcgc

SEQ ID NO: 195224 - RNA, 32 nt, Homo Sapiens
aauuauuacaggaauuaaaaacaacuuuuuag

SEQ ID NO: 195225 - RNA, 32 nt, Homo Sapiens
caggcugaggcugacaacaauaggguggggag

SEQ ID NO: 195226 - RNA, 32 nt, Homo Sapiens
acgcgcucucccuguuuaguuauggcagagaa

SEQ ID NO: 195227 - RNA, 32 nt, Homo Sapiens
ggaccugggggaagaggaaagugucccaaggu

SEQ ID NO: 195228 - RNA, 32 nt, Homo Sapiens
cccacccaucugcccuucucccuucuacgugu

SEQ ID NO: 195229 - RNA, 32 nt, Homo Sapiens
cauuggccugacgcagcucccucaaacucugc

SEQ ID NO: 195230 - RNA, 32 nt, Homo Sapiens
gugguucccucccuuugccggaggaaccuugg

SEQ ID NO: 195231 - RNA, 32 nt, Homo Sapiens
gaccuguguagggccucacugcuggagcgggg

SEQ ID NO: 195232 - RNA, 32 nt, Homo Sapiens
gcacacacauccgaccccgucgccucuucucu

SEQ ID NO: 195233 - RNA, 32 nt, Homo Sapiens
agccaagcuggaauuacaaauuguagcccauu

SEQ ID NO: 195234 - RNA, 32 nt, Homo Sapiens
auuaacugauggcccaaaaacuaccucaagag

SEQ ID NO: 195235 - RNA, 32 nt, Homo Sapiens
ggauggacagcacccaccuggguuuacucaag

SEQ ID NO: 195236 - RNA, 32 nt, Homo Sapiens
uaaagagaauaaacauuuugcacauacaugua

SEQ ID NO: 195237 - RNA, 32 nt, Homo Sapiens
ggcguccacugucuacuuggggccugguguac

SEQ ID NO: 195238 - RNA, 32 nt, Homo Sapiens
gcuguccccucgcggcuaucgaccacauccug

SEQ ID NO: 195239 - RNA, 32 nt, Homo Sapiens
acagaaauguugaguaaggugacauuuugagc

SEQ ID NO: 195240 - RNA, 32 nt, Homo Sapiens
ggggccagagugggcucuggucuccacagaug

SEQ ID NO: 195241 - RNA, 32 nt, Homo Sapiens
augauuuagcaaaaacaaaaaugaaacaaaaa

SEQ ID NO: 195242 - RNA, 32 nt, Homo Sapiens
caugaaaugcccuuugcauguucuguugguac

SEQ ID NO: 195243 - RNA, 32 nt, Homo Sapiens
aagccaugugacuucauccuccguggcucugg

SEQ ID NO: 195244 - RNA, 32 nt, Homo Sapiens
gcacuagacugauguuguuuuucuacuuaaaa

SEQ ID NO: 195245 - RNA, 32 nt, Homo Sapiens
cgcccccagccugcugcccccagcuuucuaca

SEQ ID NO: 195246 - RNA, 32 nt, Homo Sapiens
ggauuugaucuuucuuuuuuuguuaucgaggc

SEQ ID NO: 195247 - RNA, 32 nt, Homo Sapiens
acuugugugcuauaucucugaggaauggugag

SEQ ID NO: 195248 - RNA, 32 nt, Homo Sapiens
gcugggcccagcgcgcagcugcggagcgcggc

SEQ ID NO: 195249 - RNA, 30 nt, Homo Sapiens
gaugaaugauuaaaagugaacuguauaaag

SEQ ID NO: 195250 - RNA, 32 nt, Homo Sapiens
gaggcucgccgcccgcgcccgcucguucggcc

SEQ ID NO: 195251 - RNA, 32 nt, Homo Sapiens
uaaaccuuuauguacuuaaaguuauacagaaa

SEQ ID NO: 195252 - RNA, 32 nt, Homo Sapiens
gggcuuuggccaugauuuccaaaauuaacagg

SEQ ID NO: 195253 - RNA, 32 nt, Homo Sapiens
gugcugaaccccugcccuuucauucuugggcc

SEQ ID NO: 195254 - RNA, 32 nt, Homo Sapiens
ucuagaaaguugaguucucauuuuuuuaaccu

SEQ ID NO: 195255 - RNA, 31 nt, Homo Sapiens
uauaaaaugcaaaauaaauguuuuaauuaac

SEQ ID NO: 195256 - RNA, 32 nt, Homo Sapiens
cucuccugguuuuuuucuuaagccccagaaag

SEQ ID NO: 195257 - RNA, 32 nt, Homo Sapiens
auauguuuuauccauuugauaauuuuacagua

SEQ ID NO: 195258 - RNA, 32 nt, Homo Sapiens
aauaugcaguacuguuuauauuuuguauaccu

SEQ ID NO: 195259 - RNA, 32 nt, Homo Sapiens
ggagcaagggaagaugggagacagaaaccugc

SEQ ID NO: 195260 - RNA, 32 nt, Homo Sapiens
aaaggagguucaggaucuuuuguaaguggagg

SEQ ID NO: 195261 - RNA, 32 nt, Homo Sapiens
gaauccagggccuuauaguucuccucauuauc

SEQ ID NO: 195262 - RNA, 32 nt, Homo Sapiens
aggagcggcggcccagcgcccggcguuggcca

SEQ ID NO: 195263 - RNA, 32 nt, Homo Sapiens
gccucccgccgcgcccgggauguauucguccc

SEQ ID NO: 195264 - RNA, 32 nt, Homo Sapiens
gucucgggggcaucuggcaugugagggccccu

SEQ ID NO: 195265 - RNA, 32 nt, Homo Sapiens
acucgaguacuaaaaggugucuuuacagcagg

SEQ ID NO: 195266 - RNA, 32 nt, Homo Sapiens
cauuguuuguuuguugauacaaaugaauuauu

SEQ ID NO: 195267 - RNA, 32 nt, Homo Sapiens
guaucacagcaauguuuucucauucuauauuu

SEQ ID NO: 195268 - RNA, 32 nt, Homo Sapiens
uaaaaauuggcauuuuaaguguuuaaaagcaa

SEQ ID NO: 195269 - RNA, 32 nt, Homo Sapiens
gcccaugagcgcgccgcggcccgggcuggcgu

SEQ ID NO: 195270 - RNA, 32 nt, Homo Sapiens
aagcaagauggcggcgacggcggccgcagugg

SEQ ID NO: 195271 - RNA, 32 nt, Homo Sapiens
auaagguccagaaauguccuugguguguuuga

SEQ ID NO: 195272 - RNA, 32 nt, Homo Sapiens
ugcccauccagaccuuccuguggcggcaaacc

SEQ ID NO: 195273 - RNA, 32 nt, Homo Sapiens
gcucgccgcgguagccggccgacgcgccagcu

SEQ ID NO: 195274 - RNA, 32 nt, Homo Sapiens
ccaguggcggcacguccuuggcgucucuaaug

SEQ ID NO: 195275 - RNA, 32 nt, Homo Sapiens
agauuuaacccuucacaacaguucuuguuaga

SEQ ID NO: 195276 - RNA, 32 nt, Homo Sapiens
gcaguagacauccuuccaccccugcccucagc

SEQ ID NO: 195277 - RNA, 32 nt, Homo Sapiens
uaguuagcuaaccuaugggaauuauacugugg

SEQ ID NO: 195278 - RNA, 32 nt, Homo Sapiens
uaugacaggacaggcuguucuugcuucagaac

SEQ ID NO: 195279 - RNA, 32 nt, Homo Sapiens
ggacugcaagauuauuugauaaagaguagcau

SEQ ID NO: 195280 - RNA, 32 nt, Homo Sapiens
ccauguaaguggcaagcagggcuggucucccu

SEQ ID NO: 195281 - RNA, 32 nt, Homo Sapiens
uugccccucucccgcuggcagcuccucagggg

SEQ ID NO: 195282 - RNA, 32 nt, Homo Sapiens
guaauaucaaggaacuggaaaauuaugcugaa

SEQ ID NO: 195283 - RNA, 32 nt, Homo Sapiens
aaccaacugucaagcauggcauuuaccuaaag

SEQ ID NO: 195284 - RNA, 32 nt, Homo Sapiens
caguuucaaucaugggugagcugauuuacauc

SEQ ID NO: 195285 - RNA, 32 nt, Homo Sapiens
ucuuaacaacugaguucccagucauaacggga

SEQ ID NO: 195286 - RNA, 32 nt, Homo Sapiens
auugaaaauuacauuauauuaacaucacaauu

SEQ ID NO: 195287 - RNA, 31 nt, Homo Sapiens
ucuagaaugucgcacuggaguuguguagcau

SEQ ID NO: 195288 - RNA, 32 nt, Homo Sapiens
gaaucuugacauuuuucuugugaaauuuggaa

SEQ ID NO: 195289 - RNA, 32 nt, Homo Sapiens
cuauaaacaacccguguaaacccugucuacac

SEQ ID NO: 195290 - RNA, 32 nt, Homo Sapiens
aauccugacauagaaagacaaauacuacauga

SEQ ID NO: 195291 - RNA, 32 nt, Homo Sapiens
aagcccaagaacaaaaguuguguuaugggugg

SEQ ID NO: 195292 - RNA, 32 nt, Homo Sapiens
uucaaaugauaaaagguuuuguagcuacuuug

SEQ ID NO: 195293 - RNA, 32 nt, Homo Sapiens
cauucuagguuugcaagaaaaauaugaccaca

SEQ ID NO: 195294 - RNA, 32 nt, Homo Sapiens
gacaagcagggccgcagcugcccugggacccc

SEQ ID NO: 195295 - RNA, 32 nt, Homo Sapiens
gaagguggguggcauauuggggaccugggaau

SEQ ID NO: 195296 - RNA, 32 nt, Homo Sapiens
gucuuaaacuaaaugugcaauagaaggugaug

SEQ ID NO: 195297 - RNA, 32 nt, Homo Sapiens
cuugguggaucgcuugagcccagcgguuuaag

SEQ ID NO: 195298 - RNA, 32 nt, Homo Sapiens
uuuagcuucagguugucuuguuucuguauaua

SEQ ID NO: 195299 - RNA, 31 nt, Homo Sapiens
cgugagccaccgugccugccccagaaugguu

SEQ ID NO: 195300 - RNA, 32 nt, Homo Sapiens
gacacccucaccacccaacagugaugaugcau

SEQ ID NO: 195301 - RNA, 32 nt, Homo Sapiens
aaauaauaaaauuuaauuuuaaaaaaaaaaaa

SEQ ID NO: 195302 - RNA, 32 nt, Homo Sapiens
uguuagcaaagcuguuugucuuucucggaaac

SEQ ID NO: 195303 - RNA, 32 nt, Homo Sapiens
uuggccaggcuggucaugaacuccugaccuca

SEQ ID NO: 195304 - RNA, 32 nt, Homo Sapiens
gaguuuuuuuuuuuuuuuuuuaaagauccuaa

SEQ ID NO: 195305 - RNA, 32 nt, Homo Sapiens
ggugguguggggaggguggggaggcagcgcga

SEQ ID NO: 195306 - RNA, 32 nt, Homo Sapiens
gucgagucagugccguuugcgccaguuggaau

SEQ ID NO: 195307 - RNA, 32 nt, Homo Sapiens
ggccgugcaccuccaccuccagccuccaguca

SEQ ID NO: 195308 - RNA, 32 nt, Homo Sapiens
aaaguaaaacaauagauugaauauuugauaau

SEQ ID NO: 195309 - RNA, 32 nt, Homo Sapiens
ggcagagaauccuuguguguagucuuuggugg

SEQ ID NO: 195310 - RNA, 32 nt, Homo Sapiens
auaaccagcuguaacacagcugagagacuuuu

SEQ ID NO: 195311 - RNA, 32 nt, Homo Sapiens
agcgugcgagugaauacgaacauccuggcguu

SEQ ID NO: 195312 - RNA, 32 nt, Homo Sapiens
ggcuccuucgggaaacccagccccgucaccgg

SEQ ID NO: 195313 - RNA, 32 nt, Homo Sapiens
agcaguggguugcagagcuccccaugccagaa

SEQ ID NO: 195314 - RNA, 32 nt, Homo Sapiens
uugaggggacauuuucaucaucaguucagcuu

SEQ ID NO: 195315 - RNA, 32 nt, Homo Sapiens
ggcugcgacuugauuuuuaggaggaagagggg

SEQ ID NO: 195316 - RNA, 32 nt, Homo Sapiens
acauuagacaccuguguguaguggccucugau

SEQ ID NO: 195317 - RNA, 32 nt, Homo Sapiens
ggaagcucaucccucccuccaagcccccgaug

SEQ ID NO: 195318 - RNA, 32 nt, Homo Sapiens
ucaccgugacauuuuuagccauuuguccuuga

SEQ ID NO: 195319 - RNA, 32 nt, Homo Sapiens
caggaagacaccuuuggugaagacuuuaaguu

SEQ ID NO: 195320 - RNA, 32 nt, Homo Sapiens
uaugcagccuucccucucuuucugggauguuu

SEQ ID NO: 195321 - RNA, 32 nt, Homo Sapiens
ggaaauacugagcagagacggcuggggcgggg

SEQ ID NO: 195322 - RNA, 32 nt, Homo Sapiens
uuaucaugguuuuuuguuguuuucguuuugaa

SEQ ID NO: 195323 - RNA, 27 nt, Homo Sapiens
caggcguccuucuucccgccgccggug

SEQ ID NO: 195324 - RNA, 32 nt, Homo Sapiens
gcaggcagauccaaaggauaucaugaaguuuc

SEQ ID NO: 195325 - RNA, 32 nt, Homo Sapiens
cccccgguggcugccucggcggaccggggagg

SEQ ID NO: 195326 - RNA, 32 nt, Homo Sapiens
ugucuccuuucugcaucauaaagauguguggu

SEQ ID NO: 195327 - RNA, 32 nt, Homo Sapiens
cauagccaucacgagcaugucacagugccgca

SEQ ID NO: 195328 - RNA, 32 nt, Homo Sapiens
cugccuguaacaugaaacuucaaacuaaacca

SEQ ID NO: 195329 - RNA, 32 nt, Homo Sapiens
uaauuuuacugugcuacauaaaguauaacaua

SEQ ID NO: 195330 - RNA, 32 nt, Homo Sapiens
auuuucuauaaaugaaaugauaccuguguucu

SEQ ID NO: 195331 - RNA, 32 nt, Homo Sapiens
aauacuauuucuuauugagguuuaaccucuau

SEQ ID NO: 195332 - RNA, 32 nt, Homo Sapiens
uuuauugacuaccugaugugcaguuuaaucuu

SEQ ID NO: 195333 - RNA, 32 nt, Homo Sapiens
ugcauuucaaaauaaacuggugugugcucugc

SEQ ID NO: 195334 - RNA, 32 nt, Homo Sapiens
ucuucuugccugcaauuuggcaagaaaggaua

SEQ ID NO: 195335 - RNA, 32 nt, Homo Sapiens
gcuuugaaaaaguggaaaugaauucacaccau

SEQ ID NO: 195336 - RNA, 32 nt, Homo Sapiens
gacugggucucauucugucacccaggcuagag

SEQ ID NO: 195337 - RNA, 32 nt, Homo Sapiens
guuuucaaaaaauuaauauauaaauaauucag

SEQ ID NO: 195338 - RNA, 32 nt, Homo Sapiens
uaacuuccucaccccuuaaccaaaaaggugug

SEQ ID NO: 195339 - RNA, 32 nt, Homo Sapiens
uaaggggugaugcaugaugggcagaugcugga

SEQ ID NO: 195340 - RNA, 32 nt, Homo Sapiens
uacaaauagguuuucuuaaaccagagaugcac

SEQ ID NO: 195341 - RNA, 32 nt, Homo Sapiens
ugcuaaauugguuuaccgagaacucccacccu

SEQ ID NO: 195342 - RNA, 32 nt, Homo Sapiens
gguggugccuuuucgcuaggggugcugucagg

SEQ ID NO: 195343 - RNA, 32 nt, Homo Sapiens
gucuguggcuucuaaccuuguaccucagacgg

SEQ ID NO: 195344 - RNA, 32 nt, Homo Sapiens
agagugcuggacauguucuguauuuugauuca

SEQ ID NO: 195345 - RNA, 32 nt, Homo Sapiens
cggaggagcagcaagagauacaugacauucuu

SEQ ID NO: 195346 - RNA, 27 nt, Homo Sapiens
ugauccuccugccucagccccugagua

SEQ ID NO: 195347 - RNA, 32 nt, Homo Sapiens
ggaugucagaucugguagguugcagcagagaa

SEQ ID NO: 195348 - RNA, 32 nt, Homo Sapiens
aauuuaauaaaauaaacuucaaaaaauguaug

SEQ ID NO: 195349 - RNA, 32 nt, Homo Sapiens
uauauguucagcaauguugaucucauaaaagg

SEQ ID NO: 195350 - RNA, 32 nt, Homo Sapiens
gccuuuugccuggcccaggcucacccccaccu

SEQ ID NO: 195351 - RNA, 32 nt, Homo Sapiens
acggcccgagacccucguccccggcccuuugc

SEQ ID NO: 195352 - RNA, 32 nt, Homo Sapiens
gauucccgcaccugggacgaugacucggaccc

SEQ ID NO: 195353 - RNA, 32 nt, Homo Sapiens
agucccccggcucuggggccccggugacccag

SEQ ID NO: 195354 - RNA, 32 nt, Homo Sapiens
aaugauggucauuugauggguuuugggggauu

SEQ ID NO: 195355 - RNA, 32 nt, Homo Sapiens
gcccggcgcgagccugcccccagcucugccga

SEQ ID NO: 195356 - RNA, 30 nt, Homo Sapiens
ccgaaugucuguguuucauugucuagucca

SEQ ID NO: 195357 - RNA, 32 nt, Homo Sapiens
agcgagaggaggagcuccaguggcggcggcgg

SEQ ID NO: 195358 - RNA, 32 nt, Homo Sapiens
ggggggcugucauggcggcaggacggcgaacu

SEQ ID NO: 195359 - RNA, 32 nt, Homo Sapiens
gggguucuuuaaaauuucugugguuuguggcu

SEQ ID NO: 195360 - RNA, 32 nt, Homo Sapiens
cccaucccccggacuccacccccagcgggagg

SEQ ID NO: 195361 - RNA, 32 nt, Homo Sapiens
uacauuuaauuugguacauuuucauaaaauau

SEQ ID NO: 195362 - RNA, 31 nt, Homo Sapiens
cgccgugugcucugccugcuuccuggaggcu

SEQ ID NO: 195363 - RNA, 32 nt, Homo Sapiens
ugugcccuguccacggacaccauccacgugca

SEQ ID NO: 195364 - RNA, 32 nt, Homo Sapiens
uugaucuuauugaauguuacuuugaaaaugua

SEQ ID NO: 195365 - RNA, 32 nt, Homo Sapiens
ggaagcugguggccuggaaggaaggauuaggu

SEQ ID NO: 195366 - RNA, 32 nt, Homo Sapiens
acccacgcccccagccagcaacucggcgcgga

SEQ ID NO: 195367 - RNA, 32 nt, Homo Sapiens
aagagcuguuggaaacaaaacuaaaagcaaac

SEQ ID NO: 195368 - RNA, 32 nt, Homo Sapiens
cugacaucaaggaacaacuaucauccgcacag

SEQ ID NO: 195369 - RNA, 32 nt, Homo Sapiens
guacagagauauauuuuuauuauacaaaguuu

SEQ ID NO: 195370 - RNA, 32 nt, Homo Sapiens
uucguuuuauaaauucagugugccaaaugaaa

SEQ ID NO: 195371 - RNA, 32 nt, Homo Sapiens
aauaggagcuuuggaaucauuauucaugaccc

SEQ ID NO: 195372 - RNA, 32 nt, Homo Sapiens
cugguguguccucagcucccagggcugcgggc

SEQ ID NO: 195373 - RNA, 32 nt, Homo Sapiens
cugccgaagauggcggaggugcagguccuggu

SEQ ID NO: 195374 - RNA, 32 nt, Homo Sapiens
ccucaguguucuauguuaucugaagagucaaa

SEQ ID NO: 195375 - RNA, 32 nt, Homo Sapiens
uuuuucacaaaacuggaagaaauaaaagcggu

SEQ ID NO: 195376 - RNA, 32 nt, Homo Sapiens
aaaaaacagucaaccugauuugagaaauuaac

SEQ ID NO: 195377 - RNA, 32 nt, Homo Sapiens
aaaaaccuuacaaagaauguauacucaucuuu

SEQ ID NO: 195378 - RNA, 32 nt, Homo Sapiens
ugcccggcucggcugcgccuccucuauuggcc

SEQ ID NO: 195379 - RNA, 32 nt, Homo Sapiens
uaugggguaaggaggugcuuuuuuaaaaucgu

SEQ ID NO: 195380 - RNA, 32 nt, Homo Sapiens
cugaggaggaggaggaggcggaggaggcggug

SEQ ID NO: 195381 - RNA, 32 nt, Homo Sapiens
cacggucugcaccuucuguugcuggugauaaa

SEQ ID NO: 195382 - RNA, 32 nt, Homo Sapiens
auuauaguuacaaugaauugcauaugaagaag

SEQ ID NO: 195383 - RNA, 32 nt, Homo Sapiens
cgggagcuggcugagcgccggggcccuuauuu

SEQ ID NO: 195384 - RNA, 32 nt, Homo Sapiens
uugagaccuaccugcuggagaagucgcgggcc

SEQ ID NO: 195385 - RNA, 32 nt, Homo Sapiens
acuguccaauagagagcagcccuucuucuguc

SEQ ID NO: 195386 - RNA, 32 nt, Homo Sapiens
uaucugcuguucccuaucaaguauuaauguag

SEQ ID NO: 195387 - RNA, 32 nt, Homo Sapiens
ugcuguuugugauaacugauagauaacucauu

SEQ ID NO: 195388 - RNA, 32 nt, Homo Sapiens
aggagccaagagauaaagaacaaugugcugaa

SEQ ID NO: 195389 - RNA, 32 nt, Homo Sapiens
cuuggaagcuggcucucacuccccuccacccu

SEQ ID NO: 195390 - RNA, 32 nt, Homo Sapiens
uaugugagugauauuucuuucguaaugcuaua

SEQ ID NO: 195391 - RNA, 32 nt, Homo Sapiens
cgcuuguaauuccagcacuuugggaggcugag

SEQ ID NO: 195392 - RNA, 32 nt, Homo Sapiens
cagguccucuccugagccaccaucaccuccug

SEQ ID NO: 195393 - RNA, 32 nt, Homo Sapiens
aacccccaggaucacuucuccuuggcuuccuu

SEQ ID NO: 195394 - RNA, 32 nt, Homo Sapiens
auucagugcagcccucauaguaucauacuuga

SEQ ID NO: 195395 - RNA, 32 nt, Homo Sapiens
ugcaucggacuaaacuaucuguauuuauuauu

SEQ ID NO: 195396 - RNA, 32 nt, Homo Sapiens
gugcaccgugguggcccggcgggcagcccagc

SEQ ID NO: 195397 - RNA, 32 nt, Homo Sapiens
uacuucuugagcauagauagguauaguggguu

SEQ ID NO: 195398 - RNA, 32 nt, Homo Sapiens
cugauucacugccuaugaacagaccauccccc

SEQ ID NO: 195399 - RNA, 32 nt, Homo Sapiens
gcaggcggauggagggcggccugguggaggag

SEQ ID NO: 195400 - RNA, 31 nt, Homo Sapiens
acacugagggcggcgucccucacccaggcca

SEQ ID NO: 195401 - RNA, 30 nt, Homo Sapiens
ucagccaagcguucggaugagucugguuau

SEQ ID NO: 195402 - RNA, 32 nt, Homo Sapiens
gggcccugccagcucuggggagcagcagccuu

SEQ ID NO: 195403 - RNA, 32 nt, Homo Sapiens
cacacacgcucgcucgcucgccggcgcgcgca

SEQ ID NO: 195404 - RNA, 32 nt, Homo Sapiens
gaauuacauuuaucugaagaaaauaguacaac

SEQ ID NO: 195405 - RNA, 32 nt, Homo Sapiens
cgcgguggccugagcccggccgccaucgauga

SEQ ID NO: 195406 - RNA, 32 nt, Homo Sapiens
cacugcuccuguggccuuccacagcagaaacc

SEQ ID NO: 195407 - RNA, 32 nt, Homo Sapiens
auguagcguaacaaacaaaaucauggagcuga

SEQ ID NO: 195408 - RNA, 32 nt, Homo Sapiens
acacuggcccccagcaccuccuccccugggag

SEQ ID NO: 195409 - RNA, 32 nt, Homo Sapiens
uaauuaaauguuucauugcauuuuuguaagaa

SEQ ID NO: 195410 - RNA, 32 nt, Homo Sapiens
caacugaguuaucuagugauaugaccucacug

SEQ ID NO: 195411 - RNA, 32 nt, Homo Sapiens
accaguccucccucacccaccuucugucuagg

SEQ ID NO: 195412 - RNA, 32 nt, Homo Sapiens
aauuuggagacaaagaguaugguuuuccuggc

SEQ ID NO: 195413 - RNA, 32 nt, Homo Sapiens
accuucacgcacccgcaccgccacuacgacgg

SEQ ID NO: 195414 - RNA, 32 nt, Homo Sapiens
ccagauaaacuuuccugucauguguuagaacu

SEQ ID NO: 195415 - RNA, 32 nt, Homo Sapiens
ggaagcccgacguuccgcucucccgagucccu

SEQ ID NO: 195416 - RNA, 32 nt, Homo Sapiens
agcucccaaguuuuccuucuccuaccccagcc

SEQ ID NO: 195417 - RNA, 32 nt, Homo Sapiens
agacacccccaguuuccuuguuuggguggcuc

SEQ ID NO: 195418 - RNA, 32 nt, Homo Sapiens
aagcauacaaccucuuuugugugaauuuuguu

SEQ ID NO: 195419 - RNA, 32 nt, Homo Sapiens
cguuuccuccacuccgccccauccugcagggc

SEQ ID NO: 195420 - RNA, 32 nt, Homo Sapiens
aggagggaacgagcgggcgccgggccacucgg

SEQ ID NO: 195421 - RNA, 32 nt, Homo Sapiens
cgcuggagcuugucgguggccgguaaugggca

SEQ ID NO: 195422 - RNA, 32 nt, Homo Sapiens
gaagguagccgggcauggugccaggcaccugu

SEQ ID NO: 195423 - RNA, 32 nt, Homo Sapiens
ggagacuaaagauugcacuuuuuuguaguuuu

SEQ ID NO: 195424 - RNA, 32 nt, Homo Sapiens
uguggcccaagccuggucuccucccaaaauac

SEQ ID NO: 195425 - RNA, 32 nt, Homo Sapiens
uuaucggcgcugugucagcaguguugcaucug

SEQ ID NO: 195426 - RNA, 32 nt, Homo Sapiens
cuuugaccuggcagaugcacaaacaguauugg

SEQ ID NO: 195427 - RNA, 32 nt, Homo Sapiens
ccgcgggaugagccagugacucggccgguccg

SEQ ID NO: 195428 - RNA, 31 nt, Homo Sapiens
ugacaguuucaauugaaggugcuguuuguag

SEQ ID NO: 195429 - RNA, 32 nt, Homo Sapiens
cgugcuguccugaacgcgggccaggcagcugc

SEQ ID NO: 195430 - RNA, 32 nt, Homo Sapiens
gaccaaacacuggugcuggcuuugguggugga

SEQ ID NO: 195431 - RNA, 32 nt, Homo Sapiens
ggaaggaaaugucucaagaaacaaagaucucg

SEQ ID NO: 195432 - RNA, 32 nt, Homo Sapiens
uccuggaaggcacuucucucccugacugccgc

SEQ ID NO: 195433 - RNA, 31 nt, Homo Sapiens
cccaagauggugaugcugcugcugcugcuuu

SEQ ID NO: 195434 - RNA, 32 nt, Homo Sapiens
cacacacaaacacuucuagaguugcccauucc

SEQ ID NO: 195435 - RNA, 32 nt, Homo Sapiens
acaucaaaucaucagcacaagaacaucaacag

SEQ ID NO: 195436 - RNA, 32 nt, Homo Sapiens
uaucuuuuuuggagaaaugucuauucaagucc

SEQ ID NO: 195437 - RNA, 32 nt, Homo Sapiens
ggguguagaccacaccaccucccacugggcac

SEQ ID NO: 195438 - RNA, 32 nt, Homo Sapiens
caggccagggauuuguacaugguguuaauucu

SEQ ID NO: 195439 - RNA, 32 nt, Homo Sapiens
cuuguaugaucuuuuuagucauuuuuuugccg

SEQ ID NO: 195440 - RNA, 32 nt, Homo Sapiens
aagaggugccaccccugaggaggcaccggugc

SEQ ID NO: 195441 - RNA, 32 nt, Homo Sapiens
ccuucguggugaguguuacaguucuuaaaggu

SEQ ID NO: 195442 - RNA, 32 nt, Homo Sapiens
cgugugcacuguaacuuuugugugcucaagaa

SEQ ID NO: 195443 - RNA, 31 nt, Homo Sapiens
gaauagcagacucuggcgaaguuguucaccc

SEQ ID NO: 195444 - RNA, 32 nt, Homo Sapiens
gaccagcuaauuuuuaaauauuuuuguagaga

SEQ ID NO: 195445 - RNA, 32 nt, Homo Sapiens
cacagugcugucugaucugugcuuuccagcuc

SEQ ID NO: 195446 - RNA, 32 nt, Homo Sapiens
ugacgccggcccggcggcgggucacgugagcg

SEQ ID NO: 195447 - RNA, 32 nt, Homo Sapiens
uguaauacaauuuuguccuaauuugccuaauu

SEQ ID NO: 195448 - RNA, 32 nt, Homo Sapiens
cgcgacgcuuccaggcgcucuccgcggcucug

SEQ ID NO: 195449 - RNA, 32 nt, Homo Sapiens
ccuuugugaagcuggaacacuggcuggagacc

SEQ ID NO: 195450 - RNA, 32 nt, Homo Sapiens
ccaccucggccacacugcuucgcuccccccuc

SEQ ID NO: 195451 - RNA, 32 nt, Homo Sapiens
uuugccuuggcuucaaacuaguucuugauuua

SEQ ID NO: 195452 - RNA, 32 nt, Homo Sapiens
uucucccccguccaucugaccagcugggcccc

SEQ ID NO: 195453 - RNA, 32 nt, Homo Sapiens
auuucuacaaccuugucacauguagcugaguc

SEQ ID NO: 195454 - RNA, 32 nt, Homo Sapiens
accaaggaguuaaguugaggcuuuuuccagcu

SEQ ID NO: 195455 - RNA, 32 nt, Homo Sapiens
agcuaaucuaacaacuaacugccaaauugaua

SEQ ID NO: 195456 - RNA, 32 nt, Homo Sapiens
acuucuauuuucuguguagugaaaacaauguc

SEQ ID NO: 195457 - RNA, 32 nt, Homo Sapiens
auaauguuucuuuuaauugucuaugcuuaauc

SEQ ID NO: 195458 - RNA, 32 nt, Homo Sapiens
ggcucacgaaguuaaggaaagaugccaucugc

SEQ ID NO: 195459 - RNA, 32 nt, Homo Sapiens
acucugucucaaaaacaaaacaaaacagaaca

SEQ ID NO: 195460 - RNA, 32 nt, Homo Sapiens
gcaaacucccaguugcaagcuccuuggcuccc

SEQ ID NO: 195461 - RNA, 32 nt, Homo Sapiens
gagcaaaaccaucaaccaccaggcagccaggc

SEQ ID NO: 195462 - RNA, 32 nt, Homo Sapiens
uggcuggaaaugcagaauaugaauugauuagu

SEQ ID NO: 195463 - RNA, 32 nt, Homo Sapiens
auuugaucuucaguggccaaacacgaauuaaa

SEQ ID NO: 195464 - RNA, 32 nt, Homo Sapiens
cagccgcggagcaguagccgccgugggaggga

SEQ ID NO: 195465 - RNA, 32 nt, Homo Sapiens
uucucuugagacggagucucgcucuguugccc

SEQ ID NO: 195466 - RNA, 32 nt, Homo Sapiens
agcaguauguuuagugaaaugacuuuaaacuu

SEQ ID NO: 195467 - RNA, 32 nt, Homo Sapiens
gcagaggccguggaguucaggugugaggggca

SEQ ID NO: 195468 - RNA, 32 nt, Homo Sapiens
uuugcaguaugaaaauggcuagagauugggua

SEQ ID NO: 195469 - RNA, 32 nt, Homo Sapiens
uauagaauaauauuuauguuuacaauguaacu

SEQ ID NO: 195470 - RNA, 31 nt, Homo Sapiens
uccaaagcaaauugugaagaucaaaugugug

SEQ ID NO: 195471 - RNA, 32 nt, Homo Sapiens
agcuacuuaaaaagagacccaggcagcauuuc

SEQ ID NO: 195472 - RNA, 32 nt, Homo Sapiens
uacuuuccaagcaaguuagguacgcuuuccau

SEQ ID NO: 195473 - RNA, 32 nt, Homo Sapiens
guuuacugacuucuagagccauucucuuuaac

SEQ ID NO: 195474 - RNA, 32 nt, Homo Sapiens
caguaauuauuauugagacuuacuauaauaau

SEQ ID NO: 195475 - RNA, 32 nt, Homo Sapiens
augaucucauucuauuugccaauuaugaauuu

SEQ ID NO: 195476 - RNA, 32 nt, Homo Sapiens
cuuucaaggagcucacuuggccugcuugcccu

SEQ ID NO: 195477 - RNA, 32 nt, Homo Sapiens
ugucuucuguuguccacagccagagcuuagug

SEQ ID NO: 195478 - RNA, 32 nt, Homo Sapiens
agagcuuccauaucaaauuccucagcuuuguu

SEQ ID NO: 195479 - RNA, 32 nt, Homo Sapiens
ccgugcugcagucgggcacgccgcggcgccgg

SEQ ID NO: 195480 - RNA, 32 nt, Homo Sapiens
gaauaucaaaaauucugguuguauugggaacc

SEQ ID NO: 195481 - RNA, 32 nt, Homo Sapiens
cccuuaggauggggcucccagcuccuuucucc

SEQ ID NO: 195482 - RNA, 32 nt, Homo Sapiens
ugguuucagcaggcgacuuucuuccaaugcug

SEQ ID NO: 195483 - RNA, 32 nt, Homo Sapiens
ccucuccuuucugugcuuaauggaugggguuu

SEQ ID NO: 195484 - RNA, 32 nt, Homo Sapiens
gagaagcugggcccagccgcggugccugcugg

SEQ ID NO: 195485 - RNA, 32 nt, Homo Sapiens
gggcugaccccaugggcuaguacuugggguuu

SEQ ID NO: 195486 - RNA, 32 nt, Homo Sapiens
ggacagcugaggaugggccuagcagaugaagc

SEQ ID NO: 195487 - RNA, 32 nt, Homo Sapiens
gaccccgacccggcccggucaggccccauacu

SEQ ID NO: 195488 - RNA, 32 nt, Homo Sapiens
ccagugagaagcugcugaugagagugagagag

SEQ ID NO: 195489 - RNA, 32 nt, Homo Sapiens
aaaucacacaucuugaagagaauaggauuucc

SEQ ID NO: 195490 - RNA, 32 nt, Homo Sapiens
ccauguucuuugauuuaggcugguaguaaaca

SEQ ID NO: 195491 - RNA, 32 nt, Homo Sapiens
ugcggucccucccccucacguucucucuuccu

SEQ ID NO: 195492 - RNA, 32 nt, Homo Sapiens
gaaugguaugaacuuuuaaaccauauuauuga

SEQ ID NO: 195493 - RNA, 32 nt, Homo Sapiens
agccaauguaggcccaaaacuuccucaaguca

SEQ ID NO: 195494 - RNA, 32 nt, Homo Sapiens
cagaguagugacauuucugugcuccuaccauc

SEQ ID NO: 195495 - RNA, 32 nt, Homo Sapiens
cuuuaccaccucuuccucccccucaaaggaaa

SEQ ID NO: 195496 - RNA, 32 nt, Homo Sapiens
guacacacaaaauaaauguuuacuuaagagcc

SEQ ID NO: 195497 - RNA, 32 nt, Homo Sapiens
cauacacaaaaauuaauuccaaaugaauaaaa

SEQ ID NO: 195498 - RNA, 32 nt, Homo Sapiens
aggccaaauuaaaggggagcauggcagauaac

SEQ ID NO: 195499 - RNA, 32 nt, Homo Sapiens
aaguauuagguuuuaaauuuuauaaugugccc

SEQ ID NO: 195500 - RNA, 32 nt, Homo Sapiens
gccccuguugugucuuuuuuucagacucacag

SEQ ID NO: 195501 - RNA, 32 nt, Homo Sapiens
aucauuuuaaacaaaugaugguaguaauccau

SEQ ID NO: 195502 - RNA, 32 nt, Homo Sapiens
gguguuuugaaccugaucugcauaaaaccaua

SEQ ID NO: 195503 - RNA, 32 nt, Homo Sapiens
caacaguucaaagaagucauggcccaaaucca

SEQ ID NO: 195504 - RNA, 32 nt, Homo Sapiens
ggggaacguaacuuaaauuagaucaucagaaa

SEQ ID NO: 195505 - RNA, 32 nt, Homo Sapiens
cacgcacccuucccugccgccucgcugcagag

SEQ ID NO: 195506 - RNA, 32 nt, Homo Sapiens
gcaguggcggcggcugcagaagcccaagcagc

SEQ ID NO: 195507 - RNA, 32 nt, Homo Sapiens
uggaaacucaccccaaaccuugaaucgugaua

SEQ ID NO: 195508 - RNA, 32 nt, Homo Sapiens
uaacccccacuccagcugcagacgccacggag

SEQ ID NO: 195509 - RNA, 32 nt, Homo Sapiens
ugccccucucccgcuggcagcuccucagggga

SEQ ID NO: 195510 - RNA, 32 nt, Homo Sapiens
uccugcuguggguggagagccuugacucgcug

SEQ ID NO: 195511 - RNA, 32 nt, Homo Sapiens
cccccaacagagcucuucaucuuaccggugga

SEQ ID NO: 195512 - RNA, 32 nt, Homo Sapiens
uauuuuauucacauuaaucuagcauuaauucc

SEQ ID NO: 195513 - RNA, 32 nt, Homo Sapiens
ggacagacaaacgagcggagggaagauaccua

SEQ ID NO: 195514 - RNA, 32 nt, Homo Sapiens
aucgaggacuuaggagaugcccugcccugagu

SEQ ID NO: 195515 - RNA, 32 nt, Homo Sapiens
cuagcaaaacgcagauggaauaagaaaacaaa

SEQ ID NO: 195516 - RNA, 32 nt, Homo Sapiens
auaggccugccaggcggcccuggcuucuggcu

SEQ ID NO: 195517 - RNA, 32 nt, Homo Sapiens
gugugggcacagccuuccaugccuccaggagu

SEQ ID NO: 195518 - RNA, 32 nt, Homo Sapiens
acgggguguuguugucucugguggugcugcau

SEQ ID NO: 195519 - RNA, 32 nt, Homo Sapiens
ccugcgucuuucugccugagcuuguucuuugg

SEQ ID NO: 195520 - RNA, 32 nt, Homo Sapiens
ggcccuggccuggcccgggugcaggcugcaug

SEQ ID NO: 195521 - RNA, 32 nt, Homo Sapiens
caaucagggccauggguggcccgggcuggggc

SEQ ID NO: 195522 - RNA, 28 nt, Homo Sapiens
ccuccagcacagggaccaagugggggag

SEQ ID NO: 195523 - RNA, 32 nt, Homo Sapiens
ggggucacagggggugucgggcggaggaaagu

SEQ ID NO: 195524 - RNA, 32 nt, Homo Sapiens
gcggagaugacgucacgcaagcaacggcgcug

SEQ ID NO: 195525 - RNA, 32 nt, Homo Sapiens
gaaguuugauuucauuuuguauguauuaugcu

SEQ ID NO: 195526 - RNA, 32 nt, Homo Sapiens
uaauggggugaaagagaggggaggcuugccuu

SEQ ID NO: 195527 - RNA, 32 nt, Homo Sapiens
cuucauuaucaaguccaggacaguguuuauuu

SEQ ID NO: 195528 - RNA, 32 nt, Homo Sapiens
acagcuugaggccccuccugcugccuggccaa

SEQ ID NO: 195529 - RNA, 32 nt, Homo Sapiens
gcccuggcccggcagcugcugcucuacgaccg

SEQ ID NO: 195530 - RNA, 32 nt, Homo Sapiens
auccuucaagcugguuuguaaauauuugaauc

SEQ ID NO: 195531 - RNA, 32 nt, Homo Sapiens
uuuuauguaggguaaaugugacuggaauacac

SEQ ID NO: 195532 - RNA, 32 nt, Homo Sapiens
uuagaagauucuauguuaauauuuuaugugua

SEQ ID NO: 195533 - RNA, 32 nt, Homo Sapiens
cucacauccacccauacacacacacacacaca

SEQ ID NO: 195534 - RNA, 32 nt, Homo Sapiens
uggagccugccugaaauugauuuuucagaagc

SEQ ID NO: 195535 - RNA, 32 nt, Homo Sapiens
aaaacugcuauucccuaauccuccuccuauaa

SEQ ID NO: 195536 - RNA, 32 nt, Homo Sapiens
agagagccagaugggguauguuuuugugcugu

SEQ ID NO: 195537 - RNA, 32 nt, Homo Sapiens
auagcacaauuucaaagaagagacucuuugca

SEQ ID NO: 195538 - RNA, 32 nt, Homo Sapiens
gcccuuuggaaagaagcuacuauaggacaagc

SEQ ID NO: 195539 - RNA, 32 nt, Homo Sapiens
cuggggauuggagauguuccccugccuuugug

SEQ ID NO: 195540 - RNA, 32 nt, Homo Sapiens
uagcaacgguagcuagcugcagggccaguggc

SEQ ID NO: 195541 - RNA, 32 nt, Homo Sapiens
cuucuccuuuuggaagcagauagccaugcagg

SEQ ID NO: 195542 - RNA, 32 nt, Homo Sapiens
ccccacuugagaccugcugcuuccuucaaaau

SEQ ID NO: 195543 - RNA, 32 nt, Homo Sapiens
acaggggcaggaggagugugcuagaacccacc

SEQ ID NO: 195544 - RNA, 32 nt, Homo Sapiens
acgugccugacaguguuuaagguguccguuga

SEQ ID NO: 195545 - RNA, 32 nt, Homo Sapiens
acucuggcuucucuccucagacuucuauuuuu

SEQ ID NO: 195546 - RNA, 32 nt, Homo Sapiens
gauugaguguaaaucauucaaaccagugguuc

SEQ ID NO: 195547 - RNA, 32 nt, Homo Sapiens
caagccacauaaaagcaaccuaaaaauuaaac

SEQ ID NO: 195548 - RNA, 32 nt, Homo Sapiens
cuaaaacaguauucuguaaagcuuaaauuggu

SEQ ID NO: 195549 - RNA, 29 nt, Homo Sapiens
aguccugggcacaacuucgcaggaggagc

SEQ ID NO: 195550 - RNA, 31 nt, Homo Sapiens
cgacagcgccgccgccugccccgccaugggu

SEQ ID NO: 195551 - RNA, 32 nt, Homo Sapiens
agggccguccgggcuuccuguggauuggcgga

SEQ ID NO: 195552 - RNA, 32 nt, Homo Sapiens
uuuaaaauguuuaaauucucuuucacagcacc

SEQ ID NO: 195553 - RNA, 32 nt, Homo Sapiens
aucaguaagauucuagagaaagcaaaacauag

SEQ ID NO: 195554 - RNA, 32 nt, Homo Sapiens
uggggguucagaucgauggccuuguccauguu

SEQ ID NO: 195555 - RNA, 32 nt, Homo Sapiens
agggcaagagcuggcccuggggugcggacagu

SEQ ID NO: 195556 - RNA, 32 nt, Homo Sapiens
ggugcugaagcccacaguuccacacagggcag

SEQ ID NO: 195557 - RNA, 32 nt, Homo Sapiens
uuuuaaaaauaauuuauaaaucuuaccaaaac

SEQ ID NO: 195558 - RNA, 32 nt, Homo Sapiens
gacagugacgcaaggacuaggcugggagggag

SEQ ID NO: 195559 - RNA, 32 nt, Homo Sapiens
caguguccagaagcggccugugcguucccuuc

SEQ ID NO: 195560 - RNA, 32 nt, Homo Sapiens
gccccucccuccccgugcuucaugugacucuu

SEQ ID NO: 195561 - RNA, 32 nt, Homo Sapiens
uaaucaucacaaugccuuuggugugaagaaga

SEQ ID NO: 195562 - RNA, 32 nt, Homo Sapiens
ucacauugcagcacaugaugccagaaauagca

SEQ ID NO: 195563 - RNA, 32 nt, Homo Sapiens
acuccacaguguauauauuuugccauuuauuu

SEQ ID NO: 195564 - RNA, 32 nt, Homo Sapiens
cacccugccccaccccaccuccacucccaccu

SEQ ID NO: 195565 - RNA, 32 nt, Homo Sapiens
gacaggaggcggcggcagcagcggcggcauga

SEQ ID NO: 195566 - RNA, 32 nt, Homo Sapiens
uaaggguucgacagacacuuugagagcuuggg

SEQ ID NO: 195567 - RNA, 32 nt, Homo Sapiens
acgucacacucccaggaugaugaagaggggau

SEQ ID NO: 195568 - RNA, 32 nt, Homo Sapiens
ugggucucagaauugaugcaacauaagcaggu

SEQ ID NO: 195569 - RNA, 32 nt, Homo Sapiens
cgacugcaggguccugccccuugcccagccuc

SEQ ID NO: 195570 - RNA, 32 nt, Homo Sapiens
uggggaagaaaagauaggggggaugaauacua

SEQ ID NO: 195571 - RNA, 32 nt, Homo Sapiens
ggccuguaauccuggcacuuugggaggccaag

SEQ ID NO: 195572 - RNA, 32 nt, Homo Sapiens
uugggguugaaauaaaccagugggagcaugga

SEQ ID NO: 195573 - RNA, 32 nt, Homo Sapiens
ccgccccccucaucuccacccucccccauauc

SEQ ID NO: 195574 - RNA, 32 nt, Homo Sapiens
cgcaagccacuacaccugcccucuucaucgaa

SEQ ID NO: 195575 - RNA, 32 nt, Homo Sapiens
cuccuugggaugaagaggguagagugggcugc

SEQ ID NO: 195576 - RNA, 32 nt, Homo Sapiens
gcggcgcugucgcgcugccgcucacucucggg

SEQ ID NO: 195577 - RNA, 28 nt, Homo Sapiens
caaaugauuauaagcacaccacagagac

SEQ ID NO: 195578 - RNA, 32 nt, Homo Sapiens
auucccuuguuucaaaagacuugcagcuaauc

SEQ ID NO: 195579 - RNA, 32 nt, Homo Sapiens
aggcccagcugccacacccuuucugggagaag

SEQ ID NO: 195580 - RNA, 32 nt, Homo Sapiens
uuuaggcaguaucauuuccauuuuauaaguag

SEQ ID NO: 195581 - RNA, 32 nt, Homo Sapiens
gggacucugcaccuaccucacaggguuguugu

SEQ ID NO: 195582 - RNA, 32 nt, Homo Sapiens
ggccuguaaucccagcacuuugggaggcugag

SEQ ID NO: 195583 - RNA, 32 nt, Homo Sapiens
acuugaaugaauugggaaacacccagaacuuu

SEQ ID NO: 195584 - RNA, 32 nt, Homo Sapiens
aaagguaauuuucuaagcauaccuuuggaauu

SEQ ID NO: 195585 - RNA, 32 nt, Homo Sapiens
cacaccaaggucgggcccacugcaggcagcug

SEQ ID NO: 195586 - RNA, 32 nt, Homo Sapiens
gcaggucuucuccuccucuccaucccuauucc

SEQ ID NO: 195587 - RNA, 32 nt, Homo Sapiens
ugaguauuuuauauugguaugcacuuuugaaa

SEQ ID NO: 195588 - RNA, 32 nt, Homo Sapiens
gacugaaguuuauguauagacacaccucuacc

SEQ ID NO: 195589 - RNA, 32 nt, Homo Sapiens
caccggaccagccuggcccaccccacccacuu

SEQ ID NO: 195590 - RNA, 32 nt, Homo Sapiens
cuggcuucugugaaacugaacaucuccaagua

SEQ ID NO: 195591 - RNA, 32 nt, Homo Sapiens
ugccccaguuguuucuacuacauggaagaccu

SEQ ID NO: 195592 - RNA, 32 nt, Homo Sapiens
uaaaaaauccgaacagcauacuugaagaaugu

SEQ ID NO: 195593 - RNA, 32 nt, Homo Sapiens
uuccggggcugcucggugcugcuguuaagacg

SEQ ID NO: 195594 - RNA, 32 nt, Homo Sapiens
agcagccagcccucgcuguccaggcgcagcau

SEQ ID NO: 195595 - RNA, 32 nt, Homo Sapiens
uucuaacucuuuugcccuucucuucugccagu

SEQ ID NO: 195596 - RNA, 32 nt, Homo Sapiens
uuucuaaauuccuuaguacauauacuuggauc

SEQ ID NO: 195597 - RNA, 32 nt, Homo Sapiens
cacacgggauccuccaaccagacaguguggcc

SEQ ID NO: 195598 - RNA, 32 nt, Homo Sapiens
ugagcaucuaauggaaagaagguaugaguugc

SEQ ID NO: 195599 - RNA, 32 nt, Homo Sapiens
acgcugugggagagggaagaggaggcugggcc

SEQ ID NO: 195600 - RNA, 32 nt, Homo Sapiens
acaaaguaauucuauuaaaugaacuaacugaa

SEQ ID NO: 195601 - RNA, 32 nt, Homo Sapiens
cugugagaauaaagauguguuaaaauaaaaaa

SEQ ID NO: 195602 - RNA, 30 nt, Homo Sapiens
uggcucagcuauuugggggaaucuguuuuc

SEQ ID NO: 195603 - RNA, 32 nt, Homo Sapiens
cacaugguggccccgcugugucuggggucacc

SEQ ID NO: 195604 - RNA, 32 nt, Homo Sapiens
ccaucaaaacaaaggaugggauacguauagaa

SEQ ID NO: 195605 - RNA, 31 nt, Homo Sapiens
ccaaaacaguagcauaugcaggcaagucauu

SEQ ID NO: 195606 - RNA, 32 nt, Homo Sapiens
gccuauuaacugugucuuagcaauguuguaua

SEQ ID NO: 195607 - RNA, 32 nt, Homo Sapiens
ccccuccccagccauccuccccgccuuggggg

SEQ ID NO: 195608 - RNA, 32 nt, Homo Sapiens
ugaaggcagaguuuacuguuaucccucccucu

SEQ ID NO: 195609 - RNA, 32 nt, Homo Sapiens
guguguuaacugaauaggaaaauguacauacu

SEQ ID NO: 195610 - RNA, 32 nt, Homo Sapiens
ugugauauuuuugcuugauagagaaucaaauu

SEQ ID NO: 195611 - RNA, 32 nt, Homo Sapiens
acuagaucuguaaagucuggaacuagaucugu

SEQ ID NO: 195612 - RNA, 32 nt, Homo Sapiens
cuccccagcccucagcagcaucacaggauccu

SEQ ID NO: 195613 - RNA, 32 nt, Homo Sapiens
uauuuaaucaaugaaauuuaagguguaaaaau

SEQ ID NO: 195614 - RNA, 32 nt, Homo Sapiens
ccugagcagggugaggagcagcugccagcccc

SEQ ID NO: 195615 - RNA, 32 nt, Homo Sapiens
guucccuagggguucugccccucccccucucu

SEQ ID NO: 195616 - RNA, 32 nt, Homo Sapiens
gucagaccaggaagagucaguugcuugggccu

SEQ ID NO: 195617 - RNA, 32 nt, Homo Sapiens
uucugaguaaggggcuuuguugaaagaggggg

SEQ ID NO: 195618 - RNA, 28 nt, Homo Sapiens
acuagucaggugaacaggaugacuucuc

SEQ ID NO: 195619 - RNA, 32 nt, Homo Sapiens
ugugcucaccucugggaaaagcgggugagcag

SEQ ID NO: 195620 - RNA, 32 nt, Homo Sapiens
ccgcgcuguccgccgccgcugccugagucgac

SEQ ID NO: 195621 - RNA, 32 nt, Homo Sapiens
caccuuuauauauauuuuuaaaugaaaacuaa

SEQ ID NO: 195622 - RNA, 32 nt, Homo Sapiens
gccccgcaucccgcggccccagcacaaggugc

SEQ ID NO: 195623 - RNA, 32 nt, Homo Sapiens
gaagaaauacucagagacagaagcauuuagaa

SEQ ID NO: 195624 - RNA, 32 nt, Homo Sapiens
uaaaguucugcaaaauacacguuuaucuuaca

SEQ ID NO: 195625 - RNA, 32 nt, Homo Sapiens
ugggauacagaaaauaaggacaaggucugggu

SEQ ID NO: 195626 - RNA, 32 nt, Homo Sapiens
aaaauggagauauguuucugcuguucaaaaaa

SEQ ID NO: 195627 - RNA, 32 nt, Homo Sapiens
ucgccucagcccggcggcggcggcggccgaac

SEQ ID NO: 195628 - RNA, 32 nt, Homo Sapiens
ccgcaguaguucgggccauggaggcggagccg

SEQ ID NO: 195629 - RNA, 32 nt, Homo Sapiens
ugauuuuauuuuuuguuucaaaaaaguuuaag

SEQ ID NO: 195630 - RNA, 32 nt, Homo Sapiens
guauuauuucaccagcagcauagaacaggacc

SEQ ID NO: 195631 - RNA, 28 nt, Homo Sapiens
ccacagcugggcccaccgaggugcuauc

SEQ ID NO: 195632 - RNA, 32 nt, Homo Sapiens
uggaguuguuugcugcaacugccauuccccgu

SEQ ID NO: 195633 - RNA, 32 nt, Homo Sapiens
uuaaaaggcuuugaauucauggaaauacaaaa

SEQ ID NO: 195634 - RNA, 32 nt, Homo Sapiens
ggcgccaggacacaguggcugcccugucgcug

SEQ ID NO: 195635 - RNA, 32 nt, Homo Sapiens
uccuuugcucugcacgaguuaccuguuaaacu

SEQ ID NO: 195636 - RNA, 32 nt, Homo Sapiens
aaaaggucagauucuaagagcuaaacguuaag

SEQ ID NO: 195637 - RNA, 32 nt, Homo Sapiens
auuggcugacuuccgucaggcagcugggcccu

SEQ ID NO: 195638 - RNA, 32 nt, Homo Sapiens
cuuaccucuugugguucucaauaaaacagaac

SEQ ID NO: 195639 - RNA, 32 nt, Homo Sapiens
auauauguauaaagaaguauuacuguuuguaa

SEQ ID NO: 195640 - RNA, 27 nt, Homo Sapiens
cuuuaguccuucucaccucacaucaca

SEQ ID NO: 195641 - RNA, 32 nt, Homo Sapiens
ccuguaccacgaugugaugcuggagaacuuga

SEQ ID NO: 195642 - RNA, 32 nt, Homo Sapiens
cacucaugaaagauuaaaaaauggaaaccaac

SEQ ID NO: 195643 - RNA, 32 nt, Homo Sapiens
ugaaauguuucaaugauauaugcaacuauuca

SEQ ID NO: 195644 - RNA, 32 nt, Homo Sapiens
caucuuggccugcaguaagcggugcugacggg

SEQ ID NO: 195645 - RNA, 32 nt, Homo Sapiens
uaagguggcacagcacaaauggcugccaugga

SEQ ID NO: 195646 - RNA, 32 nt, Homo Sapiens
ucccggcgagggugcgcgcucggcgccgggag

SEQ ID NO: 195647 - RNA, 32 nt, Homo Sapiens
augguaguauuuuuuuuuuuuaucagcuguga

SEQ ID NO: 195648 - RNA, 30 nt, Homo Sapiens
augccggcgccgccgccgccggggaugcgu

SEQ ID NO: 195649 - RNA, 32 nt, Homo Sapiens
agguuuagacuacgggaggaguauauuaccug

SEQ ID NO: 195650 - RNA, 32 nt, Homo Sapiens
uuuaauguuuuauaugaacauuuuacauuugu

SEQ ID NO: 195651 - RNA, 32 nt, Homo Sapiens
aauuccauguauaguugguguacacucaaaac

SEQ ID NO: 195652 - RNA, 32 nt, Homo Sapiens
ucauucucuuguauggcaaacguggccaacgu

SEQ ID NO: 195653 - RNA, 32 nt, Homo Sapiens
uaaaauuugcuuccuauauaaauuaacagauu

SEQ ID NO: 195654 - RNA, 31 nt, Homo Sapiens
ggccuggcggcgggcaagccccgcgugcugu

SEQ ID NO: 195655 - RNA, 32 nt, Homo Sapiens
cuuuaagagucuuccacuucaaugcacauggu

SEQ ID NO: 195656 - RNA, 32 nt, Homo Sapiens
aaaauaaagcuguuguuaaauuuuaaacaaua

SEQ ID NO: 195657 - RNA, 32 nt, Homo Sapiens
ccggcggccucucuccucucccucagugacuc

SEQ ID NO: 195658 - RNA, 32 nt, Homo Sapiens
cagaaugugcccucccucucccccucauaacc

SEQ ID NO: 195659 - RNA, 32 nt, Homo Sapiens
cgggcgccuguaaucccaacuacucaggaggc

SEQ ID NO: 195660 - RNA, 32 nt, Homo Sapiens
uggccugccaggcuccucuccccguuuucucu

SEQ ID NO: 195661 - RNA, 32 nt, Homo Sapiens
agcagcucgccgcgcaggccaggccguacagc

SEQ ID NO: 195662 - RNA, 32 nt, Homo Sapiens
aauauagugcuaaagaagccagcuaauuuuau

SEQ ID NO: 195663 - RNA, 32 nt, Homo Sapiens
cccaagaguugcggcguaucggagacgaguuu

SEQ ID NO: 195664 - RNA, 32 nt, Homo Sapiens
auaaacuagaaggccagaggauaauggaauaa

SEQ ID NO: 195665 - RNA, 32 nt, Homo Sapiens
ggcuaggcgagccgggaaagggggcgccgccc

SEQ ID NO: 195666 - RNA, 32 nt, Homo Sapiens
uccauuagacaagggucuugucuugcuacccu

SEQ ID NO: 195667 - RNA, 32 nt, Homo Sapiens
gcccacacgucggaccccgguuggccaaucac

SEQ ID NO: 195668 - RNA, 32 nt, Homo Sapiens
uucacgaaacgaauucuguuaugcuguaauuu

SEQ ID NO: 195669 - RNA, 32 nt, Homo Sapiens
auugccucuuauuuuuaagaaaaugguucugu

SEQ ID NO: 195670 - RNA, 32 nt, Homo Sapiens
ggacaccugagaacccccuccuccccuccccc

SEQ ID NO: 195671 - RNA, 32 nt, Homo Sapiens
cccccacucguuccggccccgcaugcuccacg

SEQ ID NO: 195672 - RNA, 32 nt, Homo Sapiens
auccggggaagcugcggcagggagcgggcgcc

SEQ ID NO: 195673 - RNA, 32 nt, Homo Sapiens
aucauuccaaaauaaaaguuuauuuaauuuaa

SEQ ID NO: 195674 - RNA, 32 nt, Homo Sapiens
cagagccgcgcgcccgcgcagcaguuccagga

SEQ ID NO: 195675 - RNA, 32 nt, Homo Sapiens
caguccacguccccggacaccuccuugggaag

SEQ ID NO: 195676 - RNA, 32 nt, Homo Sapiens
ccaggcuggcgauccggagggcccgugcgcgc

SEQ ID NO: 195677 - RNA, 30 nt, Homo Sapiens
ucccuggcgcccgcgcgggcugcggcagca

SEQ ID NO: 195678 - RNA, 32 nt, Homo Sapiens
gccugccuggaaagauggguccacugccacgu

SEQ ID NO: 195679 - RNA, 32 nt, Homo Sapiens
uauuuucccucuauccuuuuauuuaaugcucu

SEQ ID NO: 195680 - RNA, 32 nt, Homo Sapiens
uauaaaaauaaaauagaaaaguaacaauaagc

SEQ ID NO: 195681 - RNA, 32 nt, Homo Sapiens
uacagcacaagcuacagccugcguccagccau

SEQ ID NO: 195682 - RNA, 32 nt, Homo Sapiens
gaacaaugugccuacauuaccagcuggcuuca

SEQ ID NO: 195683 - RNA, 32 nt, Homo Sapiens
ggccgagggcuccugcagcugcucgcgcgcag

SEQ ID NO: 195684 - RNA, 32 nt, Homo Sapiens
uaaaggagaccauuuguagcaguuggcuuaac

SEQ ID NO: 195685 - RNA, 32 nt, Homo Sapiens
uguuguacacaguaauuuugucagagguagag

SEQ ID NO: 195686 - RNA, 32 nt, Homo Sapiens
uaaaggcccccuacaaggggccccauacgaca

SEQ ID NO: 195687 - RNA, 32 nt, Homo Sapiens
acacuuagagaaaacaaacaaacaaacaaacu

SEQ ID NO: 195688 - RNA, 32 nt, Homo Sapiens
agcucuuugggaagagacgccgggcaggcaga

SEQ ID NO: 195689 - RNA, 32 nt, Homo Sapiens
aagggaugggaccugaugaccugggaggacuc

SEQ ID NO: 195690 - RNA, 32 nt, Homo Sapiens
ugccaccagaaugguaguuugcuggcaaaaaa

SEQ ID NO: 195691 - RNA, 32 nt, Homo Sapiens
cugcccgggucgugcacuuucaggcccccaga

SEQ ID NO: 195692 - RNA, 31 nt, Homo Sapiens
agggaauuaaauaaauuuugguacauccaca

SEQ ID NO: 195693 - RNA, 32 nt, Homo Sapiens
gggauagagguagaagcagauagaagguaauu

SEQ ID NO: 195694 - RNA, 32 nt, Homo Sapiens
gggugggcucugcgcguaauggcagcgccgug

SEQ ID NO: 195695 - RNA, 32 nt, Homo Sapiens
ggacccaagggcaagagacgccaggcuugggc

SEQ ID NO: 195696 - RNA, 32 nt, Homo Sapiens
cuggaaaauaugucauuuguguuuuuggggaa

SEQ ID NO: 195697 - RNA, 32 nt, Homo Sapiens
gaggucucguugauguuggacaauucaagaau

SEQ ID NO: 195698 - RNA, 32 nt, Homo Sapiens
ccuuuuucuuuuucuuuuuuucccacccuuca

SEQ ID NO: 195699 - RNA, 32 nt, Homo Sapiens
ggcuggugcggaccugccugccgcccggagcg

SEQ ID NO: 195700 - RNA, 32 nt, Homo Sapiens
agaauaaauaccaugaauccugugcaguguuu

SEQ ID NO: 195701 - RNA, 32 nt, Homo Sapiens
agaugagaauacugaggccuggacaggugaag

SEQ ID NO: 195702 - RNA, 32 nt, Homo Sapiens
cagccgccggagccgggagcccugcccaaguc

SEQ ID NO: 195703 - RNA, 32 nt, Homo Sapiens
auucaccgaagaaaaaucauuacucuuuuucu

SEQ ID NO: 195704 - RNA, 32 nt, Homo Sapiens
aaucucgggauacacacacacacacacauaua

SEQ ID NO: 195705 - RNA, 32 nt, Homo Sapiens
agcuaucuggagagaacacauaaaugauuuug

SEQ ID NO: 195706 - RNA, 32 nt, Homo Sapiens
agcugaggaaugcauuuccaucagugaagaau

SEQ ID NO: 195707 - RNA, 32 nt, Homo Sapiens
cuaaucuuugucccucacaauuuuugaaaucc

SEQ ID NO: 195708 - RNA, 32 nt, Homo Sapiens
uagggagucaaacguggaccugaaagucagcu

SEQ ID NO: 195709 - RNA, 32 nt, Homo Sapiens
cccgccugccuggcugcccaaccagcuccaac

SEQ ID NO: 195710 - RNA, 32 nt, Homo Sapiens
aaauauagacauugugagaaagccuucaguug

SEQ ID NO: 195711 - RNA, 32 nt, Homo Sapiens
cgucccggagucauggccggccugaacugcgg

SEQ ID NO: 195712 - RNA, 32 nt, Homo Sapiens
augccaagcauuaagauaaacaaauaugaugu

SEQ ID NO: 195713 - RNA, 32 nt, Homo Sapiens
cucaggaugccagcuggagcuggcacugcccc

SEQ ID NO: 195714 - RNA, 32 nt, Homo Sapiens
auccuuacccucaacgaaggugugaaggggaa

SEQ ID NO: 195715 - RNA, 32 nt, Homo Sapiens
uggaucuuaguaccucuuuauuaugugcaauu

SEQ ID NO: 195716 - RNA, 32 nt, Homo Sapiens
uuguuuuaccugcuauguuuuguuaugcagua

SEQ ID NO: 195717 - RNA, 32 nt, Homo Sapiens
aggcaggaggaggccgagggccccaggauguc

SEQ ID NO: 195718 - RNA, 32 nt, Homo Sapiens
gagucgccugacggcagagggugagcccccgu

SEQ ID NO: 195719 - RNA, 32 nt, Homo Sapiens
cgcaaccauggcgggcggggagugggcugccg

SEQ ID NO: 195720 - RNA, 32 nt, Homo Sapiens
ugcccagcccugauccaggccacagccaucua

SEQ ID NO: 195721 - RNA, 32 nt, Homo Sapiens
uugucauauauucauguaauaaaucugagccu

SEQ ID NO: 195722 - RNA, 32 nt, Homo Sapiens
auaaggaagaggcuucuuucugagggagcuuu

SEQ ID NO: 195723 - RNA, 32 nt, Homo Sapiens
ccuucuuuauggaugaggaaauuaagguuuua

SEQ ID NO: 195724 - RNA, 32 nt, Homo Sapiens
ggcguuggauaagccuggggagccccgcaugg

SEQ ID NO: 195725 - RNA, 32 nt, Homo Sapiens
ucacccuuagcacagcacaaccuccagugccc

SEQ ID NO: 195726 - RNA, 32 nt, Homo Sapiens
ugauaggcuacgauacuauuuuccugugcauc

SEQ ID NO: 195727 - RNA, 32 nt, Homo Sapiens
ucuuguauaaaguauugguuuguauuuguaaa

SEQ ID NO: 195728 - RNA, 32 nt, Homo Sapiens
ucccuuuauuaagacaaauauacauucaaaaa

SEQ ID NO: 195729 - RNA, 32 nt, Homo Sapiens
ugucuuccaucccacuugccugucccaaguuu

SEQ ID NO: 195730 - RNA, 32 nt, Homo Sapiens
aucuaugcuuuaaaauuuuucuuuauaaugcc

SEQ ID NO: 195731 - RNA, 32 nt, Homo Sapiens
gcauguccaucggugaaagaaaacggucucuu

SEQ ID NO: 195732 - RNA, 32 nt, Homo Sapiens
aaauaacaaaugaaaaguugcauacuuauuga

SEQ ID NO: 195733 - RNA, 32 nt, Homo Sapiens
agcgccacggcagacacaccacguucuagcgg

SEQ ID NO: 195734 - RNA, 32 nt, Homo Sapiens
aacuuacuuaaccauuguguccuucccaucuu

SEQ ID NO: 195735 - RNA, 32 nt, Homo Sapiens
gcagugagccgagauggcgccacugcacucca

SEQ ID NO: 195736 - RNA, 32 nt, Homo Sapiens
cugagggcucugccugucccccacugcuauca

SEQ ID NO: 195737 - RNA, 32 nt, Homo Sapiens
uauuuauugacuguccugagggccuugaaaac

SEQ ID NO: 195738 - RNA, 32 nt, Homo Sapiens
uuauuucugaagaguuuuccauuguaugaaua

SEQ ID NO: 195739 - RNA, 32 nt, Homo Sapiens
aagguuacccuagaaacaaaagaugacuaccg

SEQ ID NO: 195740 - RNA, 32 nt, Homo Sapiens
aagagagcggaggcuccugguggcuggugaca

SEQ ID NO: 195741 - RNA, 32 nt, Homo Sapiens
cucuggaaacacucauucucaaugcaagaucc

SEQ ID NO: 195742 - RNA, 32 nt, Homo Sapiens
uucucucggucccgggagcccccgcccggaga

SEQ ID NO: 195743 - RNA, 32 nt, Homo Sapiens
gcuuugacagauagccaccuccagaccucacg

SEQ ID NO: 195744 - RNA, 32 nt, Homo Sapiens
caggucuguuuuuauguucaguuuguacaauc

SEQ ID NO: 195745 - RNA, 32 nt, Homo Sapiens
auuucacucuccccggucagcucugcaucagg

SEQ ID NO: 195746 - RNA, 32 nt, Homo Sapiens
ucucugggccggguucguacuccagcacagcg

SEQ ID NO: 195747 - RNA, 32 nt, Homo Sapiens
agggcucugaagacugccagacuugaauugaa

SEQ ID NO: 195748 - RNA, 32 nt, Homo Sapiens
ugguugagucgcugcuuucccgagggcagcgc

SEQ ID NO: 195749 - RNA, 32 nt, Homo Sapiens
cggcugucacugggcucugcgccaggccaaga

SEQ ID NO: 195750 - RNA, 30 nt, Homo Sapiens
cuauaagaggagcuugaucgugggugcacc

SEQ ID NO: 195751 - RNA, 32 nt, Homo Sapiens
gugcugcuggaucuuuggggggaaauacagga

SEQ ID NO: 195752 - RNA, 32 nt, Homo Sapiens
aacauauuucuaaauuugauuauauucucuga

SEQ ID NO: 195753 - RNA, 32 nt, Homo Sapiens
cccaguguucccuccacucccgaguggccaca

SEQ ID NO: 195754 - RNA, 32 nt, Homo Sapiens
ucuggcugaaagauuacucacgauaaauacac

SEQ ID NO: 195755 - RNA, 32 nt, Homo Sapiens
cagccaccgagacaccaugagagcccucacac

SEQ ID NO: 195756 - RNA, 32 nt, Homo Sapiens
cuccauggaaguaugucugggcccacgcaccc

SEQ ID NO: 195757 - RNA, 32 nt, Homo Sapiens
uuuuguucuaacugaaaacuuuuuggcugggc

SEQ ID NO: 195758 - RNA, 32 nt, Homo Sapiens
cugggggaagggcugagaaacaguccaugugc

SEQ ID NO: 195759 - RNA, 32 nt, Homo Sapiens
cugggaaggagccccagagagccggcugucug

SEQ ID NO: 195760 - RNA, 32 nt, Homo Sapiens
cagcacaggcaacuucuccuccccugaauacc

SEQ ID NO: 195761 - RNA, 32 nt, Homo Sapiens
uuuguucaacucugccauucuaaugugaaagc

SEQ ID NO: 195762 - RNA, 32 nt, Homo Sapiens
uuggucacuccaguagcuccuggaaaaaaccu

SEQ ID NO: 195763 - RNA, 32 nt, Homo Sapiens
aggauuuuguuugauuugaaauuaaaacuuca

SEQ ID NO: 195764 - RNA, 32 nt, Homo Sapiens
gucccuguccaacacacccccacauccccuuu

SEQ ID NO: 195765 - RNA, 32 nt, Homo Sapiens
ucuaaacaguuauuucuguuuccuauuuaaua

SEQ ID NO: 195766 - RNA, 32 nt, Homo Sapiens
ccucaugaauccaacaagcauuaguguggcau

SEQ ID NO: 195767 - RNA, 32 nt, Homo Sapiens
cuuaguuguuuuuuaaaaauuauguacauuuu

SEQ ID NO: 195768 - RNA, 32 nt, Homo Sapiens
uuucucuucuugcugcaaaauaaaccacucug

SEQ ID NO: 195769 - RNA, 32 nt, Homo Sapiens
ucgucccaugccggucagcagugcugcagaca

SEQ ID NO: 195770 - RNA, 32 nt, Homo Sapiens
aaaugaauccagaaaguccccuggacggcugc

SEQ ID NO: 195771 - RNA, 32 nt, Homo Sapiens
cuuuagacauuggugggaccaaggauguuuug

SEQ ID NO: 195772 - RNA, 32 nt, Homo Sapiens
gaaggcaauggaccuggggaagagacuaucac

SEQ ID NO: 195773 - RNA, 32 nt, Homo Sapiens
uaaagcccccccccuuuuuuuuuucuuccuuc

SEQ ID NO: 195774 - RNA, 32 nt, Homo Sapiens
gguuccuggagccucccugaauaccuguccau

SEQ ID NO: 195775 - RNA, 32 nt, Homo Sapiens
acccggcccugccagcgggcgguggcgccucc

SEQ ID NO: 195776 - RNA, 32 nt, Homo Sapiens
aggggcgaagcuuuggugacagacggagagug

SEQ ID NO: 195777 - RNA, 29 nt, Homo Sapiens
guucaagugauuuuccugccuuggccucc

SEQ ID NO: 195778 - RNA, 32 nt, Homo Sapiens
caccccugccagagccucugggcccccuccuc

SEQ ID NO: 195779 - RNA, 32 nt, Homo Sapiens
uccucggggcaugacgcuggcuccugcacaga

SEQ ID NO: 195780 - RNA, 32 nt, Homo Sapiens
caucaccuugcugagagggaaucugaaucuag

SEQ ID NO: 195781 - RNA, 32 nt, Homo Sapiens
caucugcucacccaugcccacccagcgccgcc

SEQ ID NO: 195782 - RNA, 31 nt, Homo Sapiens
ggucgggcgggcccgccucaguguugcuucu

SEQ ID NO: 195783 - RNA, 32 nt, Homo Sapiens
aaacaauacuuugaaaucuuaccaaauguuaa

SEQ ID NO: 195784 - RNA, 32 nt, Homo Sapiens
uacgaguccucgggaugcagugacugagauag

SEQ ID NO: 195785 - RNA, 32 nt, Homo Sapiens
uugucugggcucaucaccucucccuaucccag

SEQ ID NO: 195786 - RNA, 32 nt, Homo Sapiens
gcgaaaacucaagauuuguggaacugggaaga

SEQ ID NO: 195787 - RNA, 32 nt, Homo Sapiens
uccggguggguggggcgggcuggguaccugag

SEQ ID NO: 195788 - RNA, 32 nt, Homo Sapiens
gggagccgcgcgcucucucccggcgcccacac

SEQ ID NO: 195789 - RNA, 32 nt, Homo Sapiens
cucccggcggguggagacuuugggauggacug

SEQ ID NO: 195790 - RNA, 32 nt, Homo Sapiens
cugaagauuauuucaugccuccgccaaagcga

SEQ ID NO: 195791 - RNA, 32 nt, Homo Sapiens
accagcugcgucucgggcgccgccucccauga

SEQ ID NO: 195792 - RNA, 32 nt, Homo Sapiens
auuucuuuauacuagcaacaaacaauaugaaa

SEQ ID NO: 195793 - RNA, 32 nt, Homo Sapiens
cugccccacgugccggcccuccuggugcucua

SEQ ID NO: 195794 - RNA, 32 nt, Homo Sapiens
uuuaagaaaaagaauucuaaaauaucuuacuu

SEQ ID NO: 195795 - RNA, 32 nt, Homo Sapiens
ggaagcugucucccuucugacauuuccuagga

SEQ ID NO: 195796 - RNA, 32 nt, Homo Sapiens
aaccuaccgguaccggccgcgcgcugguaguc

SEQ ID NO: 195797 - RNA, 32 nt, Homo Sapiens
acggaagcugggucuucuugcugugagcgcgg

SEQ ID NO: 195798 - RNA, 32 nt, Homo Sapiens
agcaaaacagaaaaacagaagacaaaaaauag

SEQ ID NO: 195799 - RNA, 32 nt, Homo Sapiens
cuuuuacuuuugauuucccuaggauggaagag

SEQ ID NO: 195800 - RNA, 32 nt, Homo Sapiens
agcaccgggaugcgcagagcacuggaagggcu

SEQ ID NO: 195801 - RNA, 32 nt, Homo Sapiens
gaaaaaggucaacccuugguucuuauagaugc

SEQ ID NO: 195802 - RNA, 32 nt, Homo Sapiens
aacucaccgaaauaaacaagcacguggugaga

SEQ ID NO: 195803 - RNA, 32 nt, Homo Sapiens
aauuuuuuguacugaagucuuuauuggugggu

SEQ ID NO: 195804 - RNA, 29 nt, Homo Sapiens
caccauggggagccaccccaccccugggc

SEQ ID NO: 195805 - RNA, 32 nt, Homo Sapiens
uuccuguaccgcucagacagcgacuaugacau

SEQ ID NO: 195806 - RNA, 32 nt, Homo Sapiens
gacguccuguguccgaucccagccccccagag

SEQ ID NO: 195807 - RNA, 32 nt, Homo Sapiens
uucaugaaauauaguguguuuauauagauauu

SEQ ID NO: 195808 - RNA, 32 nt, Homo Sapiens
cauuugauauucauugauaucaugacuuccaa

SEQ ID NO: 195809 - RNA, 32 nt, Homo Sapiens
caucuauuccaaggucauggacaggcuacugg

SEQ ID NO: 195810 - RNA, 32 nt, Homo Sapiens
guuuucucauuucuaccauaacccggaaaagg

SEQ ID NO: 195811 - RNA, 32 nt, Homo Sapiens
gcacuugauguuucaaauacaacauuuggcag

SEQ ID NO: 195812 - RNA, 32 nt, Homo Sapiens
aggcugcugugcccucuggggagcccggccga

SEQ ID NO: 195813 - RNA, 32 nt, Homo Sapiens
uggacucuggccgugcgcggcagcccaggugu

SEQ ID NO: 195814 - RNA, 32 nt, Homo Sapiens
augggaaaaugucaaaaagauuugcaaugcca

SEQ ID NO: 195815 - RNA, 32 nt, Homo Sapiens
cagcuagagaggacaaaacacacacacacaca

SEQ ID NO: 195816 - RNA, 32 nt, Homo Sapiens
auugugccuugaugguuccacgauguauccgg

SEQ ID NO: 195817 - RNA, 32 nt, Homo Sapiens
cuucugauguguuuccuccaccgaauguucug

SEQ ID NO: 195818 - RNA, 32 nt, Homo Sapiens
cuucccuuucagagccggggcugagucggcag

SEQ ID NO: 195819 - RNA, 32 nt, Homo Sapiens
guugaagaaagccgggcugugccugggagccg

SEQ ID NO: 195820 - RNA, 32 nt, Homo Sapiens
guacuuugugcguagaaaugugaguuguauug

SEQ ID NO: 195821 - RNA, 32 nt, Homo Sapiens
ggcugccaggugugcuuggagagcccccuucu

SEQ ID NO: 195822 - RNA, 32 nt, Homo Sapiens
cuuaggcacacagguuggacuuacauagagga

SEQ ID NO: 195823 - RNA, 32 nt, Homo Sapiens
gccacccucggguccccaugcucucugggagg

SEQ ID NO: 195824 - RNA, 32 nt, Homo Sapiens
aucagagcuccggaggccgccggugccgaugg

SEQ ID NO: 195825 - RNA, 32 nt, Homo Sapiens
ggccggcauggugccugggcugccgggaaccu

SEQ ID NO: 195826 - RNA, 32 nt, Homo Sapiens
gugaaaccugggucuguuuaguuucuuugguu

SEQ ID NO: 195827 - RNA, 32 nt, Homo Sapiens
ggguccuccgcggguggcuccacgugaggccu

SEQ ID NO: 195828 - RNA, 32 nt, Homo Sapiens
cagccugaguccuggggugcgaacgggugcug

SEQ ID NO: 195829 - RNA, 32 nt, Homo Sapiens
uugccuuaauauauauuuguuuuagucaugaa

SEQ ID NO: 195830 - RNA, 32 nt, Homo Sapiens
gacaauuauaugccauaauugcagaauauggu

SEQ ID NO: 195831 - RNA, 32 nt, Homo Sapiens
gggaggugcuccuggguccgcgcggguggcgg

SEQ ID NO: 195832 - RNA, 32 nt, Homo Sapiens
cacaaacccagcuugcccccagcccucccacc

SEQ ID NO: 195833 - RNA, 32 nt, Homo Sapiens
cacugacaaagauuuaggcacuccaagagagu

SEQ ID NO: 195834 - RNA, 32 nt, Homo Sapiens
ucuacagaacagaugcccugaucaccaaggac

SEQ ID NO: 195835 - RNA, 32 nt, Homo Sapiens
auuaaugccucaguuauguguuugucaaugua

SEQ ID NO: 195836 - RNA, 32 nt, Homo Sapiens
ggaggggccccucgcuggggccccugugugca

SEQ ID NO: 195837 - RNA, 29 nt, Homo Sapiens
uugcuccuccucggcguacgguccucccc

SEQ ID NO: 195838 - RNA, 32 nt, Homo Sapiens
ugaacauuggaaauagaugauuagauuuuugu

SEQ ID NO: 195839 - RNA, 32 nt, Homo Sapiens
aaacaagcuucccauccucguuuuacuuuuug

SEQ ID NO: 195840 - RNA, 32 nt, Homo Sapiens
uucagauuugaaagggggugguaugggugggg

SEQ ID NO: 195841 - RNA, 32 nt, Homo Sapiens
cauguagccaguggggggagggggagacacag

SEQ ID NO: 195842 - RNA, 32 nt, Homo Sapiens
cucugugcccccagagcugugcucuccuucuu

SEQ ID NO: 195843 - RNA, 32 nt, Homo Sapiens
caccugcguccaaguuugaauuuuuaugauau

SEQ ID NO: 195844 - RNA, 28 nt, Homo Sapiens
ggagugaagugcaauauuauaaauauua

SEQ ID NO: 195845 - RNA, 32 nt, Homo Sapiens
uuucccccucccucacuccuuccuuugcgggc

SEQ ID NO: 195846 - RNA, 32 nt, Homo Sapiens
gcauuugcaagagcuugucuccugagguggag

SEQ ID NO: 195847 - RNA, 32 nt, Homo Sapiens
gaaguacacuggaagcguggggggaacacaug

SEQ ID NO: 195848 - RNA, 32 nt, Homo Sapiens
caacuccugguugggagaggcuccuccccucc

SEQ ID NO: 195849 - RNA, 32 nt, Homo Sapiens
guaaauagcucuuaacauuuguuguaugcacu

SEQ ID NO: 195850 - RNA, 32 nt, Homo Sapiens
gauuuugguaucuuugguuuuguaguugacug

SEQ ID NO: 195851 - RNA, 32 nt, Homo Sapiens
cuacuaaaaaauacaaaaauuagccaggugug

SEQ ID NO: 195852 - RNA, 30 nt, Homo Sapiens
ucugggggugguggcauuuaagguucaacc

SEQ ID NO: 195853 - RNA, 32 nt, Homo Sapiens
aucucaaagggagaugccaauggaguaacaau

SEQ ID NO: 195854 - RNA, 31 nt, Homo Sapiens
ccuccacgccacugccucccccgaaugcauu

SEQ ID NO: 195855 - RNA, 32 nt, Homo Sapiens
augcaugcaccucagcuggcaggaggccaagc

SEQ ID NO: 195856 - RNA, 27 nt, Homo Sapiens
ccuguguccgaucccagccccccagag

SEQ ID NO: 195857 - RNA, 32 nt, Homo Sapiens
aaagguuucuucaucugggucuugcaggaggc

SEQ ID NO: 195858 - RNA, 32 nt, Homo Sapiens
guuacauaugaaauauaauaggauaacaggua

SEQ ID NO: 195859 - RNA, 32 nt, Homo Sapiens
gguggcccugcagcaccgucccaccucugcca

SEQ ID NO: 195860 - RNA, 32 nt, Homo Sapiens
gauagacuugaggacagaaaacaaaaacaaaa

SEQ ID NO: 195861 - RNA, 32 nt, Homo Sapiens
gcucagauacuaguaguggagugguggggcuu

SEQ ID NO: 195862 - RNA, 32 nt, Homo Sapiens
accacaugugauuuuucuuuaaaaucagugag

SEQ ID NO: 195863 - RNA, 32 nt, Homo Sapiens
gugcaccacugggcuccuggguagugugugug

SEQ ID NO: 195864 - RNA, 32 nt, Homo Sapiens
uuuuuagcauguuauuuauauuagcucauuca

SEQ ID NO: 195865 - RNA, 32 nt, Homo Sapiens
ccgccgcccaaaauagcccccggcgccagcug

SEQ ID NO: 195866 - RNA, 32 nt, Homo Sapiens
gagcggccugcgccgccgcgcgagaggaagca

SEQ ID NO: 195867 - RNA, 32 nt, Homo Sapiens
auucaucagggugagggguucuccucugaggu

SEQ ID NO: 195868 - RNA, 32 nt, Homo Sapiens
gguaaauccacauaugauuucuacaaaacuua

SEQ ID NO: 195869 - RNA, 32 nt, Homo Sapiens
accaagggaggcacgcgcgcugccgggcggac

SEQ ID NO: 195870 - RNA, 32 nt, Homo Sapiens
uuuugacuucguacaggguacuuuuucccaac

SEQ ID NO: 195871 - RNA, 32 nt, Homo Sapiens
gcuuagaaagggaaaagucaaauuguuccaga

SEQ ID NO: 195872 - RNA, 32 nt, Homo Sapiens
aauaaguuuacauuucacaaugaaugaccuac

SEQ ID NO: 195873 - RNA, 31 nt, Homo Sapiens
ggguauuauuugacuuuuagaacaaaagcug

SEQ ID NO: 195874 - RNA, 32 nt, Homo Sapiens
gugcucccagcagaggcugugcgugucaguuc

SEQ ID NO: 195875 - RNA, 31 nt, Homo Sapiens
ucagacuccugaccuuugccaagugagucau

SEQ ID NO: 195876 - RNA, 32 nt, Homo Sapiens
acauauugucaugcugaggugugacaccugcu

SEQ ID NO: 195877 - RNA, 32 nt, Homo Sapiens
ugggagugguggcucacgccuauaaucccugc

SEQ ID NO: 195878 - RNA, 32 nt, Homo Sapiens
ucucaauaaaagaaaaucaugaaugcuccaca

SEQ ID NO: 195879 - RNA, 32 nt, Homo Sapiens
uaagaaguucccugguuuuucccaggggacag

SEQ ID NO: 195880 - RNA, 32 nt, Homo Sapiens
agaagauuagauagauagauagauaaugcaga

SEQ ID NO: 195881 - RNA, 32 nt, Homo Sapiens
cguaaguugucaacaaauuucuauuuuauauu

SEQ ID NO: 195882 - RNA, 32 nt, Homo Sapiens
gcuuugaaguuugcgucuuuucugccucuuuc

SEQ ID NO: 195883 - RNA, 32 nt, Homo Sapiens
gccaagcagcugccuuccuuuucccuggggag

SEQ ID NO: 195884 - RNA, 32 nt, Homo Sapiens
aguguauuuccacuucugccucuccucucucc

SEQ ID NO: 195885 - RNA, 32 nt, Homo Sapiens
aaagaagcagaaaaacaaagaagaaucugggg

SEQ ID NO: 195886 - RNA, 32 nt, Homo Sapiens
uugucuuguaagaugcugccaucgguggaaac

SEQ ID NO: 195887 - RNA, 32 nt, Homo Sapiens
aaaugugaccaaacagaaucaguucuauucuu

SEQ ID NO: 195888 - RNA, 32 nt, Homo Sapiens
acucuugaucacauuagcuaugaggcgagguc

SEQ ID NO: 195889 - RNA, 32 nt, Homo Sapiens
agccuuucuccagcccaugcuggcuggggccg

SEQ ID NO: 195890 - RNA, 32 nt, Homo Sapiens
uccgagguuacuguccccggcgcguccucugu

SEQ ID NO: 195891 - RNA, 32 nt, Homo Sapiens
auaaauagcauuaggguucuuugcaauguggu

SEQ ID NO: 195892 - RNA, 32 nt, Homo Sapiens
cuuaaaggucaaggaaggaaaauacuaccugu

SEQ ID NO: 195893 - RNA, 32 nt, Homo Sapiens
cauuuucuuguacaauuguaguggauuucgug

SEQ ID NO: 195894 - RNA, 32 nt, Homo Sapiens
ucugacaaggucaagcuccaaggaagggacuc

SEQ ID NO: 195895 - RNA, 32 nt, Homo Sapiens
uaguugaucuuugacugucuuauuuauuauaa

SEQ ID NO: 195896 - RNA, 32 nt, Homo Sapiens
uuguagaauguggaaauugauucuggaaggga

SEQ ID NO: 195897 - RNA, 32 nt, Homo Sapiens
uuuauguuuaggauguugaaaaaguucugcag

SEQ ID NO: 195898 - RNA, 32 nt, Homo Sapiens
agaguuuugucaacacaacacuuuguccccgc

SEQ ID NO: 195899 - RNA, 32 nt, Homo Sapiens
gcugcaggcuccagcgucuuucugggagcucc

SEQ ID NO: 195900 - RNA, 32 nt, Homo Sapiens
ucgguagaggggcccaggauuccgggaagcug

SEQ ID NO: 195901 - RNA, 32 nt, Homo Sapiens
gggaaucccuaccccaggauucugguguggcc

SEQ ID NO: 195902 - RNA, 32 nt, Homo Sapiens
caaugaaugaauuuauuuuuuauauucuuaca

SEQ ID NO: 195903 - RNA, 32 nt, Homo Sapiens
guagccgcucuaucuggcuagcaaggaagauu

SEQ ID NO: 195904 - RNA, 32 nt, Homo Sapiens
cacagaacuagauaaaacuauuuuaaaauuca

SEQ ID NO: 195905 - RNA, 32 nt, Homo Sapiens
ucuggaaaggauuugaugaaauauucaaguca

SEQ ID NO: 195906 - RNA, 32 nt, Homo Sapiens
ucaggaccagcuugggcugcgugcguucugcc

SEQ ID NO: 195907 - RNA, 32 nt, Homo Sapiens
auguucuucuaaagugucaucuucugcccucc

SEQ ID NO: 195908 - RNA, 32 nt, Homo Sapiens
caauaccugcuucacuugauaaucauauuaua

SEQ ID NO: 195909 - RNA, 32 nt, Homo Sapiens
aguauuugggagagggaaaggcuguacuauau

SEQ ID NO: 195910 - RNA, 32 nt, Homo Sapiens
aaguauuucuuacuuuaagaucucuagcaaau

SEQ ID NO: 195911 - RNA, 32 nt, Homo Sapiens
agaccaccggcugagggagaaggugaagcagc

SEQ ID NO: 195912 - RNA, 32 nt, Homo Sapiens
cuuggacaucaucggaucagggugggaggugc

SEQ ID NO: 195913 - RNA, 32 nt, Homo Sapiens
gcccgggcgcucgggcggccagagcgacccag

SEQ ID NO: 195914 - RNA, 32 nt, Homo Sapiens
cuaucaggauucaaaucaacuuuugcaagcaa

SEQ ID NO: 195915 - RNA, 32 nt, Homo Sapiens
uuuuguggaccaagccauccugagggcaugga

SEQ ID NO: 195916 - RNA, 32 nt, Homo Sapiens
gcucuucccacuuuuuuuuuccuauuuauuug

SEQ ID NO: 195917 - RNA, 32 nt, Homo Sapiens
aggccguccccgacuccuuccucccccuuccc

SEQ ID NO: 195918 - RNA, 32 nt, Homo Sapiens
uguaguuggggguggggggcgucucccucugg

SEQ ID NO: 195919 - RNA, 32 nt, Homo Sapiens
aauguugcuucuuugaaggcaaugucuuuucu

SEQ ID NO: 195920 - RNA, 32 nt, Homo Sapiens
uuauuuugagcacuauugggaaacauaagcaa

SEQ ID NO: 195921 - RNA, 32 nt, Homo Sapiens
agauagguuauuuccaguuuuacuucaugaca

SEQ ID NO: 195922 - RNA, 32 nt, Homo Sapiens
gccuuguucaacauuugauauucagugcaauc

SEQ ID NO: 195923 - RNA, 32 nt, Homo Sapiens
guuguagaaaucacaguacccugagaccaauu

SEQ ID NO: 195924 - RNA, 32 nt, Homo Sapiens
gaaaaggaaaggaaaagggaagcuucggaugc

SEQ ID NO: 195925 - RNA, 31 nt, Homo Sapiens
uaugaucauuugauuuggcuaauuacaaaaa

SEQ ID NO: 195926 - RNA, 32 nt, Homo Sapiens
gggccgaaggcgagagaggcggugccgagacc

SEQ ID NO: 195927 - RNA, 32 nt, Homo Sapiens
cggcugcccucccuccccagcuuacaccucaa

SEQ ID NO: 195928 - RNA, 32 nt, Homo Sapiens
gccaugcagacaccucauggcacuucaaacua

SEQ ID NO: 195929 - RNA, 32 nt, Homo Sapiens
uguuccugucaggauuuguuucccucugcugu

SEQ ID NO: 195930 - RNA, 32 nt, Homo Sapiens
cauuaucauuagugcauagaaaagcuauuuaa

SEQ ID NO: 195931 - RNA, 32 nt, Homo Sapiens
aagcaucauuuucuuaugugagguggggaagg

SEQ ID NO: 195932 - RNA, 32 nt, Homo Sapiens
agguggagggaagaagggaagaauuacaaugg

SEQ ID NO: 195933 - RNA, 32 nt, Homo Sapiens
gagggcacaaaggccagauauuucaucugaag

SEQ ID NO: 195934 - RNA, 32 nt, Homo Sapiens
ccuaugugaugaugaaaucucugcauggcugc

SEQ ID NO: 195935 - RNA, 32 nt, Homo Sapiens
aagugaaaugucagguuguuuagucacugaau

SEQ ID NO: 195936 - RNA, 32 nt, Homo Sapiens
cgcugggagagccaaggccuaugccaccugca

SEQ ID NO: 195937 - RNA, 32 nt, Homo Sapiens
acaccuguaucccagcacuuugggagaccgag

SEQ ID NO: 195938 - RNA, 32 nt, Homo Sapiens
cgcggccgcgcgcucgcccugcccuagaccag

SEQ ID NO: 195939 - RNA, 32 nt, Homo Sapiens
cugagaagggaagaggggaucuuuggacuacg

SEQ ID NO: 195940 - RNA, 32 nt, Homo Sapiens
aauguuggggagaggguaauauauugugacaa

SEQ ID NO: 195941 - RNA, 32 nt, Homo Sapiens
uugagcuuucauuuuuaaaaauuauauuuuac

SEQ ID NO: 195942 - RNA, 32 nt, Homo Sapiens
gaccacagaucagaggagucccagaagagggc

SEQ ID NO: 195943 - RNA, 32 nt, Homo Sapiens
uguuaauacuguaacauacuuuuuaaauaaca

SEQ ID NO: 195944 - RNA, 32 nt, Homo Sapiens
gcauuuuuaaagauuaaucugaauuaagcuuu

SEQ ID NO: 195945 - RNA, 32 nt, Homo Sapiens
gacaagaacuacuucacaguaguugcagugag

SEQ ID NO: 195946 - RNA, 32 nt, Homo Sapiens
auguguuguucuauugcauuguaaguaaagua

SEQ ID NO: 195947 - RNA, 32 nt, Homo Sapiens
ugucccucaugggugagcccuccagcugugag

SEQ ID NO: 195948 - RNA, 32 nt, Homo Sapiens
gccauuacauuuuuugaguuagaugggacucu

SEQ ID NO: 195949 - RNA, 32 nt, Homo Sapiens
ccacauccuugaaagaaaaacuguggcuuacg

SEQ ID NO: 195950 - RNA, 32 nt, Homo Sapiens
ccagaaaggagcucagcccuguugacaucuuu

SEQ ID NO: 195951 - RNA, 32 nt, Homo Sapiens
ucuggacucagugcuuccugucccaaggaccu

SEQ ID NO: 195952 - RNA, 32 nt, Homo Sapiens
gacuccgacucccuggcuuuggcauucaguga

SEQ ID NO: 195953 - RNA, 32 nt, Homo Sapiens
aacuagccgggcgcaguggcgugcgccuguag

SEQ ID NO: 195954 - RNA, 32 nt, Homo Sapiens
acuguuucagaauuuuucaaggguaguuucuu

SEQ ID NO: 195955 - RNA, 32 nt, Homo Sapiens
cugcaugggucugccuccuacccaucccgccc

SEQ ID NO: 195956 - RNA, 32 nt, Homo Sapiens
gggucccccauggaugaaagugccuucccauu

SEQ ID NO: 195957 - RNA, 32 nt, Homo Sapiens
gccaccgcauuccagccugggcgacagagcaa

SEQ ID NO: 195958 - RNA, 32 nt, Homo Sapiens
aaggaauucaggggcugcuucagaaucccauc

SEQ ID NO: 195959 - RNA, 32 nt, Homo Sapiens
gggaaggcaccgugaugcccgcaaccccgucc

SEQ ID NO: 195960 - RNA, 32 nt, Homo Sapiens
acugagaagauaaaauggucagguuguugggg

SEQ ID NO: 195961 - RNA, 32 nt, Homo Sapiens
aauaggcuccucuggaggaaauuaugaaauac

SEQ ID NO: 195962 - RNA, 32 nt, Homo Sapiens
cccagaacgucuuuugaggcugggcgggugug

SEQ ID NO: 195963 - RNA, 32 nt, Homo Sapiens
cccuugucugcacuguucaaaccucugccgcc

SEQ ID NO: 195964 - RNA, 32 nt, Homo Sapiens
ggaacuccagagaugagugucuggagcggcuu

SEQ ID NO: 195965 - RNA, 32 nt, Homo Sapiens
cugaaagcuagccagucauguuuucuguuuuu

SEQ ID NO: 195966 - RNA, 32 nt, Homo Sapiens
cggggcucuugaggccagcugcagagcuugug

SEQ ID NO: 195967 - RNA, 32 nt, Homo Sapiens
cggagccgcugccuugccccccggagacugaa

SEQ ID NO: 195968 - RNA, 32 nt, Homo Sapiens
gcaccacggguuuuuuguuuuuuguuuguuug

SEQ ID NO: 195969 - RNA, 32 nt, Homo Sapiens
ggagaaauaaaaauaccucuuuauuuuuugau

SEQ ID NO: 195970 - RNA, 30 nt, Homo Sapiens
augugaugcugaaaaugugcaucagauguu

SEQ ID NO: 195971 - RNA, 32 nt, Homo Sapiens
uuaacaugucagagagaagagaguuaaaauuu

SEQ ID NO: 195972 - RNA, 32 nt, Homo Sapiens
ucaauuuaagaugggguauucuuucacuaguu

SEQ ID NO: 195973 - RNA, 32 nt, Homo Sapiens
uucugcuccuuccccaucguugcccccauuuc

SEQ ID NO: 195974 - RNA, 32 nt, Homo Sapiens
guggggaguggguggggggagccagcagaguu

SEQ ID NO: 195975 - RNA, 32 nt, Homo Sapiens
uagcaacuucuuuucucuucaaaugaaugcca

SEQ ID NO: 195976 - RNA, 31 nt, Homo Sapiens
ugaguccugccgguggcccgagcucgguggc

SEQ ID NO: 195977 - RNA, 32 nt, Homo Sapiens
cacugcaucuguuggaauucugcacaauguug

SEQ ID NO: 195978 - RNA, 32 nt, Homo Sapiens
agcagcuccuccccggaggaccccagcgcagu

SEQ ID NO: 195979 - RNA, 32 nt, Homo Sapiens
cagccacuggggugggggccagguucacuggg

SEQ ID NO: 195980 - RNA, 32 nt, Homo Sapiens
aucuugagcaagcuaaagaaaccaucauaauc

SEQ ID NO: 195981 - RNA, 32 nt, Homo Sapiens
acucccagugugcccaugaguaagagcaaaug

SEQ ID NO: 195982 - RNA, 32 nt, Homo Sapiens
ccgggccccguccuggggucucuguccccacu

SEQ ID NO: 195983 - RNA, 32 nt, Homo Sapiens
aggucuacucaaggugucacccuaacagaccu

SEQ ID NO: 195984 - RNA, 32 nt, Homo Sapiens
cguccggcucugcgccccgacgcggcuccugg

SEQ ID NO: 195985 - RNA, 32 nt, Homo Sapiens
aucaagaacuaauuaaacauauuguugguaaa

SEQ ID NO: 195986 - RNA, 32 nt, Homo Sapiens
cggcagagugaggcaggcaacccgaggugcgg

SEQ ID NO: 195987 - RNA, 32 nt, Homo Sapiens
uuucaguuauuaugaaugaugcuguucugagc

SEQ ID NO: 195988 - RNA, 32 nt, Homo Sapiens
acacuggccccgaggacagccaagggccauuu

SEQ ID NO: 195989 - RNA, 32 nt, Homo Sapiens
acgaggccugaccccauccccauccucgcugg

SEQ ID NO: 195990 - RNA, 28 nt, Homo Sapiens
uuaauaauguauuacauuauaguagcau

SEQ ID NO: 195991 - RNA, 32 nt, Homo Sapiens
accagcuaaggaagcccugacaugcugcaguc

SEQ ID NO: 195992 - RNA, 32 nt, Homo Sapiens
uuuuucacuccagugcguccuguugcagggac

SEQ ID NO: 195993 - RNA, 32 nt, Homo Sapiens
uauuucaaaaucaacugacuagugcaggaggc

SEQ ID NO: 195994 - RNA, 32 nt, Homo Sapiens
cuuguccccucuauuccucuagggagcacugu

SEQ ID NO: 195995 - RNA, 32 nt, Homo Sapiens
gugcgucuggcguccgcgcgcugcacaauggc

SEQ ID NO: 195996 - RNA, 32 nt, Homo Sapiens
ugcacagucaaaacgacucuaaacacacuagu

SEQ ID NO: 195997 - RNA, 32 nt, Homo Sapiens
aaaguuuccaagcuaggucuggcccguugggg

SEQ ID NO: 195998 - RNA, 32 nt, Homo Sapiens
caggcaggccauugcacccauauggcugggca

SEQ ID NO: 195999 - RNA, 32 nt, Homo Sapiens
uuauguaauuuucaagaaauuuguaugcguau

SEQ ID NO: 196000 - RNA, 32 nt, Homo Sapiens
cauagaaguucaguauaguacguaauucuugu

SEQ ID NO: 196001 - RNA, 32 nt, Homo Sapiens
uuucuugaaaaggaaaguuuggcccagcaacu

SEQ ID NO: 196002 - RNA, 32 nt, Homo Sapiens
gggcgcuaauuaugagggaggcguguagcuuc

SEQ ID NO: 196003 - RNA, 32 nt, Homo Sapiens
ccccagccaucccagccgggucccagccaccc

SEQ ID NO: 196004 - RNA, 32 nt, Homo Sapiens
ccuucuuguagaggccaggcccugccccaccu

SEQ ID NO: 196005 - RNA, 32 nt, Homo Sapiens
gauuagucaaagcuaaucauggaaguuccauu

SEQ ID NO: 196006 - RNA, 32 nt, Homo Sapiens
ggaggccacacccaccaaggcugagaacccac

SEQ ID NO: 196007 - RNA, 32 nt, Homo Sapiens
cauaccccgcggccccuugggccgucucacaa

SEQ ID NO: 196008 - RNA, 32 nt, Homo Sapiens
caaaaagaacagaaaccuccagcucuuuuaca

SEQ ID NO: 196009 - RNA, 32 nt, Homo Sapiens
auccaucccaguuagcauggagggauuuuagg

SEQ ID NO: 196010 - RNA, 32 nt, Homo Sapiens
acaguaaauugucuaccaacacccaucauggc

SEQ ID NO: 196011 - RNA, 32 nt, Homo Sapiens
cagugucuuuaagauagcaaaacuaaguguca

SEQ ID NO: 196012 - RNA, 32 nt, Homo Sapiens
cccaggcuggccugaggaugucacagcuugag

SEQ ID NO: 196013 - RNA, 32 nt, Homo Sapiens
ccgccauccugacgccgcccucuucuucccuc

SEQ ID NO: 196014 - RNA, 32 nt, Homo Sapiens
ggagcuuccuuccuuccuuccuggacaggucg

SEQ ID NO: 196015 - RNA, 32 nt, Homo Sapiens
gcaugggccgugccagcugugcccuagugaua

SEQ ID NO: 196016 - RNA, 32 nt, Homo Sapiens
cuuucuuuuuuccaguugcucccuuuuggaau

SEQ ID NO: 196017 - RNA, 32 nt, Homo Sapiens
gagacugagaauuuaaaacuuuuuguagcaau

SEQ ID NO: 196018 - RNA, 32 nt, Homo Sapiens
aagcuaucauuuccuaaauuaaggaacuuagg

SEQ ID NO: 196019 - RNA, 32 nt, Homo Sapiens
ggaggagccgggcgcggcgacacgcggccaug

SEQ ID NO: 196020 - RNA, 32 nt, Homo Sapiens
uuauuacaagauaaugcauuuuaggaguagau

SEQ ID NO: 196021 - RNA, 32 nt, Homo Sapiens
gcuugaugcagggaacccugggggacuuucag

SEQ ID NO: 196022 - RNA, 30 nt, Homo Sapiens
ccagccccacuugccugcaggcuuaugaua

SEQ ID NO: 196023 - RNA, 32 nt, Homo Sapiens
uuuuuaagauggagucuugcucugucacccag

SEQ ID NO: 196024 - RNA, 32 nt, Homo Sapiens
ugaauuuaaaaauaaauaccaauuauggaaau

SEQ ID NO: 196025 - RNA, 32 nt, Homo Sapiens
cccgggugguggccuacuucugugagggcaug

SEQ ID NO: 196026 - RNA, 32 nt, Homo Sapiens
cggguccauuuucuguauguugucaaauuaau

SEQ ID NO: 196027 - RNA, 32 nt, Homo Sapiens
accuuuggaggccgaguguuaucccuggcuuc

SEQ ID NO: 196028 - RNA, 32 nt, Homo Sapiens
agcugaucaaaguugcagcaucaggugacaag

SEQ ID NO: 196029 - RNA, 32 nt, Homo Sapiens
cuggugaagacugcccuggguaccccagaacu

SEQ ID NO: 196030 - RNA, 32 nt, Homo Sapiens
uuuuuagcacaccaguguguuaggcacugugc

SEQ ID NO: 196031 - RNA, 32 nt, Homo Sapiens
auauuucacacgcauguuuuagaauagauuuu

SEQ ID NO: 196032 - RNA, 32 nt, Homo Sapiens
acacacguggaaaaucuucgauccuggugaaa

SEQ ID NO: 196033 - RNA, 32 nt, Homo Sapiens
uccuacgaagauaaauuuaacuuuacuguuaa

SEQ ID NO: 196034 - RNA, 32 nt, Homo Sapiens
uccuucacuccagacacugcccgcucuccggg

SEQ ID NO: 196035 - RNA, 32 nt, Homo Sapiens
gggcugcaguuuccuuccuuccuucucggcag

SEQ ID NO: 196036 - RNA, 32 nt, Homo Sapiens
ugcugucugugaagcugaaucugugagaacac

SEQ ID NO: 196037 - RNA, 32 nt, Homo Sapiens
aggccagacagagaggcagcagcacauaucug

SEQ ID NO: 196038 - RNA, 32 nt, Homo Sapiens
aagggagcgcucucuugauucugggauuucuc

SEQ ID NO: 196039 - RNA, 32 nt, Homo Sapiens
uuucuguuguuguuucccagcuacaaccaacu

SEQ ID NO: 196040 - RNA, 32 nt, Homo Sapiens
cuguucucuuguccccaccaccaaccuauagc

SEQ ID NO: 196041 - RNA, 32 nt, Homo Sapiens
acccagcuccccgugucagaccccgcugucuu

SEQ ID NO: 196042 - RNA, 32 nt, Homo Sapiens
ucauauacaggauagccuaauuuuauuuguuu

SEQ ID NO: 196043 - RNA, 32 nt, Homo Sapiens
cggcggcagcggcggcagcagaguggccgcgg

SEQ ID NO: 196044 - RNA, 32 nt, Homo Sapiens
aaagcgugcucgaaggaugccauggucagggc

SEQ ID NO: 196045 - RNA, 32 nt, Homo Sapiens
caacggccgucggaccacggcgcggcggccag

SEQ ID NO: 196046 - RNA, 29 nt, Homo Sapiens
uaaagguggguccgggugccuucccaggg

SEQ ID NO: 196047 - RNA, 32 nt, Homo Sapiens
ugggccuggcugcucagaugcugcuggaaccc

SEQ ID NO: 196048 - RNA, 32 nt, Homo Sapiens
cgagauaaacaccagcugacuccacggaugga

SEQ ID NO: 196049 - RNA, 32 nt, Homo Sapiens
ugccugaggagcuccaggccugggugcgggag

SEQ ID NO: 196050 - RNA, 32 nt, Homo Sapiens
cccgacccuggccccaggcccggcaccaugau

SEQ ID NO: 196051 - RNA, 32 nt, Homo Sapiens
uaacaaaaucaucuuaaaaugcuacccuucag

SEQ ID NO: 196052 - RNA, 32 nt, Homo Sapiens
aaggagcagaagacauaacguugaaacagaaa

SEQ ID NO: 196053 - RNA, 32 nt, Homo Sapiens
gguaaugaaaacuuccuuucugagaaguuagu

SEQ ID NO: 196054 - RNA, 32 nt, Homo Sapiens
aaugcagaauggcuacugugugucuugugcua

SEQ ID NO: 196055 - RNA, 32 nt, Homo Sapiens
auauuuucuuuagauuugaguuuuaucuaaaa

SEQ ID NO: 196056 - RNA, 32 nt, Homo Sapiens
gcacagaccucacuccugaggaccaaggagag

SEQ ID NO: 196057 - RNA, 32 nt, Homo Sapiens
acagaggggaggaggugggcauuuccuacauu

SEQ ID NO: 196058 - RNA, 32 nt, Homo Sapiens
ggaauagcauauaaaaaggcauguuuggaaag

SEQ ID NO: 196059 - RNA, 32 nt, Homo Sapiens
uuccuucccucauaccuugcccauucccucug

SEQ ID NO: 196060 - RNA, 32 nt, Homo Sapiens
cauuuacuaauagaauuaagggaaauagaagc

SEQ ID NO: 196061 - RNA, 32 nt, Homo Sapiens
aaaaaauuuccaacuucuaccuuuaagaucag

SEQ ID NO: 196062 - RNA, 32 nt, Homo Sapiens
gcuuaucuacacgacucagaucuuguugucac

SEQ ID NO: 196063 - RNA, 32 nt, Homo Sapiens
uggguucuauagaaaagaccguuuaguguaga

SEQ ID NO: 196064 - RNA, 32 nt, Homo Sapiens
cacucccuuccaugccggaacccaggccaggg

SEQ ID NO: 196065 - RNA, 32 nt, Homo Sapiens
cgccaccugccagccagcagggugguggggac

SEQ ID NO: 196066 - RNA, 32 nt, Homo Sapiens
aauuucccacccccacccaccuaauucgauga

SEQ ID NO: 196067 - RNA, 32 nt, Homo Sapiens
uuguacuuggucacuuuugugcuugaggaggc

SEQ ID NO: 196068 - RNA, 32 nt, Homo Sapiens
guggcugcgcuucagccccaccccuacaccac

SEQ ID NO: 196069 - RNA, 32 nt, Homo Sapiens
ccuucagagugacagguagagaagggaagagc

SEQ ID NO: 196070 - RNA, 32 nt, Homo Sapiens
gggcuccuaccagcaggacugccucgcugccc

SEQ ID NO: 196071 - RNA, 32 nt, Homo Sapiens
uguuuucugaaaucuuuuaagcuaaaaucaca

SEQ ID NO: 196072 - RNA, 32 nt, Homo Sapiens
ugaggggcaggcuuggggggagcagcugcccc

SEQ ID NO: 196073 - RNA, 32 nt, Homo Sapiens
aaggaacagagaaugugcaauaccgucuggcu

SEQ ID NO: 196074 - RNA, 31 nt, Homo Sapiens
ugggagugaaggaguccuggaguccaccaug

SEQ ID NO: 196075 - RNA, 32 nt, Homo Sapiens
aguaucucuccauuuuaccauuaugaaaacua

SEQ ID NO: 196076 - RNA, 32 nt, Homo Sapiens
aagcauacuuuuuuggaaaauagauucaugaa

SEQ ID NO: 196077 - RNA, 32 nt, Homo Sapiens
auguaauugcaaaaugauuuagaaugucauga

SEQ ID NO: 196078 - RNA, 32 nt, Homo Sapiens
acauuuggagaaucuuccuucauccagacaac

SEQ ID NO: 196079 - RNA, 32 nt, Homo Sapiens
gguugguuuucuccagagaagaacccuugaau

SEQ ID NO: 196080 - RNA, 32 nt, Homo Sapiens
ggcauaacaccgugagauguugcaaucaauac

SEQ ID NO: 196081 - RNA, 32 nt, Homo Sapiens
ggauuuucaucaucagaaauuuccaacucauc

SEQ ID NO: 196082 - RNA, 32 nt, Homo Sapiens
caguuuuggcuuuuuucuucuuuguuguauuc

SEQ ID NO: 196083 - RNA, 32 nt, Homo Sapiens
ggcagacacacccccacccagccccuauuugg

SEQ ID NO: 196084 - RNA, 32 nt, Homo Sapiens
uaaaucucagaaugaaauacccucugccuugg

SEQ ID NO: 196085 - RNA, 32 nt, Homo Sapiens
acuuauucuagggucuuacucuuuguaugaug

SEQ ID NO: 196086 - RNA, 32 nt, Homo Sapiens
gcacccacucccuaccgcccgcucccuaagcc

SEQ ID NO: 196087 - RNA, 32 nt, Homo Sapiens
uauaaaaauauuaccucaaugguaggagacau

SEQ ID NO: 196088 - RNA, 32 nt, Homo Sapiens
gaaggugcuggagaugccaagugaguguguac

SEQ ID NO: 196089 - RNA, 32 nt, Homo Sapiens
auccaaaguuuccauaguuuuauucaaaauaa

SEQ ID NO: 196090 - RNA, 32 nt, Homo Sapiens
gacagagcauauaggauuggacaauguagaga

SEQ ID NO: 196091 - RNA, 32 nt, Homo Sapiens
ugcacagaaucuuuuuacuuugcaauagauuu

SEQ ID NO: 196092 - RNA, 32 nt, Homo Sapiens
cuaguaucaguucuuuggaauacaugaaauau

SEQ ID NO: 196093 - RNA, 32 nt, Homo Sapiens
gacuucuagucccucauaccagcccuccuugc

SEQ ID NO: 196094 - RNA, 32 nt, Homo Sapiens
caguaucuaguagauagaaugauaaaauaaga

SEQ ID NO: 196095 - RNA, 31 nt, Homo Sapiens
agagcgccugccugccugccgcugcugcggg

SEQ ID NO: 196096 - RNA, 32 nt, Homo Sapiens
uuuuaaacauaaaugcacaacaagcaaaugaa

SEQ ID NO: 196097 - RNA, 31 nt, Homo Sapiens
ggccccaguggcugagcuccaagugccugcu

SEQ ID NO: 196098 - RNA, 32 nt, Homo Sapiens
cuuugccuauguaauggaaauaaaauauuuuc

SEQ ID NO: 196099 - RNA, 32 nt, Homo Sapiens
auucaacaaaaauuuauugacugaaaugaauu

SEQ ID NO: 196100 - RNA, 32 nt, Homo Sapiens
gaccuauagugaagaugaaaccccaaagguag

SEQ ID NO: 196101 - RNA, 32 nt, Homo Sapiens
uuuccucccacuuuuccucccccauagccaca

SEQ ID NO: 196102 - RNA, 32 nt, Homo Sapiens
gcccacugaguuggagucaucaucucuacccc

SEQ ID NO: 196103 - RNA, 32 nt, Homo Sapiens
gaaaugauucagaagaaaguucaucaggugcu

SEQ ID NO: 196104 - RNA, 32 nt, Homo Sapiens
ugaauaacaacaauuuaggaaugcucaaugug

SEQ ID NO: 196105 - RNA, 32 nt, Homo Sapiens
gagauuugaaagaaccugauauuguuggccag

SEQ ID NO: 196106 - RNA, 32 nt, Homo Sapiens
uuuggguacuauuguguaguauuuaggaugua

SEQ ID NO: 196107 - RNA, 32 nt, Homo Sapiens
gacggugguaaacaggcugucuauauccuugu

SEQ ID NO: 196108 - RNA, 32 nt, Homo Sapiens
cggagucucgcucuuucgcccaggcuggcgug

SEQ ID NO: 196109 - RNA, 28 nt, Homo Sapiens
augcuaguuacaggguagaaagacugua

SEQ ID NO: 196110 - RNA, 32 nt, Homo Sapiens
cuguggguacucauuuauuuuauucuuuugua

SEQ ID NO: 196111 - RNA, 32 nt, Homo Sapiens
cauggaggaguuguuccaaacuggccucagaa

SEQ ID NO: 196112 - RNA, 32 nt, Homo Sapiens
uccauuuguaaaugcgcaaaugguacuggagg

SEQ ID NO: 196113 - RNA, 32 nt, Homo Sapiens
uagcagcaccagccuuguuuuaaauguuuucu

SEQ ID NO: 196114 - RNA, 32 nt, Homo Sapiens
uguggugaaaccaaaaucacugauuuuggucu

SEQ ID NO: 196115 - RNA, 32 nt, Homo Sapiens
agcugagagcaggagcaggaaaaggaggcuca

SEQ ID NO: 196116 - RNA, 32 nt, Homo Sapiens
gugaugguuccauugaugugggauuucccuac

SEQ ID NO: 196117 - RNA, 32 nt, Homo Sapiens
cgcguggggcagucggugggggaggcaggcgg

SEQ ID NO: 196118 - RNA, 32 nt, Homo Sapiens
uuugucacaacgguugcacugaagauggcccc

SEQ ID NO: 196119 - RNA, 32 nt, Homo Sapiens
gaaguguggaccauggcgggaccccaaggaca

SEQ ID NO: 196120 - RNA, 32 nt, Homo Sapiens
uaccacugauggaaacacacaaacaccaagcu

SEQ ID NO: 196121 - RNA, 32 nt, Homo Sapiens
cucaucuguaaagugaaggaaguaaaacaugu

SEQ ID NO: 196122 - RNA, 32 nt, Homo Sapiens
ucauuuuauguuuuuucuuaacuguuauauga

SEQ ID NO: 196123 - RNA, 32 nt, Homo Sapiens
cuuucugguaccuuauuugucuaguaucuuau

SEQ ID NO: 196124 - RNA, 32 nt, Homo Sapiens
cugcucuuucccuccccauccucuggcagaaa

SEQ ID NO: 196125 - RNA, 32 nt, Homo Sapiens
cauaagagcugcuggugaacuccaucucauuc

SEQ ID NO: 196126 - RNA, 31 nt, Homo Sapiens
uugaaaaucaaagucaauggauauguacuuu

SEQ ID NO: 196127 - RNA, 32 nt, Homo Sapiens
cuucccuccccucccccagcugagguguggcc

SEQ ID NO: 196128 - RNA, 32 nt, Homo Sapiens
ugaguuuguacuuuucaaauagauuaucuacu

SEQ ID NO: 196129 - RNA, 32 nt, Homo Sapiens
caucugcugucuuuucuuugccaucucugcuc

SEQ ID NO: 196130 - RNA, 32 nt, Homo Sapiens
uuuaggauauccacaugcaaaagaaugaaauu

SEQ ID NO: 196131 - RNA, 32 nt, Homo Sapiens
aacaacucuggauuacauuuuccucucaacug

SEQ ID NO: 196132 - RNA, 32 nt, Homo Sapiens
uccugggaaggggguauauggucucacaaguu

SEQ ID NO: 196133 - RNA, 32 nt, Homo Sapiens
gauaugagaugacgggaagcaggacgaaauau

SEQ ID NO: 196134 - RNA, 32 nt, Homo Sapiens
uggaguauuuugucacuucuccccuccgugga

SEQ ID NO: 196135 - RNA, 32 nt, Homo Sapiens
uguggccagauuuccuuggaggagaaaacaac

SEQ ID NO: 196136 - RNA, 32 nt, Homo Sapiens
agguagucugccauaugggacauauuagaaca

SEQ ID NO: 196137 - RNA, 32 nt, Homo Sapiens
ugagggcgcccggcaggccgcccugcaggcgg

SEQ ID NO: 196138 - RNA, 32 nt, Homo Sapiens
ggggaccugagccccgggggccccaucggccu

SEQ ID NO: 196139 - RNA, 32 nt, Homo Sapiens
ucuuguaaucaugccaagagaauagauacauu

SEQ ID NO: 196140 - RNA, 32 nt, Homo Sapiens
ugucucccucaucaccgacuacaggguccggu

SEQ ID NO: 196141 - RNA, 32 nt, Homo Sapiens
ugccaucuucuguguccccuuggcccuggcac

SEQ ID NO: 196142 - RNA, 32 nt, Homo Sapiens
accugccagugucaaggauuccagucaggugu

SEQ ID NO: 196143 - RNA, 32 nt, Homo Sapiens
agccuggugggcagcgaccccugggcacagaa

SEQ ID NO: 196144 - RNA, 32 nt, Homo Sapiens
gguguaguuucugcauuucaagaagacuggca

SEQ ID NO: 196145 - RNA, 32 nt, Homo Sapiens
auguucagaguagcauuauuccugcuagcuag

SEQ ID NO: 196146 - RNA, 32 nt, Homo Sapiens
uuuguucccgguuuuucuuacuguuacaaaua

SEQ ID NO: 196147 - RNA, 32 nt, Homo Sapiens
gccgcacguccggccccgaucccggcaccaug

SEQ ID NO: 196148 - RNA, 32 nt, Homo Sapiens
cauuaaccaaucacagaaaaccaccagacuca

SEQ ID NO: 196149 - RNA, 32 nt, Homo Sapiens
agggcccugccagccucgggggccacagcggc

SEQ ID NO: 196150 - RNA, 32 nt, Homo Sapiens
uggcgccccucccccgcccugccuggccucau

SEQ ID NO: 196151 - RNA, 32 nt, Homo Sapiens
aaaucaucuagcccaucaauauuuuagacauu

SEQ ID NO: 196152 - RNA, 32 nt, Homo Sapiens
uguguguguccucauguggcuguggacaagca

SEQ ID NO: 196153 - RNA, 32 nt, Homo Sapiens
aagaggagaaaguucuggagaggaugguggug

SEQ ID NO: 196154 - RNA, 32 nt, Homo Sapiens
agccgccugugcacgggcggcggcgaggcgag

SEQ ID NO: 196155 - RNA, 32 nt, Homo Sapiens
aaacaaggagaccuggggugggugugguuggg

SEQ ID NO: 196156 - RNA, 32 nt, Homo Sapiens
gggggaggccgaggcaggggcugggcagaggg

SEQ ID NO: 196157 - RNA, 32 nt, Homo Sapiens
gcuuuguucacuuuuugcaacaaaauguaugg

SEQ ID NO: 196158 - RNA, 32 nt, Homo Sapiens
gccugguuugcugggaaugccuuuaaaucaga

SEQ ID NO: 196159 - RNA, 32 nt, Homo Sapiens
gacugaggacaaaguggaggagggccgaggug

SEQ ID NO: 196160 - RNA, 32 nt, Homo Sapiens
auguacugacuucauaaaagccaucucagagc

SEQ ID NO: 196161 - RNA, 32 nt, Homo Sapiens
aguacugcacagggaccccccacccaggggcc

SEQ ID NO: 196162 - RNA, 32 nt, Homo Sapiens
caucacuaggaaaaaccaaaaaccaggaacaa

SEQ ID NO: 196163 - RNA, 32 nt, Homo Sapiens
gcggccagagcgggaaagagacucgucuuugc

SEQ ID NO: 196164 - RNA, 32 nt, Homo Sapiens
gauucagcuggguuucuguugcauuucuggua

SEQ ID NO: 196165 - RNA, 32 nt, Homo Sapiens
guguugucugcuuuggcuaaagagggaauggg

SEQ ID NO: 196166 - RNA, 32 nt, Homo Sapiens
acuuuacaaccugaugucauauuccauuuugg

SEQ ID NO: 196167 - RNA, 32 nt, Homo Sapiens
ccuaccugucaguucuuguuucuggggaggag

SEQ ID NO: 196168 - RNA, 32 nt, Homo Sapiens
aagcaaagcuugcaugucaucauagacuucau

SEQ ID NO: 196169 - RNA, 32 nt, Homo Sapiens
uuacuuuguaauucuucagaauugauuauuuu

SEQ ID NO: 196170 - RNA, 32 nt, Homo Sapiens
uguguaccuugcagacuguagacccaugucgu

SEQ ID NO: 196171 - RNA, 32 nt, Homo Sapiens
ucacaucuuaugcuaacuguagauaaaguggu

SEQ ID NO: 196172 - RNA, 32 nt, Homo Sapiens
cagccagccccucccaugccaggugagggguc

SEQ ID NO: 196173 - RNA, 32 nt, Homo Sapiens
ucaaaaagaguagcuccuuggauacuucagac

SEQ ID NO: 196174 - RNA, 32 nt, Homo Sapiens
gucacgcagacaccccccaaccacacacaucu

SEQ ID NO: 196175 - RNA, 32 nt, Homo Sapiens
acuguguacugcugcacgcgggccucccccag

SEQ ID NO: 196176 - RNA, 32 nt, Homo Sapiens
cucaccacagacccucacccaaaggaaccgcu

SEQ ID NO: 196177 - RNA, 32 nt, Homo Sapiens
acauuaaaaaggaaaguuugccaggaggaaca

SEQ ID NO: 196178 - RNA, 32 nt, Homo Sapiens
caaaauagauauauuuuuaaaauccuuaaaaa

SEQ ID NO: 196179 - RNA, 32 nt, Homo Sapiens
cgagcugagcgcggcagcggcggcgggaugcu

SEQ ID NO: 196180 - RNA, 32 nt, Homo Sapiens
cuccaauggcuuuggggaagaacuucaccagc

SEQ ID NO: 196181 - RNA, 32 nt, Homo Sapiens
aaaguaacuuuuuguauaaauaaaagaaaaug

SEQ ID NO: 196182 - RNA, 32 nt, Homo Sapiens
auucuuacuuuaucuguagaaauugaauuuug

SEQ ID NO: 196183 - RNA, 32 nt, Homo Sapiens
uuaugugagguuccaaaauauguaaaaaugau

SEQ ID NO: 196184 - RNA, 32 nt, Homo Sapiens
uucuaagcaucucuucuauacucugugcugaa

SEQ ID NO: 196185 - RNA, 32 nt, Homo Sapiens
ggcuugccucuggagaccccagccccagaggg

SEQ ID NO: 196186 - RNA, 32 nt, Homo Sapiens
uuaauccuauguuuuguaauuuucauuuuagg

SEQ ID NO: 196187 - RNA, 32 nt, Homo Sapiens
ccaguagaaaaagccagaggugcugaugacuu

SEQ ID NO: 196188 - RNA, 32 nt, Homo Sapiens
cggcuggagcgcaucugguccuccgcgcggaa

SEQ ID NO: 196189 - RNA, 32 nt, Homo Sapiens
agcuaaggguccuuccugaggcaaauccucag

SEQ ID NO: 196190 - RNA, 32 nt, Homo Sapiens
cagcccuccaaccuccucccgcagcggggacu

SEQ ID NO: 196191 - RNA, 32 nt, Homo Sapiens
uagucucgaacuccugaccugaagcgauccuc

SEQ ID NO: 196192 - RNA, 32 nt, Homo Sapiens
cuucagcugccccuccccggcgcggggggcgg

SEQ ID NO: 196193 - RNA, 32 nt, Homo Sapiens
agacugagccugugggcguggcuugcucccag

SEQ ID NO: 196194 - RNA, 32 nt, Homo Sapiens
ucccaucccucuauuuuaaucuguuaugaagg

SEQ ID NO: 196195 - RNA, 32 nt, Homo Sapiens
uguucuccuuacuccaucuccuccccaaacac

SEQ ID NO: 196196 - RNA, 32 nt, Homo Sapiens
uugugcggagagccuuuugucugcggugcugc

SEQ ID NO: 196197 - RNA, 30 nt, Homo Sapiens
gcucugccacuugccuggccaugucaccuu

SEQ ID NO: 196198 - RNA, 32 nt, Homo Sapiens
cugcagcgaaucgguggcgcgcggcgccugag

SEQ ID NO: 196199 - RNA, 32 nt, Homo Sapiens
uaauaaauucagguguuaagugccaagugaug

SEQ ID NO: 196200 - RNA, 32 nt, Homo Sapiens
ggcacgagggcccucccgagaaagggaagugc

SEQ ID NO: 196201 - RNA, 32 nt, Homo Sapiens
ccguguggcacucccccuccccaccccaucuc

SEQ ID NO: 196202 - RNA, 32 nt, Homo Sapiens
gaauuaaaacuucuuaaauaucuuuuauguug

SEQ ID NO: 196203 - RNA, 32 nt, Homo Sapiens
cuucuccccacuuugcagagccuucuaggagc

SEQ ID NO: 196204 - RNA, 32 nt, Homo Sapiens
aauuacaccugccuguccuuccugggccccuc

SEQ ID NO: 196205 - RNA, 32 nt, Homo Sapiens
acaagaacagcuuuggaaauggcuguugagcc

SEQ ID NO: 196206 - RNA, 32 nt, Homo Sapiens
cugccugcagcccccaggaggugggccugccc

SEQ ID NO: 196207 - RNA, 32 nt, Homo Sapiens
aagaaaugaggguggggauuucuggggcauaa

SEQ ID NO: 196208 - RNA, 32 nt, Homo Sapiens
accaagggcagacaaguuacaauguccuuuug

SEQ ID NO: 196209 - RNA, 32 nt, Homo Sapiens
gggcacccuguccccuuugcagauggggaugc

SEQ ID NO: 196210 - RNA, 32 nt, Homo Sapiens
gucccaggugucacaacccauccucccaggcu

SEQ ID NO: 196211 - RNA, 32 nt, Homo Sapiens
ccucggcugacagcugggccuguggugcagac

SEQ ID NO: 196212 - RNA, 32 nt, Homo Sapiens
gucuccuuuucuucauaacauagauacugaca

SEQ ID NO: 196213 - RNA, 31 nt, Homo Sapiens
uacacggagccccgaggacggacucggcugg

SEQ ID NO: 196214 - RNA, 32 nt, Homo Sapiens
uucuagacuugcuucucccaccucugagauua

SEQ ID NO: 196215 - RNA, 32 nt, Homo Sapiens
ucuucaggcugagcuccuccccgcgugccuuc

SEQ ID NO: 196216 - RNA, 32 nt, Homo Sapiens
gaaauauauaaaaauauauguugaauguuaac

SEQ ID NO: 196217 - RNA, 32 nt, Homo Sapiens
cacagcaggaggagagggagguggcgcuggug

SEQ ID NO: 196218 - RNA, 32 nt, Homo Sapiens
aauuugaaaacaaaacaaaauugcaaaagccu

SEQ ID NO: 196219 - RNA, 32 nt, Homo Sapiens
ugugucccugagucuccuuucugagugcaagc

SEQ ID NO: 196220 - RNA, 32 nt, Homo Sapiens
ugccugggcuagggcugcaggcuggcuggccc

SEQ ID NO: 196221 - RNA, 31 nt, Homo Sapiens
ggaauaugcgaguaaauucagaauugaaaca

SEQ ID NO: 196222 - RNA, 32 nt, Homo Sapiens
cuucuucccccaccuuucccgcgaagccggag

SEQ ID NO: 196223 - RNA, 32 nt, Homo Sapiens
uuuagugauuuacauguacauuuuauagggga

SEQ ID NO: 196224 - RNA, 32 nt, Homo Sapiens
aaguagcuccacgcugggcuucuguggacagc

SEQ ID NO: 196225 - RNA, 32 nt, Homo Sapiens
uaucucuagagcuugcugcuguucaaagcacu

SEQ ID NO: 196226 - RNA, 32 nt, Homo Sapiens
gcucuggacaaaggguuccagagagaagcuag

SEQ ID NO: 196227 - RNA, 32 nt, Homo Sapiens
ggagcgcccccuccccucaccuccccccuccc

SEQ ID NO: 196228 - RNA, 32 nt, Homo Sapiens
ugauauuuuaggauguuuggguguuuguuaca

SEQ ID NO: 196229 - RNA, 30 nt, Homo Sapiens
gagccucuguugaugccgccgccgcgccgc

SEQ ID NO: 196230 - RNA, 32 nt, Homo Sapiens
aaguacgguuaccaugguaacuugaagacaac

SEQ ID NO: 196231 - RNA, 32 nt, Homo Sapiens
ggaacuaucagauauaguaaauuuauauauau

SEQ ID NO: 196232 - RNA, 32 nt, Homo Sapiens
cgucuauccuguguagcauacuggcuucacca

SEQ ID NO: 196233 - RNA, 32 nt, Homo Sapiens
ggugggaucaaucuuaggaaaagcaaaaaagg

SEQ ID NO: 196234 - RNA, 32 nt, Homo Sapiens
aaggcucagggaaauacccuauguuauugugc

SEQ ID NO: 196235 - RNA, 32 nt, Homo Sapiens
ggaaaaauauuuuuugaaccuuaaucuagagu

SEQ ID NO: 196236 - RNA, 32 nt, Homo Sapiens
caucccaugcggcuacuccugcccagcguggu

SEQ ID NO: 196237 - RNA, 32 nt, Homo Sapiens
gccuuuucucugccuugcuugcuugagcuuca

SEQ ID NO: 196238 - RNA, 32 nt, Homo Sapiens
aacuggcuuccucuccuccucuccccaccuuu

SEQ ID NO: 196239 - RNA, 29 nt, Homo Sapiens
cccggccguaguuuacauuuucuaaagcg

SEQ ID NO: 196240 - RNA, 32 nt, Homo Sapiens
acauuagauucugaaaucaugacuguaccauu

SEQ ID NO: 196241 - RNA, 32 nt, Homo Sapiens
ugauugagcugcuucuacuaagaugaguaucu

SEQ ID NO: 196242 - RNA, 32 nt, Homo Sapiens
uaaaacugccaaaugcuuaccugguauuuuau

SEQ ID NO: 196243 - RNA, 32 nt, Homo Sapiens
ccucccagcucaagggacagguccugggugag

SEQ ID NO: 196244 - RNA, 32 nt, Homo Sapiens
gaagggaagcuggcgggggagaaggaggcuaa

SEQ ID NO: 196245 - RNA, 32 nt, Homo Sapiens
uuguacuguucucgugggaaucacuucaucau

SEQ ID NO: 196246 - RNA, 32 nt, Homo Sapiens
cuggaaaagaccaaaauaaaccacgugaagau

SEQ ID NO: 196247 - RNA, 32 nt, Homo Sapiens
ccaagggagcagccaucgcucuuggaucuguu

SEQ ID NO: 196248 - RNA, 32 nt, Homo Sapiens
caggggcuccacggugggcacccugcacucaa

SEQ ID NO: 196249 - RNA, 32 nt, Homo Sapiens
agcugugggagaggggucgugcggaggauccu

SEQ ID NO: 196250 - RNA, 32 nt, Homo Sapiens
gcaguuguuuuaagguuuuugaucucuagggg

SEQ ID NO: 196251 - RNA, 32 nt, Homo Sapiens
accccguuuuaacuuagaacuuucacaaugau

SEQ ID NO: 196252 - RNA, 32 nt, Homo Sapiens
auaaaugcaauaagaaaauguaaagguuuuug

SEQ ID NO: 196253 - RNA, 32 nt, Homo Sapiens
ucuacccaaggcugcuggugcugcugguguga

SEQ ID NO: 196254 - RNA, 32 nt, Homo Sapiens
uguaacaaaaagacauucauaauguuaggaag

SEQ ID NO: 196255 - RNA, 32 nt, Homo Sapiens
gcagggcccucccuuuucccauuguuccugcg

SEQ ID NO: 196256 - RNA, 32 nt, Homo Sapiens
uguuuucauaguuugguuugcauuguauauca

SEQ ID NO: 196257 - RNA, 32 nt, Homo Sapiens
agcggggaggggcugcguggcacagcuagugg

SEQ ID NO: 196258 - RNA, 32 nt, Homo Sapiens
uucauccccuccccgcgcguuccuucgcacac

SEQ ID NO: 196259 - RNA, 32 nt, Homo Sapiens
acuaucccacaaugucccacugggccccagag

SEQ ID NO: 196260 - RNA, 29 nt, Homo Sapiens
ucgugucugggacagauacuggcgccagg

SEQ ID NO: 196261 - RNA, 32 nt, Homo Sapiens
ccgcagcaccauggcgaccaccgucagcacuc

SEQ ID NO: 196262 - RNA, 32 nt, Homo Sapiens
ugaacagaauuugaacuguaagcaagcauuuc

SEQ ID NO: 196263 - RNA, 32 nt, Homo Sapiens
ugucuguggaccaagauguucuauguaauuca

SEQ ID NO: 196264 - RNA, 32 nt, Homo Sapiens
ggcuuuagaaauuuaucuuucauguacccauc

SEQ ID NO: 196265 - RNA, 32 nt, Homo Sapiens
gaugggccagcuugcagggguuggggagggag

SEQ ID NO: 196266 - RNA, 32 nt, Homo Sapiens
aguuguuacugaucaaaguuuaauugcuucau

SEQ ID NO: 196267 - RNA, 32 nt, Homo Sapiens
aggucaagaaauauacagcugauaaaaagaua

SEQ ID NO: 196268 - RNA, 31 nt, Homo Sapiens
cucucucauuugacccuuauagguagaaaua

SEQ ID NO: 196269 - RNA, 32 nt, Homo Sapiens
guaggccgggugccccuguucuccggguuugg

SEQ ID NO: 196270 - RNA, 29 nt, Homo Sapiens
caauaccaagaaguuuauuuucuauauua

SEQ ID NO: 196271 - RNA, 32 nt, Homo Sapiens
uuuguuuuuguacagcaguugggccaaccuuu

SEQ ID NO: 196272 - RNA, 32 nt, Homo Sapiens
acuacaaaacaaaaauaaauauuucacagugg

SEQ ID NO: 196273 - RNA, 32 nt, Homo Sapiens
ggaugauucgcaacagaagaaaauaugccaug

SEQ ID NO: 196274 - RNA, 32 nt, Homo Sapiens
aauuaaaagagaaaauguuauauaucaguuga

SEQ ID NO: 196275 - RNA, 32 nt, Homo Sapiens
uugcuugagaggguuucuuuuacuucaaaauc

SEQ ID NO: 196276 - RNA, 32 nt, Homo Sapiens
guguuuguuuuaaaagucacuuauuucuuaca

SEQ ID NO: 196277 - RNA, 32 nt, Homo Sapiens
gggaaaagaaauuuaugacagaaauaggcaaa

SEQ ID NO: 196278 - RNA, 32 nt, Homo Sapiens
cuuugcugcauucugccucucuaggaccaugg

SEQ ID NO: 196279 - RNA, 32 nt, Homo Sapiens
gaggaguugcuguuuguuugacaaagaaaccc

SEQ ID NO: 196280 - RNA, 32 nt, Homo Sapiens
aagccaccacgcccaaccccauuuuucuuuug

SEQ ID NO: 196281 - RNA, 32 nt, Homo Sapiens
gcugccugggcgcuaucacgugacggccgugc

SEQ ID NO: 196282 - RNA, 32 nt, Homo Sapiens
gucuagucagccuugguuaauuucauaaagua

SEQ ID NO: 196283 - RNA, 32 nt, Homo Sapiens
cucuuuguuggguaucucucuugcuuccuuag

SEQ ID NO: 196284 - RNA, 32 nt, Homo Sapiens
accagucacugccucgcagagcccuacacucc

SEQ ID NO: 196285 - RNA, 32 nt, Homo Sapiens
ugcaccuugucuucagcuuucaaggaggcugu

SEQ ID NO: 196286 - RNA, 32 nt, Homo Sapiens
uaauauaguuuaggaguaagagucuuguuuuu

SEQ ID NO: 196287 - RNA, 32 nt, Homo Sapiens
agugaggggcggggggggcccgggggcgcgcg

SEQ ID NO: 196288 - RNA, 32 nt, Homo Sapiens
ugugccaggugccagacugugcuccuuggaac

SEQ ID NO: 196289 - RNA, 32 nt, Homo Sapiens
auuaaccugccuuuuuugucagcgauugucag

SEQ ID NO: 196290 - RNA, 32 nt, Homo Sapiens
gaaacggcggccagacuuccccgggaaggggc

SEQ ID NO: 196291 - RNA, 32 nt, Homo Sapiens
aucuagaggagggccgucugugaggccacuac

SEQ ID NO: 196292 - RNA, 32 nt, Homo Sapiens
acagcagucuccccgggccuccuggccucucc

SEQ ID NO: 196293 - RNA, 32 nt, Homo Sapiens
guaauaaaacaaugacagcuguaguaacuaug

SEQ ID NO: 196294 - RNA, 31 nt, Homo Sapiens
ggcagcuuccugugugcuccaagggaugagc

SEQ ID NO: 196295 - RNA, 32 nt, Homo Sapiens
acuuuggcggucucuacaaaccuaccauuuca

SEQ ID NO: 196296 - RNA, 32 nt, Homo Sapiens
ggagcaguuuuucccagacaagacccuggaca

SEQ ID NO: 196297 - RNA, 32 nt, Homo Sapiens
aacuuagcucguccuacccccauguugaguuc

SEQ ID NO: 196298 - RNA, 32 nt, Homo Sapiens
cccgucuccgcggcgggggaccgggcugccuu

SEQ ID NO: 196299 - RNA, 32 nt, Homo Sapiens
cagaccuggaaagccaggcugagcacugcaga

SEQ ID NO: 196300 - RNA, 32 nt, Homo Sapiens
ccaucaguauugacagaagacguuacagugaa

SEQ ID NO: 196301 - RNA, 32 nt, Homo Sapiens
ugcaaaggauguguuauuaucuaugugugaca

SEQ ID NO: 196302 - RNA, 32 nt, Homo Sapiens
aguugagggugcgugggcacagagcaccacca

SEQ ID NO: 196303 - RNA, 32 nt, Homo Sapiens
cuaauuuauauucucacuaucuguaaaugaac

SEQ ID NO: 196304 - RNA, 32 nt, Homo Sapiens
agcucaagcucccagcagcagcaacuucggac

SEQ ID NO: 196305 - RNA, 32 nt, Homo Sapiens
ccuaaaaguuaaaugacuauuaaagcauauau

SEQ ID NO: 196306 - RNA, 32 nt, Homo Sapiens
accaacccagcuaacaccuggaucucaaacuu

SEQ ID NO: 196307 - RNA, 32 nt, Homo Sapiens
cugccuuggggaggaguggggcagggcagaga

SEQ ID NO: 196308 - RNA, 32 nt, Homo Sapiens
ucacccucuucgccugguacagcccucacagc

SEQ ID NO: 196309 - RNA, 32 nt, Homo Sapiens
aaaaucuuaucugagucucaccaacucaaaag

SEQ ID NO: 196310 - RNA, 32 nt, Homo Sapiens
aaauuugugaguuugucugauguucuaccaca

SEQ ID NO: 196311 - RNA, 32 nt, Homo Sapiens
aguacuagagggcccgcgccgcggccggccgc

SEQ ID NO: 196312 - RNA, 32 nt, Homo Sapiens
ucucgucccucugcuccgugugucucaugcca

SEQ ID NO: 196313 - RNA, 32 nt, Homo Sapiens
ugaagaagauaaauguuccuggauaucuuuga

SEQ ID NO: 196314 - RNA, 31 nt, Homo Sapiens
augacauugcugagcugcugaguuaaccuag

SEQ ID NO: 196315 - RNA, 32 nt, Homo Sapiens
ccccaggacuuggucuuuuuucugggucuugu

SEQ ID NO: 196316 - RNA, 32 nt, Homo Sapiens
uggggccugugcugacugugccccagacagcc

SEQ ID NO: 196317 - RNA, 32 nt, Homo Sapiens
uccccacacagggccuuuccugucccuugugg

SEQ ID NO: 196318 - RNA, 32 nt, Homo Sapiens
cgugaugguccuauccacggacgccuucucuu

SEQ ID NO: 196319 - RNA, 32 nt, Homo Sapiens
ucauugcagcauguggggcagcgccucccaug

SEQ ID NO: 196320 - RNA, 32 nt, Homo Sapiens
caguuugcaggggaagacccagugguagcuuu

SEQ ID NO: 196321 - RNA, 32 nt, Homo Sapiens
agcaagaaagcaugaaauuuauuuucauuuac

SEQ ID NO: 196322 - RNA, 32 nt, Homo Sapiens
ucuuaggauuguaggaaaauuaucuaguuaau

SEQ ID NO: 196323 - RNA, 32 nt, Homo Sapiens
gugccuaugauuuuaacuuauguuugauauau

SEQ ID NO: 196324 - RNA, 32 nt, Homo Sapiens
auuguguuccucugcccucauucuuuaccuuu

SEQ ID NO: 196325 - RNA, 32 nt, Homo Sapiens
aauuacagaaaagacagaagaugcaaaggagu

SEQ ID NO: 196326 - RNA, 32 nt, Homo Sapiens
gaacagucaccccuccucuccuuggcaaaaag

SEQ ID NO: 196327 - RNA, 32 nt, Homo Sapiens
aauaacccgaacuucagacauuuucccacaga

SEQ ID NO: 196328 - RNA, 32 nt, Homo Sapiens
gguucuagaugggaggaggugugcgugcacau

SEQ ID NO: 196329 - RNA, 32 nt, Homo Sapiens
augacuaugacuucuuuuuuaaacucuugcug

SEQ ID NO: 196330 - RNA, 32 nt, Homo Sapiens
ucccuggucucuccagagggaagaaggucacc

SEQ ID NO: 196331 - RNA, 32 nt, Homo Sapiens
uguguguguuugugagcaugggugugcccuug

SEQ ID NO: 196332 - RNA, 32 nt, Homo Sapiens
gggugcagaaaacagcaccucccaccaaccag

SEQ ID NO: 196333 - RNA, 32 nt, Homo Sapiens
ugcucuaucggccgccucgcuaccagauagcc

SEQ ID NO: 196334 - RNA, 32 nt, Homo Sapiens
gugaaaaccacauuuuaaacgcuguugcaugu

SEQ ID NO: 196335 - RNA, 32 nt, Homo Sapiens
caugguuuuuacaguuuuuuaaaugcucaaga

SEQ ID NO: 196336 - RNA, 32 nt, Homo Sapiens
ccagcagcuccgcgcccucccaggcacccggc

SEQ ID NO: 196337 - RNA, 32 nt, Homo Sapiens
cuauuuauauauaaaaguauacauaugccaua

SEQ ID NO: 196338 - RNA, 32 nt, Homo Sapiens
uauugcuuuuuaaaguguguaguuuuaugcau

SEQ ID NO: 196339 - RNA, 32 nt, Homo Sapiens
uaaaauuauuuuuccugccuguuguuggauuu

SEQ ID NO: 196340 - RNA, 32 nt, Homo Sapiens
agcucaccgcgccgagcgcgccggcaccgccu

SEQ ID NO: 196341 - RNA, 32 nt, Homo Sapiens
aacaagacuaauaauauuuucuuauuuaaaaa

SEQ ID NO: 196342 - RNA, 32 nt, Homo Sapiens
aggauuuuugaaaaguuuccugaugagagaac

SEQ ID NO: 196343 - RNA, 32 nt, Homo Sapiens
acaugucuaaaguaacacaugcacuagugcug

SEQ ID NO: 196344 - RNA, 32 nt, Homo Sapiens
auaggucaguuacuggucucuuucuccgaaug

SEQ ID NO: 196345 - RNA, 32 nt, Homo Sapiens
ccagcagccuggggggcagggcagagccucca

SEQ ID NO: 196346 - RNA, 32 nt, Homo Sapiens
gagaacaggauuauguaguuagaaaagcuaag

SEQ ID NO: 196347 - RNA, 32 nt, Homo Sapiens
cccugagcuagagaccacaggguaacucuaca

SEQ ID NO: 196348 - RNA, 32 nt, Homo Sapiens
ccuccggacauuccuggaggcgacucuggagg

SEQ ID NO: 196349 - RNA, 32 nt, Homo Sapiens
cuuaaaagagcucuaaauuugcuuguacauaa

SEQ ID NO: 196350 - RNA, 32 nt, Homo Sapiens
cauucuucaaauaguccggucuuguuuaauau

SEQ ID NO: 196351 - RNA, 32 nt, Homo Sapiens
uucacuggcuucaccuucuccuucucucuucg

SEQ ID NO: 196352 - RNA, 32 nt, Homo Sapiens
augguuuugguaguaucuauauugcuuuagug

SEQ ID NO: 196353 - RNA, 32 nt, Homo Sapiens
cauggauucugggucuccagauuggaacagag

SEQ ID NO: 196354 - RNA, 32 nt, Homo Sapiens
cagugcuguggcucugccauggaggcucauaa

SEQ ID NO: 196355 - RNA, 32 nt, Homo Sapiens
gcccagccaggagcaccgccgcggacuccagc

SEQ ID NO: 196356 - RNA, 32 nt, Homo Sapiens
caggaggaauaauucuucaagaucuauuaccc

SEQ ID NO: 196357 - RNA, 31 nt, Homo Sapiens
cagaggccggacagccugcccuggggcgcaa

SEQ ID NO: 196358 - RNA, 32 nt, Homo Sapiens
uuuguggauacucuuuuuuuuaaauuucaugc

SEQ ID NO: 196359 - RNA, 29 nt, Homo Sapiens
caucaauaaaguuguauguuucaacugac

SEQ ID NO: 196360 - RNA, 32 nt, Homo Sapiens
cauguggggugggaaccuggggugugguucca

SEQ ID NO: 196361 - RNA, 32 nt, Homo Sapiens
guucgucacagugucauuuuccauucagguac

SEQ ID NO: 196362 - RNA, 31 nt, Homo Sapiens
uuucauucgcccucagccacgcacaagggaa

SEQ ID NO: 196363 - RNA, 32 nt, Homo Sapiens
caagccugucuuucccagcgucauguuugugu

SEQ ID NO: 196364 - RNA, 32 nt, Homo Sapiens
guguucugguagcagagcucagagccaacugu

SEQ ID NO: 196365 - RNA, 32 nt, Homo Sapiens
aguggauaaaagucugugacucgggggaaagu

SEQ ID NO: 196366 - RNA, 32 nt, Homo Sapiens
cccugccccaaccggagaggccggugcacagg

SEQ ID NO: 196367 - RNA, 32 nt, Homo Sapiens
ggagaggggcuucucucugcucccggcuucca

SEQ ID NO: 196368 - RNA, 32 nt, Homo Sapiens
gagauaucaaaauaaaguuuguguuuccugaa

SEQ ID NO: 196369 - RNA, 31 nt, Homo Sapiens
gcugucagccggccugcuccaagggccagaa

SEQ ID NO: 196370 - RNA, 32 nt, Homo Sapiens
ucccagcgauucuccugccucagccucuuccu

SEQ ID NO: 196371 - RNA, 32 nt, Homo Sapiens
gccgggggcgcggccgcgguggcacuuggacc

SEQ ID NO: 196372 - RNA, 32 nt, Homo Sapiens
ccccccggggagaggacacuggccccucgcac

SEQ ID NO: 196373 - RNA, 32 nt, Homo Sapiens
ucggucguaacccucuguggcuccccugcauc

SEQ ID NO: 196374 - RNA, 32 nt, Homo Sapiens
cuugacgucacucucucucgaccuccaaacag

SEQ ID NO: 196375 - RNA, 32 nt, Homo Sapiens
cccacuccggcccuccagagccccacagcccc

SEQ ID NO: 196376 - RNA, 32 nt, Homo Sapiens
uucuuuugaugaugugcuggaggaaggaaagc

SEQ ID NO: 196377 - RNA, 32 nt, Homo Sapiens
cgcgcucagcccggcgaccccugcgggcucca

SEQ ID NO: 196378 - RNA, 32 nt, Homo Sapiens
uaaaauggggguaaagauauaaacuauuaagc

SEQ ID NO: 196379 - RNA, 32 nt, Homo Sapiens
cuguuccgcucccagaagccccgggcggcgga

SEQ ID NO: 196380 - RNA, 32 nt, Homo Sapiens
cgcaguuugcccuccgcucacgcagagccucu

SEQ ID NO: 196381 - RNA, 32 nt, Homo Sapiens
gcacuccaugcgaaaacagccauugccuuuuu

SEQ ID NO: 196382 - RNA, 32 nt, Homo Sapiens
ccgggcuggggguggggguacgccgcacagcu

SEQ ID NO: 196383 - RNA, 32 nt, Homo Sapiens
aaucaccuuucugaaaagagugggcugauaaa

SEQ ID NO: 196384 - RNA, 31 nt, Homo Sapiens
uucgauuugugcuucugugcuuguaggagag

SEQ ID NO: 196385 - RNA, 32 nt, Homo Sapiens
guguccuccaggagcuucuuguuuccuuguua

SEQ ID NO: 196386 - RNA, 32 nt, Homo Sapiens
auauauaaugaaauaauuauacaacucaccau

SEQ ID NO: 196387 - RNA, 32 nt, Homo Sapiens
ugucaucuuguacagcaaaauauuauguuggu

SEQ ID NO: 196388 - RNA, 32 nt, Homo Sapiens
cgccccggcgggcuccuccggcgugucagggu

SEQ ID NO: 196389 - RNA, 32 nt, Homo Sapiens
gccgccuucacagcagucuggaugcgggcaug

SEQ ID NO: 196390 - RNA, 32 nt, Homo Sapiens
ugaucugcuuugcagggaaauaacuuguuuuu

SEQ ID NO: 196391 - RNA, 32 nt, Homo Sapiens
ggggaggccgugccaggcagggccgguucgug

SEQ ID NO: 196392 - RNA, 32 nt, Homo Sapiens
uuguaucaagcuguaccauuuauuucuccccu

SEQ ID NO: 196393 - RNA, 32 nt, Homo Sapiens
ccuucucacaagaauuaaaaacaaaaagggca

SEQ ID NO: 196394 - RNA, 27 nt, Homo Sapiens
aaggggcuguucuucagugguucccau

SEQ ID NO: 196395 - RNA, 32 nt, Homo Sapiens
accuauuucauagaagaccuggaauccauaac

SEQ ID NO: 196396 - RNA, 32 nt, Homo Sapiens
aauuuuggauuuugccucuuugugcuuuaaag

SEQ ID NO: 196397 - RNA, 32 nt, Homo Sapiens
acauagcgagaccucaucuccaaaaaagaaaa

SEQ ID NO: 196398 - RNA, 32 nt, Homo Sapiens
cuaugggcacuaggucuguaggucccuggugc

SEQ ID NO: 196399 - RNA, 32 nt, Homo Sapiens
auaugacauuuuacuauguuuugacuuccuga

SEQ ID NO: 196400 - RNA, 32 nt, Homo Sapiens
aacgauuuguaucguaugauuaaggaucuaag

SEQ ID NO: 196401 - RNA, 32 nt, Homo Sapiens
aaggcagaacagccuccacucgcggugcacgg

SEQ ID NO: 196402 - RNA, 32 nt, Homo Sapiens
uacagaaaaaagugucagugaaauguaggucu

SEQ ID NO: 196403 - RNA, 32 nt, Homo Sapiens
gccaugaauuccucuuguuucccagucuucuc

SEQ ID NO: 196404 - RNA, 32 nt, Homo Sapiens
uuuaguggccggccggccgcucucaucccccg

SEQ ID NO: 196405 - RNA, 32 nt, Homo Sapiens
aaggugguaucuaauuuuuuuauggaccauaa

SEQ ID NO: 196406 - RNA, 32 nt, Homo Sapiens
gccacgugcccucacccagcccggcccccacc

SEQ ID NO: 196407 - RNA, 32 nt, Homo Sapiens
uuguccccucacugauuccuggcacucugcuc

SEQ ID NO: 196408 - RNA, 32 nt, Homo Sapiens
guaucuccuguuccugugcaucuccuaugaau

SEQ ID NO: 196409 - RNA, 32 nt, Homo Sapiens
uuaauuaaugaaaauaaaucugugaaguaccu

SEQ ID NO: 196410 - RNA, 32 nt, Homo Sapiens
uagagcuggcaagucagcaucauucccagugc

SEQ ID NO: 196411 - RNA, 32 nt, Homo Sapiens
auacaggcauguaucugccguacacuagauga

SEQ ID NO: 196412 - RNA, 32 nt, Homo Sapiens
gcaauuuaucuaaaugcuaggcaacgccacag

SEQ ID NO: 196413 - RNA, 32 nt, Homo Sapiens
uccucacccccugguaguucuuuauauaucac

SEQ ID NO: 196414 - RNA, 32 nt, Homo Sapiens
ucgaucuuggaauugaaaguaaagcuggaaag

SEQ ID NO: 196415 - RNA, 32 nt, Homo Sapiens
gcuguccugugggcagaagagacaggagugga

SEQ ID NO: 196416 - RNA, 32 nt, Homo Sapiens
ucugccaucuccugcuguucuuucucugugcc

SEQ ID NO: 196417 - RNA, 32 nt, Homo Sapiens
uacaaguuuuucucugggguccucuuucaagg

SEQ ID NO: 196418 - RNA, 32 nt, Homo Sapiens
cccacccucauccuuaccuccuccuacucaag

SEQ ID NO: 196419 - RNA, 32 nt, Homo Sapiens
gucccacaucagaaacugauccucaggacuug

SEQ ID NO: 196420 - RNA, 32 nt, Homo Sapiens
gggguacaacagcagccaaauucuuccccacc

SEQ ID NO: 196421 - RNA, 32 nt, Homo Sapiens
ggcauacuuugucuauagaaaaauauuuugac

SEQ ID NO: 196422 - RNA, 32 nt, Homo Sapiens
gaguccagccuauauucuuguuuaucaguuca

SEQ ID NO: 196423 - RNA, 32 nt, Homo Sapiens
uggcaguguucaaggacuggcuccaggagcag

SEQ ID NO: 196424 - RNA, 32 nt, Homo Sapiens
caagaugauuaccauuaggaguuacuuuaugu

SEQ ID NO: 196425 - RNA, 32 nt, Homo Sapiens
uauccuccuacaguaguuuaaauugacagaaa

SEQ ID NO: 196426 - RNA, 32 nt, Homo Sapiens
gaaaacccugaacaugguuucauuggauauuc

SEQ ID NO: 196427 - RNA, 32 nt, Homo Sapiens
gcccgcgcacgcccggauggcuccucgcgccg

SEQ ID NO: 196428 - RNA, 32 nt, Homo Sapiens
uuuuaggcugcuagcauguuucuucuaauggu

SEQ ID NO: 196429 - RNA, 32 nt, Homo Sapiens
ucccucugccccagccagcgccuccaggccca

SEQ ID NO: 196430 - RNA, 32 nt, Homo Sapiens
uuguccagcagcacgugucauuucauuagguc

SEQ ID NO: 196431 - RNA, 32 nt, Homo Sapiens
ugcugcugcugacgucacauggagcacagaaa

SEQ ID NO: 196432 - RNA, 32 nt, Homo Sapiens
uggugaggaugcccugcugcgcggcccugcgc

SEQ ID NO: 196433 - RNA, 32 nt, Homo Sapiens
ccaccagcucuuaggaaguaaauacagauuuu

SEQ ID NO: 196434 - RNA, 30 nt, Homo Sapiens
gcgggguuucaccauguuagccaggauggu

SEQ ID NO: 196435 - RNA, 32 nt, Homo Sapiens
aagaauucauccuagauauaaaaccauagaaa

SEQ ID NO: 196436 - RNA, 32 nt, Homo Sapiens
agcuuucauaaaaacaauucagcaaauauuuc

SEQ ID NO: 196437 - RNA, 32 nt, Homo Sapiens
cccaggcccuccccagccgacgacagccaccg

SEQ ID NO: 196438 - RNA, 32 nt, Homo Sapiens
uuggagauggaccccaccgacugcacaccacc

SEQ ID NO: 196439 - RNA, 32 nt, Homo Sapiens
aaguuugacaccuugauacccacuuuuuguga

SEQ ID NO: 196440 - RNA, 31 nt, Homo Sapiens
ggcagggacuccauuuuacagaauuacugag

SEQ ID NO: 196441 - RNA, 32 nt, Homo Sapiens
ucagcuugagcccggcggcccccgcccccgcc

SEQ ID NO: 196442 - RNA, 32 nt, Homo Sapiens
acauggaccguaaacgguucccaguugucuga

SEQ ID NO: 196443 - RNA, 32 nt, Homo Sapiens
agucugcagccucccauucucuaggccugcag

SEQ ID NO: 196444 - RNA, 32 nt, Homo Sapiens
gccgguggaaaacauggaugaugucaucuacu

SEQ ID NO: 196445 - RNA, 32 nt, Homo Sapiens
cgagcgggcggccgagcucccggagcggccug

SEQ ID NO: 196446 - RNA, 30 nt, Homo Sapiens
gggccucugcuaaugguggagagaucaagg

SEQ ID NO: 196447 - RNA, 32 nt, Homo Sapiens
cuggugaccuacauggucauggccgccauccu

SEQ ID NO: 196448 - RNA, 32 nt, Homo Sapiens
ggguguuggggguggggggagggcaagagcgu

SEQ ID NO: 196449 - RNA, 32 nt, Homo Sapiens
cguaguauauagaacaauauuccauauaaaua

SEQ ID NO: 196450 - RNA, 32 nt, Homo Sapiens
cuugcuuggugcccugaugcuucucugagaua

SEQ ID NO: 196451 - RNA, 32 nt, Homo Sapiens
cccagaaaacaaaacaaaauaaugcuuuucga

SEQ ID NO: 196452 - RNA, 32 nt, Homo Sapiens
aguaggcauuauuaucucuguaucacaaaugc

SEQ ID NO: 196453 - RNA, 32 nt, Homo Sapiens
uaaacgaagaucucgacaccuugcaguuuuac

SEQ ID NO: 196454 - RNA, 32 nt, Homo Sapiens
ggaagcagagguguuuccuuucuggggcuaag

SEQ ID NO: 196455 - RNA, 32 nt, Homo Sapiens
aguccuacagcgccguggaugugcugcagacc

SEQ ID NO: 196456 - RNA, 32 nt, Homo Sapiens
uuucuuccuugccuaugcagggcaaacaaaau

SEQ ID NO: 196457 - RNA, 32 nt, Homo Sapiens
uuuuaaaaugguaacaaucagaggaacuauaa

SEQ ID NO: 196458 - RNA, 32 nt, Homo Sapiens
cccagcccacccagccaaaaauacagcugggc

SEQ ID NO: 196459 - RNA, 32 nt, Homo Sapiens
ucagagaugagauuuuuaaaugcuuaugauau

SEQ ID NO: 196460 - RNA, 32 nt, Homo Sapiens
uucugcucucccugcucuggcauccugccagg

SEQ ID NO: 196461 - RNA, 32 nt, Homo Sapiens
gauccagggacagaggcccagccucccugaag

SEQ ID NO: 196462 - RNA, 32 nt, Homo Sapiens
gucaaaucgauggccuggccuuggcuucugau

SEQ ID NO: 196463 - RNA, 32 nt, Homo Sapiens
gugcagaugauuauggaaaauaaccucaaaau

SEQ ID NO: 196464 - RNA, 32 nt, Homo Sapiens
cacuguaauuuucaagccuauuuuauuuguac

SEQ ID NO: 196465 - RNA, 32 nt, Homo Sapiens
caguaccaaauagucacgcuuaaaagugugug

SEQ ID NO: 196466 - RNA, 32 nt, Homo Sapiens
aagccuuggagaugugggcagaggaagaggac

SEQ ID NO: 196467 - RNA, 32 nt, Homo Sapiens
ugugaagugcugggcuuugucuggggcuccag

SEQ ID NO: 196468 - RNA, 32 nt, Homo Sapiens
uuggagacaaaguggaaaugauuccuggaaag

SEQ ID NO: 196469 - RNA, 32 nt, Homo Sapiens
guucaguccaacaaaaacagguuccuuauguu

SEQ ID NO: 196470 - RNA, 32 nt, Homo Sapiens
cgauaucaugaaaggacucacacuggagagaa

SEQ ID NO: 196471 - RNA, 32 nt, Homo Sapiens
acugauauuuggagucaaaaacguaugagacc

SEQ ID NO: 196472 - RNA, 31 nt, Homo Sapiens
ucaagucuuacuguccagccaagggccccua

SEQ ID NO: 196473 - RNA, 32 nt, Homo Sapiens
uguaagcauuuuaaguuuuuuauugaauucca

SEQ ID NO: 196474 - RNA, 32 nt, Homo Sapiens
ucgcccaggagccggagcagcggcacugccug

SEQ ID NO: 196475 - RNA, 32 nt, Homo Sapiens
uggccccgccccagcccagcagcccuggacuc

SEQ ID NO: 196476 - RNA, 32 nt, Homo Sapiens
cgugggcucugaugcuuguuacuaguguuaac

SEQ ID NO: 196477 - RNA, 32 nt, Homo Sapiens
gguccccuguccccgguccccagccagcucag

SEQ ID NO: 196478 - RNA, 32 nt, Homo Sapiens
ugcugcuccuuuaaaacaaauugcauggauuu

SEQ ID NO: 196479 - RNA, 32 nt, Homo Sapiens
gaacccuggugccuuacuggugggaauguaaa

SEQ ID NO: 196480 - RNA, 32 nt, Homo Sapiens
uuuguuuaaguacuucacacagaagccuaggu

SEQ ID NO: 196481 - RNA, 32 nt, Homo Sapiens
uggcgaugcuggcccgugcccggggcugcccc

SEQ ID NO: 196482 - RNA, 32 nt, Homo Sapiens
gcgccuacuuccugucccacugccacaaagau

SEQ ID NO: 196483 - RNA, 32 nt, Homo Sapiens
gugauuguuuacugccuacuggauuuuuuucu

SEQ ID NO: 196484 - RNA, 32 nt, Homo Sapiens
aacguacugugacuuuaacuuuagacaacuua

SEQ ID NO: 196485 - RNA, 32 nt, Homo Sapiens
ggggcucucacagauacccauccaacuccucu

SEQ ID NO: 196486 - RNA, 32 nt, Homo Sapiens
accauccugcucgcaggugccuggacaggaca

SEQ ID NO: 196487 - RNA, 32 nt, Homo Sapiens
ugucucucaaaauaaauaaauaaauaaauaaa

SEQ ID NO: 196488 - RNA, 32 nt, Homo Sapiens
uggggccacuacauuugcuccauccuccuggg

SEQ ID NO: 196489 - RNA, 32 nt, Homo Sapiens
cgaugggcuucuccugcgcgccgcccgguguc

SEQ ID NO: 196490 - RNA, 32 nt, Homo Sapiens
gguacccggaagcgcgcguggaccuggcgcac

SEQ ID NO: 196491 - RNA, 32 nt, Homo Sapiens
ggcaauuuauaauuuauuacuacuuuaaauca

SEQ ID NO: 196492 - RNA, 32 nt, Homo Sapiens
uuuauggacaguuagaugcuuaccaaaaaaga

SEQ ID NO: 196493 - RNA, 32 nt, Homo Sapiens
cuuggcacaaaauaaauguaaccuggaggcuc

SEQ ID NO: 196494 - RNA, 32 nt, Homo Sapiens
ugugcccucccucacuugugggccccccuugc

SEQ ID NO: 196495 - RNA, 32 nt, Homo Sapiens
cacacaccugagcacuuccucccguuggcaaa

SEQ ID NO: 196496 - RNA, 32 nt, Homo Sapiens
ugcgcacgcgcgcugucccccggaggcgucug

SEQ ID NO: 196497 - RNA, 32 nt, Homo Sapiens
aauacaugauuaaaugcaauaguccagguacu

SEQ ID NO: 196498 - RNA, 32 nt, Homo Sapiens
uuacaggugugagccaccacacccggccaacc

SEQ ID NO: 196499 - RNA, 32 nt, Homo Sapiens
gaugggcagugauaagaggagccccgagcagg

SEQ ID NO: 196500 - RNA, 32 nt, Homo Sapiens
uuacaggugugagccaccacacugggccaaug

SEQ ID NO: 196501 - RNA, 32 nt, Homo Sapiens
agggggggaaacugaggcccagagaagggagu

SEQ ID NO: 196502 - RNA, 32 nt, Homo Sapiens
cucgguccucauucuggugggcuucggcgccu

SEQ ID NO: 196503 - RNA, 32 nt, Homo Sapiens
gaugcacccagaaauaguggagggauuaacaa

SEQ ID NO: 196504 - RNA, 32 nt, Homo Sapiens
ugacugggcccgggggccgccgcaacgacccu

SEQ ID NO: 196505 - RNA, 32 nt, Homo Sapiens
aaagugucuucccgggagcccagcgcagcccc

SEQ ID NO: 196506 - RNA, 32 nt, Homo Sapiens
cagaaguccgugccagugaccggagcggcggc

SEQ ID NO: 196507 - RNA, 32 nt, Homo Sapiens
aaaucauggcuuuauucauuuuauuuauuuuu

SEQ ID NO: 196508 - RNA, 32 nt, Homo Sapiens
guggauugcugagacuuggugcucgguauuuu

SEQ ID NO: 196509 - RNA, 32 nt, Homo Sapiens
auuugaagucccuguuugggaaugaggcacuu

SEQ ID NO: 196510 - RNA, 32 nt, Homo Sapiens
gaccaacaccucagaccuucugaagcagccca

SEQ ID NO: 196511 - RNA, 32 nt, Homo Sapiens
uauugaugagacuuccguagauaauguggaaa

SEQ ID NO: 196512 - RNA, 32 nt, Homo Sapiens
gauuacccaagcaaaaucauggaaugguuaua

SEQ ID NO: 196513 - RNA, 32 nt, Homo Sapiens
aacuuuguuuuaaauauuguaauuguggagaa

SEQ ID NO: 196514 - RNA, 32 nt, Homo Sapiens
uuuucguguauauaaauuauacaaguuacugu

SEQ ID NO: 196515 - RNA, 32 nt, Homo Sapiens
ugaggcugcccucuccagucccaggagccgug

SEQ ID NO: 196516 - RNA, 32 nt, Homo Sapiens
aucagcucacagagauucauuucagugaauga

SEQ ID NO: 196517 - RNA, 32 nt, Homo Sapiens
aggcugccuuggaguuuucauaagaaauuguc

SEQ ID NO: 196518 - RNA, 32 nt, Homo Sapiens
ccaucggaauaccucauguuucccuuugaaga

SEQ ID NO: 196519 - RNA, 32 nt, Homo Sapiens
cgcagggaccucugccuaggaaagccagguau

SEQ ID NO: 196520 - RNA, 32 nt, Homo Sapiens
cccgcgccuggugggccacaccuggcaccgcc

SEQ ID NO: 196521 - RNA, 32 nt, Homo Sapiens
aacucuucaauauauuaggcauugugcuaaua

SEQ ID NO: 196522 - RNA, 32 nt, Homo Sapiens
ccaaagaagauaaccauagcugauggagccau

SEQ ID NO: 196523 - RNA, 32 nt, Homo Sapiens
gacagucaggccccaaacaccgguguccccgu

SEQ ID NO: 196524 - RNA, 32 nt, Homo Sapiens
cuggauccgccagcgcugugccacuccccagu

SEQ ID NO: 196525 - RNA, 32 nt, Homo Sapiens
gccaacaccccggccucggggcuccugguggc

SEQ ID NO: 196526 - RNA, 32 nt, Homo Sapiens
cucuaaugagaggacccggcaauccacguuuu

SEQ ID NO: 196527 - RNA, 32 nt, Homo Sapiens
ggggucacgucuuucuccuucuccuuccuccu

SEQ ID NO: 196528 - RNA, 32 nt, Homo Sapiens
agcggaggagcucugggacacccuugucuagg

SEQ ID NO: 196529 - RNA, 32 nt, Homo Sapiens
acauauuuguauauuucuaagguaagagaauu

SEQ ID NO: 196530 - RNA, 32 nt, Homo Sapiens
aacaugcggacuguucaagagaauugaucugg

SEQ ID NO: 196531 - RNA, 32 nt, Homo Sapiens
ugggagucugcagcuuccuguugcauggcugg

SEQ ID NO: 196532 - RNA, 32 nt, Homo Sapiens
gauaaaaauaccaaaagcagaugaaaagguga

SEQ ID NO: 196533 - RNA, 31 nt, Homo Sapiens
gcacucuugggcuuggcccagaauuagaguu

SEQ ID NO: 196534 - RNA, 32 nt, Homo Sapiens
auuggacagggaugcagacacuguccauggcu

SEQ ID NO: 196535 - RNA, 31 nt, Homo Sapiens
cugcagcugccggacccaggugcggaagugc

SEQ ID NO: 196536 - RNA, 32 nt, Homo Sapiens
ggaacaagugauguggaauuaaugggugcaac

SEQ ID NO: 196537 - RNA, 32 nt, Homo Sapiens
aggcagcggccauggcgccggagcgcacgggc

SEQ ID NO: 196538 - RNA, 32 nt, Homo Sapiens
gggcugggcuguugcaccucuacuggcaucag

SEQ ID NO: 196539 - RNA, 32 nt, Homo Sapiens
aggacauggcuaaagaccuuaaccaauagcaa

SEQ ID NO: 196540 - RNA, 32 nt, Homo Sapiens
caguucaggcagaucggaaaccacuggcugca

SEQ ID NO: 196541 - RNA, 32 nt, Homo Sapiens
cccauucccagcugcagcccccuaaacccagg

SEQ ID NO: 196542 - RNA, 32 nt, Homo Sapiens
gcugacgagggggccacacucacgcagucacc

SEQ ID NO: 196543 - RNA, 32 nt, Homo Sapiens
gucuucauguguuuuuguuuucucauaagugu

SEQ ID NO: 196544 - RNA, 32 nt, Homo Sapiens
uacagcaaccuaugagguagauaauauuguca

SEQ ID NO: 196545 - RNA, 32 nt, Homo Sapiens
uugagaccaguaguaccaacuuuccagggcug

SEQ ID NO: 196546 - RNA, 32 nt, Homo Sapiens
uccaggcugcaccuacaaguaccugaacacca

SEQ ID NO: 196547 - RNA, 31 nt, Homo Sapiens
ggaaggguggcgcaucucagagcccucgcaa

SEQ ID NO: 196548 - RNA, 32 nt, Homo Sapiens
ugaaaacggagcuucuuggaggccaccugcug

SEQ ID NO: 196549 - RNA, 32 nt, Homo Sapiens
gcuugaccauuaccauuucauugaccauugua

SEQ ID NO: 196550 - RNA, 32 nt, Homo Sapiens
cuggguuaaaaauacuuuguauuaaagauuuu

SEQ ID NO: 196551 - RNA, 32 nt, Homo Sapiens
ggcagcgcuaagcaggaugccuucuccuggag

SEQ ID NO: 196552 - RNA, 32 nt, Homo Sapiens
uuuuguuugcugaauuaaaguacucugacauu

SEQ ID NO: 196553 - RNA, 32 nt, Homo Sapiens
aucuuccagguauacuccaugggaugccuguu

SEQ ID NO: 196554 - RNA, 32 nt, Homo Sapiens
cuucuugccccuguugacguggaaugcugugu

SEQ ID NO: 196555 - RNA, 32 nt, Homo Sapiens
ugccugcuagaggagcucuguguucccaagga

SEQ ID NO: 196556 - RNA, 28 nt, Homo Sapiens
ccaucauggagguggccgagguggaaag

SEQ ID NO: 196557 - RNA, 32 nt, Homo Sapiens
uacgcaccugugacaagggcuguguugaccac

SEQ ID NO: 196558 - RNA, 32 nt, Homo Sapiens
cagccccacagcccaguguucuccuugggggc

SEQ ID NO: 196559 - RNA, 27 nt, Homo Sapiens
cccaagccccuccccagcccccucucc

SEQ ID NO: 196560 - RNA, 32 nt, Homo Sapiens
gcgucuagggcuuugcucccaagggcuguggc

SEQ ID NO: 196561 - RNA, 32 nt, Homo Sapiens
cccagaccaaagggacuuuguaggugugugau

SEQ ID NO: 196562 - RNA, 32 nt, Homo Sapiens
ugaggcagcaauuuuuuacaaaaaggucaucc

SEQ ID NO: 196563 - RNA, 32 nt, Homo Sapiens
cccgggggaguaggaggcuccugacaggccgc

SEQ ID NO: 196564 - RNA, 32 nt, Homo Sapiens
uuuuccguauuuugagcucucuucccaauauu

SEQ ID NO: 196565 - RNA, 32 nt, Homo Sapiens
augaccagcugccgcuggccccggggccccgg

SEQ ID NO: 196566 - RNA, 32 nt, Homo Sapiens
ccagcccccuccccucugcucaacaccuccgc

SEQ ID NO: 196567 - RNA, 32 nt, Homo Sapiens
uggaaggaugacuggugacugaugagaaguca

SEQ ID NO: 196568 - RNA, 32 nt, Homo Sapiens
cgacuaaaggcuuuuccacauucuucacaugu

SEQ ID NO: 196569 - RNA, 32 nt, Homo Sapiens
ucuggggagagaggggcccaccccuucccagc

SEQ ID NO: 196570 - RNA, 32 nt, Homo Sapiens
gguaagauugcgcgcuucauccccucaaaaug

SEQ ID NO: 196571 - RNA, 32 nt, Homo Sapiens
caggcccggcagagccgcaggcgcuaggccgc

SEQ ID NO: 196572 - RNA, 32 nt, Homo Sapiens
uauguucuagccucuggggggaaaccaggacc

SEQ ID NO: 196573 - RNA, 32 nt, Homo Sapiens
cugcgggagcgacgaggcgggcgcggagggca

SEQ ID NO: 196574 - RNA, 32 nt, Homo Sapiens
ucuguugccuucuugacaucaaugaaaaguag

SEQ ID NO: 196575 - RNA, 32 nt, Homo Sapiens
uuugggaacaucggcuucggaacccccuacua

SEQ ID NO: 196576 - RNA, 32 nt, Homo Sapiens
accuguaaggacccaggagggcuucggcagau

SEQ ID NO: 196577 - RNA, 32 nt, Homo Sapiens
ugucuguguguacagagaacuaccugagacug

SEQ ID NO: 196578 - RNA, 32 nt, Homo Sapiens
ugaacuauuauuuagguacaaacuuuauaaag

SEQ ID NO: 196579 - RNA, 32 nt, Homo Sapiens
gggcuccuuugauagcaacuuucccaggggca

SEQ ID NO: 196580 - RNA, 32 nt, Homo Sapiens
cugagcugagcaccuccucccugagacagcag

SEQ ID NO: 196581 - RNA, 32 nt, Homo Sapiens
cauuuaaauuguuucuguuacucugugcaaaa

SEQ ID NO: 196582 - RNA, 32 nt, Homo Sapiens
aaaagugaaaauaaauaaaugggacuacauca

SEQ ID NO: 196583 - RNA, 32 nt, Homo Sapiens
cucaaauguguucguggggucuuccaaagcuc

SEQ ID NO: 196584 - RNA, 32 nt, Homo Sapiens
auccacgcccuucuaguccaaccccccucaau

SEQ ID NO: 196585 - RNA, 32 nt, Homo Sapiens
ggugcgaggguggcuguggcggggccugagca

SEQ ID NO: 196586 - RNA, 32 nt, Homo Sapiens
cccacguccaccuucguuguaagcaaacauau

SEQ ID NO: 196587 - RNA, 32 nt, Homo Sapiens
uggggccugcaggacuucuuucuggggguccu

SEQ ID NO: 196588 - RNA, 32 nt, Homo Sapiens
cuuugggaucgacuggguuuuaauggccuagu

SEQ ID NO: 196589 - RNA, 32 nt, Homo Sapiens
aaaggccagggggcagguggggugccugggag

SEQ ID NO: 196590 - RNA, 32 nt, Homo Sapiens
ccguccaccucucagccccuccccucaccccu

SEQ ID NO: 196591 - RNA, 32 nt, Homo Sapiens
ucaaucuagugucaauggaaguaacaguaaau

SEQ ID NO: 196592 - RNA, 32 nt, Homo Sapiens
aguguuuagcuggcagagcuuucccuugacuu

SEQ ID NO: 196593 - RNA, 32 nt, Homo Sapiens
gcauucaccaaauaaacuugcucucugggaaa

SEQ ID NO: 196594 - RNA, 32 nt, Homo Sapiens
gugggguuuguccgcuaggaggaggcaaggcc

SEQ ID NO: 196595 - RNA, 32 nt, Homo Sapiens
uucucugcccccagccuucugucccccuugga

SEQ ID NO: 196596 - RNA, 32 nt, Homo Sapiens
uucugcacggccccucggcacccaggccgacc

SEQ ID NO: 196597 - RNA, 31 nt, Homo Sapiens
gggaagaugaccgcgggcgccggcgugcucc

SEQ ID NO: 196598 - RNA, 32 nt, Homo Sapiens
gcugggcgccgcgcgcaccauggggcucccag

SEQ ID NO: 196599 - RNA, 32 nt, Homo Sapiens
ccacaccccacuucccucuccuuccacuuuca

SEQ ID NO: 196600 - RNA, 32 nt, Homo Sapiens
gauccacuucuguuggcacucaacccauugga

SEQ ID NO: 196601 - RNA, 32 nt, Homo Sapiens
ugggcucaccgggaacaugaguggaagagccc

SEQ ID NO: 196602 - RNA, 32 nt, Homo Sapiens
gaguacaggaccauuuuguugauugucuuucu

SEQ ID NO: 196603 - RNA, 32 nt, Homo Sapiens
agacccuacgccccgcugucaggcagcccgcc

SEQ ID NO: 196604 - RNA, 31 nt, Homo Sapiens
aauacccucaaugaucuccugaagcaucuga

SEQ ID NO: 196605 - RNA, 32 nt, Homo Sapiens
cggacgcgaugacccugaacggcggcggcagc

SEQ ID NO: 196606 - RNA, 32 nt, Homo Sapiens
ugguucagcuagucccugugcguugagaggcu

SEQ ID NO: 196607 - RNA, 32 nt, Homo Sapiens
aaaucccuuuuggccacacaguuuacaaaccc

SEQ ID NO: 196608 - RNA, 32 nt, Homo Sapiens
acuucgccgccgaauccccggcgccgcccagc

SEQ ID NO: 196609 - RNA, 32 nt, Homo Sapiens
cacagacuucaaaauagucacuuuuuacguga

SEQ ID NO: 196610 - RNA, 32 nt, Homo Sapiens
cacgcccucaacucaaguccccucccagaucu

SEQ ID NO: 196611 - RNA, 32 nt, Homo Sapiens
auguaaugcugacuuuuauaaagccuggacuu

SEQ ID NO: 196612 - RNA, 32 nt, Homo Sapiens
ugaaguacauauuaggaaaauauggguugcau

SEQ ID NO: 196613 - RNA, 32 nt, Homo Sapiens
auaauuucaaccacaaucauuaauaaaaauag

SEQ ID NO: 196614 - RNA, 32 nt, Homo Sapiens
ucuauuauuuaaagccaacaaaacaguguaac

SEQ ID NO: 196615 - RNA, 32 nt, Homo Sapiens
aaauuauuucuuuuacacaaauauaugauguu

SEQ ID NO: 196616 - RNA, 32 nt, Homo Sapiens
gggaacuugagacccacaguuauucuuaauuu

SEQ ID NO: 196617 - RNA, 32 nt, Homo Sapiens
guguguguuaauauguuuuucuuguagcauag

SEQ ID NO: 196618 - RNA, 31 nt, Homo Sapiens
acaucucucaagaugaccugaguuccuuccu

SEQ ID NO: 196619 - RNA, 32 nt, Homo Sapiens
auuggcggacauuuggagcauuucuacccuuu

SEQ ID NO: 196620 - RNA, 32 nt, Homo Sapiens
gcggcgcugggucgguggcggaggcugaggag

SEQ ID NO: 196621 - RNA, 32 nt, Homo Sapiens
acguagccacuuuaaauauacuuaacacauga

SEQ ID NO: 196622 - RNA, 32 nt, Homo Sapiens
aaugaacugcaggagcucuccuugcagcccga

SEQ ID NO: 196623 - RNA, 32 nt, Homo Sapiens
agaguggauugaagucagacuagggcuguuca

SEQ ID NO: 196624 - RNA, 32 nt, Homo Sapiens
acugagcugucauguccugaguggugagggug

SEQ ID NO: 196625 - RNA, 32 nt, Homo Sapiens
acacuaauauaaauuauuccaagucuuuaagg

SEQ ID NO: 196626 - RNA, 32 nt, Homo Sapiens
ccgggaauaaaaaccaguggcuccacagugga

SEQ ID NO: 196627 - RNA, 32 nt, Homo Sapiens
ggauuuggaagucugacaaaacaccauuccag

SEQ ID NO: 196628 - RNA, 32 nt, Homo Sapiens
cagagccuccaagcucauggccuccuuaggag

SEQ ID NO: 196629 - RNA, 32 nt, Homo Sapiens
cccuccccaucccauguauuuaucucuauuua

SEQ ID NO: 196630 - RNA, 32 nt, Homo Sapiens
uuuuugagaaaugaaauuuaacuuuagccuuu

SEQ ID NO: 196631 - RNA, 32 nt, Homo Sapiens
cuuggaauuaugucuuucucuuuuaauuugau

SEQ ID NO: 196632 - RNA, 32 nt, Homo Sapiens
uggggagcgcggggcgucccgggucgcggugc

SEQ ID NO: 196633 - RNA, 32 nt, Homo Sapiens
cagugcggagcucggcgccggggcccaugccc

SEQ ID NO: 196634 - RNA, 32 nt, Homo Sapiens
cugccugugaaugaugcaauggaaggugugcu

SEQ ID NO: 196635 - RNA, 32 nt, Homo Sapiens
gcccccaaaccacgagaucaacaaagaaaugc

SEQ ID NO: 196636 - RNA, 32 nt, Homo Sapiens
gccgccgaggccagcuucgcggcgcugccccg

SEQ ID NO: 196637 - RNA, 32 nt, Homo Sapiens
aacaguauagugguaccaauggcauuaagaug

SEQ ID NO: 196638 - RNA, 32 nt, Homo Sapiens
auaguauuucauuguguguguacaccauguuu

SEQ ID NO: 196639 - RNA, 32 nt, Homo Sapiens
ugccuguccagaugccaaaacucuguguugcu

SEQ ID NO: 196640 - RNA, 32 nt, Homo Sapiens
aguaaauacauuaagaaauaaccaaaucggcu

SEQ ID NO: 196641 - RNA, 32 nt, Homo Sapiens
cagcaucagcguggcagucaccaccccaguga

SEQ ID NO: 196642 - RNA, 32 nt, Homo Sapiens
ggauugagggccgucccugugcuccugcccag

SEQ ID NO: 196643 - RNA, 32 nt, Homo Sapiens
gcucacccauucuacacuugcucuuuugcucc

SEQ ID NO: 196644 - RNA, 32 nt, Homo Sapiens
acugcuuccuauccuccuccuggagagcccaa

SEQ ID NO: 196645 - RNA, 29 nt, Homo Sapiens
uuuucauaaaguuuaacauuuuuaucagc

SEQ ID NO: 196646 - RNA, 32 nt, Homo Sapiens
aucacacaccccagccggcuuccuggccaggg

SEQ ID NO: 196647 - RNA, 32 nt, Homo Sapiens
aauccuguaaauauuucuuuauuucaucuaaa

SEQ ID NO: 196648 - RNA, 32 nt, Homo Sapiens
gggguggagguggcaggcagggguucuccuca

SEQ ID NO: 196649 - RNA, 32 nt, Homo Sapiens
gaucccccgagaccucacgcuggaugcccugc

SEQ ID NO: 196650 - RNA, 32 nt, Homo Sapiens
uaugguguagacagcccucccccaaccccagg

SEQ ID NO: 196651 - RNA, 32 nt, Homo Sapiens
aucugagcaauaacuucuauguugguuucagu

SEQ ID NO: 196652 - RNA, 32 nt, Homo Sapiens
cugaaaacccaccgugucauaaaaccccagga

SEQ ID NO: 196653 - RNA, 32 nt, Homo Sapiens
cccauccugagccccagguuccucacauguca

SEQ ID NO: 196654 - RNA, 32 nt, Homo Sapiens
gagccauguuggagcggcgggaggcggcagca

SEQ ID NO: 196655 - RNA, 31 nt, Homo Sapiens
gcacugugaaaauaaacuuuuauuaagcuga

SEQ ID NO: 196656 - RNA, 32 nt, Homo Sapiens
guucuuggaaacaaaguuguauugucauuggu

SEQ ID NO: 196657 - RNA, 32 nt, Homo Sapiens
acuauuauccccauuucuuuuuuaaaugaaga

SEQ ID NO: 196658 - RNA, 32 nt, Homo Sapiens
aauaaacagccuucuuuuuuuuuccuuuguuu

SEQ ID NO: 196659 - RNA, 32 nt, Homo Sapiens
uucugccaagucuguuagaucuccaggucagg

SEQ ID NO: 196660 - RNA, 32 nt, Homo Sapiens
gggggcccugaggcaggaccgcccuccugacc

SEQ ID NO: 196661 - RNA, 32 nt, Homo Sapiens
uccugaauucugguuguaaaucugguuacagc

SEQ ID NO: 196662 - RNA, 32 nt, Homo Sapiens
cucccaagccccaggcagaguacaagcucauu

SEQ ID NO: 196663 - RNA, 32 nt, Homo Sapiens
ggugcuccugcccgcuggccccucgcgcguga

SEQ ID NO: 196664 - RNA, 32 nt, Homo Sapiens
gacacacccagcugcacacaugaggcauccca

SEQ ID NO: 196665 - RNA, 32 nt, Homo Sapiens
aucugugcucuccagcugggaaccagcagcga

SEQ ID NO: 196666 - RNA, 32 nt, Homo Sapiens
guguaaauguucguaugagcugugugugaaug

SEQ ID NO: 196667 - RNA, 32 nt, Homo Sapiens
uucaguguuucuaccugugugcuggagcucau

SEQ ID NO: 196668 - RNA, 32 nt, Homo Sapiens
aaagacuuuggaagcagcugcugcugcugcca

SEQ ID NO: 196669 - RNA, 32 nt, Homo Sapiens
cuuuucugacuuccccagcaaggaucuuccca

SEQ ID NO: 196670 - RNA, 32 nt, Homo Sapiens
ccgaauaggaacagcucuggucuacaguuccc

SEQ ID NO: 196671 - RNA, 32 nt, Homo Sapiens
aaggcagaaauuugaagaaaaaugaacaugaa

SEQ ID NO: 196672 - RNA, 32 nt, Homo Sapiens
caaguacuuccacuucuucccuaaaugcgcuu

SEQ ID NO: 196673 - RNA, 32 nt, Homo Sapiens
acccgcgccgccggaccugaaacccggcggag

SEQ ID NO: 196674 - RNA, 32 nt, Homo Sapiens
acugguuaaaacaugaaugaaaccucuguggc

SEQ ID NO: 196675 - RNA, 32 nt, Homo Sapiens
cuggggcuuccaucuuaauuuauucucaauaa

SEQ ID NO: 196676 - RNA, 32 nt, Homo Sapiens
gaccuccugguacccgccgccgggccuuuuag

SEQ ID NO: 196677 - RNA, 32 nt, Homo Sapiens
ucaaucagugcugcuggcacaaugaaaggugg

SEQ ID NO: 196678 - RNA, 32 nt, Homo Sapiens
ggguggcaauguguacauccucacgggcaagg

SEQ ID NO: 196679 - RNA, 32 nt, Homo Sapiens
guuauauuugaaauugcugauacugaguuuuu

SEQ ID NO: 196680 - RNA, 32 nt, Homo Sapiens
aucaguacaaaguacugagacaaugguuaggg

SEQ ID NO: 196681 - RNA, 32 nt, Homo Sapiens
uuggcugcaaagggcuguguccugacucugca

SEQ ID NO: 196682 - RNA, 32 nt, Homo Sapiens
aagcucucuggcaucacccuuuucucauaagg

SEQ ID NO: 196683 - RNA, 32 nt, Homo Sapiens
uaagugaaguugccagaaauggucaacugauc

SEQ ID NO: 196684 - RNA, 32 nt, Homo Sapiens
ccaagcugaccucagcuggguaaugugaucag

SEQ ID NO: 196685 - RNA, 32 nt, Homo Sapiens
uuccccaucaccgugcgcuguugcgaucugga

SEQ ID NO: 196686 - RNA, 32 nt, Homo Sapiens
cacuucaugaggggaggggcgaggggaagccc

SEQ ID NO: 196687 - RNA, 32 nt, Homo Sapiens
aaacgcgcggggggcguccgagacgccccgug

SEQ ID NO: 196688 - RNA, 32 nt, Homo Sapiens
caugcccacccuccccacgcugcagugggcuu

SEQ ID NO: 196689 - RNA, 32 nt, Homo Sapiens
ucuggaaagcagggucagauaccccuggaaaa

SEQ ID NO: 196690 - RNA, 32 nt, Homo Sapiens
acaugccuuugcacaggccaccccccucuuca

SEQ ID NO: 196691 - RNA, 32 nt, Homo Sapiens
ggcgccgccggcguggaccgcgcacggccucu

SEQ ID NO: 196692 - RNA, 32 nt, Homo Sapiens
agggauggccuguuccacugugaucuuaccuc

SEQ ID NO: 196693 - RNA, 32 nt, Homo Sapiens
uuacuucuggguauugauuugcuguacauuuu

SEQ ID NO: 196694 - RNA, 32 nt, Homo Sapiens
ugugcuuccuucccuggcgcagucgcuccucg

SEQ ID NO: 196695 - RNA, 32 nt, Homo Sapiens
ugggcucugacagaaagcagauaccucacccu

SEQ ID NO: 196696 - RNA, 32 nt, Homo Sapiens
ucccggagcccggcgcggggcccgcgagauac

SEQ ID NO: 196697 - RNA, 32 nt, Homo Sapiens
uugagaccugaugcugaguccucagcagcuca

SEQ ID NO: 196698 - RNA, 32 nt, Homo Sapiens
uggcaucugaggggacugaacauggcaagaag

SEQ ID NO: 196699 - RNA, 32 nt, Homo Sapiens
agagcaugguuccuuuucucagcccucuugag

SEQ ID NO: 196700 - RNA, 32 nt, Homo Sapiens
cuccauuuugcauaaccccaaucuuauaccua

SEQ ID NO: 196701 - RNA, 32 nt, Homo Sapiens
ccccgagccucggcccggguuggccgcucggc

SEQ ID NO: 196702 - RNA, 29 nt, Homo Sapiens
aaagcgauauguuucagaacugagagaga

SEQ ID NO: 196703 - RNA, 30 nt, Homo Sapiens
ccucugugcuggagaagcuggacuggcgca

SEQ ID NO: 196704 - RNA, 32 nt, Homo Sapiens
ucaagaaugguguuugcaagugccagauggaa

SEQ ID NO: 196705 - RNA, 32 nt, Homo Sapiens
gucucccagcuggcagagagggcucccagcag

SEQ ID NO: 196706 - RNA, 32 nt, Homo Sapiens
agaccaguacugcaggauuguugcacuaaaug

SEQ ID NO: 196707 - RNA, 32 nt, Homo Sapiens
aagcucugaagauggaucauggccgugacugc

SEQ ID NO: 196708 - RNA, 32 nt, Homo Sapiens
uucuguuauuugauuucuuuuauaacuuuguu

SEQ ID NO: 196709 - RNA, 32 nt, Homo Sapiens
ucagaagaguugugcacgcagauuagcaggcc

SEQ ID NO: 196710 - RNA, 32 nt, Homo Sapiens
cagacaaaauuaacaaacucagacauguuauu

SEQ ID NO: 196711 - RNA, 31 nt, Homo Sapiens
ugacaaguggggagaaagccacuuuguuucu

SEQ ID NO: 196712 - RNA, 32 nt, Homo Sapiens
uuccggcaguccagggccuccucccgagcaca

SEQ ID NO: 196713 - RNA, 32 nt, Homo Sapiens
ugcuggacccgacgagcaguguugacagugaa

SEQ ID NO: 196714 - RNA, 32 nt, Homo Sapiens
uggcccggccgcggcgcgacgccgaacccgug

SEQ ID NO: 196715 - RNA, 32 nt, Homo Sapiens
uguucucuuuuucuagcuuccacaucagcuuc

SEQ ID NO: 196716 - RNA, 32 nt, Homo Sapiens
guuauaaaacaucuauuuugaaucuguaaaua

SEQ ID NO: 196717 - RNA, 32 nt, Homo Sapiens
uauuuuuggccauucucauaccacagacaaaa

SEQ ID NO: 196718 - RNA, 32 nt, Homo Sapiens
cagccucccgaguagcugggacuacugguaca

SEQ ID NO: 196719 - RNA, 32 nt, Homo Sapiens
ugaugauaacaugauugaauugccauauaucu

SEQ ID NO: 196720 - RNA, 32 nt, Homo Sapiens
accccgcccagccccgccccagccccugcuca

SEQ ID NO: 196721 - RNA, 32 nt, Homo Sapiens
uugcugggaaacagggccccaaggcugggagc

SEQ ID NO: 196722 - RNA, 28 nt, Homo Sapiens
guacugaugucuaccaggaaagugauau

SEQ ID NO: 196723 - RNA, 32 nt, Homo Sapiens
cagccucuccagugcugggagagaccucuaga

SEQ ID NO: 196724 - RNA, 32 nt, Homo Sapiens
aucucccccucuauauccucacagagcccuaa

SEQ ID NO: 196725 - RNA, 32 nt, Homo Sapiens
cgcacgcgcgccccgcccagccugcuuucccu

SEQ ID NO: 196726 - RNA, 32 nt, Homo Sapiens
acuccugucauuugaaccccucuggguggggu

SEQ ID NO: 196727 - RNA, 32 nt, Homo Sapiens
uacaaguaccucaggcuuucccaggggcaccc

SEQ ID NO: 196728 - RNA, 32 nt, Homo Sapiens
agaccgggugggaccggaccgcgguuugaguc

SEQ ID NO: 196729 - RNA, 32 nt, Homo Sapiens
ucacuagauaacuuucaguaucaguggugguu

SEQ ID NO: 196730 - RNA, 32 nt, Homo Sapiens
cagaucuagcccaucuuacuccagguuugaua

SEQ ID NO: 196731 - RNA, 32 nt, Homo Sapiens
gauuccaguuuaggauagaguuuuuaccgaga

SEQ ID NO: 196732 - RNA, 32 nt, Homo Sapiens
ugucucuugcuuucaggcuccucccucccacc

SEQ ID NO: 196733 - RNA, 32 nt, Homo Sapiens
guguaugugucugcuaauguaaacuuugucau

SEQ ID NO: 196734 - RNA, 32 nt, Homo Sapiens
agaugaagaagcugaggagggcugggagcagu

SEQ ID NO: 196735 - RNA, 32 nt, Homo Sapiens
agucagugguggccgaaaguccggagucgcug

SEQ ID NO: 196736 - RNA, 32 nt, Homo Sapiens
guuuuuuaaugauuaagguaauuuguuagcuc

SEQ ID NO: 196737 - RNA, 32 nt, Homo Sapiens
gggcauccagcaccuacccuuccacugggcgg

SEQ ID NO: 196738 - RNA, 32 nt, Homo Sapiens
cagggugcucugugccaguuaagauuuuuaac

SEQ ID NO: 196739 - RNA, 32 nt, Homo Sapiens
uaaaugggaauggaaacguguguguuccucca

SEQ ID NO: 196740 - RNA, 32 nt, Homo Sapiens
uggagucuuaggcaucucugguacaguggggu

SEQ ID NO: 196741 - RNA, 32 nt, Homo Sapiens
cccucccacacacaggaccagacggccaccau

SEQ ID NO: 196742 - RNA, 32 nt, Homo Sapiens
cuacgugaaaaaaaaaucauuaguuuguauuu

SEQ ID NO: 196743 - RNA, 32 nt, Homo Sapiens
uggauuugaguuccagcguuuauucuuuuuuc

SEQ ID NO: 196744 - RNA, 32 nt, Homo Sapiens
cgccuguaaccccagcacuuugggaggccgag

SEQ ID NO: 196745 - RNA, 32 nt, Homo Sapiens
aaggguucuccauggauggauccaagucauag

SEQ ID NO: 196746 - RNA, 32 nt, Homo Sapiens
uaaagccagaauaagagauaaaaggaaauauu

SEQ ID NO: 196747 - RNA, 32 nt, Homo Sapiens
aaauguaugcauuuauaaguguuccauggaau

SEQ ID NO: 196748 - RNA, 32 nt, Homo Sapiens
ugggccgugggcuccggacgccgggccaggac

SEQ ID NO: 196749 - RNA, 32 nt, Homo Sapiens
guccacugagcgccgcgcucggggauggggcc

SEQ ID NO: 196750 - RNA, 32 nt, Homo Sapiens
gcuuugccuaaaacgaaugagcccuucaaguc

SEQ ID NO: 196751 - RNA, 32 nt, Homo Sapiens
ccacuagaggggcacccaccaguugcugcugc

SEQ ID NO: 196752 - RNA, 32 nt, Homo Sapiens
ucauauugaaggugacucauuuuucugcacac

SEQ ID NO: 196753 - RNA, 32 nt, Homo Sapiens
ugguaauagaaaguaaaaaucuagacaucauu

SEQ ID NO: 196754 - RNA, 32 nt, Homo Sapiens
cccucccaauccugggguugcuucaggggcug

SEQ ID NO: 196755 - RNA, 32 nt, Homo Sapiens
agggaucacgggggcggggagguggaguggag

SEQ ID NO: 196756 - RNA, 32 nt, Homo Sapiens
aacuaugguuggaagcuuagugcuuucagccc

SEQ ID NO: 196757 - RNA, 32 nt, Homo Sapiens
uuucaacacacccaaaaucaagggccuggaug

SEQ ID NO: 196758 - RNA, 32 nt, Homo Sapiens
auugugaacaaauagaccgucuggugucacag

SEQ ID NO: 196759 - RNA, 32 nt, Homo Sapiens
uauuuuuugaugguaauauucuauccuuauga

SEQ ID NO: 196760 - RNA, 32 nt, Homo Sapiens
ucgccaucuguuucccuucccucccccauacc

SEQ ID NO: 196761 - RNA, 32 nt, Homo Sapiens
uggagcgaucaccugugccuccccucccccuu

SEQ ID NO: 196762 - RNA, 32 nt, Homo Sapiens
ugcaccaaugcauuguuaaaagauguauauuu

SEQ ID NO: 196763 - RNA, 32 nt, Homo Sapiens
ccggcuaauguuuuucuguauuuuuaguagag

SEQ ID NO: 196764 - RNA, 32 nt, Homo Sapiens
ggagaguuuggggaucuacagcagccaaaggc

SEQ ID NO: 196765 - RNA, 32 nt, Homo Sapiens
ucacacccaugcacgcacacacauacacacug

SEQ ID NO: 196766 - RNA, 32 nt, Homo Sapiens
cauuuuucugguuuuuuuuucuccuauaccuu

SEQ ID NO: 196767 - RNA, 32 nt, Homo Sapiens
cuuauuaauaaaauaaaugaaguauacaugag

SEQ ID NO: 196768 - RNA, 32 nt, Homo Sapiens
ucgugaagaagggaggcagcgaggggguuggg

SEQ ID NO: 196769 - RNA, 32 nt, Homo Sapiens
guggggcagcggcgagcggaaagggaagccgg

SEQ ID NO: 196770 - RNA, 32 nt, Homo Sapiens
uggguauccacccaccuugguguaccagaaug

SEQ ID NO: 196771 - RNA, 32 nt, Homo Sapiens
uuuuaucagguauaugacugguaaaaauguuc

SEQ ID NO: 196772 - RNA, 32 nt, Homo Sapiens
ugcuaagcgggcccgggucccacacggccagc

SEQ ID NO: 196773 - RNA, 32 nt, Homo Sapiens
cgugucuaccuaugugucuuucugggaaugug

SEQ ID NO: 196774 - RNA, 32 nt, Homo Sapiens
cugcccuuacagcccuaaauggcugccuucuu

SEQ ID NO: 196775 - RNA, 31 nt, Homo Sapiens
gcugagagggcggcggcgggagcggagcggg

SEQ ID NO: 196776 - RNA, 32 nt, Homo Sapiens
ccugguggugaagagcaguccugggcacaggc

SEQ ID NO: 196777 - RNA, 32 nt, Homo Sapiens
ggcugccugagccccagaggcacccugggcac

SEQ ID NO: 196778 - RNA, 30 nt, Homo Sapiens
ccugcgggggccggcaugcaccagaccuca

SEQ ID NO: 196779 - RNA, 32 nt, Homo Sapiens
ccaaagacaauuucaaagaacaaugacaguaa

SEQ ID NO: 196780 - RNA, 32 nt, Homo Sapiens
agagggggcgcgcgcacaggagccugacuccg

SEQ ID NO: 196781 - RNA, 32 nt, Homo Sapiens
aguccaccacuacuggccaucugaccuacaaa

SEQ ID NO: 196782 - RNA, 32 nt, Homo Sapiens
cgaguuuugugauuuuggcauaccccugucug

SEQ ID NO: 196783 - RNA, 32 nt, Homo Sapiens
gggcuuccgcacaugccgcgggcggccaggca

SEQ ID NO: 196784 - RNA, 32 nt, Homo Sapiens
aggaugguucccagccccgcgcuggcggugaa

SEQ ID NO: 196785 - RNA, 32 nt, Homo Sapiens
ggccaccguccuggggccgagggcgcccgacg

SEQ ID NO: 196786 - RNA, 32 nt, Homo Sapiens
gauaggauucaaacagauaccgguuaaccaug

SEQ ID NO: 196787 - RNA, 32 nt, Homo Sapiens
ucgucggaguccgggcggccaagacccgccgc

SEQ ID NO: 196788 - RNA, 32 nt, Homo Sapiens
ccaaguuuacuaagaaacuuugaagggcuauu

SEQ ID NO: 196789 - RNA, 32 nt, Homo Sapiens
cauuuucuauuuuuaggacaaaucacaaauga

SEQ ID NO: 196790 - RNA, 32 nt, Homo Sapiens
cuuagaaaagaaaaaaugguaaaggauggcau

SEQ ID NO: 196791 - RNA, 32 nt, Homo Sapiens
gugccaucaggaggcggcugcugcugaccgga

SEQ ID NO: 196792 - RNA, 32 nt, Homo Sapiens
ccuucugccuuggcuuggacaaaccuagaauu

SEQ ID NO: 196793 - RNA, 32 nt, Homo Sapiens
cagguaccgcggcugggagggucggccccgcu

SEQ ID NO: 196794 - RNA, 32 nt, Homo Sapiens
caacaagcagugccccaacuuccucauagcca

SEQ ID NO: 196795 - RNA, 32 nt, Homo Sapiens
gaagcucccugccccaggucacgccgccgguu

SEQ ID NO: 196796 - RNA, 32 nt, Homo Sapiens
aaaauacagguuauaacaguauaauauucuuu

SEQ ID NO: 196797 - RNA, 32 nt, Homo Sapiens
cuaccucuuaggcaccuaauggcugucuuugu

SEQ ID NO: 196798 - RNA, 32 nt, Homo Sapiens
gaggucucuaauucuaaaaccaaaacaauauu

SEQ ID NO: 196799 - RNA, 32 nt, Homo Sapiens
aaggccgguuucccggcccuuaccaaaccuga

SEQ ID NO: 196800 - RNA, 32 nt, Homo Sapiens
agaagacccgcuucuccuuuccgcacacccgg

SEQ ID NO: 196801 - RNA, 32 nt, Homo Sapiens
ugugcacaauagcucugcaguaccucaccagg

SEQ ID NO: 196802 - RNA, 32 nt, Homo Sapiens
ggaguuugagaccauccuggcuaacaugguga

SEQ ID NO: 196803 - RNA, 32 nt, Homo Sapiens
ggaggguuccccggcaccccagccucccgucc

SEQ ID NO: 196804 - RNA, 32 nt, Homo Sapiens
gacagaguugccaggcacuuugagucucaguc

SEQ ID NO: 196805 - RNA, 32 nt, Homo Sapiens
gcugggccaguggacccgcccgcggcccuccu

SEQ ID NO: 196806 - RNA, 32 nt, Homo Sapiens
cuuaaaccaaaggcaugucuaucauguggaug

SEQ ID NO: 196807 - RNA, 32 nt, Homo Sapiens
uucacuuguauauaaagauuauauauaaguac

SEQ ID NO: 196808 - RNA, 32 nt, Homo Sapiens
auccgggcccccagccccgccagagccuccgu

SEQ ID NO: 196809 - RNA, 32 nt, Homo Sapiens
caguaucauacuuguuuauauuacauugugug

SEQ ID NO: 196810 - RNA, 32 nt, Homo Sapiens
ccauuccuugaguuuauccauacucaacagua

SEQ ID NO: 196811 - RNA, 32 nt, Homo Sapiens
caguggccucuuucagcccagcccagcucuuc

SEQ ID NO: 196812 - RNA, 32 nt, Homo Sapiens
guuauaauauuuccucuugccaaaucuguugc

SEQ ID NO: 196813 - RNA, 32 nt, Homo Sapiens
auaaagagcugaaaaacugaggaagcugagcu

SEQ ID NO: 196814 - RNA, 32 nt, Homo Sapiens
aucuuuaaugacugauuuaucuaguuaaaugc

SEQ ID NO: 196815 - RNA, 32 nt, Homo Sapiens
gcauuggugaaaauaaauguuaaugaauuacc

SEQ ID NO: 196816 - RNA, 32 nt, Homo Sapiens
aauuucauugguuuuuauuugcaguuuuuagu

SEQ ID NO: 196817 - RNA, 32 nt, Homo Sapiens
gaugggcuuagagcucucaugaugcuacccga

SEQ ID NO: 196818 - RNA, 31 nt, Homo Sapiens
gcagggagggcggggucaagaugccaccugg

SEQ ID NO: 196819 - RNA, 32 nt, Homo Sapiens
ugcuuaucagcuuaaggagauuuugggcugag

SEQ ID NO: 196820 - RNA, 32 nt, Homo Sapiens
ccuaguuguccagagauaaaaaucauauagac

SEQ ID NO: 196821 - RNA, 32 nt, Homo Sapiens
cugugcuuggaaagaugguuaguugauaccgu

SEQ ID NO: 196822 - RNA, 32 nt, Homo Sapiens
guuaaaggacauuuggguuguuuucaccuuuc

SEQ ID NO: 196823 - RNA, 32 nt, Homo Sapiens
gaaacauacugcggcccacuuccauuaaauag

SEQ ID NO: 196824 - RNA, 30 nt, Homo Sapiens
acgcacacacacgccacccagccucuuguu

SEQ ID NO: 196825 - RNA, 32 nt, Homo Sapiens
caagauuauuuugaauaaacaccacccauuca

SEQ ID NO: 196826 - RNA, 32 nt, Homo Sapiens
guccagcuguggcccuggaugcuggagcugga

SEQ ID NO: 196827 - RNA, 32 nt, Homo Sapiens
agcuuucaagacaauuacuguuuugguccauc

SEQ ID NO: 196828 - RNA, 32 nt, Homo Sapiens
cuuaagauauuugaguuaaccuuuaagaauuu

SEQ ID NO: 196829 - RNA, 27 nt, Homo Sapiens
ccuagauccuucuuccuuaaccccaac

SEQ ID NO: 196830 - RNA, 32 nt, Homo Sapiens
cuagacccuaggaaaaauuugcaggaacacga

SEQ ID NO: 196831 - RNA, 32 nt, Homo Sapiens
gcugagcgggccuggaggaagugagcagcggg

SEQ ID NO: 196832 - RNA, 32 nt, Homo Sapiens
caacaaauuguacagcugcacacagaacaccu

SEQ ID NO: 196833 - RNA, 32 nt, Homo Sapiens
ccgcgagcgugaccucacggggaggggccagc

SEQ ID NO: 196834 - RNA, 32 nt, Homo Sapiens
agguucuauucaguaauaugguucauggauuu

SEQ ID NO: 196835 - RNA, 32 nt, Homo Sapiens
cucagaagcagaacaagugaugaccuaaaugu

SEQ ID NO: 196836 - RNA, 32 nt, Homo Sapiens
uuuuuacauccuugauuacuuccacugaggug

SEQ ID NO: 196837 - RNA, 32 nt, Homo Sapiens
ugccuauugcuaaaauucugguaacuuuuuga

SEQ ID NO: 196838 - RNA, 32 nt, Homo Sapiens
cguagucggggaagacucuacugaauaagaca

SEQ ID NO: 196839 - RNA, 32 nt, Homo Sapiens
cagggagcuuugggacagggcuggggccccca

SEQ ID NO: 196840 - RNA, 32 nt, Homo Sapiens
guagcaggcucccuccuucugcagcccggcga

SEQ ID NO: 196841 - RNA, 32 nt, Homo Sapiens
gaggcggcuucugcgcgccggggccgccucuc

SEQ ID NO: 196842 - RNA, 32 nt, Homo Sapiens
aguccuuggggaagaaaaacaagggaggaggg

SEQ ID NO: 196843 - RNA, 32 nt, Homo Sapiens
agacggaaaggcggcugcuugccucuccaucc

SEQ ID NO: 196844 - RNA, 32 nt, Homo Sapiens
cucagccccauccccgguggcuguaaggaccc

SEQ ID NO: 196845 - RNA, 32 nt, Homo Sapiens
guccuucauacaccuucuggguagggaaacaa

SEQ ID NO: 196846 - RNA, 32 nt, Homo Sapiens
ucaccccccagaguccaccccaucccccacag

SEQ ID NO: 196847 - RNA, 32 nt, Homo Sapiens
gagaagugugaaguacaaauaucucagugcua

SEQ ID NO: 196848 - RNA, 32 nt, Homo Sapiens
gguagcagcugccuccuucucugugagcugau

SEQ ID NO: 196849 - RNA, 32 nt, Homo Sapiens
ccugacccugagaagcagagccagcaaagccc

SEQ ID NO: 196850 - RNA, 32 nt, Homo Sapiens
cacagggcaagccccaaucccugcuucauuuu

SEQ ID NO: 196851 - RNA, 32 nt, Homo Sapiens
auuaaauuuguaaugauguuuaaugaacauuu

SEQ ID NO: 196852 - RNA, 32 nt, Homo Sapiens
ccuccuccagaccccccuccccgcugccugca

SEQ ID NO: 196853 - RNA, 32 nt, Homo Sapiens
agggccuggcccacccaaggugccuggggcag

SEQ ID NO: 196854 - RNA, 32 nt, Homo Sapiens
cccgcuacaccuggacgugacguggggcuggg

SEQ ID NO: 196855 - RNA, 32 nt, Homo Sapiens
agcacucucccucugggggucuucucugaggu

SEQ ID NO: 196856 - RNA, 32 nt, Homo Sapiens
gacuucaccugccaccauuuccaggucaacag

SEQ ID NO: 196857 - RNA, 32 nt, Homo Sapiens
auccuuuuguuaguuucaguaccucagcuauc

SEQ ID NO: 196858 - RNA, 32 nt, Homo Sapiens
gaaaccaucucuauuuuuuucuuacugagauu

SEQ ID NO: 196859 - RNA, 31 nt, Homo Sapiens
gucagauuuggaacuaaacaggcaaggaggc

SEQ ID NO: 196860 - RNA, 32 nt, Homo Sapiens
ccugaaaggcagagaaacuuuuuccuacacag

SEQ ID NO: 196861 - RNA, 32 nt, Homo Sapiens
gugaaauuaaagacaucaauaaaaaugauucc

SEQ ID NO: 196862 - RNA, 32 nt, Homo Sapiens
uccagcacccacccuacccccauaaagcauug

SEQ ID NO: 196863 - RNA, 32 nt, Homo Sapiens
ggucucaaacuccugaccucaugauccacccc

SEQ ID NO: 196864 - RNA, 32 nt, Homo Sapiens
guauuuuuuaaauuauuauuuauagaaagaau

SEQ ID NO: 196865 - RNA, 32 nt, Homo Sapiens
uccacuugugucuauugaucucucacagcagc

SEQ ID NO: 196866 - RNA, 32 nt, Homo Sapiens
uggauuuugcggcugcagaggacuuccccaaa

SEQ ID NO: 196867 - RNA, 32 nt, Homo Sapiens
augcggcacugacgggcaagugcuucugcaag

SEQ ID NO: 196868 - RNA, 32 nt, Homo Sapiens
gccuagcgcccggcgccgccugccgcgucaac

SEQ ID NO: 196869 - RNA, 32 nt, Homo Sapiens
uggagcagucugaccaguggcaucuguagccu

SEQ ID NO: 196870 - RNA, 32 nt, Homo Sapiens
caugguucacugcagccuugaccuccagggcu

SEQ ID NO: 196871 - RNA, 32 nt, Homo Sapiens
cccucgggagggagcugcgcgcgggccagacg

SEQ ID NO: 196872 - RNA, 32 nt, Homo Sapiens
gcgaucaucccaaagcacuucagcuugaagaa

SEQ ID NO: 196873 - RNA, 32 nt, Homo Sapiens
ggcggcagggccccugccagccccacaccagg

SEQ ID NO: 196874 - RNA, 32 nt, Homo Sapiens
aaacaagaacaaaaacaaacauaaaguuggca

SEQ ID NO: 196875 - RNA, 32 nt, Homo Sapiens
gugguugggugggaugauaaacauugccccag

SEQ ID NO: 196876 - RNA, 32 nt, Homo Sapiens
gagacaauucuauuuuucauauacucguugcu

SEQ ID NO: 196877 - RNA, 31 nt, Homo Sapiens
caaagugcaagguauccccaguccaaguaua

SEQ ID NO: 196878 - RNA, 32 nt, Homo Sapiens
gagacuguuuaaaagcugugaaugucugaaac

SEQ ID NO: 196879 - RNA, 32 nt, Homo Sapiens
acuccagccuggccccagucccagcccccacc

SEQ ID NO: 196880 - RNA, 32 nt, Homo Sapiens
gaauaugcuguaaucuaauuuuggugaagaga

SEQ ID NO: 196881 - RNA, 32 nt, Homo Sapiens
gugcgggcgggugggugguggaggcugcgagg

SEQ ID NO: 196882 - RNA, 32 nt, Homo Sapiens
aaacugaugcugaggaugauugaggugggucu

SEQ ID NO: 196883 - RNA, 32 nt, Homo Sapiens
ugaacaagaaaagaagugauugaccacguuuu

SEQ ID NO: 196884 - RNA, 32 nt, Homo Sapiens
uuuaauaauguuucaaacauauauuacaaugc

SEQ ID NO: 196885 - RNA, 32 nt, Homo Sapiens
gcuaccgccugcugcgcgaccugccgcgucug

SEQ ID NO: 196886 - RNA, 32 nt, Homo Sapiens
gucgucgccaauaccaaaauuagcuaugauau

SEQ ID NO: 196887 - RNA, 32 nt, Homo Sapiens
auaucaucaugucaacaaaacucuaccucauc

SEQ ID NO: 196888 - RNA, 32 nt, Homo Sapiens
uggauaccagcaccccacuccagccucgagga

SEQ ID NO: 196889 - RNA, 32 nt, Homo Sapiens
cuugucauguaagcacucuacugcuuauuaaa

SEQ ID NO: 196890 - RNA, 32 nt, Homo Sapiens
cggggagggaagccucggggcugcggggugag

SEQ ID NO: 196891 - RNA, 32 nt, Homo Sapiens
uuucugaaaaggagggaguuccugcuacccau

SEQ ID NO: 196892 - RNA, 32 nt, Homo Sapiens
uuaagugauccauuuuaaaauuuguaauucaa

SEQ ID NO: 196893 - RNA, 32 nt, Homo Sapiens
cgcacgugggaaccgccgcagcuccacacucc

SEQ ID NO: 196894 - RNA, 32 nt, Homo Sapiens
uacauagccaaauguuuguaaaucacgucuua

SEQ ID NO: 196895 - RNA, 32 nt, Homo Sapiens
ggggcgggagcugggucugggcggcgggcagg

SEQ ID NO: 196896 - RNA, 32 nt, Homo Sapiens
auuuuaauauccaagaguagucaaauuaagga

SEQ ID NO: 196897 - RNA, 32 nt, Homo Sapiens
ggacucagaccggggaggcccgggccagcagc

SEQ ID NO: 196898 - RNA, 32 nt, Homo Sapiens
cuuuguuccagaagcugcccucagccagaguu

SEQ ID NO: 196899 - RNA, 32 nt, Homo Sapiens
gaucccacuauauugcacaggcuggucucaaa

SEQ ID NO: 196900 - RNA, 32 nt, Homo Sapiens
cccagagguaaaggaggcagggugggggagcc

SEQ ID NO: 196901 - RNA, 32 nt, Homo Sapiens
ugagaagcggcuuuucugaaagggauccagca

SEQ ID NO: 196902 - RNA, 32 nt, Homo Sapiens
gggaucugagcgccggccgcggugcccaggca

SEQ ID NO: 196903 - RNA, 32 nt, Homo Sapiens
auuaauagcccauuuacacaucuauaaaaugu

SEQ ID NO: 196904 - RNA, 32 nt, Homo Sapiens
ggagagcuaggucccuuggagcucuggaugcu

SEQ ID NO: 196905 - RNA, 32 nt, Homo Sapiens
ucuuggccggccagcgagggcuccucacggcc

SEQ ID NO: 196906 - RNA, 32 nt, Homo Sapiens
cuggggagaggccacugaaaagaggccuuccc

SEQ ID NO: 196907 - RNA, 32 nt, Homo Sapiens
gugguuuuaaacaguuauuuucauucuaauca

SEQ ID NO: 196908 - RNA, 32 nt, Homo Sapiens
cugcauugugaguaaagccugguggaaaucuc

SEQ ID NO: 196909 - RNA, 32 nt, Homo Sapiens
accaguggauaaaugcaaugugguauauccau

SEQ ID NO: 196910 - RNA, 32 nt, Homo Sapiens
aacauuagggcacaaccuguuggauaguuuua

SEQ ID NO: 196911 - RNA, 32 nt, Homo Sapiens
ggauggccaguagggggcgcuggaggacugcg

SEQ ID NO: 196912 - RNA, 32 nt, Homo Sapiens
gcuggucacuagggugcugugcucucuggcgc

SEQ ID NO: 196913 - RNA, 32 nt, Homo Sapiens
acuuagccuucugaagugcucaucucuugcuu

SEQ ID NO: 196914 - RNA, 31 nt, Homo Sapiens
caucaagaggugacuugggugcuguuaagac

SEQ ID NO: 196915 - RNA, 32 nt, Homo Sapiens
cagagugccagggcaguuuaugcuggugggcc

SEQ ID NO: 196916 - RNA, 32 nt, Homo Sapiens
acgcgcacugguggccuccgcggcgaguccug

SEQ ID NO: 196917 - RNA, 32 nt, Homo Sapiens
gcugcaaugcccucauacccaugcacaguaca

SEQ ID NO: 196918 - RNA, 30 nt, Homo Sapiens
uauguuuaaagugcugcagggauggagugg

SEQ ID NO: 196919 - RNA, 32 nt, Homo Sapiens
uucaaaacaagcagccuggcccggggcuggau

SEQ ID NO: 196920 - RNA, 32 nt, Homo Sapiens
ucauccugcugcccuccuccagugcuggggcu

SEQ ID NO: 196921 - RNA, 32 nt, Homo Sapiens
ucacuggugucugaaaccaaauccagagcagc

SEQ ID NO: 196922 - RNA, 32 nt, Homo Sapiens
guuugcucugggcuugccugcccuucaacagg

SEQ ID NO: 196923 - RNA, 32 nt, Homo Sapiens
acaagauccccagcagauguguguguaagcuc

SEQ ID NO: 196924 - RNA, 32 nt, Homo Sapiens
accacccugaccaacaugaaaccccgucucua

SEQ ID NO: 196925 - RNA, 32 nt, Homo Sapiens
cuagaacaaaaauagccaauaaaaacgcugag

SEQ ID NO: 196926 - RNA, 32 nt, Homo Sapiens
aacauucugaaucaagcacacuguauguucag

SEQ ID NO: 196927 - RNA, 32 nt, Homo Sapiens
uagccgggcgugguggugggcgccugcagucu

SEQ ID NO: 196928 - RNA, 32 nt, Homo Sapiens
gagagugcuguaaucaagcuucgggacuucgu

SEQ ID NO: 196929 - RNA, 32 nt, Homo Sapiens
uuugugaaauuugccuaacaaacauauguuuu

SEQ ID NO: 196930 - RNA, 32 nt, Homo Sapiens
aguugcuugacaaccuugggaaaauuguuuua

SEQ ID NO: 196931 - RNA, 32 nt, Homo Sapiens
ggggcgggggcgcucugccagccccgggaaca

SEQ ID NO: 196932 - RNA, 32 nt, Homo Sapiens
aaucccagauacucugaauuuuagaaaacaaa

SEQ ID NO: 196933 - RNA, 32 nt, Homo Sapiens
aagccgccgucgccgcgccgggggaccgccag

SEQ ID NO: 196934 - RNA, 32 nt, Homo Sapiens
gcccgccgcccggcggcgagaguagaggcgag

SEQ ID NO: 196935 - RNA, 32 nt, Homo Sapiens
auauggguccugaaauucagaagaugauaguc

SEQ ID NO: 196936 - RNA, 32 nt, Homo Sapiens
ucacaccccuccccuucucccacagccaagga

SEQ ID NO: 196937 - RNA, 32 nt, Homo Sapiens
caagagggaugugccuccauuauuuccuccac

SEQ ID NO: 196938 - RNA, 32 nt, Homo Sapiens
uuuuuaaauguuuucacucagaugaacaauuu

SEQ ID NO: 196939 - RNA, 32 nt, Homo Sapiens
cacacggauacacacacacacacacacacugc

SEQ ID NO: 196940 - RNA, 32 nt, Homo Sapiens
gacaggaaacgaaucccuuccuccucuccccu

SEQ ID NO: 196941 - RNA, 32 nt, Homo Sapiens
ccacacccagcgcgccuucuccaggaauaggc

SEQ ID NO: 196942 - RNA, 32 nt, Homo Sapiens
augauuucucugcuaacagccgccuguauguu

SEQ ID NO: 196943 - RNA, 32 nt, Homo Sapiens
gaugaauggaagacaaugauuugaacuaaggg

SEQ ID NO: 196944 - RNA, 32 nt, Homo Sapiens
caaucauacucaaaaacuuaugccuggagcug

SEQ ID NO: 196945 - RNA, 32 nt, Homo Sapiens
gcacugaggagcucgccugcugcccucuugcg

SEQ ID NO: 196946 - RNA, 30 nt, Homo Sapiens
aaauucaagcuggcugcagaaguuugcaua

SEQ ID NO: 196947 - RNA, 32 nt, Homo Sapiens
aauauuuuuuaaaaagguuuuugcaguaagcu

SEQ ID NO: 196948 - RNA, 31 nt, Homo Sapiens
gguacugccuggugccugccacaaaauaagc

SEQ ID NO: 196949 - RNA, 29 nt, Homo Sapiens
guuagguggggacagaggauuucugcuua

SEQ ID NO: 196950 - RNA, 32 nt, Homo Sapiens
cuuggagcugggauggagaagauggaagcacu

SEQ ID NO: 196951 - RNA, 32 nt, Homo Sapiens
gaaacuugagcgucauuuuucuuagugugcca

SEQ ID NO: 196952 - RNA, 32 nt, Homo Sapiens
uauaacuccugugcaaugaaggugauaacagu

SEQ ID NO: 196953 - RNA, 32 nt, Homo Sapiens
cucugaaucaacaaaaucaggaauggaaaaaa

SEQ ID NO: 196954 - RNA, 32 nt, Homo Sapiens
ccuccccgccagguccuguguguugccagccg

SEQ ID NO: 196955 - RNA, 32 nt, Homo Sapiens
ccccuauuuccaagccucuuugcccugcuccu

SEQ ID NO: 196956 - RNA, 32 nt, Homo Sapiens
cccucccugcuuccccaggcugucaaccuugu

SEQ ID NO: 196957 - RNA, 32 nt, Homo Sapiens
guucccagaagcuccccaggcucuagugcagg

SEQ ID NO: 196958 - RNA, 32 nt, Homo Sapiens
gcauggaagaacucuugaauguguuggccauu

SEQ ID NO: 196959 - RNA, 32 nt, Homo Sapiens
gaauacauuuaaaagaaaauauauuuugaaac

SEQ ID NO: 196960 - RNA, 32 nt, Homo Sapiens
acacagggcacaccucuuuuaggugcagcuca

SEQ ID NO: 196961 - RNA, 32 nt, Homo Sapiens
ucugaacguugguugguggcuggaaaacagcc

SEQ ID NO: 196962 - RNA, 32 nt, Homo Sapiens
aggccgagaggggcggggucgcggcggggccu

SEQ ID NO: 196963 - RNA, 32 nt, Homo Sapiens
ggacagcucagcugcuggcagccugccuggcc

SEQ ID NO: 196964 - RNA, 32 nt, Homo Sapiens
agcugguaaaagacaugaccaugaagaaaucu

SEQ ID NO: 196965 - RNA, 32 nt, Homo Sapiens
guuuuuaauguuuacauguuuacaucuuuaaa

SEQ ID NO: 196966 - RNA, 32 nt, Homo Sapiens
cccccuccccgccuccucccaauugugcauuu

SEQ ID NO: 196967 - RNA, 32 nt, Homo Sapiens
ggaugcccuaaaaagguggacagugaggcuca

SEQ ID NO: 196968 - RNA, 32 nt, Homo Sapiens
gacaaaggccuggccugaagccugggcuggag

SEQ ID NO: 196969 - RNA, 31 nt, Homo Sapiens
cguuuacaagaggucucuuggcugacuugcu

SEQ ID NO: 196970 - RNA, 32 nt, Homo Sapiens
uguuuuggugaccucugaaacucaguacugca

SEQ ID NO: 196971 - RNA, 32 nt, Homo Sapiens
acuuuuuaaaauguauguguagauauaacuua

SEQ ID NO: 196972 - RNA, 32 nt, Homo Sapiens
ggcccagcacaagcucuggaggccacaggagu

SEQ ID NO: 196973 - RNA, 32 nt, Homo Sapiens
aggcaugccagccugggcgaugcugcagugac

SEQ ID NO: 196974 - RNA, 32 nt, Homo Sapiens
cuacuuccucgguucccuccccgauggucuac

SEQ ID NO: 196975 - RNA, 32 nt, Homo Sapiens
aagguuguguggaaggcgcugcuccccggaug

SEQ ID NO: 196976 - RNA, 32 nt, Homo Sapiens
cgucccgaaggggacucgaaaauguacagcca

SEQ ID NO: 196977 - RNA, 32 nt, Homo Sapiens
uggaggaaaaugaugcuuauucuuauaaauua

SEQ ID NO: 196978 - RNA, 32 nt, Homo Sapiens
cuucaccuuugcuucacaaggcacaucuugaa

SEQ ID NO: 196979 - RNA, 32 nt, Homo Sapiens
acagaguuucgcucuugucacccaggcuggag

SEQ ID NO: 196980 - RNA, 32 nt, Homo Sapiens
uacccaauauauauuuuuuggaaaugaaacau

SEQ ID NO: 196981 - RNA, 32 nt, Homo Sapiens
gaccugggagaauggggcugagaggaggcuuc

SEQ ID NO: 196982 - RNA, 32 nt, Homo Sapiens
uuguuugcauuacuaaauauauauaccauuuc

SEQ ID NO: 196983 - RNA, 32 nt, Homo Sapiens
cagagaagccccaccacaauugcaucugugua

SEQ ID NO: 196984 - RNA, 31 nt, Homo Sapiens
ggaccaaggcgcugccugcucgggccugccu

SEQ ID NO: 196985 - RNA, 32 nt, Homo Sapiens
auucugcacuuuucauuauauacucuaccuuc

SEQ ID NO: 196986 - RNA, 32 nt, Homo Sapiens
aaucaaaccugaauaaaacuacaaguuuaaua

SEQ ID NO: 196987 - RNA, 32 nt, Homo Sapiens
agggagaggaagggcugaaagccccaagcccc

SEQ ID NO: 196988 - RNA, 32 nt, Homo Sapiens
uguugggguagggaagggaggggaagcacuuu

SEQ ID NO: 196989 - RNA, 32 nt, Homo Sapiens
gagagcgccccgagucccggcgcgggaggagg

SEQ ID NO: 196990 - RNA, 32 nt, Homo Sapiens
aucagaauuuaaaucuaguguuucuauuuuag

SEQ ID NO: 196991 - RNA, 32 nt, Homo Sapiens
uggcuaccaguuauugauaauguaucauguga

SEQ ID NO: 196992 - RNA, 32 nt, Homo Sapiens
ggccuccucgugcugcagaugucgccuuagga

SEQ ID NO: 196993 - RNA, 32 nt, Homo Sapiens
acggagaggcggaaaggauggcgcugugacag

SEQ ID NO: 196994 - RNA, 32 nt, Homo Sapiens
caacuuuaaugcuuaaauuuggauuguuagua

SEQ ID NO: 196995 - RNA, 32 nt, Homo Sapiens
acggaguuucacucuugucacccaggcuggag

SEQ ID NO: 196996 - RNA, 32 nt, Homo Sapiens
gcccagucaguccacaccccuucccauccacu

SEQ ID NO: 196997 - RNA, 32 nt, Homo Sapiens
ugagacaggggagugagaagggugcguugcag

SEQ ID NO: 196998 - RNA, 32 nt, Homo Sapiens
uaauaaaaggauuaucggcauuaauacuuuaa

SEQ ID NO: 196999 - RNA, 32 nt, Homo Sapiens
uuccagcauacuagcucuguugccuuugguua

SEQ ID NO: 197000 - RNA, 32 nt, Homo Sapiens
ccaggacggaggaggagguggugaaacaggaa

SEQ ID NO: 197001 - RNA, 32 nt, Homo Sapiens
ugcuccacuccagcucccugccagugcaguga

SEQ ID NO: 197002 - RNA, 32 nt, Homo Sapiens
ucagcccugaucaguuuggacucuguaacuca

SEQ ID NO: 197003 - RNA, 32 nt, Homo Sapiens
gccugggcugucagcacuuuggcagcaggucc

SEQ ID NO: 197004 - RNA, 32 nt, Homo Sapiens
ugucccugaaacaaaauugcucuggcucagag

SEQ ID NO: 197005 - RNA, 32 nt, Homo Sapiens
ugacuuuuuuucugccuuuggccugaaacauu

SEQ ID NO: 197006 - RNA, 32 nt, Homo Sapiens
gaggcccacaggugcugcccuugcugcugcug

SEQ ID NO: 197007 - RNA, 32 nt, Homo Sapiens
gacccauucuuuuuauucuucucuacagcauc

SEQ ID NO: 197008 - RNA, 32 nt, Homo Sapiens
gccagcccugucagugcugcucagaccuucau

SEQ ID NO: 197009 - RNA, 32 nt, Homo Sapiens
gaaaggaaggacucaagguuccaaggggcacg

SEQ ID NO: 197010 - RNA, 32 nt, Homo Sapiens
cuacugauaaaacuuaaaaauauccccacaca

SEQ ID NO: 197011 - RNA, 32 nt, Homo Sapiens
gcgcagcccgcggcaaucaauaaacagcaggu

SEQ ID NO: 197012 - RNA, 32 nt, Homo Sapiens
gaacaagaugcauugugagagguuucuaugua

SEQ ID NO: 197013 - RNA, 32 nt, Homo Sapiens
ccaugcguguucaagacuguucaagacuggug

SEQ ID NO: 197014 - RNA, 32 nt, Homo Sapiens
uuguaaguuuccugaggccucccagucaugcu

SEQ ID NO: 197015 - RNA, 31 nt, Homo Sapiens
acagagagggcggggcguaggaccugcgcuu

SEQ ID NO: 197016 - RNA, 32 nt, Homo Sapiens
caggccuguucccuaaggggccccagccaagg

SEQ ID NO: 197017 - RNA, 32 nt, Homo Sapiens
caccaccccaacaugcucagggaggcagaguu

SEQ ID NO: 197018 - RNA, 32 nt, Homo Sapiens
ugcuggaacaugaauuugaaucuuacaugcaa

SEQ ID NO: 197019 - RNA, 32 nt, Homo Sapiens
ucuacuugacauucuauagaagugaacacucg

SEQ ID NO: 197020 - RNA, 32 nt, Homo Sapiens
uugaguagcugggauuacaggaacgcgccacc

SEQ ID NO: 197021 - RNA, 32 nt, Homo Sapiens
guuucuagcaauaaauacaauugguacagaaa

SEQ ID NO: 197022 - RNA, 32 nt, Homo Sapiens
acgggguucagggcccggggcccagaugggcg

SEQ ID NO: 197023 - RNA, 32 nt, Homo Sapiens
gggcauagauuuccucuuccacaagcugccgc

SEQ ID NO: 197024 - RNA, 32 nt, Homo Sapiens
guuucgguuuucuaaggaaagcuucacaaaag

SEQ ID NO: 197025 - RNA, 32 nt, Homo Sapiens
gugacaaggucuuuauucggaagcgauaccuu

SEQ ID NO: 197026 - RNA, 32 nt, Homo Sapiens
caggaguguaggaaaugaauguagccagaaac

SEQ ID NO: 197027 - RNA, 32 nt, Homo Sapiens
aauuuugaaauaauuuacuuugaaauauuuuu

SEQ ID NO: 197028 - RNA, 32 nt, Homo Sapiens
ggaacgaggagcuacgggccugggcccgguua

SEQ ID NO: 197029 - RNA, 32 nt, Homo Sapiens
cuaaguuacuuugaguauuaacaaguagcuua

SEQ ID NO: 197030 - RNA, 32 nt, Homo Sapiens
agucucucauggcaucuccagcuccugcccua

SEQ ID NO: 197031 - RNA, 32 nt, Homo Sapiens
aucuuccuccaauaaugggcacuucagaaggc

SEQ ID NO: 197032 - RNA, 32 nt, Homo Sapiens
uuugagagcaaguuaagcaaguugaaaccuuu

SEQ ID NO: 197033 - RNA, 32 nt, Homo Sapiens
ccccuccucacaguuuccauguagaccccuug

SEQ ID NO: 197034 - RNA, 32 nt, Homo Sapiens
agaguuguuuucaaaacaaacauuccagaaug

SEQ ID NO: 197035 - RNA, 32 nt, Homo Sapiens
cugcccucccuauuuuaacuagaugauguuuu

SEQ ID NO: 197036 - RNA, 32 nt, Homo Sapiens
cuucaaaaaugaaagcaucagaagauaaaaua

SEQ ID NO: 197037 - RNA, 32 nt, Homo Sapiens
gguuuucugacauuaacuuaugugaugacuug

SEQ ID NO: 197038 - RNA, 32 nt, Homo Sapiens
gaccccaguucuguuuuccaggaggaacucug

SEQ ID NO: 197039 - RNA, 32 nt, Homo Sapiens
gaaggucagauuagggcggggagaagagcauc

SEQ ID NO: 197040 - RNA, 32 nt, Homo Sapiens
caguuuccuuuguaagacccagggaucacuua

SEQ ID NO: 197041 - RNA, 32 nt, Homo Sapiens
uuaagcauaguaauauaaauaaaguaauaguu

SEQ ID NO: 197042 - RNA, 32 nt, Homo Sapiens
ccaugggggcagccuugugacuggaagggugg

SEQ ID NO: 197043 - RNA, 32 nt, Homo Sapiens
uagcccuccccuccccgggauguagaacgggg

SEQ ID NO: 197044 - RNA, 32 nt, Homo Sapiens
cccagcccaagccccaucuccagccccagucc

SEQ ID NO: 197045 - RNA, 32 nt, Homo Sapiens
gcauggugaauacaugcugaauugcauucagu

SEQ ID NO: 197046 - RNA, 32 nt, Homo Sapiens
gcugguggcgcggcgcaggucccggccgagug

SEQ ID NO: 197047 - RNA, 32 nt, Homo Sapiens
cagugaaauuuuuuaugacaggacaucugcag

SEQ ID NO: 197048 - RNA, 32 nt, Homo Sapiens
cgggcaggagcgcccucucccggagcgagaag

SEQ ID NO: 197049 - RNA, 32 nt, Homo Sapiens
aaauguaauuuaauuauauuauugcuggcagc

SEQ ID NO: 197050 - RNA, 32 nt, Homo Sapiens
cagacuuuuuaaauugcaacuguaaauaugaa

SEQ ID NO: 197051 - RNA, 32 nt, Homo Sapiens
uagggccauugcugcugcacagcccucucaga

SEQ ID NO: 197052 - RNA, 32 nt, Homo Sapiens
agaaagggguucucugcgguauuccagugaaa

SEQ ID NO: 197053 - RNA, 29 nt, Homo Sapiens
ugagugugauguuuccugcugaaagcaca

SEQ ID NO: 197054 - RNA, 32 nt, Homo Sapiens
agggaggcggggguggacagggaggcagcuug

SEQ ID NO: 197055 - RNA, 32 nt, Homo Sapiens
aaccuggggaggggcugcuggcaucaaguggg

SEQ ID NO: 197056 - RNA, 32 nt, Homo Sapiens
uucggggaagcagcauaaaacagcuaaagcgg

SEQ ID NO: 197057 - RNA, 32 nt, Homo Sapiens
acuuuuuggggucagauaaugugucaggugga

SEQ ID NO: 197058 - RNA, 32 nt, Homo Sapiens
cuugucuccaugaauucaauaguuuaauagua

SEQ ID NO: 197059 - RNA, 32 nt, Homo Sapiens
uugcucagccccagcuuaucuccuccuccgcc

SEQ ID NO: 197060 - RNA, 32 nt, Homo Sapiens
ccuccuccgugcuuccucuccuccccuguacg

SEQ ID NO: 197061 - RNA, 32 nt, Homo Sapiens
cucgcgcucccuccuuaaaugagccugggcgc

SEQ ID NO: 197062 - RNA, 32 nt, Homo Sapiens
uaucccuucucacagcacaugcuggccagccu

SEQ ID NO: 197063 - RNA, 32 nt, Homo Sapiens
gaagggacagcggguuaaaaagagaaggcaag

SEQ ID NO: 197064 - RNA, 32 nt, Homo Sapiens
ggccgagcucgcgcgccgcguucccuucuccg

SEQ ID NO: 197065 - RNA, 32 nt, Homo Sapiens
uguacuguggucaaggggaaccacugcaucau

SEQ ID NO: 197066 - RNA, 32 nt, Homo Sapiens
ugcuuucuuaugugacucucuuugaaaaugug

SEQ ID NO: 197067 - RNA, 32 nt, Homo Sapiens
cuacucgcccgcgcccaggagcaugaagggcc

SEQ ID NO: 197068 - RNA, 32 nt, Homo Sapiens
aucucuaauuuuggauaauauucauugguuaa

SEQ ID NO: 197069 - RNA, 27 nt, Homo Sapiens
caucccuccuucuuuaguaucuuuacg

SEQ ID NO: 197070 - RNA, 32 nt, Homo Sapiens
uaaagugggggaaaaacauccaagcacuuuaa

SEQ ID NO: 197071 - RNA, 32 nt, Homo Sapiens
aauacaaaaaucagcugggcaugguggcgggc

SEQ ID NO: 197072 - RNA, 32 nt, Homo Sapiens
agaugagaguugggucgcugagcauugguuac

SEQ ID NO: 197073 - RNA, 32 nt, Homo Sapiens
aacaggugccagggcaggagggggcuggggca

SEQ ID NO: 197074 - RNA, 31 nt, Homo Sapiens
caucagcagcgcaguccagggccggcugcag

SEQ ID NO: 197075 - RNA, 32 nt, Homo Sapiens
aaccucaggggguagcugauccugucauucug

SEQ ID NO: 197076 - RNA, 32 nt, Homo Sapiens
ccuuugcuccggaaucucuccucccucgcccg

SEQ ID NO: 197077 - RNA, 32 nt, Homo Sapiens
auguaagaguauuuauacuggaaagaaacccu

SEQ ID NO: 197078 - RNA, 32 nt, Homo Sapiens
gugugaaaacgcaaaagugauggcucggcggu

SEQ ID NO: 197079 - RNA, 32 nt, Homo Sapiens
gaauuugcugcucucccuccccuuuccugcaa

SEQ ID NO: 197080 - RNA, 32 nt, Homo Sapiens
ccucuccugaagaauaaauguauaaauguuau

SEQ ID NO: 197081 - RNA, 32 nt, Homo Sapiens
ggaaacuguggggucuccagagggagacauga

SEQ ID NO: 197082 - RNA, 32 nt, Homo Sapiens
auacuucgagcucaugcugagagaaaaaggcg

SEQ ID NO: 197083 - RNA, 32 nt, Homo Sapiens
uuuaaauuccaaggagaaguguucuuugugua

SEQ ID NO: 197084 - RNA, 32 nt, Homo Sapiens
guggggaacaggucuuggggucaugaagggcu

SEQ ID NO: 197085 - RNA, 32 nt, Homo Sapiens
cucuaggcucugcggcgcccguguucccgcuc

SEQ ID NO: 197086 - RNA, 32 nt, Homo Sapiens
gcagcagcuaaauggacacacaauggagggga

SEQ ID NO: 197087 - RNA, 32 nt, Homo Sapiens
agaaaacauugaaaauguguuuagacaacguc

SEQ ID NO: 197088 - RNA, 32 nt, Homo Sapiens
ugccaggcuccaggcgucgccaaggcaggaca

SEQ ID NO: 197089 - RNA, 32 nt, Homo Sapiens
uuccagaguauuuugaucguuuuuguguagau

SEQ ID NO: 197090 - RNA, 32 nt, Homo Sapiens
gcaaaaggcugauuacugaaauuuaagaaaaa

SEQ ID NO: 197091 - RNA, 32 nt, Homo Sapiens
aguucaccagcaugguaguggcaaagagaggu

SEQ ID NO: 197092 - RNA, 32 nt, Homo Sapiens
ggaugucccgcacucccuuagccauugccuug

SEQ ID NO: 197093 - RNA, 32 nt, Homo Sapiens
ugagguaggggugggggugcuguaggcucuuu

SEQ ID NO: 197094 - RNA, 32 nt, Homo Sapiens
gaacuguggaagggguucugaggugggaccag

SEQ ID NO: 197095 - RNA, 32 nt, Homo Sapiens
aaaaaagucauucaccugggagggauuuuuaa

SEQ ID NO: 197096 - RNA, 32 nt, Homo Sapiens
uacuccugcaauaaugcugaggacuuguugca

SEQ ID NO: 197097 - RNA, 32 nt, Homo Sapiens
gggaggggacaugaggaggauaaacagcugac

SEQ ID NO: 197098 - RNA, 32 nt, Homo Sapiens
caaccaucgccaccccaguaaucacagcgagc

SEQ ID NO: 197099 - RNA, 32 nt, Homo Sapiens
ccaccgggcccggcuccccgcggcucggguga

SEQ ID NO: 197100 - RNA, 32 nt, Homo Sapiens
cccgcgccuucugccccugcugccggccgcgc

SEQ ID NO: 197101 - RNA, 32 nt, Homo Sapiens
acgaaucuuauuuuuccuguccugcccgugag

SEQ ID NO: 197102 - RNA, 30 nt, Homo Sapiens
caagcucuggacugcagauccucauuacgu

SEQ ID NO: 197103 - RNA, 32 nt, Homo Sapiens
uaggugacaugucuacuuuuuaauuuuuaaga

SEQ ID NO: 197104 - RNA, 32 nt, Homo Sapiens
accauuguggcaagccauaacugcacaaagag

SEQ ID NO: 197105 - RNA, 32 nt, Homo Sapiens
uuuuuaaacaauuuaaaagcuauuauucuuag

SEQ ID NO: 197106 - RNA, 32 nt, Homo Sapiens
ugucaggccugcugcccuugccuuguccucgu

SEQ ID NO: 197107 - RNA, 32 nt, Homo Sapiens
ugagcucucaccucagugaccuggacagggga

SEQ ID NO: 197108 - RNA, 32 nt, Homo Sapiens
ccaccacccagagcuucuggcucuucagagua

SEQ ID NO: 197109 - RNA, 32 nt, Homo Sapiens
gcuugagauuugccuuguucucccagaaaagc

SEQ ID NO: 197110 - RNA, 32 nt, Homo Sapiens
ccgcuguagcuguggcggcuggggcugcagcc

SEQ ID NO: 197111 - RNA, 32 nt, Homo Sapiens
uugcuuuuaaguguuagcaauaguucaaaaaa

SEQ ID NO: 197112 - RNA, 32 nt, Homo Sapiens
uagccccagacccaucaguccuggcacacauu

SEQ ID NO: 197113 - RNA, 32 nt, Homo Sapiens
acuagaaagaucugauuuggccugggaccagu

SEQ ID NO: 197114 - RNA, 32 nt, Homo Sapiens
caucuccugccagcugccggcacagacaagag

SEQ ID NO: 197115 - RNA, 32 nt, Homo Sapiens
ccacccuugcccagccccugcuuggccccucc

SEQ ID NO: 197116 - RNA, 32 nt, Homo Sapiens
cuucugaauacagauaaaaugguuggaagaaa

SEQ ID NO: 197117 - RNA, 32 nt, Homo Sapiens
caacauuuucauuuuuaacagcauuaucagaa

SEQ ID NO: 197118 - RNA, 32 nt, Homo Sapiens
ccuuuucugucaccuuucccccuagcuggcuc

SEQ ID NO: 197119 - RNA, 32 nt, Homo Sapiens
ucuuagaaaugcccuugucauuagcucaugag

SEQ ID NO: 197120 - RNA, 32 nt, Homo Sapiens
acugccuucagcugccuauugguaaauaaggu

SEQ ID NO: 197121 - RNA, 32 nt, Homo Sapiens
gcuaucuccgcggcccacccggcggcgccucc

SEQ ID NO: 197122 - RNA, 32 nt, Homo Sapiens
aagugcccccugccacaucuccaggcugcgca

SEQ ID NO: 197123 - RNA, 32 nt, Homo Sapiens
gcagggucccuguccuuccccagugccugccu

SEQ ID NO: 197124 - RNA, 32 nt, Homo Sapiens
cugggaggagaagggaggggcuggggguuccc

SEQ ID NO: 197125 - RNA, 32 nt, Homo Sapiens
aaaaaauaaaaauuaggcauauuaaaaaaaaa

SEQ ID NO: 197126 - RNA, 32 nt, Homo Sapiens
gggucucuuucccccaacuuuuccacaugguc

SEQ ID NO: 197127 - RNA, 32 nt, Homo Sapiens
cgguguggccgcgggcggguuuauccaaaggg

SEQ ID NO: 197128 - RNA, 30 nt, Homo Sapiens
uguggagagaagcugauguuuugguguauu

SEQ ID NO: 197129 - RNA, 32 nt, Homo Sapiens
gcuuccuaauaaauccuugccagacuuaaaaa

SEQ ID NO: 197130 - RNA, 32 nt, Homo Sapiens
aggugaguucuggaaggcaggggcucuggguc

SEQ ID NO: 197131 - RNA, 32 nt, Homo Sapiens
acaucugcccagucccucuccucccagcccau

SEQ ID NO: 197132 - RNA, 32 nt, Homo Sapiens
ccagaaagcugauguaacacagagccuauaaa

SEQ ID NO: 197133 - RNA, 32 nt, Homo Sapiens
auggcaugcaaaugaggccuggugccuuuugg

SEQ ID NO: 197134 - RNA, 32 nt, Homo Sapiens
cuaaaauacaaguaaauaagccaggcauggug

SEQ ID NO: 197135 - RNA, 32 nt, Homo Sapiens
acauggccaugcuccaugccgccccgccgccc

SEQ ID NO: 197136 - RNA, 32 nt, Homo Sapiens
agggugacgcagaacuauaagcccuguguguc

SEQ ID NO: 197137 - RNA, 32 nt, Homo Sapiens
cucacaggugagugcccacgccugcugucacc

SEQ ID NO: 197138 - RNA, 32 nt, Homo Sapiens
gaacuuguauaaaucacauggguauguucuug

SEQ ID NO: 197139 - RNA, 32 nt, Homo Sapiens
aauuauuuguauugaauucauguucggggcca

SEQ ID NO: 197140 - RNA, 32 nt, Homo Sapiens
uugccucuugaaacuuuuuuuuuccccucauu

SEQ ID NO: 197141 - RNA, 32 nt, Homo Sapiens
acuauguuuucuuucuuaauucuucuaaguug

SEQ ID NO: 197142 - RNA, 32 nt, Homo Sapiens
ccaggggucggcgggggcgcgggaguacgcga

SEQ ID NO: 197143 - RNA, 32 nt, Homo Sapiens
uacauuguaauagauaacugguaaaacugacc

SEQ ID NO: 197144 - RNA, 32 nt, Homo Sapiens
ccaggcguguggacccgagcccagccuugcgu

SEQ ID NO: 197145 - RNA, 32 nt, Homo Sapiens
acaaccuccuggugcuggccaagauggcugcg

SEQ ID NO: 197146 - RNA, 32 nt, Homo Sapiens
aauguuacuguaacuuggguauuauguuaacu

SEQ ID NO: 197147 - RNA, 32 nt, Homo Sapiens
uacuacacugaggagagauucccgcggguucc

SEQ ID NO: 197148 - RNA, 32 nt, Homo Sapiens
cucaucuuuguauuuccagccaucagcacagu

SEQ ID NO: 197149 - RNA, 32 nt, Homo Sapiens
ccaccguauauuuaaugucucuguaaaggcac

SEQ ID NO: 197150 - RNA, 32 nt, Homo Sapiens
caaaauaaugaaauccaccccugccugcuaga

SEQ ID NO: 197151 - RNA, 29 nt, Homo Sapiens
aaagcccuaaguuuauguuucuaaugugu

SEQ ID NO: 197152 - RNA, 32 nt, Homo Sapiens
gggccggcggaguuucuucagaggaacuaccg

SEQ ID NO: 197153 - RNA, 32 nt, Homo Sapiens
ucaauuuuuauuugcuucaaaauagaaucgga

SEQ ID NO: 197154 - RNA, 32 nt, Homo Sapiens
uuuucaggugcuaaguuuuuuauaucuuuuaa

SEQ ID NO: 197155 - RNA, 32 nt, Homo Sapiens
aaugggaacugggauuagaaucuaagcagaaa

SEQ ID NO: 197156 - RNA, 32 nt, Homo Sapiens
gguggcuucagagacagugcugccuccuccug

SEQ ID NO: 197157 - RNA, 32 nt, Homo Sapiens
cuaccccaaacucccaacacagauggaggcag

SEQ ID NO: 197158 - RNA, 32 nt, Homo Sapiens
gguaaaaugcuuuuucuuauuaauauaauuau

SEQ ID NO: 197159 - RNA, 32 nt, Homo Sapiens
caaucccaccgccugcccucugucuuucccug

SEQ ID NO: 197160 - RNA, 32 nt, Homo Sapiens
agggcagcuacacguggucugaaucgagaacc

SEQ ID NO: 197161 - RNA, 32 nt, Homo Sapiens
gcugaguuuaguuuuucacuuuagcaaagggg

SEQ ID NO: 197162 - RNA, 32 nt, Homo Sapiens
aggagggggcagggacgggacgugggaaaaug

SEQ ID NO: 197163 - RNA, 32 nt, Homo Sapiens
cgcggaaaucccuuggccggccgagccuccgc

SEQ ID NO: 197164 - RNA, 32 nt, Homo Sapiens
uucaacuuguccuuuuucucccuccagagcag

SEQ ID NO: 197165 - RNA, 32 nt, Homo Sapiens
ccuucacgucggagagacugggugugggccgu

SEQ ID NO: 197166 - RNA, 32 nt, Homo Sapiens
acuacgggccuaggauggccgccccgcugccc

SEQ ID NO: 197167 - RNA, 32 nt, Homo Sapiens
ggcugggccuccaugaugucaggaauguugca

SEQ ID NO: 197168 - RNA, 32 nt, Homo Sapiens
cucaggaggaggagauaccaggaggcagggau

SEQ ID NO: 197169 - RNA, 32 nt, Homo Sapiens
guuucccauuucccuuucuuagauugcaccag

SEQ ID NO: 197170 - RNA, 32 nt, Homo Sapiens
cagucuuuaugaauuucuuaauguucaaaaug

SEQ ID NO: 197171 - RNA, 32 nt, Homo Sapiens
caucugacugguuuccccauguccucccauuc

SEQ ID NO: 197172 - RNA, 32 nt, Homo Sapiens
uucccugccguggggccucagcacgccggugu

SEQ ID NO: 197173 - RNA, 32 nt, Homo Sapiens
agacugugauauuguguaaaugucuaucugcc

SEQ ID NO: 197174 - RNA, 32 nt, Homo Sapiens
augacuaaucaggagcagcgggcucacccagg

SEQ ID NO: 197175 - RNA, 32 nt, Homo Sapiens
acgcgcgcccugcggagcccgcccaacuccgg

SEQ ID NO: 197176 - RNA, 32 nt, Homo Sapiens
uugcccuaaugaucuacgguggucugugaaua

SEQ ID NO: 197177 - RNA, 32 nt, Homo Sapiens
augauaauguguauguggauagaugucuuugu

SEQ ID NO: 197178 - RNA, 32 nt, Homo Sapiens
ugaaccuugguguccauguccuggagacgggg

SEQ ID NO: 197179 - RNA, 32 nt, Homo Sapiens
acagacagggggagcucugucucacuguaagg

SEQ ID NO: 197180 - RNA, 32 nt, Homo Sapiens
cacagagguggccuuggagucuggagucuggg

SEQ ID NO: 197181 - RNA, 32 nt, Homo Sapiens
uuauauaguauuucugggaccaaaaaauuuaa

SEQ ID NO: 197182 - RNA, 32 nt, Homo Sapiens
aguuaugguggccuuccaggauguggcucaga

SEQ ID NO: 197183 - RNA, 32 nt, Homo Sapiens
gcccccgaagccccuggggccggagcaacugu

SEQ ID NO: 197184 - RNA, 32 nt, Homo Sapiens
uaauauuuaaaauaaacuuuccuucuucccuc

SEQ ID NO: 197185 - RNA, 32 nt, Homo Sapiens
cucaggcuggggaggaagcacauggcccugag

SEQ ID NO: 197186 - RNA, 32 nt, Homo Sapiens
aucugacacauuguuaccgugccuccuggcug

SEQ ID NO: 197187 - RNA, 32 nt, Homo Sapiens
uuucaguugggucuuuuccuuagcccugcgau

SEQ ID NO: 197188 - RNA, 32 nt, Homo Sapiens
acucaacaugcgcugcucgccgggaggcgucu

SEQ ID NO: 197189 - RNA, 32 nt, Homo Sapiens
aacccuuuucuucuccuuuccuggcuucggac

SEQ ID NO: 197190 - RNA, 32 nt, Homo Sapiens
cccaccccgccaccaagguaaaagcacaacag

SEQ ID NO: 197191 - RNA, 32 nt, Homo Sapiens
gcccccuuuccacaucgcaccagaugacuuuu

SEQ ID NO: 197192 - RNA, 32 nt, Homo Sapiens
caaccuuauuuuucuuuucuauaaaauaggag

SEQ ID NO: 197193 - RNA, 31 nt, Homo Sapiens
ccuauggaaaugugaaggaugaauugagcuc

SEQ ID NO: 197194 - RNA, 32 nt, Homo Sapiens
gacauuuuugguuuuuuuuuaaacuuuuuuuu

SEQ ID NO: 197195 - RNA, 32 nt, Homo Sapiens
gcacuguaaaugucuaggcaugugcuggucuc

SEQ ID NO: 197196 - RNA, 28 nt, Homo Sapiens
aagauggugcugcggcggcugcuggccg

SEQ ID NO: 197197 - RNA, 32 nt, Homo Sapiens
gcgccuggaccggcgccgagcgaggcggccaa

SEQ ID NO: 197198 - RNA, 32 nt, Homo Sapiens
uugaaagaagugaaaauaaacagccagagauu

SEQ ID NO: 197199 - RNA, 32 nt, Homo Sapiens
ggucccgggauggcucuaccccggccaaguga

SEQ ID NO: 197200 - RNA, 29 nt, Homo Sapiens
gugcggcuugacaaugugacagaaaagaa

SEQ ID NO: 197201 - RNA, 32 nt, Homo Sapiens
aacaugacgcucucaagcuuguccuuccuuca

SEQ ID NO: 197202 - RNA, 32 nt, Homo Sapiens
uuuaaggaauuucacauguauaagguggcucc

SEQ ID NO: 197203 - RNA, 32 nt, Homo Sapiens
gugagcccccuccucgcccaccccgccacgug

SEQ ID NO: 197204 - RNA, 32 nt, Homo Sapiens
cggcuggccgggcacaggggcuccucacuucc

SEQ ID NO: 197205 - RNA, 32 nt, Homo Sapiens
guauuucuuuuuaacuuuuuuauuuguaaacu

SEQ ID NO: 197206 - RNA, 31 nt, Homo Sapiens
ugguacaaauaaaaacuguauaucuauauac

SEQ ID NO: 197207 - RNA, 32 nt, Homo Sapiens
ggcuggucuugaauuccugaccucagugaucc

SEQ ID NO: 197208 - RNA, 32 nt, Homo Sapiens
gaaaaaauaaaguggaaacuuuuagaguauua

SEQ ID NO: 197209 - RNA, 32 nt, Homo Sapiens
aaggagaggcucagaagcacaaauauggaggu

SEQ ID NO: 197210 - RNA, 32 nt, Homo Sapiens
cuguggagucauugugccggaccucugaaaag

SEQ ID NO: 197211 - RNA, 32 nt, Homo Sapiens
ucccaagcucugcuccucuccccagcaaguga

SEQ ID NO: 197212 - RNA, 32 nt, Homo Sapiens
cacacaaggggccagugaggacaacucuggug

SEQ ID NO: 197213 - RNA, 32 nt, Homo Sapiens
agggccgggcagaugagauauuaaaguuaaua

SEQ ID NO: 197214 - RNA, 32 nt, Homo Sapiens
uaagguguuucauuguaaccugaauggaccaa

SEQ ID NO: 197215 - RNA, 32 nt, Homo Sapiens
acccagucaugguuuccccauccaacuauuag

SEQ ID NO: 197216 - RNA, 32 nt, Homo Sapiens
ccugcccguugacuaacuaugcucugugguuu

SEQ ID NO: 197217 - RNA, 32 nt, Homo Sapiens
ggugcguggugacguuucgccggcgcgggcgc

SEQ ID NO: 197218 - RNA, 29 nt, Homo Sapiens
ggaaggcaaggaggcgggacgccgcaucg

SEQ ID NO: 197219 - RNA, 32 nt, Homo Sapiens
ccagggggaucauuaccgucucucccaaccug

SEQ ID NO: 197220 - RNA, 30 nt, Homo Sapiens
gccgcguggggcgaaggcggcgcuuggcug

SEQ ID NO: 197221 - RNA, 32 nt, Homo Sapiens
cacgcccaacugggaccaggguuuucuguuuu

SEQ ID NO: 197222 - RNA, 32 nt, Homo Sapiens
acuucagcaucuuuuuaaaauaaucuaagcau

SEQ ID NO: 197223 - RNA, 32 nt, Homo Sapiens
agcagagaccugagaggcaccaggcccagccg

SEQ ID NO: 197224 - RNA, 32 nt, Homo Sapiens
ucaaguuguuuuuuuucuuuacauuugauaaa

SEQ ID NO: 197225 - RNA, 32 nt, Homo Sapiens
uaucaucuuuagagguaugauuuuuucaugaa

SEQ ID NO: 197226 - RNA, 32 nt, Homo Sapiens
gagaaaaaggauuuccucaaauuuuaaauaug

SEQ ID NO: 197227 - RNA, 32 nt, Homo Sapiens
augaaugaaugaugaauggcuggcaccuuguc

SEQ ID NO: 197228 - RNA, 32 nt, Homo Sapiens
aacuaggucuacagguuuacauuuuucugugu

SEQ ID NO: 197229 - RNA, 32 nt, Homo Sapiens
cacgaagcugguggagcucaagcgacaggcgu

SEQ ID NO: 197230 - RNA, 32 nt, Homo Sapiens
uuucuaaggggagaaaaaggggucagacagag

SEQ ID NO: 197231 - RNA, 32 nt, Homo Sapiens
cuggcugcgagcucagggggccgccugaggac

SEQ ID NO: 197232 - RNA, 32 nt, Homo Sapiens
cugagacgcgccggccucccgcugcugcuccg

SEQ ID NO: 197233 - RNA, 32 nt, Homo Sapiens
ugcgggcaccagugcagugcugccuugguucc

SEQ ID NO: 197234 - RNA, 28 nt, Homo Sapiens
ccugccaaaaauaaacaugugaaacugc

SEQ ID NO: 197235 - RNA, 32 nt, Homo Sapiens
aaucuaagaguaccuuuccuaaaauaaaauau

SEQ ID NO: 197236 - RNA, 27 nt, Homo Sapiens
ugcgggcccuucuuccucccagaacac

SEQ ID NO: 197237 - RNA, 32 nt, Homo Sapiens
gugaaaugacuuuaaacuuaaguaggaaauac

SEQ ID NO: 197238 - RNA, 32 nt, Homo Sapiens
gcagccuuccaacuagagacucgggggugucu

SEQ ID NO: 197239 - RNA, 32 nt, Homo Sapiens
gaucaagggucucuuaagggugggagcugggg

SEQ ID NO: 197240 - RNA, 32 nt, Homo Sapiens
cacgucggaccucaagcagccgagccugggcc

SEQ ID NO: 197241 - RNA, 32 nt, Homo Sapiens
ucuaaacaaaugccuuuacaaaaugaaaccca

SEQ ID NO: 197242 - RNA, 32 nt, Homo Sapiens
auguuaugauuguugauaacuaaccaaaguag

SEQ ID NO: 197243 - RNA, 32 nt, Homo Sapiens
aaucuguuuucuucauuauugggaugagcauc

SEQ ID NO: 197244 - RNA, 32 nt, Homo Sapiens
cagaauacgagcucaucagcuaggauauuggc

SEQ ID NO: 197245 - RNA, 32 nt, Homo Sapiens
ucaggacucccuccucugguccugcuguuucc

SEQ ID NO: 197246 - RNA, 32 nt, Homo Sapiens
cagccacccaccugagcccucccggccaggcu

SEQ ID NO: 197247 - RNA, 32 nt, Homo Sapiens
gugggcccccuacuccauuucccagcaaaagg

SEQ ID NO: 197248 - RNA, 32 nt, Homo Sapiens
ccuacccgcgcgcaggccaaguugcugaauca

SEQ ID NO: 197249 - RNA, 32 nt, Homo Sapiens
cugugccugucaggcucuggcccuugccuuug

SEQ ID NO: 197250 - RNA, 32 nt, Homo Sapiens
ccaguauguaccugcaggcaucagggggaggg

SEQ ID NO: 197251 - RNA, 32 nt, Homo Sapiens
ccuccgugaccacuggccccaggcuuucccac

SEQ ID NO: 197252 - RNA, 32 nt, Homo Sapiens
uauguucauaucuaugggaaaaaucuaaaaug

SEQ ID NO: 197253 - RNA, 32 nt, Homo Sapiens
aggcacagacaccaaggacagagacgcuggcu

SEQ ID NO: 197254 - RNA, 32 nt, Homo Sapiens
aaguuucacagcacuuacaauuuucccucuuc

SEQ ID NO: 197255 - RNA, 32 nt, Homo Sapiens
gggcagagggcggugccaagugccacaucuug

SEQ ID NO: 197256 - RNA, 32 nt, Homo Sapiens
ccaguuggagacgggggcugggugucccuggc

SEQ ID NO: 197257 - RNA, 32 nt, Homo Sapiens
ucaugagaacagagcccucauucauccauuca

SEQ ID NO: 197258 - RNA, 32 nt, Homo Sapiens
aaaccauaccaguaggugguaguuaaguugau

SEQ ID NO: 197259 - RNA, 32 nt, Homo Sapiens
gcaccaguguaaaauguuccuguagucacugu

SEQ ID NO: 197260 - RNA, 32 nt, Homo Sapiens
gcccccagugaaaggaauaauaaaauaauugu

SEQ ID NO: 197261 - RNA, 32 nt, Homo Sapiens
ugaauacucagauauaaugcugaacacuaaau

SEQ ID NO: 197262 - RNA, 32 nt, Homo Sapiens
caccaccuagccauagucucaaaccugugggg

SEQ ID NO: 197263 - RNA, 32 nt, Homo Sapiens
cuacugcucuccuaauguuaguucuugaugaa

SEQ ID NO: 197264 - RNA, 32 nt, Homo Sapiens
gucacucaagucauuagggagcuccucacgcu

SEQ ID NO: 197265 - RNA, 32 nt, Homo Sapiens
ucagcuuaagugcuuaaauauaucaugcugac

SEQ ID NO: 197266 - RNA, 32 nt, Homo Sapiens
uggugcuagaaaaaacaccuugggaugaaacu

SEQ ID NO: 197267 - RNA, 32 nt, Homo Sapiens
uauaaugcuuuguguacaaaaaugguagaugg

SEQ ID NO: 197268 - RNA, 32 nt, Homo Sapiens
ucuaugaauuguaggaguauuaaagaccaggc

SEQ ID NO: 197269 - RNA, 32 nt, Homo Sapiens
cuccugcccaugcucucccagaugaagggcuu

SEQ ID NO: 197270 - RNA, 32 nt, Homo Sapiens
gguuccuccccacucugucuuucucaccucuc

SEQ ID NO: 197271 - RNA, 31 nt, Homo Sapiens
aaacccagggcgguggcgugggaucacgggu

SEQ ID NO: 197272 - RNA, 32 nt, Homo Sapiens
gcgugcuacaguguuuuugugauguucugaac

SEQ ID NO: 197273 - RNA, 32 nt, Homo Sapiens
uucuauaggaugcacaaugcaugugggcccua

SEQ ID NO: 197274 - RNA, 32 nt, Homo Sapiens
ccagaguugcugugccguguccaagggccgug

SEQ ID NO: 197275 - RNA, 32 nt, Homo Sapiens
acuguguucagugccuuggagcagaaagccag

SEQ ID NO: 197276 - RNA, 32 nt, Homo Sapiens
auuuuuagagaaacaacaaaacaaagaaaaag

SEQ ID NO: 197277 - RNA, 32 nt, Homo Sapiens
cagccugugcccucgcaggucuuggugccucc

SEQ ID NO: 197278 - RNA, 32 nt, Homo Sapiens
ccaagcuuggaaagagcuguguuuugguucaa

SEQ ID NO: 197279 - RNA, 32 nt, Homo Sapiens
auuuuagguguugauuucuggaucacgggaua

SEQ ID NO: 197280 - RNA, 32 nt, Homo Sapiens
gcauguaucauacgugcuuuaagcaagucaug

SEQ ID NO: 197281 - RNA, 32 nt, Homo Sapiens
cucaucucuggcggcccucuugggccucugac

SEQ ID NO: 197282 - RNA, 32 nt, Homo Sapiens
aguuuuguauuuucuuuuuucuuuuuucuuua

SEQ ID NO: 197283 - RNA, 32 nt, Homo Sapiens
cugcuugagcccaggaggucaaggcugaagug

SEQ ID NO: 197284 - RNA, 32 nt, Homo Sapiens
ugcugaggacaaacggugugugcagagccggg

SEQ ID NO: 197285 - RNA, 32 nt, Homo Sapiens
ugaauggagggucuggugucagauacagccga

SEQ ID NO: 197286 - RNA, 32 nt, Homo Sapiens
guggucccugcccuuccgcgccucgagccauc

SEQ ID NO: 197287 - RNA, 32 nt, Homo Sapiens
cccgcugggguggaggcccaggcagaacccug

SEQ ID NO: 197288 - RNA, 32 nt, Homo Sapiens
cagaguguggcauagaagcuauuuaaugauua

SEQ ID NO: 197289 - RNA, 32 nt, Homo Sapiens
ugcggaagucagugcccaggccccacacaguc

SEQ ID NO: 197290 - RNA, 32 nt, Homo Sapiens
gacgcgggcgcaauggcggggacccggggcuu

SEQ ID NO: 197291 - RNA, 32 nt, Homo Sapiens
cggccgaacugaccaucuccgcgcucagucug

SEQ ID NO: 197292 - RNA, 32 nt, Homo Sapiens
aauuuaaggaaaaagauccucccggguuuuau

SEQ ID NO: 197293 - RNA, 32 nt, Homo Sapiens
uuuucuuacuauaaaauaaaugucuguaacug

SEQ ID NO: 197294 - RNA, 32 nt, Homo Sapiens
agcagguggcgaugcuggcccgugcccggggc

SEQ ID NO: 197295 - RNA, 32 nt, Homo Sapiens
accacagcaaggaggugcauggccgggagcgc

SEQ ID NO: 197296 - RNA, 32 nt, Homo Sapiens
cccucgcggugaguguuacaguucuuaaagau

SEQ ID NO: 197297 - RNA, 32 nt, Homo Sapiens
auuccccgcgcgcccggcgucggggcuuccag

SEQ ID NO: 197298 - RNA, 32 nt, Homo Sapiens
aucccguuccugggggcguaaggggccgggcc

SEQ ID NO: 197299 - RNA, 32 nt, Homo Sapiens
caggugugauuuguguuuggcccuuagagaga

SEQ ID NO: 197300 - RNA, 32 nt, Homo Sapiens
aaacugaguugauuugacuuuaucucaguacu

SEQ ID NO: 197301 - RNA, 32 nt, Homo Sapiens
aggacaggaucccggcggcagaaggacggaga

SEQ ID NO: 197302 - RNA, 32 nt, Homo Sapiens
gugucucugccauguggcagaagugcucuuug

SEQ ID NO: 197303 - RNA, 32 nt, Homo Sapiens
caggcucccauccauggcccagccccucuccc

SEQ ID NO: 197304 - RNA, 32 nt, Homo Sapiens
gcugauccaaauauuguagauguguauggcaa

SEQ ID NO: 197305 - RNA, 32 nt, Homo Sapiens
aaguuuuauuuuuuauauuuagugcuuaaucu

SEQ ID NO: 197306 - RNA, 32 nt, Homo Sapiens
uuuguuuggaccauuccacaagcaacuuaaac

SEQ ID NO: 197307 - RNA, 32 nt, Homo Sapiens
gucuugggauccgaccccgggccgaccgcacc

SEQ ID NO: 197308 - RNA, 32 nt, Homo Sapiens
augacaaugagaacaacaggaaauggcccgga

SEQ ID NO: 197309 - RNA, 32 nt, Homo Sapiens
aagcagugucuguugcaagaaaacagugucug

SEQ ID NO: 197310 - RNA, 32 nt, Homo Sapiens
gaaaaugugaacacugaugacaugguauagga

SEQ ID NO: 197311 - RNA, 32 nt, Homo Sapiens
ucuuguuaaugauuuucauguugauugcaugu

SEQ ID NO: 197312 - RNA, 31 nt, Homo Sapiens
guuucugaauugacuuuguuuucagaugaug

SEQ ID NO: 197313 - RNA, 32 nt, Homo Sapiens
cguuauguuuaaaauauaauguacauaccuua

SEQ ID NO: 197314 - RNA, 32 nt, Homo Sapiens
uacaguuuaguaaaaggcuuaaaauuacuuau

SEQ ID NO: 197315 - RNA, 32 nt, Homo Sapiens
aacugaagaauguacaauaaaaacuagaaugc

SEQ ID NO: 197316 - RNA, 32 nt, Homo Sapiens
gauacauuccuacaauggccacugcucagcuu

SEQ ID NO: 197317 - RNA, 32 nt, Homo Sapiens
accaacaggauuguguugcugcugaaagucug

SEQ ID NO: 197318 - RNA, 32 nt, Homo Sapiens
aaaauauuuuuggauagcguugacacgauaga

SEQ ID NO: 197319 - RNA, 32 nt, Homo Sapiens
cuaggcgauggguugguaggugcagcaaacca

SEQ ID NO: 197320 - RNA, 30 nt, Homo Sapiens
gagcgaggagguggagcagaagaucgcggg

SEQ ID NO: 197321 - RNA, 32 nt, Homo Sapiens
agaaugccgcgugcuuucuccugacuuggggc

SEQ ID NO: 197322 - RNA, 32 nt, Homo Sapiens
ugauuucagggaauucuuuaguaucgucaaug

SEQ ID NO: 197323 - RNA, 32 nt, Homo Sapiens
aggaaaaguauuuucucucauguuaguacacg

SEQ ID NO: 197324 - RNA, 32 nt, Homo Sapiens
gcaggcagguguggaugcugcaauucccaaug

SEQ ID NO: 197325 - RNA, 32 nt, Homo Sapiens
gugcagaaguugucaguggaaaauaguauuaa

SEQ ID NO: 197326 - RNA, 32 nt, Homo Sapiens
guguccgguuuauuucugaccuugaaggcuga

SEQ ID NO: 197327 - RNA, 32 nt, Homo Sapiens
cgugccaggaccaccccaccucucuugcugcc

SEQ ID NO: 197328 - RNA, 32 nt, Homo Sapiens
caauuuuuuucaccucuuuguguuuuauuuug

SEQ ID NO: 197329 - RNA, 32 nt, Homo Sapiens
ccuuuuuuuuucugugugcgugcgaauggugc

SEQ ID NO: 197330 - RNA, 32 nt, Homo Sapiens
auaugauuaaaauuauuuuuuauuccuuuuuc

SEQ ID NO: 197331 - RNA, 32 nt, Homo Sapiens
uucaagauguaauuuuacauuucugcauuuuu

SEQ ID NO: 197332 - RNA, 32 nt, Homo Sapiens
caugcugauguaucaggccaucugugucaugc

SEQ ID NO: 197333 - RNA, 32 nt, Homo Sapiens
cgguuguggccgcguugccgaccuccagcagc

SEQ ID NO: 197334 - RNA, 32 nt, Homo Sapiens
aaugccauuuuucuaaacaguaauguuuacuu

SEQ ID NO: 197335 - RNA, 32 nt, Homo Sapiens
ggaggggaggaguggagauggcggcggcggcg

SEQ ID NO: 197336 - RNA, 32 nt, Homo Sapiens
gggaaugaagaauucagaauaauuuugguaaa

SEQ ID NO: 197337 - RNA, 32 nt, Homo Sapiens
acaaaguuuugcucuugucacccaggcuggag

SEQ ID NO: 197338 - RNA, 32 nt, Homo Sapiens
aaagcuggacauuuuuauguugcauuauauac

SEQ ID NO: 197339 - RNA, 32 nt, Homo Sapiens
ucuccugcuguggucagaguugcuucgauguu

SEQ ID NO: 197340 - RNA, 32 nt, Homo Sapiens
ugccacgcgcgaggcauguucucagugugugu

SEQ ID NO: 197341 - RNA, 32 nt, Homo Sapiens
gugucugaaacaggauggcagaauaggcucac

SEQ ID NO: 197342 - RNA, 32 nt, Homo Sapiens
aggcugaggagaaggaggagcgggccguggag

SEQ ID NO: 197343 - RNA, 32 nt, Homo Sapiens
uccugccccugggcuucucaccagcuacagga

SEQ ID NO: 197344 - RNA, 32 nt, Homo Sapiens
cacugaaaacaucaauucacugguaagagucc

SEQ ID NO: 197345 - RNA, 32 nt, Homo Sapiens
gcuggaucaaaauaaucauguuuuaugaaaau

SEQ ID NO: 197346 - RNA, 32 nt, Homo Sapiens
caugggacugaggauuuugaaaaggaaacaug

SEQ ID NO: 197347 - RNA, 32 nt, Homo Sapiens
caaguaaaucauauaacuauauguuaucuucc

SEQ ID NO: 197348 - RNA, 32 nt, Homo Sapiens
ucaguccagagaugcuggcccucgcccagucu

SEQ ID NO: 197349 - RNA, 32 nt, Homo Sapiens
cgcggagagggcaccgggccgacgccuccccc

SEQ ID NO: 197350 - RNA, 32 nt, Homo Sapiens
ggcaggaucucgcucugucacccaggcaggag

SEQ ID NO: 197351 - RNA, 32 nt, Homo Sapiens
accagccuggccaacguggugaaacacugucu

SEQ ID NO: 197352 - RNA, 32 nt, Homo Sapiens
cugugggcucugcuguucucuccugcauccug

SEQ ID NO: 197353 - RNA, 32 nt, Homo Sapiens
cuaaacuuugucaucaaaggcccauuuauaau

SEQ ID NO: 197354 - RNA, 32 nt, Homo Sapiens
gucagucacugucagccccucaucucccccca

SEQ ID NO: 197355 - RNA, 32 nt, Homo Sapiens
aaaggaagagaaaacgugggguguggaagaca

SEQ ID NO: 197356 - RNA, 32 nt, Homo Sapiens
aggaacuccuggaugugguagauaagaaugag

SEQ ID NO: 197357 - RNA, 32 nt, Homo Sapiens
accucgcccccgcaagccccagccccgaggac

SEQ ID NO: 197358 - RNA, 32 nt, Homo Sapiens
agccuacccacccccaggaccccugaguaaaa

SEQ ID NO: 197359 - RNA, 32 nt, Homo Sapiens
auuuuaaacacuuuaauguugguauuagaaua

SEQ ID NO: 197360 - RNA, 32 nt, Homo Sapiens
aguuuaauauccaaaauauauaaggaacucau

SEQ ID NO: 197361 - RNA, 32 nt, Homo Sapiens
gaucagacguacccugcauugaaaagucaaga

SEQ ID NO: 197362 - RNA, 32 nt, Homo Sapiens
uauugaguauuuaaguaucuuuugaaacaaau

SEQ ID NO: 197363 - RNA, 32 nt, Homo Sapiens
ugggagagugacgaggccuaucaguacuggag

SEQ ID NO: 197364 - RNA, 32 nt, Homo Sapiens
caguuguuacaaucaggggugcuacuggauuc

SEQ ID NO: 197365 - RNA, 32 nt, Homo Sapiens
uuugaaaguagugaugucauaauuguacuaau

SEQ ID NO: 197366 - RNA, 32 nt, Homo Sapiens
uuaacagaauccaguuguugcagccagaauua

SEQ ID NO: 197367 - RNA, 32 nt, Homo Sapiens
cggaagggcuccccggggcguucccucaggag

SEQ ID NO: 197368 - RNA, 32 nt, Homo Sapiens
ugcuuucgaguucucacgcaacguacugggca

SEQ ID NO: 197369 - RNA, 32 nt, Homo Sapiens
agucagcacugacaugggaugcagcuaacugc

SEQ ID NO: 197370 - RNA, 32 nt, Homo Sapiens
auuuuauguucccaccaacgguguacaacaau

SEQ ID NO: 197371 - RNA, 32 nt, Homo Sapiens
gacccggcucgguggcuucgcaccggagcccg

SEQ ID NO: 197372 - RNA, 32 nt, Homo Sapiens
gaguuguguguuaauguguaaaaauuuuugcc

SEQ ID NO: 197373 - RNA, 32 nt, Homo Sapiens
cucucucuugucaaaugcagccaucauccgcu

SEQ ID NO: 197374 - RNA, 32 nt, Homo Sapiens
gccaaccgcccggaccucggcgcuuucuucua

SEQ ID NO: 197375 - RNA, 32 nt, Homo Sapiens
uguguuuggacuuauucuuuguuuccuuuccc

SEQ ID NO: 197376 - RNA, 32 nt, Homo Sapiens
ucagaugcuaucuuggugcacacacacaacau

SEQ ID NO: 197377 - RNA, 32 nt, Homo Sapiens
cuguuguguaccauaacauuuaaaagaaugga

SEQ ID NO: 197378 - RNA, 32 nt, Homo Sapiens
aucaugcugcuguuauuuucuacauuuguauu

SEQ ID NO: 197379 - RNA, 32 nt, Homo Sapiens
auuuucaaaaacuuuaacucuuguuauauaau

SEQ ID NO: 197380 - RNA, 32 nt, Homo Sapiens
cuccucaggaccaggguuggcaccuucccccu

SEQ ID NO: 197381 - RNA, 32 nt, Homo Sapiens
uuugguuguaaaaacaccugaaugacucuaag

SEQ ID NO: 197382 - RNA, 32 nt, Homo Sapiens
caucccucuuuuucaggcaguauaaaggcaaa

SEQ ID NO: 197383 - RNA, 32 nt, Homo Sapiens
ccccacacaacacccacacucagccacugcgg

SEQ ID NO: 197384 - RNA, 32 nt, Homo Sapiens
acccguccaagacccucugugcuccccaccau

SEQ ID NO: 197385 - RNA, 28 nt, Homo Sapiens
gagauguuugcuguuguuuucuucaucu

SEQ ID NO: 197386 - RNA, 32 nt, Homo Sapiens
auggauccuuuggauuuugauuccaguugauc

SEQ ID NO: 197387 - RNA, 32 nt, Homo Sapiens
caacuuuaaaacaugaauugcucgacagaguu

SEQ ID NO: 197388 - RNA, 32 nt, Homo Sapiens
auuuagguaaaacuuuguaggcaccuucugcu

SEQ ID NO: 197389 - RNA, 32 nt, Homo Sapiens
gaggcugggccccugggaugggaccagggaug

SEQ ID NO: 197390 - RNA, 32 nt, Homo Sapiens
gugcaacuuccauuuuagguguuggaucugag

SEQ ID NO: 197391 - RNA, 32 nt, Homo Sapiens
ccagacauuuguauuauuuuuaucaugaaauc

SEQ ID NO: 197392 - RNA, 32 nt, Homo Sapiens
ugcucaguguagaggacauuccugucauccau

SEQ ID NO: 197393 - RNA, 32 nt, Homo Sapiens
uuuguacugaggaaacaaagugcucugggcau

SEQ ID NO: 197394 - RNA, 32 nt, Homo Sapiens
cccuggagucaagucagaaauggaugugucca

SEQ ID NO: 197395 - RNA, 32 nt, Homo Sapiens
aguccucagagagccuucugugccccuggcca

SEQ ID NO: 197396 - RNA, 32 nt, Homo Sapiens
gcggcggcgccgggaggcugagagcugggagc

SEQ ID NO: 197397 - RNA, 32 nt, Homo Sapiens
uuugcccuccaagaggcucccuccugucucua

SEQ ID NO: 197398 - RNA, 32 nt, Homo Sapiens
uucccgugaacgucuccuuccucccccguauc

SEQ ID NO: 197399 - RNA, 32 nt, Homo Sapiens
uaaaauagcuauugccuauuaugauaaaagaa

SEQ ID NO: 197400 - RNA, 32 nt, Homo Sapiens
uuuuugauauucaaauuaauucuuacagcuug

SEQ ID NO: 197401 - RNA, 32 nt, Homo Sapiens
gacaagggaaagggaugggugaaccaguaggg

SEQ ID NO: 197402 - RNA, 32 nt, Homo Sapiens
ucgccucacugcggccucccccguccaaagcu

SEQ ID NO: 197403 - RNA, 32 nt, Homo Sapiens
gugucauguaaauuuguucacuuuuuugggcu

SEQ ID NO: 197404 - RNA, 32 nt, Homo Sapiens
cuauaugucacacaaucguaauuccaaaagcc

SEQ ID NO: 197405 - RNA, 32 nt, Homo Sapiens
ugcagcccucugcuccucccggccgcugcaca

SEQ ID NO: 197406 - RNA, 32 nt, Homo Sapiens
ugaaauuggucccagagaaggacuagcaauuu

SEQ ID NO: 197407 - RNA, 32 nt, Homo Sapiens
uauuuagaaaucaaaauuacaguucacauuua

SEQ ID NO: 197408 - RNA, 32 nt, Homo Sapiens
uugaaggcuuacuguagaaguggcuuacugua

SEQ ID NO: 197409 - RNA, 32 nt, Homo Sapiens
agaggggauccacuucccguggcugccggcgc

SEQ ID NO: 197410 - RNA, 32 nt, Homo Sapiens
aaggaauccaaaugugacuuugaaaauuguua

SEQ ID NO: 197411 - RNA, 32 nt, Homo Sapiens
ugcugucagccuaguuucuuucugggaauaug

SEQ ID NO: 197412 - RNA, 32 nt, Homo Sapiens
ucccauagcuucuccuuugcuuccaggagaaa

SEQ ID NO: 197413 - RNA, 32 nt, Homo Sapiens
aggguuuguuuuauuuuagccucagaguauac

SEQ ID NO: 197414 - RNA, 32 nt, Homo Sapiens
ucuaccugguuuguugugaaccuguguucucc

SEQ ID NO: 197415 - RNA, 32 nt, Homo Sapiens
aagcaagagacaacccauauaauuauauauug

SEQ ID NO: 197416 - RNA, 30 nt, Homo Sapiens
cugccagagaagcaggaggaggauggagag

SEQ ID NO: 197417 - RNA, 32 nt, Homo Sapiens
cccugaggccggacaccugggguccugccggg

SEQ ID NO: 197418 - RNA, 32 nt, Homo Sapiens
aaguggcgcugggcuguuuuagugccaggcug

SEQ ID NO: 197419 - RNA, 32 nt, Homo Sapiens
ggccugcacccacaggcauggccgagcacaug

SEQ ID NO: 197420 - RNA, 32 nt, Homo Sapiens
gacagggucuugcucugucacccaggcuggag

SEQ ID NO: 197421 - RNA, 32 nt, Homo Sapiens
ugggccccaagcacgggccgggcauagauuuc

SEQ ID NO: 197422 - RNA, 32 nt, Homo Sapiens
caucacccugccggcccggcgcgggucggggg

SEQ ID NO: 197423 - RNA, 32 nt, Homo Sapiens
acauguaauuuucuaccauaagaauaauuaac

SEQ ID NO: 197424 - RNA, 32 nt, Homo Sapiens
aggccgcggccuucugucccccggccccagac

SEQ ID NO: 197425 - RNA, 32 nt, Homo Sapiens
uugccggcaccuggugagauuccgucucuaga

SEQ ID NO: 197426 - RNA, 32 nt, Homo Sapiens
uaaauuuaugauuuaacuuuuaauuuuacccu

SEQ ID NO: 197427 - RNA, 32 nt, Homo Sapiens
uuuuucacagugccgggucuucguuucuuaaa

SEQ ID NO: 197428 - RNA, 32 nt, Homo Sapiens
agucauaagacugaugaaauagacugauugug

SEQ ID NO: 197429 - RNA, 32 nt, Homo Sapiens
ugcugggaggcaggaggcucaugcuccugucu

SEQ ID NO: 197430 - RNA, 32 nt, Homo Sapiens
aagaaaaacaauuacuguauuuuaauucaguc

SEQ ID NO: 197431 - RNA, 32 nt, Homo Sapiens
gugaacgaguuguuggcugcucccuccacagc

SEQ ID NO: 197432 - RNA, 32 nt, Homo Sapiens
gcaucaccacaguguauaugcaauucuaugca

SEQ ID NO: 197433 - RNA, 32 nt, Homo Sapiens
uacccagcugaaacagguuaagaauauucuua

SEQ ID NO: 197434 - RNA, 32 nt, Homo Sapiens
cgagagaagcgggcuccuaaugaggugggaaa

SEQ ID NO: 197435 - RNA, 32 nt, Homo Sapiens
uuugaauuucagucuguaaauacuuuuuugga

SEQ ID NO: 197436 - RNA, 32 nt, Homo Sapiens
ucuccuuuagggacagcuuagaauuauuugca

SEQ ID NO: 197437 - RNA, 32 nt, Homo Sapiens
ccagcagcuggcuacagccucgauuuauauuu

SEQ ID NO: 197438 - RNA, 32 nt, Homo Sapiens
cacugacagccucccacccccaucucucccuc

SEQ ID NO: 197439 - RNA, 29 nt, Homo Sapiens
ggagauguuguccccagugucccgagacg

SEQ ID NO: 197440 - RNA, 32 nt, Homo Sapiens
gaaaacagcauggaacaaaaccaaggucuuuc

SEQ ID NO: 197441 - RNA, 32 nt, Homo Sapiens
ucuggcagaucugaugcugauuugaugcugua

SEQ ID NO: 197442 - RNA, 32 nt, Homo Sapiens
gggggaggcuuggccugaaacuaaccacugag

SEQ ID NO: 197443 - RNA, 32 nt, Homo Sapiens
ggcuugccgggcggccccaggcggcugggcac

SEQ ID NO: 197444 - RNA, 32 nt, Homo Sapiens
gggccgcgcucgccaggccgcggagccagagc

SEQ ID NO: 197445 - RNA, 32 nt, Homo Sapiens
gauaaugcuguaacuagaauuucacaaucagc

SEQ ID NO: 197446 - RNA, 32 nt, Homo Sapiens
uuacaaccacacgggagcugugaugagaguca

SEQ ID NO: 197447 - RNA, 32 nt, Homo Sapiens
auguguccagaaccccaccacugcuuaugguc

SEQ ID NO: 197448 - RNA, 32 nt, Homo Sapiens
cggcgcgugcgcagaucagggaucgcgauugc

SEQ ID NO: 197449 - RNA, 32 nt, Homo Sapiens
cugaccaguuuguaaagaaaaacaaaugguaa

SEQ ID NO: 197450 - RNA, 32 nt, Homo Sapiens
agggauggggaagggaggaaugucauuaaugu

SEQ ID NO: 197451 - RNA, 32 nt, Homo Sapiens
gcucugggggugcuuuugaugugcuagggaua

SEQ ID NO: 197452 - RNA, 32 nt, Homo Sapiens
ggagcauuuuuggucagcaugguugaugaacu

SEQ ID NO: 197453 - RNA, 32 nt, Homo Sapiens
acuauuaauagcucuuaauaagaucaaaauuu

SEQ ID NO: 197454 - RNA, 32 nt, Homo Sapiens
cgcccccuucuccgcgcgggacgcugcccgga

SEQ ID NO: 197455 - RNA, 29 nt, Homo Sapiens
acauugaugaagacuggauguggagauaa

SEQ ID NO: 197456 - RNA, 32 nt, Homo Sapiens
auaguuuauccacaaguccuagugaggaaaca

SEQ ID NO: 197457 - RNA, 32 nt, Homo Sapiens
auuuccuguugacgacucucacagcaacagua

SEQ ID NO: 197458 - RNA, 32 nt, Homo Sapiens
cugggaggccccacacgaaagacucuuaccau

SEQ ID NO: 197459 - RNA, 32 nt, Homo Sapiens
agaagcacaaugucuuuuuuauuuuuauuuuu

SEQ ID NO: 197460 - RNA, 32 nt, Homo Sapiens
aucuuccugaguaauuaaauggaccaacaaug

SEQ ID NO: 197461 - RNA, 32 nt, Homo Sapiens
cugaugaacuuggaagacaaguaaagcaaugg

SEQ ID NO: 197462 - RNA, 32 nt, Homo Sapiens
gugauacaaaaaugcauugaucaugaauagga

SEQ ID NO: 197463 - RNA, 32 nt, Homo Sapiens
caucacaaacuguguccaguuucucuguggug

SEQ ID NO: 197464 - RNA, 32 nt, Homo Sapiens
gggaagugcaggggguccugggcacauugcca

SEQ ID NO: 197465 - RNA, 32 nt, Homo Sapiens
guguaaugucauugcuuuugauuugcuuugug

SEQ ID NO: 197466 - RNA, 32 nt, Homo Sapiens
uaauuacgugaauaaugaaauguaaaauccgg

SEQ ID NO: 197467 - RNA, 32 nt, Homo Sapiens
cuggacucgccccugagcuuccaggucuguuu

SEQ ID NO: 197468 - RNA, 32 nt, Homo Sapiens
auauaacuuguccuuacguuaaacuuggaaca

SEQ ID NO: 197469 - RNA, 32 nt, Homo Sapiens
agaagaugacugaguucuagagaccccacaag

SEQ ID NO: 197470 - RNA, 32 nt, Homo Sapiens
auacuaaaauuauuuguguaucugaaauucaa

SEQ ID NO: 197471 - RNA, 32 nt, Homo Sapiens
auccacuuaaagaucaaaguauuauaugcugu

SEQ ID NO: 197472 - RNA, 32 nt, Homo Sapiens
gcagccagucucaggaccacaguggaaucuuu

SEQ ID NO: 197473 - RNA, 32 nt, Homo Sapiens
auugacauauuuuuauguaaaguuuuucuauu

SEQ ID NO: 197474 - RNA, 32 nt, Homo Sapiens
aggaugcacuggaggaagccggacccucacga

SEQ ID NO: 197475 - RNA, 32 nt, Homo Sapiens
uuacacaacaguuuguuaauucuucauucuug

SEQ ID NO: 197476 - RNA, 32 nt, Homo Sapiens
aauaagucaaggaaaccagaauuugacacacu

SEQ ID NO: 197477 - RNA, 32 nt, Homo Sapiens
uagaacucagagcugucauccuugauucagau

SEQ ID NO: 197478 - RNA, 31 nt, Homo Sapiens
uuuucauagugcucaauagguguaguagcaa

SEQ ID NO: 197479 - RNA, 32 nt, Homo Sapiens
gauucuucugccucggccuccugaguagcugg

SEQ ID NO: 197480 - RNA, 32 nt, Homo Sapiens
cugaggguaaauuuaaauguuuagccaaauuu

SEQ ID NO: 197481 - RNA, 32 nt, Homo Sapiens
ugccagaggcccggcccgccauucccagcccc

SEQ ID NO: 197482 - RNA, 32 nt, Homo Sapiens
uuagaggaguggagugcuuucuauguaaugaa

SEQ ID NO: 197483 - RNA, 32 nt, Homo Sapiens
uaggcuucuuugauuuucuuucagaagcaauu

SEQ ID NO: 197484 - RNA, 32 nt, Homo Sapiens
auuaguccaacuaucaucaucgaugugaauaa

SEQ ID NO: 197485 - RNA, 31 nt, Homo Sapiens
auaauggaaauaaaacaggauauugacauaa

SEQ ID NO: 197486 - RNA, 32 nt, Homo Sapiens
cucgcuccacccacccacgcugcugucaccug

SEQ ID NO: 197487 - RNA, 32 nt, Homo Sapiens
aaaagacaaaaauuggaguaacguagaaugcu

SEQ ID NO: 197488 - RNA, 32 nt, Homo Sapiens
auguagaccaugauuucuuccuccucuucagu

SEQ ID NO: 197489 - RNA, 32 nt, Homo Sapiens
agaaacaaacugaguuccacugaaauuaagag

SEQ ID NO: 197490 - RNA, 32 nt, Homo Sapiens
gucauuugucuauuauaguuuuacaacauacg

SEQ ID NO: 197491 - RNA, 32 nt, Homo Sapiens
ugaagaaaaugaacacacaaugaaauauucag

SEQ ID NO: 197492 - RNA, 32 nt, Homo Sapiens
aucauccugguuuaaaucuacucucacaugga

SEQ ID NO: 197493 - RNA, 32 nt, Homo Sapiens
cuugcagccaggugcaguggcucacaccugug

SEQ ID NO: 197494 - RNA, 32 nt, Homo Sapiens
uagaauauggaucgccagucuuuacaucgcac

SEQ ID NO: 197495 - RNA, 32 nt, Homo Sapiens
gccuggcuaauuuuuauauuuucaguagagac

SEQ ID NO: 197496 - RNA, 32 nt, Homo Sapiens
uggccaaaauaguggaaccccgucgcuacuaa

SEQ ID NO: 197497 - RNA, 32 nt, Homo Sapiens
cuggcuauuuuuguauuuuuaguagagauagg

SEQ ID NO: 197498 - RNA, 32 nt, Homo Sapiens
gcucuucguucccucuaaagggugugcacucu

SEQ ID NO: 197499 - RNA, 32 nt, Homo Sapiens
auggugcuuaaaacguuuggcuucuugaaugg

SEQ ID NO: 197500 - RNA, 32 nt, Homo Sapiens
ggcagucaggccuccccgcucugugcuaccug

SEQ ID NO: 197501 - RNA, 32 nt, Homo Sapiens
acuccugcuccuucucuuguccuuccaacaaa

SEQ ID NO: 197502 - RNA, 32 nt, Homo Sapiens
cccuuccugccagccccugccauuguagcguc

SEQ ID NO: 197503 - RNA, 29 nt, Homo Sapiens
gcccgagggaagauucuggacgagaccgu

SEQ ID NO: 197504 - RNA, 32 nt, Homo Sapiens
cccuuuggcucuucuuccuuuguacucuucag

SEQ ID NO: 197505 - RNA, 32 nt, Homo Sapiens
ucuggggaagguggugcucagagccuucccug

SEQ ID NO: 197506 - RNA, 32 nt, Homo Sapiens
auauuucuuucuuaguuguuggcacucuuagg

SEQ ID NO: 197507 - RNA, 32 nt, Homo Sapiens
ggcucucagagauaagguuuuuuacaugugua

SEQ ID NO: 197508 - RNA, 32 nt, Homo Sapiens
ucaauggcaaagaaaaaguaaaucaaagauga

SEQ ID NO: 197509 - RNA, 32 nt, Homo Sapiens
gaccuccucgcucuucagcaccuccuugaacu

SEQ ID NO: 197510 - RNA, 32 nt, Homo Sapiens
aaaacuauuugcacaugacagauuucuagaua

SEQ ID NO: 197511 - RNA, 32 nt, Homo Sapiens
ccccaucuacuaaaacaaaaccuuuguagacc

SEQ ID NO: 197512 - RNA, 32 nt, Homo Sapiens
caagugcuggaacauaguuguaggcugaggcu

SEQ ID NO: 197513 - RNA, 32 nt, Homo Sapiens
cccggacgcacugcgggaacaccuggagcgcc

SEQ ID NO: 197514 - RNA, 32 nt, Homo Sapiens
uaccauucucaaccuguauuggacagcacugc

SEQ ID NO: 197515 - RNA, 32 nt, Homo Sapiens
cuuuuuauaaagcucuuaauuguugugcagua

SEQ ID NO: 197516 - RNA, 32 nt, Homo Sapiens
uccacauuucaaaauauaaaauguaacaugac

SEQ ID NO: 197517 - RNA, 32 nt, Homo Sapiens
acuauaugucauuuuauuauacuccaucaauc

SEQ ID NO: 197518 - RNA, 32 nt, Homo Sapiens
cggcggcugacucgccuucucuccggggcugc

SEQ ID NO: 197519 - RNA, 32 nt, Homo Sapiens
acuaccgagagcuuggacuacacaauacagua

SEQ ID NO: 197520 - RNA, 32 nt, Homo Sapiens
uagacucuuguacauuucucccauaacuuuuu

SEQ ID NO: 197521 - RNA, 32 nt, Homo Sapiens
ugagacagauuugccagucagcccuuuugagu

SEQ ID NO: 197522 - RNA, 32 nt, Homo Sapiens
ccugucuguauauuaccuucauuuugcuugua

SEQ ID NO: 197523 - RNA, 32 nt, Homo Sapiens
acgucucucaggaugccugagccggggaagaa

SEQ ID NO: 197524 - RNA, 32 nt, Homo Sapiens
gcugaacugccagcgguuggucauugacgaga

SEQ ID NO: 197525 - RNA, 32 nt, Homo Sapiens
cuuacgucccagcagaggccuccacugugccc

SEQ ID NO: 197526 - RNA, 32 nt, Homo Sapiens
gccuguuuccccagcccugcaggucuuccuuc

SEQ ID NO: 197527 - RNA, 32 nt, Homo Sapiens
cuaccaucuuaacuucuaugguaaauggaaaa

SEQ ID NO: 197528 - RNA, 32 nt, Homo Sapiens
ggagcugaucuucugcagacaugccuggagcc

SEQ ID NO: 197529 - RNA, 32 nt, Homo Sapiens
gaauuggcuuggagucauaggcgaugagaggg

SEQ ID NO: 197530 - RNA, 32 nt, Homo Sapiens
uagccaggccccagggagccuccgcugggccc

SEQ ID NO: 197531 - RNA, 32 nt, Homo Sapiens
aaggccacagguuuuucugcagcuauuuucua

SEQ ID NO: 197532 - RNA, 32 nt, Homo Sapiens
uuagaaaaacuauuguguaacacauaaugaaa

SEQ ID NO: 197533 - RNA, 32 nt, Homo Sapiens
cuucagccuccgcgccaggcccggccccgccg

SEQ ID NO: 197534 - RNA, 32 nt, Homo Sapiens
uuuggauaaugcuacaauccauugcugcaaag

SEQ ID NO: 197535 - RNA, 32 nt, Homo Sapiens
aaauagagaugaugaaggaucgcuacaucacu

SEQ ID NO: 197536 - RNA, 32 nt, Homo Sapiens
auggacgucaaaggacucggacaccggacucg

SEQ ID NO: 197537 - RNA, 32 nt, Homo Sapiens
uugcuacagcuauuuuacagauggggaaaacu

SEQ ID NO: 197538 - RNA, 32 nt, Homo Sapiens
auacauugcuuuuuuauucuacauggguacca

SEQ ID NO: 197539 - RNA, 32 nt, Homo Sapiens
ccaugagccaugaucgugccacuacacuccag

SEQ ID NO: 197540 - RNA, 32 nt, Homo Sapiens
gcauccccucaagucagucaauuuccuuucug

SEQ ID NO: 197541 - RNA, 32 nt, Homo Sapiens
auggucacagcugcugccccagcucuggaacu

SEQ ID NO: 197542 - RNA, 32 nt, Homo Sapiens
ugaacgagcugcucgucuauggcauccacguc

SEQ ID NO: 197543 - RNA, 32 nt, Homo Sapiens
aaaggagaaaagacagcaucuagaacaaugcu

SEQ ID NO: 197544 - RNA, 32 nt, Homo Sapiens
guuugcuuuuuaaaaugaaacuagaugagucu

SEQ ID NO: 197545 - RNA, 32 nt, Homo Sapiens
aucucauucucucuccuuuuccaucuggacca

SEQ ID NO: 197546 - RNA, 32 nt, Homo Sapiens
uaauucauuuuuccucacuccaguaguaagaa

SEQ ID NO: 197547 - RNA, 32 nt, Homo Sapiens
gcgcuggggagggcgaggcggaggcggcaaaa

SEQ ID NO: 197548 - RNA, 32 nt, Homo Sapiens
aaaaaaacuugaaauuuaauugaaagaagaaa

SEQ ID NO: 197549 - RNA, 32 nt, Homo Sapiens
cuuuaccaggcaaggugcauccccucagcccu

SEQ ID NO: 197550 - RNA, 32 nt, Homo Sapiens
acaaguaacaguugaagaaaaaauggcaagag

SEQ ID NO: 197551 - RNA, 32 nt, Homo Sapiens
aagacuaugccauugggguaguuguguuucaa

SEQ ID NO: 197552 - RNA, 32 nt, Homo Sapiens
acugccaccaccccucuuuuuauccuggugug

SEQ ID NO: 197553 - RNA, 32 nt, Homo Sapiens
ucugcuggggacccuggccaccccccugcugc

SEQ ID NO: 197554 - RNA, 28 nt, Homo Sapiens
aguuccucagcuuccaggaugaucaacc

SEQ ID NO: 197555 - RNA, 32 nt, Homo Sapiens
cuacucggggucgggcucgggcuguaaguacc

SEQ ID NO: 197556 - RNA, 32 nt, Homo Sapiens
augagauugggaggaagaauccagaggugaag

SEQ ID NO: 197557 - RNA, 32 nt, Homo Sapiens
ugaaucuuagcagaagcuggaacuuuuuauac

SEQ ID NO: 197558 - RNA, 32 nt, Homo Sapiens
ggaguccagagagaagcagcagagagaggcgc

SEQ ID NO: 197559 - RNA, 32 nt, Homo Sapiens
agccaguuguguucagacacacacaucacagc

SEQ ID NO: 197560 - RNA, 32 nt, Homo Sapiens
cugauggcaucagaagaaaacagguuaacaau

SEQ ID NO: 197561 - RNA, 32 nt, Homo Sapiens
caccgcggggagaggggcgggcgcagcauggc

SEQ ID NO: 197562 - RNA, 32 nt, Homo Sapiens
uuuaaaacaaaguguguuacacuaaaaaccag

SEQ ID NO: 197563 - RNA, 32 nt, Homo Sapiens
gccagaugguacauguucccaccucaugggau

SEQ ID NO: 197564 - RNA, 32 nt, Homo Sapiens
aacaguaauuaauuuauauuugugaaaaaugc

SEQ ID NO: 197565 - RNA, 32 nt, Homo Sapiens
cuuugggaggcugaggcggguggaucacuagg

SEQ ID NO: 197566 - RNA, 32 nt, Homo Sapiens
auuguuucaauaagcauagaaaucuaaacaac

SEQ ID NO: 197567 - RNA, 32 nt, Homo Sapiens
uggaucucaggcucugccggcccgcggcccgc

SEQ ID NO: 197568 - RNA, 32 nt, Homo Sapiens
uuuuugcuuaggauugcacuggcuuugggggc

SEQ ID NO: 197569 - RNA, 32 nt, Homo Sapiens
acagaguuuugcucuugucacccaggcuggag

SEQ ID NO: 197570 - RNA, 32 nt, Homo Sapiens
agagaacuuagagguggagcaguuggauucug

SEQ ID NO: 197571 - RNA, 32 nt, Homo Sapiens
auuauaaugugauuuuugauaauugacuaaau

SEQ ID NO: 197572 - RNA, 32 nt, Homo Sapiens
gccuccacagauaucaaaagaaaccugaagag

SEQ ID NO: 197573 - RNA, 32 nt, Homo Sapiens
auugugacgcucucccugacuuggaagaaugg

SEQ ID NO: 197574 - RNA, 32 nt, Homo Sapiens
uuugcugggauuuagauauuuucaggcaccau

SEQ ID NO: 197575 - RNA, 32 nt, Homo Sapiens
cgcugccccgucugcuccucuaggcuggcccc

SEQ ID NO: 197576 - RNA, 32 nt, Homo Sapiens
gggaaaaggaaacacacgcaaaaacuauuuua

SEQ ID NO: 197577 - RNA, 32 nt, Homo Sapiens
caagagccugaagaaauugugaucacuucuuc

SEQ ID NO: 197578 - RNA, 32 nt, Homo Sapiens
aaaaaauauagguauugugaaauauuuugcua

SEQ ID NO: 197579 - RNA, 32 nt, Homo Sapiens
auaacagcuaaggggaccugggagaugauggc

SEQ ID NO: 197580 - RNA, 32 nt, Homo Sapiens
guuccgcguccccgccgccgggaggaggugcc

SEQ ID NO: 197581 - RNA, 32 nt, Homo Sapiens
cagugccggcccccggcccaguucagggacag

SEQ ID NO: 197582 - RNA, 32 nt, Homo Sapiens
gcagaguugggagaaggcaggguggggggugu

SEQ ID NO: 197583 - RNA, 26 nt, Homo Sapiens
cauggcgggcugcugcgccgcgcugg

SEQ ID NO: 197584 - RNA, 32 nt, Homo Sapiens
ucaacggugcugucucccuuucuuggagaugc

SEQ ID NO: 197585 - RNA, 32 nt, Homo Sapiens
ugucucaugauugacagggaaaaggaagguug

SEQ ID NO: 197586 - RNA, 32 nt, Homo Sapiens
ccuaagggagagaucaaguugagacagagaag

SEQ ID NO: 197587 - RNA, 32 nt, Homo Sapiens
guguauaugugcuugugcucaugugugugguc

SEQ ID NO: 197588 - RNA, 32 nt, Homo Sapiens
aggcucagccucagccuuccagugugcaucuu

SEQ ID NO: 197589 - RNA, 32 nt, Homo Sapiens
uguuuauggaaauucaauuaauuuuuggugcu

SEQ ID NO: 197590 - RNA, 32 nt, Homo Sapiens
ggccaggggggaggaaagaggacgcguguggg

SEQ ID NO: 197591 - RNA, 32 nt, Homo Sapiens
auggaguuucacucuugucacccaggcuggag

SEQ ID NO: 197592 - RNA, 32 nt, Homo Sapiens
caacgucaaggaauuaagcauaaaaaagauug

SEQ ID NO: 197593 - RNA, 32 nt, Homo Sapiens
aucguguggugcuaaucucugcacgagcgguu

SEQ ID NO: 197594 - RNA, 32 nt, Homo Sapiens
uuaguugauguuaugacuacuuuaaauuuuaa

SEQ ID NO: 197595 - RNA, 32 nt, Homo Sapiens
cacauuuuugauaccuaaauuaaugagcuaua

SEQ ID NO: 197596 - RNA, 32 nt, Homo Sapiens
gugauccauuauuguacauuuaguggauaaac

SEQ ID NO: 197597 - RNA, 32 nt, Homo Sapiens
ggcaugccacguccgcagccccggccuggcug

SEQ ID NO: 197598 - RNA, 32 nt, Homo Sapiens
uucuagcauuguugcccuucuuugucugucag

SEQ ID NO: 197599 - RNA, 32 nt, Homo Sapiens
aaaaggauucuuuuuucuuccuuucuguuucu

SEQ ID NO: 197600 - RNA, 32 nt, Homo Sapiens
uuucccaugagcacacuucuggggaaggaaaa

SEQ ID NO: 197601 - RNA, 32 nt, Homo Sapiens
uuggagucccuccaccaagauucaguagaaga

SEQ ID NO: 197602 - RNA, 32 nt, Homo Sapiens
ccuacuucauuuccuagcugcuaagauacaag

SEQ ID NO: 197603 - RNA, 29 nt, Homo Sapiens
ccguccuuggguaggguacgguggggugg

SEQ ID NO: 197604 - RNA, 32 nt, Homo Sapiens
guugugugauuuguguuauacugguuguaauu

SEQ ID NO: 197605 - RNA, 32 nt, Homo Sapiens
gcgcccuccaccccggcccccgaacugugccu

SEQ ID NO: 197606 - RNA, 32 nt, Homo Sapiens
aaccacuuaaaauuaucuuaaguaugcauaca

SEQ ID NO: 197607 - RNA, 32 nt, Homo Sapiens
ugcaccccaagcucccgacuccagguccccug

SEQ ID NO: 197608 - RNA, 32 nt, Homo Sapiens
ccuuauuauuuuuuaucuauguggaaaacaca

SEQ ID NO: 197609 - RNA, 32 nt, Homo Sapiens
ucagaaaauuauucuuuuuuuaugugauaaau

SEQ ID NO: 197610 - RNA, 32 nt, Homo Sapiens
caaaaacucaucuuguaauauuuucauuuuug

SEQ ID NO: 197611 - RNA, 32 nt, Homo Sapiens
aacugaugaaguucuucaaauugaugccgcuu

SEQ ID NO: 197612 - RNA, 32 nt, Homo Sapiens
gaucuagaugaccucuugaaauugucccaguu

SEQ ID NO: 197613 - RNA, 32 nt, Homo Sapiens
caucaccaagaggagcuccuuccugucggugc

SEQ ID NO: 197614 - RNA, 32 nt, Homo Sapiens
gaaccuguccucccuuucuccccaacuaugca

SEQ ID NO: 197615 - RNA, 32 nt, Homo Sapiens
gguucugcccuguucccccauccauccuacaa

SEQ ID NO: 197616 - RNA, 32 nt, Homo Sapiens
ucuucauguacaaaacugggggugcagagguu

SEQ ID NO: 197617 - RNA, 32 nt, Homo Sapiens
ccauuuuuuauucuuuggguccuuccauccca

SEQ ID NO: 197618 - RNA, 32 nt, Homo Sapiens
uuuuacaguaguaaguugguaaaccaugugcu

SEQ ID NO: 197619 - RNA, 32 nt, Homo Sapiens
uuauuuuaaggguuccagcaucccagagccaa

SEQ ID NO: 197620 - RNA, 32 nt, Homo Sapiens
acacuaaguauuucaagaagaggacuuuuaau

SEQ ID NO: 197621 - RNA, 32 nt, Homo Sapiens
cugcccagggacucugcuggggugugcagggc

SEQ ID NO: 197622 - RNA, 32 nt, Homo Sapiens
uuccacacuguguaugugaacagcuugggccc

SEQ ID NO: 197623 - RNA, 32 nt, Homo Sapiens
caacaaccaaaauuauuaagcucugugcgagg

SEQ ID NO: 197624 - RNA, 32 nt, Homo Sapiens
uucaauugcaauccaugaaauuacauuuagaa

SEQ ID NO: 197625 - RNA, 32 nt, Homo Sapiens
caagagcaucagccuucuagaaucggagcucc

SEQ ID NO: 197626 - RNA, 32 nt, Homo Sapiens
auugcauuaugaguauucuuccaggucaguaa

SEQ ID NO: 197627 - RNA, 32 nt, Homo Sapiens
ccuugccagggucagucagcuaauguuacugu

SEQ ID NO: 197628 - RNA, 32 nt, Homo Sapiens
ugguacauuuuucaacuuugaauaaagaauac

SEQ ID NO: 197629 - RNA, 32 nt, Homo Sapiens
ugggcugggaggagggaggcaggggagagccg

SEQ ID NO: 197630 - RNA, 32 nt, Homo Sapiens
uuagugauauaucucaaggagaugaaccaaua

SEQ ID NO: 197631 - RNA, 32 nt, Homo Sapiens
gcgugugugugcucucgcgcacgugcugucua

SEQ ID NO: 197632 - RNA, 32 nt, Homo Sapiens
auaugaaaacuuaugaccucuuccuuuaggag

SEQ ID NO: 197633 - RNA, 32 nt, Homo Sapiens
ggagcccggccgccgcccgccggcaugagcua

SEQ ID NO: 197634 - RNA, 32 nt, Homo Sapiens
gcugccaugcugccuccccaggcuggccccag

SEQ ID NO: 197635 - RNA, 32 nt, Homo Sapiens
gcucccgccccucccccgugcucgcggggaga

SEQ ID NO: 197636 - RNA, 32 nt, Homo Sapiens
aauaaauauaucuauauauauuuagcauaaga

SEQ ID NO: 197637 - RNA, 32 nt, Homo Sapiens
ucuacuaaaaauacgaaaaaauuagcugggca

SEQ ID NO: 197638 - RNA, 32 nt, Homo Sapiens
uuuaggaacaaacuguugaaauccauuggaag

SEQ ID NO: 197639 - RNA, 32 nt, Homo Sapiens
caacacccgccaguacugugacuuccaaagcc

SEQ ID NO: 197640 - RNA, 32 nt, Homo Sapiens
ggccggaucccggucuacccuuagcccagacu

SEQ ID NO: 197641 - RNA, 32 nt, Homo Sapiens
caggccacugcuagcuuucucauacucccaca

SEQ ID NO: 197642 - RNA, 32 nt, Homo Sapiens
ucgaugaugcugggaauucagaggaaugucuu

SEQ ID NO: 197643 - RNA, 32 nt, Homo Sapiens
uggucagggaggugacccguggucagcaggau

SEQ ID NO: 197644 - RNA, 32 nt, Homo Sapiens
uguaagagccccacugagggcucugcagcgga

SEQ ID NO: 197645 - RNA, 32 nt, Homo Sapiens
gcugauccuugacuccucuucaucuuagcccc

SEQ ID NO: 197646 - RNA, 32 nt, Homo Sapiens
ucgcgagugugcgccguccgccgcccgccgga

SEQ ID NO: 197647 - RNA, 32 nt, Homo Sapiens
gaugccagucagcuccugggguugcgccaggc

SEQ ID NO: 197648 - RNA, 32 nt, Homo Sapiens
caaaaaaaaacaaaacaaaaccaaguucccac

SEQ ID NO: 197649 - RNA, 32 nt, Homo Sapiens
gaauauccugcuucauuuuuuauuuguacccu

SEQ ID NO: 197650 - RNA, 32 nt, Homo Sapiens
agggaccuucaagccuggcagaugaaugacuc

SEQ ID NO: 197651 - RNA, 32 nt, Homo Sapiens
aggagaaaccaaaccugaagauaccuugaucu

SEQ ID NO: 197652 - RNA, 32 nt, Homo Sapiens
cggucccgagcucgcguccagguggccaggcc

SEQ ID NO: 197653 - RNA, 32 nt, Homo Sapiens
cugcccuguguggccuggcagggcgcaagacc

SEQ ID NO: 197654 - RNA, 32 nt, Homo Sapiens
ucuccggaagcaggcugguucgacugugaggu

SEQ ID NO: 197655 - RNA, 32 nt, Homo Sapiens
acggggcccacagauaacagggcaucuucucc

SEQ ID NO: 197656 - RNA, 32 nt, Homo Sapiens
aggcggcccaggggcggcacgcggcugcuccg

SEQ ID NO: 197657 - RNA, 32 nt, Homo Sapiens
gugucuguucuucauuucuauagccaaagcug

SEQ ID NO: 197658 - RNA, 32 nt, Homo Sapiens
acccccugcacaggcccggcccaagccaggcg

SEQ ID NO: 197659 - RNA, 32 nt, Homo Sapiens
aaaggccugagaccccacccugcccccaaacu

SEQ ID NO: 197660 - RNA, 32 nt, Homo Sapiens
gagccucccguccaggugcuucuggcuuucca

SEQ ID NO: 197661 - RNA, 32 nt, Homo Sapiens
gcaaaguuaacuacacagaggacccaggggaa

SEQ ID NO: 197662 - RNA, 32 nt, Homo Sapiens
uaacuugaaaauuuuuuaaccaagucgcuccu

SEQ ID NO: 197663 - RNA, 32 nt, Homo Sapiens
gggagcacucuggggcagccuggcucagguuu

SEQ ID NO: 197664 - RNA, 32 nt, Homo Sapiens
cgagggcaccucuggaggggagcgccugcagg

SEQ ID NO: 197665 - RNA, 32 nt, Homo Sapiens
uccccagugggcacaacacagcccuugguggg

SEQ ID NO: 197666 - RNA, 29 nt, Homo Sapiens
gaccagccugggcaacauggcaagacccc

SEQ ID NO: 197667 - RNA, 32 nt, Homo Sapiens
cauuuuuugucaaaauauuagaaacucucaca

SEQ ID NO: 197668 - RNA, 32 nt, Homo Sapiens
uacguuuuucuuuuucccaugagugaggauag

SEQ ID NO: 197669 - RNA, 32 nt, Homo Sapiens
ccuaaguagacccccuaugcccugccccagcc

SEQ ID NO: 197670 - RNA, 32 nt, Homo Sapiens
aagaaaaaaaauuucuacaguagucuuucuug

SEQ ID NO: 197671 - RNA, 32 nt, Homo Sapiens
agucccagaaacaaaacuaugcugacaaaaaa

SEQ ID NO: 197672 - RNA, 32 nt, Homo Sapiens
uuuccccagagccccagcaucccuugcucaca

SEQ ID NO: 197673 - RNA, 32 nt, Homo Sapiens
cccaugccaucccagcuccaagcuucccacuc

SEQ ID NO: 197674 - RNA, 32 nt, Homo Sapiens
gcugaacuggggagagaagagauacagagcua

SEQ ID NO: 197675 - RNA, 31 nt, Homo Sapiens
uggcugugggagggccugccccugcccccac

SEQ ID NO: 197676 - RNA, 32 nt, Homo Sapiens
cccaccugcugcucaccuccugcugugcggcc

SEQ ID NO: 197677 - RNA, 32 nt, Homo Sapiens
auuugaagacuuuuaaguuuccuuccagccca

SEQ ID NO: 197678 - RNA, 32 nt, Homo Sapiens
gggcagguguuucuuuccuguuugucuugugu

SEQ ID NO: 197679 - RNA, 32 nt, Homo Sapiens
uccaggccuagauguuacgugaucauggccuc

SEQ ID NO: 197680 - RNA, 27 nt, Homo Sapiens
gagcuuuuccucuucagcucuucaguu

SEQ ID NO: 197681 - RNA, 32 nt, Homo Sapiens
aaugccaauauggucuuguaacuuuccuguac

SEQ ID NO: 197682 - RNA, 32 nt, Homo Sapiens
uggaagcucuauucgcuguauuuuuucuuuaa

SEQ ID NO: 197683 - RNA, 27 nt, Homo Sapiens
gcgucagccuucuucgggccucggcag

SEQ ID NO: 197684 - RNA, 32 nt, Homo Sapiens
cauuaauucagaaaagauuaguaucauccuac

SEQ ID NO: 197685 - RNA, 32 nt, Homo Sapiens
gcccgcagccucggccggcguccacgcauugc

SEQ ID NO: 197686 - RNA, 32 nt, Homo Sapiens
agacaagcuguuugagcuuucaaacacacaug

SEQ ID NO: 197687 - RNA, 30 nt, Homo Sapiens
caccaaggcccugugccgcccgccucgccc

SEQ ID NO: 197688 - RNA, 32 nt, Homo Sapiens
uugggucuggucacggcagagcuuuuguggag

SEQ ID NO: 197689 - RNA, 32 nt, Homo Sapiens
gaggccccgcugugacaguuuccccgguguga

SEQ ID NO: 197690 - RNA, 32 nt, Homo Sapiens
accacgagcagaugggccuucuccgggaugag

SEQ ID NO: 197691 - RNA, 32 nt, Homo Sapiens
aggaaugaaguauuuauaaaccacugaaaggg

SEQ ID NO: 197692 - RNA, 32 nt, Homo Sapiens
gacaaagcgcagcuuucaguauuaucuccaaa

SEQ ID NO: 197693 - RNA, 32 nt, Homo Sapiens
cggggcgcccucggggaacgugcgggcaccau

SEQ ID NO: 197694 - RNA, 32 nt, Homo Sapiens
uagcuggcggucccgggugcugcugguuagug

SEQ ID NO: 197695 - RNA, 32 nt, Homo Sapiens
gccuccauucuccauuugauagguacagaaac

SEQ ID NO: 197696 - RNA, 32 nt, Homo Sapiens
uuuucuuggcaaaauauuucuauauuauuaau

SEQ ID NO: 197697 - RNA, 32 nt, Homo Sapiens
gaaguaguuugaaacucauuguuuccuugugg

SEQ ID NO: 197698 - RNA, 32 nt, Homo Sapiens
gauaaaacccucaucucccugggacaaagcac

SEQ ID NO: 197699 - RNA, 32 nt, Homo Sapiens
gggcgggcuucgcccgcggagcuugaccuagg

SEQ ID NO: 197700 - RNA, 32 nt, Homo Sapiens
gguuucccaucggcgcacccugcccggagcca

SEQ ID NO: 197701 - RNA, 32 nt, Homo Sapiens
agauggagaaacugaggcccaggccaaaaaau

SEQ ID NO: 197702 - RNA, 32 nt, Homo Sapiens
cuggaaacagagcaccuguuuucugacuuucu

SEQ ID NO: 197703 - RNA, 32 nt, Homo Sapiens
auggcugaaugggaaaggaaacugcccaaguu

SEQ ID NO: 197704 - RNA, 32 nt, Homo Sapiens
ucgaucugggcaagaggaccccugcccugaau

SEQ ID NO: 197705 - RNA, 32 nt, Homo Sapiens
acgaggucaggagaucgagaccaaccuggcua

SEQ ID NO: 197706 - RNA, 32 nt, Homo Sapiens
ugaagaggaagccugugagaaaaaagaccccg

SEQ ID NO: 197707 - RNA, 25 nt, Homo Sapiens
auggcuaugaguucuuuuuugauca

SEQ ID NO: 197708 - RNA, 31 nt, Homo Sapiens
ugcaggagggcggagcuggggccgcaaggcu

SEQ ID NO: 197709 - RNA, 32 nt, Homo Sapiens
cgcagggcagucgggagcugcugcuggcucug

SEQ ID NO: 197710 - RNA, 32 nt, Homo Sapiens
uacguucgagugcaccgugucggaggucgaga

SEQ ID NO: 197711 - RNA, 32 nt, Homo Sapiens
cccuguguauauucucuauuaagcuuuaauug

SEQ ID NO: 197712 - RNA, 32 nt, Homo Sapiens
aucucaguuucagcaacuuccaaaaaauguga

SEQ ID NO: 197713 - RNA, 32 nt, Homo Sapiens
uauacaccauuugggcuaucagagguaccccu

SEQ ID NO: 197714 - RNA, 28 nt, Homo Sapiens
cagcaguaagauuaauugaauucucuuu

SEQ ID NO: 197715 - RNA, 32 nt, Homo Sapiens
uguguguguguccgccacacaacgcgcugugu

SEQ ID NO: 197716 - RNA, 32 nt, Homo Sapiens
uaaugcuaacuagucucaguaccuguuuuuag

SEQ ID NO: 197717 - RNA, 32 nt, Homo Sapiens
uguuguaauauuaaaauuuaccauggaaauca

SEQ ID NO: 197718 - RNA, 32 nt, Homo Sapiens
cgacaauucuauuugaggaaaagauuuguuuu

SEQ ID NO: 197719 - RNA, 32 nt, Homo Sapiens
gcucgacagagcaugaggccccugccucuucu

SEQ ID NO: 197720 - RNA, 32 nt, Homo Sapiens
ugcuauaaaauauauaauauauacaaaugcag

SEQ ID NO: 197721 - RNA, 32 nt, Homo Sapiens
caacuuaaagaggguuguaaaaauauuaaaag

SEQ ID NO: 197722 - RNA, 32 nt, Homo Sapiens
uccucccgcugcuccugcucccggggcgagcg

SEQ ID NO: 197723 - RNA, 32 nt, Homo Sapiens
aucucuucuuucccuuuguagccgaucucuag

SEQ ID NO: 197724 - RNA, 32 nt, Homo Sapiens
cagcgccucgguccagccggcgcgcuccgggc

SEQ ID NO: 197725 - RNA, 32 nt, Homo Sapiens
uacaggcaugcaccaccacaccuggcuaguuu

SEQ ID NO: 197726 - RNA, 32 nt, Homo Sapiens
caggcucuuucugcagucauaccgcggaccca

SEQ ID NO: 197727 - RNA, 32 nt, Homo Sapiens
uuuuguuuucucuggaguacuuggacagaugu

SEQ ID NO: 197728 - RNA, 32 nt, Homo Sapiens
ccgguuucccuccuccuuuuaacuucaacuuu

SEQ ID NO: 197729 - RNA, 32 nt, Homo Sapiens
uccauuagcucuccaguugguuuaaugauugg

SEQ ID NO: 197730 - RNA, 32 nt, Homo Sapiens
ugcuccgggagccugaggaggguguggggaca

SEQ ID NO: 197731 - RNA, 32 nt, Homo Sapiens
agacaaggagagucaagaaacuacuugucaua

SEQ ID NO: 197732 - RNA, 32 nt, Homo Sapiens
ugagcucuuccacccgggcgggcccccggcau

SEQ ID NO: 197733 - RNA, 32 nt, Homo Sapiens
gaccagcaccucauacucagugaaggccugga

SEQ ID NO: 197734 - RNA, 32 nt, Homo Sapiens
uaguggcagccgggcgcgugaggagcggcagg

SEQ ID NO: 197735 - RNA, 32 nt, Homo Sapiens
uuggaugcuguaaauuuuugagaaagccaacu

SEQ ID NO: 197736 - RNA, 32 nt, Homo Sapiens
uagguaucagguuaaaacacuaaagucugcca

SEQ ID NO: 197737 - RNA, 32 nt, Homo Sapiens
agcuggcagauugugacaaucuccaggagaac

SEQ ID NO: 197738 - RNA, 32 nt, Homo Sapiens
cuuuuugagucacuuaaauuggacaccuuugg

SEQ ID NO: 197739 - RNA, 32 nt, Homo Sapiens
uuauauaaagacugccugcuaauaugaacaga

SEQ ID NO: 197740 - RNA, 32 nt, Homo Sapiens
ugaggagacacccgcaauccuccacgaucuca

SEQ ID NO: 197741 - RNA, 32 nt, Homo Sapiens
gggcucugcauucuuguugccucuucccuggc

SEQ ID NO: 197742 - RNA, 32 nt, Homo Sapiens
cacuucuuguucaaaaaucaggaaaagaaaag

SEQ ID NO: 197743 - RNA, 32 nt, Homo Sapiens
gacuuuccagccuccagaacuguucccauaga

SEQ ID NO: 197744 - RNA, 32 nt, Homo Sapiens
ugauucacauauaaagaugcagaugucagaaa

SEQ ID NO: 197745 - RNA, 32 nt, Homo Sapiens
auccuccauuuucuguccgaagcugacauucc

SEQ ID NO: 197746 - RNA, 32 nt, Homo Sapiens
aacccugcccaccucccuguaccagagcugug

SEQ ID NO: 197747 - RNA, 31 nt, Homo Sapiens
gcuuuucauuugauuacccugcuugaaauac

SEQ ID NO: 197748 - RNA, 32 nt, Homo Sapiens
ccuucaaaaaauaaauguacuucauuguauuc

SEQ ID NO: 197749 - RNA, 32 nt, Homo Sapiens
cuggcugccucccagcugggcuuguucucuga

SEQ ID NO: 197750 - RNA, 32 nt, Homo Sapiens
ggagccacauucaaaugugguugauaaucuug

SEQ ID NO: 197751 - RNA, 32 nt, Homo Sapiens
auuuuuugaaagacuuuuguauaaaguugagu

SEQ ID NO: 197752 - RNA, 32 nt, Homo Sapiens
gauuagucaaaauaacuuauugaugaaauaua

SEQ ID NO: 197753 - RNA, 32 nt, Homo Sapiens
cagcauacauaaaauauacauuaaagauuucu

SEQ ID NO: 197754 - RNA, 32 nt, Homo Sapiens
cagauaaggcuuuaggaugccucagugcuuau

SEQ ID NO: 197755 - RNA, 32 nt, Homo Sapiens
uaggaaaaaugcaucaaauguuaguucugcag

SEQ ID NO: 197756 - RNA, 32 nt, Homo Sapiens
cuuggugaaauguuguauaauguuguuuucau

SEQ ID NO: 197757 - RNA, 32 nt, Homo Sapiens
uguuaauguauuuaagcauuuuauaguuaugc

SEQ ID NO: 197758 - RNA, 32 nt, Homo Sapiens
ucugaggagcagcucuucccacggaacuuuuu

SEQ ID NO: 197759 - RNA, 32 nt, Homo Sapiens
accuuaaguauuuauucuuuguauuacacaag

SEQ ID NO: 197760 - RNA, 32 nt, Homo Sapiens
gagaaggaaaauuuuagcgugcucacugaccu

SEQ ID NO: 197761 - RNA, 32 nt, Homo Sapiens
gauucugggauuuuguuucccuccccccuccc

SEQ ID NO: 197762 - RNA, 32 nt, Homo Sapiens
ccgcgcggcccggcgccugagcgccuccguuc

SEQ ID NO: 197763 - RNA, 32 nt, Homo Sapiens
acaacugcaauguuuguuuuuauuuuuggcuu

SEQ ID NO: 197764 - RNA, 32 nt, Homo Sapiens
gccacccuugcccacuucuccuucgcuuuccu

SEQ ID NO: 197765 - RNA, 32 nt, Homo Sapiens
ucucuacccccucccaccugcuuacagaaugg

SEQ ID NO: 197766 - RNA, 32 nt, Homo Sapiens
guuuugcuugggaaacaagcuccuuccccggg

SEQ ID NO: 197767 - RNA, 32 nt, Homo Sapiens
ccucuaaguauuuucaugaaauucaccagcag

SEQ ID NO: 197768 - RNA, 32 nt, Homo Sapiens
gccuggaccuaccaccugcggaggccugcugc

SEQ ID NO: 197769 - RNA, 32 nt, Homo Sapiens
aaaggccuaagcauagacagcaugguuugaca

SEQ ID NO: 197770 - RNA, 32 nt, Homo Sapiens
ggucuccagaaagaggcuggauuucugggaug

SEQ ID NO: 197771 - RNA, 32 nt, Homo Sapiens
gguagagggcaggggccaagggggcgauccug

SEQ ID NO: 197772 - RNA, 32 nt, Homo Sapiens
cccggaggaggagaggcuccgcgcggggcucc

SEQ ID NO: 197773 - RNA, 32 nt, Homo Sapiens
auaacugaaacaacauaagacaauauaaucau

SEQ ID NO: 197774 - RNA, 32 nt, Homo Sapiens
ccuuaucuuuuauaaugucuuaugccuauacc

SEQ ID NO: 197775 - RNA, 32 nt, Homo Sapiens
gcacugcugggggcuccgggggcaaggguuca

SEQ ID NO: 197776 - RNA, 32 nt, Homo Sapiens
gccaggcuggggugggguguggcaggaggaca

SEQ ID NO: 197777 - RNA, 32 nt, Homo Sapiens
acccggcagacacuccccaacugcuugcucuc

SEQ ID NO: 197778 - RNA, 32 nt, Homo Sapiens
ucucuacauaucuuauuucuaauucucagaac

SEQ ID NO: 197779 - RNA, 32 nt, Homo Sapiens
gugcccuccuucugcuggcaucugagccaggu

SEQ ID NO: 197780 - RNA, 32 nt, Homo Sapiens
uguggggcagcccugaaaggacaggcuccugg

SEQ ID NO: 197781 - RNA, 32 nt, Homo Sapiens
gaguuuugccagccuggcaacagagcaagacu

SEQ ID NO: 197782 - RNA, 32 nt, Homo Sapiens
aacgcuccccaacagcuaccccugccccccac

SEQ ID NO: 197783 - RNA, 32 nt, Homo Sapiens
auuguccucagggucugagcacaucuggaagu

SEQ ID NO: 197784 - RNA, 32 nt, Homo Sapiens
aauucugguaacccgggaccacagggccuucc

SEQ ID NO: 197785 - RNA, 32 nt, Homo Sapiens
ccgcccgggugagcgcggggcugcugggugac

SEQ ID NO: 197786 - RNA, 32 nt, Homo Sapiens
auagaauguggccacuucacuaucuucuucaa

SEQ ID NO: 197787 - RNA, 32 nt, Homo Sapiens
uucaacuaugagaagagaaguggcagcaauaa

SEQ ID NO: 197788 - RNA, 32 nt, Homo Sapiens
aggcauuuguaguacacagaaaacaguaguuu

SEQ ID NO: 197789 - RNA, 32 nt, Homo Sapiens
ucuuuuaaauuaaaaaugaugcuauuaaauac

SEQ ID NO: 197790 - RNA, 32 nt, Homo Sapiens
acauuuguacuauuuuaaaugaauaaugaccu

SEQ ID NO: 197791 - RNA, 32 nt, Homo Sapiens
cuguggcuggagccagaguggcugggaugugg

SEQ ID NO: 197792 - RNA, 29 nt, Homo Sapiens
uaugucauauguaugauauauaugaaaua

SEQ ID NO: 197793 - RNA, 32 nt, Homo Sapiens
gggccccuagcacgcgccccagccccggagca

SEQ ID NO: 197794 - RNA, 32 nt, Homo Sapiens
cuuguucuaaucucuaauagguuaacguuaau

SEQ ID NO: 197795 - RNA, 32 nt, Homo Sapiens
agagagaaacugaguuccggacaaugcauuca

SEQ ID NO: 197796 - RNA, 32 nt, Homo Sapiens
cuagaaaaucauaucacaauuuuaccugcuca

SEQ ID NO: 197797 - RNA, 32 nt, Homo Sapiens
ggagauugagaccauccuggcuaacaugguga

SEQ ID NO: 197798 - RNA, 32 nt, Homo Sapiens
ugaccuuagcuaaaccauggcaauucauaaau

SEQ ID NO: 197799 - RNA, 32 nt, Homo Sapiens
cuuguuugacauucuauagguuaauuuucaaa

SEQ ID NO: 197800 - RNA, 32 nt, Homo Sapiens
gucucaacaacuucuguaaaaucuguaacaug

SEQ ID NO: 197801 - RNA, 32 nt, Homo Sapiens
aagcagauggcauccuagauguugacagcuuu

SEQ ID NO: 197802 - RNA, 32 nt, Homo Sapiens
uuuuuaauuuaaaaaagcaaauggaaaaugua

SEQ ID NO: 197803 - RNA, 32 nt, Homo Sapiens
caccaggcugguuuucuuguauuuuuaguaga

SEQ ID NO: 197804 - RNA, 32 nt, Homo Sapiens
ccagaacagucuccccaccuccccccaacacu

SEQ ID NO: 197805 - RNA, 32 nt, Homo Sapiens
agcucuuggccaucccucaccaaacuuuggca

SEQ ID NO: 197806 - RNA, 32 nt, Homo Sapiens
cacccaaaauagcaucuaucuagacaguaucc

SEQ ID NO: 197807 - RNA, 32 nt, Homo Sapiens
agcuaaaaaugaaugaaaaugguggcuaaaga

SEQ ID NO: 197808 - RNA, 32 nt, Homo Sapiens
auugucuuucuuuuucuuuuucuuuuuaaaug

SEQ ID NO: 197809 - RNA, 32 nt, Homo Sapiens
uccaucaccaaucuccacggcacuccugcugu

SEQ ID NO: 197810 - RNA, 32 nt, Homo Sapiens
aacggcugcgcaggugacucgguggccucaag

SEQ ID NO: 197811 - RNA, 32 nt, Homo Sapiens
aggcacauuauguauauaauuaguuuauauuu

SEQ ID NO: 197812 - RNA, 32 nt, Homo Sapiens
uugaucugucucccuuuaguuuugccggauuu

SEQ ID NO: 197813 - RNA, 32 nt, Homo Sapiens
auauguaugauauauaugaaauauucccauaa

SEQ ID NO: 197814 - RNA, 32 nt, Homo Sapiens
ccugggaaugaaggcuccauaaaccauggcau

SEQ ID NO: 197815 - RNA, 32 nt, Homo Sapiens
ggcaagaccccaccuccacgggcucuccuggg

SEQ ID NO: 197816 - RNA, 32 nt, Homo Sapiens
ggaauaaucaggcuuuuuaaaugauguaauuc

SEQ ID NO: 197817 - RNA, 32 nt, Homo Sapiens
agagacagugaaaguuuuaauaccuaagucau

SEQ ID NO: 197818 - RNA, 32 nt, Homo Sapiens
acccauucucccugagagcguauuacugcuuc

SEQ ID NO: 197819 - RNA, 32 nt, Homo Sapiens
ucaugcgggagguacgcgggcacgggaccuca

SEQ ID NO: 197820 - RNA, 31 nt, Homo Sapiens
aaaagauguuuguucuucagauaacuuuuga

SEQ ID NO: 197821 - RNA, 32 nt, Homo Sapiens
caguggaucaugaaaagugcuguuuuguccuu

SEQ ID NO: 197822 - RNA, 32 nt, Homo Sapiens
uccaaagacaaugggguuuucuuccugugauu

SEQ ID NO: 197823 - RNA, 32 nt, Homo Sapiens
cccaaguuuauaucaagcugacuuuguuccag

SEQ ID NO: 197824 - RNA, 32 nt, Homo Sapiens
ucaaaaauugggaaauacuaagcucuugaaga

SEQ ID NO: 197825 - RNA, 32 nt, Homo Sapiens
aggggugagccaccgcgcccagcccucucucu

SEQ ID NO: 197826 - RNA, 32 nt, Homo Sapiens
aaccugacaggccucuggagccaggcgacuuc

SEQ ID NO: 197827 - RNA, 32 nt, Homo Sapiens
aaacagacccauauuucuuuugaugcauaaau

SEQ ID NO: 197828 - RNA, 32 nt, Homo Sapiens
gauguggccccggaagcuggcccugcgugcca

SEQ ID NO: 197829 - RNA, 32 nt, Homo Sapiens
auuuuuaaaaauucauauacuaaugugccuua

SEQ ID NO: 197830 - RNA, 32 nt, Homo Sapiens
gcaugccgccccgcccuccccccaccuccacg

SEQ ID NO: 197831 - RNA, 32 nt, Homo Sapiens
acaugacuuguuaucgccccaauaacaauguu

SEQ ID NO: 197832 - RNA, 32 nt, Homo Sapiens
aaagccccaagccccaucuuccggcuccagcg

SEQ ID NO: 197833 - RNA, 32 nt, Homo Sapiens
augauuccaaggaaacacaguacuuuagagaa

SEQ ID NO: 197834 - RNA, 32 nt, Homo Sapiens
uuaacccuuuuuccguauaaauccauuuuuug

SEQ ID NO: 197835 - RNA, 31 nt, Homo Sapiens
uucauuuuaguauuuuaggugcuguuauguu

SEQ ID NO: 197836 - RNA, 32 nt, Homo Sapiens
aucagcuuggaaaaccacuuggaaagccaacg

SEQ ID NO: 197837 - RNA, 30 nt, Homo Sapiens
guaacugggccguugccgccguccgcgcuc

SEQ ID NO: 197838 - RNA, 32 nt, Homo Sapiens
gacuucggcccacuccggggccuccccucccu

SEQ ID NO: 197839 - RNA, 32 nt, Homo Sapiens
ggcagggcgggugaggacggggacggggcgug

SEQ ID NO: 197840 - RNA, 32 nt, Homo Sapiens
gcagguucccucucuggugcugcugcuugcaa

SEQ ID NO: 197841 - RNA, 32 nt, Homo Sapiens
uuguuacuucgcuguguuuuugaaauguuggg

SEQ ID NO: 197842 - RNA, 32 nt, Homo Sapiens
ggugaagggugcagcucugguucuuccagaga

SEQ ID NO: 197843 - RNA, 32 nt, Homo Sapiens
agguauaauguuuguaucauauuaauuuuauu

SEQ ID NO: 197844 - RNA, 32 nt, Homo Sapiens
ggcgcuuuuucugcccgcggugucucagauuc

SEQ ID NO: 197845 - RNA, 32 nt, Homo Sapiens
caaaagcuuuuugauguauaaaacuugauaaa

SEQ ID NO: 197846 - RNA, 32 nt, Homo Sapiens
cuaucuugacccccaaauccagugagcuccag

SEQ ID NO: 197847 - RNA, 32 nt, Homo Sapiens
caugccggcuucuccuucuaucucuccgcauc

SEQ ID NO: 197848 - RNA, 32 nt, Homo Sapiens
uucacagaagaagaagcagugacggggacaca

SEQ ID NO: 197849 - RNA, 32 nt, Homo Sapiens
uuuaacuauggcuuacagaaaucauugccugu

SEQ ID NO: 197850 - RNA, 32 nt, Homo Sapiens
uuucuuuuucuuccuuuuuuuaaaaaaaucua

SEQ ID NO: 197851 - RNA, 32 nt, Homo Sapiens
cugguuugaaagauuaugaugcauacaguuuu

SEQ ID NO: 197852 - RNA, 32 nt, Homo Sapiens
ccuggaaccccucccucugcgccgcagcugga

SEQ ID NO: 197853 - RNA, 32 nt, Homo Sapiens
ugaaaacaaaaauaugaguauuuugauaccuu

SEQ ID NO: 197854 - RNA, 32 nt, Homo Sapiens
cugucaggagauguaaaauuccuuucugaagu

SEQ ID NO: 197855 - RNA, 32 nt, Homo Sapiens
ggggcuggcuccaggccacgcgagccggagcu

SEQ ID NO: 197856 - RNA, 32 nt, Homo Sapiens
cucugugccuaugcucuccccagcggaaagug

SEQ ID NO: 197857 - RNA, 32 nt, Homo Sapiens
aacggcaagcugccacugugggcaaagcggcu

SEQ ID NO: 197858 - RNA, 32 nt, Homo Sapiens
cuuggguaacccuuuguucuugcaauaacaau

SEQ ID NO: 197859 - RNA, 32 nt, Homo Sapiens
gaguaccggcccggcgaagcgcgccgcugucg

SEQ ID NO: 197860 - RNA, 32 nt, Homo Sapiens
gcaaaaaucgaaguacaaaaccacaagacuaa

SEQ ID NO: 197861 - RNA, 32 nt, Homo Sapiens
gaacugaccaugcaggccccaggccccaugcu

SEQ ID NO: 197862 - RNA, 32 nt, Homo Sapiens
guauguggggaggacaggagugaauguucaca

SEQ ID NO: 197863 - RNA, 32 nt, Homo Sapiens
cuuuccccugucacucccacaucacacagaaa

SEQ ID NO: 197864 - RNA, 32 nt, Homo Sapiens
uggggacgcuauagcaauucguuugcuguccu

SEQ ID NO: 197865 - RNA, 31 nt, Homo Sapiens
ccccaguaggucaccaccugcaguucccugg

SEQ ID NO: 197866 - RNA, 32 nt, Homo Sapiens
ccagcgucagguauuccuaggaggaagcccag

SEQ ID NO: 197867 - RNA, 32 nt, Homo Sapiens
cagggccccuccccggccucaguuuccccaaa

SEQ ID NO: 197868 - RNA, 32 nt, Homo Sapiens
ggacaucugagcugucacugccgaaaacaggc

SEQ ID NO: 197869 - RNA, 32 nt, Homo Sapiens
gacugugcuggguugauuuaugcugggcagug

SEQ ID NO: 197870 - RNA, 32 nt, Homo Sapiens
cagcuguguuuaccuaacccagcccuuaauua

SEQ ID NO: 197871 - RNA, 30 nt, Homo Sapiens
ggguuggccguuccucuaaucuggacuugc

SEQ ID NO: 197872 - RNA, 32 nt, Homo Sapiens
gaccaccgccccaccaccuccugggaccacac

SEQ ID NO: 197873 - RNA, 32 nt, Homo Sapiens
ggaagggggagugugacacuuucuuuccaugu

SEQ ID NO: 197874 - RNA, 32 nt, Homo Sapiens
gaaaaggcaucaggcuccccaagccccacagc

SEQ ID NO: 197875 - RNA, 32 nt, Homo Sapiens
acccuuccugucagggcuuuucuggggcugcu

SEQ ID NO: 197876 - RNA, 32 nt, Homo Sapiens
ucagggcuugggguauuccaugugacuuguau

SEQ ID NO: 197877 - RNA, 32 nt, Homo Sapiens
uguuguuuuucugcacuuaaagaauucacaug

SEQ ID NO: 197878 - RNA, 32 nt, Homo Sapiens
ggagccccagacgcgggcgccacaugcccagc

SEQ ID NO: 197879 - RNA, 32 nt, Homo Sapiens
acacuuauauuuugauuuuacaugcugguuac

SEQ ID NO: 197880 - RNA, 32 nt, Homo Sapiens
acccuccgccccacccccuccuccccagaaca

SEQ ID NO: 197881 - RNA, 31 nt, Homo Sapiens
gggggugcagaggccacaggagucagcuugc

SEQ ID NO: 197882 - RNA, 32 nt, Homo Sapiens
ucucugacaugauccauagugaaauugccaga

SEQ ID NO: 197883 - RNA, 32 nt, Homo Sapiens
gggccuggccucccagcccccggagggcaggc

SEQ ID NO: 197884 - RNA, 32 nt, Homo Sapiens
uaucuugagucuaaaaaugaccucauauagua

SEQ ID NO: 197885 - RNA, 32 nt, Homo Sapiens
uuaaauuuuuaaaguuuuacuucuaaaaugag

SEQ ID NO: 197886 - RNA, 32 nt, Homo Sapiens
uuccuuguccccucggcuucucuucgcagcca

SEQ ID NO: 197887 - RNA, 32 nt, Homo Sapiens
uuuagaauauuuuuauauuacucucuugcuua

SEQ ID NO: 197888 - RNA, 32 nt, Homo Sapiens
guuucccauuugguuuuauauguguuaaauaa

SEQ ID NO: 197889 - RNA, 31 nt, Homo Sapiens
ccuuuaaggagaaagcuaagcucuggcugag

SEQ ID NO: 197890 - RNA, 32 nt, Homo Sapiens
ccagagggccccagucuucucugagcacauga

SEQ ID NO: 197891 - RNA, 32 nt, Homo Sapiens
gucauggggggccaucguguucuguguagacc

SEQ ID NO: 197892 - RNA, 32 nt, Homo Sapiens
gucccgcccuccccgcuccgagggccgcgcca

SEQ ID NO: 197893 - RNA, 32 nt, Homo Sapiens
gacccucugauccuggagggaccagagucuga

SEQ ID NO: 197894 - RNA, 32 nt, Homo Sapiens
uugaggggaaaguuuuacugugaaagucuucu

SEQ ID NO: 197895 - RNA, 32 nt, Homo Sapiens
ggccaggguggaacugggguugccagcaggac

SEQ ID NO: 197896 - RNA, 32 nt, Homo Sapiens
ugccacugccccccgaggcugcuagacguagg

SEQ ID NO: 197897 - RNA, 32 nt, Homo Sapiens
agugucucuguugggggacagaggaaccuggg

SEQ ID NO: 197898 - RNA, 32 nt, Homo Sapiens
caggugaggaggagcuacagaugauucagccu

SEQ ID NO: 197899 - RNA, 32 nt, Homo Sapiens
cagugaccgagcuccugcccacguggggaccc

SEQ ID NO: 197900 - RNA, 32 nt, Homo Sapiens
gcuugggucuucagcacgccaagccccccacc

SEQ ID NO: 197901 - RNA, 32 nt, Homo Sapiens
cuagaagaaaaaggagacaauaccauguuguu

SEQ ID NO: 197902 - RNA, 32 nt, Homo Sapiens
aagugaauauuuuuaggugcucuugaagcuuu

SEQ ID NO: 197903 - RNA, 32 nt, Homo Sapiens
cuauuuauuucugcuuuguucucagugaugua

SEQ ID NO: 197904 - RNA, 32 nt, Homo Sapiens
gcuugaugacuuucuuuuuguagcuggggcuu

SEQ ID NO: 197905 - RNA, 32 nt, Homo Sapiens
gcuuugguccuggcuuucggcccguaguugua

SEQ ID NO: 197906 - RNA, 32 nt, Homo Sapiens
aaguccuucugccagaaaucagcccucacagu

SEQ ID NO: 197907 - RNA, 32 nt, Homo Sapiens
cucgggaggaagauaaacgggggaucccgugu

SEQ ID NO: 197908 - RNA, 32 nt, Homo Sapiens
aggucacuuuauucuguaacucuccauucacu

SEQ ID NO: 197909 - RNA, 32 nt, Homo Sapiens
cucacaccuugcuacauauaagacaguuuaua

SEQ ID NO: 197910 - RNA, 32 nt, Homo Sapiens
cugggucucggugggccugugcaggucuggga

SEQ ID NO: 197911 - RNA, 32 nt, Homo Sapiens
augcagaaaagucacaggcaucuggaagugug

SEQ ID NO: 197912 - RNA, 29 nt, Homo Sapiens
ugucuugugacuuccaucccugcugaaug

SEQ ID NO: 197913 - RNA, 32 nt, Homo Sapiens
gacugucgcggcccgcgguggcgacggcggcc

SEQ ID NO: 197914 - RNA, 31 nt, Homo Sapiens
agcccccuggguuucugucuaacucgaaguc

SEQ ID NO: 197915 - RNA, 32 nt, Homo Sapiens
cacccgugcccuggggaugaugacucaguuca

SEQ ID NO: 197916 - RNA, 32 nt, Homo Sapiens
ugggaugggaggaggaggagaaggggggccuu

SEQ ID NO: 197917 - RNA, 32 nt, Homo Sapiens
uuucucuccaugagugcauugccaccucgcag

SEQ ID NO: 197918 - RNA, 32 nt, Homo Sapiens
ccaacagggcaacuggaaccccugccugaccu

SEQ ID NO: 197919 - RNA, 32 nt, Homo Sapiens
gaagcugauggcaacuuggccaauucuggcag

SEQ ID NO: 197920 - RNA, 32 nt, Homo Sapiens
caacuagaggauguuguauuuugcacaucaga

SEQ ID NO: 197921 - RNA, 32 nt, Homo Sapiens
gggggacgggagagggcagugcaaugggaagu

SEQ ID NO: 197922 - RNA, 32 nt, Homo Sapiens
gugccugcugucugcuguaaggcugcagccuc

SEQ ID NO: 197923 - RNA, 32 nt, Homo Sapiens
ggauuuggaaauaaccugaggaaaguauuaug

SEQ ID NO: 197924 - RNA, 32 nt, Homo Sapiens
ccaaccaggaggaguugggcuguauuuuucaa

SEQ ID NO: 197925 - RNA, 32 nt, Homo Sapiens
uugcacaaaauuuuuguauaaauuacuuucag

SEQ ID NO: 197926 - RNA, 32 nt, Homo Sapiens
gguccagccuccagaucuggcccgcacgaugc

SEQ ID NO: 197927 - RNA, 32 nt, Homo Sapiens
aucuuggggcuggcgagcauugaugaauugau

SEQ ID NO: 197928 - RNA, 32 nt, Homo Sapiens
uuuaauauguguguuuauuuuaugauauugcu

SEQ ID NO: 197929 - RNA, 32 nt, Homo Sapiens
cgggguguagagagggcggguccccggccucg

SEQ ID NO: 197930 - RNA, 32 nt, Homo Sapiens
cacgcacgcacacacacacacacacacacaca

SEQ ID NO: 197931 - RNA, 32 nt, Homo Sapiens
cagaagaaaaagauaucccagaagaaacugaa

SEQ ID NO: 197932 - RNA, 32 nt, Homo Sapiens
cauaaagaaaauaacuucugcuagguauuacu

SEQ ID NO: 197933 - RNA, 32 nt, Homo Sapiens
uuuuuuuuuuuuuuuuuuuuuaaggacugggu

SEQ ID NO: 197934 - RNA, 32 nt, Homo Sapiens
uuuccccacucuugcgucacagcacaaacuac

SEQ ID NO: 197935 - RNA, 32 nt, Homo Sapiens
cuaugagccuacugcuggcucagguuccaguc

SEQ ID NO: 197936 - RNA, 31 nt, Homo Sapiens
cuggcccggcacugugugcucagccaugagg

SEQ ID NO: 197937 - RNA, 32 nt, Homo Sapiens
aaaugaugcuauaaaugugggagugcugauau

SEQ ID NO: 197938 - RNA, 32 nt, Homo Sapiens
guacucuucauuugauguaacaaaaugcuauu

SEQ ID NO: 197939 - RNA, 32 nt, Homo Sapiens
aaagugggagcauaggcaaggcauugggaaca

SEQ ID NO: 197940 - RNA, 32 nt, Homo Sapiens
ugagacaauaaugaguuaaauauuuuauugga

SEQ ID NO: 197941 - RNA, 32 nt, Homo Sapiens
aagucugucuuucuauagaaauauugugcuua

SEQ ID NO: 197942 - RNA, 32 nt, Homo Sapiens
cuaaacucaguuccauuguuaagcaaggaaaa

SEQ ID NO: 197943 - RNA, 32 nt, Homo Sapiens
uacuugguauccaagaaaauaguucaacuaua

SEQ ID NO: 197944 - RNA, 32 nt, Homo Sapiens
gcaccgagggcggccucugacaugugugccgg

SEQ ID NO: 197945 - RNA, 32 nt, Homo Sapiens
uacacacacacacacacucacacacacacaca

SEQ ID NO: 197946 - RNA, 32 nt, Homo Sapiens
agagagcuggggaugaguuggcuuauaauagc

SEQ ID NO: 197947 - RNA, 32 nt, Homo Sapiens
uucacacacacacacacacacacacacacaca

SEQ ID NO: 197948 - RNA, 32 nt, Homo Sapiens
caggauagcuugagccauauuccuaguugccu

SEQ ID NO: 197949 - RNA, 32 nt, Homo Sapiens
guaauggaaaauuuagcaaauaccaaaacuca

SEQ ID NO: 197950 - RNA, 32 nt, Homo Sapiens
cccagcucuuuuucuuuuuuuugagacggagu

SEQ ID NO: 197951 - RNA, 32 nt, Homo Sapiens
cacccaccucgcgguccccaggaccacuggcu

SEQ ID NO: 197952 - RNA, 32 nt, Homo Sapiens
aaauaaauucauguaacccauagagaauccag

SEQ ID NO: 197953 - RNA, 32 nt, Homo Sapiens
agcaguuuaugcaacguaaaacguuuacaaac

SEQ ID NO: 197954 - RNA, 32 nt, Homo Sapiens
agccgcaucuucuuuugcaucgucagccaaac

SEQ ID NO: 197955 - RNA, 32 nt, Homo Sapiens
ugggagccgcacagcccuccccuccugcgcug

SEQ ID NO: 197956 - RNA, 32 nt, Homo Sapiens
cuuguccaaacacagauugacagaccccaucc

SEQ ID NO: 197957 - RNA, 32 nt, Homo Sapiens
cagccgcccggagcagggacugucauucaggg

SEQ ID NO: 197958 - RNA, 32 nt, Homo Sapiens
augguaccacaccagggccucagccuggcccc

SEQ ID NO: 197959 - RNA, 32 nt, Homo Sapiens
aauuuacuucgacuucuuaaauuuuuguaaaa

SEQ ID NO: 197960 - RNA, 32 nt, Homo Sapiens
ucugugccacaggggauuuaugcugcuuuaca

SEQ ID NO: 197961 - RNA, 32 nt, Homo Sapiens
ccucccccucuuucuucagaccuaaauaucug

SEQ ID NO: 197962 - RNA, 32 nt, Homo Sapiens
gaggagggcgacccggucgguccugcgacccu

SEQ ID NO: 197963 - RNA, 32 nt, Homo Sapiens
cucuuaaauuuuacuggcagguguaugguugu

SEQ ID NO: 197964 - RNA, 32 nt, Homo Sapiens
ccuacacuuaggacuuuugaacuuucagucau

SEQ ID NO: 197965 - RNA, 32 nt, Homo Sapiens
gccucugcgccggcugccacccgcgcucccuc

SEQ ID NO: 197966 - RNA, 32 nt, Homo Sapiens
agacggcccaggcuccuccuccgcccgggccg

SEQ ID NO: 197967 - RNA, 32 nt, Homo Sapiens
aaaguacugaauagauuaauccaaaacacuua

SEQ ID NO: 197968 - RNA, 32 nt, Homo Sapiens
aaagcaaguucccuccaccuucuguauuuaua

SEQ ID NO: 197969 - RNA, 32 nt, Homo Sapiens
uuaaugggagggugggugggccgcagacaggc

SEQ ID NO: 197970 - RNA, 29 nt, Homo Sapiens
uacaugaagccaauauauuuuuggauaag

SEQ ID NO: 197971 - RNA, 32 nt, Homo Sapiens
caguggcggcggaggagggggcggcgugggug

SEQ ID NO: 197972 - RNA, 31 nt, Homo Sapiens
ucugccaacaccaagcucugaguuaacugug

SEQ ID NO: 197973 - RNA, 32 nt, Homo Sapiens
agcacaauagagacccugucaauggagggaca

SEQ ID NO: 197974 - RNA, 32 nt, Homo Sapiens
cugucaaggggagaagaacagacucgggggug

SEQ ID NO: 197975 - RNA, 32 nt, Homo Sapiens
ucuuucugccgagccucggucccggcccccau

SEQ ID NO: 197976 - RNA, 31 nt, Homo Sapiens
ccuacucaggggagaaagacuacucuggguu

SEQ ID NO: 197977 - RNA, 32 nt, Homo Sapiens
uuucccaguagaauucuucucaucucuggcua

SEQ ID NO: 197978 - RNA, 32 nt, Homo Sapiens
uauauuacuaugcuaucuuuagcugaugauau

SEQ ID NO: 197979 - RNA, 32 nt, Homo Sapiens
auuuuacgacugcauuggcauaaagaauaaca

SEQ ID NO: 197980 - RNA, 32 nt, Homo Sapiens
cuuugguaucuaggaaucugcgacuucccacu

SEQ ID NO: 197981 - RNA, 32 nt, Homo Sapiens
ucugggucucgugguggagccaugaucugggc

SEQ ID NO: 197982 - RNA, 32 nt, Homo Sapiens
guggacacaauagcaaggaaauccccauugag

SEQ ID NO: 197983 - RNA, 30 nt, Homo Sapiens
acuguggauaaaauccagaacugugucaaa

SEQ ID NO: 197984 - RNA, 32 nt, Homo Sapiens
ccaggacggcgaggauggacgcacagaccugg

SEQ ID NO: 197985 - RNA, 32 nt, Homo Sapiens
cagccauggcugccaucuggcuucugcccugu

SEQ ID NO: 197986 - RNA, 32 nt, Homo Sapiens
gcuggcaggcuggagcugggaacccagcgagc

SEQ ID NO: 197987 - RNA, 32 nt, Homo Sapiens
uaauuucuauagaaauaucuaaggucauuaaa

SEQ ID NO: 197988 - RNA, 32 nt, Homo Sapiens
uaauauagaaaacugucccuuuccagguggga

SEQ ID NO: 197989 - RNA, 32 nt, Homo Sapiens
gucccuuccccucccuccccuggucccacaga

SEQ ID NO: 197990 - RNA, 32 nt, Homo Sapiens
ugggacauuuuucuaacaaaaauaaaugcaug

SEQ ID NO: 197991 - RNA, 32 nt, Homo Sapiens
gcccccuacagguggcagccccugcccacucc

SEQ ID NO: 197992 - RNA, 32 nt, Homo Sapiens
uuauuuugcucuucacucuccccagccaauaa

SEQ ID NO: 197993 - RNA, 32 nt, Homo Sapiens
gauuggcuucaccgccucuggaucagaugagc

SEQ ID NO: 197994 - RNA, 32 nt, Homo Sapiens
gggaaugugaauguaauauauguagaaaaaca

SEQ ID NO: 197995 - RNA, 32 nt, Homo Sapiens
uggcguuguuucuugaugugggaggggaggug

SEQ ID NO: 197996 - RNA, 32 nt, Homo Sapiens
acaguccacaucagaagaaucauguacuccag

SEQ ID NO: 197997 - RNA, 32 nt, Homo Sapiens
uuuaauaacaaggagauuucuuaguucaugua

SEQ ID NO: 197998 - RNA, 32 nt, Homo Sapiens
gguggggagcaaacaggccagcgguggagguc

SEQ ID NO: 197999 - RNA, 32 nt, Homo Sapiens
guuaagccacugaccaacuuuuucauagaaac

SEQ ID NO: 198000 - RNA, 32 nt, Homo Sapiens
gaagaaaaaaucaaugaacuugaagaguaaga

SEQ ID NO: 198001 - RNA, 32 nt, Homo Sapiens
uuucuuugauacuuguaauuuuaaauuucagc

SEQ ID NO: 198002 - RNA, 32 nt, Homo Sapiens
acugaagcuccagccuuuccuggugccccagu

SEQ ID NO: 198003 - RNA, 32 nt, Homo Sapiens
uugagcccacaggagcucccuuuuugaauugu

SEQ ID NO: 198004 - RNA, 32 nt, Homo Sapiens
uuucaugcaguuuguuugaaguuaaguggaau

SEQ ID NO: 198005 - RNA, 32 nt, Homo Sapiens
agggaggggcuuuguuuaaacagaaagcgagu

SEQ ID NO: 198006 - RNA, 32 nt, Homo Sapiens
guagaagcuaguauauuuuuuauauuuuugua

SEQ ID NO: 198007 - RNA, 32 nt, Homo Sapiens
uuuuauauauucuuuaaccuugcugagcuagu

SEQ ID NO: 198008 - RNA, 32 nt, Homo Sapiens
uuaaggcgcccauuucagaagaguuacagccg

SEQ ID NO: 198009 - RNA, 32 nt, Homo Sapiens
ccgcccuggagcucagcgcugaagagcuaccu

SEQ ID NO: 198010 - RNA, 32 nt, Homo Sapiens
uuguugaggucuuugcagauggcuguuucuuu

SEQ ID NO: 198011 - RNA, 32 nt, Homo Sapiens
gaaggcuguauauauugaacauuauuuuuguu

SEQ ID NO: 198012 - RNA, 32 nt, Homo Sapiens
aaacaaagggcaugaaaguaucugaaagcaau

SEQ ID NO: 198013 - RNA, 32 nt, Homo Sapiens
aauguuuuagaauaaacuccugcuuauaguau

SEQ ID NO: 198014 - RNA, 32 nt, Homo Sapiens
aaauuauuuugaugaauuaugauacaaucuac

SEQ ID NO: 198015 - RNA, 32 nt, Homo Sapiens
aggccucuuuuccugaagaaauccaauccuag

SEQ ID NO: 198016 - RNA, 32 nt, Homo Sapiens
cuacagccaggguggggacucagcggguauaa

SEQ ID NO: 198017 - RNA, 32 nt, Homo Sapiens
ccaccaaggaacuucuaguccuggaggucaau

SEQ ID NO: 198018 - RNA, 32 nt, Homo Sapiens
ggauccucaucuccaugggaagugucagcgug

SEQ ID NO: 198019 - RNA, 32 nt, Homo Sapiens
aaagcugaaacacugaaacagccauugccuug

SEQ ID NO: 198020 - RNA, 32 nt, Homo Sapiens
ugucagcuuguggcugggaaagagggaugugc

SEQ ID NO: 198021 - RNA, 32 nt, Homo Sapiens
ccggcucccccuccagccagagacagaggaug

SEQ ID NO: 198022 - RNA, 32 nt, Homo Sapiens
cucaugugcugugugcucuuugaaaggaauga

SEQ ID NO: 198023 - RNA, 32 nt, Homo Sapiens
auacaucauucacagacuuugguguuuuaagu

SEQ ID NO: 198024 - RNA, 32 nt, Homo Sapiens
aguaucuuucaaguguuuuucuuuuaauagaa

SEQ ID NO: 198025 - RNA, 32 nt, Homo Sapiens
gucaccaguuuggcaccccuccccuuaugccu

SEQ ID NO: 198026 - RNA, 32 nt, Homo Sapiens
accaaaaaguaggggaggggcugggucugcaa

SEQ ID NO: 198027 - RNA, 32 nt, Homo Sapiens
uuuugucaaaugcuuuuucuucaucuaaugag

SEQ ID NO: 198028 - RNA, 32 nt, Homo Sapiens
gcugagucugaggaguccgcggcggccugggg

SEQ ID NO: 198029 - RNA, 32 nt, Homo Sapiens
uccuuuucucuugugucccuacucauugaaac

SEQ ID NO: 198030 - RNA, 32 nt, Homo Sapiens
ggagggcgcgcggcgccggagacauguccagg

SEQ ID NO: 198031 - RNA, 32 nt, Homo Sapiens
ggccgggugcacaggcccgagggaagcacagg

SEQ ID NO: 198032 - RNA, 32 nt, Homo Sapiens
aagggccaguguauaaagauuauaccagcauu

SEQ ID NO: 198033 - RNA, 32 nt, Homo Sapiens
ugguaugggagccaggaguccuggcaucauua

SEQ ID NO: 198034 - RNA, 32 nt, Homo Sapiens
cagaggcagcguguuugagcugcuggugcggu

SEQ ID NO: 198035 - RNA, 32 nt, Homo Sapiens
agugucuguauauccuauggucuucuccaucc

SEQ ID NO: 198036 - RNA, 32 nt, Homo Sapiens
uccacaagaacaauucaagaaacuaguaagaa

SEQ ID NO: 198037 - RNA, 32 nt, Homo Sapiens
cagcuuccuucucuccuuuuaccugagagcac

SEQ ID NO: 198038 - RNA, 32 nt, Homo Sapiens
aaccuuguggguggaaauauuccucugagaau

SEQ ID NO: 198039 - RNA, 32 nt, Homo Sapiens
auuugggcaguuuauuuaauucuuauuuaaau

SEQ ID NO: 198040 - RNA, 31 nt, Homo Sapiens
auucauuuaauucaaaugccaaauaguuuac

SEQ ID NO: 198041 - RNA, 32 nt, Homo Sapiens
cugggcaggaccaaggcuaggcuuuuuuauuu

SEQ ID NO: 198042 - RNA, 32 nt, Homo Sapiens
aucccccuuggguauucuuuggcauuuacugg

SEQ ID NO: 198043 - RNA, 32 nt, Homo Sapiens
cagcgucguggcgggcgccuguggucccugug

SEQ ID NO: 198044 - RNA, 32 nt, Homo Sapiens
uauuuauuaaaauuauuauucuagacuuacaa

SEQ ID NO: 198045 - RNA, 32 nt, Homo Sapiens
aaaguacaugccaaccuauauagugcuagaua

SEQ ID NO: 198046 - RNA, 32 nt, Homo Sapiens
gcaucagccagacccuguugugggcguuguca

SEQ ID NO: 198047 - RNA, 32 nt, Homo Sapiens
uggcguggccacacugcugcuccagcugccug

SEQ ID NO: 198048 - RNA, 32 nt, Homo Sapiens
gggagcacaacacuggcaaugccuugcuuucc

SEQ ID NO: 198049 - RNA, 32 nt, Homo Sapiens
aacuccugaaaaagagggucuaucuugccaca

SEQ ID NO: 198050 - RNA, 31 nt, Homo Sapiens
uauaaagaagagguuuaauuggcucacgguu

SEQ ID NO: 198051 - RNA, 32 nt, Homo Sapiens
agcuacucaucucucccuuccauguguuucuu

SEQ ID NO: 198052 - RNA, 32 nt, Homo Sapiens
ccggccgcuacuccggccccaggaugcagaau

SEQ ID NO: 198053 - RNA, 32 nt, Homo Sapiens
auuauuaguguauuuugagucuguaaaaauaa

SEQ ID NO: 198054 - RNA, 32 nt, Homo Sapiens
cgccuguaaucccagcacuuugggagccccag

SEQ ID NO: 198055 - RNA, 32 nt, Homo Sapiens
gcaaacaauuuaauguuuuaagcacuagaaac

SEQ ID NO: 198056 - RNA, 32 nt, Homo Sapiens
gcaauuguacauauuucuuucuagagaacucu

SEQ ID NO: 198057 - RNA, 29 nt, Homo Sapiens
ggcaauggaaaacaguuaucggcugcagg

SEQ ID NO: 198058 - RNA, 32 nt, Homo Sapiens
uagaauggaaaguuaaauauuuuugcagugug

SEQ ID NO: 198059 - RNA, 32 nt, Homo Sapiens
accgagcauaguuuccucuccaacuccucuuu

SEQ ID NO: 198060 - RNA, 32 nt, Homo Sapiens
gaggacggccccaucuuucuugccacagauug

SEQ ID NO: 198061 - RNA, 32 nt, Homo Sapiens
cgucuguacuaauaauacaaaaauuagcuggg

SEQ ID NO: 198062 - RNA, 32 nt, Homo Sapiens
aguauagagaugaagagaaaacuuuuucuuua

SEQ ID NO: 198063 - RNA, 32 nt, Homo Sapiens
gaauguguauuucuuugucucuuucuuucuug

SEQ ID NO: 198064 - RNA, 32 nt, Homo Sapiens
cuauauuuacuuuuuaaaugcauaauuuuccc

SEQ ID NO: 198065 - RNA, 32 nt, Homo Sapiens
auaguacaucagaaaacacaagcuggagauaa

SEQ ID NO: 198066 - RNA, 32 nt, Homo Sapiens
gucaggaggaggagcaccauuggggcggggua

SEQ ID NO: 198067 - RNA, 29 nt, Homo Sapiens
guucugcuguguuucaggaucagggggac

SEQ ID NO: 198068 - RNA, 32 nt, Homo Sapiens
agucuagaacauccuuaaaugucuaacaacaa

SEQ ID NO: 198069 - RNA, 32 nt, Homo Sapiens
aagcaaggggccugaggccucaguggggguag

SEQ ID NO: 198070 - RNA, 32 nt, Homo Sapiens
acgcaaggcgccgugggggcugccgggacggg

SEQ ID NO: 198071 - RNA, 32 nt, Homo Sapiens
agaguguuagauuuuucuuaauuccacuaaag

SEQ ID NO: 198072 - RNA, 32 nt, Homo Sapiens
uuuuccaaaaauaugaaaacuuguccuaugag

SEQ ID NO: 198073 - RNA, 32 nt, Homo Sapiens
acuguauacuucugauuaaauucaauaaaaga

SEQ ID NO: 198074 - RNA, 32 nt, Homo Sapiens
uggugccugugcuauaagcagcagauuuugug

SEQ ID NO: 198075 - RNA, 32 nt, Homo Sapiens
auaacaaaugucacugucuuaagggacagugu

SEQ ID NO: 198076 - RNA, 32 nt, Homo Sapiens
ugguucccgcggcggcgccgggcgccugagcc

SEQ ID NO: 198077 - RNA, 32 nt, Homo Sapiens
accccagcaguggccccuccccauccccuccc

SEQ ID NO: 198078 - RNA, 32 nt, Homo Sapiens
ggcuuucauuucuuauuaaccaaauuaaccuu

SEQ ID NO: 198079 - RNA, 32 nt, Homo Sapiens
agccggagggcaugcaugugggcugcuguuag

SEQ ID NO: 198080 - RNA, 32 nt, Homo Sapiens
aucauuagaaaguuugacaaaaauacuugaau

SEQ ID NO: 198081 - RNA, 32 nt, Homo Sapiens
gcguuuugcggucaucagacuuccucaucuga

SEQ ID NO: 198082 - RNA, 32 nt, Homo Sapiens
ggcuggucuugaacuucugaccucaagugaua

SEQ ID NO: 198083 - RNA, 32 nt, Homo Sapiens
gccuggugcccauccuggcccuugaguguagc

SEQ ID NO: 198084 - RNA, 32 nt, Homo Sapiens
agacggggccagcucggcggccugcugguccu

SEQ ID NO: 198085 - RNA, 32 nt, Homo Sapiens
gaagaagaagagguggauguaacugguccaau

SEQ ID NO: 198086 - RNA, 32 nt, Homo Sapiens
uuucauagcuuauuucaguuuaauuuuaaagu

SEQ ID NO: 198087 - RNA, 32 nt, Homo Sapiens
uuaaaaguuccgaguugaaacugaaggcucuc

SEQ ID NO: 198088 - RNA, 32 nt, Homo Sapiens
uaaccauaaagucauuuauauuugauuuugaa

SEQ ID NO: 198089 - RNA, 32 nt, Homo Sapiens
guuuucucuauucuuucauuucccccuucccu

SEQ ID NO: 198090 - RNA, 32 nt, Homo Sapiens
auguuucuuuugcaauuggaauaaucacuugg

SEQ ID NO: 198091 - RNA, 32 nt, Homo Sapiens
cgacgucgacuaccgcgccgcccgcgauggga

SEQ ID NO: 198092 - RNA, 32 nt, Homo Sapiens
cagggcucccacgaggccauccuccucuucuu

SEQ ID NO: 198093 - RNA, 32 nt, Homo Sapiens
ccuuugccucaaugugaagagcuuagaaagag

SEQ ID NO: 198094 - RNA, 32 nt, Homo Sapiens
caguggaccacgggaaaucauguuggaccaag

SEQ ID NO: 198095 - RNA, 32 nt, Homo Sapiens
gagcccuucugucucuggucuuucucuuugac

SEQ ID NO: 198096 - RNA, 32 nt, Homo Sapiens
ggcugaccaaaaugugcuuucuacugugaguc

SEQ ID NO: 198097 - RNA, 31 nt, Homo Sapiens
gacaugaaauaaaagguuaugacuguuaucg

SEQ ID NO: 198098 - RNA, 32 nt, Homo Sapiens
uagaaauauuccacuggggaugagggaaaacc

SEQ ID NO: 198099 - RNA, 32 nt, Homo Sapiens
ugugaagcaaaguuuugccagauguuaaacuu

SEQ ID NO: 198100 - RNA, 32 nt, Homo Sapiens
uucuugcuugugcuucccacucuccccgacuu

SEQ ID NO: 198101 - RNA, 32 nt, Homo Sapiens
agccugcucccucccugcccugguuucaacuu

SEQ ID NO: 198102 - RNA, 32 nt, Homo Sapiens
ggcugcugugucugcugcgcacgcccccuccc

SEQ ID NO: 198103 - RNA, 32 nt, Homo Sapiens
ugcggugccgggagggcggcugggcaggcggc

SEQ ID NO: 198104 - RNA, 32 nt, Homo Sapiens
uaguacaaggugcuuuaaugggauagaacuaa

SEQ ID NO: 198105 - RNA, 32 nt, Homo Sapiens
uuauaaagggccagaaauaagaugugugguuc

SEQ ID NO: 198106 - RNA, 30 nt, Homo Sapiens
augaaaacaaaauaaauauguuuuuggaug

SEQ ID NO: 198107 - RNA, 32 nt, Homo Sapiens
aagcuuuuucuuuucaauaaaugaauuuuauu

SEQ ID NO: 198108 - RNA, 32 nt, Homo Sapiens
gauugugcauuuuuuucuuuuuuuuuuuaaac

SEQ ID NO: 198109 - RNA, 32 nt, Homo Sapiens
gcuucagucuagaguaauuugggauaggaauu

SEQ ID NO: 198110 - RNA, 32 nt, Homo Sapiens
uuuaguccacccaguuuguagcauauuguuau

SEQ ID NO: 198111 - RNA, 32 nt, Homo Sapiens
guuaaaguggcaguuuuuucugcaaucuauug

SEQ ID NO: 198112 - RNA, 32 nt, Homo Sapiens
gagcgccuccggggcgggcgggcgggaccaga

SEQ ID NO: 198113 - RNA, 32 nt, Homo Sapiens
agaacauguauauaaacaugcuugcauuauau

SEQ ID NO: 198114 - RNA, 32 nt, Homo Sapiens
ccugaacagucaaggugaggcaauugauugag

SEQ ID NO: 198115 - RNA, 32 nt, Homo Sapiens
ggggguuagguguagggaaaagaaagacagau

SEQ ID NO: 198116 - RNA, 32 nt, Homo Sapiens
ccucgcggaccgugugugaaugccugcucugu

SEQ ID NO: 198117 - RNA, 32 nt, Homo Sapiens
gggcggggacagagacggagaccucugccuau

SEQ ID NO: 198118 - RNA, 31 nt, Homo Sapiens
ccuggccaggcaggguuuccccgcgcguuuc

SEQ ID NO: 198119 - RNA, 32 nt, Homo Sapiens
ccucccggcagagccccuuggcgcgugacaca

SEQ ID NO: 198120 - RNA, 32 nt, Homo Sapiens
cauuguguuuuauugcuucucuaaaauaugaa

SEQ ID NO: 198121 - RNA, 32 nt, Homo Sapiens
gagcuggccggggcucacgguguuugacccgu

SEQ ID NO: 198122 - RNA, 32 nt, Homo Sapiens
cccuagcccgcggcguggggcagugcgggcug

SEQ ID NO: 198123 - RNA, 32 nt, Homo Sapiens
ggcugugcugaauauuugauaaugagacugau

SEQ ID NO: 198124 - RNA, 32 nt, Homo Sapiens
ggggaggggaugcacacauuagaguaggaaag

SEQ ID NO: 198125 - RNA, 32 nt, Homo Sapiens
uuugaacaccgacugggaagauggggcuuagg

SEQ ID NO: 198126 - RNA, 32 nt, Homo Sapiens
gccugcacggccgcuuccggcugcugggcaac

SEQ ID NO: 198127 - RNA, 32 nt, Homo Sapiens
aggaggagaacccuccuggggaccuggacacc

SEQ ID NO: 198128 - RNA, 32 nt, Homo Sapiens
cugagggccccggcgcugcggccacgcccauc

SEQ ID NO: 198129 - RNA, 27 nt, Homo Sapiens
uggcaucccuuggucagccccuccugg

SEQ ID NO: 198130 - RNA, 32 nt, Homo Sapiens
uacuggugugagcccccacaccuggccgagcc

SEQ ID NO: 198131 - RNA, 32 nt, Homo Sapiens
agcaugugugccuguuucaucuaaucaagcag

SEQ ID NO: 198132 - RNA, 32 nt, Homo Sapiens
cgcagggaguggccgccuccuccugcgcgcac

SEQ ID NO: 198133 - RNA, 32 nt, Homo Sapiens
gcccagacauccugggguccuggucugucaga

SEQ ID NO: 198134 - RNA, 32 nt, Homo Sapiens
auuaucacauucacuuuauuaauuuauuauua

SEQ ID NO: 198135 - RNA, 32 nt, Homo Sapiens
accccaaaggcccuggcccagcccagccagac

SEQ ID NO: 198136 - RNA, 32 nt, Homo Sapiens
auucuggaaauuuuauuagcaaugcaggguga

SEQ ID NO: 198137 - RNA, 32 nt, Homo Sapiens
ugccagacguaccccccgaguacuacuccugc

SEQ ID NO: 198138 - RNA, 32 nt, Homo Sapiens
ugcacagucccggggguggccuuggaggcugu

SEQ ID NO: 198139 - RNA, 32 nt, Homo Sapiens
agagaaaaugaaaugaauucaaacuguccggc

SEQ ID NO: 198140 - RNA, 32 nt, Homo Sapiens
cauuucacaagaaaaacaaaaucagaccagga

SEQ ID NO: 198141 - RNA, 32 nt, Homo Sapiens
auguugcuaaguaauucccaauagaaagcugc

SEQ ID NO: 198142 - RNA, 32 nt, Homo Sapiens
aguucucagacauaaugggaacacgaaccggu

SEQ ID NO: 198143 - RNA, 29 nt, Homo Sapiens
gaacaugagccuccuccucuccuucuacc

SEQ ID NO: 198144 - RNA, 32 nt, Homo Sapiens
agggcccaguguucuugauagaagacccuucu

SEQ ID NO: 198145 - RNA, 32 nt, Homo Sapiens
ggguaagcgcgucuagggcgcugcgcggcgca

SEQ ID NO: 198146 - RNA, 32 nt, Homo Sapiens
cugugcagggucccagacccaggccccagagc

SEQ ID NO: 198147 - RNA, 32 nt, Homo Sapiens
cuuguauuuuugguagagacgggguuucaaca

SEQ ID NO: 198148 - RNA, 32 nt, Homo Sapiens
ugcugguagagggaggcaggaacuuguccugu

SEQ ID NO: 198149 - RNA, 32 nt, Homo Sapiens
aggggugugcgcgcuugagccggagcggggcu

SEQ ID NO: 198150 - RNA, 32 nt, Homo Sapiens
ccaucguggccauuguggccaagcgcccgcau

SEQ ID NO: 198151 - RNA, 32 nt, Homo Sapiens
ugaugaugucauuguaaauaaucauuccucau

SEQ ID NO: 198152 - RNA, 28 nt, Homo Sapiens
gcauuuuauggcuuaaggaugacggccu

SEQ ID NO: 198153 - RNA, 32 nt, Homo Sapiens
cuaagaagcagcagcaguucauuaucuaguag

SEQ ID NO: 198154 - RNA, 28 nt, Homo Sapiens
ggaaagugagguucgaggaugacguagg

SEQ ID NO: 198155 - RNA, 32 nt, Homo Sapiens
cugggaccgcaaugcccugagaacgcagccgg

SEQ ID NO: 198156 - RNA, 32 nt, Homo Sapiens
cgccucccauucuucucuacccagaaccuguc

SEQ ID NO: 198157 - RNA, 32 nt, Homo Sapiens
gcugugcuccugcucccagcagcccucucuua

SEQ ID NO: 198158 - RNA, 32 nt, Homo Sapiens
ccagucagaacaguugagcaguuuacaaauua

SEQ ID NO: 198159 - RNA, 32 nt, Homo Sapiens
cccucucccagcauugcugugcauggcucccu

SEQ ID NO: 198160 - RNA, 32 nt, Homo Sapiens
agcugccaaaggcuaugggaacccaccucuug

SEQ ID NO: 198161 - RNA, 32 nt, Homo Sapiens
agacggcgcgccagcccgucuugcuugcucgc

SEQ ID NO: 198162 - RNA, 32 nt, Homo Sapiens
cuguucacuuuuucuuuuuuuuuuuuugguaa

SEQ ID NO: 198163 - RNA, 32 nt, Homo Sapiens
cagcuagcugucuguaaagggccagauggcaa

SEQ ID NO: 198164 - RNA, 32 nt, Homo Sapiens
aauaaaaauaaucacucccuaugaucuaguua

SEQ ID NO: 198165 - RNA, 32 nt, Homo Sapiens
ccaaguggcucccacacccuguuuuacaaaaa

SEQ ID NO: 198166 - RNA, 32 nt, Homo Sapiens
agagauaaagaauaauaauuaaccaaccuugu

SEQ ID NO: 198167 - RNA, 32 nt, Homo Sapiens
uacugcaaaaauacuguauagaacuuauuugu

SEQ ID NO: 198168 - RNA, 32 nt, Homo Sapiens
ucugugaguuuaggagucuuaagauccucaca

SEQ ID NO: 198169 - RNA, 32 nt, Homo Sapiens
gaaaucauauuaauaaaauguauuguacauag

SEQ ID NO: 198170 - RNA, 32 nt, Homo Sapiens
uccggcuugucauggaagcuggcagggaccac

SEQ ID NO: 198171 - RNA, 32 nt, Homo Sapiens
uuaaaauuucuauuguugucuauugguaaugu

SEQ ID NO: 198172 - RNA, 32 nt, Homo Sapiens
caggauggccucaagugcccagcccuccugga

SEQ ID NO: 198173 - RNA, 32 nt, Homo Sapiens
aauucauggucaacugcuuuaaaaauuaagau

SEQ ID NO: 198174 - RNA, 32 nt, Homo Sapiens
uuuauaagaggaugaagugauauggugagcag

SEQ ID NO: 198175 - RNA, 32 nt, Homo Sapiens
cgucuuccagcgcaaggggcugcccgaccagg

SEQ ID NO: 198176 - RNA, 32 nt, Homo Sapiens
caccacccacccagcaguaccguccgcaccgc

SEQ ID NO: 198177 - RNA, 32 nt, Homo Sapiens
ugagacacuccagaugaagguugguguggggc

SEQ ID NO: 198178 - RNA, 32 nt, Homo Sapiens
gcugccuuugugaauggcucacuacacagcca

SEQ ID NO: 198179 - RNA, 32 nt, Homo Sapiens
cccacaggcaggagggaucuggaccggcggcu

SEQ ID NO: 198180 - RNA, 32 nt, Homo Sapiens
uuggccccaagccgaugcaucacaggaugaau

SEQ ID NO: 198181 - RNA, 32 nt, Homo Sapiens
cuaugggccaagcauguacaaauucuauuaau

SEQ ID NO: 198182 - RNA, 32 nt, Homo Sapiens
ggaagcgucugguuggcagaagagggaaggca

SEQ ID NO: 198183 - RNA, 32 nt, Homo Sapiens
ccgggagucgcugccgagugggcgcucaguuu

SEQ ID NO: 198184 - RNA, 32 nt, Homo Sapiens
cggccugaugccugaucugaugcucuguuacc

SEQ ID NO: 198185 - RNA, 32 nt, Homo Sapiens
ugcucuguaguucaaaucuguuagcuuuguga

SEQ ID NO: 198186 - RNA, 32 nt, Homo Sapiens
cccggcggcggcagccucuccucuggccgaug

SEQ ID NO: 198187 - RNA, 32 nt, Homo Sapiens
aucccgccccccacccugccccaugaaacuug

SEQ ID NO: 198188 - RNA, 32 nt, Homo Sapiens
aagcacuaaaauuccaggcaacacuuuguauu

SEQ ID NO: 198189 - RNA, 32 nt, Homo Sapiens
ugaaagaucacaucaaggaaaagggacaggag

SEQ ID NO: 198190 - RNA, 32 nt, Homo Sapiens
cugccagcuuccaagagggcggcuucacugug

SEQ ID NO: 198191 - RNA, 32 nt, Homo Sapiens
cuucaggcucugcccaggaacucgcaccugug

SEQ ID NO: 198192 - RNA, 32 nt, Homo Sapiens
gcucggcucccucuuccccuucuaaaccaagg

SEQ ID NO: 198193 - RNA, 32 nt, Homo Sapiens
cuucauuuacguaaaaggaauaaaauaagcaa

SEQ ID NO: 198194 - RNA, 32 nt, Homo Sapiens
cuguuugagcccaacacuuuaauuuauucuuu

SEQ ID NO: 198195 - RNA, 32 nt, Homo Sapiens
gagggcugcccggcugcccacagaggugcugu

SEQ ID NO: 198196 - RNA, 32 nt, Homo Sapiens
ugugugaggagcugcuggcuugcagugcgcgu

SEQ ID NO: 198197 - RNA, 32 nt, Homo Sapiens
ggccucgcgggccgugucuccggcaucaugug

SEQ ID NO: 198198 - RNA, 32 nt, Homo Sapiens
acuguccggccgcggcgcuggcuuaagccaug

SEQ ID NO: 198199 - RNA, 32 nt, Homo Sapiens
acccgcaucucgccgcgccgccgagcagccag

SEQ ID NO: 198200 - RNA, 32 nt, Homo Sapiens
caccuucuggaaagguagguuugcuguggagg

SEQ ID NO: 198201 - RNA, 32 nt, Homo Sapiens
uaauucaaaccuugauaugccuggacacugaa

SEQ ID NO: 198202 - RNA, 32 nt, Homo Sapiens
gacuggccacgcgggggcaguggaggcacagg

SEQ ID NO: 198203 - RNA, 32 nt, Homo Sapiens
cggcuccgcucccgcgucugcccgcgcuccag

SEQ ID NO: 198204 - RNA, 32 nt, Homo Sapiens
uguugaaaaaauacacuggugcucuuugaagu

SEQ ID NO: 198205 - RNA, 32 nt, Homo Sapiens
ggcaggaagggccagccuucaccaucgcgugg

SEQ ID NO: 198206 - RNA, 32 nt, Homo Sapiens
ggaaaaacagagcugguagacuugaagaggag

SEQ ID NO: 198207 - RNA, 32 nt, Homo Sapiens
aauuuaaaaaauaccuuuuaagcuaguugauc

SEQ ID NO: 198208 - RNA, 32 nt, Homo Sapiens
agauuuggugccugugagcucugauuguagga

SEQ ID NO: 198209 - RNA, 32 nt, Homo Sapiens
cccguggaugcacaacuuuggcaacaucugua

SEQ ID NO: 198210 - RNA, 32 nt, Homo Sapiens
agcagcccaagccucaggauggacaagaggaa

SEQ ID NO: 198211 - RNA, 32 nt, Homo Sapiens
agaggcccacugaguuggagucaucaucucua

SEQ ID NO: 198212 - RNA, 32 nt, Homo Sapiens
aguaacucccagcagaguucuacuaaaucuca

SEQ ID NO: 198213 - RNA, 32 nt, Homo Sapiens
uuuagcccacugacauccauuuaggacuucug

SEQ ID NO: 198214 - RNA, 32 nt, Homo Sapiens
auuuauucacaaaugagaaguaggcacaaagu

SEQ ID NO: 198215 - RNA, 32 nt, Homo Sapiens
uuggggcacagcgagguacugcagcuuccucc

SEQ ID NO: 198216 - RNA, 32 nt, Homo Sapiens
gcuccaaacugggugacauggugagaccuugu

SEQ ID NO: 198217 - RNA, 32 nt, Homo Sapiens
agggcugccuccaagaggaaccucugauuuau

SEQ ID NO: 198218 - RNA, 32 nt, Homo Sapiens
cgagucgugaggacgcgccgcggaggcuguuc

SEQ ID NO: 198219 - RNA, 32 nt, Homo Sapiens
uaaauagaauccaagucaauugugacugcaau

SEQ ID NO: 198220 - RNA, 32 nt, Homo Sapiens
ggugugcagcgggugcgggugccgcuuaaaca

SEQ ID NO: 198221 - RNA, 32 nt, Homo Sapiens
acauggaaaagacuucuguggacauaauucug

SEQ ID NO: 198222 - RNA, 32 nt, Homo Sapiens
aagauauaaacuauaacuguccguuacuuuug

SEQ ID NO: 198223 - RNA, 32 nt, Homo Sapiens
uucaccugccccagccccacccacccuggccc

SEQ ID NO: 198224 - RNA, 32 nt, Homo Sapiens
caggggucaaucuaacaaaacccuaacguuga

SEQ ID NO: 198225 - RNA, 32 nt, Homo Sapiens
acccacacucuuaaaaaucaugccguaauguc

SEQ ID NO: 198226 - RNA, 32 nt, Homo Sapiens
aauugaacguacccugagcccggagccugcaa

SEQ ID NO: 198227 - RNA, 32 nt, Homo Sapiens
gggcggcggggacuccgagagccccggagaga

SEQ ID NO: 198228 - RNA, 32 nt, Homo Sapiens
cuggaagacacuuuauagauguggaugucacc

SEQ ID NO: 198229 - RNA, 32 nt, Homo Sapiens
gcagcugugggaaggaaccugccuggggccac

SEQ ID NO: 198230 - RNA, 32 nt, Homo Sapiens
accgccgccgccgccgccuccuccuccucagc

SEQ ID NO: 198231 - RNA, 31 nt, Homo Sapiens
cauuccuucaucucuuugccaaguuguuuuc

SEQ ID NO: 198232 - RNA, 32 nt, Homo Sapiens
aacaugauucaguaugacaaacuuuuuugagc

SEQ ID NO: 198233 - RNA, 32 nt, Homo Sapiens
caucuggcugaaggcagccugauacccuuacc

SEQ ID NO: 198234 - RNA, 32 nt, Homo Sapiens
gggauuguuaauaugauucagggguaauggac

SEQ ID NO: 198235 - RNA, 32 nt, Homo Sapiens
uugugagauugugcccgcccuucugcuuuaau

SEQ ID NO: 198236 - RNA, 32 nt, Homo Sapiens
uucccucccuccccucaauacccucaguacug

SEQ ID NO: 198237 - RNA, 32 nt, Homo Sapiens
auuuuccuauuauaugaaauguaucuuuuggu

SEQ ID NO: 198238 - RNA, 32 nt, Homo Sapiens
ccauaauagaaagaauggagaacuauuaacca

SEQ ID NO: 198239 - RNA, 32 nt, Homo Sapiens
cugguggugggaagagggacccaauggacaaa

SEQ ID NO: 198240 - RNA, 32 nt, Homo Sapiens
cgcgccugcccucgcagcggcgcucggccgca

SEQ ID NO: 198241 - RNA, 32 nt, Homo Sapiens
ccuggcgggccugggggcgcuacggugggaga

SEQ ID NO: 198242 - RNA, 32 nt, Homo Sapiens
cacaucacaccugugacggaagcacuucugga

SEQ ID NO: 198243 - RNA, 32 nt, Homo Sapiens
agguucuccuuccccagucaccaguugcucga

SEQ ID NO: 198244 - RNA, 32 nt, Homo Sapiens
cugcuaacugcccuucucuccucccucucauc

SEQ ID NO: 198245 - RNA, 32 nt, Homo Sapiens
ccgggggugggagggucuggcucucagucacc

SEQ ID NO: 198246 - RNA, 32 nt, Homo Sapiens
cacgcucggcuccagcggccaagagccggaga

SEQ ID NO: 198247 - RNA, 32 nt, Homo Sapiens
uauauuaaauguuuguaucuaagguacugucu

SEQ ID NO: 198248 - RNA, 32 nt, Homo Sapiens
gaucuccuccuccuuuccagcagugagcccca

SEQ ID NO: 198249 - RNA, 32 nt, Homo Sapiens
cagcagaccccugcaugcaguuguguaaggac

SEQ ID NO: 198250 - RNA, 32 nt, Homo Sapiens
cuuggaugagaggcaggcgcuucagagaagcu

SEQ ID NO: 198251 - RNA, 32 nt, Homo Sapiens
auauuuuagauauauugguucaaauaaaauac

SEQ ID NO: 198252 - RNA, 32 nt, Homo Sapiens
caggccagcugagaccuacaggaccguggagc

SEQ ID NO: 198253 - RNA, 32 nt, Homo Sapiens
gcaaauauauguguuauuauauacuccacgaa

SEQ ID NO: 198254 - RNA, 32 nt, Homo Sapiens
agccccuuucuaugacuccaucuggauuuggc

SEQ ID NO: 198255 - RNA, 32 nt, Homo Sapiens
cggagcugcuguguccucuggaucugcucguc

SEQ ID NO: 198256 - RNA, 32 nt, Homo Sapiens
aggguggcauggucccagccaagccccuucuu

SEQ ID NO: 198257 - RNA, 32 nt, Homo Sapiens
uuggagaggagaacaaugacuuugugcugaca

SEQ ID NO: 198258 - RNA, 32 nt, Homo Sapiens
agggaaauuaggguucaguuuaucacuggaca

SEQ ID NO: 198259 - RNA, 30 nt, Homo Sapiens
cccgggcgcgcgcggcgaaucugcggcugc

SEQ ID NO: 198260 - RNA, 32 nt, Homo Sapiens
aacacacccccuccuucucugcuuuggguccc

SEQ ID NO: 198261 - RNA, 32 nt, Homo Sapiens
agcacugucuggacucuagaagaugcucugau

SEQ ID NO: 198262 - RNA, 32 nt, Homo Sapiens
ugaggucccccuccuuccggccaauggcagaa

SEQ ID NO: 198263 - RNA, 32 nt, Homo Sapiens
aacauccuggcguuaaaacgucuugcauucua

SEQ ID NO: 198264 - RNA, 32 nt, Homo Sapiens
gagugaggaaaagaaggaaagggcagacuggu

SEQ ID NO: 198265 - RNA, 32 nt, Homo Sapiens
uguguaaagcuguucaaguuauuugauguuua

SEQ ID NO: 198266 - RNA, 32 nt, Homo Sapiens
cugugacggggcagcccucucugucccucggu

SEQ ID NO: 198267 - RNA, 32 nt, Homo Sapiens
ggagccgacgcgccgcgcggguaccuagccau

SEQ ID NO: 198268 - RNA, 32 nt, Homo Sapiens
uccgcugcgccucagcugugggggccucaggc

SEQ ID NO: 198269 - RNA, 32 nt, Homo Sapiens
cagugaucugaucccgggaucccggcuccaag

SEQ ID NO: 198270 - RNA, 32 nt, Homo Sapiens
ugacaucuauuauguaucaguuuuaaaaauua

SEQ ID NO: 198271 - RNA, 32 nt, Homo Sapiens
ugccauuaauaaauuauaugaacuacuauaca

SEQ ID NO: 198272 - RNA, 32 nt, Homo Sapiens
uaaguacuaugaaugaauuugguugguuuugg

SEQ ID NO: 198273 - RNA, 32 nt, Homo Sapiens
acucuguguucccucuuuuacagcuggacaga

SEQ ID NO: 198274 - RNA, 32 nt, Homo Sapiens
acuggcaauacaaaggaaaauaugguacagga

SEQ ID NO: 198275 - RNA, 32 nt, Homo Sapiens
uuauuaauauaauuauuuuuaaauucugaaaa

SEQ ID NO: 198276 - RNA, 32 nt, Homo Sapiens
ggcuggucaaugcauccuacaccaaacugcag

SEQ ID NO: 198277 - RNA, 32 nt, Homo Sapiens
aucuuguguaaucuaaucauggaaguaacauu

SEQ ID NO: 198278 - RNA, 32 nt, Homo Sapiens
gcucugucagacucaccuuugucuucucugug

SEQ ID NO: 198279 - RNA, 32 nt, Homo Sapiens
uacugucuugguuagcucuauauaguaggggc

SEQ ID NO: 198280 - RNA, 32 nt, Homo Sapiens
ggagagaugauuaggaagaaaaugucuuaaac

SEQ ID NO: 198281 - RNA, 32 nt, Homo Sapiens
ucuguacccagcuggguagcagccagcaaagg

SEQ ID NO: 198282 - RNA, 32 nt, Homo Sapiens
gaggagccaggugccugaaacuuccuccaccu

SEQ ID NO: 198283 - RNA, 32 nt, Homo Sapiens
cuggcccagaaagccagacauuguguggaagg

SEQ ID NO: 198284 - RNA, 32 nt, Homo Sapiens
uagauaaugcaaacaacauguuucauauacaa

SEQ ID NO: 198285 - RNA, 32 nt, Homo Sapiens
uaguuauuuuauucuuuacauccuucacccca

SEQ ID NO: 198286 - RNA, 32 nt, Homo Sapiens
ugggaaaauggcacaaggcuucuccugaaccu

SEQ ID NO: 198287 - RNA, 32 nt, Homo Sapiens
guagaccaaagguauaucagcuuauucagaau

SEQ ID NO: 198288 - RNA, 32 nt, Homo Sapiens
ccagccuccucuucuuuuuaaauagaaaccuu

SEQ ID NO: 198289 - RNA, 32 nt, Homo Sapiens
guuccccaaagaaggucuggaacuccccuccc

SEQ ID NO: 198290 - RNA, 32 nt, Homo Sapiens
aguagaaccaguucagccuccuugaagcugcc

SEQ ID NO: 198291 - RNA, 32 nt, Homo Sapiens
caaacugaaaacaguucauguguggggggcaa

SEQ ID NO: 198292 - RNA, 32 nt, Homo Sapiens
gugugcccgccuugcgcaugcguguucccugg

SEQ ID NO: 198293 - RNA, 32 nt, Homo Sapiens
uuuguugucauucagcucuuuggcuuugccug

SEQ ID NO: 198294 - RNA, 32 nt, Homo Sapiens
cccgccgcccucuuuguccccccgcugcagga

SEQ ID NO: 198295 - RNA, 32 nt, Homo Sapiens
ccagccaugauuaacccugcuaauucagauac

SEQ ID NO: 198296 - RNA, 28 nt, Homo Sapiens
gcagugagggcgaggaggaugacgaggg

SEQ ID NO: 198297 - RNA, 32 nt, Homo Sapiens
cccuccccuccagcccccagugggacaucaaa

SEQ ID NO: 198298 - RNA, 32 nt, Homo Sapiens
ggguauguuggcaauaaugaugcauuggaugc

SEQ ID NO: 198299 - RNA, 32 nt, Homo Sapiens
ucucuguuuuguguuauaauuguuauguuuug

SEQ ID NO: 198300 - RNA, 32 nt, Homo Sapiens
cugucgccugugcgccugcgcgcggcgccgag

SEQ ID NO: 198301 - RNA, 32 nt, Homo Sapiens
ccugaggaagcaguguggacaggcugacacgu

SEQ ID NO: 198302 - RNA, 32 nt, Homo Sapiens
aacaaaugaguaguggcuucaguguccuugcg

SEQ ID NO: 198303 - RNA, 32 nt, Homo Sapiens
gaggcugaacaaacucaggaccugguggccca

SEQ ID NO: 198304 - RNA, 32 nt, Homo Sapiens
aggggcgcggcucgcagcggcgggugcagggg

SEQ ID NO: 198305 - RNA, 32 nt, Homo Sapiens
ugauuuuuuuuuucuuuuuacuguugaacuua

SEQ ID NO: 198306 - RNA, 32 nt, Homo Sapiens
uguccacuuuucccuuucaugcugcauauuaa

SEQ ID NO: 198307 - RNA, 32 nt, Homo Sapiens
gccgaucugaugcugagaggagacaagcuugu

SEQ ID NO: 198308 - RNA, 32 nt, Homo Sapiens
cuauuuaagacuuuguuuuuuauauugcugau

SEQ ID NO: 198309 - RNA, 32 nt, Homo Sapiens
agaaauuuuucaccacuggacaaaaggagcug

SEQ ID NO: 198310 - RNA, 32 nt, Homo Sapiens
gaccucccucucuccuuccagucacagauuau

SEQ ID NO: 198311 - RNA, 32 nt, Homo Sapiens
auaaaaguauuuuuauuagauuucauaugcau

SEQ ID NO: 198312 - RNA, 32 nt, Homo Sapiens
aguacuggaguacuuuuucagguuaucuuauu

SEQ ID NO: 198313 - RNA, 32 nt, Homo Sapiens
uuuugugggggagaggggaggggacgggcagg

SEQ ID NO: 198314 - RNA, 32 nt, Homo Sapiens
ugaagcgcacgcgggcgggcggcaggaugggc

SEQ ID NO: 198315 - RNA, 32 nt, Homo Sapiens
ggguccucacagauuuuuccugaacaacccca

SEQ ID NO: 198316 - RNA, 32 nt, Homo Sapiens
ugcccugaaaacagugggaccgugaagucagc

SEQ ID NO: 198317 - RNA, 32 nt, Homo Sapiens
auugccuugaagaauuguauuaaugaagaggu

SEQ ID NO: 198318 - RNA, 32 nt, Homo Sapiens
gguuccuuuacuauugggugaaucauuaggua

SEQ ID NO: 198319 - RNA, 32 nt, Homo Sapiens
guucauuuuuaaacauuuuuaucucuucaagu

SEQ ID NO: 198320 - RNA, 32 nt, Homo Sapiens
agcccccgcccggcugugccccgucugaccaa

SEQ ID NO: 198321 - RNA, 32 nt, Homo Sapiens
aguuaauuggaauucaggaaucuuauauucuu

SEQ ID NO: 198322 - RNA, 32 nt, Homo Sapiens
gcgugaggcagagggagacguuaguccagcau

SEQ ID NO: 198323 - RNA, 32 nt, Homo Sapiens
gacgggccggaucugugcuguuguguaagagc

SEQ ID NO: 198324 - RNA, 32 nt, Homo Sapiens
uugcagugccuucuuccuuguuuaccuguggg

SEQ ID NO: 198325 - RNA, 32 nt, Homo Sapiens
caaauauacaaauaaguguguuuguguaugug

SEQ ID NO: 198326 - RNA, 32 nt, Homo Sapiens
cucugucguccucgcagccgggacccucucau

SEQ ID NO: 198327 - RNA, 32 nt, Homo Sapiens
uaaguaaugugugaauccauuagaauguugag

SEQ ID NO: 198328 - RNA, 28 nt, Homo Sapiens
augcgaagguggcggccgagguggcggc

SEQ ID NO: 198329 - RNA, 28 nt, Homo Sapiens
cggcgggggcggccgagggggaagagug

SEQ ID NO: 198330 - RNA, 32 nt, Homo Sapiens
cuggccaggagcuucucugaugugauauccac

SEQ ID NO: 198331 - RNA, 32 nt, Homo Sapiens
gcagggaacaccucuggcuuguagaagggacg

SEQ ID NO: 198332 - RNA, 32 nt, Homo Sapiens
ggggaaggucugggucaaauucuucuuuugua

SEQ ID NO: 198333 - RNA, 32 nt, Homo Sapiens
aagcagagggcuuggggaaagccuguuccucu

SEQ ID NO: 198334 - RNA, 32 nt, Homo Sapiens
cccccacggccccucgggccccggccugccgc

SEQ ID NO: 198335 - RNA, 32 nt, Homo Sapiens
ccacaaggagauggauaaugugccuguuuuuu

SEQ ID NO: 198336 - RNA, 32 nt, Homo Sapiens
ucauucaaaaauuuuuucagaaaugcuuguac

SEQ ID NO: 198337 - RNA, 32 nt, Homo Sapiens
gcccaaacaaaacaggacaucugugaccgccc

SEQ ID NO: 198338 - RNA, 32 nt, Homo Sapiens
auuaguaauguuuauguguuaugucaggagau

SEQ ID NO: 198339 - RNA, 32 nt, Homo Sapiens
uuggugaaaccucugucaggcugucuuccucc

SEQ ID NO: 198340 - RNA, 32 nt, Homo Sapiens
uauuuuacugccuuuccuuuuaauuuuuguuu

SEQ ID NO: 198341 - RNA, 32 nt, Homo Sapiens
aaggaggguaucaagaggcuguucuaucagua

SEQ ID NO: 198342 - RNA, 32 nt, Homo Sapiens
guuccaugcauaauacagucuuaagugaauuu

SEQ ID NO: 198343 - RNA, 32 nt, Homo Sapiens
uuaaauacuacguauugaucuaauauuguugg

SEQ ID NO: 198344 - RNA, 27 nt, Homo Sapiens
ccaggcuccuucuuggaccccaggcug

SEQ ID NO: 198345 - RNA, 32 nt, Homo Sapiens
guguaauaguaaauaaauuauuuaacauagaa

SEQ ID NO: 198346 - RNA, 32 nt, Homo Sapiens
cuuguuacggauucauuuauccauucaguguu

SEQ ID NO: 198347 - RNA, 32 nt, Homo Sapiens
uuccagguggcugacgcuucccguggcgggga

SEQ ID NO: 198348 - RNA, 32 nt, Homo Sapiens
gcuguauuuuuacaauaaggcaagcuaaagaa

SEQ ID NO: 198349 - RNA, 32 nt, Homo Sapiens
gugcuauauggacuuuauuaggcuuuagauuu

SEQ ID NO: 198350 - RNA, 32 nt, Homo Sapiens
aguccacgcgcgcggcugagaaccgccgggac

SEQ ID NO: 198351 - RNA, 32 nt, Homo Sapiens
aucucacaugcuguuuuuccuauuugguuuga

SEQ ID NO: 198352 - RNA, 32 nt, Homo Sapiens
ccaggaaugcacuuacugauaagauauugagg

SEQ ID NO: 198353 - RNA, 32 nt, Homo Sapiens
guccuaaacuacggaugggaacuauuacaguu

SEQ ID NO: 198354 - RNA, 32 nt, Homo Sapiens
cuguguaauaauauugaauaauuuuuuagaag

SEQ ID NO: 198355 - RNA, 32 nt, Homo Sapiens
gacuguuuccaggcacagaauaugaaucguaa

SEQ ID NO: 198356 - RNA, 32 nt, Homo Sapiens
ggaggcugggccuggguuugugccgcuggggu

SEQ ID NO: 198357 - RNA, 32 nt, Homo Sapiens
ccgggcugcguucggaccccugucguauagaa

SEQ ID NO: 198358 - RNA, 32 nt, Homo Sapiens
gacagagagguaaggccugaaaaaguaaaauu

SEQ ID NO: 198359 - RNA, 29 nt, Homo Sapiens
ggucaugugacuuuucuguacuguuaaac

SEQ ID NO: 198360 - RNA, 32 nt, Homo Sapiens
gugcaguggcgcggucucggcucacugcaagc

SEQ ID NO: 198361 - RNA, 32 nt, Homo Sapiens
acaaguaaacauuccaacauugucuuuaggag

SEQ ID NO: 198362 - RNA, 32 nt, Homo Sapiens
aguuggcagaauccccauaccucgcagauuug

SEQ ID NO: 198363 - RNA, 32 nt, Homo Sapiens
uaggguuuggaagaaagagagaaggauucuuu

SEQ ID NO: 198364 - RNA, 32 nt, Homo Sapiens
ugguagggcuggaagcugaggcuggccgccag

SEQ ID NO: 198365 - RNA, 32 nt, Homo Sapiens
aagagaaaguuguugaauauaauccuuaguga

SEQ ID NO: 198366 - RNA, 32 nt, Homo Sapiens
auguguuccaggaauguuaaugagaugguauu

SEQ ID NO: 198367 - RNA, 32 nt, Homo Sapiens
uaaaacuauuacauuuaaaauauggacgucug

SEQ ID NO: 198368 - RNA, 32 nt, Homo Sapiens
gcucccacccucaaggugcggggagaagaagc

SEQ ID NO: 198369 - RNA, 31 nt, Homo Sapiens
uuagggaguagguugaaccaggugauuaccu

SEQ ID NO: 198370 - RNA, 32 nt, Homo Sapiens
agggaccacacaaagauugacaguaagaugcu

SEQ ID NO: 198371 - RNA, 32 nt, Homo Sapiens
caucugggggaccccugggaucuaccugccca

SEQ ID NO: 198372 - RNA, 32 nt, Homo Sapiens
gccauaaacguaaugauugaaguagaauucua

SEQ ID NO: 198373 - RNA, 32 nt, Homo Sapiens
aguuuaaaauggugucugagguuguacuauuu

SEQ ID NO: 198374 - RNA, 32 nt, Homo Sapiens
uuuaauuaucuaaagccaaugaaagacuucuu

SEQ ID NO: 198375 - RNA, 32 nt, Homo Sapiens
ugccuguugugggugugaguguguacaagagc

SEQ ID NO: 198376 - RNA, 32 nt, Homo Sapiens
aguuuaaaaaucaacuuuuuauugccuucuca

SEQ ID NO: 198377 - RNA, 32 nt, Homo Sapiens
cugccauaccguauagagagccaagguacagc

SEQ ID NO: 198378 - RNA, 32 nt, Homo Sapiens
ggccaccagugcauagcccaugcugaagauuc

SEQ ID NO: 198379 - RNA, 32 nt, Homo Sapiens
aguuccuaauccccuuuccgggcagccgccgg

SEQ ID NO: 198380 - RNA, 32 nt, Homo Sapiens
caguagccgcggcugcuucgguugccgcgguc

SEQ ID NO: 198381 - RNA, 32 nt, Homo Sapiens
gucuucccaagccccauguucaugguggggca

SEQ ID NO: 198382 - RNA, 32 nt, Homo Sapiens
ucuuuguugacaaaggugcaguuucuccucuc

SEQ ID NO: 198383 - RNA, 32 nt, Homo Sapiens
uacauaguuggaaaagcuuuguggggggauua

SEQ ID NO: 198384 - RNA, 32 nt, Homo Sapiens
acugcaaaaauauccuauguaacaacuaccaa

SEQ ID NO: 198385 - RNA, 32 nt, Homo Sapiens
uaagcuuuuucugauuuuuagaggaacagaaa

SEQ ID NO: 198386 - RNA, 32 nt, Homo Sapiens
gggcucugccccagcauccccccgagccucuc

SEQ ID NO: 198387 - RNA, 32 nt, Homo Sapiens
gggucaaugggacgacaguggcaagagggguu

SEQ ID NO: 198388 - RNA, 32 nt, Homo Sapiens
agugcccgcccgggcagggcuggagcccgagu

SEQ ID NO: 198389 - RNA, 32 nt, Homo Sapiens
uacagacuuuacaggcuuggcuuugagauucu

SEQ ID NO: 198390 - RNA, 30 nt, Homo Sapiens
cugauucgcggcgggagcggcaggagggag

SEQ ID NO: 198391 - RNA, 32 nt, Homo Sapiens
aguuuuucauucccuuucuucugcaguuuuca

SEQ ID NO: 198392 - RNA, 32 nt, Homo Sapiens
uccugcuauuuaggcauucuccagguucgaga

SEQ ID NO: 198393 - RNA, 32 nt, Homo Sapiens
agaaaaaaucagaaucucugguugguggaguc

SEQ ID NO: 198394 - RNA, 32 nt, Homo Sapiens
augaguaugugauucuuuuuaaguaugaaaau

SEQ ID NO: 198395 - RNA, 32 nt, Homo Sapiens
cauacuugaaacaaaaaucaucauggucauuu

SEQ ID NO: 198396 - RNA, 32 nt, Homo Sapiens
cauuaaaaaauauuuugaaaacaugcaguaaa

SEQ ID NO: 198397 - RNA, 32 nt, Homo Sapiens
ccaacaucugccgcuaccuggacuggaucaag

SEQ ID NO: 198398 - RNA, 32 nt, Homo Sapiens
gauaaaaaaugaauauaagagugcuugucauu

SEQ ID NO: 198399 - RNA, 32 nt, Homo Sapiens
uuuaaaaaaugaaauagugauguuguccuaac

SEQ ID NO: 198400 - RNA, 32 nt, Homo Sapiens
agcugagguggaggcaggcugcggcagacggc

SEQ ID NO: 198401 - RNA, 32 nt, Homo Sapiens
ggucaggagcggcccccuccccucaccucucc

SEQ ID NO: 198402 - RNA, 32 nt, Homo Sapiens
guguuggugauaggcuugaauuauuaaaaacu

SEQ ID NO: 198403 - RNA, 32 nt, Homo Sapiens
ugcccgcaccccagccccacuccgggccuccg

SEQ ID NO: 198404 - RNA, 32 nt, Homo Sapiens
cuauuguuagaaaaacaaaacaaaaaacaaaa

SEQ ID NO: 198405 - RNA, 32 nt, Homo Sapiens
agcaaugaauugcaugagaaacaaaaguuuua

SEQ ID NO: 198406 - RNA, 29 nt, Homo Sapiens
aggagauaaaguuucccauuuuccaauac

SEQ ID NO: 198407 - RNA, 32 nt, Homo Sapiens
aacuggugaaacaggaauauuaauugaaauga

SEQ ID NO: 198408 - RNA, 30 nt, Homo Sapiens
gagugugagaggaugggggaagcacugugg

SEQ ID NO: 198409 - RNA, 32 nt, Homo Sapiens
cuuucuuacgguauaauacauguuguuuagga

SEQ ID NO: 198410 - RNA, 32 nt, Homo Sapiens
ccagcucgcucuugguacuugggaccccagug

SEQ ID NO: 198411 - RNA, 32 nt, Homo Sapiens
ucuuacuuuaaauguaggaaauccaaaaagaa

SEQ ID NO: 198412 - RNA, 32 nt, Homo Sapiens
gguuuacuccagcagaccugaucuccgggacc

SEQ ID NO: 198413 - RNA, 32 nt, Homo Sapiens
ucuucugguugauugugaccuugaauacaaaa

SEQ ID NO: 198414 - RNA, 31 nt, Homo Sapiens
gggccgagggcggcggggaccgcgguuuggg

SEQ ID NO: 198415 - RNA, 32 nt, Homo Sapiens
agguugccaguuauacauuuauagaaagauaa

SEQ ID NO: 198416 - RNA, 32 nt, Homo Sapiens
uccacaucuguaaaaugagaaguugccuccgc

SEQ ID NO: 198417 - RNA, 32 nt, Homo Sapiens
ucaagagcguguauuauuaucuaguagaaaaa

SEQ ID NO: 198418 - RNA, 31 nt, Homo Sapiens
cccauggcggggcccauucacggggcaacac

SEQ ID NO: 198419 - RNA, 31 nt, Homo Sapiens
guuccuauaaagaaaauauuaugauaucuug

SEQ ID NO: 198420 - RNA, 32 nt, Homo Sapiens
cuuggggagcaguguuaugauaccaaauggcu

SEQ ID NO: 198421 - RNA, 29 nt, Homo Sapiens
gcauuucaacugagaggaaagcuaaucgg

SEQ ID NO: 198422 - RNA, 32 nt, Homo Sapiens
ccacuggggagguggcgcugggcgcgcgggau

SEQ ID NO: 198423 - RNA, 32 nt, Homo Sapiens
uguucuuucccucucugugugggccagguggg

SEQ ID NO: 198424 - RNA, 32 nt, Homo Sapiens
cuuggggcacucuggggugcgcgccgaucuuc

SEQ ID NO: 198425 - RNA, 32 nt, Homo Sapiens
uguuuaagucucuggagaguuaaguauuuugu

SEQ ID NO: 198426 - RNA, 32 nt, Homo Sapiens
agaauggcuuugguuuuuuucuuaguaaauag

SEQ ID NO: 198427 - RNA, 30 nt, Homo Sapiens
aguggggccuucggcggcgacuauggaagg

SEQ ID NO: 198428 - RNA, 32 nt, Homo Sapiens
agagcuuauuuguaucagagcuuauuacuugu

SEQ ID NO: 198429 - RNA, 32 nt, Homo Sapiens
ucugguuauuuguuuuuuccuuuguuguuuua

SEQ ID NO: 198430 - RNA, 32 nt, Homo Sapiens
ggccuccuugucacacaagauguccuggcccc

SEQ ID NO: 198431 - RNA, 32 nt, Homo Sapiens
cggucagauguggcuucuggcuccucggggcc

SEQ ID NO: 198432 - RNA, 32 nt, Homo Sapiens
acagggacugcaggugucucauacucaguggc

SEQ ID NO: 198433 - RNA, 32 nt, Homo Sapiens
uacagaaaccuuuggaggaaguagugggguug

SEQ ID NO: 198434 - RNA, 32 nt, Homo Sapiens
uaugaaauauuuugaauacacaucucugucag

SEQ ID NO: 198435 - RNA, 32 nt, Homo Sapiens
ccccaaaacaaucccgacaaucccuuaucccu

SEQ ID NO: 198436 - RNA, 32 nt, Homo Sapiens
ccuccccugccagggcagggccccaggcauug

SEQ ID NO: 198437 - RNA, 32 nt, Homo Sapiens
ccugagagaaauagaaaaguuguuaaaguuac

SEQ ID NO: 198438 - RNA, 32 nt, Homo Sapiens
gaauugcgacacucuuuuuucauuauaucaaa

SEQ ID NO: 198439 - RNA, 32 nt, Homo Sapiens
uacgggggagcgggaaaggugccucagagaga

SEQ ID NO: 198440 - RNA, 32 nt, Homo Sapiens
auaauugcccaguacauagaaaugagaugccu

SEQ ID NO: 198441 - RNA, 32 nt, Homo Sapiens
aucccuugucuaaaugcagagcagcugagaga

SEQ ID NO: 198442 - RNA, 32 nt, Homo Sapiens
gggaggaaggcagggaggaaaagcggucuucg

SEQ ID NO: 198443 - RNA, 32 nt, Homo Sapiens
aguacugucuagcuaccacugcuaacuaugca

SEQ ID NO: 198444 - RNA, 30 nt, Homo Sapiens
cgcggagggucggggccgccgguggagucu

SEQ ID NO: 198445 - RNA, 32 nt, Homo Sapiens
uaagcugcaucacuucugcuuucuuccuacua

SEQ ID NO: 198446 - RNA, 32 nt, Homo Sapiens
gcauccauuuugccuuuuaaacaacuaggauu

SEQ ID NO: 198447 - RNA, 32 nt, Homo Sapiens
cguuuucugaaugaggacuuagagugggaagc

SEQ ID NO: 198448 - RNA, 32 nt, Homo Sapiens
cuaaauuuuguuuuaauccagaucucaugacu

SEQ ID NO: 198449 - RNA, 32 nt, Homo Sapiens
ucucugcaccucagagugcagaaccacagacg

SEQ ID NO: 198450 - RNA, 32 nt, Homo Sapiens
accggccuugucugcugggcacgggucuucgc

SEQ ID NO: 198451 - RNA, 32 nt, Homo Sapiens
uccgcggggcuguggcugcugcugugcauguc

SEQ ID NO: 198452 - RNA, 32 nt, Homo Sapiens
ugauucucuacuuuucccuuuuuuguauuaug

SEQ ID NO: 198453 - RNA, 32 nt, Homo Sapiens
uaagagguuuguaguuagugcuuauuuuugca

SEQ ID NO: 198454 - RNA, 32 nt, Homo Sapiens
uccuggcugauagaaaagugucauguccaaug

SEQ ID NO: 198455 - RNA, 32 nt, Homo Sapiens
agucccacucccuccugagguccccaagggca

SEQ ID NO: 198456 - RNA, 32 nt, Homo Sapiens
ugcccggccucuuuuuauuuauuccuaaaaua

SEQ ID NO: 198457 - RNA, 32 nt, Homo Sapiens
uccuccaccguccaaaguaaacuuugccgcuc

SEQ ID NO: 198458 - RNA, 32 nt, Homo Sapiens
gaggcaguggcggcuggaguagguaggcgagu

SEQ ID NO: 198459 - RNA, 32 nt, Homo Sapiens
augugggcugaggggauucagacauccagggu

SEQ ID NO: 198460 - RNA, 32 nt, Homo Sapiens
guuuuuuauuaagagaaaaaccaguguaacgu

SEQ ID NO: 198461 - RNA, 32 nt, Homo Sapiens
cgcccgcuucaaccccaggggaccagaggaac

SEQ ID NO: 198462 - RNA, 32 nt, Homo Sapiens
accauccaguugcaggaaaacaagcuuaacau

SEQ ID NO: 198463 - RNA, 32 nt, Homo Sapiens
gagccccggcaccgcgcgcucggggaccccga

SEQ ID NO: 198464 - RNA, 32 nt, Homo Sapiens
acaggauagcuugagccauauuccuaguugcc

SEQ ID NO: 198465 - RNA, 32 nt, Homo Sapiens
ggaggaggggccgcgggcgggaggcgcugcga

SEQ ID NO: 198466 - RNA, 32 nt, Homo Sapiens
auaauagaaaguguaguggucuguggaucagc

SEQ ID NO: 198467 - RNA, 32 nt, Homo Sapiens
ucucgagcguccaacacacuaggauccgggag

SEQ ID NO: 198468 - RNA, 32 nt, Homo Sapiens
gcccuauucauccuccuccccagccagcucac

SEQ ID NO: 198469 - RNA, 32 nt, Homo Sapiens
gggcccccaucccuccccuugccacaucgcag

SEQ ID NO: 198470 - RNA, 32 nt, Homo Sapiens
ccacuagggcuuuuuucccucaaaagcuguac

SEQ ID NO: 198471 - RNA, 32 nt, Homo Sapiens
cugggccggaggaggggagauguuuggggucc

SEQ ID NO: 198472 - RNA, 32 nt, Homo Sapiens
aauggcccucccaaaaagaugccaugagggag

SEQ ID NO: 198473 - RNA, 32 nt, Homo Sapiens
ggauauuuguaucaggguucuacuucacuuca

SEQ ID NO: 198474 - RNA, 32 nt, Homo Sapiens
ucugcccugccagcugcagccugguuggcagc

SEQ ID NO: 198475 - RNA, 32 nt, Homo Sapiens
ccuuaacaaaaauuaauucaagauggauuaaa

SEQ ID NO: 198476 - RNA, 32 nt, Homo Sapiens
ggagauggcucagcggggcugcaccaaggggc

SEQ ID NO: 198477 - RNA, 32 nt, Homo Sapiens
acucuccgugcuuugcgccgggaccccuggcc

SEQ ID NO: 198478 - RNA, 32 nt, Homo Sapiens
agaaggcagccuucgaaguccugggcauuggg

SEQ ID NO: 198479 - RNA, 32 nt, Homo Sapiens
gaguacccccuccagugucccucccccgccgg

SEQ ID NO: 198480 - RNA, 31 nt, Homo Sapiens
cauaugaagauucagaaccauccacaggaau

SEQ ID NO: 198481 - RNA, 32 nt, Homo Sapiens
cgggcggcgggcgggcgcggguuugauuucug

SEQ ID NO: 198482 - RNA, 32 nt, Homo Sapiens
gcggggucggcgcugccgggugaaaucguagg

SEQ ID NO: 198483 - RNA, 32 nt, Homo Sapiens
auuuauagcugauuugaagguuuucuauuuaa

SEQ ID NO: 198484 - RNA, 32 nt, Homo Sapiens
ccucccucuccucuccucuccuauggugagcc

SEQ ID NO: 198485 - RNA, 32 nt, Homo Sapiens
uguuuuagaacuuuauucccccgcccccucac

SEQ ID NO: 198486 - RNA, 32 nt, Homo Sapiens
auuccuccauuucacuugcaaaacagaaguaa

SEQ ID NO: 198487 - RNA, 32 nt, Homo Sapiens
uaauauacccccuuuuuuguuugugacuuuca

SEQ ID NO: 198488 - RNA, 32 nt, Homo Sapiens
augugccuugggcuccuccugcccuccaucuc

SEQ ID NO: 198489 - RNA, 32 nt, Homo Sapiens
ugcuuugcacgucaucugguccuuccaccugg

SEQ ID NO: 198490 - RNA, 32 nt, Homo Sapiens
cucacccuagaauaaacuuaacagugucccgu

SEQ ID NO: 198491 - RNA, 32 nt, Homo Sapiens
gcccguucaccaagccccccgccccgccccca

SEQ ID NO: 198492 - RNA, 32 nt, Homo Sapiens
uugaggucaggaguuugagaccagccugacca

SEQ ID NO: 198493 - RNA, 32 nt, Homo Sapiens
guuguggaucaauuuggaaaaaccaaaauaug

SEQ ID NO: 198494 - RNA, 32 nt, Homo Sapiens
aaauuagcugggugugguggcgggcgcccguu

SEQ ID NO: 198495 - RNA, 32 nt, Homo Sapiens
gcagcagcggcagcaccccaggcgcugacagc

SEQ ID NO: 198496 - RNA, 32 nt, Homo Sapiens
gccgccgagccgagccgagccccagcuccagc

SEQ ID NO: 198497 - RNA, 30 nt, Homo Sapiens
cuacacucuggcaugggggaacccggcccc

SEQ ID NO: 198498 - RNA, 32 nt, Homo Sapiens
ggaggccgugcaggugggaggugggacagggg

SEQ ID NO: 198499 - RNA, 32 nt, Homo Sapiens
ugcagguucaaauuccaguucuccuacuuauc

SEQ ID NO: 198500 - RNA, 32 nt, Homo Sapiens
aguugcuacuugggaauaaagggcuuuuugag

SEQ ID NO: 198501 - RNA, 32 nt, Homo Sapiens
cugccuucaaagcuagaucauguuugccuugc

SEQ ID NO: 198502 - RNA, 30 nt, Homo Sapiens
gggguguccgaguugccgccggagaggagu

SEQ ID NO: 198503 - RNA, 32 nt, Homo Sapiens
guguuccuguguuguuguggaacuaaggacaa

SEQ ID NO: 198504 - RNA, 32 nt, Homo Sapiens
ggcuucuagguccccgagauaagugugcaggg

SEQ ID NO: 198505 - RNA, 32 nt, Homo Sapiens
guuuauccuuuaguacuaaaauuaaaaguuac

SEQ ID NO: 198506 - RNA, 32 nt, Homo Sapiens
auuuuuuucuuaauuuuauugacucauuuaug

SEQ ID NO: 198507 - RNA, 32 nt, Homo Sapiens
aacuggcugcgcacagggagcugucaccaugc

SEQ ID NO: 198508 - RNA, 32 nt, Homo Sapiens
cccacggcggccuuggggugaaggggacccag

SEQ ID NO: 198509 - RNA, 32 nt, Homo Sapiens
ccucuuuucugcuuggcccagcccuagcaccc

SEQ ID NO: 198510 - RNA, 30 nt, Homo Sapiens
gguccccugccucuacugccggcgccugcg

SEQ ID NO: 198511 - RNA, 32 nt, Homo Sapiens
aacugcucacugacagcuucucuguaaccugc

SEQ ID NO: 198512 - RNA, 32 nt, Homo Sapiens
auuccucugcaacuccucccccuuuuauuucc

SEQ ID NO: 198513 - RNA, 32 nt, Homo Sapiens
cacuuagguuccauggagaauauguggcauga

SEQ ID NO: 198514 - RNA, 32 nt, Homo Sapiens
agagaugguguugggagcccuuuggagaacgc

SEQ ID NO: 198515 - RNA, 32 nt, Homo Sapiens
gcugcugacucugugcagcugcgcaccugugu

SEQ ID NO: 198516 - RNA, 32 nt, Homo Sapiens
cagccggcugcguuccucucuccauccguccg

SEQ ID NO: 198517 - RNA, 30 nt, Homo Sapiens
cucauugugauuguggaagaagcucaugua

SEQ ID NO: 198518 - RNA, 32 nt, Homo Sapiens
aucuauguaauggccguguuacuuucagaucu

SEQ ID NO: 198519 - RNA, 32 nt, Homo Sapiens
ucacagccucugaccccuccucacuggccauc

SEQ ID NO: 198520 - RNA, 32 nt, Homo Sapiens
agagugggcugggauuguggagacugcccagg

SEQ ID NO: 198521 - RNA, 32 nt, Homo Sapiens
auguguaugaacuuguuuuucuuaaucuuuaa

SEQ ID NO: 198522 - RNA, 30 nt, Homo Sapiens
ggaggguggggcggguggcggcgguggcag

SEQ ID NO: 198523 - RNA, 32 nt, Homo Sapiens
aggcuggagugcaguagcacaaacauggguca

SEQ ID NO: 198524 - RNA, 32 nt, Homo Sapiens
aaugauaaguacuacauaccucaucucuuggg

SEQ ID NO: 198525 - RNA, 32 nt, Homo Sapiens
auauuuggcucuuaucccugcacauguagagg

SEQ ID NO: 198526 - RNA, 32 nt, Homo Sapiens
uugaaaagccccaaggaaaccuuugcgggugg

SEQ ID NO: 198527 - RNA, 32 nt, Homo Sapiens
auauaaaugugugaaucagggcugugaagaca

SEQ ID NO: 198528 - RNA, 32 nt, Homo Sapiens
auaaguaaaaguuauuugaggaccucagacau

SEQ ID NO: 198529 - RNA, 32 nt, Homo Sapiens
auaaagucaauacaucuugcuuauucuacaau

SEQ ID NO: 198530 - RNA, 32 nt, Homo Sapiens
cugcuggacuuccuaugcaggaaaccaggagc

SEQ ID NO: 198531 - RNA, 32 nt, Homo Sapiens
gccggagccccagcugcagcagcugagaccgc

SEQ ID NO: 198532 - RNA, 32 nt, Homo Sapiens
cuggauggaacaaacuuuaacuuaccaagcac

SEQ ID NO: 198533 - RNA, 29 nt, Homo Sapiens
ccaguggcccugugauaccacagacugug

SEQ ID NO: 198534 - RNA, 32 nt, Homo Sapiens
agauuucagaucuagcucugucagacuguaaa

SEQ ID NO: 198535 - RNA, 32 nt, Homo Sapiens
agugaccacagcagggcaggcaucaugugugu

SEQ ID NO: 198536 - RNA, 32 nt, Homo Sapiens
ucuuuaaaugaggacacugcugauugcuggug

SEQ ID NO: 198537 - RNA, 32 nt, Homo Sapiens
auuaaagaauaaaguuagacaagcaacugguu

SEQ ID NO: 198538 - RNA, 32 nt, Homo Sapiens
uuauggaagaucugggacagaccgugugacag

SEQ ID NO: 198539 - RNA, 32 nt, Homo Sapiens
ccgagggacaaaggagauuggaugacugggaa

SEQ ID NO: 198540 - RNA, 32 nt, Homo Sapiens
ucccccgagugcauggcuuggagagcagaaug

SEQ ID NO: 198541 - RNA, 32 nt, Homo Sapiens
uucugaaaacaaugaaaagaguauauuuaacc

SEQ ID NO: 198542 - RNA, 32 nt, Homo Sapiens
auuacuuuuuaaaauuccugugacaauuaaua

SEQ ID NO: 198543 - RNA, 32 nt, Homo Sapiens
uuacuagcaacuuccuuggagcgaugugguug

SEQ ID NO: 198544 - RNA, 32 nt, Homo Sapiens
gucauguguccuucacucuccucugagucucc

SEQ ID NO: 198545 - RNA, 32 nt, Homo Sapiens
cgggcugugggggucccggcaccuggcgugag

SEQ ID NO: 198546 - RNA, 32 nt, Homo Sapiens
gcuucuguacagucaggucugcucuggucugg

SEQ ID NO: 198547 - RNA, 32 nt, Homo Sapiens
ggaggcgcaggcggagagcggcggugcccccg

SEQ ID NO: 198548 - RNA, 32 nt, Homo Sapiens
gcaucgaccugguauugcaguacuuccaggaa

SEQ ID NO: 198549 - RNA, 32 nt, Homo Sapiens
cacuuuuccuuccucucacgguuuuuugcaga

SEQ ID NO: 198550 - RNA, 32 nt, Homo Sapiens
cgaaaggccguagacgccgucagaaucgguuu

SEQ ID NO: 198551 - RNA, 32 nt, Homo Sapiens
cugccuuggccccagggcgccucucugugcca

SEQ ID NO: 198552 - RNA, 32 nt, Homo Sapiens
gaaagaaaugacuucuucuugcacuuuaugaa

SEQ ID NO: 198553 - RNA, 32 nt, Homo Sapiens
aacaccucgucagagucucagcaucaggcaaa

SEQ ID NO: 198554 - RNA, 32 nt, Homo Sapiens
caggaacucugcagcguccaugcuguagcuuc

SEQ ID NO: 198555 - RNA, 32 nt, Homo Sapiens
gaggcgccgggcggugcgcugggagcugcugg

SEQ ID NO: 198556 - RNA, 32 nt, Homo Sapiens
gugccucugccuggacgcccauugucugggau

SEQ ID NO: 198557 - RNA, 32 nt, Homo Sapiens
ccagaugccagaaugaagguguagccaguguu

SEQ ID NO: 198558 - RNA, 32 nt, Homo Sapiens
cuauugcugucaacauuauuauuuaauaaaaa

SEQ ID NO: 198559 - RNA, 32 nt, Homo Sapiens
gauggauuugaaaaugguuuugaaugcaauua

SEQ ID NO: 198560 - RNA, 32 nt, Homo Sapiens
uuguuggagccugcaggguggugcugggacug

SEQ ID NO: 198561 - RNA, 32 nt, Homo Sapiens
auuguuucuacaauaauuuguaaacauauuua

SEQ ID NO: 198562 - RNA, 32 nt, Homo Sapiens
ggacucaagagagauuugauuaaugaaucgua

SEQ ID NO: 198563 - RNA, 32 nt, Homo Sapiens
gccacaguucccugcagccaaucaggcugaaa

SEQ ID NO: 198564 - RNA, 32 nt, Homo Sapiens
acccgccgcgcgcacucgcgcacggacccgca

SEQ ID NO: 198565 - RNA, 32 nt, Homo Sapiens
uuuauugacagacaauggacuuugaagucagc

SEQ ID NO: 198566 - RNA, 32 nt, Homo Sapiens
ggagcuggcuggcaacccggcccgcgacaaga

SEQ ID NO: 198567 - RNA, 32 nt, Homo Sapiens
uucuuggccaucuccauccugugagucaggac

SEQ ID NO: 198568 - RNA, 32 nt, Homo Sapiens
cccaagagauggauccuggggcaguuggcauc

SEQ ID NO: 198569 - RNA, 32 nt, Homo Sapiens
ggcuaccacacccaccuacuguuaugagugug

SEQ ID NO: 198570 - RNA, 32 nt, Homo Sapiens
agcggcccacccaccagcagcugcuggagguc

SEQ ID NO: 198571 - RNA, 32 nt, Homo Sapiens
ucaaaacgaccugcaacgucuggcgcuuagcu

SEQ ID NO: 198572 - RNA, 32 nt, Homo Sapiens
uucuuuccagaccugcuccugcugcacagagc

SEQ ID NO: 198573 - RNA, 32 nt, Homo Sapiens
ggagcacacagcaccucgcggguccagcuggg

SEQ ID NO: 198574 - RNA, 32 nt, Homo Sapiens
aagugugcucuuccaugauguugauaggugac

SEQ ID NO: 198575 - RNA, 32 nt, Homo Sapiens
agcugacauccaaggcugaggaccccaguggg

SEQ ID NO: 198576 - RNA, 32 nt, Homo Sapiens
cauaggaaucucuauuugcuguauuuauugug

SEQ ID NO: 198577 - RNA, 32 nt, Homo Sapiens
caccagaggaccccgcagcaucguguacuccu

SEQ ID NO: 198578 - RNA, 32 nt, Homo Sapiens
guuuugugaaaaauaaucaucuguuagcugua

SEQ ID NO: 198579 - RNA, 32 nt, Homo Sapiens
caucugaauuguuuaaauuugcuaguggauuu

SEQ ID NO: 198580 - RNA, 32 nt, Homo Sapiens
agauggccgcgugcgggauccucggguaccgg

SEQ ID NO: 198581 - RNA, 32 nt, Homo Sapiens
ggcugcuggugccuuucuucccaccucgcuug

SEQ ID NO: 198582 - RNA, 32 nt, Homo Sapiens
uuucaagaaaauuuaaaacgaucccaaggaaa

SEQ ID NO: 198583 - RNA, 32 nt, Homo Sapiens
gagcuuccagugagccgagaucgcgccacugc

SEQ ID NO: 198584 - RNA, 32 nt, Homo Sapiens
cuguccccagaugcacuaacagauggggccca

SEQ ID NO: 198585 - RNA, 32 nt, Homo Sapiens
ugcuccuggugccugccucucuccuccacccc

SEQ ID NO: 198586 - RNA, 32 nt, Homo Sapiens
gcggcugugguccagcuggaucugcaagauug

SEQ ID NO: 198587 - RNA, 32 nt, Homo Sapiens
ggacauugggaaggguccauggaucgcggccc

SEQ ID NO: 198588 - RNA, 32 nt, Homo Sapiens
ggcuguggcaggagggcggcggcggcggcugc

SEQ ID NO: 198589 - RNA, 32 nt, Homo Sapiens
cuacaaugaagaugaauuccuuguauaaaaau

SEQ ID NO: 198590 - RNA, 32 nt, Homo Sapiens
uuuccugguuuguuccucucuccacugaagcu

SEQ ID NO: 198591 - RNA, 32 nt, Homo Sapiens
gcgcuccuuucacacacgcgcgcgcucgcugg

SEQ ID NO: 198592 - RNA, 32 nt, Homo Sapiens
ugaaagucuguuucauugggguuuuuguuuug

SEQ ID NO: 198593 - RNA, 32 nt, Homo Sapiens
uugcagagaaaaaacuuucucccugcaucuca

SEQ ID NO: 198594 - RNA, 32 nt, Homo Sapiens
cagagggcaggacgcccaggcugggggcucuc

SEQ ID NO: 198595 - RNA, 32 nt, Homo Sapiens
uccacagauccugguccuacaaauaagccugc

SEQ ID NO: 198596 - RNA, 32 nt, Homo Sapiens
cgagggauagaccccuggaugugacucuucuu

SEQ ID NO: 198597 - RNA, 32 nt, Homo Sapiens
agcggacggggucgagucagugccguuugcgc

SEQ ID NO: 198598 - RNA, 32 nt, Homo Sapiens
ccugacucaauacaaauaaaaaccaaaucuaa

SEQ ID NO: 198599 - RNA, 32 nt, Homo Sapiens
agcccccacccccaguuaacacugcugcuucu

SEQ ID NO: 198600 - RNA, 32 nt, Homo Sapiens
auguuggaaagaaagguugugaauccuuuggc

SEQ ID NO: 198601 - RNA, 32 nt, Homo Sapiens
uagcugggauuacaggcaugcgccaccacacc

SEQ ID NO: 198602 - RNA, 32 nt, Homo Sapiens
uagguuauuucugaauguuuuauagaauuucu

SEQ ID NO: 198603 - RNA, 32 nt, Homo Sapiens
uacgcgugagcuugcuugugggcacuggcuug

SEQ ID NO: 198604 - RNA, 32 nt, Homo Sapiens
ggggggccuuaauuuuaaaaauauugcauuaa

SEQ ID NO: 198605 - RNA, 32 nt, Homo Sapiens
aauuccuauuggcaucacacgggcuacaaauu

SEQ ID NO: 198606 - RNA, 32 nt, Homo Sapiens
ucagcaacuccagccucuguagcauugaagaa

SEQ ID NO: 198607 - RNA, 32 nt, Homo Sapiens
auagguggccgcccggccccuuuccccgccug

SEQ ID NO: 198608 - RNA, 32 nt, Homo Sapiens
cccucaguccacucacuaagggugcugaggaa

SEQ ID NO: 198609 - RNA, 32 nt, Homo Sapiens
gagggcgcaccucgugcugggcgccggggaag

SEQ ID NO: 198610 - RNA, 32 nt, Homo Sapiens
uuuggaaaugucaacugucuuuaugucugcuu

SEQ ID NO: 198611 - RNA, 32 nt, Homo Sapiens
ccuucaggaaaugccacagauaugaguacuuu

SEQ ID NO: 198612 - RNA, 32 nt, Homo Sapiens
gccaccccaauauauggcuuugggggcugaaa

SEQ ID NO: 198613 - RNA, 32 nt, Homo Sapiens
cuggggaacauuucuguaaauaccauugacac

SEQ ID NO: 198614 - RNA, 32 nt, Homo Sapiens
cgccccugcccccgcucccgcucccagguucc

SEQ ID NO: 198615 - RNA, 32 nt, Homo Sapiens
gcaaacccuucucuucuccccccaacacaauc

SEQ ID NO: 198616 - RNA, 32 nt, Homo Sapiens
uauaauuaauaaaaucugcggagaauuguaaa

SEQ ID NO: 198617 - RNA, 32 nt, Homo Sapiens
acaguuguugguuuuuugauuuuagcauauua

SEQ ID NO: 198618 - RNA, 32 nt, Homo Sapiens
uggugucugcaccuccuuucccucucuccauc

SEQ ID NO: 198619 - RNA, 32 nt, Homo Sapiens
cgcugucagaucugugguuuuucuacuugaag

SEQ ID NO: 198620 - RNA, 32 nt, Homo Sapiens
ccuucuuccuucccucucaauccacuagcuuu

SEQ ID NO: 198621 - RNA, 32 nt, Homo Sapiens
ucagagcgauaggaaagcacccugcccuucau

SEQ ID NO: 198622 - RNA, 32 nt, Homo Sapiens
ggacaagggcuuugugcagggagcuccucucc

SEQ ID NO: 198623 - RNA, 32 nt, Homo Sapiens
uccuaguuagacaauaaagauuuuuaaagaau

SEQ ID NO: 198624 - RNA, 32 nt, Homo Sapiens
cgcccgggcaggucaaacacgcagcccccucc

SEQ ID NO: 198625 - RNA, 32 nt, Homo Sapiens
agagaggucuaacaccaacauaagguacuagc

SEQ ID NO: 198626 - RNA, 32 nt, Homo Sapiens
gccaaugaugagggaacauuugaaagaacugc

SEQ ID NO: 198627 - RNA, 32 nt, Homo Sapiens
ccuuaacuuuuccauuggggcucagguaucac

SEQ ID NO: 198628 - RNA, 32 nt, Homo Sapiens
gcucgcaggaggaggaggucaucgacggcuuc

SEQ ID NO: 198629 - RNA, 29 nt, Homo Sapiens
ugaggucggggaccagcaggcaccgcagu

SEQ ID NO: 198630 - RNA, 32 nt, Homo Sapiens
uaauaacccauggaguaaugcaugucaacucu

SEQ ID NO: 198631 - RNA, 32 nt, Homo Sapiens
aagaaaucgagcucaacaucagcgagauucca

SEQ ID NO: 198632 - RNA, 32 nt, Homo Sapiens
ugacucuaguacugugaauccagugaaaauaa

SEQ ID NO: 198633 - RNA, 32 nt, Homo Sapiens
caaaggagaauuuuuaaagccuuaacaaugcc

SEQ ID NO: 198634 - RNA, 32 nt, Homo Sapiens
uggguuuauauuugaagguauagaaucuggga

SEQ ID NO: 198635 - RNA, 32 nt, Homo Sapiens
cauguuugcacuuguuauuuuguagcuuuaau

SEQ ID NO: 198636 - RNA, 32 nt, Homo Sapiens
gggaauuaugaguaaaauugaacuuugauggg

SEQ ID NO: 198637 - RNA, 32 nt, Homo Sapiens
uguucagcucuuuucaguuaacagaugaacuu

SEQ ID NO: 198638 - RNA, 32 nt, Homo Sapiens
caaaaaaguggaagaguaggauaaauuuuuua

SEQ ID NO: 198639 - RNA, 32 nt, Homo Sapiens
cgcggcggggaagagagacugcggcgggaggg

SEQ ID NO: 198640 - RNA, 32 nt, Homo Sapiens
ucaguauuagucugugacuacaaaauauuuua

SEQ ID NO: 198641 - RNA, 32 nt, Homo Sapiens
ugugcaguacugcuguagaaaaguauuaauag

SEQ ID NO: 198642 - RNA, 32 nt, Homo Sapiens
uuuuauuuugcgaaacaaaacaaaacaaaaaa

SEQ ID NO: 198643 - RNA, 32 nt, Homo Sapiens
caggcuguucuaaaccaccugggcucaaguga

SEQ ID NO: 198644 - RNA, 32 nt, Homo Sapiens
auuuaugaaaauaguuucauugucauuuauug

SEQ ID NO: 198645 - RNA, 32 nt, Homo Sapiens
cagcccuggugcgacccggcccguugccguag

SEQ ID NO: 198646 - RNA, 32 nt, Homo Sapiens
ggggaacuacuauauauaugcaucuacccaag

SEQ ID NO: 198647 - RNA, 32 nt, Homo Sapiens
ggguccugguaguagagacccagcuggccugg

SEQ ID NO: 198648 - RNA, 32 nt, Homo Sapiens
aagcauuuaaaagaucuagaaacacugaugag

SEQ ID NO: 198649 - RNA, 32 nt, Homo Sapiens
gacugacaagugugcaaaauguuuacaaucuu

SEQ ID NO: 198650 - RNA, 32 nt, Homo Sapiens
auggaugcacaaaaagagcuccuagaacuaua

SEQ ID NO: 198651 - RNA, 32 nt, Homo Sapiens
gaucccuggugacaccuuccuggagaagacuc

SEQ ID NO: 198652 - RNA, 32 nt, Homo Sapiens
uuuaauuagggugaaaauuuugaaaguuguau

SEQ ID NO: 198653 - RNA, 29 nt, Homo Sapiens
caugacauauguaugggauaggccucuuc

SEQ ID NO: 198654 - RNA, 32 nt, Homo Sapiens
gagccggccguggaaggagggaugcguguucc

SEQ ID NO: 198655 - RNA, 32 nt, Homo Sapiens
cauuuuccgagcucuuccggaucggauccuau

SEQ ID NO: 198656 - RNA, 32 nt, Homo Sapiens
cuucuucaccucucacccacgcuucagacuuc

SEQ ID NO: 198657 - RNA, 32 nt, Homo Sapiens
aggcggcagaggugcuggaccacaucuccgcc

SEQ ID NO: 198658 - RNA, 32 nt, Homo Sapiens
gacggcggccgcggcaucccccugcccaucca

SEQ ID NO: 198659 - RNA, 32 nt, Homo Sapiens
cccacuccagccgcaagcauaacugaagaaau

SEQ ID NO: 198660 - RNA, 32 nt, Homo Sapiens
guggaagagcagccuuccuuugucccuguggu

SEQ ID NO: 198661 - RNA, 32 nt, Homo Sapiens
guugcugucuucugcucucauccugcaggugg

SEQ ID NO: 198662 - RNA, 32 nt, Homo Sapiens
acuuuuaaaaaauguaucaaaaauaauaaacg

SEQ ID NO: 198663 - RNA, 32 nt, Homo Sapiens
cugaaccccucgccgggcguaagugucaggag

SEQ ID NO: 198664 - RNA, 32 nt, Homo Sapiens
gcggcaaacugggacaugcagaauugaauuug

SEQ ID NO: 198665 - RNA, 32 nt, Homo Sapiens
gauguccuuguacugucuuaaguuaguguugc

SEQ ID NO: 198666 - RNA, 32 nt, Homo Sapiens
gaacuagagucaacugugucagggcuaagaaa

SEQ ID NO: 198667 - RNA, 32 nt, Homo Sapiens
cagcaagagcgcgggcggguggcccaggcacg

SEQ ID NO: 198668 - RNA, 32 nt, Homo Sapiens
gccgcucgcccggcccggcuuccgaggggaga

SEQ ID NO: 198669 - RNA, 32 nt, Homo Sapiens
uuaaugugggaaguacagacagaaaucucuuc

SEQ ID NO: 198670 - RNA, 32 nt, Homo Sapiens
auccaaaacuaaacuuggcagaaaaauuauuu

SEQ ID NO: 198671 - RNA, 32 nt, Homo Sapiens
gaaacaagaaacagagauuuccaauugcucuu

SEQ ID NO: 198672 - RNA, 32 nt, Homo Sapiens
cauauaagauauaaaaauugucaugagauucu

SEQ ID NO: 198673 - RNA, 32 nt, Homo Sapiens
aucucuaggacucuccucccgcgcugcucagg

SEQ ID NO: 198674 - RNA, 32 nt, Homo Sapiens
cgggugcguggccggugcuggcugggaguucu

SEQ ID NO: 198675 - RNA, 32 nt, Homo Sapiens
cuauuuuguaaauugcugcaugaccaaaauag

SEQ ID NO: 198676 - RNA, 32 nt, Homo Sapiens
ugcugcgggugagugaaggacacaucacguuc

SEQ ID NO: 198677 - RNA, 32 nt, Homo Sapiens
ugguaugggacaggggcagaaaacacuacaua

SEQ ID NO: 198678 - RNA, 32 nt, Homo Sapiens
ggaauuuuuacggcuuuuguguagucauguag

SEQ ID NO: 198679 - RNA, 32 nt, Homo Sapiens
uuugacguuugcagucacacacaacaccuuag

SEQ ID NO: 198680 - RNA, 32 nt, Homo Sapiens
acuuagaagcugaagaaaauagacauagccgg

SEQ ID NO: 198681 - RNA, 32 nt, Homo Sapiens
gccuccugcuccagcucccauccagcccuggg

SEQ ID NO: 198682 - RNA, 32 nt, Homo Sapiens
ucucucaugaccagcucucugccucccuucca

SEQ ID NO: 198683 - RNA, 32 nt, Homo Sapiens
ugguaucuuuuggaggaagauacauuuuagug

SEQ ID NO: 198684 - RNA, 32 nt, Homo Sapiens
aggagggccccggcggccgaccccggucugug

SEQ ID NO: 198685 - RNA, 32 nt, Homo Sapiens
gggggagcgaggggagagggggcugcccccga

SEQ ID NO: 198686 - RNA, 32 nt, Homo Sapiens
ggauucauuuccugcccuuccucaguuuaauc

SEQ ID NO: 198687 - RNA, 32 nt, Homo Sapiens
agccaaugagguccaagaaguucucacccauu

SEQ ID NO: 198688 - RNA, 32 nt, Homo Sapiens
gcuguugaaaaauaauguauauaaaaugcaua

SEQ ID NO: 198689 - RNA, 32 nt, Homo Sapiens
agaaauagcuccgauaaggacuuuuuagaagg

SEQ ID NO: 198690 - RNA, 32 nt, Homo Sapiens
uaacugaauuuauggugcuauuuaaacaauuu

SEQ ID NO: 198691 - RNA, 32 nt, Homo Sapiens
aaacagugagauuuauacuguaucaaugucua

SEQ ID NO: 198692 - RNA, 32 nt, Homo Sapiens
uccucuaucaggaagauugugcaugccguggg

SEQ ID NO: 198693 - RNA, 32 nt, Homo Sapiens
acccuggaaugggguugguuuggacaccccca

SEQ ID NO: 198694 - RNA, 32 nt, Homo Sapiens
accucugggugaugaaguuguuuuagcaaauc

SEQ ID NO: 198695 - RNA, 32 nt, Homo Sapiens
cauaaaagggagcggcggggggcaggggcccc

SEQ ID NO: 198696 - RNA, 32 nt, Homo Sapiens
uucuauaugcaaacaugaugucuuuauuauuc

SEQ ID NO: 198697 - RNA, 31 nt, Homo Sapiens
gccguucugcacugccccuuggccugugugu

SEQ ID NO: 198698 - RNA, 32 nt, Homo Sapiens
caacagcaaaaaggugaucaucugaaagccag

SEQ ID NO: 198699 - RNA, 32 nt, Homo Sapiens
uuaugguugucauggcaaauucaggugauaua

SEQ ID NO: 198700 - RNA, 32 nt, Homo Sapiens
ucuuaaggcaguuuuuauuuuaauuuuauuaa

SEQ ID NO: 198701 - RNA, 32 nt, Homo Sapiens
aauggcagaaauuugcacuuugaacaugugug

SEQ ID NO: 198702 - RNA, 32 nt, Homo Sapiens
cgugagucuccucagcucugcuuaccggugcg

SEQ ID NO: 198703 - RNA, 32 nt, Homo Sapiens
augugacuccugccuuccaggaucucaccauu

SEQ ID NO: 198704 - RNA, 32 nt, Homo Sapiens
cauccauuuuuguagcacacuuuucaaaaaca

SEQ ID NO: 198705 - RNA, 30 nt, Homo Sapiens
ggguagugcaggcgccggguuucccgcggu

SEQ ID NO: 198706 - RNA, 32 nt, Homo Sapiens
guccgggcccggggcgcacggcccgcacgacg

SEQ ID NO: 198707 - RNA, 32 nt, Homo Sapiens
aaaauaugcaucuauuuuuucuugacuucuuu

SEQ ID NO: 198708 - RNA, 32 nt, Homo Sapiens
gucucaccccccgccucuccccggcccccgcc

SEQ ID NO: 198709 - RNA, 32 nt, Homo Sapiens
ucuaucuccaggcacaaugucccugcugucuc

SEQ ID NO: 198710 - RNA, 32 nt, Homo Sapiens
augaagauaaggaaaagaaaaggccauagccu

SEQ ID NO: 198711 - RNA, 31 nt, Homo Sapiens
guggguacuggcugccugcccugggccaggg

SEQ ID NO: 198712 - RNA, 32 nt, Homo Sapiens
gugcucuccucuuuuuuguuuguuuugcacuu

SEQ ID NO: 198713 - RNA, 32 nt, Homo Sapiens
gggaauaggaggagggcagggugagugggggc

SEQ ID NO: 198714 - RNA, 32 nt, Homo Sapiens
acauggcuuagucaaggcgcgcucagaugccg

SEQ ID NO: 198715 - RNA, 32 nt, Homo Sapiens
gaacuaagaaacaaaaaaagugucaaaaccac

SEQ ID NO: 198716 - RNA, 32 nt, Homo Sapiens
gagcuggggauacauuugagagucuggcccac

SEQ ID NO: 198717 - RNA, 32 nt, Homo Sapiens
ucaucuggaaaaaggggauuaaaccauuuacc

SEQ ID NO: 198718 - RNA, 32 nt, Homo Sapiens
gccaggacugggacgcugcugcuggcgccugg

SEQ ID NO: 198719 - RNA, 32 nt, Homo Sapiens
uucugugaccaucaauuaauaugaggguuugu

SEQ ID NO: 198720 - RNA, 32 nt, Homo Sapiens
gucaguguuuuuaaguuuuuguuuuuuuuuua

SEQ ID NO: 198721 - RNA, 32 nt, Homo Sapiens
ccauucagaauguuggggccucuucccuucuc

SEQ ID NO: 198722 - RNA, 32 nt, Homo Sapiens
ccccaucggacgccuccacaggcggcgcaccc

SEQ ID NO: 198723 - RNA, 32 nt, Homo Sapiens
uucuuuguuuuuucuucaguuuuuuguuguuu

SEQ ID NO: 198724 - RNA, 32 nt, Homo Sapiens
cuaaugccccacuucagcaaggaccagucuau

SEQ ID NO: 198725 - RNA, 32 nt, Homo Sapiens
uggugaagaagcugcccugggcuugucguccu

SEQ ID NO: 198726 - RNA, 32 nt, Homo Sapiens
cucccugcucuucugcacuccuggacacaacc

SEQ ID NO: 198727 - RNA, 32 nt, Homo Sapiens
uucaguacauaaauacuaucauuuucauucua

SEQ ID NO: 198728 - RNA, 32 nt, Homo Sapiens
cugaggagugagcggccgagacgcugcucccc

SEQ ID NO: 198729 - RNA, 32 nt, Homo Sapiens
uucacuuuuuucccuuuguauaucaguuacgg

SEQ ID NO: 198730 - RNA, 32 nt, Homo Sapiens
ccuuuggaguacugaggcgcgcacagaguccu

SEQ ID NO: 198731 - RNA, 32 nt, Homo Sapiens
cuggggcuugggggcgggggaggguggcagug

SEQ ID NO: 198732 - RNA, 32 nt, Homo Sapiens
cuccccaccaccacuuuuuuuuuuuuuaaacc

SEQ ID NO: 198733 - RNA, 32 nt, Homo Sapiens
cuuucuuuucuuucguuugucuauugaagaac

SEQ ID NO: 198734 - RNA, 32 nt, Homo Sapiens
uuucuuuuuuaaagccauucuguucuuuggau

SEQ ID NO: 198735 - RNA, 32 nt, Homo Sapiens
cuaacauccaaguuuagaugaguagucauuca

SEQ ID NO: 198736 - RNA, 32 nt, Homo Sapiens
gaaguuaugugcuuuguuauggaggaugaagc

SEQ ID NO: 198737 - RNA, 32 nt, Homo Sapiens
agugugcggcucuggcggcugcguggcggggu

SEQ ID NO: 198738 - RNA, 32 nt, Homo Sapiens
uaaucacauaugugcauagauacacaaucgua

SEQ ID NO: 198739 - RNA, 32 nt, Homo Sapiens
uccacagaaauacaugaaaugucuggucuguc

SEQ ID NO: 198740 - RNA, 32 nt, Homo Sapiens
uuuauauuugaaauuuuauuuaguucuugagu

SEQ ID NO: 198741 - RNA, 32 nt, Homo Sapiens
gggcaacgauuaucuuggaaauuaaagaguca

SEQ ID NO: 198742 - RNA, 32 nt, Homo Sapiens
ucaccccacagucuccucucucuucuuuucua

SEQ ID NO: 198743 - RNA, 32 nt, Homo Sapiens
agcccuauggccucacucuaccucuguccugu

SEQ ID NO: 198744 - RNA, 32 nt, Homo Sapiens
ccggggcugcggggcgaguugucggcccuggg

SEQ ID NO: 198745 - RNA, 28 nt, Homo Sapiens
uucuuguuugccaucauguguuucacac

SEQ ID NO: 198746 - RNA, 32 nt, Homo Sapiens
gagucagcccucgugucccgggcucacagugg

SEQ ID NO: 198747 - RNA, 32 nt, Homo Sapiens
cauguuucuguuucuauaguaauuuagaaauu

SEQ ID NO: 198748 - RNA, 32 nt, Homo Sapiens
gcucugacccugggcuuucacgggccccauuc

SEQ ID NO: 198749 - RNA, 32 nt, Homo Sapiens
uucuuuuaucugcuaaguuguaccuuaauuag

SEQ ID NO: 198750 - RNA, 32 nt, Homo Sapiens
aguuucggacuggccuggccgacgugguaaaa

SEQ ID NO: 198751 - RNA, 32 nt, Homo Sapiens
gcgcgggggagcccggccgagggaugggcugc

SEQ ID NO: 198752 - RNA, 32 nt, Homo Sapiens
gcuuuuuguggaaugaggaaaauguacuaccu

SEQ ID NO: 198753 - RNA, 32 nt, Homo Sapiens
acugcuuuuauguucugucuccuuccauaaau

SEQ ID NO: 198754 - RNA, 32 nt, Homo Sapiens
cccuagcuuuuaauauaaaaguguuuuucuga

SEQ ID NO: 198755 - RNA, 32 nt, Homo Sapiens
ccuggguccccauggcgcuguggcgcggcucc

SEQ ID NO: 198756 - RNA, 32 nt, Homo Sapiens
cggggguugugggaaagcaagccgaguguacg

SEQ ID NO: 198757 - RNA, 32 nt, Homo Sapiens
gacaggcccucccugucuccagggcccccacc

SEQ ID NO: 198758 - RNA, 32 nt, Homo Sapiens
ccauuagagugaacaggcaacccacagaaugg

SEQ ID NO: 198759 - RNA, 32 nt, Homo Sapiens
uuacuggucugggaaacaggauguguuuccuu

SEQ ID NO: 198760 - RNA, 32 nt, Homo Sapiens
ugcuccugugcagcuggugaacuuugccuauc

SEQ ID NO: 198761 - RNA, 32 nt, Homo Sapiens
uccugaccuagugaucugcccuccucagccuc

SEQ ID NO: 198762 - RNA, 32 nt, Homo Sapiens
caaccacgggguggggguggggcgcgcaucaa

SEQ ID NO: 198763 - RNA, 32 nt, Homo Sapiens
ucucccgguggaagccucgcaacgaagggccg

SEQ ID NO: 198764 - RNA, 32 nt, Homo Sapiens
uguauuuuucuuuuccauuucguuccaaauaa

SEQ ID NO: 198765 - RNA, 32 nt, Homo Sapiens
gcuuauagaagagaaagauauaccuuccgaag

SEQ ID NO: 198766 - RNA, 32 nt, Homo Sapiens
aaaggaacagaaaagaaacgcagagaucauag

SEQ ID NO: 198767 - RNA, 32 nt, Homo Sapiens
uuguuguuuauuucuucagugaacauugucuu

SEQ ID NO: 198768 - RNA, 32 nt, Homo Sapiens
aggacaaagaauaccguuaugauuauuuaauc

SEQ ID NO: 198769 - RNA, 32 nt, Homo Sapiens
auucgaccauucucuuugaacucuucugcagu

SEQ ID NO: 198770 - RNA, 32 nt, Homo Sapiens
cuuccuagguccucuccuucugaugggaccac

SEQ ID NO: 198771 - RNA, 32 nt, Homo Sapiens
gcccucagggucggccgcuuucccucuggacc

SEQ ID NO: 198772 - RNA, 32 nt, Homo Sapiens
guccugagauaaaagauucaguuuuacgaaug

SEQ ID NO: 198773 - RNA, 32 nt, Homo Sapiens
ccugugcuccccagcccccucccccaugcaga

SEQ ID NO: 198774 - RNA, 32 nt, Homo Sapiens
uggggcucgcaaccacccaaugaucgauucag

SEQ ID NO: 198775 - RNA, 32 nt, Homo Sapiens
cuguugaugccgccgccgcgccgcccuccgag

SEQ ID NO: 198776 - RNA, 32 nt, Homo Sapiens
aguaucucacuuuggaggaaaggccagguuug

SEQ ID NO: 198777 - RNA, 32 nt, Homo Sapiens
agccccggggguagcggcggcgcgagcagggg

SEQ ID NO: 198778 - RNA, 32 nt, Homo Sapiens
ugcccccugccagccgacccuccuggccuucc

SEQ ID NO: 198779 - RNA, 32 nt, Homo Sapiens
cagaacauagauauguauucagcuugucuuca

SEQ ID NO: 198780 - RNA, 32 nt, Homo Sapiens
caaagaagugcuuccagcaucacuccagcaac

SEQ ID NO: 198781 - RNA, 32 nt, Homo Sapiens
cugaguggaccccacggcucucucccacgccu

SEQ ID NO: 198782 - RNA, 32 nt, Homo Sapiens
cugaaaccaaaauauauuugcuucaucugccc

SEQ ID NO: 198783 - RNA, 32 nt, Homo Sapiens
auauacugcgcuuaauauuugcugucuuuuuc

SEQ ID NO: 198784 - RNA, 32 nt, Homo Sapiens
aaagguuaagaaggcuuuuuugcucuguagcc

SEQ ID NO: 198785 - RNA, 32 nt, Homo Sapiens
uuuuacugcuggauugugcaagauauuuaacc

SEQ ID NO: 198786 - RNA, 32 nt, Homo Sapiens
gguacuugauaaauaaucauagucuuaaaugu

SEQ ID NO: 198787 - RNA, 32 nt, Homo Sapiens
ggccuggcccaccgugggccucagagcugcug

SEQ ID NO: 198788 - RNA, 32 nt, Homo Sapiens
ggagcucagaaggaagcagaagacacacagag

SEQ ID NO: 198789 - RNA, 32 nt, Homo Sapiens
gagaugaguauuugcagagcggugcuggaauc

SEQ ID NO: 198790 - RNA, 32 nt, Homo Sapiens
cgugagccaccgcgcccggccugaggcuggua

SEQ ID NO: 198791 - RNA, 32 nt, Homo Sapiens
cagcccugcaccugccugccacuuccccaccg

SEQ ID NO: 198792 - RNA, 32 nt, Homo Sapiens
gacucuaaauaguugauuuuucugccugaagg

SEQ ID NO: 198793 - RNA, 32 nt, Homo Sapiens
uguucccuccaggucagcugcccccaaacccc

SEQ ID NO: 198794 - RNA, 32 nt, Homo Sapiens
cccucauugugucaaagagugugccaaucuau

SEQ ID NO: 198795 - RNA, 32 nt, Homo Sapiens
uucaacugcaccauguucuggcacuguauuuu

SEQ ID NO: 198796 - RNA, 32 nt, Homo Sapiens
ggcaguccucacagcccucgcucgcucuuggc

SEQ ID NO: 198797 - RNA, 32 nt, Homo Sapiens
augcuuuucuaaaaaugcaaaacuaugauguu

SEQ ID NO: 198798 - RNA, 32 nt, Homo Sapiens
aucuaaauucagaaaauuuaauuuucauagua

SEQ ID NO: 198799 - RNA, 32 nt, Homo Sapiens
auaccaaaugcauuguuguucugcucaauaca

SEQ ID NO: 198800 - RNA, 32 nt, Homo Sapiens
ggccaggcgcggugacucacaccuguaauccg

SEQ ID NO: 198801 - RNA, 32 nt, Homo Sapiens
caaaaggacaaagagguggccgagagaguuuu

SEQ ID NO: 198802 - RNA, 32 nt, Homo Sapiens
uuuguuaaaaauaccuccccaacuccugcuaa

SEQ ID NO: 198803 - RNA, 32 nt, Homo Sapiens
cagaggcagcggguggggcgccuggguggucc

SEQ ID NO: 198804 - RNA, 32 nt, Homo Sapiens
ugccuagggcccaucaaugucagaugcagcca

SEQ ID NO: 198805 - RNA, 31 nt, Homo Sapiens
acugugaaauaaauauaccauauuagcuacc

SEQ ID NO: 198806 - RNA, 32 nt, Homo Sapiens
gaacaguacauuuuugucuuuaucucaaguau

SEQ ID NO: 198807 - RNA, 32 nt, Homo Sapiens
aggcacuauguuaagaaauauauuuauuugcu

SEQ ID NO: 198808 - RNA, 32 nt, Homo Sapiens
ccaggucuccucuuccucucccugaagaaacc

SEQ ID NO: 198809 - RNA, 32 nt, Homo Sapiens
aacaggaauuugaaaugcaagcauauaucugg

SEQ ID NO: 198810 - RNA, 32 nt, Homo Sapiens
ucgugcggggcaaaaugaggagcagaggcaug

SEQ ID NO: 198811 - RNA, 32 nt, Homo Sapiens
ccccacccugccagcccuucuucuggcuuccc

SEQ ID NO: 198812 - RNA, 32 nt, Homo Sapiens
ugcauuugugacuuaaagguugacuggucaaa

SEQ ID NO: 198813 - RNA, 32 nt, Homo Sapiens
uugcccugccaucaucugggguggcuggcugu

SEQ ID NO: 198814 - RNA, 32 nt, Homo Sapiens
acuuuugaauaaaagcaaaaguacaaauguca

SEQ ID NO: 198815 - RNA, 32 nt, Homo Sapiens
guaaaaacuccugagccuggcgagccaggcag

SEQ ID NO: 198816 - RNA, 32 nt, Homo Sapiens
ggccacuugcuuaauugcauuucuggcaggga

SEQ ID NO: 198817 - RNA, 32 nt, Homo Sapiens
agggcgcugcugguuccugggggacugggugg

SEQ ID NO: 198818 - RNA, 32 nt, Homo Sapiens
gagacacuaaauaaauauaauggauucaucca

SEQ ID NO: 198819 - RNA, 32 nt, Homo Sapiens
ccccgagugacaccccauccccucccaucccc

SEQ ID NO: 198820 - RNA, 32 nt, Homo Sapiens
gccucugaagccagugggggcuccucagauag

SEQ ID NO: 198821 - RNA, 32 nt, Homo Sapiens
ccuggcccagaggcuccugaagaugcugggcg

SEQ ID NO: 198822 - RNA, 32 nt, Homo Sapiens
cuuguuccuuuuccugacuccuccuugcaaac

SEQ ID NO: 198823 - RNA, 32 nt, Homo Sapiens
cuccgggacccggcccgcgccaccgcccccgu

SEQ ID NO: 198824 - RNA, 32 nt, Homo Sapiens
guuggacagguugcccacuagauggagugaga

SEQ ID NO: 198825 - RNA, 32 nt, Homo Sapiens
aagcagcugagguggguggaucaugaggucag

SEQ ID NO: 198826 - RNA, 32 nt, Homo Sapiens
gaacuggaagcagcuucuagagaacagcuuca

SEQ ID NO: 198827 - RNA, 32 nt, Homo Sapiens
cuccuccccagggaagacccugaccguguaca

SEQ ID NO: 198828 - RNA, 32 nt, Homo Sapiens
aguaagggcuccuggggguuggcuggagaugg

SEQ ID NO: 198829 - RNA, 32 nt, Homo Sapiens
cggcccagggcgccggcccacccuucccuccg

SEQ ID NO: 198830 - RNA, 32 nt, Homo Sapiens
uucgccggguccgcugacagggaggcuacccg

SEQ ID NO: 198831 - RNA, 32 nt, Homo Sapiens
ggaaauuuggggauuauuuauccuccugggga

SEQ ID NO: 198832 - RNA, 32 nt, Homo Sapiens
uuaccuuauugauauuggucugaugguuugug

SEQ ID NO: 198833 - RNA, 32 nt, Homo Sapiens
uguuucaguucuaguuuguauuuuucucucag

SEQ ID NO: 198834 - RNA, 32 nt, Homo Sapiens
caugggcugccuaggagcugccugcacggcac

SEQ ID NO: 198835 - RNA, 32 nt, Homo Sapiens
guuucuucccccuuuguaggaaucagauaccu

SEQ ID NO: 198836 - RNA, 32 nt, Homo Sapiens
gccgccagccccacgggcagccucggcagucu

SEQ ID NO: 198837 - RNA, 32 nt, Homo Sapiens
uugauuuagaauuuaaauaaacacuaugaggc

SEQ ID NO: 198838 - RNA, 32 nt, Homo Sapiens
ugccguggagccgcauccacuguggauuauaa

SEQ ID NO: 198839 - RNA, 32 nt, Homo Sapiens
ucuuauuuugguucuuuuuuuuauuuccacaa

SEQ ID NO: 198840 - RNA, 32 nt, Homo Sapiens
ccccauggauacugaggcauagcuguacugug

SEQ ID NO: 198841 - RNA, 32 nt, Homo Sapiens
uaaauaaucacguauuguggggaggggaguuc

SEQ ID NO: 198842 - RNA, 32 nt, Homo Sapiens
caaagcuggguguuuuagcauuacuguguaaa

SEQ ID NO: 198843 - RNA, 32 nt, Homo Sapiens
gccccccucgcgcaccccggccccgccucaca

SEQ ID NO: 198844 - RNA, 32 nt, Homo Sapiens
acuuccuucugccuuccaacccucaccuuccc

SEQ ID NO: 198845 - RNA, 32 nt, Homo Sapiens
ggugccuccugcauguccugcugcccugagcu

SEQ ID NO: 198846 - RNA, 32 nt, Homo Sapiens
ggaugcagaugggugcuaucagagccucuccc

SEQ ID NO: 198847 - RNA, 32 nt, Homo Sapiens
cauggggccuccuuggccuccucuuggagagu

SEQ ID NO: 198848 - RNA, 32 nt, Homo Sapiens
gauuuuacaucauucuugcugaacuucaacuu

SEQ ID NO: 198849 - RNA, 32 nt, Homo Sapiens
guuggcuggaggggcugcugcugggaacaccu

SEQ ID NO: 198850 - RNA, 32 nt, Homo Sapiens
cagcgaggaugcggggcuggucugcaccggua

SEQ ID NO: 198851 - RNA, 32 nt, Homo Sapiens
ucucaagcaggaccccaccccuaguaagcauc

SEQ ID NO: 198852 - RNA, 32 nt, Homo Sapiens
cuaacugaggaaccugagcagaugccuugacc

SEQ ID NO: 198853 - RNA, 32 nt, Homo Sapiens
uaugcugaagggaaaaauauaccuguauaaga

SEQ ID NO: 198854 - RNA, 32 nt, Homo Sapiens
uuugauuucuucaugcuuuugcccuucucaag

SEQ ID NO: 198855 - RNA, 32 nt, Homo Sapiens
cuucacuccgcggcacccucaaaccccagccc

SEQ ID NO: 198856 - RNA, 32 nt, Homo Sapiens
gaccgcuugagcccaggaguuugagacuguag

SEQ ID NO: 198857 - RNA, 32 nt, Homo Sapiens
agaguuucaugacuuuuuccugccuacuaucu

SEQ ID NO: 198858 - RNA, 32 nt, Homo Sapiens
ugagaggagagcagcucugagcccugcuucca

SEQ ID NO: 198859 - RNA, 32 nt, Homo Sapiens
augaucuuguuacugugauauuuuaaauaucc

SEQ ID NO: 198860 - RNA, 32 nt, Homo Sapiens
guuuuuaugaagucucuuucugaucacgaaca

SEQ ID NO: 198861 - RNA, 32 nt, Homo Sapiens
agagcuaucuggugcuggugugccagccccuc

SEQ ID NO: 198862 - RNA, 32 nt, Homo Sapiens
aggguuuuugcauguacaguuuuuacaagaau

SEQ ID NO: 198863 - RNA, 32 nt, Homo Sapiens
caggcagugugaggggugcagcagccaggagg

SEQ ID NO: 198864 - RNA, 32 nt, Homo Sapiens
ucuccugcaugucaggagcaucagugaggcuu

SEQ ID NO: 198865 - RNA, 32 nt, Homo Sapiens
ccccauauuggcaacacccccagcgccacccc

SEQ ID NO: 198866 - RNA, 32 nt, Homo Sapiens
ucuuucagaaaaauguuuuuccaauuaguaua

SEQ ID NO: 198867 - RNA, 32 nt, Homo Sapiens
ccuccaaagcuugucuuugccuaauauggagc

SEQ ID NO: 198868 - RNA, 31 nt, Homo Sapiens
ggcgagauggcggcggagguguugccgagug

SEQ ID NO: 198869 - RNA, 32 nt, Homo Sapiens
aggaacaggcaugaagauauugccauacaauu

SEQ ID NO: 198870 - RNA, 32 nt, Homo Sapiens
gcucagaccuuccuaggcuuugcaaugcuggg

SEQ ID NO: 198871 - RNA, 32 nt, Homo Sapiens
uccaaucucauuugucacuggauaauucacgc

SEQ ID NO: 198872 - RNA, 32 nt, Homo Sapiens
agaggcgggauccgagcgcgccggcggggcgc

SEQ ID NO: 198873 - RNA, 32 nt, Homo Sapiens
agaccaguucccuggaggccacccacccugug

SEQ ID NO: 198874 - RNA, 32 nt, Homo Sapiens
ugugcuucccggugccagggugucauggaagg

SEQ ID NO: 198875 - RNA, 32 nt, Homo Sapiens
ccggccaaacuccccuagacagaugggugacc

SEQ ID NO: 198876 - RNA, 32 nt, Homo Sapiens
aaaagaugcccuagcagcaauccaccaguuuu

SEQ ID NO: 198877 - RNA, 32 nt, Homo Sapiens
auaaaugcagcugucaugcaguucuuuucuuu

SEQ ID NO: 198878 - RNA, 32 nt, Homo Sapiens
agccagcuugacuauuagaaaaguaugaaacu

SEQ ID NO: 198879 - RNA, 32 nt, Homo Sapiens
aaguagagaagcugcucuguguggugguuaac

SEQ ID NO: 198880 - RNA, 32 nt, Homo Sapiens
ccacaccuggcccaugcuggguuuuugugcau

SEQ ID NO: 198881 - RNA, 32 nt, Homo Sapiens
ccuccggggcccuccgccugcucccagccaug

SEQ ID NO: 198882 - RNA, 32 nt, Homo Sapiens
uggugaaaaaauauccccaaaguggaaauuau

SEQ ID NO: 198883 - RNA, 32 nt, Homo Sapiens
gcagauacaaauaaaauacagauuguccuuua

SEQ ID NO: 198884 - RNA, 32 nt, Homo Sapiens
ccuaucgcgccccaagcuccucacgugccucc

SEQ ID NO: 198885 - RNA, 32 nt, Homo Sapiens
gauguaugaaauguauguacagaccagagaug

SEQ ID NO: 198886 - RNA, 29 nt, Homo Sapiens
ucuuaagguauccaauccauaaacacggg

SEQ ID NO: 198887 - RNA, 32 nt, Homo Sapiens
ccguggcgcccuucuacccagcccagugugcg

SEQ ID NO: 198888 - RNA, 32 nt, Homo Sapiens
gaacaagucaaucagugacuagcuuccuguag

SEQ ID NO: 198889 - RNA, 32 nt, Homo Sapiens
gaggggacuaaaucauguaugcuugguucuuu

SEQ ID NO: 198890 - RNA, 32 nt, Homo Sapiens
gaacauuuccuuggcuggacagaugggguuau

SEQ ID NO: 198891 - RNA, 32 nt, Homo Sapiens
uacuaauuucugaugaaaauaaaguuguuucu

SEQ ID NO: 198892 - RNA, 32 nt, Homo Sapiens
cugcagcugcgcacagucgcauuucuuucccc

SEQ ID NO: 198893 - RNA, 32 nt, Homo Sapiens
aggucacuuccacuucaaaccuucagugaggg

SEQ ID NO: 198894 - RNA, 31 nt, Homo Sapiens
cgagggcugccggcacuaggcgcagagccgc

SEQ ID NO: 198895 - RNA, 32 nt, Homo Sapiens
cccaggaacagagacuccuaguugagugauag

SEQ ID NO: 198896 - RNA, 31 nt, Homo Sapiens
aaaccgcugccggugaguuuugggaguauuu

SEQ ID NO: 198897 - RNA, 32 nt, Homo Sapiens
aagaguaaguaucucacaaauaggaaauaaaa

SEQ ID NO: 198898 - RNA, 32 nt, Homo Sapiens
guguauuuuuauucuaauaaacuuuuguguuc

SEQ ID NO: 198899 - RNA, 32 nt, Homo Sapiens
aacuccaucgccaucuucuucccuuaacucca

SEQ ID NO: 198900 - RNA, 32 nt, Homo Sapiens
aaauauggaaagacauucacuagaagcucugc

SEQ ID NO: 198901 - RNA, 32 nt, Homo Sapiens
ugggccaggggcggccggacccgucccuccac

SEQ ID NO: 198902 - RNA, 32 nt, Homo Sapiens
uugaaauacuaagaucagacuuugaaaauuuu

SEQ ID NO: 198903 - RNA, 32 nt, Homo Sapiens
gaaaaguaaaauccaaaauguuagcaaaacaa

SEQ ID NO: 198904 - RNA, 32 nt, Homo Sapiens
gauauaguacuugaaauucuuaccagaaaauu

SEQ ID NO: 198905 - RNA, 32 nt, Homo Sapiens
cugcacuccgucgccggaagugccaccgagaa

SEQ ID NO: 198906 - RNA, 32 nt, Homo Sapiens
aaagaaaaaaaauuauuaaauguuucucacau

SEQ ID NO: 198907 - RNA, 27 nt, Homo Sapiens
ccugagaaauaaaaagccugucauuuc

SEQ ID NO: 198908 - RNA, 32 nt, Homo Sapiens
cugagacuccagcagaguuggggcuggaacuu

SEQ ID NO: 198909 - RNA, 32 nt, Homo Sapiens
ugcuucacuuggacucacuggaugggacuuga

SEQ ID NO: 198910 - RNA, 32 nt, Homo Sapiens
caauuuugggggagccgaggaacugcgggggc

SEQ ID NO: 198911 - RNA, 32 nt, Homo Sapiens
cucugcccauccccaccccaccccgacguccc

SEQ ID NO: 198912 - RNA, 32 nt, Homo Sapiens
acagauucauaaacuuuuaugacuuauauugu

SEQ ID NO: 198913 - RNA, 32 nt, Homo Sapiens
uuaccuuugcugucacuuucucucuuauaaau

SEQ ID NO: 198914 - RNA, 32 nt, Homo Sapiens
gaccaucaggugccggcugggggcuguaggca

SEQ ID NO: 198915 - RNA, 32 nt, Homo Sapiens
aaaucacgcucgcgugcuucggaagcauccgg

SEQ ID NO: 198916 - RNA, 32 nt, Homo Sapiens
agcaguaggaggaguauaaauacagccagaaa

SEQ ID NO: 198917 - RNA, 32 nt, Homo Sapiens
gagggagcaaaaaggaaaauacaggauacaau

SEQ ID NO: 198918 - RNA, 32 nt, Homo Sapiens
uuuuaauguuucccaugcacucauuuaguuug

SEQ ID NO: 198919 - RNA, 32 nt, Homo Sapiens
ggcaggcuggucucgugauagugagugagugc

SEQ ID NO: 198920 - RNA, 32 nt, Homo Sapiens
cacuuacaaagagucuuuaucuagacaacaua

SEQ ID NO: 198921 - RNA, 32 nt, Homo Sapiens
cgagucgccgccggcgucggugccgucaaaga

SEQ ID NO: 198922 - RNA, 32 nt, Homo Sapiens
ggcugccccucgccccagcauccaaguccucc

SEQ ID NO: 198923 - RNA, 32 nt, Homo Sapiens
uccuccgaaaaaccccugaggaccccccccca

SEQ ID NO: 198924 - RNA, 32 nt, Homo Sapiens
auaccuucauuuaauauaucaauauugggccu

SEQ ID NO: 198925 - RNA, 32 nt, Homo Sapiens
uucuaaucagaagccacugauuuuauaauaaa

SEQ ID NO: 198926 - RNA, 32 nt, Homo Sapiens
ggggacccuucagcugacgaugucccccgggg

SEQ ID NO: 198927 - RNA, 32 nt, Homo Sapiens
agguuauucuggguuaauuuuaucuaaugaag

SEQ ID NO: 198928 - RNA, 32 nt, Homo Sapiens
cccucauucugcacagaagguuuauugguucc

SEQ ID NO: 198929 - RNA, 32 nt, Homo Sapiens
ccagccuuuccacggcgcccaccgcagugccg

SEQ ID NO: 198930 - RNA, 31 nt, Homo Sapiens
ugaguggacugaggccugccccgcccagacu

SEQ ID NO: 198931 - RNA, 32 nt, Homo Sapiens
gacagaggaggacuacgcguguccuugggcgg

SEQ ID NO: 198932 - RNA, 32 nt, Homo Sapiens
ucuaugguucuauuucuuuuuaucuuuucccu

SEQ ID NO: 198933 - RNA, 32 nt, Homo Sapiens
agauccacauauagacauuuuaaagacuuuuc

SEQ ID NO: 198934 - RNA, 32 nt, Homo Sapiens
guuuaaaagaucaaauuagccuuaaugcugga

SEQ ID NO: 198935 - RNA, 32 nt, Homo Sapiens
ugaaaagaaagauuaaaccuacuuucauaugu

SEQ ID NO: 198936 - RNA, 32 nt, Homo Sapiens
cuaaaaauauuguuauaaugauaauauccuua

SEQ ID NO: 198937 - RNA, 32 nt, Homo Sapiens
uagagagaggagaggaggggaagagccucagu

SEQ ID NO: 198938 - RNA, 32 nt, Homo Sapiens
caaacauuucauccguguguauguguaugugu

SEQ ID NO: 198939 - RNA, 32 nt, Homo Sapiens
aucccuaaagaaaacaaacaaacaaacaaaaa

SEQ ID NO: 198940 - RNA, 32 nt, Homo Sapiens
uuguaagguauuuuacacguguccugauuuug

SEQ ID NO: 198941 - RNA, 32 nt, Homo Sapiens
aauguuucaaggauuccugaccauaagugaca

SEQ ID NO: 198942 - RNA, 32 nt, Homo Sapiens
caccccuggaccugccuugguugugucaucug

SEQ ID NO: 198943 - RNA, 32 nt, Homo Sapiens
cauguccuccgcuccgcccggcccccuagcug

SEQ ID NO: 198944 - RNA, 32 nt, Homo Sapiens
gacaaaaauuguuuugacauagguucccuagg

SEQ ID NO: 198945 - RNA, 32 nt, Homo Sapiens
gucauuauuuuuguuagcaaagauuaaaugug

SEQ ID NO: 198946 - RNA, 32 nt, Homo Sapiens
guggagagcugccagcagcaugaggaggccgg

SEQ ID NO: 198947 - RNA, 32 nt, Homo Sapiens
augcacucacuuucuuacuacgccuccucccc

SEQ ID NO: 198948 - RNA, 32 nt, Homo Sapiens
augcccagccccagccagcugucccugccuca

SEQ ID NO: 198949 - RNA, 27 nt, Homo Sapiens
uuuuuacuccccuucagccccccggcu

SEQ ID NO: 198950 - RNA, 32 nt, Homo Sapiens
ggauauacaaauagcagcauauuuuuuagaaa

SEQ ID NO: 198951 - RNA, 32 nt, Homo Sapiens
aauauucaauccaaaauuaacucuguaaaugu

SEQ ID NO: 198952 - RNA, 32 nt, Homo Sapiens
guagccugucauucagggauaugugaucugaa

SEQ ID NO: 198953 - RNA, 32 nt, Homo Sapiens
cccaugucucuacuguagcuuccaggccguuu

SEQ ID NO: 198954 - RNA, 32 nt, Homo Sapiens
uacuguaggggcuuaauaauguuuaucaaaua

SEQ ID NO: 198955 - RNA, 32 nt, Homo Sapiens
caagguuuuuauuucauuuuggcucugucauu

SEQ ID NO: 198956 - RNA, 32 nt, Homo Sapiens
ggccuugaugaaggguuaaaggucuauuauuc

SEQ ID NO: 198957 - RNA, 30 nt, Homo Sapiens
uccccgcgcgcgcccgguggagacuucgau

SEQ ID NO: 198958 - RNA, 32 nt, Homo Sapiens
gugccuuucacuucuuuuuuuccccagaaauc

SEQ ID NO: 198959 - RNA, 32 nt, Homo Sapiens
cacugcacuccagccugggcugcagggugagg

SEQ ID NO: 198960 - RNA, 32 nt, Homo Sapiens
auucauaaaaauuucuuuauaaaugauguuuu

SEQ ID NO: 198961 - RNA, 32 nt, Homo Sapiens
ccccagcccggcuguguccccggcgccccgga

SEQ ID NO: 198962 - RNA, 31 nt, Homo Sapiens
uggagccuuggguaccccugaguuaagggag

SEQ ID NO: 198963 - RNA, 32 nt, Homo Sapiens
acuuuguuuuuacuuuuccguuucauucuaaa

SEQ ID NO: 198964 - RNA, 32 nt, Homo Sapiens
cucaucacagaaaugaaauacaguggucucuc

SEQ ID NO: 198965 - RNA, 32 nt, Homo Sapiens
ggguguggggcagucuggguccucucaucauc

SEQ ID NO: 198966 - RNA, 32 nt, Homo Sapiens
ccguuccgcucccagcggcuccaguguaaauu

SEQ ID NO: 198967 - RNA, 32 nt, Homo Sapiens
ggaaagggugggguccagcugcauugcgaaug

SEQ ID NO: 198968 - RNA, 32 nt, Homo Sapiens
gaauucauauuauggagaaccuaacaauuuaa

SEQ ID NO: 198969 - RNA, 32 nt, Homo Sapiens
cugccaccaaaggacuugaucugaguugggag

SEQ ID NO: 198970 - RNA, 32 nt, Homo Sapiens
aguuaguucuaccuggugcccauguucugauu

SEQ ID NO: 198971 - RNA, 32 nt, Homo Sapiens
cacuuggaauauuuuuaccaccuauccugauc

SEQ ID NO: 198972 - RNA, 32 nt, Homo Sapiens
aagaucagugguuaucuuugcagacgccacca

SEQ ID NO: 198973 - RNA, 32 nt, Homo Sapiens
ucugggaaggcacagcuggcugcagggaacgg

SEQ ID NO: 198974 - RNA, 32 nt, Homo Sapiens
aaugcagugaauugugaccaaguuauaaauca

SEQ ID NO: 198975 - RNA, 32 nt, Homo Sapiens
cuccagggagcaccagcgacugagaggccaca

SEQ ID NO: 198976 - RNA, 32 nt, Homo Sapiens
ugcagacuuuugcggugaguguuacagcucuu

SEQ ID NO: 198977 - RNA, 32 nt, Homo Sapiens
acgcgccgaugaccacgcgggccgggcugugc

SEQ ID NO: 198978 - RNA, 32 nt, Homo Sapiens
ucaaagcaguuuugcgcccccgcaagggaaug

SEQ ID NO: 198979 - RNA, 32 nt, Homo Sapiens
guaauucugaaacacuguagaauagauaaaaa

SEQ ID NO: 198980 - RNA, 32 nt, Homo Sapiens
auugcucuucaaauacacagauauuggggcaa

SEQ ID NO: 198981 - RNA, 32 nt, Homo Sapiens
uucuuguuuuuggcauguuguuugauuucuuu

SEQ ID NO: 198982 - RNA, 32 nt, Homo Sapiens
ugguuggguugacacuaacuuuucuuaagaug

SEQ ID NO: 198983 - RNA, 32 nt, Homo Sapiens
gaggccccggccagcccuucuccuccaccagu

SEQ ID NO: 198984 - RNA, 32 nt, Homo Sapiens
ggguguggguccguugaagcgagccgccucca

SEQ ID NO: 198985 - RNA, 32 nt, Homo Sapiens
auacuuucuuuucuuuauuuuacaaagcuuua

SEQ ID NO: 198986 - RNA, 32 nt, Homo Sapiens
gucagacacagcugcguaacauccauccugcu

SEQ ID NO: 198987 - RNA, 32 nt, Homo Sapiens
gcgcccgcggcgggcgccgaccucuguccuag

SEQ ID NO: 198988 - RNA, 32 nt, Homo Sapiens
gaaaagaaacaaaaauacagugaucaucaaau

SEQ ID NO: 198989 - RNA, 32 nt, Homo Sapiens
uuugacacuccagcaugcuagugaaucaugua

SEQ ID NO: 198990 - RNA, 32 nt, Homo Sapiens
ccucuccuugccuuggccccagccucugcuuc

SEQ ID NO: 198991 - RNA, 32 nt, Homo Sapiens
ucccaaagaacaacaaugcauugaaguacauu

SEQ ID NO: 198992 - RNA, 32 nt, Homo Sapiens
uagcuuuauuuuucauauuuuccauaaauggc

SEQ ID NO: 198993 - RNA, 32 nt, Homo Sapiens
gauuuuuuaaauuuuuguuuuaucugaauuuc

SEQ ID NO: 198994 - RNA, 32 nt, Homo Sapiens
aaucaccacggaacuccugugcaugaggcacu

SEQ ID NO: 198995 - RNA, 32 nt, Homo Sapiens
agaucuguuucaucaaauauccucaauuacaa

SEQ ID NO: 198996 - RNA, 32 nt, Homo Sapiens
uauccaacaugaaauucccuucuuuuguuauu

SEQ ID NO: 198997 - RNA, 32 nt, Homo Sapiens
auccaucuccuccucuaaauuaaacaggauuu

SEQ ID NO: 198998 - RNA, 32 nt, Homo Sapiens
gucagccucggagacagccugguucccugugg

SEQ ID NO: 198999 - RNA, 32 nt, Homo Sapiens
augaucucaaccucuucgccagcccuccugac

SEQ ID NO: 199000 - RNA, 32 nt, Homo Sapiens
uggaggcugcagugaguugugaucgugucagu

SEQ ID NO: 199001 - RNA, 32 nt, Homo Sapiens
ccaguguuuggucuuuagcugaaacagacauu

SEQ ID NO: 199002 - RNA, 32 nt, Homo Sapiens
ccaaaggagauuaacuuuuuaaucaguggacu

SEQ ID NO: 199003 - RNA, 32 nt, Homo Sapiens
gcuaacauuucccccaaucacaauucuauuuu

SEQ ID NO: 199004 - RNA, 32 nt, Homo Sapiens
gagucuggaaaacaaaguuuaaugauucagaa

SEQ ID NO: 199005 - RNA, 32 nt, Homo Sapiens
gauugauuaacucgagcggagccccggccucc

SEQ ID NO: 199006 - RNA, 32 nt, Homo Sapiens
gacauguggcaucggauggccacagggcgggg

SEQ ID NO: 199007 - RNA, 32 nt, Homo Sapiens
gccaucgccggggcgccuguucucuguccgga

SEQ ID NO: 199008 - RNA, 32 nt, Homo Sapiens
ggaggagagggcccgagaaggggccauaccag

SEQ ID NO: 199009 - RNA, 32 nt, Homo Sapiens
gaguaggggaccgcgggcuccgcggcagaaau

SEQ ID NO: 199010 - RNA, 31 nt, Homo Sapiens
auuggggugugcucaggguugugaguguguu

SEQ ID NO: 199011 - RNA, 32 nt, Homo Sapiens
guccugcccucccaacuuucuauccuccccuc

SEQ ID NO: 199012 - RNA, 32 nt, Homo Sapiens
ggccuuucccucagguuuuccucuuccccacu

SEQ ID NO: 199013 - RNA, 32 nt, Homo Sapiens
ugaccagaggcuggaguggggguguguuauag

SEQ ID NO: 199014 - RNA, 31 nt, Homo Sapiens
aggcugccgggggcugcagacauggagggcc

SEQ ID NO: 199015 - RNA, 32 nt, Homo Sapiens
ucaaugaugaguuuucuuaacagaauuugguu

SEQ ID NO: 199016 - RNA, 32 nt, Homo Sapiens
agagaacaucuuccagcugccucuuucacacc

SEQ ID NO: 199017 - RNA, 32 nt, Homo Sapiens
gagaacuucacgggacugucgcugguuggaga

SEQ ID NO: 199018 - RNA, 32 nt, Homo Sapiens
aggucacauuuuauuccuggaugcuuuauguc

SEQ ID NO: 199019 - RNA, 32 nt, Homo Sapiens
ugguaauuugugccuuuuaauaaaguggaagc

SEQ ID NO: 199020 - RNA, 32 nt, Homo Sapiens
aaucacagucaucuuuaacagcuuacacugau

SEQ ID NO: 199021 - RNA, 32 nt, Homo Sapiens
cucacgcaggcccauggcggcggccgcggcgg

SEQ ID NO: 199022 - RNA, 32 nt, Homo Sapiens
cacccaccuuucccggcccaagccagcgcacc

SEQ ID NO: 199023 - RNA, 32 nt, Homo Sapiens
gagacucacagcaacucuccauuauagcuuuc

SEQ ID NO: 199024 - RNA, 32 nt, Homo Sapiens
gcggcuuagccgaugaagcagcagccgacuga

SEQ ID NO: 199025 - RNA, 32 nt, Homo Sapiens
agaggaaucaugucuguaacuuaugcucaaaa

SEQ ID NO: 199026 - RNA, 32 nt, Homo Sapiens
aaauuacaaaaauuagccgggagugguggugg

SEQ ID NO: 199027 - RNA, 32 nt, Homo Sapiens
uuggcucauaaaauuggacucuguaaaacaac

SEQ ID NO: 199028 - RNA, 32 nt, Homo Sapiens
cucaaauaaaaauauucuuuuaaaaauguggu

SEQ ID NO: 199029 - RNA, 32 nt, Homo Sapiens
caauagugaaaugugaacacuuucuaauucua

SEQ ID NO: 199030 - RNA, 32 nt, Homo Sapiens
acgucugcauuuauuuccuaaaagcacaaaug

SEQ ID NO: 199031 - RNA, 32 nt, Homo Sapiens
uucuagagagcagaagaaaauauuggccaaau

SEQ ID NO: 199032 - RNA, 32 nt, Homo Sapiens
cagagauggaaaucuagaauuucuugcagcuu

SEQ ID NO: 199033 - RNA, 32 nt, Homo Sapiens
cucaagaggaagagccaaugugugaggaguug

SEQ ID NO: 199034 - RNA, 32 nt, Homo Sapiens
ucaugcauuucagugguaaccaaaaaauaauu

SEQ ID NO: 199035 - RNA, 32 nt, Homo Sapiens
ugcuuaggaaaauuauuuggaacuuaguaacc

SEQ ID NO: 199036 - RNA, 32 nt, Homo Sapiens
uccgcugggacuaggaucaggguguggacacc

SEQ ID NO: 199037 - RNA, 32 nt, Homo Sapiens
ugugugggugacugcucugugcugcgccuucu

SEQ ID NO: 199038 - RNA, 32 nt, Homo Sapiens
auuucaagguaagagccuuaaaaguuaaaaac

SEQ ID NO: 199039 - RNA, 32 nt, Homo Sapiens
acccacuugacugugugggugcauugagaaca

SEQ ID NO: 199040 - RNA, 32 nt, Homo Sapiens
agggaguccugcccccuccccccacuuccuuu

SEQ ID NO: 199041 - RNA, 32 nt, Homo Sapiens
cugaacgugcggcugggccgggacagcagggc

SEQ ID NO: 199042 - RNA, 32 nt, Homo Sapiens
gguaaagcucugggccccuccucccugcugcc

SEQ ID NO: 199043 - RNA, 32 nt, Homo Sapiens
augcauagaaagauucacacuggcgagaaacc

SEQ ID NO: 199044 - RNA, 32 nt, Homo Sapiens
uaugaucccccuccggcgugguaugguugggg

SEQ ID NO: 199045 - RNA, 32 nt, Homo Sapiens
gaacucuucuauuuauuaaggaaaaugucaca

SEQ ID NO: 199046 - RNA, 32 nt, Homo Sapiens
cucugaggccccaagggaagggcuucucucua

SEQ ID NO: 199047 - RNA, 32 nt, Homo Sapiens
gacggggguggcggcuucucccgggcugccgc

SEQ ID NO: 199048 - RNA, 32 nt, Homo Sapiens
ucagcccugggcaacauagugagaccccuguc

SEQ ID NO: 199049 - RNA, 31 nt, Homo Sapiens
cccagaauggggggcggggugcgagaagagu

SEQ ID NO: 199050 - RNA, 32 nt, Homo Sapiens
gguccaccacaucgcugcucuuucucacaguc

SEQ ID NO: 199051 - RNA, 32 nt, Homo Sapiens
cgacagcagccagacccugucccggcccaugc

SEQ ID NO: 199052 - RNA, 32 nt, Homo Sapiens
cucagaauccgaaggcucgguuccagcgcagc

SEQ ID NO: 199053 - RNA, 32 nt, Homo Sapiens
uugggcagcgcccuuccucuccacccucccag

SEQ ID NO: 199054 - RNA, 32 nt, Homo Sapiens
ggaccccugcuuccugguucucagucccaccc

SEQ ID NO: 199055 - RNA, 32 nt, Homo Sapiens
gggugcgugcgcggcgacugcgacgggcagug

SEQ ID NO: 199056 - RNA, 32 nt, Homo Sapiens
uaacacccaaaauaaguagaacacugaagauu

SEQ ID NO: 199057 - RNA, 32 nt, Homo Sapiens
agaaccacaaugcacauuagcauauuagucug

SEQ ID NO: 199058 - RNA, 32 nt, Homo Sapiens
acguguagaucuguaaauaaaauugcaguauu

SEQ ID NO: 199059 - RNA, 32 nt, Homo Sapiens
aggaggaggaggagaagcggaugagaucgugg

SEQ ID NO: 199060 - RNA, 32 nt, Homo Sapiens
augcucaugaccaacacauacacgucauagaa

SEQ ID NO: 199061 - RNA, 32 nt, Homo Sapiens
agggauuucaugaaacaaaacagauaaaaauc

SEQ ID NO: 199062 - RNA, 32 nt, Homo Sapiens
ccuggccagaagaaccacauagacuuaucuau

SEQ ID NO: 199063 - RNA, 32 nt, Homo Sapiens
acaaagucaggagauugagaccguccuggcua

SEQ ID NO: 199064 - RNA, 32 nt, Homo Sapiens
ccgagccggccgcgcuccgaacggcgccuccc

SEQ ID NO: 199065 - RNA, 32 nt, Homo Sapiens
cugcgugccucccagaaguggguuaggagcac

SEQ ID NO: 199066 - RNA, 32 nt, Homo Sapiens
uucugauuuuuccagaaaucaagcagaagauu

SEQ ID NO: 199067 - RNA, 32 nt, Homo Sapiens
aauguuauuuugauacgugaaaagcauaugaa

SEQ ID NO: 199068 - RNA, 32 nt, Homo Sapiens
gcuggcgguugcugucagcugauucccggggu

SEQ ID NO: 199069 - RNA, 32 nt, Homo Sapiens
ccauuugcaauaauuugguuacaccauuugcu

SEQ ID NO: 199070 - RNA, 32 nt, Homo Sapiens
cagagggcauaucugucuuuuacuccuguccc

SEQ ID NO: 199071 - RNA, 32 nt, Homo Sapiens
uuugcagcgucuuuuuaaccucagaaaauuuc

SEQ ID NO: 199072 - RNA, 32 nt, Homo Sapiens
gguggcucuaggaauugggguucagcagggac

SEQ ID NO: 199073 - RNA, 30 nt, Homo Sapiens
aaccaccugcuaauucuggggagguaccug

SEQ ID NO: 199074 - RNA, 32 nt, Homo Sapiens
agcugggggaggaggaagauaagcgcgugagg

SEQ ID NO: 199075 - RNA, 32 nt, Homo Sapiens
uaaugagcagaccagcagguacguagugggag

SEQ ID NO: 199076 - RNA, 32 nt, Homo Sapiens
ugaaacacaggucuccucuccucccagcacag

SEQ ID NO: 199077 - RNA, 32 nt, Homo Sapiens
gggcagcuccuuuuccaugccuccccccaccc

SEQ ID NO: 199078 - RNA, 32 nt, Homo Sapiens
aggugaggagaaagacugaaaacuaugagaaa

SEQ ID NO: 199079 - RNA, 32 nt, Homo Sapiens
gcagaucuuaaggucugagacuugcugauuuu

SEQ ID NO: 199080 - RNA, 32 nt, Homo Sapiens
gugcacagcugcgacucggcgccggccgggga

SEQ ID NO: 199081 - RNA, 32 nt, Homo Sapiens
ucccugaagaucuguuaagaauaggucucauc

SEQ ID NO: 199082 - RNA, 32 nt, Homo Sapiens
caggagcaggggugcaggauccuguucugagc

SEQ ID NO: 199083 - RNA, 32 nt, Homo Sapiens
ugaagggacagaggacagggcuucuaauaccu

SEQ ID NO: 199084 - RNA, 32 nt, Homo Sapiens
gggugagacagagugggagagauuacggcaug

SEQ ID NO: 199085 - RNA, 32 nt, Homo Sapiens
agcagccuggggccuccacucuggccggagga

SEQ ID NO: 199086 - RNA, 32 nt, Homo Sapiens
cuagagggggaagaggagagacccccaacaag

SEQ ID NO: 199087 - RNA, 32 nt, Homo Sapiens
gacugcugggccgccuggcccggcucaucaag

SEQ ID NO: 199088 - RNA, 32 nt, Homo Sapiens
caaaacagaacaaaagcaaaggaaaaugcuuu

SEQ ID NO: 199089 - RNA, 31 nt, Homo Sapiens
augccgugaaacagcccccagcccccgucug

SEQ ID NO: 199090 - RNA, 32 nt, Homo Sapiens
guaauuuuacuuuuuauuucuaaaguuguagu

SEQ ID NO: 199091 - RNA, 32 nt, Homo Sapiens
acccucuucaaccuccucccuucuucuggcuu

SEQ ID NO: 199092 - RNA, 32 nt, Homo Sapiens
ggugcacaggacaaauaaaaacaaauaauuuc

SEQ ID NO: 199093 - RNA, 32 nt, Homo Sapiens
gaaagggacugagggaggaaagaaggagccau

SEQ ID NO: 199094 - RNA, 32 nt, Homo Sapiens
auaaagcugugaaaaauagaaguauaauuuga

SEQ ID NO: 199095 - RNA, 32 nt, Homo Sapiens
gugagccuaucuaaguuuuuuuaaauuaaggc

SEQ ID NO: 199096 - RNA, 32 nt, Homo Sapiens
ugcccccugccagccggggcucgcccacucau

SEQ ID NO: 199097 - RNA, 32 nt, Homo Sapiens
gcuggugccuggccuuccuggaauggugggug

SEQ ID NO: 199098 - RNA, 32 nt, Homo Sapiens
uaguagagauggguuuucaccaugguggccag

SEQ ID NO: 199099 - RNA, 32 nt, Homo Sapiens
ccuggaaaccaucucacuucacagggcaggug

SEQ ID NO: 199100 - RNA, 32 nt, Homo Sapiens
cugaagucuagcaucucaaggcugaucuggaa

SEQ ID NO: 199101 - RNA, 32 nt, Homo Sapiens
guucaggcugaauugaagaucccucuuacccg

SEQ ID NO: 199102 - RNA, 32 nt, Homo Sapiens
acucuuccaauuucugcuuucagacaugcugc

SEQ ID NO: 199103 - RNA, 32 nt, Homo Sapiens
ucuaucuauccaagugauacaauucauagggg

SEQ ID NO: 199104 - RNA, 32 nt, Homo Sapiens
ccugagcggaauccugcaaagauggagaagga

SEQ ID NO: 199105 - RNA, 32 nt, Homo Sapiens
uggccaguuaggaugccugauacaagaccguc

SEQ ID NO: 199106 - RNA, 32 nt, Homo Sapiens
cuuuguauauugcaauuuuucuguuugggaaa

SEQ ID NO: 199107 - RNA, 28 nt, Homo Sapiens
gggaaggggcggcugcgagggguaucaa

SEQ ID NO: 199108 - RNA, 32 nt, Homo Sapiens
guggauuauuaacaauaacacaguuuucuuua

SEQ ID NO: 199109 - RNA, 32 nt, Homo Sapiens
acccucugccccccagcccucuggcgucucua

SEQ ID NO: 199110 - RNA, 32 nt, Homo Sapiens
auuuauggcaugcacugaccucuucuuggagc

SEQ ID NO: 199111 - RNA, 30 nt, Homo Sapiens
cuccgccagcccgugccaccgcugcuaaug

SEQ ID NO: 199112 - RNA, 32 nt, Homo Sapiens
caccggucccccagcccccaccgucgcgccag

SEQ ID NO: 199113 - RNA, 32 nt, Homo Sapiens
uucucacugguaucacauggucuugcaguuuu

SEQ ID NO: 199114 - RNA, 32 nt, Homo Sapiens
cucgcguacgacccauuuccugucgccccccg

SEQ ID NO: 199115 - RNA, 32 nt, Homo Sapiens
aaaguagggaaguuuuaugccauguuaauauu

SEQ ID NO: 199116 - RNA, 32 nt, Homo Sapiens
ggacugccugaagaguaaaacugugugaacaa

SEQ ID NO: 199117 - RNA, 32 nt, Homo Sapiens
uuccaaauggcagagagcacugagaggagaca

SEQ ID NO: 199118 - RNA, 32 nt, Homo Sapiens
accgggggccgcgguucagcuccgccgggcgc

SEQ ID NO: 199119 - RNA, 32 nt, Homo Sapiens
uuacagaaagggaaaaguuuaacccauuauua

SEQ ID NO: 199120 - RNA, 32 nt, Homo Sapiens
cauaucugaagaugaaaacuaauugaaucaaa

SEQ ID NO: 199121 - RNA, 32 nt, Homo Sapiens
agaaucaucaguaugucacuuccuaauuucua

SEQ ID NO: 199122 - RNA, 32 nt, Homo Sapiens
uuccugaggagcuguuggccugggugggcagg

SEQ ID NO: 199123 - RNA, 32 nt, Homo Sapiens
aucucggaucauaaucuccuuggugcugauua

SEQ ID NO: 199124 - RNA, 32 nt, Homo Sapiens
ggguugggcagggagguauauuugagccagac

SEQ ID NO: 199125 - RNA, 32 nt, Homo Sapiens
uagcuuuuaagagcuuccuuugaccacugucu

SEQ ID NO: 199126 - RNA, 32 nt, Homo Sapiens
uuuauaggugaugauccaaggcgcaauuauuu

SEQ ID NO: 199127 - RNA, 31 nt, Homo Sapiens
uuccaugugaggcccugcagagccuggcauc

SEQ ID NO: 199128 - RNA, 32 nt, Homo Sapiens
uuugcugcuucuuucuggguuguggccgauga

SEQ ID NO: 199129 - RNA, 32 nt, Homo Sapiens
auguaggagcugaguucuuaaagacugaagac

SEQ ID NO: 199130 - RNA, 32 nt, Homo Sapiens
cggggucggguggccaacggcgcggccgcggg

SEQ ID NO: 199131 - RNA, 32 nt, Homo Sapiens
agcaagcagcugccgagacaaauggugguggg

SEQ ID NO: 199132 - RNA, 32 nt, Homo Sapiens
ggugauuuguuuuaauggguuaaugaauacuu

SEQ ID NO: 199133 - RNA, 30 nt, Homo Sapiens
ggggauuaggaacugggggaaacuuaauga

SEQ ID NO: 199134 - RNA, 32 nt, Homo Sapiens
gccaccuacugaaaagaaaaacaaauagcuag

SEQ ID NO: 199135 - RNA, 32 nt, Homo Sapiens
aagggguuaaugaaacaaauagcuguugacgu

SEQ ID NO: 199136 - RNA, 32 nt, Homo Sapiens
agguuucuggggauacauagacuuaggaaguu

SEQ ID NO: 199137 - RNA, 32 nt, Homo Sapiens
uucaguguguggaaaugucucgugggguggca

SEQ ID NO: 199138 - RNA, 32 nt, Homo Sapiens
cccguaggaccgaaguguuuugugguggagua

SEQ ID NO: 199139 - RNA, 32 nt, Homo Sapiens
augauccugggagaggugaagagggccaggau

SEQ ID NO: 199140 - RNA, 32 nt, Homo Sapiens
uuuucaucauucauuucuuuuucuaaaaguug

SEQ ID NO: 199141 - RNA, 32 nt, Homo Sapiens
aagaugaugaugaucuuuaaaauacacacuca

SEQ ID NO: 199142 - RNA, 32 nt, Homo Sapiens
auuuguauuagauggaagucaugaugaugggc

SEQ ID NO: 199143 - RNA, 32 nt, Homo Sapiens
aaaaaggauuggcauuauucuuggcgcacagu

SEQ ID NO: 199144 - RNA, 31 nt, Homo Sapiens
gacgcagcgcaggacccgccccgcgcgugac

SEQ ID NO: 199145 - RNA, 32 nt, Homo Sapiens
aaucaggcgccggguaguggguugcugggcug

SEQ ID NO: 199146 - RNA, 32 nt, Homo Sapiens
uuuuaugggccucccccaauugucuuuuuauu

SEQ ID NO: 199147 - RNA, 32 nt, Homo Sapiens
gauuaucuuuugcuuccccccagcugccuccu

SEQ ID NO: 199148 - RNA, 32 nt, Homo Sapiens
gaggcagggaguuggcucucuugguggagaug

SEQ ID NO: 199149 - RNA, 32 nt, Homo Sapiens
accgaacaauaaguggcaaccaauuaucuuaa

SEQ ID NO: 199150 - RNA, 32 nt, Homo Sapiens
caucgagccccagcgcccggcccgcagccugc

SEQ ID NO: 199151 - RNA, 32 nt, Homo Sapiens
cccaggcgcucgccccaggacguuguccggcg

SEQ ID NO: 199152 - RNA, 32 nt, Homo Sapiens
caauuccaagggacaccuggaaccuccugcug

SEQ ID NO: 199153 - RNA, 32 nt, Homo Sapiens
gaucaaaaagacuguuucgaaaccaacaucug

SEQ ID NO: 199154 - RNA, 32 nt, Homo Sapiens
ugugcauuaguuuucaaguauaagguuuaagu

SEQ ID NO: 199155 - RNA, 29 nt, Homo Sapiens
gaggaacaaguguuauauuuaucugugug

SEQ ID NO: 199156 - RNA, 32 nt, Homo Sapiens
cagcauuuccacucaccuccguguucuugggg

SEQ ID NO: 199157 - RNA, 32 nt, Homo Sapiens
ucuccccaguacgaauuuuguccauaaacaaa

SEQ ID NO: 199158 - RNA, 32 nt, Homo Sapiens
uuccucuggccccuccucuccaagaaaauuag

SEQ ID NO: 199159 - RNA, 32 nt, Homo Sapiens
ggaggaauguagccagcuccccacucaggacg

SEQ ID NO: 199160 - RNA, 32 nt, Homo Sapiens
aauucucaacguaugugaagaccuuacuauug

SEQ ID NO: 199161 - RNA, 32 nt, Homo Sapiens
uugaucuccugaccuugugauccaccagccuc

SEQ ID NO: 199162 - RNA, 32 nt, Homo Sapiens
cagugcgaauuugaaagaagaaaaccagaugg

SEQ ID NO: 199163 - RNA, 32 nt, Homo Sapiens
cuuacagauuuacaugugcacacacacacaaa

SEQ ID NO: 199164 - RNA, 32 nt, Homo Sapiens
ucacagcacuauuuccuauuaagcccacugau

SEQ ID NO: 199165 - RNA, 32 nt, Homo Sapiens
ccacaagaagugccucuuaggucugugacaga

SEQ ID NO: 199166 - RNA, 32 nt, Homo Sapiens
aaacaguggaacaaugguauauuuaacuacau

SEQ ID NO: 199167 - RNA, 32 nt, Homo Sapiens
cuuuguccucagcuccuccugcuuucuugggu

SEQ ID NO: 199168 - RNA, 32 nt, Homo Sapiens
ccagccuggugccuuggcaucucccaaugggg

SEQ ID NO: 199169 - RNA, 32 nt, Homo Sapiens
acaauuuaaaggaaacaaccacucuuuugaau

SEQ ID NO: 199170 - RNA, 32 nt, Homo Sapiens
agccgggccgggggcggggaaagggguggggc

SEQ ID NO: 199171 - RNA, 32 nt, Homo Sapiens
ggugaggguuguuuuucuuucucugaaaccua

SEQ ID NO: 199172 - RNA, 32 nt, Homo Sapiens
gccggacaguucccgcgguccaggcgcuguca

SEQ ID NO: 199173 - RNA, 32 nt, Homo Sapiens
agcucaguggugcuguuguagguucagaaaug

SEQ ID NO: 199174 - RNA, 32 nt, Homo Sapiens
agauguuagggucacuguugguggcugcccca

SEQ ID NO: 199175 - RNA, 32 nt, Homo Sapiens
agaugauaucugaaaccagagagacuuggaau

SEQ ID NO: 199176 - RNA, 32 nt, Homo Sapiens
ggaaguguuucaaugggagccagaucucauga

SEQ ID NO: 199177 - RNA, 32 nt, Homo Sapiens
cuccugcggcccagcucuguccuccagagccu

SEQ ID NO: 199178 - RNA, 32 nt, Homo Sapiens
gagauauuuacaaaacauuaaaaaauaugggg

SEQ ID NO: 199179 - RNA, 31 nt, Homo Sapiens
uacauucuuacagaaaaguccauuuaaaagu

SEQ ID NO: 199180 - RNA, 30 nt, Homo Sapiens
uuucuggucuucggcugcucaggguucauc

SEQ ID NO: 199181 - RNA, 32 nt, Homo Sapiens
cuguucugucauuuucccaucuguaaaaugag

SEQ ID NO: 199182 - RNA, 32 nt, Homo Sapiens
gaacucaaaugaucaauaauuaaugaaugacu

SEQ ID NO: 199183 - RNA, 32 nt, Homo Sapiens
cucuaaaggaaaugcaguuguucugauaagaa

SEQ ID NO: 199184 - RNA, 32 nt, Homo Sapiens
auuaacaaauaaauuggaauuuaaaaauaucg

SEQ ID NO: 199185 - RNA, 32 nt, Homo Sapiens
cucucagcgguggcuggcuggcauuuuucucu

SEQ ID NO: 199186 - RNA, 32 nt, Homo Sapiens
aaauuucuuggagaguguuaaucuuuucugug

SEQ ID NO: 199187 - RNA, 32 nt, Homo Sapiens
cgaccaucccaacccggcacucacagccccgc

SEQ ID NO: 199188 - RNA, 32 nt, Homo Sapiens
acgucuggccggcucccggcgaagggcagcgg

SEQ ID NO: 199189 - RNA, 32 nt, Homo Sapiens
ccuucccggacggggcggcuggccgggcagag

SEQ ID NO: 199190 - RNA, 30 nt, Homo Sapiens
agccacugcuaucgcuauuuaagaacccua

SEQ ID NO: 199191 - RNA, 32 nt, Homo Sapiens
ucacuggggcuuuggggucagcuacacaagga

SEQ ID NO: 199192 - RNA, 32 nt, Homo Sapiens
cgccuaugucauucggaucugggcuccccaaa

SEQ ID NO: 199193 - RNA, 32 nt, Homo Sapiens
aaaauccacaguguuucuguucauuuguuacu

SEQ ID NO: 199194 - RNA, 32 nt, Homo Sapiens
gcauguucucuacacaauuguaaggugucacu

SEQ ID NO: 199195 - RNA, 32 nt, Homo Sapiens
ggauuacaggcgugagccacuccacccagccc

SEQ ID NO: 199196 - RNA, 32 nt, Homo Sapiens
uugaaucaguuauauuuaucuguaccuucuuu

SEQ ID NO: 199197 - RNA, 32 nt, Homo Sapiens
gugagucccuucccuccccaggccucgcuucc

SEQ ID NO: 199198 - RNA, 32 nt, Homo Sapiens
ccugcccgcccggugcccugcggagagccucg

SEQ ID NO: 199199 - RNA, 32 nt, Homo Sapiens
ucuguuuucuauuuguuaagaaaaacuacagc

SEQ ID NO: 199200 - RNA, 32 nt, Homo Sapiens
gagauguuuucaagaauauauaguuaaauccu

SEQ ID NO: 199201 - RNA, 32 nt, Homo Sapiens
gcucggaaggauuucagcuccaggcuggcugc

SEQ ID NO: 199202 - RNA, 32 nt, Homo Sapiens
gaagugguguugcggagggaaguguggggaga

SEQ ID NO: 199203 - RNA, 32 nt, Homo Sapiens
gcgggccgacagaucugcgccggggcccugag

SEQ ID NO: 199204 - RNA, 32 nt, Homo Sapiens
cuuuucaacacuuuuagcaggauuguggacau

SEQ ID NO: 199205 - RNA, 32 nt, Homo Sapiens
gcagggggacccuuggcccagcccaggaaacc

SEQ ID NO: 199206 - RNA, 32 nt, Homo Sapiens
cgacucagccggaaccggcucccggcccgagg

SEQ ID NO: 199207 - RNA, 31 nt, Homo Sapiens
acaggaacaaagggcaaaggauauguacugg

SEQ ID NO: 199208 - RNA, 32 nt, Homo Sapiens
ugucagauauuuuuauuuuaguauuuccuguu

SEQ ID NO: 199209 - RNA, 32 nt, Homo Sapiens
acgcuaggagaaauuucuuuuacaaaacuuuu

SEQ ID NO: 199210 - RNA, 32 nt, Homo Sapiens
gccagcaggaggauggaaaagcagaauggagg

SEQ ID NO: 199211 - RNA, 32 nt, Homo Sapiens
cacucaguucucccuuuuuuuacauaaggauu

SEQ ID NO: 199212 - RNA, 32 nt, Homo Sapiens
acagauaaacaaacaagcccccugcccuccuc

SEQ ID NO: 199213 - RNA, 32 nt, Homo Sapiens
aauuauauuacuaccacugacaugacuuucca

SEQ ID NO: 199214 - RNA, 32 nt, Homo Sapiens
ucacagcugcucagcucuggcuucuguaaacc

SEQ ID NO: 199215 - RNA, 32 nt, Homo Sapiens
acugcaugacggagccgagccaugugucuuua

SEQ ID NO: 199216 - RNA, 32 nt, Homo Sapiens
ucuuaauuacaauaucugauauuuuuacaguc

SEQ ID NO: 199217 - RNA, 32 nt, Homo Sapiens
agagcgcggucccagcccggccacugcggauc

SEQ ID NO: 199218 - RNA, 32 nt, Homo Sapiens
auucgggggcucagcccuccucccucccuucc

SEQ ID NO: 199219 - RNA, 32 nt, Homo Sapiens
uaccuagggucucacuagucgggggauuuacc

SEQ ID NO: 199220 - RNA, 32 nt, Homo Sapiens
ugauggcgggugggcagcgggcggcgggcucc

SEQ ID NO: 199221 - RNA, 32 nt, Homo Sapiens
agcgcucuugucaccccugcugcuggagugca

SEQ ID NO: 199222 - RNA, 32 nt, Homo Sapiens
ccucuucuucuuccacacccacagcacaguca

SEQ ID NO: 199223 - RNA, 30 nt, Homo Sapiens
cagagggccaggcgcgguggcucacgccug

SEQ ID NO: 199224 - RNA, 32 nt, Homo Sapiens
uuaaauauuucuguucuuauuuccaguuuucu

SEQ ID NO: 199225 - RNA, 32 nt, Homo Sapiens
ggacuuuauauaaaaggaugacuccaaaggau

SEQ ID NO: 199226 - RNA, 29 nt, Homo Sapiens
uauaauggcaggcacaaucuguuucauca

SEQ ID NO: 199227 - RNA, 32 nt, Homo Sapiens
agugugaugccaaauaaaauuuucucaggauc

SEQ ID NO: 199228 - RNA, 32 nt, Homo Sapiens
uucaaucuagaauucuccaguagguaccaucu

SEQ ID NO: 199229 - RNA, 32 nt, Homo Sapiens
ugccccaucgccauucugccaucucccucuau

SEQ ID NO: 199230 - RNA, 32 nt, Homo Sapiens
gcccgaagggagcugcggaucgcgaggccagu

SEQ ID NO: 199231 - RNA, 32 nt, Homo Sapiens
uugggcaggcugguguugaacuucugaccuca

SEQ ID NO: 199232 - RNA, 32 nt, Homo Sapiens
augcaaggugaacaccacuuugucucugagaa

SEQ ID NO: 199233 - RNA, 31 nt, Homo Sapiens
aaugggaaauaaaauguggucuguccacgca

SEQ ID NO: 199234 - RNA, 32 nt, Homo Sapiens
aagggcacggguccuuguuuuuggguugagag

SEQ ID NO: 199235 - RNA, 32 nt, Homo Sapiens
cuauuacuaacagguccaacccuaagugagac

SEQ ID NO: 199236 - RNA, 32 nt, Homo Sapiens
uguguguaguuagacaauguccuguugggugg

SEQ ID NO: 199237 - RNA, 32 nt, Homo Sapiens
gcaugcacguucagacagcugcauuguaagag

SEQ ID NO: 199238 - RNA, 32 nt, Homo Sapiens
caacuuggauccuugagaaagaauaauaccag

SEQ ID NO: 199239 - RNA, 32 nt, Homo Sapiens
auaugaaagccagggggcagugccaaacacgc

SEQ ID NO: 199240 - RNA, 32 nt, Homo Sapiens
ucuccuacacaauucauuuacuccauuugaau

SEQ ID NO: 199241 - RNA, 32 nt, Homo Sapiens
cgccuggggaugcacguggccacgggauuuca

SEQ ID NO: 199242 - RNA, 32 nt, Homo Sapiens
auucuccucggaauuggcuggcaccucugguu

SEQ ID NO: 199243 - RNA, 32 nt, Homo Sapiens
cccuucugcuguccuuuccccaacguacuggg

SEQ ID NO: 199244 - RNA, 32 nt, Homo Sapiens
ggagacacaaccggcggcucuccggggauuua

SEQ ID NO: 199245 - RNA, 30 nt, Homo Sapiens
gagauucuggacuacgugugcagggcccaa

SEQ ID NO: 199246 - RNA, 32 nt, Homo Sapiens
gagccagaaacugcagaggacaugacagugug

SEQ ID NO: 199247 - RNA, 32 nt, Homo Sapiens
cagggugcaugcgucuccugcuggugaaucac

SEQ ID NO: 199248 - RNA, 32 nt, Homo Sapiens
acucaacggcucucagacaccagguugcuucu

SEQ ID NO: 199249 - RNA, 32 nt, Homo Sapiens
cuuugugcuuuuaagagugggcugggauugug

SEQ ID NO: 199250 - RNA, 32 nt, Homo Sapiens
uuguacuccucuaucagugcuugcuaccaaga

SEQ ID NO: 199251 - RNA, 32 nt, Homo Sapiens
cuuaaggagauggagaggccggagcuggacga

SEQ ID NO: 199252 - RNA, 32 nt, Homo Sapiens
ggagaccugcuugaaccuggagguggagguug

SEQ ID NO: 199253 - RNA, 32 nt, Homo Sapiens
uaaauauuuuucccaacuggaaagcacuugau

SEQ ID NO: 199254 - RNA, 32 nt, Homo Sapiens
cagcgaggcgaagagggaaggaagguggauuu

SEQ ID NO: 199255 - RNA, 32 nt, Homo Sapiens
uccuggggccgcggcagcggcugcgaggggac

SEQ ID NO: 199256 - RNA, 32 nt, Homo Sapiens
ccaccaaauggcauuaccuagguccaucauca

SEQ ID NO: 199257 - RNA, 32 nt, Homo Sapiens
ccgaauaaacacaccaaccagggaagacggcc

SEQ ID NO: 199258 - RNA, 32 nt, Homo Sapiens
uccuuggggaggggcgggugggucuggaugaa

SEQ ID NO: 199259 - RNA, 32 nt, Homo Sapiens
gugguggcgggugccuguggucccagcuacug

SEQ ID NO: 199260 - RNA, 32 nt, Homo Sapiens
cacccacucgcacaagcuuccauccacaugug

SEQ ID NO: 199261 - RNA, 32 nt, Homo Sapiens
uaauuuucucaauaauccuaugagaacugucc

SEQ ID NO: 199262 - RNA, 32 nt, Homo Sapiens
aaaaauuaaaacuacuaguuuuuuuucagugu

SEQ ID NO: 199263 - RNA, 32 nt, Homo Sapiens
ggcaauucuuugaccucaaccugugaugaggg

SEQ ID NO: 199264 - RNA, 32 nt, Homo Sapiens
aagugagccgacugcgaucugagcuggggggc

SEQ ID NO: 199265 - RNA, 30 nt, Homo Sapiens
uuucgcccguucccgccgccggcggaagcc

SEQ ID NO: 199266 - RNA, 30 nt, Homo Sapiens
ugcauaugcaggugcgcgggugacgaaugg

SEQ ID NO: 199267 - RNA, 32 nt, Homo Sapiens
cagucacauaacuuggauucugucccaguuug

SEQ ID NO: 199268 - RNA, 32 nt, Homo Sapiens
uuccaucguuuucucucgugcaauggcguccg

SEQ ID NO: 199269 - RNA, 32 nt, Homo Sapiens
gcagggcuauaugccccaggcuuuucauccug

SEQ ID NO: 199270 - RNA, 32 nt, Homo Sapiens
guaaauuuucuaauguuuuucuuaaagcugaa

SEQ ID NO: 199271 - RNA, 32 nt, Homo Sapiens
uuccucuugcugcaauuuucguggaauucaug

SEQ ID NO: 199272 - RNA, 32 nt, Homo Sapiens
ggcucugccaucugggguguggugugguaugu

SEQ ID NO: 199273 - RNA, 32 nt, Homo Sapiens
acucauuugacaaauagaguccagcugccucu

SEQ ID NO: 199274 - RNA, 32 nt, Homo Sapiens
agcagacuaaaauguuuuaaaaugugaaaaaa

SEQ ID NO: 199275 - RNA, 32 nt, Homo Sapiens
aagucaaacuaaaaacggugaaagguugcgac

SEQ ID NO: 199276 - RNA, 32 nt, Homo Sapiens
gagacggagaaagggaagaggcugggaugguc

SEQ ID NO: 199277 - RNA, 32 nt, Homo Sapiens
auagauuccauucuagggcccagccgucucuu

SEQ ID NO: 199278 - RNA, 32 nt, Homo Sapiens
uugaagaaaauauuugcaauaaauucaagacu

SEQ ID NO: 199279 - RNA, 32 nt, Homo Sapiens
auaaucuuuacuauugaaucugucugauauag

SEQ ID NO: 199280 - RNA, 32 nt, Homo Sapiens
uccucgccaucccauucugcccccuccccacc

SEQ ID NO: 199281 - RNA, 32 nt, Homo Sapiens
cauaccugccagcucguaugccucuggcaugg

SEQ ID NO: 199282 - RNA, 32 nt, Homo Sapiens
uccagucaugcccacucaggcaucugaccaac

SEQ ID NO: 199283 - RNA, 32 nt, Homo Sapiens
gaccccaggcccggcccgugguacccagcagg

SEQ ID NO: 199284 - RNA, 32 nt, Homo Sapiens
gaaaguauaugauacugaauuugccuacuauc

SEQ ID NO: 199285 - RNA, 32 nt, Homo Sapiens
cuccuuucucggcuguccuuccaauuauaccu

SEQ ID NO: 199286 - RNA, 32 nt, Homo Sapiens
auauuggaauaaaaaguaauugcuacaaacua

SEQ ID NO: 199287 - RNA, 32 nt, Homo Sapiens
ucugccgagagccgaagauggcagugaacgua

SEQ ID NO: 199288 - RNA, 32 nt, Homo Sapiens
aaaaacggcauaguccagugucaucugaaggg

SEQ ID NO: 199289 - RNA, 32 nt, Homo Sapiens
guaacaaacuaaagaaaucugaggccaggcac

SEQ ID NO: 199290 - RNA, 32 nt, Homo Sapiens
auagagcaucaaucaauauaagcauuauugag

SEQ ID NO: 199291 - RNA, 32 nt, Homo Sapiens
ucagcucuccaaguuccaggcuuccgguccuu

SEQ ID NO: 199292 - RNA, 32 nt, Homo Sapiens
caaacuuuaggguaaaaauugcgauuggacag

SEQ ID NO: 199293 - RNA, 32 nt, Homo Sapiens
uucuauagaagugaacacucgaaagaacuggu

SEQ ID NO: 199294 - RNA, 30 nt, Homo Sapiens
agggucgucccugcugcagaagcuguauac

SEQ ID NO: 199295 - RNA, 32 nt, Homo Sapiens
aaaguacaaccacuaucuuuuguucuaccugu

SEQ ID NO: 199296 - RNA, 32 nt, Homo Sapiens
ccuccagccuuuuaaccuguugggccuaggau

SEQ ID NO: 199297 - RNA, 30 nt, Homo Sapiens
uuuggaggcaggccugcaggcgcguccccg

SEQ ID NO: 199298 - RNA, 32 nt, Homo Sapiens
ggcggggggcccgccggcggaaaugaugcuga

SEQ ID NO: 199299 - RNA, 32 nt, Homo Sapiens
cuuuucccaucccgccaucaucucaggagcaa

SEQ ID NO: 199300 - RNA, 32 nt, Homo Sapiens
cgacugaggggaggggcggggccaggcgccug

SEQ ID NO: 199301 - RNA, 32 nt, Homo Sapiens
ugguggugugugccuguaaucccagcuacuca

SEQ ID NO: 199302 - RNA, 32 nt, Homo Sapiens
aucuguuccuuccuggucacgagguggccaga

SEQ ID NO: 199303 - RNA, 32 nt, Homo Sapiens
cuauccaggauuaaagucaaguuuacuuaggc

SEQ ID NO: 199304 - RNA, 32 nt, Homo Sapiens
gggugcugggcugaggcuaaggguggacgcgu

SEQ ID NO: 199305 - RNA, 32 nt, Homo Sapiens
uuaccaaacuguaaggggguuucggagugaug

SEQ ID NO: 199306 - RNA, 32 nt, Homo Sapiens
aauugcugacaaauuuuucuguguacauguag

SEQ ID NO: 199307 - RNA, 32 nt, Homo Sapiens
uuguauaguuccaugaauauuaaaugagauua

SEQ ID NO: 199308 - RNA, 32 nt, Homo Sapiens
caggucagaggucaccaugaaaaggaggcagu

SEQ ID NO: 199309 - RNA, 32 nt, Homo Sapiens
uugggcucuauccuccacggccccauccaagc

SEQ ID NO: 199310 - RNA, 32 nt, Homo Sapiens
gugcagagauaaaaccugaguaccagagccac

SEQ ID NO: 199311 - RNA, 32 nt, Homo Sapiens
cagaaaacagaaaaaaggaggaguugcuaauc

SEQ ID NO: 199312 - RNA, 32 nt, Homo Sapiens
uucaacccucggcuccgccgccggcuccuugc

SEQ ID NO: 199313 - RNA, 32 nt, Homo Sapiens
agcagcgcacgcgggugcaccgcggccgcgcc

SEQ ID NO: 199314 - RNA, 32 nt, Homo Sapiens
gcagaaaaucuauugccucaugauguuuuagc

SEQ ID NO: 199315 - RNA, 32 nt, Homo Sapiens
cugggggcucugccaguugugagcucugccca

SEQ ID NO: 199316 - RNA, 32 nt, Homo Sapiens
uguggaugggccgaccuggcugggacucguga

SEQ ID NO: 199317 - RNA, 32 nt, Homo Sapiens
gguuucaccguguuggccaggcuggucuccaa

SEQ ID NO: 199318 - RNA, 32 nt, Homo Sapiens
uauauugauaagcaaacuauuuccaaacuaaa

SEQ ID NO: 199319 - RNA, 32 nt, Homo Sapiens
ggaauugggaucucaagggcauuucccuuugc

SEQ ID NO: 199320 - RNA, 32 nt, Homo Sapiens
uucauuuuaagugguguggagauuccagcacu

SEQ ID NO: 199321 - RNA, 32 nt, Homo Sapiens
ucauaaaguauuuuaauagaaaaaucacuugu

SEQ ID NO: 199322 - RNA, 32 nt, Homo Sapiens
auauaugaagacuguaaauguuagacgacuag

SEQ ID NO: 199323 - RNA, 32 nt, Homo Sapiens
aguaaugucuuccucagccucaaccagggacc

SEQ ID NO: 199324 - RNA, 32 nt, Homo Sapiens
gagaaauucucuuuaggacaaagcagagaguc

SEQ ID NO: 199325 - RNA, 31 nt, Homo Sapiens
gagguggcccugaagaugccccgccuuaguu

SEQ ID NO: 199326 - RNA, 32 nt, Homo Sapiens
uuacuggcauuggaacaguauaaaauaccagu

SEQ ID NO: 199327 - RNA, 32 nt, Homo Sapiens
cgccgccgcagucgucucggcccgcggaggga

SEQ ID NO: 199328 - RNA, 32 nt, Homo Sapiens
auucacgagccuggggcuccagcagcagccag

SEQ ID NO: 199329 - RNA, 32 nt, Homo Sapiens
acgaagucaggagaucaagaccaucuggcuaa

SEQ ID NO: 199330 - RNA, 32 nt, Homo Sapiens
ggcaggugaagcucagcuguguggggcugugc

SEQ ID NO: 199331 - RNA, 32 nt, Homo Sapiens
uuaaaaauuggcagauaaaauuuuauguauuu

SEQ ID NO: 199332 - RNA, 32 nt, Homo Sapiens
aauucgccgcagcggaccggccucggcgaauu

SEQ ID NO: 199333 - RNA, 32 nt, Homo Sapiens
acacguacuguaauaaaauacaauaauaugaa

SEQ ID NO: 199334 - RNA, 31 nt, Homo Sapiens
caaagaaugcugucagaaggguaucucagug

SEQ ID NO: 199335 - RNA, 29 nt, Homo Sapiens
gaccagccuggacaacauggcaaaacccu

SEQ ID NO: 199336 - RNA, 32 nt, Homo Sapiens
guguucugagaguggugacuaaggcugagcac

SEQ ID NO: 199337 - RNA, 32 nt, Homo Sapiens
caagcacagaucccagacuuugccagaggcaa

SEQ ID NO: 199338 - RNA, 32 nt, Homo Sapiens
augucagucugcuuagaaauaacagaagaaaa

SEQ ID NO: 199339 - RNA, 32 nt, Homo Sapiens
uaggggaggagcucaggucugcgccaggcagg

SEQ ID NO: 199340 - RNA, 32 nt, Homo Sapiens
aggagccgccugcgaccgcccgggcgucgcaa

SEQ ID NO: 199341 - RNA, 32 nt, Homo Sapiens
uagacacgaggcugccuaggcuggggucccag

SEQ ID NO: 199342 - RNA, 32 nt, Homo Sapiens
uuuuguuuuguuuuccaaaucaagguaacuug

SEQ ID NO: 199343 - RNA, 32 nt, Homo Sapiens
gaaggcucuaucugcugggcuggcggccaucc

SEQ ID NO: 199344 - RNA, 32 nt, Homo Sapiens
uaggccugcaccucucuggccuccucaagagc

SEQ ID NO: 199345 - RNA, 32 nt, Homo Sapiens
uuaugacuacacauauacuauuucaugaagau

SEQ ID NO: 199346 - RNA, 32 nt, Homo Sapiens
uaacauguuaaaaauauugcuaugcauuuauu

SEQ ID NO: 199347 - RNA, 32 nt, Homo Sapiens
ugcccagcuaauuuuucuuuauuaguagagac

SEQ ID NO: 199348 - RNA, 32 nt, Homo Sapiens
aggaguagaauaugaagugcuaaaucugaaug

SEQ ID NO: 199349 - RNA, 32 nt, Homo Sapiens
auuauacauaucucuuuuuuauucuguuaaua

SEQ ID NO: 199350 - RNA, 32 nt, Homo Sapiens
gagaaauauuaaaagagaaaugaaacaauaga

SEQ ID NO: 199351 - RNA, 32 nt, Homo Sapiens
aaccauuuagacagcagggcuuaccuaaauag

SEQ ID NO: 199352 - RNA, 32 nt, Homo Sapiens
aauuauuugugcuggcuguggguacaaugaug

SEQ ID NO: 199353 - RNA, 32 nt, Homo Sapiens
uaccgcuccccucuccuccgccacccccgccg

SEQ ID NO: 199354 - RNA, 32 nt, Homo Sapiens
cauuucugaagauaagagacaagugagcucuc

SEQ ID NO: 199355 - RNA, 32 nt, Homo Sapiens
auugucuacuuaucuaaauauucauaccacaa

SEQ ID NO: 199356 - RNA, 32 nt, Homo Sapiens
gauaauugccuuuuauggauacauaaugcuuc

SEQ ID NO: 199357 - RNA, 32 nt, Homo Sapiens
agccauggccccagccaaugcauggaggcgag

SEQ ID NO: 199358 - RNA, 32 nt, Homo Sapiens
ggugguaagagggaaacucuggagagccugca

SEQ ID NO: 199359 - RNA, 29 nt, Homo Sapiens
gaccagcuugggcaacauggcaaagcccc

SEQ ID NO: 199360 - RNA, 32 nt, Homo Sapiens
uggugacuauuugaaucaaaaauguauugaau

SEQ ID NO: 199361 - RNA, 32 nt, Homo Sapiens
aaggaugauggaaaaaucacccaguugugcua

SEQ ID NO: 199362 - RNA, 32 nt, Homo Sapiens
aaaaauauuuuccuuguagaaaauaguuuucc

SEQ ID NO: 199363 - RNA, 31 nt, Homo Sapiens
gucaagaugauugcaacaccuuugaaacauu

SEQ ID NO: 199364 - RNA, 32 nt, Homo Sapiens
aguaaugaaaccauagugugauugccucagaa

SEQ ID NO: 199365 - RNA, 30 nt, Homo Sapiens
cucaagcauggcggcggcggcauugggcag

SEQ ID NO: 199366 - RNA, 32 nt, Homo Sapiens
agacccuagcauggccaggucuggucacccuu

SEQ ID NO: 199367 - RNA, 32 nt, Homo Sapiens
uguauguaggagcugcaguucuuguggaagac

SEQ ID NO: 199368 - RNA, 32 nt, Homo Sapiens
cugacagaacagagacugacaucucccaaucu

SEQ ID NO: 199369 - RNA, 32 nt, Homo Sapiens
cacucuaagaaacacgugcaggaugugggugc

SEQ ID NO: 199370 - RNA, 32 nt, Homo Sapiens
gucucggcccccggagcggggaccacggagac

SEQ ID NO: 199371 - RNA, 32 nt, Homo Sapiens
cccuuugggugcggagugggaaaggaagaaga

SEQ ID NO: 199372 - RNA, 32 nt, Homo Sapiens
agaaaaagaaaaagaaaaaauauuuucccuau

SEQ ID NO: 199373 - RNA, 32 nt, Homo Sapiens
ccuguuuccagaugcauuccugucccagaguc

SEQ ID NO: 199374 - RNA, 32 nt, Homo Sapiens
ucgcccuccgucccguugggccccacauuccc

SEQ ID NO: 199375 - RNA, 32 nt, Homo Sapiens
aguaccaaaugcuuuaaaaacuauuuaacuug

SEQ ID NO: 199376 - RNA, 32 nt, Homo Sapiens
ggccagggagacgauggucuccgugacuaugg

SEQ ID NO: 199377 - RNA, 32 nt, Homo Sapiens
ugcaggggaaagagggggagcguguuagugua

SEQ ID NO: 199378 - RNA, 32 nt, Homo Sapiens
uaacuuucaaaauaauauuuuuccuuuguaau

SEQ ID NO: 199379 - RNA, 32 nt, Homo Sapiens
ggucuguuucucagcaucauggaugcaggggc

SEQ ID NO: 199380 - RNA, 32 nt, Homo Sapiens
aggcggcagaucugaacuugcggaggauaaga

SEQ ID NO: 199381 - RNA, 32 nt, Homo Sapiens
ccccgagcccgccgcuuccggucucagcgccu

SEQ ID NO: 199382 - RNA, 32 nt, Homo Sapiens
gacagggcggggguggcggcggccccuagcgc

SEQ ID NO: 199383 - RNA, 32 nt, Homo Sapiens
cgggcuaccgguccggucgcccggggaucaca

SEQ ID NO: 199384 - RNA, 32 nt, Homo Sapiens
uuagagauugacuucagaaacuuuuucuaaau

SEQ ID NO: 199385 - RNA, 32 nt, Homo Sapiens
ccauguccgaauuuugugagcuccacacgggc

SEQ ID NO: 199386 - RNA, 28 nt, Homo Sapiens
ccuaaaauggcgaacauguguuuucauc

SEQ ID NO: 199387 - RNA, 32 nt, Homo Sapiens
aguggcaggcccugcgcagggcgagaauggug

SEQ ID NO: 199388 - RNA, 32 nt, Homo Sapiens
ccaccucccaccuccaaguccuccucacugca

SEQ ID NO: 199389 - RNA, 32 nt, Homo Sapiens
gccucgcucccuccuggcccucugguccagcc

SEQ ID NO: 199390 - RNA, 32 nt, Homo Sapiens
ccaggaagaacaaggaugaagagguuccuguc

SEQ ID NO: 199391 - RNA, 32 nt, Homo Sapiens
ugcgaauuucgaagaggagguggcaaaguggg

SEQ ID NO: 199392 - RNA, 32 nt, Homo Sapiens
cuuauaauaaaggacuguaaucuuauuuagga

SEQ ID NO: 199393 - RNA, 32 nt, Homo Sapiens
aagcccaagaucugugacaguuggagcucaaa

SEQ ID NO: 199394 - RNA, 32 nt, Homo Sapiens
guuggcaggacucgcugcugcugcugcugcuu

SEQ ID NO: 199395 - RNA, 32 nt, Homo Sapiens
cccagcugggccagggcugugcucccugaagu

SEQ ID NO: 199396 - RNA, 32 nt, Homo Sapiens
gacccugggcucggcguccuccggaaaacugc

SEQ ID NO: 199397 - RNA, 32 nt, Homo Sapiens
gaggccgacucgucgccacccagcgcgccgca

SEQ ID NO: 199398 - RNA, 32 nt, Homo Sapiens
uuuuaaugacaaaaccaaaaacagacaugggg

SEQ ID NO: 199399 - RNA, 32 nt, Homo Sapiens
ugcucuggucccagccccacucggaugucccc

SEQ ID NO: 199400 - RNA, 32 nt, Homo Sapiens
acauuaucuauuuuagcacucauuccaaaauu

SEQ ID NO: 199401 - RNA, 32 nt, Homo Sapiens
uucuaaagaaucaucaguguauagauuagaag

SEQ ID NO: 199402 - RNA, 32 nt, Homo Sapiens
gauccucggagccgcucuggcccccaggcgcu

SEQ ID NO: 199403 - RNA, 32 nt, Homo Sapiens
ucuuggagucaccucuuaaguaccuggacaca

SEQ ID NO: 199404 - RNA, 32 nt, Homo Sapiens
agcagcgagauaccccaccucccucaaccuca

SEQ ID NO: 199405 - RNA, 32 nt, Homo Sapiens
gaagcaauauaugaaaauuacuuggauuaaug

SEQ ID NO: 199406 - RNA, 32 nt, Homo Sapiens
cuauuagugaaagaaacccacuuuuuaucagg

SEQ ID NO: 199407 - RNA, 32 nt, Homo Sapiens
uaacugcgugaagaaggaauuuuuuaauuacu

SEQ ID NO: 199408 - RNA, 32 nt, Homo Sapiens
ccgcgagacagagggauaaagugaagauggug

SEQ ID NO: 199409 - RNA, 32 nt, Homo Sapiens
gcaagaaccucccuuucccccucccccaauaa

SEQ ID NO: 199410 - RNA, 32 nt, Homo Sapiens
cauggguuucggagaccugaaaagccccaccg

SEQ ID NO: 199411 - RNA, 32 nt, Homo Sapiens
ccgcggccucccucccgcacacuccugcugcc

SEQ ID NO: 199412 - RNA, 32 nt, Homo Sapiens
cacaguuuucuuuaccuuccugauguuccaac

SEQ ID NO: 199413 - RNA, 32 nt, Homo Sapiens
gccgcucccaggcccgucucccggcccguggc

SEQ ID NO: 199414 - RNA, 32 nt, Homo Sapiens
auuuugaugaaaauccuuacuuugaaaauaaa

SEQ ID NO: 199415 - RNA, 32 nt, Homo Sapiens
aacagccauucagaaacaaaacuguagaacug

SEQ ID NO: 199416 - RNA, 32 nt, Homo Sapiens
uugugccccuggaugcgcuaacauucacucuu

SEQ ID NO: 199417 - RNA, 32 nt, Homo Sapiens
ggauaaggaagcaaggagagccaggcauuagc

SEQ ID NO: 199418 - RNA, 32 nt, Homo Sapiens
cuaauauggaauggaacugcagcaaaugcaaa

SEQ ID NO: 199419 - RNA, 32 nt, Homo Sapiens
gacuuuggucccagcccagacuccucagacuu

SEQ ID NO: 199420 - RNA, 32 nt, Homo Sapiens
gccugaucggcauggugaaaccccguuucuac

SEQ ID NO: 199421 - RNA, 32 nt, Homo Sapiens
aauucuguggaggagaagaaaagugauucagu

SEQ ID NO: 199422 - RNA, 32 nt, Homo Sapiens
cauaucuuaggacacagaugugcccagggagg

SEQ ID NO: 199423 - RNA, 32 nt, Homo Sapiens
ccagaaucagcucuuguggccuugaaguggcu

SEQ ID NO: 199424 - RNA, 32 nt, Homo Sapiens
auauuuaagaaaccaauauuuaaaauguuggu

SEQ ID NO: 199425 - RNA, 32 nt, Homo Sapiens
aguuaaaccaacacugacccccugcccuugag

SEQ ID NO: 199426 - RNA, 32 nt, Homo Sapiens
ucucagagccugccuccucccuguuuauaugc

SEQ ID NO: 199427 - RNA, 32 nt, Homo Sapiens
gcucagugcuggcgcgugaggcggaggcgggc

SEQ ID NO: 199428 - RNA, 32 nt, Homo Sapiens
aauauucuuuuggaaacguaauauuggccuug

SEQ ID NO: 199429 - RNA, 32 nt, Homo Sapiens
gggccugguaugcaauaagaucaauaaauacu

SEQ ID NO: 199430 - RNA, 32 nt, Homo Sapiens
uucuagcacuggcaaaggucuuuuuucuuugc

SEQ ID NO: 199431 - RNA, 32 nt, Homo Sapiens
cuuaaaaaauaaauacuaucuuucucucuggc

SEQ ID NO: 199432 - RNA, 32 nt, Homo Sapiens
aggcccuggcauggaguccccuggacucagug

SEQ ID NO: 199433 - RNA, 32 nt, Homo Sapiens
ugugagccucccacccaccccaacucuccgag

SEQ ID NO: 199434 - RNA, 32 nt, Homo Sapiens
agcgaagacagagacguggaaagacagggaga

SEQ ID NO: 199435 - RNA, 32 nt, Homo Sapiens
ccaucccguccccauuccuccuccucucugag

SEQ ID NO: 199436 - RNA, 32 nt, Homo Sapiens
ugcuuauauguuaaauugaauaaaauacucuc

SEQ ID NO: 199437 - RNA, 32 nt, Homo Sapiens
ggaaguagggcagugcaugacuggccuuaggu

SEQ ID NO: 199438 - RNA, 32 nt, Homo Sapiens
ccagagaauuuaauuuaauguuuuuucuuugu

SEQ ID NO: 199439 - RNA, 30 nt, Homo Sapiens
gcuagucuggacugcugggacucgggcccc

SEQ ID NO: 199440 - RNA, 32 nt, Homo Sapiens
cugguuuccaugaugccuauccagucaaucuc

SEQ ID NO: 199441 - RNA, 32 nt, Homo Sapiens
gugggacggucuuuucuaaacuuuacaugaga

SEQ ID NO: 199442 - RNA, 32 nt, Homo Sapiens
ggcgacggcguuagcccggcccucggccccuc

SEQ ID NO: 199443 - RNA, 32 nt, Homo Sapiens
ggaauagccauacuauggcccuaugauugucu

SEQ ID NO: 199444 - RNA, 32 nt, Homo Sapiens
gaacuuaaaaauuuuuuauacaauuacccaau

SEQ ID NO: 199445 - RNA, 32 nt, Homo Sapiens
cuauguuuccccccuuuucagaauagaacuau

SEQ ID NO: 199446 - RNA, 32 nt, Homo Sapiens
ggaaaggaaaauuuuggaagucaagaaagucc

SEQ ID NO: 199447 - RNA, 32 nt, Homo Sapiens
cuaucccuaaaaauaauauuuuuuaaaaauag

SEQ ID NO: 199448 - RNA, 32 nt, Homo Sapiens
ugcaguaugggacuuugaaauaaugauucaua

SEQ ID NO: 199449 - RNA, 30 nt, Homo Sapiens
ccgggcgcagggagggucgcccugaggaca

SEQ ID NO: 199450 - RNA, 32 nt, Homo Sapiens
gagugccguggcguaaucucggcucacugcaa

SEQ ID NO: 199451 - RNA, 32 nt, Homo Sapiens
agcuauauuaaacaguuuuucugugguauaau

SEQ ID NO: 199452 - RNA, 32 nt, Homo Sapiens
uggcucccacugagaugugcugcuggaagacu

SEQ ID NO: 199453 - RNA, 32 nt, Homo Sapiens
cauugccugaacuuuccaacacucccuagcug

SEQ ID NO: 199454 - RNA, 32 nt, Homo Sapiens
ggguccuagccuuuuuugguuauaagcccuuu

SEQ ID NO: 199455 - RNA, 32 nt, Homo Sapiens
auuucuucccaggaauccaaucuccuguggau

SEQ ID NO: 199456 - RNA, 32 nt, Homo Sapiens
acucaaaauggcaccuguuccucuugaugauu

SEQ ID NO: 199457 - RNA, 32 nt, Homo Sapiens
uugaauuuggcacacacacacacacacccaca

SEQ ID NO: 199458 - RNA, 32 nt, Homo Sapiens
gccaaggggaugcucugugcagacacaugugc

SEQ ID NO: 199459 - RNA, 32 nt, Homo Sapiens
uuugaacauuuuaauuugugugaugauguaga

SEQ ID NO: 199460 - RNA, 32 nt, Homo Sapiens
ccuggcuaaaauucuuuuguauuuuuacuaca

SEQ ID NO: 199461 - RNA, 27 nt, Homo Sapiens
ggcacccccuucuucauugcucucucc

SEQ ID NO: 199462 - RNA, 32 nt, Homo Sapiens
uuggcaacucagcugcugcugcuuccaugugu

SEQ ID NO: 199463 - RNA, 32 nt, Homo Sapiens
gaaauucaucacaaccugaggcccaggaucug

SEQ ID NO: 199464 - RNA, 32 nt, Homo Sapiens
ucauuguuaucuuauugugaugaugaagaacu

SEQ ID NO: 199465 - RNA, 32 nt, Homo Sapiens
uucuaaaauugugccagcgagcaccgugaacg

SEQ ID NO: 199466 - RNA, 32 nt, Homo Sapiens
uggccuucccgccaccguggcggccgccccgc

SEQ ID NO: 199467 - RNA, 32 nt, Homo Sapiens
accuuaacagucaccacugugcucaaccagac

SEQ ID NO: 199468 - RNA, 32 nt, Homo Sapiens
aagaguugagggaaagugcugcugcugggucu

SEQ ID NO: 199469 - RNA, 32 nt, Homo Sapiens
cugaagucaaggaaggagagcauguaggagaa

SEQ ID NO: 199470 - RNA, 32 nt, Homo Sapiens
uggucccugcggugggaccggaucugggccug

SEQ ID NO: 199471 - RNA, 32 nt, Homo Sapiens
agaauuuucccauggcagaaauucugaguuuu

SEQ ID NO: 199472 - RNA, 32 nt, Homo Sapiens
ugcucaaaaugaaaugcauugacaccaaagga

SEQ ID NO: 199473 - RNA, 27 nt, Homo Sapiens
gauccugcuuuccucagcccccgcucu

SEQ ID NO: 199474 - RNA, 32 nt, Homo Sapiens
guuaggccagauugacaccuauuuauaaacca

SEQ ID NO: 199475 - RNA, 32 nt, Homo Sapiens
aacaguaauuuucaacacauuuuauuuuaaaa

SEQ ID NO: 199476 - RNA, 32 nt, Homo Sapiens
cuugcccucccgaaggccccaguccagccuac

SEQ ID NO: 199477 - RNA, 32 nt, Homo Sapiens
gaagggacagccguauaucuugucaccgaggg

SEQ ID NO: 199478 - RNA, 32 nt, Homo Sapiens
gaaaggagggcugugaggagauaccucauuaa

SEQ ID NO: 199479 - RNA, 31 nt, Homo Sapiens
gcccagcugucuugccugcccgugggcaccc

SEQ ID NO: 199480 - RNA, 32 nt, Homo Sapiens
ccacguagccccugcucgcuguccuugcucuc

SEQ ID NO: 199481 - RNA, 32 nt, Homo Sapiens
gucaauacacaaaacacacuaggggccgggca

SEQ ID NO: 199482 - RNA, 32 nt, Homo Sapiens
ggcccaguguggaagcccagcgugucuguucu

SEQ ID NO: 199483 - RNA, 32 nt, Homo Sapiens
cuguauacauugugcuccuuucugggggaaga

SEQ ID NO: 199484 - RNA, 32 nt, Homo Sapiens
gucaggguucgggggcugcagcagccaagcgc

SEQ ID NO: 199485 - RNA, 32 nt, Homo Sapiens
ggagccaagucgaccuggcaucagguccuggc

SEQ ID NO: 199486 - RNA, 32 nt, Homo Sapiens
ucauauuguaaguccaggaugaacuaggagaa

SEQ ID NO: 199487 - RNA, 32 nt, Homo Sapiens
caugacgaugggcccugaaugccaagauucau

SEQ ID NO: 199488 - RNA, 30 nt, Homo Sapiens
augccacugguuccgaugccacuggcuggg

SEQ ID NO: 199489 - RNA, 32 nt, Homo Sapiens
ugguguugacuucugacucuaaaagcaaucaa

SEQ ID NO: 199490 - RNA, 32 nt, Homo Sapiens
gagggauguucuagcccucccuggcaugucag

SEQ ID NO: 199491 - RNA, 32 nt, Homo Sapiens
gaaaggacaacaacauaccuggacagaaaugc

SEQ ID NO: 199492 - RNA, 32 nt, Homo Sapiens
ugucgccccccgcuccucccccaaaauccggu

SEQ ID NO: 199493 - RNA, 32 nt, Homo Sapiens
ggguccugcuacauuuaugagaauaaugaugg

SEQ ID NO: 199494 - RNA, 32 nt, Homo Sapiens
auccacccuggccucuuuuuacccacugacuc

SEQ ID NO: 199495 - RNA, 30 nt, Homo Sapiens
aggaggaggaggagcggcggcgccugggcg

SEQ ID NO: 199496 - RNA, 32 nt, Homo Sapiens
agaguuauaggaccacagucuucacuucugau

SEQ ID NO: 199497 - RNA, 32 nt, Homo Sapiens
cucaucacagauccagaccucccccacuuucc

SEQ ID NO: 199498 - RNA, 32 nt, Homo Sapiens
aaauuugucuguuuuccacuuggaguuauuuu

SEQ ID NO: 199499 - RNA, 32 nt, Homo Sapiens
aaagcuguggccugggaaauaguucucuuggc

SEQ ID NO: 199500 - RNA, 32 nt, Homo Sapiens
cugcggcauguaugacuucucuggccaguuug

SEQ ID NO: 199501 - RNA, 32 nt, Homo Sapiens
cugcauccuaugccggccgggggcggggggug

SEQ ID NO: 199502 - RNA, 32 nt, Homo Sapiens
gauggcuccagugacaggcagcagccaccagg

SEQ ID NO: 199503 - RNA, 32 nt, Homo Sapiens
cccagggugaugugagcagagcccaggaaugc

SEQ ID NO: 199504 - RNA, 32 nt, Homo Sapiens
ucggccuuggcaggcccggccuccugccucuc

SEQ ID NO: 199505 - RNA, 32 nt, Homo Sapiens
gcgauuauaaucuccaacuuuauuuugaaugu

SEQ ID NO: 199506 - RNA, 32 nt, Homo Sapiens
uucugucugccucuccuuccucucugcagccc

SEQ ID NO: 199507 - RNA, 32 nt, Homo Sapiens
gcagcauaccccugggaccccucggccacugc

SEQ ID NO: 199508 - RNA, 32 nt, Homo Sapiens
cuccgcgggcggugcuccagggacgcgcacac

SEQ ID NO: 199509 - RNA, 32 nt, Homo Sapiens
cugcucugaggguggguccaggcagacaugug

SEQ ID NO: 199510 - RNA, 32 nt, Homo Sapiens
agacagggccccagcagcccugucuguuacca

SEQ ID NO: 199511 - RNA, 32 nt, Homo Sapiens
auguaaugauauauuuuuucauuauuauagua

SEQ ID NO: 199512 - RNA, 32 nt, Homo Sapiens
agagaccccaggccagcccccggagucugcaa

SEQ ID NO: 199513 - RNA, 32 nt, Homo Sapiens
agacaggcugguuuuuucucuguucuccugag

SEQ ID NO: 199514 - RNA, 30 nt, Homo Sapiens
aacugacuauucacgucccaucuuuuuggc

SEQ ID NO: 199515 - RNA, 32 nt, Homo Sapiens
gggcccccagccccgcacccagcccggacuca

SEQ ID NO: 199516 - RNA, 32 nt, Homo Sapiens
gacggagucucacucugucacccaggcuggac

SEQ ID NO: 199517 - RNA, 32 nt, Homo Sapiens
gcugucucuugugugugucaugcacaaggaag

SEQ ID NO: 199518 - RNA, 32 nt, Homo Sapiens
ggcagcugcuccaugcagaacugaagcugguu

SEQ ID NO: 199519 - RNA, 32 nt, Homo Sapiens
aaacuaaccaaauuauuuuaucauaaagaggu

SEQ ID NO: 199520 - RNA, 32 nt, Homo Sapiens
aagacgagaaaguugagaagaacacgaagcac

SEQ ID NO: 199521 - RNA, 32 nt, Homo Sapiens
gggcuggcucugcgcccugccuaccuguccag

SEQ ID NO: 199522 - RNA, 32 nt, Homo Sapiens
ccugaccuccauaugcuguacaugacaucgaa

SEQ ID NO: 199523 - RNA, 32 nt, Homo Sapiens
uuuacuccugauuugcagaauguaagugauuu

SEQ ID NO: 199524 - RNA, 27 nt, Homo Sapiens
aagagucccuucuucaaugcucuccag

SEQ ID NO: 199525 - RNA, 32 nt, Homo Sapiens
acgcccggagagcggccuggagagcgcgugcu

SEQ ID NO: 199526 - RNA, 32 nt, Homo Sapiens
caaaacauuuuucagguuccaaggaagagcau

SEQ ID NO: 199527 - RNA, 32 nt, Homo Sapiens
ccaccccgcugucccgagcccggagccucgcc

SEQ ID NO: 199528 - RNA, 32 nt, Homo Sapiens
uucaacugacuucauaauauuuuuauauucau

SEQ ID NO: 199529 - RNA, 32 nt, Homo Sapiens
ucggaccgcgccgcccgccuccccucucgcgu

SEQ ID NO: 199530 - RNA, 32 nt, Homo Sapiens
gaaccuuaucaaaggcaaaaccacagcugcuu

SEQ ID NO: 199531 - RNA, 32 nt, Homo Sapiens
ugcgaaucuuuauuauuauccaaacauuuaug

SEQ ID NO: 199532 - RNA, 32 nt, Homo Sapiens
uuguggagggucaggaaggguggagaggagcu

SEQ ID NO: 199533 - RNA, 32 nt, Homo Sapiens
cauauuuuuugaaauguuuuugaaaauuauga

SEQ ID NO: 199534 - RNA, 32 nt, Homo Sapiens
gaggcugccgagagggggcgcuuggagggcca

SEQ ID NO: 199535 - RNA, 32 nt, Homo Sapiens
ugcggcaaccacugucgcucuccgaaggcucc

SEQ ID NO: 199536 - RNA, 32 nt, Homo Sapiens
uauucucaguuaucuuuccccauaauaaaaaa

SEQ ID NO: 199537 - RNA, 32 nt, Homo Sapiens
aaggcgcgggagcuugcgugcugcugggccug

SEQ ID NO: 199538 - RNA, 32 nt, Homo Sapiens
guagggccgggcgauaauggcggcgucgaggc

SEQ ID NO: 199539 - RNA, 32 nt, Homo Sapiens
cuuacuuauaaauucuauucuuugaaaaaauu

SEQ ID NO: 199540 - RNA, 32 nt, Homo Sapiens
ccacuguguaagugacucaucuuccuguuguu

SEQ ID NO: 199541 - RNA, 32 nt, Homo Sapiens
cauuuugacaugugguuuaccuaauaguuuug

SEQ ID NO: 199542 - RNA, 31 nt, Homo Sapiens
ccuggccugccgguugcuaacugggccacuu

SEQ ID NO: 199543 - RNA, 32 nt, Homo Sapiens
aaaucaauuaucauuuacccucuuccuguggu

SEQ ID NO: 199544 - RNA, 32 nt, Homo Sapiens
gcgccugcccacccuccacccacagccucacg

SEQ ID NO: 199545 - RNA, 32 nt, Homo Sapiens
cucuuucuuaaggcacuuugcauuguagaaug

SEQ ID NO: 199546 - RNA, 30 nt, Homo Sapiens
gaagagguugauggcggcggcggagcuccg

SEQ ID NO: 199547 - RNA, 32 nt, Homo Sapiens
ggagggguccggccugaggcccggggcggcgu

SEQ ID NO: 199548 - RNA, 32 nt, Homo Sapiens
ugccugccugucugcugagguaaggugggagg

SEQ ID NO: 199549 - RNA, 32 nt, Homo Sapiens
ccccgggaagcagugggacgcggagacagcag

SEQ ID NO: 199550 - RNA, 32 nt, Homo Sapiens
ucugggcugcgcaugguggcucacaccuauaa

SEQ ID NO: 199551 - RNA, 32 nt, Homo Sapiens
cagacuccugccggcagcugcccugggggaca

SEQ ID NO: 199552 - RNA, 32 nt, Homo Sapiens
cuugucccuccauaugauccgccccgacgccg

SEQ ID NO: 199553 - RNA, 32 nt, Homo Sapiens
uuggacgcccagugcuggccuuggaggacggu

SEQ ID NO: 199554 - RNA, 27 nt, Homo Sapiens
agugggcccuccgacagcccccucugc

SEQ ID NO: 199555 - RNA, 32 nt, Homo Sapiens
cuuacucccaaguuauaaaugcuggcaacaaa

SEQ ID NO: 199556 - RNA, 32 nt, Homo Sapiens
caacaugaugagacccugucucugccaaaaaa

SEQ ID NO: 199557 - RNA, 32 nt, Homo Sapiens
gccuaugcacaaaagcauuaccugaucuuaag

SEQ ID NO: 199558 - RNA, 32 nt, Homo Sapiens
ggggagcaaaaagcaacuuauguauuuucuuc

SEQ ID NO: 199559 - RNA, 32 nt, Homo Sapiens
guuguuugaaauuauuuuucuuuucgggucuu

SEQ ID NO: 199560 - RNA, 32 nt, Homo Sapiens
aacuugugaacaugugaauacacaugugaagu

SEQ ID NO: 199561 - RNA, 32 nt, Homo Sapiens
guuuaaauaguucuguuguaacuuuuaauagu

SEQ ID NO: 199562 - RNA, 32 nt, Homo Sapiens
aggaacagggcugcagcgucaggguccgagag

SEQ ID NO: 199563 - RNA, 32 nt, Homo Sapiens
ggguuccucggaguuuaauuugaaagucuggg

SEQ ID NO: 199564 - RNA, 32 nt, Homo Sapiens
uuaaugucaaaucaaggcaaaaggaauuaaau

SEQ ID NO: 199565 - RNA, 32 nt, Homo Sapiens
guaacccuggggauugaugggacaggguuaaa

SEQ ID NO: 199566 - RNA, 32 nt, Homo Sapiens
ccugucuccuguccccucccccggucaugaca

SEQ ID NO: 199567 - RNA, 32 nt, Homo Sapiens
uucucaggggccuggguccacgaggcuacgac

SEQ ID NO: 199568 - RNA, 32 nt, Homo Sapiens
ugaccugaacaauggcuguagcuguggaccaa

SEQ ID NO: 199569 - RNA, 32 nt, Homo Sapiens
uucccgggccagggcugccccuaaucucugua

SEQ ID NO: 199570 - RNA, 32 nt, Homo Sapiens
acuuuauauaaauguuuaaaacauagggguaa

SEQ ID NO: 199571 - RNA, 32 nt, Homo Sapiens
caacgagcagugccgcguggccuucggcccca

SEQ ID NO: 199572 - RNA, 32 nt, Homo Sapiens
ggagagauuugauuuaauugacucugccuaga

SEQ ID NO: 199573 - RNA, 32 nt, Homo Sapiens
auuaaugaugauaauuauaauguaucuguaca

SEQ ID NO: 199574 - RNA, 32 nt, Homo Sapiens
ugagccgagccgagccgagcugggggcgcaga

SEQ ID NO: 199575 - RNA, 32 nt, Homo Sapiens
guuuuacaaagauaucuaaggauccaagcaaa

SEQ ID NO: 199576 - RNA, 29 nt, Homo Sapiens
gccuccugggugaagaggacgcaggucgc

SEQ ID NO: 199577 - RNA, 32 nt, Homo Sapiens
ggaagucaaaauuuauuuaacaccuaagccuu

SEQ ID NO: 199578 - RNA, 32 nt, Homo Sapiens
uagcaaucguagcaacuaauuccacuaaguac

SEQ ID NO: 199579 - RNA, 31 nt, Homo Sapiens
acauggcggcacuguugaccccaccuucacg

SEQ ID NO: 199580 - RNA, 32 nt, Homo Sapiens
ggcucagaggggcaaagucaccugcaugguag

SEQ ID NO: 199581 - RNA, 32 nt, Homo Sapiens
ugucgcugaagccccagaagcgggcccucagg

SEQ ID NO: 199582 - RNA, 32 nt, Homo Sapiens
ccaugggauguuccugaugcagguguguauaa

SEQ ID NO: 199583 - RNA, 32 nt, Homo Sapiens
cccacucccgacccgaccccagccccaccuga

SEQ ID NO: 199584 - RNA, 32 nt, Homo Sapiens
cgugggcucccggcgagcgguugauggcgagg

SEQ ID NO: 199585 - RNA, 32 nt, Homo Sapiens
guuaacacuguaaagaauguaacauguggggg

SEQ ID NO: 199586 - RNA, 32 nt, Homo Sapiens
uuuucuuuuuuuucuuuuugguagagauggca

SEQ ID NO: 199587 - RNA, 32 nt, Homo Sapiens
ggacccaucgggucgggauggaccacacggac

SEQ ID NO: 199588 - RNA, 29 nt, Homo Sapiens
aggaggaugaagaagguuauaacgaugga

SEQ ID NO: 199589 - RNA, 32 nt, Homo Sapiens
uugggagucugaggcaggagaauggcgugaac

SEQ ID NO: 199590 - RNA, 32 nt, Homo Sapiens
cacaacggcccuggccucugcacugugauagc

SEQ ID NO: 199591 - RNA, 32 nt, Homo Sapiens
auuacacagucuuuuugaccucuuuugaaggu

SEQ ID NO: 199592 - RNA, 32 nt, Homo Sapiens
ugaaaacugauaggauuuuguuugucauuugg

SEQ ID NO: 199593 - RNA, 32 nt, Homo Sapiens
ugccauaguuugucaucccugggucuaggaaa

SEQ ID NO: 199594 - RNA, 32 nt, Homo Sapiens
caaguuuggggucagaggccgggacacugagg

SEQ ID NO: 199595 - RNA, 30 nt, Homo Sapiens
ggaugcagugcucgcuguugcugaauaggc

SEQ ID NO: 199596 - RNA, 32 nt, Homo Sapiens
aaaauaugagagaauaaacagaauacuuggga

SEQ ID NO: 199597 - RNA, 32 nt, Homo Sapiens
agaguauggaaauggaauuuaaucuguuuauu

SEQ ID NO: 199598 - RNA, 32 nt, Homo Sapiens
agggcuccugcagcugcucgcgcgcagucgga

SEQ ID NO: 199599 - RNA, 32 nt, Homo Sapiens
auacuugaacucccaucacgggcacuuucaau

SEQ ID NO: 199600 - RNA, 32 nt, Homo Sapiens
gagacagggcgggcucugcuaagggacgcgcc

SEQ ID NO: 199601 - RNA, 32 nt, Homo Sapiens
gcacugaugcguguauggaugugugugaguca

SEQ ID NO: 199602 - RNA, 32 nt, Homo Sapiens
aaagcucaccucggggacaauuccuugggcuu

SEQ ID NO: 199603 - RNA, 32 nt, Homo Sapiens
agaaagugacguaucacgugcucgaugaagaa

SEQ ID NO: 199604 - RNA, 32 nt, Homo Sapiens
guauuaaaucaguucuuaauuuaauuuuuaag

SEQ ID NO: 199605 - RNA, 32 nt, Homo Sapiens
auuaaguaaaagucuguaaauauguuaaugag

SEQ ID NO: 199606 - RNA, 32 nt, Homo Sapiens
gccauggccugccugccuuuuggcuuuguuuc

SEQ ID NO: 199607 - RNA, 32 nt, Homo Sapiens
cccauuuggaguacagugaugugguagcuaca

SEQ ID NO: 199608 - RNA, 32 nt, Homo Sapiens
uaaaacuucgauuugcagaacuccacuauuuu

SEQ ID NO: 199609 - RNA, 32 nt, Homo Sapiens
ugcuuuuguaaaacuuuuuggauuuuguaaaa

SEQ ID NO: 199610 - RNA, 32 nt, Homo Sapiens
cauucuguagaauuauacaugucuaguuugua

SEQ ID NO: 199611 - RNA, 32 nt, Homo Sapiens
ggacgggcugagggaggcgccucaccagugcc

SEQ ID NO: 199612 - RNA, 32 nt, Homo Sapiens
aaagauguauuaccauauaauuuaaaaacagg

SEQ ID NO: 199613 - RNA, 32 nt, Homo Sapiens
agugaacaugaaaagaacuuauuucaugccuu

SEQ ID NO: 199614 - RNA, 32 nt, Homo Sapiens
caugugcagacacucaagagcccuuccaggag

SEQ ID NO: 199615 - RNA, 32 nt, Homo Sapiens
gaugccuagggcggggugggcaguggcugccg

SEQ ID NO: 199616 - RNA, 32 nt, Homo Sapiens
gcgucguccuccccggcgcuccuccacagcuc

SEQ ID NO: 199617 - RNA, 32 nt, Homo Sapiens
aagaaauacuuuagcaucaugaaagggaaaga

SEQ ID NO: 199618 - RNA, 32 nt, Homo Sapiens
cccggccagcacacacacguggcaucuuaggc

SEQ ID NO: 199619 - RNA, 32 nt, Homo Sapiens
aagaugcuuaucuggaacuguguucuggugaa

SEQ ID NO: 199620 - RNA, 32 nt, Homo Sapiens
cuugaaacaaaaugagacguggucuaaagccc

SEQ ID NO: 199621 - RNA, 32 nt, Homo Sapiens
uaaugacugacccaucuuguggaaagugcaga

SEQ ID NO: 199622 - RNA, 32 nt, Homo Sapiens
gcuuccaagagacauuuacauaaaauugcuuc

SEQ ID NO: 199623 - RNA, 32 nt, Homo Sapiens
aaaguggaaaagagggugagcagguggcccac

SEQ ID NO: 199624 - RNA, 32 nt, Homo Sapiens
ugaaaauaguaauaccugaggacccaugggaa

SEQ ID NO: 199625 - RNA, 30 nt, Homo Sapiens
aggaccaaggaccuggcuggucacuucucc

SEQ ID NO: 199626 - RNA, 31 nt, Homo Sapiens
cuuauuauuguguuuucuucaguguaauugu

SEQ ID NO: 199627 - RNA, 30 nt, Homo Sapiens
gaccgggggcccgugcugcugggagcucua

SEQ ID NO: 199628 - RNA, 32 nt, Homo Sapiens
cucuggagucgcggcccgggguucacgauguc

SEQ ID NO: 199629 - RNA, 32 nt, Homo Sapiens
accaccauuucccucccgggccgggggucggc

SEQ ID NO: 199630 - RNA, 32 nt, Homo Sapiens
gcagccaaagccccaggagcccuagguuccaa

SEQ ID NO: 199631 - RNA, 32 nt, Homo Sapiens
augauuuuuuuuuuuuuuuuuaucgaaagaga

SEQ ID NO: 199632 - RNA, 32 nt, Homo Sapiens
gugcuucugaagauuguuugcuguaguguugu

SEQ ID NO: 199633 - RNA, 32 nt, Homo Sapiens
aauauuacugucaaguaaauaagauuuguuuu

SEQ ID NO: 199634 - RNA, 32 nt, Homo Sapiens
aucuaauaguacuuguaauuucuuucugcuua

SEQ ID NO: 199635 - RNA, 32 nt, Homo Sapiens
gaguucacuuuuacuuuucuuaaacuuaggcu

SEQ ID NO: 199636 - RNA, 32 nt, Homo Sapiens
ccgcucuccgcggaacugcucugccgucucgg

SEQ ID NO: 199637 - RNA, 32 nt, Homo Sapiens
ugcacccgagagucucugacuccaccugaaag

SEQ ID NO: 199638 - RNA, 32 nt, Homo Sapiens
caguuuguuuugcugccaaccugucuccaccc

SEQ ID NO: 199639 - RNA, 32 nt, Homo Sapiens
gguauggaucauugucagaacuugauuggagg

SEQ ID NO: 199640 - RNA, 32 nt, Homo Sapiens
uguuacacaauuuguuauuucuucaaauuucc

SEQ ID NO: 199641 - RNA, 32 nt, Homo Sapiens
acccagugcccucugcagaccccucccagccg

SEQ ID NO: 199642 - RNA, 32 nt, Homo Sapiens
cugccugucccccaagcaccgccucugucccc

SEQ ID NO: 199643 - RNA, 32 nt, Homo Sapiens
ucuggcgguggccacagcgugcuggcgacacu

SEQ ID NO: 199644 - RNA, 32 nt, Homo Sapiens
gcauuuucauucucucuuuguuuacugcacag

SEQ ID NO: 199645 - RNA, 32 nt, Homo Sapiens
uugcuuuauagcauauuacucaggccugauuc

SEQ ID NO: 199646 - RNA, 32 nt, Homo Sapiens
cccucaggccuuauaauacauaaaauaauuua

SEQ ID NO: 199647 - RNA, 32 nt, Homo Sapiens
accguccgccgccgcucccggggcuguugugu

SEQ ID NO: 199648 - RNA, 32 nt, Homo Sapiens
ggucggggccccaguuaagcugugccccacca

SEQ ID NO: 199649 - RNA, 32 nt, Homo Sapiens
auaauuguaaaggguuuuugcauguacaguuu

SEQ ID NO: 199650 - RNA, 32 nt, Homo Sapiens
ggccgcuguggccuucagggucuccccaaaca

SEQ ID NO: 199651 - RNA, 32 nt, Homo Sapiens
agcauuccacacugcagggaggagugguacuu

SEQ ID NO: 199652 - RNA, 32 nt, Homo Sapiens
ccugaggcuggaccggccccuggacuucuacg

SEQ ID NO: 199653 - RNA, 32 nt, Homo Sapiens
gacucguucuacugccuggaaggaagagaagg

SEQ ID NO: 199654 - RNA, 32 nt, Homo Sapiens
auaaaugaaacacuugagcacacuuuaaaaag

SEQ ID NO: 199655 - RNA, 32 nt, Homo Sapiens
aguuaagcauuaccuuucuacauuccagaaga

SEQ ID NO: 199656 - RNA, 32 nt, Homo Sapiens
accaucucaaaauaucaguuauauaaacguuu

SEQ ID NO: 199657 - RNA, 32 nt, Homo Sapiens
agcuacuguaguuuuggcguggcacuauugua

SEQ ID NO: 199658 - RNA, 32 nt, Homo Sapiens
gacggagcccgggucuugcuccccauuggccg

SEQ ID NO: 199659 - RNA, 32 nt, Homo Sapiens
cuaucugccaugugaguugggcaaauuguuga

SEQ ID NO: 199660 - RNA, 32 nt, Homo Sapiens
uugucugcaauaaugaauauaacugcaguguc

SEQ ID NO: 199661 - RNA, 32 nt, Homo Sapiens
acaagcauaaaccagagcacuggguagagagg

SEQ ID NO: 199662 - RNA, 32 nt, Homo Sapiens
gcaaucaauuuaaauuauguagguuuaagacu

SEQ ID NO: 199663 - RNA, 32 nt, Homo Sapiens
ucagcuuuucauaauaucuaugcugaguauuu

SEQ ID NO: 199664 - RNA, 32 nt, Homo Sapiens
uauuguacccucaagaccccagagagaaacag

SEQ ID NO: 199665 - RNA, 32 nt, Homo Sapiens
guggcugaaacacuuaccugcaguggaaagcc

SEQ ID NO: 199666 - RNA, 32 nt, Homo Sapiens
cuuaaggcuuuuaaucagauaccuguguugcu

SEQ ID NO: 199667 - RNA, 32 nt, Homo Sapiens
aacagccuggccaacauagugaaacuccgucu

SEQ ID NO: 199668 - RNA, 32 nt, Homo Sapiens
gacacuuuuuauuauuuuauuguuauguuugu

SEQ ID NO: 199669 - RNA, 32 nt, Homo Sapiens
ccaagccauguacgcuuuguguuuccugagcc

SEQ ID NO: 199670 - RNA, 32 nt, Homo Sapiens
ucaaaagaaauauuuaaaugugagucuuugug

SEQ ID NO: 199671 - RNA, 32 nt, Homo Sapiens
uucucaucucaaaaaugcugugacagcuuuuu

SEQ ID NO: 199672 - RNA, 32 nt, Homo Sapiens
guuuugggccuccaugccccagcucuggauga

SEQ ID NO: 199673 - RNA, 32 nt, Homo Sapiens
uuugauuauuuugugguccuuuccugggauuu

SEQ ID NO: 199674 - RNA, 32 nt, Homo Sapiens
ucggugucuggguggcagcugagcugggacuc

SEQ ID NO: 199675 - RNA, 32 nt, Homo Sapiens
gcccgcucggcgucggccgccgccaugggagu

SEQ ID NO: 199676 - RNA, 32 nt, Homo Sapiens
accugucaacaagguccgcaaguucuggccuu

SEQ ID NO: 199677 - RNA, 32 nt, Homo Sapiens
uucugcgcgacgugcuggcccaggaccugcau

SEQ ID NO: 199678 - RNA, 32 nt, Homo Sapiens
uguuuuaaugaaauucuuaaauuaacaucuuu

SEQ ID NO: 199679 - RNA, 32 nt, Homo Sapiens
gcugccuugggguuggcagaacacgugaagga

SEQ ID NO: 199680 - RNA, 32 nt, Homo Sapiens
aagaacuguaaauuuauguaucauaggugcac

SEQ ID NO: 199681 - RNA, 32 nt, Homo Sapiens
gcuguugcuccuuagcaggcuaugaaguugca

SEQ ID NO: 199682 - RNA, 32 nt, Homo Sapiens
aggaacaacugccuguuuccuccaccuccacc

SEQ ID NO: 199683 - RNA, 32 nt, Homo Sapiens
agcgcucggaagcccgcggggugcgggagcgg

SEQ ID NO: 199684 - RNA, 32 nt, Homo Sapiens
aauugaaggaauauuuggauauuuuuaauccu

SEQ ID NO: 199685 - RNA, 32 nt, Homo Sapiens
auauuaaaaauaauucacugugauuuuuaugg

SEQ ID NO: 199686 - RNA, 32 nt, Homo Sapiens
ccggcccccgcucccgccccagcacuuuuggc

SEQ ID NO: 199687 - RNA, 32 nt, Homo Sapiens
agaaucugccagaagcucccagggaauaaugg

SEQ ID NO: 199688 - RNA, 32 nt, Homo Sapiens
cccgggcgggcgagaggcucucaacugggcgg

SEQ ID NO: 199689 - RNA, 32 nt, Homo Sapiens
cucccucccacuuugcucauuuucuaaccuag

SEQ ID NO: 199690 - RNA, 32 nt, Homo Sapiens
aaggaauuuuauaaguuuuguuacaugaaagg

SEQ ID NO: 199691 - RNA, 32 nt, Homo Sapiens
guaccuuccuuccaugggucuuaagcuguggc

SEQ ID NO: 199692 - RNA, 32 nt, Homo Sapiens
auacagugggucuuuguguguuugaacuccca

SEQ ID NO: 199693 - RNA, 32 nt, Homo Sapiens
ggggaccauugcagcauccuccccuccucgga

SEQ ID NO: 199694 - RNA, 32 nt, Homo Sapiens
guuccguccugcccgcgcccggucucagggug

SEQ ID NO: 199695 - RNA, 32 nt, Homo Sapiens
gcgcccagccccaaguggcuuuuucaauuaca

SEQ ID NO: 199696 - RNA, 32 nt, Homo Sapiens
gccugagggccucccaccacugcccagccccu

SEQ ID NO: 199697 - RNA, 32 nt, Homo Sapiens
auucugagauaaaaauuaugugucaucuaaac

SEQ ID NO: 199698 - RNA, 32 nt, Homo Sapiens
cacucggccccggccgagcccguagcuagagc

SEQ ID NO: 199699 - RNA, 28 nt, Homo Sapiens
gcgcgggggcggcgccgagaacgaaacu

SEQ ID NO: 199700 - RNA, 32 nt, Homo Sapiens
uggccuggaaaguuuucuaagguguuagggag

SEQ ID NO: 199701 - RNA, 32 nt, Homo Sapiens
uaauuuuuguuguuaauuuaagaaauagacuu

SEQ ID NO: 199702 - RNA, 29 nt, Homo Sapiens
cccaaauagaauuccuauuuucuacagcc

SEQ ID NO: 199703 - RNA, 31 nt, Homo Sapiens
cauucaacaaauuaauggguguaaggaacug

SEQ ID NO: 199704 - RNA, 32 nt, Homo Sapiens
ccggaaugugggccuaguguugccagaucuuc

SEQ ID NO: 199705 - RNA, 32 nt, Homo Sapiens
ucgauuuuaggagcccagcuuuagucauuuga

SEQ ID NO: 199706 - RNA, 32 nt, Homo Sapiens
gggagccgccaccucgagacgucuucccgccg

SEQ ID NO: 199707 - RNA, 32 nt, Homo Sapiens
ccggaagcacaguccucccagacgccagcgcc

SEQ ID NO: 199708 - RNA, 32 nt, Homo Sapiens
aaaaaugguuggcacuaacaaagaacgagcac

SEQ ID NO: 199709 - RNA, 32 nt, Homo Sapiens
cuacugcgggcugguccgggcuccucagguuc

SEQ ID NO: 199710 - RNA, 32 nt, Homo Sapiens
acuggguacaagcagugcccuuauuguauggu

SEQ ID NO: 199711 - RNA, 32 nt, Homo Sapiens
auauuaaacuaaaucaggcucauuugaagaug

SEQ ID NO: 199712 - RNA, 32 nt, Homo Sapiens
accuccuucccacccuucuccagauucuccaa

SEQ ID NO: 199713 - RNA, 32 nt, Homo Sapiens
cgacucucgacccgggccccagccuccuugcg

SEQ ID NO: 199714 - RNA, 32 nt, Homo Sapiens
uuugugccccuuucuucaagucucuguuggua

SEQ ID NO: 199715 - RNA, 32 nt, Homo Sapiens
ccaugacuuccacccgcaaaccucugaucugu

SEQ ID NO: 199716 - RNA, 32 nt, Homo Sapiens
augucccccuauaaggccccucugccaucuac

SEQ ID NO: 199717 - RNA, 32 nt, Homo Sapiens
gcacaggguuguggccuccaccccagcucugg

SEQ ID NO: 199718 - RNA, 31 nt, Homo Sapiens
ggcaggaugaaaaaccacagucugagagcug

SEQ ID NO: 199719 - RNA, 32 nt, Homo Sapiens
auuuauuauaucuauuuggcaggugcacaauc

SEQ ID NO: 199720 - RNA, 32 nt, Homo Sapiens
ccauuggggcuccucauuggggugcuuggggc

SEQ ID NO: 199721 - RNA, 32 nt, Homo Sapiens
aacaaagcagcaugcaggaacuagaaacacau

SEQ ID NO: 199722 - RNA, 32 nt, Homo Sapiens
uccucuuugccugcuauauaaggcaggcuccu

SEQ ID NO: 199723 - RNA, 32 nt, Homo Sapiens
uauauugaaaaaacuuuuuugacacucccaag

SEQ ID NO: 199724 - RNA, 32 nt, Homo Sapiens
cugcucagaccugugccccggcgggaccccca

SEQ ID NO: 199725 - RNA, 32 nt, Homo Sapiens
ccucuuccccuauaccuguucccacaaauggc

SEQ ID NO: 199726 - RNA, 32 nt, Homo Sapiens
cccuaaaggacaccccucgcccccaucuucau

SEQ ID NO: 199727 - RNA, 32 nt, Homo Sapiens
gugagcggguggcaggccgggcuccgccacug

SEQ ID NO: 199728 - RNA, 32 nt, Homo Sapiens
gaggcagcuguuugagcuccaaugugugcagc

SEQ ID NO: 199729 - RNA, 32 nt, Homo Sapiens
agagccgagcucuggagccucagcgagcggag

SEQ ID NO: 199730 - RNA, 32 nt, Homo Sapiens
gacacuccuggccaucuguggauuugucugug

SEQ ID NO: 199731 - RNA, 32 nt, Homo Sapiens
ggauacaauuucaggaaaaauuucauaccaau

SEQ ID NO: 199732 - RNA, 32 nt, Homo Sapiens
aaagguaauuuaauccaaguauucuaucauca

SEQ ID NO: 199733 - RNA, 32 nt, Homo Sapiens
cuucagaccuugucucuucucaucuuuccauu

SEQ ID NO: 199734 - RNA, 32 nt, Homo Sapiens
gguuuuuugaugcacaaaguucuuaaguuuuc

SEQ ID NO: 199735 - RNA, 32 nt, Homo Sapiens
auucugcaccccccggccccgcccaugcugag

SEQ ID NO: 199736 - RNA, 32 nt, Homo Sapiens
uauuuagucaaucaccacuuauucucaggcaa

SEQ ID NO: 199737 - RNA, 32 nt, Homo Sapiens
uuuuaacaaaaauaaacacugcuaaaaguuau

SEQ ID NO: 199738 - RNA, 32 nt, Homo Sapiens
uuauuucugcucuucaggaaauuucugcacca

SEQ ID NO: 199739 - RNA, 31 nt, Homo Sapiens
caugugaaauaaaacucaguauuuuaauaaa

SEQ ID NO: 199740 - RNA, 32 nt, Homo Sapiens
cugagcgccgcggccgcagagccucuccggcc

SEQ ID NO: 199741 - RNA, 32 nt, Homo Sapiens
gggggugaccagcacagcuccagccagcagcu

SEQ ID NO: 199742 - RNA, 32 nt, Homo Sapiens
aggguggcggugguuccuggggucugagaugu

SEQ ID NO: 199743 - RNA, 32 nt, Homo Sapiens
gggagguggauaggucggugauguguggagcg

SEQ ID NO: 199744 - RNA, 32 nt, Homo Sapiens
uggaauagaaaagaugagaggcagaggcagac

SEQ ID NO: 199745 - RNA, 32 nt, Homo Sapiens
uaaaauaucuaccugcccucucucaguuauuc

SEQ ID NO: 199746 - RNA, 32 nt, Homo Sapiens
agaaggccaaacaaaacacaucugugggcugg

SEQ ID NO: 199747 - RNA, 32 nt, Homo Sapiens
cugagcacguaugggccagguacgguucuuca

SEQ ID NO: 199748 - RNA, 32 nt, Homo Sapiens
ugcacaacaacaagcuggcagacgccgggcug

SEQ ID NO: 199749 - RNA, 32 nt, Homo Sapiens
cggccucccccuuuccucucuguuacagugcc

SEQ ID NO: 199750 - RNA, 32 nt, Homo Sapiens
acugggcugcccagccccgcucaggccuagga

SEQ ID NO: 199751 - RNA, 32 nt, Homo Sapiens
uuuaggauauauuuuuaaauucuuugaaacac

SEQ ID NO: 199752 - RNA, 32 nt, Homo Sapiens
accagagucucgugugugccgaccacaggagc

SEQ ID NO: 199753 - RNA, 32 nt, Homo Sapiens
uaucccccgccccacggccucaucucgaguuc

SEQ ID NO: 199754 - RNA, 32 nt, Homo Sapiens
aagggaccuaacugaaaacaaacaagcuggga

SEQ ID NO: 199755 - RNA, 32 nt, Homo Sapiens
aaaaaauaauauuuuauacaugucaucaaagu

SEQ ID NO: 199756 - RNA, 32 nt, Homo Sapiens
agaggcuuuaauaagcacuuuaaaaguggaac

SEQ ID NO: 199757 - RNA, 32 nt, Homo Sapiens
agcccagguagggguccugggggauuggguuc

SEQ ID NO: 199758 - RNA, 32 nt, Homo Sapiens
aaagacaaaaagagauuacaaaaggaaaauau

SEQ ID NO: 199759 - RNA, 32 nt, Homo Sapiens
gcugcaccgggccggggcgcggcuggacgugc

SEQ ID NO: 199760 - RNA, 32 nt, Homo Sapiens
uucaaagcauucugcagccugaauuuugaagg

SEQ ID NO: 199761 - RNA, 32 nt, Homo Sapiens
cacacagucucccaucucuccuccccuccccc

SEQ ID NO: 199762 - RNA, 32 nt, Homo Sapiens
ugcauuuacacacacacacacacacacacaca

SEQ ID NO: 199763 - RNA, 32 nt, Homo Sapiens
aaaguuguguaauggugaugcuaaagaaaugu

SEQ ID NO: 199764 - RNA, 32 nt, Homo Sapiens
uuucugccaauaaaguugcaugguaaauauuu

SEQ ID NO: 199765 - RNA, 30 nt, Homo Sapiens
uggggagcugguggcaugaaaugcaaauga

SEQ ID NO: 199766 - RNA, 32 nt, Homo Sapiens
uucuggggaaauguucagauacaguuuuguga

SEQ ID NO: 199767 - RNA, 32 nt, Homo Sapiens
uccagaggaccuugguguuugcucucccuuga

SEQ ID NO: 199768 - RNA, 32 nt, Homo Sapiens
cuuugcccugucacccccgaaucaugacccac

SEQ ID NO: 199769 - RNA, 32 nt, Homo Sapiens
caaccugguugaggggacuguccccaagauga

SEQ ID NO: 199770 - RNA, 32 nt, Homo Sapiens
cguuuccuauguaaguagguagcccaaaccuu

SEQ ID NO: 199771 - RNA, 32 nt, Homo Sapiens
augguaucacugcaugauaagagcaaaugugu

SEQ ID NO: 199772 - RNA, 32 nt, Homo Sapiens
cacugcacuccagccugggccagaaugagacu

SEQ ID NO: 199773 - RNA, 32 nt, Homo Sapiens
caaauaaguauuuugucaaaucauuuacaaaa

SEQ ID NO: 199774 - RNA, 30 nt, Homo Sapiens
gagggugacugugcugugaggcccgccgga

SEQ ID NO: 199775 - RNA, 32 nt, Homo Sapiens
uuugcccaaaucugccuauugcagcugggaga

SEQ ID NO: 199776 - RNA, 32 nt, Homo Sapiens
auucugggcaagucacccaggaugcuggggca

SEQ ID NO: 199777 - RNA, 32 nt, Homo Sapiens
gaaauuuaaaauuuauggaagagacagugcag

SEQ ID NO: 199778 - RNA, 32 nt, Homo Sapiens
ggcccaggcuccuggugugucugcagugcagg

SEQ ID NO: 199779 - RNA, 29 nt, Homo Sapiens
ccacauggggacgcugccauggcuucuug

SEQ ID NO: 199780 - RNA, 32 nt, Homo Sapiens
gcuugcucucuggcugugcuccugcuuaaaga

SEQ ID NO: 199781 - RNA, 32 nt, Homo Sapiens
ugacccagcuggaaagccagcgcccugccgcg

SEQ ID NO: 199782 - RNA, 32 nt, Homo Sapiens
ggagaaccugugugucgaaacucuguaucuaa

SEQ ID NO: 199783 - RNA, 32 nt, Homo Sapiens
gauuccuuuacauccuucucccuaacaucuag

SEQ ID NO: 199784 - RNA, 32 nt, Homo Sapiens
caggcuuuuuugcugugagggagccaccaggg

SEQ ID NO: 199785 - RNA, 32 nt, Homo Sapiens
cuuuggacuaccgcccagcaguguccugcccu

SEQ ID NO: 199786 - RNA, 32 nt, Homo Sapiens
guugugaggguugagaucaucuauguucaaag

SEQ ID NO: 199787 - RNA, 32 nt, Homo Sapiens
uugucauccauccuuaaauuuuuaugacaccc

SEQ ID NO: 199788 - RNA, 32 nt, Homo Sapiens
aucuucuuccuucgucgucucuccucuuuaau

SEQ ID NO: 199789 - RNA, 32 nt, Homo Sapiens
gauuuuagcuguggguuuuucuuggacauccu

SEQ ID NO: 199790 - RNA, 32 nt, Homo Sapiens
ucccagccuguccuguggccugucccacugug

SEQ ID NO: 199791 - RNA, 32 nt, Homo Sapiens
gggcacucccaccagcucgcagcccuccuucg

SEQ ID NO: 199792 - RNA, 32 nt, Homo Sapiens
aaauaacacggcaugggaguaagguuauccuu

SEQ ID NO: 199793 - RNA, 32 nt, Homo Sapiens
aaucacauuuaugguuuggaaccaucacccca

SEQ ID NO: 199794 - RNA, 32 nt, Homo Sapiens
caaccucuuuggaaucuucuucaucuuggcug

SEQ ID NO: 199795 - RNA, 31 nt, Homo Sapiens
cguguggcaguggugcugccccgagugccug

SEQ ID NO: 199796 - RNA, 32 nt, Homo Sapiens
ccccgaccaagcaugggggugcucuguaggua

SEQ ID NO: 199797 - RNA, 32 nt, Homo Sapiens
aggggucagagcugcgaagcugagagauauga

SEQ ID NO: 199798 - RNA, 32 nt, Homo Sapiens
ccuggaucaccggcccggagagcccgccgccu

SEQ ID NO: 199799 - RNA, 32 nt, Homo Sapiens
agucaaaaaaucacagaugcuggugagguugu

SEQ ID NO: 199800 - RNA, 32 nt, Homo Sapiens
agaagcguggugggcgggucccgggcaccugu

SEQ ID NO: 199801 - RNA, 32 nt, Homo Sapiens
gagcggagcggaggaugcagcagccgcagccg

SEQ ID NO: 199802 - RNA, 32 nt, Homo Sapiens
cuugcccaccucaggccuggugguggcagugg

SEQ ID NO: 199803 - RNA, 32 nt, Homo Sapiens
ggaucugagggaagaagggaauguuaaaaccu

SEQ ID NO: 199804 - RNA, 32 nt, Homo Sapiens
cgacuuacguaucuuuucuccuccucccuagu

SEQ ID NO: 199805 - RNA, 32 nt, Homo Sapiens
agggucaaggcuugggucuugccccgcagacc

SEQ ID NO: 199806 - RNA, 32 nt, Homo Sapiens
agaugaagaagaauucuuuauauagcauaaaa

SEQ ID NO: 199807 - RNA, 30 nt, Homo Sapiens
uuguguuaucaccauaaguggugauauucc

SEQ ID NO: 199808 - RNA, 32 nt, Homo Sapiens
guaacccuuucugugccaguugagaaugagcc

SEQ ID NO: 199809 - RNA, 32 nt, Homo Sapiens
agcacugccucccagcgccagggucgcgggca

SEQ ID NO: 199810 - RNA, 32 nt, Homo Sapiens
gucugcuuuucuugcagcaucauuuccuuaca

SEQ ID NO: 199811 - RNA, 32 nt, Homo Sapiens
uguuccagaauuucuucauaccuuuuccacau

SEQ ID NO: 199812 - RNA, 32 nt, Homo Sapiens
agagacccgcggcagcagcuccccgccacuca

SEQ ID NO: 199813 - RNA, 32 nt, Homo Sapiens
auuccauuucuuucuuuuuuuaaucuaaagga

SEQ ID NO: 199814 - RNA, 32 nt, Homo Sapiens
ugaccucagggugauccgcucaccucagccac

SEQ ID NO: 199815 - RNA, 32 nt, Homo Sapiens
cggaagauggugccgggggucgcuggcucugc

SEQ ID NO: 199816 - RNA, 32 nt, Homo Sapiens
auagagaaaacgcacagcucagaaagggggcc

SEQ ID NO: 199817 - RNA, 32 nt, Homo Sapiens
cccugcaggucugcuggccgcgcauauagccu

SEQ ID NO: 199818 - RNA, 32 nt, Homo Sapiens
aguuuuugauuucucaaauauuguguucauua

SEQ ID NO: 199819 - RNA, 32 nt, Homo Sapiens
auuccuuuucuuuuucucuugugccaaacuga

SEQ ID NO: 199820 - RNA, 32 nt, Homo Sapiens
uuuucuugguagacucuuggaacuugcucagu

SEQ ID NO: 199821 - RNA, 32 nt, Homo Sapiens
gccccuuuggaauucugcacuccaguuacuua

SEQ ID NO: 199822 - RNA, 32 nt, Homo Sapiens
ggccuucagcgcggguccuggugcugcggcca

SEQ ID NO: 199823 - RNA, 32 nt, Homo Sapiens
uuuccuuguauauaaugacuuuugcuggcaga

SEQ ID NO: 199824 - RNA, 32 nt, Homo Sapiens
aucagcauggguccugggcugcggcugugccu

SEQ ID NO: 199825 - RNA, 32 nt, Homo Sapiens
accucgggucaggcccgggaaccccgagagga

SEQ ID NO: 199826 - RNA, 32 nt, Homo Sapiens
gcucaggugccuuacaucuuuucuaaucacag

SEQ ID NO: 199827 - RNA, 27 nt, Homo Sapiens
cccugcugcaucuucagcaucucccau

SEQ ID NO: 199828 - RNA, 31 nt, Homo Sapiens
auuuuuccaaaauaaauuuuaugaggaauuc

SEQ ID NO: 199829 - RNA, 32 nt, Homo Sapiens
ggcucccaccgcgcgccucgccgcccucgcaa

SEQ ID NO: 199830 - RNA, 32 nt, Homo Sapiens
cuggacacacuguuacacgugccuguaguccc

SEQ ID NO: 199831 - RNA, 28 nt, Homo Sapiens
cugugaagaaaauaacauuuuaagaaac

SEQ ID NO: 199832 - RNA, 32 nt, Homo Sapiens
auagaaauauuuuuacucguucuucugaauug

SEQ ID NO: 199833 - RNA, 32 nt, Homo Sapiens
gauuuuaaaaauuggaaacugacauaauguua

SEQ ID NO: 199834 - RNA, 32 nt, Homo Sapiens
cuguguucgcucuaaacaaaacagugguaggu

SEQ ID NO: 199835 - RNA, 32 nt, Homo Sapiens
gaaagcuaagacaaacaaaacuacaauggaag

SEQ ID NO: 199836 - RNA, 32 nt, Homo Sapiens
aaucuauguuucccccuuuuuaaguuagcagg

SEQ ID NO: 199837 - RNA, 32 nt, Homo Sapiens
uauagaaauuuuuuauacugauugguucauag

SEQ ID NO: 199838 - RNA, 32 nt, Homo Sapiens
uaaggguuauuuagauauguucccucacugaa

SEQ ID NO: 199839 - RNA, 32 nt, Homo Sapiens
gguuucaccauauuggccaggcuggucucgaa

SEQ ID NO: 199840 - RNA, 32 nt, Homo Sapiens
aagauggaaaauugauuccucugacuuugcua

SEQ ID NO: 199841 - RNA, 32 nt, Homo Sapiens
cccuuccuggggaaaagaagcacccagacccc

SEQ ID NO: 199842 - RNA, 32 nt, Homo Sapiens
gcggccuccgcgcgcgcacgaugcccucggcc

SEQ ID NO: 199843 - RNA, 32 nt, Homo Sapiens
uggcaccucgcacaaguagcgccgccaaaguu

SEQ ID NO: 199844 - RNA, 32 nt, Homo Sapiens
uccuuaaagguuaacauuucuaaagcaauauu

SEQ ID NO: 199845 - RNA, 32 nt, Homo Sapiens
cgccgcccgaggggcggcaggggcugaccaca

SEQ ID NO: 199846 - RNA, 32 nt, Homo Sapiens
ggcuaagaaacgccaggucugccuguucuugc

SEQ ID NO: 199847 - RNA, 32 nt, Homo Sapiens
ggauauuuacuuuaauucaaugcaacacauau

SEQ ID NO: 199848 - RNA, 32 nt, Homo Sapiens
caucuuaaaaauuuuuaaguucacaauucagu

SEQ ID NO: 199849 - RNA, 32 nt, Homo Sapiens
gggcaucuucccggaaucagauucaaaggauc

SEQ ID NO: 199850 - RNA, 32 nt, Homo Sapiens
gucacugaguccuugaaauccuccccugcccc

SEQ ID NO: 199851 - RNA, 32 nt, Homo Sapiens
aacuuguuacuaaagaaaauaucugaaaugug

SEQ ID NO: 199852 - RNA, 32 nt, Homo Sapiens
uggugcugcucagaugugacugagagggauga

SEQ ID NO: 199853 - RNA, 32 nt, Homo Sapiens
cuggucuucggccggguccccagcccccgcuc

SEQ ID NO: 199854 - RNA, 32 nt, Homo Sapiens
caaguuugcauuucuccuuuuugggaucugcc

SEQ ID NO: 199855 - RNA, 32 nt, Homo Sapiens
ggagcccugaagauugaggcuacagugagccu

SEQ ID NO: 199856 - RNA, 32 nt, Homo Sapiens
ggaguuuagacaauguugcccuuggauuuuuu

SEQ ID NO: 199857 - RNA, 32 nt, Homo Sapiens
caugucccguuaauacaucugaaacaguuuua

SEQ ID NO: 199858 - RNA, 32 nt, Homo Sapiens
gagggggcuccugcugugcugcugagccgcac

SEQ ID NO: 199859 - RNA, 32 nt, Homo Sapiens
uauuaggauaucuauuuaauacugaacuuugg

SEQ ID NO: 199860 - RNA, 32 nt, Homo Sapiens
cccuuccagcugcguaaagcaaaccuaccccg

SEQ ID NO: 199861 - RNA, 32 nt, Homo Sapiens
ugucuugacaccacugaugucgagugugcggg

SEQ ID NO: 199862 - RNA, 32 nt, Homo Sapiens
gcuggcggcggaaaugaugaggcgcuggccau

SEQ ID NO: 199863 - RNA, 32 nt, Homo Sapiens
uuaaguggaaauuacagaaauauccauucauu

SEQ ID NO: 199864 - RNA, 32 nt, Homo Sapiens
ugaaugcuucucacuuuuuuuuuuguuugaug

SEQ ID NO: 199865 - RNA, 32 nt, Homo Sapiens
gggucacccuccccagcacccauugccccacc

SEQ ID NO: 199866 - RNA, 32 nt, Homo Sapiens
ugaaagaauuuggcuuuuuuuuuucuuuuuuu

SEQ ID NO: 199867 - RNA, 32 nt, Homo Sapiens
agccggaacucucuauuguguuuuagucagau

SEQ ID NO: 199868 - RNA, 32 nt, Homo Sapiens
cuccagaaaggggaggaggcgaggggagcccg

SEQ ID NO: 199869 - RNA, 32 nt, Homo Sapiens
gagggauccgccguggacccagggaagcggag

SEQ ID NO: 199870 - RNA, 32 nt, Homo Sapiens
cagaugagggaggagccuuagagcuggagcaa

SEQ ID NO: 199871 - RNA, 32 nt, Homo Sapiens
aagcuccugucgccgcugggcuucucgccucc

SEQ ID NO: 199872 - RNA, 32 nt, Homo Sapiens
augaaacuaaacacacacacaaacaaguacaa

SEQ ID NO: 199873 - RNA, 32 nt, Homo Sapiens
uccaccccggacuuagauuuagcaaucguuaa

SEQ ID NO: 199874 - RNA, 32 nt, Homo Sapiens
uguuuuaaggauuuuuucgcaugagcgcagcu

SEQ ID NO: 199875 - RNA, 32 nt, Homo Sapiens
guaccacaugcgcaggcaggugauggcggcgc

SEQ ID NO: 199876 - RNA, 32 nt, Homo Sapiens
gcaggguccuccuggggccuuccugccuuuga

SEQ ID NO: 199877 - RNA, 32 nt, Homo Sapiens
uaaaaacuucuguucauguuccuacaucugau

SEQ ID NO: 199878 - RNA, 31 nt, Homo Sapiens
cgggaagaaaacaugaagugucuguuuuugu

SEQ ID NO: 199879 - RNA, 32 nt, Homo Sapiens
gugcgcugggggcucggucuaugacgagcagc

SEQ ID NO: 199880 - RNA, 32 nt, Homo Sapiens
ccgcgcuuccucuccgccccucgcgcuccagc

SEQ ID NO: 199881 - RNA, 32 nt, Homo Sapiens
cuccauauuuucauaaauaauuccuuguguuu

SEQ ID NO: 199882 - RNA, 32 nt, Homo Sapiens
ugauuggguuccugcuggccuguguggcaacu

SEQ ID NO: 199883 - RNA, 32 nt, Homo Sapiens
cgauuguaaagaauuuaaagaccuccacuguu

SEQ ID NO: 199884 - RNA, 32 nt, Homo Sapiens
aggauauuuuuccgcaaaucagucgguugaaa

SEQ ID NO: 199885 - RNA, 32 nt, Homo Sapiens
aaagaaagcacaaaaacuagacagugggaggg

SEQ ID NO: 199886 - RNA, 32 nt, Homo Sapiens
caccuuucaguacuccaccuagcucugccaaa

SEQ ID NO: 199887 - RNA, 32 nt, Homo Sapiens
aagaggaaugcuuauucaucauuggugggagu

SEQ ID NO: 199888 - RNA, 32 nt, Homo Sapiens
ucauauauauaauuuuuuuuuacauuauaugu

SEQ ID NO: 199889 - RNA, 32 nt, Homo Sapiens
cucccagugcuaucccuccccccucccccgac

SEQ ID NO: 199890 - RNA, 32 nt, Homo Sapiens
cccuuucuaacacacacacacacacacacaca

SEQ ID NO: 199891 - RNA, 32 nt, Homo Sapiens
uuuaagggugcaggaggacagcagcuaacaag

SEQ ID NO: 199892 - RNA, 32 nt, Homo Sapiens
uugauaacaccgucagugccuacuacuggguc

SEQ ID NO: 199893 - RNA, 32 nt, Homo Sapiens
guggcguugggucgcgguuuccuucaccaagc

SEQ ID NO: 199894 - RNA, 32 nt, Homo Sapiens
cccggccccugccccucccuccggguggaacu

SEQ ID NO: 199895 - RNA, 32 nt, Homo Sapiens
ucaucagcugagggcagggaauggaacuuuaa

SEQ ID NO: 199896 - RNA, 32 nt, Homo Sapiens
guguguccugcucacauugucuccagggccuc

SEQ ID NO: 199897 - RNA, 32 nt, Homo Sapiens
acuucccuuuuuccgguccgccggauuaugaa

SEQ ID NO: 199898 - RNA, 32 nt, Homo Sapiens
aauagugcuaagcugggaaguucuuccugagg

SEQ ID NO: 199899 - RNA, 32 nt, Homo Sapiens
uggugugcaccuguaaucucagcuacucggga

SEQ ID NO: 199900 - RNA, 32 nt, Homo Sapiens
uuccccagccugaccuggcccgccgcugcagc

SEQ ID NO: 199901 - RNA, 32 nt, Homo Sapiens
gucuucaggcucuagaaacaucuuuaacuucg

SEQ ID NO: 199902 - RNA, 32 nt, Homo Sapiens
ucuacaccagcagagaccucccugcccugcgg

SEQ ID NO: 199903 - RNA, 32 nt, Homo Sapiens
cuccaaaggaucacaacuccuugccggcaagg

SEQ ID NO: 199904 - RNA, 32 nt, Homo Sapiens
ccuuuuuguaaauacugcuugaccguacucuc

SEQ ID NO: 199905 - RNA, 32 nt, Homo Sapiens
caaacugucgccccccgcuccucccccaaaau

SEQ ID NO: 199906 - RNA, 32 nt, Homo Sapiens
ggcuaagaucaaguguaguaucaugaggaguu

SEQ ID NO: 199907 - RNA, 32 nt, Homo Sapiens
ugcgauucauggauauacugguaaauuuaggc

SEQ ID NO: 199908 - RNA, 32 nt, Homo Sapiens
ggagagguuccugggguggauuccuaagcagu

SEQ ID NO: 199909 - RNA, 32 nt, Homo Sapiens
guguuuuugugcccuccuggggaccagaaucu

SEQ ID NO: 199910 - RNA, 32 nt, Homo Sapiens
ggauccggagcagcugcugccagcccgcgggc

SEQ ID NO: 199911 - RNA, 32 nt, Homo Sapiens
gauggggucuagcucuaucacccaggcugaag

SEQ ID NO: 199912 - RNA, 32 nt, Homo Sapiens
uuauuguguaaaacuguugaacacaugacugu

SEQ ID NO: 199913 - RNA, 32 nt, Homo Sapiens
acaggcgcgcacaauggcugcagauccaccug

SEQ ID NO: 199914 - RNA, 32 nt, Homo Sapiens
ggugccaggcagggcagacauggcaaggaagc

SEQ ID NO: 199915 - RNA, 32 nt, Homo Sapiens
aucauuuuucuuuuuuguaaauccagugcguu

SEQ ID NO: 199916 - RNA, 32 nt, Homo Sapiens
aauuuagaauacauuuaaguauuguggaagaa

SEQ ID NO: 199917 - RNA, 32 nt, Homo Sapiens
uagcucaggaagccuuccuuucuagucucuac

SEQ ID NO: 199918 - RNA, 32 nt, Homo Sapiens
gcuauuuuucucucuuuuuuuuuuuuuugaga

SEQ ID NO: 199919 - RNA, 32 nt, Homo Sapiens
gcccuccgccccagccccagccagccaggccc

SEQ ID NO: 199920 - RNA, 32 nt, Homo Sapiens
ucaagcaucuucucacuaauguuuuucacuau

SEQ ID NO: 199921 - RNA, 32 nt, Homo Sapiens
cucaccgugcgcgcucgcggccgggugguagu

SEQ ID NO: 199922 - RNA, 32 nt, Homo Sapiens
gucagcccauccccuagacacccucuguuucc

SEQ ID NO: 199923 - RNA, 32 nt, Homo Sapiens
ccaggaaacagugccuaaggaugaugucaagu

SEQ ID NO: 199924 - RNA, 32 nt, Homo Sapiens
uucccagaggaugugguuuggggcaggcaggu

SEQ ID NO: 199925 - RNA, 32 nt, Homo Sapiens
uuuuacauaaaaaagaaaaaccacguauuuuu

SEQ ID NO: 199926 - RNA, 32 nt, Homo Sapiens
uugaggaaaucaggcauaugacuuuauacuua

SEQ ID NO: 199927 - RNA, 30 nt, Homo Sapiens
gacucaggcaggccgcgcuccagccucacc

SEQ ID NO: 199928 - RNA, 31 nt, Homo Sapiens
ugaaugagggcggcagcgguggcggcgguag

SEQ ID NO: 199929 - RNA, 32 nt, Homo Sapiens
aggguggccagcugcuggcucccagagcgcag

SEQ ID NO: 199930 - RNA, 32 nt, Homo Sapiens
acagcacaccggugcuggccacaccagccccc

SEQ ID NO: 199931 - RNA, 32 nt, Homo Sapiens
aggcccuggcucuggaggagaaugccaccucc

SEQ ID NO: 199932 - RNA, 32 nt, Homo Sapiens
cugguauggguuugggugucaaugaaagggcc

SEQ ID NO: 199933 - RNA, 32 nt, Homo Sapiens
acuaucuccggcacccagcaguguuuggcaua

SEQ ID NO: 199934 - RNA, 32 nt, Homo Sapiens
auaagggcaaaguuaaguagauagagacuuua

SEQ ID NO: 199935 - RNA, 32 nt, Homo Sapiens
uauaaguggaagaaguuuuucagaauucaugc

SEQ ID NO: 199936 - RNA, 32 nt, Homo Sapiens
uggaaauuuguuucuuuuuuuaaguuuguguu

SEQ ID NO: 199937 - RNA, 32 nt, Homo Sapiens
uuccugagccccacaacaaggccagggauggu

SEQ ID NO: 199938 - RNA, 32 nt, Homo Sapiens
ccacucaugcuggagaggacaggccgccuguc

SEQ ID NO: 199939 - RNA, 32 nt, Homo Sapiens
cuggauauuguuuuuaccacuuuuagcuggau

SEQ ID NO: 199940 - RNA, 32 nt, Homo Sapiens
ccagaucaacuggcacggcaggccaggcugag

SEQ ID NO: 199941 - RNA, 32 nt, Homo Sapiens
cgcuacugccccccaaacugccccccgagcuu

SEQ ID NO: 199942 - RNA, 32 nt, Homo Sapiens
gugagaagugauagcucugugcacccggagac

SEQ ID NO: 199943 - RNA, 32 nt, Homo Sapiens
ucucucccucucucccuucccccuccccugaa

SEQ ID NO: 199944 - RNA, 32 nt, Homo Sapiens
uauuuaggggccauauacuacauuauauagca

SEQ ID NO: 199945 - RNA, 32 nt, Homo Sapiens
gucagggcugagaggagaaggagggagacaug

SEQ ID NO: 199946 - RNA, 32 nt, Homo Sapiens
ggaggaaggggcgagaggcaucaucaaaggag

SEQ ID NO: 199947 - RNA, 32 nt, Homo Sapiens
ggcugggcuugguggcucacuccuguaguccc

SEQ ID NO: 199948 - RNA, 32 nt, Homo Sapiens
aaggaggcuggaaaucaauacugcacacugca

SEQ ID NO: 199949 - RNA, 32 nt, Homo Sapiens
aauauccuauacucuucaguaagaaucuguau

SEQ ID NO: 199950 - RNA, 32 nt, Homo Sapiens
ucagcaggcgaccggccuccccgccccugacc

SEQ ID NO: 199951 - RNA, 32 nt, Homo Sapiens
aaacuucacuguguguuuucuaucucggaucc

SEQ ID NO: 199952 - RNA, 32 nt, Homo Sapiens
uaauuucuaaaauggauauauguguggauuaa

SEQ ID NO: 199953 - RNA, 32 nt, Homo Sapiens
gccuagugggaggugauuggaugaugggggug

SEQ ID NO: 199954 - RNA, 32 nt, Homo Sapiens
cuagaucucacccccaggauguugcggaggcu

SEQ ID NO: 199955 - RNA, 32 nt, Homo Sapiens
ucauuguuaugaggaugaaaugaagaucuaug

SEQ ID NO: 199956 - RNA, 32 nt, Homo Sapiens
guugggggugggggguugggggaggcagggaa

SEQ ID NO: 199957 - RNA, 32 nt, Homo Sapiens
gccaccagccccagcccccggcgcguggccua

SEQ ID NO: 199958 - RNA, 32 nt, Homo Sapiens
ugcaaaaggagaucacacccuugccccgcuga

SEQ ID NO: 199959 - RNA, 32 nt, Homo Sapiens
uaggucaucgucggggacaucaggcccugaca

SEQ ID NO: 199960 - RNA, 32 nt, Homo Sapiens
gcgggacgucccgggcgggggagcugacucug

SEQ ID NO: 199961 - RNA, 32 nt, Homo Sapiens
gcaggccccugagggagggagcugucagccag

SEQ ID NO: 199962 - RNA, 32 nt, Homo Sapiens
ggaaugacuuaauuaugagacuguauauaauc

SEQ ID NO: 199963 - RNA, 32 nt, Homo Sapiens
uacugccagcccggacccccagccccugggcu

SEQ ID NO: 199964 - RNA, 32 nt, Homo Sapiens
caagcuggacucaggcaagcgcugcuccaaca

SEQ ID NO: 199965 - RNA, 32 nt, Homo Sapiens
ggaggcucugcccucuccagaggugccagacc

SEQ ID NO: 199966 - RNA, 32 nt, Homo Sapiens
ugccugggccaagggauuuuuacauccuugau

SEQ ID NO: 199967 - RNA, 32 nt, Homo Sapiens
accggacgcgcgcggccuccgccgcucccagu

SEQ ID NO: 199968 - RNA, 32 nt, Homo Sapiens
gaggcccccuguguccaagccucccccuggcu

SEQ ID NO: 199969 - RNA, 32 nt, Homo Sapiens
uacaggucccgguaccugaggaaccaguguag

SEQ ID NO: 199970 - RNA, 32 nt, Homo Sapiens
gacucuggugauaagcucuuucccucuccguu

SEQ ID NO: 199971 - RNA, 32 nt, Homo Sapiens
cgcggaguuugugucccggcucggaccccggc

SEQ ID NO: 199972 - RNA, 32 nt, Homo Sapiens
cugcauuuacacaccacacaacacacacacac

SEQ ID NO: 199973 - RNA, 32 nt, Homo Sapiens
ccauccacuaccccguuuucucuucuugcugc

SEQ ID NO: 199974 - RNA, 32 nt, Homo Sapiens
ugcauuuuucuaugcuuuuuuaaaaacuaguu

SEQ ID NO: 199975 - RNA, 32 nt, Homo Sapiens
cccuccgcccacucugcccccugggagcccuc

SEQ ID NO: 199976 - RNA, 32 nt, Homo Sapiens
ugggcuggacuggccauuuuucuggggguagg

SEQ ID NO: 199977 - RNA, 32 nt, Homo Sapiens
gacugcgcuucgugcgaggcccgggcagcauc

SEQ ID NO: 199978 - RNA, 32 nt, Homo Sapiens
ucugguaagggguaauauuuauagaaaggaaa

SEQ ID NO: 199979 - RNA, 32 nt, Homo Sapiens
gaagagaaauguaaguauauuuuuuguuaucu

SEQ ID NO: 199980 - RNA, 29 nt, Homo Sapiens
agaggcgggggacagcagaggcugcagac

SEQ ID NO: 199981 - RNA, 32 nt, Homo Sapiens
accaaagauaaggacuagauacuacuuucucu

SEQ ID NO: 199982 - RNA, 32 nt, Homo Sapiens
uguuguccuggagggauuuucuuacagcgaag

SEQ ID NO: 199983 - RNA, 28 nt, Homo Sapiens
agagggaugauagaucauuugaacccaa

SEQ ID NO: 199984 - RNA, 32 nt, Homo Sapiens
uaaauacagauguguaauauaaagcaucaaua

SEQ ID NO: 199985 - RNA, 32 nt, Homo Sapiens
gggggaggggagagggguaccuagaacccaga

SEQ ID NO: 199986 - RNA, 32 nt, Homo Sapiens
aaggcaguuaauuauucuuuuacauuuguuac

SEQ ID NO: 199987 - RNA, 32 nt, Homo Sapiens
cuaagugaaauuucuagccugcacuuugaugu

SEQ ID NO: 199988 - RNA, 32 nt, Homo Sapiens
cugaagauuuaaaaucaaaauggauaaacucu

SEQ ID NO: 199989 - RNA, 32 nt, Homo Sapiens
auuuuccugcaguauaugaaguauuguaccag

SEQ ID NO: 199990 - RNA, 32 nt, Homo Sapiens
cuagagacuucuuuuaaggggguuuggcuggu

SEQ ID NO: 199991 - RNA, 32 nt, Homo Sapiens
uccuccuccuuccccauugcuguaaauauuuc

SEQ ID NO: 199992 - RNA, 32 nt, Homo Sapiens
uguuuugaccgggagaucuagagagugcucag

SEQ ID NO: 199993 - RNA, 32 nt, Homo Sapiens
uaaaaguguuuguuaguugucggcugggcgug

SEQ ID NO: 199994 - RNA, 32 nt, Homo Sapiens
gaagccgguuggaaugccuucuuccugcccaa

SEQ ID NO: 199995 - RNA, 32 nt, Homo Sapiens
gcucuucugcaccaugagaccaacccagggca

SEQ ID NO: 199996 - RNA, 32 nt, Homo Sapiens
ucggagcugugggguguggggaggcggaggca

SEQ ID NO: 199997 - RNA, 32 nt, Homo Sapiens
cccuugguaaccaguuuugcucuucuucugcc

SEQ ID NO: 199998 - RNA, 32 nt, Homo Sapiens
ggccccaccucuuccagaaccuccugcucuuc

SEQ ID NO: 199999 - RNA, 32 nt, Homo Sapiens
aucccacgggagaggggagagggacgcacagc

SEQ ID NO: 200000 - RNA, 32 nt, Homo Sapiens
cacugaauggcucuuuggugacuguaauguaa

SEQ ID NO: 200001 - RNA, 32 nt, Homo Sapiens
cugguuugcaggucaguuucuucuuuuaauuc

SEQ ID NO: 200002 - RNA, 32 nt, Homo Sapiens
cuccgcccaguucggugccagcugcgugggcu

SEQ ID NO: 200003 - RNA, 32 nt, Homo Sapiens
uauugaaauaugaaauaguacaauauaaagau

SEQ ID NO: 200004 - RNA, 32 nt, Homo Sapiens
uaacugcaaaagacaaaaugacuauacagacu

SEQ ID NO: 200005 - RNA, 32 nt, Homo Sapiens
cucagccaugugaggacccagcaagaaaggag

SEQ ID NO: 200006 - RNA, 32 nt, Homo Sapiens
agaaucaaccucuuuaaauauuuuacagaauu

SEQ ID NO: 200007 - RNA, 32 nt, Homo Sapiens
ugaagauauuuuacuguauucguaacauaugu

SEQ ID NO: 200008 - RNA, 32 nt, Homo Sapiens
ggccucuacucucuccucccucuggcucugcc

SEQ ID NO: 200009 - RNA, 32 nt, Homo Sapiens
cacacagcuggccugguaaacccagcugggag

SEQ ID NO: 200010 - RNA, 32 nt, Homo Sapiens
gauguagaagcccugucagagcccugacuaaa

SEQ ID NO: 200011 - RNA, 32 nt, Homo Sapiens
gguucuagguugucauucagacuuuaacauua

SEQ ID NO: 200012 - RNA, 30 nt, Homo Sapiens
gcgagagagaagcuaggugugaugaugaca

SEQ ID NO: 200013 - RNA, 32 nt, Homo Sapiens
gacagcaagggaaaugacgaccaagagaagaa

SEQ ID NO: 200014 - RNA, 32 nt, Homo Sapiens
gcgagugucauggcggccggcgucgaguuggc

SEQ ID NO: 200015 - RNA, 32 nt, Homo Sapiens
cagucuugaugcaguuucauaguucuuaaaau

SEQ ID NO: 200016 - RNA, 32 nt, Homo Sapiens
caacaauaauaaauuauuguaaacuuuguggc

SEQ ID NO: 200017 - RNA, 32 nt, Homo Sapiens
gcuugccgcguggagacugaucuguuccaucc

SEQ ID NO: 200018 - RNA, 32 nt, Homo Sapiens
gcaggcuuuuuagccaacaacaaaaguguuuu

SEQ ID NO: 200019 - RNA, 32 nt, Homo Sapiens
cucaagaagcagaggccuccucuggagugaga

SEQ ID NO: 200020 - RNA, 32 nt, Homo Sapiens
aaaaaauauuccacaauuuaugaaaaaagcau

SEQ ID NO: 200021 - RNA, 30 nt, Homo Sapiens
gauuuggauaaaaguugaucuguauaguca

SEQ ID NO: 200022 - RNA, 32 nt, Homo Sapiens
agggcugggaccagcacggggcuggauuccaa

SEQ ID NO: 200023 - RNA, 32 nt, Homo Sapiens
ccuggagcguggcacgcagagccccaggcgcg

SEQ ID NO: 200024 - RNA, 32 nt, Homo Sapiens
ggggcccggacgcagcccggcuccuccccucc

SEQ ID NO: 200025 - RNA, 32 nt, Homo Sapiens
caaugagcugaauuagauggccuuaugaaacu

SEQ ID NO: 200026 - RNA, 32 nt, Homo Sapiens
uuccaucaccucggcgcucccggagccacuac

SEQ ID NO: 200027 - RNA, 32 nt, Homo Sapiens
gagcacaacugccuugcagagccuggagccgg

SEQ ID NO: 200028 - RNA, 32 nt, Homo Sapiens
ucaggugcaauaaaaacaaaauuaaaacccaa

SEQ ID NO: 200029 - RNA, 32 nt, Homo Sapiens
agaguguggaucuucuggagaagugcuguugu

SEQ ID NO: 200030 - RNA, 32 nt, Homo Sapiens
cacugcacagacuuccaucauuagcgccucac

SEQ ID NO: 200031 - RNA, 32 nt, Homo Sapiens
aaugcugcuucuucuacuggacugucuuucac

SEQ ID NO: 200032 - RNA, 32 nt, Homo Sapiens
uuuguacuucugaguucuugcuguauguaugu

SEQ ID NO: 200033 - RNA, 32 nt, Homo Sapiens
ucggaucgaggcuucuucauggccgcucagau

SEQ ID NO: 200034 - RNA, 32 nt, Homo Sapiens
uccuuccacugacuuugaugcugaugacagcc

SEQ ID NO: 200035 - RNA, 32 nt, Homo Sapiens
uccucugggucuugcccugaccccaagcacaa

SEQ ID NO: 200036 - RNA, 32 nt, Homo Sapiens
ggcacagaugagcagacgcagauggccauuga

SEQ ID NO: 200037 - RNA, 31 nt, Homo Sapiens
cugggcggcagagcgagacucugucacgaag

SEQ ID NO: 200038 - RNA, 32 nt, Homo Sapiens
uuauuuuauuuuucuuuuugucgcugcacuuc

SEQ ID NO: 200039 - RNA, 32 nt, Homo Sapiens
aaaacccaaaauauuaugcaaacuacuguaag

SEQ ID NO: 200040 - RNA, 32 nt, Homo Sapiens
uucuaaguuucaucacaaacuguguccaguuu

SEQ ID NO: 200041 - RNA, 32 nt, Homo Sapiens
ggcgggcugaggagaguggaaaaggaagcgac

SEQ ID NO: 200042 - RNA, 31 nt, Homo Sapiens
aggcccucagggagaaaggagcaacacacug

SEQ ID NO: 200043 - RNA, 30 nt, Homo Sapiens
cagcgauugcuaauggguuugggaagcgga

SEQ ID NO: 200044 - RNA, 32 nt, Homo Sapiens
agaaagauuuauauccuggcauuugaaaugcu

SEQ ID NO: 200045 - RNA, 32 nt, Homo Sapiens
uucuuccguaggaaaguugugaaaauaguuua

SEQ ID NO: 200046 - RNA, 32 nt, Homo Sapiens
accaauagggcugagcucucugugggcuggca

SEQ ID NO: 200047 - RNA, 31 nt, Homo Sapiens
agaccucucaauucacaaugaguuaacugau

SEQ ID NO: 200048 - RNA, 31 nt, Homo Sapiens
auguugaaauaaacuaugguaucuucaucau

SEQ ID NO: 200049 - RNA, 32 nt, Homo Sapiens
ccucgcguccccaccccgcgcccuggccgcug

SEQ ID NO: 200050 - RNA, 32 nt, Homo Sapiens
cuaauucagggaauauauauuuuucuaugaaa

SEQ ID NO: 200051 - RNA, 32 nt, Homo Sapiens
auugauuauagcaaugugauuuuguagguuau

SEQ ID NO: 200052 - RNA, 32 nt, Homo Sapiens
guggaaagugacccucuaguucaacugugcca

SEQ ID NO: 200053 - RNA, 32 nt, Homo Sapiens
auuucuguaaaauaaacuguauuugcaaaucc

SEQ ID NO: 200054 - RNA, 32 nt, Homo Sapiens
auuuaggagcagccucugagcccuugggcaag

SEQ ID NO: 200055 - RNA, 32 nt, Homo Sapiens
gaaaaggcuuccccuggcuggaccugcaggac

SEQ ID NO: 200056 - RNA, 32 nt, Homo Sapiens
cuguggggggagaggacaaaugccaggcacag

SEQ ID NO: 200057 - RNA, 32 nt, Homo Sapiens
gacucugaaaaacacaaaaaaggacguaugaa

SEQ ID NO: 200058 - RNA, 32 nt, Homo Sapiens
uggaggcuucccucacuuccacagcaucauuc

SEQ ID NO: 200059 - RNA, 27 nt, Homo Sapiens
uuucuccauuaauucugaaaaaggguu

SEQ ID NO: 200060 - RNA, 32 nt, Homo Sapiens
guggcccuggacacagcccacccucugugagc

SEQ ID NO: 200061 - RNA, 32 nt, Homo Sapiens
ucucccuucccucccccaguuguggggaauag

SEQ ID NO: 200062 - RNA, 32 nt, Homo Sapiens
cuuggacuuuuuuuuucuuuucuuuuucuuuu

SEQ ID NO: 200063 - RNA, 32 nt, Homo Sapiens
ccacgaugggauuuuucucccuugccgaaaug

SEQ ID NO: 200064 - RNA, 32 nt, Homo Sapiens
caccuccgcccccucggacucccuccccucug

SEQ ID NO: 200065 - RNA, 32 nt, Homo Sapiens
ggccuugugacgguuuauucugauugagaacu

SEQ ID NO: 200066 - RNA, 32 nt, Homo Sapiens
aauaaagcaauauacaccuuagguuccacuaa

SEQ ID NO: 200067 - RNA, 32 nt, Homo Sapiens
uaggaaacauaaauaagauuacagagguauca

SEQ ID NO: 200068 - RNA, 32 nt, Homo Sapiens
uccguaaguacuucuguggccuugaguauuuu

SEQ ID NO: 200069 - RNA, 32 nt, Homo Sapiens
ugccuagguguuuuugggggagcccuguuuuc

SEQ ID NO: 200070 - RNA, 32 nt, Homo Sapiens
ucggggugacggaauguucuggaccuugauau

SEQ ID NO: 200071 - RNA, 32 nt, Homo Sapiens
uguuucucaagguuuugugagaguuuugacug

SEQ ID NO: 200072 - RNA, 32 nt, Homo Sapiens
ccgaggcggugaugcggcgccacugcaggacg

SEQ ID NO: 200073 - RNA, 32 nt, Homo Sapiens
agcugucugugucaaggccacgcagaaaucua

SEQ ID NO: 200074 - RNA, 32 nt, Homo Sapiens
aauuuauauaaaaacugauagaaaugacaaau

SEQ ID NO: 200075 - RNA, 32 nt, Homo Sapiens
acuccagcacaccugcagaagaagggcaugac

SEQ ID NO: 200076 - RNA, 32 nt, Homo Sapiens
gagcggauuucccccuugcuguucucaugaua

SEQ ID NO: 200077 - RNA, 32 nt, Homo Sapiens
cuuuuguucacagcgugcagcagcgagccggc

SEQ ID NO: 200078 - RNA, 30 nt, Homo Sapiens
aagacaugacuaccaacgcgggccccuugc

SEQ ID NO: 200079 - RNA, 32 nt, Homo Sapiens
auaaacaaaaauuauaauaaggagcagcuuuu

SEQ ID NO: 200080 - RNA, 32 nt, Homo Sapiens
augauaaauagcuuuaagaaugugcuaaugau

SEQ ID NO: 200081 - RNA, 32 nt, Homo Sapiens
agauguggccccagcuuccuaagcugccaccu

SEQ ID NO: 200082 - RNA, 32 nt, Homo Sapiens
augccuuccagaugcauaaggcaaacaucugg

SEQ ID NO: 200083 - RNA, 32 nt, Homo Sapiens
cccgugagccuggggaacuugcagcuuaaagc

SEQ ID NO: 200084 - RNA, 32 nt, Homo Sapiens
ucagccaccaggaaaagggaguggccaggaag

SEQ ID NO: 200085 - RNA, 32 nt, Homo Sapiens
cucgccuggccgccagccccagccccagcccc

SEQ ID NO: 200086 - RNA, 32 nt, Homo Sapiens
uagcuuagcauuagugacuuauuucaaaagac

SEQ ID NO: 200087 - RNA, 32 nt, Homo Sapiens
cggccugggcugcccccgcuccagucaaugcu

SEQ ID NO: 200088 - RNA, 32 nt, Homo Sapiens
acaagcacaacacuguuaggacucucccuguu

SEQ ID NO: 200089 - RNA, 32 nt, Homo Sapiens
uuguuauuggcuuuucguauuccucuuaacgu

SEQ ID NO: 200090 - RNA, 32 nt, Homo Sapiens
caccccuggguugcaacugggggcuguguggc

SEQ ID NO: 200091 - RNA, 32 nt, Homo Sapiens
aaaaguaaaacaaaacagaaaauagcaacugu

SEQ ID NO: 200092 - RNA, 32 nt, Homo Sapiens
ggagguuccgagggaggcaggggacggccagc

SEQ ID NO: 200093 - RNA, 32 nt, Homo Sapiens
gugauaaaggauuaguauccaggauauauaaa

SEQ ID NO: 200094 - RNA, 32 nt, Homo Sapiens
gguccgacacgcugccgagcaccuuggugucc

SEQ ID NO: 200095 - RNA, 32 nt, Homo Sapiens
ccagggagcuugcccgggucuccucgggggag

SEQ ID NO: 200096 - RNA, 32 nt, Homo Sapiens
uuauacacaaaaaaaacuuaugccaggacauc

SEQ ID NO: 200097 - RNA, 32 nt, Homo Sapiens
aacacacacacacacacacacacacacaaaau

SEQ ID NO: 200098 - RNA, 29 nt, Homo Sapiens
auugggcaaaguuuauuuucuaugucagc

SEQ ID NO: 200099 - RNA, 32 nt, Homo Sapiens
ucuugugcauuacuccucucccuccuucguua

SEQ ID NO: 200100 - RNA, 32 nt, Homo Sapiens
acaaugguacauuuuuacaugggaacaaaagg

SEQ ID NO: 200101 - RNA, 32 nt, Homo Sapiens
ucuuccuuccuccuccuccccaguaccacaua

SEQ ID NO: 200102 - RNA, 32 nt, Homo Sapiens
uuaccaaaauuccacauuuaagaguacauuag

SEQ ID NO: 200103 - RNA, 32 nt, Homo Sapiens
ugcaguccuuugacacauaggaucucaucgag

SEQ ID NO: 200104 - RNA, 32 nt, Homo Sapiens
gcacuugugugcacacgcccacguucucugaa

SEQ ID NO: 200105 - RNA, 32 nt, Homo Sapiens
aauuuaaaacgcaaguaaaauuguaggcauua

SEQ ID NO: 200106 - RNA, 32 nt, Homo Sapiens
aagacugaaugcucagccucugugcuuagacu

SEQ ID NO: 200107 - RNA, 32 nt, Homo Sapiens
gcaguuuccagaauaggcuuucuacuguacca

SEQ ID NO: 200108 - RNA, 32 nt, Homo Sapiens
ucucccugguugugcccuccccagccccucac

SEQ ID NO: 200109 - RNA, 32 nt, Homo Sapiens
gaaaacagugauuuagguuuguaacauccggc

SEQ ID NO: 200110 - RNA, 32 nt, Homo Sapiens
cagccuggaccggcugcugcugcacgggaacc

SEQ ID NO: 200111 - RNA, 32 nt, Homo Sapiens
cccuggccggacucagcguggagcacgugcac

SEQ ID NO: 200112 - RNA, 32 nt, Homo Sapiens
ggaccccacgauuuaggguaacuguuaucauc

SEQ ID NO: 200113 - RNA, 32 nt, Homo Sapiens
cggccuaaaaauaccccgaacuucacagcccg

SEQ ID NO: 200114 - RNA, 32 nt, Homo Sapiens
gagcacacagacagaagacugugucauggguc

SEQ ID NO: 200115 - RNA, 32 nt, Homo Sapiens
acugggcucugugcucccucccggcccuccaa

SEQ ID NO: 200116 - RNA, 31 nt, Homo Sapiens
uacguacuacggagaaacucaucauuuuuau

SEQ ID NO: 200117 - RNA, 32 nt, Homo Sapiens
uguauggaauaauugguuuuaucgcagauuuu

SEQ ID NO: 200118 - RNA, 32 nt, Homo Sapiens
cuguacuccaugaggaugagaacucuaaauga

SEQ ID NO: 200119 - RNA, 32 nt, Homo Sapiens
aggaguggccguuauggaacgcagcagcagcg

SEQ ID NO: 200120 - RNA, 32 nt, Homo Sapiens
ugaguuuagauagcucuggugccucucagaac

SEQ ID NO: 200121 - RNA, 32 nt, Homo Sapiens
uuugcuguagagagauuuuucuuaacuaagga

SEQ ID NO: 200122 - RNA, 32 nt, Homo Sapiens
gagaggggaccaagccuggccugggggugggg

SEQ ID NO: 200123 - RNA, 32 nt, Homo Sapiens
uuuuuuacacguuugcagaggugcaaucaaau

SEQ ID NO: 200124 - RNA, 32 nt, Homo Sapiens
cugcauccauucucucuuucucuugaugacgc

SEQ ID NO: 200125 - RNA, 32 nt, Homo Sapiens
gccgggagccgcggcccggaaucggggcgcuu

SEQ ID NO: 200126 - RNA, 32 nt, Homo Sapiens
gcuaaguguucgcuacgcggggcuaccggauc

SEQ ID NO: 200127 - RNA, 32 nt, Homo Sapiens
uccggaucucaaagagguaugugcacucccau

SEQ ID NO: 200128 - RNA, 32 nt, Homo Sapiens
agaccaccacccaaaaaaucaacugaugucac

SEQ ID NO: 200129 - RNA, 32 nt, Homo Sapiens
cuacauuacagccauauguaacaucaagccau

SEQ ID NO: 200130 - RNA, 32 nt, Homo Sapiens
aaucuguucuuugcucuuguaucugcuggacg

SEQ ID NO: 200131 - RNA, 32 nt, Homo Sapiens
cggccaugcauucuuccggcuccucugacucc

SEQ ID NO: 200132 - RNA, 32 nt, Homo Sapiens
cguggccuuugaugagcuggcuuaacaucccu

SEQ ID NO: 200133 - RNA, 32 nt, Homo Sapiens
auggcuagaguagcagcugcuaucuugggaca

SEQ ID NO: 200134 - RNA, 32 nt, Homo Sapiens
ggccaucccccuccagggcggagaucggaggu

SEQ ID NO: 200135 - RNA, 32 nt, Homo Sapiens
uaagauggcuguggcauuuccaaacauccaaa

SEQ ID NO: 200136 - RNA, 32 nt, Homo Sapiens
aaaauuguaaauaaauaauguuauguaucagu

SEQ ID NO: 200137 - RNA, 32 nt, Homo Sapiens
uuuuuaacagagcacuuaauuauguuggacua

SEQ ID NO: 200138 - RNA, 32 nt, Homo Sapiens
ggugcuguucccuccgcccugugccagggccu

SEQ ID NO: 200139 - RNA, 32 nt, Homo Sapiens
caccaacaaccugguguaugacaccucggaca

SEQ ID NO: 200140 - RNA, 32 nt, Homo Sapiens
auaugcugacuucacuuauuagucuuagggau

SEQ ID NO: 200141 - RNA, 32 nt, Homo Sapiens
ugacccgcacuuuaaagcuuuuguuugcauuu

SEQ ID NO: 200142 - RNA, 32 nt, Homo Sapiens
uccugggggccgcaaucuggcuccugcaggcc

SEQ ID NO: 200143 - RNA, 32 nt, Homo Sapiens
agucgaggcagcagcccucgaggcccucacag

SEQ ID NO: 200144 - RNA, 32 nt, Homo Sapiens
ucagggccugccaguucucaccagcugggagg

SEQ ID NO: 200145 - RNA, 32 nt, Homo Sapiens
uauaguuuuuauuauuucuucuuuuccuuuug

SEQ ID NO: 200146 - RNA, 32 nt, Homo Sapiens
agccgcugccuccgcgggccuggcgugggcgc

SEQ ID NO: 200147 - RNA, 32 nt, Homo Sapiens
cucaagucaaggccaggcacggcggcucacgc

SEQ ID NO: 200148 - RNA, 31 nt, Homo Sapiens
gcugagcugccgggccuccucgaggccccua

SEQ ID NO: 200149 - RNA, 32 nt, Homo Sapiens
uuuugucuugucaucacaggcgccuauacagc

SEQ ID NO: 200150 - RNA, 32 nt, Homo Sapiens
aaucaguccaacaugagauuuuaggaauagaa

SEQ ID NO: 200151 - RNA, 32 nt, Homo Sapiens
ucuacacugaacucauguucugaugagaauac

SEQ ID NO: 200152 - RNA, 32 nt, Homo Sapiens
gaaaccccgucucuacuaaaaauagaagcauu

SEQ ID NO: 200153 - RNA, 32 nt, Homo Sapiens
gagggggaccagcucagccugccuccccaagg

SEQ ID NO: 200154 - RNA, 32 nt, Homo Sapiens
cuucuggagcagccacauuuucaaggacuguc

SEQ ID NO: 200155 - RNA, 32 nt, Homo Sapiens
cagugcucuuaaucugaucagagcagccugaa

SEQ ID NO: 200156 - RNA, 32 nt, Homo Sapiens
aggccgggcagacaaggacagaagacucuggg

SEQ ID NO: 200157 - RNA, 32 nt, Homo Sapiens
auggggauucuuuucuaagguaauauuaauga

SEQ ID NO: 200158 - RNA, 32 nt, Homo Sapiens
accucagaauacugggcucuauuuuaucaagc

SEQ ID NO: 200159 - RNA, 32 nt, Homo Sapiens
cuuuaacacauuuccuuccaauaaagauaaaa

SEQ ID NO: 200160 - RNA, 32 nt, Homo Sapiens
cauggggcucagcccucugugccucaguuucc

SEQ ID NO: 200161 - RNA, 32 nt, Homo Sapiens
acaguuucaaggaggauuuguucaucagaugc

SEQ ID NO: 200162 - RNA, 32 nt, Homo Sapiens
caggagggaagcugaggcucagagacaucaug

SEQ ID NO: 200163 - RNA, 32 nt, Homo Sapiens
ccggccugggcaucugaccucccccaccccag

SEQ ID NO: 200164 - RNA, 32 nt, Homo Sapiens
gcagaccagaucuggucagguccucggaagcu

SEQ ID NO: 200165 - RNA, 32 nt, Homo Sapiens
ucuucaauccccauaaugcuucuuuccucuua

SEQ ID NO: 200166 - RNA, 32 nt, Homo Sapiens
auauugcucuauauguaauauauccugaaagc

SEQ ID NO: 200167 - RNA, 32 nt, Homo Sapiens
gcauggaacuccugggcucuuguggggacguu

SEQ ID NO: 200168 - RNA, 32 nt, Homo Sapiens
guaugcuacgagaacucuucugaugauggaau

SEQ ID NO: 200169 - RNA, 32 nt, Homo Sapiens
cagucauuuuaaaaugguggcugaauuuccca

SEQ ID NO: 200170 - RNA, 32 nt, Homo Sapiens
uaaaauauuuaaauugugaaccuauugauaaa

SEQ ID NO: 200171 - RNA, 32 nt, Homo Sapiens
guaaauguaaucagaugccauuuuauaugugg

SEQ ID NO: 200172 - RNA, 32 nt, Homo Sapiens
uugguuuguuucugccuaugucuguuucucuc

SEQ ID NO: 200173 - RNA, 31 nt, Homo Sapiens
cggcugggggcggugagcgcggcguggggcu

SEQ ID NO: 200174 - RNA, 32 nt, Homo Sapiens
cugcccagagguacugaggaaaagcaauaugg

SEQ ID NO: 200175 - RNA, 32 nt, Homo Sapiens
ggccgcagcauggggcgcuuccgcgggggccu

SEQ ID NO: 200176 - RNA, 32 nt, Homo Sapiens
uggaaugguuacuguuuauacugugguauguu

SEQ ID NO: 200177 - RNA, 32 nt, Homo Sapiens
cagcucagggagagaccccgcccuuggucccu

SEQ ID NO: 200178 - RNA, 32 nt, Homo Sapiens
cgggcgcucaggucugggccacuuucaucccc

SEQ ID NO: 200179 - RNA, 32 nt, Homo Sapiens
gggccagauuaugacaaacacaugacagcaac

SEQ ID NO: 200180 - RNA, 32 nt, Homo Sapiens
gggagcccgcccgguggcggcuggggucggcu

SEQ ID NO: 200181 - RNA, 32 nt, Homo Sapiens
cugggggucugccugcacacucuggggagcca

SEQ ID NO: 200182 - RNA, 32 nt, Homo Sapiens
aaaugggaauaaaacacaccacaaacaauuca

SEQ ID NO: 200183 - RNA, 32 nt, Homo Sapiens
gcggcccgcgccccugcuaggcugcggcggca

SEQ ID NO: 200184 - RNA, 32 nt, Homo Sapiens
cucuauccugaagagggaaggugcuagaaauu

SEQ ID NO: 200185 - RNA, 28 nt, Homo Sapiens
gugauggggaucuuacugggccugcuac

SEQ ID NO: 200186 - RNA, 32 nt, Homo Sapiens
ugagaugaaaauaaaucuaagucaaaguucca

SEQ ID NO: 200187 - RNA, 31 nt, Homo Sapiens
cauacaaauggcaaacagguauaugaaaagg

SEQ ID NO: 200188 - RNA, 32 nt, Homo Sapiens
cccuuucagauuugugacauuaacucaccuca

SEQ ID NO: 200189 - RNA, 32 nt, Homo Sapiens
gguccauggccaggauucugugcuucagaacg

SEQ ID NO: 200190 - RNA, 32 nt, Homo Sapiens
uggcagugaggguggagggagacagugggcgg

SEQ ID NO: 200191 - RNA, 28 nt, Homo Sapiens
ucaggcaugagcaccaggauggcagggg

SEQ ID NO: 200192 - RNA, 32 nt, Homo Sapiens
acacauuucuaaaaaugucauguuacauuccu

SEQ ID NO: 200193 - RNA, 32 nt, Homo Sapiens
ucaacuagaaacaguacauuguucaggaaaac

SEQ ID NO: 200194 - RNA, 32 nt, Homo Sapiens
gagaagcccgcucuccuuucacugcuguggca

SEQ ID NO: 200195 - RNA, 32 nt, Homo Sapiens
auggugucugcccuuccaaucaccucccugac

SEQ ID NO: 200196 - RNA, 32 nt, Homo Sapiens
gguuaaaaucaucacuuuuauguuauguauau

SEQ ID NO: 200197 - RNA, 32 nt, Homo Sapiens
cacgcucgcucgcucgccggcgcgcgcacacc

SEQ ID NO: 200198 - RNA, 32 nt, Homo Sapiens
guuugcuaaucacuguggcuagcugaauagug

SEQ ID NO: 200199 - RNA, 32 nt, Homo Sapiens
gagcugaggggcgggggcgcugcggcacagcu

SEQ ID NO: 200200 - RNA, 32 nt, Homo Sapiens
guuguagaacuuucuuuuuaaggugaauaagu

SEQ ID NO: 200201 - RNA, 32 nt, Homo Sapiens
auuuaaaaaaucaaaacuguaacguaauuaac

SEQ ID NO: 200202 - RNA, 32 nt, Homo Sapiens
agggacccaggaaacuaagauuugagauucag

SEQ ID NO: 200203 - RNA, 32 nt, Homo Sapiens
ucugaugacaaggccuugggcuaccagcugcu

SEQ ID NO: 200204 - RNA, 30 nt, Homo Sapiens
gcugggcgcucagugggggaaaacgagccg

SEQ ID NO: 200205 - RNA, 32 nt, Homo Sapiens
cgggccugcccucuccggucucggugcuccga

SEQ ID NO: 200206 - RNA, 32 nt, Homo Sapiens
auguugcauccacauguucccguuugcagaaa

SEQ ID NO: 200207 - RNA, 32 nt, Homo Sapiens
gcugucagccgcgcugaugacauuggcgcaga

SEQ ID NO: 200208 - RNA, 32 nt, Homo Sapiens
aaggagucaccggauacagagguucugcagaa

SEQ ID NO: 200209 - RNA, 32 nt, Homo Sapiens
ucccggcgccgcgcucguccgcagaggaggcg

SEQ ID NO: 200210 - RNA, 32 nt, Homo Sapiens
caggcugccagcaauucacuuacuauacugaa

SEQ ID NO: 200211 - RNA, 32 nt, Homo Sapiens
uuguacguauuaccaaagaaaccaaaaacugc

SEQ ID NO: 200212 - RNA, 32 nt, Homo Sapiens
ccuucucugggcauguucugaauguuuacacu

SEQ ID NO: 200213 - RNA, 32 nt, Homo Sapiens
acagaaagugcauuuuaaccaguacucugggu

SEQ ID NO: 200214 - RNA, 32 nt, Homo Sapiens
cacggcccaagcccaagcuugugccggucauu

SEQ ID NO: 200215 - RNA, 32 nt, Homo Sapiens
augguaugagagacagugaggagggagggcac

SEQ ID NO: 200216 - RNA, 32 nt, Homo Sapiens
gucucgccagcgcccacccccauggcucgggu

SEQ ID NO: 200217 - RNA, 32 nt, Homo Sapiens
agggcaguggagaggaccgcgcuguccugcug

SEQ ID NO: 200218 - RNA, 32 nt, Homo Sapiens
gucuguacuaaaaauacaaaauuuagcugagu

SEQ ID NO: 200219 - RNA, 32 nt, Homo Sapiens
ucaauaucucuuauuguucuauguugaaaaaa

SEQ ID NO: 200220 - RNA, 31 nt, Homo Sapiens
cggcgccugcgcagccgccauguucgguugc

SEQ ID NO: 200221 - RNA, 32 nt, Homo Sapiens
cugcuuuuugcuucuugaguugucuuuugcca

SEQ ID NO: 200222 - RNA, 31 nt, Homo Sapiens
ggagguucuggaagaaagucuggaccaucau

SEQ ID NO: 200223 - RNA, 32 nt, Homo Sapiens
gggcccgugcucugcccuccccgguuuccgac

SEQ ID NO: 200224 - RNA, 32 nt, Homo Sapiens
aggcuuccagaugucuaaaagauucuuuaaac

SEQ ID NO: 200225 - RNA, 32 nt, Homo Sapiens
ccagagugaguuccgggugggcgugggcucgg

SEQ ID NO: 200226 - RNA, 32 nt, Homo Sapiens
uuuaaagcucuuugucaaguuagugauugcau

SEQ ID NO: 200227 - RNA, 32 nt, Homo Sapiens
agcucuacuguaaauaaaauauuuuauaaaac

SEQ ID NO: 200228 - RNA, 32 nt, Homo Sapiens
uguauuauauauauguguauacugauugaaau

SEQ ID NO: 200229 - RNA, 32 nt, Homo Sapiens
ucuaggccgggcgcggagcgaggaagcgggug

SEQ ID NO: 200230 - RNA, 32 nt, Homo Sapiens
ugucuccugaucauaucauacccauuaaguau

SEQ ID NO: 200231 - RNA, 32 nt, Homo Sapiens
caguuuuugucaaaaacaugaacagucacaua

SEQ ID NO: 200232 - RNA, 32 nt, Homo Sapiens
uacucguauuaguccauuuucacgcugcugau

SEQ ID NO: 200233 - RNA, 32 nt, Homo Sapiens
uugguaucuggaugaaucgacacucacugaca

SEQ ID NO: 200234 - RNA, 32 nt, Homo Sapiens
uacuucuguauaaacuaacagcaaaaaggcgu

SEQ ID NO: 200235 - RNA, 32 nt, Homo Sapiens
guccuggggcccagucgcgcuccccgcucgcg

SEQ ID NO: 200236 - RNA, 32 nt, Homo Sapiens
aggagccggcccucacgcccgccccgcgccac

SEQ ID NO: 200237 - RNA, 32 nt, Homo Sapiens
aguucagauuccuagcuuuguacccagggauu

SEQ ID NO: 200238 - RNA, 32 nt, Homo Sapiens
agccccggcccgucccguccccggggauccuc

SEQ ID NO: 200239 - RNA, 32 nt, Homo Sapiens
uauggaacccucaacacauaaauauuaagaua

SEQ ID NO: 200240 - RNA, 32 nt, Homo Sapiens
ugauuggcuaggaugccugucaggaacucauu

SEQ ID NO: 200241 - RNA, 32 nt, Homo Sapiens
gcaaaaaggggaggaaauacacaacaauaaua

SEQ ID NO: 200242 - RNA, 32 nt, Homo Sapiens
auaugaauauauuuucauuuucauauuuugca

SEQ ID NO: 200243 - RNA, 32 nt, Homo Sapiens
gugugaugucauucuucccuaaucgcuuacac

SEQ ID NO: 200244 - RNA, 32 nt, Homo Sapiens
guccagagcgccagcagcgccaucauuaaagc

SEQ ID NO: 200245 - RNA, 32 nt, Homo Sapiens
gcaucucugcuugcaucuuccauccuacugaa

SEQ ID NO: 200246 - RNA, 32 nt, Homo Sapiens
cagccagcucucagccaacgaguaauuuauug

SEQ ID NO: 200247 - RNA, 31 nt, Homo Sapiens
cacaggagaaauuguagugaugaaaugugca

SEQ ID NO: 200248 - RNA, 32 nt, Homo Sapiens
acaguguagcauuguucuugauuaguuuggca

SEQ ID NO: 200249 - RNA, 32 nt, Homo Sapiens
uaaucaaucauguacuuuaguuuaauguauaa

SEQ ID NO: 200250 - RNA, 32 nt, Homo Sapiens
gucuugcuuuuuacugcuuuuguuguaguugu

SEQ ID NO: 200251 - RNA, 32 nt, Homo Sapiens
ggcugguccucacuauuccccagucucccgcu

SEQ ID NO: 200252 - RNA, 32 nt, Homo Sapiens
ccucccgcggccagcccuucccucccagucgg

SEQ ID NO: 200253 - RNA, 32 nt, Homo Sapiens
cugcagauauauauuuauauuuauacauauau

SEQ ID NO: 200254 - RNA, 32 nt, Homo Sapiens
agucccucaagccccaggaggcaaaagcgagg

SEQ ID NO: 200255 - RNA, 32 nt, Homo Sapiens
uaaaaaggaguggauuacaauauuuuggcaau

SEQ ID NO: 200256 - RNA, 32 nt, Homo Sapiens
ugccucugccuugccccuaugccugcccgccu

SEQ ID NO: 200257 - RNA, 32 nt, Homo Sapiens
cugaagggcaggcagagcugcucccgaacuug

SEQ ID NO: 200258 - RNA, 26 nt, Homo Sapiens
cugauucugaaccugauguguguguu

SEQ ID NO: 200259 - RNA, 32 nt, Homo Sapiens
ucagcagaaugguugggaaugucaucaugagc

SEQ ID NO: 200260 - RNA, 32 nt, Homo Sapiens
uuggaagaauccuggaacaccucucccaggca

SEQ ID NO: 200261 - RNA, 32 nt, Homo Sapiens
accauauuugaagauaggaccuuuaaagaggu

SEQ ID NO: 200262 - RNA, 30 nt, Homo Sapiens
cgccuggcgcccgccgcugaagcgcaggac

SEQ ID NO: 200263 - RNA, 32 nt, Homo Sapiens
uucccgggcgcggcggccgccgccucucucaa

SEQ ID NO: 200264 - RNA, 32 nt, Homo Sapiens
gagcacauuugagaccucuguguuagagggga

SEQ ID NO: 200265 - RNA, 32 nt, Homo Sapiens
gucguuuggucgcagggcugcagcaguacaau

SEQ ID NO: 200266 - RNA, 32 nt, Homo Sapiens
agccugaccaacauggcaaaacaucgucuaaa

SEQ ID NO: 200267 - RNA, 32 nt, Homo Sapiens
cuguucgcgggaagaauggggaaacaguaagg

SEQ ID NO: 200268 - RNA, 32 nt, Homo Sapiens
augaauucacuacucugagcacugugccuggu

SEQ ID NO: 200269 - RNA, 32 nt, Homo Sapiens
cuuccuguucucuggagaucuugcagaaaaga

SEQ ID NO: 200270 - RNA, 32 nt, Homo Sapiens
ucccugggccggacggcggugucccggcgugg

SEQ ID NO: 200271 - RNA, 32 nt, Homo Sapiens
guguguggaagacaugagccguguauaauauu

SEQ ID NO: 200272 - RNA, 32 nt, Homo Sapiens
cgcauguauguaucuguucccuguuccuucug

SEQ ID NO: 200273 - RNA, 32 nt, Homo Sapiens
cugcagcucuggaccucacuggagcggccccg

SEQ ID NO: 200274 - RNA, 32 nt, Homo Sapiens
guggcaugcuggugguggcgggugcugguggg

SEQ ID NO: 200275 - RNA, 32 nt, Homo Sapiens
uaaacucaguuauuuuuaaugcuuaauacaua

SEQ ID NO: 200276 - RNA, 32 nt, Homo Sapiens
caacuagucuuagccggcccgguuugaacauc

SEQ ID NO: 200277 - RNA, 32 nt, Homo Sapiens
gaggagagaggcccgggcgcggcgcgggggau

SEQ ID NO: 200278 - RNA, 32 nt, Homo Sapiens
ggggaacagacgcauguccuucugggagucac

SEQ ID NO: 200279 - RNA, 32 nt, Homo Sapiens
aaaauuuauuuuuauacugauauuaguuugga

SEQ ID NO: 200280 - RNA, 32 nt, Homo Sapiens
uucaggccaagaguuugaagcuggugcuugag

SEQ ID NO: 200281 - RNA, 30 nt, Homo Sapiens
accaggagaagaaggcacuacauuuaaugu

SEQ ID NO: 200282 - RNA, 32 nt, Homo Sapiens
ccaggugcuuugcaggcugggacgaggaagcc

SEQ ID NO: 200283 - RNA, 32 nt, Homo Sapiens
gaaacucuguggaauauaaacuuuuuaaaaau

SEQ ID NO: 200284 - RNA, 32 nt, Homo Sapiens
auuauuauacuucuuauguuuggaccugcuau

SEQ ID NO: 200285 - RNA, 32 nt, Homo Sapiens
uuauuagaauaaaaacagaauacuauguucau

SEQ ID NO: 200286 - RNA, 32 nt, Homo Sapiens
guucuucuggagguguugguuuaaugggauug

SEQ ID NO: 200287 - RNA, 31 nt, Homo Sapiens
cuagccucacggagaaggaucugaaagaagc

SEQ ID NO: 200288 - RNA, 32 nt, Homo Sapiens
gggaguccagcauguagucauggcagccuuag

SEQ ID NO: 200289 - RNA, 32 nt, Homo Sapiens
ggggaauuuuaaaacuaaucugguaucuauuc

SEQ ID NO: 200290 - RNA, 32 nt, Homo Sapiens
uuaguacuguggcuuucuuuuccuauuuuaug

SEQ ID NO: 200291 - RNA, 32 nt, Homo Sapiens
auguauucuuaaauucauuuuaauuuuguaca

SEQ ID NO: 200292 - RNA, 31 nt, Homo Sapiens
cggugucacugggcuaccgugagauccaagu

SEQ ID NO: 200293 - RNA, 32 nt, Homo Sapiens
ucauccucuuuucaagagcaguguccguggug

SEQ ID NO: 200294 - RNA, 32 nt, Homo Sapiens
ccuguggagacgggacagcccugucccacuca

SEQ ID NO: 200295 - RNA, 32 nt, Homo Sapiens
ggcccagcuggcagugcugaucgaucccacau

SEQ ID NO: 200296 - RNA, 32 nt, Homo Sapiens
aaaacaugcugcagcaagaggaccccgcucuc

SEQ ID NO: 200297 - RNA, 32 nt, Homo Sapiens
agaugaugggcucccugaaacugcugccgccg

SEQ ID NO: 200298 - RNA, 32 nt, Homo Sapiens
gcagcuuccuuuuuaccuuguuuuccuuuggg

SEQ ID NO: 200299 - RNA, 32 nt, Homo Sapiens
uugccccuaguuugaggccugcccgauuaccc

SEQ ID NO: 200300 - RNA, 32 nt, Homo Sapiens
aauccaacccgcgcccucuccucucuuccugc

SEQ ID NO: 200301 - RNA, 32 nt, Homo Sapiens
ugccauguuguccugugggauucaucuucaaa

SEQ ID NO: 200302 - RNA, 32 nt, Homo Sapiens
ccuucuuguacuuuuuucaucuuuacccugcc

SEQ ID NO: 200303 - RNA, 32 nt, Homo Sapiens
ccaggaaaagacuguuaacauuacauuuaugc

SEQ ID NO: 200304 - RNA, 32 nt, Homo Sapiens
aaagcucuuaauuuauauuaaaacaguagccu

SEQ ID NO: 200305 - RNA, 32 nt, Homo Sapiens
uuggguguuuuuuuuuuuuuuaaucauggugc

SEQ ID NO: 200306 - RNA, 32 nt, Homo Sapiens
uggcauugacuuuccccccagugugacgucug

SEQ ID NO: 200307 - RNA, 32 nt, Homo Sapiens
uaaauauaaucagccaaaaacacacacaaaau

SEQ ID NO: 200308 - RNA, 32 nt, Homo Sapiens
cucaugucauuaugacauuucuuaaaacuuua

SEQ ID NO: 200309 - RNA, 32 nt, Homo Sapiens
aaagagauacucucagaaaaaagucaucggcu

SEQ ID NO: 200310 - RNA, 29 nt, Homo Sapiens
aagcugagauacugggcacaggguugugg

SEQ ID NO: 200311 - RNA, 32 nt, Homo Sapiens
agcaagacuaaugucaacucuaauggaaggcu

SEQ ID NO: 200312 - RNA, 32 nt, Homo Sapiens
agaauugguuccuuccauuaugagcaacuugu

SEQ ID NO: 200313 - RNA, 32 nt, Homo Sapiens
cccaaacuauauaaaaaggaauucaguggagg

SEQ ID NO: 200314 - RNA, 32 nt, Homo Sapiens
guauauuuuuauuggcuacuuuauuguuuagg

SEQ ID NO: 200315 - RNA, 32 nt, Homo Sapiens
uucccuuacuuggauuucagacucuagauucg

SEQ ID NO: 200316 - RNA, 32 nt, Homo Sapiens
uuuuauuuuuauuuuuauuuuugagacagagc

SEQ ID NO: 200317 - RNA, 32 nt, Homo Sapiens
uaucccacaaggaaaaaaaauaaaacuaagaa

SEQ ID NO: 200318 - RNA, 32 nt, Homo Sapiens
aucauggggaaaaagaggaucuggagaaccuc

SEQ ID NO: 200319 - RNA, 32 nt, Homo Sapiens
uaauaaggacacuauggaaaugucuggaucau

SEQ ID NO: 200320 - RNA, 32 nt, Homo Sapiens
ugauaacaccaaccaaaccacuccuaucugca

SEQ ID NO: 200321 - RNA, 32 nt, Homo Sapiens
gagcaaacccccaagaggcuuaauuuaccaau

SEQ ID NO: 200322 - RNA, 32 nt, Homo Sapiens
ugugacucucccaggccccagaauagcuccug

SEQ ID NO: 200323 - RNA, 32 nt, Homo Sapiens
ugagcagccaaggaccagcaucuguccgcauu

SEQ ID NO: 200324 - RNA, 32 nt, Homo Sapiens
gcucaggcugccccucuccuuccccggcucgc

SEQ ID NO: 200325 - RNA, 32 nt, Homo Sapiens
ugugaauguuggaugaugaauuuuugucucuu

SEQ ID NO: 200326 - RNA, 30 nt, Homo Sapiens
auccaacuggacuguaugcuguggucucac

SEQ ID NO: 200327 - RNA, 32 nt, Homo Sapiens
cucugcuagguccuugcuuauauggcaaccac

SEQ ID NO: 200328 - RNA, 32 nt, Homo Sapiens
aguaaacccagcugccugcauugccugggacu

SEQ ID NO: 200329 - RNA, 32 nt, Homo Sapiens
uaaagaacuucauuaucuuccuuguauuuuag

SEQ ID NO: 200330 - RNA, 32 nt, Homo Sapiens
uguacuauacuuuuuauuguuacuugagugua

SEQ ID NO: 200331 - RNA, 32 nt, Homo Sapiens
cagauauuucuauguggcuucagacaccagaa

SEQ ID NO: 200332 - RNA, 32 nt, Homo Sapiens
ugaggcguuggugucuccuggaugcuacuagc

SEQ ID NO: 200333 - RNA, 32 nt, Homo Sapiens
aucuggccaaguuggacuuugauccuuugggc

SEQ ID NO: 200334 - RNA, 32 nt, Homo Sapiens
ucucccgauggccacugggucucugcaaacca

SEQ ID NO: 200335 - RNA, 32 nt, Homo Sapiens
agccagugcgguggagagagccaagggccaga

SEQ ID NO: 200336 - RNA, 32 nt, Homo Sapiens
uagggacgagggggcggggcggccacaauuuc

SEQ ID NO: 200337 - RNA, 32 nt, Homo Sapiens
gaggcagcaaacagccaaaacaacauuccuca

SEQ ID NO: 200338 - RNA, 32 nt, Homo Sapiens
uugggguccgccggccauggccuucacuuucg

SEQ ID NO: 200339 - RNA, 32 nt, Homo Sapiens
acacagcuaggcaugccugggaauccugcugc

SEQ ID NO: 200340 - RNA, 32 nt, Homo Sapiens
acaccagcucuuugguuguuuuuggauauaac

SEQ ID NO: 200341 - RNA, 32 nt, Homo Sapiens
aaaaucucaaauaacaaguacaaacauugaac

SEQ ID NO: 200342 - RNA, 32 nt, Homo Sapiens
ggccaggucguugagggucggcggcgggcgag

SEQ ID NO: 200343 - RNA, 32 nt, Homo Sapiens
cuauaaacccuaauuuuuuuuauuuaaguaca

SEQ ID NO: 200344 - RNA, 32 nt, Homo Sapiens
cuuuggcuguuuucuucaguuuuaugcauucu

SEQ ID NO: 200345 - RNA, 32 nt, Homo Sapiens
cacauagcuuucuauuuguuaaguauaaauuu

SEQ ID NO: 200346 - RNA, 32 nt, Homo Sapiens
uagauguaacaguuuaaaauggauugcaaauc

SEQ ID NO: 200347 - RNA, 32 nt, Homo Sapiens
cuuggccaacauggugaaauccugucuguacu

SEQ ID NO: 200348 - RNA, 32 nt, Homo Sapiens
uguuugcucauucuucagaucuucucagugaa

SEQ ID NO: 200349 - RNA, 32 nt, Homo Sapiens
gccauguaccugaguacagguggcaguugcag

SEQ ID NO: 200350 - RNA, 32 nt, Homo Sapiens
gcgcggccucagugcccucccuggugcgucug

SEQ ID NO: 200351 - RNA, 32 nt, Homo Sapiens
aguugcguuggcggccuggguguuggcgguuc

SEQ ID NO: 200352 - RNA, 32 nt, Homo Sapiens
guggcuguccccagccugcacagcccaagccc

SEQ ID NO: 200353 - RNA, 32 nt, Homo Sapiens
ggguggccuugacuaaaaggcuuugguucaac

SEQ ID NO: 200354 - RNA, 32 nt, Homo Sapiens
cgggcgccgcgggaccucuccgggccauggca

SEQ ID NO: 200355 - RNA, 28 nt, Homo Sapiens
uuccaguugucuaguggugugguaugca

SEQ ID NO: 200356 - RNA, 32 nt, Homo Sapiens
caugguuaacugugagccaaaauacaauugga

SEQ ID NO: 200357 - RNA, 32 nt, Homo Sapiens
caccuguaaucccagcacuuugggaggcugaa

SEQ ID NO: 200358 - RNA, 32 nt, Homo Sapiens
cuacccauuuucugccaagauucaagcagucg

SEQ ID NO: 200359 - RNA, 32 nt, Homo Sapiens
cauugauuuuuaaagcuuuugugauauuuuag

SEQ ID NO: 200360 - RNA, 32 nt, Homo Sapiens
aguguuuccuuccuuugugccccccgcuggug

SEQ ID NO: 200361 - RNA, 32 nt, Homo Sapiens
auaagauggccuguagcaaugaggcugugcau

SEQ ID NO: 200362 - RNA, 32 nt, Homo Sapiens
gcucgccugcacuugcgcugcccgccauggcc

SEQ ID NO: 200363 - RNA, 30 nt, Homo Sapiens
gaugcauuaaaauaaacaucagaguaacuc

SEQ ID NO: 200364 - RNA, 32 nt, Homo Sapiens
ucuuuucuaucucaucuugaugaugauaguca

SEQ ID NO: 200365 - RNA, 30 nt, Homo Sapiens
cgggcaggcaggccccgcguggcggcuugg

SEQ ID NO: 200366 - RNA, 32 nt, Homo Sapiens
caccugugaucccagcacuuugggaggcugag

SEQ ID NO: 200367 - RNA, 32 nt, Homo Sapiens
cuccucgucgcggaccccggcucgccgacccc

SEQ ID NO: 200368 - RNA, 30 nt, Homo Sapiens
uuucccggagguggcagcacagccggaggu

SEQ ID NO: 200369 - RNA, 32 nt, Homo Sapiens
gcguugggauucgugguguugcuggagacccg

SEQ ID NO: 200370 - RNA, 32 nt, Homo Sapiens
uucuccacacagguaauucaccaguaaaaccc

SEQ ID NO: 200371 - RNA, 30 nt, Homo Sapiens
gcaguauggcgcccaacaucuacuugguuc

SEQ ID NO: 200372 - RNA, 32 nt, Homo Sapiens
ccgcugaggccgcggcgcccgccagccugucc

SEQ ID NO: 200373 - RNA, 32 nt, Homo Sapiens
uugggugggauuuuuucccuuuuuauguggga

SEQ ID NO: 200374 - RNA, 32 nt, Homo Sapiens
uguuucccuggccugcugucagcuuugcacca

SEQ ID NO: 200375 - RNA, 32 nt, Homo Sapiens
cgaggcggcacuggguggggagcccuacaucc

SEQ ID NO: 200376 - RNA, 32 nt, Homo Sapiens
ccccuagagugcucuguguaugcggaugauuu

SEQ ID NO: 200377 - RNA, 32 nt, Homo Sapiens
uugcuuuuuaaaaaguuuuucucuuuaagaga

SEQ ID NO: 200378 - RNA, 32 nt, Homo Sapiens
auggugccucauguaacccacacuggagcgau

SEQ ID NO: 200379 - RNA, 32 nt, Homo Sapiens
aaaaaaaaaaagauuauuuuaggggagaugua

SEQ ID NO: 200380 - RNA, 32 nt, Homo Sapiens
gcaaggcgccgcggcucagcgcguaccggcgg

SEQ ID NO: 200381 - RNA, 30 nt, Homo Sapiens
aucugcaggcuaauggcaggaaauggucau

SEQ ID NO: 200382 - RNA, 32 nt, Homo Sapiens
auuuuauauaaaauaggagauaaaagucacau

SEQ ID NO: 200383 - RNA, 32 nt, Homo Sapiens
cccccacggcggccucccggggacuugggccu

SEQ ID NO: 200384 - RNA, 32 nt, Homo Sapiens
acagcaaccugccuggccugggaagccccccg

SEQ ID NO: 200385 - RNA, 32 nt, Homo Sapiens
cuggacccgcggcggcucggccgguguucccc

SEQ ID NO: 200386 - RNA, 32 nt, Homo Sapiens
cgccgccgcccggcaucguggagcuggggccc

SEQ ID NO: 200387 - RNA, 32 nt, Homo Sapiens
cuaaauuuaagugggaugauuagauauacaca

SEQ ID NO: 200388 - RNA, 32 nt, Homo Sapiens
agaaacccaagcaaaaauauauagcaauuguu

SEQ ID NO: 200389 - RNA, 32 nt, Homo Sapiens
aaucugcagagggugcuacugaagauccagcc

SEQ ID NO: 200390 - RNA, 32 nt, Homo Sapiens
auuguuggauuuugagaguucuauguacaagu

SEQ ID NO: 200391 - RNA, 32 nt, Homo Sapiens
ggccacagcuccguggaaggacucccccuacc

SEQ ID NO: 200392 - RNA, 32 nt, Homo Sapiens
gcggccgccgccaugucggugcugggcgagua

SEQ ID NO: 200393 - RNA, 32 nt, Homo Sapiens
uagggaccagggcuaccaaaaggguggggaga

SEQ ID NO: 200394 - RNA, 32 nt, Homo Sapiens
accgagggacccugggggccgaggggagccag

SEQ ID NO: 200395 - RNA, 29 nt, Homo Sapiens
ccagagagcaucugggcuuguagcugacc

SEQ ID NO: 200396 - RNA, 32 nt, Homo Sapiens
cgcccggccucacuccgcggcccgccaggacc

SEQ ID NO: 200397 - RNA, 32 nt, Homo Sapiens
cggugcuugggccuguguccccggguggugga

SEQ ID NO: 200398 - RNA, 32 nt, Homo Sapiens
auggaguagcuguugcccuucuccgguugugu

SEQ ID NO: 200399 - RNA, 32 nt, Homo Sapiens
guacucuuuucuuuuugagcugugauagauua

SEQ ID NO: 200400 - RNA, 32 nt, Homo Sapiens
agauuuuuuaucaaaaugugucaugccaguaa

SEQ ID NO: 200401 - RNA, 32 nt, Homo Sapiens
gccagcucaaggugucccacuauccccucugg

SEQ ID NO: 200402 - RNA, 32 nt, Homo Sapiens
gccucaaucccuccaaguagaaugggugcacc

SEQ ID NO: 200403 - RNA, 32 nt, Homo Sapiens
gaggugggccggugaggcaagcaagcccugug

SEQ ID NO: 200404 - RNA, 32 nt, Homo Sapiens
aaaaaacaaaacaaaacaugggaaauacaacc

SEQ ID NO: 200405 - RNA, 32 nt, Homo Sapiens
uuuccugccucccagacgaagccuccaacuac

SEQ ID NO: 200406 - RNA, 32 nt, Homo Sapiens
ugguucuccuggauguuuugcucuguuuugau

SEQ ID NO: 200407 - RNA, 32 nt, Homo Sapiens
ccuguggccucuuggagaggcgagccaggggg

SEQ ID NO: 200408 - RNA, 32 nt, Homo Sapiens
gugaccagggaugcccgggugcccugagaucc

SEQ ID NO: 200409 - RNA, 32 nt, Homo Sapiens
caaaauuaaaagacaaaauauguuaucaguag

SEQ ID NO: 200410 - RNA, 32 nt, Homo Sapiens
guccugcaucuuuuuuuuuuuaucugcuucug

SEQ ID NO: 200411 - RNA, 32 nt, Homo Sapiens
aggcggacggcccgggccgccgccgccuuguc

SEQ ID NO: 200412 - RNA, 31 nt, Homo Sapiens
agcugggagccccauugccccggcagcucug

SEQ ID NO: 200413 - RNA, 32 nt, Homo Sapiens
cggcacuggcggcaagagcagacgcccgagcc

SEQ ID NO: 200414 - RNA, 32 nt, Homo Sapiens
agccucccggagcagcgccgcgcagagcccgg

SEQ ID NO: 200415 - RNA, 32 nt, Homo Sapiens
aaaaguguuuauuuuucauauugugccaauau

SEQ ID NO: 200416 - RNA, 32 nt, Homo Sapiens
ggugacgucgcgggucucggucgcggggcccg

SEQ ID NO: 200417 - RNA, 32 nt, Homo Sapiens
accauccucauauagaauaaaauaucaaccua

SEQ ID NO: 200418 - RNA, 32 nt, Homo Sapiens
auuuauauuuaacguauuggaccugauauuuu

SEQ ID NO: 200419 - RNA, 32 nt, Homo Sapiens
agcuggcggagcacgagugccacgggcggggc

SEQ ID NO: 200420 - RNA, 32 nt, Homo Sapiens
uuuccuuggggauuuaauaugugcgaaucuug

SEQ ID NO: 200421 - RNA, 32 nt, Homo Sapiens
ccaagggaggguggagaggggcugagggacag

SEQ ID NO: 200422 - RNA, 32 nt, Homo Sapiens
augccagcccccguggagcugcacccaauaag

SEQ ID NO: 200423 - RNA, 32 nt, Homo Sapiens
ugccacucuguaaauuugagcgaccuuucuga

SEQ ID NO: 200424 - RNA, 32 nt, Homo Sapiens
aauuuauaugaauauuugaucuucuugagauu

SEQ ID NO: 200425 - RNA, 32 nt, Homo Sapiens
uguaacucuuuagcacauuucucuaaacccuu

SEQ ID NO: 200426 - RNA, 31 nt, Homo Sapiens
aggaugggugguaauuaauauuggaauacuu

SEQ ID NO: 200427 - RNA, 32 nt, Homo Sapiens
aaccucugguggccguaccugaugcacgaaca

SEQ ID NO: 200428 - RNA, 32 nt, Homo Sapiens
cgcuagggccgcgagcccccgccggcccuucc

SEQ ID NO: 200429 - RNA, 32 nt, Homo Sapiens
ccagccgccccucuccuccugggcugcagagc

SEQ ID NO: 200430 - RNA, 32 nt, Homo Sapiens
aaaagggaacauuuauacacuauugaugggag

SEQ ID NO: 200431 - RNA, 32 nt, Homo Sapiens
uuauugagcuuaauuauaauacugucaaauug

SEQ ID NO: 200432 - RNA, 32 nt, Homo Sapiens
ccaauccauuuggcagaacugcuggggcuggu

SEQ ID NO: 200433 - RNA, 32 nt, Homo Sapiens
ccccaugaacaccaacaucuccagguucugag

SEQ ID NO: 200434 - RNA, 32 nt, Homo Sapiens
cgccccccgcccgggccccggcgauggugaca

SEQ ID NO: 200435 - RNA, 32 nt, Homo Sapiens
accuuaaagauaacuuuuuaaauucugaagag

SEQ ID NO: 200436 - RNA, 32 nt, Homo Sapiens
agagaaaaacacuugcccuuuuuccugggaug

SEQ ID NO: 200437 - RNA, 30 nt, Homo Sapiens
ccaugccggaaccgcgcgggucgucgcagc

SEQ ID NO: 200438 - RNA, 32 nt, Homo Sapiens
caaacgguuuuguaguuaacacuacacuacuc

SEQ ID NO: 200439 - RNA, 32 nt, Homo Sapiens
uguuaaaaagugagagugcugcuguuccauuc

SEQ ID NO: 200440 - RNA, 32 nt, Homo Sapiens
gcccagagaggggaagcugugcaggagagaau

SEQ ID NO: 200441 - RNA, 32 nt, Homo Sapiens
aacaaaguggaaguauagaucuucuucucccu

SEQ ID NO: 200442 - RNA, 32 nt, Homo Sapiens
auugaguuagacacuaaaaacaaccuaaaaua

SEQ ID NO: 200443 - RNA, 32 nt, Homo Sapiens
gacagguccaggcauggacuccagguucccua

SEQ ID NO: 200444 - RNA, 32 nt, Homo Sapiens
cugucugaggccggcucagcagugcagccugg

SEQ ID NO: 200445 - RNA, 32 nt, Homo Sapiens
gugagcuggugcccggcgaccuggcacccgcg

SEQ ID NO: 200446 - RNA, 32 nt, Homo Sapiens
ugaugggcagccauccugggaaugucugcaag

SEQ ID NO: 200447 - RNA, 32 nt, Homo Sapiens
uuuuacagacauucuuuaucaagaggucggcc

SEQ ID NO: 200448 - RNA, 32 nt, Homo Sapiens
accuacaccagaagagucagugucacagauau

SEQ ID NO: 200449 - RNA, 32 nt, Homo Sapiens
uuuacagcauuuccagguccagagagguuggc

SEQ ID NO: 200450 - RNA, 32 nt, Homo Sapiens
uugauuuuaucuuuuccuuucaggguuuuguc

SEQ ID NO: 200451 - RNA, 32 nt, Homo Sapiens
cggguccugaccccggcccggcucccgcuccg

SEQ ID NO: 200452 - RNA, 32 nt, Homo Sapiens
auccuuccauccugaggaccgccccaacccuc

SEQ ID NO: 200453 - RNA, 30 nt, Homo Sapiens
agcagauaaaaaagacggaaggcauacuaa

SEQ ID NO: 200454 - RNA, 32 nt, Homo Sapiens
cuaaauugugugucuguuuuugaaagguguug

SEQ ID NO: 200455 - RNA, 32 nt, Homo Sapiens
cuacauaaggaaacagaaggagggauuucagg

SEQ ID NO: 200456 - RNA, 32 nt, Homo Sapiens
ggccguuggagguggcugcggcagcugaugug

SEQ ID NO: 200457 - RNA, 32 nt, Homo Sapiens
ucuccuggcaacugaaguccgcgcuucccuuc

SEQ ID NO: 200458 - RNA, 32 nt, Homo Sapiens
gagcucugcuaagggacagacugccuccucaa

SEQ ID NO: 200459 - RNA, 32 nt, Homo Sapiens
caggaguuauuuauaaagaccucuuccucuca

SEQ ID NO: 200460 - RNA, 32 nt, Homo Sapiens
uguucucagggugcucuucccuacguggucac

SEQ ID NO: 200461 - RNA, 31 nt, Homo Sapiens
ccgcgucggggucgcgcaggagccgggcugc

SEQ ID NO: 200462 - RNA, 32 nt, Homo Sapiens
cucugaaaaaaguucuacaucagaauggaaag

SEQ ID NO: 200463 - RNA, 32 nt, Homo Sapiens
acauguccuuggcaauggaagccuggguugga

SEQ ID NO: 200464 - RNA, 32 nt, Homo Sapiens
uggggacuaaaggagcacuccaugcuuuagau

SEQ ID NO: 200465 - RNA, 32 nt, Homo Sapiens
aaggagaagaaauauguaaaguauauuuaaac

SEQ ID NO: 200466 - RNA, 32 nt, Homo Sapiens
uuuacaaggagaugcuuauagaugauaguugu

SEQ ID NO: 200467 - RNA, 32 nt, Homo Sapiens
ucaaaggugcccuagugccaugauuuaaauau

SEQ ID NO: 200468 - RNA, 32 nt, Homo Sapiens
uuggagaugaaaacaacacuugugaaauuagg

SEQ ID NO: 200469 - RNA, 32 nt, Homo Sapiens
ccaacaaauuccucaucuccaucugagaccac

SEQ ID NO: 200470 - RNA, 32 nt, Homo Sapiens
augcuguggacuaauuccaugguuacuuuguc

SEQ ID NO: 200471 - RNA, 32 nt, Homo Sapiens
acagcagaugaaugagcgguagcuuuaguuug

SEQ ID NO: 200472 - RNA, 32 nt, Homo Sapiens
ugcuacaucuaaauucugauaauuuaaaaucc

SEQ ID NO: 200473 - RNA, 32 nt, Homo Sapiens
uugagaucagaaguuugagaccauccuggcca

SEQ ID NO: 200474 - RNA, 32 nt, Homo Sapiens
gagauaaauuuguacuuuuuagaucaaaacaa

SEQ ID NO: 200475 - RNA, 32 nt, Homo Sapiens
aaguggcaggugaggaggagcuacagaugauu

SEQ ID NO: 200476 - RNA, 32 nt, Homo Sapiens
aggacgguggagcccggcccaggccguucucc

SEQ ID NO: 200477 - RNA, 32 nt, Homo Sapiens
gccuccucuagccaugacguggcagccaaaaa

SEQ ID NO: 200478 - RNA, 32 nt, Homo Sapiens
uucugccgcaugcaaagacugugaccauggag

SEQ ID NO: 200479 - RNA, 32 nt, Homo Sapiens
ccagcuuuggagcagccuuucagagaccguuc

SEQ ID NO: 200480 - RNA, 32 nt, Homo Sapiens
agcaucugagaaggcccugugcccuaaaggac

SEQ ID NO: 200481 - RNA, 32 nt, Homo Sapiens
gcggggucuccauggugcuaggccaggguggc

SEQ ID NO: 200482 - RNA, 32 nt, Homo Sapiens
uauaugauauugugcaaauguuugccauaggc

SEQ ID NO: 200483 - RNA, 32 nt, Homo Sapiens
aaaucuccaaaauaaaacuuuuuaaaauaaaa

SEQ ID NO: 200484 - RNA, 27 nt, Homo Sapiens
ccuuuaauuaucuucagcucccucuga

SEQ ID NO: 200485 - RNA, 32 nt, Homo Sapiens
cacuaggacgucugccuuuuuaaggcaguucc

SEQ ID NO: 200486 - RNA, 32 nt, Homo Sapiens
gacggagaaaaggacuagguggcugccaacgc

SEQ ID NO: 200487 - RNA, 32 nt, Homo Sapiens
auuuggaacaagugaaaaauauuuucacguag

SEQ ID NO: 200488 - RNA, 32 nt, Homo Sapiens
ccugaggaagggggaaucugccucuuguugcc

SEQ ID NO: 200489 - RNA, 32 nt, Homo Sapiens
accauuaagaguuagaaagaugaucuguauca

SEQ ID NO: 200490 - RNA, 32 nt, Homo Sapiens
ggccuuccccaggagaugauccuguuaagugu

SEQ ID NO: 200491 - RNA, 32 nt, Homo Sapiens
auaauuaaauaaauuuuuuucuuaauacuguu

SEQ ID NO: 200492 - RNA, 32 nt, Homo Sapiens
gcagcuugcgccccgcagccccgcagccccgc

SEQ ID NO: 200493 - RNA, 32 nt, Homo Sapiens
ugcucaugguugcaugacuuuaugagucgcug

SEQ ID NO: 200494 - RNA, 32 nt, Homo Sapiens
uuaguuaaugguuuuucuugaauucgagaagc

SEQ ID NO: 200495 - RNA, 32 nt, Homo Sapiens
cgaaccacaguguugaggggagcccgcuggga

SEQ ID NO: 200496 - RNA, 32 nt, Homo Sapiens
ugucgggcugcugcucucagcggcggggcucg

SEQ ID NO: 200497 - RNA, 32 nt, Homo Sapiens
guacaugggucaauguuaauucuuuuaucucu

SEQ ID NO: 200498 - RNA, 32 nt, Homo Sapiens
ccaccgccucggccgcugcagcuccgccggca

SEQ ID NO: 200499 - RNA, 32 nt, Homo Sapiens
ccagucggcccggcccgggggccauggagcuc

SEQ ID NO: 200500 - RNA, 32 nt, Homo Sapiens
ccgcuuggugagugucuggugcccugguggcc

SEQ ID NO: 200501 - RNA, 32 nt, Homo Sapiens
acugcacccuucugcccugccccccucgucuc

SEQ ID NO: 200502 - RNA, 32 nt, Homo Sapiens
ugaaccuucauaaucagacucauuccuuaauu

SEQ ID NO: 200503 - RNA, 32 nt, Homo Sapiens
aagcuaauuaauguguccaucacgucacauac

SEQ ID NO: 200504 - RNA, 32 nt, Homo Sapiens
gagaggcugaagaggguggaucaugaggugag

SEQ ID NO: 200505 - RNA, 32 nt, Homo Sapiens
ugggacuucugggucuccagggaggguauuua

SEQ ID NO: 200506 - RNA, 32 nt, Homo Sapiens
ggacaucucugcccucuucucaucccccagcc

SEQ ID NO: 200507 - RNA, 32 nt, Homo Sapiens
ucgcucgccuccuguacccauccagcgaccag

SEQ ID NO: 200508 - RNA, 32 nt, Homo Sapiens
ggcagccugagccccagcccacaugccacuca

SEQ ID NO: 200509 - RNA, 29 nt, Homo Sapiens
auuguuuuauacugugaccacaaauauua

SEQ ID NO: 200510 - RNA, 32 nt, Homo Sapiens
uuucaucuuucugcauuauuucauguaaauuu

SEQ ID NO: 200511 - RNA, 32 nt, Homo Sapiens
auuccaaaggauucaaguucuaauuauaaccu

SEQ ID NO: 200512 - RNA, 32 nt, Homo Sapiens
ucucccccagccuaacccccagccccuccaug

SEQ ID NO: 200513 - RNA, 31 nt, Homo Sapiens
guaccagaauaaagaauagaguguagagugu

SEQ ID NO: 200514 - RNA, 32 nt, Homo Sapiens
auggcggaagcaggaagcagacuccagagggc

SEQ ID NO: 200515 - RNA, 32 nt, Homo Sapiens
uuuccuugucauugguuccuggcacucgggcc

SEQ ID NO: 200516 - RNA, 32 nt, Homo Sapiens
gaaguacacaggcaccacuaauaaucagaccu

SEQ ID NO: 200517 - RNA, 32 nt, Homo Sapiens
uaaacccauugucuaauauuuaaaagaguuga

SEQ ID NO: 200518 - RNA, 32 nt, Homo Sapiens
gguagacugccaaauguaguaguuuuuccagu

SEQ ID NO: 200519 - RNA, 32 nt, Homo Sapiens
uuaaaauuuuugcugucuguuuuucucuaccc

SEQ ID NO: 200520 - RNA, 32 nt, Homo Sapiens
gaaccuuuuuauuuuuugcaucuccauagcau

SEQ ID NO: 200521 - RNA, 32 nt, Homo Sapiens
uuagcagacaaaagcaguuuuuacaagcucuu

SEQ ID NO: 200522 - RNA, 32 nt, Homo Sapiens
cucacuccaguucagcagcaauggucuacacu

SEQ ID NO: 200523 - RNA, 32 nt, Homo Sapiens
aagcaguuuagccuuuggauagaggaaccugc

SEQ ID NO: 200524 - RNA, 32 nt, Homo Sapiens
cauauggaucauaaguccauuuggggaagacu

SEQ ID NO: 200525 - RNA, 32 nt, Homo Sapiens
uccuggugcuuguacuucuccuacaugucaug

SEQ ID NO: 200526 - RNA, 29 nt, Homo Sapiens
cgacggcgacgucucuuuugacuaaaaga

SEQ ID NO: 200527 - RNA, 32 nt, Homo Sapiens
caagagcccgccggccagugggcuuguuugca

SEQ ID NO: 200528 - RNA, 32 nt, Homo Sapiens
cgcacaaaaggucuuccccacccacccccagc

SEQ ID NO: 200529 - RNA, 32 nt, Homo Sapiens
uuuacuggaguugugcgcaugcuugcuugagg

SEQ ID NO: 200530 - RNA, 32 nt, Homo Sapiens
uucccauggucuugggcagcucugccccugug

SEQ ID NO: 200531 - RNA, 32 nt, Homo Sapiens
ccaaauuuaaagcuagaugaggaguugccacu

SEQ ID NO: 200532 - RNA, 32 nt, Homo Sapiens
ccaagacagucuuuuaucaaguuuugacgguu

SEQ ID NO: 200533 - RNA, 32 nt, Homo Sapiens
acagcccacagaacuaugaaaaaguuaaggcu

SEQ ID NO: 200534 - RNA, 29 nt, Homo Sapiens
caggguggacgucucagugcacacgcagg

SEQ ID NO: 200535 - RNA, 32 nt, Homo Sapiens
uaauuauucauacauagcacauaugaccauga

SEQ ID NO: 200536 - RNA, 32 nt, Homo Sapiens
agggugaggcuguccaggggcuccacgguggg

SEQ ID NO: 200537 - RNA, 32 nt, Homo Sapiens
aggaaaggggccuggaggaggagggggaccag

SEQ ID NO: 200538 - RNA, 32 nt, Homo Sapiens
acgacagaagauacaagaagggagaggugucu

SEQ ID NO: 200539 - RNA, 30 nt, Homo Sapiens
cugggaggagguggugggcugguucggacg

SEQ ID NO: 200540 - RNA, 32 nt, Homo Sapiens
ugaaaauguucuuguguagaaacagaaggaca

SEQ ID NO: 200541 - RNA, 32 nt, Homo Sapiens
ugaaguggcugauguccauaacuucugagucu

SEQ ID NO: 200542 - RNA, 32 nt, Homo Sapiens
auguugguuuuaucuuuaaaaauggacaaaua

SEQ ID NO: 200543 - RNA, 32 nt, Homo Sapiens
agguaugugaauaaauauguucaugcuaguau

SEQ ID NO: 200544 - RNA, 32 nt, Homo Sapiens
gagcugcggcgccggcuccugccgccugggcc

SEQ ID NO: 200545 - RNA, 32 nt, Homo Sapiens
uuaguugauuuuuucauuuuguuagagguauu

SEQ ID NO: 200546 - RNA, 32 nt, Homo Sapiens
gacgcgccagcuuccccgggagccgcuugcuc

SEQ ID NO: 200547 - RNA, 32 nt, Homo Sapiens
cgggcgugguggcacacgccugaagucccagc

SEQ ID NO: 200548 - RNA, 31 nt, Homo Sapiens
cuugagugggcaaaguuuagagccuggggga

SEQ ID NO: 200549 - RNA, 32 nt, Homo Sapiens
cuuacuguauaaaggugugcuguguccaccgu

SEQ ID NO: 200550 - RNA, 30 nt, Homo Sapiens
gggcaaugucccgccgcaaacagggcaacc

SEQ ID NO: 200551 - RNA, 32 nt, Homo Sapiens
ccagcaagccugcagcagcaggugcccccacg

SEQ ID NO: 200552 - RNA, 31 nt, Homo Sapiens
ggcccaggguggcuggcaggagucccagcug

SEQ ID NO: 200553 - RNA, 32 nt, Homo Sapiens
auugaguggacugugggggucuguagagacag

SEQ ID NO: 200554 - RNA, 32 nt, Homo Sapiens
gcggaucuccuccuccuuuccagcagugagcc

SEQ ID NO: 200555 - RNA, 32 nt, Homo Sapiens
gaggacagauuuugcaaagcggaggcugcgac

SEQ ID NO: 200556 - RNA, 32 nt, Homo Sapiens
ggcauccgugugccggcccugcagugccugcc

SEQ ID NO: 200557 - RNA, 32 nt, Homo Sapiens
cggggcggacggccucccggaagcgcggaacc

SEQ ID NO: 200558 - RNA, 32 nt, Homo Sapiens
ucuccacggcucccccacaaccucugaagacc

SEQ ID NO: 200559 - RNA, 32 nt, Homo Sapiens
caguccuguguaggagaggaaagggaaucaaa

SEQ ID NO: 200560 - RNA, 32 nt, Homo Sapiens
aagaucuugguuuuuccaaacuggaccauccu

SEQ ID NO: 200561 - RNA, 32 nt, Homo Sapiens
caaguugauucuagguggauggucauccuugg

SEQ ID NO: 200562 - RNA, 32 nt, Homo Sapiens
gguuguaguuuucagguagguugguuucuucc

SEQ ID NO: 200563 - RNA, 32 nt, Homo Sapiens
cugaguccccagcaugugcuacagugagcugc

SEQ ID NO: 200564 - RNA, 30 nt, Homo Sapiens
uccuggcugccucagggcgcccugaaagga

SEQ ID NO: 200565 - RNA, 32 nt, Homo Sapiens
ggagucaucacaagggaauacacaauuauuug

SEQ ID NO: 200566 - RNA, 32 nt, Homo Sapiens
ugcgauucuggagccaggcggcugggguuugc

SEQ ID NO: 200567 - RNA, 32 nt, Homo Sapiens
aaauaguacuucuaccacuguuuggagaaaau

SEQ ID NO: 200568 - RNA, 32 nt, Homo Sapiens
aaaauugaccaugaaauuuagucaaacgguga

SEQ ID NO: 200569 - RNA, 32 nt, Homo Sapiens
auauucuguggcaaugaagaaaacacuaggga

SEQ ID NO: 200570 - RNA, 32 nt, Homo Sapiens
augucuaauguaacuucuacuuuuccuuuuga

SEQ ID NO: 200571 - RNA, 32 nt, Homo Sapiens
uuuuuccaccugaaaugugucaguuguuguuc

SEQ ID NO: 200572 - RNA, 32 nt, Homo Sapiens
cauguuugcuuuauuuuauuuuaaugucagaa

SEQ ID NO: 200573 - RNA, 32 nt, Homo Sapiens
ucgccuggggacgcagccacuuucuccagugg

SEQ ID NO: 200574 - RNA, 32 nt, Homo Sapiens
cuccucaucuccuuugaccaguuucuucuaau

SEQ ID NO: 200575 - RNA, 32 nt, Homo Sapiens
aauauagcauauagcuauagauauaggcuuuu

SEQ ID NO: 200576 - RNA, 32 nt, Homo Sapiens
ucuacaugagaauauacuaauuuuauaugcaa

SEQ ID NO: 200577 - RNA, 32 nt, Homo Sapiens
cgaccuccgugaguggccccgccccgcccuag

SEQ ID NO: 200578 - RNA, 32 nt, Homo Sapiens
gaauuucagcauugcauagaagcagccuuaca

SEQ ID NO: 200579 - RNA, 32 nt, Homo Sapiens
ucucacuggccugcugcagaugagccaggggg

SEQ ID NO: 200580 - RNA, 32 nt, Homo Sapiens
guggaaugaugauuuuauguuuagugaguggu

SEQ ID NO: 200581 - RNA, 31 nt, Homo Sapiens
cuuguaacaaauucuuaggucaauaugugaa

SEQ ID NO: 200582 - RNA, 32 nt, Homo Sapiens
ucuagaugaugaugaacaugauuaugaagaaa

SEQ ID NO: 200583 - RNA, 32 nt, Homo Sapiens
uccucucuccaccugcccucuuaucuaggagc

SEQ ID NO: 200584 - RNA, 32 nt, Homo Sapiens
aaaacucauuuuuucuuguucuuaauuuauau

SEQ ID NO: 200585 - RNA, 32 nt, Homo Sapiens
ccucuugcccucacacucugguaccaggacug

SEQ ID NO: 200586 - RNA, 32 nt, Homo Sapiens
cagacuccaagagcugccaccgcuggggcugc

SEQ ID NO: 200587 - RNA, 32 nt, Homo Sapiens
cuagaaggugaaaacuuuuuuggcucucauuu

SEQ ID NO: 200588 - RNA, 32 nt, Homo Sapiens
gcauucugauguaccuaggaguuuuguuaaac

SEQ ID NO: 200589 - RNA, 32 nt, Homo Sapiens
aacaaguuuuuggcagagguauauuuacauuc

SEQ ID NO: 200590 - RNA, 32 nt, Homo Sapiens
aaauguuaacaaaauauaucuuaacagauuac

SEQ ID NO: 200591 - RNA, 28 nt, Homo Sapiens
gcgaugagaagcugcuucugcgugagac

SEQ ID NO: 200592 - RNA, 32 nt, Homo Sapiens
gcagguugaagugagccaaaaucaggcuacag

SEQ ID NO: 200593 - RNA, 32 nt, Homo Sapiens
uuauuuagaagacacuuucucugccucauccu

SEQ ID NO: 200594 - RNA, 32 nt, Homo Sapiens
gguggagagggagaggcuggaggccugggcag

SEQ ID NO: 200595 - RNA, 32 nt, Homo Sapiens
gucaggacacaagccagaccuggacggaagug

SEQ ID NO: 200596 - RNA, 32 nt, Homo Sapiens
agcacaggagacggagguugcugugagcugag

SEQ ID NO: 200597 - RNA, 32 nt, Homo Sapiens
acaugauaaaaugacauagaaugacacacaca

SEQ ID NO: 200598 - RNA, 32 nt, Homo Sapiens
cacuccugccuggugcucggcagaccccacug

SEQ ID NO: 200599 - RNA, 32 nt, Homo Sapiens
gggcucgaacgcgcagcgcacgggaaccgguc

SEQ ID NO: 200600 - RNA, 32 nt, Homo Sapiens
uauuuuuagcuuuguuuuuuuauaagccuuuu

SEQ ID NO: 200601 - RNA, 32 nt, Homo Sapiens
gguuuuuaggccuggccgccauggcgucuccu

SEQ ID NO: 200602 - RNA, 32 nt, Homo Sapiens
ugggguaaaaauuucugcuagcaaaaucaagu

SEQ ID NO: 200603 - RNA, 32 nt, Homo Sapiens
ggagcgaggggagagggggcugcccccgaggu

SEQ ID NO: 200604 - RNA, 32 nt, Homo Sapiens
ucccucccauucucucugcaacucccugcggg

SEQ ID NO: 200605 - RNA, 32 nt, Homo Sapiens
accccuccaaggggcuggccugugagccuuga

SEQ ID NO: 200606 - RNA, 32 nt, Homo Sapiens
gcauuucugcaccuuugggucaugcuuuguag

SEQ ID NO: 200607 - RNA, 32 nt, Homo Sapiens
aguuaaaaaaauuuuuagauagcuuagcuugu

SEQ ID NO: 200608 - RNA, 32 nt, Homo Sapiens
gcuggacuucuuggcuggaugcgcggggggua

SEQ ID NO: 200609 - RNA, 32 nt, Homo Sapiens
ggucgcuggcgccuguuuccucagagccacuu

SEQ ID NO: 200610 - RNA, 32 nt, Homo Sapiens
ggagagucaccgcggcgggcccgggugguggu

SEQ ID NO: 200611 - RNA, 32 nt, Homo Sapiens
gacagggcggaggguuugaaagaauauugagc

SEQ ID NO: 200612 - RNA, 32 nt, Homo Sapiens
cggcaguucucaaagacuuaauccccuagucg

SEQ ID NO: 200613 - RNA, 32 nt, Homo Sapiens
uccacucccagcuccacauccuccuccuauuc

SEQ ID NO: 200614 - RNA, 32 nt, Homo Sapiens
cgacaauugcaggaugcacagauucugauggg

SEQ ID NO: 200615 - RNA, 32 nt, Homo Sapiens
ccauacacugugcugugggcccggggccuccu

SEQ ID NO: 200616 - RNA, 32 nt, Homo Sapiens
agcaugacaaacaaaaucauuuaccugacuuu

SEQ ID NO: 200617 - RNA, 32 nt, Homo Sapiens
gcccuccgcucgccuggcccggaccggaagcg

SEQ ID NO: 200618 - RNA, 32 nt, Homo Sapiens
gagaccaggaaaggaagaaaggcagcuucacu

SEQ ID NO: 200619 - RNA, 32 nt, Homo Sapiens
uuuguaaaguuucuuuuuguuuuaucuuaugu

SEQ ID NO: 200620 - RNA, 32 nt, Homo Sapiens
uucagcgcggccucgggccuggucgagaagga

SEQ ID NO: 200621 - RNA, 32 nt, Homo Sapiens
uaaggaguccugcuuaucacaaugaauguucu

SEQ ID NO: 200622 - RNA, 29 nt, Homo Sapiens
acacauauauguauacauauauacacaua

SEQ ID NO: 200623 - RNA, 32 nt, Homo Sapiens
aagccccacugccucuuugcugaaacaaccca

SEQ ID NO: 200624 - RNA, 32 nt, Homo Sapiens
aaaauuagcugggcgugguggugcgugccugu

SEQ ID NO: 200625 - RNA, 32 nt, Homo Sapiens
uguccuguggaggaggugguggugguauggug

SEQ ID NO: 200626 - RNA, 32 nt, Homo Sapiens
aguacagcuuuuuugagauauuuuaaaaaguc

SEQ ID NO: 200627 - RNA, 32 nt, Homo Sapiens
uucagggagcuggcagagagggugugugagcg

SEQ ID NO: 200628 - RNA, 32 nt, Homo Sapiens
ggagguugaggugggcagaucgccugaggucg

SEQ ID NO: 200629 - RNA, 32 nt, Homo Sapiens
ccgggugggcguccauggugcugcugcgcuga

SEQ ID NO: 200630 - RNA, 32 nt, Homo Sapiens
aaaugaagcuaaaagaaguaugaacccauugg

SEQ ID NO: 200631 - RNA, 32 nt, Homo Sapiens
cagacuguucccuccaagguccucuuaggucc

SEQ ID NO: 200632 - RNA, 32 nt, Homo Sapiens
aggugaauucccagcccucgccggauucaacu

SEQ ID NO: 200633 - RNA, 32 nt, Homo Sapiens
ggugcaccgggaaaaugugucugaguccugcu

SEQ ID NO: 200634 - RNA, 32 nt, Homo Sapiens
cuaaucaaagauuuccuauucccuguaauuug

SEQ ID NO: 200635 - RNA, 32 nt, Homo Sapiens
gcgcgggggcacuuguuguucuucgcgaaguc

SEQ ID NO: 200636 - RNA, 32 nt, Homo Sapiens
gugcauggccugugcugccuucugccuggcuc

SEQ ID NO: 200637 - RNA, 32 nt, Homo Sapiens
ucaaauauauuguacuuuuuuauuucuguaag

SEQ ID NO: 200638 - RNA, 32 nt, Homo Sapiens
ccggguuuucccuccgccuuuggggcaggcga

SEQ ID NO: 200639 - RNA, 32 nt, Homo Sapiens
uugugaucaaaauaaauguuuaaaucgcuaaa

SEQ ID NO: 200640 - RNA, 31 nt, Homo Sapiens
gacacgaugcgcugcgcgcuggcgcucucgg

SEQ ID NO: 200641 - RNA, 32 nt, Homo Sapiens
acuacaauuccaaaaaucaucaugguuggaaa

SEQ ID NO: 200642 - RNA, 32 nt, Homo Sapiens
aaauucauuuggugaagaaaaauacauuuuau

SEQ ID NO: 200643 - RNA, 32 nt, Homo Sapiens
caagacauacagaggaaaagaaaugagacaaa

SEQ ID NO: 200644 - RNA, 32 nt, Homo Sapiens
cgagaccaguguucgugccaagaaugaucaaa

SEQ ID NO: 200645 - RNA, 32 nt, Homo Sapiens
uagcaaguaauuuuuguuuuauaaaucauagu

SEQ ID NO: 200646 - RNA, 32 nt, Homo Sapiens
gcuugccugcuucugcccuuuccagagggguc

SEQ ID NO: 200647 - RNA, 32 nt, Homo Sapiens
cgaagcggagagcaccggggggaggagauggg

SEQ ID NO: 200648 - RNA, 32 nt, Homo Sapiens
aucuuacugucaaucuugccuacauugauuau

SEQ ID NO: 200649 - RNA, 32 nt, Homo Sapiens
agauggcuuccccgccgccacccagagugugg

SEQ ID NO: 200650 - RNA, 32 nt, Homo Sapiens
uacuugcuuuaaaaagcagaguuagauuuuug

SEQ ID NO: 200651 - RNA, 32 nt, Homo Sapiens
cguugugggcgccauuucucggcgucucccga

SEQ ID NO: 200652 - RNA, 32 nt, Homo Sapiens
acagcacaaaaaucuugaaaacuaugaagucc

SEQ ID NO: 200653 - RNA, 32 nt, Homo Sapiens
agguacugaaggcuuuaaaaauaauuaagauc

SEQ ID NO: 200654 - RNA, 32 nt, Homo Sapiens
cguagugccagcugcuugggaggcugagguga

SEQ ID NO: 200655 - RNA, 32 nt, Homo Sapiens
cauugauugguaguucgaagaauuggcagaau

SEQ ID NO: 200656 - RNA, 32 nt, Homo Sapiens
aggugccaagagguuaugauacggguuucuug

SEQ ID NO: 200657 - RNA, 32 nt, Homo Sapiens
auuucugacccuguguguuagagcaguugcau

SEQ ID NO: 200658 - RNA, 32 nt, Homo Sapiens
gcagcggccccgggaacccggauccuuccggg

SEQ ID NO: 200659 - RNA, 29 nt, Homo Sapiens
ggguaugugacuuuggaacuggguaacag

SEQ ID NO: 200660 - RNA, 32 nt, Homo Sapiens
uguugacaaacuaaguuuuuuuuauuuuuccc

SEQ ID NO: 200661 - RNA, 32 nt, Homo Sapiens
gggaguucaaggagacgggggcgacgcggcug

SEQ ID NO: 200662 - RNA, 32 nt, Homo Sapiens
uuauuaaauaugucuucauaaauuacgcacag

SEQ ID NO: 200663 - RNA, 32 nt, Homo Sapiens
gagucaagccucaggaccuggaaacuuugugu

SEQ ID NO: 200664 - RNA, 32 nt, Homo Sapiens
ucugugcucagguccucacgcugcagacgccc

SEQ ID NO: 200665 - RNA, 32 nt, Homo Sapiens
aaaccugagauuccaacccagccuuuuguuug

SEQ ID NO: 200666 - RNA, 32 nt, Homo Sapiens
acacugggccugggccagggccccagagcucc

SEQ ID NO: 200667 - RNA, 32 nt, Homo Sapiens
guugauugcucuucuuuuucuaguucuuucag

SEQ ID NO: 200668 - RNA, 32 nt, Homo Sapiens
gccuuuuucuuuucuuuuuaaaaauuuuaaga

SEQ ID NO: 200669 - RNA, 32 nt, Homo Sapiens
ucagacuagucaacuuucuuaauagucugcau

SEQ ID NO: 200670 - RNA, 32 nt, Homo Sapiens
gagcgccgccgggaauuccaucccaccguggg

SEQ ID NO: 200671 - RNA, 32 nt, Homo Sapiens
gaaaaaauauacauuuacaaauugugagauuu

SEQ ID NO: 200672 - RNA, 31 nt, Homo Sapiens
cccuggugggucugccugccugggccacccu

SEQ ID NO: 200673 - RNA, 32 nt, Homo Sapiens
uguuauaaggaaaacuaacaaacagaaaggaa

SEQ ID NO: 200674 - RNA, 30 nt, Homo Sapiens
gguguggccgguaggaagugggggccagga

SEQ ID NO: 200675 - RNA, 32 nt, Homo Sapiens
auauguuuuuauuauauucauagccuucuuaa

SEQ ID NO: 200676 - RNA, 32 nt, Homo Sapiens
uuuugagaaaaaaguuaccgaauauuuuuuag

SEQ ID NO: 200677 - RNA, 32 nt, Homo Sapiens
cauugugcuggggcuccccaaggcccugccac

SEQ ID NO: 200678 - RNA, 32 nt, Homo Sapiens
uuuccauuguucuuuugguuuuuccugcauug

SEQ ID NO: 200679 - RNA, 32 nt, Homo Sapiens
acucacugccccccuugggcacccacucaccc

SEQ ID NO: 200680 - RNA, 32 nt, Homo Sapiens
uaaaaugcacauuugcuuuggaugcacuguug

SEQ ID NO: 200681 - RNA, 32 nt, Homo Sapiens
gaggggagcaaguggggaccuggccauggccc

SEQ ID NO: 200682 - RNA, 32 nt, Homo Sapiens
gaagacucugggcauucugcugcuggcuugca

SEQ ID NO: 200683 - RNA, 32 nt, Homo Sapiens
aaggcgggcauggaggccgcgcugcucaacgu

SEQ ID NO: 200684 - RNA, 32 nt, Homo Sapiens
ccaguucagccuuuaugcacaguacgugaagc

SEQ ID NO: 200685 - RNA, 32 nt, Homo Sapiens
auguuuuugguucaauuacauaaaaauuaaua

SEQ ID NO: 200686 - RNA, 29 nt, Homo Sapiens
cagcauauguguauguaugcguauguaug

SEQ ID NO: 200687 - RNA, 32 nt, Homo Sapiens
cuaaaagagucuuuuuauuuuuaaaacacaag

SEQ ID NO: 200688 - RNA, 32 nt, Homo Sapiens
ggucaaauaaaggaauaaaaagcugguagccg

SEQ ID NO: 200689 - RNA, 32 nt, Homo Sapiens
ccuucaucgcaguacaucguggcccuggucuu

SEQ ID NO: 200690 - RNA, 32 nt, Homo Sapiens
aucaaguggcaccagaauggacugauuaaaau

SEQ ID NO: 200691 - RNA, 32 nt, Homo Sapiens
uaauuuacaaauaacauugguagauugacaug

SEQ ID NO: 200692 - RNA, 32 nt, Homo Sapiens
ucagcgucccgguguggcugugccguuggucc

SEQ ID NO: 200693 - RNA, 32 nt, Homo Sapiens
acuucaacucugggcuuuugguccuccaggca

SEQ ID NO: 200694 - RNA, 32 nt, Homo Sapiens
ucugccuguaucuuucccacuccaccacacug

SEQ ID NO: 200695 - RNA, 32 nt, Homo Sapiens
gcuggugacuggcaggugacucccucagcagu

SEQ ID NO: 200696 - RNA, 32 nt, Homo Sapiens
uuagauaggagcauggagggcgugccugguga

SEQ ID NO: 200697 - RNA, 32 nt, Homo Sapiens
ggucagggucuucuugcgacccggcccgcucc

SEQ ID NO: 200698 - RNA, 32 nt, Homo Sapiens
aaucgugcaauaaccauaugcgacuauuuugc

SEQ ID NO: 200699 - RNA, 32 nt, Homo Sapiens
gcaucaaaaaaguaaauagauguugaaaugaa

SEQ ID NO: 200700 - RNA, 32 nt, Homo Sapiens
caugucuccaucuggucauacuccauagcuac

SEQ ID NO: 200701 - RNA, 32 nt, Homo Sapiens
accuuuaaauauguguuuuauagaauaucuca

SEQ ID NO: 200702 - RNA, 32 nt, Homo Sapiens
cccaaauggaaauuguauuugccuucuccacu

SEQ ID NO: 200703 - RNA, 32 nt, Homo Sapiens
uaaguccaguuuuccuucuccagcuucuugcu

SEQ ID NO: 200704 - RNA, 32 nt, Homo Sapiens
cugagggaagacugaggacaugggcucagugg

SEQ ID NO: 200705 - RNA, 32 nt, Homo Sapiens
caaaagaaaaauuuauuuaaauaaaauacuuu

SEQ ID NO: 200706 - RNA, 32 nt, Homo Sapiens
guuuuguuucuuuucuacauuuuuaaguauua

SEQ ID NO: 200707 - RNA, 32 nt, Homo Sapiens
ccugugcccccauggguuuucuuuuuucuuuu

SEQ ID NO: 200708 - RNA, 32 nt, Homo Sapiens
ccagaacugugggcaauaaaugucuguuguuu

SEQ ID NO: 200709 - RNA, 32 nt, Homo Sapiens
ccguagccagcaggcuucagugcucaccgaaa

SEQ ID NO: 200710 - RNA, 32 nt, Homo Sapiens
ccauacuuuuaaaauccugaaucauuguuuau

SEQ ID NO: 200711 - RNA, 32 nt, Homo Sapiens
uauuuuuuacuuugcccuuuuaaaaaauauac

SEQ ID NO: 200712 - RNA, 32 nt, Homo Sapiens
aucugacuuccuacagccaaauccccagaggc

SEQ ID NO: 200713 - RNA, 32 nt, Homo Sapiens
aggagagagguuuagugccauguucagugggc

SEQ ID NO: 200714 - RNA, 32 nt, Homo Sapiens
uaucauucauaucaaaaagaguuuagcaaaug

SEQ ID NO: 200715 - RNA, 32 nt, Homo Sapiens
ucagaauaaaaagaagcugaggaagcuguugg

SEQ ID NO: 200716 - RNA, 32 nt, Homo Sapiens
ggcuagccaucccaguacuuccacguuuuuca

SEQ ID NO: 200717 - RNA, 32 nt, Homo Sapiens
caaggacugucccuccagcagucgccuccucc

SEQ ID NO: 200718 - RNA, 32 nt, Homo Sapiens
uccagauguggcaaaaucuggcaaaggcagag

SEQ ID NO: 200719 - RNA, 32 nt, Homo Sapiens
auggaaucaaccauuaccaggcaaauucuugc

SEQ ID NO: 200720 - RNA, 32 nt, Homo Sapiens
acgcccucccgcgagucccgggccccucccgc

SEQ ID NO: 200721 - RNA, 32 nt, Homo Sapiens
gaagcugacuucugaagaugacugccucaccu

SEQ ID NO: 200722 - RNA, 32 nt, Homo Sapiens
gacagggucucacucugucacccaggcuggaa

SEQ ID NO: 200723 - RNA, 32 nt, Homo Sapiens
cugguagauauuaaagcuggguacuaagaaau

SEQ ID NO: 200724 - RNA, 32 nt, Homo Sapiens
uauuguaauuuagaugcaaaagaauguguugu

SEQ ID NO: 200725 - RNA, 32 nt, Homo Sapiens
auuccggucucacugaccccggcccacccgcg

SEQ ID NO: 200726 - RNA, 32 nt, Homo Sapiens
cucugguaugacagacuaucagagguuccaaa

SEQ ID NO: 200727 - RNA, 32 nt, Homo Sapiens
gcagcagaugaccccuucucccccgucugugc

SEQ ID NO: 200728 - RNA, 32 nt, Homo Sapiens
ggcaguaugucucagcuggaauggaaagaaug

SEQ ID NO: 200729 - RNA, 32 nt, Homo Sapiens
cgggcugugccgcagagcugccggcugugcgg

SEQ ID NO: 200730 - RNA, 32 nt, Homo Sapiens
ggcuuuuuucuuuccuuuuuucaaauugacuu

SEQ ID NO: 200731 - RNA, 32 nt, Homo Sapiens
ucuaagcuguuggagccggccggcgcucacuu

SEQ ID NO: 200732 - RNA, 32 nt, Homo Sapiens
cggcuuccugggguccuccccacgucccaaag

SEQ ID NO: 200733 - RNA, 32 nt, Homo Sapiens
acccugccuggccacuugcuguuucuucaguu

SEQ ID NO: 200734 - RNA, 32 nt, Homo Sapiens
aaccgcugugcagcuugggaaggaaaagagcu

SEQ ID NO: 200735 - RNA, 32 nt, Homo Sapiens
uaucgacuucuuggaaaaacacagacagcaau

SEQ ID NO: 200736 - RNA, 32 nt, Homo Sapiens
cccuugaaaaggagggguuuggggacagggac

SEQ ID NO: 200737 - RNA, 32 nt, Homo Sapiens
cuuaaagcagcauuacagucccagaccugcgg

SEQ ID NO: 200738 - RNA, 32 nt, Homo Sapiens
ggcucuuggggauuagauaucccuuuaaucug

SEQ ID NO: 200739 - RNA, 32 nt, Homo Sapiens
ggcagccuggaaagagcugguagcagaacauu

SEQ ID NO: 200740 - RNA, 32 nt, Homo Sapiens
cauuuaaauuuauuuaacaguuaucuugaaag

SEQ ID NO: 200741 - RNA, 32 nt, Homo Sapiens
aaagagcccccugcugccccccgcggcggcuu

SEQ ID NO: 200742 - RNA, 32 nt, Homo Sapiens
ccucuagaucuuuaaaaauauucauaaauagu

SEQ ID NO: 200743 - RNA, 32 nt, Homo Sapiens
cagcgggcgggcccggcugccaaggaggaggg

SEQ ID NO: 200744 - RNA, 32 nt, Homo Sapiens
uggugggcgcgguggcucuugccuguaauccc

SEQ ID NO: 200745 - RNA, 32 nt, Homo Sapiens
ggcggagagcgcagggcggggagaggcguggg

SEQ ID NO: 200746 - RNA, 32 nt, Homo Sapiens
ugcugcaugcguguuaccuggcuuuuggcucc

SEQ ID NO: 200747 - RNA, 32 nt, Homo Sapiens
aaucucugcacgagcgguucaugucuucagua

SEQ ID NO: 200748 - RNA, 32 nt, Homo Sapiens
gaguuucgaaggauuaaugacuuccucagcgc

SEQ ID NO: 200749 - RNA, 32 nt, Homo Sapiens
uuuuaaauuuaaaacaaugaauugaaugcucu

SEQ ID NO: 200750 - RNA, 32 nt, Homo Sapiens
cucuccaggugucaaaggugaaccgaguccag

SEQ ID NO: 200751 - RNA, 32 nt, Homo Sapiens
gacuugaggagcuguuuuguuguuguuguugu

SEQ ID NO: 200752 - RNA, 32 nt, Homo Sapiens
acuccccucccgccuacccccaucccaaacug

SEQ ID NO: 200753 - RNA, 32 nt, Homo Sapiens
ucuuuggccucaaccccuccccugcacugaga

SEQ ID NO: 200754 - RNA, 32 nt, Homo Sapiens
cccugcacuggaguccagucucuucugcuggc

SEQ ID NO: 200755 - RNA, 32 nt, Homo Sapiens
aaacuuguuuccagacaucuuuuucagauugu

SEQ ID NO: 200756 - RNA, 32 nt, Homo Sapiens
uuguaauucuauuugagcaaguuggaaguuua

SEQ ID NO: 200757 - RNA, 32 nt, Homo Sapiens
acaacuaaauguuuaucauuguuuaguguuua

SEQ ID NO: 200758 - RNA, 32 nt, Homo Sapiens
cccuuuggaagggcaaucuuaugggggaaggu

SEQ ID NO: 200759 - RNA, 32 nt, Homo Sapiens
cguuuuguauaucauuaaaucuuuaaaagaaa

SEQ ID NO: 200760 - RNA, 32 nt, Homo Sapiens
gaagucaagaugauaccuccaacugacauacg

SEQ ID NO: 200761 - RNA, 32 nt, Homo Sapiens
ccuucccaaucuucuuuuucaggcucgccaag

SEQ ID NO: 200762 - RNA, 32 nt, Homo Sapiens
cgcaagccccccagccucccacccugguccca

SEQ ID NO: 200763 - RNA, 32 nt, Homo Sapiens
gcccguuugcagagcccgcggcgccgggagga

SEQ ID NO: 200764 - RNA, 32 nt, Homo Sapiens
ggccacagaggccuaaguuugcuggccugugg

SEQ ID NO: 200765 - RNA, 32 nt, Homo Sapiens
gaggguaacaacagagugucagauaugucauc

SEQ ID NO: 200766 - RNA, 32 nt, Homo Sapiens
ccgcaggccccggccgcggcguccucgacaac

SEQ ID NO: 200767 - RNA, 32 nt, Homo Sapiens
cuucuuggucuucuccuucugggccucauggc

SEQ ID NO: 200768 - RNA, 32 nt, Homo Sapiens
uccccagccgaaccucacgcccggccccuccu

SEQ ID NO: 200769 - RNA, 32 nt, Homo Sapiens
cuccagggagaaugucugguugugaagagccg

SEQ ID NO: 200770 - RNA, 32 nt, Homo Sapiens
cugugcuucagcgaccaggauggccaggccag

SEQ ID NO: 200771 - RNA, 32 nt, Homo Sapiens
ggcugcucuugaacuccugaccucaaaugauc

SEQ ID NO: 200772 - RNA, 32 nt, Homo Sapiens
gaggcuggaacauagugucugccucgcuuccu

SEQ ID NO: 200773 - RNA, 32 nt, Homo Sapiens
gcgcgccgcguagggucccccgggccgagagg

SEQ ID NO: 200774 - RNA, 32 nt, Homo Sapiens
gaaucuuccagaagcccagcuccacccgcaca

SEQ ID NO: 200775 - RNA, 30 nt, Homo Sapiens
gacaauuaaugauuaaagacugugauugcc

SEQ ID NO: 200776 - RNA, 32 nt, Homo Sapiens
auauuaauauucaaaucauaguucaaaaauac

SEQ ID NO: 200777 - RNA, 32 nt, Homo Sapiens
uacucaggccccaagggguuucuguuucuauu

SEQ ID NO: 200778 - RNA, 32 nt, Homo Sapiens
accaggugguccugggucuccaugauuuccug

SEQ ID NO: 200779 - RNA, 32 nt, Homo Sapiens
ucagcauccaaguuuaugaaugacaguaguca

SEQ ID NO: 200780 - RNA, 32 nt, Homo Sapiens
uaaaucuuaaaaugaauuauguuauuugcucu

SEQ ID NO: 200781 - RNA, 32 nt, Homo Sapiens
gacgucugacagugacgaugaguggacauuug

SEQ ID NO: 200782 - RNA, 32 nt, Homo Sapiens
aacucauccuuuauaaagacaccacuccugag

SEQ ID NO: 200783 - RNA, 32 nt, Homo Sapiens
ccuggguuggagcuacugcauguugauuguuu

SEQ ID NO: 200784 - RNA, 32 nt, Homo Sapiens
aaauuguguacuuaaaugaaccucauuucccu

SEQ ID NO: 200785 - RNA, 32 nt, Homo Sapiens
uuucggcugugaauaaaguucagcuagaauca

SEQ ID NO: 200786 - RNA, 32 nt, Homo Sapiens
auucucaguccuccucuggucuacaaagccug

SEQ ID NO: 200787 - RNA, 32 nt, Homo Sapiens
agaacgcagaccagcccaagcugacagcuuga

SEQ ID NO: 200788 - RNA, 32 nt, Homo Sapiens
ccuagcaauauuugcaacaucccaauggcccu

SEQ ID NO: 200789 - RNA, 30 nt, Homo Sapiens
gguggggcaagaguuucgccggcgcaucag

SEQ ID NO: 200790 - RNA, 32 nt, Homo Sapiens
gauacauucuucugcccauuauaauucucacc

SEQ ID NO: 200791 - RNA, 32 nt, Homo Sapiens
ggaaccuggggguggggaggagggggaugcgg

SEQ ID NO: 200792 - RNA, 32 nt, Homo Sapiens
gccugugugagccgcacuuccggugugagccg

SEQ ID NO: 200793 - RNA, 32 nt, Homo Sapiens
uacugauaagcacuuauguucugccuucugcc

SEQ ID NO: 200794 - RNA, 31 nt, Homo Sapiens
uaaggauugugcucagcagcuguuugaguua

SEQ ID NO: 200795 - RNA, 32 nt, Homo Sapiens
cagucgcgcacccuguguugccugcugacuug

SEQ ID NO: 200796 - RNA, 28 nt, Homo Sapiens
gccuaggaagauuaaauuaagaauaacu

SEQ ID NO: 200797 - RNA, 30 nt, Homo Sapiens
uccaguguguacccugccucucucugucau

SEQ ID NO: 200798 - RNA, 32 nt, Homo Sapiens
ggugggaggagcugagagggcuaucuggacuc

SEQ ID NO: 200799 - RNA, 32 nt, Homo Sapiens
aguggcggcccgaaacgccgccgcggagccga

SEQ ID NO: 200800 - RNA, 32 nt, Homo Sapiens
cugagcuaaaagaccauuuuuugagacaccua

SEQ ID NO: 200801 - RNA, 29 nt, Homo Sapiens
cgagagugggcaagcaggacgccgggcug

SEQ ID NO: 200802 - RNA, 32 nt, Homo Sapiens
ggcauggcccgcgcgcccggcgcgaccucugc

SEQ ID NO: 200803 - RNA, 32 nt, Homo Sapiens
cuggcagccgccugggguggugaccccaggag

SEQ ID NO: 200804 - RNA, 32 nt, Homo Sapiens
cuaccuaguccaagaguaaaccccaccugcca

SEQ ID NO: 200805 - RNA, 32 nt, Homo Sapiens
guaaaauaagcacuuacuggauuuguaauugg

SEQ ID NO: 200806 - RNA, 32 nt, Homo Sapiens
gugucuuccuuuuguucucacugccaaacugc

SEQ ID NO: 200807 - RNA, 32 nt, Homo Sapiens
cuuggaccaaaccacgugguuugcagcuuuuc

SEQ ID NO: 200808 - RNA, 32 nt, Homo Sapiens
uuuuuuuucuuuucuuuuuuaaaaauaugugg

SEQ ID NO: 200809 - RNA, 32 nt, Homo Sapiens
gccuccuguuugccuucagggacugccaucua

SEQ ID NO: 200810 - RNA, 32 nt, Homo Sapiens
gaauuucugcucuucaccgauuuucucaggga

SEQ ID NO: 200811 - RNA, 32 nt, Homo Sapiens
uugauggcuuuuauuccuuuccacauuuccua

SEQ ID NO: 200812 - RNA, 32 nt, Homo Sapiens
uuuuuauuugaaaaaauacaugacauguaauc

SEQ ID NO: 200813 - RNA, 32 nt, Homo Sapiens
uucucuggccucagccucccaaguagcuggga

SEQ ID NO: 200814 - RNA, 32 nt, Homo Sapiens
ugccugagguggcuguuuaccuaaaggaguca

SEQ ID NO: 200815 - RNA, 32 nt, Homo Sapiens
uuggguguagaugucacaacuaccuucuacuc

SEQ ID NO: 200816 - RNA, 32 nt, Homo Sapiens
augccugggcauccuacccccaucacccuuua

SEQ ID NO: 200817 - RNA, 32 nt, Homo Sapiens
auucugaugauuagacugaauccucagacguu

SEQ ID NO: 200818 - RNA, 32 nt, Homo Sapiens
uaaaccagaaaauguuuuaaauuuauaauucc

SEQ ID NO: 200819 - RNA, 32 nt, Homo Sapiens
uugccgguggacagcauggccgugccagccuc

SEQ ID NO: 200820 - RNA, 32 nt, Homo Sapiens
gcccaaguccuucaaaccuccuccuuuucacc

SEQ ID NO: 200821 - RNA, 32 nt, Homo Sapiens
uuaggcccuguaaccacccuggccauaggcau

SEQ ID NO: 200822 - RNA, 32 nt, Homo Sapiens
aaauuuguaccauaaccguuuauuuaacauau

SEQ ID NO: 200823 - RNA, 32 nt, Homo Sapiens
cuuuugcucuaauauuucauuauuuuccaguu

SEQ ID NO: 200824 - RNA, 32 nt, Homo Sapiens
gaccgcucaccccaucggcuggaaugcuugcu

SEQ ID NO: 200825 - RNA, 32 nt, Homo Sapiens
ccuaggagcccgcgccucuccucugcgccccg

SEQ ID NO: 200826 - RNA, 32 nt, Homo Sapiens
cgccaccauguccuccuucucugagucggcgc

SEQ ID NO: 200827 - RNA, 32 nt, Homo Sapiens
ucuggacauaagacauaacaguaacacgaugu

SEQ ID NO: 200828 - RNA, 32 nt, Homo Sapiens
ggcacgaggggcgcuggggcccugggcagcgc

SEQ ID NO: 200829 - RNA, 32 nt, Homo Sapiens
cugaggcccugaccccugcucccggccacagg

SEQ ID NO: 200830 - RNA, 32 nt, Homo Sapiens
gaccuggccaaggguccugucaucccucaugg

SEQ ID NO: 200831 - RNA, 29 nt, Homo Sapiens
uuaaaagagaaaguggccauuacuaauga

SEQ ID NO: 200832 - RNA, 32 nt, Homo Sapiens
accuguggaaaaccucuggccucuguucagaa

SEQ ID NO: 200833 - RNA, 32 nt, Homo Sapiens
ggauggaaccucugggucaggaaacagcugga

SEQ ID NO: 200834 - RNA, 32 nt, Homo Sapiens
aggcacagcuggagaacccuagggcugugaac

SEQ ID NO: 200835 - RNA, 30 nt, Homo Sapiens
ggagaggcgcccggugcagauggccccggg

SEQ ID NO: 200836 - RNA, 32 nt, Homo Sapiens
guccaaagauacccucuuucucaagguagucu

SEQ ID NO: 200837 - RNA, 32 nt, Homo Sapiens
ugcacaguccucugcccucuguccgucucuug

SEQ ID NO: 200838 - RNA, 32 nt, Homo Sapiens
gagagugacccggcccugguccagggcccucc

SEQ ID NO: 200839 - RNA, 32 nt, Homo Sapiens
gugcaauuuuguuuuucuuaaugccaguuuac

SEQ ID NO: 200840 - RNA, 32 nt, Homo Sapiens
uccgcuuccggcgacuccauggggaaacugaa

SEQ ID NO: 200841 - RNA, 31 nt, Homo Sapiens
cuucaauaaaaaguugggcuuugugacuagc

SEQ ID NO: 200842 - RNA, 32 nt, Homo Sapiens
cagacuucaaggaggaucaguccacccugaag

SEQ ID NO: 200843 - RNA, 32 nt, Homo Sapiens
uugacuacggaagagggaaaagugccacagac

SEQ ID NO: 200844 - RNA, 32 nt, Homo Sapiens
uaguuacaggucauuauaucuacuauguugau

SEQ ID NO: 200845 - RNA, 32 nt, Homo Sapiens
ccagguuauauucaagguuuuauuuuuuccag

SEQ ID NO: 200846 - RNA, 32 nt, Homo Sapiens
cucauucugugccuccuucugugccuccuacc

SEQ ID NO: 200847 - RNA, 32 nt, Homo Sapiens
uucaagaaagaagccaaaaauauuuccgugag

SEQ ID NO: 200848 - RNA, 32 nt, Homo Sapiens
auuucauugugggugcauccacagguggcccg

SEQ ID NO: 200849 - RNA, 32 nt, Homo Sapiens
uuaacauuuucaaagcacuuagaauagugucu

SEQ ID NO: 200850 - RNA, 32 nt, Homo Sapiens
ugcagcuucacuugcuggagugccaaguagau

SEQ ID NO: 200851 - RNA, 32 nt, Homo Sapiens
gaaccggaacaucagccagcuccaggcugaga

SEQ ID NO: 200852 - RNA, 32 nt, Homo Sapiens
uaaugauugucugcccauguccugccugaaau

SEQ ID NO: 200853 - RNA, 32 nt, Homo Sapiens
caggcugugcaagccccugaggucuugagaga

SEQ ID NO: 200854 - RNA, 32 nt, Homo Sapiens
acauuuuacaagauaccuuguuuccuuuauua

SEQ ID NO: 200855 - RNA, 32 nt, Homo Sapiens
uuacuucaggagacuacgacaguguagaauuu

SEQ ID NO: 200856 - RNA, 32 nt, Homo Sapiens
uuucauuuuauucuggucucagggccauacau

SEQ ID NO: 200857 - RNA, 32 nt, Homo Sapiens
cgccggcggaggaggagguggugacuggcagg

SEQ ID NO: 200858 - RNA, 32 nt, Homo Sapiens
uugcacaucauucauucacuguauaguaauca

SEQ ID NO: 200859 - RNA, 32 nt, Homo Sapiens
caaaaccagauuccgggguggggggugggggg

SEQ ID NO: 200860 - RNA, 32 nt, Homo Sapiens
caguauguauaaacuuauaagaauuaaauuga

SEQ ID NO: 200861 - RNA, 32 nt, Homo Sapiens
uaaggaacaaaauaaacccuuguguauguauc

SEQ ID NO: 200862 - RNA, 32 nt, Homo Sapiens
acaucccucgucuuguccucucuucugcacag

SEQ ID NO: 200863 - RNA, 32 nt, Homo Sapiens
cccggaagugagcggcggcagcugcgaggcuc

SEQ ID NO: 200864 - RNA, 32 nt, Homo Sapiens
gugagaacaacaacagugccuggagaauccca

SEQ ID NO: 200865 - RNA, 32 nt, Homo Sapiens
uguggaguucccuggacaccuuggucuggcuc

SEQ ID NO: 200866 - RNA, 32 nt, Homo Sapiens
uuccucucaucgaaaucagucuacaaauaaac

SEQ ID NO: 200867 - RNA, 32 nt, Homo Sapiens
cacgguuggacagguucccagcccuagguuug

SEQ ID NO: 200868 - RNA, 32 nt, Homo Sapiens
cugauaaaacaaaacagaagucagacaauguu

SEQ ID NO: 200869 - RNA, 32 nt, Homo Sapiens
gccuugcuagacagccagguuagccuuugccc

SEQ ID NO: 200870 - RNA, 32 nt, Homo Sapiens
ggcaggaggagcugcacagccugcgggccaug

SEQ ID NO: 200871 - RNA, 32 nt, Homo Sapiens
agaggggacuuccagagucaaugaacgucacc

SEQ ID NO: 200872 - RNA, 32 nt, Homo Sapiens
aauaguccucaauguugggaaaacagaugagc

SEQ ID NO: 200873 - RNA, 32 nt, Homo Sapiens
aauaaacaaaaaugugcccuauguaagcuucu

SEQ ID NO: 200874 - RNA, 32 nt, Homo Sapiens
gagacaccuuugacuagcuagcaagaaagaua

SEQ ID NO: 200875 - RNA, 32 nt, Homo Sapiens
cacucuuuuuauggauccuucauggaaacaug

SEQ ID NO: 200876 - RNA, 32 nt, Homo Sapiens
gcuucagaccagaaaugugucaucuugccagc

SEQ ID NO: 200877 - RNA, 32 nt, Homo Sapiens
agguuuaauaacuuucaagguaauucuagauu

SEQ ID NO: 200878 - RNA, 32 nt, Homo Sapiens
uuuccuuccuccuuccuccccggauuggcuug

SEQ ID NO: 200879 - RNA, 32 nt, Homo Sapiens
aacagugacuaaucagggauuaucauagauaa

SEQ ID NO: 200880 - RNA, 32 nt, Homo Sapiens
gaaauaccucaauaaagagagagcucauugac

SEQ ID NO: 200881 - RNA, 32 nt, Homo Sapiens
uccccacccuccccagguucuccucuugcaug

SEQ ID NO: 200882 - RNA, 32 nt, Homo Sapiens
aggacucuggaccuaggaaaagaggcuuuugg

SEQ ID NO: 200883 - RNA, 32 nt, Homo Sapiens
uaauguaugaaaugauuaaauaaaaucaaaac

SEQ ID NO: 200884 - RNA, 32 nt, Homo Sapiens
guuucuaugugagcaugcauauauacuucaca

SEQ ID NO: 200885 - RNA, 32 nt, Homo Sapiens
aagaagauaaaauaaauuauauacccgagcca

SEQ ID NO: 200886 - RNA, 32 nt, Homo Sapiens
augguuauuucuuuucuuucugcagcucucac

SEQ ID NO: 200887 - RNA, 32 nt, Homo Sapiens
uaccuggugagugccggcgcgcgggagggcgg

SEQ ID NO: 200888 - RNA, 32 nt, Homo Sapiens
gcaagaggaugaugcuggccuaccgcuuccgg

SEQ ID NO: 200889 - RNA, 32 nt, Homo Sapiens
cccugccccccgcugaccuucacccccacagc

SEQ ID NO: 200890 - RNA, 32 nt, Homo Sapiens
uagugugucccacccgccagccccacagauga

SEQ ID NO: 200891 - RNA, 32 nt, Homo Sapiens
guuuaaagguccaccuuugaccaucuaaaccc

SEQ ID NO: 200892 - RNA, 32 nt, Homo Sapiens
uagauguuaugaagaagaggguauuucuaguu

SEQ ID NO: 200893 - RNA, 32 nt, Homo Sapiens
uuuauuuauuuuugcuaguuuaauagguaugu

SEQ ID NO: 200894 - RNA, 32 nt, Homo Sapiens
uuucccggggcaagcauuguuucacacacucc

SEQ ID NO: 200895 - RNA, 32 nt, Homo Sapiens
cgcauccucaggcgccagccuguccaguagca

SEQ ID NO: 200896 - RNA, 32 nt, Homo Sapiens
acuucuuucugcggaaauguguguguauacuu

SEQ ID NO: 200897 - RNA, 32 nt, Homo Sapiens
cggagccauggcugcgcagcgggcuggccggg

SEQ ID NO: 200898 - RNA, 32 nt, Homo Sapiens
acauugaccacauaguuggaaguaaagcacuc

SEQ ID NO: 200899 - RNA, 32 nt, Homo Sapiens
caagacugacuuuuauuucagaauaagauucu

SEQ ID NO: 200900 - RNA, 32 nt, Homo Sapiens
aaaguauuguuuugugguccaaaccuguugcc

SEQ ID NO: 200901 - RNA, 32 nt, Homo Sapiens
guguaaaaaaauuuaaacaaguguuaacuuua

SEQ ID NO: 200902 - RNA, 32 nt, Homo Sapiens
acuuagggaaguggaagagaaagggaauuuug

SEQ ID NO: 200903 - RNA, 32 nt, Homo Sapiens
ccucagaaaccccuuaaaaugugcuuaccuuu

SEQ ID NO: 200904 - RNA, 32 nt, Homo Sapiens
ggcuaggacuuccaguauuuauugaauagaaa

SEQ ID NO: 200905 - RNA, 32 nt, Homo Sapiens
auguaacacacacacacauacacacacacaca

SEQ ID NO: 200906 - RNA, 32 nt, Homo Sapiens
ccugagaagaucuuaagcuacuccuugggcug

SEQ ID NO: 200907 - RNA, 32 nt, Homo Sapiens
ggcacgcccagaacuuauuugcuggcuguuuc

SEQ ID NO: 200908 - RNA, 32 nt, Homo Sapiens
ccauaucccagggcauaggacuugcagguucc

SEQ ID NO: 200909 - RNA, 32 nt, Homo Sapiens
gacaggcuuggccauggauccgcucucagagc

SEQ ID NO: 200910 - RNA, 32 nt, Homo Sapiens
gccggagacagcucuucaguucccauaaacuc

SEQ ID NO: 200911 - RNA, 32 nt, Homo Sapiens
cuaucaagaaugcaucucaaggggcuaggcaa

SEQ ID NO: 200912 - RNA, 32 nt, Homo Sapiens
uuuuguacuguaauaaaauagaggcuauucuu

SEQ ID NO: 200913 - RNA, 32 nt, Homo Sapiens
augaaguuauuucaaaguuaaguuuuaaacaa

SEQ ID NO: 200914 - RNA, 32 nt, Homo Sapiens
agacacacacaccagcagagacagaaacagca

SEQ ID NO: 200915 - RNA, 32 nt, Homo Sapiens
uuuuguuuuaauuuuuuuuuuaauagacggaa

SEQ ID NO: 200916 - RNA, 32 nt, Homo Sapiens
agcaaccgucuguagcaaagaagugcuuccag

SEQ ID NO: 200917 - RNA, 32 nt, Homo Sapiens
aaaaguuggggguggggggaggcugaacaaac

SEQ ID NO: 200918 - RNA, 32 nt, Homo Sapiens
auggggaacaugacuuccuuccggaguccuug

SEQ ID NO: 200919 - RNA, 32 nt, Homo Sapiens
agucggagagaauggggugagcagccaccauu

SEQ ID NO: 200920 - RNA, 32 nt, Homo Sapiens
ccagcaccccacagcccucacauccccuggcc

SEQ ID NO: 200921 - RNA, 32 nt, Homo Sapiens
cugcuguccuuuccccaacguacugggucccg

SEQ ID NO: 200922 - RNA, 32 nt, Homo Sapiens
cucaccucgcgggauggcagcugcugauuugu

SEQ ID NO: 200923 - RNA, 32 nt, Homo Sapiens
caaggacauucauucuuaauucaguagaaaag

SEQ ID NO: 200924 - RNA, 32 nt, Homo Sapiens
cuuuaccuuuuugguuuuguccugcaucacuc

SEQ ID NO: 200925 - RNA, 32 nt, Homo Sapiens
gaucaguguggacuuugcugccaacuaucuca

SEQ ID NO: 200926 - RNA, 32 nt, Homo Sapiens
gaagcagaauccaaaccaugaauuguagagaa

SEQ ID NO: 200927 - RNA, 32 nt, Homo Sapiens
cacugcaaccuccuccucccggguucaagcaa

SEQ ID NO: 200928 - RNA, 32 nt, Homo Sapiens
ccccucccuuccagauuaaccaaaaccugcua

SEQ ID NO: 200929 - RNA, 32 nt, Homo Sapiens
guggucaucacugugcaaucuacaucuaguau

SEQ ID NO: 200930 - RNA, 32 nt, Homo Sapiens
uauuaaugaggaacacugaacuaguuggaaau

SEQ ID NO: 200931 - RNA, 32 nt, Homo Sapiens
cagggagaagaacaugagguagacuuaaagaa

SEQ ID NO: 200932 - RNA, 32 nt, Homo Sapiens
guuauaaugcccuuguucccaauaaaacuggg

SEQ ID NO: 200933 - RNA, 32 nt, Homo Sapiens
gcggagguugcgacccaaagcuuaugaaagaa

SEQ ID NO: 200934 - RNA, 32 nt, Homo Sapiens
ccaaauucagagaaauugacuggccugcccgu

SEQ ID NO: 200935 - RNA, 32 nt, Homo Sapiens
uggagccugcggucggagggccuugggcaaga

SEQ ID NO: 200936 - RNA, 32 nt, Homo Sapiens
cuuucgugauauauuucauuugcaaacuucua

SEQ ID NO: 200937 - RNA, 32 nt, Homo Sapiens
cggucuuugugcuugcucuucagauggauggu

SEQ ID NO: 200938 - RNA, 32 nt, Homo Sapiens
cauaauaacuugucaagaacuuuuuagaguug

SEQ ID NO: 200939 - RNA, 32 nt, Homo Sapiens
cagaccgaccccagccuggccgccuggcaugg

SEQ ID NO: 200940 - RNA, 32 nt, Homo Sapiens
ucuauugcaauaaaaaauauuagauacucuau

SEQ ID NO: 200941 - RNA, 32 nt, Homo Sapiens
cucuuccagagccagcgccaggucuugaaugg

SEQ ID NO: 200942 - RNA, 32 nt, Homo Sapiens
cuuuguuuugaaaaaguaccuucuguggacaa

SEQ ID NO: 200943 - RNA, 32 nt, Homo Sapiens
ucccuggucuccugggaagugugaccucuucu

SEQ ID NO: 200944 - RNA, 32 nt, Homo Sapiens
ugcugaaaauaaaaacagugggguaaaauuag

SEQ ID NO: 200945 - RNA, 32 nt, Homo Sapiens
ccggguuugauuucugaugacucuggccugag

SEQ ID NO: 200946 - RNA, 32 nt, Homo Sapiens
accaaggcccagaggaaguuaagggagaguca

SEQ ID NO: 200947 - RNA, 32 nt, Homo Sapiens
gccccaguguuaaugucuuagauuuucaguau

SEQ ID NO: 200948 - RNA, 32 nt, Homo Sapiens
guuggagagaggggugaugccuggugcuggug

SEQ ID NO: 200949 - RNA, 32 nt, Homo Sapiens
uaugggagcaucugggaaagcagagcugccag

SEQ ID NO: 200950 - RNA, 32 nt, Homo Sapiens
ggcacuccacacuggggggcccugcagcucca

SEQ ID NO: 200951 - RNA, 32 nt, Homo Sapiens
cauuucugguauaguucauguagcauuguaau

SEQ ID NO: 200952 - RNA, 32 nt, Homo Sapiens
cagagccccuccccaucuuccucucucuaaaa

SEQ ID NO: 200953 - RNA, 32 nt, Homo Sapiens
uuaaaggguagagaaagagauguguggcuggg

SEQ ID NO: 200954 - RNA, 32 nt, Homo Sapiens
gcacagccugagugcuggccucugucaacccu

SEQ ID NO: 200955 - RNA, 32 nt, Homo Sapiens
gcucucacaccuacacccacgcacccccucac

SEQ ID NO: 200956 - RNA, 32 nt, Homo Sapiens
aaccacuggcauuugggggcuguuuauuauag

SEQ ID NO: 200957 - RNA, 32 nt, Homo Sapiens
gucuugcugucuguuguuguuugaaaucuguu

SEQ ID NO: 200958 - RNA, 32 nt, Homo Sapiens
cauuuagaggcauucgacgaaaacacaggaaa

SEQ ID NO: 200959 - RNA, 32 nt, Homo Sapiens
gauucuugggaagauaaauguuaauguuccca

SEQ ID NO: 200960 - RNA, 32 nt, Homo Sapiens
aacucaaaaauuuugauauuuucauuaacuug

SEQ ID NO: 200961 - RNA, 32 nt, Homo Sapiens
ugccccccacugauaagcaggcuccacccaga

SEQ ID NO: 200962 - RNA, 32 nt, Homo Sapiens
agagucgucaugucucuugagcagaagaguca

SEQ ID NO: 200963 - RNA, 32 nt, Homo Sapiens
ggagggggcgccgcggcccacccuccuuccug

SEQ ID NO: 200964 - RNA, 32 nt, Homo Sapiens
gagccagacagcccugucaauggggagggacc

SEQ ID NO: 200965 - RNA, 29 nt, Homo Sapiens
gaagcucaguguuucauagaugagacugg

SEQ ID NO: 200966 - RNA, 32 nt, Homo Sapiens
agcugagacccuagccugugccaggcagggag

SEQ ID NO: 200967 - RNA, 32 nt, Homo Sapiens
ugcgcgauggugacucugggcgcggagguugg

SEQ ID NO: 200968 - RNA, 32 nt, Homo Sapiens
aaagcaguaguuguuucuuaauugcuaaguaa

SEQ ID NO: 200969 - RNA, 32 nt, Homo Sapiens
acccucggcguuagccuucuuugugcgccguc

SEQ ID NO: 200970 - RNA, 32 nt, Homo Sapiens
ccacagccugcccuaccccaccuacccugccu

SEQ ID NO: 200971 - RNA, 32 nt, Homo Sapiens
uggguagaaaaauuauuagaacauucacuuuu

SEQ ID NO: 200972 - RNA, 32 nt, Homo Sapiens
uccccgcguucccgcguccugcgauccgccgc

SEQ ID NO: 200973 - RNA, 32 nt, Homo Sapiens
accuaaaaucaucaaagcagcaguggccucua

SEQ ID NO: 200974 - RNA, 32 nt, Homo Sapiens
cugagcgcgccugccugggaaaacacugcagc

SEQ ID NO: 200975 - RNA, 32 nt, Homo Sapiens
cuucauccagaaccucuuccucaagcaagaca

SEQ ID NO: 200976 - RNA, 32 nt, Homo Sapiens
augcugccuccagaauggucuuucuaaugugu

SEQ ID NO: 200977 - RNA, 32 nt, Homo Sapiens
uacccauccccucaauaaaguuuuuauaaagg

SEQ ID NO: 200978 - RNA, 32 nt, Homo Sapiens
ggcuugaugggagaggcuggggcagggccuua

SEQ ID NO: 200979 - RNA, 32 nt, Homo Sapiens
ggacaauauggacugcuauuuacucuugaaug

SEQ ID NO: 200980 - RNA, 32 nt, Homo Sapiens
uuccuuuuugguuuuuacuuaacuguuucaaa

SEQ ID NO: 200981 - RNA, 32 nt, Homo Sapiens
gaaauggagagacaacucuuugguucagcugg

SEQ ID NO: 200982 - RNA, 32 nt, Homo Sapiens
ccggauugccuggccagcaccacgugggccug

SEQ ID NO: 200983 - RNA, 32 nt, Homo Sapiens
ccgccgccgccugcgccgcgagaucagccccg

SEQ ID NO: 200984 - RNA, 32 nt, Homo Sapiens
ccaccgcccccugcugccccuccugcggccuc

SEQ ID NO: 200985 - RNA, 32 nt, Homo Sapiens
gucccucugaaucugagaucuaugaggcagga

SEQ ID NO: 200986 - RNA, 31 nt, Homo Sapiens
ccagccucacggaagacagcuuuaucuuguu

SEQ ID NO: 200987 - RNA, 32 nt, Homo Sapiens
uuuugccucaccaaauaccagaagggucacac

SEQ ID NO: 200988 - RNA, 32 nt, Homo Sapiens
ucucaggaguuucucuugaugaucuaccuuuu

SEQ ID NO: 200989 - RNA, 32 nt, Homo Sapiens
ccguuuggugagaagugagagaucugaugguu

SEQ ID NO: 200990 - RNA, 32 nt, Homo Sapiens
aauuguaguuuaucauuaguuuguaucuguaa

SEQ ID NO: 200991 - RNA, 32 nt, Homo Sapiens
acgagccccacccacgcgggguggcugccgug

SEQ ID NO: 200992 - RNA, 32 nt, Homo Sapiens
aaucacuugcaauuucauuguaaaaugaacaa

SEQ ID NO: 200993 - RNA, 32 nt, Homo Sapiens
agccugaccaacaugacgaaaccccgucucua

SEQ ID NO: 200994 - RNA, 32 nt, Homo Sapiens
caccuguaaucccagcacuuugggaagucaag

SEQ ID NO: 200995 - RNA, 32 nt, Homo Sapiens
aggacuuugaguuuuauccaauaggugaaaau

SEQ ID NO: 200996 - RNA, 32 nt, Homo Sapiens
cacuuguaaucccagcacuuugggaagccaag

SEQ ID NO: 200997 - RNA, 32 nt, Homo Sapiens
guuagacuuuuuaaguuuuugcugauaagagc

SEQ ID NO: 200998 - RNA, 32 nt, Homo Sapiens
uagcuuugccccagccacuuugccccaaccac

SEQ ID NO: 200999 - RNA, 32 nt, Homo Sapiens
augaugcugcggguguuugagagccuuugacc

SEQ ID NO: 201000 - RNA, 32 nt, Homo Sapiens
cuucaaugccacggccugaccggaguauccgc

SEQ ID NO: 201001 - RNA, 32 nt, Homo Sapiens
aacuugauauucaaaugaaacucccugggaaa

SEQ ID NO: 201002 - RNA, 32 nt, Homo Sapiens
aagcacagcagguuuauccagaugaacugaga

SEQ ID NO: 201003 - RNA, 32 nt, Homo Sapiens
ucacuaaaauuuguaaggaaauaaugagcuag

SEQ ID NO: 201004 - RNA, 32 nt, Homo Sapiens
cacccaccccuaccuggaauggaggcugggag

SEQ ID NO: 201005 - RNA, 32 nt, Homo Sapiens
agcuccauuuccccuccuccucucuaccagac

SEQ ID NO: 201006 - RNA, 32 nt, Homo Sapiens
cgcuuguaaucccagcacuuugggaggccaag

SEQ ID NO: 201007 - RNA, 32 nt, Homo Sapiens
ggucuggcggacgcgucccaccccaggcucuc

SEQ ID NO: 201008 - RNA, 32 nt, Homo Sapiens
uguuauuucuaaaaggaacugcauaccaaaaa

SEQ ID NO: 201009 - RNA, 32 nt, Homo Sapiens
cccaggcucagggacucuggugccaaauccag

SEQ ID NO: 201010 - RNA, 32 nt, Homo Sapiens
aggugccggggaagaggggccaggccuggggg

SEQ ID NO: 201011 - RNA, 32 nt, Homo Sapiens
aauugcaguuucacaagguuuacuuuuuaaag

SEQ ID NO: 201012 - RNA, 32 nt, Homo Sapiens
acaacaacaacaaacccuuggggaauauuauu

SEQ ID NO: 201013 - RNA, 32 nt, Homo Sapiens
aacuuccugucccauuuagugaaacaaaaggu

SEQ ID NO: 201014 - RNA, 32 nt, Homo Sapiens
gacuaguguucuuauuaguauauugcuucaca

SEQ ID NO: 201015 - RNA, 32 nt, Homo Sapiens
cgccuguaaucccagcacuuugggaggucaag

SEQ ID NO: 201016 - RNA, 32 nt, Homo Sapiens
gcuucccgcccggugcccagggguaggcggcc

SEQ ID NO: 201017 - RNA, 32 nt, Homo Sapiens
cugaaaacugaaugucaagaaaaggagucaag

SEQ ID NO: 201018 - RNA, 32 nt, Homo Sapiens
cccagccccggcugugucuacuccaggccaag

SEQ ID NO: 201019 - RNA, 32 nt, Homo Sapiens
gcauggaaaaauacugccuagaaaaugcaaaa

SEQ ID NO: 201020 - RNA, 32 nt, Homo Sapiens
cugcagcugugccguccacaccucuaggucgc

SEQ ID NO: 201021 - RNA, 32 nt, Homo Sapiens
ucugugagggucagaccuguccugaggcuuuu

SEQ ID NO: 201022 - RNA, 32 nt, Homo Sapiens
gccuguuuggggauuuggcuacgaucuccuuc

SEQ ID NO: 201023 - RNA, 32 nt, Homo Sapiens
cauucacaaugaaaaguuuauuuuaaacauug

SEQ ID NO: 201024 - RNA, 32 nt, Homo Sapiens
ccaauguuugucagagaaaaauccccagcagu

SEQ ID NO: 201025 - RNA, 32 nt, Homo Sapiens
ugaaauaaauuaaagggauaacgugucaagcc

SEQ ID NO: 201026 - RNA, 32 nt, Homo Sapiens
guccaggggcgguggcucacgccuguaauccc

SEQ ID NO: 201027 - RNA, 32 nt, Homo Sapiens
caacugauuucuuguccaaugauccuugcgug

SEQ ID NO: 201028 - RNA, 32 nt, Homo Sapiens
gggaagcgguuggcugguguuggaccuggugc

SEQ ID NO: 201029 - RNA, 32 nt, Homo Sapiens
ggcuuaaaaagaaagccaaaccacuguacuua

SEQ ID NO: 201030 - RNA, 32 nt, Homo Sapiens
aaauacagcuguaccccgcgggcccuuagcac

SEQ ID NO: 201031 - RNA, 32 nt, Homo Sapiens
cacggagcugauggagucagugauggacguug

SEQ ID NO: 201032 - RNA, 32 nt, Homo Sapiens
cuccuggcugcaauaacaaacaucuuugaugu

SEQ ID NO: 201033 - RNA, 32 nt, Homo Sapiens
uucucuucauugcugcuucucagcauuuucuu

SEQ ID NO: 201034 - RNA, 32 nt, Homo Sapiens
ccgacucggccucccaaagagcuggaauuaca

SEQ ID NO: 201035 - RNA, 32 nt, Homo Sapiens
gcuaccuguggccugcgccgcgcgggcaggca

SEQ ID NO: 201036 - RNA, 32 nt, Homo Sapiens
aauaucauccuuauaacagguacauuuucaac

SEQ ID NO: 201037 - RNA, 32 nt, Homo Sapiens
uggccaugcuucagacacgagacccaccaagg

SEQ ID NO: 201038 - RNA, 32 nt, Homo Sapiens
aggccccgcgcgcagcugccgcgcucugcacc

SEQ ID NO: 201039 - RNA, 32 nt, Homo Sapiens
uugccagccucuuccuuggggguggcuaccuc

SEQ ID NO: 201040 - RNA, 32 nt, Homo Sapiens
aauggucaguaccagcccuuguccucugccug

SEQ ID NO: 201041 - RNA, 32 nt, Homo Sapiens
gagcagugcaugcuuuggguuaugacauuuaa

SEQ ID NO: 201042 - RNA, 32 nt, Homo Sapiens
cagcccucaugccccagagggcgaaguggucu

SEQ ID NO: 201043 - RNA, 32 nt, Homo Sapiens
aaaugccaagcacuucuuuuucucgcuguccu

SEQ ID NO: 201044 - RNA, 32 nt, Homo Sapiens
guagcuggaauuacaagcaugcacugcuaugc

SEQ ID NO: 201045 - RNA, 32 nt, Homo Sapiens
uuuguaugcuaaggaagugcuacgaugccauc

SEQ ID NO: 201046 - RNA, 32 nt, Homo Sapiens
cgccagcugcucguccccgccggcgucugugg

SEQ ID NO: 201047 - RNA, 32 nt, Homo Sapiens
cauguuguaaaauaaauguuuacuguugaaau

SEQ ID NO: 201048 - RNA, 32 nt, Homo Sapiens
ugcacaaggacacguugggcucacaggaggag

SEQ ID NO: 201049 - RNA, 32 nt, Homo Sapiens
acaaugcccaaaacagaagauacaguuaggaa

SEQ ID NO: 201050 - RNA, 32 nt, Homo Sapiens
gagcaggaaauuuauaagaaauugaaagagca

SEQ ID NO: 201051 - RNA, 30 nt, Homo Sapiens
acucgguaugaucuggacaagaguuguagu

SEQ ID NO: 201052 - RNA, 32 nt, Homo Sapiens
ccccccgccgccuccuucucgcccuccgaggu

SEQ ID NO: 201053 - RNA, 32 nt, Homo Sapiens
caucagccaacccaccacgaguaaaacgcccu

SEQ ID NO: 201054 - RNA, 32 nt, Homo Sapiens
gacaaaaugggaggagggguagccagaccaua

SEQ ID NO: 201055 - RNA, 32 nt, Homo Sapiens
caaaugaaagagaaaauauauauuuuuaaugg

SEQ ID NO: 201056 - RNA, 32 nt, Homo Sapiens
gugcugcagugaacagaagagacaaaauaucc

SEQ ID NO: 201057 - RNA, 32 nt, Homo Sapiens
gaaagacuaggaugugauuuauuaacgaccaa

SEQ ID NO: 201058 - RNA, 32 nt, Homo Sapiens
caacuguuucuagaugcuuccaagaacaagaa

SEQ ID NO: 201059 - RNA, 32 nt, Homo Sapiens
gauuaccuuucugcuccugaaucgcaccugug

SEQ ID NO: 201060 - RNA, 32 nt, Homo Sapiens
gggcggggcgccagccauggacaaucagugca

SEQ ID NO: 201061 - RNA, 32 nt, Homo Sapiens
aaacaaaacugggcacagagaaucagcuagga

SEQ ID NO: 201062 - RNA, 32 nt, Homo Sapiens
aggcggagguggcaaauaaaccugggcaauuu

SEQ ID NO: 201063 - RNA, 32 nt, Homo Sapiens
uuggccucgacacuggcugccaagaagaccug

SEQ ID NO: 201064 - RNA, 32 nt, Homo Sapiens
uauuuguguuuuuauuucaaguaagucauuuu

SEQ ID NO: 201065 - RNA, 32 nt, Homo Sapiens
gaccagacacuggggcagcaucaggcacaguc

SEQ ID NO: 201066 - RNA, 32 nt, Homo Sapiens
ugggcccugcccagccccggaacucugcgcga

SEQ ID NO: 201067 - RNA, 30 nt, Homo Sapiens
cagagccaugcucugcacucuggggucagc

SEQ ID NO: 201068 - RNA, 32 nt, Homo Sapiens
aaaacaucaaaaccaagauggcgacaaaagug

SEQ ID NO: 201069 - RNA, 32 nt, Homo Sapiens
accucacaggauuuuucuucucuucccuuuga

SEQ ID NO: 201070 - RNA, 32 nt, Homo Sapiens
uuuuugauuaaagaugcuauuacaauguaaau

SEQ ID NO: 201071 - RNA, 27 nt, Homo Sapiens
caaaacuccuucuuuugucuuugauua

SEQ ID NO: 201072 - RNA, 32 nt, Homo Sapiens
auucaggaaaucaaaucagucuuccggucugc

SEQ ID NO: 201073 - RNA, 32 nt, Homo Sapiens
ccacuuuuuuauugcacuggcuugaauacagu

SEQ ID NO: 201074 - RNA, 32 nt, Homo Sapiens
uggccucaagcacuccacccaccucggccucc

SEQ ID NO: 201075 - RNA, 32 nt, Homo Sapiens
uaagcuuagcuacuauuuccaauugcuucccc

SEQ ID NO: 201076 - RNA, 32 nt, Homo Sapiens
uagguucaggggguacaugugcagguuuguua

SEQ ID NO: 201077 - RNA, 32 nt, Homo Sapiens
agcaaacugucauauugauguggcucuaaaca

SEQ ID NO: 201078 - RNA, 32 nt, Homo Sapiens
ucaaaaagcugauauucauaauuugagaagca

SEQ ID NO: 201079 - RNA, 27 nt, Homo Sapiens
cuaaugaaauaaaauguauuuaugacc

SEQ ID NO: 201080 - RNA, 32 nt, Homo Sapiens
cugagaaaugcgcuguugauaagaucaucgau

SEQ ID NO: 201081 - RNA, 30 nt, Homo Sapiens
aagcguguggacugcagcuucugcuggugc

SEQ ID NO: 201082 - RNA, 32 nt, Homo Sapiens
ugagaggcggguggguguuaguucagaggguu

SEQ ID NO: 201083 - RNA, 32 nt, Homo Sapiens
uaaagagaagaaaaaacagaagaacuuuauga

SEQ ID NO: 201084 - RNA, 32 nt, Homo Sapiens
uaugaccguuugcagucugagcaggccagggg

SEQ ID NO: 201085 - RNA, 32 nt, Homo Sapiens
gcggggcagcgcggggucgccauggcugagcu

SEQ ID NO: 201086 - RNA, 32 nt, Homo Sapiens
uaaaugacuucauugggaauauugagcagagg

SEQ ID NO: 201087 - RNA, 32 nt, Homo Sapiens
gauguuccaaaaacccaaguagucagucccuu

SEQ ID NO: 201088 - RNA, 32 nt, Homo Sapiens
uuguuuggacggcagccccacugcacauaaca

SEQ ID NO: 201089 - RNA, 32 nt, Homo Sapiens
gccccaggcuccugugcuggcgguucugagaa

SEQ ID NO: 201090 - RNA, 32 nt, Homo Sapiens
uuaggaugucauucuuugcaguucuucaucau

SEQ ID NO: 201091 - RNA, 32 nt, Homo Sapiens
gucggcgggacggugaggaagggggaggcagc

SEQ ID NO: 201092 - RNA, 32 nt, Homo Sapiens
aguccaacuggaaacagaaaaauauuuaaaga

SEQ ID NO: 201093 - RNA, 32 nt, Homo Sapiens
ccucggaagggcuccccaggauguguacucgu

SEQ ID NO: 201094 - RNA, 32 nt, Homo Sapiens
ucaggggcugucaaagugacugcguucaucag

SEQ ID NO: 201095 - RNA, 32 nt, Homo Sapiens
auuugagaaaaaagguuacuuuguuauucagc

SEQ ID NO: 201096 - RNA, 32 nt, Homo Sapiens
cgccuucagcuacuccagguagccccguagca

SEQ ID NO: 201097 - RNA, 32 nt, Homo Sapiens
ccagccuggggagaggucgcggcggcggguuu

SEQ ID NO: 201098 - RNA, 32 nt, Homo Sapiens
gagauuccggugccuccugaaagccuggccug

SEQ ID NO: 201099 - RNA, 32 nt, Homo Sapiens
acauccaggugggaggugucagagcccagcuc

SEQ ID NO: 201100 - RNA, 31 nt, Homo Sapiens
guuuuagacugcugcgcuccaaagcgggcac

SEQ ID NO: 201101 - RNA, 32 nt, Homo Sapiens
gugaaucagcaugucacauuccacuaaaagau

SEQ ID NO: 201102 - RNA, 32 nt, Homo Sapiens
uuaucacgaugauuauuccagacacaaaggaa

SEQ ID NO: 201103 - RNA, 32 nt, Homo Sapiens
acaaucugggagacauaauuuugcaaagcaga

SEQ ID NO: 201104 - RNA, 32 nt, Homo Sapiens
ucgcgacauguccaccccggcucggcggcgcc

SEQ ID NO: 201105 - RNA, 32 nt, Homo Sapiens
aaggcagggugcacagguggcuccagucucag

SEQ ID NO: 201106 - RNA, 32 nt, Homo Sapiens
ugauaggcauuuucuuuuuguuuuuuugagau

SEQ ID NO: 201107 - RNA, 32 nt, Homo Sapiens
uaaucccuggguuuuguuucuauuuguaguuu

SEQ ID NO: 201108 - RNA, 32 nt, Homo Sapiens
guguuucauacuuucugguuuuacacaucgcu

SEQ ID NO: 201109 - RNA, 32 nt, Homo Sapiens
acugcucucugcugcccucccauccucccugu

SEQ ID NO: 201110 - RNA, 32 nt, Homo Sapiens
uuaaauuaaacuaauauggcagguuauaauga

SEQ ID NO: 201111 - RNA, 32 nt, Homo Sapiens
acgggauaguguuucuguuuccguggucuuug

SEQ ID NO: 201112 - RNA, 32 nt, Homo Sapiens
cguccucgcucccgcgcuccccgcgccccgga

SEQ ID NO: 201113 - RNA, 32 nt, Homo Sapiens
agugucuuaacaccagaugcuacuuuuuacug

SEQ ID NO: 201114 - RNA, 31 nt, Homo Sapiens
ugugggugcuaacaccucagagcuguccucu

SEQ ID NO: 201115 - RNA, 32 nt, Homo Sapiens
uucugccccuuuuaaccugauguguaccuuac

SEQ ID NO: 201116 - RNA, 32 nt, Homo Sapiens
augcaagaagugggcaggacuuggacaaacuu

SEQ ID NO: 201117 - RNA, 32 nt, Homo Sapiens
uccacccgccgucucggccgcggccagcagcc

SEQ ID NO: 201118 - RNA, 32 nt, Homo Sapiens
cagcaauaacuggcagcauggcauaccugcag

SEQ ID NO: 201119 - RNA, 32 nt, Homo Sapiens
ggggcaccccucugccuccccccacccucccu

SEQ ID NO: 201120 - RNA, 32 nt, Homo Sapiens
cacgcguccggccgcucggcccgggggcuucg

SEQ ID NO: 201121 - RNA, 32 nt, Homo Sapiens
gacuuuuucuaaauuuagcuuuauuuuucaua

SEQ ID NO: 201122 - RNA, 32 nt, Homo Sapiens
ucuacaaagcaucugauuuuggaaguacaugg

SEQ ID NO: 201123 - RNA, 32 nt, Homo Sapiens
cauuuuuccuucccauuauuuaugcauguaaa

SEQ ID NO: 201124 - RNA, 32 nt, Homo Sapiens
augcuccaagucugucaacgggagggcagcag

SEQ ID NO: 201125 - RNA, 32 nt, Homo Sapiens
cgcgggccguugggguucggagcuucguggga

SEQ ID NO: 201126 - RNA, 32 nt, Homo Sapiens
guauuuuugaauaaaaaacauuuguacauucc

SEQ ID NO: 201127 - RNA, 32 nt, Homo Sapiens
acacugcuucaauucuaauuuauuuuucauuu

SEQ ID NO: 201128 - RNA, 32 nt, Homo Sapiens
gaaugugacaaggccuuuagugugcucaacuc

SEQ ID NO: 201129 - RNA, 32 nt, Homo Sapiens
auuuggaguauuuuuuaaaugcuguaucuuua

SEQ ID NO: 201130 - RNA, 32 nt, Homo Sapiens
ucauauuggacuuuuuacaucccuuuuuuagc

SEQ ID NO: 201131 - RNA, 32 nt, Homo Sapiens
uucaguaaauguuuguugaaugaaugcauguc

SEQ ID NO: 201132 - RNA, 32 nt, Homo Sapiens
uucacucuacgguaaaaagauucccuuauuua

SEQ ID NO: 201133 - RNA, 32 nt, Homo Sapiens
ucugggagccuggccucagcaaggggccuucc

SEQ ID NO: 201134 - RNA, 32 nt, Homo Sapiens
cccggcagggcggagaggagcggccggaguca

SEQ ID NO: 201135 - RNA, 32 nt, Homo Sapiens
acagcuaccccggcccgggcucuggaggcccc

SEQ ID NO: 201136 - RNA, 32 nt, Homo Sapiens
aaugccaguugucugaaaaaucuuauaagguu

SEQ ID NO: 201137 - RNA, 32 nt, Homo Sapiens
uuaagguacaagcagaacaauaccaauagauu

SEQ ID NO: 201138 - RNA, 32 nt, Homo Sapiens
auuucacuguagagagguuaaauaucaugugu

SEQ ID NO: 201139 - RNA, 32 nt, Homo Sapiens
gccccucgcucuugcuggcagggcagcagggg

SEQ ID NO: 201140 - RNA, 32 nt, Homo Sapiens
cuucauuacaucaaaucaacacugcuccaugg

SEQ ID NO: 201141 - RNA, 32 nt, Homo Sapiens
cugagggcggggugcuggcccaaaggcagggc

SEQ ID NO: 201142 - RNA, 32 nt, Homo Sapiens
cuguaugcugagcugguaaaauacauuguaaa

SEQ ID NO: 201143 - RNA, 32 nt, Homo Sapiens
cugugcagccgcgggcccagggugcuguuggu

SEQ ID NO: 201144 - RNA, 32 nt, Homo Sapiens
cuuugccugggaacugguccuuguuugccggg

SEQ ID NO: 201145 - RNA, 32 nt, Homo Sapiens
augcccacaaaacagguuuauuuuuaaauuuu

SEQ ID NO: 201146 - RNA, 32 nt, Homo Sapiens
acaauauucuuuauuccuaucuaguauacuag

SEQ ID NO: 201147 - RNA, 31 nt, Homo Sapiens
aagaaggcgucgaggcugucugaggaggagc

SEQ ID NO: 201148 - RNA, 32 nt, Homo Sapiens
cugaccaucagcugcgucuuccacguggccug

SEQ ID NO: 201149 - RNA, 32 nt, Homo Sapiens
aaaagacaaaaauuacagugugaacaagagaa

SEQ ID NO: 201150 - RNA, 32 nt, Homo Sapiens
cuaacagaaaaauagaauaaaauguugauaag

SEQ ID NO: 201151 - RNA, 32 nt, Homo Sapiens
ggaggacugggugcgcgugcagggaucggaag

SEQ ID NO: 201152 - RNA, 32 nt, Homo Sapiens
aaggcaucaaggacaucccgaaacuggaaauu

SEQ ID NO: 201153 - RNA, 32 nt, Homo Sapiens
uaggaugcccuauugcugucuuucuagauuua

SEQ ID NO: 201154 - RNA, 32 nt, Homo Sapiens
aaugacauuucuaguaauauguuuccuuuggc

SEQ ID NO: 201155 - RNA, 32 nt, Homo Sapiens
uguuccagccccaccccacccucaaccacuuc

SEQ ID NO: 201156 - RNA, 32 nt, Homo Sapiens
ccgacgcugcuccuccucccgauuccaucugc

SEQ ID NO: 201157 - RNA, 32 nt, Homo Sapiens
ugugcuuuauuauggccuuguuuauauaucac

SEQ ID NO: 201158 - RNA, 32 nt, Homo Sapiens
gcccaccgccucccaccacaccugccaccugu

SEQ ID NO: 201159 - RNA, 32 nt, Homo Sapiens
ccgcggccacacgcgguggcaugcauggagga

SEQ ID NO: 201160 - RNA, 32 nt, Homo Sapiens
cuccagggugcacggggauggggggugaggag

SEQ ID NO: 201161 - RNA, 32 nt, Homo Sapiens
aaguaugcauuaccgcguggcuugcgaugucc

SEQ ID NO: 201162 - RNA, 32 nt, Homo Sapiens
cucaguagcaucccauuuuguaaaaugaauuc

SEQ ID NO: 201163 - RNA, 32 nt, Homo Sapiens
gagaguugcaguccucuucaagcuguuaucau

SEQ ID NO: 201164 - RNA, 32 nt, Homo Sapiens
guugcagaaaucagacacuuuauaugcauaaa

SEQ ID NO: 201165 - RNA, 32 nt, Homo Sapiens
gaacggucgaggacaggaagugagucaucaca

SEQ ID NO: 201166 - RNA, 32 nt, Homo Sapiens
acacagccaggaucagucauggagccaugaua

SEQ ID NO: 201167 - RNA, 32 nt, Homo Sapiens
gucacuugucacaacuaacaggcuuucaccuc

SEQ ID NO: 201168 - RNA, 32 nt, Homo Sapiens
aaggacuucuaacaauaaacucucuuuugcac

SEQ ID NO: 201169 - RNA, 32 nt, Homo Sapiens
gugccaucacccgcuacaugaccugcuccuga

SEQ ID NO: 201170 - RNA, 32 nt, Homo Sapiens
gaacacauuuucacaguuauguuucuucauag

SEQ ID NO: 201171 - RNA, 32 nt, Homo Sapiens
uccguucaccccaccccaccccaccucucccc

SEQ ID NO: 201172 - RNA, 32 nt, Homo Sapiens
gugugaggccccagccuggagccaggcacugg

SEQ ID NO: 201173 - RNA, 32 nt, Homo Sapiens
ggguucugaggggagacugagguccugagccg

SEQ ID NO: 201174 - RNA, 32 nt, Homo Sapiens
auuuuaaaacaaauaugcacagaaaauaaaca

SEQ ID NO: 201175 - RNA, 32 nt, Homo Sapiens
uggccagggcggggccguggacagggagguga

SEQ ID NO: 201176 - RNA, 32 nt, Homo Sapiens
ugccaccaagguuuccucucuucccccaggac

SEQ ID NO: 201177 - RNA, 32 nt, Homo Sapiens
uacaacccaagccauuccacccccuccccugc

SEQ ID NO: 201178 - RNA, 32 nt, Homo Sapiens
uugcugugccgcuuuuuuagggcucacacauu

SEQ ID NO: 201179 - RNA, 32 nt, Homo Sapiens
uccccagugucagcaacagcacuuccuucgug

SEQ ID NO: 201180 - RNA, 32 nt, Homo Sapiens
gcaggacgugagcgcagagcagagccuggaga

SEQ ID NO: 201181 - RNA, 32 nt, Homo Sapiens
cucuacaaaaauacaaaaauuagccaggcgug

SEQ ID NO: 201182 - RNA, 31 nt, Homo Sapiens
cauaccuauguacacacacaagauugcauua

SEQ ID NO: 201183 - RNA, 32 nt, Homo Sapiens
ccacgcaggggagaccagggcugggguuuaag

SEQ ID NO: 201184 - RNA, 32 nt, Homo Sapiens
guaguccuuuucccuuucuccagucggcccac

SEQ ID NO: 201185 - RNA, 32 nt, Homo Sapiens
aaaucuaaaacaauuaagagauaauaugauag

SEQ ID NO: 201186 - RNA, 32 nt, Homo Sapiens
uuuuagcuccagccacaggggccacagcccag

SEQ ID NO: 201187 - RNA, 32 nt, Homo Sapiens
caacuauugcuagaaaaaugggaacuacgaug

SEQ ID NO: 201188 - RNA, 32 nt, Homo Sapiens
ccaaagcaguauuuauacuauuguaaacaacu

SEQ ID NO: 201189 - RNA, 32 nt, Homo Sapiens
uuugagaauuuguaaaugaacaguccaauauu

SEQ ID NO: 201190 - RNA, 32 nt, Homo Sapiens
gauguuagauucaaaucagcauugaguucagu

SEQ ID NO: 201191 - RNA, 32 nt, Homo Sapiens
cccuaagcugggaagccuggaaugaccucuug

SEQ ID NO: 201192 - RNA, 32 nt, Homo Sapiens
uagacuaauuuucgauuuucuuucuugaaaua

SEQ ID NO: 201193 - RNA, 32 nt, Homo Sapiens
agggggaugacaugugacuccuaugaucucag

SEQ ID NO: 201194 - RNA, 32 nt, Homo Sapiens
uccucaccuccaccaccccuuugcacaucagc

SEQ ID NO: 201195 - RNA, 32 nt, Homo Sapiens
ccuccgacccauaccuucuccccacagccucu

SEQ ID NO: 201196 - RNA, 32 nt, Homo Sapiens
gugccgccccggggcaagggccccagcagccc

SEQ ID NO: 201197 - RNA, 32 nt, Homo Sapiens
gguggcuccagccagcucugccccacagggaa

SEQ ID NO: 201198 - RNA, 32 nt, Homo Sapiens
aaacuucuuuggggcuugucuugagacguggc

SEQ ID NO: 201199 - RNA, 32 nt, Homo Sapiens
cauucuagcugagaagcaaugggucacucauu

SEQ ID NO: 201200 - RNA, 32 nt, Homo Sapiens
agcuccugccagcccauccuucugcagaaugu

SEQ ID NO: 201201 - RNA, 32 nt, Homo Sapiens
ccucaaagcguauuuuugugaaaucuuuuaag

SEQ ID NO: 201202 - RNA, 32 nt, Homo Sapiens
augaaaugcauguuuagugagcacuaauacaa

SEQ ID NO: 201203 - RNA, 32 nt, Homo Sapiens
cggaagcggagcaaggucgaggccggguuggc

SEQ ID NO: 201204 - RNA, 32 nt, Homo Sapiens
auaaagacuuuuuaauuuuaaaaaaaacaaaa

SEQ ID NO: 201205 - RNA, 31 nt, Homo Sapiens
uuuuugagcagcaccugaagagccugaagcu

SEQ ID NO: 201206 - RNA, 32 nt, Homo Sapiens
ucaacuaaguucacggcaaaaugucauuguuc

SEQ ID NO: 201207 - RNA, 32 nt, Homo Sapiens
ucuuucaugugggcuaaugugaggauaaucuu

SEQ ID NO: 201208 - RNA, 32 nt, Homo Sapiens
gugagaguaacguaccguauggucauuguucu

SEQ ID NO: 201209 - RNA, 32 nt, Homo Sapiens
agagcgacaaggaaaaguuaggacuccugagg

SEQ ID NO: 201210 - RNA, 32 nt, Homo Sapiens
ggcggagggcgcgucggguuuggcccagcuuc

SEQ ID NO: 201211 - RNA, 32 nt, Homo Sapiens
caagucggcuguggagaugcggaaagcccuga

SEQ ID NO: 201212 - RNA, 32 nt, Homo Sapiens
acagcugucgcccaucggagaggcaggacuac

SEQ ID NO: 201213 - RNA, 32 nt, Homo Sapiens
cuccccuaaugcgggggcuggaccaggcugag

SEQ ID NO: 201214 - RNA, 32 nt, Homo Sapiens
gacagagaagguggcgaccagcccagaagagg

SEQ ID NO: 201215 - RNA, 32 nt, Homo Sapiens
aucucauaucaacaaaagccuuugaaacaugg

SEQ ID NO: 201216 - RNA, 32 nt, Homo Sapiens
gaccaagagcucucccgccuucucccucgagc

SEQ ID NO: 201217 - RNA, 32 nt, Homo Sapiens
cucugcaugucauacagcaagauggaacacag

SEQ ID NO: 201218 - RNA, 32 nt, Homo Sapiens
uuuuuuuccacuuuuuuaaaaaaugcacuacu

SEQ ID NO: 201219 - RNA, 32 nt, Homo Sapiens
gccauccuuggcgggauccuuucuaaggagcc

SEQ ID NO: 201220 - RNA, 28 nt, Homo Sapiens
uaaagggggaggcauauuauaaaaugcu

SEQ ID NO: 201221 - RNA, 32 nt, Homo Sapiens
ugaaugucggcggcgcugggguugcagggaaa

SEQ ID NO: 201222 - RNA, 32 nt, Homo Sapiens
auuaguguauauuuuccaaccuugaggcauga

SEQ ID NO: 201223 - RNA, 32 nt, Homo Sapiens
ccgacuggaaaacuauuaagugauccucaaag

SEQ ID NO: 201224 - RNA, 28 nt, Homo Sapiens
gcaagaucagauuaacauuucagaaaaa

SEQ ID NO: 201225 - RNA, 32 nt, Homo Sapiens
ggagaaguacaagacacuguugaaagaaauca

SEQ ID NO: 201226 - RNA, 32 nt, Homo Sapiens
agguggcccagggcugcaccccggcggccucg

SEQ ID NO: 201227 - RNA, 32 nt, Homo Sapiens
gugagccaccgcgcccggcccauacuucguau

SEQ ID NO: 201228 - RNA, 32 nt, Homo Sapiens
auccuuaacaaaugcccaagccaugguuaaag

SEQ ID NO: 201229 - RNA, 32 nt, Homo Sapiens
aucucacagcgcgcagagacugcagccuccca

SEQ ID NO: 201230 - RNA, 32 nt, Homo Sapiens
auuugagaaugcuucaaucauauuuuccuaug

SEQ ID NO: 201231 - RNA, 32 nt, Homo Sapiens
cuagacucugaaguuucuuucuuucauagagc

SEQ ID NO: 201232 - RNA, 32 nt, Homo Sapiens
augccugguaagcaguggcuccucuaacaagu

SEQ ID NO: 201233 - RNA, 32 nt, Homo Sapiens
ucaggaaaaacgcagggaacagagucuuaaag

SEQ ID NO: 201234 - RNA, 32 nt, Homo Sapiens
ucggaccccuucgaggccccaggggucuccac

SEQ ID NO: 201235 - RNA, 32 nt, Homo Sapiens
uagauaguauauuagcagcaugcaauaauuac

SEQ ID NO: 201236 - RNA, 32 nt, Homo Sapiens
aacaagcucacaucuuccugugggaaaccuuc

SEQ ID NO: 201237 - RNA, 32 nt, Homo Sapiens
aacauaagauaaaauuuguuguaucuaaguuc

SEQ ID NO: 201238 - RNA, 32 nt, Homo Sapiens
gccaccgaccccacccccugccuggaaacuua

SEQ ID NO: 201239 - RNA, 32 nt, Homo Sapiens
cgaguauuacacaaccaacaaaaccgcaaaau

SEQ ID NO: 201240 - RNA, 32 nt, Homo Sapiens
uggcggccgcccugcuccugcugcgucgugag

SEQ ID NO: 201241 - RNA, 32 nt, Homo Sapiens
ccuucaccgcugcuggggcacacacacacaca

SEQ ID NO: 201242 - RNA, 32 nt, Homo Sapiens
acacucgaggucgggcagcacaaguguaauga

SEQ ID NO: 201243 - RNA, 32 nt, Homo Sapiens
gacggguggagaucgcguucccugcccgccga

SEQ ID NO: 201244 - RNA, 32 nt, Homo Sapiens
ccgaggaggaagagguugauggcggcggcgga

SEQ ID NO: 201245 - RNA, 32 nt, Homo Sapiens
cuaagacauuuuaaaguaauuaugagaaacgc

SEQ ID NO: 201246 - RNA, 32 nt, Homo Sapiens
ucaaccucucuaugaauggcacaccuuaguca

SEQ ID NO: 201247 - RNA, 32 nt, Homo Sapiens
aaucuuuagaacuuaaauuuuucucguuuagu

SEQ ID NO: 201248 - RNA, 32 nt, Homo Sapiens
gaugaugguuucacuucagucuuccccauccc

SEQ ID NO: 201249 - RNA, 32 nt, Homo Sapiens
gggccuccaugugcgugcgggcgguggcgggc

SEQ ID NO: 201250 - RNA, 32 nt, Homo Sapiens
ucugggcauuaagucaguggcuuugcauagcu

SEQ ID NO: 201251 - RNA, 32 nt, Homo Sapiens
uuuacaagcgggauggauuucucuaaggcaga

SEQ ID NO: 201252 - RNA, 32 nt, Homo Sapiens
auacuucagaugcacauaggaauagaagugug

SEQ ID NO: 201253 - RNA, 32 nt, Homo Sapiens
gccgggagcagucgccgcugccgccuccgccc

SEQ ID NO: 201254 - RNA, 32 nt, Homo Sapiens
ggcuagucuugaacuccugaccucaagugauc

SEQ ID NO: 201255 - RNA, 32 nt, Homo Sapiens
auucauuaaggguaacaccaaaccacuaaaca

SEQ ID NO: 201256 - RNA, 32 nt, Homo Sapiens
uacuugaauuaucucauguuggcacuucuaag

SEQ ID NO: 201257 - RNA, 32 nt, Homo Sapiens
aacagggccaagaaaacugcugcugcaggggg

SEQ ID NO: 201258 - RNA, 32 nt, Homo Sapiens
ggcuggucuugaacuccugaccucaaguaauc

SEQ ID NO: 201259 - RNA, 32 nt, Homo Sapiens
uucagggaaaaacagagaaacuguuccaauua

SEQ ID NO: 201260 - RNA, 32 nt, Homo Sapiens
ccuguuuuuuaaaguuucaccugugaaguagg

SEQ ID NO: 201261 - RNA, 32 nt, Homo Sapiens
cagagccccugccugccccaggggagccagaa

SEQ ID NO: 201262 - RNA, 32 nt, Homo Sapiens
ggcuggugcuuugggagagaguagcaaggaga

SEQ ID NO: 201263 - RNA, 32 nt, Homo Sapiens
gauaugucugcacuuugaggucccuuuugaau

SEQ ID NO: 201264 - RNA, 29 nt, Homo Sapiens
gcaaaugugacuuucugucugcugccugg

SEQ ID NO: 201265 - RNA, 32 nt, Homo Sapiens
cuagaaccuggcuccccuccccuccggagcuc

SEQ ID NO: 201266 - RNA, 32 nt, Homo Sapiens
cugagaugagaggaucacuugagccuggggag

SEQ ID NO: 201267 - RNA, 32 nt, Homo Sapiens
gccgcgcucccucccuaccugggugcccuccc

SEQ ID NO: 201268 - RNA, 32 nt, Homo Sapiens
uuuuuuuuuuuuucuuuuuuggugugaaggug

SEQ ID NO: 201269 - RNA, 32 nt, Homo Sapiens
aaauauagccacugccuauaggcucuucagca

SEQ ID NO: 201270 - RNA, 32 nt, Homo Sapiens
ucuaaagcucuuucgauuuuauacugauuaaa

SEQ ID NO: 201271 - RNA, 30 nt, Homo Sapiens
aaaacaugucucgaagauaugacuccagga

SEQ ID NO: 201272 - RNA, 32 nt, Homo Sapiens
acacacaccugauuuaacaacaucucguuauc

SEQ ID NO: 201273 - RNA, 32 nt, Homo Sapiens
auaucugaagauaaugaugacuuuuuaaugua

SEQ ID NO: 201274 - RNA, 32 nt, Homo Sapiens
aaauuagccggauguggugacacacaccugua

SEQ ID NO: 201275 - RNA, 32 nt, Homo Sapiens
uucuguccucaauaacacagccauuauugcca

SEQ ID NO: 201276 - RNA, 32 nt, Homo Sapiens
uccccggagcccacucaccuuuuuucuuuuuc

SEQ ID NO: 201277 - RNA, 32 nt, Homo Sapiens
uuuuugguaggggacagagucucacuauuauc

SEQ ID NO: 201278 - RNA, 32 nt, Homo Sapiens
ccgucacccgcgggaccccgggagcacagacu

SEQ ID NO: 201279 - RNA, 32 nt, Homo Sapiens
gcgugguccauaucuaggucgggccucucacg

SEQ ID NO: 201280 - RNA, 32 nt, Homo Sapiens
ucugugaaaauauuucuuugaaaacuuugcaa

SEQ ID NO: 201281 - RNA, 32 nt, Homo Sapiens
aggcucugcugcucugccacucagcugcccuc

SEQ ID NO: 201282 - RNA, 32 nt, Homo Sapiens
uacagcccugaacccuaaaaacaaaugaaaug

SEQ ID NO: 201283 - RNA, 32 nt, Homo Sapiens
uugcaauguacaaauaauacagcugugcuaau

SEQ ID NO: 201284 - RNA, 32 nt, Homo Sapiens
ucugggguuucucguggcgguugaaauagucc

SEQ ID NO: 201285 - RNA, 32 nt, Homo Sapiens
ugccuaggccuuacgcauuugcugacugacuc

SEQ ID NO: 201286 - RNA, 32 nt, Homo Sapiens
gggugagaacagauguuccucuggccuucuug

SEQ ID NO: 201287 - RNA, 32 nt, Homo Sapiens
cuggcuggguugauguggaaaccagagcuguc

SEQ ID NO: 201288 - RNA, 30 nt, Homo Sapiens
agcaucucgcucucggagccggcgcagguu

SEQ ID NO: 201289 - RNA, 32 nt, Homo Sapiens
ggggagccugaacauucacuccuuguccucca

SEQ ID NO: 201290 - RNA, 32 nt, Homo Sapiens
aaguuugagccugggcaauguagcaagacccc

SEQ ID NO: 201291 - RNA, 32 nt, Homo Sapiens
cugugggugcccucgggccccaagagugucug

SEQ ID NO: 201292 - RNA, 32 nt, Homo Sapiens
cugagcugggacucaagguggcucuuggaacc

SEQ ID NO: 201293 - RNA, 32 nt, Homo Sapiens
ugcauauaaaggaaacauaucuguaaacuuca

SEQ ID NO: 201294 - RNA, 32 nt, Homo Sapiens
cuaugugccaaaugagugauaagauuuaagcu

SEQ ID NO: 201295 - RNA, 32 nt, Homo Sapiens
uuccucuccacuuuucaauacugaaagauuaa

SEQ ID NO: 201296 - RNA, 32 nt, Homo Sapiens
gagugauaggucaaagcuuuuacuugagucuc

SEQ ID NO: 201297 - RNA, 32 nt, Homo Sapiens
uaggaagugcccucgagcacugaagucaccau

SEQ ID NO: 201298 - RNA, 32 nt, Homo Sapiens
gaaucaggaccgagagcccuacuaagucacac

SEQ ID NO: 201299 - RNA, 32 nt, Homo Sapiens
agucggucaagcgaagugccuggcauaccaug

SEQ ID NO: 201300 - RNA, 32 nt, Homo Sapiens
cuugagagaaggagaggaagauacagcagaca

SEQ ID NO: 201301 - RNA, 32 nt, Homo Sapiens
ucauguagacagauuaauauauuuuuguacaa

SEQ ID NO: 201302 - RNA, 32 nt, Homo Sapiens
aagcucacucccuuccucuccaucucucccuc

SEQ ID NO: 201303 - RNA, 31 nt, Homo Sapiens
ccaugugguccgagugaggugagacggcccu

SEQ ID NO: 201304 - RNA, 32 nt, Homo Sapiens
guaguccgcccccuccuccccaccauccuccc

SEQ ID NO: 201305 - RNA, 32 nt, Homo Sapiens
uucaacagcucuuuuaagugaguucuucagcu

SEQ ID NO: 201306 - RNA, 32 nt, Homo Sapiens
aggagggcccuccgcaggcccgcgcccggucc

SEQ ID NO: 201307 - RNA, 32 nt, Homo Sapiens
acgacgagggacuuugugggcugggcccuccg

SEQ ID NO: 201308 - RNA, 32 nt, Homo Sapiens
uaccccaggccaaggcaagggcccugcucacc

SEQ ID NO: 201309 - RNA, 32 nt, Homo Sapiens
gagggcgcugcgaggaggagcggaaggcggag

SEQ ID NO: 201310 - RNA, 28 nt, Homo Sapiens
cagaggccagauuaacauuaggaaucuc

SEQ ID NO: 201311 - RNA, 32 nt, Homo Sapiens
uagcugggaucauaggcacgcgccaccacacc

SEQ ID NO: 201312 - RNA, 32 nt, Homo Sapiens
uuuaaaaauaggucuuuuuuuuauauuuugga

SEQ ID NO: 201313 - RNA, 32 nt, Homo Sapiens
uuucccagaaaauaauguguuuuaauaugauu

SEQ ID NO: 201314 - RNA, 32 nt, Homo Sapiens
gcuguggucugaagugguuugcaggucagccu

SEQ ID NO: 201315 - RNA, 32 nt, Homo Sapiens
cauuucuuuagucaacgcucuccacuuccuga

SEQ ID NO: 201316 - RNA, 32 nt, Homo Sapiens
ucuuuccuuuucuccacacgugucacagccag

SEQ ID NO: 201317 - RNA, 32 nt, Homo Sapiens
gguuggagcaggaugagggaauccugucacca

SEQ ID NO: 201318 - RNA, 32 nt, Homo Sapiens
cccgagucccggcgcgggaggaggagcgggag

SEQ ID NO: 201319 - RNA, 32 nt, Homo Sapiens
ugcuucugaggaagaaaaggaguuaggagaaa

SEQ ID NO: 201320 - RNA, 32 nt, Homo Sapiens
uaguaauauuccaaaagaauguaaauaggaaa

SEQ ID NO: 201321 - RNA, 32 nt, Homo Sapiens
ugucucuuuuaaaaucuacuguauuuauuaua

SEQ ID NO: 201322 - RNA, 32 nt, Homo Sapiens
aacaagucauguagucucauggccgggaaucu

SEQ ID NO: 201323 - RNA, 32 nt, Homo Sapiens
acaaggucaggaguuugagaccagccugacca

SEQ ID NO: 201324 - RNA, 32 nt, Homo Sapiens
cuccccucccagccagcgcccgggccuggacg

SEQ ID NO: 201325 - RNA, 32 nt, Homo Sapiens
agugccuuacgcuuacuaaauuuaaaucuuua

SEQ ID NO: 201326 - RNA, 32 nt, Homo Sapiens
ugaaaacuaauauauauguacauggauuucua

SEQ ID NO: 201327 - RNA, 32 nt, Homo Sapiens
cuuugcaugauuaguucagggaugagugguuu

SEQ ID NO: 201328 - RNA, 31 nt, Homo Sapiens
gcggccggucgaccggaguggcugcccugcg

SEQ ID NO: 201329 - RNA, 32 nt, Homo Sapiens
guuugcugaaagauauguauauuuuugaucuu

SEQ ID NO: 201330 - RNA, 32 nt, Homo Sapiens
ucgugaggacugcauuuccauucacuaauuuu

SEQ ID NO: 201331 - RNA, 32 nt, Homo Sapiens
agagcugggcuuccagccccagcccucgaguc

SEQ ID NO: 201332 - RNA, 32 nt, Homo Sapiens
gcaguucucagaccgaaggugcugccuucauc

SEQ ID NO: 201333 - RNA, 32 nt, Homo Sapiens
ugcaaaacuaaauaaagggcugcaugcuuauu

SEQ ID NO: 201334 - RNA, 32 nt, Homo Sapiens
gugacccgugagcacuccccgccccgucccca

SEQ ID NO: 201335 - RNA, 32 nt, Homo Sapiens
augguuuagaaacggaaaaauguuacaaauuu

SEQ ID NO: 201336 - RNA, 32 nt, Homo Sapiens
gguuuuugcauggaaauuaauguaaugcuuau

SEQ ID NO: 201337 - RNA, 32 nt, Homo Sapiens
gcccugagauuuuaagaacauaaaaugugaca

SEQ ID NO: 201338 - RNA, 32 nt, Homo Sapiens
cugccccagcagguaccacgguccucggccca

SEQ ID NO: 201339 - RNA, 32 nt, Homo Sapiens
agguagggaaaggggacuugugguaguggacc

SEQ ID NO: 201340 - RNA, 32 nt, Homo Sapiens
agauggaguauggaagaaaugcccaagacggc

SEQ ID NO: 201341 - RNA, 32 nt, Homo Sapiens
agcuggcucugugagggugcugacuggcuuca

SEQ ID NO: 201342 - RNA, 32 nt, Homo Sapiens
auuuucucuaaagagauuuguguucuuauuga

SEQ ID NO: 201343 - RNA, 32 nt, Homo Sapiens
gguggugaugacagacccccuuuuggacucac

SEQ ID NO: 201344 - RNA, 32 nt, Homo Sapiens
gggugggacuugggucuucagaucauaaacua

SEQ ID NO: 201345 - RNA, 32 nt, Homo Sapiens
gaacugggcagacaccccuggagcucagccga

SEQ ID NO: 201346 - RNA, 32 nt, Homo Sapiens
agggaccguguacagcuugauaacccuuaaua

SEQ ID NO: 201347 - RNA, 32 nt, Homo Sapiens
caccuuuagcuagguuggcccgagugaggccu

SEQ ID NO: 201348 - RNA, 32 nt, Homo Sapiens
cgccgccgagugcugucucuauggcgaggagg

SEQ ID NO: 201349 - RNA, 32 nt, Homo Sapiens
auaacaggguugaauauauauuuugaauauac

SEQ ID NO: 201350 - RNA, 32 nt, Homo Sapiens
uugcugaagugagguagcagcucucuucuguc

SEQ ID NO: 201351 - RNA, 32 nt, Homo Sapiens
ugaguguggguagccguaaguccccaagacau

SEQ ID NO: 201352 - RNA, 32 nt, Homo Sapiens
ccgcaccgcggcauguguggcuccauggaggg

SEQ ID NO: 201353 - RNA, 32 nt, Homo Sapiens
gaguguguaaauauaaucgacuuuuguuugug

SEQ ID NO: 201354 - RNA, 31 nt, Homo Sapiens
cuccgaguggcacgccugccccaggaugccc

SEQ ID NO: 201355 - RNA, 32 nt, Homo Sapiens
uagauuguaaccccuccacuccccucugagau

SEQ ID NO: 201356 - RNA, 32 nt, Homo Sapiens
cuugggacugcggcugccacaggaagggggca

SEQ ID NO: 201357 - RNA, 32 nt, Homo Sapiens
gggucuggcaggggcugcucaggccgccuagc

SEQ ID NO: 201358 - RNA, 32 nt, Homo Sapiens
auuuuguaaaauugauuacguugaaugcuuuu

SEQ ID NO: 201359 - RNA, 32 nt, Homo Sapiens
uguuugaaagacugaaaagcccaaagcuggcc

SEQ ID NO: 201360 - RNA, 32 nt, Homo Sapiens
gcaggagauccgggacugucugauugaggaca

SEQ ID NO: 201361 - RNA, 32 nt, Homo Sapiens
ccacaagcugcucuugcagaguucuuaccauu

SEQ ID NO: 201362 - RNA, 32 nt, Homo Sapiens
cucccggaacagagcucaugcugcugcuccug

SEQ ID NO: 201363 - RNA, 32 nt, Homo Sapiens
ggguggcacugacugugcagguaucagcgucu

SEQ ID NO: 201364 - RNA, 32 nt, Homo Sapiens
uugcuuuuuuaagggagggccagaaagaaagu

SEQ ID NO: 201365 - RNA, 32 nt, Homo Sapiens
acuuauuaaagagcuuccacagugaagaugga

SEQ ID NO: 201366 - RNA, 31 nt, Homo Sapiens
ggugacuuuugaggaauucaagaaugcugau

SEQ ID NO: 201367 - RNA, 32 nt, Homo Sapiens
ugucccuugaugcacagagaagcuggggagga

SEQ ID NO: 201368 - RNA, 32 nt, Homo Sapiens
gaagauuuaauuugugauaccuuuguauguau

SEQ ID NO: 201369 - RNA, 32 nt, Homo Sapiens
cuuuuugguuugaccgccacgauuuagguuag

SEQ ID NO: 201370 - RNA, 32 nt, Homo Sapiens
ccagaaaauguuucccagaaaacuagacagca

SEQ ID NO: 201371 - RNA, 32 nt, Homo Sapiens
uuuuugcucaauauaaaaaugaggauacuuau

SEQ ID NO: 201372 - RNA, 31 nt, Homo Sapiens
gcugcugagccccacgccaagcuggagagcg

SEQ ID NO: 201373 - RNA, 30 nt, Homo Sapiens
uucagguggcugcugccgccgccgccgccg

SEQ ID NO: 201374 - RNA, 32 nt, Homo Sapiens
acccccagcucuagaugauuugguaaaaccac

SEQ ID NO: 201375 - RNA, 32 nt, Homo Sapiens
gcaaagccaaggggcagccuccugucaaggua

SEQ ID NO: 201376 - RNA, 32 nt, Homo Sapiens
ggagacauauccuagaucacuuugcuuuuucu

SEQ ID NO: 201377 - RNA, 32 nt, Homo Sapiens
agaguacaccaauuuguuaaaagcaagaaacc

SEQ ID NO: 201378 - RNA, 28 nt, Homo Sapiens
cccaauaaacuuauuuuauuugccuuug

SEQ ID NO: 201379 - RNA, 32 nt, Homo Sapiens
aggggcgaggcuuuaagcgaggcagaauggug

SEQ ID NO: 201380 - RNA, 32 nt, Homo Sapiens
accccugucagacagaggcugcggccugggcc

SEQ ID NO: 201381 - RNA, 32 nt, Homo Sapiens
ucagagguaaaguugugugcuaucuuggcagc

SEQ ID NO: 201382 - RNA, 32 nt, Homo Sapiens
aagacuccagaauuggaggcaugaugaagacu

SEQ ID NO: 201383 - RNA, 32 nt, Homo Sapiens
aagaaauugcugucccauaaaaaucauaauug

SEQ ID NO: 201384 - RNA, 32 nt, Homo Sapiens
uacaaugacacuaaaaucaugcugagagcaaa

SEQ ID NO: 201385 - RNA, 32 nt, Homo Sapiens
gaggauugggggaggagaagcagugccuuccc

SEQ ID NO: 201386 - RNA, 32 nt, Homo Sapiens
agucaaaaacgaauuuauucaucuauguaacu

SEQ ID NO: 201387 - RNA, 32 nt, Homo Sapiens
cgggaggcagccuguccacucuuaccacaggc

SEQ ID NO: 201388 - RNA, 32 nt, Homo Sapiens
uauggugauccuggaacacacacagaagccuc

SEQ ID NO: 201389 - RNA, 32 nt, Homo Sapiens
gcagccaggauugccucagcuccucccccuca

SEQ ID NO: 201390 - RNA, 32 nt, Homo Sapiens
ugucuaucaaggaaggaaguuacugucuuccc

SEQ ID NO: 201391 - RNA, 32 nt, Homo Sapiens
accaggauuauugcacccgcauggcuccacca

SEQ ID NO: 201392 - RNA, 32 nt, Homo Sapiens
gcgcuuacuuagauuuuugcugugauaauuga

SEQ ID NO: 201393 - RNA, 32 nt, Homo Sapiens
ucccagagggagaggaggugggcugugccuca

SEQ ID NO: 201394 - RNA, 32 nt, Homo Sapiens
ggacuggccccggagccuacaaccugacgcag

SEQ ID NO: 201395 - RNA, 32 nt, Homo Sapiens
ucuugauaaaccuuagucccaagcauuucauc

SEQ ID NO: 201396 - RNA, 32 nt, Homo Sapiens
cagggagagcugugcuccugggugcugaagcc

SEQ ID NO: 201397 - RNA, 32 nt, Homo Sapiens
ggggugcuuugggugccuggaauugggaccuu

SEQ ID NO: 201398 - RNA, 32 nt, Homo Sapiens
aauuaaaaggacuuaugcucugcugucucagg

SEQ ID NO: 201399 - RNA, 28 nt, Homo Sapiens
ggagugucagaugggaagugcuuugaug

SEQ ID NO: 201400 - RNA, 32 nt, Homo Sapiens
cagggguguguggaaggcagugggggaguugg

SEQ ID NO: 201401 - RNA, 32 nt, Homo Sapiens
gcuuguuuugguuuccuucuaacuugcccacg

SEQ ID NO: 201402 - RNA, 32 nt, Homo Sapiens
cacgaggcacgugguuaugcugccggaguuug

SEQ ID NO: 201403 - RNA, 32 nt, Homo Sapiens
auauaaucaucaaguaauacaaacuaauuuag

SEQ ID NO: 201404 - RNA, 32 nt, Homo Sapiens
ugggaggaacuggcagagggugcgccuggcca

SEQ ID NO: 201405 - RNA, 32 nt, Homo Sapiens
agauccacagcuacgucacugaauuguuaaug

SEQ ID NO: 201406 - RNA, 30 nt, Homo Sapiens
cccugugucuguggaacagaagcagcuucc

SEQ ID NO: 201407 - RNA, 32 nt, Homo Sapiens
agccgggggcagggcugccuccagccugcacg

SEQ ID NO: 201408 - RNA, 32 nt, Homo Sapiens
cgcuccccggcgggcuggcuccuggccccgga

SEQ ID NO: 201409 - RNA, 32 nt, Homo Sapiens
gagcugcggucgcagaggccgacggagccgga

SEQ ID NO: 201410 - RNA, 30 nt, Homo Sapiens
uaaaaugucuguguaggagagaaguggggu

SEQ ID NO: 201411 - RNA, 32 nt, Homo Sapiens
aggucugagccacagcagcauuuuuauuucag

SEQ ID NO: 201412 - RNA, 32 nt, Homo Sapiens
aaaugccugcugcuaccacccuuuucaauugc

SEQ ID NO: 201413 - RNA, 32 nt, Homo Sapiens
gggcagcggcgcugcgccuccucaguguucug

SEQ ID NO: 201414 - RNA, 32 nt, Homo Sapiens
cugccgccucagagccgggaaaagcagccgga

SEQ ID NO: 201415 - RNA, 32 nt, Homo Sapiens
agaggaggaggcaggagaagcaggcagccugc

SEQ ID NO: 201416 - RNA, 32 nt, Homo Sapiens
cacucagggaacaaaauggucagccagagcug

SEQ ID NO: 201417 - RNA, 32 nt, Homo Sapiens
cauucucugaucacccagccauauacacagag

SEQ ID NO: 201418 - RNA, 32 nt, Homo Sapiens
cugccaggcagugcccuucccggagcgugccc

SEQ ID NO: 201419 - RNA, 32 nt, Homo Sapiens
aggcaucagaaaauaaguaaucaaauuaggua

SEQ ID NO: 201420 - RNA, 32 nt, Homo Sapiens
gagucacacgggggcagcugauacaaauugca

SEQ ID NO: 201421 - RNA, 32 nt, Homo Sapiens
gucuccuuggugauuaagguccugcuugaacu

SEQ ID NO: 201422 - RNA, 32 nt, Homo Sapiens
cgcugggaauccugcuccuccucagguccugg

SEQ ID NO: 201423 - RNA, 32 nt, Homo Sapiens
uuaugauauggugucuuuuucuugaaacaagc

SEQ ID NO: 201424 - RNA, 32 nt, Homo Sapiens
cgggagucugaugaccgugucugggcucugac

SEQ ID NO: 201425 - RNA, 32 nt, Homo Sapiens
gcgucugggucucuccucucccuugcagguuu

SEQ ID NO: 201426 - RNA, 32 nt, Homo Sapiens
auuuaaguuguauauaaaaauaaaaggauagc

SEQ ID NO: 201427 - RNA, 32 nt, Homo Sapiens
ugcuuucuuuugcgguaggacuuggcugugag

SEQ ID NO: 201428 - RNA, 32 nt, Homo Sapiens
gucagccccccgcccggcuagccgccccgucc

SEQ ID NO: 201429 - RNA, 32 nt, Homo Sapiens
uuaagaaacauaaaaacuggcaaaauaaaaaa

SEQ ID NO: 201430 - RNA, 32 nt, Homo Sapiens
uaugacacaaaguaugauaccuuuaaaaaggu

SEQ ID NO: 201431 - RNA, 30 nt, Homo Sapiens
gcuggagggcaucaucaugagucuggagag

SEQ ID NO: 201432 - RNA, 32 nt, Homo Sapiens
cucucucuuuuuaccacugaauuuuuccaaaa

SEQ ID NO: 201433 - RNA, 32 nt, Homo Sapiens
gaguucgcaucucuccuuuuccugguuagacu

SEQ ID NO: 201434 - RNA, 32 nt, Homo Sapiens
ggugauggcagcagauucuuccauucaaauga

SEQ ID NO: 201435 - RNA, 30 nt, Homo Sapiens
gugcaaugauggcugggggaaucgucauga

SEQ ID NO: 201436 - RNA, 32 nt, Homo Sapiens
uuacguuuuucacagcucuugaguauuuucua

SEQ ID NO: 201437 - RNA, 32 nt, Homo Sapiens
ccgguggcuggagaccuggggggcagguggau

SEQ ID NO: 201438 - RNA, 30 nt, Homo Sapiens
acauuucugcuaauagggagagggacccac

SEQ ID NO: 201439 - RNA, 32 nt, Homo Sapiens
ucagggaggagcuacccucucugcugagagcu

SEQ ID NO: 201440 - RNA, 31 nt, Homo Sapiens
cauauuuuaaggagaaagaacucuauuggug

SEQ ID NO: 201441 - RNA, 32 nt, Homo Sapiens
aggcuucacagccccagaggauuccauauaaa

SEQ ID NO: 201442 - RNA, 32 nt, Homo Sapiens
acaaaaggcaaugauucacgcuuuuguuuuca

SEQ ID NO: 201443 - RNA, 32 nt, Homo Sapiens
acaugauuuccuuguggccacuccaugcauuu

SEQ ID NO: 201444 - RNA, 32 nt, Homo Sapiens
ugucuguguuugugugugcauaguucuguggu

SEQ ID NO: 201445 - RNA, 32 nt, Homo Sapiens
gagaaaauucuauggaacuauuaucagcucac

SEQ ID NO: 201446 - RNA, 32 nt, Homo Sapiens
cucuggggcaggggcugcucacugguucaugg

SEQ ID NO: 201447 - RNA, 32 nt, Homo Sapiens
ccagucccggugccagcgcaacgccucccugg

SEQ ID NO: 201448 - RNA, 29 nt, Homo Sapiens
uuugucauauguauuuuguauuugcauau

SEQ ID NO: 201449 - RNA, 32 nt, Homo Sapiens
cagcagaaggcacaaacccagugcugguucuc

SEQ ID NO: 201450 - RNA, 32 nt, Homo Sapiens
ugggauguuuaguuaccaguuuucccaaagug

SEQ ID NO: 201451 - RNA, 32 nt, Homo Sapiens
gcuaucccacccagccaugcuggaauaaacac

SEQ ID NO: 201452 - RNA, 32 nt, Homo Sapiens
acuacccaccugcccggcacccccuccccagu

SEQ ID NO: 201453 - RNA, 32 nt, Homo Sapiens
cauuuucaguggcaauagaggacccuuguugu

SEQ ID NO: 201454 - RNA, 32 nt, Homo Sapiens
uuuaauauaucucuuucuuuuucuuccgacau

SEQ ID NO: 201455 - RNA, 32 nt, Homo Sapiens
aaagcagauuguggcagugucgccuuuugugg

SEQ ID NO: 201456 - RNA, 32 nt, Homo Sapiens
uuacguugcuaaggggggagggugaggauuaa

SEQ ID NO: 201457 - RNA, 32 nt, Homo Sapiens
ugcaaagcagaaaaaguaugaaaaaaccaagg

SEQ ID NO: 201458 - RNA, 32 nt, Homo Sapiens
guguccugcuccauugagauggauggcaaacc

SEQ ID NO: 201459 - RNA, 32 nt, Homo Sapiens
ggcaagucucuauauuauguccucuuuugugg

SEQ ID NO: 201460 - RNA, 32 nt, Homo Sapiens
auggguuccaguuaauucaugccucccaugga

SEQ ID NO: 201461 - RNA, 32 nt, Homo Sapiens
uuacaauguacaaauuccucauucugucaccu

SEQ ID NO: 201462 - RNA, 32 nt, Homo Sapiens
cuccuccuggcugcccaggaaguagugucuuc

SEQ ID NO: 201463 - RNA, 32 nt, Homo Sapiens
ccccaccuccccacagacacccgcccccucuc

SEQ ID NO: 201464 - RNA, 32 nt, Homo Sapiens
accuggaagaccuggaggaagaggaggaggag

SEQ ID NO: 201465 - RNA, 32 nt, Homo Sapiens
aaucugcugggacugccuggagauuugucagg

SEQ ID NO: 201466 - RNA, 31 nt, Homo Sapiens
ugagccaccccacagaaccaugcagcucuca

SEQ ID NO: 201467 - RNA, 32 nt, Homo Sapiens
acuguggaagggggcguccugcagcugguuag

SEQ ID NO: 201468 - RNA, 32 nt, Homo Sapiens
cuuacccauuggugucuauuaagaauacuaug

SEQ ID NO: 201469 - RNA, 32 nt, Homo Sapiens
aauuauuguaaauucauacauuuguagccauu

SEQ ID NO: 201470 - RNA, 32 nt, Homo Sapiens
gaaagccuuucuauuuuuuggugcgggaggga

SEQ ID NO: 201471 - RNA, 32 nt, Homo Sapiens
gcccaggaguggugggggguccggggcacccu

SEQ ID NO: 201472 - RNA, 32 nt, Homo Sapiens
uagaguuuacuuugguuuaaagacuuucaaau

SEQ ID NO: 201473 - RNA, 32 nt, Homo Sapiens
ugacaacuccucccgauucggcaaauucaucc

SEQ ID NO: 201474 - RNA, 32 nt, Homo Sapiens
aauauaucucaacauuuuuuugguggcaaugu

SEQ ID NO: 201475 - RNA, 32 nt, Homo Sapiens
guacuauuugcuuaauagauuaaugaaauuua

SEQ ID NO: 201476 - RNA, 32 nt, Homo Sapiens
agaguggcugugcagggcugggggguggucug

SEQ ID NO: 201477 - RNA, 32 nt, Homo Sapiens
ucauuugcuuggagaagcagcuguuaguagac

SEQ ID NO: 201478 - RNA, 32 nt, Homo Sapiens
aauguugagccgugugacagagucacaacuag

SEQ ID NO: 201479 - RNA, 32 nt, Homo Sapiens
acaaauauuuccuguuugguuaaacuuuaauc

SEQ ID NO: 201480 - RNA, 32 nt, Homo Sapiens
acuggucaugcaagcauuuacagugccaugcu

SEQ ID NO: 201481 - RNA, 32 nt, Homo Sapiens
uaguugagcgcaccccccgcccgccccagcgg

SEQ ID NO: 201482 - RNA, 32 nt, Homo Sapiens
ucauagugguauaaaguucacacaguauuaug

SEQ ID NO: 201483 - RNA, 32 nt, Homo Sapiens
ccacucuucucccacacgagcccagcucuccc

SEQ ID NO: 201484 - RNA, 32 nt, Homo Sapiens
uuaacuuaaugauggagaagagugcucaacag

SEQ ID NO: 201485 - RNA, 32 nt, Homo Sapiens
gagagagacagacagaaggagaaggauaaauc

SEQ ID NO: 201486 - RNA, 32 nt, Homo Sapiens
gggucaguucccucaucagcaccagaggcuca

SEQ ID NO: 201487 - RNA, 32 nt, Homo Sapiens
gaaggcgucugcgagaccauggagaacggaua

SEQ ID NO: 201488 - RNA, 32 nt, Homo Sapiens
ccaucacgcuggccacacgcaacgccaaggcc

SEQ ID NO: 201489 - RNA, 32 nt, Homo Sapiens
cacggcuccuucccaccccucggcaguggcug

SEQ ID NO: 201490 - RNA, 30 nt, Homo Sapiens
uccuauuuucuuuggauuccagaauaaaaa

SEQ ID NO: 201491 - RNA, 32 nt, Homo Sapiens
cuguauacaugugauaaugauacuguuuuaaa

SEQ ID NO: 201492 - RNA, 32 nt, Homo Sapiens
aaagacauuuuucuccucaguagcauaguuuu

SEQ ID NO: 201493 - RNA, 30 nt, Homo Sapiens
caagagcccugcucaaauugcugacuugca

SEQ ID NO: 201494 - RNA, 32 nt, Homo Sapiens
caaauaugacucccuaaaauauauacacuuug

SEQ ID NO: 201495 - RNA, 32 nt, Homo Sapiens
acacacaguguuucauuguuccguguuuuccc

SEQ ID NO: 201496 - RNA, 32 nt, Homo Sapiens
agaggaaucccauggagcauuaauuaguucuu

SEQ ID NO: 201497 - RNA, 32 nt, Homo Sapiens
acuccugggugcuggaggaguagagacaucac

SEQ ID NO: 201498 - RNA, 32 nt, Homo Sapiens
gccgguccucccuccaccuccuccucggcccc

SEQ ID NO: 201499 - RNA, 32 nt, Homo Sapiens
ggagggcgaggacgaggcguaaugcccccgcg

SEQ ID NO: 201500 - RNA, 32 nt, Homo Sapiens
gcgcucggacccgcggagccugcugugcuaug

SEQ ID NO: 201501 - RNA, 32 nt, Homo Sapiens
ggcugcaggcugccucccucucagccuggaca

SEQ ID NO: 201502 - RNA, 32 nt, Homo Sapiens
agagugcagaugcacaggaacaaguggaaggg

SEQ ID NO: 201503 - RNA, 32 nt, Homo Sapiens
ggacaugggucaguaaccuguaguucugauuc

SEQ ID NO: 201504 - RNA, 32 nt, Homo Sapiens
uuuuuauggagcuguuuuuuuauuauugaguu

SEQ ID NO: 201505 - RNA, 32 nt, Homo Sapiens
aaucauagauggagaugaugacuggugcuuuc

SEQ ID NO: 201506 - RNA, 32 nt, Homo Sapiens
uggggccuguacugccugcuuggggggugaug

SEQ ID NO: 201507 - RNA, 32 nt, Homo Sapiens
uccuuccuucuuucccuaccgccccacgcgcg

SEQ ID NO: 201508 - RNA, 32 nt, Homo Sapiens
cccuccccaagccuucagggcugcucggaguc

SEQ ID NO: 201509 - RNA, 32 nt, Homo Sapiens
auaacuauuaaacaccuuguuuacagacagau

SEQ ID NO: 201510 - RNA, 32 nt, Homo Sapiens
ugcugcuccgcgguggagucaccgcaccgcuc

SEQ ID NO: 201511 - RNA, 32 nt, Homo Sapiens
uuagccuuaccuccugcauuugcaauacguaa

SEQ ID NO: 201512 - RNA, 32 nt, Homo Sapiens
aacuuggcauuugugaaugggaaucuuguuca

SEQ ID NO: 201513 - RNA, 32 nt, Homo Sapiens
uuauaggaguugcagcagcaaaaauaugaacc

SEQ ID NO: 201514 - RNA, 32 nt, Homo Sapiens
ccacagacagcuuuuaggucacagaaaccucu

SEQ ID NO: 201515 - RNA, 32 nt, Homo Sapiens
uucuuauuaaaaaucuaacaaaucuguaaaaa

SEQ ID NO: 201516 - RNA, 32 nt, Homo Sapiens
uuauagauuagaucaaaagucuacauaacuaa

SEQ ID NO: 201517 - RNA, 32 nt, Homo Sapiens
uguuuuggcaaaucuuuuuuucuuuuuugaga

SEQ ID NO: 201518 - RNA, 32 nt, Homo Sapiens
gcuuugagauaaauguuaauuaccucaugcau

SEQ ID NO: 201519 - RNA, 32 nt, Homo Sapiens
aucucuggggaagagcugucaaaagacuggug

SEQ ID NO: 201520 - RNA, 32 nt, Homo Sapiens
cccaggaacacuuuuggaauaauuuaucagac

SEQ ID NO: 201521 - RNA, 32 nt, Homo Sapiens
augguaguuugaucuguguuuuacuuuauugu

SEQ ID NO: 201522 - RNA, 32 nt, Homo Sapiens
aagguggccuuugugcugcgccugcaggcaga

SEQ ID NO: 201523 - RNA, 32 nt, Homo Sapiens
ugguggccggggugggggccaugcggccaagu

SEQ ID NO: 201524 - RNA, 30 nt, Homo Sapiens
cuggcugcugcugcugcaggucugguuuau

SEQ ID NO: 201525 - RNA, 32 nt, Homo Sapiens
cccggccucuucccugggaaccucugaacucc

SEQ ID NO: 201526 - RNA, 32 nt, Homo Sapiens
caucccagccugggaugcuccauugcauuugu

SEQ ID NO: 201527 - RNA, 32 nt, Homo Sapiens
uucccauuaaccuuugccaguguuaugauugu

SEQ ID NO: 201528 - RNA, 32 nt, Homo Sapiens
aggggaccccccacccagacugacuggggcuu

SEQ ID NO: 201529 - RNA, 32 nt, Homo Sapiens
cuuuuaaugaacugugaaggacaacagcaucu

SEQ ID NO: 201530 - RNA, 32 nt, Homo Sapiens
ugacuucugcacaguguagaacuuucuccaau

SEQ ID NO: 201531 - RNA, 32 nt, Homo Sapiens
ggggcaauuggaugauauauagagugguuaug

SEQ ID NO: 201532 - RNA, 32 nt, Homo Sapiens
uuucucuaaugaucagugacgaugaguuuuuu

SEQ ID NO: 201533 - RNA, 32 nt, Homo Sapiens
caugucuauucagcuucguuuauuuucaagaa

SEQ ID NO: 201534 - RNA, 31 nt, Homo Sapiens
ggcucucuccacugccugcccgccaccgugc

SEQ ID NO: 201535 - RNA, 32 nt, Homo Sapiens
cggguggaggucggggaugaggcagcagguag

SEQ ID NO: 201536 - RNA, 32 nt, Homo Sapiens
auuaagcuuuuguaauuauuuuucaguagucc

SEQ ID NO: 201537 - RNA, 32 nt, Homo Sapiens
gcuucuugacucgcguugcugccggccuccgc

SEQ ID NO: 201538 - RNA, 32 nt, Homo Sapiens
uaaggaacgauuacaggacaaacaaacccaau

SEQ ID NO: 201539 - RNA, 32 nt, Homo Sapiens
acugaaucaugggggugguuucccucaugcua

SEQ ID NO: 201540 - RNA, 32 nt, Homo Sapiens
agaguagcuggagagugagcugugcgugugug

SEQ ID NO: 201541 - RNA, 32 nt, Homo Sapiens
aacagcagcauuuucaguaauuccuacaaaca

SEQ ID NO: 201542 - RNA, 32 nt, Homo Sapiens
aaagacuagagggauuaguacaaacuccucuu

SEQ ID NO: 201543 - RNA, 32 nt, Homo Sapiens
gggaccgcaguucgggaacauguuggccucga

SEQ ID NO: 201544 - RNA, 32 nt, Homo Sapiens
cagcagccgccccgucugagaagugaggagcc

SEQ ID NO: 201545 - RNA, 32 nt, Homo Sapiens
gugaauaaagauuguuugcuuuguagccccuu

SEQ ID NO: 201546 - RNA, 32 nt, Homo Sapiens
gacuuuggggcuuuuucuucuguuuuucauga

SEQ ID NO: 201547 - RNA, 32 nt, Homo Sapiens
guucuacugucuguuuuccuuaauuaucgacc

SEQ ID NO: 201548 - RNA, 32 nt, Homo Sapiens
ccaacacuggagauuauaucucaacaugaaau

SEQ ID NO: 201549 - RNA, 32 nt, Homo Sapiens
ggacaggggccacgcuccugggcuuccaaagu

SEQ ID NO: 201550 - RNA, 32 nt, Homo Sapiens
uucaagaugguguggagggagauacaauuuga

SEQ ID NO: 201551 - RNA, 32 nt, Homo Sapiens
gaggagagaagggucuacauagucuuucagag

SEQ ID NO: 201552 - RNA, 30 nt, Homo Sapiens
acgcggguccggcgcgcgggaggcgaugac

SEQ ID NO: 201553 - RNA, 32 nt, Homo Sapiens
ggaucauuugagcaauaucuuuugcuugggag

SEQ ID NO: 201554 - RNA, 30 nt, Homo Sapiens
ggggugcgacccgcgcagccggcgccuugu

SEQ ID NO: 201555 - RNA, 31 nt, Homo Sapiens
cuccacccaaucaguggaagugccaggaaac

SEQ ID NO: 201556 - RNA, 32 nt, Homo Sapiens
uccagucucuacacaugcuguccuucucuccc

SEQ ID NO: 201557 - RNA, 32 nt, Homo Sapiens
accugggcggguguguugggggguggaaggag

SEQ ID NO: 201558 - RNA, 32 nt, Homo Sapiens
ccuugacuuugaguugcagaucguggguguug

SEQ ID NO: 201559 - RNA, 32 nt, Homo Sapiens
ucuagggcugugcaggacgugccuuguuaacc

SEQ ID NO: 201560 - RNA, 32 nt, Homo Sapiens
uauacaucuucaguuuuucucugaauugaauu

SEQ ID NO: 201561 - RNA, 32 nt, Homo Sapiens
auguaaggggguacagugcaguuuuguuacau

SEQ ID NO: 201562 - RNA, 32 nt, Homo Sapiens
gcaauggacccggcgcuggcagcccagaugag

SEQ ID NO: 201563 - RNA, 32 nt, Homo Sapiens
ccaccgucccuacauagcauccagcgacacca

SEQ ID NO: 201564 - RNA, 32 nt, Homo Sapiens
aauucgcuggauuuuuaagagcgcguuauuau

SEQ ID NO: 201565 - RNA, 32 nt, Homo Sapiens
agcucgcagcccgcagcccgcagaggacgccc

SEQ ID NO: 201566 - RNA, 32 nt, Homo Sapiens
acgaaguuuuuggcugugggcucucugggaca

SEQ ID NO: 201567 - RNA, 32 nt, Homo Sapiens
cugcaggggaggaggauguaccuugugucucu

SEQ ID NO: 201568 - RNA, 32 nt, Homo Sapiens
cuacugccgcgaggucaguccgcagccuccgg

SEQ ID NO: 201569 - RNA, 32 nt, Homo Sapiens
gcuagcauuuuuccaacgagggaacuuauucc

SEQ ID NO: 201570 - RNA, 32 nt, Homo Sapiens
agugaaccaugaaauauauuauagaacugaau

SEQ ID NO: 201571 - RNA, 32 nt, Homo Sapiens
ccgggguccacgggagggcuguccuuggggac

SEQ ID NO: 201572 - RNA, 32 nt, Homo Sapiens
aggggcccuauuuuccugcugcuucccagcuc

SEQ ID NO: 201573 - RNA, 32 nt, Homo Sapiens
guccugggcgaccgcucugucgcaguugggcg

SEQ ID NO: 201574 - RNA, 32 nt, Homo Sapiens
gucaucuuugaguuuaaggccuuuuguuguau

SEQ ID NO: 201575 - RNA, 32 nt, Homo Sapiens
gcaauaggaggaaaaggaaagcguuuuuguag

SEQ ID NO: 201576 - RNA, 32 nt, Homo Sapiens
gggguggcucggcucgggaggccugggacccc

SEQ ID NO: 201577 - RNA, 32 nt, Homo Sapiens
cugggcgacaagagcagaacucugucucaaaa

SEQ ID NO: 201578 - RNA, 32 nt, Homo Sapiens
aaauaaaaaugcuaaauagaagaaauuguagg

SEQ ID NO: 201579 - RNA, 32 nt, Homo Sapiens
guauggcaacaauuuggaaacuuugugcauuc

SEQ ID NO: 201580 - RNA, 32 nt, Homo Sapiens
cuggggauaagaaaugagacacauggaccagg

SEQ ID NO: 201581 - RNA, 32 nt, Homo Sapiens
cgcacacacgggcggacacacacacacgcgcg

SEQ ID NO: 201582 - RNA, 28 nt, Homo Sapiens
aucuucgugucuaauauaguuugccacu

SEQ ID NO: 201583 - RNA, 32 nt, Homo Sapiens
aauauccagcucucuuguguuaucucagugug

SEQ ID NO: 201584 - RNA, 32 nt, Homo Sapiens
gcuaagugacagagcuuugcuucuuucacucu

SEQ ID NO: 201585 - RNA, 32 nt, Homo Sapiens
ggaccggggaaagagggaggcugaaauguuua

SEQ ID NO: 201586 - RNA, 31 nt, Homo Sapiens
gaaaagaaauaaaaugccuauguuguuguuc

SEQ ID NO: 201587 - RNA, 32 nt, Homo Sapiens
uggcuaugagaggccuccugcugcagaaacac

SEQ ID NO: 201588 - RNA, 32 nt, Homo Sapiens
ucccacguuuguuaucucugccuaaauguuag

SEQ ID NO: 201589 - RNA, 32 nt, Homo Sapiens
cgucgcccgcggcgccgcaccugcugcaccac

SEQ ID NO: 201590 - RNA, 32 nt, Homo Sapiens
ugucacuguggcggccuggcugucgcugcuuu

SEQ ID NO: 201591 - RNA, 32 nt, Homo Sapiens
uuuuuucugaauccuuaugcucuuuuaaagcc

SEQ ID NO: 201592 - RNA, 32 nt, Homo Sapiens
cuuacugagccucagaaagcaagccccucggu

SEQ ID NO: 201593 - RNA, 32 nt, Homo Sapiens
aggcaccgccccagccccaccacauggcccag

SEQ ID NO: 201594 - RNA, 32 nt, Homo Sapiens
aauacugguauuuuuacuuaaucuauaaaaug

SEQ ID NO: 201595 - RNA, 32 nt, Homo Sapiens
guuauggaaagaaagucuuacaguccauuuug

SEQ ID NO: 201596 - RNA, 32 nt, Homo Sapiens
gugucuggaaucccagcuccgcugcuuacugu

SEQ ID NO: 201597 - RNA, 31 nt, Homo Sapiens
uuagcccaagaggucuuucacugauacaagg

SEQ ID NO: 201598 - RNA, 32 nt, Homo Sapiens
ccauaggagcagccuuagcauccccugugaac

SEQ ID NO: 201599 - RNA, 32 nt, Homo Sapiens
ucuccugccuccugggauucagacggugaaga

SEQ ID NO: 201600 - RNA, 32 nt, Homo Sapiens
ucccccugcccagcgcucccaggccccgccac

SEQ ID NO: 201601 - RNA, 32 nt, Homo Sapiens
gggccugucuccugggagugcuuugagggugg

SEQ ID NO: 201602 - RNA, 32 nt, Homo Sapiens
agagggugggucugaguccccacaaugucuga

SEQ ID NO: 201603 - RNA, 32 nt, Homo Sapiens
ccgaggugcuguacauucugcugcuggugguu

SEQ ID NO: 201604 - RNA, 32 nt, Homo Sapiens
uugagcaggcacagcucugucgaggucccugu

SEQ ID NO: 201605 - RNA, 32 nt, Homo Sapiens
ccccaugccugacuuugguucccagugagcau

SEQ ID NO: 201606 - RNA, 32 nt, Homo Sapiens
auuugacauuauccagcugguuguguacaucg

SEQ ID NO: 201607 - RNA, 32 nt, Homo Sapiens
aggaaggcacaugaaucagggccauuguuuga

SEQ ID NO: 201608 - RNA, 32 nt, Homo Sapiens
cguugccgcgcgccugagccgccgucgccgcc

SEQ ID NO: 201609 - RNA, 32 nt, Homo Sapiens
ccccgugcacauuuccucuuuucucaucucca

SEQ ID NO: 201610 - RNA, 32 nt, Homo Sapiens
accaaaugcaaacacaucugggucugcgauua

SEQ ID NO: 201611 - RNA, 32 nt, Homo Sapiens
ugugcccaacuucaauaagagaaccaagggac

SEQ ID NO: 201612 - RNA, 32 nt, Homo Sapiens
gacaucacccugggaggccccuggacacagag

SEQ ID NO: 201613 - RNA, 32 nt, Homo Sapiens
uuucugcaaauauugaaggaugaccuggauug

SEQ ID NO: 201614 - RNA, 32 nt, Homo Sapiens
ggccgaaggccagcuggagcgucggcgcugcg

SEQ ID NO: 201615 - RNA, 32 nt, Homo Sapiens
cggggccgccgggggcgcccugcugagcgcua

SEQ ID NO: 201616 - RNA, 32 nt, Homo Sapiens
gaaacucucccucuccaucgccauccugcaag

SEQ ID NO: 201617 - RNA, 32 nt, Homo Sapiens
guccuuuaacuccuagaggcaaacuuuugggg

SEQ ID NO: 201618 - RNA, 32 nt, Homo Sapiens
accuggccuggcggcucuggucacuaugagug

SEQ ID NO: 201619 - RNA, 32 nt, Homo Sapiens
uagcugggccucugaggccuguauggaacucu

SEQ ID NO: 201620 - RNA, 29 nt, Homo Sapiens
ugacugagaaggauugauaucauggcuag

SEQ ID NO: 201621 - RNA, 32 nt, Homo Sapiens
cagugguuacauuucacauuucacuaauguug

SEQ ID NO: 201622 - RNA, 32 nt, Homo Sapiens
uaugcagcuugacaaugugguagaacaaaaag

SEQ ID NO: 201623 - RNA, 32 nt, Homo Sapiens
caggguucagagaggagaggaggaagauggug

SEQ ID NO: 201624 - RNA, 32 nt, Homo Sapiens
auggaaucgcagacgguugaugaugaagcgcc

SEQ ID NO: 201625 - RNA, 32 nt, Homo Sapiens
aggagaguucgccgccgucgccgcccgugagg

SEQ ID NO: 201626 - RNA, 32 nt, Homo Sapiens
uuugacugcuaggggagggaaccuggguaugg

SEQ ID NO: 201627 - RNA, 32 nt, Homo Sapiens
aaccauuccauaucagaauuuuccuugguuua

SEQ ID NO: 201628 - RNA, 32 nt, Homo Sapiens
uccguaugccaagauucugauguuggucugga

SEQ ID NO: 201629 - RNA, 32 nt, Homo Sapiens
ccuucucauuuucuuuugcugcugccauguaa

SEQ ID NO: 201630 - RNA, 32 nt, Homo Sapiens
cuuguuuuucuccugcucucccccaccgccgu

SEQ ID NO: 201631 - RNA, 32 nt, Homo Sapiens
ggagaaagggguuagaugaaacaucaguuggu

SEQ ID NO: 201632 - RNA, 32 nt, Homo Sapiens
gaccgugagucagcauuggcggcggccccagc

SEQ ID NO: 201633 - RNA, 32 nt, Homo Sapiens
cucaccccugaacgguugcuccggguagcucu

SEQ ID NO: 201634 - RNA, 32 nt, Homo Sapiens
uucuguugauucaccuaacucauuauuuugcu

SEQ ID NO: 201635 - RNA, 32 nt, Homo Sapiens
cgcuggagcugcuguggcucccgccgcggcgg

SEQ ID NO: 201636 - RNA, 32 nt, Homo Sapiens
auugccaucuucucaguccuucucccuuucuu

SEQ ID NO: 201637 - RNA, 32 nt, Homo Sapiens
uaggccuccuucccuccucagugucuuucaaa

SEQ ID NO: 201638 - RNA, 32 nt, Homo Sapiens
uuaggauuuuuggaauguauucaggaccugua

SEQ ID NO: 201639 - RNA, 32 nt, Homo Sapiens
auucucuggggccaccugaaggcuuucaaaca

SEQ ID NO: 201640 - RNA, 32 nt, Homo Sapiens
ccagagcucugcgugcugcugcugccaccaag

SEQ ID NO: 201641 - RNA, 32 nt, Homo Sapiens
agcccacaaccuggacacagcuccucaagaca

SEQ ID NO: 201642 - RNA, 32 nt, Homo Sapiens
caguugaacaaauuauuuugugaaucuguuuc

SEQ ID NO: 201643 - RNA, 32 nt, Homo Sapiens
agaaaaggccuuugcuuggguuuccuuuguau

SEQ ID NO: 201644 - RNA, 32 nt, Homo Sapiens
agcugggcauaguggugcaugccuguguuucu

SEQ ID NO: 201645 - RNA, 32 nt, Homo Sapiens
uuuuuaucuauuaaugcagauauauuagaaua

SEQ ID NO: 201646 - RNA, 32 nt, Homo Sapiens
gcccgcucugcgccuccggcacucuggugaug

SEQ ID NO: 201647 - RNA, 32 nt, Homo Sapiens
gacaugugggaauuaugggagcuacaauucaa

SEQ ID NO: 201648 - RNA, 32 nt, Homo Sapiens
ggaugguuagacagcacagcgaagacugcuaa

SEQ ID NO: 201649 - RNA, 32 nt, Homo Sapiens
uuggcucuucuggacugagccauccucaucac

SEQ ID NO: 201650 - RNA, 32 nt, Homo Sapiens
cacauguacacacacacacacacacacacaca

SEQ ID NO: 201651 - RNA, 32 nt, Homo Sapiens
ugcguguacacauacacacacacacacaccug

SEQ ID NO: 201652 - RNA, 32 nt, Homo Sapiens
cuuguguguucccuccuccgccauccucuguu

SEQ ID NO: 201653 - RNA, 32 nt, Homo Sapiens
ccuucucaguucuugugucuguuauuggaguc

SEQ ID NO: 201654 - RNA, 32 nt, Homo Sapiens
gacuagguuugugcaggaaggugaugcccacu

SEQ ID NO: 201655 - RNA, 32 nt, Homo Sapiens
gccuggggugcagcuggugucaggguaugcug

SEQ ID NO: 201656 - RNA, 32 nt, Homo Sapiens
cugccccugcugacacagacauccucuaugcc

SEQ ID NO: 201657 - RNA, 32 nt, Homo Sapiens
ucccaggcccucauggccccagucuacgaggg

SEQ ID NO: 201658 - RNA, 32 nt, Homo Sapiens
guucccaaguagguaguaguaguaugugccac

SEQ ID NO: 201659 - RNA, 31 nt, Homo Sapiens
acccccagccaccaccugccccgccucgucc

SEQ ID NO: 201660 - RNA, 32 nt, Homo Sapiens
uucugagaaucacauauuguuacaggccuugc

SEQ ID NO: 201661 - RNA, 32 nt, Homo Sapiens
ucacucaagaggacuucagcucugcuguuggg

SEQ ID NO: 201662 - RNA, 32 nt, Homo Sapiens
ucggugugggggucccggggcuccaagccacc

SEQ ID NO: 201663 - RNA, 32 nt, Homo Sapiens
gugcgggcgcgcgggccuaccggguucguagu

SEQ ID NO: 201664 - RNA, 32 nt, Homo Sapiens
acaugaaugcaaaccugaaggcuaugaauucu

SEQ ID NO: 201665 - RNA, 32 nt, Homo Sapiens
gauuccccuggacgcuccugcugauucugucg

SEQ ID NO: 201666 - RNA, 32 nt, Homo Sapiens
cgcugccgccgccgccgacgccgccuucguuu

SEQ ID NO: 201667 - RNA, 32 nt, Homo Sapiens
aaaagggagccaagaagaaagugguugaucca

SEQ ID NO: 201668 - RNA, 32 nt, Homo Sapiens
uuuggcuaaaauaaauguagcaucuaauuuua

SEQ ID NO: 201669 - RNA, 32 nt, Homo Sapiens
cacuacauuucccccuuucaugauauuccucu

SEQ ID NO: 201670 - RNA, 32 nt, Homo Sapiens
caccauuggccaguuuuaccacguuuuucaag

SEQ ID NO: 201671 - RNA, 32 nt, Homo Sapiens
uccuagggaccgaggcggccaggcccuggggc

SEQ ID NO: 201672 - RNA, 32 nt, Homo Sapiens
cuugugucuuugucauugucugguucuuaaga

SEQ ID NO: 201673 - RNA, 32 nt, Homo Sapiens
ccugcagggccucagcuggcaccagcaucuaa

SEQ ID NO: 201674 - RNA, 32 nt, Homo Sapiens
ucuuuuugguggugguucugugcuggaagagc

SEQ ID NO: 201675 - RNA, 32 nt, Homo Sapiens
ucccugcccaacccuguggccuucagggcuca

SEQ ID NO: 201676 - RNA, 32 nt, Homo Sapiens
gugcucaucuggcuaucucaccagggccuuaa

SEQ ID NO: 201677 - RNA, 32 nt, Homo Sapiens
ucugagcagcgaaggggcguaaaugagcaggg

SEQ ID NO: 201678 - RNA, 32 nt, Homo Sapiens
gacagaaaaaucacauaacucugguguguuaa

SEQ ID NO: 201679 - RNA, 32 nt, Homo Sapiens
guucaauggauugagaaaaauauguuuuauuu

SEQ ID NO: 201680 - RNA, 32 nt, Homo Sapiens
aacaguuugugauuucuauugcuguagcuagg

SEQ ID NO: 201681 - RNA, 32 nt, Homo Sapiens
ugucugcuuuuuaagguugggauugugcugac

SEQ ID NO: 201682 - RNA, 32 nt, Homo Sapiens
uccuccacagaaacacaaacacaguuauucca

SEQ ID NO: 201683 - RNA, 32 nt, Homo Sapiens
gccagccugugcugcccacuuucagaguugaa

SEQ ID NO: 201684 - RNA, 31 nt, Homo Sapiens
gcgaagcguuguccucagccccgcguggaac

SEQ ID NO: 201685 - RNA, 32 nt, Homo Sapiens
gagucagaacuaagaugaggcugaaucgggag

SEQ ID NO: 201686 - RNA, 32 nt, Homo Sapiens
cacugguaaucccagcacuuugggaggcccag

SEQ ID NO: 201687 - RNA, 32 nt, Homo Sapiens
uauuguacaauauauaugcucagcacugcccc

SEQ ID NO: 201688 - RNA, 32 nt, Homo Sapiens
acugggacaacauguccaugccaccaugcuca

SEQ ID NO: 201689 - RNA, 32 nt, Homo Sapiens
ucggcgggcaggggcgggggaugaggcggacg

SEQ ID NO: 201690 - RNA, 32 nt, Homo Sapiens
gccgggcacgggcgcuccugcugccgucucug

SEQ ID NO: 201691 - RNA, 31 nt, Homo Sapiens
uuuuuuacaaauuggaacagcuuuggugugu

SEQ ID NO: 201692 - RNA, 32 nt, Homo Sapiens
gagacgagucucaucugucacccaggcuggag

SEQ ID NO: 201693 - RNA, 32 nt, Homo Sapiens
caggcucugcuguggccccgcggagccaagcu

SEQ ID NO: 201694 - RNA, 32 nt, Homo Sapiens
aguuauuaauaaagaauuccauugcuuagcua

SEQ ID NO: 201695 - RNA, 32 nt, Homo Sapiens
guuagucaugugaguucuuggguuuguuuggg

SEQ ID NO: 201696 - RNA, 32 nt, Homo Sapiens
ucuaugccaaaauaacuucucuucauauuugc

SEQ ID NO: 201697 - RNA, 32 nt, Homo Sapiens
gagggacauucagaagagucagacacacaguc

SEQ ID NO: 201698 - RNA, 32 nt, Homo Sapiens
auauguuaaguguaaaaugcaaguggcaaaac

SEQ ID NO: 201699 - RNA, 32 nt, Homo Sapiens
cuaggcuucggcccggccgccgccacacauaa

SEQ ID NO: 201700 - RNA, 32 nt, Homo Sapiens
aaaaaauccugaugaagguuuggcuaaaaucu

SEQ ID NO: 201701 - RNA, 32 nt, Homo Sapiens
acagaauucagauaaaauuugccuauguucug

SEQ ID NO: 201702 - RNA, 32 nt, Homo Sapiens
gcaagguggcggcugaggaagagcagagcccc

SEQ ID NO: 201703 - RNA, 32 nt, Homo Sapiens
uaacuaaugaacuggucucugugcaaauccug

SEQ ID NO: 201704 - RNA, 32 nt, Homo Sapiens
ccagcggccguagcuagcgucuggccugagaa

SEQ ID NO: 201705 - RNA, 32 nt, Homo Sapiens
ccgagaucgugucacugcacuccagccuggcg

SEQ ID NO: 201706 - RNA, 32 nt, Homo Sapiens
acggcggccgcugcaaaguuuccccggcggcg

SEQ ID NO: 201707 - RNA, 32 nt, Homo Sapiens
aucaucucuguaaaccacuugucacuacaaaa

SEQ ID NO: 201708 - RNA, 32 nt, Homo Sapiens
ucaaggcauggcaggcgcacccugcccaucuc

SEQ ID NO: 201709 - RNA, 32 nt, Homo Sapiens
cccauucuuuuuauucuucucuacagcaucca

SEQ ID NO: 201710 - RNA, 32 nt, Homo Sapiens
gucuggaaaaggaagaaaaugguuucaguuuc

SEQ ID NO: 201711 - RNA, 32 nt, Homo Sapiens
gcgcccucgccgcggacaccggagcugcggcc

SEQ ID NO: 201712 - RNA, 31 nt, Homo Sapiens
uugauaucggugguaacgacggccucagcag

SEQ ID NO: 201713 - RNA, 28 nt, Homo Sapiens
cuagaagagauugaacauuugaauuggu

SEQ ID NO: 201714 - RNA, 32 nt, Homo Sapiens
ggugggagggucaggagggcagggugaagggg

SEQ ID NO: 201715 - RNA, 32 nt, Homo Sapiens
guuguacgaaagcgcgucugcggccgcaaugu

SEQ ID NO: 201716 - RNA, 32 nt, Homo Sapiens
ugacaaaauggggcagaagagaaaggacucag

SEQ ID NO: 201717 - RNA, 32 nt, Homo Sapiens
gguggcagacauuuauggacacccgccacgug

SEQ ID NO: 201718 - RNA, 32 nt, Homo Sapiens
acuaauauuggucauugaucuucguucaugaa

SEQ ID NO: 201719 - RNA, 32 nt, Homo Sapiens
auaacuugugauuccagggcuguuugucaaca

SEQ ID NO: 201720 - RNA, 32 nt, Homo Sapiens
uacacaaaaauauuuuccuuguagaaaauagu

SEQ ID NO: 201721 - RNA, 32 nt, Homo Sapiens
cuugucgccggagcugagaaccaagagcucga

SEQ ID NO: 201722 - RNA, 32 nt, Homo Sapiens
uuauauaacuauacuugucaaauagcaccuau

SEQ ID NO: 201723 - RNA, 32 nt, Homo Sapiens
cuuccugggcccggcaggagagccugcaggag

SEQ ID NO: 201724 - RNA, 32 nt, Homo Sapiens
uuccucccucugccccucccccagccaugcca

SEQ ID NO: 201725 - RNA, 32 nt, Homo Sapiens
ucgguagcgcggcgggcaaggcaggcgccaug

SEQ ID NO: 201726 - RNA, 32 nt, Homo Sapiens
cccccuuuuucaaggccccauccaccucccuc

SEQ ID NO: 201727 - RNA, 32 nt, Homo Sapiens
uuuauucuucaguuguacuuugaauggugggg

SEQ ID NO: 201728 - RNA, 32 nt, Homo Sapiens
aaauauuuacacauauuuccaaauauuuauuu

SEQ ID NO: 201729 - RNA, 32 nt, Homo Sapiens
gaaccauaugguggguguauguguguacaaga

SEQ ID NO: 201730 - RNA, 32 nt, Homo Sapiens
cagaaggaaucccaggaaaaacaagaaauaua

SEQ ID NO: 201731 - RNA, 32 nt, Homo Sapiens
acuccagaacagaacccacagucccaggcgcu

SEQ ID NO: 201732 - RNA, 32 nt, Homo Sapiens
uuacuguaaagaagggccaugguauaguagau

SEQ ID NO: 201733 - RNA, 32 nt, Homo Sapiens
cuaaggccuguguuucugccauauauuuuauu

SEQ ID NO: 201734 - RNA, 32 nt, Homo Sapiens
agauguuauuugauaacuggcuuugccaaggu

SEQ ID NO: 201735 - RNA, 32 nt, Homo Sapiens
gcggcguacccucucccacuuucuuuguucug

SEQ ID NO: 201736 - RNA, 32 nt, Homo Sapiens
gaucugcagaucuggaggagacgggaaggagu

SEQ ID NO: 201737 - RNA, 32 nt, Homo Sapiens
ggagggagggagagggggcguguugaacaucc

SEQ ID NO: 201738 - RNA, 32 nt, Homo Sapiens
auagagucagagagggcccggaucaagaaacu

SEQ ID NO: 201739 - RNA, 32 nt, Homo Sapiens
cacaaaacugucaguaucuauagaccaggucu

SEQ ID NO: 201740 - RNA, 32 nt, Homo Sapiens
ugggcggccaagggagcgaccaacugaucgca

SEQ ID NO: 201741 - RNA, 30 nt, Homo Sapiens
ccuuaugucuguggcgguggcacggugcug

SEQ ID NO: 201742 - RNA, 32 nt, Homo Sapiens
ugcuugggcuccugcugagcaguucuuuccug

SEQ ID NO: 201743 - RNA, 32 nt, Homo Sapiens
uuugaauuuuuggaaacuuuagcugugcuguc

SEQ ID NO: 201744 - RNA, 32 nt, Homo Sapiens
gccggcgccggcugcgcagaggagccgcucuc

SEQ ID NO: 201745 - RNA, 32 nt, Homo Sapiens
ucugcaucuccucucgucuccuccaugguggu

SEQ ID NO: 201746 - RNA, 32 nt, Homo Sapiens
auuuuggccugucagguccauccggcgaugcu

SEQ ID NO: 201747 - RNA, 32 nt, Homo Sapiens
gcgcugccggugcggugugcuacgcgcgccca

SEQ ID NO: 201748 - RNA, 32 nt, Homo Sapiens
uacagcugucaaaaacaaaaacugguauuuca

SEQ ID NO: 201749 - RNA, 32 nt, Homo Sapiens
aaggacaugaacucauccuuuuuuauggcugc

SEQ ID NO: 201750 - RNA, 32 nt, Homo Sapiens
ccuggggcuccagggagcaggcugggaacugc

SEQ ID NO: 201751 - RNA, 32 nt, Homo Sapiens
ccagcagacagagccaggagaggcucagcugc

SEQ ID NO: 201752 - RNA, 32 nt, Homo Sapiens
aguccucauaucaaauacagaacaugaucuuc

SEQ ID NO: 201753 - RNA, 32 nt, Homo Sapiens
gaggagccgggcgcggagguacgcugagugga

SEQ ID NO: 201754 - RNA, 32 nt, Homo Sapiens
gccagcgaaaagacaaaaaaaaaaaaaaaaaa

SEQ ID NO: 201755 - RNA, 32 nt, Homo Sapiens
aggaacuggcagcucagcugcagaugcuuuuc

SEQ ID NO: 201756 - RNA, 32 nt, Homo Sapiens
cauauacuuucucuccuucuaucuccagggcc

SEQ ID NO: 201757 - RNA, 32 nt, Homo Sapiens
ugccaaggacccagagcccagcccugaccacc

SEQ ID NO: 201758 - RNA, 32 nt, Homo Sapiens
ggcugagaacguaaaacugaggacagaggagg

SEQ ID NO: 201759 - RNA, 32 nt, Homo Sapiens
agagggucacuuguuuguauugcaauaaacac

SEQ ID NO: 201760 - RNA, 32 nt, Homo Sapiens
cauucuccuggcagagcugaggucugagagau

SEQ ID NO: 201761 - RNA, 32 nt, Homo Sapiens
uccccgguccccagccagcucagccugaccag

SEQ ID NO: 201762 - RNA, 32 nt, Homo Sapiens
guguguaccugaaccucccaagagaaauagua

SEQ ID NO: 201763 - RNA, 32 nt, Homo Sapiens
acucugcccuguucccagccacuucccaaccu

SEQ ID NO: 201764 - RNA, 32 nt, Homo Sapiens
cugaggucugcccacccuacagauggggcuuu

SEQ ID NO: 201765 - RNA, 32 nt, Homo Sapiens
uucugcguguguauauuuguaauauaugauau

SEQ ID NO: 201766 - RNA, 32 nt, Homo Sapiens
gcgucuccgccugcuggacgggcccaggcgag

SEQ ID NO: 201767 - RNA, 32 nt, Homo Sapiens
augaagucugcaggccugaggaccauguacug

SEQ ID NO: 201768 - RNA, 32 nt, Homo Sapiens
uguaggauaaucaguuacauuuauuguuagac

SEQ ID NO: 201769 - RNA, 32 nt, Homo Sapiens
uuacuaaugacuuggcggcuggcugcgacccc

SEQ ID NO: 201770 - RNA, 32 nt, Homo Sapiens
agggggaugagcaugcuguuuaugaacggaaa

SEQ ID NO: 201771 - RNA, 32 nt, Homo Sapiens
cuccacgccgacgcccgcccggauugcucccc

SEQ ID NO: 201772 - RNA, 32 nt, Homo Sapiens
uccagacuucggggugaggaggauuaacugaa

SEQ ID NO: 201773 - RNA, 32 nt, Homo Sapiens
cagccacccgcgggaagcucguggccgggacc

SEQ ID NO: 201774 - RNA, 32 nt, Homo Sapiens
ugaaaccuuuucagaaucauggcagaggggcg

SEQ ID NO: 201775 - RNA, 32 nt, Homo Sapiens
ugagagaaguaguaguugaauuuuaugaucug

SEQ ID NO: 201776 - RNA, 32 nt, Homo Sapiens
ucacuggguuuccauuucugaauuuuaugcac

SEQ ID NO: 201777 - RNA, 32 nt, Homo Sapiens
gucucuuucuaccuucccucuguuagucauuu

SEQ ID NO: 201778 - RNA, 32 nt, Homo Sapiens
gacagagugaggucguugccuugacgacgaca

SEQ ID NO: 201779 - RNA, 32 nt, Homo Sapiens
aauugcuuuguauuguauauuacaaugaucac

SEQ ID NO: 201780 - RNA, 32 nt, Homo Sapiens
cgccgcucaggcccuggagcggacgguuccua

SEQ ID NO: 201781 - RNA, 32 nt, Homo Sapiens
cccagaccucaauaaagacaccuuuuguacca

SEQ ID NO: 201782 - RNA, 32 nt, Homo Sapiens
guguggcgcgacguuggagaccggggcagcgc

SEQ ID NO: 201783 - RNA, 32 nt, Homo Sapiens
ugaaguacaugacuuugaagucuugacccucc

SEQ ID NO: 201784 - RNA, 32 nt, Homo Sapiens
agcaaaaccaguuucuuggagaguaaaaaacu

SEQ ID NO: 201785 - RNA, 32 nt, Homo Sapiens
auaugauuaucuauaugguuaucuucuuuuuc

SEQ ID NO: 201786 - RNA, 32 nt, Homo Sapiens
cucggggcucguccacucuccucccucucucc

SEQ ID NO: 201787 - RNA, 32 nt, Homo Sapiens
aauagcuggauggauuugaaugauugggauga

SEQ ID NO: 201788 - RNA, 32 nt, Homo Sapiens
cuugccaguguuguguaguuagaaccugaacc

SEQ ID NO: 201789 - RNA, 32 nt, Homo Sapiens
uauugaguucuucaaacauuguagccucuuua

SEQ ID NO: 201790 - RNA, 32 nt, Homo Sapiens
ugcccagucugcuugucuauggaaggcugucu

SEQ ID NO: 201791 - RNA, 27 nt, Homo Sapiens
gaaaccaguuucuucugguauguagca

SEQ ID NO: 201792 - RNA, 32 nt, Homo Sapiens
aaggugcccuguagaacucuguuacacauauu

SEQ ID NO: 201793 - RNA, 32 nt, Homo Sapiens
uccucucauuggcucuuuuucugcucacggga

SEQ ID NO: 201794 - RNA, 32 nt, Homo Sapiens
gguguggagcgagaggcgcgagcgggaaccgg

SEQ ID NO: 201795 - RNA, 32 nt, Homo Sapiens
uugugucgaagccccagugcucugccuggaaa

SEQ ID NO: 201796 - RNA, 32 nt, Homo Sapiens
uccccacaagaaugccaggaggaggggucauu

SEQ ID NO: 201797 - RNA, 32 nt, Homo Sapiens
cucuagauguguaauuacauggaaaauacuag

SEQ ID NO: 201798 - RNA, 32 nt, Homo Sapiens
ggugcccucugcgccuccuuaaggaugcaggg

SEQ ID NO: 201799 - RNA, 32 nt, Homo Sapiens
cucaacuuuccacaaagcuauggcucuucuuu

SEQ ID NO: 201800 - RNA, 32 nt, Homo Sapiens
uauagcuuaauauguuuauuaguucucuuugg

SEQ ID NO: 201801 - RNA, 32 nt, Homo Sapiens
gagugagaugggaagaagaucuucuuugccau

SEQ ID NO: 201802 - RNA, 32 nt, Homo Sapiens
ugaugccccgucccagguugcacugcaaccaa

SEQ ID NO: 201803 - RNA, 32 nt, Homo Sapiens
uucucagucccggcccucacugcacccaccaa

SEQ ID NO: 201804 - RNA, 32 nt, Homo Sapiens
caagccacagagaggauaauaguucuucccaa

SEQ ID NO: 201805 - RNA, 32 nt, Homo Sapiens
ggaagauaguuuucuucaggugucaauggcgu

SEQ ID NO: 201806 - RNA, 32 nt, Homo Sapiens
aaaaguagcuauuuggggcccacaaaaauaac

SEQ ID NO: 201807 - RNA, 32 nt, Homo Sapiens
cccaaggcccgaggcagcggcgcgggaucggc

SEQ ID NO: 201808 - RNA, 32 nt, Homo Sapiens
acucaggauggaaagcacuuggacaaauacug

SEQ ID NO: 201809 - RNA, 32 nt, Homo Sapiens
aaaagagaaggaaacuuuuuaaauucaauuua

SEQ ID NO: 201810 - RNA, 31 nt, Homo Sapiens
uuucugccacccucaguaagaacacacgagg

SEQ ID NO: 201811 - RNA, 32 nt, Homo Sapiens
agcaacccaaccaaaacaaaucacauucuugc

SEQ ID NO: 201812 - RNA, 32 nt, Homo Sapiens
agaaggagaagcuacaaagugggcauccaagc

SEQ ID NO: 201813 - RNA, 32 nt, Homo Sapiens
caucgcuaacaccaccaccuccaucggcaccc

SEQ ID NO: 201814 - RNA, 32 nt, Homo Sapiens
auguuugaacaaauagugacauacaggugcua

SEQ ID NO: 201815 - RNA, 32 nt, Homo Sapiens
uuugccacagaaacauaaguaaaauuuuagag

SEQ ID NO: 201816 - RNA, 32 nt, Homo Sapiens
aaggccagaaccaaaccccccucagucaacgu

SEQ ID NO: 201817 - RNA, 32 nt, Homo Sapiens
auuuagagcaggucuuuuuuuuucuucauugu

SEQ ID NO: 201818 - RNA, 32 nt, Homo Sapiens
auuauucccuccccgacccagcccagugccac

SEQ ID NO: 201819 - RNA, 32 nt, Homo Sapiens
gccccagccaagcugcuccccgcggcggccgc

SEQ ID NO: 201820 - RNA, 32 nt, Homo Sapiens
gaagucagacucagaacuagguccuggguuuc

SEQ ID NO: 201821 - RNA, 32 nt, Homo Sapiens
ugagcuuauuaaaaauaauuuuacauguuuac

SEQ ID NO: 201822 - RNA, 32 nt, Homo Sapiens
aaaagaacugggaauggcaaaacuacugucgg

SEQ ID NO: 201823 - RNA, 32 nt, Homo Sapiens
auuguaaaguaacagcagcagcagcagcagca

SEQ ID NO: 201824 - RNA, 32 nt, Homo Sapiens
ggagggagacgcuccccuccccugucugcaga

SEQ ID NO: 201825 - RNA, 32 nt, Homo Sapiens
cccucgccuucccuccucucaccugcaggcug

SEQ ID NO: 201826 - RNA, 32 nt, Homo Sapiens
cugaaggguggacuuuuaaaauagaaaugccu

SEQ ID NO: 201827 - RNA, 32 nt, Homo Sapiens
ucaaacugcaucacccaggagucugcaaauuc

SEQ ID NO: 201828 - RNA, 32 nt, Homo Sapiens
guuuuguuguuguuaacuuauugaauuuagag

SEQ ID NO: 201829 - RNA, 32 nt, Homo Sapiens
auccugcgguugucuggcugguuccggggggu

SEQ ID NO: 201830 - RNA, 32 nt, Homo Sapiens
guggcccgggggccucuucuggaccaggaaac

SEQ ID NO: 201831 - RNA, 32 nt, Homo Sapiens
accgcaggggcggggaggagccgggcucugcc

SEQ ID NO: 201832 - RNA, 32 nt, Homo Sapiens
ggugaagaacagagccucucaaucagacgggu

SEQ ID NO: 201833 - RNA, 32 nt, Homo Sapiens
cuuuaggcuguucuuugagguaucaaugaagu

SEQ ID NO: 201834 - RNA, 32 nt, Homo Sapiens
gcugcuuccuccucugguuucucauggcaggu

SEQ ID NO: 201835 - RNA, 32 nt, Homo Sapiens
gcgaaaacuuccccacggcuacugcguccacg

SEQ ID NO: 201836 - RNA, 32 nt, Homo Sapiens
gucauguggaucuuaguuaccaaacuaugaag

SEQ ID NO: 201837 - RNA, 32 nt, Homo Sapiens
gggagggagcuaagcuugggcugggcugcuug

SEQ ID NO: 201838 - RNA, 32 nt, Homo Sapiens
ucgaccugagggggcccaucccugcccaccuc

SEQ ID NO: 201839 - RNA, 32 nt, Homo Sapiens
cugauuccaucccacacugaaucugagcagca

SEQ ID NO: 201840 - RNA, 32 nt, Homo Sapiens
aacauaaaggauaguggcgaguuuacaagcug

SEQ ID NO: 201841 - RNA, 32 nt, Homo Sapiens
gguguuggcgcugauguagcucauggaaggau

SEQ ID NO: 201842 - RNA, 32 nt, Homo Sapiens
cucccugggggccccaggauggggggccacac

SEQ ID NO: 201843 - RNA, 32 nt, Homo Sapiens
uugggguggggggaguuucaguccucgggauc

SEQ ID NO: 201844 - RNA, 32 nt, Homo Sapiens
ucaacuguaaacagaggugaaaacacuccuuu

SEQ ID NO: 201845 - RNA, 32 nt, Homo Sapiens
cuccauuucuagcauaugacaccuggccucug

SEQ ID NO: 201846 - RNA, 32 nt, Homo Sapiens
uuguugggcgaaaauuuaucgguugguuuaau

SEQ ID NO: 201847 - RNA, 32 nt, Homo Sapiens
cacacgcagaguuaccgaaaacaaauggaaca

SEQ ID NO: 201848 - RNA, 32 nt, Homo Sapiens
uuguccguguguugggcuuuccggaggucugu

SEQ ID NO: 201849 - RNA, 32 nt, Homo Sapiens
uuuucuuuuuguuuuucuuucuucuucuuauu

SEQ ID NO: 201850 - RNA, 32 nt, Homo Sapiens
cuacauaaugaaaaagaaaaacagaccauuua

SEQ ID NO: 201851 - RNA, 32 nt, Homo Sapiens
gacccuggggcuuugcaaaugacuuagugacu

SEQ ID NO: 201852 - RNA, 32 nt, Homo Sapiens
uuaagaagaggcucugcagagaagguccuggg

SEQ ID NO: 201853 - RNA, 32 nt, Homo Sapiens
auuaacuacaguguuaaauguauuuauuugag

SEQ ID NO: 201854 - RNA, 32 nt, Homo Sapiens
cuggaggcuccggcucgggggaucugccccua

SEQ ID NO: 201855 - RNA, 32 nt, Homo Sapiens
agaacauccgccguguguucaacgacugccgu

SEQ ID NO: 201856 - RNA, 32 nt, Homo Sapiens
ugauggugccugacugaauccaaauauccuag

SEQ ID NO: 201857 - RNA, 28 nt, Homo Sapiens
ccugcggggcggccaugcggcggugaca

SEQ ID NO: 201858 - RNA, 30 nt, Homo Sapiens
gaccugucagcugcuggggaaacgcugcug

SEQ ID NO: 201859 - RNA, 32 nt, Homo Sapiens
gaaguuucuccagguggccucccuuuccaaca

SEQ ID NO: 201860 - RNA, 32 nt, Homo Sapiens
ucgccacgucuggcuaauuauuauuuuuugua

SEQ ID NO: 201861 - RNA, 32 nt, Homo Sapiens
uuuguuugagacggagucuuggucugucgccc

SEQ ID NO: 201862 - RNA, 32 nt, Homo Sapiens
agaaaguuauaugugcagauuauuuuccuugg

SEQ ID NO: 201863 - RNA, 32 nt, Homo Sapiens
guggugucugcuucaccucccucuccacugca

SEQ ID NO: 201864 - RNA, 29 nt, Homo Sapiens
uuaagugaaguauuauauuuuucaauaac

SEQ ID NO: 201865 - RNA, 32 nt, Homo Sapiens
agacagcccacacacaacccagcccuaaugau

SEQ ID NO: 201866 - RNA, 32 nt, Homo Sapiens
cuacuuuuaagugagaauauaugcaauauuuu

SEQ ID NO: 201867 - RNA, 32 nt, Homo Sapiens
ugccucagcccccaagccuagaaggaccucua

SEQ ID NO: 201868 - RNA, 32 nt, Homo Sapiens
ugaauucugaccagagcuaugaaucugguuga

SEQ ID NO: 201869 - RNA, 32 nt, Homo Sapiens
cgugggcccuccccugcugccacugcggccca

SEQ ID NO: 201870 - RNA, 32 nt, Homo Sapiens
aagcaccugugcuguggaguggcauuuuagau

SEQ ID NO: 201871 - RNA, 32 nt, Homo Sapiens
ccgugcgccccgggcgcaccgggauaucaacg

SEQ ID NO: 201872 - RNA, 32 nt, Homo Sapiens
gagauucagaauguugcaucaaugcaaacucc

SEQ ID NO: 201873 - RNA, 32 nt, Homo Sapiens
cccacuucuucuccccucccccaccgcaucug

SEQ ID NO: 201874 - RNA, 32 nt, Homo Sapiens
uuaguuuuaaguaucuaaaauaugagauaauu

SEQ ID NO: 201875 - RNA, 32 nt, Homo Sapiens
aggcucuuuucaucaaaaauuccacacccuca

SEQ ID NO: 201876 - RNA, 32 nt, Homo Sapiens
ugggacuucacgugucucggccaaggcgagca

SEQ ID NO: 201877 - RNA, 32 nt, Homo Sapiens
uuuuuuacagaaaaugagcgauaaagagauuu

SEQ ID NO: 201878 - RNA, 32 nt, Homo Sapiens
auuucauucagagaagcagaaggaugauuguu

SEQ ID NO: 201879 - RNA, 32 nt, Homo Sapiens
cuaccuucuugccuuuuugucuaagccuuucu

SEQ ID NO: 201880 - RNA, 31 nt, Homo Sapiens
aaaauacaaaaauuagccaggugugguggug

SEQ ID NO: 201881 - RNA, 32 nt, Homo Sapiens
ggguaaagauuggcaaacuuuuucuauaaagg

SEQ ID NO: 201882 - RNA, 32 nt, Homo Sapiens
guaagaacucagaugccugggaagcccagccc

SEQ ID NO: 201883 - RNA, 32 nt, Homo Sapiens
aaguuuaugacgucaucgcugcggcuggccaa

SEQ ID NO: 201884 - RNA, 32 nt, Homo Sapiens
ucccagcccaccagcccucugcccaccucaca

SEQ ID NO: 201885 - RNA, 32 nt, Homo Sapiens
cccgcacagcccugggccccagcaccuccccu

SEQ ID NO: 201886 - RNA, 32 nt, Homo Sapiens
guauauugacuauauagugucuaaugacuggg

SEQ ID NO: 201887 - RNA, 32 nt, Homo Sapiens
uaggcccuuucugccugugucagggccaggaa

SEQ ID NO: 201888 - RNA, 32 nt, Homo Sapiens
uucacuacgcaguaucucuggggccugggacc

SEQ ID NO: 201889 - RNA, 30 nt, Homo Sapiens
uggcggggagguggcauucuugaacugcug

SEQ ID NO: 201890 - RNA, 32 nt, Homo Sapiens
accgugagcucgccggcccgucgcccgcucgc

SEQ ID NO: 201891 - RNA, 32 nt, Homo Sapiens
gaucagugggucuaaguguccgagacuuaacg

SEQ ID NO: 201892 - RNA, 32 nt, Homo Sapiens
gcuugcuaacuguugagcuguuuuaacuaaac

SEQ ID NO: 201893 - RNA, 32 nt, Homo Sapiens
caccaaauauuuugcaacuuuauuucuucuga

SEQ ID NO: 201894 - RNA, 32 nt, Homo Sapiens
gcacuggugcaugaaggugaaguaaggaggca

SEQ ID NO: 201895 - RNA, 32 nt, Homo Sapiens
auacagauagaauauuugauauuucuugggau

SEQ ID NO: 201896 - RNA, 32 nt, Homo Sapiens
cugucccccggccuccagggcuccucucccgg

SEQ ID NO: 201897 - RNA, 32 nt, Homo Sapiens
uggacccugccagcagccaggccauggagcuc

SEQ ID NO: 201898 - RNA, 32 nt, Homo Sapiens
uaccaugcguacuuaaauagaugguaauuuuc

SEQ ID NO: 201899 - RNA, 30 nt, Homo Sapiens
ccuauuuaucaccacucaauauugggugag

SEQ ID NO: 201900 - RNA, 32 nt, Homo Sapiens
gaggcgugggcugggauugcggugccugugcu

SEQ ID NO: 201901 - RNA, 32 nt, Homo Sapiens
gucccagggcccgggguccacagaggaugagg

SEQ ID NO: 201902 - RNA, 32 nt, Homo Sapiens
augcggaaaaugggcuuggagauucuugauuc

SEQ ID NO: 201903 - RNA, 32 nt, Homo Sapiens
ccccacucccaccccgccccgccccgcccgua

SEQ ID NO: 201904 - RNA, 31 nt, Homo Sapiens
acgucgcaaggaugaaaacgaugcggacagg

SEQ ID NO: 201905 - RNA, 32 nt, Homo Sapiens
cuggugcggcggugcuggagguugcggcggcg

SEQ ID NO: 201906 - RNA, 32 nt, Homo Sapiens
guuuaaggagggaacagaacagaguuggaagu

SEQ ID NO: 201907 - RNA, 32 nt, Homo Sapiens
cgugccuuucucuuggagaggguuuagaugca

SEQ ID NO: 201908 - RNA, 32 nt, Homo Sapiens
gauaugggugguuuucuuuuccggguuuggug

SEQ ID NO: 201909 - RNA, 32 nt, Homo Sapiens
ccgagguccgcgccacccacccgcaaccuccu

SEQ ID NO: 201910 - RNA, 32 nt, Homo Sapiens
cucaccuaaggaaacauaaacaugacauaauu

SEQ ID NO: 201911 - RNA, 32 nt, Homo Sapiens
aacauucagacacacucccuucugccuuccgg

SEQ ID NO: 201912 - RNA, 32 nt, Homo Sapiens
uaacuggaugccuggauuguccugccacccag

SEQ ID NO: 201913 - RNA, 32 nt, Homo Sapiens
aaaaacaaaacaaaacaaaacaaaugacagua

SEQ ID NO: 201914 - RNA, 29 nt, Homo Sapiens
gaaaacauauguauuuguaaaaaugguuu

SEQ ID NO: 201915 - RNA, 32 nt, Homo Sapiens
auuuuggaacucuggagucuaguugaaggccu

SEQ ID NO: 201916 - RNA, 31 nt, Homo Sapiens
aauacaaaauaaaaauuaguuguuaccuccu

SEQ ID NO: 201917 - RNA, 32 nt, Homo Sapiens
agggugcugcccgcccuuggugcuggaggcgg

SEQ ID NO: 201918 - RNA, 27 nt, Homo Sapiens
agggugggguacuggaguuagaucucu

SEQ ID NO: 201919 - RNA, 32 nt, Homo Sapiens
ucacugcaagcacugccucccuccggggucug

SEQ ID NO: 201920 - RNA, 32 nt, Homo Sapiens
auaauacaguuauauagcuaaaugcaaccagu

SEQ ID NO: 201921 - RNA, 27 nt, Homo Sapiens
agggccuguuaauucuuauauuuuucu

SEQ ID NO: 201922 - RNA, 32 nt, Homo Sapiens
auuaauacacauuugcagggauuguuuguuac

SEQ ID NO: 201923 - RNA, 32 nt, Homo Sapiens
caccagaggagcugguccugcugcuuagaguc

SEQ ID NO: 201924 - RNA, 32 nt, Homo Sapiens
agccgggucagaguugaacaaugaccauaguu

SEQ ID NO: 201925 - RNA, 32 nt, Homo Sapiens
uacuucuaaggauauagcacaaagggaacauu

SEQ ID NO: 201926 - RNA, 32 nt, Homo Sapiens
augacuauuugggcgggcuggcucuuuugcag

SEQ ID NO: 201927 - RNA, 32 nt, Homo Sapiens
gcaaggagcugagaaguccugcagcaccaggu

SEQ ID NO: 201928 - RNA, 32 nt, Homo Sapiens
auucacccacaguuuaaagcucauuaauuauu

SEQ ID NO: 201929 - RNA, 32 nt, Homo Sapiens
uaaccuauuuccccuauagcccaagcucugag

SEQ ID NO: 201930 - RNA, 32 nt, Homo Sapiens
aaaccagccaaucaauaacauaaaaauauuau

SEQ ID NO: 201931 - RNA, 32 nt, Homo Sapiens
aagcuccgccgcaggcuuuguccgcuagcgcu

SEQ ID NO: 201932 - RNA, 32 nt, Homo Sapiens
ccccacucaugaucaccguuuauuuucauaau

SEQ ID NO: 201933 - RNA, 32 nt, Homo Sapiens
cuccuggaagcagagcaugcagauacucaugc

SEQ ID NO: 201934 - RNA, 32 nt, Homo Sapiens
cuggcgccggcgaggacuccccggccacccgc

SEQ ID NO: 201935 - RNA, 32 nt, Homo Sapiens
cgucucugaggaaaguaaaauaaauggaauaa

SEQ ID NO: 201936 - RNA, 32 nt, Homo Sapiens
aguucagaggauguggggaggauauaagaggg

SEQ ID NO: 201937 - RNA, 32 nt, Homo Sapiens
cucaccugcacccaccggaccaggugucaccc

SEQ ID NO: 201938 - RNA, 32 nt, Homo Sapiens
acuuaucguguccuucaugaaaacagaaaguu

SEQ ID NO: 201939 - RNA, 32 nt, Homo Sapiens
cuuugcuugcuacagcucauuugggggcauga

SEQ ID NO: 201940 - RNA, 32 nt, Homo Sapiens
aguaaaacacaagacuucagauucagccgaau

SEQ ID NO: 201941 - RNA, 32 nt, Homo Sapiens
acgcgugggcccggccaaggcgagugccgcgc

SEQ ID NO: 201942 - RNA, 32 nt, Homo Sapiens
cuccagcuuuugcugagcuuugcaucuugccu

SEQ ID NO: 201943 - RNA, 31 nt, Homo Sapiens
cgggcacugggggucgcucagggcgggacau

SEQ ID NO: 201944 - RNA, 32 nt, Homo Sapiens
cuuaaaguuguaaaaaaucaagcuauguacuu

SEQ ID NO: 201945 - RNA, 32 nt, Homo Sapiens
auuuuuaagcgguuaggcacugagaguagcag

SEQ ID NO: 201946 - RNA, 32 nt, Homo Sapiens
uuugcaugacgauuuuacuguauuuuucugag

SEQ ID NO: 201947 - RNA, 32 nt, Homo Sapiens
uaacuugucuucaacugaaauuuuuucagccu

SEQ ID NO: 201948 - RNA, 32 nt, Homo Sapiens
gggaagaaacucuggagaagagcuaauuuucu

SEQ ID NO: 201949 - RNA, 32 nt, Homo Sapiens
aacaucggggcgccgcgccgggacgcgucccc

SEQ ID NO: 201950 - RNA, 32 nt, Homo Sapiens
cuaaggccaaacaaacaaaaaacacuugcuuu

SEQ ID NO: 201951 - RNA, 32 nt, Homo Sapiens
aaacaguaaaaugugcuuaaaaggccaucuuu

SEQ ID NO: 201952 - RNA, 32 nt, Homo Sapiens
uuucuguggguuugccuggccaugguuggaga

SEQ ID NO: 201953 - RNA, 32 nt, Homo Sapiens
gccuagggucuguaccgggcuggccugugccu

SEQ ID NO: 201954 - RNA, 32 nt, Homo Sapiens
gccgugggagggggguugugggcuggcggggc

SEQ ID NO: 201955 - RNA, 32 nt, Homo Sapiens
ucuuuucuuuuucucucucgccaugguuggag

SEQ ID NO: 201956 - RNA, 32 nt, Homo Sapiens
ucucaaccuuggagugggcauugucuuucugu

SEQ ID NO: 201957 - RNA, 32 nt, Homo Sapiens
uaaugacugucugcccauguccugccugaaau

SEQ ID NO: 201958 - RNA, 32 nt, Homo Sapiens
cugguucagagguccacacaugaaguuaccau

SEQ ID NO: 201959 - RNA, 32 nt, Homo Sapiens
agaacaaauggcagcagccaugcagccagccu

SEQ ID NO: 201960 - RNA, 32 nt, Homo Sapiens
accgcacccccuggggaccccugcgccccucc

SEQ ID NO: 201961 - RNA, 32 nt, Homo Sapiens
ggaggacaugguggagaccagggacaggagag

SEQ ID NO: 201962 - RNA, 32 nt, Homo Sapiens
gggcuggggguaguuuuccauggucacagaga

SEQ ID NO: 201963 - RNA, 32 nt, Homo Sapiens
aguugucgccgcuuucuagggaccccgcccca

SEQ ID NO: 201964 - RNA, 32 nt, Homo Sapiens
gcacagcuggaaccaagcacccuggugcccag

SEQ ID NO: 201965 - RNA, 32 nt, Homo Sapiens
cacacacacacacacacacacacacaccucug

SEQ ID NO: 201966 - RNA, 32 nt, Homo Sapiens
gggcaggcucugcgugcgcccccucgagugcc

SEQ ID NO: 201967 - RNA, 32 nt, Homo Sapiens
auuaaaaaguugcaguaggguugcuuuuagag

SEQ ID NO: 201968 - RNA, 29 nt, Homo Sapiens
guggcuauuuguuuuagaggcaaguuuag

SEQ ID NO: 201969 - RNA, 32 nt, Homo Sapiens
agggcaguggcguggccccggaggacguuagu

SEQ ID NO: 201970 - RNA, 30 nt, Homo Sapiens
uacaggcgcgcgccaccacgcgaacucgua

SEQ ID NO: 201971 - RNA, 32 nt, Homo Sapiens
gcugcucggccggccggcggcggcgagcagca

SEQ ID NO: 201972 - RNA, 32 nt, Homo Sapiens
uguugacuaaaauuauaguuagagcugagaaa

SEQ ID NO: 201973 - RNA, 32 nt, Homo Sapiens
gcugagggaaaggcucguagcugguggguucc

SEQ ID NO: 201974 - RNA, 32 nt, Homo Sapiens
ugcggcgcaugguggugaagauggccaagauc

SEQ ID NO: 201975 - RNA, 32 nt, Homo Sapiens
gagcacuucauacaccucuauccaccacagac

SEQ ID NO: 201976 - RNA, 30 nt, Homo Sapiens
ggggcaguuuugguggaagaagcucgggcg

SEQ ID NO: 201977 - RNA, 29 nt, Homo Sapiens
cagccugggggacagagcaagacuguugu

SEQ ID NO: 201978 - RNA, 32 nt, Homo Sapiens
ugaaauaauucaugccacggaccugugcacau

SEQ ID NO: 201979 - RNA, 27 nt, Homo Sapiens
cuugauacuuucuucagauccucuuug

SEQ ID NO: 201980 - RNA, 32 nt, Homo Sapiens
cuaauuuuaaacaaauagaucuuguuuuuaua

SEQ ID NO: 201981 - RNA, 32 nt, Homo Sapiens
guaauggcuccggcccggguguucgcugucca

SEQ ID NO: 201982 - RNA, 32 nt, Homo Sapiens
uaugaaauauaguuuuguauaauagcauagau

SEQ ID NO: 201983 - RNA, 32 nt, Homo Sapiens
ugaaaaaacaacacugggggagggggacggug

SEQ ID NO: 201984 - RNA, 32 nt, Homo Sapiens
gccuggagcggcgguuuagagagccgagccug

SEQ ID NO: 201985 - RNA, 32 nt, Homo Sapiens
uauuuauuuaaagauuuuuaugauuacuuagg

SEQ ID NO: 201986 - RNA, 32 nt, Homo Sapiens
uuauugaguggccacaauguagaguggcucaa

SEQ ID NO: 201987 - RNA, 32 nt, Homo Sapiens
uuugaaccucagagaccauccacugucuuuga

SEQ ID NO: 201988 - RNA, 32 nt, Homo Sapiens
uucaauaaaaauuuacugaauuaaaggauuaa

SEQ ID NO: 201989 - RNA, 32 nt, Homo Sapiens
cuaguguuacuuaauguauauucuaaaaagag

SEQ ID NO: 201990 - RNA, 32 nt, Homo Sapiens
ggugaugguaacuuggacucggauggugguaa

SEQ ID NO: 201991 - RNA, 32 nt, Homo Sapiens
ucgggacauaucuaaauuaauugaacuuuuca

SEQ ID NO: 201992 - RNA, 32 nt, Homo Sapiens
gcagcggaaggggcugacugggucugguccuu

SEQ ID NO: 201993 - RNA, 32 nt, Homo Sapiens
uguuagacuugcugaguccuagcuguguuuag

SEQ ID NO: 201994 - RNA, 32 nt, Homo Sapiens
cuuucuucuuuggcuuguuuuguuuuucuauc

SEQ ID NO: 201995 - RNA, 32 nt, Homo Sapiens
aggaaacauaagaaaaaacauaaagagagaca

SEQ ID NO: 201996 - RNA, 32 nt, Homo Sapiens
gcauaucaaugugguggagaaagggaaggggu

SEQ ID NO: 201997 - RNA, 32 nt, Homo Sapiens
ugcuuuucuggauuaaaaaauaaaauaaaaua

SEQ ID NO: 201998 - RNA, 32 nt, Homo Sapiens
ucuguaguugguuuccuuccugugucccuuug

SEQ ID NO: 201999 - RNA, 32 nt, Homo Sapiens
gacacagccucuccagccuauaaacagccggg

SEQ ID NO: 202000 - RNA, 32 nt, Homo Sapiens
aggccugugggcacgcgccgcccgcagccuua

SEQ ID NO: 202001 - RNA, 32 nt, Homo Sapiens
acuaaaguuaguaaagaaaaguuuaccaucug

SEQ ID NO: 202002 - RNA, 32 nt, Homo Sapiens
gccucuuucugcaacucccccagccccaucac

SEQ ID NO: 202003 - RNA, 32 nt, Homo Sapiens
caacuuuuguauccacaguagacaaaauagca

SEQ ID NO: 202004 - RNA, 32 nt, Homo Sapiens
auaaauucuguguuuaccuugcucacugcugu

SEQ ID NO: 202005 - RNA, 32 nt, Homo Sapiens
uacccgucuuccccuccgcgaugccucaugcc

SEQ ID NO: 202006 - RNA, 32 nt, Homo Sapiens
gaacccggggacggagguugcagugaaccgag

SEQ ID NO: 202007 - RNA, 32 nt, Homo Sapiens
cugagcagggaucgaucuggccugguggugau

SEQ ID NO: 202008 - RNA, 32 nt, Homo Sapiens
uucaugacaaagcuugaccagucuuugccaac

SEQ ID NO: 202009 - RNA, 32 nt, Homo Sapiens
aaauuuuaaagcuccauaaugaucuccuuuga

SEQ ID NO: 202010 - RNA, 32 nt, Homo Sapiens
aauaauacaguuggcuuuuggucaaaaaauga

SEQ ID NO: 202011 - RNA, 32 nt, Homo Sapiens
uauagaaaggauuaaucauuuugacugcauac

SEQ ID NO: 202012 - RNA, 32 nt, Homo Sapiens
aaaagucuuugaagcugucaaacuauauucgu

SEQ ID NO: 202013 - RNA, 32 nt, Homo Sapiens
ggacaggugggcagcccugcucaccccagccc

SEQ ID NO: 202014 - RNA, 32 nt, Homo Sapiens
gcgauuucaucaucgugcgaacaucauggggu

SEQ ID NO: 202015 - RNA, 32 nt, Homo Sapiens
ccuuuuuauaugccuauuauucacauaucucc

SEQ ID NO: 202016 - RNA, 32 nt, Homo Sapiens
gauguucaugauagaaagaauaaaauguuucu

SEQ ID NO: 202017 - RNA, 32 nt, Homo Sapiens
agaaaacugcaauguaucugguaaaugaguua

SEQ ID NO: 202018 - RNA, 32 nt, Homo Sapiens
aauguggcauuagguauuuggcuguuuauugg

SEQ ID NO: 202019 - RNA, 32 nt, Homo Sapiens
aaaguauaccuuaauaaauauuuuaugaucag

SEQ ID NO: 202020 - RNA, 32 nt, Homo Sapiens
cgagucaccgcgucccucuccugcagcucccg

SEQ ID NO: 202021 - RNA, 32 nt, Homo Sapiens
auucugcccugggcuccucagguaguuggaau

SEQ ID NO: 202022 - RNA, 32 nt, Homo Sapiens
agugauguuuuaggaacugaaaugucacacuu

SEQ ID NO: 202023 - RNA, 32 nt, Homo Sapiens
uggcauuuaaaauaaacauaucaguaaguuuc

SEQ ID NO: 202024 - RNA, 32 nt, Homo Sapiens
aauaaaaaaugaaaagagaaugaugcucaaaa

SEQ ID NO: 202025 - RNA, 32 nt, Homo Sapiens
cgguuccagacacugguuucuugcuuuguuuu

SEQ ID NO: 202026 - RNA, 32 nt, Homo Sapiens
gcagaccccccuccccacagucacauggccac

SEQ ID NO: 202027 - RNA, 32 nt, Homo Sapiens
agagagcaguuaaggcacacagagcaccagcu

SEQ ID NO: 202028 - RNA, 32 nt, Homo Sapiens
cucccucggggugacggaauguucuggaccuu

SEQ ID NO: 202029 - RNA, 32 nt, Homo Sapiens
cgguuguggcagcuggggagguuuggccccaa

SEQ ID NO: 202030 - RNA, 32 nt, Homo Sapiens
gaugcaucaguuccuuaauauacacgugaaau

SEQ ID NO: 202031 - RNA, 32 nt, Homo Sapiens
cugcuuuuacuuucuucucugucuuuaacuuc

SEQ ID NO: 202032 - RNA, 32 nt, Homo Sapiens
ccuguaccugcucccacccagcccuuggugug

SEQ ID NO: 202033 - RNA, 32 nt, Homo Sapiens
aggcaaugcaggaguguggauuaagcaccaga

SEQ ID NO: 202034 - RNA, 28 nt, Homo Sapiens
uuaauaguggcuaagaaugguggcauua

SEQ ID NO: 202035 - RNA, 32 nt, Homo Sapiens
gccaacgugcgcgagcggcggcgcaugcaguc

SEQ ID NO: 202036 - RNA, 32 nt, Homo Sapiens
gucuggggcugagggccagggcccggaugccc

SEQ ID NO: 202037 - RNA, 32 nt, Homo Sapiens
gauauuuuuaagugucauaacuucuaacuauu

SEQ ID NO: 202038 - RNA, 32 nt, Homo Sapiens
gagucuaccaggcaagauaguguuacagggca

SEQ ID NO: 202039 - RNA, 32 nt, Homo Sapiens
ccccaaagugaagaagcuauguguguaucaau

SEQ ID NO: 202040 - RNA, 32 nt, Homo Sapiens
guagcuuaauauaaaaauuaaacuuuauucug

SEQ ID NO: 202041 - RNA, 32 nt, Homo Sapiens
auugauauucuacuggccaugaugccacugaa

SEQ ID NO: 202042 - RNA, 32 nt, Homo Sapiens
ggagaaugugacauagauuugcuggcacaugg

SEQ ID NO: 202043 - RNA, 32 nt, Homo Sapiens
ugaugggaagggcggaggagcugccgaugguc

SEQ ID NO: 202044 - RNA, 32 nt, Homo Sapiens
gggagacgcccgggccgggcgguccugggcuc

SEQ ID NO: 202045 - RNA, 32 nt, Homo Sapiens
guacugggaaaggggaguucacaguacucgga

SEQ ID NO: 202046 - RNA, 32 nt, Homo Sapiens
uucauuuacaagcaagcaggccaggcagcugu

SEQ ID NO: 202047 - RNA, 32 nt, Homo Sapiens
aaccgaaacaacaacuuuacccggcaguccca

SEQ ID NO: 202048 - RNA, 32 nt, Homo Sapiens
gucgagauagaguaaauaugguccaauuaaaa

SEQ ID NO: 202049 - RNA, 32 nt, Homo Sapiens
ugcugugaacucgaccccguguggauagucac

SEQ ID NO: 202050 - RNA, 32 nt, Homo Sapiens
uggacacggacggagggggcuggaccgugagu

SEQ ID NO: 202051 - RNA, 32 nt, Homo Sapiens
agagggaagcggggcacggcgucaucaugcac

SEQ ID NO: 202052 - RNA, 32 nt, Homo Sapiens
gaggagguggcggcgcuggagcuccucccggg

SEQ ID NO: 202053 - RNA, 32 nt, Homo Sapiens
cuuagacaagaguugcuuguccugcugugggc

SEQ ID NO: 202054 - RNA, 32 nt, Homo Sapiens
ggcagcggccccuggaggaggaggcggaggag

SEQ ID NO: 202055 - RNA, 32 nt, Homo Sapiens
acgggcgugcgggguggaaccgcaggaagcgg

SEQ ID NO: 202056 - RNA, 32 nt, Homo Sapiens
gcccucaccucacccuuuuccaacuugcccag

SEQ ID NO: 202057 - RNA, 32 nt, Homo Sapiens
cugacauaaaaugauaauuuuguauauauuau

SEQ ID NO: 202058 - RNA, 32 nt, Homo Sapiens
ugcacucagcaucaccccuuccuggguggcau

SEQ ID NO: 202059 - RNA, 32 nt, Homo Sapiens
cucccuggggacggccacucccuggcugaggg

SEQ ID NO: 202060 - RNA, 32 nt, Homo Sapiens
uaaguuauuuaggcguagaacaaaauuauuca

SEQ ID NO: 202061 - RNA, 32 nt, Homo Sapiens
agugucaaaaauuuaugcagaguccccaacuu

SEQ ID NO: 202062 - RNA, 32 nt, Homo Sapiens
uguggcuccaucuuucaacaugaccaauccag

SEQ ID NO: 202063 - RNA, 32 nt, Homo Sapiens
auuugagucaacaccuggagaaguuagggagu

SEQ ID NO: 202064 - RNA, 32 nt, Homo Sapiens
ugaugagagaauguggaaauagaugugcaguu

SEQ ID NO: 202065 - RNA, 32 nt, Homo Sapiens
uguccucuacaucaauuaacaucgugggucac

SEQ ID NO: 202066 - RNA, 32 nt, Homo Sapiens
ugggcgcuaagauggcggcggcgugaguugca

SEQ ID NO: 202067 - RNA, 32 nt, Homo Sapiens
cuguuguguaauggaaaugcugacuuucacuu

SEQ ID NO: 202068 - RNA, 32 nt, Homo Sapiens
uuaggaagggaaggugggacaggcaggcagga

SEQ ID NO: 202069 - RNA, 32 nt, Homo Sapiens
aggggggagacggggauuaggcaucccagagg

SEQ ID NO: 202070 - RNA, 32 nt, Homo Sapiens
uugcccgggagcccuggcaugauggggugagg

SEQ ID NO: 202071 - RNA, 32 nt, Homo Sapiens
gugugggguggccccagggccuggccccacuc

SEQ ID NO: 202072 - RNA, 32 nt, Homo Sapiens
ucaaagaagauucaugaaaaauuuauauccaa

SEQ ID NO: 202073 - RNA, 32 nt, Homo Sapiens
aagaaccgcccucuagaggcagcccuccuugc

SEQ ID NO: 202074 - RNA, 32 nt, Homo Sapiens
ucauauuagaaaaaucuagggauucuaaugga

SEQ ID NO: 202075 - RNA, 32 nt, Homo Sapiens
agucuuaucuggccugguuauuuccuugcggg

SEQ ID NO: 202076 - RNA, 32 nt, Homo Sapiens
ggagagcgcgcauggcggcugugggaccgcgg

SEQ ID NO: 202077 - RNA, 32 nt, Homo Sapiens
uuauuuguuucauuacagaguagcuguaggua

SEQ ID NO: 202078 - RNA, 32 nt, Homo Sapiens
ccucugcccugcccuccagccugggacaauaa

SEQ ID NO: 202079 - RNA, 32 nt, Homo Sapiens
uuuccagcccgcaggucgccacggccaucccu

SEQ ID NO: 202080 - RNA, 32 nt, Homo Sapiens
ccaugggcacgcgccgucuccgggccauggcg

SEQ ID NO: 202081 - RNA, 32 nt, Homo Sapiens
auguacaggacacauaaagagcugaaaugcuc

SEQ ID NO: 202082 - RNA, 32 nt, Homo Sapiens
agccuaugagauuguggacauauaacaagaaa

SEQ ID NO: 202083 - RNA, 32 nt, Homo Sapiens
aaggucaugcuguuacagguguaguuugugug

SEQ ID NO: 202084 - RNA, 32 nt, Homo Sapiens
uaaaacccaaaauaauagcuuugcuuagcccu

SEQ ID NO: 202085 - RNA, 32 nt, Homo Sapiens
gccccagggacccaccaguggggcugggagaa

SEQ ID NO: 202086 - RNA, 32 nt, Homo Sapiens
aggaucugguguuugaggaggccugcggguac

SEQ ID NO: 202087 - RNA, 32 nt, Homo Sapiens
uugauggagcuacuacuguaaugcgugaacua

SEQ ID NO: 202088 - RNA, 32 nt, Homo Sapiens
gggguugguguuuggcggcgccagagcagcgg

SEQ ID NO: 202089 - RNA, 29 nt, Homo Sapiens
gccacgucguguuucacaugucggagucg

SEQ ID NO: 202090 - RNA, 32 nt, Homo Sapiens
ucaauauacauuuuuguuuguuugcuuguccu

SEQ ID NO: 202091 - RNA, 32 nt, Homo Sapiens
cucgucgcgaccggcccgggccgcaggacgcc

SEQ ID NO: 202092 - RNA, 32 nt, Homo Sapiens
ccagggcguuggggcugcuccugggccgcggg

SEQ ID NO: 202093 - RNA, 32 nt, Homo Sapiens
ggcuggaggggcuagaaggcgagaggggcugg

SEQ ID NO: 202094 - RNA, 32 nt, Homo Sapiens
agauuaugaagaugagagucacuccccaggaa

SEQ ID NO: 202095 - RNA, 32 nt, Homo Sapiens
gccaaggugggcaccacccuggagcgggcccc

SEQ ID NO: 202096 - RNA, 32 nt, Homo Sapiens
guuuuuauuuuugugucugugaaagugccaag

SEQ ID NO: 202097 - RNA, 32 nt, Homo Sapiens
auuguauuuacuuagccgcuucugggagccac

SEQ ID NO: 202098 - RNA, 32 nt, Homo Sapiens
uaacgcugugugaauauaaagaguaguuugca

SEQ ID NO: 202099 - RNA, 32 nt, Homo Sapiens
ccuauucucauuuuuucuuaauuuucuuuaau

SEQ ID NO: 202100 - RNA, 32 nt, Homo Sapiens
ccacacccucacuguuauguggaccaaaaugu

SEQ ID NO: 202101 - RNA, 32 nt, Homo Sapiens
ugaaauaauguaauuauagagauggaaaacag

SEQ ID NO: 202102 - RNA, 32 nt, Homo Sapiens
aaauuaaacugggcaauagccuaagaaggggg

SEQ ID NO: 202103 - RNA, 32 nt, Homo Sapiens
uugaucgccgagggcucucugcucuucagagu

SEQ ID NO: 202104 - RNA, 32 nt, Homo Sapiens
aaagccaaugaguuuuuuuuuaauucuccuuu

SEQ ID NO: 202105 - RNA, 32 nt, Homo Sapiens
uggagagccaaggccucuguuuuagucuuuca

SEQ ID NO: 202106 - RNA, 30 nt, Homo Sapiens
aaauaguggggcgaguaugucauggggaga

SEQ ID NO: 202107 - RNA, 32 nt, Homo Sapiens
uugcuucaguugccaagaaguuccucaucucc

SEQ ID NO: 202108 - RNA, 32 nt, Homo Sapiens
agacaccuggggauugcgucuggggccuccag

SEQ ID NO: 202109 - RNA, 31 nt, Homo Sapiens
uccccugggcccggcguccagcgcgcagacg

SEQ ID NO: 202110 - RNA, 27 nt, Homo Sapiens
acugccuaguucuucagcccuagaugg

SEQ ID NO: 202111 - RNA, 32 nt, Homo Sapiens
cacuuugauuuuucuuuuuccucccuuagaaa

SEQ ID NO: 202112 - RNA, 32 nt, Homo Sapiens
ucaggaugccuuuucuaccccaucccucacag

SEQ ID NO: 202113 - RNA, 31 nt, Homo Sapiens
cgcgcgcugccgggcggacagaggcugaggc

SEQ ID NO: 202114 - RNA, 32 nt, Homo Sapiens
cacgcacacagugucuguguacauguacagau

SEQ ID NO: 202115 - RNA, 32 nt, Homo Sapiens
gcugagcuagccaaaugugucagugcgaaaca

SEQ ID NO: 202116 - RNA, 32 nt, Homo Sapiens
gcccugcagugaggacacgcccugcccagucc

SEQ ID NO: 202117 - RNA, 32 nt, Homo Sapiens
cccauccuucucuuuguagagaauagagacgu

SEQ ID NO: 202118 - RNA, 32 nt, Homo Sapiens
acccagaauugucuuguuuaauuuauacuuuc

SEQ ID NO: 202119 - RNA, 32 nt, Homo Sapiens
cuugaugauaaaccaguaaauaugaguuuuga

SEQ ID NO: 202120 - RNA, 32 nt, Homo Sapiens
acacaaaauuucaaaacaaaaacaagagggca

SEQ ID NO: 202121 - RNA, 32 nt, Homo Sapiens
guauguguaucuuuauuucagaugucacccag

SEQ ID NO: 202122 - RNA, 32 nt, Homo Sapiens
aucauucaucccuuaacaggcacauuagaucu

SEQ ID NO: 202123 - RNA, 32 nt, Homo Sapiens
aaaugcccaucaguguggcucccuuugaagaa

SEQ ID NO: 202124 - RNA, 32 nt, Homo Sapiens
cauauuugaggaaguaucuauuugagcacuga

SEQ ID NO: 202125 - RNA, 32 nt, Homo Sapiens
cuuaguaagaaucaucuagguuaugcugaagu

SEQ ID NO: 202126 - RNA, 30 nt, Homo Sapiens
uuauuuccacuugcaggccagcuuaaccuc

SEQ ID NO: 202127 - RNA, 32 nt, Homo Sapiens
uguuggauaugccaauaagaucccaagccaua

SEQ ID NO: 202128 - RNA, 32 nt, Homo Sapiens
uguggccccugccaugagagcagcguguacaa

SEQ ID NO: 202129 - RNA, 28 nt, Homo Sapiens
uggagaaauggcaucauuauaagcuaug

SEQ ID NO: 202130 - RNA, 32 nt, Homo Sapiens
uuuccaagacaauccuggcauaaacaggccca

SEQ ID NO: 202131 - RNA, 32 nt, Homo Sapiens
gccacccggacgccgcugugcagugcguggcc

SEQ ID NO: 202132 - RNA, 32 nt, Homo Sapiens
gaauauuaugcaggcuuuaaacaucaaaaaag

SEQ ID NO: 202133 - RNA, 32 nt, Homo Sapiens
gggcucccacgugguucgccucaugggccugg

SEQ ID NO: 202134 - RNA, 32 nt, Homo Sapiens
uuucacacuguguuuaccacuccaucaccucu

SEQ ID NO: 202135 - RNA, 32 nt, Homo Sapiens
gaggacugccagcacacugucaccucucacca

SEQ ID NO: 202136 - RNA, 32 nt, Homo Sapiens
aggcgucucuccucagucggcuugucgccugc

SEQ ID NO: 202137 - RNA, 32 nt, Homo Sapiens
cuccagaacggggacccccaccccgaccgggg

SEQ ID NO: 202138 - RNA, 32 nt, Homo Sapiens
ugacgggguguguggcccgaggaagcuggaca

SEQ ID NO: 202139 - RNA, 32 nt, Homo Sapiens
uggaagaguguuagauuuuucuuaauuccacu

SEQ ID NO: 202140 - RNA, 32 nt, Homo Sapiens
agaaggguagcugggcggggcucgaggcuggu

SEQ ID NO: 202141 - RNA, 32 nt, Homo Sapiens
ggucuccggccgcgcccgcgcuggccgcugau

SEQ ID NO: 202142 - RNA, 32 nt, Homo Sapiens
gggcaauguucccuuguuggugggcccccaag

SEQ ID NO: 202143 - RNA, 32 nt, Homo Sapiens
ucaagauuugaaauacuuaagcaugaagugac

SEQ ID NO: 202144 - RNA, 32 nt, Homo Sapiens
ggccagugcagccccagguucccgagcggcag

SEQ ID NO: 202145 - RNA, 32 nt, Homo Sapiens
cagccuccggaguagcugggaauacaggugca

SEQ ID NO: 202146 - RNA, 32 nt, Homo Sapiens
gcgcacugcagccccaggccccggccccccac

SEQ ID NO: 202147 - RNA, 32 nt, Homo Sapiens
cacuccucucggcuccuccccggcagcggcgg

SEQ ID NO: 202148 - RNA, 32 nt, Homo Sapiens
cacacugaggggacgcggggcugggccauggc

SEQ ID NO: 202149 - RNA, 32 nt, Homo Sapiens
cugcaggagcugaugagccgcugcuggcagcc

SEQ ID NO: 202150 - RNA, 32 nt, Homo Sapiens
aaaucgagaaaacagauguggguuucuuuaag

SEQ ID NO: 202151 - RNA, 32 nt, Homo Sapiens
cgcucuggccccaggcuugugccccacccugg

SEQ ID NO: 202152 - RNA, 32 nt, Homo Sapiens
ccggguacccgcggcugugggggaggaggagg

SEQ ID NO: 202153 - RNA, 32 nt, Homo Sapiens
agcagagaggccgggggucuucagguggggcc

SEQ ID NO: 202154 - RNA, 32 nt, Homo Sapiens
aagauaaauuugcagaauauacucaaauuaga

SEQ ID NO: 202155 - RNA, 32 nt, Homo Sapiens
uacggacgugcagcugagcuguccguguccca

SEQ ID NO: 202156 - RNA, 30 nt, Homo Sapiens
gacggcggcgacggcgcggguuccuagcgg

SEQ ID NO: 202157 - RNA, 32 nt, Homo Sapiens
gucagccggaauguccugugaagugcuuguca

SEQ ID NO: 202158 - RNA, 32 nt, Homo Sapiens
acucccgcgccgggacgcggggugggaccagg

SEQ ID NO: 202159 - RNA, 32 nt, Homo Sapiens
gcccagagcuucccuuucuggccgccagaugg

SEQ ID NO: 202160 - RNA, 32 nt, Homo Sapiens
gcgggagcucugcgggcgcuggaaccugcaga

SEQ ID NO: 202161 - RNA, 32 nt, Homo Sapiens
cgaauuucucccgaagcccgcggaggagcggg

SEQ ID NO: 202162 - RNA, 32 nt, Homo Sapiens
ugcccugcugucuacauuuuucuauggagcuu

SEQ ID NO: 202163 - RNA, 32 nt, Homo Sapiens
ccccauccugccgcccgagguggcugccugga

SEQ ID NO: 202164 - RNA, 32 nt, Homo Sapiens
ugacagguuugcuacacacagccccggacugu

SEQ ID NO: 202165 - RNA, 30 nt, Homo Sapiens
aaguggcuacuugccauuuugacaucaacu

SEQ ID NO: 202166 - RNA, 32 nt, Homo Sapiens
aaucaccccucuaccuuugauauuccacuuag

SEQ ID NO: 202167 - RNA, 32 nt, Homo Sapiens
aucccagccccccagagcugcccucagcaucc

SEQ ID NO: 202168 - RNA, 32 nt, Homo Sapiens
agaccaaugcaguagcuuauuuccaagccuug

SEQ ID NO: 202169 - RNA, 32 nt, Homo Sapiens
auggggucuaggggagacccaggcccauuauu

SEQ ID NO: 202170 - RNA, 32 nt, Homo Sapiens
ccaggugcaaagggcucccggcgcccggauuu

SEQ ID NO: 202171 - RNA, 32 nt, Homo Sapiens
uucacuggagacgggguuucacuguguuagcc

SEQ ID NO: 202172 - RNA, 31 nt, Homo Sapiens
gcgcgccagccggucggcaggggucacgcgg

SEQ ID NO: 202173 - RNA, 32 nt, Homo Sapiens
ccucuugcauaaucuuuuuguuuucuagacag

SEQ ID NO: 202174 - RNA, 32 nt, Homo Sapiens
aaaaaagggggaggauuguucacucacuguua

SEQ ID NO: 202175 - RNA, 32 nt, Homo Sapiens
cgcgcaaugcauggcgauuccaggcgcugaac

SEQ ID NO: 202176 - RNA, 32 nt, Homo Sapiens
ugaaaaccuagaugcacagcacuuccuugucc

SEQ ID NO: 202177 - RNA, 32 nt, Homo Sapiens
gguggaaucucugcugacgucacgucacuccc

SEQ ID NO: 202178 - RNA, 32 nt, Homo Sapiens
auugggaugaacuggaggaagaagcccgaaaa

SEQ ID NO: 202179 - RNA, 32 nt, Homo Sapiens
cauguggaaaaggaaacguuugcuuccccucc

SEQ ID NO: 202180 - RNA, 32 nt, Homo Sapiens
cuuuuaugguuuuuaauuuuuaucaggacuaa

SEQ ID NO: 202181 - RNA, 32 nt, Homo Sapiens
aagcuggagaucugaacccagcccauuugcac

SEQ ID NO: 202182 - RNA, 32 nt, Homo Sapiens
guauguauguuaauauuaaagcaacugagugu

SEQ ID NO: 202183 - RNA, 32 nt, Homo Sapiens
gacauagaagauggggaaaugccaaugggcaa

SEQ ID NO: 202184 - RNA, 32 nt, Homo Sapiens
gcugggcugggcggccggcggucguggggcag

SEQ ID NO: 202185 - RNA, 32 nt, Homo Sapiens
cauuuucugugguuaaaaaugaucuccagaau

SEQ ID NO: 202186 - RNA, 32 nt, Homo Sapiens
ugcaaucaaggugguucuggugcggggguggg

SEQ ID NO: 202187 - RNA, 32 nt, Homo Sapiens
ggaggacccuucaucuucuccucugccagggg

SEQ ID NO: 202188 - RNA, 32 nt, Homo Sapiens
uccacagcgacgccugcccagcccuccucccc

SEQ ID NO: 202189 - RNA, 32 nt, Homo Sapiens
cccgcauggaccgcggcuuccgccggguagcg

SEQ ID NO: 202190 - RNA, 32 nt, Homo Sapiens
gaauuuaccauuucuuuuuuaaaacaugucua

SEQ ID NO: 202191 - RNA, 32 nt, Homo Sapiens
accuggccaguuucuaucauaaauuuuaaaug

SEQ ID NO: 202192 - RNA, 32 nt, Homo Sapiens
cccagacacagaguucucauucuccaaacgug

SEQ ID NO: 202193 - RNA, 32 nt, Homo Sapiens
uuggacggccccagugacccucagugacccag

SEQ ID NO: 202194 - RNA, 32 nt, Homo Sapiens
uguuuguuaagcacagccuguuucuuggaagu

SEQ ID NO: 202195 - RNA, 32 nt, Homo Sapiens
augugcugccugggcgcuaucacgugauggcc

SEQ ID NO: 202196 - RNA, 26 nt, Homo Sapiens
uggccgaacuucugaucagggaugua

SEQ ID NO: 202197 - RNA, 32 nt, Homo Sapiens
auuuuuccuuuaaauuucagcuuuggcucugg

SEQ ID NO: 202198 - RNA, 32 nt, Homo Sapiens
gaauuacagcuauuuauuacgaagcacucugu

SEQ ID NO: 202199 - RNA, 32 nt, Homo Sapiens
caaaguuguggccaagcccaggcgcuguuaug

SEQ ID NO: 202200 - RNA, 32 nt, Homo Sapiens
auuugaucuguauuuguauaugcugaugcaau

SEQ ID NO: 202201 - RNA, 32 nt, Homo Sapiens
uuccacgcccuuccgauuccaccuccgccucc

SEQ ID NO: 202202 - RNA, 32 nt, Homo Sapiens
auugguaucaaaagaauucuuacaggaauauu

SEQ ID NO: 202203 - RNA, 32 nt, Homo Sapiens
aagaaagaagguaucuggaaagaaauagagaa

SEQ ID NO: 202204 - RNA, 32 nt, Homo Sapiens
gagcucaggacacuuggcuuuggggggaagga

SEQ ID NO: 202205 - RNA, 32 nt, Homo Sapiens
caacauggcaaguacaguacuuugaauuuuag

SEQ ID NO: 202206 - RNA, 32 nt, Homo Sapiens
gucaccaguuuagagaucagucaaauuggaaa

SEQ ID NO: 202207 - RNA, 31 nt, Homo Sapiens
ucuuugugaaacauuuguucaaguucuaaua

SEQ ID NO: 202208 - RNA, 32 nt, Homo Sapiens
agggcucggcccgcgccgccccaugugacccg

SEQ ID NO: 202209 - RNA, 32 nt, Homo Sapiens
uuaccauuuuguuuuucuugaauagucugugu

SEQ ID NO: 202210 - RNA, 29 nt, Homo Sapiens
ugaaauauauguauuucaugguacguauu

SEQ ID NO: 202211 - RNA, 32 nt, Homo Sapiens
gggagauugaguuuucgggaaguagcggaugg

SEQ ID NO: 202212 - RNA, 32 nt, Homo Sapiens
ugaaugaaaaucaacagaugaauaaaugguuc

SEQ ID NO: 202213 - RNA, 32 nt, Homo Sapiens
uuccauuauugucaaggcuuuggcuagaaugg

SEQ ID NO: 202214 - RNA, 32 nt, Homo Sapiens
acacuucuugacaucacccuauucauuuccuu

SEQ ID NO: 202215 - RNA, 32 nt, Homo Sapiens
aauuuucuauauuauaaacauaaaauaaguaa

SEQ ID NO: 202216 - RNA, 32 nt, Homo Sapiens
gcccguuggggaucucagcaguggggcaggag

SEQ ID NO: 202217 - RNA, 32 nt, Homo Sapiens
gcugugggaagccgagaguccuggacuguucg

SEQ ID NO: 202218 - RNA, 32 nt, Homo Sapiens
guaagaaaucacuuuuaagaaaacauuuuuag

SEQ ID NO: 202219 - RNA, 30 nt, Homo Sapiens
agccagggagguggaccgcaugcuggcccu

SEQ ID NO: 202220 - RNA, 32 nt, Homo Sapiens
ggggucaaggccaggcagcggggcgcgucugc

SEQ ID NO: 202221 - RNA, 32 nt, Homo Sapiens
cuggcuccuccgcgcgucgccggcgcuccacc

SEQ ID NO: 202222 - RNA, 32 nt, Homo Sapiens
gucucggugccugagccugcucccuccgcccg

SEQ ID NO: 202223 - RNA, 32 nt, Homo Sapiens
cggccuuggguuggcuggcccagcugcucagg

SEQ ID NO: 202224 - RNA, 32 nt, Homo Sapiens
gcggccgcgucgacccggcgcagaaaccguaa

SEQ ID NO: 202225 - RNA, 32 nt, Homo Sapiens
ggaaucacagaaacuggggaagggaaaacaaa

SEQ ID NO: 202226 - RNA, 32 nt, Homo Sapiens
gcaggagcuggacaaugcugcuggcaacacug

SEQ ID NO: 202227 - RNA, 32 nt, Homo Sapiens
ggauuuggaaucugggguggggucugaagaau

SEQ ID NO: 202228 - RNA, 32 nt, Homo Sapiens
uaccuguaaugccagcacuuugggaggccaag

SEQ ID NO: 202229 - RNA, 32 nt, Homo Sapiens
uagaguugagagacaaagguaauuauaaaccu

SEQ ID NO: 202230 - RNA, 32 nt, Homo Sapiens
uaacuucagagguaaucaugauauguuauuuu

SEQ ID NO: 202231 - RNA, 31 nt, Homo Sapiens
ugccgcuugcaccugcagccccgcgcucuac

SEQ ID NO: 202232 - RNA, 32 nt, Homo Sapiens
auauguuguaauaaaacuuaugcuaguuuauu

SEQ ID NO: 202233 - RNA, 32 nt, Homo Sapiens
ugcagggcgggaaggggauucguggcgacggc

SEQ ID NO: 202234 - RNA, 32 nt, Homo Sapiens
ggagugccucagagauucugcuaugacuuugg

SEQ ID NO: 202235 - RNA, 32 nt, Homo Sapiens
uuuaggcuuuuguauguuucagaugcaaacau

SEQ ID NO: 202236 - RNA, 32 nt, Homo Sapiens
gagugcagugguguaaucuuggcucacugcag

SEQ ID NO: 202237 - RNA, 32 nt, Homo Sapiens
cugcuuccaaauaguacuagaaagucuugcuu

SEQ ID NO: 202238 - RNA, 32 nt, Homo Sapiens
ccugaggcgggugggcacggccgaccauccac

SEQ ID NO: 202239 - RNA, 31 nt, Homo Sapiens
uugauuuggaauaauuaauagcuacuggaca

SEQ ID NO: 202240 - RNA, 32 nt, Homo Sapiens
gaguaaugaaauucuugccaugugcugaggag

SEQ ID NO: 202241 - RNA, 32 nt, Homo Sapiens
ucucuccgucuucccgccaucauugugcugua

SEQ ID NO: 202242 - RNA, 32 nt, Homo Sapiens
cuucuuucuaccuuucugcucccggccaugag

SEQ ID NO: 202243 - RNA, 32 nt, Homo Sapiens
cccugccugccaggggcccuggcguuugccuc

SEQ ID NO: 202244 - RNA, 32 nt, Homo Sapiens
aaugagcuuaaacugcaagugauuuaaaaauu

SEQ ID NO: 202245 - RNA, 32 nt, Homo Sapiens
aggucauagaucugguucuggaggacagaagu

SEQ ID NO: 202246 - RNA, 32 nt, Homo Sapiens
aaauuuguuucuuuuuaaaauuuuuugagagu

SEQ ID NO: 202247 - RNA, 32 nt, Homo Sapiens
uaaaauuugauuccuuuuuuucuuaugaaaaa

SEQ ID NO: 202248 - RNA, 32 nt, Homo Sapiens
cugcccugcaguaucucuaaccaggggacuuu

SEQ ID NO: 202249 - RNA, 32 nt, Homo Sapiens
ugcucuccuuccccgcccccagccugcuaagu

SEQ ID NO: 202250 - RNA, 32 nt, Homo Sapiens
ugaauucauuauggugauacacauaugugaau

SEQ ID NO: 202251 - RNA, 32 nt, Homo Sapiens
ggaagcuuuguaccucuuuugcaggaucuggg

SEQ ID NO: 202252 - RNA, 32 nt, Homo Sapiens
aagcaggcagaucaccugaggucaggaguuug

SEQ ID NO: 202253 - RNA, 32 nt, Homo Sapiens
gcaugacacaccugggggaaauuggcgauguc

SEQ ID NO: 202254 - RNA, 32 nt, Homo Sapiens
ucugaguaucacaucacacaaaaggaacaaaa

SEQ ID NO: 202255 - RNA, 32 nt, Homo Sapiens
uucagucuccuuuucuuucucaccauuuauca

SEQ ID NO: 202256 - RNA, 32 nt, Homo Sapiens
ccuucauucacugaucucugggaaggaggaug

SEQ ID NO: 202257 - RNA, 32 nt, Homo Sapiens
aacuccagacuucuccuucuuuuuugcccuug

SEQ ID NO: 202258 - RNA, 32 nt, Homo Sapiens
aaaaugaaaugaauauuuugcaagaaaaaguu

SEQ ID NO: 202259 - RNA, 32 nt, Homo Sapiens
ugcuggugccuuauagcuccccucccagugga

SEQ ID NO: 202260 - RNA, 32 nt, Homo Sapiens
gagcccagaccgugggagagccagagcaagag

SEQ ID NO: 202261 - RNA, 30 nt, Homo Sapiens
agaagauggaggaggaggguggcagcagcg

SEQ ID NO: 202262 - RNA, 32 nt, Homo Sapiens
cuuguuuguauuucuucagguauuuucaauug

SEQ ID NO: 202263 - RNA, 32 nt, Homo Sapiens
uagguccugcgggccgaccguccccggcgggg

SEQ ID NO: 202264 - RNA, 32 nt, Homo Sapiens
uguuauuuuuauuugcacuugcuggucuuugu

SEQ ID NO: 202265 - RNA, 32 nt, Homo Sapiens
aagugacgauacuuuuggcgcgcgcgguugcu

SEQ ID NO: 202266 - RNA, 32 nt, Homo Sapiens
aaaacgugaccguaggcuguuuuuuaguuauu

SEQ ID NO: 202267 - RNA, 32 nt, Homo Sapiens
ucuggcuagcuaauuuuuguauuuuuaguaga

SEQ ID NO: 202268 - RNA, 32 nt, Homo Sapiens
gccuugaguacauaccauacagcaaauaaaug

SEQ ID NO: 202269 - RNA, 32 nt, Homo Sapiens
cuuauucaaaaauaacaucugacuacuauaaa

SEQ ID NO: 202270 - RNA, 32 nt, Homo Sapiens
ggccacacgcgguggcaugcauggaggacucu

SEQ ID NO: 202271 - RNA, 32 nt, Homo Sapiens
agccgcagccgccgcccccuccccugcagcga

SEQ ID NO: 202272 - RNA, 32 nt, Homo Sapiens
guauaucucagauacauggguguggcauugaa

SEQ ID NO: 202273 - RNA, 32 nt, Homo Sapiens
uucaguuugauuguccugaggaugccaacaca

SEQ ID NO: 202274 - RNA, 32 nt, Homo Sapiens
ccaggccggcgccaccacgccuuccgccgagu

SEQ ID NO: 202275 - RNA, 32 nt, Homo Sapiens
gcucuuucucuagguuuaauucuuuuccaugg

SEQ ID NO: 202276 - RNA, 32 nt, Homo Sapiens
agugagccgagaucaugcuacugcaugccagc

SEQ ID NO: 202277 - RNA, 32 nt, Homo Sapiens
uggccgcuccucccugcuccucaugggaagau

SEQ ID NO: 202278 - RNA, 32 nt, Homo Sapiens
ccacagcguaccugccccuuucugcccuccug

SEQ ID NO: 202279 - RNA, 32 nt, Homo Sapiens
gagccgcccucccuuccccaaggauccacucc

SEQ ID NO: 202280 - RNA, 32 nt, Homo Sapiens
aggacaggagagauuuacaaauaguguuuugg

SEQ ID NO: 202281 - RNA, 32 nt, Homo Sapiens
uuuucuaauaauaucuuacauuuguacagcau

SEQ ID NO: 202282 - RNA, 32 nt, Homo Sapiens
uuauggcugacauauuuacggcugacaaacuc

SEQ ID NO: 202283 - RNA, 32 nt, Homo Sapiens
uugugaugcaauuuccagaaauccauuugugu

SEQ ID NO: 202284 - RNA, 32 nt, Homo Sapiens
aaugcaggaugaaaugucaaaggucauuuuau

SEQ ID NO: 202285 - RNA, 32 nt, Homo Sapiens
acagggcagugggacagggcauggccaggugg

SEQ ID NO: 202286 - RNA, 32 nt, Homo Sapiens
agcccagccagccccagacuccagugcaccag

SEQ ID NO: 202287 - RNA, 32 nt, Homo Sapiens
gcacccagcauagagaggauggcugcccaucc

SEQ ID NO: 202288 - RNA, 32 nt, Homo Sapiens
ccccaccccuccccucacggcgaagguuuccu

SEQ ID NO: 202289 - RNA, 32 nt, Homo Sapiens
uccauuuuauagaagaggaaauuaaggcuuga

SEQ ID NO: 202290 - RNA, 32 nt, Homo Sapiens
ggcccuccugucccucaccccagccacaacaa

SEQ ID NO: 202291 - RNA, 32 nt, Homo Sapiens
ugcagcaaaaacuguuacuguguuuauuauau

SEQ ID NO: 202292 - RNA, 32 nt, Homo Sapiens
cugggagccagccccaggcuccagggccacgg

SEQ ID NO: 202293 - RNA, 32 nt, Homo Sapiens
ugggccagaaaagcagggacaagcacaggugg

SEQ ID NO: 202294 - RNA, 32 nt, Homo Sapiens
cagcccuugacccuugaguccuggcuuuggcu

SEQ ID NO: 202295 - RNA, 32 nt, Homo Sapiens
gggcaggcaugguggcucaugccuguaguccc

SEQ ID NO: 202296 - RNA, 32 nt, Homo Sapiens
agcccagcgcugccaggccccgaggguucugu

SEQ ID NO: 202297 - RNA, 32 nt, Homo Sapiens
ggcuuuaggaagauaccugggggauggagggg

SEQ ID NO: 202298 - RNA, 32 nt, Homo Sapiens
gcugugaccuguuuuucuuucucauucacauu

SEQ ID NO: 202299 - RNA, 32 nt, Homo Sapiens
cauuuuuauuggugaaagaccauuccagccau

SEQ ID NO: 202300 - RNA, 32 nt, Homo Sapiens
ccgcucacuccagccgaggcccccgcauauag

SEQ ID NO: 202301 - RNA, 32 nt, Homo Sapiens
aaggacuugggagcucucuuugaaaggcaaac

SEQ ID NO: 202302 - RNA, 32 nt, Homo Sapiens
ugccacgauuugucuuuuuuuauauaaugaac

SEQ ID NO: 202303 - RNA, 32 nt, Homo Sapiens
ccucacugaggcaccccacuuccagugaagaa

SEQ ID NO: 202304 - RNA, 32 nt, Homo Sapiens
acauaacagaaaaaggugaaaacacucucccu

SEQ ID NO: 202305 - RNA, 31 nt, Homo Sapiens
ugggcuuaauaaaaauauuugugaucauaaa

SEQ ID NO: 202306 - RNA, 32 nt, Homo Sapiens
aggugugugcuagguuuggagauacaagguaa

SEQ ID NO: 202307 - RNA, 32 nt, Homo Sapiens
cuguggcucagccccagcucccaaggccugcc

SEQ ID NO: 202308 - RNA, 32 nt, Homo Sapiens
cagagcgccaccuccagaucagauggggacac

SEQ ID NO: 202309 - RNA, 32 nt, Homo Sapiens
aaaauauuuacuauuaugcuuauuagaacaaa

SEQ ID NO: 202310 - RNA, 32 nt, Homo Sapiens
gaagccggggcuggcccggccgggagacuccc

SEQ ID NO: 202311 - RNA, 32 nt, Homo Sapiens
uguaucacuguagagggaaggaacagaggccc

SEQ ID NO: 202312 - RNA, 32 nt, Homo Sapiens
aaauucauggcuuuuucuuuuuuugcauauua

SEQ ID NO: 202313 - RNA, 32 nt, Homo Sapiens
acauucuuauauuauuucauguauauugaaga

SEQ ID NO: 202314 - RNA, 32 nt, Homo Sapiens
aggggagagcaagggggagagaucuagauugg

SEQ ID NO: 202315 - RNA, 32 nt, Homo Sapiens
uucucuuucuuuugccuauuaaaccucugcuc

SEQ ID NO: 202316 - RNA, 32 nt, Homo Sapiens
ccauaaaggacacccccuucucucuagaaaga

SEQ ID NO: 202317 - RNA, 32 nt, Homo Sapiens
ugccccucccacccggccccgcccaggcacgg

SEQ ID NO: 202318 - RNA, 32 nt, Homo Sapiens
caacgcagcuccgcuuucauuucuuucacaua

SEQ ID NO: 202319 - RNA, 32 nt, Homo Sapiens
agcuucccaagccccaucaauaaagccccugu

SEQ ID NO: 202320 - RNA, 32 nt, Homo Sapiens
gccuggccacccaaaggcaacucaggggugga

SEQ ID NO: 202321 - RNA, 32 nt, Homo Sapiens
guuuuggaaaauuuaaaugcugcagauuugug

SEQ ID NO: 202322 - RNA, 32 nt, Homo Sapiens
cgacaucuuauguagaugauccacaacuucaa

SEQ ID NO: 202323 - RNA, 32 nt, Homo Sapiens
uguuuuguaaaaugaagaccagcaaauguagg

SEQ ID NO: 202324 - RNA, 31 nt, Homo Sapiens
caggguggugaaguuuuuaauugguguucau

SEQ ID NO: 202325 - RNA, 32 nt, Homo Sapiens
uuuuguguguuuuuauuuacccuaaccuguca

SEQ ID NO: 202326 - RNA, 32 nt, Homo Sapiens
gcucaccuggaacagggcuggggcuggguugg

SEQ ID NO: 202327 - RNA, 32 nt, Homo Sapiens
auaucugcuggccaccuguaugucuucuuugg

SEQ ID NO: 202328 - RNA, 32 nt, Homo Sapiens
aaagcaggcaacaaaaucuccuggcuuuacag

SEQ ID NO: 202329 - RNA, 32 nt, Homo Sapiens
ugaguucuuuuggucccagagaggcagccugg

SEQ ID NO: 202330 - RNA, 32 nt, Homo Sapiens
gaaagcuaucuagggacgagaucuagaaucaa

SEQ ID NO: 202331 - RNA, 32 nt, Homo Sapiens
ugcccuaguuuugccuucuccaauccacucuu

SEQ ID NO: 202332 - RNA, 32 nt, Homo Sapiens
ccaagggagacgggcucagucaacacauauuu

SEQ ID NO: 202333 - RNA, 32 nt, Homo Sapiens
caguuugcaggaagaaaggaagagaauggaaa

SEQ ID NO: 202334 - RNA, 32 nt, Homo Sapiens
uuauauuuaaggauuaugcugcacuguacuac

SEQ ID NO: 202335 - RNA, 32 nt, Homo Sapiens
cagccgggcccagcucuucuguccuuggccac

SEQ ID NO: 202336 - RNA, 32 nt, Homo Sapiens
cguaaagaggauguguggcauuuucacuuuug

SEQ ID NO: 202337 - RNA, 31 nt, Homo Sapiens
cccgcuggagcuggugcgacggccugagcgc

SEQ ID NO: 202338 - RNA, 32 nt, Homo Sapiens
uuccugguacacgagucguuccucuacaagcg

SEQ ID NO: 202339 - RNA, 32 nt, Homo Sapiens
ccaacgggucacacagagaaaccugagucuag

SEQ ID NO: 202340 - RNA, 32 nt, Homo Sapiens
acuagaagcugaucugauugguccaacaguuu

SEQ ID NO: 202341 - RNA, 32 nt, Homo Sapiens
gccuuugguuacuuuaauuacuccauggaaga

SEQ ID NO: 202342 - RNA, 32 nt, Homo Sapiens
cugccugggaggggagccuggaccccccucuu

SEQ ID NO: 202343 - RNA, 32 nt, Homo Sapiens
gcaggcacuugaaaauggguguguuuucuucc

SEQ ID NO: 202344 - RNA, 32 nt, Homo Sapiens
auggcuaaauauguauuuguugaaacauguau

SEQ ID NO: 202345 - RNA, 32 nt, Homo Sapiens
ucugcagugccagcugacuuaagggagugaac

SEQ ID NO: 202346 - RNA, 32 nt, Homo Sapiens
acucuggccugugugcugggcuccacauugga

SEQ ID NO: 202347 - RNA, 32 nt, Homo Sapiens
agaugccagggacccacggagcccuuaugaca

SEQ ID NO: 202348 - RNA, 32 nt, Homo Sapiens
ugcuugaguugacacagggagcuccaggacuc

SEQ ID NO: 202349 - RNA, 32 nt, Homo Sapiens
gucaaacugccaaauaaaaauauuucaguagu

SEQ ID NO: 202350 - RNA, 32 nt, Homo Sapiens
agagaucggggcggggguuggggggcaagcgg

SEQ ID NO: 202351 - RNA, 32 nt, Homo Sapiens
uacaucaaucuagagaaagagaaggacgaccc

SEQ ID NO: 202352 - RNA, 32 nt, Homo Sapiens
acuaguuuuagccagaucuuugccaaacauuc

SEQ ID NO: 202353 - RNA, 32 nt, Homo Sapiens
uucuuaagaucuaagaauuugcugaaagcauu

SEQ ID NO: 202354 - RNA, 32 nt, Homo Sapiens
gcaaaaugucauuguucucccuccuaccuguc

SEQ ID NO: 202355 - RNA, 32 nt, Homo Sapiens
cauguugaaaagacaaagaauacuggagaaga

SEQ ID NO: 202356 - RNA, 31 nt, Homo Sapiens
ccgggagcuugagcgcagccauagacaacua

SEQ ID NO: 202357 - RNA, 32 nt, Homo Sapiens
ugaugaacagaugacaaacaucugaaaccccc

SEQ ID NO: 202358 - RNA, 32 nt, Homo Sapiens
ucauuaugaauccauggauggcucaauucuua

SEQ ID NO: 202359 - RNA, 32 nt, Homo Sapiens
uaaaugucaaauaaagauuauuuucacuagaa

SEQ ID NO: 202360 - RNA, 32 nt, Homo Sapiens
uccaguccggugccaucugaagcccccuuccc

SEQ ID NO: 202361 - RNA, 28 nt, Homo Sapiens
ucauuuucuaguugacauuugaauccug

SEQ ID NO: 202362 - RNA, 32 nt, Homo Sapiens
ggcugagggcugguggcuggccccacagccuc

SEQ ID NO: 202363 - RNA, 32 nt, Homo Sapiens
gaccgagucuugcucuguuacccaggcuggag

SEQ ID NO: 202364 - RNA, 32 nt, Homo Sapiens
auuaaagauaaaaaucuuuucuacuuuucuuu

SEQ ID NO: 202365 - RNA, 31 nt, Homo Sapiens
cuuugugcuccagucgcuccuaacgcucccu

SEQ ID NO: 202366 - RNA, 32 nt, Homo Sapiens
ucaggaaagaaaaaccaggaacuaguuucaau

SEQ ID NO: 202367 - RNA, 32 nt, Homo Sapiens
gugucuccagcauuagaauggaaccuggcaca

SEQ ID NO: 202368 - RNA, 32 nt, Homo Sapiens
uuacaggugugagccaccacgccagccugacg

SEQ ID NO: 202369 - RNA, 32 nt, Homo Sapiens
cuuggauagcagcugagauguuccugaaaccu

SEQ ID NO: 202370 - RNA, 32 nt, Homo Sapiens
ccacacucugagcggccggccggccccgccag

SEQ ID NO: 202371 - RNA, 32 nt, Homo Sapiens
uggauuuuaguauauuuacggagcugugcauu

SEQ ID NO: 202372 - RNA, 32 nt, Homo Sapiens
cuguguacaccugagcgagacgcucagucgcu

SEQ ID NO: 202373 - RNA, 32 nt, Homo Sapiens
acccuggcuuccuuccuccacccaguggagac

SEQ ID NO: 202374 - RNA, 32 nt, Homo Sapiens
gcaucguuguacauagauaucaaaugcuuguc

SEQ ID NO: 202375 - RNA, 32 nt, Homo Sapiens
uuuuaacaaaacaaaaugaggacaaaaauaug

SEQ ID NO: 202376 - RNA, 32 nt, Homo Sapiens
ggcugcggccagcagagcccaggccagggcuc

SEQ ID NO: 202377 - RNA, 28 nt, Homo Sapiens
uacuauauuaggcacauuauaaaaagua

SEQ ID NO: 202378 - RNA, 32 nt, Homo Sapiens
cauuuuguauggaacaaaaaacaaaacucccu

SEQ ID NO: 202379 - RNA, 32 nt, Homo Sapiens
acgccaccucgcccggcccgaucuuucuaaaa

SEQ ID NO: 202380 - RNA, 32 nt, Homo Sapiens
cagucaaugaaguuuuuuccuguaucaaauau

SEQ ID NO: 202381 - RNA, 32 nt, Homo Sapiens
caggcggccgcgggcuccgguucccggccagc

SEQ ID NO: 202382 - RNA, 32 nt, Homo Sapiens
auuuugaugcuccauuuuuuuauguugcuuuu

SEQ ID NO: 202383 - RNA, 32 nt, Homo Sapiens
ugagguuccggugcucgccgccgcccagcucc

SEQ ID NO: 202384 - RNA, 32 nt, Homo Sapiens
guuauaccuauuuuugugcaauuacaucaugu

SEQ ID NO: 202385 - RNA, 32 nt, Homo Sapiens
ccgccugugccucccccuuccuauuuugccac

SEQ ID NO: 202386 - RNA, 32 nt, Homo Sapiens
cuguauuuuauagcuuuuuuuuucauguaggu

SEQ ID NO: 202387 - RNA, 32 nt, Homo Sapiens
ccccucuaacuguacugcucacucgacauccc

SEQ ID NO: 202388 - RNA, 32 nt, Homo Sapiens
uaguuuauaugcaucugauuugaaaggaguau

SEQ ID NO: 202389 - RNA, 32 nt, Homo Sapiens
gugagucaaugagugaguggugagucacugug

SEQ ID NO: 202390 - RNA, 32 nt, Homo Sapiens
cugacuaaaauuuuguuuuuuauuuuuuguaa

SEQ ID NO: 202391 - RNA, 32 nt, Homo Sapiens
gccaugccugugugggggcgggcccaggcccu

SEQ ID NO: 202392 - RNA, 32 nt, Homo Sapiens
agauguuuuuguaaguuuuuauuuugaaauaa

SEQ ID NO: 202393 - RNA, 32 nt, Homo Sapiens
gaggccccccgagaggugcugcugcauccgcu

SEQ ID NO: 202394 - RNA, 32 nt, Homo Sapiens
gccaccagacccacccacgcucugacgagagg

SEQ ID NO: 202395 - RNA, 32 nt, Homo Sapiens
cguuagggcagagggagcugggcagggcacag

SEQ ID NO: 202396 - RNA, 32 nt, Homo Sapiens
cuuuuuaaaaauuuacccuugacauuuggaaa

SEQ ID NO: 202397 - RNA, 32 nt, Homo Sapiens
aggcagaggggugcagaagagagagcagagcc

SEQ ID NO: 202398 - RNA, 32 nt, Homo Sapiens
accaccuaugggaaucaaaacacacccccacu

SEQ ID NO: 202399 - RNA, 32 nt, Homo Sapiens
ccaaggaacucguuuauguuggcugauagagc

SEQ ID NO: 202400 - RNA, 29 nt, Homo Sapiens
aaacaugugacuuuacguuuugaucaaaa

SEQ ID NO: 202401 - RNA, 32 nt, Homo Sapiens
cgcgggccacccacgcccccagccagcaacuc

SEQ ID NO: 202402 - RNA, 32 nt, Homo Sapiens
ccggcgcugcgcucgcagcugcgcggagauuc

SEQ ID NO: 202403 - RNA, 32 nt, Homo Sapiens
aguagaaacaauuguauuuugaagucucauac

SEQ ID NO: 202404 - RNA, 32 nt, Homo Sapiens
cccuugagggcggcgcuuccggucggcggagc

SEQ ID NO: 202405 - RNA, 32 nt, Homo Sapiens
ccggggcggcggggcggccgagcauggaagaa

SEQ ID NO: 202406 - RNA, 32 nt, Homo Sapiens
uucaaguguaaguccaggaaaggggcaggcgg

SEQ ID NO: 202407 - RNA, 32 nt, Homo Sapiens
cuggcaccacagcugcaucuugcuugugagaa

SEQ ID NO: 202408 - RNA, 32 nt, Homo Sapiens
cuaacagauucuucuggacaaaagucacauau

SEQ ID NO: 202409 - RNA, 32 nt, Homo Sapiens
cacuuggaauccacacugguaccgccagccuc

SEQ ID NO: 202410 - RNA, 32 nt, Homo Sapiens
acuuaagccuuugagcucuccagcuuggacca

SEQ ID NO: 202411 - RNA, 32 nt, Homo Sapiens
ugacacgugcuccgugcuggugauuuuaugug

SEQ ID NO: 202412 - RNA, 32 nt, Homo Sapiens
guugaccccccuugcaucacucuucuucccau

SEQ ID NO: 202413 - RNA, 32 nt, Homo Sapiens
uugguuucuuaauaaugaguaaaccauaaauu

SEQ ID NO: 202414 - RNA, 32 nt, Homo Sapiens
guggcuuucucaacauuaaccagcaucccagu

SEQ ID NO: 202415 - RNA, 32 nt, Homo Sapiens
aacagugacuuagggacaaugccaagaccaga

SEQ ID NO: 202416 - RNA, 32 nt, Homo Sapiens
gacagagacucgcucugucacccaggcuggag

SEQ ID NO: 202417 - RNA, 32 nt, Homo Sapiens
cuacuaaaggcuuugccacauucuucacaugu

SEQ ID NO: 202418 - RNA, 30 nt, Homo Sapiens
ggucaagccugaaugggggaugcccccugg

SEQ ID NO: 202419 - RNA, 32 nt, Homo Sapiens
acagccuggccgguucccacucuggcccaucu

SEQ ID NO: 202420 - RNA, 32 nt, Homo Sapiens
gccguccgccgcggacaagacccuggccucag

SEQ ID NO: 202421 - RNA, 32 nt, Homo Sapiens
aaauaaguggcuuuuguuguuguuguuuuugu

SEQ ID NO: 202422 - RNA, 32 nt, Homo Sapiens
auauuaauuuguuuuucuuauccaaguaaaga

SEQ ID NO: 202423 - RNA, 32 nt, Homo Sapiens
caauuuuccuuguuugaauauagaauuguaac

SEQ ID NO: 202424 - RNA, 32 nt, Homo Sapiens
ugagcccggggaggaacguggggcaggcgcgg

SEQ ID NO: 202425 - RNA, 32 nt, Homo Sapiens
gacacagugggaauugauuauguauuaacuga

SEQ ID NO: 202426 - RNA, 28 nt, Homo Sapiens
accaugggccgggcccggcgcuuccagu

SEQ ID NO: 202427 - RNA, 32 nt, Homo Sapiens
agggcgcagcuguuggggcugcgggggagugg

SEQ ID NO: 202428 - RNA, 32 nt, Homo Sapiens
cguguaaaauggugcuguuauuacucugucuu

SEQ ID NO: 202429 - RNA, 32 nt, Homo Sapiens
cuuccacucugauucagaaacacacuucuacc

SEQ ID NO: 202430 - RNA, 32 nt, Homo Sapiens
gccuuauuuccacauuuaaacuaccuguuaau

SEQ ID NO: 202431 - RNA, 32 nt, Homo Sapiens
gaggcccuggaaaauuuugugcuuccaacgug

SEQ ID NO: 202432 - RNA, 32 nt, Homo Sapiens
acgcguggcgcgauggcggcggccccacgcgc

SEQ ID NO: 202433 - RNA, 32 nt, Homo Sapiens
gacucaucucccuuccuucucagggggucccg

SEQ ID NO: 202434 - RNA, 32 nt, Homo Sapiens
gggcccagccccagcuguugccuggcuuucca

SEQ ID NO: 202435 - RNA, 32 nt, Homo Sapiens
gaacauuagggaaauccagagaaggcaaaauu

SEQ ID NO: 202436 - RNA, 32 nt, Homo Sapiens
caaaucuagacaauaguuucucugagguagaa

SEQ ID NO: 202437 - RNA, 32 nt, Homo Sapiens
uaauuuuaaaucuauuucauaaccuguuuuga

SEQ ID NO: 202438 - RNA, 32 nt, Homo Sapiens
ucgcccacuuccccggcgaccuggugcccgcu

SEQ ID NO: 202439 - RNA, 32 nt, Homo Sapiens
uugccccggugggaagggccgcggcgguggug

SEQ ID NO: 202440 - RNA, 32 nt, Homo Sapiens
gccagggcuggguaucccagucccgugucgug

SEQ ID NO: 202441 - RNA, 32 nt, Homo Sapiens
guuccuggcccuguguacgcugaaacccuccc

SEQ ID NO: 202442 - RNA, 32 nt, Homo Sapiens
ugggaaggugugauugguuuugaaaugugagc

SEQ ID NO: 202443 - RNA, 32 nt, Homo Sapiens
cuuacaaaaauauauuuuggaaaauuguauac

SEQ ID NO: 202444 - RNA, 32 nt, Homo Sapiens
uugagauaguaucucacuuuggaggaaaggcc

SEQ ID NO: 202445 - RNA, 32 nt, Homo Sapiens
ccuauccuuucugucacugucaagcaaaacaa

SEQ ID NO: 202446 - RNA, 32 nt, Homo Sapiens
cacaucgauucugcaccuggggacccagagcg

SEQ ID NO: 202447 - RNA, 32 nt, Homo Sapiens
ggccuggggcccuggggugggguaggcagaug

SEQ ID NO: 202448 - RNA, 32 nt, Homo Sapiens
cuguggccuuuugaacuguacaucucacaugu

SEQ ID NO: 202449 - RNA, 32 nt, Homo Sapiens
gugcaauggcacaauuuuggcucacugcaacc

SEQ ID NO: 202450 - RNA, 32 nt, Homo Sapiens
gguggcggugcaaccgucauguggagagcauc

SEQ ID NO: 202451 - RNA, 32 nt, Homo Sapiens
gcuuaaggcugaauguaggauucuucaguaug

SEQ ID NO: 202452 - RNA, 32 nt, Homo Sapiens
ucuaggcgccggcgcuggccugggccgccugc

SEQ ID NO: 202453 - RNA, 32 nt, Homo Sapiens
cugcaccgccccaccagacccggacucggagc

SEQ ID NO: 202454 - RNA, 32 nt, Homo Sapiens
ugcugggccagccccaccuggagcucaguaaa

SEQ ID NO: 202455 - RNA, 32 nt, Homo Sapiens
gguggagaacaguaaaaggugggcagaugucu

SEQ ID NO: 202456 - RNA, 32 nt, Homo Sapiens
uuuacuucagcacuaacacuagugcuuccgcu

SEQ ID NO: 202457 - RNA, 32 nt, Homo Sapiens
uccaucuuagagcaucacucuuccucacacca

SEQ ID NO: 202458 - RNA, 32 nt, Homo Sapiens
cacagcuugccccacaccaccuucacacccac

SEQ ID NO: 202459 - RNA, 32 nt, Homo Sapiens
gcaacagaaagauacuuuguaaugagaaggua

SEQ ID NO: 202460 - RNA, 32 nt, Homo Sapiens
cagaagcaaaaauaaaauugcaguaagugaau

SEQ ID NO: 202461 - RNA, 32 nt, Homo Sapiens
uuccgggaccagagcucuguugggaacugcug

SEQ ID NO: 202462 - RNA, 32 nt, Homo Sapiens
ccucugcgucuuuuuacucaccaccuuagagc

SEQ ID NO: 202463 - RNA, 32 nt, Homo Sapiens
gaagacuuaaaggcagacgaaccaucaaguga

SEQ ID NO: 202464 - RNA, 32 nt, Homo Sapiens
gcgccaaugcgcgcccggguucuuggguucuu

SEQ ID NO: 202465 - RNA, 32 nt, Homo Sapiens
uucuagagagauguauuuaugagggugauaac

SEQ ID NO: 202466 - RNA, 32 nt, Homo Sapiens
aggcgagucaggucucucuggaccucgccuga

SEQ ID NO: 202467 - RNA, 32 nt, Homo Sapiens
acaaaccagaagucggcauuugugaaaagucc

SEQ ID NO: 202468 - RNA, 32 nt, Homo Sapiens
aaauacucuucagauccuauguagucagugaa

SEQ ID NO: 202469 - RNA, 32 nt, Homo Sapiens
uguccucuggccacaccgccagcccuuggucc

SEQ ID NO: 202470 - RNA, 32 nt, Homo Sapiens
aaacagaccccuaugaagcaccucaagucuuu

SEQ ID NO: 202471 - RNA, 32 nt, Homo Sapiens
accaaagggcuggcagaaaugggcgccuggcu

SEQ ID NO: 202472 - RNA, 32 nt, Homo Sapiens
caaacuugcugccgaccgcgggcugcuccugc

SEQ ID NO: 202473 - RNA, 32 nt, Homo Sapiens
ugucaaacaaaugugacuuaugcuggugcccu

SEQ ID NO: 202474 - RNA, 28 nt, Homo Sapiens
uauuuggagauaauacauuugaggguuu

SEQ ID NO: 202475 - RNA, 32 nt, Homo Sapiens
gggagcgaguaaagucugggccaggcaaaaaa

SEQ ID NO: 202476 - RNA, 32 nt, Homo Sapiens
ggcuuaaauacuuauuugaucuuaccaaagaa

SEQ ID NO: 202477 - RNA, 32 nt, Homo Sapiens
caccccuccacccccacccccaagugccuucg

SEQ ID NO: 202478 - RNA, 32 nt, Homo Sapiens
cacaggcagcccagcccuccucugucaacauc

SEQ ID NO: 202479 - RNA, 32 nt, Homo Sapiens
acuugugauugugaaauugauaacacuuggau

SEQ ID NO: 202480 - RNA, 32 nt, Homo Sapiens
aauuaaaacaauacaaauucaugguuuuuuaa

SEQ ID NO: 202481 - RNA, 32 nt, Homo Sapiens
ucccccugccagcaacgcucacucuaccccca

SEQ ID NO: 202482 - RNA, 32 nt, Homo Sapiens
ugaugggacaccuggcaguggcuagcauggac

SEQ ID NO: 202483 - RNA, 32 nt, Homo Sapiens
gauuagcucccugugguggagcauacacaggg

SEQ ID NO: 202484 - RNA, 32 nt, Homo Sapiens
gggcuaagggaagugcugaaauagagcaaagg

SEQ ID NO: 202485 - RNA, 32 nt, Homo Sapiens
caaaugacuguaaauauauuuucacuguuucu

SEQ ID NO: 202486 - RNA, 32 nt, Homo Sapiens
gcugcugacggcggcgaccgcggccggaggcg

SEQ ID NO: 202487 - RNA, 32 nt, Homo Sapiens
gugaacgcaggguuugccauugcuaccaagca

SEQ ID NO: 202488 - RNA, 32 nt, Homo Sapiens
augcaccucccuccccagcucgagaucauucu

SEQ ID NO: 202489 - RNA, 32 nt, Homo Sapiens
cugcgucaacgcgccugaaacaccccgcgggc

SEQ ID NO: 202490 - RNA, 32 nt, Homo Sapiens
acauauacaaauaaaaagauacgauucgcaaa

SEQ ID NO: 202491 - RNA, 32 nt, Homo Sapiens
uuacuacuugcaguagccuguccccaacuuuu

SEQ ID NO: 202492 - RNA, 32 nt, Homo Sapiens
uaaaaguaaaacaaaaucaccuguauccuacc

SEQ ID NO: 202493 - RNA, 32 nt, Homo Sapiens
ugacuaaauuuggaaucagaggcuuuuaaagc

SEQ ID NO: 202494 - RNA, 32 nt, Homo Sapiens
uguguggcuggccuuacagcacggggaugagu

SEQ ID NO: 202495 - RNA, 32 nt, Homo Sapiens
gaagcaacagaaaagaccaaaguggaagagga

SEQ ID NO: 202496 - RNA, 32 nt, Homo Sapiens
gggugcuggcaaguguggcagcugccucuggg

SEQ ID NO: 202497 - RNA, 32 nt, Homo Sapiens
ucauggaguuuggaaaauauuuauaguauaca

SEQ ID NO: 202498 - RNA, 32 nt, Homo Sapiens
auccuucacugcauuaugaaaauauuucacau

SEQ ID NO: 202499 - RNA, 32 nt, Homo Sapiens
aauaauggcauaaaguuuggggaugccaggca

SEQ ID NO: 202500 - RNA, 32 nt, Homo Sapiens
gaaaguaauuuuccugguuuuuugaauggaua

SEQ ID NO: 202501 - RNA, 32 nt, Homo Sapiens
cauacaccugucuccuucuuccugccuggcuu

SEQ ID NO: 202502 - RNA, 27 nt, Homo Sapiens
ccaaagcccuucuucuuuccaccacaa

SEQ ID NO: 202503 - RNA, 32 nt, Homo Sapiens
ccugagaggccccggcaggucccggcccggcg

SEQ ID NO: 202504 - RNA, 32 nt, Homo Sapiens
guugacacauaaaauuaaccaucacagcaaca

SEQ ID NO: 202505 - RNA, 32 nt, Homo Sapiens
cuucuagcucaggacaccccugcccgcgaugg

SEQ ID NO: 202506 - RNA, 32 nt, Homo Sapiens
acagccaccuaaacgguucaguuucuucugcg

SEQ ID NO: 202507 - RNA, 32 nt, Homo Sapiens
cuccccaucguccccaucguccuccuuguccc

SEQ ID NO: 202508 - RNA, 32 nt, Homo Sapiens
ccagauuugucaaaaugauacacuauucaguu

SEQ ID NO: 202509 - RNA, 32 nt, Homo Sapiens
caucgacugcccagcccaggagagagugucuc

SEQ ID NO: 202510 - RNA, 32 nt, Homo Sapiens
uggauuuauuguuuuuauuccacacuuccuac

SEQ ID NO: 202511 - RNA, 32 nt, Homo Sapiens
aguaagugaauagaauacaauaaaacaaaaca

SEQ ID NO: 202512 - RNA, 32 nt, Homo Sapiens
gucacagcugggucugugguccguuuugguug

SEQ ID NO: 202513 - RNA, 32 nt, Homo Sapiens
cuguaaaaagaaaucuguaaauggugaccgua

SEQ ID NO: 202514 - RNA, 32 nt, Homo Sapiens
gugaacuucagcuacagcccagagcaggcgga

SEQ ID NO: 202515 - RNA, 32 nt, Homo Sapiens
gggcccuuagcacgcgccccagcgccggagca

SEQ ID NO: 202516 - RNA, 32 nt, Homo Sapiens
cauccaugauauguauguggacacaggcugga

SEQ ID NO: 202517 - RNA, 32 nt, Homo Sapiens
gaauccagcuguuacucguccgcggccucuca

SEQ ID NO: 202518 - RNA, 32 nt, Homo Sapiens
augcaggccgggcccgguggcucccgccugua

SEQ ID NO: 202519 - RNA, 32 nt, Homo Sapiens
gaguaugaguggccuucccaaucuacaggaaa

SEQ ID NO: 202520 - RNA, 32 nt, Homo Sapiens
acacuaugccauauuuuuuuuaauuauaguug

SEQ ID NO: 202521 - RNA, 32 nt, Homo Sapiens
gggcugcacaugccugcagugggacaagaaga

SEQ ID NO: 202522 - RNA, 32 nt, Homo Sapiens
gcccugaggaccagaggcgccaggcagccacc

SEQ ID NO: 202523 - RNA, 32 nt, Homo Sapiens
ucucugcgugacuuccacuguucaucaaagaa

SEQ ID NO: 202524 - RNA, 32 nt, Homo Sapiens
uugcuucaggcuaagagcugccucgcucuuug

SEQ ID NO: 202525 - RNA, 32 nt, Homo Sapiens
uccuaguugaaagaguagagaucuguuucucc

SEQ ID NO: 202526 - RNA, 32 nt, Homo Sapiens
aggcggggucgagauggcggcgccuuugagga

SEQ ID NO: 202527 - RNA, 32 nt, Homo Sapiens
aggauggcgaagaggucgcgcagguggguggc

SEQ ID NO: 202528 - RNA, 32 nt, Homo Sapiens
agacugcgccgacggcagcgacgagcgcggcu

SEQ ID NO: 202529 - RNA, 32 nt, Homo Sapiens
aaagacacaaauaacaaugauaaaaagacauc

SEQ ID NO: 202530 - RNA, 32 nt, Homo Sapiens
ggugccuaccccguguucccagcccugucccu

SEQ ID NO: 202531 - RNA, 32 nt, Homo Sapiens
agagcugagcacaccacaggaaaggagggagg

SEQ ID NO: 202532 - RNA, 32 nt, Homo Sapiens
guauuacaggagaaggauugggaacagaaugg

SEQ ID NO: 202533 - RNA, 32 nt, Homo Sapiens
auuaacucaggcauuucauuuauuuuuuccuu

SEQ ID NO: 202534 - RNA, 32 nt, Homo Sapiens
uauguaucaguucugaguuccacuggccuauc

SEQ ID NO: 202535 - RNA, 32 nt, Homo Sapiens
aaagaaaaacaauuacaacaugugcccuuaca

SEQ ID NO: 202536 - RNA, 32 nt, Homo Sapiens
caggccuggcugaggcgccgcggccggguccc

SEQ ID NO: 202537 - RNA, 32 nt, Homo Sapiens
guuuguacauuuuuggggggagagacacagau

SEQ ID NO: 202538 - RNA, 32 nt, Homo Sapiens
ugagcaaauuuucucaguugucuguaugacuu

SEQ ID NO: 202539 - RNA, 32 nt, Homo Sapiens
uuuuuacauuuuaaauugucuuuauuguguau

SEQ ID NO: 202540 - RNA, 32 nt, Homo Sapiens
ugagccccgcggcgccccgggaacuuggcggc

SEQ ID NO: 202541 - RNA, 32 nt, Homo Sapiens
ugauguggacgaagacaggcccaagaucuucc

SEQ ID NO: 202542 - RNA, 32 nt, Homo Sapiens
aauuguagaacuuuauacucacuuugauaugu

SEQ ID NO: 202543 - RNA, 32 nt, Homo Sapiens
cucucagccgccuaccaagacugcagggaugg

SEQ ID NO: 202544 - RNA, 32 nt, Homo Sapiens
uuagcagaugaccauaauaaauuauuuuuaau

SEQ ID NO: 202545 - RNA, 32 nt, Homo Sapiens
gccuuaagccugggaaggcaauuaggguuuca

SEQ ID NO: 202546 - RNA, 32 nt, Homo Sapiens
ccuuagacauuagauuauaugaaaaugauuga

SEQ ID NO: 202547 - RNA, 32 nt, Homo Sapiens
agaauucagaacuuggguuucaauuguagaau

SEQ ID NO: 202548 - RNA, 32 nt, Homo Sapiens
accagcagcuggaccugagcgccugccggcug

SEQ ID NO: 202549 - RNA, 32 nt, Homo Sapiens
uuucuugcauuuccagaugauugcaaagagcu

SEQ ID NO: 202550 - RNA, 32 nt, Homo Sapiens
cucaauggcuacgugugacuagugcuuaccau

SEQ ID NO: 202551 - RNA, 27 nt, Homo Sapiens
cugggauccuucuuccugucccuggcu

SEQ ID NO: 202552 - RNA, 32 nt, Homo Sapiens
caucaucauuggcuccaucgcuggggcugucc

SEQ ID NO: 202553 - RNA, 32 nt, Homo Sapiens
uuuacuaugagcagcaagaagaaaccaggcuc

SEQ ID NO: 202554 - RNA, 32 nt, Homo Sapiens
agcggguuugguugcagcggcggcggaggcca

SEQ ID NO: 202555 - RNA, 32 nt, Homo Sapiens
ccguagucaacgugcgccuccccucccggcuc

SEQ ID NO: 202556 - RNA, 32 nt, Homo Sapiens
uuacacuccuccagggaccccggagcuuccac

SEQ ID NO: 202557 - RNA, 32 nt, Homo Sapiens
cugugcaccgaguuacuuucccggccccucgu

SEQ ID NO: 202558 - RNA, 32 nt, Homo Sapiens
aauucacuaaauauuucuauuuuuuugcuuuu

SEQ ID NO: 202559 - RNA, 32 nt, Homo Sapiens
ccaggcugcccccaacaacuccaggcccugcc

SEQ ID NO: 202560 - RNA, 32 nt, Homo Sapiens
ugcuaguuuccucucuuggagagccaaggaua

SEQ ID NO: 202561 - RNA, 32 nt, Homo Sapiens
uggggaagagcuuaggaauggggugggcaugg

SEQ ID NO: 202562 - RNA, 32 nt, Homo Sapiens
cuggcucaagcgaucccuccccucagccuccu

SEQ ID NO: 202563 - RNA, 32 nt, Homo Sapiens
gcuggccgaggagacuggcucuggccaggggc

SEQ ID NO: 202564 - RNA, 32 nt, Homo Sapiens
aaaagagccaucuggucucuggcuagaguuag

SEQ ID NO: 202565 - RNA, 32 nt, Homo Sapiens
agcagugaccucccuuuccuccguggaaguag

SEQ ID NO: 202566 - RNA, 32 nt, Homo Sapiens
cuugggggagaaugaaggaaaccuggaagucu

SEQ ID NO: 202567 - RNA, 32 nt, Homo Sapiens
gcuuaaaaacuacccaugucuuucuggaaagg

SEQ ID NO: 202568 - RNA, 32 nt, Homo Sapiens
agccaaccgagacacaaaaaaggagcuggggu

SEQ ID NO: 202569 - RNA, 32 nt, Homo Sapiens
aauuaauuaaaauaaacuagguaaacuuggau

SEQ ID NO: 202570 - RNA, 32 nt, Homo Sapiens
ucauuguacuuucauugcuuugaaagaguaaa

SEQ ID NO: 202571 - RNA, 32 nt, Homo Sapiens
cagcuggccuccgccgcucaucugcagggcgu

SEQ ID NO: 202572 - RNA, 32 nt, Homo Sapiens
ggauuacaaaagacagcaauaggaacgcagua

SEQ ID NO: 202573 - RNA, 32 nt, Homo Sapiens
caaugggauugugagaaucaagucacucucaa

SEQ ID NO: 202574 - RNA, 32 nt, Homo Sapiens
aguuguucaaaaggagcaaaaauggccugcgg

SEQ ID NO: 202575 - RNA, 31 nt, Homo Sapiens
cagcgguagagcugccugccuugcuuccucu

SEQ ID NO: 202576 - RNA, 32 nt, Homo Sapiens
cgggaugccucccaagacagggucuccagccc

SEQ ID NO: 202577 - RNA, 32 nt, Homo Sapiens
gacuggaugagcagcaaaggguccuggaagga

SEQ ID NO: 202578 - RNA, 32 nt, Homo Sapiens
agaggagccuucugacugcugcagagaccauc

SEQ ID NO: 202579 - RNA, 32 nt, Homo Sapiens
auaccauauaaaaaagugaaaagacaagcaac

SEQ ID NO: 202580 - RNA, 32 nt, Homo Sapiens
gaggcuggucccuggcccaacaugauacugac

SEQ ID NO: 202581 - RNA, 32 nt, Homo Sapiens
uggaaguacugucuauguuauuagauugagug

SEQ ID NO: 202582 - RNA, 32 nt, Homo Sapiens
caggagggacaggaaacguucccuccuuaacc

SEQ ID NO: 202583 - RNA, 32 nt, Homo Sapiens
ucagaggcccucacuuagcguggaggaaggaa

SEQ ID NO: 202584 - RNA, 32 nt, Homo Sapiens
uuguuaacggcgcggcagccuccaccgccugc

SEQ ID NO: 202585 - RNA, 32 nt, Homo Sapiens
aagccagccagacccuggagagcucacagacu

SEQ ID NO: 202586 - RNA, 32 nt, Homo Sapiens
ugucucgcagucaggaggagcagggccagccg

SEQ ID NO: 202587 - RNA, 32 nt, Homo Sapiens
uaaaaccacagugauauuuuuggaugcuuugu

SEQ ID NO: 202588 - RNA, 32 nt, Homo Sapiens
ucuaccugggucuaacuugcugucugacucuc

SEQ ID NO: 202589 - RNA, 32 nt, Homo Sapiens
cugccucuucaccucccugaauccguguccau

SEQ ID NO: 202590 - RNA, 32 nt, Homo Sapiens
guuauugaaaaugagaauaaaauguugagcuu

SEQ ID NO: 202591 - RNA, 32 nt, Homo Sapiens
aguuucugcccauuuuagggccacguuaccaa

SEQ ID NO: 202592 - RNA, 32 nt, Homo Sapiens
ccccggguagagagggucggcucgugcucauc

SEQ ID NO: 202593 - RNA, 32 nt, Homo Sapiens
cucagcacuuugauuuuggacagggacaaggu

SEQ ID NO: 202594 - RNA, 32 nt, Homo Sapiens
ccagaaccagccaggccuggggugcuucaagc

SEQ ID NO: 202595 - RNA, 32 nt, Homo Sapiens
cgggagcuucguccagccuguggauggagccu

SEQ ID NO: 202596 - RNA, 32 nt, Homo Sapiens
uugguuaccuauugccguaaauaaaaauagcu

SEQ ID NO: 202597 - RNA, 32 nt, Homo Sapiens
ucuaaaacaaagucuaugcaaaccacuuaaaa

SEQ ID NO: 202598 - RNA, 32 nt, Homo Sapiens
uugaggccgccaccagccccagcccccggcgc

SEQ ID NO: 202599 - RNA, 32 nt, Homo Sapiens
gugaucugagguucugccccaacugcacagca

SEQ ID NO: 202600 - RNA, 32 nt, Homo Sapiens
acugaggaaugaauugaaucuugagacggguc

SEQ ID NO: 202601 - RNA, 32 nt, Homo Sapiens
acaggccuauuaacaucauacauugucauuag

SEQ ID NO: 202602 - RNA, 32 nt, Homo Sapiens
ccccaugcuuagggucuccccccgguuccucc

SEQ ID NO: 202603 - RNA, 32 nt, Homo Sapiens
ccuccacucccucuucuuuaacccaguggccu

SEQ ID NO: 202604 - RNA, 32 nt, Homo Sapiens
ccgccccgccccacauuccgacaaccgaugcu

SEQ ID NO: 202605 - RNA, 32 nt, Homo Sapiens
cuaccugguaugaaggaauacacauccugaag

SEQ ID NO: 202606 - RNA, 32 nt, Homo Sapiens
aagacuaggagccaugcugaugaugugggucu

SEQ ID NO: 202607 - RNA, 32 nt, Homo Sapiens
acacacguaucuaacaaacaaacaaacaguga

SEQ ID NO: 202608 - RNA, 32 nt, Homo Sapiens
cccuuaauuugcaaauacaguaguaauuaagg

SEQ ID NO: 202609 - RNA, 32 nt, Homo Sapiens
gugucagucaacauggaggcagaggaaucgga

SEQ ID NO: 202610 - RNA, 32 nt, Homo Sapiens
auucuggaacucucuccuuuccuggcuggggc

SEQ ID NO: 202611 - RNA, 32 nt, Homo Sapiens
gagacguuugcaagacgaguuguacugcuguc

SEQ ID NO: 202612 - RNA, 32 nt, Homo Sapiens
guuauccuuccacagaacacaucagagcuauc

SEQ ID NO: 202613 - RNA, 32 nt, Homo Sapiens
cgacccgagcagccgguucccuccucuccagg

SEQ ID NO: 202614 - RNA, 32 nt, Homo Sapiens
agcaaauauggacagguuuacuuagaaauccu

SEQ ID NO: 202615 - RNA, 32 nt, Homo Sapiens
gaugcaaaguguguaaagguugccauaaagga

SEQ ID NO: 202616 - RNA, 32 nt, Homo Sapiens
ugggcccgcugcgcucagagggugcugguugg

SEQ ID NO: 202617 - RNA, 32 nt, Homo Sapiens
uuguauuccuagcuuauuuaaucuucaaagaa

SEQ ID NO: 202618 - RNA, 32 nt, Homo Sapiens
gucuggcgcccaaccaccugcugcuggcgccc

SEQ ID NO: 202619 - RNA, 32 nt, Homo Sapiens
aaaauugcauauauuuaggcuucacaacauga

SEQ ID NO: 202620 - RNA, 31 nt, Homo Sapiens
agagaaaugcaaacuaaaacaguaaaguguc

SEQ ID NO: 202621 - RNA, 32 nt, Homo Sapiens
ggugccuccaccccugcccuccccuucauccc

SEQ ID NO: 202622 - RNA, 32 nt, Homo Sapiens
gccccagcagcccuauggugaccgccacacug

SEQ ID NO: 202623 - RNA, 32 nt, Homo Sapiens
uucauagcagugccaacaucugaaguggagcu

SEQ ID NO: 202624 - RNA, 32 nt, Homo Sapiens
ucguuguaggaggaaucugugcucuacuuacc

SEQ ID NO: 202625 - RNA, 32 nt, Homo Sapiens
uuauucuacauaugagaauucaugauggaaag

SEQ ID NO: 202626 - RNA, 32 nt, Homo Sapiens
aggugaguucccugcccauaggcauugcccag

SEQ ID NO: 202627 - RNA, 32 nt, Homo Sapiens
ccccagugcuugucaaauuugcugacagguca

SEQ ID NO: 202628 - RNA, 32 nt, Homo Sapiens
auuugcguauucaaaugaggccuggcucccgu

SEQ ID NO: 202629 - RNA, 32 nt, Homo Sapiens
uucuuaaaaaauuuauacuuaaaaaauccugc

SEQ ID NO: 202630 - RNA, 32 nt, Homo Sapiens
aaaggaccuuugggggugggugggagcaaagg

SEQ ID NO: 202631 - RNA, 32 nt, Homo Sapiens
agaaggcagaacaaaaugagcugggcuuugga

SEQ ID NO: 202632 - RNA, 30 nt, Homo Sapiens
aggcccgcagccgugccgggugcucuucag

SEQ ID NO: 202633 - RNA, 32 nt, Homo Sapiens
caagaauugugcagcuuuuggcaccgaggaau

SEQ ID NO: 202634 - RNA, 32 nt, Homo Sapiens
uuugaaaaggcuuuucuggcgucggaggcggu

SEQ ID NO: 202635 - RNA, 32 nt, Homo Sapiens
gacccagcacgcugcuggcagagaugguuuga

SEQ ID NO: 202636 - RNA, 32 nt, Homo Sapiens
acgcccagcuaauuuuuguauuugaguagaga

SEQ ID NO: 202637 - RNA, 32 nt, Homo Sapiens
gggggaaggaggagguccaggccgguaguggc

SEQ ID NO: 202638 - RNA, 28 nt, Homo Sapiens
ggccuggggcggcccagaggagcugggc

SEQ ID NO: 202639 - RNA, 32 nt, Homo Sapiens
aagggcuccucuauccugugguccugagcugu

SEQ ID NO: 202640 - RNA, 32 nt, Homo Sapiens
uuucucuucuauuugcauuucugcacuuuggu

SEQ ID NO: 202641 - RNA, 32 nt, Homo Sapiens
aaaucuaucacuuuucaccuuacacuuaaugu

SEQ ID NO: 202642 - RNA, 32 nt, Homo Sapiens
cggcgccuacacuuagcuccgcgcccgagaga

SEQ ID NO: 202643 - RNA, 32 nt, Homo Sapiens
agaggaucgggguggggagaccaaacaagaga

SEQ ID NO: 202644 - RNA, 32 nt, Homo Sapiens
gucggccgccgccaguccccgccccgacugug

SEQ ID NO: 202645 - RNA, 32 nt, Homo Sapiens
aauagaacccucaaauaauuuuuagaauucuu

SEQ ID NO: 202646 - RNA, 32 nt, Homo Sapiens
gaggcugugggggcagcagaucaggagcccac

SEQ ID NO: 202647 - RNA, 32 nt, Homo Sapiens
ggucuccgugcuggugggacugagaagaacgc

SEQ ID NO: 202648 - RNA, 32 nt, Homo Sapiens
aucuucaguggcugcaacgaaaaagagagagu

SEQ ID NO: 202649 - RNA, 32 nt, Homo Sapiens
ugacccucuggagaugauguccugcccaggcc

SEQ ID NO: 202650 - RNA, 32 nt, Homo Sapiens
cugacgcccuccccacccuggcaugcccccuu

SEQ ID NO: 202651 - RNA, 32 nt, Homo Sapiens
caggcugccgugcacuuugucggauauaaaau

SEQ ID NO: 202652 - RNA, 32 nt, Homo Sapiens
ggauuuucaaaauggcugcagcuccucaagca

SEQ ID NO: 202653 - RNA, 32 nt, Homo Sapiens
acuccccugugcugcacugcuggggucagaca

SEQ ID NO: 202654 - RNA, 32 nt, Homo Sapiens
accuccuccaacaaaggagucaacucaguuga

SEQ ID NO: 202655 - RNA, 32 nt, Homo Sapiens
accuguaaaaaauaaacuacugcuuccucucc

SEQ ID NO: 202656 - RNA, 32 nt, Homo Sapiens
guuagacauacuguauuuuuucguucagugug

SEQ ID NO: 202657 - RNA, 32 nt, Homo Sapiens
gugggccggaggcgaggcgcccaccgcgcggc

SEQ ID NO: 202658 - RNA, 32 nt, Homo Sapiens
gacgucgguugagcggcggcgaacaugcgcuu

SEQ ID NO: 202659 - RNA, 32 nt, Homo Sapiens
cugaggaagaccucagacauggaguccaggau

SEQ ID NO: 202660 - RNA, 32 nt, Homo Sapiens
aaaacgccugaagaauacaaaggauggucugu

SEQ ID NO: 202661 - RNA, 32 nt, Homo Sapiens
acccuccagcccugguccccagccccugcuac

SEQ ID NO: 202662 - RNA, 32 nt, Homo Sapiens
cuguauuuacuuuaaaagaagugcauaauuac

SEQ ID NO: 202663 - RNA, 32 nt, Homo Sapiens
cuuuucuagucaguucuaagacugcuagagag

SEQ ID NO: 202664 - RNA, 32 nt, Homo Sapiens
ucagaggugguggggcuugguuauacugguag

SEQ ID NO: 202665 - RNA, 32 nt, Homo Sapiens
agcgauagacccagguuuugccugcacgaugu

SEQ ID NO: 202666 - RNA, 32 nt, Homo Sapiens
aaccuaccucauccuccuggaggguguggcua

SEQ ID NO: 202667 - RNA, 32 nt, Homo Sapiens
auguuuuuaaucauuuugaucaauguuuguag

SEQ ID NO: 202668 - RNA, 30 nt, Homo Sapiens
gagagcgaagggcgggcgggucccggagca

SEQ ID NO: 202669 - RNA, 32 nt, Homo Sapiens
gacccaggcagcgccccaggaagccaugcugg

SEQ ID NO: 202670 - RNA, 32 nt, Homo Sapiens
aauggcuuuauggcaagccacuuugacagaca

SEQ ID NO: 202671 - RNA, 32 nt, Homo Sapiens
uacugcgcggcggcccaggagcucggacugcu

SEQ ID NO: 202672 - RNA, 32 nt, Homo Sapiens
gaugucuuaaaguguguuuucuucugugugaa

SEQ ID NO: 202673 - RNA, 32 nt, Homo Sapiens
uggggaccgagaccagcacggacgguagcaac

SEQ ID NO: 202674 - RNA, 32 nt, Homo Sapiens
ccagccugggagagggguuuuguuuccucgga

SEQ ID NO: 202675 - RNA, 32 nt, Homo Sapiens
ccagugcucugcaacaaguccugucugacccc

SEQ ID NO: 202676 - RNA, 32 nt, Homo Sapiens
ccacagccugggccucgccgcgaugccggaga

SEQ ID NO: 202677 - RNA, 32 nt, Homo Sapiens
ccaggcugauccugaggccuggacaaauggga

SEQ ID NO: 202678 - RNA, 32 nt, Homo Sapiens
aggaaggcugggugguggaggggggagaauga

SEQ ID NO: 202679 - RNA, 32 nt, Homo Sapiens
uuuuacauaaaaauaugguagaauuaauuuau

SEQ ID NO: 202680 - RNA, 32 nt, Homo Sapiens
uugaugcuggagucacaucuguugauagcugg

SEQ ID NO: 202681 - RNA, 32 nt, Homo Sapiens
uggauccagacaccgcucaucccgaucucuuc

SEQ ID NO: 202682 - RNA, 32 nt, Homo Sapiens
cggcgcgcccugccccacggacccgggcagug

SEQ ID NO: 202683 - RNA, 32 nt, Homo Sapiens
uugcccaucaucccuucuuccauccuuagagg

SEQ ID NO: 202684 - RNA, 31 nt, Homo Sapiens
gccccaucaggccugcccugaguuggccuug

SEQ ID NO: 202685 - RNA, 32 nt, Homo Sapiens
guaucauagauauaauguuuuaacuaauaaaa

SEQ ID NO: 202686 - RNA, 32 nt, Homo Sapiens
cauuucaaucaagaauggcagggaucuauuuu

SEQ ID NO: 202687 - RNA, 32 nt, Homo Sapiens
uucgcgucccagacccucgcccccgcuaaaga

SEQ ID NO: 202688 - RNA, 32 nt, Homo Sapiens
ucacucagcucuuugcuucaugccucgcuuua

SEQ ID NO: 202689 - RNA, 32 nt, Homo Sapiens
agcaguuaaugauauguggccuugugcuuacu

SEQ ID NO: 202690 - RNA, 32 nt, Homo Sapiens
uuguaaucaaugaguaauucaugaugaauuau

SEQ ID NO: 202691 - RNA, 32 nt, Homo Sapiens
uuggaaaaauauauuucuucuagauguucuaa

SEQ ID NO: 202692 - RNA, 32 nt, Homo Sapiens
ccuguggaaaccuggggugccggccuguacag

SEQ ID NO: 202693 - RNA, 32 nt, Homo Sapiens
ccccgcccccgggaaccgggugcggcguaaaa

SEQ ID NO: 202694 - RNA, 32 nt, Homo Sapiens
gacugguuagacaguacucuuaacuccuagcc

SEQ ID NO: 202695 - RNA, 32 nt, Homo Sapiens
ucucuuacugucagaaucucucuugcaguaca

SEQ ID NO: 202696 - RNA, 32 nt, Homo Sapiens
cuaccuccagggauucuuggggggcuuaaaca

SEQ ID NO: 202697 - RNA, 32 nt, Homo Sapiens
cccugcugaggguggugucaggguuccgugac

SEQ ID NO: 202698 - RNA, 32 nt, Homo Sapiens
uguuccuuauuucucucuccugguguggguaa

SEQ ID NO: 202699 - RNA, 32 nt, Homo Sapiens
cuuuacuuacuauaaacuuauuauaaauuggu

SEQ ID NO: 202700 - RNA, 32 nt, Homo Sapiens
gcgcgccuccuccgccgccgcggacugcggca

SEQ ID NO: 202701 - RNA, 32 nt, Homo Sapiens
uaccaugagcauuaaucaaucccauucuucag

SEQ ID NO: 202702 - RNA, 32 nt, Homo Sapiens
agcuacaaacacaccuggaaaaggcucacuaa

SEQ ID NO: 202703 - RNA, 32 nt, Homo Sapiens
auuuacaauuucuaauaaaggauuauaugucg

SEQ ID NO: 202704 - RNA, 32 nt, Homo Sapiens
ucccucccgauuccgccgcggcccccaaagac

SEQ ID NO: 202705 - RNA, 32 nt, Homo Sapiens
ccccgccguccuccuucccgcggccgugaggg

SEQ ID NO: 202706 - RNA, 32 nt, Homo Sapiens
ugucaggaaggggaugggugucccuggcuccc

SEQ ID NO: 202707 - RNA, 32 nt, Homo Sapiens
acgcggggcagggcagcgcccgggcuggagac

SEQ ID NO: 202708 - RNA, 30 nt, Homo Sapiens
accaacaauaucccgccuccucuaauuaca

SEQ ID NO: 202709 - RNA, 32 nt, Homo Sapiens
auggcaagcgccugccucuccccuuccggugc

SEQ ID NO: 202710 - RNA, 32 nt, Homo Sapiens
aauaaacuauaaaauauagucaucuugggaaa

SEQ ID NO: 202711 - RNA, 32 nt, Homo Sapiens
gggagcguggggccgacaguuuugggggugaa

SEQ ID NO: 202712 - RNA, 32 nt, Homo Sapiens
gugcugcgggcugggcugcccgggggagauga

SEQ ID NO: 202713 - RNA, 32 nt, Homo Sapiens
aaggaccuggggcuggugcgggcccggaggag

SEQ ID NO: 202714 - RNA, 32 nt, Homo Sapiens
ugggguucccuacuucgaauccaggucucugu

SEQ ID NO: 202715 - RNA, 32 nt, Homo Sapiens
gguaggugcugggcuccugggagggcccagau

SEQ ID NO: 202716 - RNA, 31 nt, Homo Sapiens
augguguuuggcucuuauagagccuguguga

SEQ ID NO: 202717 - RNA, 29 nt, Homo Sapiens
ccuccuuggggacagaacucuccucuccc

SEQ ID NO: 202718 - RNA, 32 nt, Homo Sapiens
uucccaggcccagaagacagacccacagcccu

SEQ ID NO: 202719 - RNA, 32 nt, Homo Sapiens
cugacuucucuuucuucagccuuuugaccacu

SEQ ID NO: 202720 - RNA, 32 nt, Homo Sapiens
ugacauguaaauuauguguuguguauaaguaa

SEQ ID NO: 202721 - RNA, 32 nt, Homo Sapiens
cuagccccuccuccccgcgagacucucaggcu

SEQ ID NO: 202722 - RNA, 32 nt, Homo Sapiens
agcgacccaccuccaguccccuggacaaucgg

SEQ ID NO: 202723 - RNA, 32 nt, Homo Sapiens
ccugcacuugaacaucagacuccagguucuuc

SEQ ID NO: 202724 - RNA, 32 nt, Homo Sapiens
gaccuuugccagcuaccugggggagggcuugc

SEQ ID NO: 202725 - RNA, 32 nt, Homo Sapiens
gcauugggaggcccggccugggggaggagacg

SEQ ID NO: 202726 - RNA, 32 nt, Homo Sapiens
cgggcugcaggcgggggugcugcagaggacac

SEQ ID NO: 202727 - RNA, 32 nt, Homo Sapiens
aacugaguuccaucuucggacguuguucuuac

SEQ ID NO: 202728 - RNA, 32 nt, Homo Sapiens
cugaaguucagauauauugaaacuuucuuagg

SEQ ID NO: 202729 - RNA, 32 nt, Homo Sapiens
uaccuagaacaaaaauagccaauaaaaacgcu

SEQ ID NO: 202730 - RNA, 32 nt, Homo Sapiens
gaacuauccacaagucuaauguuuccaugcuu

SEQ ID NO: 202731 - RNA, 32 nt, Homo Sapiens
uccucauuaguuaaguuuuucuuuuuauguuu

SEQ ID NO: 202732 - RNA, 32 nt, Homo Sapiens
gcagagggauggcugcucagcugcugacugau

SEQ ID NO: 202733 - RNA, 32 nt, Homo Sapiens
cagcagcagcagcagcagcagcacccgcaucc

SEQ ID NO: 202734 - RNA, 32 nt, Homo Sapiens
gcgccaaggggcggggagcgggcgugcgugug

SEQ ID NO: 202735 - RNA, 32 nt, Homo Sapiens
aaaacuaaaaauacucaugaaaagagccuacc

SEQ ID NO: 202736 - RNA, 32 nt, Homo Sapiens
ggccgggugcgguggcucacgccugucauccc

SEQ ID NO: 202737 - RNA, 32 nt, Homo Sapiens
gacuuccugccccugcucugcacucucaggua

SEQ ID NO: 202738 - RNA, 32 nt, Homo Sapiens
gggcgccugaggaggaggaggagaagcggaug

SEQ ID NO: 202739 - RNA, 32 nt, Homo Sapiens
aacauccgcauucuccucuucuuccugggugc

SEQ ID NO: 202740 - RNA, 32 nt, Homo Sapiens
agagaggugguuucuguagagaauaauuauug

SEQ ID NO: 202741 - RNA, 32 nt, Homo Sapiens
ccuaggcuggagggcaggguugagaucuuggc

SEQ ID NO: 202742 - RNA, 32 nt, Homo Sapiens
ccccugaggaugggaaaggagcucuucaguug

SEQ ID NO: 202743 - RNA, 32 nt, Homo Sapiens
cuaaucccagucaagagggcucugccaggggc

SEQ ID NO: 202744 - RNA, 32 nt, Homo Sapiens
guuuauucugcagacaaaaaugugacaauaug

SEQ ID NO: 202745 - RNA, 32 nt, Homo Sapiens
cagaaggggaugcacgcccccuguggucaagc

SEQ ID NO: 202746 - RNA, 32 nt, Homo Sapiens
accccagaaaucacugaaauuucaugauuggc

SEQ ID NO: 202747 - RNA, 31 nt, Homo Sapiens
gagcgcugggauucagcaggagugccaggag

SEQ ID NO: 202748 - RNA, 32 nt, Homo Sapiens
gcagaccuccccagccccuagcccaggagaga

SEQ ID NO: 202749 - RNA, 32 nt, Homo Sapiens
caacaugaaacaccaagaugucugucucugaa

SEQ ID NO: 202750 - RNA, 32 nt, Homo Sapiens
accuggggauuguuaagugcugccuuaguugc

SEQ ID NO: 202751 - RNA, 32 nt, Homo Sapiens
cggguccggggacagcgggcgaggggcagcug

SEQ ID NO: 202752 - RNA, 32 nt, Homo Sapiens
cagagccucugcgccuccacagggaaaaggca

SEQ ID NO: 202753 - RNA, 32 nt, Homo Sapiens
gacugggcaccaagcuugcagccgaaggccuu

SEQ ID NO: 202754 - RNA, 32 nt, Homo Sapiens
cccaucucaugccccagggaccgccacugccc

SEQ ID NO: 202755 - RNA, 32 nt, Homo Sapiens
uggugucacagcacuccucuuugcccuagaga

SEQ ID NO: 202756 - RNA, 32 nt, Homo Sapiens
aagauuuaaguacaauuuaagaauuuaaaaca

SEQ ID NO: 202757 - RNA, 32 nt, Homo Sapiens
accaccugcccuccccgccuucuuggugacaa

SEQ ID NO: 202758 - RNA, 32 nt, Homo Sapiens
gaaccaaaauaugcaguugaaaaaauaguaga

SEQ ID NO: 202759 - RNA, 32 nt, Homo Sapiens
ggccgggcacgguggcucacgccgguaauccc

SEQ ID NO: 202760 - RNA, 32 nt, Homo Sapiens
gacuacagcuccgacugucagugccggccuuc

SEQ ID NO: 202761 - RNA, 32 nt, Homo Sapiens
gagaguaggcugcgccccccagcccuuccuga

SEQ ID NO: 202762 - RNA, 32 nt, Homo Sapiens
agcuucauggggguagaugcuuuacuucauuc

SEQ ID NO: 202763 - RNA, 32 nt, Homo Sapiens
ggcuucugccccugcccuuccucacacugaca

SEQ ID NO: 202764 - RNA, 32 nt, Homo Sapiens
gcccagcguguuggcucacaccuaugaucuca

SEQ ID NO: 202765 - RNA, 32 nt, Homo Sapiens
aacauuuauagcagaaaguauucguguuuccu

SEQ ID NO: 202766 - RNA, 32 nt, Homo Sapiens
ugucuuucuccauugcagaaauaagcuaggga

SEQ ID NO: 202767 - RNA, 32 nt, Homo Sapiens
gccagccuguuucucuaacaaacaaacaaaca

SEQ ID NO: 202768 - RNA, 32 nt, Homo Sapiens
ccucucguuccccguccucguuuccagcaucu

SEQ ID NO: 202769 - RNA, 32 nt, Homo Sapiens
ugugaaauuuaaaaaagggauguuuuuccagg

SEQ ID NO: 202770 - RNA, 32 nt, Homo Sapiens
cugguuuuugguuuuuagaaauauuuuuuauu

SEQ ID NO: 202771 - RNA, 32 nt, Homo Sapiens
gagauucugaccacugucccauaggauucuga

SEQ ID NO: 202772 - RNA, 32 nt, Homo Sapiens
cugcugggggcccuacugcuuccuggugcugc

SEQ ID NO: 202773 - RNA, 32 nt, Homo Sapiens
ccggcugugaacuggcuggcagguucugcacg

SEQ ID NO: 202774 - RNA, 30 nt, Homo Sapiens
auugagaucuucgaaugcugcggagcugga

SEQ ID NO: 202775 - RNA, 31 nt, Homo Sapiens
uccugagcaaggucugcagcccccagcucug

SEQ ID NO: 202776 - RNA, 32 nt, Homo Sapiens
ugugagggacuccgggaagccauggacgucga

SEQ ID NO: 202777 - RNA, 32 nt, Homo Sapiens
guucguuguacuuuuaauuauuauuuuauuua

SEQ ID NO: 202778 - RNA, 32 nt, Homo Sapiens
ccuagagagccucauggauuguaacuaaagaa

SEQ ID NO: 202779 - RNA, 32 nt, Homo Sapiens
uggggaggggguggccauuaugaguggggccc

SEQ ID NO: 202780 - RNA, 32 nt, Homo Sapiens
ccgccgaggagggucacgcagcacaaugccag

SEQ ID NO: 202781 - RNA, 32 nt, Homo Sapiens
uuauuaucuuagcagcagcauguguggaaauc

SEQ ID NO: 202782 - RNA, 32 nt, Homo Sapiens
ggugugggccgcgugcggcgucuucuccaucg

SEQ ID NO: 202783 - RNA, 32 nt, Homo Sapiens
aggauggguaguaggcagaugauaaaauuuau

SEQ ID NO: 202784 - RNA, 32 nt, Homo Sapiens
gaaaauaaaaacauccaguuuguggaugacua

SEQ ID NO: 202785 - RNA, 32 nt, Homo Sapiens
aaucagaucacauuauuuccuguuuuuaacag

SEQ ID NO: 202786 - RNA, 32 nt, Homo Sapiens
ccuuccucgcuaauuugaacuaauuguauaaa

SEQ ID NO: 202787 - RNA, 32 nt, Homo Sapiens
uuucaacacuuuacuaaaagcuuauuucuguc

SEQ ID NO: 202788 - RNA, 32 nt, Homo Sapiens
uagauguuaaggucagugcucuccaggagauu

SEQ ID NO: 202789 - RNA, 32 nt, Homo Sapiens
ugccucccggggugggggcgggccccgcacac

SEQ ID NO: 202790 - RNA, 32 nt, Homo Sapiens
cuuugaugguuuuuuucuuaauuauuggcuga

SEQ ID NO: 202791 - RNA, 32 nt, Homo Sapiens
ggggcuccucacuugcugcagugucauagcaa

SEQ ID NO: 202792 - RNA, 32 nt, Homo Sapiens
cuguaaaauggcauuugaaucucguucuuugu

SEQ ID NO: 202793 - RNA, 32 nt, Homo Sapiens
aaaaacaaacuccuaguccuuuagaaauaaca

SEQ ID NO: 202794 - RNA, 32 nt, Homo Sapiens
ggaaccaggcccucacuuagguuuggaggggc

SEQ ID NO: 202795 - RNA, 32 nt, Homo Sapiens
gggggugcgaguuugucuuuaucaccccccau

SEQ ID NO: 202796 - RNA, 32 nt, Homo Sapiens
uagaaugcaaauaccucccuccccuaaacuga

SEQ ID NO: 202797 - RNA, 32 nt, Homo Sapiens
gcucccugggguggagaagggaccagggauug

SEQ ID NO: 202798 - RNA, 32 nt, Homo Sapiens
aaggugcuuucgagauuaaauuauuaauaaca

SEQ ID NO: 202799 - RNA, 31 nt, Homo Sapiens
cgcugaggcagccggcuggugcaccgcccgg

SEQ ID NO: 202800 - RNA, 32 nt, Homo Sapiens
uugccuuugagcccacguauauuuagacuccu

SEQ ID NO: 202801 - RNA, 32 nt, Homo Sapiens
uccuaugauguucucuaguauaucacacuuag

SEQ ID NO: 202802 - RNA, 32 nt, Homo Sapiens
gcccccguuucccccaccgccaucuccagagc

SEQ ID NO: 202803 - RNA, 32 nt, Homo Sapiens
cugacugugcuuuuguaaauuuucacaaacag

SEQ ID NO: 202804 - RNA, 32 nt, Homo Sapiens
uccgcucuuggcuuccagaaaaguuuggagaa

SEQ ID NO: 202805 - RNA, 32 nt, Homo Sapiens
auaugagagauuuggugacuuuugauacgggu

SEQ ID NO: 202806 - RNA, 32 nt, Homo Sapiens
cuccuguaaucccagcacuuugggaggcccag

SEQ ID NO: 202807 - RNA, 32 nt, Homo Sapiens
cugucuucuuugauagccaucuauucaucugg

SEQ ID NO: 202808 - RNA, 32 nt, Homo Sapiens
agaauaugcgggacaugaugcuaagagcccug

SEQ ID NO: 202809 - RNA, 32 nt, Homo Sapiens
gaaagugcauuacuggugaagguauuaucaau

SEQ ID NO: 202810 - RNA, 32 nt, Homo Sapiens
aacuuaugauuacuuaaauauucucccauauu

SEQ ID NO: 202811 - RNA, 30 nt, Homo Sapiens
ggcgguacgaggcgcgcgcucggggucccg

SEQ ID NO: 202812 - RNA, 32 nt, Homo Sapiens
gugcaagacauuagcccuuuaguuaugagccu

SEQ ID NO: 202813 - RNA, 32 nt, Homo Sapiens
uuuuucuuuauuucuuuuuuuuuuuuaaauag

SEQ ID NO: 202814 - RNA, 30 nt, Homo Sapiens
gauugcaggcgcgugccgccacgccugacu

SEQ ID NO: 202815 - RNA, 32 nt, Homo Sapiens
ggacaguugcaaaaggcuucaaggaauuuauc

SEQ ID NO: 202816 - RNA, 32 nt, Homo Sapiens
cuaauuuuuguauuuucaguacagaugggguu

SEQ ID NO: 202817 - RNA, 32 nt, Homo Sapiens
cguauaauagguaaugguuuuuagacauagga

SEQ ID NO: 202818 - RNA, 32 nt, Homo Sapiens
cggguggugugggugugaagacgcugccuccc

SEQ ID NO: 202819 - RNA, 32 nt, Homo Sapiens
augguacuauuaugguauuguacuugggcuuu

SEQ ID NO: 202820 - RNA, 32 nt, Homo Sapiens
gccauguugcuuccucauggcaccugcuuucc

SEQ ID NO: 202821 - RNA, 32 nt, Homo Sapiens
cuuggguugagaugaaugauguguucacaaau

SEQ ID NO: 202822 - RNA, 32 nt, Homo Sapiens
aaucaucugagggggagggagaaggaugcuca

SEQ ID NO: 202823 - RNA, 32 nt, Homo Sapiens
aaagagaagcuauauagagaaaaggaaaccac

SEQ ID NO: 202824 - RNA, 32 nt, Homo Sapiens
agcaugagaaugccucuguguuugugagugug

SEQ ID NO: 202825 - RNA, 32 nt, Homo Sapiens
acacucuggauugaauaauacuguagccucau

SEQ ID NO: 202826 - RNA, 32 nt, Homo Sapiens
acacgcccuccuccucgcugccugcagcucca

SEQ ID NO: 202827 - RNA, 32 nt, Homo Sapiens
uuauuuucagugcuuuuuguuuggccucccug

SEQ ID NO: 202828 - RNA, 32 nt, Homo Sapiens
acuucaucgcaguggacugugucccucggugc

SEQ ID NO: 202829 - RNA, 32 nt, Homo Sapiens
accuaagaauauauuugauauauucugguaua

SEQ ID NO: 202830 - RNA, 32 nt, Homo Sapiens
gcgagccggccgcggcuggcacugcugcugcu

SEQ ID NO: 202831 - RNA, 32 nt, Homo Sapiens
guggcagcgggcuuauccuucucuguugccaa

SEQ ID NO: 202832 - RNA, 32 nt, Homo Sapiens
cuuuagaauuuaugcccaguuuucuugcauug

SEQ ID NO: 202833 - RNA, 32 nt, Homo Sapiens
agagauagagugcagggcauggcauuggaggc

SEQ ID NO: 202834 - RNA, 32 nt, Homo Sapiens
auuccuguucuaucccuucucuaucccacccu

SEQ ID NO: 202835 - RNA, 32 nt, Homo Sapiens
cgagaacugccauugucgucuuuauguccgcc

SEQ ID NO: 202836 - RNA, 32 nt, Homo Sapiens
aaucccuaaauauaguuauauuucauacuuag

SEQ ID NO: 202837 - RNA, 31 nt, Homo Sapiens
ugugaucagugcagccaagaguucaugaggu

SEQ ID NO: 202838 - RNA, 32 nt, Homo Sapiens
ucaggguuggccaugauuugugaaggagaugc

SEQ ID NO: 202839 - RNA, 32 nt, Homo Sapiens
aggaagaggagaaagucuucauggggugcuag

SEQ ID NO: 202840 - RNA, 32 nt, Homo Sapiens
uggaggcgggcuugagagcggcggccagggag

SEQ ID NO: 202841 - RNA, 32 nt, Homo Sapiens
gcaauaacacuauauuuauuuuuggguuuggc

SEQ ID NO: 202842 - RNA, 32 nt, Homo Sapiens
cgccuccgcccggcugcccgcccggacugucg

SEQ ID NO: 202843 - RNA, 32 nt, Homo Sapiens
aagggagggcugucgguggcggugccugggga

SEQ ID NO: 202844 - RNA, 32 nt, Homo Sapiens
cccggcucacccccggcccugccagcacucug

SEQ ID NO: 202845 - RNA, 32 nt, Homo Sapiens
uagcuuuuccccuuuuugcugacaaaaagaag

SEQ ID NO: 202846 - RNA, 32 nt, Homo Sapiens
gcucuccucaaagacgcaaaacauuuuccaac

SEQ ID NO: 202847 - RNA, 32 nt, Homo Sapiens
guguuggauaaaugcaggauguuaauaugcua

SEQ ID NO: 202848 - RNA, 32 nt, Homo Sapiens
aaacugcuguccuggugacuugucccucuucu

SEQ ID NO: 202849 - RNA, 32 nt, Homo Sapiens
gccauugcacuccagucugggcgacaggagca

SEQ ID NO: 202850 - RNA, 32 nt, Homo Sapiens
ccgagccggagccccagcccuaggcccugcgc

SEQ ID NO: 202851 - RNA, 32 nt, Homo Sapiens
cucuuguucagcagauggcaguuuuuaaaaaa

SEQ ID NO: 202852 - RNA, 32 nt, Homo Sapiens
uaagagagaggccaguugugauaguggccaag

SEQ ID NO: 202853 - RNA, 32 nt, Homo Sapiens
ccuuugaaauaccaccuagaggaagggguaau

SEQ ID NO: 202854 - RNA, 32 nt, Homo Sapiens
gggaccaggaaggaacugaggaccaagaagug

SEQ ID NO: 202855 - RNA, 32 nt, Homo Sapiens
uuggacaaccuaacucagcuuuauuugacaug

SEQ ID NO: 202856 - RNA, 32 nt, Homo Sapiens
gcggcgucuuggcgcgcgccuguagucccagc

SEQ ID NO: 202857 - RNA, 32 nt, Homo Sapiens
gggcugggcuccugggcugaacauggaccacg

SEQ ID NO: 202858 - RNA, 32 nt, Homo Sapiens
cuugaagugucuauaagcucaucacagccuag

SEQ ID NO: 202859 - RNA, 32 nt, Homo Sapiens
cucagggcgcgacuuccggggcgacgggcggc

SEQ ID NO: 202860 - RNA, 32 nt, Homo Sapiens
cgcugcgccggcgaccccggacccggcacccg

SEQ ID NO: 202861 - RNA, 32 nt, Homo Sapiens
cagucagucaauagauggcaucccucaucagg

SEQ ID NO: 202862 - RNA, 32 nt, Homo Sapiens
acaacaagucuaucccgcaaagggcagggaau

SEQ ID NO: 202863 - RNA, 32 nt, Homo Sapiens
ugcucuuccuuccccaccugcuggggauuuuc

SEQ ID NO: 202864 - RNA, 32 nt, Homo Sapiens
gcagauguauuaugaaauguguuuuauuuuca

SEQ ID NO: 202865 - RNA, 32 nt, Homo Sapiens
gcaagucaacaaaagcacuuagucaggauccg

SEQ ID NO: 202866 - RNA, 30 nt, Homo Sapiens
caggaguaucaccaugggagagggcaggac

SEQ ID NO: 202867 - RNA, 32 nt, Homo Sapiens
gcugcugcccuccacuuccugcucuugcaagu

SEQ ID NO: 202868 - RNA, 32 nt, Homo Sapiens
uuggauacuuuuuucuugccaauuauguuuga

SEQ ID NO: 202869 - RNA, 32 nt, Homo Sapiens
uugauguuaagugaauggaucuaaguaaaucu

SEQ ID NO: 202870 - RNA, 32 nt, Homo Sapiens
agacuggaaguuuaaaaauguacaaguccuuu

SEQ ID NO: 202871 - RNA, 32 nt, Homo Sapiens
aguccaauuaaaccucuuuuauucauaaaaua

SEQ ID NO: 202872 - RNA, 32 nt, Homo Sapiens
cagagugggcggcacagcgggcugcacacagg

SEQ ID NO: 202873 - RNA, 32 nt, Homo Sapiens
uugugcacuccagagcagcauccugaguggca

SEQ ID NO: 202874 - RNA, 32 nt, Homo Sapiens
ggggccgcggccaaagagcuggcuguaauccc

SEQ ID NO: 202875 - RNA, 32 nt, Homo Sapiens
ucuggcccagggcagggcugccccacacaagg

SEQ ID NO: 202876 - RNA, 32 nt, Homo Sapiens
agacacauuuuggucuuaauccauguacacuu

SEQ ID NO: 202877 - RNA, 32 nt, Homo Sapiens
ccagacuaucagcagcagcaagagcgucuccu

SEQ ID NO: 202878 - RNA, 32 nt, Homo Sapiens
ggggcgugaaggggguuccggcgggagggccg

SEQ ID NO: 202879 - RNA, 32 nt, Homo Sapiens
caguggguggaagaggagaagagggaccugga

SEQ ID NO: 202880 - RNA, 32 nt, Homo Sapiens
gccuugaguuacauuuucauggggacuuggga

SEQ ID NO: 202881 - RNA, 32 nt, Homo Sapiens
uguauucgaugagguuuccauguauuuacuua

SEQ ID NO: 202882 - RNA, 32 nt, Homo Sapiens
augacuuucaugacuauauaaaaguccauugu

SEQ ID NO: 202883 - RNA, 32 nt, Homo Sapiens
gggcacucauuucaaaucaugaaaugcuacuu

SEQ ID NO: 202884 - RNA, 29 nt, Homo Sapiens
guguguguauguauguauguacuuuagca

SEQ ID NO: 202885 - RNA, 32 nt, Homo Sapiens
aagaccucccagauguucuccucuguguucuu

SEQ ID NO: 202886 - RNA, 32 nt, Homo Sapiens
guggagaagcuuugcaaaaucuguagggauag

SEQ ID NO: 202887 - RNA, 32 nt, Homo Sapiens
gcugucuuccuucuccugaaauccagagacuu

SEQ ID NO: 202888 - RNA, 32 nt, Homo Sapiens
ccucccacccggccugcagagccccaggcagu

SEQ ID NO: 202889 - RNA, 32 nt, Homo Sapiens
gagucaauuaaaccucuuuccuuuauaaaaaa

SEQ ID NO: 202890 - RNA, 32 nt, Homo Sapiens
uuccccaacaccuuugugccuuugcauauggu

SEQ ID NO: 202891 - RNA, 32 nt, Homo Sapiens
ugguuggaagacugugacaauagcucaugaaa

SEQ ID NO: 202892 - RNA, 32 nt, Homo Sapiens
uccucgggggccuggggaaccgcgcgguuugg

SEQ ID NO: 202893 - RNA, 32 nt, Homo Sapiens
gagccaauuaaaccucuuuucuuuauaaaaaa

SEQ ID NO: 202894 - RNA, 32 nt, Homo Sapiens
ugguagcuaugcuuugauguccuguugaggcc

SEQ ID NO: 202895 - RNA, 32 nt, Homo Sapiens
ccucggcucccucguccuagcaggcauugccu

SEQ ID NO: 202896 - RNA, 32 nt, Homo Sapiens
uugucaggaagaucggaggugccaaguagcag

SEQ ID NO: 202897 - RNA, 32 nt, Homo Sapiens
acaguuucagaauugaauaggcaagugacugu

SEQ ID NO: 202898 - RNA, 32 nt, Homo Sapiens
cacuaugaagauuguucaccuuugcugcauuu

SEQ ID NO: 202899 - RNA, 32 nt, Homo Sapiens
ggguuuccagggaaacaacaugaaaaacaggu

SEQ ID NO: 202900 - RNA, 32 nt, Homo Sapiens
gguauaauauauauuucuugaguaauaaugug

SEQ ID NO: 202901 - RNA, 32 nt, Homo Sapiens
gguguugacaccuuggcaguguuuauggccag

SEQ ID NO: 202902 - RNA, 31 nt, Homo Sapiens
ucccuggagccccaggugggcugaggggcag

SEQ ID NO: 202903 - RNA, 32 nt, Homo Sapiens
uuucuauauuguaguaaaugugaaaagaguuu

SEQ ID NO: 202904 - RNA, 32 nt, Homo Sapiens
cuggugagaaauucuguaaauugugauaauca

SEQ ID NO: 202905 - RNA, 32 nt, Homo Sapiens
ucucggggcacgcuccaguaugccaguccugc

SEQ ID NO: 202906 - RNA, 32 nt, Homo Sapiens
auaggacagcugcucuuccauaaacagauuau

SEQ ID NO: 202907 - RNA, 32 nt, Homo Sapiens
gggcccaggaccagccucaguuucucaccaaa

SEQ ID NO: 202908 - RNA, 32 nt, Homo Sapiens
cuuccuguuacuuuacuucucuagccugucug

SEQ ID NO: 202909 - RNA, 32 nt, Homo Sapiens
aauugucacacuuuucccuuccccaccaguuc

SEQ ID NO: 202910 - RNA, 32 nt, Homo Sapiens
aaagcuuuacuuuguacaaauguaaauagaua

SEQ ID NO: 202911 - RNA, 32 nt, Homo Sapiens
cacaccuagcuaauauuuuguauuuuaauaga

SEQ ID NO: 202912 - RNA, 32 nt, Homo Sapiens
guaugguuugcccaucggaggaaagcuaaaac

SEQ ID NO: 202913 - RNA, 32 nt, Homo Sapiens
ccuuggcucguggcauggccaagcccuggggu

SEQ ID NO: 202914 - RNA, 32 nt, Homo Sapiens
ucaguuauuuaguaaauaaucucaauaaauuu

SEQ ID NO: 202915 - RNA, 32 nt, Homo Sapiens
guugcuguacacaacuuugagacacccaaaau

SEQ ID NO: 202916 - RNA, 32 nt, Homo Sapiens
ccacugauauucuuucauguuuagaaauucuu

SEQ ID NO: 202917 - RNA, 32 nt, Homo Sapiens
ggccccaucagaggcugggggaggcggcacau

SEQ ID NO: 202918 - RNA, 31 nt, Homo Sapiens
ucauuccaagccaccacuguaaggaauaaag

SEQ ID NO: 202919 - RNA, 32 nt, Homo Sapiens
aacuguguggaaaagguugauuuuucuuaaua

SEQ ID NO: 202920 - RNA, 32 nt, Homo Sapiens
gcagagccuguaucaugggacacacaccccuu

SEQ ID NO: 202921 - RNA, 32 nt, Homo Sapiens
ucaggaccaacucucucccuccccucauccca

SEQ ID NO: 202922 - RNA, 32 nt, Homo Sapiens
aauucucaguacugccuauagagauacagugu

SEQ ID NO: 202923 - RNA, 32 nt, Homo Sapiens
cccuagaccuccuucccucccuccucacguca

SEQ ID NO: 202924 - RNA, 32 nt, Homo Sapiens
uucgucucggugggcuucuccugcaugggagu

SEQ ID NO: 202925 - RNA, 32 nt, Homo Sapiens
uuuaaaaagaauucuuuuuucauuauucugcc

SEQ ID NO: 202926 - RNA, 32 nt, Homo Sapiens
uguucaucuaucgcaaaguaaaaauguaaaau

SEQ ID NO: 202927 - RNA, 32 nt, Homo Sapiens
acaacgaggaugaagacuucuaugauaaucca

SEQ ID NO: 202928 - RNA, 32 nt, Homo Sapiens
acuuuuucugucugcccuucaucgucaagcau

SEQ ID NO: 202929 - RNA, 30 nt, Homo Sapiens
ugccucuggauguguccagaagcuuuacca

SEQ ID NO: 202930 - RNA, 32 nt, Homo Sapiens
caagcaaaagauuguccccuucugcauauggg

SEQ ID NO: 202931 - RNA, 32 nt, Homo Sapiens
gaugucccagaacaagcagagaggcugauuuu

SEQ ID NO: 202932 - RNA, 32 nt, Homo Sapiens
gaguggccaguguucggcguugcucgggauuc

SEQ ID NO: 202933 - RNA, 32 nt, Homo Sapiens
cagucggcuuucugcugggcucggagccagaa

SEQ ID NO: 202934 - RNA, 32 nt, Homo Sapiens
acuaucauccuucaguuuuagcacuggcauuu

SEQ ID NO: 202935 - RNA, 32 nt, Homo Sapiens
ggcccugccucuccccgcucauagaagccugg

SEQ ID NO: 202936 - RNA, 32 nt, Homo Sapiens
gagguuacagugagccgagauggcgccauuuc

SEQ ID NO: 202937 - RNA, 32 nt, Homo Sapiens
ccacacucuaugcccuucuccuccacaaaggu

SEQ ID NO: 202938 - RNA, 32 nt, Homo Sapiens
auaauuugaauguauuugauuuauaaguuuuu

SEQ ID NO: 202939 - RNA, 32 nt, Homo Sapiens
agguuugauuccucagcagcaguguccagucu

SEQ ID NO: 202940 - RNA, 32 nt, Homo Sapiens
ucacucuguucgucgggacgccgccuuucuaa

SEQ ID NO: 202941 - RNA, 32 nt, Homo Sapiens
aguggccugcgcgcugacccugcccuucaucu

SEQ ID NO: 202942 - RNA, 32 nt, Homo Sapiens
uggaugggaaaguuaauuauuggucucuucaa

SEQ ID NO: 202943 - RNA, 32 nt, Homo Sapiens
gugccacgcggcgugcccggcgcuuuccccgc

SEQ ID NO: 202944 - RNA, 32 nt, Homo Sapiens
agggcuuuuauuuuuucuuuuguaauugugua

SEQ ID NO: 202945 - RNA, 32 nt, Homo Sapiens
acuuuugcuguaauguuaauauugauuuauua

SEQ ID NO: 202946 - RNA, 32 nt, Homo Sapiens
auucuccugauaauucaagggagcucaaaguc

SEQ ID NO: 202947 - RNA, 32 nt, Homo Sapiens
gggacuccuugacaaagcucucagcuccaaug

SEQ ID NO: 202948 - RNA, 29 nt, Homo Sapiens
auagaucaguugcuauauuuucuggugua

SEQ ID NO: 202949 - RNA, 32 nt, Homo Sapiens
caccugcauccacaguagccugugcggcacuc

SEQ ID NO: 202950 - RNA, 32 nt, Homo Sapiens
gcaugcugucuccaacccuuauccccagguuu

SEQ ID NO: 202951 - RNA, 32 nt, Homo Sapiens
cuauacaagaguaucugaaacuaacuguugcc

SEQ ID NO: 202952 - RNA, 32 nt, Homo Sapiens
cuagguacuaauuugcagaugucuuuacauau

SEQ ID NO: 202953 - RNA, 32 nt, Homo Sapiens
acauccucugucuauuugagacuuagaaaaau

SEQ ID NO: 202954 - RNA, 32 nt, Homo Sapiens
aaaaaaggaaauguguaucaagaacaugauua

SEQ ID NO: 202955 - RNA, 32 nt, Homo Sapiens
ugacaggagaauuuauauacaggauguauacc

SEQ ID NO: 202956 - RNA, 32 nt, Homo Sapiens
guccgaggccgcggccguggcgcugggcggcu

SEQ ID NO: 202957 - RNA, 30 nt, Homo Sapiens
gaguguucacuugccccucaguuugugacc

SEQ ID NO: 202958 - RNA, 32 nt, Homo Sapiens
cgggccaggguccuggcgacagggggcccaag

SEQ ID NO: 202959 - RNA, 32 nt, Homo Sapiens
uaaggcagaaauacuaaaaauaucugguucaa

SEQ ID NO: 202960 - RNA, 32 nt, Homo Sapiens
aagcagaaacugaguucucuuggccugccgcg

SEQ ID NO: 202961 - RNA, 32 nt, Homo Sapiens
gcacauuccuaccugcuuccuaauggggaugc

SEQ ID NO: 202962 - RNA, 32 nt, Homo Sapiens
gggugugucuccuuggccuccuagaggguggg

SEQ ID NO: 202963 - RNA, 32 nt, Homo Sapiens
cuccacuccuccccuauaaagccuccuggggu

SEQ ID NO: 202964 - RNA, 32 nt, Homo Sapiens
auuauuuauauaauucagcuuucaaaucuguu

SEQ ID NO: 202965 - RNA, 32 nt, Homo Sapiens
aaaaucauuuuugaauugauaauuagaauauu

SEQ ID NO: 202966 - RNA, 32 nt, Homo Sapiens
guuuggugugcagcauacuagaguagugagag

SEQ ID NO: 202967 - RNA, 32 nt, Homo Sapiens
cucuaucaagauuuagucaaguucaguuagau

SEQ ID NO: 202968 - RNA, 32 nt, Homo Sapiens
auauuauaauuugaugauuuuucaugcgucaa

SEQ ID NO: 202969 - RNA, 32 nt, Homo Sapiens
aauccuacguauuuguuaugcauguacaaaga

SEQ ID NO: 202970 - RNA, 32 nt, Homo Sapiens
ucgaagucagccuggccaacguggugaaaccc

SEQ ID NO: 202971 - RNA, 31 nt, Homo Sapiens
auaagccuuacgggaaaguccagaucuacac

SEQ ID NO: 202972 - RNA, 32 nt, Homo Sapiens
gcgggacccagagcuuccccccugucgcuagu

SEQ ID NO: 202973 - RNA, 32 nt, Homo Sapiens
ugugaaaaacaguaaaguugggagaggagcau

SEQ ID NO: 202974 - RNA, 32 nt, Homo Sapiens
caugagcacccaccccacagcaccaucaggca

SEQ ID NO: 202975 - RNA, 32 nt, Homo Sapiens
uuggcuccaagagcuaccccagagaccuuaaa

SEQ ID NO: 202976 - RNA, 32 nt, Homo Sapiens
ggaggugcuuaccccugaaagucccuaagugu

SEQ ID NO: 202977 - RNA, 32 nt, Homo Sapiens
uucaucaucucccagagugcugcccggggaua

SEQ ID NO: 202978 - RNA, 32 nt, Homo Sapiens
cuaccgacgacggcgggcagacggugccagca

SEQ ID NO: 202979 - RNA, 32 nt, Homo Sapiens
gagccucgaaagccgcaggggcggcagcucgc

SEQ ID NO: 202980 - RNA, 32 nt, Homo Sapiens
cccucuaaaauaacccagaaaaaaugcucuga

SEQ ID NO: 202981 - RNA, 32 nt, Homo Sapiens
aucauacaaucuuucauuaucuaaguguauua

SEQ ID NO: 202982 - RNA, 32 nt, Homo Sapiens
acagugaacaacaugcaacaaucagagggaag

SEQ ID NO: 202983 - RNA, 32 nt, Homo Sapiens
ucuuugguuuaaaacguuuguaccucaucugu

SEQ ID NO: 202984 - RNA, 30 nt, Homo Sapiens
auuauuggggcuuacccccaucuuaaguag

SEQ ID NO: 202985 - RNA, 32 nt, Homo Sapiens
gucccagcccauucuccguugaaacagaucac

SEQ ID NO: 202986 - RNA, 31 nt, Homo Sapiens
gccaggaugcugaaucugcugcugcuggcgc

SEQ ID NO: 202987 - RNA, 32 nt, Homo Sapiens
ggugcgaggaggagcaugcacggaccaagcgc

SEQ ID NO: 202988 - RNA, 32 nt, Homo Sapiens
uuccuaugcugaauaguuuucuuacuuucagg

SEQ ID NO: 202989 - RNA, 32 nt, Homo Sapiens
ggaaguucccagcagagcaaacugcuuuccag

SEQ ID NO: 202990 - RNA, 32 nt, Homo Sapiens
ucugaacaucagaaggaacaaacuccggacac

SEQ ID NO: 202991 - RNA, 32 nt, Homo Sapiens
cggaggggaagaggaggccggauugaugcauu

SEQ ID NO: 202992 - RNA, 28 nt, Homo Sapiens
aacuuaguuacaggacucaauaauggug

SEQ ID NO: 202993 - RNA, 32 nt, Homo Sapiens
aagaccucaacgugucuuucugggggauacua

SEQ ID NO: 202994 - RNA, 32 nt, Homo Sapiens
cauguaagaugcacaacaaaagaaacaucaga

SEQ ID NO: 202995 - RNA, 32 nt, Homo Sapiens
ccaagaagaagcugcgggaaggacagcagggg

SEQ ID NO: 202996 - RNA, 32 nt, Homo Sapiens
cugccccgggcccgcgaggccacgcgucgccg

SEQ ID NO: 202997 - RNA, 32 nt, Homo Sapiens
guuaggauguugcuuucuuuuuccauuaguua

SEQ ID NO: 202998 - RNA, 32 nt, Homo Sapiens
aguuuccccauguuggccaggcuggucuugaa

SEQ ID NO: 202999 - RNA, 32 nt, Homo Sapiens
ggaagaaagggagagagggccaggcagucgca

SEQ ID NO: 203000 - RNA, 32 nt, Homo Sapiens
caggaagggcgcgggccgcggucccugcgcgu

SEQ ID NO: 203001 - RNA, 32 nt, Homo Sapiens
ccuguuuuaaucacaugacuacaugucccagu

SEQ ID NO: 203002 - RNA, 32 nt, Homo Sapiens
auaguaacagagcuugaccuccuggccaaaag

SEQ ID NO: 203003 - RNA, 32 nt, Homo Sapiens
auguaauaggauuccugggcuuccucaauggg

SEQ ID NO: 203004 - RNA, 32 nt, Homo Sapiens
ccccuuccggcucacacccccgcccacacucc

SEQ ID NO: 203005 - RNA, 32 nt, Homo Sapiens
gcucaccuuuuacugccaguacuccaggcuuu

SEQ ID NO: 203006 - RNA, 32 nt, Homo Sapiens
gcaccugcacacucacagcugcacaaacugcc

SEQ ID NO: 203007 - RNA, 32 nt, Homo Sapiens
ggccggucccacauuccacgcgagcugaauuc

SEQ ID NO: 203008 - RNA, 32 nt, Homo Sapiens
aauuagccgggugugguggcgcaugccuguaa

SEQ ID NO: 203009 - RNA, 32 nt, Homo Sapiens
ccagggccaucuccugucaccaugguguucca

SEQ ID NO: 203010 - RNA, 32 nt, Homo Sapiens
gagauacuacaauauuaacauaagaaaagauu

SEQ ID NO: 203011 - RNA, 32 nt, Homo Sapiens
ccacucccuggccaauggcaucacucuucagg

SEQ ID NO: 203012 - RNA, 32 nt, Homo Sapiens
cugugccuguuauuguuuuuuauuuuuacucu

SEQ ID NO: 203013 - RNA, 32 nt, Homo Sapiens
ugaaguuccucauagugucauugguaugagag

SEQ ID NO: 203014 - RNA, 32 nt, Homo Sapiens
aaguguaacaaaucuguugcacgcugagagga

SEQ ID NO: 203015 - RNA, 32 nt, Homo Sapiens
cauugcagaugagauuccucuaauggaagaag

SEQ ID NO: 203016 - RNA, 32 nt, Homo Sapiens
ugggguuacagauggccaaugaucucuccaac

SEQ ID NO: 203017 - RNA, 32 nt, Homo Sapiens
gcaaguuuuccagaucaccacccaaguugugu

SEQ ID NO: 203018 - RNA, 32 nt, Homo Sapiens
gagauaauaugaguggcagcucuucaugaguc

SEQ ID NO: 203019 - RNA, 32 nt, Homo Sapiens
aaaauauaaaaauuagcugggugugguggugg

SEQ ID NO: 203020 - RNA, 32 nt, Homo Sapiens
accacacaccuguguggagauuuuauuuuuua

SEQ ID NO: 203021 - RNA, 32 nt, Homo Sapiens
aagauacagaaggaaaucaugcgugugaucgg

SEQ ID NO: 203022 - RNA, 32 nt, Homo Sapiens
cugauggagcagccccauuccagggucccauc

SEQ ID NO: 203023 - RNA, 32 nt, Homo Sapiens
aauuagccgggcgugguggugcaugccuguaa

SEQ ID NO: 203024 - RNA, 32 nt, Homo Sapiens
ccugacccacccaggaaaggauggggguccag

SEQ ID NO: 203025 - RNA, 32 nt, Homo Sapiens
uagccuuucgugcuuggcaaccccuguagacu

SEQ ID NO: 203026 - RNA, 32 nt, Homo Sapiens
ucuaaggaaagcuucacaaaagaucaaaggaa

SEQ ID NO: 203027 - RNA, 32 nt, Homo Sapiens
gaaacaaugugcuagcagaaugugcuaauuag

SEQ ID NO: 203028 - RNA, 32 nt, Homo Sapiens
cugguuggauggacauaacuauuguaacuauu

SEQ ID NO: 203029 - RNA, 32 nt, Homo Sapiens
gccgggggugcuuuggggggagcugcgccgau

SEQ ID NO: 203030 - RNA, 32 nt, Homo Sapiens
ucugguccaaggaaacaucugcacacaggcca

SEQ ID NO: 203031 - RNA, 32 nt, Homo Sapiens
cagugaaaaguguauuuugauagagaacuuuu

SEQ ID NO: 203032 - RNA, 32 nt, Homo Sapiens
cagcauaagaaacugcugcagaguggugcgag

SEQ ID NO: 203033 - RNA, 32 nt, Homo Sapiens
aguaugaaaucuuuauacuauauguuccacgu

SEQ ID NO: 203034 - RNA, 32 nt, Homo Sapiens
ugcuugaagaacuaagaggagaauuaguagag

SEQ ID NO: 203035 - RNA, 32 nt, Homo Sapiens
aaauucaccuugaguuuucucaucugcaaaau

SEQ ID NO: 203036 - RNA, 32 nt, Homo Sapiens
gguguggacaggcagcggcggcuggcgacgaa

SEQ ID NO: 203037 - RNA, 32 nt, Homo Sapiens
ccuuaccauaauauuucuguuaacuguuacau

SEQ ID NO: 203038 - RNA, 32 nt, Homo Sapiens
gugcuguugcuguccucuaaguauugucucaa

SEQ ID NO: 203039 - RNA, 32 nt, Homo Sapiens
ccuggagccuucuugggguguuguggcuggga

SEQ ID NO: 203040 - RNA, 32 nt, Homo Sapiens
ggaacaaagggagguugggcggggcggugcug

SEQ ID NO: 203041 - RNA, 32 nt, Homo Sapiens
acuguuuauuuagcaucagggauugucccuug

SEQ ID NO: 203042 - RNA, 32 nt, Homo Sapiens
auggagcuugcuucuuuuuguuuugccugcca

SEQ ID NO: 203043 - RNA, 32 nt, Homo Sapiens
gcgacaggcagacaaagucuggcgucuggauc

SEQ ID NO: 203044 - RNA, 30 nt, Homo Sapiens
aggccgcugcuacugccgccgcugcuucuu

SEQ ID NO: 203045 - RNA, 32 nt, Homo Sapiens
ucagucucaaagcaaacaaaagaguauugaag

SEQ ID NO: 203046 - RNA, 32 nt, Homo Sapiens
cuccugcucagcucagcccggcugcggaggaa

SEQ ID NO: 203047 - RNA, 32 nt, Homo Sapiens
auaucuagacauaaaaauuguuuucuguauag

SEQ ID NO: 203048 - RNA, 32 nt, Homo Sapiens
ugggauguagagaggcguuagugggcaggugg

SEQ ID NO: 203049 - RNA, 32 nt, Homo Sapiens
uuuucuuacaaaggguauuucgcgaucgaucg

SEQ ID NO: 203050 - RNA, 32 nt, Homo Sapiens
uguuuuuauucagauuucccuaauuaguggug

SEQ ID NO: 203051 - RNA, 32 nt, Homo Sapiens
ccgcgccugccaggccgacgggucuggcccag

SEQ ID NO: 203052 - RNA, 32 nt, Homo Sapiens
uaacuuuuaaacacuaucucaaagccagcaua

SEQ ID NO: 203053 - RNA, 32 nt, Homo Sapiens
gagcugugguugugggcgccggacaaguccaa

SEQ ID NO: 203054 - RNA, 32 nt, Homo Sapiens
guugaaaugugaauuaaggaaaacuuuuguua

SEQ ID NO: 203055 - RNA, 32 nt, Homo Sapiens
uggucagaagaguaaaguuucugggauugggg

SEQ ID NO: 203056 - RNA, 32 nt, Homo Sapiens
cccgguacacugauaagugcucacuaaaggau

SEQ ID NO: 203057 - RNA, 32 nt, Homo Sapiens
gaacccagggucaccaaggucugcuuggacaa

SEQ ID NO: 203058 - RNA, 32 nt, Homo Sapiens
caggcagcggcugagucaguguguguggaaug

SEQ ID NO: 203059 - RNA, 32 nt, Homo Sapiens
gaaaacugaguaggaaaugaaauacuagauua

SEQ ID NO: 203060 - RNA, 32 nt, Homo Sapiens
agguggaagaggguaggagggaugcuggugcc

SEQ ID NO: 203061 - RNA, 32 nt, Homo Sapiens
uaaaauaauaauauaaaguuugaacugauuag

SEQ ID NO: 203062 - RNA, 32 nt, Homo Sapiens
aaacucuucaccaaauagaacacuugugucuc

SEQ ID NO: 203063 - RNA, 32 nt, Homo Sapiens
auucacgagaaacauuuuuuuauuuguuuaau

SEQ ID NO: 203064 - RNA, 27 nt, Homo Sapiens
cucacacccuuccucagccccaucauc

SEQ ID NO: 203065 - RNA, 32 nt, Homo Sapiens
aggcgacggugccgggcgcgggccccugcgua

SEQ ID NO: 203066 - RNA, 32 nt, Homo Sapiens
gagcugagaaggaaaagaggagcuugcggagg

SEQ ID NO: 203067 - RNA, 32 nt, Homo Sapiens
gugugugacuuaugguuaaauaaaaugaaaau

SEQ ID NO: 203068 - RNA, 32 nt, Homo Sapiens
ucguauaaugacugguaauuucauucacugaa

SEQ ID NO: 203069 - RNA, 32 nt, Homo Sapiens
agcgagcccaaccccugcacccagguagucau

SEQ ID NO: 203070 - RNA, 32 nt, Homo Sapiens
aaaacagggcuuucuggaaaaacauucuucuc

SEQ ID NO: 203071 - RNA, 32 nt, Homo Sapiens
gggauugcgggaagaaggguguguggaggcca

SEQ ID NO: 203072 - RNA, 32 nt, Homo Sapiens
aaaauaugacuucugaaaauucugaauucaaa

SEQ ID NO: 203073 - RNA, 32 nt, Homo Sapiens
acacacagagggugggggugagcaggcagugu

SEQ ID NO: 203074 - RNA, 32 nt, Homo Sapiens
uugaguccuggaguuugagaucagccugggca

SEQ ID NO: 203075 - RNA, 32 nt, Homo Sapiens
guucuucuuuugcagauugcuuuacuugcucu

SEQ ID NO: 203076 - RNA, 32 nt, Homo Sapiens
gauguuuuuauucucucaggcagucuauauau

SEQ ID NO: 203077 - RNA, 32 nt, Homo Sapiens
ccucggccuccgcgccuccccucccccgacuc

SEQ ID NO: 203078 - RNA, 32 nt, Homo Sapiens
uguaacuuauuguguccccgcguauuuauuug

SEQ ID NO: 203079 - RNA, 32 nt, Homo Sapiens
aacagcugaaagauugauuaaugaacuauugu

SEQ ID NO: 203080 - RNA, 32 nt, Homo Sapiens
uggugagauuugacuuuuuuuuuuaauggaaa

SEQ ID NO: 203081 - RNA, 32 nt, Homo Sapiens
auauagaauuugacaccaaauuuuggaacuua

SEQ ID NO: 203082 - RNA, 32 nt, Homo Sapiens
uacuucuuauacauuugauaaaguaaggcaug

SEQ ID NO: 203083 - RNA, 32 nt, Homo Sapiens
ugugcuguaaaaauucaauacaguuuaaauaa

SEQ ID NO: 203084 - RNA, 32 nt, Homo Sapiens
gggauggugggauauuugugucuguguucuua

SEQ ID NO: 203085 - RNA, 32 nt, Homo Sapiens
ccaacauaaaacaaaaccaagccuuggcucgu

SEQ ID NO: 203086 - RNA, 32 nt, Homo Sapiens
ccuccugcgcccccgcuccccccgcauccccu

SEQ ID NO: 203087 - RNA, 32 nt, Homo Sapiens
cagcccuaggcccgucccacucaccucccccc

SEQ ID NO: 203088 - RNA, 32 nt, Homo Sapiens
uagagugugcgguggcuuuggcaacagaaacc

SEQ ID NO: 203089 - RNA, 32 nt, Homo Sapiens
uguuagcauaguagauaaauuguuaugaaaua

SEQ ID NO: 203090 - RNA, 32 nt, Homo Sapiens
acgagcuccuggcgcgccugcugcaggggcug

SEQ ID NO: 203091 - RNA, 32 nt, Homo Sapiens
aucucagaaaucaguaucucaauggguacugu

SEQ ID NO: 203092 - RNA, 32 nt, Homo Sapiens
ucaauuuuaacccaaagucauuggauuauuua

SEQ ID NO: 203093 - RNA, 32 nt, Homo Sapiens
uucggggccccggcggcccgcgccccugcuag

SEQ ID NO: 203094 - RNA, 32 nt, Homo Sapiens
caccagugcacuccagcugggcgacagagcga

SEQ ID NO: 203095 - RNA, 32 nt, Homo Sapiens
cgggccucgcuggaccacggacccgccagguu

SEQ ID NO: 203096 - RNA, 32 nt, Homo Sapiens
ugcggaucgcgaggccaguaccgaccccgccc

SEQ ID NO: 203097 - RNA, 32 nt, Homo Sapiens
caggggaggcagaaaaucauguuaguuugguu

SEQ ID NO: 203098 - RNA, 32 nt, Homo Sapiens
uaaagcaguaggcaucacccgggauguacaau

SEQ ID NO: 203099 - RNA, 32 nt, Homo Sapiens
cagaagguggacagggccuacccagguggagg

SEQ ID NO: 203100 - RNA, 32 nt, Homo Sapiens
ucccgaacuggagggguagagaaggcucugcc

SEQ ID NO: 203101 - RNA, 27 nt, Homo Sapiens
agguucacauucuucugguauaucauu

SEQ ID NO: 203102 - RNA, 32 nt, Homo Sapiens
cccaggcugggaagcgccuucuccaggugccu

SEQ ID NO: 203103 - RNA, 32 nt, Homo Sapiens
acgcaggccggccuccaccuccagaggguucu

SEQ ID NO: 203104 - RNA, 32 nt, Homo Sapiens
ucccauuacccaugucgcccucaaauuacaua

SEQ ID NO: 203105 - RNA, 32 nt, Homo Sapiens
ucuguaccaaaacuugaacauaaaagacuaga

SEQ ID NO: 203106 - RNA, 32 nt, Homo Sapiens
cuguuguguuugucaaaaagucauuguaaucu

SEQ ID NO: 203107 - RNA, 32 nt, Homo Sapiens
cccccagcccucguguguccacaccgcagugc

SEQ ID NO: 203108 - RNA, 32 nt, Homo Sapiens
ucugacaguuaccaccugagccccaggaaaac

SEQ ID NO: 203109 - RNA, 32 nt, Homo Sapiens
ugugcauguaaauuaauugucagcauuccaug

SEQ ID NO: 203110 - RNA, 32 nt, Homo Sapiens
uuuuuuaagcaaauuacuuacuguauuuuuau

SEQ ID NO: 203111 - RNA, 32 nt, Homo Sapiens
uuuaaugagaaaaaauauauauacuaucgagc

SEQ ID NO: 203112 - RNA, 32 nt, Homo Sapiens
aaugugaggcuacuucuaagauguguguucac

SEQ ID NO: 203113 - RNA, 32 nt, Homo Sapiens
acucccgccucccugccuccagcccuggcugc

SEQ ID NO: 203114 - RNA, 32 nt, Homo Sapiens
ugccgccaccgccugcuccucgucguccucgu

SEQ ID NO: 203115 - RNA, 32 nt, Homo Sapiens
aguccugugaaugaaacauugugaccucaagu

SEQ ID NO: 203116 - RNA, 32 nt, Homo Sapiens
gccagccuaugagcuuccugguagggacacca

SEQ ID NO: 203117 - RNA, 32 nt, Homo Sapiens
gaaugaauccugaaaugcaccucugggaucgg

SEQ ID NO: 203118 - RNA, 32 nt, Homo Sapiens
gaaacuauugagauauuaaaauuuuugaaauc

SEQ ID NO: 203119 - RNA, 32 nt, Homo Sapiens
cagcguccccagagccgagccagggugugagu

SEQ ID NO: 203120 - RNA, 32 nt, Homo Sapiens
ucacgugacugccagccccaucggagucuaag

SEQ ID NO: 203121 - RNA, 32 nt, Homo Sapiens
ggcacgaggguggaagagccauccagagugag

SEQ ID NO: 203122 - RNA, 32 nt, Homo Sapiens
ugccaggcucugcuccagggcacagcuggcug

SEQ ID NO: 203123 - RNA, 32 nt, Homo Sapiens
cuucucggcagagcucacugcaaacaacugga

SEQ ID NO: 203124 - RNA, 32 nt, Homo Sapiens
cgccagacccugccccaccucacuucccuccc

SEQ ID NO: 203125 - RNA, 32 nt, Homo Sapiens
guccgcgggaugcucaguagcccgcugcccgg

SEQ ID NO: 203126 - RNA, 32 nt, Homo Sapiens
cgcgcugagucuuuuuuuuuuuccuagcagcu

SEQ ID NO: 203127 - RNA, 32 nt, Homo Sapiens
ggucucaaagacaggccauucuuuauauacac

SEQ ID NO: 203128 - RNA, 32 nt, Homo Sapiens
ccuaaaguguguaaguuuuucauuuugucaua

SEQ ID NO: 203129 - RNA, 32 nt, Homo Sapiens
gcuggcugcaggaggacccuggcugagggcug

SEQ ID NO: 203130 - RNA, 32 nt, Homo Sapiens
guaauguacuuccaaagccccccaaauaagaa

SEQ ID NO: 203131 - RNA, 32 nt, Homo Sapiens
gagacgccuugauguggccaccggcuacccuc

SEQ ID NO: 203132 - RNA, 32 nt, Homo Sapiens
uaauaaaugaacuagcuuguuuugacagguuu

SEQ ID NO: 203133 - RNA, 32 nt, Homo Sapiens
gacugggucucugggaacagguuggaggucuu

SEQ ID NO: 203134 - RNA, 32 nt, Homo Sapiens
gcccgcagguucuccuggagugguggccucug

SEQ ID NO: 203135 - RNA, 32 nt, Homo Sapiens
ugaauuucuuauucucuuucuucagucuuuuu

SEQ ID NO: 203136 - RNA, 32 nt, Homo Sapiens
aguggaagccucuggaggaauagacugaaggc

SEQ ID NO: 203137 - RNA, 32 nt, Homo Sapiens
acuggguggucaaugcccacucgcucugaaau

SEQ ID NO: 203138 - RNA, 32 nt, Homo Sapiens
uuugagcauuucaaaucaguaguuugggcagu

SEQ ID NO: 203139 - RNA, 32 nt, Homo Sapiens
agccucuuuaaucuguugccugauuuucucug

SEQ ID NO: 203140 - RNA, 32 nt, Homo Sapiens
uugacagaaaggguuucuucuaccucuguuau

SEQ ID NO: 203141 - RNA, 32 nt, Homo Sapiens
gaaaucaaggucuggaggagacagagggaucc

SEQ ID NO: 203142 - RNA, 32 nt, Homo Sapiens
cuuuuauguccuuacaacaccuugcuuuguaa

SEQ ID NO: 203143 - RNA, 32 nt, Homo Sapiens
uaccacugcauuccagccugggugacagagcg

SEQ ID NO: 203144 - RNA, 32 nt, Homo Sapiens
uauguuuauguaauaaaguaaauacagagcug

SEQ ID NO: 203145 - RNA, 32 nt, Homo Sapiens
accagugcugccgugcaacgcugugucucuca

SEQ ID NO: 203146 - RNA, 32 nt, Homo Sapiens
caucauguuuugauuuaucugggagaaaacug

SEQ ID NO: 203147 - RNA, 32 nt, Homo Sapiens
uguuguggcagacaauaugcugaacauuagac

SEQ ID NO: 203148 - RNA, 32 nt, Homo Sapiens
auugggguugaagcucuucagaggagcuggaa

SEQ ID NO: 203149 - RNA, 32 nt, Homo Sapiens
cauagugucauuccaaauccaugcaugcuguu

SEQ ID NO: 203150 - RNA, 32 nt, Homo Sapiens
cgcgcccccgcgggccccggcgggaggagagu

SEQ ID NO: 203151 - RNA, 32 nt, Homo Sapiens
cccuccuaacuguaucucugcuagagaacuga

SEQ ID NO: 203152 - RNA, 32 nt, Homo Sapiens
guugucuggaaagggguaauauugugagcuga

SEQ ID NO: 203153 - RNA, 32 nt, Homo Sapiens
uucgcugaggagaaacacgaaacggacccuuu

SEQ ID NO: 203154 - RNA, 32 nt, Homo Sapiens
cauuuggugucuuuuuauaauucgcucguggu

SEQ ID NO: 203155 - RNA, 32 nt, Homo Sapiens
uaugaacauuguugaaaugacaaaagauuuag

SEQ ID NO: 203156 - RNA, 32 nt, Homo Sapiens
uaucuuuugacaaaggggauaaagaguuucag

SEQ ID NO: 203157 - RNA, 32 nt, Homo Sapiens
aaagcccaguguuuuugcaaagaaugaaaagg

SEQ ID NO: 203158 - RNA, 32 nt, Homo Sapiens
aaccggaacaaauguaugugucuucagaacac

SEQ ID NO: 203159 - RNA, 32 nt, Homo Sapiens
gcuugccauuuucucacuggaugcccugggua

SEQ ID NO: 203160 - RNA, 32 nt, Homo Sapiens
ccucuucucgcccuucccaccaugccagaaug

SEQ ID NO: 203161 - RNA, 32 nt, Homo Sapiens
acuccccggacucggggugccgggccaaccuc

SEQ ID NO: 203162 - RNA, 32 nt, Homo Sapiens
cuggccaggagcuggaggagcaggcagugggu

SEQ ID NO: 203163 - RNA, 32 nt, Homo Sapiens
ucagauuauggacuguuaccagaucuuucuuc

SEQ ID NO: 203164 - RNA, 32 nt, Homo Sapiens
cugacucugaacugggugaacucuguggaggg

SEQ ID NO: 203165 - RNA, 32 nt, Homo Sapiens
cagaaggaucucuggagcccaggaguucgagg

SEQ ID NO: 203166 - RNA, 32 nt, Homo Sapiens
uuacuuguauaugauguagucaccuuaacuau

SEQ ID NO: 203167 - RNA, 32 nt, Homo Sapiens
cagcgccgcccggguaccucgcggggcgggag

SEQ ID NO: 203168 - RNA, 32 nt, Homo Sapiens
ggaggggcugccugggguaucuggggguggug

SEQ ID NO: 203169 - RNA, 32 nt, Homo Sapiens
uccuaccgcguguggucagacacacaggaccu

SEQ ID NO: 203170 - RNA, 32 nt, Homo Sapiens
gaauguggaaaaucauucugugugaagucaag

SEQ ID NO: 203171 - RNA, 32 nt, Homo Sapiens
acaaagucuugcucugucacccaggcuggagu

SEQ ID NO: 203172 - RNA, 32 nt, Homo Sapiens
gcccuuccuaccucuggugaugguuuccacag

SEQ ID NO: 203173 - RNA, 32 nt, Homo Sapiens
gccuagcccuguacaauguaauuuaaacuuac

SEQ ID NO: 203174 - RNA, 32 nt, Homo Sapiens
gccuuucagcagccucuacgggcccagcuccu

SEQ ID NO: 203175 - RNA, 32 nt, Homo Sapiens
cugaacaaaaacugcuaccacuaugauuauaa

SEQ ID NO: 203176 - RNA, 32 nt, Homo Sapiens
aaucaugagugauucuugacauucacuuguuc

SEQ ID NO: 203177 - RNA, 32 nt, Homo Sapiens
ggcugaucucgaacuccugaccucaagugauc

SEQ ID NO: 203178 - RNA, 30 nt, Homo Sapiens
ggaaaggaagguggcacagaccauguuccc

SEQ ID NO: 203179 - RNA, 32 nt, Homo Sapiens
gccccucucucagugucaauagaugaaaguac

SEQ ID NO: 203180 - RNA, 32 nt, Homo Sapiens
aucagcacugucaguuggggucuguccccagg

SEQ ID NO: 203181 - RNA, 32 nt, Homo Sapiens
uggggccccgggugggugcgggggcgauucaa

SEQ ID NO: 203182 - RNA, 32 nt, Homo Sapiens
ugguaccaaaauuuuuaucaacagcuguuuaa

SEQ ID NO: 203183 - RNA, 32 nt, Homo Sapiens
ugacuauauuccauagagaagaaagaugggau

SEQ ID NO: 203184 - RNA, 32 nt, Homo Sapiens
cuggacuggguuggcugcagugugguguuuag

SEQ ID NO: 203185 - RNA, 32 nt, Homo Sapiens
cacgacgacuucgcucggaggcacaucggccc

SEQ ID NO: 203186 - RNA, 32 nt, Homo Sapiens
agugcugguaaauuauuuuuaaugauuugagu

SEQ ID NO: 203187 - RNA, 32 nt, Homo Sapiens
ucaccugugaggggaaagggggugcuguccuc

SEQ ID NO: 203188 - RNA, 32 nt, Homo Sapiens
ggcuggucucgaacuccugaccucaagugguc

SEQ ID NO: 203189 - RNA, 32 nt, Homo Sapiens
gccagcgccagcugcagccccggcugcccacu

SEQ ID NO: 203190 - RNA, 32 nt, Homo Sapiens
ggugcagaauuugaaccguugcacauagauuc

SEQ ID NO: 203191 - RNA, 32 nt, Homo Sapiens
cauagaaucuucagagccacaggcuuuucaag

SEQ ID NO: 203192 - RNA, 32 nt, Homo Sapiens
acacagcaguuuggucaauauugucuuaacau

SEQ ID NO: 203193 - RNA, 32 nt, Homo Sapiens
gauaaacugguucuuucaaacaucacaggugu

SEQ ID NO: 203194 - RNA, 32 nt, Homo Sapiens
ucucuucuuuaacuuccugcauuacccugggc

SEQ ID NO: 203195 - RNA, 32 nt, Homo Sapiens
aacccugacaccuuuaaaaagcaguuuuugaa

SEQ ID NO: 203196 - RNA, 32 nt, Homo Sapiens
ugcuuacagcauaugguaaccaagguuagaug

SEQ ID NO: 203197 - RNA, 32 nt, Homo Sapiens
agucaugccuggagauucuggccuacugcauu

SEQ ID NO: 203198 - RNA, 32 nt, Homo Sapiens
agagagacacaagcuggcaaaggagcggcgag

SEQ ID NO: 203199 - RNA, 32 nt, Homo Sapiens
ugcgacaugcccuucccccagccccagcgccc

SEQ ID NO: 203200 - RNA, 32 nt, Homo Sapiens
guuuaagauauguuuucuguauaaaugaacua

SEQ ID NO: 203201 - RNA, 32 nt, Homo Sapiens
guacacauuggucucccuguuccguguuucuu

SEQ ID NO: 203202 - RNA, 32 nt, Homo Sapiens
ggggaggagaacaugaguagauaauuucaggg

SEQ ID NO: 203203 - RNA, 32 nt, Homo Sapiens
uugguuaucaacaacuaaauauaaauuacuuu

SEQ ID NO: 203204 - RNA, 32 nt, Homo Sapiens
cgcagggucggggacugcgcgcggugccaggc

SEQ ID NO: 203205 - RNA, 32 nt, Homo Sapiens
uugacacuucuugguuauuuucagaugaacag

SEQ ID NO: 203206 - RNA, 32 nt, Homo Sapiens
auuaggaugccugugggguacguggacggugg

SEQ ID NO: 203207 - RNA, 32 nt, Homo Sapiens
acugugggcaaaucauuguacuggauaauuga

SEQ ID NO: 203208 - RNA, 32 nt, Homo Sapiens
guucuguauaaaaugcaaaauaaauguuuuaa

SEQ ID NO: 203209 - RNA, 32 nt, Homo Sapiens
ccuuccaaacuuagaagacaucuauacuuccu

SEQ ID NO: 203210 - RNA, 32 nt, Homo Sapiens
ucuccucagcgcgcccgggucccgcuccccgu

SEQ ID NO: 203211 - RNA, 32 nt, Homo Sapiens
cagaugaggacauaaaagaugaacuuaaagcu

SEQ ID NO: 203212 - RNA, 32 nt, Homo Sapiens
cugugaccucaucuuaacuaauuauaucauca

SEQ ID NO: 203213 - RNA, 32 nt, Homo Sapiens
ucucauuuuccuguuuacacuggggauuugga

SEQ ID NO: 203214 - RNA, 32 nt, Homo Sapiens
uucaguguuucaucagguccuuccaucucugg

SEQ ID NO: 203215 - RNA, 32 nt, Homo Sapiens
aacuuugaaucuaccuaugaccuguaagcucu

SEQ ID NO: 203216 - RNA, 32 nt, Homo Sapiens
cuggagugaaaugugucacuggauaucuugag

SEQ ID NO: 203217 - RNA, 32 nt, Homo Sapiens
guggcugccucggcccucccagcucuuacacu

SEQ ID NO: 203218 - RNA, 32 nt, Homo Sapiens
ggcccuuccucuaucauggaugcugggugacu

SEQ ID NO: 203219 - RNA, 32 nt, Homo Sapiens
ugcaaacaaaaauguaguuaauguaauuuuua

SEQ ID NO: 203220 - RNA, 31 nt, Homo Sapiens
uccauauugcuaaaaauaaaugucuuccacu

SEQ ID NO: 203221 - RNA, 32 nt, Homo Sapiens
uuggagaagaaccuggucccagaggagcuuga

SEQ ID NO: 203222 - RNA, 32 nt, Homo Sapiens
uaugaucucagagguuaacuuauuuaaggggg

SEQ ID NO: 203223 - RNA, 32 nt, Homo Sapiens
cuaagcuaaaagaauaaccauugacauuacca

SEQ ID NO: 203224 - RNA, 32 nt, Homo Sapiens
acaaaucaugcaaugcagccaaggaauauaug

SEQ ID NO: 203225 - RNA, 32 nt, Homo Sapiens
uugggagagugguuuuucaaaguagaaauguc

SEQ ID NO: 203226 - RNA, 32 nt, Homo Sapiens
gcuuacaguuuaggaggagucucagauccaga

SEQ ID NO: 203227 - RNA, 32 nt, Homo Sapiens
caucguuuaaaacaaaauauuaacuuauauua

SEQ ID NO: 203228 - RNA, 32 nt, Homo Sapiens
agagaaccgccaugaagagagaagggggugcc

SEQ ID NO: 203229 - RNA, 32 nt, Homo Sapiens
uuggaagagccgucugcagcuacuucagagga

SEQ ID NO: 203230 - RNA, 32 nt, Homo Sapiens
aaaauguugcugucauguaauuuaaacaaugu

SEQ ID NO: 203231 - RNA, 32 nt, Homo Sapiens
gcccuuccugucuuggccggccccacugcccc

SEQ ID NO: 203232 - RNA, 32 nt, Homo Sapiens
agaaacuguucucucucuaaaucuucacucuu

SEQ ID NO: 203233 - RNA, 32 nt, Homo Sapiens
gggcucgcggcgcugcaaggcggcgaggcccg

SEQ ID NO: 203234 - RNA, 32 nt, Homo Sapiens
ggagcugcaggggacaggugggcacggggagg

SEQ ID NO: 203235 - RNA, 32 nt, Homo Sapiens
aacuguauuguuuuguuacaucaaauaaacau

SEQ ID NO: 203236 - RNA, 32 nt, Homo Sapiens
gcguccccgcugccggccacggcgcucagcgc

SEQ ID NO: 203237 - RNA, 32 nt, Homo Sapiens
ccagcacguucucaaaguuuccacauuagcac

SEQ ID NO: 203238 - RNA, 32 nt, Homo Sapiens
cugguuucaacgccagcuuucugugcuucugc

SEQ ID NO: 203239 - RNA, 32 nt, Homo Sapiens
cucuggcucgguuuccuuucuuuggucugaua

SEQ ID NO: 203240 - RNA, 32 nt, Homo Sapiens
ugcacauuuaggguguggccaagccucagcca

SEQ ID NO: 203241 - RNA, 32 nt, Homo Sapiens
gucacucugggugacguguggauccugcuggc

SEQ ID NO: 203242 - RNA, 32 nt, Homo Sapiens
gcacacucauuucuuagggacugagaggggag

SEQ ID NO: 203243 - RNA, 32 nt, Homo Sapiens
gcucaaccccaaccccacggacagcugucccc

SEQ ID NO: 203244 - RNA, 32 nt, Homo Sapiens
ccgcgggaccccgaugagcugcacuagcccca

SEQ ID NO: 203245 - RNA, 32 nt, Homo Sapiens
cgccggcugccccucgcucccaggcgccacaa

SEQ ID NO: 203246 - RNA, 32 nt, Homo Sapiens
ggaaggggcgaccccgggauuguaacgggggc

SEQ ID NO: 203247 - RNA, 32 nt, Homo Sapiens
ucuaggauugcagauggcaggcuggucucugg

SEQ ID NO: 203248 - RNA, 32 nt, Homo Sapiens
ggaugggggcaugacacuccagugucaaaaua

SEQ ID NO: 203249 - RNA, 32 nt, Homo Sapiens
ucuugugaguuacuuuuuuaggcugugguuug

SEQ ID NO: 203250 - RNA, 32 nt, Homo Sapiens
cccuguccccgcagagggugucgcccaccccu

SEQ ID NO: 203251 - RNA, 32 nt, Homo Sapiens
cuugguggaugugcccgggguccugacaccca

SEQ ID NO: 203252 - RNA, 29 nt, Homo Sapiens
aucuuuaggggacagaggauuugucaaga

SEQ ID NO: 203253 - RNA, 32 nt, Homo Sapiens
ggugugggucugugagggaccggucggaaggg

SEQ ID NO: 203254 - RNA, 32 nt, Homo Sapiens
aaggagcccuucugcuggcccuguccgggcau

SEQ ID NO: 203255 - RNA, 32 nt, Homo Sapiens
ggcggcggccaugcugggccccggggcugugu

SEQ ID NO: 203256 - RNA, 30 nt, Homo Sapiens
uguaccuucugugcuggaugcucuucaagg

SEQ ID NO: 203257 - RNA, 32 nt, Homo Sapiens
aagaccugcagaguguaugacacauaaccagc

SEQ ID NO: 203258 - RNA, 32 nt, Homo Sapiens
aagaaaaggggagagaaguuaauccacaucuu

SEQ ID NO: 203259 - RNA, 32 nt, Homo Sapiens
acuccguauuccugggaaagugcucgacugag

SEQ ID NO: 203260 - RNA, 32 nt, Homo Sapiens
agggcgcgggagcuccaccuccucggcuuucc

SEQ ID NO: 203261 - RNA, 32 nt, Homo Sapiens
cuagaaaaugagcagaauaaaggauauuaucu

SEQ ID NO: 203262 - RNA, 32 nt, Homo Sapiens
gucccgcgcgcacuucggcgauggcuuuuccg

SEQ ID NO: 203263 - RNA, 32 nt, Homo Sapiens
guucacacagaaaccuguacacaaacguucau

SEQ ID NO: 203264 - RNA, 29 nt, Homo Sapiens
auuuaauuugucggagaccacaaaccaac

SEQ ID NO: 203265 - RNA, 32 nt, Homo Sapiens
ucagcgaacuggagaggcgccaugggcuggau

SEQ ID NO: 203266 - RNA, 32 nt, Homo Sapiens
ccccaagaugcaugauuaagugaggaaaaaag

SEQ ID NO: 203267 - RNA, 32 nt, Homo Sapiens
ugauuguucauaucaagaaauugauugaacgu

SEQ ID NO: 203268 - RNA, 32 nt, Homo Sapiens
agugccugucaagggaggcagaugugagcucg

SEQ ID NO: 203269 - RNA, 32 nt, Homo Sapiens
cagggcugagggggcucuggcuaaacccaccu

SEQ ID NO: 203270 - RNA, 32 nt, Homo Sapiens
auauccaauuuaauaauaaaugcacucauguu

SEQ ID NO: 203271 - RNA, 32 nt, Homo Sapiens
aagauggcuaauggaauuaacuuucuccccug

SEQ ID NO: 203272 - RNA, 32 nt, Homo Sapiens
aaaacagcuuuaauuucccugcgaggaaauca

SEQ ID NO: 203273 - RNA, 32 nt, Homo Sapiens
uuccuugaucuuucccagugauauggauugaa

SEQ ID NO: 203274 - RNA, 32 nt, Homo Sapiens
uucauauauaaucauaucuaagaucuauaucu

SEQ ID NO: 203275 - RNA, 32 nt, Homo Sapiens
caugcauuuaaaguauucuccauccucccagg

SEQ ID NO: 203276 - RNA, 30 nt, Homo Sapiens
gaauuccgccgccgccggggcccccggcag

SEQ ID NO: 203277 - RNA, 32 nt, Homo Sapiens
ggacucggguggcucugaggucgccuggggac

SEQ ID NO: 203278 - RNA, 30 nt, Homo Sapiens
cugcuguaucaccauuuuuacguaacugca

SEQ ID NO: 203279 - RNA, 32 nt, Homo Sapiens
gggauuacaggcgcccaccuccacacccagcu

SEQ ID NO: 203280 - RNA, 32 nt, Homo Sapiens
auucagcgacuuucaauuccacagcauucuaa

SEQ ID NO: 203281 - RNA, 32 nt, Homo Sapiens
cggcugggcggugcagcuccgcccggcuccgc

SEQ ID NO: 203282 - RNA, 32 nt, Homo Sapiens
cuauagucuccccaccuguaaaacagaggaug

SEQ ID NO: 203283 - RNA, 32 nt, Homo Sapiens
cacuggaaagagaauacuauauugcucauuua

SEQ ID NO: 203284 - RNA, 32 nt, Homo Sapiens
aggaacuggccucugccuacggucggcaagaa

SEQ ID NO: 203285 - RNA, 32 nt, Homo Sapiens
ugcuauucaaagccagcuaccccuggccccuc

SEQ ID NO: 203286 - RNA, 32 nt, Homo Sapiens
gucccuugcacaccaccccugaagcacauggc

SEQ ID NO: 203287 - RNA, 26 nt, Homo Sapiens
cauggaccaaaaucaacauuugaaua

SEQ ID NO: 203288 - RNA, 32 nt, Homo Sapiens
ucuucccugaaugcuuuuuuuuuuuggccccc

SEQ ID NO: 203289 - RNA, 32 nt, Homo Sapiens
uaagugggucuuuuaaacuuaugucuguuaag

SEQ ID NO: 203290 - RNA, 32 nt, Homo Sapiens
gugcgcggagagcgcgcauggcggcuguggga

SEQ ID NO: 203291 - RNA, 32 nt, Homo Sapiens
ucaggcggaucucguggcggagcccaucuugc

SEQ ID NO: 203292 - RNA, 32 nt, Homo Sapiens
ccgcagugugaaaugcuauauagugcaaugaa

SEQ ID NO: 203293 - RNA, 32 nt, Homo Sapiens
gauguuguuccuggcuagauguuuacauuugu

SEQ ID NO: 203294 - RNA, 30 nt, Homo Sapiens
gaaaaggcgcccgcggcagcgccucccagc

SEQ ID NO: 203295 - RNA, 32 nt, Homo Sapiens
ccaccuccgugcuugcuuaacauccuguugca

SEQ ID NO: 203296 - RNA, 32 nt, Homo Sapiens
ucaauaauuuccuccggugcugcugaggagag

SEQ ID NO: 203297 - RNA, 32 nt, Homo Sapiens
ugggucggccucuggaguauggucuggcgggu

SEQ ID NO: 203298 - RNA, 32 nt, Homo Sapiens
cugcuacuaaucacagagaaaaaugugaagaa

SEQ ID NO: 203299 - RNA, 32 nt, Homo Sapiens
acucugagguguuggcggggcggucgcagacu

SEQ ID NO: 203300 - RNA, 32 nt, Homo Sapiens
cuagcgccgggcgggccccggcaccaagcuaa

SEQ ID NO: 203301 - RNA, 32 nt, Homo Sapiens
cccgcgcuccguuccgcccaggccgcgcccag

SEQ ID NO: 203302 - RNA, 32 nt, Homo Sapiens
aggugcuucccgaggcguuuuguuugagugca

SEQ ID NO: 203303 - RNA, 32 nt, Homo Sapiens
uuguauuaggaggguugcugcagaggugaaau

SEQ ID NO: 203304 - RNA, 32 nt, Homo Sapiens
aagccuucaauauuuucuuuugcgaucccuuc

SEQ ID NO: 203305 - RNA, 32 nt, Homo Sapiens
cuggggaggaggagcugcgagcgcgggagacg

SEQ ID NO: 203306 - RNA, 30 nt, Homo Sapiens
cagggcagcugugcugggugagcucuucca

SEQ ID NO: 203307 - RNA, 32 nt, Homo Sapiens
aacugaaaaugaaauacuguggauguuaugac

SEQ ID NO: 203308 - RNA, 32 nt, Homo Sapiens
ucuacaguguuuccuuuuaaauuguccagaaa

SEQ ID NO: 203309 - RNA, 32 nt, Homo Sapiens
gguuuucgggaaacauuuuuugaaagggagca

SEQ ID NO: 203310 - RNA, 32 nt, Homo Sapiens
uuaaugaaggauuuccuuuuaaugcugcuuuu

SEQ ID NO: 203311 - RNA, 32 nt, Homo Sapiens
ggcuccggguagccauggaggaccccacgcuc

SEQ ID NO: 203312 - RNA, 32 nt, Homo Sapiens
ggcccauagucauuacauuuuuuaccauuuca

SEQ ID NO: 203313 - RNA, 32 nt, Homo Sapiens
gcguaugacagcacuuauaaguaaauccauuu

SEQ ID NO: 203314 - RNA, 32 nt, Homo Sapiens
uggcaugguggcucacgcuuguaaucccagca

SEQ ID NO: 203315 - RNA, 32 nt, Homo Sapiens
uccuuaugcaaaguaauuuacacagaaauucc

SEQ ID NO: 203316 - RNA, 32 nt, Homo Sapiens
cccugacagggccagugcaguuuggugugucc

SEQ ID NO: 203317 - RNA, 32 nt, Homo Sapiens
uccaucgccaugcagagcugcucucacuucuc

SEQ ID NO: 203318 - RNA, 32 nt, Homo Sapiens
guuuucucaacagagagcaaagggccaggcag

SEQ ID NO: 203319 - RNA, 32 nt, Homo Sapiens
uaauugggaaauguucacccauucugccaaua

SEQ ID NO: 203320 - RNA, 32 nt, Homo Sapiens
acccugcccucuucuuguguuguguuugucac

SEQ ID NO: 203321 - RNA, 32 nt, Homo Sapiens
ucuuugaacagugugaugagaauaggaaugug

SEQ ID NO: 203322 - RNA, 32 nt, Homo Sapiens
gccuuagggcuuugguguggacaauagaggcu

SEQ ID NO: 203323 - RNA, 32 nt, Homo Sapiens
ggcugcgaguguuccugagaguugaaaguggg

SEQ ID NO: 203324 - RNA, 32 nt, Homo Sapiens
uuuccucccaugccacagcaagaugcagacaa

SEQ ID NO: 203325 - RNA, 32 nt, Homo Sapiens
cacuaaacgaacuuaacuguauauagcaaaac

SEQ ID NO: 203326 - RNA, 32 nt, Homo Sapiens
caaaagcccaucuuauacacuuuuauauagcu

SEQ ID NO: 203327 - RNA, 32 nt, Homo Sapiens
aucugucauuugagcagggcucagcggggaca

SEQ ID NO: 203328 - RNA, 32 nt, Homo Sapiens
acucaggggauucccugaaaaauuaccugcag

SEQ ID NO: 203329 - RNA, 31 nt, Homo Sapiens
cuaccgcggcacucccggcugcacgcucugc

SEQ ID NO: 203330 - RNA, 32 nt, Homo Sapiens
ccaauuauuuuugacuaggggaugggggacag

SEQ ID NO: 203331 - RNA, 32 nt, Homo Sapiens
aucccagcacuuugcggggcugaaacaagggg

SEQ ID NO: 203332 - RNA, 32 nt, Homo Sapiens
ucugguugcccugccucuggcuccagaacaga

SEQ ID NO: 203333 - RNA, 30 nt, Homo Sapiens
ugggcugggccggggcaccagucggguuug

SEQ ID NO: 203334 - RNA, 32 nt, Homo Sapiens
cuguaucucugcaggccauacugguuccauug

SEQ ID NO: 203335 - RNA, 32 nt, Homo Sapiens
ggcuagagugcaguggcaugaucauagguuau

SEQ ID NO: 203336 - RNA, 28 nt, Homo Sapiens
agaucacuuacaggaucauguuagugag

SEQ ID NO: 203337 - RNA, 32 nt, Homo Sapiens
cuuuucuuucuuucuuuuuuuuuuuuuuugug

SEQ ID NO: 203338 - RNA, 32 nt, Homo Sapiens
gaacaugaacaaagauaaaaacuguuuggagg

SEQ ID NO: 203339 - RNA, 32 nt, Homo Sapiens
gcacugcuggccuagaccagcugcugaaagcu

SEQ ID NO: 203340 - RNA, 32 nt, Homo Sapiens
ccuggguggguucucuggcugagcaggucuga

SEQ ID NO: 203341 - RNA, 32 nt, Homo Sapiens
caugauaggugcugaauugugauucacaauuu

SEQ ID NO: 203342 - RNA, 32 nt, Homo Sapiens
gggaacugggaccguugggcugaaacagucuu

SEQ ID NO: 203343 - RNA, 32 nt, Homo Sapiens
uagccaggcaugguggugggcgccuguagucc

SEQ ID NO: 203344 - RNA, 32 nt, Homo Sapiens
caggggccagcaggcugcagcugcuggaugaa

SEQ ID NO: 203345 - RNA, 32 nt, Homo Sapiens
guuuuccccucacagcguaaacaaagccaugg

SEQ ID NO: 203346 - RNA, 32 nt, Homo Sapiens
aaguaaccaccugguccgugcacuggagaagg

SEQ ID NO: 203347 - RNA, 32 nt, Homo Sapiens
ggcgucgggcggugcggaugucgggcugggcg

SEQ ID NO: 203348 - RNA, 32 nt, Homo Sapiens
ucuaaaaugacacugauuucugauaaaauuaa

SEQ ID NO: 203349 - RNA, 32 nt, Homo Sapiens
cuuccaaagcaugaucuuuggccaggggaucu

SEQ ID NO: 203350 - RNA, 32 nt, Homo Sapiens
ccugacaugugggggugggggguguggaaucc

SEQ ID NO: 203351 - RNA, 32 nt, Homo Sapiens
ugaaggagaggguggggagggaggcaucuagg

SEQ ID NO: 203352 - RNA, 32 nt, Homo Sapiens
gaaaacaaaacacuaacuguuccauccuguua

SEQ ID NO: 203353 - RNA, 32 nt, Homo Sapiens
agugggccucugucgggggcggggcgguaggu

SEQ ID NO: 203354 - RNA, 32 nt, Homo Sapiens
cacuugacuaugaaguuuuuuuaaagcacaga

SEQ ID NO: 203355 - RNA, 32 nt, Homo Sapiens
cuuuauuucauccacaccccaauuccggccca

SEQ ID NO: 203356 - RNA, 32 nt, Homo Sapiens
uuagaagagucuucucaaccaagcuuaacucg

SEQ ID NO: 203357 - RNA, 32 nt, Homo Sapiens
aacaaacaaacuuagaaacauaaaaggaaaug

SEQ ID NO: 203358 - RNA, 32 nt, Homo Sapiens
acauuaguaaaaauaaaaauggaauuuuuuac

SEQ ID NO: 203359 - RNA, 32 nt, Homo Sapiens
cuucccauuaugccguacgcugggcagagugg

SEQ ID NO: 203360 - RNA, 32 nt, Homo Sapiens
ucacaucaagcaugcaauaaugugcaaauuuu

SEQ ID NO: 203361 - RNA, 32 nt, Homo Sapiens
gccagggcgagaggcgggagccggagagguga

SEQ ID NO: 203362 - RNA, 32 nt, Homo Sapiens
cgggaguuuggcuggccaggaacuugagugac

SEQ ID NO: 203363 - RNA, 32 nt, Homo Sapiens
gggcagaagaaaccccagaugucccagauguc

SEQ ID NO: 203364 - RNA, 32 nt, Homo Sapiens
auaaucagcauucaaauuguaugcuuucugaa

SEQ ID NO: 203365 - RNA, 32 nt, Homo Sapiens
caaugaauuggacgcagcaaucugaaaucauc

SEQ ID NO: 203366 - RNA, 32 nt, Homo Sapiens
agggugcccucccgucucccacaacuucugcu

SEQ ID NO: 203367 - RNA, 32 nt, Homo Sapiens
gggcaccgagcgcgugaaaacuccagcggacu

SEQ ID NO: 203368 - RNA, 32 nt, Homo Sapiens
agguauauuuaguugcaguccagcucuuuaga

SEQ ID NO: 203369 - RNA, 32 nt, Homo Sapiens
cugcggcgccgcgcaccgcuggcagcugaggg

SEQ ID NO: 203370 - RNA, 32 nt, Homo Sapiens
aaagcugaccccagcccccacccccaguuaac

SEQ ID NO: 203371 - RNA, 32 nt, Homo Sapiens
aaguuacucuagaggaaaaaugucuaaagaaa

SEQ ID NO: 203372 - RNA, 32 nt, Homo Sapiens
caucaaugugaaagucagggucacagcugguc

SEQ ID NO: 203373 - RNA, 32 nt, Homo Sapiens
agggucuuaccauuugccccagcuggucucaa

SEQ ID NO: 203374 - RNA, 32 nt, Homo Sapiens
aauacaaaaaucagccaggcgugguggcacgc

SEQ ID NO: 203375 - RNA, 32 nt, Homo Sapiens
accauuaaauguugaagaaugcauacugacug

SEQ ID NO: 203376 - RNA, 32 nt, Homo Sapiens
aaaauuacagaauaaacuugugacuggucuug

SEQ ID NO: 203377 - RNA, 32 nt, Homo Sapiens
cggaggggcggaugcagagcccggggccccca

SEQ ID NO: 203378 - RNA, 32 nt, Homo Sapiens
cugaaugccugggggccuggaagcugcgaggg

SEQ ID NO: 203379 - RNA, 32 nt, Homo Sapiens
uuugcaaauaguuuuucuuuaauaugauucua

SEQ ID NO: 203380 - RNA, 24 nt, Homo Sapiens
gcaguggauaaaaagcaaaugugu

SEQ ID NO: 203381 - RNA, 32 nt, Homo Sapiens
cuguuggguuccagaugcugcagcuccaugug

SEQ ID NO: 203382 - RNA, 32 nt, Homo Sapiens
cgaaggucaggaguucgagagcagccugguca

SEQ ID NO: 203383 - RNA, 32 nt, Homo Sapiens
acugcucagaaaccaccaagacuguugaugcc

SEQ ID NO: 203384 - RNA, 32 nt, Homo Sapiens
ucuaauugccuucuaaccugggagaucaucuu

SEQ ID NO: 203385 - RNA, 32 nt, Homo Sapiens
uuucuuugagucuguuuuuuuauaguuuguau

SEQ ID NO: 203386 - RNA, 32 nt, Homo Sapiens
aagcacaggaaacagaagcaaaaaauaggcaa

SEQ ID NO: 203387 - RNA, 32 nt, Homo Sapiens
auccaggcugucuggguccaagaacucuguuc

SEQ ID NO: 203388 - RNA, 32 nt, Homo Sapiens
gggucaaauucuucuuuuguauguccagucuc

SEQ ID NO: 203389 - RNA, 32 nt, Homo Sapiens
gauagagacagaggaacaaaaagagcagcagu

SEQ ID NO: 203390 - RNA, 32 nt, Homo Sapiens
uagcuccucgcgauggacccaggcauccugga

SEQ ID NO: 203391 - RNA, 32 nt, Homo Sapiens
gaaaauaauauuaaaucuaagauauuuugaac

SEQ ID NO: 203392 - RNA, 32 nt, Homo Sapiens
cuagaucuaauauauaucaucagaaaauauau

SEQ ID NO: 203393 - RNA, 32 nt, Homo Sapiens
aauuccagaguaguuucaaguuucacaucgua

SEQ ID NO: 203394 - RNA, 32 nt, Homo Sapiens
aacgcaaauuuaugagcagcuccuugaagaag

SEQ ID NO: 203395 - RNA, 32 nt, Homo Sapiens
ugauccaaggaugugacauggcuucuccucag

SEQ ID NO: 203396 - RNA, 32 nt, Homo Sapiens
auguaggcaauacauguaucuaaacaauguau

SEQ ID NO: 203397 - RNA, 32 nt, Homo Sapiens
gcugcaaguuagaaguggacuggccauugagg

SEQ ID NO: 203398 - RNA, 30 nt, Homo Sapiens
agagccgacugugccacccacuugcgagcc

SEQ ID NO: 203399 - RNA, 32 nt, Homo Sapiens
agcgguaucgggccgccucccugaugcugcgg

SEQ ID NO: 203400 - RNA, 32 nt, Homo Sapiens
gagaggcacccucuccagggcugcgcuuccuc

SEQ ID NO: 203401 - RNA, 32 nt, Homo Sapiens
cauuauaaacacaggagaauaaucaauagaau

SEQ ID NO: 203402 - RNA, 32 nt, Homo Sapiens
aucagauuuucuucuuuucaugaauuccuaca

SEQ ID NO: 203403 - RNA, 32 nt, Homo Sapiens
ugagacucugucuggauuugccugcagaguuu

SEQ ID NO: 203404 - RNA, 32 nt, Homo Sapiens
ucccucccuugacucuggggguccacauccac

SEQ ID NO: 203405 - RNA, 32 nt, Homo Sapiens
ccuucuuuuucugcacugagucucaggcagug

SEQ ID NO: 203406 - RNA, 32 nt, Homo Sapiens
uacguaucaaggacaguaacuaccauggcucc

SEQ ID NO: 203407 - RNA, 32 nt, Homo Sapiens
uugauuuaacucacuaaauauuuauauaacuu

SEQ ID NO: 203408 - RNA, 32 nt, Homo Sapiens
uguugaugucugagcagcaugcuugcaccacc

SEQ ID NO: 203409 - RNA, 32 nt, Homo Sapiens
uggaagaagccccgccacggacuucggcagag

SEQ ID NO: 203410 - RNA, 32 nt, Homo Sapiens
acgcagcccgacacuuggcccgcgggguuccc

SEQ ID NO: 203411 - RNA, 32 nt, Homo Sapiens
uuuguugucauucucaucgcagugcuuuggua

SEQ ID NO: 203412 - RNA, 32 nt, Homo Sapiens
ugaaaaagaugaccccuuucugauuaggaucu

SEQ ID NO: 203413 - RNA, 32 nt, Homo Sapiens
aaggaagaaaauuuauauauauauaauauaaa

SEQ ID NO: 203414 - RNA, 32 nt, Homo Sapiens
uauuucuuggaacgcgaaaggaagcuuuaccu

SEQ ID NO: 203415 - RNA, 32 nt, Homo Sapiens
uggaaaaugucucucagcauugcuuuauuaca

SEQ ID NO: 203416 - RNA, 32 nt, Homo Sapiens
uccugaccucaugauccgcccuccucagccuc

SEQ ID NO: 203417 - RNA, 29 nt, Homo Sapiens
augggugggggacaggagcugcuucccag

SEQ ID NO: 203418 - RNA, 32 nt, Homo Sapiens
cuggauagcuauuugcacgaaucauggacaua

SEQ ID NO: 203419 - RNA, 32 nt, Homo Sapiens
cuucaugaaaauaagccuuuaguugcucucua

SEQ ID NO: 203420 - RNA, 32 nt, Homo Sapiens
uaucacucagaaugaaacaugggagaguuaac

SEQ ID NO: 203421 - RNA, 32 nt, Homo Sapiens
uuagcuuuuuauucagauucucuuuguggcca

SEQ ID NO: 203422 - RNA, 32 nt, Homo Sapiens
ccccgcuuugccaccaucuccuccucugaucu

SEQ ID NO: 203423 - RNA, 32 nt, Homo Sapiens
ggugaggaggggcugcucugaugucccuccua

SEQ ID NO: 203424 - RNA, 32 nt, Homo Sapiens
agaagccuuaaacaucuuucugugaaaaugcu

SEQ ID NO: 203425 - RNA, 32 nt, Homo Sapiens
guccccugccccccuccuuuuguuuuguacac

SEQ ID NO: 203426 - RNA, 32 nt, Homo Sapiens
uguacacacccacaacccguccuuccacuugg

SEQ ID NO: 203427 - RNA, 32 nt, Homo Sapiens
ugccccgguuuggccuggugcgggccaaggag

SEQ ID NO: 203428 - RNA, 32 nt, Homo Sapiens
gcugcccaggagucucuuggggccgcugcaag

SEQ ID NO: 203429 - RNA, 32 nt, Homo Sapiens
gcaggcccgggcgggcagagcagcggaggagu

SEQ ID NO: 203430 - RNA, 32 nt, Homo Sapiens
gcaaagcaguugcauugauugcuucucuuaau

SEQ ID NO: 203431 - RNA, 32 nt, Homo Sapiens
cagcagccgcagccgccucgcgcccggucccg

SEQ ID NO: 203432 - RNA, 32 nt, Homo Sapiens
cgcuaccuuuugcuguggcaaaugggcccccg

SEQ ID NO: 203433 - RNA, 32 nt, Homo Sapiens
aacuccaacgccgggcgccgcgggcagcaccc

SEQ ID NO: 203434 - RNA, 32 nt, Homo Sapiens
aacacugaagaccagguugagaaggaugaacc

SEQ ID NO: 203435 - RNA, 32 nt, Homo Sapiens
aaugcuucaaagcugaagaaucuaaaugucgu

SEQ ID NO: 203436 - RNA, 32 nt, Homo Sapiens
ucuuggaucuuuucuuguuucuccuugguuuu

SEQ ID NO: 203437 - RNA, 32 nt, Homo Sapiens
gaccaagacaccuggggauugcgucuggggcc

SEQ ID NO: 203438 - RNA, 32 nt, Homo Sapiens
auauugcuguuuaaauuuuguauauguguaua

SEQ ID NO: 203439 - RNA, 32 nt, Homo Sapiens
cagcagacccucuacccaggcuuguucugcag

SEQ ID NO: 203440 - RNA, 32 nt, Homo Sapiens
cucccucuaguuuuuucuuccuugucacugcu

SEQ ID NO: 203441 - RNA, 32 nt, Homo Sapiens
ccauaaacaauuuuauacugaaaugaaguuuc

SEQ ID NO: 203442 - RNA, 32 nt, Homo Sapiens
agacauuaggggaucaguuguauuuauuguau

SEQ ID NO: 203443 - RNA, 32 nt, Homo Sapiens
uucaggcugaggaggacuugcucaggccgauu

SEQ ID NO: 203444 - RNA, 32 nt, Homo Sapiens
uuacuuuuguuuauauuuuucuuuuuauguau

SEQ ID NO: 203445 - RNA, 32 nt, Homo Sapiens
augaaugaauaaaauguggggauaaugcagaa

SEQ ID NO: 203446 - RNA, 32 nt, Homo Sapiens
ucaacccucacuccaaacuuucccuauucaga

SEQ ID NO: 203447 - RNA, 32 nt, Homo Sapiens
cccuuuuuuuucugauucuuuuuucagucagu

SEQ ID NO: 203448 - RNA, 32 nt, Homo Sapiens
cugugaaauaugugagugauaauuaaacacuu

SEQ ID NO: 203449 - RNA, 32 nt, Homo Sapiens
aaaauccucauaccuccucguuugaccaaauc

SEQ ID NO: 203450 - RNA, 32 nt, Homo Sapiens
ccuugauugugucacugcacuccagcuugggu

SEQ ID NO: 203451 - RNA, 32 nt, Homo Sapiens
aauggcuugugcuccugcuccuguggguauag

SEQ ID NO: 203452 - RNA, 32 nt, Homo Sapiens
cucuguuccagggccuccucaggcucguuacc

SEQ ID NO: 203453 - RNA, 32 nt, Homo Sapiens
uuuuaaacacaagaauuuucgaucucgagaag

SEQ ID NO: 203454 - RNA, 32 nt, Homo Sapiens
ggacaaagcugccaggagccacagcagccaca

SEQ ID NO: 203455 - RNA, 32 nt, Homo Sapiens
aaacaaacuguuuagcugggaguuuaucaagc

SEQ ID NO: 203456 - RNA, 32 nt, Homo Sapiens
augugugugcuaaaggaggacaugagcugugu

SEQ ID NO: 203457 - RNA, 32 nt, Homo Sapiens
cugagccccgguucugucagggucccuaaggg

SEQ ID NO: 203458 - RNA, 32 nt, Homo Sapiens
auguuguaugauuuauacuaagcauuaaugug

SEQ ID NO: 203459 - RNA, 32 nt, Homo Sapiens
cuaccugccuugaagaagacaccugaccugcg

SEQ ID NO: 203460 - RNA, 32 nt, Homo Sapiens
uguuagaaauguuuaaguugcuguucugugau

SEQ ID NO: 203461 - RNA, 32 nt, Homo Sapiens
cagcgcgcccucgggaggacguggccccggcc

SEQ ID NO: 203462 - RNA, 29 nt, Homo Sapiens
uaaaaauaaaguuccuuuauauuucuguc

SEQ ID NO: 203463 - RNA, 32 nt, Homo Sapiens
uggggucucugccuauggaucauacuucaaac

SEQ ID NO: 203464 - RNA, 32 nt, Homo Sapiens
cccacacucuuaaaaaucaugccguaauguca

SEQ ID NO: 203465 - RNA, 32 nt, Homo Sapiens
uuuuauuucuuagguuuuuagaguucaggauu

SEQ ID NO: 203466 - RNA, 32 nt, Homo Sapiens
auuugauuuuuugcauuucaggaggcaacuga

SEQ ID NO: 203467 - RNA, 32 nt, Homo Sapiens
gcgaggcguggcggccccauggccccgcuggg

SEQ ID NO: 203468 - RNA, 32 nt, Homo Sapiens
ucuccggcuagccgccggcgccgcccgggucc

SEQ ID NO: 203469 - RNA, 32 nt, Homo Sapiens
cccaggaggaggaggaaacccuuccgagaaaa

SEQ ID NO: 203470 - RNA, 32 nt, Homo Sapiens
uuuaaaugaaacaucuaauuuugcuguaaggc

SEQ ID NO: 203471 - RNA, 32 nt, Homo Sapiens
ucuggcucuuacauaacaaacaucaucaucca

SEQ ID NO: 203472 - RNA, 32 nt, Homo Sapiens
ccuucccuaccuugccagcuucuucauaggac

SEQ ID NO: 203473 - RNA, 32 nt, Homo Sapiens
agaaauaaacacaaguuaaauaugacuaagca

SEQ ID NO: 203474 - RNA, 32 nt, Homo Sapiens
aggauuuguauaaagagugacucuccuaugaa

SEQ ID NO: 203475 - RNA, 32 nt, Homo Sapiens
agaagaagagcuggcugauauuaaacaggccu

SEQ ID NO: 203476 - RNA, 32 nt, Homo Sapiens
aggcuggagugcagugguaugaucuuggcuca

SEQ ID NO: 203477 - RNA, 32 nt, Homo Sapiens
uuuaaugguuuugguugcuccucccccagcug

SEQ ID NO: 203478 - RNA, 32 nt, Homo Sapiens
ccaccucuguucuccuugaacagcuuccccuc

SEQ ID NO: 203479 - RNA, 32 nt, Homo Sapiens
caccaauuuuuccacauacuuucaugccuugc

SEQ ID NO: 203480 - RNA, 32 nt, Homo Sapiens
cagacucacugggguuuguacaugcuggggag

SEQ ID NO: 203481 - RNA, 32 nt, Homo Sapiens
gcuaccgggagcgcgaggaacugcagcggcga

SEQ ID NO: 203482 - RNA, 31 nt, Homo Sapiens
gcugugcagcgcagcuggacucugcauccca

SEQ ID NO: 203483 - RNA, 32 nt, Homo Sapiens
agcuauuccuuccccucggugcacugccccug

SEQ ID NO: 203484 - RNA, 32 nt, Homo Sapiens
uugccuuaagaauuauuuugaaagaaguauua

SEQ ID NO: 203485 - RNA, 32 nt, Homo Sapiens
ccugggaggugcacaugaaacagucccuccca

SEQ ID NO: 203486 - RNA, 32 nt, Homo Sapiens
uacaguuguaaauaaucagaacauaugaaaaa

SEQ ID NO: 203487 - RNA, 32 nt, Homo Sapiens
uauccaaacacuagcagacauuuaacuggaau

SEQ ID NO: 203488 - RNA, 32 nt, Homo Sapiens
gagaggugagucaagaggcagucuccauugga

SEQ ID NO: 203489 - RNA, 32 nt, Homo Sapiens
accucguucuuccacacccuguccuggugggg

SEQ ID NO: 203490 - RNA, 32 nt, Homo Sapiens
acggugccgggcgcgggccccugcguaaggug

SEQ ID NO: 203491 - RNA, 32 nt, Homo Sapiens
uuuuaugugcuaaugcauguauuuguaaacca

SEQ ID NO: 203492 - RNA, 32 nt, Homo Sapiens
cuugcaagaaaauuauuuccacuagauagaaa

SEQ ID NO: 203493 - RNA, 32 nt, Homo Sapiens
acauauaaugaaauauucucccuggaaaugug

SEQ ID NO: 203494 - RNA, 32 nt, Homo Sapiens
gaccauucaggcagcaaagucucugcuuacau

SEQ ID NO: 203495 - RNA, 32 nt, Homo Sapiens
gcggcuugcuguccagccugugugggggccgu

SEQ ID NO: 203496 - RNA, 32 nt, Homo Sapiens
ucccaauaguuuccucugcauuuauauacucu

SEQ ID NO: 203497 - RNA, 32 nt, Homo Sapiens
uguaccgggcggggggcgccuacgggccgggc

SEQ ID NO: 203498 - RNA, 32 nt, Homo Sapiens
caaugggcacagccuuccuccccagaggaccc

SEQ ID NO: 203499 - RNA, 30 nt, Homo Sapiens
uuacgggcgcccgccaccgcgccuggcuaa

SEQ ID NO: 203500 - RNA, 32 nt, Homo Sapiens
caagucaccaaaaagacacugcagaaacccug

SEQ ID NO: 203501 - RNA, 32 nt, Homo Sapiens
uaaaagacaaggaaacaaacuacuuuuuuguu

SEQ ID NO: 203502 - RNA, 32 nt, Homo Sapiens
uggcuuccuggagggaagccuccuaaggccag

SEQ ID NO: 203503 - RNA, 32 nt, Homo Sapiens
aggaaagaaggcuggagcugugagauucgcuu

SEQ ID NO: 203504 - RNA, 32 nt, Homo Sapiens
uucauucauacacagacgauggaagaagccac

SEQ ID NO: 203505 - RNA, 32 nt, Homo Sapiens
guugguaaauuucaaaaugugcuugacaccug

SEQ ID NO: 203506 - RNA, 32 nt, Homo Sapiens
aauguccucaggucuuuguaauuuauauuaga

SEQ ID NO: 203507 - RNA, 32 nt, Homo Sapiens
aaccccaauaaaugaugauuauuguuaaaaaa

SEQ ID NO: 203508 - RNA, 32 nt, Homo Sapiens
gcggcggcggcaccucugggaguuuaagaugu

SEQ ID NO: 203509 - RNA, 32 nt, Homo Sapiens
cccagaaauggcauuugcaguuaauuagcaca

SEQ ID NO: 203510 - RNA, 30 nt, Homo Sapiens
gaggagggagguggugagcagacagacagg

SEQ ID NO: 203511 - RNA, 32 nt, Homo Sapiens
caguggggaaauagucacggggccugcucagu

SEQ ID NO: 203512 - RNA, 32 nt, Homo Sapiens
cuccugucaccaugguguuccacgguugggga

SEQ ID NO: 203513 - RNA, 29 nt, Homo Sapiens
caaaauguggauuuccgaggcaagaagga

SEQ ID NO: 203514 - RNA, 32 nt, Homo Sapiens
ggguccaguuuaguaacgagugauuuaggcaa

SEQ ID NO: 203515 - RNA, 32 nt, Homo Sapiens
caaguccuuuuauuuuaacaugauguccauga

SEQ ID NO: 203516 - RNA, 32 nt, Homo Sapiens
ugggcaagaucauugguuuaucauagugaaac

SEQ ID NO: 203517 - RNA, 32 nt, Homo Sapiens
ggcauucaggagccacaaugucuugaacaagu

SEQ ID NO: 203518 - RNA, 32 nt, Homo Sapiens
aagauuaucaaauaagcuuaugcuuuggagag

SEQ ID NO: 203519 - RNA, 32 nt, Homo Sapiens
cacacaguuggauggaggcuucuccaaggaaa

SEQ ID NO: 203520 - RNA, 32 nt, Homo Sapiens
uacaguguauuacuguauauuaaacugaaaua

SEQ ID NO: 203521 - RNA, 32 nt, Homo Sapiens
caaaguaaugguuuuucucucaguucucuaag

SEQ ID NO: 203522 - RNA, 28 nt, Homo Sapiens
ugcgcggggcggccauuggcggcggagu

SEQ ID NO: 203523 - RNA, 32 nt, Homo Sapiens
uacuuggaaaauugagaaauggcucaaaagag

SEQ ID NO: 203524 - RNA, 32 nt, Homo Sapiens
gagacucacagaucuacacaaacuacaaaagu

SEQ ID NO: 203525 - RNA, 32 nt, Homo Sapiens
cgcaggaggggccagcagccccaggaguccca

SEQ ID NO: 203526 - RNA, 32 nt, Homo Sapiens
cggaggaauugaauugaaugggacagagggca

SEQ ID NO: 203527 - RNA, 32 nt, Homo Sapiens
uucuuaaaaugguuggcuucuugucuguaagc

SEQ ID NO: 203528 - RNA, 32 nt, Homo Sapiens
ccugcugucccucuccaggccuuggcaaugac

SEQ ID NO: 203529 - RNA, 32 nt, Homo Sapiens
uaaaagaagauaaaaaagcaguugguacuuga

SEQ ID NO: 203530 - RNA, 32 nt, Homo Sapiens
uuccagagccccacuggggguuaccuucgcuu

SEQ ID NO: 203531 - RNA, 32 nt, Homo Sapiens
ccuagagccagccgcggccgcgcaggaggggc

SEQ ID NO: 203532 - RNA, 32 nt, Homo Sapiens
gggguauguugagaaacauccugaggcaaggu

SEQ ID NO: 203533 - RNA, 32 nt, Homo Sapiens
cucuugcucccucucuggccaugugacaugcc

SEQ ID NO: 203534 - RNA, 32 nt, Homo Sapiens
gcuggccggagucaagcugugcacgggaagga

SEQ ID NO: 203535 - RNA, 32 nt, Homo Sapiens
agccaccccccgccccacuccauguuggcugu

SEQ ID NO: 203536 - RNA, 32 nt, Homo Sapiens
gguuguaguaggagcugaaauccaugcugagc

SEQ ID NO: 203537 - RNA, 32 nt, Homo Sapiens
ggaugauuaaugaaguagcaucugaaaaaccc

SEQ ID NO: 203538 - RNA, 32 nt, Homo Sapiens
ggccccuccgcggagcccggucacagucacug

SEQ ID NO: 203539 - RNA, 32 nt, Homo Sapiens
uuuauguuuuugaaaguuuaaguuuuagacac

SEQ ID NO: 203540 - RNA, 32 nt, Homo Sapiens
cccugucugaccagcccaggauggucacacag

SEQ ID NO: 203541 - RNA, 32 nt, Homo Sapiens
uacggggcccuccuuucagccuugaccccuuc

SEQ ID NO: 203542 - RNA, 32 nt, Homo Sapiens
gcgcgcccagugacugcaccccggcccucauc

SEQ ID NO: 203543 - RNA, 32 nt, Homo Sapiens
uauggaaaacaauaugguagaacuuaguaaac

SEQ ID NO: 203544 - RNA, 32 nt, Homo Sapiens
cacauucaacggccagaauggcggcccacagg

SEQ ID NO: 203545 - RNA, 32 nt, Homo Sapiens
uggcaggcucuuugcccucguuggccaguccc

SEQ ID NO: 203546 - RNA, 32 nt, Homo Sapiens
aauacauuuuugggggguaagcauugucauca

SEQ ID NO: 203547 - RNA, 32 nt, Homo Sapiens
gugcaguagcgccgucucggcucacugcaagc

SEQ ID NO: 203548 - RNA, 32 nt, Homo Sapiens
aauugagauaaugauacuuaaccaguuagaag

SEQ ID NO: 203549 - RNA, 32 nt, Homo Sapiens
caucucaugcgugguugaguuaguagaaucug

SEQ ID NO: 203550 - RNA, 32 nt, Homo Sapiens
auaauguccuuaaauuuuauuuccagcuccug

SEQ ID NO: 203551 - RNA, 32 nt, Homo Sapiens
ucuuaggucucuucuuuuauaccaagcucauc

SEQ ID NO: 203552 - RNA, 32 nt, Homo Sapiens
auggaaaagacuucuuuucauacucucacuau

SEQ ID NO: 203553 - RNA, 32 nt, Homo Sapiens
gcaacacccgggagcuguuuuguccuuugugg

SEQ ID NO: 203554 - RNA, 32 nt, Homo Sapiens
gguauuacugaauuagcguuuaauccacuucc

SEQ ID NO: 203555 - RNA, 32 nt, Homo Sapiens
ccucaccacaaagggacuccugugaaacugcu

SEQ ID NO: 203556 - RNA, 32 nt, Homo Sapiens
aggagguauacacauacugauguuguuuugau

SEQ ID NO: 203557 - RNA, 32 nt, Homo Sapiens
agggaugcaugggcuuuuuggccaguguuucc

SEQ ID NO: 203558 - RNA, 32 nt, Homo Sapiens
acucuacaaaguuuccuccucuccuacacuga

SEQ ID NO: 203559 - RNA, 32 nt, Homo Sapiens
ugagugagggcaggaguguuuauggcagagug

SEQ ID NO: 203560 - RNA, 32 nt, Homo Sapiens
ugaggcuacucggcuuggcccgcagguccucc

SEQ ID NO: 203561 - RNA, 32 nt, Homo Sapiens
cuguugaaaaagagaaaaacuaauauauuuga

SEQ ID NO: 203562 - RNA, 32 nt, Homo Sapiens
cucuuugcauuacaauaugaaguaaaguucua

SEQ ID NO: 203563 - RNA, 32 nt, Homo Sapiens
cucaaccuaggcagggcggggcaggagggccu

SEQ ID NO: 203564 - RNA, 32 nt, Homo Sapiens
cacacacaaaaauuaaaugcaauaaaggaauc

SEQ ID NO: 203565 - RNA, 32 nt, Homo Sapiens
gagacagaagaaagagaucaagggcagauaac

SEQ ID NO: 203566 - RNA, 32 nt, Homo Sapiens
gucuaaugcccauuuucccaacuauucuuucc

SEQ ID NO: 203567 - RNA, 32 nt, Homo Sapiens
cccgcacgccccgaccuuccaucguaggccgg

SEQ ID NO: 203568 - RNA, 32 nt, Homo Sapiens
cgcgacaagcccgccgggaucccgggcccugg

SEQ ID NO: 203569 - RNA, 32 nt, Homo Sapiens
ggaagguucugaugacagcugcagaggcaggg

SEQ ID NO: 203570 - RNA, 32 nt, Homo Sapiens
ggcagcagcuccggcggcgauuccuccuccug

SEQ ID NO: 203571 - RNA, 32 nt, Homo Sapiens
gucaggccacuggccaguggggaccagccucu

SEQ ID NO: 203572 - RNA, 32 nt, Homo Sapiens
aucuugcccugacgcaguuacaaaagaugagg

SEQ ID NO: 203573 - RNA, 32 nt, Homo Sapiens
uauaacauacucaaaagcuguuacacuuucuc

SEQ ID NO: 203574 - RNA, 32 nt, Homo Sapiens
gggcuuuuuagacugcugcugcucagcugguu

SEQ ID NO: 203575 - RNA, 32 nt, Homo Sapiens
cggggagggaggaggaggagaagaugcgcagu

SEQ ID NO: 203576 - RNA, 32 nt, Homo Sapiens
cuggagaugauuaaggccccgcuuccuggccu

SEQ ID NO: 203577 - RNA, 32 nt, Homo Sapiens
uuugacuuauaaauacaauuuguuauguuuau

SEQ ID NO: 203578 - RNA, 32 nt, Homo Sapiens
gccagccccccgcccugggccccgucucgccu

SEQ ID NO: 203579 - RNA, 32 nt, Homo Sapiens
gaacucacauaaaaaacaccacguaaguaaau

SEQ ID NO: 203580 - RNA, 32 nt, Homo Sapiens
cucucacggggagagguaugggagggaagucg

SEQ ID NO: 203581 - RNA, 32 nt, Homo Sapiens
ugaaaaguaaacgauaaaauguggauuaaagu

SEQ ID NO: 203582 - RNA, 32 nt, Homo Sapiens
aaacugggucaucauuuguccuguucuagcaa

SEQ ID NO: 203583 - RNA, 32 nt, Homo Sapiens
cguuaaggcucuguuuugaagcuuacauggac

SEQ ID NO: 203584 - RNA, 32 nt, Homo Sapiens
gaauaaagauucauuuucaagcugaauaacca

SEQ ID NO: 203585 - RNA, 32 nt, Homo Sapiens
cacuuaaaagauacagcauggaacuuuguacc

SEQ ID NO: 203586 - RNA, 32 nt, Homo Sapiens
gcauucuucucauaccuagaaaaucacuguaa

SEQ ID NO: 203587 - RNA, 32 nt, Homo Sapiens
ggcugaugaaaaaauauacauaaaaggguaaa

SEQ ID NO: 203588 - RNA, 32 nt, Homo Sapiens
agaagcuuaaggaugaaaucagcaaauguuua

SEQ ID NO: 203589 - RNA, 32 nt, Homo Sapiens
cucugaugccaccaccugaacccugcucccuc

SEQ ID NO: 203590 - RNA, 32 nt, Homo Sapiens
gauuccaccuccgccuccaccucccccugcca

SEQ ID NO: 203591 - RNA, 32 nt, Homo Sapiens
aagggggccaagggccaggguuuggcauguca

SEQ ID NO: 203592 - RNA, 32 nt, Homo Sapiens
gaggucagaggugacagaagcguucaggggug

SEQ ID NO: 203593 - RNA, 32 nt, Homo Sapiens
guauuucuuuaacaagugguuaaaaaaagugu

SEQ ID NO: 203594 - RNA, 27 nt, Homo Sapiens
acuagguccuucuuccccauguuuuau

SEQ ID NO: 203595 - RNA, 32 nt, Homo Sapiens
cacagacaggcuuuuccugccauccucagacc

SEQ ID NO: 203596 - RNA, 32 nt, Homo Sapiens
cugcggccucggugcugaugcugagugcugug

SEQ ID NO: 203597 - RNA, 32 nt, Homo Sapiens
gggugggguggcuccgcccaggaggcggcugc

SEQ ID NO: 203598 - RNA, 32 nt, Homo Sapiens
aggcucguuaacugccgagagccuccggguuu

SEQ ID NO: 203599 - RNA, 32 nt, Homo Sapiens
augggggcacuggccuggagccugggcccacc

SEQ ID NO: 203600 - RNA, 32 nt, Homo Sapiens
cccccucaucucacugcccaguuucuuuuuga

SEQ ID NO: 203601 - RNA, 30 nt, Homo Sapiens
cuuuuugcgaauuggggggaaaguguauuu

SEQ ID NO: 203602 - RNA, 32 nt, Homo Sapiens
cuucuguguucaguugaauuguaacugcuuuu

SEQ ID NO: 203603 - RNA, 32 nt, Homo Sapiens
cccccagagaugucaucagagcuccucugucc

SEQ ID NO: 203604 - RNA, 32 nt, Homo Sapiens
uugccucugcacugcgcccccacagcccacuc

SEQ ID NO: 203605 - RNA, 32 nt, Homo Sapiens
ucaguuacauccgaaagugucuggagaagcug

SEQ ID NO: 203606 - RNA, 32 nt, Homo Sapiens
uaauagaccccauaacccacuaugccuuccug

SEQ ID NO: 203607 - RNA, 32 nt, Homo Sapiens
gucuccagauauugccagauguccucuuggaa

SEQ ID NO: 203608 - RNA, 32 nt, Homo Sapiens
ugcugaguguuaauagauuaucauauugccug

SEQ ID NO: 203609 - RNA, 32 nt, Homo Sapiens
uuuguccuccucgcgcaaucccggcccgggug

SEQ ID NO: 203610 - RNA, 32 nt, Homo Sapiens
cuaaguaagauguagcacuuugaauaugaaau

SEQ ID NO: 203611 - RNA, 32 nt, Homo Sapiens
cugaugguggacuggcuggagacccaggucag

SEQ ID NO: 203612 - RNA, 32 nt, Homo Sapiens
uugcagaccugccuggagguucucccuggggu

SEQ ID NO: 203613 - RNA, 32 nt, Homo Sapiens
cccccaagcggauacuggucuucucgucggau

SEQ ID NO: 203614 - RNA, 32 nt, Homo Sapiens
uuauuuuagcaaauauuauauuucaugacaau

SEQ ID NO: 203615 - RNA, 32 nt, Homo Sapiens
gaccggcucuucucgcuuccccggcggcggca

SEQ ID NO: 203616 - RNA, 32 nt, Homo Sapiens
augaagccaaaaaacauauuugaauuuaaaua

SEQ ID NO: 203617 - RNA, 32 nt, Homo Sapiens
uccuccguccacuugagcucugccucuuccuc

SEQ ID NO: 203618 - RNA, 32 nt, Homo Sapiens
gucauagguguggucaucauccucuccugcau

SEQ ID NO: 203619 - RNA, 32 nt, Homo Sapiens
agggagcugcccggcuggccuaggcaggcagc

SEQ ID NO: 203620 - RNA, 32 nt, Homo Sapiens
gagagugggcaagcaggacgccgggcugagug

SEQ ID NO: 203621 - RNA, 32 nt, Homo Sapiens
ugauggaaaaauacaaguuaaagcuauugcug

SEQ ID NO: 203622 - RNA, 32 nt, Homo Sapiens
uacucugguuggaaaugccauuguuuugggga

SEQ ID NO: 203623 - RNA, 32 nt, Homo Sapiens
aaaaggggcgggacgcgccgcgcucgggaugu

SEQ ID NO: 203624 - RNA, 32 nt, Homo Sapiens
cuaaggaacaacaugaggaacgugcagauggg

SEQ ID NO: 203625 - RNA, 32 nt, Homo Sapiens
gcugagaugggcaggugcugcagcagccccgc

SEQ ID NO: 203626 - RNA, 32 nt, Homo Sapiens
guuucaaagugacaacucuaaacccuaggcaa

SEQ ID NO: 203627 - RNA, 32 nt, Homo Sapiens
acaaaguguaugcaccuugucuucagcuuuca

SEQ ID NO: 203628 - RNA, 32 nt, Homo Sapiens
cugagagacuggauuuggaaagaauauugaga

SEQ ID NO: 203629 - RNA, 32 nt, Homo Sapiens
ccugggaaagacuuggaagagaccagcauguc

SEQ ID NO: 203630 - RNA, 32 nt, Homo Sapiens
gcaaacagucucuucuauuucuuucuuuuuau

SEQ ID NO: 203631 - RNA, 32 nt, Homo Sapiens
uggaacccaagccucauauuuucuguccaguc

SEQ ID NO: 203632 - RNA, 32 nt, Homo Sapiens
cagaagaugaucucgaugugucuguucaauuu

SEQ ID NO: 203633 - RNA, 32 nt, Homo Sapiens
cacugcuccccccucagcaucuccaaauauau

SEQ ID NO: 203634 - RNA, 32 nt, Homo Sapiens
uacuucuuguuaaggaaauucaucucuuguuu

SEQ ID NO: 203635 - RNA, 32 nt, Homo Sapiens
uccucucagcuuugccuuuggaugcccucucu

SEQ ID NO: 203636 - RNA, 32 nt, Homo Sapiens
cuguuuagguuuugugauagaaugggauuuga

SEQ ID NO: 203637 - RNA, 32 nt, Homo Sapiens
gguccagaaugauaugcaaaaacuacuuuuua

SEQ ID NO: 203638 - RNA, 32 nt, Homo Sapiens
aauauauuaugaaaauguuuucaagaaaucac

SEQ ID NO: 203639 - RNA, 32 nt, Homo Sapiens
gacacaccuaugacacagcaucaggugguccu

SEQ ID NO: 203640 - RNA, 31 nt, Homo Sapiens
ucaucagagcuuuggaacucgagaccaguug

SEQ ID NO: 203641 - RNA, 32 nt, Homo Sapiens
auuuaaauuuuacccuuuagacuguagccugg

SEQ ID NO: 203642 - RNA, 32 nt, Homo Sapiens
cgcugggucaucgcgccgcgcggcuuccuggc

SEQ ID NO: 203643 - RNA, 32 nt, Homo Sapiens
ugagaaaaugucuuuauuaaauguagaaagug

SEQ ID NO: 203644 - RNA, 30 nt, Homo Sapiens
ggccgcugaucggccgcgggucuugucgac

SEQ ID NO: 203645 - RNA, 32 nt, Homo Sapiens
uuuuguuaucuaacgguaauuacggaguccag

SEQ ID NO: 203646 - RNA, 32 nt, Homo Sapiens
ccugggacagacggaggcucaggccuggcucc

SEQ ID NO: 203647 - RNA, 32 nt, Homo Sapiens
uugauuuauaaggucuuaauucagauuaugac

SEQ ID NO: 203648 - RNA, 32 nt, Homo Sapiens
guauugcucccucaggauggcucugggccugc

SEQ ID NO: 203649 - RNA, 28 nt, Homo Sapiens
uggagguggcggccgcugcagcccuggc

SEQ ID NO: 203650 - RNA, 31 nt, Homo Sapiens
uuugauauuugagccauuccuaaagauuugg

SEQ ID NO: 203651 - RNA, 32 nt, Homo Sapiens
ccgcggcgcugagccagccgggacggacaugc

SEQ ID NO: 203652 - RNA, 32 nt, Homo Sapiens
cucugccuuuuagauagcaggagcaaauuagu

SEQ ID NO: 203653 - RNA, 32 nt, Homo Sapiens
gaaaugagaaaacuuaaugucguucuuguaca

SEQ ID NO: 203654 - RNA, 32 nt, Homo Sapiens
uguacagccuacuguuugucuccaguuuuuaa

SEQ ID NO: 203655 - RNA, 32 nt, Homo Sapiens
acaaaaucgcacaacgaugacgcacugcucaa

SEQ ID NO: 203656 - RNA, 32 nt, Homo Sapiens
ccgcagcggcgguggcgacgacggccgagacg

SEQ ID NO: 203657 - RNA, 32 nt, Homo Sapiens
guugcucuggggauggguuuauuuaagggaga

SEQ ID NO: 203658 - RNA, 32 nt, Homo Sapiens
acuaacuggugucuuuucuccucuuccaagau

SEQ ID NO: 203659 - RNA, 32 nt, Homo Sapiens
aaauggauuuaaaagacaaaaauggaggucca

SEQ ID NO: 203660 - RNA, 30 nt, Homo Sapiens
uaccauauuaucacccaucuaguuaguuac

SEQ ID NO: 203661 - RNA, 32 nt, Homo Sapiens
ccaaggcgggaggagagaagggacagcucugg

SEQ ID NO: 203662 - RNA, 32 nt, Homo Sapiens
ggagaaugauuugaaccuaggaggcagagguu

SEQ ID NO: 203663 - RNA, 32 nt, Homo Sapiens
ugguccauuucccauuuccuuuucuucccuga

SEQ ID NO: 203664 - RNA, 32 nt, Homo Sapiens
auuccaaucugggcaacauagcaagauucugu

SEQ ID NO: 203665 - RNA, 32 nt, Homo Sapiens
aaucgaugaauugauuaaauuuagacaauuaa

SEQ ID NO: 203666 - RNA, 32 nt, Homo Sapiens
cucccuucucuacucuuccccagcaccaugcc

SEQ ID NO: 203667 - RNA, 32 nt, Homo Sapiens
aauagaaaucaucuguaauuuauuagcuaaca

SEQ ID NO: 203668 - RNA, 32 nt, Homo Sapiens
agcguggcuucgaagauuguuucagaagcguu

SEQ ID NO: 203669 - RNA, 32 nt, Homo Sapiens
ugauucaucacagauuuuauauauauacuuuu

SEQ ID NO: 203670 - RNA, 32 nt, Homo Sapiens
aaaccucuaauugggcuuaccugguaccagac

SEQ ID NO: 203671 - RNA, 30 nt, Homo Sapiens
ucucagggagguggcuuugcuggguucagg

SEQ ID NO: 203672 - RNA, 31 nt, Homo Sapiens
accuagcuuuccugccugcccccagggcuaa

SEQ ID NO: 203673 - RNA, 31 nt, Homo Sapiens
cuccuggagccccaagucagcccccauccuu

SEQ ID NO: 203674 - RNA, 32 nt, Homo Sapiens
aaaaaaggauugcaucugugaugugugggaca

SEQ ID NO: 203675 - RNA, 32 nt, Homo Sapiens
ugucuuuuguuuugguuuuuuauuuuuugucu

SEQ ID NO: 203676 - RNA, 32 nt, Homo Sapiens
gauacuggaaaccuaacugcaauguggauguu

SEQ ID NO: 203677 - RNA, 32 nt, Homo Sapiens
uaggaaauauuuuaguucuguuuucuugggga

SEQ ID NO: 203678 - RNA, 32 nt, Homo Sapiens
agccgucucuggcuauagauaaguagaucuaa

SEQ ID NO: 203679 - RNA, 32 nt, Homo Sapiens
ucuauugaggaaaaccacaaaaaacuucaaaa

SEQ ID NO: 203680 - RNA, 32 nt, Homo Sapiens
uugguuuucugcacaagcgaugcuaaugaugu

SEQ ID NO: 203681 - RNA, 32 nt, Homo Sapiens
aaagagguccagaauaaaauauauuuugauau

SEQ ID NO: 203682 - RNA, 32 nt, Homo Sapiens
gugccaccacacuccagccugggcgacagaau

SEQ ID NO: 203683 - RNA, 32 nt, Homo Sapiens
ugugaucacuguauugagagauauauuuugug

SEQ ID NO: 203684 - RNA, 32 nt, Homo Sapiens
cgcagacgccccugcagccgccggucggcgcc

SEQ ID NO: 203685 - RNA, 32 nt, Homo Sapiens
gcucagccagccaguuuggccuugacucucuu

SEQ ID NO: 203686 - RNA, 32 nt, Homo Sapiens
aaaacugauuaaaaagugaguuccauuaauaa

SEQ ID NO: 203687 - RNA, 32 nt, Homo Sapiens
uacuggagggauuuuugucuugaauuuguuuc

SEQ ID NO: 203688 - RNA, 32 nt, Homo Sapiens
uucugcggccagagccgaggcgggcgggggug

SEQ ID NO: 203689 - RNA, 32 nt, Homo Sapiens
cacucgcagcucgggcgccgcgcgagccuguc

SEQ ID NO: 203690 - RNA, 32 nt, Homo Sapiens
agggcgaggaggagcagaggagcacacagaug

SEQ ID NO: 203691 - RNA, 32 nt, Homo Sapiens
gguccccuggggugggguggucagggugagca

SEQ ID NO: 203692 - RNA, 32 nt, Homo Sapiens
aagugauauuaagaguauuggcuuauauuuaa

SEQ ID NO: 203693 - RNA, 32 nt, Homo Sapiens
ggaaaucucuacaaguuuuaaugauuucuccc

SEQ ID NO: 203694 - RNA, 32 nt, Homo Sapiens
cgggggugguccagcccucgcccggcccccac

SEQ ID NO: 203695 - RNA, 32 nt, Homo Sapiens
agagaggagagcccugagaccgcagggcuuug

SEQ ID NO: 203696 - RNA, 32 nt, Homo Sapiens
aucgccuuaaugucuaaagaucagaaaucgcu

SEQ ID NO: 203697 - RNA, 32 nt, Homo Sapiens
ucuucuaugcagaacaaaaagcugcaucuaau

SEQ ID NO: 203698 - RNA, 32 nt, Homo Sapiens
ucugccucauuucuuaaaauuagagaauuaag

SEQ ID NO: 203699 - RNA, 32 nt, Homo Sapiens
uaaacugacuguuuuucuuugcuuggauacug

SEQ ID NO: 203700 - RNA, 32 nt, Homo Sapiens
uaaagaugaaaggaugauaaguacacuggaaa

SEQ ID NO: 203701 - RNA, 32 nt, Homo Sapiens
caaggucccagccccaggcagcccugucacag

SEQ ID NO: 203702 - RNA, 32 nt, Homo Sapiens
uggcugucguuuguuaacaucaucaggaagau

SEQ ID NO: 203703 - RNA, 32 nt, Homo Sapiens
cugucucguuugccuugaccgccaugugaaag

SEQ ID NO: 203704 - RNA, 32 nt, Homo Sapiens
gagcaaauuugauucucugcgcagcagaaagc

SEQ ID NO: 203705 - RNA, 32 nt, Homo Sapiens
caaagaugaugggauuaagagauuaaagacag

SEQ ID NO: 203706 - RNA, 32 nt, Homo Sapiens
uuucugauaaugacggauaucaacaauuaaac

SEQ ID NO: 203707 - RNA, 32 nt, Homo Sapiens
cguguguuugcaguaaguugugagauguuaau

SEQ ID NO: 203708 - RNA, 32 nt, Homo Sapiens
aggacaaauaaaacauggccagcaaauacaaa

SEQ ID NO: 203709 - RNA, 32 nt, Homo Sapiens
ccucgcgugcccgugcgaggccgggggcuucu

SEQ ID NO: 203710 - RNA, 30 nt, Homo Sapiens
acucggcguccgccgccgccggguagccgg

SEQ ID NO: 203711 - RNA, 32 nt, Homo Sapiens
uucggccgcugacgcgaacccuccgcaccggg

SEQ ID NO: 203712 - RNA, 32 nt, Homo Sapiens
uguaaauacuggaaacaaaaacagcaguugca

SEQ ID NO: 203713 - RNA, 32 nt, Homo Sapiens
aauccccaugugucuagggagagaccuggugg

SEQ ID NO: 203714 - RNA, 32 nt, Homo Sapiens
uuuacauuuguacacaaaugugacuaugucuu

SEQ ID NO: 203715 - RNA, 32 nt, Homo Sapiens
gccacagcucugggggcugcugcugccugggc

SEQ ID NO: 203716 - RNA, 32 nt, Homo Sapiens
ucugcucuguuucuaguuaaaauauaauaaau

SEQ ID NO: 203717 - RNA, 32 nt, Homo Sapiens
agccuacauuggcaucaaguucuguaucaauc

SEQ ID NO: 203718 - RNA, 32 nt, Homo Sapiens
uuccuauccagucccaaccaacccuuccguua

SEQ ID NO: 203719 - RNA, 32 nt, Homo Sapiens
ugaucuggaaaacugccuguccucugugaaaa

SEQ ID NO: 203720 - RNA, 31 nt, Homo Sapiens
acucagagagaaaaacaguauuagugaaaag

SEQ ID NO: 203721 - RNA, 32 nt, Homo Sapiens
gggaggcccgguuuugaagccgcuucucugcc

SEQ ID NO: 203722 - RNA, 32 nt, Homo Sapiens
cuccagagaggcugcugcucauugagcugcac

SEQ ID NO: 203723 - RNA, 32 nt, Homo Sapiens
ugcgaugccuucugaugugcuugaggugacca

SEQ ID NO: 203724 - RNA, 32 nt, Homo Sapiens
gagagauagauauuauucacguaauaaaaaac

SEQ ID NO: 203725 - RNA, 32 nt, Homo Sapiens
gccggaccagcuggugcugcgcggcgcagguc

SEQ ID NO: 203726 - RNA, 32 nt, Homo Sapiens
aagcaaauaucuccagaggggauuaauccuuc

SEQ ID NO: 203727 - RNA, 32 nt, Homo Sapiens
cucuggaaaugccuggaucugcgaccccagcc

SEQ ID NO: 203728 - RNA, 32 nt, Homo Sapiens
uuugaagaaaucaacuuggagacuccuccuua

SEQ ID NO: 203729 - RNA, 32 nt, Homo Sapiens
cugcuggagggggacugaagggcgagcagggu

SEQ ID NO: 203730 - RNA, 32 nt, Homo Sapiens
uauuaucucauuuaagcaauuuacuuccucau

SEQ ID NO: 203731 - RNA, 32 nt, Homo Sapiens
gauauuaauguggaaggucaucaauaaagggg

SEQ ID NO: 203732 - RNA, 32 nt, Homo Sapiens
gacuugaaugguuaauaaaacugcacagugcu

SEQ ID NO: 203733 - RNA, 32 nt, Homo Sapiens
ccuacuuuuuucuguugaacauaugacuucuc

SEQ ID NO: 203734 - RNA, 32 nt, Homo Sapiens
gccuuuuuaugaaaaugaaaucugaaaucacc

SEQ ID NO: 203735 - RNA, 32 nt, Homo Sapiens
ccaaccccgggcucgucgcuuucuccaucccg

SEQ ID NO: 203736 - RNA, 32 nt, Homo Sapiens
gugagcuuuaagugguuuguaaaccauaaaac

SEQ ID NO: 203737 - RNA, 32 nt, Homo Sapiens
ggcuucuggcuuuugcccccagccccuuggau

SEQ ID NO: 203738 - RNA, 32 nt, Homo Sapiens
ugggcauugaggcauuuccauacaucuucuga

SEQ ID NO: 203739 - RNA, 32 nt, Homo Sapiens
gauaucuugacaaacucuccaauuuucuaaaa

SEQ ID NO: 203740 - RNA, 32 nt, Homo Sapiens
uuaguuuguguguugucucuugaguuugucgc

SEQ ID NO: 203741 - RNA, 32 nt, Homo Sapiens
aggcucagggaccggcaguucuacucuagagc

SEQ ID NO: 203742 - RNA, 32 nt, Homo Sapiens
guggaugccgcgcgugucuucucuucuuucca

SEQ ID NO: 203743 - RNA, 32 nt, Homo Sapiens
agugagaacccauugggaccgagccuggggag

SEQ ID NO: 203744 - RNA, 32 nt, Homo Sapiens
ucugcaguguggcugcuucuugauucauccau

SEQ ID NO: 203745 - RNA, 32 nt, Homo Sapiens
uccgaggacagccuuuuccccaggccucagag

SEQ ID NO: 203746 - RNA, 32 nt, Homo Sapiens
cugagccuucacguacuuccccucccauuccc

SEQ ID NO: 203747 - RNA, 32 nt, Homo Sapiens
uccccaccucugcccggacauccaccaugggg

SEQ ID NO: 203748 - RNA, 32 nt, Homo Sapiens
gguuccccaggagaggggagggacuggccccu

SEQ ID NO: 203749 - RNA, 32 nt, Homo Sapiens
ucccucaggaauaguaagagccagccccucuu

SEQ ID NO: 203750 - RNA, 32 nt, Homo Sapiens
gguuugugguccccccaaaaagcuacaccaag

SEQ ID NO: 203751 - RNA, 32 nt, Homo Sapiens
aaaugaguguaaauuuggacuuguggguaguc

SEQ ID NO: 203752 - RNA, 32 nt, Homo Sapiens
gugugcccagauuuuaaaaauaccuucaaaaa

SEQ ID NO: 203753 - RNA, 32 nt, Homo Sapiens
cacaccuuucccugaagucuuucaguuuaucu

SEQ ID NO: 203754 - RNA, 32 nt, Homo Sapiens
aaacaccauggagaugaaaugccuuugauuuu

SEQ ID NO: 203755 - RNA, 32 nt, Homo Sapiens
gucccuguggucugaauuuaucaaaacucauu

SEQ ID NO: 203756 - RNA, 32 nt, Homo Sapiens
cucccgccgggggaacccggcgaggacaagag

SEQ ID NO: 203757 - RNA, 32 nt, Homo Sapiens
gccgcacccaccgcugccccaggagcagcacg

SEQ ID NO: 203758 - RNA, 28 nt, Homo Sapiens
gcggaggggcggccugggaggggaggag

SEQ ID NO: 203759 - RNA, 32 nt, Homo Sapiens
uggccgcgccgcagaaguggcucccgaggaag

SEQ ID NO: 203760 - RNA, 32 nt, Homo Sapiens
guauaaauauaaauauuuaccauauaaucuug

SEQ ID NO: 203761 - RNA, 32 nt, Homo Sapiens
aaagucaaaaauuauuugcuauggcaggauaa

SEQ ID NO: 203762 - RNA, 32 nt, Homo Sapiens
ugcccgggccucggggcagccccugcagcacu

SEQ ID NO: 203763 - RNA, 32 nt, Homo Sapiens
uuauaaucugacaucaccccagcgccauuugu

SEQ ID NO: 203764 - RNA, 32 nt, Homo Sapiens
aggggaggagacggcgggggcggccgcggcuu

SEQ ID NO: 203765 - RNA, 32 nt, Homo Sapiens
acuacagugucugugauguccgcauguccagg

SEQ ID NO: 203766 - RNA, 32 nt, Homo Sapiens
caggguuccugacuagcugucuccucugcagc

SEQ ID NO: 203767 - RNA, 32 nt, Homo Sapiens
uugcaguaggcacuuuaucaggaccugaccug

SEQ ID NO: 203768 - RNA, 32 nt, Homo Sapiens
ggaggugaucagaucaugggggugguuccccc

SEQ ID NO: 203769 - RNA, 32 nt, Homo Sapiens
uucagccuguuaaugaugucuucauguugagu

SEQ ID NO: 203770 - RNA, 32 nt, Homo Sapiens
gacgugccuucagggucugguuaugcuucaug

SEQ ID NO: 203771 - RNA, 32 nt, Homo Sapiens
uuuuauacuuuuuuaugaguuaugauagcagc

SEQ ID NO: 203772 - RNA, 32 nt, Homo Sapiens
ccuccggccugggcugcccacaaggcuugucc

SEQ ID NO: 203773 - RNA, 32 nt, Homo Sapiens
guggggggucuuuggguuuacaugcugcuggg

SEQ ID NO: 203774 - RNA, 32 nt, Homo Sapiens
gagaugcaaagauaaaauugcugcgguuguua

SEQ ID NO: 203775 - RNA, 32 nt, Homo Sapiens
ucucccugcccuugagaacucccuuugcucca

SEQ ID NO: 203776 - RNA, 32 nt, Homo Sapiens
acaugccguuguguuaugcccagccacucuga

SEQ ID NO: 203777 - RNA, 32 nt, Homo Sapiens
acauuguccgucagcggugcugcuuggaggcu

SEQ ID NO: 203778 - RNA, 32 nt, Homo Sapiens
ucauuuuaccuaaccuuuuuuauuuucuuucc

SEQ ID NO: 203779 - RNA, 32 nt, Homo Sapiens
uggacaagacaaaaacuauuuuauagagaguu

SEQ ID NO: 203780 - RNA, 32 nt, Homo Sapiens
guccuacaccccuggcacucucuucuugaaag

SEQ ID NO: 203781 - RNA, 32 nt, Homo Sapiens
ucaugaucuuaccuguuguuugacuaugaaaa

SEQ ID NO: 203782 - RNA, 32 nt, Homo Sapiens
uuuuuagauaaaauuguucuccuucuaaaaaa

SEQ ID NO: 203783 - RNA, 32 nt, Homo Sapiens
gaaacaaugauacuucuuuuuaucucuuuagu

SEQ ID NO: 203784 - RNA, 32 nt, Homo Sapiens
gggcugucugguuuuaaauaaaguuggaacac

SEQ ID NO: 203785 - RNA, 32 nt, Homo Sapiens
uuuuauugacauggaaauacuugcuccaugag

SEQ ID NO: 203786 - RNA, 32 nt, Homo Sapiens
uauccgggccgcugcgcgucugggggcugcgg

SEQ ID NO: 203787 - RNA, 32 nt, Homo Sapiens
ggucccgguguuguuuuugccucguuccccau

SEQ ID NO: 203788 - RNA, 32 nt, Homo Sapiens
ccugaagaaaucaguggccugacuucauuaac

SEQ ID NO: 203789 - RNA, 32 nt, Homo Sapiens
agcucugacacucugccaacauccucugauuc

SEQ ID NO: 203790 - RNA, 32 nt, Homo Sapiens
uagaaaguaacaccccauauguuuccauuccc

SEQ ID NO: 203791 - RNA, 32 nt, Homo Sapiens
cccuggacguuuuucugcucucuucuggcccu

SEQ ID NO: 203792 - RNA, 32 nt, Homo Sapiens
ccauaauuuaaauuauuuugguuccacacugu

SEQ ID NO: 203793 - RNA, 32 nt, Homo Sapiens
ucgggcggccgccaggcuucccggcccgccac

SEQ ID NO: 203794 - RNA, 32 nt, Homo Sapiens
gccucgggcucccagggcggacacggccaccg

SEQ ID NO: 203795 - RNA, 29 nt, Homo Sapiens
augcugucacaaauaaaaucauuaaaugc

SEQ ID NO: 203796 - RNA, 32 nt, Homo Sapiens
gggccugcuguggugcuggacaucagugacag

SEQ ID NO: 203797 - RNA, 32 nt, Homo Sapiens
uuuaaggagaguauaaagugcgagcacuguga

SEQ ID NO: 203798 - RNA, 32 nt, Homo Sapiens
auucaagcugaauguuuaagagagauuuuggu

SEQ ID NO: 203799 - RNA, 32 nt, Homo Sapiens
guuuuggaggugaccggcgcggcggccgcucu

SEQ ID NO: 203800 - RNA, 32 nt, Homo Sapiens
uuccuauguaaugagcuagaaacuaaaguaca

SEQ ID NO: 203801 - RNA, 32 nt, Homo Sapiens
aggaccgggagaccgaacgcagcguccagccg

SEQ ID NO: 203802 - RNA, 32 nt, Homo Sapiens
gggaggggaaaauuauuuuauuuuauuuuuau

SEQ ID NO: 203803 - RNA, 32 nt, Homo Sapiens
uuggauguuaaucugauguggugcucuuggag

SEQ ID NO: 203804 - RNA, 32 nt, Homo Sapiens
gagugcccggccaggucuccaagccccaaaug

SEQ ID NO: 203805 - RNA, 32 nt, Homo Sapiens
gagggggcgaaggggucagcccugcccuucag

SEQ ID NO: 203806 - RNA, 32 nt, Homo Sapiens
ucuuuccagaaagugauuggcaaggcuuugga

SEQ ID NO: 203807 - RNA, 32 nt, Homo Sapiens
uuuugcugagugcgcuaagggaugcuggccug

SEQ ID NO: 203808 - RNA, 32 nt, Homo Sapiens
uggcccaggaggagcggugagugcgagccgcc

SEQ ID NO: 203809 - RNA, 32 nt, Homo Sapiens
ccuggcugcccacgcccucccuggcccccgcc

SEQ ID NO: 203810 - RNA, 32 nt, Homo Sapiens
ggccaggccggcagcgggaggcccugggagaa

SEQ ID NO: 203811 - RNA, 32 nt, Homo Sapiens
aaucagaagcaagcacagaguuugucagguuu

SEQ ID NO: 203812 - RNA, 32 nt, Homo Sapiens
guacacguuccccaggcccauaacagaggacu

SEQ ID NO: 203813 - RNA, 32 nt, Homo Sapiens
uucacaacagggcaguugugauacgaauagaa

SEQ ID NO: 203814 - RNA, 32 nt, Homo Sapiens
cucucugucacccaagcuggaauacaauggca

SEQ ID NO: 203815 - RNA, 32 nt, Homo Sapiens
caggcucaccuucacccgcuucagggggauuc

SEQ ID NO: 203816 - RNA, 32 nt, Homo Sapiens
uaucaguuuuucugguacaacuuuuuuccauu

SEQ ID NO: 203817 - RNA, 30 nt, Homo Sapiens
agcagcaauaaaagaaaagagugcacaagg

SEQ ID NO: 203818 - RNA, 32 nt, Homo Sapiens
uauuuauauauuuucuuaaaacagcagauuug

SEQ ID NO: 203819 - RNA, 32 nt, Homo Sapiens
aucuguggccggcggcagcuggugcggggggc

SEQ ID NO: 203820 - RNA, 32 nt, Homo Sapiens
ccccugaccuccacugacaucuacgacccgcc

SEQ ID NO: 203821 - RNA, 32 nt, Homo Sapiens
aaaaugcaggccaggugcgguggcucacaccu

SEQ ID NO: 203822 - RNA, 32 nt, Homo Sapiens
ggcagaacgcguuuggccccaaccagcacccc

SEQ ID NO: 203823 - RNA, 32 nt, Homo Sapiens
aauucucaacuuuccacaaagcuauggcucuu

SEQ ID NO: 203824 - RNA, 32 nt, Homo Sapiens
agauguggcauggaaggcagaggcuggguggg

SEQ ID NO: 203825 - RNA, 32 nt, Homo Sapiens
gaaauaaauauuauuuuguccuuguauagacu

SEQ ID NO: 203826 - RNA, 32 nt, Homo Sapiens
acuuucauucccuuucaugauuugcaacuuua

SEQ ID NO: 203827 - RNA, 32 nt, Homo Sapiens
cuaauuaucacgucugacaaauguguaugugu

SEQ ID NO: 203828 - RNA, 32 nt, Homo Sapiens
cuucagcauggaagaggaguccugucaggccu

SEQ ID NO: 203829 - RNA, 32 nt, Homo Sapiens
aauuaaauucauucaaaugaugauguaauccc

SEQ ID NO: 203830 - RNA, 32 nt, Homo Sapiens
agacuuucuacuagaggacuugaaagagaacu

SEQ ID NO: 203831 - RNA, 32 nt, Homo Sapiens
aaaggauaaaaauaaacuccugcuucccaagg

SEQ ID NO: 203832 - RNA, 32 nt, Homo Sapiens
uuacuuuccagaaagguuucuaaaguuacaga

SEQ ID NO: 203833 - RNA, 32 nt, Homo Sapiens
gguucccacggagcugacuucuccggggugcc

SEQ ID NO: 203834 - RNA, 32 nt, Homo Sapiens
uagccaguggaacaaaguuuguaguuauuuug

SEQ ID NO: 203835 - RNA, 32 nt, Homo Sapiens
ugaaccuagaacuugaagugacuccuacuuau

SEQ ID NO: 203836 - RNA, 32 nt, Homo Sapiens
ugcuucaaaaauuucagaaauucagcaguauu

SEQ ID NO: 203837 - RNA, 32 nt, Homo Sapiens
acauuuuucuucucuuuuuuuguuuguuuggu

SEQ ID NO: 203838 - RNA, 32 nt, Homo Sapiens
gaauauaguuuaucuuacuauggcauuuauuu

SEQ ID NO: 203839 - RNA, 32 nt, Homo Sapiens
ugucagguggguagcauggugccuggcucaau

SEQ ID NO: 203840 - RNA, 32 nt, Homo Sapiens
auguuagucacccuuucagucuucuguauucu

SEQ ID NO: 203841 - RNA, 32 nt, Homo Sapiens
ucuauuaaaaauacaaaaaagauuagccgggu

SEQ ID NO: 203842 - RNA, 32 nt, Homo Sapiens
ucacauugguuuucuuuuccuguuuacaucug

SEQ ID NO: 203843 - RNA, 32 nt, Homo Sapiens
agaguucccugcagcccgguccagguccaggc

SEQ ID NO: 203844 - RNA, 32 nt, Homo Sapiens
aacucaacauguuuuucuuaaaugcuguuuua

SEQ ID NO: 203845 - RNA, 32 nt, Homo Sapiens
uuuaguuuucuuuuccuugauuucucaguagg

SEQ ID NO: 203846 - RNA, 32 nt, Homo Sapiens
guccugccccagcccacccccacauuggagcc

SEQ ID NO: 203847 - RNA, 32 nt, Homo Sapiens
ggccugcggcgcccgcggcaccaugaucucca

SEQ ID NO: 203848 - RNA, 32 nt, Homo Sapiens
cacuugaggcuuagcuuugcucugccaacuuc

SEQ ID NO: 203849 - RNA, 32 nt, Homo Sapiens
uggacaagaagcugggagaggcacaaacugga

SEQ ID NO: 203850 - RNA, 32 nt, Homo Sapiens
uccgcuaguuccugcgggccuuugcccgcuuc

SEQ ID NO: 203851 - RNA, 32 nt, Homo Sapiens
gaugccuuuucucuucugccuugcgaaauaac

SEQ ID NO: 203852 - RNA, 32 nt, Homo Sapiens
agcgggaggcuggguaguuaccggaggaggca

SEQ ID NO: 203853 - RNA, 32 nt, Homo Sapiens
gaccuucucgcgcuccuccuggccucugaggg

SEQ ID NO: 203854 - RNA, 32 nt, Homo Sapiens
cuuuugaaaugaaugaaaauagugacaaaaca

SEQ ID NO: 203855 - RNA, 32 nt, Homo Sapiens
gauuucauauauauguguaugggaggcaugga

SEQ ID NO: 203856 - RNA, 32 nt, Homo Sapiens
cuacaguuacacaauauggaggcaaacaucag

SEQ ID NO: 203857 - RNA, 32 nt, Homo Sapiens
guuggacccccugagauccagcccuacuucuu

SEQ ID NO: 203858 - RNA, 32 nt, Homo Sapiens
aucgucuauguuaggcuuuuugaaauauuaac

SEQ ID NO: 203859 - RNA, 32 nt, Homo Sapiens
agauuccccucccagacacccucauuccugua

SEQ ID NO: 203860 - RNA, 32 nt, Homo Sapiens
agcgagcaccccgggagcugacuggcuccgcc

SEQ ID NO: 203861 - RNA, 32 nt, Homo Sapiens
aaccaagggaaaaaacugugaaauagagcugu

SEQ ID NO: 203862 - RNA, 32 nt, Homo Sapiens
uuuaucaaaaauuuuccuagaagaagaugugg

SEQ ID NO: 203863 - RNA, 32 nt, Homo Sapiens
gugccugugugagccugcaugcauacaugugu

SEQ ID NO: 203864 - RNA, 32 nt, Homo Sapiens
uaaauggaaaauuuaaauggcaaaaaaggcaa

SEQ ID NO: 203865 - RNA, 32 nt, Homo Sapiens
gcuucugugucccacacggccuguucccagcu

SEQ ID NO: 203866 - RNA, 32 nt, Homo Sapiens
uugccuuaauauugaauauacuguuuaccuca

SEQ ID NO: 203867 - RNA, 32 nt, Homo Sapiens
ggcuccguguuccauguccccauccugaaaau

SEQ ID NO: 203868 - RNA, 32 nt, Homo Sapiens
uuaggaucugggcucagaagccccacagcugu

SEQ ID NO: 203869 - RNA, 31 nt, Homo Sapiens
uggaagagggugagacagguauuccucacag

SEQ ID NO: 203870 - RNA, 32 nt, Homo Sapiens
gccccaacugucagcaguguggaggcugugag

SEQ ID NO: 203871 - RNA, 32 nt, Homo Sapiens
gggccacuuguguuuucuguucugggaacuuc

SEQ ID NO: 203872 - RNA, 32 nt, Homo Sapiens
gcacuuacuagauuucuaauugucugcuucuu

SEQ ID NO: 203873 - RNA, 32 nt, Homo Sapiens
uuggggcuuccucuccuucgacuccugccaga

SEQ ID NO: 203874 - RNA, 32 nt, Homo Sapiens
gccauaaagaagaaugagauccugucauuugc

SEQ ID NO: 203875 - RNA, 32 nt, Homo Sapiens
cugccgcagucauggcugcugaugggguggac

SEQ ID NO: 203876 - RNA, 32 nt, Homo Sapiens
cuaucuuucagcucccuagaucuuuagcuucu

SEQ ID NO: 203877 - RNA, 32 nt, Homo Sapiens
cuaugcguccccagccugggcugacaggacca

SEQ ID NO: 203878 - RNA, 32 nt, Homo Sapiens
cggcggcggugucggcagcugcuguagcgaag

SEQ ID NO: 203879 - RNA, 30 nt, Homo Sapiens
cgcagggugcuggaggaggaaaccggcgga

SEQ ID NO: 203880 - RNA, 32 nt, Homo Sapiens
cuugauuuaaucaucccacacuguauacauau

SEQ ID NO: 203881 - RNA, 32 nt, Homo Sapiens
cugucggccccacagccugcccgcccccugcu

SEQ ID NO: 203882 - RNA, 32 nt, Homo Sapiens
ggcuggagaaggaggagaaggccaaggcgcug

SEQ ID NO: 203883 - RNA, 32 nt, Homo Sapiens
ugggauccgccuucgcugacgccgggcaccua

SEQ ID NO: 203884 - RNA, 32 nt, Homo Sapiens
ugggcuccucagcaauaaagcacuuuauuuuc

SEQ ID NO: 203885 - RNA, 32 nt, Homo Sapiens
ccaggcaaaaagaucugaaacauuaguuuggg

SEQ ID NO: 203886 - RNA, 32 nt, Homo Sapiens
aaauguuuuuaaaugguauucucacccaguag

SEQ ID NO: 203887 - RNA, 32 nt, Homo Sapiens
gggaccaguuugcaugaggcucccgggcagag

SEQ ID NO: 203888 - RNA, 32 nt, Homo Sapiens
guucgcgugggggacagggugguggggacagc

SEQ ID NO: 203889 - RNA, 32 nt, Homo Sapiens
ugguuauagcccugcccucccaagucccaccc

SEQ ID NO: 203890 - RNA, 32 nt, Homo Sapiens
uagauagauaaacuuuuugccacuauaugaca

SEQ ID NO: 203891 - RNA, 32 nt, Homo Sapiens
acacaaacaaaauaaacaaaaacuggccaaaa

SEQ ID NO: 203892 - RNA, 32 nt, Homo Sapiens
cccgaaggccccaguccagccuacagcuuccc

SEQ ID NO: 203893 - RNA, 32 nt, Homo Sapiens
uagggaugggaagccaugaggaccuggccuuc

SEQ ID NO: 203894 - RNA, 32 nt, Homo Sapiens
ccuccauaaguaguccaggggcgguggcucac

SEQ ID NO: 203895 - RNA, 32 nt, Homo Sapiens
agugaaauuugugaagagaaauguaucaucaa

SEQ ID NO: 203896 - RNA, 32 nt, Homo Sapiens
guggcauauguuaaguuuugcuucauuggacc

SEQ ID NO: 203897 - RNA, 32 nt, Homo Sapiens
acuacacaaacacauacugacagauucagcca

SEQ ID NO: 203898 - RNA, 32 nt, Homo Sapiens
cccccgcgcuggcgccauggcggagcaggaga

SEQ ID NO: 203899 - RNA, 32 nt, Homo Sapiens
ggcuggcacccgaaaugugugacauucagcuu

SEQ ID NO: 203900 - RNA, 32 nt, Homo Sapiens
uaaauaacuacuguacucaauacucuaaaaaa

SEQ ID NO: 203901 - RNA, 32 nt, Homo Sapiens
gaaugaaggcuuuggaguagauuauuucaaag

SEQ ID NO: 203902 - RNA, 32 nt, Homo Sapiens
uuauggagaccuaaagucuugauguugugaag

SEQ ID NO: 203903 - RNA, 32 nt, Homo Sapiens
uuuauugcuucuuuuuggagagugcuauaaaa

SEQ ID NO: 203904 - RNA, 32 nt, Homo Sapiens
cucuacagacugccuuggcccacccauugaac

SEQ ID NO: 203905 - RNA, 32 nt, Homo Sapiens
ucacuuguuacagcuguuucugauaagcacuu

SEQ ID NO: 203906 - RNA, 32 nt, Homo Sapiens
ggccgaaguggcggccacagccugagccccga

SEQ ID NO: 203907 - RNA, 32 nt, Homo Sapiens
ucacauuuuuaaaauguucuagucauuuugag

SEQ ID NO: 203908 - RNA, 32 nt, Homo Sapiens
agggguuggggggcgcggcgccccacauaaca

SEQ ID NO: 203909 - RNA, 32 nt, Homo Sapiens
augcuuuguucuuuucugguuuugguuccucu

SEQ ID NO: 203910 - RNA, 32 nt, Homo Sapiens
aggguggggcacugcaccuuaccccacccauc

SEQ ID NO: 203911 - RNA, 32 nt, Homo Sapiens
auauccucuauucuuauaauauuaaaacccau

SEQ ID NO: 203912 - RNA, 32 nt, Homo Sapiens
uugcagcucugacuucugcucccaguaaccca

SEQ ID NO: 203913 - RNA, 32 nt, Homo Sapiens
agcagggucagggucuucuugcgacccggcuc

SEQ ID NO: 203914 - RNA, 32 nt, Homo Sapiens
ccagcugacccccaaguuuccuuccagcuuua

SEQ ID NO: 203915 - RNA, 32 nt, Homo Sapiens
ggacgcgccccgagauggagagcaaagcccug

SEQ ID NO: 203916 - RNA, 32 nt, Homo Sapiens
cuggagaauaauauucaauuaaauuauuucua

SEQ ID NO: 203917 - RNA, 32 nt, Homo Sapiens
uacuguaacaauauguuuucuuggauuguugu

SEQ ID NO: 203918 - RNA, 32 nt, Homo Sapiens
ggauagcgaugaugguugcucaacauuuugaa

SEQ ID NO: 203919 - RNA, 32 nt, Homo Sapiens
uauuuaaaauuccauuaucuuaugaauaagca

SEQ ID NO: 203920 - RNA, 32 nt, Homo Sapiens
aguauuccaaaauauauuuaauaauggaauau

SEQ ID NO: 203921 - RNA, 32 nt, Homo Sapiens
aauggcauuuuucacagaaucagaagaaaaca

SEQ ID NO: 203922 - RNA, 30 nt, Homo Sapiens
gaaaggugagguggcgagacaguggggugc

SEQ ID NO: 203923 - RNA, 32 nt, Homo Sapiens
uugucauauaccucaacacuaguuuggcaaua

SEQ ID NO: 203924 - RNA, 31 nt, Homo Sapiens
ccaggaagcgcucgccugccccacagccugg

SEQ ID NO: 203925 - RNA, 32 nt, Homo Sapiens
cucugucucaaaaacaaacaaacaaacaaaaa

SEQ ID NO: 203926 - RNA, 32 nt, Homo Sapiens
uguucugcccaccagcaccagaggucacucuc

SEQ ID NO: 203927 - RNA, 32 nt, Homo Sapiens
uacauuuuaaacauucacauccaaagaagcag

SEQ ID NO: 203928 - RNA, 32 nt, Homo Sapiens
acuuuuugacuucuguuugucuuacgcuucuc

SEQ ID NO: 203929 - RNA, 32 nt, Homo Sapiens
cacuugguccccuccgccccucggguggcccc

SEQ ID NO: 203930 - RNA, 32 nt, Homo Sapiens
gcgcuccagccugggugaggagacccuguccu

SEQ ID NO: 203931 - RNA, 32 nt, Homo Sapiens
agguaccccccgccgccccccuggaaagcaca

SEQ ID NO: 203932 - RNA, 32 nt, Homo Sapiens
gauuacuaauauauuuuuuccauguuucauug

SEQ ID NO: 203933 - RNA, 32 nt, Homo Sapiens
gagaagagucacaguggaacugucccagcuuu

SEQ ID NO: 203934 - RNA, 32 nt, Homo Sapiens
ggggcgaggagggcacggaaaccugugccgag

SEQ ID NO: 203935 - RNA, 32 nt, Homo Sapiens
uucugauaucgaauuaaugaaguaaaguuguu

SEQ ID NO: 203936 - RNA, 32 nt, Homo Sapiens
uaaugcaaaaggugucccaaggcuccugacca

SEQ ID NO: 203937 - RNA, 32 nt, Homo Sapiens
aaguccuuuucagucugagaccucuggcugaa

SEQ ID NO: 203938 - RNA, 32 nt, Homo Sapiens
gcagcuguacgacuuuggagaaguuguuuaac

SEQ ID NO: 203939 - RNA, 32 nt, Homo Sapiens
ccucuccuacaccagcagcaguggggaugacg

SEQ ID NO: 203940 - RNA, 32 nt, Homo Sapiens
gcccucucccccacuuccccccggcccauggu

SEQ ID NO: 203941 - RNA, 32 nt, Homo Sapiens
aaccucuagauguguaauuacauggaaaauac

SEQ ID NO: 203942 - RNA, 32 nt, Homo Sapiens
cacaugcuuuuguaucuugucauaguuaucca

SEQ ID NO: 203943 - RNA, 32 nt, Homo Sapiens
uuuacuaaaaauacaaaaauuacccaagcaua

SEQ ID NO: 203944 - RNA, 32 nt, Homo Sapiens
gaacacuauguacaaagcaauuugagcaccau

SEQ ID NO: 203945 - RNA, 32 nt, Homo Sapiens
gaggucaggaagucuguugccuuaacgucccc

SEQ ID NO: 203946 - RNA, 32 nt, Homo Sapiens
acgguaccugacuaccauuugcuggaaauuug

SEQ ID NO: 203947 - RNA, 32 nt, Homo Sapiens
cucugggggcagagaccaggccgccguccagu

SEQ ID NO: 203948 - RNA, 32 nt, Homo Sapiens
ggcccagcuguguacagcgagggugggcagcc

SEQ ID NO: 203949 - RNA, 32 nt, Homo Sapiens
ccccggccaucuuagcggcugcuguugguugg

SEQ ID NO: 203950 - RNA, 32 nt, Homo Sapiens
acuucauuuauuucuuauuaaucucauaaugg

SEQ ID NO: 203951 - RNA, 32 nt, Homo Sapiens
cacuuaucuacucuauucuacauauuguccag

SEQ ID NO: 203952 - RNA, 32 nt, Homo Sapiens
gccgcgcgcugugucuccgcugcguccgccga

SEQ ID NO: 203953 - RNA, 32 nt, Homo Sapiens
gacuuuaaaauauccuaguuuagcaguucauc

SEQ ID NO: 203954 - RNA, 32 nt, Homo Sapiens
cauggacguccuccccuccaaauccagaagcu

SEQ ID NO: 203955 - RNA, 32 nt, Homo Sapiens
uccuucuguauauacaucuguugauuuuaucc

SEQ ID NO: 203956 - RNA, 32 nt, Homo Sapiens
agagcagcguguacaagguggaugcugcucca

SEQ ID NO: 203957 - RNA, 32 nt, Homo Sapiens
caguaaacuucaugcauaaacacuucagaggc

SEQ ID NO: 203958 - RNA, 32 nt, Homo Sapiens
auucccacagaaaaauuccaagucaaauuauc

SEQ ID NO: 203959 - RNA, 30 nt, Homo Sapiens
uuuccaguuacaggcgaugcugccggaaac

SEQ ID NO: 203960 - RNA, 32 nt, Homo Sapiens
gacucccucuaaguggaauagccucccuguaa

SEQ ID NO: 203961 - RNA, 32 nt, Homo Sapiens
aggagccggaggaggagccgccgccgccguug

SEQ ID NO: 203962 - RNA, 32 nt, Homo Sapiens
cucauuccccuccgguucuccucggugacuca

SEQ ID NO: 203963 - RNA, 32 nt, Homo Sapiens
ggaagaugaagccggccagagccccucugccc

SEQ ID NO: 203964 - RNA, 31 nt, Homo Sapiens
cgccugcggcacugccuuccgugacgucgcc

SEQ ID NO: 203965 - RNA, 32 nt, Homo Sapiens
aauaugcugugcuaauaauggagugagacaug

SEQ ID NO: 203966 - RNA, 32 nt, Homo Sapiens
cagcagccagcaugcugagaauuuaguaagga

SEQ ID NO: 203967 - RNA, 32 nt, Homo Sapiens
ccgccuuggggagaggacggguggggaccgcc

SEQ ID NO: 203968 - RNA, 32 nt, Homo Sapiens
agugccuccccgccgcgcuggcgucaaguuca

SEQ ID NO: 203969 - RNA, 32 nt, Homo Sapiens
cucacgcccucccacccccacccuacagcccc

SEQ ID NO: 203970 - RNA, 30 nt, Homo Sapiens
ggaugggccauuccgaucugccuuaugaaa

SEQ ID NO: 203971 - RNA, 32 nt, Homo Sapiens
caccauuuucccuccaggaccaccuugguuuc

SEQ ID NO: 203972 - RNA, 32 nt, Homo Sapiens
caucaaaggggcgcacgggucuggaggcgcag

SEQ ID NO: 203973 - RNA, 32 nt, Homo Sapiens
aaccuaaauuuucuuuggguaguaacuaaugu

SEQ ID NO: 203974 - RNA, 32 nt, Homo Sapiens
uuauuacaguugguauggaaauccacaauuug

SEQ ID NO: 203975 - RNA, 32 nt, Homo Sapiens
ucucccugcuacuucuugcauccuucacaucc

SEQ ID NO: 203976 - RNA, 32 nt, Homo Sapiens
gcagagcaguugcaacccucucugcccuugcu

SEQ ID NO: 203977 - RNA, 32 nt, Homo Sapiens
cacaagcccuuaaauaaagcagccagcgcaca

SEQ ID NO: 203978 - RNA, 27 nt, Homo Sapiens
guacgguccuucugugggucugucggu

SEQ ID NO: 203979 - RNA, 32 nt, Homo Sapiens
uagcuauugggaacagggaacuguccuacacu

SEQ ID NO: 203980 - RNA, 32 nt, Homo Sapiens
gcaaccuccgccucuuggguucaaccgauucu

SEQ ID NO: 203981 - RNA, 32 nt, Homo Sapiens
ugcagccugagcuccacccuccccucuucuug

SEQ ID NO: 203982 - RNA, 32 nt, Homo Sapiens
uucuguuaugcuguaauuugaacucuccucac

SEQ ID NO: 203983 - RNA, 29 nt, Homo Sapiens
ggacaugggcaagaagcacaagaagcaca

SEQ ID NO: 203984 - RNA, 32 nt, Homo Sapiens
cuuagagcugucuuuaggcuaauaaccagcag

SEQ ID NO: 203985 - RNA, 32 nt, Homo Sapiens
cuaaugcuggguuugugcgugugugucugcuu

SEQ ID NO: 203986 - RNA, 32 nt, Homo Sapiens
auuuuuacagaaaagagggugggagggugugg

SEQ ID NO: 203987 - RNA, 32 nt, Homo Sapiens
guggaagggggaggagucaggggcucuguguu

SEQ ID NO: 203988 - RNA, 32 nt, Homo Sapiens
caccuuauaaaacaggcuugagggagcccuuc

SEQ ID NO: 203989 - RNA, 32 nt, Homo Sapiens
aagaccauucugcuccugcugcuggagacccu

SEQ ID NO: 203990 - RNA, 32 nt, Homo Sapiens
auauauuaauaaguaacuuaugcaccauacug

SEQ ID NO: 203991 - RNA, 32 nt, Homo Sapiens
caacagccaaacuucugccacucacacacugc

SEQ ID NO: 203992 - RNA, 32 nt, Homo Sapiens
gaggcggagugugcggagaggaggcggggcaa

SEQ ID NO: 203993 - RNA, 32 nt, Homo Sapiens
guggcugggcccagcgcgcagcugcggagcgc

SEQ ID NO: 203994 - RNA, 32 nt, Homo Sapiens
ggaccugggcagaugggccggcugggauggug

SEQ ID NO: 203995 - RNA, 32 nt, Homo Sapiens
uaauuuagccucaggacugagaauguggaagc

SEQ ID NO: 203996 - RNA, 32 nt, Homo Sapiens
ccuucaucucaagcauccaaugcugaaagcgg

SEQ ID NO: 203997 - RNA, 32 nt, Homo Sapiens
acaagagaaaucaguguuuacugcagagaaca

SEQ ID NO: 203998 - RNA, 32 nt, Homo Sapiens
uaaggcucagcaugcugguaacccaccauucu

SEQ ID NO: 203999 - RNA, 32 nt, Homo Sapiens
aaacccgagcgcgggcggcuccccgccucgcc

SEQ ID NO: 204000 - RNA, 30 nt, Homo Sapiens
cccccucccccugccacccaccuuacuguu

SEQ ID NO: 204001 - RNA, 32 nt, Homo Sapiens
ugcagauggaguuuuagaguaguaaugaaauu

SEQ ID NO: 204002 - RNA, 32 nt, Homo Sapiens
ucacagcuaacuucuucagucucaucuauucc

SEQ ID NO: 204003 - RNA, 30 nt, Homo Sapiens
gcaccaugacuucugagaaagguccuucaa

SEQ ID NO: 204004 - RNA, 32 nt, Homo Sapiens
uaagaaucucugggcacccuggauagaaccuu

SEQ ID NO: 204005 - RNA, 32 nt, Homo Sapiens
gagccgagaaaucaacguagagcuuccucuau

SEQ ID NO: 204006 - RNA, 32 nt, Homo Sapiens
auuuaaauuguuucucuuucugcauaauaaac

SEQ ID NO: 204007 - RNA, 30 nt, Homo Sapiens
gcuacucuggacuauuuuuuaggcucuucc

SEQ ID NO: 204008 - RNA, 32 nt, Homo Sapiens
auggugauuggaaauuuuuagcuguaacaaaa

SEQ ID NO: 204009 - RNA, 32 nt, Homo Sapiens
cacagaggcuuuucccauccacaccacaaucc

SEQ ID NO: 204010 - RNA, 32 nt, Homo Sapiens
aggcgguggccccagacccuccccuguccaaa

SEQ ID NO: 204011 - RNA, 32 nt, Homo Sapiens
acgcuggugggccuguuguggaguacgcuuug

SEQ ID NO: 204012 - RNA, 32 nt, Homo Sapiens
ugccuccaccuccuucaauaccuacuuuucuu

SEQ ID NO: 204013 - RNA, 32 nt, Homo Sapiens
agccugggaaaggaguguguucugccugcccg

SEQ ID NO: 204014 - RNA, 32 nt, Homo Sapiens
agcccuuuucgacugugagcugcggcagcuga

SEQ ID NO: 204015 - RNA, 29 nt, Homo Sapiens
gugcuuccgguccccgugcuggugggacu

SEQ ID NO: 204016 - RNA, 32 nt, Homo Sapiens
auuauuguaccucuaaacuaagauuuucccau

SEQ ID NO: 204017 - RNA, 32 nt, Homo Sapiens
uccgagagcuccuggggggguucugcccuuca

SEQ ID NO: 204018 - RNA, 32 nt, Homo Sapiens
uaucaucaaacaagaaauucauauucaccuuu

SEQ ID NO: 204019 - RNA, 32 nt, Homo Sapiens
auucauguuguaaauuuuuggagcaagcaguc

SEQ ID NO: 204020 - RNA, 32 nt, Homo Sapiens
aacuuugguuccugugauacauuucugaaugg

SEQ ID NO: 204021 - RNA, 32 nt, Homo Sapiens
ccagggccagcuuggcgauagaugccucaagg

SEQ ID NO: 204022 - RNA, 32 nt, Homo Sapiens
gaugucuagggucagagaggcagcgacugguc

SEQ ID NO: 204023 - RNA, 32 nt, Homo Sapiens
ucccggcugcgguggcugucgccccccacccu

SEQ ID NO: 204024 - RNA, 32 nt, Homo Sapiens
uugcagguaaaagaagcagcuacaucaugcuu

SEQ ID NO: 204025 - RNA, 32 nt, Homo Sapiens
gcacuuuggaaugggagcguggaaccaccugu

SEQ ID NO: 204026 - RNA, 32 nt, Homo Sapiens
cugaucaaaaauacugugaaauaaagaauguu

SEQ ID NO: 204027 - RNA, 32 nt, Homo Sapiens
uuucugccaggguauguuacaacaucacacuu

SEQ ID NO: 204028 - RNA, 32 nt, Homo Sapiens
ccagacggggaugcucagggcuggggcugcag

SEQ ID NO: 204029 - RNA, 32 nt, Homo Sapiens
ucacggacccaccgggagaaacgaauaacucc

SEQ ID NO: 204030 - RNA, 32 nt, Homo Sapiens
aacucagaggccggugccggugcagguccuag

SEQ ID NO: 204031 - RNA, 32 nt, Homo Sapiens
ccucccauugacauccucccccuacacucccu

SEQ ID NO: 204032 - RNA, 32 nt, Homo Sapiens
cccagcuccucccugcccccugcuacagccac

SEQ ID NO: 204033 - RNA, 32 nt, Homo Sapiens
caaauguaaaauguauaaagucacauguacug

SEQ ID NO: 204034 - RNA, 32 nt, Homo Sapiens
acagcaaaacugagugugugucucuguuucau

SEQ ID NO: 204035 - RNA, 32 nt, Homo Sapiens
uccaaaguuauuucauaccauuauuauguaaa

SEQ ID NO: 204036 - RNA, 32 nt, Homo Sapiens
uaagguuggggauuaguccagguacagaagca

SEQ ID NO: 204037 - RNA, 32 nt, Homo Sapiens
acaaccacggacuuagggaaacaucaacauau

SEQ ID NO: 204038 - RNA, 32 nt, Homo Sapiens
ccccagaucacagauacggcaugaucaaaaug

SEQ ID NO: 204039 - RNA, 32 nt, Homo Sapiens
caagggaggagaaauggauagaaucaugguua

SEQ ID NO: 204040 - RNA, 32 nt, Homo Sapiens
uucuaagugggaagaggaagggagaggcaagc

SEQ ID NO: 204041 - RNA, 32 nt, Homo Sapiens
cuaaucagaaauuuuuaucaguuuccagucuc

SEQ ID NO: 204042 - RNA, 32 nt, Homo Sapiens
gggccuggaaaacgugcucugacuuugucacc

SEQ ID NO: 204043 - RNA, 32 nt, Homo Sapiens
gccuccacccccaccucccccuggagcccucg

SEQ ID NO: 204044 - RNA, 32 nt, Homo Sapiens
ugcagcgccuggagcagcugguggaggccaag

SEQ ID NO: 204045 - RNA, 32 nt, Homo Sapiens
aggcagcauccacgcccucccgcggaagaucg

SEQ ID NO: 204046 - RNA, 32 nt, Homo Sapiens
cccacuguggcaucagaaaauucuugggggcu

SEQ ID NO: 204047 - RNA, 32 nt, Homo Sapiens
gucuacaacaagaaguguauauuuucaaacaa

SEQ ID NO: 204048 - RNA, 32 nt, Homo Sapiens
gacugggcaacgcaccugugccaaacccugcc

SEQ ID NO: 204049 - RNA, 32 nt, Homo Sapiens
gaauaagucugcuucaugccaaggcugggcuu

SEQ ID NO: 204050 - RNA, 31 nt, Homo Sapiens
acagcucggccaggccugcccggagggugcu

SEQ ID NO: 204051 - RNA, 32 nt, Homo Sapiens
gagguccauggguugacuuaugcucacaaaua

SEQ ID NO: 204052 - RNA, 32 nt, Homo Sapiens
uaauaauaaaaauuauauagacguauaaaauu

SEQ ID NO: 204053 - RNA, 32 nt, Homo Sapiens
uuuuuaaaaagaaguuuucauggcaucagugu

SEQ ID NO: 204054 - RNA, 32 nt, Homo Sapiens
uauaacacaucauauuguucagauacucauau

SEQ ID NO: 204055 - RNA, 32 nt, Homo Sapiens
aucuucaaaaaauaaaauaaugugaagcaaaa

SEQ ID NO: 204056 - RNA, 32 nt, Homo Sapiens
ggguucgcaugugugguaccuguccccucacu

SEQ ID NO: 204057 - RNA, 32 nt, Homo Sapiens
caggaaagcuuuucuuuuucuuuuuuuuuuuu

SEQ ID NO: 204058 - RNA, 32 nt, Homo Sapiens
cgggcgaggccggugaggacgcggcgggcgag

SEQ ID NO: 204059 - RNA, 32 nt, Homo Sapiens
uuuguuuuuuaaaaacacuguaacucaaugag

SEQ ID NO: 204060 - RNA, 32 nt, Homo Sapiens
uggcuuauaugauauacccuauugcuccuagg

SEQ ID NO: 204061 - RNA, 32 nt, Homo Sapiens
cgagccacuccagcgagaccccaccuugcaug

SEQ ID NO: 204062 - RNA, 32 nt, Homo Sapiens
ucugccuucaccaguagcuggugccaggacag

SEQ ID NO: 204063 - RNA, 32 nt, Homo Sapiens
aaccacaucccaaguguccccuggagagcaag

SEQ ID NO: 204064 - RNA, 32 nt, Homo Sapiens
ccggagagcccauggagaaguaccagguuuug

SEQ ID NO: 204065 - RNA, 32 nt, Homo Sapiens
uuuaaaauguggugucccauuccaagggagac

SEQ ID NO: 204066 - RNA, 32 nt, Homo Sapiens
ggaauugcugggguuuagaugcacuuuuucuu

SEQ ID NO: 204067 - RNA, 32 nt, Homo Sapiens
acucuggaggaagaggagagaacggggcucug

SEQ ID NO: 204068 - RNA, 32 nt, Homo Sapiens
accugcuccguuuauguaguuauuucaagaga

SEQ ID NO: 204069 - RNA, 32 nt, Homo Sapiens
ccuguggggaugggcuccugcagccuggggag

SEQ ID NO: 204070 - RNA, 32 nt, Homo Sapiens
cgcgggggacaaagggcgggcggauccgcggg

SEQ ID NO: 204071 - RNA, 32 nt, Homo Sapiens
gugacccuuuggggauucugucccugacccug

SEQ ID NO: 204072 - RNA, 32 nt, Homo Sapiens
ugggcugccggcacuucgcggcagucagagca

SEQ ID NO: 204073 - RNA, 32 nt, Homo Sapiens
aaugaccacgggccucaguuuccccauuugua

SEQ ID NO: 204074 - RNA, 32 nt, Homo Sapiens
ucuacuaaaaauacacaaaauuagcugggcgu

SEQ ID NO: 204075 - RNA, 32 nt, Homo Sapiens
uuuugauaauggcucuuaaaucuuuaaacaca

SEQ ID NO: 204076 - RNA, 32 nt, Homo Sapiens
acuacacgauuucuucccacuccacaaucugu

SEQ ID NO: 204077 - RNA, 32 nt, Homo Sapiens
cuuggcauauuguagggugcucaauggugguu

SEQ ID NO: 204078 - RNA, 32 nt, Homo Sapiens
caacagagaacaaccugcuggaaagaccuggg

SEQ ID NO: 204079 - RNA, 32 nt, Homo Sapiens
ccacaggcgccaagagcaaguaccucaucuuc

SEQ ID NO: 204080 - RNA, 32 nt, Homo Sapiens
ucacaguauguacacacacacacacacacaca

SEQ ID NO: 204081 - RNA, 32 nt, Homo Sapiens
agaauagaaacuugaagugcuaaauggaauaa

SEQ ID NO: 204082 - RNA, 32 nt, Homo Sapiens
uauuuuuaaaauuuauguaauaucaugagucg

SEQ ID NO: 204083 - RNA, 28 nt, Homo Sapiens
cucagggagcgcccgccgagugcugcug

SEQ ID NO: 204084 - RNA, 32 nt, Homo Sapiens
ccuuguuuuuuaagagaaaugaagcuaagaca

SEQ ID NO: 204085 - RNA, 32 nt, Homo Sapiens
ggugaauuaagcaugaauaacacacacucccu

SEQ ID NO: 204086 - RNA, 32 nt, Homo Sapiens
gcaugaguguggccagcgugcagccgagaaaa

SEQ ID NO: 204087 - RNA, 32 nt, Homo Sapiens
uuacuuuuuuuuucuuuuuuuuuuuuuuuuuu

SEQ ID NO: 204088 - RNA, 32 nt, Homo Sapiens
augucuauguucuuguugcuaugagucaagga

SEQ ID NO: 204089 - RNA, 29 nt, Homo Sapiens
aauaaaaacaacagcagggauagcagauu

SEQ ID NO: 204090 - RNA, 32 nt, Homo Sapiens
gauuccugggaccacccuuugcugggaggaag

SEQ ID NO: 204091 - RNA, 32 nt, Homo Sapiens
gccaccggcgcgcacaggucuuuccgugccgg

SEQ ID NO: 204092 - RNA, 32 nt, Homo Sapiens
ugucugugugccccgcuggcgagcuguaguug

SEQ ID NO: 204093 - RNA, 32 nt, Homo Sapiens
augauaucugugaagguguuuaaaagacaagc

SEQ ID NO: 204094 - RNA, 32 nt, Homo Sapiens
cagacuccaucccccacccccaggagccuggc

SEQ ID NO: 204095 - RNA, 30 nt, Homo Sapiens
ucuucugucuguggcccugcuggaguccuu

SEQ ID NO: 204096 - RNA, 32 nt, Homo Sapiens
cgaugaggggauggaccgcgccaucccagggc

SEQ ID NO: 204097 - RNA, 32 nt, Homo Sapiens
cacagacagcagccgccucgccaugaagcugc

SEQ ID NO: 204098 - RNA, 32 nt, Homo Sapiens
ggcugggcacgguggcucaugccuguuauccc

SEQ ID NO: 204099 - RNA, 30 nt, Homo Sapiens
auauaggauaaaauaaugcuuugagaagaa

SEQ ID NO: 204100 - RNA, 32 nt, Homo Sapiens
auuuggaugcuguucugugaucuaaaacaacu

SEQ ID NO: 204101 - RNA, 32 nt, Homo Sapiens
aaucaaucuucuuuuucuuaauaguacagcag

SEQ ID NO: 204102 - RNA, 32 nt, Homo Sapiens
aagcgauuuuccugcuucaucuucccagguag

SEQ ID NO: 204103 - RNA, 32 nt, Homo Sapiens
gaucaagaugcggugaacauguugugcaugcc

SEQ ID NO: 204104 - RNA, 32 nt, Homo Sapiens
auuccuggugugcgcccaaacacauggauaua

SEQ ID NO: 204105 - RNA, 32 nt, Homo Sapiens
ucucugcagcacuccggguucuccuccagagc

SEQ ID NO: 204106 - RNA, 32 nt, Homo Sapiens
aguugucguuuuuagcuuuguguuuacuuuuu

SEQ ID NO: 204107 - RNA, 32 nt, Homo Sapiens
ugccccugccagcucuggcacugcccccuccc

SEQ ID NO: 204108 - RNA, 32 nt, Homo Sapiens
ccuucagugugauuuuugucuucugcuccuuc

SEQ ID NO: 204109 - RNA, 32 nt, Homo Sapiens
caccugaguauuuugcauuauuaacuacuucu

SEQ ID NO: 204110 - RNA, 32 nt, Homo Sapiens
ucugaauaaaggugucccacucacuguuccag

SEQ ID NO: 204111 - RNA, 32 nt, Homo Sapiens
aaauaaugaaaauaaacacauauagaaggcuu

SEQ ID NO: 204112 - RNA, 31 nt, Homo Sapiens
aaggcucaaguuugguugccaaauggaaggg

SEQ ID NO: 204113 - RNA, 32 nt, Homo Sapiens
ccugcucccucuggggggcacccugggcaggg

SEQ ID NO: 204114 - RNA, 32 nt, Homo Sapiens
gaggcauuccccaggcaccugcuugaggagug

SEQ ID NO: 204115 - RNA, 32 nt, Homo Sapiens
gggucccgauugcugcagccgcuugucagugu

SEQ ID NO: 204116 - RNA, 32 nt, Homo Sapiens
caucuuagccggugauacacuaccucuuacgu

SEQ ID NO: 204117 - RNA, 32 nt, Homo Sapiens
cuguacgaaguacauguugacaugugaguaua

SEQ ID NO: 204118 - RNA, 32 nt, Homo Sapiens
uagaguccucaauuguguuuacauuaauagug

SEQ ID NO: 204119 - RNA, 32 nt, Homo Sapiens
ugcggcgucccgcggccuccccgagucgggcg

SEQ ID NO: 204120 - RNA, 29 nt, Homo Sapiens
auguugauggcuuuccuguaaugaaugua

SEQ ID NO: 204121 - RNA, 32 nt, Homo Sapiens
caagugaauggcaagaggguccucggccgaaa

SEQ ID NO: 204122 - RNA, 32 nt, Homo Sapiens
ccugguucuuccuguuuggaccaguucuugug

SEQ ID NO: 204123 - RNA, 32 nt, Homo Sapiens
cgcguggaauggggagauggacugcacggcgg

SEQ ID NO: 204124 - RNA, 32 nt, Homo Sapiens
gggucggcgggccgcaggagggggucaugggu

SEQ ID NO: 204125 - RNA, 32 nt, Homo Sapiens
cacuugggccugguuuuagauguuuuuaauuu

SEQ ID NO: 204126 - RNA, 32 nt, Homo Sapiens
ggagcucuguccggaaucacauagauaccauc

SEQ ID NO: 204127 - RNA, 32 nt, Homo Sapiens
ggaacuggaagacggcgcuucccugcuguagc

SEQ ID NO: 204128 - RNA, 32 nt, Homo Sapiens
ccgcacugcuugcggcagcgguguccgcccca

SEQ ID NO: 204129 - RNA, 32 nt, Homo Sapiens
ccagcacuugugcgcauagaagcuaaggggaa

SEQ ID NO: 204130 - RNA, 32 nt, Homo Sapiens
aguuuuuucauuuuggagcuaguuacugggag

SEQ ID NO: 204131 - RNA, 32 nt, Homo Sapiens
gccaggagcuggaagccacguggggccagaca

SEQ ID NO: 204132 - RNA, 32 nt, Homo Sapiens
ugcaggucggugagaggacaagagggacuccc

SEQ ID NO: 204133 - RNA, 32 nt, Homo Sapiens
cugugugacucugggugagucccuuaaccccu

SEQ ID NO: 204134 - RNA, 32 nt, Homo Sapiens
agaggcuccccaggaggcucaaggcugggggc

SEQ ID NO: 204135 - RNA, 32 nt, Homo Sapiens
ccucaguuugucugcuggucucuuggggggcc

SEQ ID NO: 204136 - RNA, 32 nt, Homo Sapiens
uaaggaaagaacucaccuuucuggggcucucu

SEQ ID NO: 204137 - RNA, 32 nt, Homo Sapiens
accccccggggcagcaggagccaggcagguga

SEQ ID NO: 204138 - RNA, 32 nt, Homo Sapiens
auggucacaguccagccuccuccgugcagccc

SEQ ID NO: 204139 - RNA, 32 nt, Homo Sapiens
gauggggacuuccugggacaagcaaggaaagu

SEQ ID NO: 204140 - RNA, 32 nt, Homo Sapiens
uccucgggcucaucaccgguucugugccugug

SEQ ID NO: 204141 - RNA, 32 nt, Homo Sapiens
cccggaguccccgccgccgucaugcagucccc

SEQ ID NO: 204142 - RNA, 32 nt, Homo Sapiens
gagauaaauggcaaauugcuuuuuuaaaaguu

SEQ ID NO: 204143 - RNA, 32 nt, Homo Sapiens
cgaauuaaaacacacacacacacacacacaca

SEQ ID NO: 204144 - RNA, 32 nt, Homo Sapiens
cugaguggccccagagcccuggcuggacucgu

SEQ ID NO: 204145 - RNA, 32 nt, Homo Sapiens
gcuuugaaaaucaacauuuugguaccaguguu

SEQ ID NO: 204146 - RNA, 32 nt, Homo Sapiens
agaggaugauguuauuuuuuuaugcccucugu

SEQ ID NO: 204147 - RNA, 32 nt, Homo Sapiens
cacuugcuguagacuccugggugcuggaggag

SEQ ID NO: 204148 - RNA, 32 nt, Homo Sapiens
aaauugcuguguaucugauagcucuuuggcag

SEQ ID NO: 204149 - RNA, 32 nt, Homo Sapiens
acggcucuucucccugccccagcucugcugcc

SEQ ID NO: 204150 - RNA, 32 nt, Homo Sapiens
gcagagggaagggaggauggcuggggccaggg

SEQ ID NO: 204151 - RNA, 32 nt, Homo Sapiens
caguaggagacaggacgcuuguccugcggaau

SEQ ID NO: 204152 - RNA, 32 nt, Homo Sapiens
caacaggacaagggcugcccgcguguccagcc

SEQ ID NO: 204153 - RNA, 32 nt, Homo Sapiens
auaauuuuuaaaucuguaaaugucuauaugag

SEQ ID NO: 204154 - RNA, 32 nt, Homo Sapiens
aauauagugcgguggcuucuggcugagauguu

SEQ ID NO: 204155 - RNA, 32 nt, Homo Sapiens
ggagaaaggaagggcugcaugcgggcuuccuc

SEQ ID NO: 204156 - RNA, 32 nt, Homo Sapiens
gaaaaaucaaaccuucugaaaauuaugauauu

SEQ ID NO: 204157 - RNA, 32 nt, Homo Sapiens
gcgcccaccuggcacaccccccucaccccagc

SEQ ID NO: 204158 - RNA, 32 nt, Homo Sapiens
ggccagauccgcgucccgccucagcggccgga

SEQ ID NO: 204159 - RNA, 32 nt, Homo Sapiens
uaaucuuaacuguguauacuaauucguuuugu

SEQ ID NO: 204160 - RNA, 32 nt, Homo Sapiens
ccuuagguaguaggaagaauuacaauuucuuu

SEQ ID NO: 204161 - RNA, 32 nt, Homo Sapiens
cuccaagcccagcccauggagauugaccugga

SEQ ID NO: 204162 - RNA, 32 nt, Homo Sapiens
uccauuuuugccaugugucaucgagucgcucc

SEQ ID NO: 204163 - RNA, 32 nt, Homo Sapiens
cuccuucccgacccccucccccuagcccagcc

SEQ ID NO: 204164 - RNA, 32 nt, Homo Sapiens
acaggccaggacuucaagugaggaggacgccu

SEQ ID NO: 204165 - RNA, 32 nt, Homo Sapiens
ucaacgauauaaauucaguagauggaaauuau

SEQ ID NO: 204166 - RNA, 32 nt, Homo Sapiens
guccaucccccuccaagacacagaggugccuc

SEQ ID NO: 204167 - RNA, 32 nt, Homo Sapiens
ucgcuuuaccuucuuggagcaguuggagagua

SEQ ID NO: 204168 - RNA, 32 nt, Homo Sapiens
aggccugcauguccggcugaaggcugaguguc

SEQ ID NO: 204169 - RNA, 32 nt, Homo Sapiens
gucuuauaaaaauuauucauuauggugaaccc

SEQ ID NO: 204170 - RNA, 32 nt, Homo Sapiens
guggaauaugagaaguuuuuauuuguggugca

SEQ ID NO: 204171 - RNA, 32 nt, Homo Sapiens
cugcggcgucccgcggccuccccgagucgggc

SEQ ID NO: 204172 - RNA, 32 nt, Homo Sapiens
gcuccagaagguggagauggagaaccagaucu

SEQ ID NO: 204173 - RNA, 32 nt, Homo Sapiens
uuuuauuaaaauuuauaagcaagaaauuauac

SEQ ID NO: 204174 - RNA, 32 nt, Homo Sapiens
cucgggcagcacgugagguagaacgaguguga

SEQ ID NO: 204175 - RNA, 32 nt, Homo Sapiens
caguuguacagccugauguaggacuuggaaaa

SEQ ID NO: 204176 - RNA, 32 nt, Homo Sapiens
cugcuguucagacuugauaagaucucagaguc

SEQ ID NO: 204177 - RNA, 32 nt, Homo Sapiens
uggcaccccuuccucgagggccccauccccca

SEQ ID NO: 204178 - RNA, 32 nt, Homo Sapiens
aaaugaaaacaaaauuagagcaaagcugaccu

SEQ ID NO: 204179 - RNA, 32 nt, Homo Sapiens
acuugaauaguccauugaccgaaacucuuuau

SEQ ID NO: 204180 - RNA, 28 nt, Homo Sapiens
gcucugggagcccugccgagguguggcu

SEQ ID NO: 204181 - RNA, 32 nt, Homo Sapiens
ugguuguggaaaguagugggauacuuggaauc

SEQ ID NO: 204182 - RNA, 32 nt, Homo Sapiens
aauuauuuaaacaaaaacuaggcgguugaaug

SEQ ID NO: 204183 - RNA, 32 nt, Homo Sapiens
aaggaaauuuaaauucuggagaauucuacagg

SEQ ID NO: 204184 - RNA, 32 nt, Homo Sapiens
aauagacuuacacacuguacauuuucacggcc

SEQ ID NO: 204185 - RNA, 32 nt, Homo Sapiens
gucuucucaguaguuccacauugucuuaauua

SEQ ID NO: 204186 - RNA, 32 nt, Homo Sapiens
ggguuagcgcuugauuggauguuucaagcaag

SEQ ID NO: 204187 - RNA, 32 nt, Homo Sapiens
acuuggcauaugugcucuggcuuuccauuggc

SEQ ID NO: 204188 - RNA, 32 nt, Homo Sapiens
aaauucccuacuaucaucacaugccuccccaa

SEQ ID NO: 204189 - RNA, 32 nt, Homo Sapiens
guuaacuccaugaguuaaaugcuacccauuuu

SEQ ID NO: 204190 - RNA, 32 nt, Homo Sapiens
ggucaucuccggcuaccgaagccaccuugcuu

SEQ ID NO: 204191 - RNA, 32 nt, Homo Sapiens
aggaaccgcccgguccuuuaggguccgggccc

SEQ ID NO: 204192 - RNA, 32 nt, Homo Sapiens
gguuucacuguacauucaugcugugaugcgau

SEQ ID NO: 204193 - RNA, 32 nt, Homo Sapiens
uaacgauaaaagacagugaaagaaaauaacaa

SEQ ID NO: 204194 - RNA, 32 nt, Homo Sapiens
ccacgaacccaccagaaggaagaaacugcgga

SEQ ID NO: 204195 - RNA, 32 nt, Homo Sapiens
gagaguucccaauuuggauagaacggccacca

SEQ ID NO: 204196 - RNA, 32 nt, Homo Sapiens
accucugcagugccugcuucuuaccuggcccu

SEQ ID NO: 204197 - RNA, 32 nt, Homo Sapiens
cucccguccuccccgaagccccgccucugacc

SEQ ID NO: 204198 - RNA, 32 nt, Homo Sapiens
uuccuacuuugaugauaagcacucagauauau

SEQ ID NO: 204199 - RNA, 32 nt, Homo Sapiens
uugccaccaccuggggagauccugcuugggaa

SEQ ID NO: 204200 - RNA, 32 nt, Homo Sapiens
accagggucaauccggggugccccagguggau

SEQ ID NO: 204201 - RNA, 32 nt, Homo Sapiens
gaauuuuuaaacaaguauuuguuaauuuagaa

SEQ ID NO: 204202 - RNA, 32 nt, Homo Sapiens
cuuaauuuucuuuuauuucaguuucucauaga

SEQ ID NO: 204203 - RNA, 32 nt, Homo Sapiens
gcgugguuuuuaaagggggaugaugaauguga

SEQ ID NO: 204204 - RNA, 32 nt, Homo Sapiens
ccagcucaccucaggcccugccaggggagggu

SEQ ID NO: 204205 - RNA, 32 nt, Homo Sapiens
cggcggcggcgcgccagcggcaggaccauggu

SEQ ID NO: 204206 - RNA, 30 nt, Homo Sapiens
aagccuugggagggugaugagugcuggucc

SEQ ID NO: 204207 - RNA, 32 nt, Homo Sapiens
guucgccaucugagcuaacaaacacgugugua

SEQ ID NO: 204208 - RNA, 32 nt, Homo Sapiens
augugauagagaugacucguccuccuuuaauu

SEQ ID NO: 204209 - RNA, 32 nt, Homo Sapiens
cccacaugcccccaucuccaagcgugggguug

SEQ ID NO: 204210 - RNA, 32 nt, Homo Sapiens
aaauuggcagauauuggaaaaauauuuuguga

SEQ ID NO: 204211 - RNA, 32 nt, Homo Sapiens
caggccaggcccggcccggcgaguggucaagg

SEQ ID NO: 204212 - RNA, 32 nt, Homo Sapiens
ccaggaugguuuggaaacuucuccugaaugca

SEQ ID NO: 204213 - RNA, 32 nt, Homo Sapiens
ugauggggaaaacaagcugugucuucuuaacu

SEQ ID NO: 204214 - RNA, 32 nt, Homo Sapiens
uauggcgggcggcgggugggaccgcgaguuac

SEQ ID NO: 204215 - RNA, 32 nt, Homo Sapiens
gugguguggcugccacggccuccuggcuccag

SEQ ID NO: 204216 - RNA, 32 nt, Homo Sapiens
aauggaggcagcgggggcggcggcgugaagaa

SEQ ID NO: 204217 - RNA, 32 nt, Homo Sapiens
gacuaggugcuugcuuuuuuugucaguaaauu

SEQ ID NO: 204218 - RNA, 32 nt, Homo Sapiens
uaugcaaauuuaucacaaacuauuuaaagcaa

SEQ ID NO: 204219 - RNA, 32 nt, Homo Sapiens
uggcggccgccccacccuccccacccggggaa

SEQ ID NO: 204220 - RNA, 32 nt, Homo Sapiens
ccuugagacagaggcaggacccucguguuccc

SEQ ID NO: 204221 - RNA, 32 nt, Homo Sapiens
caggccccuguacagagaagugucucacgucu

SEQ ID NO: 204222 - RNA, 32 nt, Homo Sapiens
cugcccuuccuggcugccccuuuggguuccag

SEQ ID NO: 204223 - RNA, 32 nt, Homo Sapiens
ggcaguggucccagccccagcucuaccccacg

SEQ ID NO: 204224 - RNA, 32 nt, Homo Sapiens
ccucucuccugguuccuccccaucugccuguu

SEQ ID NO: 204225 - RNA, 32 nt, Homo Sapiens
guuaucaaggcacauucuccaccacugucaca

SEQ ID NO: 204226 - RNA, 32 nt, Homo Sapiens
augggcucaucuuuaaagcuuuuacuaaaaga

SEQ ID NO: 204227 - RNA, 32 nt, Homo Sapiens
ccuggucucccggcccuagcgcccgccaaacc

SEQ ID NO: 204228 - RNA, 32 nt, Homo Sapiens
uuuuuuuuuaaauaaacuuuauggcuguuugu

SEQ ID NO: 204229 - RNA, 32 nt, Homo Sapiens
ggggcgcgcggguuggaggcgcuucagcaccg

SEQ ID NO: 204230 - RNA, 32 nt, Homo Sapiens
aaaccaaaauaaacuguugccucugacacaca

SEQ ID NO: 204231 - RNA, 32 nt, Homo Sapiens
auugggccugguuuucuugucccuucauaccc

SEQ ID NO: 204232 - RNA, 32 nt, Homo Sapiens
gaugaggucuugcacugucacccaggcugcug

SEQ ID NO: 204233 - RNA, 32 nt, Homo Sapiens
uggcuguguggcggcuccgcgguucgcagguc

SEQ ID NO: 204234 - RNA, 30 nt, Homo Sapiens
ggcggaggcaggcggguugcuugagcuccg

SEQ ID NO: 204235 - RNA, 32 nt, Homo Sapiens
guuugcguccuucccguccacccagugcagcu

SEQ ID NO: 204236 - RNA, 32 nt, Homo Sapiens
acaaaacaaaacaaaauuaacugcuuaaaugu

SEQ ID NO: 204237 - RNA, 29 nt, Homo Sapiens
caguuuccaugucuguaccacaagagggu

SEQ ID NO: 204238 - RNA, 32 nt, Homo Sapiens
gcugagaucgcgguauuaaaucugugaaagaa

SEQ ID NO: 204239 - RNA, 32 nt, Homo Sapiens
ggcugggugcgguggcccacaucuguaauccc

SEQ ID NO: 204240 - RNA, 30 nt, Homo Sapiens
uggcccccuuagaugggggaagucaacagu

SEQ ID NO: 204241 - RNA, 32 nt, Homo Sapiens
auauuuuaagauucagcauuugaaagauuucc

SEQ ID NO: 204242 - RNA, 32 nt, Homo Sapiens
uuugggaagccagacuccagggacugaaaagg

SEQ ID NO: 204243 - RNA, 32 nt, Homo Sapiens
agagacgcacgguccccuccccgccccuaggc

SEQ ID NO: 204244 - RNA, 27 nt, Homo Sapiens
gcauggaggcggauuugagccagcuga

SEQ ID NO: 204245 - RNA, 32 nt, Homo Sapiens
ucauuuccugguuuuuuuuaccaccuuauuua

SEQ ID NO: 204246 - RNA, 32 nt, Homo Sapiens
uccacgugguaagauccuccaagcugcuuuag

SEQ ID NO: 204247 - RNA, 32 nt, Homo Sapiens
aacuuaauguucuuaugcaaaauggaacgcua

SEQ ID NO: 204248 - RNA, 32 nt, Homo Sapiens
ccgccuccauccaaaaucacgcucgcgugcuu

SEQ ID NO: 204249 - RNA, 32 nt, Homo Sapiens
acuggacugugggcccuccugcuggagccagg

SEQ ID NO: 204250 - RNA, 32 nt, Homo Sapiens
agaaaugauuucaaaaugauauucaaucuuaa

SEQ ID NO: 204251 - RNA, 32 nt, Homo Sapiens
uaggcuuaaugaaagaggucuuucuugcuuug

SEQ ID NO: 204252 - RNA, 32 nt, Homo Sapiens
accuccccauucacaacuacuuucucgcuccc

SEQ ID NO: 204253 - RNA, 32 nt, Homo Sapiens
aaguuggcuuuuuuuuuuuuuaacauuuaguc

SEQ ID NO: 204254 - RNA, 32 nt, Homo Sapiens
ucggagcucucaugggccccaggaaguccagg

SEQ ID NO: 204255 - RNA, 32 nt, Homo Sapiens
auguguauauauauguauauggauaacugcau

SEQ ID NO: 204256 - RNA, 32 nt, Homo Sapiens
gugaugggccugccuccugggcugguuccugg

SEQ ID NO: 204257 - RNA, 32 nt, Homo Sapiens
aaagauuuucuuuacauaaagugaaucaaauu

SEQ ID NO: 204258 - RNA, 32 nt, Homo Sapiens
gcaggaggcugcaucccuggccugcuggugcc

SEQ ID NO: 204259 - RNA, 32 nt, Homo Sapiens
ucccuuuggcuuuguuaugucccucugggaau

SEQ ID NO: 204260 - RNA, 32 nt, Homo Sapiens
uguuuaagggcuuguuucuggcuauguuaaag

SEQ ID NO: 204261 - RNA, 32 nt, Homo Sapiens
gauagggucuucgggccccgggcagacccucu

SEQ ID NO: 204262 - RNA, 32 nt, Homo Sapiens
ugucuacaaaaauuagccaggcaugauggagg

SEQ ID NO: 204263 - RNA, 32 nt, Homo Sapiens
gugaagaggaagaaauauagcuuauuuuaaac

SEQ ID NO: 204264 - RNA, 32 nt, Homo Sapiens
gguuaaaauaaaauuucuuugcuaucucacuc

SEQ ID NO: 204265 - RNA, 32 nt, Homo Sapiens
aggguuugauaaaccagaacauucucgccuga

SEQ ID NO: 204266 - RNA, 32 nt, Homo Sapiens
agcuugggaagaaacuugcagaugauaugugc

SEQ ID NO: 204267 - RNA, 32 nt, Homo Sapiens
gggagccgcgcgccuucuccggcguccggguc

SEQ ID NO: 204268 - RNA, 29 nt, Homo Sapiens
ggcaacauagugagacucuguacaaaaaa

SEQ ID NO: 204269 - RNA, 32 nt, Homo Sapiens
gggcaggaauugggaggccuagggugggcaug

SEQ ID NO: 204270 - RNA, 32 nt, Homo Sapiens
ugcacuggugaagaggacauguuagagcaaca

SEQ ID NO: 204271 - RNA, 32 nt, Homo Sapiens
gacgcugggccugcccggugcgcacgggggcg

SEQ ID NO: 204272 - RNA, 32 nt, Homo Sapiens
uuggcaaagggagaacuggggugggcgggggg

SEQ ID NO: 204273 - RNA, 32 nt, Homo Sapiens
uagguuccagcauguaaagagcugggagggcg

SEQ ID NO: 204274 - RNA, 32 nt, Homo Sapiens
cuggagaucguaaugaacauuuagaugcuggu

SEQ ID NO: 204275 - RNA, 32 nt, Homo Sapiens
gcuggcaaaaagaugucaaggaugucacuggg

SEQ ID NO: 204276 - RNA, 32 nt, Homo Sapiens
uaaaaaaugcaaagagcugagagaauccuggg

SEQ ID NO: 204277 - RNA, 32 nt, Homo Sapiens
guugggaaggauuuuccuggcaacuguaccuu

SEQ ID NO: 204278 - RNA, 32 nt, Homo Sapiens
caaaauaaaaauucuaauuaaaauaguuaacu

SEQ ID NO: 204279 - RNA, 32 nt, Homo Sapiens
aucuuuuuucuuugauucauuuuugaauaaau

SEQ ID NO: 204280 - RNA, 32 nt, Homo Sapiens
gcaccgcggcgguaguuggaggcgggagaggg

SEQ ID NO: 204281 - RNA, 32 nt, Homo Sapiens
acaguauacauccuguauugccucggcaagac

SEQ ID NO: 204282 - RNA, 32 nt, Homo Sapiens
gccucaaccuccccgccccauuuucagcaggg

SEQ ID NO: 204283 - RNA, 32 nt, Homo Sapiens
uccuccaccugccuauugcagagcagcagaaa

SEQ ID NO: 204284 - RNA, 32 nt, Homo Sapiens
cacauaaccaucagccagaagaugccgcaugc

SEQ ID NO: 204285 - RNA, 32 nt, Homo Sapiens
acucgcuccuucccccacccgcccccaccgcu

SEQ ID NO: 204286 - RNA, 32 nt, Homo Sapiens
guuccaucuucagacuugaggcuuauucuuag

SEQ ID NO: 204287 - RNA, 32 nt, Homo Sapiens
acauguuuucuccagcucuauuccaccaugac

SEQ ID NO: 204288 - RNA, 32 nt, Homo Sapiens
cugaguugauuucugugucuauuucaacccau

SEQ ID NO: 204289 - RNA, 29 nt, Homo Sapiens
ucauacauauguauuaggacaccaacaca

SEQ ID NO: 204290 - RNA, 32 nt, Homo Sapiens
gaggagcgguccuuccacaccagccgcaaccc

SEQ ID NO: 204291 - RNA, 32 nt, Homo Sapiens
uucacuucuuugauccuuggugcauggucacc

SEQ ID NO: 204292 - RNA, 32 nt, Homo Sapiens
aaggggugggacccgggcgggcuccgggaggg

SEQ ID NO: 204293 - RNA, 32 nt, Homo Sapiens
ucaccucaggaccaugugauaauugcguuaac

SEQ ID NO: 204294 - RNA, 32 nt, Homo Sapiens
ugcagauuaaaaacuuuauagggacuugcauu

SEQ ID NO: 204295 - RNA, 32 nt, Homo Sapiens
ugcgagagaagaaaugucuguugcuuuaagcc

SEQ ID NO: 204296 - RNA, 32 nt, Homo Sapiens
uggucaaggggcacgaacaggucuggugaccc

SEQ ID NO: 204297 - RNA, 32 nt, Homo Sapiens
uuaaaaggaaaacaauguccuuacuuguaaac

SEQ ID NO: 204298 - RNA, 32 nt, Homo Sapiens
agagcagaggaggucccagauaccaaguggcg

SEQ ID NO: 204299 - RNA, 32 nt, Homo Sapiens
aucucaagaacaaaagacaacugaaagaagcu

SEQ ID NO: 204300 - RNA, 32 nt, Homo Sapiens
cgguccgcgccaagccguccccgccgacgccg

SEQ ID NO: 204301 - RNA, 32 nt, Homo Sapiens
gagaaggagaugcggcugcugcuggcccuguu

SEQ ID NO: 204302 - RNA, 32 nt, Homo Sapiens
ugggcagaagaugacauuuaauuuggaaauuu

SEQ ID NO: 204303 - RNA, 32 nt, Homo Sapiens
cauaauguuucauuaaauuauaccccagaaag

SEQ ID NO: 204304 - RNA, 29 nt, Homo Sapiens
augugguaggaacugucuauaagauagug

SEQ ID NO: 204305 - RNA, 32 nt, Homo Sapiens
agagagcaucucuggagagaaagaggagagcc

SEQ ID NO: 204306 - RNA, 32 nt, Homo Sapiens
uagaccuagagcauuuuuauuuauacuaaauu

SEQ ID NO: 204307 - RNA, 32 nt, Homo Sapiens
aaacauuucuguauuuuuuuuaaguaaauaag

SEQ ID NO: 204308 - RNA, 32 nt, Homo Sapiens
auggcaaaaaccgcaaucacuuuugcuccaac

SEQ ID NO: 204309 - RNA, 32 nt, Homo Sapiens
gccaauguaggaacccaaaaugcuuauuucuu

SEQ ID NO: 204310 - RNA, 32 nt, Homo Sapiens
aaaaucauagcacuaacauucaguagucaugu

SEQ ID NO: 204311 - RNA, 32 nt, Homo Sapiens
auuagaguaaguuaaucaggguuuguuuccaa

SEQ ID NO: 204312 - RNA, 32 nt, Homo Sapiens
ccuucagcuugggcugcuuggccacggaacag

SEQ ID NO: 204313 - RNA, 32 nt, Homo Sapiens
gggaaaggagaugugugagcaauuucuguacc

SEQ ID NO: 204314 - RNA, 32 nt, Homo Sapiens
gaaaagacaugacuuacccaguccggcaucgg

SEQ ID NO: 204315 - RNA, 30 nt, Homo Sapiens
cggcaggcgcccgggguccucagcgcugca

SEQ ID NO: 204316 - RNA, 32 nt, Homo Sapiens
ccuacaaaauagcaauacuaagcuuuacagcu

SEQ ID NO: 204317 - RNA, 32 nt, Homo Sapiens
cuauugaaauaccauguucauuccucuggcuc

SEQ ID NO: 204318 - RNA, 32 nt, Homo Sapiens
aaggauguauguacaaggacugacuuuaauaa

SEQ ID NO: 204319 - RNA, 28 nt, Homo Sapiens
gugagggcgcggccgccgugcuggacau

SEQ ID NO: 204320 - RNA, 30 nt, Homo Sapiens
uguggaccaugugcugcaggagcaucgugu

SEQ ID NO: 204321 - RNA, 32 nt, Homo Sapiens
agcugcuauguggacaguuguuuucuagugug

SEQ ID NO: 204322 - RNA, 32 nt, Homo Sapiens
ucgccgggagacggagaagcacuuuuuggccc

SEQ ID NO: 204323 - RNA, 32 nt, Homo Sapiens
accugaagaauaaguaugaaagcaucaaucaa

SEQ ID NO: 204324 - RNA, 32 nt, Homo Sapiens
ugacacucgcccucagaggagagcagcagccc

SEQ ID NO: 204325 - RNA, 32 nt, Homo Sapiens
cagugugauacccagugacuagacgcacucug

SEQ ID NO: 204326 - RNA, 32 nt, Homo Sapiens
uuacugucaaaauaauuuuauggcucacuaug

SEQ ID NO: 204327 - RNA, 29 nt, Homo Sapiens
auuuauauauguauuaccaaaagcagucu

SEQ ID NO: 204328 - RNA, 32 nt, Homo Sapiens
auuuauguauauuggauaaaaauguacuacag

SEQ ID NO: 204329 - RNA, 32 nt, Homo Sapiens
cacucccgggccggucaugaacgggccggcgg

SEQ ID NO: 204330 - RNA, 32 nt, Homo Sapiens
gcccaccucucgcgccggggcccucgcgaggc

SEQ ID NO: 204331 - RNA, 32 nt, Homo Sapiens
cagcccugaaacaaagcauuuccuuguuuuca

SEQ ID NO: 204332 - RNA, 32 nt, Homo Sapiens
auugagaguggcuuccaagagccccgugccua

SEQ ID NO: 204333 - RNA, 32 nt, Homo Sapiens
auuguuuuucagucucuggggucaguuuugug

SEQ ID NO: 204334 - RNA, 32 nt, Homo Sapiens
ugcagggcggagcuaccagcccaggcucagau

SEQ ID NO: 204335 - RNA, 32 nt, Homo Sapiens
cuuugcgggguccgccugugugcaggagucgc

SEQ ID NO: 204336 - RNA, 32 nt, Homo Sapiens
aaaucucaccuuucaaguacuaaguuagaauu

SEQ ID NO: 204337 - RNA, 32 nt, Homo Sapiens
acgacggaaacgcagaacguuuaugagaaaac

SEQ ID NO: 204338 - RNA, 32 nt, Homo Sapiens
uugccacaccaaucagagagccuagaacaucc

SEQ ID NO: 204339 - RNA, 32 nt, Homo Sapiens
cuggagaaaaauaaaauggacauuguacuuaa

SEQ ID NO: 204340 - RNA, 32 nt, Homo Sapiens
gcgucuggacgaaggagagcuuuuuucucaug

SEQ ID NO: 204341 - RNA, 32 nt, Homo Sapiens
gccuggauuugagcuuccguccuuccuuccuc

SEQ ID NO: 204342 - RNA, 32 nt, Homo Sapiens
auaguauguagagguggggccuugaggaagug

SEQ ID NO: 204343 - RNA, 32 nt, Homo Sapiens
uuuaugcauuagacugguaaccagauaaaaua

SEQ ID NO: 204344 - RNA, 32 nt, Homo Sapiens
gauagaggagccuuauuuuuuauuauggcagc

SEQ ID NO: 204345 - RNA, 32 nt, Homo Sapiens
ccccuggcgggugagagugcagagacgaaggu

SEQ ID NO: 204346 - RNA, 32 nt, Homo Sapiens
auguggaagaacuuaggcaucugugggcaugg

SEQ ID NO: 204347 - RNA, 32 nt, Homo Sapiens
ccccuccccacuuuuuuugagauccauccuuu

SEQ ID NO: 204348 - RNA, 32 nt, Homo Sapiens
uaugcuuuuuucugcauguuugugaucacugu

SEQ ID NO: 204349 - RNA, 32 nt, Homo Sapiens
guauuacacuguauuuguaucucugaagcaug

SEQ ID NO: 204350 - RNA, 32 nt, Homo Sapiens
cucccugugccggggaggaggggguggguucg

SEQ ID NO: 204351 - RNA, 32 nt, Homo Sapiens
ucuaagcacuuuacacauauuagcucauucag

SEQ ID NO: 204352 - RNA, 31 nt, Homo Sapiens
uucagacucaaugauaagucugaaguggaaa

SEQ ID NO: 204353 - RNA, 32 nt, Homo Sapiens
auacugugaacguaccagguguuuacagauuu

SEQ ID NO: 204354 - RNA, 32 nt, Homo Sapiens
gaguuucgcucuuguugcccagccuggccaac

SEQ ID NO: 204355 - RNA, 32 nt, Homo Sapiens
ugcaggccugugcucacaguggcaccagcaac

SEQ ID NO: 204356 - RNA, 32 nt, Homo Sapiens
aaaagacaaaaauuagcugggcguggugguac

SEQ ID NO: 204357 - RNA, 32 nt, Homo Sapiens
gacgacaugagcagcucaccauaugauaaaaa

SEQ ID NO: 204358 - RNA, 32 nt, Homo Sapiens
aaaaugaaaaagacuaguguacuacaaaagag

SEQ ID NO: 204359 - RNA, 32 nt, Homo Sapiens
uguggaucaaugcaagaugacaaaggcuuuuu

SEQ ID NO: 204360 - RNA, 32 nt, Homo Sapiens
uuccaagucugugcccagaauggggggcgggg

SEQ ID NO: 204361 - RNA, 32 nt, Homo Sapiens
ccauuggaccuuuggcacuggaugagccaaua

SEQ ID NO: 204362 - RNA, 32 nt, Homo Sapiens
ggccccguggcuccuccuuccuccuccacaaa

SEQ ID NO: 204363 - RNA, 32 nt, Homo Sapiens
guaaaaaaguaguuuuacauuuuaugaaguaa

SEQ ID NO: 204364 - RNA, 32 nt, Homo Sapiens
caacuucccucuaucacaguuagugauuuggg

SEQ ID NO: 204365 - RNA, 32 nt, Homo Sapiens
uuccuaaaaugaauuuucuagaugauugaaua

SEQ ID NO: 204366 - RNA, 32 nt, Homo Sapiens
ucaaccagaguuccaaccaaugggcuccaucc

SEQ ID NO: 204367 - RNA, 32 nt, Homo Sapiens
gaauuugucauucagaucaugaauuguuuucc

SEQ ID NO: 204368 - RNA, 32 nt, Homo Sapiens
gauuaagaaauaauuugcaauaccgugcuacu

SEQ ID NO: 204369 - RNA, 32 nt, Homo Sapiens
ugccuuuccauuugcccucccuggccaugccu

SEQ ID NO: 204370 - RNA, 32 nt, Homo Sapiens
auauaugacugacuauucaauaccauacugaa

SEQ ID NO: 204371 - RNA, 31 nt, Homo Sapiens
ccugggaagucucagaaccaggaaggaaacc

SEQ ID NO: 204372 - RNA, 32 nt, Homo Sapiens
gaaucagaaaaaagguguuuuguauuuuaaag

SEQ ID NO: 204373 - RNA, 32 nt, Homo Sapiens
cuagagccgagcggagcgccccgcgggcccgc

SEQ ID NO: 204374 - RNA, 32 nt, Homo Sapiens
caaauugucagaguucuagucccuauuuuaug

SEQ ID NO: 204375 - RNA, 32 nt, Homo Sapiens
ccauauuuaaguguuacuguggcuucaaagaa

SEQ ID NO: 204376 - RNA, 32 nt, Homo Sapiens
cgucuuuuccggcccccgugcacucuccgccc

SEQ ID NO: 204377 - RNA, 32 nt, Homo Sapiens
guuaguaaugauggaacagaucaaugaaaagu

SEQ ID NO: 204378 - RNA, 32 nt, Homo Sapiens
ccauguggcagccaugacacacaccacauaag

SEQ ID NO: 204379 - RNA, 30 nt, Homo Sapiens
cgacugggcaggcgggggagccccuacuuc

SEQ ID NO: 204380 - RNA, 32 nt, Homo Sapiens
caauuuuaagaccagaaaaauuugaagucuga

SEQ ID NO: 204381 - RNA, 32 nt, Homo Sapiens
acugcugugaagaucugaauguuugacccuca

SEQ ID NO: 204382 - RNA, 32 nt, Homo Sapiens
ggaguuuggggaugaggcagcugaagaacaga

SEQ ID NO: 204383 - RNA, 32 nt, Homo Sapiens
aagaaaucccagaagcggacuccaucaaucca

SEQ ID NO: 204384 - RNA, 32 nt, Homo Sapiens
ccccugggggccuggguaguguaggaucucgc

SEQ ID NO: 204385 - RNA, 32 nt, Homo Sapiens
ccuggcgggcugaggagaaggaggucagugcu

SEQ ID NO: 204386 - RNA, 32 nt, Homo Sapiens
cuaaucaccguggaauuucucauuuucauuau

SEQ ID NO: 204387 - RNA, 32 nt, Homo Sapiens
gggggcuucgccucuggcccagcccucccgcu

SEQ ID NO: 204388 - RNA, 32 nt, Homo Sapiens
auuucuguuuuguuuaccgacauauucaguau

SEQ ID NO: 204389 - RNA, 32 nt, Homo Sapiens
cauacagaggccgaggggccaauucguucucu

SEQ ID NO: 204390 - RNA, 32 nt, Homo Sapiens
ggaugggaacucccacgcagcgucccacaggc

SEQ ID NO: 204391 - RNA, 32 nt, Homo Sapiens
ggcgccuccuccaugaaccgagaauugggaca

SEQ ID NO: 204392 - RNA, 32 nt, Homo Sapiens
ccuuaaccacacuuaaucuccaaauaaguacg

SEQ ID NO: 204393 - RNA, 32 nt, Homo Sapiens
gagcucggccucccucggggugacggaauguu

SEQ ID NO: 204394 - RNA, 32 nt, Homo Sapiens
agcuguuauucagauuugaauucagacugugu

SEQ ID NO: 204395 - RNA, 32 nt, Homo Sapiens
cccgcggcucuccucuucuucaucucuguuuu

SEQ ID NO: 204396 - RNA, 32 nt, Homo Sapiens
gcaguuuuauuacuaaaguuuuauaaguaguu

SEQ ID NO: 204397 - RNA, 32 nt, Homo Sapiens
aggcgcugcaguggagauggggacaaagggcu

SEQ ID NO: 204398 - RNA, 32 nt, Homo Sapiens
cagcgcagggcuggcacgugacaggcucguca

SEQ ID NO: 204399 - RNA, 32 nt, Homo Sapiens
ucuguaucagaaaugcauaccuuuaaauggaa

SEQ ID NO: 204400 - RNA, 32 nt, Homo Sapiens
uucacagaggcagcccagccccggccucccag

SEQ ID NO: 204401 - RNA, 32 nt, Homo Sapiens
ggaagugaaaauagguauacaguggauuaauu

SEQ ID NO: 204402 - RNA, 32 nt, Homo Sapiens
gggccuucgggcccgaggcggcggcggcggua

SEQ ID NO: 204403 - RNA, 32 nt, Homo Sapiens
agcuucauauaugacauguuuauauuguaaau

SEQ ID NO: 204404 - RNA, 32 nt, Homo Sapiens
aaaagauaggaaagggaaaauauuuuuucauu

SEQ ID NO: 204405 - RNA, 32 nt, Homo Sapiens
aacaaaacccaguguuugcacacacacaaaau

SEQ ID NO: 204406 - RNA, 32 nt, Homo Sapiens
cuaucaagaacaaugaggggcugaggggaugg

SEQ ID NO: 204407 - RNA, 32 nt, Homo Sapiens
ggugaggcagugggucccacuuccccuccuac

SEQ ID NO: 204408 - RNA, 32 nt, Homo Sapiens
aucuacaacauaaugauacugaauuguuaugu

SEQ ID NO: 204409 - RNA, 32 nt, Homo Sapiens
cucugugacgaagcuuccagaggaaggaucag

SEQ ID NO: 204410 - RNA, 32 nt, Homo Sapiens
ucaccuucuggccacugggaggcgcugcucga

SEQ ID NO: 204411 - RNA, 32 nt, Homo Sapiens
gccugguccggcacuucuuccgcggcccaggc

SEQ ID NO: 204412 - RNA, 32 nt, Homo Sapiens
cacauuacuguaagcacuaaccauuauaaaag

SEQ ID NO: 204413 - RNA, 32 nt, Homo Sapiens
gaaggagucagagaggcgacaggauaggcagc

SEQ ID NO: 204414 - RNA, 32 nt, Homo Sapiens
ucugcauagauguugcugcaugugucccaugu

SEQ ID NO: 204415 - RNA, 32 nt, Homo Sapiens
uggcagcagaccccaaaccaacccucuugacu

SEQ ID NO: 204416 - RNA, 32 nt, Homo Sapiens
accacagagggacaggaguccugggcauguag

SEQ ID NO: 204417 - RNA, 32 nt, Homo Sapiens
aaccaagaggggcuggcucugcgcccugccua

SEQ ID NO: 204418 - RNA, 32 nt, Homo Sapiens
uuucaaacacacaugcacacagcacaauucag

SEQ ID NO: 204419 - RNA, 32 nt, Homo Sapiens
uccucuagggaggggauggggaggccuccuag

SEQ ID NO: 204420 - RNA, 32 nt, Homo Sapiens
aucaacuuuggaaaaagugggugugugaugua

SEQ ID NO: 204421 - RNA, 32 nt, Homo Sapiens
aggaaaaggcggauugaggcugcugggucagc

SEQ ID NO: 204422 - RNA, 32 nt, Homo Sapiens
aauuauuuuguuggauaauugucuaguuagaa

SEQ ID NO: 204423 - RNA, 32 nt, Homo Sapiens
uggucaaccuggccguccggggcccccaggcc

SEQ ID NO: 204424 - RNA, 32 nt, Homo Sapiens
auuaucucagaauggacacuacaaaugccagc

SEQ ID NO: 204425 - RNA, 32 nt, Homo Sapiens
cagccgugagaggacugcucaacaaugccccc

SEQ ID NO: 204426 - RNA, 32 nt, Homo Sapiens
ccugcaaguucacugcaugucugaugcuuggu

SEQ ID NO: 204427 - RNA, 32 nt, Homo Sapiens
cugugugccgaggagauggcgucuaccagaag

SEQ ID NO: 204428 - RNA, 32 nt, Homo Sapiens
gugaguuuaaacaaaaaccacaaacagacaaa

SEQ ID NO: 204429 - RNA, 32 nt, Homo Sapiens
ccuugguggcuuuggcuucugcacuccuuggc

SEQ ID NO: 204430 - RNA, 32 nt, Homo Sapiens
guguggaagcuauacaaggaaagcugaaucca

SEQ ID NO: 204431 - RNA, 32 nt, Homo Sapiens
uagacaaagacaugcccguucccgcggcccac

SEQ ID NO: 204432 - RNA, 32 nt, Homo Sapiens
ucccuuggaucaggauccuucucaagacuggu

SEQ ID NO: 204433 - RNA, 32 nt, Homo Sapiens
cagacucguuuuugguaguuuguuuuaacuuc

SEQ ID NO: 204434 - RNA, 32 nt, Homo Sapiens
aauaaaugcacaguguaacauaaaaaaaaaaa

SEQ ID NO: 204435 - RNA, 32 nt, Homo Sapiens
ccuucagguucaagugauucuccucccucagc

SEQ ID NO: 204436 - RNA, 32 nt, Homo Sapiens
aauugcaaauuaggaagaaauucacacccaga

SEQ ID NO: 204437 - RNA, 32 nt, Homo Sapiens
ucuaaaauguauccuguucguuugucagcugg

SEQ ID NO: 204438 - RNA, 32 nt, Homo Sapiens
uugguguuaccuugucuguuuucauuugucua

SEQ ID NO: 204439 - RNA, 32 nt, Homo Sapiens
cggcacgcucccucugcagauggucgccgcac

SEQ ID NO: 204440 - RNA, 32 nt, Homo Sapiens
auauccuaaccuuguuaucucuugccuccucc

SEQ ID NO: 204441 - RNA, 32 nt, Homo Sapiens
caauccacgaguaagcaccucccucccccuga

SEQ ID NO: 204442 - RNA, 32 nt, Homo Sapiens
cuuauacuauuuggguuuuucuuaaugcucca

SEQ ID NO: 204443 - RNA, 32 nt, Homo Sapiens
ucagaugucucauauaauaaggugaugucgga

SEQ ID NO: 204444 - RNA, 32 nt, Homo Sapiens
aagaggggucccgggggucccggagcggaagu

SEQ ID NO: 204445 - RNA, 32 nt, Homo Sapiens
cagugucucuggcagacccaucggcagcucug

SEQ ID NO: 204446 - RNA, 32 nt, Homo Sapiens
cccgagggacgccaugcggggaggcaggggcg

SEQ ID NO: 204447 - RNA, 32 nt, Homo Sapiens
gcuauauuuuccccuuguuuuuaaaagguuuu

SEQ ID NO: 204448 - RNA, 32 nt, Homo Sapiens
auuuuaauggauuguuaauuucaguccuguag

SEQ ID NO: 204449 - RNA, 32 nt, Homo Sapiens
uauacaugagaaaaaagcacaugauaauuguu

SEQ ID NO: 204450 - RNA, 32 nt, Homo Sapiens
ggcuggcugggaugcugguggcucuucagagg

SEQ ID NO: 204451 - RNA, 32 nt, Homo Sapiens
cugaggcccggugacccuucgcccgcaaccag

SEQ ID NO: 204452 - RNA, 32 nt, Homo Sapiens
ccuuagaugggauggagcuggggggugggaau

SEQ ID NO: 204453 - RNA, 32 nt, Homo Sapiens
ucagggggcagugaggugccccugccuggagc

SEQ ID NO: 204454 - RNA, 32 nt, Homo Sapiens
cugcccgccccgcucucccgaagcuguucggg

SEQ ID NO: 204455 - RNA, 32 nt, Homo Sapiens
aucauaucauuuaaaaauacuacauuagggcu

SEQ ID NO: 204456 - RNA, 32 nt, Homo Sapiens
accugcgugucccuuccuccccgagucagggc

SEQ ID NO: 204457 - RNA, 32 nt, Homo Sapiens
cuuuauuuuuaaaaggagaaguuuaacuuugc

SEQ ID NO: 204458 - RNA, 32 nt, Homo Sapiens
gccugcagggugugggcagagaagggcaucug

SEQ ID NO: 204459 - RNA, 32 nt, Homo Sapiens
ugccagaggagcuccaagcccggauguuagag

SEQ ID NO: 204460 - RNA, 32 nt, Homo Sapiens
auuucuuuagcagagaaaguugguuuuaaaaa

SEQ ID NO: 204461 - RNA, 32 nt, Homo Sapiens
cuaacaccgggcgggcggcugcggcggcacuu

SEQ ID NO: 204462 - RNA, 32 nt, Homo Sapiens
cucuaauuauuuaugguaccauuugaauugua

SEQ ID NO: 204463 - RNA, 32 nt, Homo Sapiens
ccuucacgggauacuucuuuuaucugcagaug

SEQ ID NO: 204464 - RNA, 32 nt, Homo Sapiens
gugugucuuguacaguuaguuauauuagcagc

SEQ ID NO: 204465 - RNA, 32 nt, Homo Sapiens
ccgcccggauugcuccccgagccccgggaccg

SEQ ID NO: 204466 - RNA, 32 nt, Homo Sapiens
ggcgcccggagcugcuggcccaaaggauccgg

SEQ ID NO: 204467 - RNA, 32 nt, Homo Sapiens
cugggaggaggcccaggcucucugguggccgc

SEQ ID NO: 204468 - RNA, 32 nt, Homo Sapiens
cuauucaaggaccccgcgcaggcccagccccu

SEQ ID NO: 204469 - RNA, 32 nt, Homo Sapiens
uaaggguaaugcggcucuaggccggcugagga

SEQ ID NO: 204470 - RNA, 32 nt, Homo Sapiens
cccaaccucacucucagacucccugccaccuu

SEQ ID NO: 204471 - RNA, 32 nt, Homo Sapiens
uuugaggaggggggcggggagggaccugcggc

SEQ ID NO: 204472 - RNA, 32 nt, Homo Sapiens
ugucucaggaaccaccugagcccacagauccu

SEQ ID NO: 204473 - RNA, 32 nt, Homo Sapiens
ugaagcuuuuucugccuccugauucucucuuu

SEQ ID NO: 204474 - RNA, 32 nt, Homo Sapiens
acuucccaaaacuuguucacugggguccucgu

SEQ ID NO: 204475 - RNA, 32 nt, Homo Sapiens
ugccuuacugaaugcauuuaccagcaaacaug

SEQ ID NO: 204476 - RNA, 31 nt, Homo Sapiens
gacagcacaaagaaguaagggcaguuauugg

SEQ ID NO: 204477 - RNA, 32 nt, Homo Sapiens
ccaggcagccccacuguaagacaucucauugc

SEQ ID NO: 204478 - RNA, 32 nt, Homo Sapiens
gguccgugacauucugcagcuaguccacuacu

SEQ ID NO: 204479 - RNA, 32 nt, Homo Sapiens
uuaauuagugguggucuccgacuuuauagcag

SEQ ID NO: 204480 - RNA, 32 nt, Homo Sapiens
guggggucagggagaccccugcuugcccuggc

SEQ ID NO: 204481 - RNA, 32 nt, Homo Sapiens
ccgucaggcuccccggcccucuggcugccaaa

SEQ ID NO: 204482 - RNA, 32 nt, Homo Sapiens
gucguuguuuuaaacuuuagaaucugaaaacc

SEQ ID NO: 204483 - RNA, 30 nt, Homo Sapiens
cacccgucuccugcugcaggcucugggguu

SEQ ID NO: 204484 - RNA, 32 nt, Homo Sapiens
uuggguucaggagaagaugguuugacuagaaa

SEQ ID NO: 204485 - RNA, 32 nt, Homo Sapiens
uggagauauuucaaaugaaaauaaucaaaggu

SEQ ID NO: 204486 - RNA, 32 nt, Homo Sapiens
uuucuuuuuuaaauuauguaaucagaugauuu

SEQ ID NO: 204487 - RNA, 32 nt, Homo Sapiens
ggccaugagcugguccgggaccacgugcaccg

SEQ ID NO: 204488 - RNA, 32 nt, Homo Sapiens
ucacugugcagcuucugggguggccugggcgg

SEQ ID NO: 204489 - RNA, 32 nt, Homo Sapiens
cuguccuuucccuuucacuguuucacuccaaa

SEQ ID NO: 204490 - RNA, 32 nt, Homo Sapiens
cuagagcaacagacuccuagaagugcgauguc

SEQ ID NO: 204491 - RNA, 32 nt, Homo Sapiens
gcaugcaauuggugaaucaugcagcuuugggg

SEQ ID NO: 204492 - RNA, 32 nt, Homo Sapiens
cuuauguggcaccaacaagaccugaugcagaa

SEQ ID NO: 204493 - RNA, 29 nt, Homo Sapiens
cuccuaucuguccaauaccccacagguuu

SEQ ID NO: 204494 - RNA, 32 nt, Homo Sapiens
cccggaacccccgcccucggggugcgaggcgg

SEQ ID NO: 204495 - RNA, 32 nt, Homo Sapiens
ccuaagcugcuucuuuaacauagagaucuuua

SEQ ID NO: 204496 - RNA, 32 nt, Homo Sapiens
aaaucauggucauaauuuuucuuuuuuucccu

SEQ ID NO: 204497 - RNA, 32 nt, Homo Sapiens
aagcaguugaguauuuauaacaauaauauuuu

SEQ ID NO: 204498 - RNA, 32 nt, Homo Sapiens
uauuuacuaaaauaaauaauaaacaagauaau

SEQ ID NO: 204499 - RNA, 32 nt, Homo Sapiens
gucgaguaugaggcaguuauuuuuuagagugu

SEQ ID NO: 204500 - RNA, 32 nt, Homo Sapiens
cgguaacuuacuuuuccauaauauugcaaaua

SEQ ID NO: 204501 - RNA, 32 nt, Homo Sapiens
gaauggugagaaauaaauauguauuuuuuacg

SEQ ID NO: 204502 - RNA, 32 nt, Homo Sapiens
acagcggucagugggauucagccugagaaccu

SEQ ID NO: 204503 - RNA, 32 nt, Homo Sapiens
gagggguagggggaauggggacaggcucuuuc

SEQ ID NO: 204504 - RNA, 32 nt, Homo Sapiens
cacagaacaaaaauaauguucuuuuuaugcaa

SEQ ID NO: 204505 - RNA, 32 nt, Homo Sapiens
aagcugggggccuggguccuacccugucuggu

SEQ ID NO: 204506 - RNA, 32 nt, Homo Sapiens
acgugguagaggucgcgggcaguuggugggca

SEQ ID NO: 204507 - RNA, 32 nt, Homo Sapiens
ugugggggguggagggcggggcccugaugugg

SEQ ID NO: 204508 - RNA, 32 nt, Homo Sapiens
acaaaagaacaaaaacgaauaagcaaagaaga

SEQ ID NO: 204509 - RNA, 32 nt, Homo Sapiens
ugcaaaacccucgggcggagaagucgcugccu

SEQ ID NO: 204510 - RNA, 32 nt, Homo Sapiens
gcggcgccagucgacccgccucgccacaacuu

SEQ ID NO: 204511 - RNA, 32 nt, Homo Sapiens
gaauaggagguggcugaugcagucauuuauua

SEQ ID NO: 204512 - RNA, 32 nt, Homo Sapiens
agauaaugacaaaugaagauuaugacauguau

SEQ ID NO: 204513 - RNA, 31 nt, Homo Sapiens
uuacagaggcgcugccugccccuuguccugc

SEQ ID NO: 204514 - RNA, 32 nt, Homo Sapiens
gggcccagucauauaugcacaguuagaccacu

SEQ ID NO: 204515 - RNA, 32 nt, Homo Sapiens
aaugagucacagagaaguuacaugacaaagau

SEQ ID NO: 204516 - RNA, 32 nt, Homo Sapiens
cugucucggucugcggucuuuaccacaucaau

SEQ ID NO: 204517 - RNA, 32 nt, Homo Sapiens
ggacuaggacaaaaauugggcuguggcugggg

SEQ ID NO: 204518 - RNA, 28 nt, Homo Sapiens
ugcaugguagagaggaugaauggauggc

SEQ ID NO: 204519 - RNA, 29 nt, Homo Sapiens
ucuuuuguauuuucccugccgaagugaau

SEQ ID NO: 204520 - RNA, 32 nt, Homo Sapiens
auagaaagcauuaaagcuguuuugcuaaguaa

SEQ ID NO: 204521 - RNA, 32 nt, Homo Sapiens
ugugugucaccucacacaccacaagggggcug

SEQ ID NO: 204522 - RNA, 32 nt, Homo Sapiens
gagagggguggcgggcccgacagcggagggag

SEQ ID NO: 204523 - RNA, 32 nt, Homo Sapiens
ggaugggauugaugggcaggagggauccccgc

SEQ ID NO: 204524 - RNA, 32 nt, Homo Sapiens
uuguaagauacaaaaacuauguaaauacagac

SEQ ID NO: 204525 - RNA, 32 nt, Homo Sapiens
gggcaguauuagaaacaaaaucauggaucaag

SEQ ID NO: 204526 - RNA, 32 nt, Homo Sapiens
gcuacgucccuucgcgcgccgagaucaagagg

SEQ ID NO: 204527 - RNA, 30 nt, Homo Sapiens
agccccugagguggcauggugaugucucca

SEQ ID NO: 204528 - RNA, 32 nt, Homo Sapiens
aacauuaaacgcaaaacugauuaggauuugau

SEQ ID NO: 204529 - RNA, 32 nt, Homo Sapiens
ccuccgcccgggcgcuggagccggcgagggca

SEQ ID NO: 204530 - RNA, 32 nt, Homo Sapiens
agcugggagacggcggcagcccagcggccgga

SEQ ID NO: 204531 - RNA, 32 nt, Homo Sapiens
ccucgccaugggacauaacgggagcuggaucu

SEQ ID NO: 204532 - RNA, 32 nt, Homo Sapiens
gccuccagaacagaugccaucuuccugaaugu

SEQ ID NO: 204533 - RNA, 32 nt, Homo Sapiens
gcugcgcuuuuggccugaauuuucagugacaa

SEQ ID NO: 204534 - RNA, 32 nt, Homo Sapiens
ccuaacuagacaauuuuuuauugagugucucc

SEQ ID NO: 204535 - RNA, 32 nt, Homo Sapiens
ccaccaaaacugcuccuccuccuguauuccug

SEQ ID NO: 204536 - RNA, 32 nt, Homo Sapiens
uagugaauugguugaguuuugauuccucuaac

SEQ ID NO: 204537 - RNA, 32 nt, Homo Sapiens
ccucugcuuggcugcauagagcuauaguucug

SEQ ID NO: 204538 - RNA, 32 nt, Homo Sapiens
gcuauugcagugagcgcaagcaugucaaggau

SEQ ID NO: 204539 - RNA, 32 nt, Homo Sapiens
guucuucacgccccgauuucgucuuccaggag

SEQ ID NO: 204540 - RNA, 32 nt, Homo Sapiens
auuggaugguaacuaaggucuauacaucuacu

SEQ ID NO: 204541 - RNA, 32 nt, Homo Sapiens
acauuguucguggaaauagaaauguauaauua

SEQ ID NO: 204542 - RNA, 28 nt, Homo Sapiens
ugaaugagggccgugaggaugacaugcu

SEQ ID NO: 204543 - RNA, 32 nt, Homo Sapiens
cgcuacacuccagccugggugacagagugaga

SEQ ID NO: 204544 - RNA, 32 nt, Homo Sapiens
acgccuagcuaauuuuuguauuuuuagcagag

SEQ ID NO: 204545 - RNA, 32 nt, Homo Sapiens
uccuugugacccgcccgcucuccuaagggagc

SEQ ID NO: 204546 - RNA, 32 nt, Homo Sapiens
cuacuaaaaaauauaaaaaauuagucgggcau

SEQ ID NO: 204547 - RNA, 32 nt, Homo Sapiens
uacaucuaagaauuuuuuuuuaaauuuuauua

SEQ ID NO: 204548 - RNA, 32 nt, Homo Sapiens
acgucaucucucccuuuccugccgcccaggcc

SEQ ID NO: 204549 - RNA, 32 nt, Homo Sapiens
cgcagggcgcucggggaagcaaacggagugug

SEQ ID NO: 204550 - RNA, 32 nt, Homo Sapiens
aacaaaaugagggguggcagggauaaaaaguc

SEQ ID NO: 204551 - RNA, 32 nt, Homo Sapiens
aaggaacuaaauuccuucuccaccucaaccac

SEQ ID NO: 204552 - RNA, 32 nt, Homo Sapiens
gcaguauauauucuuucacaaggcauccauac

SEQ ID NO: 204553 - RNA, 32 nt, Homo Sapiens
ccccggucauccggacaucccaacgcaugcuc

SEQ ID NO: 204554 - RNA, 32 nt, Homo Sapiens
gcugggagagggcggagggggaggcggcgcgc

SEQ ID NO: 204555 - RNA, 32 nt, Homo Sapiens
cauaacacccgcgaccccgcagcuaagcgcag

SEQ ID NO: 204556 - RNA, 32 nt, Homo Sapiens
cccccuuccuuccauguauccagcgcuccccc

SEQ ID NO: 204557 - RNA, 32 nt, Homo Sapiens
gaaggugagggugagcagagauguguguggac

SEQ ID NO: 204558 - RNA, 32 nt, Homo Sapiens
ggggagggaccuccauaaggcuuuuccucccu

SEQ ID NO: 204559 - RNA, 32 nt, Homo Sapiens
gaacuggaauguaagaggcaccagaggauucc

SEQ ID NO: 204560 - RNA, 32 nt, Homo Sapiens
cgguggcggcgguugggccgaggcaggcggcc

SEQ ID NO: 204561 - RNA, 31 nt, Homo Sapiens
ugucugagcccagccaccugaguuuuuagua

SEQ ID NO: 204562 - RNA, 32 nt, Homo Sapiens
uguaaaguuuugucuguaaaccucuugcaguu

SEQ ID NO: 204563 - RNA, 32 nt, Homo Sapiens
cugaggagggagagggggagcguagccuuaca

SEQ ID NO: 204564 - RNA, 32 nt, Homo Sapiens
cauuugcuuuuguagauguguuuucagagcua

SEQ ID NO: 204565 - RNA, 32 nt, Homo Sapiens
gcccauccucgggaacccccuggguccgcggc

SEQ ID NO: 204566 - RNA, 32 nt, Homo Sapiens
aaaaguguuuuuucuuuuuucccauuuuuaaa

SEQ ID NO: 204567 - RNA, 32 nt, Homo Sapiens
uccagagggcgggcgcccgagccgugcgggga

SEQ ID NO: 204568 - RNA, 32 nt, Homo Sapiens
aaacucauucuauuuuuucucuaaaauagauc

SEQ ID NO: 204569 - RNA, 32 nt, Homo Sapiens
accuguuccuucccaaccaccgagcuucaaug

SEQ ID NO: 204570 - RNA, 32 nt, Homo Sapiens
caaucagcuuaaaaagaaaaacaaggaagggg

SEQ ID NO: 204571 - RNA, 32 nt, Homo Sapiens
aggcugcuucgaagcccucccuacccaccccg

SEQ ID NO: 204572 - RNA, 32 nt, Homo Sapiens
ugucgggggcuggaauaguucuggccagaccc

SEQ ID NO: 204573 - RNA, 32 nt, Homo Sapiens
ugccugaggaccccuucggccuggacagccca

SEQ ID NO: 204574 - RNA, 32 nt, Homo Sapiens
aucaccagaauuaauuuuauuauucuuauuau

SEQ ID NO: 204575 - RNA, 32 nt, Homo Sapiens
cgacacugagaacagcuuccccugccuucugc

SEQ ID NO: 204576 - RNA, 32 nt, Homo Sapiens
gaucagaagaucuggccaugcuggggcucaca

SEQ ID NO: 204577 - RNA, 32 nt, Homo Sapiens
agcagacagcacagcagcugcagaggcaaggc

SEQ ID NO: 204578 - RNA, 32 nt, Homo Sapiens
ugcaccaggcccggcugcguagcaguugagug

SEQ ID NO: 204579 - RNA, 32 nt, Homo Sapiens
gagccuggugaagaauguauuaaugagacugc

SEQ ID NO: 204580 - RNA, 32 nt, Homo Sapiens
aagaacugcuugaaccugggagguggagguug

SEQ ID NO: 204581 - RNA, 32 nt, Homo Sapiens
cuucugcccuuaaaugcuuccuugggcaagag

SEQ ID NO: 204582 - RNA, 32 nt, Homo Sapiens
ucugauuucuuacuuuuuucccccuuagaugc

SEQ ID NO: 204583 - RNA, 32 nt, Homo Sapiens
cgggccugguucggccacggccucggcuucca

SEQ ID NO: 204584 - RNA, 32 nt, Homo Sapiens
ugagacagaaaagagguaaggaaguguugggg

SEQ ID NO: 204585 - RNA, 32 nt, Homo Sapiens
cggggguugcaucacccacccugcgauggagg

SEQ ID NO: 204586 - RNA, 32 nt, Homo Sapiens
aaguuaacaauguccuuucuuaaaaugcaaau

SEQ ID NO: 204587 - RNA, 32 nt, Homo Sapiens
uggccaaaggagauuaacuuuuuaaucagugg

SEQ ID NO: 204588 - RNA, 32 nt, Homo Sapiens
ggcccuggagccagcccuaucuggcaguccug

SEQ ID NO: 204589 - RNA, 32 nt, Homo Sapiens
cggggguucucguggccgcggcagcgcggucu

SEQ ID NO: 204590 - RNA, 32 nt, Homo Sapiens
ugacugaauuuucaguauguacuugaaggaag

SEQ ID NO: 204591 - RNA, 32 nt, Homo Sapiens
aauuguagaaauaccggaacaaagugcagaug

SEQ ID NO: 204592 - RNA, 32 nt, Homo Sapiens
gcccgcaaggaccugcccuuccggauccagag

SEQ ID NO: 204593 - RNA, 32 nt, Homo Sapiens
uuauuauuuuugguggucucuauugaccaaug

SEQ ID NO: 204594 - RNA, 32 nt, Homo Sapiens
gguaugagccaccgcgcccagcccaucucacu

SEQ ID NO: 204595 - RNA, 32 nt, Homo Sapiens
cacuauauuuaguugaagccuguucacuguuu

SEQ ID NO: 204596 - RNA, 32 nt, Homo Sapiens
guauguaauacugauaaugacaauaaaugaca

SEQ ID NO: 204597 - RNA, 32 nt, Homo Sapiens
gcccuguggccccgcccggcccgcgcuugcua

SEQ ID NO: 204598 - RNA, 32 nt, Homo Sapiens
agggggaaaaggaaagcauaugucaguuguuu

SEQ ID NO: 204599 - RNA, 29 nt, Homo Sapiens
ccaaguaaagucaugaauuuucuaauuuu

SEQ ID NO: 204600 - RNA, 32 nt, Homo Sapiens
uauuacuuuuggcagccuggaaaguugugucu

SEQ ID NO: 204601 - RNA, 32 nt, Homo Sapiens
gcagaggcauuugaaaaugaagaugaaaagau

SEQ ID NO: 204602 - RNA, 32 nt, Homo Sapiens
gacagcuuuuucuccguaguaugcgaguugac

SEQ ID NO: 204603 - RNA, 32 nt, Homo Sapiens
aucucacuaugaagauuugaauaacuagacau

SEQ ID NO: 204604 - RNA, 32 nt, Homo Sapiens
cucccacuuaggagcgagaacaugcgguguuu

SEQ ID NO: 204605 - RNA, 32 nt, Homo Sapiens
uuacuguuuuuagaugaauguacgaugagaaa

SEQ ID NO: 204606 - RNA, 32 nt, Homo Sapiens
gcccggcccucccguucgcccguccucacuag

SEQ ID NO: 204607 - RNA, 32 nt, Homo Sapiens
aguauucagcuguaaguguaguauuguuuuau

SEQ ID NO: 204608 - RNA, 32 nt, Homo Sapiens
gacgaaggccagagaccccaccgcucccuccc

SEQ ID NO: 204609 - RNA, 32 nt, Homo Sapiens
uccugcuugugguggaagucagggcugaggcu

SEQ ID NO: 204610 - RNA, 32 nt, Homo Sapiens
ucucagucccuggcugcuuuggcauuugggga

SEQ ID NO: 204611 - RNA, 32 nt, Homo Sapiens
gcuggacugggucagacaccacuacaccgagg

SEQ ID NO: 204612 - RNA, 32 nt, Homo Sapiens
guugugucccaggguggacuagugggguuuga

SEQ ID NO: 204613 - RNA, 32 nt, Homo Sapiens
ccugccccagcccagucccucccggccgcgcg

SEQ ID NO: 204614 - RNA, 32 nt, Homo Sapiens
agacuuuaaaaauuuccagaaggucaggaauu

SEQ ID NO: 204615 - RNA, 32 nt, Homo Sapiens
aaagaagaggauguugcaacaaaaaggucaaa

SEQ ID NO: 204616 - RNA, 32 nt, Homo Sapiens
cugccucagccucucaaagagcugggauuaca

SEQ ID NO: 204617 - RNA, 32 nt, Homo Sapiens
cccaggucauugugucuguuuccgaggggccu

SEQ ID NO: 204618 - RNA, 32 nt, Homo Sapiens
aaauguauuuccccuuguggcuuucaaccacc

SEQ ID NO: 204619 - RNA, 32 nt, Homo Sapiens
ggccgggcgcgguagcucacgccuggaauccc

SEQ ID NO: 204620 - RNA, 32 nt, Homo Sapiens
cugaggcgccgcgguaccaugaggcgccggua

SEQ ID NO: 204621 - RNA, 30 nt, Homo Sapiens
auaugcuagaucuugggggaaacacugcau

SEQ ID NO: 204622 - RNA, 32 nt, Homo Sapiens
auuuguacuaauuuuucuuucucuuguagcac

SEQ ID NO: 204623 - RNA, 32 nt, Homo Sapiens
aaccugguuuuaugaaaccaaagacuagugca

SEQ ID NO: 204624 - RNA, 32 nt, Homo Sapiens
gagccgagaucaugccauugcauuccagccuu

SEQ ID NO: 204625 - RNA, 32 nt, Homo Sapiens
agugacagcaaccccagagaugaggcaccaga

SEQ ID NO: 204626 - RNA, 32 nt, Homo Sapiens
ucacaccaguaaggagaagcaauauaagugug

SEQ ID NO: 204627 - RNA, 29 nt, Homo Sapiens
aguugugcgugagagagaggcaagcgccc

SEQ ID NO: 204628 - RNA, 32 nt, Homo Sapiens
ggagaccaugguuuuuaauguuagaacagaaa

SEQ ID NO: 204629 - RNA, 32 nt, Homo Sapiens
augaacugggaaaauuuuaacugcaugguaug

SEQ ID NO: 204630 - RNA, 32 nt, Homo Sapiens
aggaaggccuucaagcgcgccacgcaccucaa

SEQ ID NO: 204631 - RNA, 32 nt, Homo Sapiens
agcaacggggcgggccuugguucgccuggggc

SEQ ID NO: 204632 - RNA, 32 nt, Homo Sapiens
ugcuccccgcggcggccgcacagcagcccgag

SEQ ID NO: 204633 - RNA, 32 nt, Homo Sapiens
uaccuuccagcaucuguuggggagacgagauu

SEQ ID NO: 204634 - RNA, 32 nt, Homo Sapiens
acccgcucccucacucgcacacacagacacaa

SEQ ID NO: 204635 - RNA, 32 nt, Homo Sapiens
accaugagggaagaauaaagagcugugggcaa

SEQ ID NO: 204636 - RNA, 32 nt, Homo Sapiens
cccuacccugacgccucccagucaucaucucc

SEQ ID NO: 204637 - RNA, 32 nt, Homo Sapiens
uaaaagugaugauggucuggggagagauuuua

SEQ ID NO: 204638 - RNA, 32 nt, Homo Sapiens
cggccgcccgcgagcggcgugccacguacggc

SEQ ID NO: 204639 - RNA, 32 nt, Homo Sapiens
gagucuuacaauguauuugucaucucaugaua

SEQ ID NO: 204640 - RNA, 32 nt, Homo Sapiens
ccuuuaaaacuuaugucauguccuucuguguu

SEQ ID NO: 204641 - RNA, 32 nt, Homo Sapiens
gaaauuuacacacacacacacacacacacaca

SEQ ID NO: 204642 - RNA, 32 nt, Homo Sapiens
ccguggcaaacgccaggugcuuuuucugggag

SEQ ID NO: 204643 - RNA, 32 nt, Homo Sapiens
uaaauaggaacaaccucuuuuaaaagagaaaa

SEQ ID NO: 204644 - RNA, 32 nt, Homo Sapiens
cucugcucucgggauggugcuuccuuuaucuu

SEQ ID NO: 204645 - RNA, 30 nt, Homo Sapiens
ggaccaggcuccggcggcggcgggggucac

SEQ ID NO: 204646 - RNA, 32 nt, Homo Sapiens
uucugcuugcugucggcaccgcugcguuaccc

SEQ ID NO: 204647 - RNA, 32 nt, Homo Sapiens
cucacacauccacuucucccuccagagcccgg

SEQ ID NO: 204648 - RNA, 32 nt, Homo Sapiens
caggaguuuaauacuguuuggccaccgguuac

SEQ ID NO: 204649 - RNA, 32 nt, Homo Sapiens
ccccuuuauguaugaaaacauaaaauugaaaa

SEQ ID NO: 204650 - RNA, 32 nt, Homo Sapiens
ggggcgggugcugcuugcugcaggcucugggg

SEQ ID NO: 204651 - RNA, 31 nt, Homo Sapiens
guuggaugcauggcaaaagcaaaggugugga

SEQ ID NO: 204652 - RNA, 32 nt, Homo Sapiens
gcacccgcaggguguggugccucacaccugua

SEQ ID NO: 204653 - RNA, 32 nt, Homo Sapiens
agacugucucaaccaugcuguuggauuugcaa

SEQ ID NO: 204654 - RNA, 32 nt, Homo Sapiens
cagccucgagaauugauaacacacucuucugg

SEQ ID NO: 204655 - RNA, 32 nt, Homo Sapiens
uccagaugcuaagaagcagcaguggggcuuuu

SEQ ID NO: 204656 - RNA, 32 nt, Homo Sapiens
agcuuaagccccaagaagugagguggguugug

SEQ ID NO: 204657 - RNA, 32 nt, Homo Sapiens
gugaacgcgggccgccccgugcgcccgcccca

SEQ ID NO: 204658 - RNA, 32 nt, Homo Sapiens
cuucccaacugcaucccccacccagcuuguuc

SEQ ID NO: 204659 - RNA, 32 nt, Homo Sapiens
ugcugacuucauuuuccaauccggagaagggg

SEQ ID NO: 204660 - RNA, 32 nt, Homo Sapiens
uggggcgccagacgaaucggggucucguuuuu

SEQ ID NO: 204661 - RNA, 32 nt, Homo Sapiens
gagccagcucugcggagucaucacgcagccau

SEQ ID NO: 204662 - RNA, 32 nt, Homo Sapiens
agagggcagaauccucagcucccaucauugug

SEQ ID NO: 204663 - RNA, 32 nt, Homo Sapiens
uagguucuccaaguucucaccuugaaacagau

SEQ ID NO: 204664 - RNA, 32 nt, Homo Sapiens
gaccccgagcauauaaauuugcugugcuaugc

SEQ ID NO: 204665 - RNA, 32 nt, Homo Sapiens
ggcauguaaaauggauccuuguccuaacguca

SEQ ID NO: 204666 - RNA, 32 nt, Homo Sapiens
gggagggaugggggcggguaucggcguagggg

SEQ ID NO: 204667 - RNA, 32 nt, Homo Sapiens
gccacucgggaccugaugucggcagcugugcc

SEQ ID NO: 204668 - RNA, 32 nt, Homo Sapiens
aguuaccacccucauucuuggcggucacaaca

SEQ ID NO: 204669 - RNA, 32 nt, Homo Sapiens
agaucagcuagacacacccagcccagauucaa

SEQ ID NO: 204670 - RNA, 32 nt, Homo Sapiens
acugcucauguaucuugaucuaauuacuaaau

SEQ ID NO: 204671 - RNA, 32 nt, Homo Sapiens
aauagcuauugucuucaagguguucaaucggu

SEQ ID NO: 204672 - RNA, 32 nt, Homo Sapiens
gagacuucuccacucaggucuuuguugcacua

SEQ ID NO: 204673 - RNA, 32 nt, Homo Sapiens
ugggccuggaccgcgcguggccggcgccaaaa

SEQ ID NO: 204674 - RNA, 32 nt, Homo Sapiens
uguugguggcgguaauuuuguccaucaaauga

SEQ ID NO: 204675 - RNA, 32 nt, Homo Sapiens
uuuguauuucaccaccuaaauguaauguugau

SEQ ID NO: 204676 - RNA, 32 nt, Homo Sapiens
uaccgccgggcggagggcgcgcuacuagcagc

SEQ ID NO: 204677 - RNA, 32 nt, Homo Sapiens
ccgacuguggggggcgggcugggaggugggag

SEQ ID NO: 204678 - RNA, 32 nt, Homo Sapiens
uauuuagguauacacacacacacacacacaca

SEQ ID NO: 204679 - RNA, 31 nt, Homo Sapiens
aacagaagcggugaucgucuaaguaugagcc

SEQ ID NO: 204680 - RNA, 32 nt, Homo Sapiens
agacaucaaaaauuuuaacauaaucacaauga

SEQ ID NO: 204681 - RNA, 32 nt, Homo Sapiens
ggugcugcaggccgacuggcgcggccggcccg

SEQ ID NO: 204682 - RNA, 32 nt, Homo Sapiens
cgcggcuucgcggaacccggcgccggccgccg

SEQ ID NO: 204683 - RNA, 32 nt, Homo Sapiens
ugccucacaccuuguucucuucugcucuagac

SEQ ID NO: 204684 - RNA, 32 nt, Homo Sapiens
aguuauaaguuauguucaguagccucaaagaa

SEQ ID NO: 204685 - RNA, 32 nt, Homo Sapiens
uugccuccauucuccucucucuaucccugaaa

SEQ ID NO: 204686 - RNA, 32 nt, Homo Sapiens
cugggccuuggcuugggaccagguacgaagga

SEQ ID NO: 204687 - RNA, 32 nt, Homo Sapiens
cagugugguuacuucuuucuucugccucgacu

SEQ ID NO: 204688 - RNA, 32 nt, Homo Sapiens
uuauagaaaauauuucuaaaauuuuaucacgg

SEQ ID NO: 204689 - RNA, 32 nt, Homo Sapiens
cauuuuccgcuuuaggaaauuauuuaugcauu

SEQ ID NO: 204690 - RNA, 32 nt, Homo Sapiens
uuuccaaagcaguccaggggaauacuuucuga

SEQ ID NO: 204691 - RNA, 32 nt, Homo Sapiens
aguucaaccagccuggacaacaaagcaagacc

SEQ ID NO: 204692 - RNA, 32 nt, Homo Sapiens
aguugcaggcuccuuuagcugcaccaugaagu

SEQ ID NO: 204693 - RNA, 32 nt, Homo Sapiens
ugguaaguaaaacaacuaaaucucuuaguuuu

SEQ ID NO: 204694 - RNA, 32 nt, Homo Sapiens
aucccacaucguguggggcaguguccaucccc

SEQ ID NO: 204695 - RNA, 32 nt, Homo Sapiens
uuauaaucuaacccaaacuagcauguguuucu

SEQ ID NO: 204696 - RNA, 32 nt, Homo Sapiens
aaaagagaugacccugccccuugcccagggcc

SEQ ID NO: 204697 - RNA, 32 nt, Homo Sapiens
ucauuuuaacucuagaauugggcuuguacaga

SEQ ID NO: 204698 - RNA, 32 nt, Homo Sapiens
ccuguguuucuuagugcaaaucuguagaguaa

SEQ ID NO: 204699 - RNA, 32 nt, Homo Sapiens
uaucugaagaacuuggagguuuuggggcauuc

SEQ ID NO: 204700 - RNA, 32 nt, Homo Sapiens
uggccuguuucaucacguaugugcugcuaccu

SEQ ID NO: 204701 - RNA, 32 nt, Homo Sapiens
cccaagugauacucccaccucugccuuacaaa

SEQ ID NO: 204702 - RNA, 32 nt, Homo Sapiens
cugauguguuuccauuuguauuuaaugugugu

SEQ ID NO: 204703 - RNA, 32 nt, Homo Sapiens
cccacugcuugcucacauccauaucagaaggg

SEQ ID NO: 204704 - RNA, 32 nt, Homo Sapiens
caucaccuuccuccccaguguuuccacuuauc

SEQ ID NO: 204705 - RNA, 32 nt, Homo Sapiens
aagcaggugcagugcugucaccuggcugaaga

SEQ ID NO: 204706 - RNA, 32 nt, Homo Sapiens
ugggugguaugaaagcacuuccagaccucuag

SEQ ID NO: 204707 - RNA, 32 nt, Homo Sapiens
cauagccauuuucucucuagggcuuucuuucc

SEQ ID NO: 204708 - RNA, 32 nt, Homo Sapiens
augggucuuuugccgugaccacaaauaaagga

SEQ ID NO: 204709 - RNA, 32 nt, Homo Sapiens
acacucuagccccugcccuuauugggggacag

SEQ ID NO: 204710 - RNA, 30 nt, Homo Sapiens
acuuugggaggugcaggcaggcagauggcu

SEQ ID NO: 204711 - RNA, 30 nt, Homo Sapiens
ggcccaccacuugccugaucauagccuccu

SEQ ID NO: 204712 - RNA, 32 nt, Homo Sapiens
cccucugucuagggaccccccucccaagccug

SEQ ID NO: 204713 - RNA, 32 nt, Homo Sapiens
uuuuaguuagagguggaacauuccuuggacca

SEQ ID NO: 204714 - RNA, 32 nt, Homo Sapiens
agcccccggcccggccacugcaggaugcccac

SEQ ID NO: 204715 - RNA, 32 nt, Homo Sapiens
guagugauauuguaacaauacugccauucccu

SEQ ID NO: 204716 - RNA, 32 nt, Homo Sapiens
agcauuuccuucccugacagccggaccuggga

SEQ ID NO: 204717 - RNA, 30 nt, Homo Sapiens
augauuuccuaaaagggggaaaaaagugcc

SEQ ID NO: 204718 - RNA, 32 nt, Homo Sapiens
uaauuugcgaauguauucuauaaaaucacauc

SEQ ID NO: 204719 - RNA, 32 nt, Homo Sapiens
uaagaugggaauggaaaugccugauguuaagg

SEQ ID NO: 204720 - RNA, 32 nt, Homo Sapiens
ggggcucccgcugggacuccacuuccguggau

SEQ ID NO: 204721 - RNA, 32 nt, Homo Sapiens
aauuccugcagggcuggugacagacauaacag

SEQ ID NO: 204722 - RNA, 32 nt, Homo Sapiens
ccggcgaggguggggagggcaggcgcaggugg

SEQ ID NO: 204723 - RNA, 32 nt, Homo Sapiens
gaugaggggaaaaaccaguauuuaagucuaua

SEQ ID NO: 204724 - RNA, 32 nt, Homo Sapiens
ugaguuugggaauuguguauagcugauuuuuu

SEQ ID NO: 204725 - RNA, 32 nt, Homo Sapiens
ccgguccagcgccccaggacccgccgccggcu

SEQ ID NO: 204726 - RNA, 32 nt, Homo Sapiens
cgucacgugcgcgccgcccgcgggccgguugg

SEQ ID NO: 204727 - RNA, 32 nt, Homo Sapiens
uucuaauaauuucugugccuuucuguccugua

SEQ ID NO: 204728 - RNA, 32 nt, Homo Sapiens
ggcuggccccacucuuguagcauggacacugc

SEQ ID NO: 204729 - RNA, 32 nt, Homo Sapiens
uuacuuuaccuucacuaacaauggggggagaa

SEQ ID NO: 204730 - RNA, 32 nt, Homo Sapiens
gggguggggaggaggcaggaggcggcugcgcg

SEQ ID NO: 204731 - RNA, 32 nt, Homo Sapiens
gcgagggggcggggcggacggccucccggaag

SEQ ID NO: 204732 - RNA, 32 nt, Homo Sapiens
acucuuguuuaccauucauguaacaaaaccca

SEQ ID NO: 204733 - RNA, 32 nt, Homo Sapiens
accucagcgcccagcccuuccgucuuguuacg

SEQ ID NO: 204734 - RNA, 29 nt, Homo Sapiens
aagagauaaaguuuguaaaacuucgaaaa

SEQ ID NO: 204735 - RNA, 32 nt, Homo Sapiens
ggagugagugcaggcucagaucagggcgaggc

SEQ ID NO: 204736 - RNA, 32 nt, Homo Sapiens
auaucuuaauaaaguuuuaagcuuuucuccaa

SEQ ID NO: 204737 - RNA, 32 nt, Homo Sapiens
uggugacgccuggcagcgggccuggcacgggu

SEQ ID NO: 204738 - RNA, 32 nt, Homo Sapiens
gggacgagggcggcggauggcgucccauguag

SEQ ID NO: 204739 - RNA, 32 nt, Homo Sapiens
ugauuuuagcucugagaacaaacaaauuaagg

SEQ ID NO: 204740 - RNA, 32 nt, Homo Sapiens
uccaucacauuuggcaaagaacaaagacccaa

SEQ ID NO: 204741 - RNA, 30 nt, Homo Sapiens
uggacuggauauugacucuaacucuuauuc

SEQ ID NO: 204742 - RNA, 32 nt, Homo Sapiens
ugagagcacgguggggcggggcgggagaaagu

SEQ ID NO: 204743 - RNA, 32 nt, Homo Sapiens
uggugcucacagcuguaaucccagcacuuuga

SEQ ID NO: 204744 - RNA, 32 nt, Homo Sapiens
caccuuccuccgugacuguguuuuuguucuga

SEQ ID NO: 204745 - RNA, 32 nt, Homo Sapiens
aguuagaacuaccauuuccuccccuuagcugc

SEQ ID NO: 204746 - RNA, 32 nt, Homo Sapiens
gcccgccuccgcagagagcggcgggagcccgg

SEQ ID NO: 204747 - RNA, 32 nt, Homo Sapiens
gugguacccccuucucuccccagccccaugug

SEQ ID NO: 204748 - RNA, 32 nt, Homo Sapiens
ggcugugggagguguuggcggcggcggcgcgg

SEQ ID NO: 204749 - RNA, 32 nt, Homo Sapiens
gcgggcggggguacagggacggggcaggggcu

SEQ ID NO: 204750 - RNA, 32 nt, Homo Sapiens
uauuauacuagauaaaauguuguuacaaaguc

SEQ ID NO: 204751 - RNA, 32 nt, Homo Sapiens
ucguggaccaguacaucuguaaauacccggag

SEQ ID NO: 204752 - RNA, 32 nt, Homo Sapiens
ggugaugggccuugcccucccccucccagccc

SEQ ID NO: 204753 - RNA, 32 nt, Homo Sapiens
gcagucuucaguuugcagaguaggggucuguc

SEQ ID NO: 204754 - RNA, 32 nt, Homo Sapiens
gcggcucagacacggcccgagcgccgccgcgg

SEQ ID NO: 204755 - RNA, 32 nt, Homo Sapiens
caaaaaguaugagugugguaaauauuaaagaa

SEQ ID NO: 204756 - RNA, 32 nt, Homo Sapiens
augccuuugggguucgaaguggcccuggagcc

SEQ ID NO: 204757 - RNA, 32 nt, Homo Sapiens
uuggacaguuauguguugagggaaauacaguu

SEQ ID NO: 204758 - RNA, 32 nt, Homo Sapiens
gaaaaagaaaagaucuugcuaaaguuaaaaua

SEQ ID NO: 204759 - RNA, 32 nt, Homo Sapiens
auauggauauccucaauucuuaagacagcuug

SEQ ID NO: 204760 - RNA, 32 nt, Homo Sapiens
ccuccccgggcgcuccuccccaggccucccgg

SEQ ID NO: 204761 - RNA, 32 nt, Homo Sapiens
agggauuugcacacagaagacacucaauaucu

SEQ ID NO: 204762 - RNA, 32 nt, Homo Sapiens
acugcagccugggcaacauagcaagacucugu

SEQ ID NO: 204763 - RNA, 28 nt, Homo Sapiens
accauggaggcuggcauccuccuggcca

SEQ ID NO: 204764 - RNA, 32 nt, Homo Sapiens
ggaaggugugucucuccuccaguggucuuugg

SEQ ID NO: 204765 - RNA, 32 nt, Homo Sapiens
ccuucucugccagcgaucucgcagcacugugu

SEQ ID NO: 204766 - RNA, 32 nt, Homo Sapiens
gauaaucccaccguuucuggcaugucagauau

SEQ ID NO: 204767 - RNA, 32 nt, Homo Sapiens
guucacaaaaauuauguuaguguguuuucagu

SEQ ID NO: 204768 - RNA, 32 nt, Homo Sapiens
ugggggguuggcagcccacugcaccgccucag

SEQ ID NO: 204769 - RNA, 28 nt, Homo Sapiens
ccuucaaagggaaaacauuugggguucu

SEQ ID NO: 204770 - RNA, 32 nt, Homo Sapiens
gcacuccucaggaaugagaaccacugaaccac

SEQ ID NO: 204771 - RNA, 32 nt, Homo Sapiens
aucugcaaaccugggcaguauuccacacugaa

SEQ ID NO: 204772 - RNA, 32 nt, Homo Sapiens
ccagcccugugcuaggcgcugacauuaacagg

SEQ ID NO: 204773 - RNA, 32 nt, Homo Sapiens
gagcuucaggacgccuuuccugucccacuggc

SEQ ID NO: 204774 - RNA, 32 nt, Homo Sapiens
gaggccgaagaucacggugaccagagauuucu

SEQ ID NO: 204775 - RNA, 32 nt, Homo Sapiens
accaguugauaaagaaugccaaaugcucugga

SEQ ID NO: 204776 - RNA, 32 nt, Homo Sapiens
gcagugaauauugggaaccuuccagugguuuu

SEQ ID NO: 204777 - RNA, 32 nt, Homo Sapiens
uaccaugaguaaaacuucagguguuucgcaag

SEQ ID NO: 204778 - RNA, 31 nt, Homo Sapiens
cccggguuggucggguuuccaagggcugacc

SEQ ID NO: 204779 - RNA, 32 nt, Homo Sapiens
ugcuaacucuaagauuugauaagggccacauc

SEQ ID NO: 204780 - RNA, 32 nt, Homo Sapiens
ucuucaccguggcgagcauucugcucauagac

SEQ ID NO: 204781 - RNA, 32 nt, Homo Sapiens
uguucuucaacuguuuuugucuacacucuuuc

SEQ ID NO: 204782 - RNA, 32 nt, Homo Sapiens
cuaguuuaaggguggaaaaaugaaaauuuuug

SEQ ID NO: 204783 - RNA, 32 nt, Homo Sapiens
aagaaucccucgucugugcguuucuuguggga

SEQ ID NO: 204784 - RNA, 32 nt, Homo Sapiens
gcacccaccuggcgugcugcugccgccacuug

SEQ ID NO: 204785 - RNA, 32 nt, Homo Sapiens
gagcagcagcagcagcagcagcagcaaccucc

SEQ ID NO: 204786 - RNA, 32 nt, Homo Sapiens
ucuaccgaguaauacaaugcaggagcucaacc

SEQ ID NO: 204787 - RNA, 32 nt, Homo Sapiens
gagacaggacuucaggaguccuggagggcugc

SEQ ID NO: 204788 - RNA, 30 nt, Homo Sapiens
caaagauauaaaaaauaaacgguagaacaa

SEQ ID NO: 204789 - RNA, 32 nt, Homo Sapiens
acuggcuaugagcagaagguucgggccagccu

SEQ ID NO: 204790 - RNA, 32 nt, Homo Sapiens
cuguggcacaggcugcccggagggauggcgug

SEQ ID NO: 204791 - RNA, 32 nt, Homo Sapiens
uagcuauaaacacuuuccagauugaaggauua

SEQ ID NO: 204792 - RNA, 32 nt, Homo Sapiens
cucagaucuccauggcccagcaaggccaagau

SEQ ID NO: 204793 - RNA, 32 nt, Homo Sapiens
uucgagaaagcugagcaaauagacuaaaugac

SEQ ID NO: 204794 - RNA, 32 nt, Homo Sapiens
ucaggaaggaggagaggaaccauuugugcaga

SEQ ID NO: 204795 - RNA, 32 nt, Homo Sapiens
acccuccccacgcugcagugggcuugugugug

SEQ ID NO: 204796 - RNA, 32 nt, Homo Sapiens
ugggguggggacggaggggaaagggaagccug

SEQ ID NO: 204797 - RNA, 32 nt, Homo Sapiens
gcagucagggugggaagaaagaaugcaagagu

SEQ ID NO: 204798 - RNA, 32 nt, Homo Sapiens
ugcccaaagcauguuccgcacccaggcggggg

SEQ ID NO: 204799 - RNA, 32 nt, Homo Sapiens
cggaggggcgggggaggcgccgggaagucgac

SEQ ID NO: 204800 - RNA, 32 nt, Homo Sapiens
uuguccaccagggcucagccaagcccugcagu

SEQ ID NO: 204801 - RNA, 32 nt, Homo Sapiens
uggguauuguagcugaaacgucuugcgagcug

SEQ ID NO: 204802 - RNA, 32 nt, Homo Sapiens
aguuaggaaugcacccggggccuccugcagau

SEQ ID NO: 204803 - RNA, 32 nt, Homo Sapiens
cugugauuuuccgugccagugaugccagggcc

SEQ ID NO: 204804 - RNA, 32 nt, Homo Sapiens
ucuaucaaaaauacaaaaaauuaacuaggugu

SEQ ID NO: 204805 - RNA, 32 nt, Homo Sapiens
uggcggggccagcaggcugucccagcccucac

SEQ ID NO: 204806 - RNA, 32 nt, Homo Sapiens
agagaagaaaaaacaacuggcuguaacguaaa

SEQ ID NO: 204807 - RNA, 32 nt, Homo Sapiens
gcucugagcacccugccgcccgcggccccagc

SEQ ID NO: 204808 - RNA, 32 nt, Homo Sapiens
ccugggccucacgguuucucgucagccccguc

SEQ ID NO: 204809 - RNA, 32 nt, Homo Sapiens
gaccccacccagucuucauguacggccgaccg

SEQ ID NO: 204810 - RNA, 32 nt, Homo Sapiens
cagcggcccagcugcuuaucugucuaacuugg

SEQ ID NO: 204811 - RNA, 32 nt, Homo Sapiens
agagggagcuccagcucugugcuccucauuca

SEQ ID NO: 204812 - RNA, 32 nt, Homo Sapiens
ugcggcgucugcaacagcuucgggcucggggu

SEQ ID NO: 204813 - RNA, 32 nt, Homo Sapiens
uuugcugacuugcugcugcacguggguaucag

SEQ ID NO: 204814 - RNA, 32 nt, Homo Sapiens
cagacccugggcccucucuccucacugcacca

SEQ ID NO: 204815 - RNA, 32 nt, Homo Sapiens
ggauaccucuggagaccaggaugggugggcag

SEQ ID NO: 204816 - RNA, 32 nt, Homo Sapiens
gcggccccacccaaggucaggcccugauggau

SEQ ID NO: 204817 - RNA, 32 nt, Homo Sapiens
gggcuuuauaugcuuggauggcuucguggaau

SEQ ID NO: 204818 - RNA, 32 nt, Homo Sapiens
gggcggcgcgucugggucuggcgcuucccgac

SEQ ID NO: 204819 - RNA, 32 nt, Homo Sapiens
accuggggaaaggggcggccgugggcgcagcu

SEQ ID NO: 204820 - RNA, 31 nt, Homo Sapiens
aaauggacaaauuggaugcauuuauguuaua

SEQ ID NO: 204821 - RNA, 32 nt, Homo Sapiens
cuggaaggcagugaccacuuuuuuauauucuc

SEQ ID NO: 204822 - RNA, 32 nt, Homo Sapiens
agagcaccgggcggccgggccugcguggugcc

SEQ ID NO: 204823 - RNA, 32 nt, Homo Sapiens
ccacccugucaugguaugugaggugugggugu

SEQ ID NO: 204824 - RNA, 32 nt, Homo Sapiens
cuccuccuauuaugagacuucaauuuccaaag

SEQ ID NO: 204825 - RNA, 32 nt, Homo Sapiens
uucacaaaaugaaacucccgaauggguggagu

SEQ ID NO: 204826 - RNA, 30 nt, Homo Sapiens
cugauggcuguugcugcagaagauguccuc

SEQ ID NO: 204827 - RNA, 32 nt, Homo Sapiens
cacucuuucuucauauacgguguuucuuaugu

SEQ ID NO: 204828 - RNA, 32 nt, Homo Sapiens
ugccuggaucauuugaaauuucugggagucug

SEQ ID NO: 204829 - RNA, 32 nt, Homo Sapiens
guccaaguuucacagauguuaagcauuuugug

SEQ ID NO: 204830 - RNA, 32 nt, Homo Sapiens
guuaaucuugauauaaauuuguguuugauaaa

SEQ ID NO: 204831 - RNA, 32 nt, Homo Sapiens
acagcaauagggggcagacagcuccuaccugu

SEQ ID NO: 204832 - RNA, 32 nt, Homo Sapiens
guuacuuagguggucaguccuuuuaaaguagu

SEQ ID NO: 204833 - RNA, 32 nt, Homo Sapiens
ugagccgcgggaacacguccggcgugcuggug

SEQ ID NO: 204834 - RNA, 32 nt, Homo Sapiens
acugucguggugccggcacccagccgggccaa

SEQ ID NO: 204835 - RNA, 32 nt, Homo Sapiens
uucucccacuacacucuaguaaacauuuucug

SEQ ID NO: 204836 - RNA, 32 nt, Homo Sapiens
ugagucaauuuaacaauccugacaugcucccu

SEQ ID NO: 204837 - RNA, 32 nt, Homo Sapiens
cccccacacagaccccgcaauccuuuuuuaaa

SEQ ID NO: 204838 - RNA, 32 nt, Homo Sapiens
ggccaaagacgccggcuugguguggccccaga

SEQ ID NO: 204839 - RNA, 32 nt, Homo Sapiens
ggccgucgcugcgcugcagccauccuggcccg

SEQ ID NO: 204840 - RNA, 32 nt, Homo Sapiens
gccacugcauuccggccugggcgacagagcga

SEQ ID NO: 204841 - RNA, 32 nt, Homo Sapiens
aguaauaguucuguaggauauuacaauuaaua

SEQ ID NO: 204842 - RNA, 29 nt, Homo Sapiens
aguggcugguccaugucuauagaguaaca

SEQ ID NO: 204843 - RNA, 32 nt, Homo Sapiens
ucaggcaggugugcauuugugcaugccagugu

SEQ ID NO: 204844 - RNA, 32 nt, Homo Sapiens
ccugaccucaggugauccgccuaccucagccu

SEQ ID NO: 204845 - RNA, 32 nt, Homo Sapiens
ccugucuacugauagucaguuugcugugucag

SEQ ID NO: 204846 - RNA, 32 nt, Homo Sapiens
ugcuguuggugucggagcacgaggggaggcac

SEQ ID NO: 204847 - RNA, 32 nt, Homo Sapiens
cccaaccucaggugauccgccuaccuuggccu

SEQ ID NO: 204848 - RNA, 32 nt, Homo Sapiens
agccuuuuguucugaccuaagagccugcuaug

SEQ ID NO: 204849 - RNA, 32 nt, Homo Sapiens
gcccguuccaccucgcgaucugccggguaccc

SEQ ID NO: 204850 - RNA, 32 nt, Homo Sapiens
gagccaaaaugacuuugaacugaaacuuuucu

SEQ ID NO: 204851 - RNA, 32 nt, Homo Sapiens
gggucccaguucaguuugucugcacagcagcc

SEQ ID NO: 204852 - RNA, 32 nt, Homo Sapiens
gggaagccuccacaacaccuccugauaguagu

SEQ ID NO: 204853 - RNA, 32 nt, Homo Sapiens
auaaaacucugcaaagacaaugucuagcacuu

SEQ ID NO: 204854 - RNA, 32 nt, Homo Sapiens
gcaaggguuugagaagcccaccccucuaauuc

SEQ ID NO: 204855 - RNA, 32 nt, Homo Sapiens
gccucgauuuauauuucuguuuguggugaacu

SEQ ID NO: 204856 - RNA, 32 nt, Homo Sapiens
uaagauccuccaagcugcuuuagaaguaacaa

SEQ ID NO: 204857 - RNA, 32 nt, Homo Sapiens
agagaucgucuguucaaauauauccuauauau

SEQ ID NO: 204858 - RNA, 32 nt, Homo Sapiens
guggaaugcugauggaggcagacgcugccgag

SEQ ID NO: 204859 - RNA, 32 nt, Homo Sapiens
agccagggcaacauaauaagacuuuucucuac

SEQ ID NO: 204860 - RNA, 32 nt, Homo Sapiens
uucauuuauuuuucuucauugcaguggauuga

SEQ ID NO: 204861 - RNA, 32 nt, Homo Sapiens
gugggcagggccagggcgggaggagcugggga

SEQ ID NO: 204862 - RNA, 32 nt, Homo Sapiens
auacuugacuuaggaggcaacccuaucucuug

SEQ ID NO: 204863 - RNA, 32 nt, Homo Sapiens
aaucaggaaugggaaauuaaaaaccagugaau

SEQ ID NO: 204864 - RNA, 32 nt, Homo Sapiens
ucaucaugucuccucucccauucgcaauaagc

SEQ ID NO: 204865 - RNA, 32 nt, Homo Sapiens
cauaauuuugccuuacuaacagaaucauaucc

SEQ ID NO: 204866 - RNA, 32 nt, Homo Sapiens
ugggaggcccugggucuccccccagccacacc

SEQ ID NO: 204867 - RNA, 32 nt, Homo Sapiens
guggaucuuggaaagcacuagaaacuaaacau

SEQ ID NO: 204868 - RNA, 32 nt, Homo Sapiens
cuggaaaagucgaucaauguuuugcaguuuau

SEQ ID NO: 204869 - RNA, 32 nt, Homo Sapiens
aagcauuuuuaacguguagguugagaacaagc

SEQ ID NO: 204870 - RNA, 32 nt, Homo Sapiens
guugguuuguuuuuaagagauggggucuuguu

SEQ ID NO: 204871 - RNA, 32 nt, Homo Sapiens
ucauugcgaugaugguuaaccauaacuuuacc

SEQ ID NO: 204872 - RNA, 32 nt, Homo Sapiens
cagcaaggcaggcaccccugcagacuucgucc

SEQ ID NO: 204873 - RNA, 32 nt, Homo Sapiens
ggcauaagcagcuucuccugcugacuggccaa

SEQ ID NO: 204874 - RNA, 32 nt, Homo Sapiens
cucaagaauuugccacguauguucaaggguga

SEQ ID NO: 204875 - RNA, 32 nt, Homo Sapiens
uuaaauacauaaauugagauaaguagauuaga

SEQ ID NO: 204876 - RNA, 32 nt, Homo Sapiens
cagccccccaaauucucuggaccuccacccug

SEQ ID NO: 204877 - RNA, 32 nt, Homo Sapiens
uuuaaaaaauccauuucuuuuagaaaaaauua

SEQ ID NO: 204878 - RNA, 32 nt, Homo Sapiens
ccuuauaaguccugauuaaauuaaucugaacc

SEQ ID NO: 204879 - RNA, 32 nt, Homo Sapiens
aucuguguguugugggaagagaauuuucaaua

SEQ ID NO: 204880 - RNA, 32 nt, Homo Sapiens
ccucaccguaucuuuuaacccauuuaaaaaaa

SEQ ID NO: 204881 - RNA, 32 nt, Homo Sapiens
cauuuucgagccaucaguuuauguucagaugc

SEQ ID NO: 204882 - RNA, 32 nt, Homo Sapiens
ccgccuugcuuccccauuccuggcgaccacug

SEQ ID NO: 204883 - RNA, 32 nt, Homo Sapiens
agaugucaggguuuuucuauucuggacaauga

SEQ ID NO: 204884 - RNA, 32 nt, Homo Sapiens
uaugguggaugaugauuucaucucacgugcug

SEQ ID NO: 204885 - RNA, 32 nt, Homo Sapiens
ccaugccguccgccggccccgccugagccgcg

SEQ ID NO: 204886 - RNA, 32 nt, Homo Sapiens
auaaaagauugugaaaucguaacugcuuuguu

SEQ ID NO: 204887 - RNA, 32 nt, Homo Sapiens
ucacugaagcgccaagcuaucccuuuagcaaa

SEQ ID NO: 204888 - RNA, 32 nt, Homo Sapiens
aaaaccaaagauuuccucugagcaacuuucaa

SEQ ID NO: 204889 - RNA, 32 nt, Homo Sapiens
cugccauccagucuggccccaguaccuaccug

SEQ ID NO: 204890 - RNA, 32 nt, Homo Sapiens
aaaugaaauucauauaaugacuuaaauguauu

SEQ ID NO: 204891 - RNA, 32 nt, Homo Sapiens
cuucgcuggggcggggcgcaggcguuggcuuu

SEQ ID NO: 204892 - RNA, 32 nt, Homo Sapiens
cuccacacauaaauaacaccacuaaaguuguu

SEQ ID NO: 204893 - RNA, 32 nt, Homo Sapiens
uuauuuugaagcaccagcaccauuauuuccca

SEQ ID NO: 204894 - RNA, 32 nt, Homo Sapiens
ggaaaugugcauagaguuuguauuuuauuuuu

SEQ ID NO: 204895 - RNA, 32 nt, Homo Sapiens
cgccuggcucgguuaugggaauagccgucagu

SEQ ID NO: 204896 - RNA, 32 nt, Homo Sapiens
ggcgguaugacuggacagacuuugaauauacu

SEQ ID NO: 204897 - RNA, 32 nt, Homo Sapiens
cugaaaacugcuuuugcugauaaagaaacaca

SEQ ID NO: 204898 - RNA, 32 nt, Homo Sapiens
uuuuggauaaagaacuuuuuaaauucaguacu

SEQ ID NO: 204899 - RNA, 32 nt, Homo Sapiens
gagagaaagaagccaagucugauuauaccaua

SEQ ID NO: 204900 - RNA, 32 nt, Homo Sapiens
gaaucaaucaacaugagaagccugaggccagg

SEQ ID NO: 204901 - RNA, 31 nt, Homo Sapiens
gugguaccuugcugccugcucugcugguaga

SEQ ID NO: 204902 - RNA, 32 nt, Homo Sapiens
guaacccacagugguaccaugagaugucaaaa

SEQ ID NO: 204903 - RNA, 32 nt, Homo Sapiens
guggcauuugauaaaguaaguuguaauaugau

SEQ ID NO: 204904 - RNA, 32 nt, Homo Sapiens
cucuacagagacgugaugugggaaaccuucag

SEQ ID NO: 204905 - RNA, 32 nt, Homo Sapiens
ugaacuggaaauguuuuacaugauucuuaaac

SEQ ID NO: 204906 - RNA, 32 nt, Homo Sapiens
auucccccacccaaauacaagucccaguggaa

SEQ ID NO: 204907 - RNA, 32 nt, Homo Sapiens
aauacagauagaaacauagauaaauauaacua

SEQ ID NO: 204908 - RNA, 32 nt, Homo Sapiens
aaugagaaauagagacgugucaacagaugcau

SEQ ID NO: 204909 - RNA, 32 nt, Homo Sapiens
uuggggauuuuucuucuagaaaucaaaugacu

SEQ ID NO: 204910 - RNA, 32 nt, Homo Sapiens
gcaauuaucaaaaagaaaaaccacaggcccuu

SEQ ID NO: 204911 - RNA, 32 nt, Homo Sapiens
uuggucuacagcucuggcauggagggcacaug

SEQ ID NO: 204912 - RNA, 32 nt, Homo Sapiens
uagacaugauaaaagaaacauuuguacguucu

SEQ ID NO: 204913 - RNA, 32 nt, Homo Sapiens
auuccacuaagaaaugccaagauucuuaaauu

SEQ ID NO: 204914 - RNA, 32 nt, Homo Sapiens
caggcccugggagucauguggaugccaguagc

SEQ ID NO: 204915 - RNA, 32 nt, Homo Sapiens
ccaggucuauacauuuagguaaugaaugguag

SEQ ID NO: 204916 - RNA, 32 nt, Homo Sapiens
uucacgccauucuccugccucagccucacgag

SEQ ID NO: 204917 - RNA, 32 nt, Homo Sapiens
gcugggcagucaagcgagcaucaggagaacug

SEQ ID NO: 204918 - RNA, 32 nt, Homo Sapiens
uuccauaauucagauuucuacacuuuauacuu

SEQ ID NO: 204919 - RNA, 32 nt, Homo Sapiens
uaucccugccagcacagugcuggacauaguga

SEQ ID NO: 204920 - RNA, 32 nt, Homo Sapiens
uuuuuuacagaauauaagaaacaucaaugacc

SEQ ID NO: 204921 - RNA, 32 nt, Homo Sapiens
uuuagaccgcccuguggaaugauccucuuauu

SEQ ID NO: 204922 - RNA, 32 nt, Homo Sapiens
uauauucccaaggggccgggugcuuuccuguc

SEQ ID NO: 204923 - RNA, 32 nt, Homo Sapiens
aacguuugagugccagcucugugccgggugcc

SEQ ID NO: 204924 - RNA, 32 nt, Homo Sapiens
uugaccaaaacacaguauaaaaacacuggcac

SEQ ID NO: 204925 - RNA, 32 nt, Homo Sapiens
ggguaaggaguucaaggcagcgcccacacccg

SEQ ID NO: 204926 - RNA, 32 nt, Homo Sapiens
auaaacaggccaugcauauaauguacagugua

SEQ ID NO: 204927 - RNA, 32 nt, Homo Sapiens
agugcggcucugucccugcugccgccuccagu

SEQ ID NO: 204928 - RNA, 32 nt, Homo Sapiens
acuguaucauuuucuuuuuuaaccgguaagag

SEQ ID NO: 204929 - RNA, 32 nt, Homo Sapiens
uuuuaacuccgucuaccuggcguuuuguuaga

SEQ ID NO: 204930 - RNA, 32 nt, Homo Sapiens
cugagucaccggccccgcccuccggagccgga

SEQ ID NO: 204931 - RNA, 32 nt, Homo Sapiens
ugagaggccccggccccucccugccuggccuu

SEQ ID NO: 204932 - RNA, 32 nt, Homo Sapiens
cagggggcagaagggcauccucugccaggugg

SEQ ID NO: 204933 - RNA, 32 nt, Homo Sapiens
aaaagaaaucaagaaugcaauuuuauuuacaa

SEQ ID NO: 204934 - RNA, 32 nt, Homo Sapiens
cgguuucauuuuacugaaaaccugugaaaccu

SEQ ID NO: 204935 - RNA, 32 nt, Homo Sapiens
gggcuagcggccuggcgcugcggcgaccgacc

SEQ ID NO: 204936 - RNA, 32 nt, Homo Sapiens
gucuaaacuguuaaacaacucuuuaaaggaua

SEQ ID NO: 204937 - RNA, 32 nt, Homo Sapiens
aacacguagagcuauuaacuguucaaaagccu

SEQ ID NO: 204938 - RNA, 32 nt, Homo Sapiens
uucauauaaaaauuaccuaaagcaaaguaaaa

SEQ ID NO: 204939 - RNA, 32 nt, Homo Sapiens
gaggaacaaacacuaaccuaagguacacaucc

SEQ ID NO: 204940 - RNA, 32 nt, Homo Sapiens
caauugucucuuaaugcgaugacacuauucau

SEQ ID NO: 204941 - RNA, 32 nt, Homo Sapiens
aacuguuaaaauuuaaaaaaaauuuaaaucau

SEQ ID NO: 204942 - RNA, 32 nt, Homo Sapiens
agacuuucugaaaaaauccacuuuuuguucau

SEQ ID NO: 204943 - RNA, 32 nt, Homo Sapiens
cugggguguucccuggcccauggucaccugug

SEQ ID NO: 204944 - RNA, 32 nt, Homo Sapiens
cggucgugguggcucaugccuguaaucccaac

SEQ ID NO: 204945 - RNA, 32 nt, Homo Sapiens
aguguuucgguugguaaguucuuccagcugaa

SEQ ID NO: 204946 - RNA, 32 nt, Homo Sapiens
ucgccucccagcucccucggggcccccagcua

SEQ ID NO: 204947 - RNA, 32 nt, Homo Sapiens
agcugaaucacguagaauuugaagaucaagau

SEQ ID NO: 204948 - RNA, 32 nt, Homo Sapiens
accuggcaacucuuuuaccaucccuuuguauu

SEQ ID NO: 204949 - RNA, 32 nt, Homo Sapiens
uaauccgagggggaauauuugcugggcgucag

SEQ ID NO: 204950 - RNA, 32 nt, Homo Sapiens
cccaccagaauggcccggggcuccccaggcuc

SEQ ID NO: 204951 - RNA, 32 nt, Homo Sapiens
gggauggugccgcccgauaugcuugauaugcu

SEQ ID NO: 204952 - RNA, 32 nt, Homo Sapiens
acuacgagaaagcuguggugggacagccaagu

SEQ ID NO: 204953 - RNA, 32 nt, Homo Sapiens
aaaaaauucaaauauacagaauggaauaaaaa

SEQ ID NO: 204954 - RNA, 32 nt, Homo Sapiens
uggcagaggauacauugggcuguauuuauugg

SEQ ID NO: 204955 - RNA, 32 nt, Homo Sapiens
ccaggacugugggcccacggaccccugggaag

SEQ ID NO: 204956 - RNA, 32 nt, Homo Sapiens
caguggucagggaugccuggaggcauauaucc

SEQ ID NO: 204957 - RNA, 32 nt, Homo Sapiens
acugccgucggguaaggucccagcacggacau

SEQ ID NO: 204958 - RNA, 32 nt, Homo Sapiens
uuuuguuucuauuugucucuaaguauuuucuu

SEQ ID NO: 204959 - RNA, 32 nt, Homo Sapiens
cuuaaaacagagcccaccugcauaguaacugu

SEQ ID NO: 204960 - RNA, 32 nt, Homo Sapiens
cgcgucgccgugggcgacgugcccgcuuccaa

SEQ ID NO: 204961 - RNA, 32 nt, Homo Sapiens
ugccuuggacaaaaaggcuaccuaccacgugc

SEQ ID NO: 204962 - RNA, 32 nt, Homo Sapiens
ugcggaccaaccccccggagccugcacccuuc

SEQ ID NO: 204963 - RNA, 32 nt, Homo Sapiens
cauauuuggggauaugagaaagcaaacuagau

SEQ ID NO: 204964 - RNA, 32 nt, Homo Sapiens
ggaggaggucagaggagaugggggcuggcucu

SEQ ID NO: 204965 - RNA, 32 nt, Homo Sapiens
gguuucuauugugacgcucucccugacuugga

SEQ ID NO: 204966 - RNA, 32 nt, Homo Sapiens
aagcucccagaaaaaccacaagcaagggcccc

SEQ ID NO: 204967 - RNA, 32 nt, Homo Sapiens
gucggugucugcgcgcuggugucugaggccca

SEQ ID NO: 204968 - RNA, 32 nt, Homo Sapiens
uuuucgcuauaaauaaaagguaacuguacaaa

SEQ ID NO: 204969 - RNA, 32 nt, Homo Sapiens
uuggaccuauauuguucacguuuugauggcgg

SEQ ID NO: 204970 - RNA, 32 nt, Homo Sapiens
gcuguuauuuccccuagucaucucuuacauuc

SEQ ID NO: 204971 - RNA, 32 nt, Homo Sapiens
uggaagucaccauugcagaugcuuagucaacu

SEQ ID NO: 204972 - RNA, 32 nt, Homo Sapiens
gauucuuucagagaagaaaccagaucugaccu

SEQ ID NO: 204973 - RNA, 32 nt, Homo Sapiens
ugccagaacuuaacccaaauacacacagagag

SEQ ID NO: 204974 - RNA, 32 nt, Homo Sapiens
ggcgcggggggcggccccggcggggggcgggg

SEQ ID NO: 204975 - RNA, 32 nt, Homo Sapiens
ccucucagccuuccgcccggugaggaagcccg

SEQ ID NO: 204976 - RNA, 32 nt, Homo Sapiens
agaacgcuccagcccaggacuucgaggcugca

SEQ ID NO: 204977 - RNA, 32 nt, Homo Sapiens
gguuaauauuucuguguagaaaugaaaauugg

SEQ ID NO: 204978 - RNA, 32 nt, Homo Sapiens
caccauugacguuagcugccccauugccucua

SEQ ID NO: 204979 - RNA, 32 nt, Homo Sapiens
ccuugauugcuccuaguuauauacagggucua

SEQ ID NO: 204980 - RNA, 32 nt, Homo Sapiens
cggugccgagccccugcugcugcaugaaccuu

SEQ ID NO: 204981 - RNA, 32 nt, Homo Sapiens
gcgcgcaccggcgcgcggccaagaccaugguc

SEQ ID NO: 204982 - RNA, 32 nt, Homo Sapiens
agcuggucucaaacuccugaccucaggugaug

SEQ ID NO: 204983 - RNA, 32 nt, Homo Sapiens
gccagccccucgcccucucuguggcauagucu

SEQ ID NO: 204984 - RNA, 32 nt, Homo Sapiens
uuaauuacaccuguggggagcuuggcggggca

SEQ ID NO: 204985 - RNA, 32 nt, Homo Sapiens
aguguauugucuuugcacacacauauagguau

SEQ ID NO: 204986 - RNA, 32 nt, Homo Sapiens
aucugccgcaggcccgcgggccgcccgggaau

SEQ ID NO: 204987 - RNA, 32 nt, Homo Sapiens
cuguggguuguaauguugauggccgccacccu

SEQ ID NO: 204988 - RNA, 32 nt, Homo Sapiens
gucuggaaucuggguggguccuuggaggaggg

SEQ ID NO: 204989 - RNA, 32 nt, Homo Sapiens
cacugggcaaaagagaauccccugccuucccu

SEQ ID NO: 204990 - RNA, 32 nt, Homo Sapiens
ucccggcucucccgcccucccucccgaaacac

SEQ ID NO: 204991 - RNA, 31 nt, Homo Sapiens
cccccuuuaaagagaaaguaacaccacuccu

SEQ ID NO: 204992 - RNA, 32 nt, Homo Sapiens
gcuaguuaugggaguuaaguuuuuguaguuac

SEQ ID NO: 204993 - RNA, 32 nt, Homo Sapiens
ccagauguuucauagaaagaauuuuuucuuga

SEQ ID NO: 204994 - RNA, 32 nt, Homo Sapiens
cugcacccacuuuccugucauuuauuuauaua

SEQ ID NO: 204995 - RNA, 32 nt, Homo Sapiens
acaauugggaaucuccugaggacaacuuggag

SEQ ID NO: 204996 - RNA, 31 nt, Homo Sapiens
aucgcgagggcggagcugaguucuccucugc

SEQ ID NO: 204997 - RNA, 32 nt, Homo Sapiens
cccccguucgcccucuggcccgcgggcgaaga

SEQ ID NO: 204998 - RNA, 32 nt, Homo Sapiens
ugggugcggacuagguggccgcggcgggagug

SEQ ID NO: 204999 - RNA, 32 nt, Homo Sapiens
gcccaggacgccuuuauaugcuguuaguuucc

SEQ ID NO: 205000 - RNA, 32 nt, Homo Sapiens
caacagcacagagcgcugaacacacaccccac

SEQ ID NO: 205001 - RNA, 32 nt, Homo Sapiens
ugcacuccagcauggaagacagcgagacuccg

SEQ ID NO: 205002 - RNA, 32 nt, Homo Sapiens
cggucuccugucuaaaaugaggugauaauagc

SEQ ID NO: 205003 - RNA, 32 nt, Homo Sapiens
uuaguugacugcacuauauaauauagaacuau

SEQ ID NO: 205004 - RNA, 32 nt, Homo Sapiens
auucagaaaaccaaaaauaaaaaauacggaaa

SEQ ID NO: 205005 - RNA, 29 nt, Homo Sapiens
cggggacaggagcagaggacggucaucca

SEQ ID NO: 205006 - RNA, 32 nt, Homo Sapiens
cccugcucagccgugcccugcuccaucucccu

SEQ ID NO: 205007 - RNA, 32 nt, Homo Sapiens
uuacuugggggaggacagacacugugguguca

SEQ ID NO: 205008 - RNA, 32 nt, Homo Sapiens
agaaccugccccccggcuuccccgccuccgug

SEQ ID NO: 205009 - RNA, 32 nt, Homo Sapiens
gagaaggcccuccuugcuaucugggcugagug

SEQ ID NO: 205010 - RNA, 32 nt, Homo Sapiens
ggaaaauggaacaaaaugguguucuuagguaa

SEQ ID NO: 205011 - RNA, 32 nt, Homo Sapiens
cuuagggccgcgaucccgccucauugcaaugu

SEQ ID NO: 205012 - RNA, 32 nt, Homo Sapiens
uccaauuagaaaaggacaagauauauuuuucu

SEQ ID NO: 205013 - RNA, 32 nt, Homo Sapiens
caucucuuucuuccucccauugcagcuauccu

SEQ ID NO: 205014 - RNA, 32 nt, Homo Sapiens
cugcucauuccaguaaugucuuugaaagcaaa

SEQ ID NO: 205015 - RNA, 32 nt, Homo Sapiens
gcuuuccacagugguugcaucuguuuacauac

SEQ ID NO: 205016 - RNA, 32 nt, Homo Sapiens
agaauaaaguuaccauguuauacuguuauguc

SEQ ID NO: 205017 - RNA, 32 nt, Homo Sapiens
agaggaggcggcccggcccgggcagcugcggc

SEQ ID NO: 205018 - RNA, 32 nt, Homo Sapiens
ucugaagggggcccccuuucccugcccgcugg

SEQ ID NO: 205019 - RNA, 32 nt, Homo Sapiens
ccacacuccuggacaggccccuggacaguuga

SEQ ID NO: 205020 - RNA, 32 nt, Homo Sapiens
ugcaagccuuugauucccaaugggggacucag

SEQ ID NO: 205021 - RNA, 32 nt, Homo Sapiens
acccugacgugcagaagcugcuggagacccuc

SEQ ID NO: 205022 - RNA, 32 nt, Homo Sapiens
ccccaaaucuguucuguaaauaauauuaugga

SEQ ID NO: 205023 - RNA, 32 nt, Homo Sapiens
cccgccggaaguaagaaggggaauucugaguu

SEQ ID NO: 205024 - RNA, 32 nt, Homo Sapiens
guguagguuccguaucucccuggagaagcacc

SEQ ID NO: 205025 - RNA, 32 nt, Homo Sapiens
uccagccccccuccuuuuuuuguuuuucuuuu

SEQ ID NO: 205026 - RNA, 32 nt, Homo Sapiens
ucugcacccgcaccccacccccagaccucacc

SEQ ID NO: 205027 - RNA, 32 nt, Homo Sapiens
ccucggcccucccagucccucgcugcacaaau

SEQ ID NO: 205028 - RNA, 32 nt, Homo Sapiens
uuuauaugugaaaucuugcccagucacagagg

SEQ ID NO: 205029 - RNA, 32 nt, Homo Sapiens
uggcgccccuucugcggccgggacccaggccu

SEQ ID NO: 205030 - RNA, 32 nt, Homo Sapiens
uguuugcucaccuggggugugggaggcccguc

SEQ ID NO: 205031 - RNA, 32 nt, Homo Sapiens
aagauggccgcggcgcgcacggcuccugcggc

SEQ ID NO: 205032 - RNA, 32 nt, Homo Sapiens
gugauggucugagacucucuuaggagcagagc

SEQ ID NO: 205033 - RNA, 32 nt, Homo Sapiens
auuggaaauuauuuaaacuaauuuagauaacu

SEQ ID NO: 205034 - RNA, 32 nt, Homo Sapiens
ccggcagcgggugagagugggugcuggccagg

SEQ ID NO: 205035 - RNA, 32 nt, Homo Sapiens
acuaugcauaucuauauauuggccaauuaucu

SEQ ID NO: 205036 - RNA, 32 nt, Homo Sapiens
aauugugcugaaucugucugacuauaacucug

SEQ ID NO: 205037 - RNA, 32 nt, Homo Sapiens
uguucagagcagccggaguuugcuggaccaca

SEQ ID NO: 205038 - RNA, 32 nt, Homo Sapiens
ccuagacauggaaaaacagauuacugucuauu

SEQ ID NO: 205039 - RNA, 32 nt, Homo Sapiens
aguugccuggcggcgccgugccagaagccccc

SEQ ID NO: 205040 - RNA, 32 nt, Homo Sapiens
agcuugguacuguauuuuuuuauauugaucug

SEQ ID NO: 205041 - RNA, 32 nt, Homo Sapiens
caggaacccagaccccagucugggcggcucua

SEQ ID NO: 205042 - RNA, 32 nt, Homo Sapiens
caggagaacacugucuuaauauuucuuuacau

SEQ ID NO: 205043 - RNA, 32 nt, Homo Sapiens
uuugaaacacugggcuguuugcacagcuccaa

SEQ ID NO: 205044 - RNA, 32 nt, Homo Sapiens
cuguauaguuuaaugaugaaugugcaggggac

SEQ ID NO: 205045 - RNA, 32 nt, Homo Sapiens
aaaaaccaacuggcaguuugcuaagcauaucu

SEQ ID NO: 205046 - RNA, 32 nt, Homo Sapiens
aauggaugaauuguauuuugcaaagauaguua

SEQ ID NO: 205047 - RNA, 32 nt, Homo Sapiens
ucauaauuguguacucggaaauuaaaguuugc

SEQ ID NO: 205048 - RNA, 32 nt, Homo Sapiens
aucccucggaggaggaggugaaccagcugcac

SEQ ID NO: 205049 - RNA, 32 nt, Homo Sapiens
gcccccggcugccaaggacccuucuccgagcg

SEQ ID NO: 205050 - RNA, 32 nt, Homo Sapiens
cgggggcggggcggggcgccagccauggacaa

SEQ ID NO: 205051 - RNA, 32 nt, Homo Sapiens
aaccagguuggaaaccaagacggagcucagac

SEQ ID NO: 205052 - RNA, 32 nt, Homo Sapiens
aagaaggaggcgccuccacuggacgagggcug

SEQ ID NO: 205053 - RNA, 32 nt, Homo Sapiens
ugggaacagaucugugaucugaggagguucug

SEQ ID NO: 205054 - RNA, 32 nt, Homo Sapiens
cuuucccacccuuccuccccacaaggcugucu

SEQ ID NO: 205055 - RNA, 32 nt, Homo Sapiens
uguugugacagucccuucucccuucuuccuuc

SEQ ID NO: 205056 - RNA, 32 nt, Homo Sapiens
gguaccagcuccucuuuguaccucuggugcaa

SEQ ID NO: 205057 - RNA, 32 nt, Homo Sapiens
uugggguuuucacauaaucuccuuccacaucu

SEQ ID NO: 205058 - RNA, 32 nt, Homo Sapiens
gaaauuucaaaaaacuucaaaggguaguaugu

SEQ ID NO: 205059 - RNA, 32 nt, Homo Sapiens
cccacacagauagcagccucuugcuugcccuu

SEQ ID NO: 205060 - RNA, 32 nt, Homo Sapiens
gaaaguacaaauaccuauuauguugguuggaa

SEQ ID NO: 205061 - RNA, 32 nt, Homo Sapiens
ugagagucaugauaaauugccuuaaccaccaa

SEQ ID NO: 205062 - RNA, 32 nt, Homo Sapiens
ccagaagagaugcugaagacaccauccaaaga

SEQ ID NO: 205063 - RNA, 32 nt, Homo Sapiens
aguucuucaaauaaauaaaccaggucauucuc

SEQ ID NO: 205064 - RNA, 32 nt, Homo Sapiens
aagccugacaaaauucuuuucuuauuggauaa

SEQ ID NO: 205065 - RNA, 32 nt, Homo Sapiens
caaaguacaaacggcagaagcuggaggaggaa

SEQ ID NO: 205066 - RNA, 32 nt, Homo Sapiens
cgcuggagaagcuggagguggaccggcggcug

SEQ ID NO: 205067 - RNA, 32 nt, Homo Sapiens
guauuuauaaauuuauccaaguacuguaaucc

SEQ ID NO: 205068 - RNA, 32 nt, Homo Sapiens
uugcuuuacccccgccagcacuuccgcacaca

SEQ ID NO: 205069 - RNA, 32 nt, Homo Sapiens
agcggacgguucccagcgucugcucccacggu

SEQ ID NO: 205070 - RNA, 32 nt, Homo Sapiens
caaguucuaccugcagaaugguguuugugaug

SEQ ID NO: 205071 - RNA, 32 nt, Homo Sapiens
cugcccucgucguuccuccuccuuccauuuga

SEQ ID NO: 205072 - RNA, 32 nt, Homo Sapiens
ccccuaccccacccccgcaccauggggucaau

SEQ ID NO: 205073 - RNA, 32 nt, Homo Sapiens
gcaggcuggucuaccacuggaccauguaacuc

SEQ ID NO: 205074 - RNA, 30 nt, Homo Sapiens
agccuuccaugugcugccggaacucgggcc

SEQ ID NO: 205075 - RNA, 32 nt, Homo Sapiens
agacuccugccagauggggcagguaguuuauu

SEQ ID NO: 205076 - RNA, 32 nt, Homo Sapiens
ggaggcugaggcaggagaauggcuggaacccg

SEQ ID NO: 205077 - RNA, 32 nt, Homo Sapiens
ucccagccugcgccccgaugcugcgcguucug

SEQ ID NO: 205078 - RNA, 32 nt, Homo Sapiens
gucaggcgagcggcgaagcggcuggagggcgg

SEQ ID NO: 205079 - RNA, 32 nt, Homo Sapiens
cccuagcucccucugaguugcgcugggcuugg

SEQ ID NO: 205080 - RNA, 32 nt, Homo Sapiens
auugaagccucccagacccagccccuuuuccu

SEQ ID NO: 205081 - RNA, 32 nt, Homo Sapiens
ccauaccaaagcacgaaccagacuguuucuug

SEQ ID NO: 205082 - RNA, 32 nt, Homo Sapiens
auaaauauauaacaugcacaaauaaugugaca

SEQ ID NO: 205083 - RNA, 32 nt, Homo Sapiens
gccuguucuuucuaggucuuuggaguuuggau

SEQ ID NO: 205084 - RNA, 32 nt, Homo Sapiens
ggaaaaauacucagcaaacaaaguuaccaauu

SEQ ID NO: 205085 - RNA, 32 nt, Homo Sapiens
ugaaacagugaauguccuucauuuucagcugg

SEQ ID NO: 205086 - RNA, 32 nt, Homo Sapiens
gucaagcgauucuccuaccucagccuccucag

SEQ ID NO: 205087 - RNA, 32 nt, Homo Sapiens
aaaaugugugaacacagagaguuuuuggugau

SEQ ID NO: 205088 - RNA, 32 nt, Homo Sapiens
guucucucugcuucugucuugaggauauggga

SEQ ID NO: 205089 - RNA, 32 nt, Homo Sapiens
uguuugugucuacauguucuaccuguuguacc

SEQ ID NO: 205090 - RNA, 32 nt, Homo Sapiens
gaacaucuucuggaaacaaaaagaguagaaaa

SEQ ID NO: 205091 - RNA, 31 nt, Homo Sapiens
cuucgaacgagcagccugcccuguguccccu

SEQ ID NO: 205092 - RNA, 32 nt, Homo Sapiens
gcgucgagacaggaaggcagggcgcagugguu

SEQ ID NO: 205093 - RNA, 32 nt, Homo Sapiens
acuguucugaacacuuugcuugagauccgugc

SEQ ID NO: 205094 - RNA, 32 nt, Homo Sapiens
cugcuuuggaaagacaugcacuuuuuaguuga

SEQ ID NO: 205095 - RNA, 32 nt, Homo Sapiens
uuccucuccuuccccaccaccaguaguaacca

SEQ ID NO: 205096 - RNA, 32 nt, Homo Sapiens
aagaauugcuugaaccugggagguggagguug

SEQ ID NO: 205097 - RNA, 32 nt, Homo Sapiens
uuuucuaaauguucuccaagcuauuguauguu

SEQ ID NO: 205098 - RNA, 32 nt, Homo Sapiens
aaaugccaacuggagaagucuguuuuuaaaua

SEQ ID NO: 205099 - RNA, 32 nt, Homo Sapiens
cuugccugcuuuucuuuuuuuuucuuuuuuug

SEQ ID NO: 205100 - RNA, 32 nt, Homo Sapiens
aaaggaccucggaaggcugaaaaagugggucg

SEQ ID NO: 205101 - RNA, 32 nt, Homo Sapiens
ggaaugcucacagacugugugguaaugagaga

SEQ ID NO: 205102 - RNA, 32 nt, Homo Sapiens
ggaaucuuuccuuccagcaucccuuuacuguc

SEQ ID NO: 205103 - RNA, 32 nt, Homo Sapiens
uccgggcgggcucgcgucauccugcccccgcu

SEQ ID NO: 205104 - RNA, 32 nt, Homo Sapiens
gguuaccuccaugugcccuuuuuagggaagcu

SEQ ID NO: 205105 - RNA, 32 nt, Homo Sapiens
agaggcugggcggcugccggugacagacugug

SEQ ID NO: 205106 - RNA, 32 nt, Homo Sapiens
gccuggcccccacccccuccccggccagccug

SEQ ID NO: 205107 - RNA, 32 nt, Homo Sapiens
ucccaugccuucuugcccugacagugucccau

SEQ ID NO: 205108 - RNA, 32 nt, Homo Sapiens
ccaagcagacacugggacaaagggagaauauc

SEQ ID NO: 205109 - RNA, 32 nt, Homo Sapiens
cugcauuuauuccaccaaccgccccgcugcca

SEQ ID NO: 205110 - RNA, 32 nt, Homo Sapiens
cucagaccucucgggcgagcgcggcgcagcgc

SEQ ID NO: 205111 - RNA, 32 nt, Homo Sapiens
uguuguccugucaucaucuuugaggccagaac

SEQ ID NO: 205112 - RNA, 32 nt, Homo Sapiens
cccugaccggcuucucacagugucucaggcca

SEQ ID NO: 205113 - RNA, 32 nt, Homo Sapiens
cuucauugcuggcagauuucgaaacaaaggau

SEQ ID NO: 205114 - RNA, 32 nt, Homo Sapiens
cagccccuccccaacaggcuugguccgggcag

SEQ ID NO: 205115 - RNA, 32 nt, Homo Sapiens
gaauugcauaaugugugccuuuuaaaacaaua

SEQ ID NO: 205116 - RNA, 27 nt, Homo Sapiens
augagguccuucuguagugccauggua

SEQ ID NO: 205117 - RNA, 32 nt, Homo Sapiens
aauuuuauauauaugucuugugugcguguccu

SEQ ID NO: 205118 - RNA, 32 nt, Homo Sapiens
ggugugcuguacgggggcgcccggggacagga

SEQ ID NO: 205119 - RNA, 32 nt, Homo Sapiens
gguagagaugccuuuguuuuccugcuuaggaa

SEQ ID NO: 205120 - RNA, 32 nt, Homo Sapiens
ccaaaaaaaaaauuaaaaauuagccaagcaug

SEQ ID NO: 205121 - RNA, 32 nt, Homo Sapiens
cuuuucuaacugaguuguccuacaugcaagua

SEQ ID NO: 205122 - RNA, 29 nt, Homo Sapiens
ggacagccgguccgggaacccugagugag

SEQ ID NO: 205123 - RNA, 32 nt, Homo Sapiens
uuagcuaauuuucuuguuuugguuuacuuuga

SEQ ID NO: 205124 - RNA, 32 nt, Homo Sapiens
uagagagggaagaggguucuccagguucacca

SEQ ID NO: 205125 - RNA, 32 nt, Homo Sapiens
aucuuauaggaaaacuuucugacucugcuugg

SEQ ID NO: 205126 - RNA, 32 nt, Homo Sapiens
uguuacgcacaaagcccuccuuuucccauccc

SEQ ID NO: 205127 - RNA, 32 nt, Homo Sapiens
cuccuugucgucgcggggcuggcgaugccgaa

SEQ ID NO: 205128 - RNA, 32 nt, Homo Sapiens
agaagaaaguuagcuuuguaaacuacuucauu

SEQ ID NO: 205129 - RNA, 32 nt, Homo Sapiens
cugaguuuggccucuggcucgguuuccuuucu

SEQ ID NO: 205130 - RNA, 32 nt, Homo Sapiens
aaaccagugauuuugauagaaauauuucucca

SEQ ID NO: 205131 - RNA, 32 nt, Homo Sapiens
gauuuagaauacuggcucugguaugaaagcug

SEQ ID NO: 205132 - RNA, 32 nt, Homo Sapiens
uuguuuccuuuagaucuuuaccuuaggccaaa

SEQ ID NO: 205133 - RNA, 32 nt, Homo Sapiens
uugaaggcacaaaacaaaaacuuugcucuuuu

SEQ ID NO: 205134 - RNA, 28 nt, Homo Sapiens
ucgggguuuacaggaaccaggggauggg

SEQ ID NO: 205135 - RNA, 32 nt, Homo Sapiens
uuucccucuugcuuccucucucgucaucugac

SEQ ID NO: 205136 - RNA, 32 nt, Homo Sapiens
cccaggaagcucgggccccagcgaggaaaggc

SEQ ID NO: 205137 - RNA, 32 nt, Homo Sapiens
auucugggagaggcaagaaucucuguaguugc

SEQ ID NO: 205138 - RNA, 32 nt, Homo Sapiens
gacaugaccagcccacugauccugucagcagg

SEQ ID NO: 205139 - RNA, 32 nt, Homo Sapiens
ccuacucuuaauuuuucuuauuguuaaaguuu

SEQ ID NO: 205140 - RNA, 32 nt, Homo Sapiens
auuugcugggagaauuuuuucuuuguauuuau

SEQ ID NO: 205141 - RNA, 32 nt, Homo Sapiens
acauuucucaaagauuuuugagguuguauuug

SEQ ID NO: 205142 - RNA, 32 nt, Homo Sapiens
uugugcagguuaguaacauauguauacaugug

SEQ ID NO: 205143 - RNA, 32 nt, Homo Sapiens
uguagcugaaaauuauuuaaagugcaaaguua

SEQ ID NO: 205144 - RNA, 32 nt, Homo Sapiens
ccaguaggccccagcccagaccucuucggcuu

SEQ ID NO: 205145 - RNA, 32 nt, Homo Sapiens
aguggcaagcuguagaaaauguuuacacgcau

SEQ ID NO: 205146 - RNA, 32 nt, Homo Sapiens
agucuggccaacaugacgaaaccccgucucua

SEQ ID NO: 205147 - RNA, 32 nt, Homo Sapiens
cccaguugcugcugcuguuggugcugguuccg

SEQ ID NO: 205148 - RNA, 32 nt, Homo Sapiens
gaaguuuaacacaacugaacucuaagaaaauc

SEQ ID NO: 205149 - RNA, 32 nt, Homo Sapiens
agcuuggcaugguggcacgugccuguaguccc

SEQ ID NO: 205150 - RNA, 32 nt, Homo Sapiens
gcggagucuucagauacacuguguccucgaug

SEQ ID NO: 205151 - RNA, 32 nt, Homo Sapiens
uuugguuuguucccuuugucucagagaagcag

SEQ ID NO: 205152 - RNA, 28 nt, Homo Sapiens
ccugggugacagagcuagacuccaucuc

SEQ ID NO: 205153 - RNA, 32 nt, Homo Sapiens
gaaucccggcgccuagaacguguuuuucggga

SEQ ID NO: 205154 - RNA, 32 nt, Homo Sapiens
agggcugccaggcuuccagggucauuguguca

SEQ ID NO: 205155 - RNA, 32 nt, Homo Sapiens
uaggguugcgcggcccggaaacgcagagccgg

SEQ ID NO: 205156 - RNA, 32 nt, Homo Sapiens
cuugucuauuuucucuuggguugagccuguga

SEQ ID NO: 205157 - RNA, 32 nt, Homo Sapiens
gggccuacuucuccccagcagugcuugcaggu

SEQ ID NO: 205158 - RNA, 32 nt, Homo Sapiens
ccccaacucacucucucucaccauuucccagc

SEQ ID NO: 205159 - RNA, 32 nt, Homo Sapiens
aggcaugcuuccagcccuucccgugcucuccc

SEQ ID NO: 205160 - RNA, 32 nt, Homo Sapiens
gucccucccuucccucuccuugagugcauuuu

SEQ ID NO: 205161 - RNA, 32 nt, Homo Sapiens
aaccuccgccuuuccaccuuccggguucaagc

SEQ ID NO: 205162 - RNA, 32 nt, Homo Sapiens
ggaccagcccgggcaacauagcaagaccccua

SEQ ID NO: 205163 - RNA, 32 nt, Homo Sapiens
augcucagccugccagcucggccucaacuuug

SEQ ID NO: 205164 - RNA, 32 nt, Homo Sapiens
aaaacaccaaaauaagauaaaauaaaacaaau

SEQ ID NO: 205165 - RNA, 32 nt, Homo Sapiens
cuuagggaauaaaaauagcagcaacaaauacu

SEQ ID NO: 205166 - RNA, 32 nt, Homo Sapiens
agaauucuauguuuaauaaugaauauuguuga

SEQ ID NO: 205167 - RNA, 32 nt, Homo Sapiens
aacccaaggcaucuuaccaacagcugguuugg

SEQ ID NO: 205168 - RNA, 32 nt, Homo Sapiens
uggguucaucugggcuggaaccagaggcuccu

SEQ ID NO: 205169 - RNA, 32 nt, Homo Sapiens
cuguuccucccucucugugacucuacaccacc

SEQ ID NO: 205170 - RNA, 32 nt, Homo Sapiens
aggaaaccuucgcuuuauuugacaauguauaa

SEQ ID NO: 205171 - RNA, 32 nt, Homo Sapiens
auuuaaguauaaaaugugaaucaucuugucua

SEQ ID NO: 205172 - RNA, 32 nt, Homo Sapiens
cccaccccaucccuuucgugccacucccgucc

SEQ ID NO: 205173 - RNA, 32 nt, Homo Sapiens
uuugcccucucauuuuucaguacuucuacaga

SEQ ID NO: 205174 - RNA, 32 nt, Homo Sapiens
gcagaagccuaauucccaaauuccuuagaugg

SEQ ID NO: 205175 - RNA, 32 nt, Homo Sapiens
gucggcuccgcggcgccgccauggccgacgug

SEQ ID NO: 205176 - RNA, 32 nt, Homo Sapiens
gaauuuuucaguucuuuuuuuuuuuuuugagg

SEQ ID NO: 205177 - RNA, 32 nt, Homo Sapiens
guucugguauugacgcaauuauauuaggaaaa

SEQ ID NO: 205178 - RNA, 30 nt, Homo Sapiens
acgggguuucacuguguuagccaggacggc

SEQ ID NO: 205179 - RNA, 32 nt, Homo Sapiens
gccuuggcuccagcccuguaccccuugguacu

SEQ ID NO: 205180 - RNA, 32 nt, Homo Sapiens
ucuuaagaguguuuuuuuuuuagauuguucca

SEQ ID NO: 205181 - RNA, 32 nt, Homo Sapiens
ugucgcccaagccugaugcugguguaggcgcu

SEQ ID NO: 205182 - RNA, 32 nt, Homo Sapiens
uggguccauggugaaauaaaaaacagugcucg

SEQ ID NO: 205183 - RNA, 32 nt, Homo Sapiens
cccuuccgcuugggcugcccagcccuguccuc

SEQ ID NO: 205184 - RNA, 32 nt, Homo Sapiens
gcucccggagggugggccggaggcgaggcgcc

SEQ ID NO: 205185 - RNA, 31 nt, Homo Sapiens
caggagaaauaaaacagcuaucguuugggag

SEQ ID NO: 205186 - RNA, 32 nt, Homo Sapiens
cuaacccuuacagccuguuggcacauacacaa

SEQ ID NO: 205187 - RNA, 32 nt, Homo Sapiens
uuuauguuauuuauauuagcuaacaggaaaca

SEQ ID NO: 205188 - RNA, 32 nt, Homo Sapiens
ccccggcagcgggggcagccucucgcacggau

SEQ ID NO: 205189 - RNA, 32 nt, Homo Sapiens
gccgugggagaauggcugggcagagcagaggg

SEQ ID NO: 205190 - RNA, 29 nt, Homo Sapiens
ggccagaggggacagaggcuggcggcaga

SEQ ID NO: 205191 - RNA, 29 nt, Homo Sapiens
auuacuauauguaucuuaauguagucuau

SEQ ID NO: 205192 - RNA, 32 nt, Homo Sapiens
cucuucagcuccgucucccuugcucuccgcuc

SEQ ID NO: 205193 - RNA, 32 nt, Homo Sapiens
aggaugcagacacaccauggguccuguuaagg

SEQ ID NO: 205194 - RNA, 32 nt, Homo Sapiens
auuagcuccuccuuuuuccuuccagucuaaaa

SEQ ID NO: 205195 - RNA, 32 nt, Homo Sapiens
guaccugaccgugcagacccagcgcguguccu

SEQ ID NO: 205196 - RNA, 32 nt, Homo Sapiens
aggguuuucguguaucucuauguggaucuaaa

SEQ ID NO: 205197 - RNA, 32 nt, Homo Sapiens
ucuguuuucacaagacagacgucugucccgcu

SEQ ID NO: 205198 - RNA, 32 nt, Homo Sapiens
gagccguugggucgguuccugcuauuccggcg

SEQ ID NO: 205199 - RNA, 32 nt, Homo Sapiens
ugugcauaugugugugcgugcacgugcgcgcu

SEQ ID NO: 205200 - RNA, 32 nt, Homo Sapiens
gcuaguugauugucagguauguuguaaauaga

SEQ ID NO: 205201 - RNA, 32 nt, Homo Sapiens
aaaaagacuaaagcccuauuaaggaaguuauu

SEQ ID NO: 205202 - RNA, 32 nt, Homo Sapiens
acaagaugaugaacaccaguaugucagacaau

SEQ ID NO: 205203 - RNA, 32 nt, Homo Sapiens
guacguaauauuuauuuuaacuuaugcaaggg

SEQ ID NO: 205204 - RNA, 32 nt, Homo Sapiens
aagggcagccugcgggcagagccgggggccac

SEQ ID NO: 205205 - RNA, 32 nt, Homo Sapiens
gaagaugauagccugccccuuccucugggagc

SEQ ID NO: 205206 - RNA, 32 nt, Homo Sapiens
cuuccugcuauuuaggcauucuccagguucga

SEQ ID NO: 205207 - RNA, 32 nt, Homo Sapiens
aaggcauuggaaaauuugguggcugccacaag

SEQ ID NO: 205208 - RNA, 32 nt, Homo Sapiens
cugugagguugaccacucuguagguggacgag

SEQ ID NO: 205209 - RNA, 32 nt, Homo Sapiens
uuugcuuuugaaaaaugcuuguuacaugaaua

SEQ ID NO: 205210 - RNA, 32 nt, Homo Sapiens
uaggaaccaggaggacaaaaccaccaugcauu

SEQ ID NO: 205211 - RNA, 32 nt, Homo Sapiens
guaguguuaaccucaaauaggcuaaaugugaa

SEQ ID NO: 205212 - RNA, 32 nt, Homo Sapiens
ccuuuccccacuuuuuuaaagccacauucccc

SEQ ID NO: 205213 - RNA, 32 nt, Homo Sapiens
ugcaggccugacgagaggcuccgggcagcuga

SEQ ID NO: 205214 - RNA, 32 nt, Homo Sapiens
cccgcccgcucgcuccccggcgcucacaccug

SEQ ID NO: 205215 - RNA, 32 nt, Homo Sapiens
ugggugguucugcggcacacuaagguuugaaa

SEQ ID NO: 205216 - RNA, 32 nt, Homo Sapiens
acugagaaauuauuuguaaaucauguggcauc

SEQ ID NO: 205217 - RNA, 32 nt, Homo Sapiens
ugguagggggagagggaccugccgcgaaacca

SEQ ID NO: 205218 - RNA, 30 nt, Homo Sapiens
gcagcggguuaagugccgcccgcgcggaga

SEQ ID NO: 205219 - RNA, 32 nt, Homo Sapiens
cuacagaaaaauuuuaaaauuagcugggcgug

SEQ ID NO: 205220 - RNA, 32 nt, Homo Sapiens
uuccgcuggagcuggccacgggccgacccagc

SEQ ID NO: 205221 - RNA, 32 nt, Homo Sapiens
uuuuuggcaugaggaacuaacaguccauuacu

SEQ ID NO: 205222 - RNA, 32 nt, Homo Sapiens
gccuggggucggugcggagcugccgggcugag

SEQ ID NO: 205223 - RNA, 32 nt, Homo Sapiens
gagugggcugugcgugcugacguuguagaagc

SEQ ID NO: 205224 - RNA, 32 nt, Homo Sapiens
augguuugcauucaaaacgaugugguuugucc

SEQ ID NO: 205225 - RNA, 32 nt, Homo Sapiens
uuguuauaaagaagaguaaaacaaagaugugu

SEQ ID NO: 205226 - RNA, 32 nt, Homo Sapiens
guuccuaguguauuuucgucuuucuggaaaac

SEQ ID NO: 205227 - RNA, 32 nt, Homo Sapiens
augggauccaaggggcagucuugcaacagugc

SEQ ID NO: 205228 - RNA, 32 nt, Homo Sapiens
agaaauggauacagucuaaagaauuaacucac

SEQ ID NO: 205229 - RNA, 32 nt, Homo Sapiens
cuccugcugccuggccucuccucacuccuggc

SEQ ID NO: 205230 - RNA, 32 nt, Homo Sapiens
aacaggccuguguuugaauccaagucaccugu

SEQ ID NO: 205231 - RNA, 32 nt, Homo Sapiens
ccaggcccaggccuguguucccggcccuugcu

SEQ ID NO: 205232 - RNA, 32 nt, Homo Sapiens
agauuuacugucacuuauugauuuuauggaaa

SEQ ID NO: 205233 - RNA, 32 nt, Homo Sapiens
cggcgaagggcgcaggagcaucgcucggaggg

SEQ ID NO: 205234 - RNA, 32 nt, Homo Sapiens
cagcccgacgccuacuggcccgcgcugccccc

SEQ ID NO: 205235 - RNA, 32 nt, Homo Sapiens
aagaauacaaaggagcacuacucuuggcuaca

SEQ ID NO: 205236 - RNA, 32 nt, Homo Sapiens
ggguccuguauuuuuccaaacaacugugcuuc

SEQ ID NO: 205237 - RNA, 32 nt, Homo Sapiens
ggcagcugcagcaagaggcagcugaagcccuc

SEQ ID NO: 205238 - RNA, 32 nt, Homo Sapiens
ugucuauaaauuuugaaugauacugugccuua

SEQ ID NO: 205239 - RNA, 32 nt, Homo Sapiens
cuccugagaaagucagccaagggccuacccug

SEQ ID NO: 205240 - RNA, 32 nt, Homo Sapiens
ggagcugcaaggaaauacaaaaauuuuuaaaa

SEQ ID NO: 205241 - RNA, 32 nt, Homo Sapiens
gucccucaacugagcuccucaugcaaagcugg

SEQ ID NO: 205242 - RNA, 30 nt, Homo Sapiens
ccaaacacuuuucauccccaucuuaaguuu

SEQ ID NO: 205243 - RNA, 32 nt, Homo Sapiens
aggguuuuuggaaccaucaccugggaagauuu

SEQ ID NO: 205244 - RNA, 32 nt, Homo Sapiens
cucccccugccagccgcacugucccaggccca

SEQ ID NO: 205245 - RNA, 32 nt, Homo Sapiens
gcagggagcccuuccccaggccccacggccuu

SEQ ID NO: 205246 - RNA, 32 nt, Homo Sapiens
ccugugcgaaugggcccggcuccgggucaagg

SEQ ID NO: 205247 - RNA, 32 nt, Homo Sapiens
ccccugucugcgaaguccggcgcgggcccuuc

SEQ ID NO: 205248 - RNA, 32 nt, Homo Sapiens
agcuugagguguacagaugcuguauuauaucc

SEQ ID NO: 205249 - RNA, 32 nt, Homo Sapiens
uuccaggauauuuuuucuuuuuuuuuuuuuuu

SEQ ID NO: 205250 - RNA, 32 nt, Homo Sapiens
gagaagggaaggggaguguccccagccaaccc

SEQ ID NO: 205251 - RNA, 32 nt, Homo Sapiens
agacaguuaugaacugaaagucauaacgggga

SEQ ID NO: 205252 - RNA, 32 nt, Homo Sapiens
uuuccauuucuuucuucagaaccaaaguaugu

SEQ ID NO: 205253 - RNA, 32 nt, Homo Sapiens
gagguccccgguugcuggucagguccccaugg

SEQ ID NO: 205254 - RNA, 32 nt, Homo Sapiens
cacacacguguagcucacacacaguauacaca

SEQ ID NO: 205255 - RNA, 32 nt, Homo Sapiens
caggggguggccugggauuuccucucugaucg

SEQ ID NO: 205256 - RNA, 31 nt, Homo Sapiens
ucaaauuauuugacuauugcuagacauuucu

SEQ ID NO: 205257 - RNA, 32 nt, Homo Sapiens
cugucuccugcagaccucaucauuccacagua

SEQ ID NO: 205258 - RNA, 32 nt, Homo Sapiens
cagagaaugagcauucccugcuugguggaaug

SEQ ID NO: 205259 - RNA, 32 nt, Homo Sapiens
uauguauauaagacauauauaugugugaaaau

SEQ ID NO: 205260 - RNA, 32 nt, Homo Sapiens
gggccucaccgccccagggccguugccugcuc

SEQ ID NO: 205261 - RNA, 32 nt, Homo Sapiens
gggguuaaagaagagguggggaggcagugugg

SEQ ID NO: 205262 - RNA, 32 nt, Homo Sapiens
aguuauugcagaacuuccuguccugguggaga

SEQ ID NO: 205263 - RNA, 32 nt, Homo Sapiens
gcaggcggccccacccugcacugguccaaggu

SEQ ID NO: 205264 - RNA, 32 nt, Homo Sapiens
ccuauccuggaaacauacugcugcacugacuu

SEQ ID NO: 205265 - RNA, 32 nt, Homo Sapiens
aguuuugggauacuugccauaagccaagcccu

SEQ ID NO: 205266 - RNA, 32 nt, Homo Sapiens
gccacgugcacgcgcgcacuccgccucaccag

SEQ ID NO: 205267 - RNA, 32 nt, Homo Sapiens
aacaauuucauuuaagccagagauuuauugca

SEQ ID NO: 205268 - RNA, 32 nt, Homo Sapiens
auccgcgaguguauuauaucaacacuucuguu

SEQ ID NO: 205269 - RNA, 32 nt, Homo Sapiens
aacagagugcucucagugagaaguguuuuggu

SEQ ID NO: 205270 - RNA, 32 nt, Homo Sapiens
aggaaaucuaaggaaaauuaauccucacagag

SEQ ID NO: 205271 - RNA, 32 nt, Homo Sapiens
uccuguuccacuuuugaaauuuuauuuguucc

SEQ ID NO: 205272 - RNA, 32 nt, Homo Sapiens
ugcaagaaauuugaaacuuauugggaaaagcc

SEQ ID NO: 205273 - RNA, 32 nt, Homo Sapiens
cugcuccucggggccuggcgcagggcuguagc

SEQ ID NO: 205274 - RNA, 32 nt, Homo Sapiens
uacuaauuaauagaaaaucauucaaccaagag

SEQ ID NO: 205275 - RNA, 32 nt, Homo Sapiens
gggacgagaaagaucauugaaauucugagaaa

SEQ ID NO: 205276 - RNA, 32 nt, Homo Sapiens
cugagccuuucgcccuggaaguucuuggccca

SEQ ID NO: 205277 - RNA, 32 nt, Homo Sapiens
cacuggauucuuacuuucuggaucuugacacu

SEQ ID NO: 205278 - RNA, 32 nt, Homo Sapiens
aguacucaggaccagaguuaagcugauaccuu

SEQ ID NO: 205279 - RNA, 32 nt, Homo Sapiens
cgcucugucuucucucuucaguuuucuuuaac

SEQ ID NO: 205280 - RNA, 31 nt, Homo Sapiens
ugguaagaauaaaacagauuucuacagacug

SEQ ID NO: 205281 - RNA, 32 nt, Homo Sapiens
uuacuaacauggugaugggcucccuccccuaa

SEQ ID NO: 205282 - RNA, 32 nt, Homo Sapiens
cgagaugcucccugcagcccaggccccgggca

SEQ ID NO: 205283 - RNA, 32 nt, Homo Sapiens
uaagguuauuuuuuauuaacugugcauaugaa

SEQ ID NO: 205284 - RNA, 32 nt, Homo Sapiens
ugccgugaucccagcccacacuagccugggug

SEQ ID NO: 205285 - RNA, 32 nt, Homo Sapiens
ccugcauccuucugccuugggccuccaaggaa

SEQ ID NO: 205286 - RNA, 32 nt, Homo Sapiens
gagggcaccagcggggaccuaucugcgagcag

SEQ ID NO: 205287 - RNA, 32 nt, Homo Sapiens
cccuagccaggccccagggagccuccgcuggg

SEQ ID NO: 205288 - RNA, 32 nt, Homo Sapiens
cugcuucuacuacuccaucaaggucaacuguu

SEQ ID NO: 205289 - RNA, 32 nt, Homo Sapiens
gcuccauccuuugaguucugcauugccauccu

SEQ ID NO: 205290 - RNA, 32 nt, Homo Sapiens
aacgugccugcgcgugcuuggauaguucauuu

SEQ ID NO: 205291 - RNA, 32 nt, Homo Sapiens
cugccgucaccauuggccaguuuuaccacguu

SEQ ID NO: 205292 - RNA, 32 nt, Homo Sapiens
acuuuuaauaauaucaaguuugcauagucaug

SEQ ID NO: 205293 - RNA, 32 nt, Homo Sapiens
ucucauaaaaauuggccuuuuacauguugucu

SEQ ID NO: 205294 - RNA, 32 nt, Homo Sapiens
cuuuaaaaaguacauaaauccaugaguccaua

SEQ ID NO: 205295 - RNA, 32 nt, Homo Sapiens
cuuucagcucuggccaagagugggacaggguu

SEQ ID NO: 205296 - RNA, 32 nt, Homo Sapiens
ucccaguacuuugggaggccgagucaggugga

SEQ ID NO: 205297 - RNA, 32 nt, Homo Sapiens
aaauaugaaaauaaauuucuuuuuuaugucgu

SEQ ID NO: 205298 - RNA, 32 nt, Homo Sapiens
guuuagagaggaacucuuguggagagcugguu

SEQ ID NO: 205299 - RNA, 32 nt, Homo Sapiens
aaaacaaaaguacauugcuuaaaauauauagu

SEQ ID NO: 205300 - RNA, 32 nt, Homo Sapiens
gauuuaaaaaauuuugcauguaagaauguacu

SEQ ID NO: 205301 - RNA, 32 nt, Homo Sapiens
gaguauuguaaauuuuacuggcaauuauuauu

SEQ ID NO: 205302 - RNA, 32 nt, Homo Sapiens
cagcaaugccuggccugguagcuccgcuucug

SEQ ID NO: 205303 - RNA, 32 nt, Homo Sapiens
aaaucuccagaauggaaggggguggggauuuu

SEQ ID NO: 205304 - RNA, 32 nt, Homo Sapiens
cauuuucacagcacuacuugcuuauauugaca

SEQ ID NO: 205305 - RNA, 32 nt, Homo Sapiens
gaaaaauauuuuugagggaacuguuauagauu

SEQ ID NO: 205306 - RNA, 32 nt, Homo Sapiens
cuacucuagccuguucauauggaccaaauuuc

SEQ ID NO: 205307 - RNA, 31 nt, Homo Sapiens
aguggagugggacagguauauaaaggaagua

SEQ ID NO: 205308 - RNA, 32 nt, Homo Sapiens
ccugagcaucucuccuuccucucccagaucgu

SEQ ID NO: 205309 - RNA, 32 nt, Homo Sapiens
aagagcuucauuuugagaucaagccccacgau

SEQ ID NO: 205310 - RNA, 32 nt, Homo Sapiens
cugcaguugaagaagcugaaaaaugaaggccu

SEQ ID NO: 205311 - RNA, 32 nt, Homo Sapiens
cuucuaugaagcuuuuuuuuuaaugugaaauu

SEQ ID NO: 205312 - RNA, 32 nt, Homo Sapiens
cauaauccccacauguugugggacgcacccgg

SEQ ID NO: 205313 - RNA, 32 nt, Homo Sapiens
gcaguacuugaaaaugcacaaaacacuuccac

SEQ ID NO: 205314 - RNA, 32 nt, Homo Sapiens
cucaucuaauuccauugguguagacuuuagca

SEQ ID NO: 205315 - RNA, 32 nt, Homo Sapiens
ugguacuguggcgcuccgugaaauuagacguu

SEQ ID NO: 205316 - RNA, 32 nt, Homo Sapiens
cccugggaucacuguguuuaagagagaguggu

SEQ ID NO: 205317 - RNA, 32 nt, Homo Sapiens
gugugguagaacuuagauauauuuguguugaa

SEQ ID NO: 205318 - RNA, 32 nt, Homo Sapiens
ucauguggacgcccaggugcagacggaggccc

SEQ ID NO: 205319 - RNA, 32 nt, Homo Sapiens
gauuuuauuccaaauguaauuuauugcugcug

SEQ ID NO: 205320 - RNA, 32 nt, Homo Sapiens
ccauaaaaauucccaguaugcauguuuuaugc

SEQ ID NO: 205321 - RNA, 32 nt, Homo Sapiens
ccucauagucauuuuucuuaauugcccuuaau

SEQ ID NO: 205322 - RNA, 32 nt, Homo Sapiens
uucgagaccagacugggaaacauggcaaaauc

SEQ ID NO: 205323 - RNA, 32 nt, Homo Sapiens
auggcucacugaagucuugaccccgcugccuc

SEQ ID NO: 205324 - RNA, 32 nt, Homo Sapiens
uguguuuuccacuguacccucaucucaggaau

SEQ ID NO: 205325 - RNA, 29 nt, Homo Sapiens
gggaguuggggacagcagaacgacuugac

SEQ ID NO: 205326 - RNA, 32 nt, Homo Sapiens
ggacaguuauuuaaacgaguggccgggagcau

SEQ ID NO: 205327 - RNA, 32 nt, Homo Sapiens
aaagaagaaaggaaaccucauuacucaauccu

SEQ ID NO: 205328 - RNA, 32 nt, Homo Sapiens
ccagcaggguaaagcgggagggugggcggggu

SEQ ID NO: 205329 - RNA, 32 nt, Homo Sapiens
cucugcagacugccccgcggccucggccaccg

SEQ ID NO: 205330 - RNA, 32 nt, Homo Sapiens
gcuaagaaggucugaaaauuuaaugaaaccac

SEQ ID NO: 205331 - RNA, 32 nt, Homo Sapiens
aauuagccgggcgugguggcgcaugcccauaa

SEQ ID NO: 205332 - RNA, 32 nt, Homo Sapiens
gcacccuagacaaaaaggguugagauccagug

SEQ ID NO: 205333 - RNA, 32 nt, Homo Sapiens
auaccuauaaaaugcaguaagcauguguuaca

SEQ ID NO: 205334 - RNA, 30 nt, Homo Sapiens
gcugugucuagugcugcagggaucucggca

SEQ ID NO: 205335 - RNA, 32 nt, Homo Sapiens
ggacuuaacacccuugccuuucugggacuugg

SEQ ID NO: 205336 - RNA, 32 nt, Homo Sapiens
cuuggaaaccguugucaguuuauuuacuaugc

SEQ ID NO: 205337 - RNA, 31 nt, Homo Sapiens
gcuccccacgccaccaccauuuggguggcug

SEQ ID NO: 205338 - RNA, 32 nt, Homo Sapiens
uggacauagaaaaagaggcuggcaaggguugu

SEQ ID NO: 205339 - RNA, 32 nt, Homo Sapiens
uuucaaaagagauuuacuuuuuuaaaggacuu

SEQ ID NO: 205340 - RNA, 32 nt, Homo Sapiens
auaagaaagcaauauuuuuuuaucucaguuuc

SEQ ID NO: 205341 - RNA, 32 nt, Homo Sapiens
uuacuguuugaaaagaaauaaguagugucauu

SEQ ID NO: 205342 - RNA, 32 nt, Homo Sapiens
ggcggcgggaggaggagcgcacgggccggcug

SEQ ID NO: 205343 - RNA, 32 nt, Homo Sapiens
ggaauuguugcacggcaaccacuccucccaug

SEQ ID NO: 205344 - RNA, 32 nt, Homo Sapiens
agagaaccacacuuuauauaaaguaguuuuug

SEQ ID NO: 205345 - RNA, 32 nt, Homo Sapiens
uucugaaagcaaacugauuuauuuucauuguu

SEQ ID NO: 205346 - RNA, 32 nt, Homo Sapiens
uccucgaugugccugcccugaaggagugagcu

SEQ ID NO: 205347 - RNA, 32 nt, Homo Sapiens
ucucuagcaaucuauuuacuguuuaucaaucu

SEQ ID NO: 205348 - RNA, 32 nt, Homo Sapiens
uguauaugaaucccugaguccuuaagaacguc

SEQ ID NO: 205349 - RNA, 32 nt, Homo Sapiens
acuuuucauguaugcauagggaagacacuuca

SEQ ID NO: 205350 - RNA, 32 nt, Homo Sapiens
cccuucuugcagaggcaugugugcuagggaug

SEQ ID NO: 205351 - RNA, 32 nt, Homo Sapiens
uggagccaaucugcggggcucugccgggugca

SEQ ID NO: 205352 - RNA, 32 nt, Homo Sapiens
auguuugcauuacgcuaggucaauuccauugu

SEQ ID NO: 205353 - RNA, 32 nt, Homo Sapiens
ucuucuugccugcaauuuggcaagcaaggggu

SEQ ID NO: 205354 - RNA, 32 nt, Homo Sapiens
uguauaugaugucacugugaccucuuugaaau

SEQ ID NO: 205355 - RNA, 32 nt, Homo Sapiens
gcagcaccaauauuaacaacgcgaacaaaaca

SEQ ID NO: 205356 - RNA, 32 nt, Homo Sapiens
uggcggcggaggagggggcggcgugggugggg

SEQ ID NO: 205357 - RNA, 32 nt, Homo Sapiens
cauacuaacauauauauacacaacagaaaguu

SEQ ID NO: 205358 - RNA, 32 nt, Homo Sapiens
caggacccacugaacaagggugaacucgggug

SEQ ID NO: 205359 - RNA, 32 nt, Homo Sapiens
ugacccacccauauggccccaguuuuuucugu

SEQ ID NO: 205360 - RNA, 23 nt, Homo Sapiens
ggcuuuggucacgguccagcggu

SEQ ID NO: 205361 - RNA, 32 nt, Homo Sapiens
aggucgcgcccguucgcaccgcccccgcccgc

SEQ ID NO: 205362 - RNA, 32 nt, Homo Sapiens
auaaauauuuauucucuuuucuuuguuucaua

SEQ ID NO: 205363 - RNA, 32 nt, Homo Sapiens
uuuaagacaagcuguauaaacagaacuccacu

SEQ ID NO: 205364 - RNA, 32 nt, Homo Sapiens
ugauaggccccacucauuucaaguguuaugaa

SEQ ID NO: 205365 - RNA, 32 nt, Homo Sapiens
cuccacgcgcgcccggacgcggcggccaggcu

SEQ ID NO: 205366 - RNA, 32 nt, Homo Sapiens
aaauucuggauuucuuuuuuauuuuggaguau

SEQ ID NO: 205367 - RNA, 31 nt, Homo Sapiens
augcugugaaacugccugugucgaaaugcag

SEQ ID NO: 205368 - RNA, 32 nt, Homo Sapiens
ccuucucgguccccgagggcccuggcccccgc

SEQ ID NO: 205369 - RNA, 32 nt, Homo Sapiens
aaaagcuauuagugaauauuaagguaguuauu

SEQ ID NO: 205370 - RNA, 32 nt, Homo Sapiens
cucucguggguuuuuuaccuuccugaucccac

SEQ ID NO: 205371 - RNA, 32 nt, Homo Sapiens
aauacacucaguuugucuucuaguacucagcu

SEQ ID NO: 205372 - RNA, 32 nt, Homo Sapiens
cuggaaccaaaauuaaauuguacuucauaaaa

SEQ ID NO: 205373 - RNA, 32 nt, Homo Sapiens
aacucccucggcggguaacucauucgacugug

SEQ ID NO: 205374 - RNA, 32 nt, Homo Sapiens
ugcuguuuaagugacugauggcuaauguacug

SEQ ID NO: 205375 - RNA, 32 nt, Homo Sapiens
cuguccccggugccgccgacccgggccgugug

SEQ ID NO: 205376 - RNA, 32 nt, Homo Sapiens
agauguuuggaacacagucaguggagcuggug

SEQ ID NO: 205377 - RNA, 30 nt, Homo Sapiens
guccaagucugugcccuaagcuuggucccc

SEQ ID NO: 205378 - RNA, 32 nt, Homo Sapiens
gcuuuuucaaaaaacauuaaauucacaugcag

SEQ ID NO: 205379 - RNA, 32 nt, Homo Sapiens
agauaauuggagguuaagagaauuagucaggg

SEQ ID NO: 205380 - RNA, 32 nt, Homo Sapiens
gcucugaggggaggggguccgugguagaggcc

SEQ ID NO: 205381 - RNA, 32 nt, Homo Sapiens
ugugugucaccauauaacugcaccucaccccc

SEQ ID NO: 205382 - RNA, 32 nt, Homo Sapiens
cccggaggugggcuacugcagggaccugagcc

SEQ ID NO: 205383 - RNA, 32 nt, Homo Sapiens
gcuuccugccagcacgugccugaagguuucac

SEQ ID NO: 205384 - RNA, 32 nt, Homo Sapiens
uaacagaaaaaauuauuuauuuauucuacuuu

SEQ ID NO: 205385 - RNA, 32 nt, Homo Sapiens
ucagguuucaaggggacggccuugucugggau

SEQ ID NO: 205386 - RNA, 32 nt, Homo Sapiens
accucuguugguuucugccucccuuuguuucc

SEQ ID NO: 205387 - RNA, 32 nt, Homo Sapiens
cacagucaggaagggcguggaccagggaggcu

SEQ ID NO: 205388 - RNA, 32 nt, Homo Sapiens
agcaguaaggaagaggugaugaucucuuugua

SEQ ID NO: 205389 - RNA, 32 nt, Homo Sapiens
cuccauggcgaccgcguuggcuggguggccuc

SEQ ID NO: 205390 - RNA, 32 nt, Homo Sapiens
gccccggaggucgaggcuacagugacccaaga

SEQ ID NO: 205391 - RNA, 32 nt, Homo Sapiens
uuuucaaugugcuuaaauuuguuuaaauuuuc

SEQ ID NO: 205392 - RNA, 32 nt, Homo Sapiens
aauccagggcaaguuucguggaggaagugaug

SEQ ID NO: 205393 - RNA, 32 nt, Homo Sapiens
aaagccagcugccgaccagagccccacacgga

SEQ ID NO: 205394 - RNA, 32 nt, Homo Sapiens
ccaaaggccccuucggccuccuuguagcuguu

SEQ ID NO: 205395 - RNA, 32 nt, Homo Sapiens
auuacuggauuaaauauaaaauuuaagguaau

SEQ ID NO: 205396 - RNA, 32 nt, Homo Sapiens
caaggguucaauauauauacauguauauacug

SEQ ID NO: 205397 - RNA, 32 nt, Homo Sapiens
ccgaacagccucccagccugggcccccggcgg

SEQ ID NO: 205398 - RNA, 32 nt, Homo Sapiens
aggcgucugacacaguaugaugaugaagaucc

SEQ ID NO: 205399 - RNA, 32 nt, Homo Sapiens
cugugaaaaugguuuuugcacauuauuuguau

SEQ ID NO: 205400 - RNA, 32 nt, Homo Sapiens
aagaacaucgaucugaaggauucauaaggagc

SEQ ID NO: 205401 - RNA, 29 nt, Homo Sapiens
agaaaugauucuuuccugcagaauauugc

SEQ ID NO: 205402 - RNA, 32 nt, Homo Sapiens
ucagacuccagcaaauucccucuugaaggcac

SEQ ID NO: 205403 - RNA, 32 nt, Homo Sapiens
cagucuucaaggaaauggaaggguuaagaaau

SEQ ID NO: 205404 - RNA, 32 nt, Homo Sapiens
auggcuggggccgcugggguccgucuucacac

SEQ ID NO: 205405 - RNA, 32 nt, Homo Sapiens
agaacaauauaaaauuaauaucuauuaccaag

SEQ ID NO: 205406 - RNA, 32 nt, Homo Sapiens
ccugagcagcugggauuacaggcgcuggccac

SEQ ID NO: 205407 - RNA, 32 nt, Homo Sapiens
uuucuuaccuccaagcguuucagacaccagca

SEQ ID NO: 205408 - RNA, 32 nt, Homo Sapiens
ucgccagugugcuuuucuuaauaucuaagaug

SEQ ID NO: 205409 - RNA, 32 nt, Homo Sapiens
agaugacagaguuuugucacagcuugugaauu

SEQ ID NO: 205410 - RNA, 32 nt, Homo Sapiens
cgcucucuuuugccugccgccauauaagacau

SEQ ID NO: 205411 - RNA, 32 nt, Homo Sapiens
caucugaugucauucuuaaaagaauaaaugcc

SEQ ID NO: 205412 - RNA, 32 nt, Homo Sapiens
auggcuggcuguuaguucugguaaaugugugc

SEQ ID NO: 205413 - RNA, 32 nt, Homo Sapiens
uccaguggacugcguggacccgugagcucagg

SEQ ID NO: 205414 - RNA, 32 nt, Homo Sapiens
accacaaauaaugaaagagaucugaaagccag

SEQ ID NO: 205415 - RNA, 32 nt, Homo Sapiens
ucuguccagggcacuuugcagcuccauccuca

SEQ ID NO: 205416 - RNA, 32 nt, Homo Sapiens
aucugcaacaacccuauuuccaaauaaaguca

SEQ ID NO: 205417 - RNA, 32 nt, Homo Sapiens
agauggucccacuuauucuagggucuuacucu

SEQ ID NO: 205418 - RNA, 32 nt, Homo Sapiens
auaauagccuacuucuuagaauaugccugucc

SEQ ID NO: 205419 - RNA, 32 nt, Homo Sapiens
uuuuccugucagugcuuuucucuucuuugaga

SEQ ID NO: 205420 - RNA, 29 nt, Homo Sapiens
gaagcuucaaaauauaucugugacucugu

SEQ ID NO: 205421 - RNA, 32 nt, Homo Sapiens
caggugccugccuggcaccacagugacccugg

SEQ ID NO: 205422 - RNA, 28 nt, Homo Sapiens
aacugcagggggcagcauuugaaaaaua

SEQ ID NO: 205423 - RNA, 32 nt, Homo Sapiens
gaacugccacuaugguuaaaugucuuguuuaa

SEQ ID NO: 205424 - RNA, 32 nt, Homo Sapiens
cagauacaaccugcucucuguacugcuguugg

SEQ ID NO: 205425 - RNA, 32 nt, Homo Sapiens
gguuucaggauggaucaagugcuguuacagcu

SEQ ID NO: 205426 - RNA, 32 nt, Homo Sapiens
cacgagguggggaugcguuuccaggucuaccu

SEQ ID NO: 205427 - RNA, 32 nt, Homo Sapiens
aucggggacugucauuggagaggagcgauaga

SEQ ID NO: 205428 - RNA, 32 nt, Homo Sapiens
ccagucugccagcugaguccugguuuuggaug

SEQ ID NO: 205429 - RNA, 32 nt, Homo Sapiens
gcuuuuaggaugugggaguaaaacuuuaaugg

SEQ ID NO: 205430 - RNA, 32 nt, Homo Sapiens
gaagauuuaaaaaacucaugagaagaguaauc

SEQ ID NO: 205431 - RNA, 32 nt, Homo Sapiens
caucuccccgcagcugcggcgcugagcacccc

SEQ ID NO: 205432 - RNA, 32 nt, Homo Sapiens
aguaccuguuuuaagaaaaaacaacaaggaag

SEQ ID NO: 205433 - RNA, 32 nt, Homo Sapiens
uuuagaaccaaaccacaaguccccucaaggac

SEQ ID NO: 205434 - RNA, 32 nt, Homo Sapiens
acaguaacugccauuuuuugucugugauaaca

SEQ ID NO: 205435 - RNA, 32 nt, Homo Sapiens
aacaaccugucaacucuuuuuguuuuuugaga

SEQ ID NO: 205436 - RNA, 32 nt, Homo Sapiens
ucgcgcuccccgcucgcggcagcccccgugua

SEQ ID NO: 205437 - RNA, 32 nt, Homo Sapiens
gugucugacaccugccagcagcccuuugcuau

SEQ ID NO: 205438 - RNA, 32 nt, Homo Sapiens
ccuggcccagaagaaacuuauguaaauuucau

SEQ ID NO: 205439 - RNA, 32 nt, Homo Sapiens
gaguaugggaggaggagguggccuagaacucu

SEQ ID NO: 205440 - RNA, 32 nt, Homo Sapiens
gcauggccgggcggggcggugucuccuuucac

SEQ ID NO: 205441 - RNA, 32 nt, Homo Sapiens
gcucugggaugaaguaacccaggcuggcgauc

SEQ ID NO: 205442 - RNA, 32 nt, Homo Sapiens
cucccuggcccggcccgggaccccucugcccu

SEQ ID NO: 205443 - RNA, 32 nt, Homo Sapiens
guggguagcuaagggucgggaacgcccaagaa

SEQ ID NO: 205444 - RNA, 32 nt, Homo Sapiens
caauggggagcauuuuacauuauucuuggaug

SEQ ID NO: 205445 - RNA, 32 nt, Homo Sapiens
aggcuggauaaaacuguuuuuaagucagugau

SEQ ID NO: 205446 - RNA, 32 nt, Homo Sapiens
ugauucaggauaaaacguaaacacgugcuguu

SEQ ID NO: 205447 - RNA, 32 nt, Homo Sapiens
caggccagcaggggcgucguuuuguugccauu

SEQ ID NO: 205448 - RNA, 32 nt, Homo Sapiens
auaaagggagaagagggaaaacagaaaaccug

SEQ ID NO: 205449 - RNA, 32 nt, Homo Sapiens
cuuaauuugagcgaacuuaaaguaaaaacgcu

SEQ ID NO: 205450 - RNA, 32 nt, Homo Sapiens
ccuucccagacaccuccuucccaacaccgccu

SEQ ID NO: 205451 - RNA, 32 nt, Homo Sapiens
gugggcccggguggagucccggccggagcugg

SEQ ID NO: 205452 - RNA, 32 nt, Homo Sapiens
ucccuuggacgcccuccugguuugggaagcug

SEQ ID NO: 205453 - RNA, 32 nt, Homo Sapiens
acggagcuucucagccucuuggagccucuguc

SEQ ID NO: 205454 - RNA, 32 nt, Homo Sapiens
caggugagggugggaggcagaaaagaggcaca

SEQ ID NO: 205455 - RNA, 32 nt, Homo Sapiens
uaacaaacccgcauguucugcacauguacccc

SEQ ID NO: 205456 - RNA, 32 nt, Homo Sapiens
gacauuuuugcaucgacacuucaacauuaaca

SEQ ID NO: 205457 - RNA, 32 nt, Homo Sapiens
uagacacuugcaugccaacuccuuccaaauuc

SEQ ID NO: 205458 - RNA, 32 nt, Homo Sapiens
cugggugagagauaaaucuuauagggguggga

SEQ ID NO: 205459 - RNA, 32 nt, Homo Sapiens
cuucugccgcggcugcggcgcccgcgcgaguc

SEQ ID NO: 205460 - RNA, 32 nt, Homo Sapiens
ccggcugucauucauguguugauuuguaauuu

SEQ ID NO: 205461 - RNA, 32 nt, Homo Sapiens
gaggguuuaaacagacagaaagacagacacag

SEQ ID NO: 205462 - RNA, 32 nt, Homo Sapiens
cgccgcagccucggggaaaccuaccugcacac

SEQ ID NO: 205463 - RNA, 32 nt, Homo Sapiens
auagauguaaaaaugugaaaaguuuuauucaa

SEQ ID NO: 205464 - RNA, 32 nt, Homo Sapiens
aagggcugcccuggcgggaaccccgcauggcc

SEQ ID NO: 205465 - RNA, 32 nt, Homo Sapiens
ccccacccagccugcuggcagaggccucagcu

SEQ ID NO: 205466 - RNA, 32 nt, Homo Sapiens
cgccgggucuccugggcugaggcuccccaagc

SEQ ID NO: 205467 - RNA, 32 nt, Homo Sapiens
uuggcggcuucugucccagccaucucaggccu

SEQ ID NO: 205468 - RNA, 32 nt, Homo Sapiens
aauuuauuuucuuuuuugauaauuuauuguac

SEQ ID NO: 205469 - RNA, 32 nt, Homo Sapiens
gugggcuugaaaguaccuuguccgcucagaag

SEQ ID NO: 205470 - RNA, 32 nt, Homo Sapiens
ugcacaugccaaaaacaacuccugcuaucuca

SEQ ID NO: 205471 - RNA, 32 nt, Homo Sapiens
cacagggauuucuugaaaugcuuuuguuauua

SEQ ID NO: 205472 - RNA, 32 nt, Homo Sapiens
uuuucuguccgaagcugacauuccucuggcag

SEQ ID NO: 205473 - RNA, 32 nt, Homo Sapiens
aacauuuuuuaaggucucuccucuuccuuccc

SEQ ID NO: 205474 - RNA, 32 nt, Homo Sapiens
auuaacaauuauuucaagagucauacugugag

SEQ ID NO: 205475 - RNA, 32 nt, Homo Sapiens
ccgccaccaccgcagcagcagcagucggggag

SEQ ID NO: 205476 - RNA, 32 nt, Homo Sapiens
guaaugaguuuaaaaaucaacuuuuuauugcc

SEQ ID NO: 205477 - RNA, 30 nt, Homo Sapiens
gccccuccucgcccgccgccggaguuuucu

SEQ ID NO: 205478 - RNA, 32 nt, Homo Sapiens
uauuauuauuuuuaguagagaugggguuucac

SEQ ID NO: 205479 - RNA, 32 nt, Homo Sapiens
aggagcagggguggggggagggggaugggguc

SEQ ID NO: 205480 - RNA, 32 nt, Homo Sapiens
accccaccccccacccugccagcccuucuucu

SEQ ID NO: 205481 - RNA, 32 nt, Homo Sapiens
aucucauccuccccguggcugcccucuguguc

SEQ ID NO: 205482 - RNA, 32 nt, Homo Sapiens
accuuggaagcugcugcugcugcuuacagaau

SEQ ID NO: 205483 - RNA, 32 nt, Homo Sapiens
cuauaaacgcuagaauauaaugcugaauuaua

SEQ ID NO: 205484 - RNA, 32 nt, Homo Sapiens
caaugcucagaauugaaaauuacuacuuaaaa

SEQ ID NO: 205485 - RNA, 32 nt, Homo Sapiens
gaacuuuguguaaugccuggagcauaguaggc

SEQ ID NO: 205486 - RNA, 32 nt, Homo Sapiens
ggcgguggccgcggccgccgagucggucugcg

SEQ ID NO: 205487 - RNA, 32 nt, Homo Sapiens
ugccccagccccagccguagcccuugugcuca

SEQ ID NO: 205488 - RNA, 32 nt, Homo Sapiens
gguccgggagcagucgacugccggagacucgg

SEQ ID NO: 205489 - RNA, 32 nt, Homo Sapiens
uggcgugagacggggcggggcgcgcguaucgg

SEQ ID NO: 205490 - RNA, 32 nt, Homo Sapiens
cacccgcuggccgugggugcuccggcgucugg

SEQ ID NO: 205491 - RNA, 32 nt, Homo Sapiens
ugcuucuugugcgcccucaaggcaccacccuc

SEQ ID NO: 205492 - RNA, 32 nt, Homo Sapiens
gcaaguaauuuaauuuuuguugcgucagauuc

SEQ ID NO: 205493 - RNA, 32 nt, Homo Sapiens
auuugaugucuuucagaugucuggugacaguc

SEQ ID NO: 205494 - RNA, 32 nt, Homo Sapiens
uuucaaagggcaagucagaaguuguuuauaaa

SEQ ID NO: 205495 - RNA, 32 nt, Homo Sapiens
gucgugcggaagcugcgacgcaggcagaccau

SEQ ID NO: 205496 - RNA, 32 nt, Homo Sapiens
uguaggugggggaggcgucugcaggucaccug

SEQ ID NO: 205497 - RNA, 32 nt, Homo Sapiens
ccugaggagcagcugcaggagcuucaugagug

SEQ ID NO: 205498 - RNA, 32 nt, Homo Sapiens
gcacuccucccucuccuuccuuuguuuaaaau

SEQ ID NO: 205499 - RNA, 32 nt, Homo Sapiens
aaaaauagguaguggagccauagcccucacca

SEQ ID NO: 205500 - RNA, 32 nt, Homo Sapiens
aaguccauuaaaccucuuucuuuuguaaauug

SEQ ID NO: 205501 - RNA, 32 nt, Homo Sapiens
cuugcaguguuucucucgcccuugaugggagc

SEQ ID NO: 205502 - RNA, 32 nt, Homo Sapiens
cuggcuccaccugugaucaccucccccugcuu

SEQ ID NO: 205503 - RNA, 32 nt, Homo Sapiens
uguuuuuuaagugaaaguauuuauugagcauc

SEQ ID NO: 205504 - RNA, 32 nt, Homo Sapiens
gagccagaaggggacccaggugugcauagcuc

SEQ ID NO: 205505 - RNA, 32 nt, Homo Sapiens
gugccccugugcuuggagagaaaggggccggu

SEQ ID NO: 205506 - RNA, 32 nt, Homo Sapiens
uucuaacaagggcacauccuguguucugggaa

SEQ ID NO: 205507 - RNA, 32 nt, Homo Sapiens
auuugcgcucuggaggguagggcuugcugggc

SEQ ID NO: 205508 - RNA, 32 nt, Homo Sapiens
agagaucacgcgccgcgccgcgaggcuugggg

SEQ ID NO: 205509 - RNA, 32 nt, Homo Sapiens
auuuuuauagcuagauaaauauuguuagucuu

SEQ ID NO: 205510 - RNA, 32 nt, Homo Sapiens
cuuccaugaggaaauaaauguggguugugcug

SEQ ID NO: 205511 - RNA, 32 nt, Homo Sapiens
uugggggcucaccccaccuccaggucugucaa

SEQ ID NO: 205512 - RNA, 32 nt, Homo Sapiens
caccuccuuccagguucuggcuccuuccagcc

SEQ ID NO: 205513 - RNA, 32 nt, Homo Sapiens
aggcugagugaaagucauuuugaaagacugau

SEQ ID NO: 205514 - RNA, 32 nt, Homo Sapiens
ccuucuccaccgagcuuuggugcuuuggccuc

SEQ ID NO: 205515 - RNA, 32 nt, Homo Sapiens
cacucccccucuaucggcgucuaucuguaggu

SEQ ID NO: 205516 - RNA, 32 nt, Homo Sapiens
ucacaaaccugaagcugaaccacaggacaaga

SEQ ID NO: 205517 - RNA, 32 nt, Homo Sapiens
cguuggucauuucauggauggccuuucuauug

SEQ ID NO: 205518 - RNA, 32 nt, Homo Sapiens
gcagggccgugacacagguucuggccaaugau

SEQ ID NO: 205519 - RNA, 32 nt, Homo Sapiens
ucuuguggacacagaaaugcacaggggacacu

SEQ ID NO: 205520 - RNA, 32 nt, Homo Sapiens
gcgagcguccuugcggccuccaagugccggug

SEQ ID NO: 205521 - RNA, 32 nt, Homo Sapiens
uguguaaagccucuucuguuuccauuuggugg

SEQ ID NO: 205522 - RNA, 32 nt, Homo Sapiens
cacugcacccucacuagccaggguguugacgu

SEQ ID NO: 205523 - RNA, 32 nt, Homo Sapiens
caaccucuucagcauaaagcuccugcccaaac

SEQ ID NO: 205524 - RNA, 31 nt, Homo Sapiens
ccagggccaugcaggcuuggaguccagaguu

SEQ ID NO: 205525 - RNA, 32 nt, Homo Sapiens
guugaggcagugcuucuguuuucuugucuauu

SEQ ID NO: 205526 - RNA, 32 nt, Homo Sapiens
gucuccuuucccggccgcacaggguuuuauag

SEQ ID NO: 205527 - RNA, 32 nt, Homo Sapiens
guagccgugggcccugucggaggggagccagc

SEQ ID NO: 205528 - RNA, 32 nt, Homo Sapiens
gugcuacgucccgcggucggagccgcgucuuc

SEQ ID NO: 205529 - RNA, 32 nt, Homo Sapiens
uggccuucucaguuugggccaaaagggaugga

SEQ ID NO: 205530 - RNA, 32 nt, Homo Sapiens
ccagcagagcagacauuaaaucuuaaaguucc

SEQ ID NO: 205531 - RNA, 32 nt, Homo Sapiens
ccgccagaagcagugcagaccagcugccgccc

SEQ ID NO: 205532 - RNA, 32 nt, Homo Sapiens
uucaauacagauauauuuucuuucucuuccuc

SEQ ID NO: 205533 - RNA, 32 nt, Homo Sapiens
ccccgucucuaaaauacaaauaaaauauuugu

SEQ ID NO: 205534 - RNA, 32 nt, Homo Sapiens
uccuugcuuuucgaccacuuggagacggggga

SEQ ID NO: 205535 - RNA, 32 nt, Homo Sapiens
ccggacagccuggcugucauugcuuucuuccu

SEQ ID NO: 205536 - RNA, 32 nt, Homo Sapiens
ccacugccuugcucugggccuguggugcuccc

SEQ ID NO: 205537 - RNA, 30 nt, Homo Sapiens
ugucggaauacuuguguucaauaaaaauug

SEQ ID NO: 205538 - RNA, 32 nt, Homo Sapiens
uuuuguuucaucuugacuuucuuaauuuccua

SEQ ID NO: 205539 - RNA, 32 nt, Homo Sapiens
auggaaccagugcuuauuugucuugucuaagg

SEQ ID NO: 205540 - RNA, 32 nt, Homo Sapiens
ugguggaggaggagacguaguggccugggcug

SEQ ID NO: 205541 - RNA, 32 nt, Homo Sapiens
guguuuaaauguuacuuguuuucaaacuuugu

SEQ ID NO: 205542 - RNA, 32 nt, Homo Sapiens
gcugggacccaccguguagacacacgacaugc

SEQ ID NO: 205543 - RNA, 32 nt, Homo Sapiens
gacaacuuacuacuuugauguccuguuggcuc

SEQ ID NO: 205544 - RNA, 32 nt, Homo Sapiens
guaaauguauuagaaaaauacaaugaagaacc

SEQ ID NO: 205545 - RNA, 32 nt, Homo Sapiens
guuuugucaugaauucuuaugcuuauaauauc

SEQ ID NO: 205546 - RNA, 32 nt, Homo Sapiens
caugauuuauagcacaaccuuuccaauaaucc

SEQ ID NO: 205547 - RNA, 32 nt, Homo Sapiens
aaaaguuaaauguuuuuuuaaucuucaagaaa

SEQ ID NO: 205548 - RNA, 32 nt, Homo Sapiens
aaaagugugcuuucuuuuuacauuauauuaca

SEQ ID NO: 205549 - RNA, 32 nt, Homo Sapiens
gaaagggcuugcuaagaaaaaagggaguaaaa

SEQ ID NO: 205550 - RNA, 32 nt, Homo Sapiens
gcaggggccaagggggcgauccugguggcugc

SEQ ID NO: 205551 - RNA, 32 nt, Homo Sapiens
ucagaaucugaggagucagaugaggaugacgg

SEQ ID NO: 205552 - RNA, 32 nt, Homo Sapiens
aagaaggucugagagggaaggagaaugacauu

SEQ ID NO: 205553 - RNA, 32 nt, Homo Sapiens
cacgagggccgcggugcaguguccgacccgag

SEQ ID NO: 205554 - RNA, 32 nt, Homo Sapiens
gcgcgccccacuuuacgccuaagguccucagu

SEQ ID NO: 205555 - RNA, 32 nt, Homo Sapiens
caggaguggcaggaugguugcauguaccaggg

SEQ ID NO: 205556 - RNA, 32 nt, Homo Sapiens
aauguagaagacucaaggaaguggggauuaga

SEQ ID NO: 205557 - RNA, 32 nt, Homo Sapiens
acuuccaaauaugggaggaaaggacagaugug

SEQ ID NO: 205558 - RNA, 32 nt, Homo Sapiens
ugacugcugugugauauucagaagggaaguag

SEQ ID NO: 205559 - RNA, 32 nt, Homo Sapiens
ccucaaagaugggaucuucaccacccacucgg

SEQ ID NO: 205560 - RNA, 31 nt, Homo Sapiens
gacagcaugggaggcaauggcuccacaugua

SEQ ID NO: 205561 - RNA, 31 nt, Homo Sapiens
acuccggccagccccagccaaacacacaaaa

SEQ ID NO: 205562 - RNA, 32 nt, Homo Sapiens
cuuuccauccuuuuuuuuuuuauuuugaggaa

SEQ ID NO: 205563 - RNA, 32 nt, Homo Sapiens
aaacuuauaaagucacuuuuuauuuuuccuca

SEQ ID NO: 205564 - RNA, 32 nt, Homo Sapiens
gggagacgggcagggcggcgccagcaggcccu

SEQ ID NO: 205565 - RNA, 32 nt, Homo Sapiens
ucccugcucuccauacuuccuguccuggcucu

SEQ ID NO: 205566 - RNA, 32 nt, Homo Sapiens
gcucaggaccucaggaugggagaugaggagaa

SEQ ID NO: 205567 - RNA, 32 nt, Homo Sapiens
ccuccauuuaaauaaacuggugacuuuccuuu

SEQ ID NO: 205568 - RNA, 32 nt, Homo Sapiens
gaggugcacagaggcuuuugagucaggcccaa

SEQ ID NO: 205569 - RNA, 32 nt, Homo Sapiens
uaaugaaccuggugagacauguucacauggcc

SEQ ID NO: 205570 - RNA, 32 nt, Homo Sapiens
acagauuuacuuuuuggcucacauaacuucaa

SEQ ID NO: 205571 - RNA, 32 nt, Homo Sapiens
ccagauggccccagugaucccuggccuccugg

SEQ ID NO: 205572 - RNA, 32 nt, Homo Sapiens
aagguuuuuuaaacuggaugaaucuguggaaa

SEQ ID NO: 205573 - RNA, 32 nt, Homo Sapiens
uacuaaggauguuuuuaccagccugccugacu

SEQ ID NO: 205574 - RNA, 32 nt, Homo Sapiens
ugauauuuuaaagaugaauugauucaaugugu

SEQ ID NO: 205575 - RNA, 32 nt, Homo Sapiens
auaaauuucuauauagugucaagaugcuacau

SEQ ID NO: 205576 - RNA, 32 nt, Homo Sapiens
uguguaugucagcucagcaucuuuuaaucgug

SEQ ID NO: 205577 - RNA, 32 nt, Homo Sapiens
auuuuacgaauauaugcguuuauauuuauacu

SEQ ID NO: 205578 - RNA, 32 nt, Homo Sapiens
ggaagaccuaaggagcuguccaguucuuggcu

SEQ ID NO: 205579 - RNA, 32 nt, Homo Sapiens
acccaguagagcuugaagcugaccuuucugag

SEQ ID NO: 205580 - RNA, 32 nt, Homo Sapiens
agcacuaacuaaauaaauuuguugguucaguu

SEQ ID NO: 205581 - RNA, 32 nt, Homo Sapiens
gcgugcucagagacauaaucagcugaagagaa

SEQ ID NO: 205582 - RNA, 32 nt, Homo Sapiens
ucugcagucugcuucuaaugggaaagggcacc

SEQ ID NO: 205583 - RNA, 32 nt, Homo Sapiens
ccugucugucuucgcguggugcgcguuccgca

SEQ ID NO: 205584 - RNA, 32 nt, Homo Sapiens
aagggauagaaagcggauagaaagcuagaauc

SEQ ID NO: 205585 - RNA, 32 nt, Homo Sapiens
cuuauuuauaaauucauuaaaaacacuacagg

SEQ ID NO: 205586 - RNA, 32 nt, Homo Sapiens
uuuugacaaacaguuuaugaaaaaauaaaacu

SEQ ID NO: 205587 - RNA, 32 nt, Homo Sapiens
cugggaagaacacagcccaugugcucugcaug

SEQ ID NO: 205588 - RNA, 32 nt, Homo Sapiens
gguuggaaagacuguucuauagcugccagaga

SEQ ID NO: 205589 - RNA, 32 nt, Homo Sapiens
uccaccccaucccccacagggucccugauaac

SEQ ID NO: 205590 - RNA, 32 nt, Homo Sapiens
ccugggcacccgagacuagggaguggugauga

SEQ ID NO: 205591 - RNA, 32 nt, Homo Sapiens
acccucucuggggcacagccugcccaacccca

SEQ ID NO: 205592 - RNA, 32 nt, Homo Sapiens
cugccuccagcauccaguggcugcuggcauac

SEQ ID NO: 205593 - RNA, 32 nt, Homo Sapiens
uucaugguggguggaguggggguggcugggcu

SEQ ID NO: 205594 - RNA, 32 nt, Homo Sapiens
ggacccagggcugcacuuccaaugcucugcag

SEQ ID NO: 205595 - RNA, 32 nt, Homo Sapiens
aggugagcaguggagagaaggggggcccugca

SEQ ID NO: 205596 - RNA, 32 nt, Homo Sapiens
ccaaugagauauaguuaagagauggcauucaa

SEQ ID NO: 205597 - RNA, 32 nt, Homo Sapiens
caauaucaaugaacgugcuaagaucauugauc

SEQ ID NO: 205598 - RNA, 32 nt, Homo Sapiens
uuaagaacuuuaagacgauuaauuguaaauaa

SEQ ID NO: 205599 - RNA, 32 nt, Homo Sapiens
gcagguggggccgccgcggaacuccagguccg

SEQ ID NO: 205600 - RNA, 32 nt, Homo Sapiens
auugacauauuagaaggcaauuaggguguuuc

SEQ ID NO: 205601 - RNA, 32 nt, Homo Sapiens
gcagccugcuccacauuugggcacagaaggac

SEQ ID NO: 205602 - RNA, 32 nt, Homo Sapiens
ucauucagaaaagacaggucagcagggcaguc

SEQ ID NO: 205603 - RNA, 32 nt, Homo Sapiens
cacugaggcaccucucugggaauaacguuccc

SEQ ID NO: 205604 - RNA, 32 nt, Homo Sapiens
cgaacggcugccggucagguguccuugucccc

SEQ ID NO: 205605 - RNA, 32 nt, Homo Sapiens
gacccagacccgagguuuuuccgggcgucgca

SEQ ID NO: 205606 - RNA, 32 nt, Homo Sapiens
guuaaaaggaauugauaauucauuuucauuuu

SEQ ID NO: 205607 - RNA, 30 nt, Homo Sapiens
auagaggccaggcgcgguggcuuacgccug

SEQ ID NO: 205608 - RNA, 32 nt, Homo Sapiens
cagcagcaaggugguggcgcccgggcagcuug

SEQ ID NO: 205609 - RNA, 32 nt, Homo Sapiens
auggacuauggacucuuucaaagggaucugau

SEQ ID NO: 205610 - RNA, 32 nt, Homo Sapiens
ugguggugggugggcugucaagacgugucaug

SEQ ID NO: 205611 - RNA, 32 nt, Homo Sapiens
uccuccgcaaacuuaugggggcucccagauau

SEQ ID NO: 205612 - RNA, 32 nt, Homo Sapiens
augaauauaggacaaaucauggcuauaucuau

SEQ ID NO: 205613 - RNA, 32 nt, Homo Sapiens
gucccuccugucauucucacgacuccgggaga

SEQ ID NO: 205614 - RNA, 32 nt, Homo Sapiens
ggcauuucagaccccgucccagaugggucuga

SEQ ID NO: 205615 - RNA, 30 nt, Homo Sapiens
uguuuuucuuuuaagggggaaacaagguag

SEQ ID NO: 205616 - RNA, 31 nt, Homo Sapiens
auugucacauggguuuuuaauccuggccuug

SEQ ID NO: 205617 - RNA, 30 nt, Homo Sapiens
agaggggucaucccugcuucaagccagugc

SEQ ID NO: 205618 - RNA, 32 nt, Homo Sapiens
accccgaccauggcaucgaggacccagcguuc

SEQ ID NO: 205619 - RNA, 32 nt, Homo Sapiens
uguuuguagaauucauuuuuuaucccaagagg

SEQ ID NO: 205620 - RNA, 30 nt, Homo Sapiens
cggacauuccaccacuagaguauacuuuuc

SEQ ID NO: 205621 - RNA, 32 nt, Homo Sapiens
aaagccacggcgucugcguuugcaaugcaugc

SEQ ID NO: 205622 - RNA, 32 nt, Homo Sapiens
guugagaacgggccaugugacaauggcgguuu

SEQ ID NO: 205623 - RNA, 32 nt, Homo Sapiens
ugaagcuuggggugggugugugcuucuggggu

SEQ ID NO: 205624 - RNA, 32 nt, Homo Sapiens
accccccgucccgagagcaucauugucgccag

SEQ ID NO: 205625 - RNA, 32 nt, Homo Sapiens
ucugugcgcgcccgcucuaugaugcuugcgcg

SEQ ID NO: 205626 - RNA, 32 nt, Homo Sapiens
gaaaagcuaugaaacucauguuucucuguuuc

SEQ ID NO: 205627 - RNA, 32 nt, Homo Sapiens
aguuguaacaaguggggguggggggugcgggc

SEQ ID NO: 205628 - RNA, 32 nt, Homo Sapiens
agacgcggugggggcgggguggggggucugga

SEQ ID NO: 205629 - RNA, 32 nt, Homo Sapiens
ugaugguugugcuucuuugcugagggacauuu

SEQ ID NO: 205630 - RNA, 32 nt, Homo Sapiens
aauauuggugaaaagaaaaaugcuggucucac

SEQ ID NO: 205631 - RNA, 32 nt, Homo Sapiens
aaaacugccaaaaauauaauucuuaguggaag

SEQ ID NO: 205632 - RNA, 32 nt, Homo Sapiens
gagagaggggcucgggaagggagcuggggcgg

SEQ ID NO: 205633 - RNA, 32 nt, Homo Sapiens
ugggggcgcaggcccgggagggggcaccggga

SEQ ID NO: 205634 - RNA, 32 nt, Homo Sapiens
aagcacccaagcagaagggagacugagugccu

SEQ ID NO: 205635 - RNA, 32 nt, Homo Sapiens
uaccggagagguucuggcaccauuucggggug

SEQ ID NO: 205636 - RNA, 28 nt, Homo Sapiens
cacacguguggccccaggauggcaagga

SEQ ID NO: 205637 - RNA, 32 nt, Homo Sapiens
gcagauggacugccuggccagaggggggaaag

SEQ ID NO: 205638 - RNA, 32 nt, Homo Sapiens
uauuagcaaacacaagacauuuuauguauuau

SEQ ID NO: 205639 - RNA, 32 nt, Homo Sapiens
uucccccuucuacuuuuugcuucccuguggcu

SEQ ID NO: 205640 - RNA, 32 nt, Homo Sapiens
cugccaaaaagaaguagaagcuggcgugugaa

SEQ ID NO: 205641 - RNA, 32 nt, Homo Sapiens
cauuugggcgacccccgggcggggccagccau

SEQ ID NO: 205642 - RNA, 32 nt, Homo Sapiens
uuauugaaacugaguauuuuucuuuggcuaau

SEQ ID NO: 205643 - RNA, 32 nt, Homo Sapiens
cagaaaugaaaauaaaauaugaaaauaaugaa

SEQ ID NO: 205644 - RNA, 32 nt, Homo Sapiens
cugugcagccucagcccaacaccaugaccucu

SEQ ID NO: 205645 - RNA, 32 nt, Homo Sapiens
uggguggccuguuaggaacuggaccgcacagc

SEQ ID NO: 205646 - RNA, 32 nt, Homo Sapiens
cuugguacuuguuuuucuucauuuggaggcua

SEQ ID NO: 205647 - RNA, 32 nt, Homo Sapiens
caguuuuuuagacuggaaaaaagccagucuaa

SEQ ID NO: 205648 - RNA, 30 nt, Homo Sapiens
cuccauggcaggcguggguggggaccgcag

SEQ ID NO: 205649 - RNA, 32 nt, Homo Sapiens
acuucaaaucauauccucagauauauuuuuag

SEQ ID NO: 205650 - RNA, 32 nt, Homo Sapiens
uuaggucucucuuucccuuaucaaaaaggcuu

SEQ ID NO: 205651 - RNA, 32 nt, Homo Sapiens
gaguucggggccagcagccgucuacccggugu

SEQ ID NO: 205652 - RNA, 32 nt, Homo Sapiens
cagguguuguccccagccccagcugcuuaugu

SEQ ID NO: 205653 - RNA, 32 nt, Homo Sapiens
ccuggagcggcagcugcggaugucugcucccg

SEQ ID NO: 205654 - RNA, 32 nt, Homo Sapiens
cugaagaaaauauuugcaaacuacucaucuaa

SEQ ID NO: 205655 - RNA, 32 nt, Homo Sapiens
caagaucauggugccaucauggccgaguucug

SEQ ID NO: 205656 - RNA, 32 nt, Homo Sapiens
gaggcgcccuguaggauacugcuuguuacuua

SEQ ID NO: 205657 - RNA, 32 nt, Homo Sapiens
caugguuuugagaacaggaacuguaaaucugu

SEQ ID NO: 205658 - RNA, 32 nt, Homo Sapiens
gugaaauaguaaaaugccaaguauuguggcag

SEQ ID NO: 205659 - RNA, 32 nt, Homo Sapiens
cgagacuuugucaucaggacccaccuccagga

SEQ ID NO: 205660 - RNA, 32 nt, Homo Sapiens
aaguugggcccagcucagguguccugaguggu

SEQ ID NO: 205661 - RNA, 32 nt, Homo Sapiens
guaaccagcauuuauuggagaagugaaucaca

SEQ ID NO: 205662 - RNA, 32 nt, Homo Sapiens
aaacggaaaaggauaauugagccccaggacau

SEQ ID NO: 205663 - RNA, 32 nt, Homo Sapiens
ugcgcuggaggaugaaguguuugauagcacua

SEQ ID NO: 205664 - RNA, 32 nt, Homo Sapiens
gggguuuuuagaucuaggaaccagaguacaga

SEQ ID NO: 205665 - RNA, 32 nt, Homo Sapiens
ucccucaugcagauaguauacacaucauaaac

SEQ ID NO: 205666 - RNA, 32 nt, Homo Sapiens
aagcaccugggggacaacagugcucgugcagg

SEQ ID NO: 205667 - RNA, 32 nt, Homo Sapiens
cuguguacagcuggccacacacagggaaggag

SEQ ID NO: 205668 - RNA, 32 nt, Homo Sapiens
caucauuccgagucaucaucucuguuugcugc

SEQ ID NO: 205669 - RNA, 32 nt, Homo Sapiens
aucaggaugcagccugguggcuuuugugacuc

SEQ ID NO: 205670 - RNA, 32 nt, Homo Sapiens
aaacuugcuacauuauuccacagugaaaguug

SEQ ID NO: 205671 - RNA, 32 nt, Homo Sapiens
ucuaguuucuuacaucccugccucucuuccuc

SEQ ID NO: 205672 - RNA, 32 nt, Homo Sapiens
ucuguuaagaauuuugucagcuaacauaauuc

SEQ ID NO: 205673 - RNA, 32 nt, Homo Sapiens
ucuagugaaaaauuauaaucuacuuaaacucu

SEQ ID NO: 205674 - RNA, 32 nt, Homo Sapiens
ccugcuuuucuuucuuuuuuuguauugucaaa

SEQ ID NO: 205675 - RNA, 32 nt, Homo Sapiens
acaaaaucauguuaaugcguuuuguacaucag

SEQ ID NO: 205676 - RNA, 32 nt, Homo Sapiens
uucaaaauauauaucagauuaauacacugaaa

SEQ ID NO: 205677 - RNA, 32 nt, Homo Sapiens
uguucugcacaaaacaugcuuccuuuucaaag

SEQ ID NO: 205678 - RNA, 32 nt, Homo Sapiens
ggcaggacugcaacuggcgucuccaucuacug

SEQ ID NO: 205679 - RNA, 31 nt, Homo Sapiens
agaauugcuugagccaggaagguugagguug

SEQ ID NO: 205680 - RNA, 31 nt, Homo Sapiens
ccgugccagcacugccgcuuccaccugggcc

SEQ ID NO: 205681 - RNA, 32 nt, Homo Sapiens
caguggguuugugaaguuguauguauguuugc

SEQ ID NO: 205682 - RNA, 32 nt, Homo Sapiens
gggcugcgcgcgcgggaccccggagcccaaac

SEQ ID NO: 205683 - RNA, 32 nt, Homo Sapiens
gcggacaguaccgccuuccuccccucuguccg

SEQ ID NO: 205684 - RNA, 32 nt, Homo Sapiens
auuccaauaaaacuuuauuuauggacacugaa

SEQ ID NO: 205685 - RNA, 32 nt, Homo Sapiens
uuuaagaaauguuucauagguauaaaaaggug

SEQ ID NO: 205686 - RNA, 32 nt, Homo Sapiens
uagauuuuucauuuacuuucucucucuuggau

SEQ ID NO: 205687 - RNA, 32 nt, Homo Sapiens
cugcgugccugcugcuggccgggcacccccgg

SEQ ID NO: 205688 - RNA, 32 nt, Homo Sapiens
auguuccagugaaaauggaguucuggguugga

SEQ ID NO: 205689 - RNA, 32 nt, Homo Sapiens
ggcagcccugucugaaggacacuuccugccua

SEQ ID NO: 205690 - RNA, 32 nt, Homo Sapiens
cauugaguacagaaaaguuguagauuucaaau

SEQ ID NO: 205691 - RNA, 32 nt, Homo Sapiens
uacuuauugguagcuucuuaauuucauacuug

SEQ ID NO: 205692 - RNA, 32 nt, Homo Sapiens
aagggaccgggacuggaaagggaccaggacug

SEQ ID NO: 205693 - RNA, 32 nt, Homo Sapiens
gggaguccugucagcuuccccaggagcucucu

SEQ ID NO: 205694 - RNA, 32 nt, Homo Sapiens
uuuaaaagagauuaauaaaaucauaaugcauu

SEQ ID NO: 205695 - RNA, 32 nt, Homo Sapiens
uugccuuuuuauugcagguuuuccuuuggaau

SEQ ID NO: 205696 - RNA, 32 nt, Homo Sapiens
ucguagucgggaagaggagcuucagcagcgcu

SEQ ID NO: 205697 - RNA, 32 nt, Homo Sapiens
gcgaguagcuggcggucccgggugcugcuggu

SEQ ID NO: 205698 - RNA, 32 nt, Homo Sapiens
ugaaaggaaauguggaauaaaaggagguuuuc

SEQ ID NO: 205699 - RNA, 32 nt, Homo Sapiens
gagcacuugggaaauagcacaugcagggagag

SEQ ID NO: 205700 - RNA, 32 nt, Homo Sapiens
ucugccagccuccuccuccccugccagccucu

SEQ ID NO: 205701 - RNA, 32 nt, Homo Sapiens
cuggaaaauguuccuuaauguuuuaaaccuuu

SEQ ID NO: 205702 - RNA, 32 nt, Homo Sapiens
aaaaaauaaaaagaaggugggcagaaaugugc

SEQ ID NO: 205703 - RNA, 32 nt, Homo Sapiens
acaggggaagggcccggcacccuuucuggguc

SEQ ID NO: 205704 - RNA, 32 nt, Homo Sapiens
cgacugcacccgccgccgcgcugcugggggcu

SEQ ID NO: 205705 - RNA, 32 nt, Homo Sapiens
aaagguugcuuagcuuuuuuuuugacauuugu

SEQ ID NO: 205706 - RNA, 32 nt, Homo Sapiens
uuauuuuuuuagauuucuuuucuuuugcacua

SEQ ID NO: 205707 - RNA, 32 nt, Homo Sapiens
uucaauaauuauucuuuuuauuauauucaaug

SEQ ID NO: 205708 - RNA, 32 nt, Homo Sapiens
gagggcggcgagcgcguccggagccgccggag

SEQ ID NO: 205709 - RNA, 32 nt, Homo Sapiens
acuccaagacaauuuuucuguuucaguuucau

SEQ ID NO: 205710 - RNA, 32 nt, Homo Sapiens
ccuagggucucuucuugcuugacucaaucuac

SEQ ID NO: 205711 - RNA, 32 nt, Homo Sapiens
cguaacagcuucugucuccccacacauccgau

SEQ ID NO: 205712 - RNA, 31 nt, Homo Sapiens
agcaagccccucugccugcaccucagcuucu

SEQ ID NO: 205713 - RNA, 32 nt, Homo Sapiens
cuguuucagguaugcgugugcauuguaaacuu

SEQ ID NO: 205714 - RNA, 32 nt, Homo Sapiens
cugcuccagccuaaagaguuaagggaaaacca

SEQ ID NO: 205715 - RNA, 32 nt, Homo Sapiens
aggagggccggcggagcgccauggccugcauc

SEQ ID NO: 205716 - RNA, 32 nt, Homo Sapiens
ucagaggaaggugagauauuuuuuguacucca

SEQ ID NO: 205717 - RNA, 32 nt, Homo Sapiens
aaagggggaaaauauauuuguauguuuagacc

SEQ ID NO: 205718 - RNA, 32 nt, Homo Sapiens
ucuucaccuaaaacuuccuuaagugagugaca

SEQ ID NO: 205719 - RNA, 32 nt, Homo Sapiens
cuuucuuccuuccccucaggcaauggcgguga

SEQ ID NO: 205720 - RNA, 32 nt, Homo Sapiens
cuggccgagguguggggcgcgggcguggggcc

SEQ ID NO: 205721 - RNA, 32 nt, Homo Sapiens
ucccacauaaccucccagaagcuccagggaag

SEQ ID NO: 205722 - RNA, 32 nt, Homo Sapiens
cauuugccaaccccugaucuauguguuugagu

SEQ ID NO: 205723 - RNA, 32 nt, Homo Sapiens
aggcauuccagaaagaagaguaguuaagcaga

SEQ ID NO: 205724 - RNA, 29 nt, Homo Sapiens
uugcuguaaaguuuuguauauuuuguaaa

SEQ ID NO: 205725 - RNA, 32 nt, Homo Sapiens
uuagauggacauuuaaaauggaacuucuuuua

SEQ ID NO: 205726 - RNA, 32 nt, Homo Sapiens
ucaguggaggcacaagccugaagcacucuucu

SEQ ID NO: 205727 - RNA, 32 nt, Homo Sapiens
cuccagucuacuguggagggaacccaggaucc

SEQ ID NO: 205728 - RNA, 32 nt, Homo Sapiens
ucccccaaggcacagcauauacagcauggucg

SEQ ID NO: 205729 - RNA, 32 nt, Homo Sapiens
caagccucagagaauaacaguguuuuauggac

SEQ ID NO: 205730 - RNA, 32 nt, Homo Sapiens
cagaaaugauuuuuguacaugguuuuauuuuc

SEQ ID NO: 205731 - RNA, 30 nt, Homo Sapiens
auucacaucuucggagaugaggaguaaaau

SEQ ID NO: 205732 - RNA, 32 nt, Homo Sapiens
cgguggaggaggagguggggcuggcgcugaag

SEQ ID NO: 205733 - RNA, 32 nt, Homo Sapiens
ccggagcgagccagggagcggcuaaccgggga

SEQ ID NO: 205734 - RNA, 32 nt, Homo Sapiens
aacuagaaaaaagagacuuaagaucauuuuuu

SEQ ID NO: 205735 - RNA, 32 nt, Homo Sapiens
aauauucaugaccugaugugggaggagacagc

SEQ ID NO: 205736 - RNA, 32 nt, Homo Sapiens
acccaauggacaaaaccguuuuuguuuuugag

SEQ ID NO: 205737 - RNA, 32 nt, Homo Sapiens
augaaggugacuucagguaaaagcagauuaaa

SEQ ID NO: 205738 - RNA, 32 nt, Homo Sapiens
ccaacuccagcauucucgugugaacugcagag

SEQ ID NO: 205739 - RNA, 32 nt, Homo Sapiens
ucccggucccccagcccauccgccauccccag

SEQ ID NO: 205740 - RNA, 32 nt, Homo Sapiens
cucacuagacauuugaggaaccuccugccugg

SEQ ID NO: 205741 - RNA, 32 nt, Homo Sapiens
cuuuguaacugugaaauacucuccaggauuua

SEQ ID NO: 205742 - RNA, 32 nt, Homo Sapiens
cgucugcaggaagccgaggccuuuuugguauu

SEQ ID NO: 205743 - RNA, 32 nt, Homo Sapiens
agaaggggaaacugaggcccagggaggagagu

SEQ ID NO: 205744 - RNA, 32 nt, Homo Sapiens
cuuauucucuuuuuuucuuguccucauucuug

SEQ ID NO: 205745 - RNA, 32 nt, Homo Sapiens
ccucccacggcauccccuccccaucuccccuu

SEQ ID NO: 205746 - RNA, 32 nt, Homo Sapiens
gagccagcaguggauaugcaccacugagaucu

SEQ ID NO: 205747 - RNA, 32 nt, Homo Sapiens
cccaagagugucugcuggccacucgcuguggc

SEQ ID NO: 205748 - RNA, 32 nt, Homo Sapiens
cccauauguugucaucucugguccacaggugu

SEQ ID NO: 205749 - RNA, 32 nt, Homo Sapiens
aucuuagcccauggugguggggcuugcuagaa

SEQ ID NO: 205750 - RNA, 32 nt, Homo Sapiens
uuccgaaauagcauuuucuuuaccaguauccu

SEQ ID NO: 205751 - RNA, 32 nt, Homo Sapiens
caccagggccuuuggguggcauaugacaguuu

SEQ ID NO: 205752 - RNA, 32 nt, Homo Sapiens
cagcagcccccuuuccucugccagcaccacca

SEQ ID NO: 205753 - RNA, 32 nt, Homo Sapiens
uggggucugguuacacaacugaaacaggagca

SEQ ID NO: 205754 - RNA, 32 nt, Homo Sapiens
ugagcgccaaggaaaagaaacuaucucgguca

SEQ ID NO: 205755 - RNA, 32 nt, Homo Sapiens
uagugcaucaaagaauucacacaggggagaaa

SEQ ID NO: 205756 - RNA, 32 nt, Homo Sapiens
ggucuggcuuuugccaagaggaacggggcuuu

SEQ ID NO: 205757 - RNA, 32 nt, Homo Sapiens
uacuugcuggagaccucagaaaacacaagugc

SEQ ID NO: 205758 - RNA, 32 nt, Homo Sapiens
uuuuuauuuuuauaaacaaaaucugauguuca

SEQ ID NO: 205759 - RNA, 32 nt, Homo Sapiens
auauucaaagauuuguuuuauuaauaugcaau

SEQ ID NO: 205760 - RNA, 32 nt, Homo Sapiens
uuuacggcccuccuccuguuuccgauuucagc

SEQ ID NO: 205761 - RNA, 32 nt, Homo Sapiens
gcagucucacuuuuggaaucuguccguuagaa

SEQ ID NO: 205762 - RNA, 32 nt, Homo Sapiens
gccagaugaggugaaagcuuauagaagggccu

SEQ ID NO: 205763 - RNA, 32 nt, Homo Sapiens
ccaagccuggggcugccucugcucuccaagac

SEQ ID NO: 205764 - RNA, 32 nt, Homo Sapiens
aaugcaaaaaaaacagaaaauggggagauuua

SEQ ID NO: 205765 - RNA, 32 nt, Homo Sapiens
gagauggaucauaaguaaaugagcagugugag

SEQ ID NO: 205766 - RNA, 32 nt, Homo Sapiens
aauagaaaaaauaauccgacucccacuacauc

SEQ ID NO: 205767 - RNA, 32 nt, Homo Sapiens
cagacugagggugcuuuuuggggggugggaga

SEQ ID NO: 205768 - RNA, 29 nt, Homo Sapiens
aggagugggugacagaggagacugcagag

SEQ ID NO: 205769 - RNA, 32 nt, Homo Sapiens
gugaugggcucaaugaucauccauucauuccu

SEQ ID NO: 205770 - RNA, 32 nt, Homo Sapiens
gaguucaucuucucagagcugcuguccaaccu

SEQ ID NO: 205771 - RNA, 32 nt, Homo Sapiens
uuagcaaauuuauguauucuucuacuauuugc

SEQ ID NO: 205772 - RNA, 32 nt, Homo Sapiens
uguuuugauuacccucguguuacuacaagaug

SEQ ID NO: 205773 - RNA, 32 nt, Homo Sapiens
cccagguaacagccuucugaaagcagagccaa

SEQ ID NO: 205774 - RNA, 32 nt, Homo Sapiens
cagcagcaaugagauucaguuuuauacccaca

SEQ ID NO: 205775 - RNA, 32 nt, Homo Sapiens
cugaguaugcuaguaauaaaugggagucauau

SEQ ID NO: 205776 - RNA, 32 nt, Homo Sapiens
agguuuggagaccuggccuccuggucagcuuu

SEQ ID NO: 205777 - RNA, 32 nt, Homo Sapiens
uguccuccuccucuccucucuauucccagugu

SEQ ID NO: 205778 - RNA, 32 nt, Homo Sapiens
ggugcccccguccaccuccucgcugugacccu

SEQ ID NO: 205779 - RNA, 32 nt, Homo Sapiens
ugccuguagucccagcacuuugggagacugag

SEQ ID NO: 205780 - RNA, 32 nt, Homo Sapiens
aaauuuaaauguuuagccaaauuuauugucau

SEQ ID NO: 205781 - RNA, 32 nt, Homo Sapiens
cuuccuucuguucuuuugugcuuucaaauaac

SEQ ID NO: 205782 - RNA, 32 nt, Homo Sapiens
ugcacgggcggcggcgaggcgaggguggcggu

SEQ ID NO: 205783 - RNA, 32 nt, Homo Sapiens
acacacacuauaaggcugagggcugccagcag

SEQ ID NO: 205784 - RNA, 32 nt, Homo Sapiens
ggguaugugagccaugccuugcccuuuucuga

SEQ ID NO: 205785 - RNA, 32 nt, Homo Sapiens
guuuuccguacuccaaaccaucagguggacac

SEQ ID NO: 205786 - RNA, 32 nt, Homo Sapiens
aaaauugccuucuucaaacaagggugucauuc

SEQ ID NO: 205787 - RNA, 32 nt, Homo Sapiens
gagucccggcccagccccuccaccccccugcc

SEQ ID NO: 205788 - RNA, 32 nt, Homo Sapiens
gauuuuuucuuaacuuuuuuuuuuuaacacac

SEQ ID NO: 205789 - RNA, 32 nt, Homo Sapiens
gcuuggcaaagagaugggagggggccagauac

SEQ ID NO: 205790 - RNA, 32 nt, Homo Sapiens
gcaguaaauauguaguaauugauacuugggag

SEQ ID NO: 205791 - RNA, 32 nt, Homo Sapiens
uguucuuugucaagugucauuagcaacuguug

SEQ ID NO: 205792 - RNA, 32 nt, Homo Sapiens
acgggagacagagugaagcaucaaccuacuua

SEQ ID NO: 205793 - RNA, 32 nt, Homo Sapiens
caguucucaacugcgaucacguccugguuaug

SEQ ID NO: 205794 - RNA, 32 nt, Homo Sapiens
ccagcaaaacaaaaauauucuacaaaaugaca

SEQ ID NO: 205795 - RNA, 32 nt, Homo Sapiens
aauccccaacuuuucagagcgagucuuuugca

SEQ ID NO: 205796 - RNA, 32 nt, Homo Sapiens
uacaggagggaccuccugggacuuuauggaag

SEQ ID NO: 205797 - RNA, 32 nt, Homo Sapiens
ugacgugcagcaugugcucgcugcugggcaua

SEQ ID NO: 205798 - RNA, 32 nt, Homo Sapiens
gacuggcgugcacgacgcggacuucgaggccc

SEQ ID NO: 205799 - RNA, 32 nt, Homo Sapiens
ccccggcaggcagggacaagauggcauggcaa

SEQ ID NO: 205800 - RNA, 32 nt, Homo Sapiens
acuaucagauuccauggccguauaaagacaau

SEQ ID NO: 205801 - RNA, 32 nt, Homo Sapiens
ccauuuucaccaucaagcacaaauaauugggu

SEQ ID NO: 205802 - RNA, 32 nt, Homo Sapiens
caucuuccggugcuauccuccccucccacccc

SEQ ID NO: 205803 - RNA, 32 nt, Homo Sapiens
augccuuaacugugccacaccccacaaccccc

SEQ ID NO: 205804 - RNA, 32 nt, Homo Sapiens
cagcuugggcgacagagcgagacccagucuca

SEQ ID NO: 205805 - RNA, 32 nt, Homo Sapiens
auuuauaaaaauuaaguuugugaaugugacua

SEQ ID NO: 205806 - RNA, 32 nt, Homo Sapiens
uaaauaaugcuguuguguuagcucugaguaga

SEQ ID NO: 205807 - RNA, 32 nt, Homo Sapiens
aacaccuuuguaaagaaucuguaaccaauacc

SEQ ID NO: 205808 - RNA, 32 nt, Homo Sapiens
cuguacccaagcccuuagcucaagcucugcuu

SEQ ID NO: 205809 - RNA, 32 nt, Homo Sapiens
cuaucucauaggaaacauccucauugauccuc

SEQ ID NO: 205810 - RNA, 32 nt, Homo Sapiens
uggcugcuuuugcugcugcugcuccuccguau

SEQ ID NO: 205811 - RNA, 32 nt, Homo Sapiens
ccaguugcccagcagagcucuuggccccgcug

SEQ ID NO: 205812 - RNA, 26 nt, Homo Sapiens
guuaauaaacacacucacgaaaaguu

SEQ ID NO: 205813 - RNA, 32 nt, Homo Sapiens
gaaggguccuugugccaguccuccccuuuuug

SEQ ID NO: 205814 - RNA, 32 nt, Homo Sapiens
acggugagaaagagacccgaucuaacccaggc

SEQ ID NO: 205815 - RNA, 32 nt, Homo Sapiens
ugggacccugaacccucccuucaccuugcuug

SEQ ID NO: 205816 - RNA, 32 nt, Homo Sapiens
aauugaggugaugugacauucugcuccccucc

SEQ ID NO: 205817 - RNA, 30 nt, Homo Sapiens
caggcgggcaggcgggcgccauggagcugc

SEQ ID NO: 205818 - RNA, 32 nt, Homo Sapiens
acugcuuuggccucccucuccucucaccagau

SEQ ID NO: 205819 - RNA, 32 nt, Homo Sapiens
guuuuggcuguugcuuuuuuuaaaguuagguc

SEQ ID NO: 205820 - RNA, 32 nt, Homo Sapiens
cucugguugcaaucccucccccucccacacug

SEQ ID NO: 205821 - RNA, 32 nt, Homo Sapiens
agacugaaacuugcucacagacuuccaguuau

SEQ ID NO: 205822 - RNA, 32 nt, Homo Sapiens
gcggauugcgggugaacucgccgcccgggggc

SEQ ID NO: 205823 - RNA, 32 nt, Homo Sapiens
cugucuacaccugagcacugcaggagauucuc

SEQ ID NO: 205824 - RNA, 32 nt, Homo Sapiens
acaguucauguucgacaauauuccuugaugac

SEQ ID NO: 205825 - RNA, 32 nt, Homo Sapiens
uaacaugccuggggggcauacaauccaacccg

SEQ ID NO: 205826 - RNA, 32 nt, Homo Sapiens
auuugggcagugccacccacuccuugggcccc

SEQ ID NO: 205827 - RNA, 32 nt, Homo Sapiens
auuaugugaacauuauagaguguacauacaca

SEQ ID NO: 205828 - RNA, 32 nt, Homo Sapiens
uucggaggccucuugacugggaccacagagau

SEQ ID NO: 205829 - RNA, 32 nt, Homo Sapiens
cugaagauauuggcacaaauguuuuauacaaa

SEQ ID NO: 205830 - RNA, 32 nt, Homo Sapiens
guccaguuccagaugccuggacccagagugug

SEQ ID NO: 205831 - RNA, 32 nt, Homo Sapiens
aggaggccgagaccggagcgccgcucgccgca

SEQ ID NO: 205832 - RNA, 32 nt, Homo Sapiens
ccgcaccgacgcggcccgggcuggagccgagc

SEQ ID NO: 205833 - RNA, 30 nt, Homo Sapiens
caguaauggcggaggcugcagcucccggaa

SEQ ID NO: 205834 - RNA, 32 nt, Homo Sapiens
ugcauucuguuuccucuucuaguugugccauu

SEQ ID NO: 205835 - RNA, 32 nt, Homo Sapiens
gaaaagaucuacccugaggagcucucccggcu

SEQ ID NO: 205836 - RNA, 32 nt, Homo Sapiens
ucuaauucucaaaggugcuuauccauuuucuu

SEQ ID NO: 205837 - RNA, 32 nt, Homo Sapiens
ugccuccccauggaggcgcccgggccggccca

SEQ ID NO: 205838 - RNA, 32 nt, Homo Sapiens
uacgggaauuagugauccuucucuggagagaa

SEQ ID NO: 205839 - RNA, 32 nt, Homo Sapiens
ccccagcccagcugccuccagaccccuaagca

SEQ ID NO: 205840 - RNA, 32 nt, Homo Sapiens
gacccgugucuuuccaugcccgagggccacga

SEQ ID NO: 205841 - RNA, 32 nt, Homo Sapiens
uagcaccggccgcggcucccccuggacggggc

SEQ ID NO: 205842 - RNA, 32 nt, Homo Sapiens
gaggaggggaagaucugggcaauuuuggccuu

SEQ ID NO: 205843 - RNA, 32 nt, Homo Sapiens
uguaccaauuuuuuuuuuuuuacugugcuuca

SEQ ID NO: 205844 - RNA, 32 nt, Homo Sapiens
caucacagaaaagaugaaaagagaaaagaaaa

SEQ ID NO: 205845 - RNA, 32 nt, Homo Sapiens
cgcgcuggucccggucucgccccgcagcccuc

SEQ ID NO: 205846 - RNA, 32 nt, Homo Sapiens
uaagaagaaaucaaacauguuucaggaaaagg

SEQ ID NO: 205847 - RNA, 32 nt, Homo Sapiens
gacaacgugacccugagggacuguagccccac

SEQ ID NO: 205848 - RNA, 32 nt, Homo Sapiens
aacagccuggaacauguuacucugauuucaug

SEQ ID NO: 205849 - RNA, 32 nt, Homo Sapiens
cagaucugucugaaagccucaguuucugagug

SEQ ID NO: 205850 - RNA, 32 nt, Homo Sapiens
gagcuggacuguuucuacuccucccuccuccu

SEQ ID NO: 205851 - RNA, 32 nt, Homo Sapiens
gagacgccgggggccuggcccggcccgcacuc

SEQ ID NO: 205852 - RNA, 32 nt, Homo Sapiens
cagcacucagggccaggggagagagaagagga

SEQ ID NO: 205853 - RNA, 32 nt, Homo Sapiens
cccaaggcccccucggccuccugggcaacuug

SEQ ID NO: 205854 - RNA, 32 nt, Homo Sapiens
gccaaacucggaagaaaagagaggaggaaaag

SEQ ID NO: 205855 - RNA, 32 nt, Homo Sapiens
aagcgugucaggcugucaguguuuggugcacg

SEQ ID NO: 205856 - RNA, 32 nt, Homo Sapiens
cguuugacagagcuguucacuuccucuuccug

SEQ ID NO: 205857 - RNA, 32 nt, Homo Sapiens
gcgccucccccgccgcgcgccuccugcaugcg

SEQ ID NO: 205858 - RNA, 32 nt, Homo Sapiens
cugcggccgggcgcgaaaauggcggcggcggc

SEQ ID NO: 205859 - RNA, 32 nt, Homo Sapiens
auuuacugaugaugauccuucagcccagagau

SEQ ID NO: 205860 - RNA, 32 nt, Homo Sapiens
cgcaggugagcggacccgcgcuggggugcggg

SEQ ID NO: 205861 - RNA, 32 nt, Homo Sapiens
uugaaauuuuugguuauaaauguaauacgaau

SEQ ID NO: 205862 - RNA, 32 nt, Homo Sapiens
ggcccggccccggccccccgccaagccaugcu

SEQ ID NO: 205863 - RNA, 32 nt, Homo Sapiens
aauguucuugucaccaaagugcccaacucugg

SEQ ID NO: 205864 - RNA, 32 nt, Homo Sapiens
gguucaagacaagccucaggcaucaugucaau

SEQ ID NO: 205865 - RNA, 31 nt, Homo Sapiens
cagagguggcucugccugcagcugggccucu

SEQ ID NO: 205866 - RNA, 32 nt, Homo Sapiens
ucacgucuguccuuguucuccuccagguggag

SEQ ID NO: 205867 - RNA, 30 nt, Homo Sapiens
gagccagcugggcgcgcguuguuuucugag

SEQ ID NO: 205868 - RNA, 32 nt, Homo Sapiens
ggggaugccagaaaugucuggagcaauggaag

SEQ ID NO: 205869 - RNA, 32 nt, Homo Sapiens
gcccgaggcagacggugcaggggccuccggga

SEQ ID NO: 205870 - RNA, 32 nt, Homo Sapiens
augugcugggaaaugcagaaaucacguugcug

SEQ ID NO: 205871 - RNA, 32 nt, Homo Sapiens
uccuggugucucccaggccaucaccaucagcc

SEQ ID NO: 205872 - RNA, 32 nt, Homo Sapiens
caaguuaacaaggaaugccugugccaauaaaa

SEQ ID NO: 205873 - RNA, 32 nt, Homo Sapiens
ggcggcggcucauggcggcgacggagcugaga

SEQ ID NO: 205874 - RNA, 29 nt, Homo Sapiens
gcuauuaugguaaauuaccacaaacuuaa

SEQ ID NO: 205875 - RNA, 32 nt, Homo Sapiens
agugcuucugcccuuccacgaacuccuccucc

SEQ ID NO: 205876 - RNA, 31 nt, Homo Sapiens
aggggguagcgcagcccaugcucuucuguac

SEQ ID NO: 205877 - RNA, 32 nt, Homo Sapiens
cuggggcagcggggacccucggguuugccgga

SEQ ID NO: 205878 - RNA, 32 nt, Homo Sapiens
acaucaacaucagcuuccucgaugaggaaguc

SEQ ID NO: 205879 - RNA, 32 nt, Homo Sapiens
uguggaagcugcugucccacuugggccauaug

SEQ ID NO: 205880 - RNA, 32 nt, Homo Sapiens
gugucugguggguccuuuuucuuucuuuuuaa

SEQ ID NO: 205881 - RNA, 32 nt, Homo Sapiens
guucugagggcuuaugccgggugcaggcuuuc

SEQ ID NO: 205882 - RNA, 32 nt, Homo Sapiens
uuccuuuaaaauuuacacuaaaaaaaggugcg

SEQ ID NO: 205883 - RNA, 32 nt, Homo Sapiens
aaacgccgggcaggagcgcccucucccggagc

SEQ ID NO: 205884 - RNA, 32 nt, Homo Sapiens
gacagggucucgcuuugacacccaggcuggag

SEQ ID NO: 205885 - RNA, 32 nt, Homo Sapiens
uaguauucaugacuauggauaaacuaaacacg

SEQ ID NO: 205886 - RNA, 32 nt, Homo Sapiens
cuugcccugaagugaggcgccagggaagcugc

SEQ ID NO: 205887 - RNA, 32 nt, Homo Sapiens
uuuccucugccuuuuucucuuauauguggguu

SEQ ID NO: 205888 - RNA, 32 nt, Homo Sapiens
agguccgagucuuuuuaguguuuuugcaaggg

SEQ ID NO: 205889 - RNA, 32 nt, Homo Sapiens
cucagccccagccccagcuccagcccugagga

SEQ ID NO: 205890 - RNA, 32 nt, Homo Sapiens
ccugugguaauguggcagcugggaccauggcc

SEQ ID NO: 205891 - RNA, 32 nt, Homo Sapiens
aaacucauuuuucacuguugacaagcgaggca

SEQ ID NO: 205892 - RNA, 32 nt, Homo Sapiens
gacagagucucccuuugucacccaggccggag

SEQ ID NO: 205893 - RNA, 32 nt, Homo Sapiens
gaugccagggucacugggguugggcuggggag

SEQ ID NO: 205894 - RNA, 32 nt, Homo Sapiens
cuugaagaggggguuagagagaaggcagguug

SEQ ID NO: 205895 - RNA, 32 nt, Homo Sapiens
uuguuugcauuccaauuuuguuuaauaaugag

SEQ ID NO: 205896 - RNA, 32 nt, Homo Sapiens
ggaucucugcaucucucuguaccugaucgugc

SEQ ID NO: 205897 - RNA, 32 nt, Homo Sapiens
cugcuccugccucuccuccucauagucaucga

SEQ ID NO: 205898 - RNA, 32 nt, Homo Sapiens
uauguaguucauguuuguguuggugggguaag

SEQ ID NO: 205899 - RNA, 32 nt, Homo Sapiens
agaagacucaguuucuuucaccuaguagacau

SEQ ID NO: 205900 - RNA, 32 nt, Homo Sapiens
gucucuuuugacuaaaagacaguguccagugc

SEQ ID NO: 205901 - RNA, 32 nt, Homo Sapiens
cuggggcuggagcuaugggcuggccauaggag

SEQ ID NO: 205902 - RNA, 32 nt, Homo Sapiens
ucgagcagcggcaguucucacuacagcgccag

SEQ ID NO: 205903 - RNA, 32 nt, Homo Sapiens
ucagaagucgguuuccuuuccuuuucuucagu

SEQ ID NO: 205904 - RNA, 32 nt, Homo Sapiens
uguuuguauuguuuuuuuucugaugauacuga

SEQ ID NO: 205905 - RNA, 32 nt, Homo Sapiens
ggcccagcuagccccagacuucggccccaugc

SEQ ID NO: 205906 - RNA, 32 nt, Homo Sapiens
aguguucuaugguuuaaauuagcauagcaauc

SEQ ID NO: 205907 - RNA, 32 nt, Homo Sapiens
cauagcuggggccagcagguucugcugagggu

SEQ ID NO: 205908 - RNA, 32 nt, Homo Sapiens
gaugcugaaucugcuggugccuugaucuugga

SEQ ID NO: 205909 - RNA, 32 nt, Homo Sapiens
gccauuaaaaagacaaacuuaauguacagagc

SEQ ID NO: 205910 - RNA, 32 nt, Homo Sapiens
ggaagcuguuuccuguugugauguuggaccug

SEQ ID NO: 205911 - RNA, 32 nt, Homo Sapiens
ucaaagagcaaauuagggacugagucauggca

SEQ ID NO: 205912 - RNA, 30 nt, Homo Sapiens
aagauggucugugcuccgagcaggcuaaag

SEQ ID NO: 205913 - RNA, 32 nt, Homo Sapiens
uuugaggaaccacagagcccaaggcuggaaac

SEQ ID NO: 205914 - RNA, 32 nt, Homo Sapiens
aauuuuugcugagaaccagaaaaaagaaagca

SEQ ID NO: 205915 - RNA, 32 nt, Homo Sapiens
uuaugcaagauauuuuugaaguaaauuaaaca

SEQ ID NO: 205916 - RNA, 30 nt, Homo Sapiens
gcucuucuggacugagccauccucaucacc

SEQ ID NO: 205917 - RNA, 32 nt, Homo Sapiens
aaaguuuauuuuugguuuuggaugaaucugcg

SEQ ID NO: 205918 - RNA, 32 nt, Homo Sapiens
cagcggggccuggccuaccucccccauccccu

SEQ ID NO: 205919 - RNA, 32 nt, Homo Sapiens
ugcggcacauucaagucagcuuucaccauuuu

SEQ ID NO: 205920 - RNA, 32 nt, Homo Sapiens
cuugaccagcauagauauuuggcacucuccuu

SEQ ID NO: 205921 - RNA, 32 nt, Homo Sapiens
aaaaccaaggaccuagggaaauaccagguaca

SEQ ID NO: 205922 - RNA, 32 nt, Homo Sapiens
augcugagaaaguuggugaagcuacauacaag

SEQ ID NO: 205923 - RNA, 32 nt, Homo Sapiens
cugucucuaccaaaauacaaaaauuagccggg

SEQ ID NO: 205924 - RNA, 32 nt, Homo Sapiens
gagggaaacgagcaaacucuuggcaucucugg

SEQ ID NO: 205925 - RNA, 32 nt, Homo Sapiens
ggucaagaaucuuuuuauucccaugugaaugu

SEQ ID NO: 205926 - RNA, 32 nt, Homo Sapiens
uauuauaauacuauucaguugggauaauggga

SEQ ID NO: 205927 - RNA, 32 nt, Homo Sapiens
cccucaucuuuaaaauguggcuaaugccugcc

SEQ ID NO: 205928 - RNA, 32 nt, Homo Sapiens
aagguguccaagagggucagugcgguggagga

SEQ ID NO: 205929 - RNA, 32 nt, Homo Sapiens
ggagauuuagugcuuuuauauucauuuccuug

SEQ ID NO: 205930 - RNA, 32 nt, Homo Sapiens
aguugugaaagauaagaaacugacccaaaguc

SEQ ID NO: 205931 - RNA, 32 nt, Homo Sapiens
auggcuuugugauucaaucuguaaacugugua

SEQ ID NO: 205932 - RNA, 32 nt, Homo Sapiens
guuugaaaauucccuaaguauuaaaagaaggg

SEQ ID NO: 205933 - RNA, 32 nt, Homo Sapiens
cguguccaacuggcugccugcuccuucucgau

SEQ ID NO: 205934 - RNA, 32 nt, Homo Sapiens
gcccccagguugagcaauaagaaaccagaacc

SEQ ID NO: 205935 - RNA, 32 nt, Homo Sapiens
cugagcagcacgagaccccauccuccccuccg

SEQ ID NO: 205936 - RNA, 26 nt, Homo Sapiens
cauggagacuucagcauccuccuccc

SEQ ID NO: 205937 - RNA, 32 nt, Homo Sapiens
uuaauauuacagaaacaaagggaugcaccaaa

SEQ ID NO: 205938 - RNA, 32 nt, Homo Sapiens
gaggccuggccagcuggccacuggaugaccug

SEQ ID NO: 205939 - RNA, 32 nt, Homo Sapiens
agggcagugacacuguaggagcauagcaagcc

SEQ ID NO: 205940 - RNA, 32 nt, Homo Sapiens
acaaaaugcuuuguaacagacuugcgguuaau

SEQ ID NO: 205941 - RNA, 32 nt, Homo Sapiens
uccauaucccuguugauacguuuaccugcugc

SEQ ID NO: 205942 - RNA, 32 nt, Homo Sapiens
cuuuaauccuucccaggcaccagucagcugaa

SEQ ID NO: 205943 - RNA, 32 nt, Homo Sapiens
acagaugggugcucuguggugaauggguggcc

SEQ ID NO: 205944 - RNA, 32 nt, Homo Sapiens
uuggauagcaaauccugagacaauggaaaacc

SEQ ID NO: 205945 - RNA, 32 nt, Homo Sapiens
ccaccucugcccgcggaggccggggagccccu

SEQ ID NO: 205946 - RNA, 32 nt, Homo Sapiens
aaagcaaaacuuauguuauuccuuugcagugc

SEQ ID NO: 205947 - RNA, 32 nt, Homo Sapiens
ccgcuuaggcucccaacaaaacggggucgggu

SEQ ID NO: 205948 - RNA, 32 nt, Homo Sapiens
uuauccuccucccagauaccucucacccucgg

SEQ ID NO: 205949 - RNA, 32 nt, Homo Sapiens
gcuacuguaaagagacccuccgcccuucuguc

SEQ ID NO: 205950 - RNA, 32 nt, Homo Sapiens
ggguaaaccguguuaucuuaggucuugucccc

SEQ ID NO: 205951 - RNA, 32 nt, Homo Sapiens
gaaggagugucugcuugaaggccuggaccacc

SEQ ID NO: 205952 - RNA, 32 nt, Homo Sapiens
uguuguuuuuauuaaucuuuugucuuaaaaua

SEQ ID NO: 205953 - RNA, 32 nt, Homo Sapiens
aaggaacugggaucgcgccgcggcgguuccug

SEQ ID NO: 205954 - RNA, 32 nt, Homo Sapiens
ggagcccggccgcgcccggugcauugugggag

SEQ ID NO: 205955 - RNA, 32 nt, Homo Sapiens
ccaucuaguuuauaguuuauuuagcauguugu

SEQ ID NO: 205956 - RNA, 32 nt, Homo Sapiens
uacugauuguaaagauuuaauaaaauauguaa

SEQ ID NO: 205957 - RNA, 32 nt, Homo Sapiens
cuuguucuauagauggacagagcucuccggug

SEQ ID NO: 205958 - RNA, 32 nt, Homo Sapiens
aauacagguuguuucuauuuuacuuuuucugg

SEQ ID NO: 205959 - RNA, 32 nt, Homo Sapiens
caucugcugcgcccggccccacugacagaucu

SEQ ID NO: 205960 - RNA, 32 nt, Homo Sapiens
accaccaccacuuccacccguccuacgccacu

SEQ ID NO: 205961 - RNA, 32 nt, Homo Sapiens
gucagaggaccggggcagccccugccaccaaa

SEQ ID NO: 205962 - RNA, 32 nt, Homo Sapiens
cccuggcagcggggucuucaccugguuccagc

SEQ ID NO: 205963 - RNA, 32 nt, Homo Sapiens
auuaaaacaaaacaaacacaaacaaggaggca

SEQ ID NO: 205964 - RNA, 32 nt, Homo Sapiens
ucuuucacccucggaucucuagcuacaaaagg

SEQ ID NO: 205965 - RNA, 32 nt, Homo Sapiens
uuucagcuuguuacauugauaauaauuauuuc

SEQ ID NO: 205966 - RNA, 32 nt, Homo Sapiens
ggggcggcaggagagagaggcuggccuacaca

SEQ ID NO: 205967 - RNA, 32 nt, Homo Sapiens
cgaaccccugagcagagaaucuuacuaggcuu

SEQ ID NO: 205968 - RNA, 32 nt, Homo Sapiens
ccugaaauggcugagggagggggcuaagagag

SEQ ID NO: 205969 - RNA, 28 nt, Homo Sapiens
caguuggggcggccccgcaggcccaggu

SEQ ID NO: 205970 - RNA, 32 nt, Homo Sapiens
uggccccgaggagggggcguugccauggcgac

SEQ ID NO: 205971 - RNA, 32 nt, Homo Sapiens
aagagcggcccggcccgagccaugacggacgg

SEQ ID NO: 205972 - RNA, 32 nt, Homo Sapiens
ugggggucucggggaaagcugcacccagcgcc

SEQ ID NO: 205973 - RNA, 32 nt, Homo Sapiens
caaagaccccacuucccaauacaaucacauua

SEQ ID NO: 205974 - RNA, 32 nt, Homo Sapiens
gguuucugggacugagacccaggccuggcagg

SEQ ID NO: 205975 - RNA, 32 nt, Homo Sapiens
gcccagcccuccccauggagccagcucccucu

SEQ ID NO: 205976 - RNA, 32 nt, Homo Sapiens
aauaaaauaaauaacauaaaucguugaacaua

SEQ ID NO: 205977 - RNA, 32 nt, Homo Sapiens
agcgggguagagaccgccgggucucggcccgc

SEQ ID NO: 205978 - RNA, 32 nt, Homo Sapiens
cucuccuguaccucuugagccuugaacuuuga

SEQ ID NO: 205979 - RNA, 32 nt, Homo Sapiens
uucucugcgcaguacggccgccgggaccgcag

SEQ ID NO: 205980 - RNA, 32 nt, Homo Sapiens
aauguugcagacauuuaagcaguuagaaacuc

SEQ ID NO: 205981 - RNA, 32 nt, Homo Sapiens
ucaaggagggaggauccuggaacuaauccccu

SEQ ID NO: 205982 - RNA, 32 nt, Homo Sapiens
ccccagcuaccaccuccuccccggccggcggc

SEQ ID NO: 205983 - RNA, 30 nt, Homo Sapiens
cugcgagagaagcuaaacguguuuauuuuc

SEQ ID NO: 205984 - RNA, 32 nt, Homo Sapiens
cguaagcccuguacauguacuauuaauucagu

SEQ ID NO: 205985 - RNA, 32 nt, Homo Sapiens
ccucccccaccuccccgagucuugggagccug

SEQ ID NO: 205986 - RNA, 32 nt, Homo Sapiens
cagagcuugcccagcuguccccgggaagccaa

SEQ ID NO: 205987 - RNA, 32 nt, Homo Sapiens
aguaccaugggcuacagugucuggccuuggga

SEQ ID NO: 205988 - RNA, 32 nt, Homo Sapiens
ucuuggcuaauauguacuggggaaauaaucca

SEQ ID NO: 205989 - RNA, 32 nt, Homo Sapiens
accaaguccuccacagagggcgagccagggug

SEQ ID NO: 205990 - RNA, 32 nt, Homo Sapiens
gugauucuucuaaagcacugguuucaagaaua

SEQ ID NO: 205991 - RNA, 32 nt, Homo Sapiens
gcccugacuguuccaacaccaccugcuauggg

SEQ ID NO: 205992 - RNA, 32 nt, Homo Sapiens
cagcuccauuuucuuauugcgcugcuaccguu

SEQ ID NO: 205993 - RNA, 30 nt, Homo Sapiens
gggccauggcugaggcggccccggccccga

SEQ ID NO: 205994 - RNA, 32 nt, Homo Sapiens
cgcacgacggacuuucccuggaccccagucag

SEQ ID NO: 205995 - RNA, 32 nt, Homo Sapiens
ucucccgucuucugccucccacuccauacccc

SEQ ID NO: 205996 - RNA, 32 nt, Homo Sapiens
cugugcaucuucuuguccauucaucugcccac

SEQ ID NO: 205997 - RNA, 32 nt, Homo Sapiens
gagggaccuuggagagcucaggauggcucaga

SEQ ID NO: 205998 - RNA, 32 nt, Homo Sapiens
uucugccuggcggccaggccuccagcuucccc

SEQ ID NO: 205999 - RNA, 32 nt, Homo Sapiens
cuuccccagccgccggccgaaccgccgcuccc

SEQ ID NO: 206000 - RNA, 32 nt, Homo Sapiens
uuguuccucuguuuccucacccuaacccuaaa

SEQ ID NO: 206001 - RNA, 32 nt, Homo Sapiens
uaaaagaugaauaagaaaaaagaucaagcucu

SEQ ID NO: 206002 - RNA, 32 nt, Homo Sapiens
uucaagagaacaaauauguuacaauccuugcc

SEQ ID NO: 206003 - RNA, 32 nt, Homo Sapiens
uggaccacuugauaacuuccaguguccuggca

SEQ ID NO: 206004 - RNA, 32 nt, Homo Sapiens
gcacuagaaaacugccuacuaaagccucagua

SEQ ID NO: 206005 - RNA, 32 nt, Homo Sapiens
gugaaaaguuuuuaauaaauguguugaaaauc

SEQ ID NO: 206006 - RNA, 32 nt, Homo Sapiens
cuccucccagaggcuuccaggagcacgagggc

SEQ ID NO: 206007 - RNA, 32 nt, Homo Sapiens
cucucuuuuuaacuuucucugugauaaggaaa

SEQ ID NO: 206008 - RNA, 32 nt, Homo Sapiens
accagggacagagguagaaaaguaaacauuaa

SEQ ID NO: 206009 - RNA, 32 nt, Homo Sapiens
gauucucugccagccugugucacccacccacc

SEQ ID NO: 206010 - RNA, 29 nt, Homo Sapiens
gauguuuaaaguuuauuuuucagcaggug

SEQ ID NO: 206011 - RNA, 32 nt, Homo Sapiens
uuaaaaucuuuaaauuuuauaaaucagcuguu

SEQ ID NO: 206012 - RNA, 32 nt, Homo Sapiens
gaaggaacaagauuuucuuaagucauccaagu

SEQ ID NO: 206013 - RNA, 32 nt, Homo Sapiens
gucaguucccccuuguuugcugccagagaaau

SEQ ID NO: 206014 - RNA, 32 nt, Homo Sapiens
agguuauagugaacuaugaucuuaccacuaca

SEQ ID NO: 206015 - RNA, 32 nt, Homo Sapiens
uaucaaauaaagugauuauuuuuuacaacccc

SEQ ID NO: 206016 - RNA, 32 nt, Homo Sapiens
ccacgaccacacgcacuucaggguggaagcug

SEQ ID NO: 206017 - RNA, 32 nt, Homo Sapiens
accgagauuacaguggaagaucagcuugcaug

SEQ ID NO: 206018 - RNA, 32 nt, Homo Sapiens
ugggagggugggggcuaggaccccaagaagcu

SEQ ID NO: 206019 - RNA, 32 nt, Homo Sapiens
ggccugccacugacccugucuguauuuucucg

SEQ ID NO: 206020 - RNA, 32 nt, Homo Sapiens
uuagucaggaguaagcucugugcgagagaucu

SEQ ID NO: 206021 - RNA, 32 nt, Homo Sapiens
ccuaaauaagcacuuagaauauuugggugugc

SEQ ID NO: 206022 - RNA, 32 nt, Homo Sapiens
agccucucugcccuuccacucucugaccaccg

SEQ ID NO: 206023 - RNA, 32 nt, Homo Sapiens
cccgccuccagcagcccucugucggccuccuc

SEQ ID NO: 206024 - RNA, 32 nt, Homo Sapiens
gcccugugguuggacgguggccugggugcgcu

SEQ ID NO: 206025 - RNA, 32 nt, Homo Sapiens
acuugaagaacuaaaacaacaaugcaaaccuu

SEQ ID NO: 206026 - RNA, 32 nt, Homo Sapiens
auugcaaaaauauuuugugcggaauucgauau

SEQ ID NO: 206027 - RNA, 32 nt, Homo Sapiens
ucagccagcuccggggcucucaucuuccacuc

SEQ ID NO: 206028 - RNA, 32 nt, Homo Sapiens
gucucuuuuagagucagacuccuagacucacu

SEQ ID NO: 206029 - RNA, 32 nt, Homo Sapiens
cuacgaaaugacaggcugccccugcccugaau

SEQ ID NO: 206030 - RNA, 32 nt, Homo Sapiens
cugccuugcccccacaggugggcacauccugu

SEQ ID NO: 206031 - RNA, 32 nt, Homo Sapiens
cuuggggcuguuccucccacgcagcaggccuc

SEQ ID NO: 206032 - RNA, 32 nt, Homo Sapiens
aacuugcagcuagaauugagggaagagagaga

SEQ ID NO: 206033 - RNA, 32 nt, Homo Sapiens
gcuggcacuguaggcauguaccaccaugccca

SEQ ID NO: 206034 - RNA, 28 nt, Homo Sapiens
cauagcaaauaaaaauguuuugguauau

SEQ ID NO: 206035 - RNA, 32 nt, Homo Sapiens
gggagcugcccggcuggccuaggcaggcagcc

SEQ ID NO: 206036 - RNA, 31 nt, Homo Sapiens
uguuucugucuccagaaccacaagaacugga

SEQ ID NO: 206037 - RNA, 32 nt, Homo Sapiens
aauuaaaaggucugcauuuucuuuuuucuuuu

SEQ ID NO: 206038 - RNA, 32 nt, Homo Sapiens
acaaaguuggagcuuuuaaagaaccugggagu

SEQ ID NO: 206039 - RNA, 32 nt, Homo Sapiens
cuggggaaagacuggacacaccagggcaucac

SEQ ID NO: 206040 - RNA, 32 nt, Homo Sapiens
ggugugggaaaacagcuccagagcuucuaagc

SEQ ID NO: 206041 - RNA, 32 nt, Homo Sapiens
agcacuucuggugguuuaaaaugugauucugu

SEQ ID NO: 206042 - RNA, 32 nt, Homo Sapiens
gauucucauuucuauuuguaaauucuuaagca

SEQ ID NO: 206043 - RNA, 30 nt, Homo Sapiens
acccacccacaauccuauucucgggcugag

SEQ ID NO: 206044 - RNA, 32 nt, Homo Sapiens
uacccugcccuggcuggcaugugagaagccau

SEQ ID NO: 206045 - RNA, 32 nt, Homo Sapiens
gcgccggcuccauggcgaccgggcucggggag

SEQ ID NO: 206046 - RNA, 32 nt, Homo Sapiens
gccuggccugucagcucccugcuaggcuacag

SEQ ID NO: 206047 - RNA, 32 nt, Homo Sapiens
aauccacaccaauuauuuaaauucacuuggua

SEQ ID NO: 206048 - RNA, 32 nt, Homo Sapiens
uagggggagggggcuuccccuuucagcugccc

SEQ ID NO: 206049 - RNA, 32 nt, Homo Sapiens
ggauuauaaugagccaaaauguuucccggugu

SEQ ID NO: 206050 - RNA, 32 nt, Homo Sapiens
ugcauggagggcaggccaggauggagcccagg

SEQ ID NO: 206051 - RNA, 32 nt, Homo Sapiens
cuuuaaagggugacucgucccacuuguguucu

SEQ ID NO: 206052 - RNA, 29 nt, Homo Sapiens
uaggaaagaaaaugauauuuucuaaguaa

SEQ ID NO: 206053 - RNA, 32 nt, Homo Sapiens
caaaagccacuggcucccaggaugcaccucua

SEQ ID NO: 206054 - RNA, 32 nt, Homo Sapiens
cgucuccaauuaugaaacuaaucuuaacccug

SEQ ID NO: 206055 - RNA, 32 nt, Homo Sapiens
cauuugcaaaaauuauucugcuaaguauuuac

SEQ ID NO: 206056 - RNA, 30 nt, Homo Sapiens
cauucugucugugguagagcucgggccagc

SEQ ID NO: 206057 - RNA, 32 nt, Homo Sapiens
cacaucacagcgggaggagcugucccaggugg

SEQ ID NO: 206058 - RNA, 32 nt, Homo Sapiens
ucugguuuucuuuuacccauaaauaacaugaa

SEQ ID NO: 206059 - RNA, 32 nt, Homo Sapiens
gagucaccguuggagggccggggggugcuggu

SEQ ID NO: 206060 - RNA, 32 nt, Homo Sapiens
cagcaccccucgcaccaggcggcggcggcgga

SEQ ID NO: 206061 - RNA, 32 nt, Homo Sapiens
ugcuggaauuauggcaccuugcagcuucuucu

SEQ ID NO: 206062 - RNA, 32 nt, Homo Sapiens
cccgcccggugcagccgcugugcgagagcgac

SEQ ID NO: 206063 - RNA, 32 nt, Homo Sapiens
uguuuugaagcaguaacauuuuucucagugca

SEQ ID NO: 206064 - RNA, 32 nt, Homo Sapiens
gugccuaauaauauuauuuacucaauauauuu

SEQ ID NO: 206065 - RNA, 32 nt, Homo Sapiens
aguugauuuuuccacaaacuuucagagggcca

SEQ ID NO: 206066 - RNA, 32 nt, Homo Sapiens
acguaagucauuuuuuaccuuugagucauugg

SEQ ID NO: 206067 - RNA, 32 nt, Homo Sapiens
ucgccgccucagucgccagcgccgggcgcagu

SEQ ID NO: 206068 - RNA, 32 nt, Homo Sapiens
ugggugcucugcaaaguuagggcaaagagagu

SEQ ID NO: 206069 - RNA, 32 nt, Homo Sapiens
cauucuaugacucuugucuccuccuccaggag

SEQ ID NO: 206070 - RNA, 32 nt, Homo Sapiens
guaagccccagaguauauugaauagaaauucu

SEQ ID NO: 206071 - RNA, 32 nt, Homo Sapiens
caaggggagcccaauuaaauaccuggguucag

SEQ ID NO: 206072 - RNA, 32 nt, Homo Sapiens
agugccaguaaucccagcuacucuuggaggcu

SEQ ID NO: 206073 - RNA, 32 nt, Homo Sapiens
uccagcugccagcgcagccgccagcgccggca

SEQ ID NO: 206074 - RNA, 32 nt, Homo Sapiens
uuuucccuuggccacuagcccaucuucaauga

SEQ ID NO: 206075 - RNA, 32 nt, Homo Sapiens
auuagcccggugccaguggucccagcuagccg

SEQ ID NO: 206076 - RNA, 32 nt, Homo Sapiens
ugccagccgugcugucccccaaugccacgcug

SEQ ID NO: 206077 - RNA, 32 nt, Homo Sapiens
ggcaauacaaauauuaucacauagcgucaacu

SEQ ID NO: 206078 - RNA, 32 nt, Homo Sapiens
gcgggacuccuagacccggcgcugcgaugaag

SEQ ID NO: 206079 - RNA, 32 nt, Homo Sapiens
ugaaauaaaaauuauaauaaagcaaauuuaua

SEQ ID NO: 206080 - RNA, 32 nt, Homo Sapiens
cgugcagcgcaccgugauguucacgcggccag

SEQ ID NO: 206081 - RNA, 32 nt, Homo Sapiens
ugaaccugaauuuugcucuccucuucuaugca

SEQ ID NO: 206082 - RNA, 32 nt, Homo Sapiens
cuugggagcggcugcgggccugcaggggugag

SEQ ID NO: 206083 - RNA, 32 nt, Homo Sapiens
ugagucuuaaaaccuccucuuauuucuacaag

SEQ ID NO: 206084 - RNA, 32 nt, Homo Sapiens
cucccuuacccccauccuuaacuuuguauccu

SEQ ID NO: 206085 - RNA, 32 nt, Homo Sapiens
guuuugccauguggucccaggcuggucucaaa

SEQ ID NO: 206086 - RNA, 32 nt, Homo Sapiens
acauucacucuuguuugucccuggacuggcca

SEQ ID NO: 206087 - RNA, 32 nt, Homo Sapiens
cucugcugucuccucugguccugagaugagcu

SEQ ID NO: 206088 - RNA, 32 nt, Homo Sapiens
aagaaaagauaaagaugaucuacucagaaauu

SEQ ID NO: 206089 - RNA, 32 nt, Homo Sapiens
gcaaugucuagugaaacuuaucugauggcauu

SEQ ID NO: 206090 - RNA, 32 nt, Homo Sapiens
ucaccuggaggcuacgcgcgcuacgccgcgua

SEQ ID NO: 206091 - RNA, 32 nt, Homo Sapiens
ccagcacuucgggggguugaggcgggcagauc

SEQ ID NO: 206092 - RNA, 32 nt, Homo Sapiens
uaagaaugcaagaugaaaaaaucagguaaaau

SEQ ID NO: 206093 - RNA, 31 nt, Homo Sapiens
uucacucagccacgccaaccagagacugggu

SEQ ID NO: 206094 - RNA, 29 nt, Homo Sapiens
ugugaugggccaccggggcaagagggaag

SEQ ID NO: 206095 - RNA, 32 nt, Homo Sapiens
cacuuugagagaccgaggcgggcggaucacga

SEQ ID NO: 206096 - RNA, 32 nt, Homo Sapiens
cuaggggcggcaugcuccugcuaggaguccag

SEQ ID NO: 206097 - RNA, 32 nt, Homo Sapiens
aaagcugacauaagaaaaauuauuuaacuucu

SEQ ID NO: 206098 - RNA, 31 nt, Homo Sapiens
ggcgguauccacagaagacaggcaagaggau

SEQ ID NO: 206099 - RNA, 32 nt, Homo Sapiens
uagccucuucuucaggcccuaauuacagcucu

SEQ ID NO: 206100 - RNA, 32 nt, Homo Sapiens
auucuguucuuugccuauaaacauuagcgaug

SEQ ID NO: 206101 - RNA, 32 nt, Homo Sapiens
uuccuggauaaaaaagaaaacauuccagaugc

SEQ ID NO: 206102 - RNA, 32 nt, Homo Sapiens
gaucaccugagcucaggaguccaagaccagcc

SEQ ID NO: 206103 - RNA, 32 nt, Homo Sapiens
uucuggggggauguuaccccuaacguuacagg

SEQ ID NO: 206104 - RNA, 32 nt, Homo Sapiens
agaggccuccucucuggagucuucacaggggc

SEQ ID NO: 206105 - RNA, 32 nt, Homo Sapiens
gcgcccaggaggaagggagggcagagggggcu

SEQ ID NO: 206106 - RNA, 32 nt, Homo Sapiens
aacccgaauggcccagccuggugcugguggau

SEQ ID NO: 206107 - RNA, 32 nt, Homo Sapiens
ccuuuaagaacaaaaacugggcacauucuaaa

SEQ ID NO: 206108 - RNA, 32 nt, Homo Sapiens
guacugaccgagaaucucuggaacugguucuu

SEQ ID NO: 206109 - RNA, 32 nt, Homo Sapiens
guuuucuccugaggacacccaggcugccuuug

SEQ ID NO: 206110 - RNA, 32 nt, Homo Sapiens
gccgccguugacccggccgccggccgggagcu

SEQ ID NO: 206111 - RNA, 32 nt, Homo Sapiens
caguuaauaaagauuuguauugugaaaagauu

SEQ ID NO: 206112 - RNA, 32 nt, Homo Sapiens
ugccucucguggccucaacgggcccagccccu

SEQ ID NO: 206113 - RNA, 32 nt, Homo Sapiens
caucagcuccuguuucuuuucaucucuaggaa

SEQ ID NO: 206114 - RNA, 32 nt, Homo Sapiens
ucgguauggcagucuguggccuuggcagcugg

SEQ ID NO: 206115 - RNA, 32 nt, Homo Sapiens
uugagaaucagucaaaaagauacaacaccuga

SEQ ID NO: 206116 - RNA, 32 nt, Homo Sapiens
gagacugcggcgggagggccaggccgugggag

SEQ ID NO: 206117 - RNA, 32 nt, Homo Sapiens
acgugccaugcaguuccuggggguugcuguau

SEQ ID NO: 206118 - RNA, 32 nt, Homo Sapiens
cccgugccgggcgggcccgagcgggugucgag

SEQ ID NO: 206119 - RNA, 32 nt, Homo Sapiens
gugcuuugaggguggggccuguaugugcccuc

SEQ ID NO: 206120 - RNA, 32 nt, Homo Sapiens
ccgcagccucagucccgccgccgcccgcugcg

SEQ ID NO: 206121 - RNA, 32 nt, Homo Sapiens
auucucauggcccuuuggucacugccgggugg

SEQ ID NO: 206122 - RNA, 32 nt, Homo Sapiens
gugaauguuggaucucagacuaaccauaguaa

SEQ ID NO: 206123 - RNA, 32 nt, Homo Sapiens
ggaguuugaguaaagaaaaugacugauguacu

SEQ ID NO: 206124 - RNA, 32 nt, Homo Sapiens
acgagccccucgcggcacugccccggccccgg

SEQ ID NO: 206125 - RNA, 32 nt, Homo Sapiens
acgaacaucccaguguggcccuggacgggaca

SEQ ID NO: 206126 - RNA, 32 nt, Homo Sapiens
aggugguggcagggccgcccccugcaguccgg

SEQ ID NO: 206127 - RNA, 32 nt, Homo Sapiens
gcucuuuccccucccugcccucuggucugaca

SEQ ID NO: 206128 - RNA, 32 nt, Homo Sapiens
aggauuuguaugcucccuguagccagagguga

SEQ ID NO: 206129 - RNA, 32 nt, Homo Sapiens
uggagucuggaauggagcaggggggaccaugg

SEQ ID NO: 206130 - RNA, 32 nt, Homo Sapiens
uauucaaugucauauugcugguaaaugucaga

SEQ ID NO: 206131 - RNA, 32 nt, Homo Sapiens
ugaguacaaaggaaacaggaauaauaaaggca

SEQ ID NO: 206132 - RNA, 32 nt, Homo Sapiens
uuauuuuuagcauacuguuaaauaucacauca

SEQ ID NO: 206133 - RNA, 32 nt, Homo Sapiens
uuugagcuucacaaaauaaucaguggagauuc

SEQ ID NO: 206134 - RNA, 32 nt, Homo Sapiens
cagggugggugugcauggauucgggcaugaag

SEQ ID NO: 206135 - RNA, 32 nt, Homo Sapiens
uagccuccugaggccuggcugagagggcuggg

SEQ ID NO: 206136 - RNA, 32 nt, Homo Sapiens
uaaaaaaaaaaaaaaaucaucuuacuagguac

SEQ ID NO: 206137 - RNA, 32 nt, Homo Sapiens
acauuguaauaauaauuugaucuuauuugaac

SEQ ID NO: 206138 - RNA, 32 nt, Homo Sapiens
gaucgcgccacccacuccagcccgggugacag

SEQ ID NO: 206139 - RNA, 32 nt, Homo Sapiens
gcggcgcagggccggcuuggccuuccguggga

SEQ ID NO: 206140 - RNA, 32 nt, Homo Sapiens
uauuuauguaauuauuugauaacucuuguaaa

SEQ ID NO: 206141 - RNA, 31 nt, Homo Sapiens
auucauggguccccuaguuaggcccagauaa

SEQ ID NO: 206142 - RNA, 32 nt, Homo Sapiens
aaaaauguaguuagucuuuucuuaacuuauac

SEQ ID NO: 206143 - RNA, 32 nt, Homo Sapiens
cuuaaggcacuagucccuuacagaggaccaug

SEQ ID NO: 206144 - RNA, 32 nt, Homo Sapiens
gccagcgcgcgcgggcgggcggacagaucgga

SEQ ID NO: 206145 - RNA, 32 nt, Homo Sapiens
cucagucuuuggcaauggccacccugguguug

SEQ ID NO: 206146 - RNA, 32 nt, Homo Sapiens
ugcccccuuucuggcucucagcgccgucgcca

SEQ ID NO: 206147 - RNA, 32 nt, Homo Sapiens
gggguuugagaccggccuggccagcgugguga

SEQ ID NO: 206148 - RNA, 32 nt, Homo Sapiens
gugucggaaggggagggugagguuugcccacu

SEQ ID NO: 206149 - RNA, 32 nt, Homo Sapiens
agcugccgugggcccuggggaugugugcuuca

SEQ ID NO: 206150 - RNA, 32 nt, Homo Sapiens
accggagucggguuuggggaaguugucaagga

SEQ ID NO: 206151 - RNA, 32 nt, Homo Sapiens
cacaaucugaucccaaagaugugcuccacaaa

SEQ ID NO: 206152 - RNA, 32 nt, Homo Sapiens
auuauuuucugcaucuugcauggugcacaaua

SEQ ID NO: 206153 - RNA, 30 nt, Homo Sapiens
gaugcgagccggccaccagucccggcagag

SEQ ID NO: 206154 - RNA, 32 nt, Homo Sapiens
uagaaacuaugcuuaucauuggcugucaguaa

SEQ ID NO: 206155 - RNA, 32 nt, Homo Sapiens
accccuugccuggccucaccuggccagcucac

SEQ ID NO: 206156 - RNA, 32 nt, Homo Sapiens
aggaggaggaggagacaccuagagccugcgac

SEQ ID NO: 206157 - RNA, 32 nt, Homo Sapiens
acauuaugcaaaucucuuuagcacuauuuuaa

SEQ ID NO: 206158 - RNA, 32 nt, Homo Sapiens
ggaccucagaaggagcuuuuugccuaucuaua

SEQ ID NO: 206159 - RNA, 32 nt, Homo Sapiens
ccagagaaauuaacuuacauuaucaaaaaauu

SEQ ID NO: 206160 - RNA, 32 nt, Homo Sapiens
agaguccucacaacugcgucuccggaggcaga

SEQ ID NO: 206161 - RNA, 32 nt, Homo Sapiens
gucagguggaagcugagaaauaaauguauaua

SEQ ID NO: 206162 - RNA, 32 nt, Homo Sapiens
ucucucacacauacacacacaaacacauacac

SEQ ID NO: 206163 - RNA, 32 nt, Homo Sapiens
cccccuccccgcccgccuucccggugaccuuc

SEQ ID NO: 206164 - RNA, 31 nt, Homo Sapiens
caaggcaggcacaucaccugaguucaggagu

SEQ ID NO: 206165 - RNA, 32 nt, Homo Sapiens
ugcccuggaccucagcauccucuguuugaugc

SEQ ID NO: 206166 - RNA, 32 nt, Homo Sapiens
ugggagcuccuguccccgccagcccugcucca

SEQ ID NO: 206167 - RNA, 32 nt, Homo Sapiens
cuuagcuacuugggaggcugaggugggaggau

SEQ ID NO: 206168 - RNA, 32 nt, Homo Sapiens
gcugaggcgccauggcggcggcagcgguguca

SEQ ID NO: 206169 - RNA, 32 nt, Homo Sapiens
uuaccuggucaccaugugaugugaucagaugc

SEQ ID NO: 206170 - RNA, 32 nt, Homo Sapiens
ugguagaaacaagaauuccacccacgcaccua

SEQ ID NO: 206171 - RNA, 29 nt, Homo Sapiens
cgccauggacgaagcggaucggcggcucc

SEQ ID NO: 206172 - RNA, 32 nt, Homo Sapiens
gggaucuggaucagauucugggggcucagaaa

SEQ ID NO: 206173 - RNA, 32 nt, Homo Sapiens
acgguccccccucacuccacacuggcacguuu

SEQ ID NO: 206174 - RNA, 32 nt, Homo Sapiens
cucagagauguguccccauccacacaucaugg

SEQ ID NO: 206175 - RNA, 32 nt, Homo Sapiens
auauaaauauccaguauaaaggaaagcguuaa

SEQ ID NO: 206176 - RNA, 32 nt, Homo Sapiens
uccuuccacuggccagcauucuccucuauuag

SEQ ID NO: 206177 - RNA, 32 nt, Homo Sapiens
aaaaaaagagagaaacuugacugcacauuaaa

SEQ ID NO: 206178 - RNA, 32 nt, Homo Sapiens
cauaugucaucaacacuaagcauuuuauugga

SEQ ID NO: 206179 - RNA, 32 nt, Homo Sapiens
augcggccucugucacaucuacucaacucugc

SEQ ID NO: 206180 - RNA, 32 nt, Homo Sapiens
ccuagcuccacggcacgggugucucccagcca

SEQ ID NO: 206181 - RNA, 32 nt, Homo Sapiens
ugcuggggcucuggagagacugagacgggugu

SEQ ID NO: 206182 - RNA, 32 nt, Homo Sapiens
uucuauuuuuugcugcccccuccccgcccacu

SEQ ID NO: 206183 - RNA, 32 nt, Homo Sapiens
cccugggccccggacgcccccggacacaauaa

SEQ ID NO: 206184 - RNA, 32 nt, Homo Sapiens
cucccugauggccaugcugagggacaguggug

SEQ ID NO: 206185 - RNA, 32 nt, Homo Sapiens
ccaagcacagaaagccgcuaaauaaaaucuuu

SEQ ID NO: 206186 - RNA, 30 nt, Homo Sapiens
cugagagcccugguccggcgcgcgccgccg

SEQ ID NO: 206187 - RNA, 32 nt, Homo Sapiens
ggcccccucccugucuggaccccggccccacc

SEQ ID NO: 206188 - RNA, 31 nt, Homo Sapiens
acucgggcacucccuaaguccacucuaguug

SEQ ID NO: 206189 - RNA, 32 nt, Homo Sapiens
ggcguuuggggguggggaaggcaccuccagag

SEQ ID NO: 206190 - RNA, 32 nt, Homo Sapiens
gacugaagagaaaaaaggaacgaggauuucau

SEQ ID NO: 206191 - RNA, 32 nt, Homo Sapiens
ccgcuuugggggccgcggucucuccgcagcuc

SEQ ID NO: 206192 - RNA, 32 nt, Homo Sapiens
cacgcuguccuggccucccuggaggccuggcu

SEQ ID NO: 206193 - RNA, 32 nt, Homo Sapiens
cccaggagggcugaaggcaggggccacucaca

SEQ ID NO: 206194 - RNA, 32 nt, Homo Sapiens
uuugguuauauuacaaaaaugucaaucaaaua

SEQ ID NO: 206195 - RNA, 32 nt, Homo Sapiens
cuccaaccauguccgacgaggccucggccauc

SEQ ID NO: 206196 - RNA, 32 nt, Homo Sapiens
gaggccugcuccauggagugcaggacgagcua

SEQ ID NO: 206197 - RNA, 32 nt, Homo Sapiens
caggggcaaaguugcugaaaaaguuuugguuu

SEQ ID NO: 206198 - RNA, 32 nt, Homo Sapiens
gggggcagcugucccagugucaauguuuacuc

SEQ ID NO: 206199 - RNA, 32 nt, Homo Sapiens
acuugauuccuuuaaguuuaaucuugguauuc

SEQ ID NO: 206200 - RNA, 32 nt, Homo Sapiens
uccccaggccccaggaagccgugcccugcccc

SEQ ID NO: 206201 - RNA, 32 nt, Homo Sapiens
ccugcccgaggucgcugcagccccaucuacca

SEQ ID NO: 206202 - RNA, 32 nt, Homo Sapiens
aaagcuuuuuaaaauuuagaguagguauuaau

SEQ ID NO: 206203 - RNA, 32 nt, Homo Sapiens
uuuuguacagugacuucagaguaucucacaug

SEQ ID NO: 206204 - RNA, 32 nt, Homo Sapiens
aguaggauuuccuuuuucaacuguuccaggaa

SEQ ID NO: 206205 - RNA, 32 nt, Homo Sapiens
gggucgucaugauccggaccccauugucggcc

SEQ ID NO: 206206 - RNA, 32 nt, Homo Sapiens
cagaggccccuuuaaacuuccuccucggccgg

SEQ ID NO: 206207 - RNA, 32 nt, Homo Sapiens
gacuaccccagguaccuuugcugcugauuugg

SEQ ID NO: 206208 - RNA, 32 nt, Homo Sapiens
uauuucaugcugcuuccagagcccucugggag

SEQ ID NO: 206209 - RNA, 32 nt, Homo Sapiens
uauacuaagccuauguuauaguucuaguaaaa

SEQ ID NO: 206210 - RNA, 32 nt, Homo Sapiens
ugucccgucgcggcuugggacccggcaagaug

SEQ ID NO: 206211 - RNA, 32 nt, Homo Sapiens
cagaaggugggcagggcgggggaggcagggac

SEQ ID NO: 206212 - RNA, 32 nt, Homo Sapiens
uagguguuuugacaccaaaagaaaacuacaug

SEQ ID NO: 206213 - RNA, 32 nt, Homo Sapiens
ccggugggugugcugaggacaccugggcugcg

SEQ ID NO: 206214 - RNA, 32 nt, Homo Sapiens
uggucuggcuugcauggauguagggcuugggg

SEQ ID NO: 206215 - RNA, 32 nt, Homo Sapiens
cugaagcugccacagauaaaauuguaagugga

SEQ ID NO: 206216 - RNA, 30 nt, Homo Sapiens
cugucauggcggcggccgcccccaaugccg

SEQ ID NO: 206217 - RNA, 27 nt, Homo Sapiens
guucuguccuucuugagaaucuaaaac

SEQ ID NO: 206218 - RNA, 32 nt, Homo Sapiens
ggugagauggaccauccugcccccguggggga

SEQ ID NO: 206219 - RNA, 32 nt, Homo Sapiens
uaucuuaucuuggacacuuaugcugaauuaug

SEQ ID NO: 206220 - RNA, 32 nt, Homo Sapiens
gccggccccgccaggccuccccgcuggccaua

SEQ ID NO: 206221 - RNA, 32 nt, Homo Sapiens
gagcggggccuuggaggcccagcccgcgcggc

SEQ ID NO: 206222 - RNA, 32 nt, Homo Sapiens
aaaaaagcaguucuuaacccaguguccaugga

SEQ ID NO: 206223 - RNA, 32 nt, Homo Sapiens
uuccuuccuaauaggcaucuccaggcugccug

SEQ ID NO: 206224 - RNA, 32 nt, Homo Sapiens
uugaaguacauuuuugucgguuugugaggggu

SEQ ID NO: 206225 - RNA, 32 nt, Homo Sapiens
gcggacugccccagcucccccagccccacgaa

SEQ ID NO: 206226 - RNA, 32 nt, Homo Sapiens
cagccaaaccaugucaacuuugaaacacagaa

SEQ ID NO: 206227 - RNA, 32 nt, Homo Sapiens
caugagcggaccuugucugucagauaagauuu

SEQ ID NO: 206228 - RNA, 32 nt, Homo Sapiens
cccaauacuguaaagcagaugcuguuuagcac

SEQ ID NO: 206229 - RNA, 32 nt, Homo Sapiens
ugaaaucaacuguguucuagcgaccacuuguu

SEQ ID NO: 206230 - RNA, 32 nt, Homo Sapiens
uccuuacguucucaaaauauuaacucgaauug

SEQ ID NO: 206231 - RNA, 32 nt, Homo Sapiens
cccgggucgagcauguagcggcugcuggcggc

SEQ ID NO: 206232 - RNA, 32 nt, Homo Sapiens
uucggcuguagcagcaagcaauccccaaccuc

SEQ ID NO: 206233 - RNA, 32 nt, Homo Sapiens
gugccugacaaaguucuguuucuucaccuggg

SEQ ID NO: 206234 - RNA, 32 nt, Homo Sapiens
gcaacaucaaggagaagcugcggaaauggcca

SEQ ID NO: 206235 - RNA, 32 nt, Homo Sapiens
gcaggcggcugccaggcccagcccugacuucc

SEQ ID NO: 206236 - RNA, 32 nt, Homo Sapiens
gggguacugguuuucuauccacguucuaugcc

SEQ ID NO: 206237 - RNA, 32 nt, Homo Sapiens
gauugggcaggcaugaugggguugacuucaug

SEQ ID NO: 206238 - RNA, 29 nt, Homo Sapiens
cugagaaggugugcaacaccaucuacagc

SEQ ID NO: 206239 - RNA, 32 nt, Homo Sapiens
uugcccagcuccggccuagcuccaacuaccug

SEQ ID NO: 206240 - RNA, 32 nt, Homo Sapiens
uguauuauauuuuaauaguuuauuuucccucu

SEQ ID NO: 206241 - RNA, 32 nt, Homo Sapiens
ugucaauguacaaaauucaaaacugucaacuu

SEQ ID NO: 206242 - RNA, 32 nt, Homo Sapiens
uuugagaaagcaaaacaaaacaauaacaauag

SEQ ID NO: 206243 - RNA, 32 nt, Homo Sapiens
uccucaaagcauccagugaacacuggaagagg

SEQ ID NO: 206244 - RNA, 32 nt, Homo Sapiens
gggacucagugaguggcugugcucucugcaca

SEQ ID NO: 206245 - RNA, 32 nt, Homo Sapiens
uguccuauauaaguagaguauauggaugggag

SEQ ID NO: 206246 - RNA, 32 nt, Homo Sapiens
gggagguggcagccacagaagccuaggcagac

SEQ ID NO: 206247 - RNA, 32 nt, Homo Sapiens
ugauuugcuccuuaagcaagagauucacugcu

SEQ ID NO: 206248 - RNA, 32 nt, Homo Sapiens
uggauacugcggggcuuuuccgcggaggagcg

SEQ ID NO: 206249 - RNA, 32 nt, Homo Sapiens
ggcgccacgugggauucggcccgggugcucuu

SEQ ID NO: 206250 - RNA, 32 nt, Homo Sapiens
cccugccugggcuggcugugaggccaccuuug

SEQ ID NO: 206251 - RNA, 32 nt, Homo Sapiens
cugccauccgaggcuuccuggucuagaguugc

SEQ ID NO: 206252 - RNA, 32 nt, Homo Sapiens
gaggggcucuccccggaggcucagcccccucu

SEQ ID NO: 206253 - RNA, 32 nt, Homo Sapiens
acccuugcuuuuaccccugucaguagcccucc

SEQ ID NO: 206254 - RNA, 32 nt, Homo Sapiens
auuuuaucuggcauuucuggcucucuaguugg

SEQ ID NO: 206255 - RNA, 32 nt, Homo Sapiens
gcggcugaggggcugaggaggcugaggggcug

SEQ ID NO: 206256 - RNA, 31 nt, Homo Sapiens
gacaggguggcugagaaccaggacagggccu

SEQ ID NO: 206257 - RNA, 32 nt, Homo Sapiens
auguagcagacagcauggaggcugggacccag

SEQ ID NO: 206258 - RNA, 32 nt, Homo Sapiens
aguauauugguaguugucaauauagcagugcu

SEQ ID NO: 206259 - RNA, 32 nt, Homo Sapiens
uguggccuccccagcccugcacgugccaggcu

SEQ ID NO: 206260 - RNA, 32 nt, Homo Sapiens
gcggguggcggggcucuggguuuggguuuaug

SEQ ID NO: 206261 - RNA, 32 nt, Homo Sapiens
aucuuuuauuuuuauuucauccaaauagcugc

SEQ ID NO: 206262 - RNA, 32 nt, Homo Sapiens
cuggcucuaggcuugggacugcggcugccaca

SEQ ID NO: 206263 - RNA, 32 nt, Homo Sapiens
cccccauuccugcugcugcugcugcugcugcu

SEQ ID NO: 206264 - RNA, 32 nt, Homo Sapiens
uuuauauuugauaaguuuucauuauaaaccuu

SEQ ID NO: 206265 - RNA, 32 nt, Homo Sapiens
cauuaagugaauugucugaggacacacagcca

SEQ ID NO: 206266 - RNA, 32 nt, Homo Sapiens
agagggucucccuggggugggguugcuggacc

SEQ ID NO: 206267 - RNA, 32 nt, Homo Sapiens
cucggguggcagaggagaagaaucgcuugaac

SEQ ID NO: 206268 - RNA, 32 nt, Homo Sapiens
cugagggggcuguggcggccgcggcgggcgac

SEQ ID NO: 206269 - RNA, 32 nt, Homo Sapiens
gccuucugcugggacaggccugggcugugcag

SEQ ID NO: 206270 - RNA, 32 nt, Homo Sapiens
agaaguuuuggugauaaagauuuucggacagg

SEQ ID NO: 206271 - RNA, 32 nt, Homo Sapiens
acauuauuuuaaaacuucacugcuguaguuuc

SEQ ID NO: 206272 - RNA, 32 nt, Homo Sapiens
ugagacuaaacacaaaaacaguagauaaaucu

SEQ ID NO: 206273 - RNA, 32 nt, Homo Sapiens
aaauuuguuauucaaauuaaauggcugugaac

SEQ ID NO: 206274 - RNA, 32 nt, Homo Sapiens
acagcagaugaggacagugagaauuagguuag

SEQ ID NO: 206275 - RNA, 32 nt, Homo Sapiens
ccuuucugagcuccagccccagccccucgaac

SEQ ID NO: 206276 - RNA, 32 nt, Homo Sapiens
cuccucuccuggcccuucuacgccuccccugu

SEQ ID NO: 206277 - RNA, 32 nt, Homo Sapiens
ggaacuccugggcucaggauccuucugcuucg

SEQ ID NO: 206278 - RNA, 32 nt, Homo Sapiens
aucuauaaaaauugagggaaaugguuaugcaa

SEQ ID NO: 206279 - RNA, 30 nt, Homo Sapiens
acauauggaggugggguggacagggugcug

SEQ ID NO: 206280 - RNA, 32 nt, Homo Sapiens
guucuuacagugccggcccuguguugccagau

SEQ ID NO: 206281 - RNA, 30 nt, Homo Sapiens
agcggcggcgcgcagcgcgucuccuuccgc

SEQ ID NO: 206282 - RNA, 32 nt, Homo Sapiens
uuccaauaaaagacagagaaauaaauuucaga

SEQ ID NO: 206283 - RNA, 32 nt, Homo Sapiens
cauaugaaacaaaaauuaaaauacguauuaca

SEQ ID NO: 206284 - RNA, 32 nt, Homo Sapiens
acucauguggaggaacucaaggaauguuuaga

SEQ ID NO: 206285 - RNA, 32 nt, Homo Sapiens
uuguuuuuauguggcgccaagaacgaaccugu

SEQ ID NO: 206286 - RNA, 32 nt, Homo Sapiens
aaccagcaaucauuuaaaauaaaccauauuaa

SEQ ID NO: 206287 - RNA, 32 nt, Homo Sapiens
uacagaagaaacaaaaugguaauuacagaauu

SEQ ID NO: 206288 - RNA, 32 nt, Homo Sapiens
cgaaaacgugucagcguuuucuuuuuaaaauu

SEQ ID NO: 206289 - RNA, 30 nt, Homo Sapiens
ccccaccaugcucagugugucugacucucu

SEQ ID NO: 206290 - RNA, 32 nt, Homo Sapiens
gaucuucaaucccuucuccccagcaccgguga

SEQ ID NO: 206291 - RNA, 32 nt, Homo Sapiens
cccauaaucuggcucaugguaccuguucuucu

SEQ ID NO: 206292 - RNA, 32 nt, Homo Sapiens
uugggcaaguuacuuuacuucucugaauuucc

SEQ ID NO: 206293 - RNA, 32 nt, Homo Sapiens
cgcggcugccagcgugcacugggcgcuccucg

SEQ ID NO: 206294 - RNA, 32 nt, Homo Sapiens
cgaaccagcccccuucuguuucccugaagaag

SEQ ID NO: 206295 - RNA, 32 nt, Homo Sapiens
gcucagggcugccggggagaccccaagaggac

SEQ ID NO: 206296 - RNA, 32 nt, Homo Sapiens
aucaauguuuugaaaauaaugaucucagacuu

SEQ ID NO: 206297 - RNA, 32 nt, Homo Sapiens
cgagaguccgagaggcgacggaggcggacucu

SEQ ID NO: 206298 - RNA, 32 nt, Homo Sapiens
cccgagucccgccgccuucccucccgccgcag

SEQ ID NO: 206299 - RNA, 32 nt, Homo Sapiens
uugaggucaggaauucaaaaccagccuggcca

SEQ ID NO: 206300 - RNA, 32 nt, Homo Sapiens
aagcucuccgaguugggauaccuccuaaagua

SEQ ID NO: 206301 - RNA, 32 nt, Homo Sapiens
agugaaguguauuguggaacaauuuagaaacu

SEQ ID NO: 206302 - RNA, 32 nt, Homo Sapiens
uugagauauagccuuuacauuuguacacaaau

SEQ ID NO: 206303 - RNA, 32 nt, Homo Sapiens
aggaggcccgccuggcuccgcuccaucgcgca

SEQ ID NO: 206304 - RNA, 32 nt, Homo Sapiens
uccuccccauucuccaucuugggggcucagau

SEQ ID NO: 206305 - RNA, 31 nt, Homo Sapiens
uugccagaaagcuguacuugaguuaaacaua

SEQ ID NO: 206306 - RNA, 32 nt, Homo Sapiens
cagcugcgggugcccaagcccuugcugggccu

SEQ ID NO: 206307 - RNA, 32 nt, Homo Sapiens
auagccacagaaaugucacauuaagcaaagca

SEQ ID NO: 206308 - RNA, 32 nt, Homo Sapiens
uauuucaugaauugucuagcaaaaaugguagg

SEQ ID NO: 206309 - RNA, 32 nt, Homo Sapiens
cuaaaugccacagugcucuuggagcaaguugg

SEQ ID NO: 206310 - RNA, 32 nt, Homo Sapiens
gaaggauccaacagauuucccaacacaguccc

SEQ ID NO: 206311 - RNA, 32 nt, Homo Sapiens
gguggcgcuggcgguugcugucagcugauucc

SEQ ID NO: 206312 - RNA, 32 nt, Homo Sapiens
gaguagcuggaauugcagacacccaucaccac

SEQ ID NO: 206313 - RNA, 32 nt, Homo Sapiens
uaaacgcuauguguuggaaauuccuugagaau

SEQ ID NO: 206314 - RNA, 32 nt, Homo Sapiens
caaacaccucagggcaagggccaggcacagga

SEQ ID NO: 206315 - RNA, 32 nt, Homo Sapiens
augaguugaagaaggcaaaggcuuguaaauuu

SEQ ID NO: 206316 - RNA, 32 nt, Homo Sapiens
ccagcugagccaggcccgcgggcccccuccag

SEQ ID NO: 206317 - RNA, 32 nt, Homo Sapiens
uuccugcugucaaccuuuuuucacacuuuuuu

SEQ ID NO: 206318 - RNA, 31 nt, Homo Sapiens
ugauccagaaagaaaacuuguauuaugugug

SEQ ID NO: 206319 - RNA, 32 nt, Homo Sapiens
cccaagcaucaguguacccagcccagugacug

SEQ ID NO: 206320 - RNA, 32 nt, Homo Sapiens
cuuguaccgaugcagcucucuuucucccccac

SEQ ID NO: 206321 - RNA, 32 nt, Homo Sapiens
gccacugcacuccagcccgggcgacagagcga

SEQ ID NO: 206322 - RNA, 32 nt, Homo Sapiens
ccggcacggcuacaucugggaccgccacuaca

SEQ ID NO: 206323 - RNA, 32 nt, Homo Sapiens
uuguggcuggguuuucugaagucugaggaaca

SEQ ID NO: 206324 - RNA, 32 nt, Homo Sapiens
uaaaaggggagcuuccugggaauuucaggcuc

SEQ ID NO: 206325 - RNA, 32 nt, Homo Sapiens
cggggagguuccagggcccgcggccgcggguu

SEQ ID NO: 206326 - RNA, 32 nt, Homo Sapiens
acagacuggaguggaccuggaacuuagagacg

SEQ ID NO: 206327 - RNA, 31 nt, Homo Sapiens
agcuaguucguagcuuucccaaauaaacucu

SEQ ID NO: 206328 - RNA, 32 nt, Homo Sapiens
uccucaaaggugcccuagugccaugauuuaaa

SEQ ID NO: 206329 - RNA, 31 nt, Homo Sapiens
agcuuuguaggcagccaaucccagagaagca

SEQ ID NO: 206330 - RNA, 32 nt, Homo Sapiens
aagagaauucuaauuuaccaucauucaaauua

SEQ ID NO: 206331 - RNA, 32 nt, Homo Sapiens
aaccacuggcuuacgcccaccauuuccgaggu

SEQ ID NO: 206332 - RNA, 32 nt, Homo Sapiens
gacaggaggccacacccaccaaggcugagaac

SEQ ID NO: 206333 - RNA, 32 nt, Homo Sapiens
ggccuuuccuucccucucugaugucccagugc

SEQ ID NO: 206334 - RNA, 32 nt, Homo Sapiens
uuuauucuuguacauaaaaaugugcaauaugg

SEQ ID NO: 206335 - RNA, 32 nt, Homo Sapiens
uuuucuuuauauauuuccuuaccauacaaggu

SEQ ID NO: 206336 - RNA, 32 nt, Homo Sapiens
cguucugugcccauucuucaggcaacuuucga

SEQ ID NO: 206337 - RNA, 32 nt, Homo Sapiens
aaggggccugcgccuggcguuguucaucgcag

SEQ ID NO: 206338 - RNA, 32 nt, Homo Sapiens
ucugaccccacuuaugcugcugugaauuuuuu

SEQ ID NO: 206339 - RNA, 32 nt, Homo Sapiens
gcggccucagagagcuuccuccccucggaagg

SEQ ID NO: 206340 - RNA, 32 nt, Homo Sapiens
aacaucacucccucucccucccuaacagugaa

SEQ ID NO: 206341 - RNA, 32 nt, Homo Sapiens
accugaagaacaagcagaaagaggcucucuga

SEQ ID NO: 206342 - RNA, 32 nt, Homo Sapiens
uugauuauguaguucauccagcccuugggcau

SEQ ID NO: 206343 - RNA, 32 nt, Homo Sapiens
gcucuccacuucugccucccucuuccacuguu

SEQ ID NO: 206344 - RNA, 32 nt, Homo Sapiens
cacuggggcuugggggcgggggaggguggcag

SEQ ID NO: 206345 - RNA, 32 nt, Homo Sapiens
ccucucaauugcuuauuuuaacuuuggaaacc

SEQ ID NO: 206346 - RNA, 32 nt, Homo Sapiens
ggagcacacaaauggaaucaacuuguguuuca

SEQ ID NO: 206347 - RNA, 32 nt, Homo Sapiens
agcauuguaaaauuauuucaugauuagaaauu

SEQ ID NO: 206348 - RNA, 32 nt, Homo Sapiens
aguccucuguuugccaccugggcgcucauuca

SEQ ID NO: 206349 - RNA, 32 nt, Homo Sapiens
gaguuggaccaaugcccccuccccuucagcug

SEQ ID NO: 206350 - RNA, 32 nt, Homo Sapiens
ccucucccaucccccugcccucguggccagcc

SEQ ID NO: 206351 - RNA, 29 nt, Homo Sapiens
cgccauggagcuccgggugcugcucugcu

SEQ ID NO: 206352 - RNA, 32 nt, Homo Sapiens
auuaggcuuuagauuuugauagcaauguucca

SEQ ID NO: 206353 - RNA, 32 nt, Homo Sapiens
gacucagggaacacagugaucuacacagaguc

SEQ ID NO: 206354 - RNA, 32 nt, Homo Sapiens
guucaccagaaagcuauugagcguuugcugga

SEQ ID NO: 206355 - RNA, 32 nt, Homo Sapiens
gugacggcucugccccacuugugaacgccaac

SEQ ID NO: 206356 - RNA, 32 nt, Homo Sapiens
aacccuggcuccucuuuccccagcuucugucu

SEQ ID NO: 206357 - RNA, 32 nt, Homo Sapiens
ggagguaccgacagucccugugcugguuagac

SEQ ID NO: 206358 - RNA, 32 nt, Homo Sapiens
gugaugcccacccaagaaguucaggagcugcc

SEQ ID NO: 206359 - RNA, 32 nt, Homo Sapiens
agacagaucagggcccaccucccugccaggga

SEQ ID NO: 206360 - RNA, 32 nt, Homo Sapiens
caacuucgagccauuuguuacaugauauuccc

SEQ ID NO: 206361 - RNA, 32 nt, Homo Sapiens
cuaggcagacugcaagcccgaccgagcacuug

SEQ ID NO: 206362 - RNA, 32 nt, Homo Sapiens
uuguuucccaaguuuuugaaagcuggcaacuc

SEQ ID NO: 206363 - RNA, 32 nt, Homo Sapiens
ucagccaguucaaugucuccuuguuaucagag

SEQ ID NO: 206364 - RNA, 32 nt, Homo Sapiens
acuuuacccaaggcguuuggcucagagggcua

SEQ ID NO: 206365 - RNA, 32 nt, Homo Sapiens
aaagcagaugugagagaggaaaaggaucuguu

SEQ ID NO: 206366 - RNA, 32 nt, Homo Sapiens
gaauuccgcgccgccgccgccggcagaccccg

SEQ ID NO: 206367 - RNA, 32 nt, Homo Sapiens
ggggccugucuccgcugccuccuucuccacuu

SEQ ID NO: 206368 - RNA, 32 nt, Homo Sapiens
ucugcauauuccaugagagugaagguuuuccu

SEQ ID NO: 206369 - RNA, 32 nt, Homo Sapiens
uguucaggguugccaugcugcugcugagcuga

SEQ ID NO: 206370 - RNA, 32 nt, Homo Sapiens
agaccuucagguuuccuccuccucagaggaca

SEQ ID NO: 206371 - RNA, 32 nt, Homo Sapiens
guuuauguagaaaauacaaauaaaaguuauuu

SEQ ID NO: 206372 - RNA, 32 nt, Homo Sapiens
cuuuucgauuuaaugaaguauugcuagcugaa

SEQ ID NO: 206373 - RNA, 32 nt, Homo Sapiens
cgccacgccucgcgcccggcacucaccgcccc

SEQ ID NO: 206374 - RNA, 32 nt, Homo Sapiens
ccaaagcggcgaagucgcgagacagcggacaa

SEQ ID NO: 206375 - RNA, 32 nt, Homo Sapiens
acauagggaaacugaggcucagggguguuaag

SEQ ID NO: 206376 - RNA, 32 nt, Homo Sapiens
ucccuuccugugaguucuccaguuacccugga

SEQ ID NO: 206377 - RNA, 32 nt, Homo Sapiens
cuuauguuugaaaauuaacugagugaguuaag

SEQ ID NO: 206378 - RNA, 32 nt, Homo Sapiens
gagguguuucugggcgggaagggcugggccag

SEQ ID NO: 206379 - RNA, 32 nt, Homo Sapiens
ggccugccaccgagcccuccuugagcucagcc

SEQ ID NO: 206380 - RNA, 32 nt, Homo Sapiens
cuauucaaaaauuuagaagaguggcaaauacu

SEQ ID NO: 206381 - RNA, 32 nt, Homo Sapiens
gcggcgggcggaaggcggggcgugggggucug

SEQ ID NO: 206382 - RNA, 32 nt, Homo Sapiens
guugguuugucuuuuugucuuuuuuuuuuuuu

SEQ ID NO: 206383 - RNA, 31 nt, Homo Sapiens
acgaauucaucugcuuauggauauguuguug

SEQ ID NO: 206384 - RNA, 32 nt, Homo Sapiens
aggacauggccucagcuggguggcaccaggug

SEQ ID NO: 206385 - RNA, 32 nt, Homo Sapiens
aauguacaguuuucuuuuuuuuuuuuuugguu

SEQ ID NO: 206386 - RNA, 32 nt, Homo Sapiens
cugacgcuggaacaugccacuugguuggaaga

SEQ ID NO: 206387 - RNA, 32 nt, Homo Sapiens
aaaugauaaucuagguagauauuaucuuuacu

SEQ ID NO: 206388 - RNA, 32 nt, Homo Sapiens
agccaguggguucccgcgcgugccgagacucu

SEQ ID NO: 206389 - RNA, 32 nt, Homo Sapiens
gcauuccucaagacaaaugguaauuugcuagg

SEQ ID NO: 206390 - RNA, 32 nt, Homo Sapiens
uuauguucuaaauaaacuuauggccauacaug

SEQ ID NO: 206391 - RNA, 32 nt, Homo Sapiens
uucuguggggguaccugugggguacuucaaac

SEQ ID NO: 206392 - RNA, 32 nt, Homo Sapiens
gugugcccaucccucaaccuccucagugauca

SEQ ID NO: 206393 - RNA, 32 nt, Homo Sapiens
gguggugggaauggcugcuucauuccucgagg

SEQ ID NO: 206394 - RNA, 32 nt, Homo Sapiens
uugagaccaaaccaagugcuuccaaauucuuu

SEQ ID NO: 206395 - RNA, 32 nt, Homo Sapiens
uccaagaguaggugcugccuagcagcccuucg

SEQ ID NO: 206396 - RNA, 32 nt, Homo Sapiens
aacacccagaaaguuuuugugugugccuuucc

SEQ ID NO: 206397 - RNA, 32 nt, Homo Sapiens
caaauuaaacauuuuacccguuguguugggug

SEQ ID NO: 206398 - RNA, 32 nt, Homo Sapiens
cuacacuugaguugggaaccgaaagagaaaaa

SEQ ID NO: 206399 - RNA, 32 nt, Homo Sapiens
uccccggcacgcugauggagcccgggcgcggc

SEQ ID NO: 206400 - RNA, 32 nt, Homo Sapiens
agcagcgaggggcuguugcuggaauuugccuu

SEQ ID NO: 206401 - RNA, 32 nt, Homo Sapiens
agcgcugggcgugcgugcgggcaggcgggggc

SEQ ID NO: 206402 - RNA, 32 nt, Homo Sapiens
aaaaaugcaaaauaaaauuuuuaugaaaaucu

SEQ ID NO: 206403 - RNA, 32 nt, Homo Sapiens
cuaggccauguuaauugguuauacauguuugg

SEQ ID NO: 206404 - RNA, 32 nt, Homo Sapiens
uugguaguggugcacaaaaaacaagaacagga

SEQ ID NO: 206405 - RNA, 32 nt, Homo Sapiens
guuggagggcugguucaggugcccuggaggga

SEQ ID NO: 206406 - RNA, 32 nt, Homo Sapiens
auuuuuugcuacuucugaccuugccuuccagg

SEQ ID NO: 206407 - RNA, 32 nt, Homo Sapiens
guggggaccugcccugccccucuuagguuugg

SEQ ID NO: 206408 - RNA, 32 nt, Homo Sapiens
ugggaggaggcaccggccgcgcggcgggagga

SEQ ID NO: 206409 - RNA, 32 nt, Homo Sapiens
ugagaccagaaagcugggagcccugcguggag

SEQ ID NO: 206410 - RNA, 32 nt, Homo Sapiens
ccgcuccccgucuuccucucucacacaccuac

SEQ ID NO: 206411 - RNA, 32 nt, Homo Sapiens
cacuguaaucuacauuccaucaccuuuaucag

SEQ ID NO: 206412 - RNA, 32 nt, Homo Sapiens
caccgugccugcccuugggauauguuuuuuuu

SEQ ID NO: 206413 - RNA, 32 nt, Homo Sapiens
gaaagcuaaugaagaggccuaccuggauccag

SEQ ID NO: 206414 - RNA, 32 nt, Homo Sapiens
ugggccgaccucacaccucagcccuugcaccc

SEQ ID NO: 206415 - RNA, 32 nt, Homo Sapiens
ugccugacucagacaaagccaggccgcuccuc

SEQ ID NO: 206416 - RNA, 32 nt, Homo Sapiens
gaaaugggagcacaguacugggaaaugggggc

SEQ ID NO: 206417 - RNA, 32 nt, Homo Sapiens
gcuuuuaaauguuuuuaaaauacuguaugcca

SEQ ID NO: 206418 - RNA, 32 nt, Homo Sapiens
agcuucucuccauggacacggcgggcgcauug

SEQ ID NO: 206419 - RNA, 32 nt, Homo Sapiens
auguuauggcaaacagauaagacugauaaacu

SEQ ID NO: 206420 - RNA, 32 nt, Homo Sapiens
ccccuccucccgcuccaaacccgaaccucuca

SEQ ID NO: 206421 - RNA, 32 nt, Homo Sapiens
auauacaaccucagcaaugacaaggaagaagu

SEQ ID NO: 206422 - RNA, 32 nt, Homo Sapiens
gcugguuagagcaugauuuuuucuaaagcaua

SEQ ID NO: 206423 - RNA, 32 nt, Homo Sapiens
ggacaugccuacuggguauguuggcaauaaug

SEQ ID NO: 206424 - RNA, 32 nt, Homo Sapiens
gccucgggggugcagccugggcugggacugcu

SEQ ID NO: 206425 - RNA, 32 nt, Homo Sapiens
uaaaugacuuggacugauguuacucuggaguu

SEQ ID NO: 206426 - RNA, 32 nt, Homo Sapiens
aagguuuaaagggauuucaacaaugaauuucu

SEQ ID NO: 206427 - RNA, 32 nt, Homo Sapiens
caucauggccccaccggguacccugagcagcu

SEQ ID NO: 206428 - RNA, 32 nt, Homo Sapiens
uaagcucacaugaaaaucaugauucuagaguu

SEQ ID NO: 206429 - RNA, 32 nt, Homo Sapiens
uagggucauuuuuuccucaugucaagguuuuu

SEQ ID NO: 206430 - RNA, 32 nt, Homo Sapiens
ugagaagaaaaugacagacaugcuaaaagagg

SEQ ID NO: 206431 - RNA, 32 nt, Homo Sapiens
cuguuuugcaagcaccuucuccuguguccuug

SEQ ID NO: 206432 - RNA, 29 nt, Homo Sapiens
ugucaugcugacacugaugacagagguga

SEQ ID NO: 206433 - RNA, 32 nt, Homo Sapiens
gaccgcgaccaccuuccacgcucuucccugcc

SEQ ID NO: 206434 - RNA, 32 nt, Homo Sapiens
ggagcugggccuggccucccagcccccggagg

SEQ ID NO: 206435 - RNA, 28 nt, Homo Sapiens
cuguucaaagauuaaaauuggguaacau

SEQ ID NO: 206436 - RNA, 32 nt, Homo Sapiens
gggcggugucucgcacgggcacggcaccucug

SEQ ID NO: 206437 - RNA, 32 nt, Homo Sapiens
cucaacaaacaaaugagcaacaaaccaauacc

SEQ ID NO: 206438 - RNA, 32 nt, Homo Sapiens
uuuccuucguuccacacccugacucuacgccc

SEQ ID NO: 206439 - RNA, 32 nt, Homo Sapiens
uuuugugguagugaugguugucagugcugcca

SEQ ID NO: 206440 - RNA, 32 nt, Homo Sapiens
cucuuagaucauaauuccaucuucaagagacu

SEQ ID NO: 206441 - RNA, 29 nt, Homo Sapiens
aagaugaagaaucugaaagugacuggaug

SEQ ID NO: 206442 - RNA, 32 nt, Homo Sapiens
ggccgguuuguuguggucgccauuuugcuggu

SEQ ID NO: 206443 - RNA, 32 nt, Homo Sapiens
uggccucucccagccuggcaugauaggggggu

SEQ ID NO: 206444 - RNA, 32 nt, Homo Sapiens
gcaggacugaccagcccuucugggccccaggg

SEQ ID NO: 206445 - RNA, 32 nt, Homo Sapiens
accauauguuccccccagagaaugugucuaua

SEQ ID NO: 206446 - RNA, 32 nt, Homo Sapiens
ggucggacgggcgggcgccggugggagcucgg

SEQ ID NO: 206447 - RNA, 32 nt, Homo Sapiens
gguggcaugcuuuuuucacuuagccgucuauc

SEQ ID NO: 206448 - RNA, 32 nt, Homo Sapiens
aacaggcccucccucugcccucccgucuguga

SEQ ID NO: 206449 - RNA, 32 nt, Homo Sapiens
guuugguuuuuuguccuugcgauaguuugcug

SEQ ID NO: 206450 - RNA, 32 nt, Homo Sapiens
aauaagucaggagcagcgaaaaugggacuucu

SEQ ID NO: 206451 - RNA, 32 nt, Homo Sapiens
ccuuuccuggaaucaccauuauagagaaacug

SEQ ID NO: 206452 - RNA, 32 nt, Homo Sapiens
gccugcccagcccuccuccccuuccggcuccg

SEQ ID NO: 206453 - RNA, 32 nt, Homo Sapiens
aaaaaaccaagucuucuguuuauccugaggcu

SEQ ID NO: 206454 - RNA, 32 nt, Homo Sapiens
cugcaguccuggcccccucgucauuuucuuuc

SEQ ID NO: 206455 - RNA, 32 nt, Homo Sapiens
aaccugggagccuccugacacggaguagagac

SEQ ID NO: 206456 - RNA, 32 nt, Homo Sapiens
uuuugaucgaccaaauaaaauguccuaauaau

SEQ ID NO: 206457 - RNA, 32 nt, Homo Sapiens
agcaguugguggcaaaugaagccaggcugugc

SEQ ID NO: 206458 - RNA, 32 nt, Homo Sapiens
agggaggcuuccuggaggaagcggcauuguua

SEQ ID NO: 206459 - RNA, 32 nt, Homo Sapiens
uccuccuuggugccucgcaggcagaugaaaac

SEQ ID NO: 206460 - RNA, 32 nt, Homo Sapiens
uuagcugguaaauguccucuuaaaagauccaa

SEQ ID NO: 206461 - RNA, 32 nt, Homo Sapiens
guuaacaauauuuuuguucugaucuucuuccc

SEQ ID NO: 206462 - RNA, 32 nt, Homo Sapiens
cacagguacuuugcagucauaccacacccaug

SEQ ID NO: 206463 - RNA, 32 nt, Homo Sapiens
cccgccgcuaugacuggugggccccgggcccu

SEQ ID NO: 206464 - RNA, 32 nt, Homo Sapiens
ggaagccugugcugcaaugguaacucagugac

SEQ ID NO: 206465 - RNA, 29 nt, Homo Sapiens
gucagugucacuucaggaaagcuauuuaa

SEQ ID NO: 206466 - RNA, 32 nt, Homo Sapiens
caauggcugcuguuccaucgaaguaucuagaa

SEQ ID NO: 206467 - RNA, 32 nt, Homo Sapiens
ugauguucuccauccaggaucccagccaggau

SEQ ID NO: 206468 - RNA, 32 nt, Homo Sapiens
cauaucacauaaagaaaugcguugaagcaaaa

SEQ ID NO: 206469 - RNA, 32 nt, Homo Sapiens
gagcccgcgcucuccuucccccgcccucagag

SEQ ID NO: 206470 - RNA, 32 nt, Homo Sapiens
ucuccaucuuuccaccgcacaccuggaccagg

SEQ ID NO: 206471 - RNA, 32 nt, Homo Sapiens
guccacccuaguccgagggcugcagucaacua

SEQ ID NO: 206472 - RNA, 32 nt, Homo Sapiens
auggauggugccugcuguccgugucagcuuuu

SEQ ID NO: 206473 - RNA, 32 nt, Homo Sapiens
gauguggcaaugaaaugauggugcaaguuccu

SEQ ID NO: 206474 - RNA, 32 nt, Homo Sapiens
cuccaaaucagagagcuacucaucucucccuu

SEQ ID NO: 206475 - RNA, 32 nt, Homo Sapiens
gaagggggaacaagucaaaauauuuuuaaaag

SEQ ID NO: 206476 - RNA, 32 nt, Homo Sapiens
ucuauacuguggacuaaugaaaugguguuguu

SEQ ID NO: 206477 - RNA, 32 nt, Homo Sapiens
aggugagucaaucuccaggcccccagauggua

SEQ ID NO: 206478 - RNA, 32 nt, Homo Sapiens
cccuugcugcuggagaucugaggucacugcug

SEQ ID NO: 206479 - RNA, 32 nt, Homo Sapiens
ccugggccugaggucuccugugcgacucuccg

SEQ ID NO: 206480 - RNA, 29 nt, Homo Sapiens
gaauuaaagcugcuugucacuuuuugcug

SEQ ID NO: 206481 - RNA, 30 nt, Homo Sapiens
accccggcgcccgcgccaugcggcgggaga

SEQ ID NO: 206482 - RNA, 32 nt, Homo Sapiens
gcauauaaaaacaaacuuuaacaaagagaaau

SEQ ID NO: 206483 - RNA, 32 nt, Homo Sapiens
cuaaauccagcuuuuucuuaccucugguacac

SEQ ID NO: 206484 - RNA, 32 nt, Homo Sapiens
gcacauuuacagccacaggggcgagaagcccu

SEQ ID NO: 206485 - RNA, 32 nt, Homo Sapiens
uaucccaacagaagagaaaauauuuuuauauu

SEQ ID NO: 206486 - RNA, 29 nt, Homo Sapiens
cuccauggcgaccgggcucggggagccgg

SEQ ID NO: 206487 - RNA, 32 nt, Homo Sapiens
gaaauuuaaaagacacuguuuacaagaaaaaa

SEQ ID NO: 206488 - RNA, 32 nt, Homo Sapiens
gggcaguugggucccuugccagcugcuauggg

SEQ ID NO: 206489 - RNA, 32 nt, Homo Sapiens
aagggccauuuucccuuguugucuuugaaaau

SEQ ID NO: 206490 - RNA, 32 nt, Homo Sapiens
uuuuugaccauuuaagccuuuauaaaugcguu

SEQ ID NO: 206491 - RNA, 32 nt, Homo Sapiens
uuuuuguugugcuuauaugggagggagagugg

SEQ ID NO: 206492 - RNA, 32 nt, Homo Sapiens
ugagauccccucacugaagaagcagauugcca

SEQ ID NO: 206493 - RNA, 32 nt, Homo Sapiens
gaggcggccgaccuccggcccgaggcaccggg

SEQ ID NO: 206494 - RNA, 28 nt, Homo Sapiens
ggaccggggcggcagcggccguagcagc

SEQ ID NO: 206495 - RNA, 32 nt, Homo Sapiens
gagcuacugcaccugcccucuguuuccuuugg

SEQ ID NO: 206496 - RNA, 32 nt, Homo Sapiens
gaaccagacguuuguuucccaguuggaaagaa

SEQ ID NO: 206497 - RNA, 32 nt, Homo Sapiens
ccacaggcgagggugggcugaggcugaaguug

SEQ ID NO: 206498 - RNA, 32 nt, Homo Sapiens
uuucucgaagacaccagugggcccguguggaa

SEQ ID NO: 206499 - RNA, 32 nt, Homo Sapiens
gguggggcggccugucugcgucugcgucccag

SEQ ID NO: 206500 - RNA, 32 nt, Homo Sapiens
cugaggucaggagaucgagaucagccuggcca

SEQ ID NO: 206501 - RNA, 32 nt, Homo Sapiens
caauauggguggggggaauuguguguugugag

SEQ ID NO: 206502 - RNA, 32 nt, Homo Sapiens
uuuccguguucuuaccuagccuccccccacuu

SEQ ID NO: 206503 - RNA, 32 nt, Homo Sapiens
auaucauccacacaugaaucugcacaucugua

SEQ ID NO: 206504 - RNA, 32 nt, Homo Sapiens
cuuuuaaaguauauuucucuuuuggugaaagg

SEQ ID NO: 206505 - RNA, 32 nt, Homo Sapiens
aaggagucauacuugugaagacuuuuauguca

SEQ ID NO: 206506 - RNA, 32 nt, Homo Sapiens
guggucugucuguuaguucaguuucucaagcc

SEQ ID NO: 206507 - RNA, 32 nt, Homo Sapiens
ugaccugcacggguaccuggaacuucagcuca

SEQ ID NO: 206508 - RNA, 32 nt, Homo Sapiens
uuuauucuuggguugguggaguggauauugcc

SEQ ID NO: 206509 - RNA, 32 nt, Homo Sapiens
ugagucuguaaggcccaaaguggguacagaca

SEQ ID NO: 206510 - RNA, 32 nt, Homo Sapiens
ucaggggcgggcccccgccugcguucgcggcg

SEQ ID NO: 206511 - RNA, 32 nt, Homo Sapiens
uccagagacaccugaggccccagagcuugagg

SEQ ID NO: 206512 - RNA, 32 nt, Homo Sapiens
gucaugcuguguggccaauuauaauuuuuuuc

SEQ ID NO: 206513 - RNA, 32 nt, Homo Sapiens
agaggcaaaaacugaggcgcagaaugaugaaa

SEQ ID NO: 206514 - RNA, 32 nt, Homo Sapiens
cggggacagaagagaccccgccguugggacgc

SEQ ID NO: 206515 - RNA, 32 nt, Homo Sapiens
ucugcaggcagacagcuggauacagcgcugug

SEQ ID NO: 206516 - RNA, 30 nt, Homo Sapiens
gcaggagagaagcagggugggcugcuggca

SEQ ID NO: 206517 - RNA, 32 nt, Homo Sapiens
uugcugggcuccuggcuagaugcaagcaaggu

SEQ ID NO: 206518 - RNA, 32 nt, Homo Sapiens
caugugaaguguauaugauucucuugagauaa

SEQ ID NO: 206519 - RNA, 32 nt, Homo Sapiens
ucucucccggucgugagcgaucagcgccucuc

SEQ ID NO: 206520 - RNA, 32 nt, Homo Sapiens
cacuuaguaacaggcaucuacauucuuuacua

SEQ ID NO: 206521 - RNA, 32 nt, Homo Sapiens
aaacuaaguuacuuuuuuacuaacaaggaaga

SEQ ID NO: 206522 - RNA, 32 nt, Homo Sapiens
cacgugcccaugggaugcuuccagguccccuu

SEQ ID NO: 206523 - RNA, 32 nt, Homo Sapiens
uaugcugggcaggaugagacaucagugucugc

SEQ ID NO: 206524 - RNA, 32 nt, Homo Sapiens
uugcucacgauuuucuaaaggcacaugaucua

SEQ ID NO: 206525 - RNA, 32 nt, Homo Sapiens
gaugagaccagcaggcccuuucucuuucagga

SEQ ID NO: 206526 - RNA, 32 nt, Homo Sapiens
ucacagucccccuguuuugaaucaggccaugu

SEQ ID NO: 206527 - RNA, 32 nt, Homo Sapiens
guucagaaaaagacaagggaaagcaggugagg

SEQ ID NO: 206528 - RNA, 32 nt, Homo Sapiens
uuccguggaucuuucaugucucuguacauccu

SEQ ID NO: 206529 - RNA, 32 nt, Homo Sapiens
gcgggccccugaggccacucuccggagcgcgc

SEQ ID NO: 206530 - RNA, 32 nt, Homo Sapiens
ggugcauuuaacgcaacugguaauugcagaau

SEQ ID NO: 206531 - RNA, 32 nt, Homo Sapiens
accaguggagccggggcgcagggcgggggcgg

SEQ ID NO: 206532 - RNA, 32 nt, Homo Sapiens
caaaacaaaaagauuaaauugcuauugcugua

SEQ ID NO: 206533 - RNA, 32 nt, Homo Sapiens
uggcggugagcgcugccgccccggggccccca

SEQ ID NO: 206534 - RNA, 32 nt, Homo Sapiens
accccugaccccagccucaaggggccccucaa

SEQ ID NO: 206535 - RNA, 32 nt, Homo Sapiens
auuauuuauuuuugcccucuuuggggaagugg

SEQ ID NO: 206536 - RNA, 32 nt, Homo Sapiens
cagggccgcccggccccuucuggaccuuucca

SEQ ID NO: 206537 - RNA, 32 nt, Homo Sapiens
ccggcguggaccgcgcacggccucuaggucuc

SEQ ID NO: 206538 - RNA, 32 nt, Homo Sapiens
uccuccccgcggcccgcccgggccaugcuccc

SEQ ID NO: 206539 - RNA, 32 nt, Homo Sapiens
cgccgcucaguccuuccaccggaaguguccga

SEQ ID NO: 206540 - RNA, 32 nt, Homo Sapiens
cuccagccugaagcggaaguggaggaaagaug

SEQ ID NO: 206541 - RNA, 32 nt, Homo Sapiens
ggacacaugccguggguauccugagcugccau

SEQ ID NO: 206542 - RNA, 32 nt, Homo Sapiens
ugcacaggagagacagcgucagggcaucaucu

SEQ ID NO: 206543 - RNA, 32 nt, Homo Sapiens
uucagugacucuagggccaaagaauauuaggu

SEQ ID NO: 206544 - RNA, 32 nt, Homo Sapiens
ccuccucagcuucagccuccgcgccaggcccg

SEQ ID NO: 206545 - RNA, 32 nt, Homo Sapiens
caguuucuccacagccuucuccagccugugug

SEQ ID NO: 206546 - RNA, 32 nt, Homo Sapiens
gggucugggggcucccuggagcuccuccugcg

SEQ ID NO: 206547 - RNA, 32 nt, Homo Sapiens
ccaagaacucccagcagcuuugaaagcagacu

SEQ ID NO: 206548 - RNA, 32 nt, Homo Sapiens
ucauugggagaugcccgguuuugcggguuuua

SEQ ID NO: 206549 - RNA, 32 nt, Homo Sapiens
agcaaaguuuuaaagugcaauuuuaaaacugu

SEQ ID NO: 206550 - RNA, 32 nt, Homo Sapiens
ucccgggcaccguugcccgcccggggcccgcu

SEQ ID NO: 206551 - RNA, 32 nt, Homo Sapiens
accauuacaccuggcuaauuguuguauuuuag

SEQ ID NO: 206552 - RNA, 32 nt, Homo Sapiens
uuucagcagauuggagauccccugccugcagc

SEQ ID NO: 206553 - RNA, 32 nt, Homo Sapiens
cacucagcccgcgguucuauguuccucugaau

SEQ ID NO: 206554 - RNA, 32 nt, Homo Sapiens
uccauauguaauuacaugauuaugauacuaau

SEQ ID NO: 206555 - RNA, 32 nt, Homo Sapiens
ugcugguggcccagguccugcugcucauuagu

SEQ ID NO: 206556 - RNA, 30 nt, Homo Sapiens
caggaggcgcccgcuccgcgguggcgcucu

SEQ ID NO: 206557 - RNA, 32 nt, Homo Sapiens
aagaugucucgugugaaggcugggguggcggc

SEQ ID NO: 206558 - RNA, 32 nt, Homo Sapiens
uuuguuaaugaaaaugauaaaacagaauauug

SEQ ID NO: 206559 - RNA, 32 nt, Homo Sapiens
cuaucugaaccacccuuuauucuacauaugau

SEQ ID NO: 206560 - RNA, 32 nt, Homo Sapiens
cuaaaauauagccuucuguuaagcaaauagua

SEQ ID NO: 206561 - RNA, 32 nt, Homo Sapiens
ccauaagcaaucccuugccuuaacucaucacc

SEQ ID NO: 206562 - RNA, 32 nt, Homo Sapiens
uguauuauauauauggcacauguauuauauau

SEQ ID NO: 206563 - RNA, 32 nt, Homo Sapiens
auuauacuaugaaagcuguaaguaacuuggug

SEQ ID NO: 206564 - RNA, 32 nt, Homo Sapiens
acauuuauaauucuuuuuccuuguuugaguau

SEQ ID NO: 206565 - RNA, 32 nt, Homo Sapiens
aggaaggaaaauuuaucccccuaacagccugg

SEQ ID NO: 206566 - RNA, 32 nt, Homo Sapiens
gggcuguugcugugguuuccugaguugcugcu

SEQ ID NO: 206567 - RNA, 32 nt, Homo Sapiens
ccucagcggcccuucuguuccauccucugugg

SEQ ID NO: 206568 - RNA, 32 nt, Homo Sapiens
uauuugccaucauauuuuugguuuacucccuu

SEQ ID NO: 206569 - RNA, 32 nt, Homo Sapiens
agcuacauuaaggcucuuucucuaaucgccuu

SEQ ID NO: 206570 - RNA, 32 nt, Homo Sapiens
gcuacuauaaaacuauguaccacucucagaau

SEQ ID NO: 206571 - RNA, 32 nt, Homo Sapiens
guugacaacaauuuauuguauguuuucagaga

SEQ ID NO: 206572 - RNA, 32 nt, Homo Sapiens
cuggauuagacacccccugcuucccacugugc

SEQ ID NO: 206573 - RNA, 32 nt, Homo Sapiens
uuuuaaugauuuucauuuaucauuguaaaacc

SEQ ID NO: 206574 - RNA, 32 nt, Homo Sapiens
cuccaguggaacaaagauugagaaccacaaua

SEQ ID NO: 206575 - RNA, 32 nt, Homo Sapiens
ccggucccccgccccaggcccuuccccaccga

SEQ ID NO: 206576 - RNA, 32 nt, Homo Sapiens
ggauuucuuauguuuucuaguucucuguuuuu

SEQ ID NO: 206577 - RNA, 32 nt, Homo Sapiens
ugcauaaguccucauucuaccacauguuaacc

SEQ ID NO: 206578 - RNA, 32 nt, Homo Sapiens
acggcagcggccccggccucccucuccgccgc

SEQ ID NO: 206579 - RNA, 32 nt, Homo Sapiens
uucaaucaaccugggcucuccccaccccaccc

SEQ ID NO: 206580 - RNA, 32 nt, Homo Sapiens
cuagagaggggugaggaauggaugcugucuaa

SEQ ID NO: 206581 - RNA, 32 nt, Homo Sapiens
cggagagcugggugcuaccgcuguuuccgcug

SEQ ID NO: 206582 - RNA, 32 nt, Homo Sapiens
guggccucucccaccccuccccugauggucuu

SEQ ID NO: 206583 - RNA, 32 nt, Homo Sapiens
cccugacccccucccccaggugagugaccacc

SEQ ID NO: 206584 - RNA, 32 nt, Homo Sapiens
cuccuucagggccagugacuugcugggcuucg

SEQ ID NO: 206585 - RNA, 32 nt, Homo Sapiens
gucucuucacuuugaugagugacaugaacacc

SEQ ID NO: 206586 - RNA, 32 nt, Homo Sapiens
caacgccgcccggauggcuucccaaaaccgcg

SEQ ID NO: 206587 - RNA, 32 nt, Homo Sapiens
caggcuggaagagcaaaugcugcuggcauucu

SEQ ID NO: 206588 - RNA, 32 nt, Homo Sapiens
uguggugugcaaacagcucuuaaguagaaaga

SEQ ID NO: 206589 - RNA, 32 nt, Homo Sapiens
uauuucaguuuaguaaaaauuuucuuuuuucc

SEQ ID NO: 206590 - RNA, 32 nt, Homo Sapiens
gccgagaagcagauccugaggugugucggaca

SEQ ID NO: 206591 - RNA, 32 nt, Homo Sapiens
guaagcaucccauuggugucaguugccaggug

SEQ ID NO: 206592 - RNA, 32 nt, Homo Sapiens
uuucauugcugucuacagguuucuuucagauu

SEQ ID NO: 206593 - RNA, 32 nt, Homo Sapiens
auaggugaaauauuuuauagcgagauuuuuau

SEQ ID NO: 206594 - RNA, 32 nt, Homo Sapiens
accaagcacagcacaacuucuguggcuacuuc

SEQ ID NO: 206595 - RNA, 32 nt, Homo Sapiens
uagacuccagauuacccuuucuuaauaaauau

SEQ ID NO: 206596 - RNA, 32 nt, Homo Sapiens
ccggcggcgucuccucccgggacgcugagggg

SEQ ID NO: 206597 - RNA, 32 nt, Homo Sapiens
cugggaacccaccgggaugcuggccagaacac

SEQ ID NO: 206598 - RNA, 32 nt, Homo Sapiens
cucuuggcccaggcccgggcgcggcccccucc

SEQ ID NO: 206599 - RNA, 32 nt, Homo Sapiens
aacuagccuaguuuuccuuuucuuuauucugg

SEQ ID NO: 206600 - RNA, 32 nt, Homo Sapiens
uauguaaacugaugaagaugugcugauuaaca

SEQ ID NO: 206601 - RNA, 32 nt, Homo Sapiens
cccacccugcccagcucagggauuggcgggcg

SEQ ID NO: 206602 - RNA, 32 nt, Homo Sapiens
cugcccgcacugccucucccaggaacuggaaa

SEQ ID NO: 206603 - RNA, 32 nt, Homo Sapiens
accccuauggggcaaugcaaaagggaaaugug

SEQ ID NO: 206604 - RNA, 32 nt, Homo Sapiens
aguuuaaaauuugauuaaacaagagaaguggu

SEQ ID NO: 206605 - RNA, 32 nt, Homo Sapiens
cccuauggaaguauuuccgaaauuacuuccca

SEQ ID NO: 206606 - RNA, 32 nt, Homo Sapiens
cuucuguauggacugcugauguggccugccau

SEQ ID NO: 206607 - RNA, 32 nt, Homo Sapiens
gucccugcguccucugccccucacugcucugu

SEQ ID NO: 206608 - RNA, 32 nt, Homo Sapiens
caccaucugagacaggaccucccggccuccuu

SEQ ID NO: 206609 - RNA, 32 nt, Homo Sapiens
uuugaggugucugcugucgcuaccacugugca

SEQ ID NO: 206610 - RNA, 32 nt, Homo Sapiens
ccccgagggcucugugcccuggaccgcaccuc

SEQ ID NO: 206611 - RNA, 32 nt, Homo Sapiens
gcuggcucucaguccccgccucacagagggug

SEQ ID NO: 206612 - RNA, 32 nt, Homo Sapiens
ugcucccuccagagcccugaccucugacuccc

SEQ ID NO: 206613 - RNA, 32 nt, Homo Sapiens
ucacauagcuaauggaaguugcuuucugcuuu

SEQ ID NO: 206614 - RNA, 32 nt, Homo Sapiens
cuguaaauuuaaaaugauacaaugaaucuaaa

SEQ ID NO: 206615 - RNA, 32 nt, Homo Sapiens
aaugcagaaacaguugggcuuuucuuaacagg

SEQ ID NO: 206616 - RNA, 32 nt, Homo Sapiens
gauauuuuuaugcuccuuacuuucucuuuucu

SEQ ID NO: 206617 - RNA, 32 nt, Homo Sapiens
guccgugccgcaaagcgaacggcggccgcggc

SEQ ID NO: 206618 - RNA, 31 nt, Homo Sapiens
guaucuguaaacacucugaugaagucuguau

SEQ ID NO: 206619 - RNA, 32 nt, Homo Sapiens
gucuucuuaauauguucuuuuaaaugauugaa

SEQ ID NO: 206620 - RNA, 32 nt, Homo Sapiens
agcggcgugcgcgcccccuccccguagccucg

SEQ ID NO: 206621 - RNA, 32 nt, Homo Sapiens
caagaacucggaaaucagaucuucuugcagaa

SEQ ID NO: 206622 - RNA, 32 nt, Homo Sapiens
gaagccggggacccggggggcugaggaaugcu

SEQ ID NO: 206623 - RNA, 32 nt, Homo Sapiens
augggcuuggcuuccacuggcuuugccuggag

SEQ ID NO: 206624 - RNA, 32 nt, Homo Sapiens
ucuaguaggcucaagggacagaugaaaauccu

SEQ ID NO: 206625 - RNA, 32 nt, Homo Sapiens
aagcccaagcggaagcgcacgggguccgacuc

SEQ ID NO: 206626 - RNA, 32 nt, Homo Sapiens
aaauuagaauuacagaagccccugcccaguga

SEQ ID NO: 206627 - RNA, 32 nt, Homo Sapiens
cuuguuucuggacuuggagcugugaugaagua

SEQ ID NO: 206628 - RNA, 32 nt, Homo Sapiens
ggacagaagaguucaugguugcauucagggau

SEQ ID NO: 206629 - RNA, 32 nt, Homo Sapiens
uucacugcacaaaguugaaauaugaagaggau

SEQ ID NO: 206630 - RNA, 32 nt, Homo Sapiens
aguuauauauuauauauaaucacuauaucacu

SEQ ID NO: 206631 - RNA, 32 nt, Homo Sapiens
cuuuucucauuucuaugaugggguagaggaua

SEQ ID NO: 206632 - RNA, 32 nt, Homo Sapiens
ugucccucccaccucugugaccucaggccuac

SEQ ID NO: 206633 - RNA, 32 nt, Homo Sapiens
cacaggcaaccuggccuucgccuccuagcccg

SEQ ID NO: 206634 - RNA, 32 nt, Homo Sapiens
gagcccuucagcgcgcccuguugcuucugcua

SEQ ID NO: 206635 - RNA, 32 nt, Homo Sapiens
agcuugcagcagggcguccgagcaauaagggc

SEQ ID NO: 206636 - RNA, 32 nt, Homo Sapiens
auuugaaagcauguguuuaacacauggauaua

SEQ ID NO: 206637 - RNA, 32 nt, Homo Sapiens
gggccauauguucaccugcuuuccuguccguu

SEQ ID NO: 206638 - RNA, 32 nt, Homo Sapiens
gcauuugacgccuuuaaaacuaccuuuuugcu

SEQ ID NO: 206639 - RNA, 32 nt, Homo Sapiens
gaagaagauauuuaauaucuuaaaaauauucc

SEQ ID NO: 206640 - RNA, 32 nt, Homo Sapiens
gugucguguuugucugcagucagcugagcuaa

SEQ ID NO: 206641 - RNA, 32 nt, Homo Sapiens
aaagagagggcuuccaacuuuuuucuacuagc

SEQ ID NO: 206642 - RNA, 32 nt, Homo Sapiens
cccuccccaccagcagaaacauccucccacuc

SEQ ID NO: 206643 - RNA, 32 nt, Homo Sapiens
cuacaugcaccucuccuccccucagccaccuu

SEQ ID NO: 206644 - RNA, 32 nt, Homo Sapiens
ggccaguccauauuacaguggcugggcuguuu

SEQ ID NO: 206645 - RNA, 32 nt, Homo Sapiens
auauacuuuuauacagaagaaaaaaaaaaaaa

SEQ ID NO: 206646 - RNA, 32 nt, Homo Sapiens
aggcaagaccaaucaaucacugaaccugccuc

SEQ ID NO: 206647 - RNA, 30 nt, Homo Sapiens
gacgcgccaccgucccugccggcgccuccg

SEQ ID NO: 206648 - RNA, 32 nt, Homo Sapiens
aacuuuacccaaaaacuaaaucucuaauaugg

SEQ ID NO: 206649 - RNA, 32 nt, Homo Sapiens
cccgcucuucuucuggccuaguucucacgagg

SEQ ID NO: 206650 - RNA, 32 nt, Homo Sapiens
caggacauaaauuuugucacuugggacaguag

SEQ ID NO: 206651 - RNA, 32 nt, Homo Sapiens
gguccugccgugguaccagccuccagccugcc

SEQ ID NO: 206652 - RNA, 32 nt, Homo Sapiens
agcucuauugauacucuuucuaaugcugauau

SEQ ID NO: 206653 - RNA, 32 nt, Homo Sapiens
auuaguacuuuuuaaaucuuuacucucuaucu

SEQ ID NO: 206654 - RNA, 32 nt, Homo Sapiens
gauauucacgcaucgugccuguuccugacagc

SEQ ID NO: 206655 - RNA, 32 nt, Homo Sapiens
cacagugugaaugaaaacaucuaugaguacag

SEQ ID NO: 206656 - RNA, 32 nt, Homo Sapiens
cggggaacccucacuagcaggacugguggugg

SEQ ID NO: 206657 - RNA, 32 nt, Homo Sapiens
aaguguauucuauucuguauguaugcauuuaa

SEQ ID NO: 206658 - RNA, 32 nt, Homo Sapiens
gacucuauacucuccgcccgccccagggcugg

SEQ ID NO: 206659 - RNA, 32 nt, Homo Sapiens
uuuuuucuuuuuucuuuuuuuuuaaagaucau

SEQ ID NO: 206660 - RNA, 32 nt, Homo Sapiens
ucuuucuggagagccccaagggcccccuagcc

SEQ ID NO: 206661 - RNA, 32 nt, Homo Sapiens
uaaacagccaaugguauguuuugacugacauc

SEQ ID NO: 206662 - RNA, 31 nt, Homo Sapiens
agccggcacugagaagaacgaacacaagaaa

SEQ ID NO: 206663 - RNA, 32 nt, Homo Sapiens
aauuuuuuacaaacacuguuaagcccuaagua

SEQ ID NO: 206664 - RNA, 32 nt, Homo Sapiens
aaucauccugucaaguguaaccacuguccacg

SEQ ID NO: 206665 - RNA, 32 nt, Homo Sapiens
cagauuaauaaagaagcuuugaaagaagacca

SEQ ID NO: 206666 - RNA, 32 nt, Homo Sapiens
acaggaaugcauuuuuccccuugucuuuguug

SEQ ID NO: 206667 - RNA, 32 nt, Homo Sapiens
augcccagggucacacagcuugagacaagagc

SEQ ID NO: 206668 - RNA, 32 nt, Homo Sapiens
gaaaacuagcguaguuuuuuuauuagaaauug

SEQ ID NO: 206669 - RNA, 32 nt, Homo Sapiens
caguucugcagggcugcucaguucacaggagg

SEQ ID NO: 206670 - RNA, 32 nt, Homo Sapiens
cguuuaagaaauguacugaaauaaucauugga

SEQ ID NO: 206671 - RNA, 32 nt, Homo Sapiens
guugucaauggaugagugaucaacuaacagcu

SEQ ID NO: 206672 - RNA, 32 nt, Homo Sapiens
cuuuuuuauguaaaagagaaagagacucucua

SEQ ID NO: 206673 - RNA, 32 nt, Homo Sapiens
auagauugcgggcccaccccucccccugucug

SEQ ID NO: 206674 - RNA, 32 nt, Homo Sapiens
aauggucuuaguugucugaaaagccagcucuu

SEQ ID NO: 206675 - RNA, 32 nt, Homo Sapiens
ccuauggcaauaacuuaauugcauaugguaua

SEQ ID NO: 206676 - RNA, 32 nt, Homo Sapiens
cauguuuuuauacaaaauaagaacgaggauuu

SEQ ID NO: 206677 - RNA, 32 nt, Homo Sapiens
ccucccaggaaugccgugaaaggagacaaggu

SEQ ID NO: 206678 - RNA, 32 nt, Homo Sapiens
ucaauguuuuaaagguauugucagagaaaaac

SEQ ID NO: 206679 - RNA, 32 nt, Homo Sapiens
cuagucacuccaguugaagacgggacgcgugc

SEQ ID NO: 206680 - RNA, 32 nt, Homo Sapiens
agagagagcagcaggugaaggcugggccuccu

SEQ ID NO: 206681 - RNA, 32 nt, Homo Sapiens
caggagaaggcccauuuucacaguccacagaa

SEQ ID NO: 206682 - RNA, 32 nt, Homo Sapiens
gcccugccgggccccaggauggcaggccaccu

SEQ ID NO: 206683 - RNA, 32 nt, Homo Sapiens
accagcccaagccugggacugggccuggaacc

SEQ ID NO: 206684 - RNA, 32 nt, Homo Sapiens
agacagaaucccuggggugcuggacuggcccu

SEQ ID NO: 206685 - RNA, 32 nt, Homo Sapiens
ccagcccugccuuccacugugcucucugucag

SEQ ID NO: 206686 - RNA, 32 nt, Homo Sapiens
cauuugggggguaauaacagcuuuuuugcacu

SEQ ID NO: 206687 - RNA, 32 nt, Homo Sapiens
caccacacuccagcuacuguguaguggcugaa

SEQ ID NO: 206688 - RNA, 32 nt, Homo Sapiens
ggucgauugugcgcaaauacaugcagaaggag

SEQ ID NO: 206689 - RNA, 32 nt, Homo Sapiens
cgccuaccccgcccgccacgccgccgucgaug

SEQ ID NO: 206690 - RNA, 32 nt, Homo Sapiens
gaggacuggaggggaagcgggaggcgagcggg

SEQ ID NO: 206691 - RNA, 32 nt, Homo Sapiens
caaggguuguuuccagaggggucugagccaau

SEQ ID NO: 206692 - RNA, 32 nt, Homo Sapiens
gugaucucucucuaugcccacccuauagagca

SEQ ID NO: 206693 - RNA, 32 nt, Homo Sapiens
ugaagucaaugggcaauuguaacacaauggca

SEQ ID NO: 206694 - RNA, 32 nt, Homo Sapiens
cuguggaaaaggagagcuguuccagaacacag

SEQ ID NO: 206695 - RNA, 32 nt, Homo Sapiens
gcugcggcgggcccugggccgcaugguggagc

SEQ ID NO: 206696 - RNA, 32 nt, Homo Sapiens
gaaacccggccgcuaagcgaggccuccuccuc

SEQ ID NO: 206697 - RNA, 32 nt, Homo Sapiens
ggugugggugaccggggcucuggcggugcgug

SEQ ID NO: 206698 - RNA, 32 nt, Homo Sapiens
cagucuaaaaauugauagaagaauaucgauau

SEQ ID NO: 206699 - RNA, 32 nt, Homo Sapiens
cauccuggggacggccugcacccucugcccgc

SEQ ID NO: 206700 - RNA, 32 nt, Homo Sapiens
gaauuucugaugcacagacacugugggagaua

SEQ ID NO: 206701 - RNA, 32 nt, Homo Sapiens
cggcaaccacgcacccaacuucuccagccacg

SEQ ID NO: 206702 - RNA, 32 nt, Homo Sapiens
uuguuggugggaccagagcuuugacaaaccuc

SEQ ID NO: 206703 - RNA, 32 nt, Homo Sapiens
gaucugaccucugccccgcugccgcccaggag

SEQ ID NO: 206704 - RNA, 32 nt, Homo Sapiens
ucuggccggcccagcccaguccaggaccuggc

SEQ ID NO: 206705 - RNA, 32 nt, Homo Sapiens
cugggguguguuuauuugaugguugauuuugc

SEQ ID NO: 206706 - RNA, 32 nt, Homo Sapiens
uugucaggaaaccaagcccacccuuccacauu

SEQ ID NO: 206707 - RNA, 32 nt, Homo Sapiens
ucuucucuucauuuucaccaccacaaagcugg

SEQ ID NO: 206708 - RNA, 32 nt, Homo Sapiens
cacaaugaugaccaccugaagacagagaaaag

SEQ ID NO: 206709 - RNA, 30 nt, Homo Sapiens
uguccugucugugugcagaaucuuaucaaa

SEQ ID NO: 206710 - RNA, 32 nt, Homo Sapiens
cuuuccacgaggaggagccacacaggguggcc

SEQ ID NO: 206711 - RNA, 32 nt, Homo Sapiens
ugucacauuuccccagccccaccuuccccucc

SEQ ID NO: 206712 - RNA, 32 nt, Homo Sapiens
cagggcaggccggugcccuuuuugggaggcac

SEQ ID NO: 206713 - RNA, 32 nt, Homo Sapiens
caucccggcuucggacccuugggcguagaguu

SEQ ID NO: 206714 - RNA, 32 nt, Homo Sapiens
uugcuuuugcuuaaaacauaauuacugaaacc

SEQ ID NO: 206715 - RNA, 32 nt, Homo Sapiens
aaggacucccagcccaggacucucuuuagagc

SEQ ID NO: 206716 - RNA, 32 nt, Homo Sapiens
augaacuuacugacaagucuguccaggcaccg

SEQ ID NO: 206717 - RNA, 32 nt, Homo Sapiens
gguaucugacuucuuggcugaaauaacuuauu

SEQ ID NO: 206718 - RNA, 32 nt, Homo Sapiens
agaggccgaguuaccgcccgccgcccgcgccc

SEQ ID NO: 206719 - RNA, 30 nt, Homo Sapiens
aggagagccaccccugcuuucuggccaucu

SEQ ID NO: 206720 - RNA, 32 nt, Homo Sapiens
uaauuaccuguaaaaugguauuauuggaauga

SEQ ID NO: 206721 - RNA, 32 nt, Homo Sapiens
gauuggcaagugagucagugggaaauucucuc

SEQ ID NO: 206722 - RNA, 32 nt, Homo Sapiens
aacuacuccgagucuuggucuccgucccucua

SEQ ID NO: 206723 - RNA, 32 nt, Homo Sapiens
aaaggcagaaaaggcauaccuaaggacuaauu

SEQ ID NO: 206724 - RNA, 32 nt, Homo Sapiens
guagagaaaugauaaauggccuaagaaggcau

SEQ ID NO: 206725 - RNA, 32 nt, Homo Sapiens
cuacuuuuucuuuaucaauuaaauagcucaga

SEQ ID NO: 206726 - RNA, 32 nt, Homo Sapiens
agcaacacaaaacacaagugugguuuuaaagc

SEQ ID NO: 206727 - RNA, 32 nt, Homo Sapiens
cgcugcggugucaccucugugcccgacaucag

SEQ ID NO: 206728 - RNA, 32 nt, Homo Sapiens
agccucuuguguuugugugcagagaaguauau

SEQ ID NO: 206729 - RNA, 32 nt, Homo Sapiens
gaaaccaaaugguguaaauauuuuauuugaua

SEQ ID NO: 206730 - RNA, 32 nt, Homo Sapiens
augccaccucucucaccacguucuagucccag

SEQ ID NO: 206731 - RNA, 32 nt, Homo Sapiens
caggggcauugucugaccacauucuuuuugua

SEQ ID NO: 206732 - RNA, 32 nt, Homo Sapiens
guacauucagagugcccccuccccugcaaggc

SEQ ID NO: 206733 - RNA, 32 nt, Homo Sapiens
guuauagcuaugauuguuuuuaucagugagua

SEQ ID NO: 206734 - RNA, 32 nt, Homo Sapiens
aacucuuguuuccaagcuuauauccucaauca

SEQ ID NO: 206735 - RNA, 32 nt, Homo Sapiens
aaagauuuuuauuaauaaaggcuuauauuuug

SEQ ID NO: 206736 - RNA, 32 nt, Homo Sapiens
cuggaacgugcccugauccccgagggcgccag

SEQ ID NO: 206737 - RNA, 32 nt, Homo Sapiens
ggacuugucagacguggacccugaaaugacaa

SEQ ID NO: 206738 - RNA, 32 nt, Homo Sapiens
aucugacuccuguacgggaugaggaagcagag

SEQ ID NO: 206739 - RNA, 32 nt, Homo Sapiens
agcuugcuuuaguuagacgucucauuauugaa

SEQ ID NO: 206740 - RNA, 32 nt, Homo Sapiens
ggcaaguacacucguuuguaauucaguuacau

SEQ ID NO: 206741 - RNA, 32 nt, Homo Sapiens
ucacuuugcucuucuuuuugguuacauacauu

SEQ ID NO: 206742 - RNA, 32 nt, Homo Sapiens
cugugggacaaagcacugcugaugaagucccc

SEQ ID NO: 206743 - RNA, 32 nt, Homo Sapiens
gagcccuggaacccggacucguugcuccuggc

SEQ ID NO: 206744 - RNA, 32 nt, Homo Sapiens
aggcagcgucuaagguuacguuaccacagacu

SEQ ID NO: 206745 - RNA, 32 nt, Homo Sapiens
ggcuuuuaucuaccaucaaccugauaaggcac

SEQ ID NO: 206746 - RNA, 32 nt, Homo Sapiens
ucauccuuugcuaggaugcacucuguacaaaa

SEQ ID NO: 206747 - RNA, 32 nt, Homo Sapiens
ggguguauguuugggaagaaaaacgaaggugc

SEQ ID NO: 206748 - RNA, 32 nt, Homo Sapiens
ccuaaaugcuuuaucuuuuuuaucucauucuu

SEQ ID NO: 206749 - RNA, 32 nt, Homo Sapiens
agaaccuuuuugccuuuuuuuguuccccguga

SEQ ID NO: 206750 - RNA, 32 nt, Homo Sapiens
augugcaugaaaaugaggacuucuuuugcuaa

SEQ ID NO: 206751 - RNA, 32 nt, Homo Sapiens
auuugggggugggagguggaaaaggaacccaa

SEQ ID NO: 206752 - RNA, 31 nt, Homo Sapiens
uggaugcuaaaaaugguucuaacugaaaacc

SEQ ID NO: 206753 - RNA, 32 nt, Homo Sapiens
ggcguggcguuggcugccccggaccccgggca

SEQ ID NO: 206754 - RNA, 32 nt, Homo Sapiens
aaacucgggcgccaaacccagcccuucucuaa

SEQ ID NO: 206755 - RNA, 32 nt, Homo Sapiens
acugagucaccuguagauaauuuuaauaagau

SEQ ID NO: 206756 - RNA, 32 nt, Homo Sapiens
ccccccgcgggaacgggguacacggugggcug

SEQ ID NO: 206757 - RNA, 30 nt, Homo Sapiens
uuuguacagaagcuuugaugaagugucuug

SEQ ID NO: 206758 - RNA, 32 nt, Homo Sapiens
gugucuccccguguccucucccugccaagucu

SEQ ID NO: 206759 - RNA, 32 nt, Homo Sapiens
ccccgcgucgggccgggcgccaccuccccccu

SEQ ID NO: 206760 - RNA, 32 nt, Homo Sapiens
gacaaaaugcaaacuuuuuuuuuuuucugaga

SEQ ID NO: 206761 - RNA, 32 nt, Homo Sapiens
aaaaggugcauuaggcuguaguucuaauauug

SEQ ID NO: 206762 - RNA, 32 nt, Homo Sapiens
gaugggaagagcuggaacagcaggaggcggag

SEQ ID NO: 206763 - RNA, 32 nt, Homo Sapiens
gcagaaaacaacaaacugcagcugaggacagc

SEQ ID NO: 206764 - RNA, 32 nt, Homo Sapiens
gcuuuacaggcugccaggagcgggggcggcgg

SEQ ID NO: 206765 - RNA, 32 nt, Homo Sapiens
cuugccacugccugagugcaccauaguguccc

SEQ ID NO: 206766 - RNA, 32 nt, Homo Sapiens
uguuuuguuuuggauaaauuuccuguugugug

SEQ ID NO: 206767 - RNA, 32 nt, Homo Sapiens
aaaagcugccagcacauguccgccaaaaccau

SEQ ID NO: 206768 - RNA, 32 nt, Homo Sapiens
uugacaacauaugaaauuuuaaauugugcauu

SEQ ID NO: 206769 - RNA, 32 nt, Homo Sapiens
ggacaggaagggagggcgggccccgggcccuc

SEQ ID NO: 206770 - RNA, 32 nt, Homo Sapiens
uuacaggugugagccaccaugcccagccuguu

SEQ ID NO: 206771 - RNA, 32 nt, Homo Sapiens
ccaguccuuuucaaauccaagacugaaaugaa

SEQ ID NO: 206772 - RNA, 32 nt, Homo Sapiens
acguauuuuggaaggaggugugaaaaagacag

SEQ ID NO: 206773 - RNA, 31 nt, Homo Sapiens
ugcagggucccaggugcaggagugguacccc

SEQ ID NO: 206774 - RNA, 32 nt, Homo Sapiens
uguauucacuucuggucucuuuaagacuguuu

SEQ ID NO: 206775 - RNA, 29 nt, Homo Sapiens
acugccuggggacagggacugcuguggcg

SEQ ID NO: 206776 - RNA, 32 nt, Homo Sapiens
agugagggcguuugcguaaaucuauagguuuu

SEQ ID NO: 206777 - RNA, 32 nt, Homo Sapiens
cgccccuucucgccgagccguggggcgcgggc

SEQ ID NO: 206778 - RNA, 32 nt, Homo Sapiens
gauucugccuuuuguuaugugcgugaacagaa

SEQ ID NO: 206779 - RNA, 32 nt, Homo Sapiens
ggucuacguggccuuuaccguccgcaacccag

SEQ ID NO: 206780 - RNA, 32 nt, Homo Sapiens
gagcgagguccuucccuaggcgggucugggcg

SEQ ID NO: 206781 - RNA, 32 nt, Homo Sapiens
cacguucccaaccgcgaggccagacaucugac

SEQ ID NO: 206782 - RNA, 32 nt, Homo Sapiens
ccuaucacauuuaccuccauaccuguucuugc

SEQ ID NO: 206783 - RNA, 32 nt, Homo Sapiens
cauacauauauucacuuuaugaauaugagaag

SEQ ID NO: 206784 - RNA, 32 nt, Homo Sapiens
agaauaguccaauauagcauuccccaaaugaa

SEQ ID NO: 206785 - RNA, 32 nt, Homo Sapiens
ucaggagccagacuuuuggagagaaggcagcu

SEQ ID NO: 206786 - RNA, 32 nt, Homo Sapiens
agcagaaaacacacuuggaacgcagggcagac

SEQ ID NO: 206787 - RNA, 32 nt, Homo Sapiens
agccugccaagagccgccugggccuggccucc

SEQ ID NO: 206788 - RNA, 32 nt, Homo Sapiens
agaguaugacgaugguauuuaucuguauuuuu

SEQ ID NO: 206789 - RNA, 32 nt, Homo Sapiens
gagcagccaacccauuucaacaaaauugaaca

SEQ ID NO: 206790 - RNA, 32 nt, Homo Sapiens
gucaaaagaaugcaugcacgcuucuaaaugaa

SEQ ID NO: 206791 - RNA, 32 nt, Homo Sapiens
cugcgcgguggcacagccugggcccgcucaag

SEQ ID NO: 206792 - RNA, 32 nt, Homo Sapiens
uuccuaaagguauguauuugaaaacuugaaaa

SEQ ID NO: 206793 - RNA, 32 nt, Homo Sapiens
ucugugucuccauggccugcaguccaugcucu

SEQ ID NO: 206794 - RNA, 32 nt, Homo Sapiens
guccuuagguguucuuuuucuuuuaagaaaua

SEQ ID NO: 206795 - RNA, 29 nt, Homo Sapiens
guggcuuuugugaaguauggcaaagguuu

SEQ ID NO: 206796 - RNA, 32 nt, Homo Sapiens
uucacuucucuuccucccucauggaagaugca

SEQ ID NO: 206797 - RNA, 30 nt, Homo Sapiens
ccaucuuguggcggcggcgcgggcggcugu

SEQ ID NO: 206798 - RNA, 32 nt, Homo Sapiens
gugaugggggagagggugaaggaggucaggcc

SEQ ID NO: 206799 - RNA, 32 nt, Homo Sapiens
aaauaggugaggcaggguuuccuccuuagaca

SEQ ID NO: 206800 - RNA, 32 nt, Homo Sapiens
accccgaccccggccccacgggcggacacucg

SEQ ID NO: 206801 - RNA, 32 nt, Homo Sapiens
aagacgcaagucugcugaugcucccggcugaa

SEQ ID NO: 206802 - RNA, 32 nt, Homo Sapiens
augggcgcuucuguccagcugcacccgaggcc

SEQ ID NO: 206803 - RNA, 32 nt, Homo Sapiens
ccccagcgcugccugccccucucggagccugg

SEQ ID NO: 206804 - RNA, 32 nt, Homo Sapiens
uguugagucaacauuaagggugagaacugcuc

SEQ ID NO: 206805 - RNA, 32 nt, Homo Sapiens
cagagucccagcuguccuggacucugcugugg

SEQ ID NO: 206806 - RNA, 32 nt, Homo Sapiens
agcugaccaaacacuaaggaugcugaaguucc

SEQ ID NO: 206807 - RNA, 32 nt, Homo Sapiens
caaagccauuguaaauguguguacagugugua

SEQ ID NO: 206808 - RNA, 32 nt, Homo Sapiens
guuuuuuguuuuacaaugucauauacugccau

SEQ ID NO: 206809 - RNA, 32 nt, Homo Sapiens
uuucuuuuucuuuuuuaaauucuuaguguaau

SEQ ID NO: 206810 - RNA, 32 nt, Homo Sapiens
ggucgaggccugcccaugagucaggggagcuc

SEQ ID NO: 206811 - RNA, 32 nt, Homo Sapiens
ucggugcgaggaauuuugugacaggcucuguu

SEQ ID NO: 206812 - RNA, 32 nt, Homo Sapiens
aggagagcuuguugugaaacacugcuuccuga

SEQ ID NO: 206813 - RNA, 32 nt, Homo Sapiens
cucuaaccagcuccccaccucaacccucacac

SEQ ID NO: 206814 - RNA, 32 nt, Homo Sapiens
uauucuuuagcaagagaaaauauuuuccccuu

SEQ ID NO: 206815 - RNA, 32 nt, Homo Sapiens
uaucaugauuuuucagagauagcuuuguuaag

SEQ ID NO: 206816 - RNA, 32 nt, Homo Sapiens
agcuaucucuacauuuaaaaaucucuucucuu

SEQ ID NO: 206817 - RNA, 32 nt, Homo Sapiens
ugccuuccugucauauuuuagccaaaacaacu

SEQ ID NO: 206818 - RNA, 32 nt, Homo Sapiens
aaaaccuuaauuacauaacauuguguggauga

SEQ ID NO: 206819 - RNA, 32 nt, Homo Sapiens
cacaguuguugcugccuauuguggugccgccu

SEQ ID NO: 206820 - RNA, 32 nt, Homo Sapiens
ugagcugugccaggcaggauccagccaaggcc

SEQ ID NO: 206821 - RNA, 27 nt, Homo Sapiens
auuggugucuccuccagcccccuccau

SEQ ID NO: 206822 - RNA, 32 nt, Homo Sapiens
cuuuaccuagggcuaccauuuccuagcaaacc

SEQ ID NO: 206823 - RNA, 32 nt, Homo Sapiens
ggcgccaguucccuuccauggucucccggcug

SEQ ID NO: 206824 - RNA, 28 nt, Homo Sapiens
guguggaauaaauuauuuuuguuaaggc

SEQ ID NO: 206825 - RNA, 32 nt, Homo Sapiens
uaaucucuuuaacaagaugcaacaagacagaa

SEQ ID NO: 206826 - RNA, 32 nt, Homo Sapiens
guuucugucuacuacuaagauucaucaaucug

SEQ ID NO: 206827 - RNA, 32 nt, Homo Sapiens
gagaaggcuaaccuugggaaucuugcagguua

SEQ ID NO: 206828 - RNA, 32 nt, Homo Sapiens
cugcccacaagccccagcauccccguaggcau

SEQ ID NO: 206829 - RNA, 32 nt, Homo Sapiens
cccugacuguggcaggaauccaagugcauuuc

SEQ ID NO: 206830 - RNA, 32 nt, Homo Sapiens
aggaguucgaagucagccuggccaacguggug

SEQ ID NO: 206831 - RNA, 32 nt, Homo Sapiens
uuauguauauauacaugcagaaauauauaugu

SEQ ID NO: 206832 - RNA, 32 nt, Homo Sapiens
aauuuagauaaugggcugugugcaauguaagg

SEQ ID NO: 206833 - RNA, 32 nt, Homo Sapiens
guggccaugcuucuugccccuugggccucccc

SEQ ID NO: 206834 - RNA, 32 nt, Homo Sapiens
guuguaaugagcacuaaaugugaagugcuugg

SEQ ID NO: 206835 - RNA, 32 nt, Homo Sapiens
gcucugaguuggaaaagguuuuagaaaaagug

SEQ ID NO: 206836 - RNA, 32 nt, Homo Sapiens
uggagcauaaaccguggaguccuagagccccu

SEQ ID NO: 206837 - RNA, 32 nt, Homo Sapiens
uuacuuaaaaauugggaauaagcucgcuuuuu

SEQ ID NO: 206838 - RNA, 32 nt, Homo Sapiens
gggaagaggcaucagccaucuugcuugagaac

SEQ ID NO: 206839 - RNA, 32 nt, Homo Sapiens
ccagcugggaauuauggaugaugcugcagagu

SEQ ID NO: 206840 - RNA, 32 nt, Homo Sapiens
agggagauguuacaguuaauccacaaucaaca

SEQ ID NO: 206841 - RNA, 32 nt, Homo Sapiens
acauuuucuucucauggcauuuagauauuaaa

SEQ ID NO: 206842 - RNA, 32 nt, Homo Sapiens
uuucuucugcuacuuuggggaguugauggcca

SEQ ID NO: 206843 - RNA, 32 nt, Homo Sapiens
gcccgcugcugaccacgcccccucggaggccc

SEQ ID NO: 206844 - RNA, 32 nt, Homo Sapiens
ucggguaccgcacggcugccgcggcggccuua

SEQ ID NO: 206845 - RNA, 32 nt, Homo Sapiens
acacccgggccuuggcggcugcacccccugcu

SEQ ID NO: 206846 - RNA, 32 nt, Homo Sapiens
ucacucacuuuagaggacuuauuuagaauugc

SEQ ID NO: 206847 - RNA, 32 nt, Homo Sapiens
accaacucugucuucuucuggaucugccuaug

SEQ ID NO: 206848 - RNA, 32 nt, Homo Sapiens
gauccaucagaccuuuuuccccucauuagguu

SEQ ID NO: 206849 - RNA, 23 nt, Homo Sapiens
gugcaggggaggaggagcuaugu

SEQ ID NO: 206850 - RNA, 32 nt, Homo Sapiens
cuguuaccugaagagaggugagaccaaggcca

SEQ ID NO: 206851 - RNA, 32 nt, Homo Sapiens
ugucugcauuuuaccauagauuggagugcauc

SEQ ID NO: 206852 - RNA, 32 nt, Homo Sapiens
aggcauggucugcccucugcauccucuggagc

SEQ ID NO: 206853 - RNA, 30 nt, Homo Sapiens
caaaggugcaggcgcgcgagcacaacccau

SEQ ID NO: 206854 - RNA, 32 nt, Homo Sapiens
gccucucacagugugucuucuaccugcauuuu

SEQ ID NO: 206855 - RNA, 32 nt, Homo Sapiens
aguaccucccgcucuccaccgccugcagcagc

SEQ ID NO: 206856 - RNA, 32 nt, Homo Sapiens
agaguguugguguuggcuggggugucaauaaa

SEQ ID NO: 206857 - RNA, 32 nt, Homo Sapiens
gucagggaggucugaagcugguccugggcucc

SEQ ID NO: 206858 - RNA, 32 nt, Homo Sapiens
cagagggugguucuguaggaccucuuuuguug

SEQ ID NO: 206859 - RNA, 32 nt, Homo Sapiens
gggccccagccccccaggaacuuggggcugcc

SEQ ID NO: 206860 - RNA, 32 nt, Homo Sapiens
uucauuugauucagagcuaaauauucaccaua

SEQ ID NO: 206861 - RNA, 32 nt, Homo Sapiens
gcagauccauccuggggucucccgggcaggga

SEQ ID NO: 206862 - RNA, 32 nt, Homo Sapiens
cagcagccgggcgggcgcucgggcgggacaug

SEQ ID NO: 206863 - RNA, 32 nt, Homo Sapiens
ugaacagaacaggagaaggcgaagcggggcaa

SEQ ID NO: 206864 - RNA, 32 nt, Homo Sapiens
uuccaguucuuugcccauuuccuguuggguug

SEQ ID NO: 206865 - RNA, 32 nt, Homo Sapiens
uccuuuuaagaucauuuuaauuuuaguugagu

SEQ ID NO: 206866 - RNA, 32 nt, Homo Sapiens
agcugagcgugguggcgggcgccuguaauccc

SEQ ID NO: 206867 - RNA, 32 nt, Homo Sapiens
aguggucucaccuggaggcaagagggagggga

SEQ ID NO: 206868 - RNA, 27 nt, Homo Sapiens
gauacuuccuucuucuguucuucuagc

SEQ ID NO: 206869 - RNA, 32 nt, Homo Sapiens
gguuggcucccucugcuuuuccaucagucugu

SEQ ID NO: 206870 - RNA, 32 nt, Homo Sapiens
uucccauaguacugagguacuagagaccucug

SEQ ID NO: 206871 - RNA, 32 nt, Homo Sapiens
aagacaaacuaaaaaguacugaaacuucaaga

SEQ ID NO: 206872 - RNA, 32 nt, Homo Sapiens
aauuuguacugaggggaauucuauucaucuaa

SEQ ID NO: 206873 - RNA, 30 nt, Homo Sapiens
cgcguguggggcgcguguggagcgggugug

SEQ ID NO: 206874 - RNA, 32 nt, Homo Sapiens
aacaccacccucgugaguaaccuguaugguca

SEQ ID NO: 206875 - RNA, 32 nt, Homo Sapiens
agcuccauaucccagucccagcccuucuuugc

SEQ ID NO: 206876 - RNA, 32 nt, Homo Sapiens
aaaggccagaaaguguuuguauguaaagacca

SEQ ID NO: 206877 - RNA, 32 nt, Homo Sapiens
uggggucgaaggagcugcuugccagugugcag

SEQ ID NO: 206878 - RNA, 32 nt, Homo Sapiens
agaaacccacccacugugaucaauagggagag

SEQ ID NO: 206879 - RNA, 32 nt, Homo Sapiens
uuuuagaacgagccacuaaccuauuagagaag

SEQ ID NO: 206880 - RNA, 32 nt, Homo Sapiens
ccucuccccuucccuggcuguggacacuggca

SEQ ID NO: 206881 - RNA, 32 nt, Homo Sapiens
aggcuuguuucagaaaucuauagugcaaaaua

SEQ ID NO: 206882 - RNA, 32 nt, Homo Sapiens
cggcccggggagaggaggggccgcugucccug

SEQ ID NO: 206883 - RNA, 32 nt, Homo Sapiens
cuuuaccuaauagauguguaaauagaacuuuu

SEQ ID NO: 206884 - RNA, 32 nt, Homo Sapiens
ugaaugguacuauucaacggagcacaaucaca

SEQ ID NO: 206885 - RNA, 32 nt, Homo Sapiens
ggugcgugaggacuggggcccgggcccggcgc

SEQ ID NO: 206886 - RNA, 32 nt, Homo Sapiens
acacugccagccaccugagaugcugccagcag

SEQ ID NO: 206887 - RNA, 32 nt, Homo Sapiens
uccaggacaggccaccugaugaagcuucucag

SEQ ID NO: 206888 - RNA, 32 nt, Homo Sapiens
uucuucagauuaaaauuuguauaauuuguuua

SEQ ID NO: 206889 - RNA, 32 nt, Homo Sapiens
ccuggccggccacagcagcagcgccacgagca

SEQ ID NO: 206890 - RNA, 32 nt, Homo Sapiens
gccucgggagggugggggcgcgcgggccacuu

SEQ ID NO: 206891 - RNA, 32 nt, Homo Sapiens
agacgcuuuccucuccucuucccuccugucuu

SEQ ID NO: 206892 - RNA, 32 nt, Homo Sapiens
ggggagacaaaaauauacaugugaaauaaaac

SEQ ID NO: 206893 - RNA, 32 nt, Homo Sapiens
aaggaacaacaauaaaucauauggaaauuuau

SEQ ID NO: 206894 - RNA, 32 nt, Homo Sapiens
acuucuaugaggaggcuucuguucucucccca

SEQ ID NO: 206895 - RNA, 32 nt, Homo Sapiens
cgcgaucccccgcuagggccucccuggucugg

SEQ ID NO: 206896 - RNA, 32 nt, Homo Sapiens
accuggcuugacaggcuuggucucugcaagug

SEQ ID NO: 206897 - RNA, 32 nt, Homo Sapiens
aggcugcgggcagcgaggagcggcuggcgcuc

SEQ ID NO: 206898 - RNA, 32 nt, Homo Sapiens
uucgggcaacgcgcuggaagccucggcagucg

SEQ ID NO: 206899 - RNA, 32 nt, Homo Sapiens
ccucgggggaucccuggccgcgcauccucugg

SEQ ID NO: 206900 - RNA, 32 nt, Homo Sapiens
auaugaaaaaucaauaguuagcuuuguaagaa

SEQ ID NO: 206901 - RNA, 32 nt, Homo Sapiens
agcaucugcuuuggccuccgggcccccucgcu

SEQ ID NO: 206902 - RNA, 32 nt, Homo Sapiens
gcccagcauggcgaccccgacccagaccccca

SEQ ID NO: 206903 - RNA, 32 nt, Homo Sapiens
guggucugcauuagaaaccaaguuauccaagu

SEQ ID NO: 206904 - RNA, 32 nt, Homo Sapiens
gcagugagauaggaaaucaagauggaagcaga

SEQ ID NO: 206905 - RNA, 32 nt, Homo Sapiens
ucuucagcaaaaaagcacuuugaugcucauau

SEQ ID NO: 206906 - RNA, 32 nt, Homo Sapiens
ggacuugagucuuuuuccuauagauauaucca

SEQ ID NO: 206907 - RNA, 32 nt, Homo Sapiens
aaauguaaaagauacaaaauggcguguuauca

SEQ ID NO: 206908 - RNA, 32 nt, Homo Sapiens
cccagccucccucuucuuccucaggcuuugga

SEQ ID NO: 206909 - RNA, 32 nt, Homo Sapiens
uuuuauaaaaauuuuccuagaagguuuauacu

SEQ ID NO: 206910 - RNA, 32 nt, Homo Sapiens
caagaagagggcggcgccugcugcugucucgu

SEQ ID NO: 206911 - RNA, 32 nt, Homo Sapiens
gucuaguucauuugcauuuugggcauuucagc

SEQ ID NO: 206912 - RNA, 32 nt, Homo Sapiens
ggggaaaaucauacagauauuuuauguguuuc

SEQ ID NO: 206913 - RNA, 32 nt, Homo Sapiens
cgccgcugcauuccagccugggugacagagcg

SEQ ID NO: 206914 - RNA, 32 nt, Homo Sapiens
gucgaagauguugguuucccuuucucuguuau

SEQ ID NO: 206915 - RNA, 32 nt, Homo Sapiens
cugaguugaagggaauuauuuucaugcagaca

SEQ ID NO: 206916 - RNA, 32 nt, Homo Sapiens
aguuuaaggggaaauaggcuaguuuauagaaa

SEQ ID NO: 206917 - RNA, 32 nt, Homo Sapiens
aagcuuucacuuuaaaauguccaccugcguuu

SEQ ID NO: 206918 - RNA, 32 nt, Homo Sapiens
ccucccggcagagaggcuugaaaacaucuuuu

SEQ ID NO: 206919 - RNA, 32 nt, Homo Sapiens
ucauccagcaagugcuuuccagcuuaugccag

SEQ ID NO: 206920 - RNA, 32 nt, Homo Sapiens
gagugugcggagaggaggcggggcaacugcgc

SEQ ID NO: 206921 - RNA, 32 nt, Homo Sapiens
gucaguuuuaucaauuauauuauguuuaauua

SEQ ID NO: 206922 - RNA, 32 nt, Homo Sapiens
auuacaggcguccgccaccaugcccagccaau

SEQ ID NO: 206923 - RNA, 32 nt, Homo Sapiens
uuguccggcauaugcaaagauaggcagugcug

SEQ ID NO: 206924 - RNA, 32 nt, Homo Sapiens
ggacuacuucacaaaugguuauaaagucauau

SEQ ID NO: 206925 - RNA, 32 nt, Homo Sapiens
aacccaugggcaacaccaagcauucuaaugga

SEQ ID NO: 206926 - RNA, 32 nt, Homo Sapiens
acacauagguuuuuuuuuuuuaacuuucucuu

SEQ ID NO: 206927 - RNA, 32 nt, Homo Sapiens
acuaaagacuuaacuuuauaauaaugaagaua

SEQ ID NO: 206928 - RNA, 32 nt, Homo Sapiens
uuccuuuucccucucucccuuggaguaucaau

SEQ ID NO: 206929 - RNA, 32 nt, Homo Sapiens
uucaauauuuguguaguucaguuuuucuacau

SEQ ID NO: 206930 - RNA, 32 nt, Homo Sapiens
auucgguucccugucuccuccucccgucacag

SEQ ID NO: 206931 - RNA, 32 nt, Homo Sapiens
uggcgccuccgcgccugacccaggaggagugg

SEQ ID NO: 206932 - RNA, 32 nt, Homo Sapiens
uuaacuugaaggagaacagaaaugguauuacu

SEQ ID NO: 206933 - RNA, 32 nt, Homo Sapiens
aucucuccaucccagcuauuaauguccuaguc

SEQ ID NO: 206934 - RNA, 32 nt, Homo Sapiens
cugccaucuucaggauauugguuguuccccuc

SEQ ID NO: 206935 - RNA, 32 nt, Homo Sapiens
cuguguccuugguacagaaccauccacuugac

SEQ ID NO: 206936 - RNA, 32 nt, Homo Sapiens
gugaguggugcuacggaaaggcugggaguggc

SEQ ID NO: 206937 - RNA, 32 nt, Homo Sapiens
aagcaaccugcagcugaggucgccggcgccuu

SEQ ID NO: 206938 - RNA, 32 nt, Homo Sapiens
caguuucaggugccggcugggcccugaauguc

SEQ ID NO: 206939 - RNA, 32 nt, Homo Sapiens
acagauaaacuggcauuugguacuugcaagca

SEQ ID NO: 206940 - RNA, 32 nt, Homo Sapiens
ccgggaagggcggcugcgggcagacgcggcgc

SEQ ID NO: 206941 - RNA, 32 nt, Homo Sapiens
guucuuuuuuaaaguaucuacuucuaaaauua

SEQ ID NO: 206942 - RNA, 32 nt, Homo Sapiens
cuguagcuggaacacaagaaguguuuguuuaa

SEQ ID NO: 206943 - RNA, 32 nt, Homo Sapiens
ggcuauucugacccgccccgguuccgggacgc

SEQ ID NO: 206944 - RNA, 32 nt, Homo Sapiens
uuccuuaucacguguguaaggggaaaaagguu

SEQ ID NO: 206945 - RNA, 32 nt, Homo Sapiens
gaacacuaaagacagcugaugaucuuuaaaag

SEQ ID NO: 206946 - RNA, 32 nt, Homo Sapiens
uggcaggaauggggacccucaccccccaagca

SEQ ID NO: 206947 - RNA, 32 nt, Homo Sapiens
accuccucugcccagagcuguccucaaagcau

SEQ ID NO: 206948 - RNA, 32 nt, Homo Sapiens
ucaaggccuuuucugcagaccaaguagccuuc

SEQ ID NO: 206949 - RNA, 32 nt, Homo Sapiens
agaaagcccauaauucaaggcuuuuaauacag

SEQ ID NO: 206950 - RNA, 32 nt, Homo Sapiens
cccaauaaucugggguugaaacuuugaggaaa

SEQ ID NO: 206951 - RNA, 32 nt, Homo Sapiens
gccgggguuccacagggcccagcccuggcagg

SEQ ID NO: 206952 - RNA, 32 nt, Homo Sapiens
cccccgcggcccggaguccaucccgccuccuc

SEQ ID NO: 206953 - RNA, 32 nt, Homo Sapiens
uucccccucucccuccccaauggcuguguagc

SEQ ID NO: 206954 - RNA, 32 nt, Homo Sapiens
cauuuuaauuuaauguguuaaaaacacaaugu

SEQ ID NO: 206955 - RNA, 32 nt, Homo Sapiens
ccagcagaggaggacaguggcucugagcagcc

SEQ ID NO: 206956 - RNA, 28 nt, Homo Sapiens
ucagaagauguauagcauuugaaugucu

SEQ ID NO: 206957 - RNA, 32 nt, Homo Sapiens
cugcagugggcccacccaugggcuggcccaua

SEQ ID NO: 206958 - RNA, 32 nt, Homo Sapiens
uuuaugccuucucauucagaacuguaagauga

SEQ ID NO: 206959 - RNA, 31 nt, Homo Sapiens
cuuggucuggcucuugugccaagggcugaag

SEQ ID NO: 206960 - RNA, 32 nt, Homo Sapiens
gccgaggcgggugauuuauuuggcauaaaagu

SEQ ID NO: 206961 - RNA, 32 nt, Homo Sapiens
gccuagccucaaagcguucaucauacaucaua

SEQ ID NO: 206962 - RNA, 32 nt, Homo Sapiens
ggggcaagugucuggaaggccugaggggcacu

SEQ ID NO: 206963 - RNA, 32 nt, Homo Sapiens
ggggaagcuaacccggccccuucccccaggag

SEQ ID NO: 206964 - RNA, 32 nt, Homo Sapiens
ccauugucagcaugcacaaugccucugauucu

SEQ ID NO: 206965 - RNA, 32 nt, Homo Sapiens
guagccaaguuaaugggaaugcuccaucuacc

SEQ ID NO: 206966 - RNA, 32 nt, Homo Sapiens
auuccuccccugcagucugaggaggcaaaggu

SEQ ID NO: 206967 - RNA, 32 nt, Homo Sapiens
gccuggcugagacacgccaguggccucagcug

SEQ ID NO: 206968 - RNA, 32 nt, Homo Sapiens
cagauccucuguguggacccaggacugcuucc

SEQ ID NO: 206969 - RNA, 32 nt, Homo Sapiens
agucaaacagugucaggaaauuccuauuucca

SEQ ID NO: 206970 - RNA, 32 nt, Homo Sapiens
cgccgugcccacccuccuccggaaucgcccuu

SEQ ID NO: 206971 - RNA, 32 nt, Homo Sapiens
caguacugagaauggaugggagaggagaggaa

SEQ ID NO: 206972 - RNA, 32 nt, Homo Sapiens
agugcuuaauaaauuuaauuucaaacaaaaaa

SEQ ID NO: 206973 - RNA, 32 nt, Homo Sapiens
ccagcugucucauuuuaaaucauauaccaagc

SEQ ID NO: 206974 - RNA, 32 nt, Homo Sapiens
ucuuggauccuuuugccuuaaucucagugcuc

SEQ ID NO: 206975 - RNA, 32 nt, Homo Sapiens
ccgagcguccguccgcgccgucggccauggcc

SEQ ID NO: 206976 - RNA, 32 nt, Homo Sapiens
uuuugcuuuggcuuugcagacucuuuuuuagu

SEQ ID NO: 206977 - RNA, 32 nt, Homo Sapiens
cucugcucccgccagccuuguuuucagguggu

SEQ ID NO: 206978 - RNA, 32 nt, Homo Sapiens
cuguuguaaaaaauauaauugcucuuaauucu

SEQ ID NO: 206979 - RNA, 32 nt, Homo Sapiens
cugucaaugauuauuuucauuacaauggaaac

SEQ ID NO: 206980 - RNA, 32 nt, Homo Sapiens
cuggaacuuaggauaucugaucuagaaguacc

SEQ ID NO: 206981 - RNA, 32 nt, Homo Sapiens
cuguggcuucggguugccgaagagcgaugcuc

SEQ ID NO: 206982 - RNA, 32 nt, Homo Sapiens
gagggcgucaguauagaggccuuugcaucugg

SEQ ID NO: 206983 - RNA, 32 nt, Homo Sapiens
gguuaaucuggaacuuacguucuuauaccaau

SEQ ID NO: 206984 - RNA, 32 nt, Homo Sapiens
aauucugguguugguuggaguuccaucuugca

SEQ ID NO: 206985 - RNA, 32 nt, Homo Sapiens
cuaggacauuuuaguaaaugguagugaguuaa

SEQ ID NO: 206986 - RNA, 32 nt, Homo Sapiens
cgcuccgucccaucggggcugcggccagggcg

SEQ ID NO: 206987 - RNA, 32 nt, Homo Sapiens
ccugcucuucccgagagcugcccccaaaucag

SEQ ID NO: 206988 - RNA, 32 nt, Homo Sapiens
gggauaagcuuugucaguagagggcaccaaac

SEQ ID NO: 206989 - RNA, 32 nt, Homo Sapiens
aauuccagcauuggagaagcgaggggcggggc

SEQ ID NO: 206990 - RNA, 32 nt, Homo Sapiens
gccgccccugcagcugcucccgggcggcacga

SEQ ID NO: 206991 - RNA, 32 nt, Homo Sapiens
aaugaguuuucuuucaaaguacucacuaaggg

SEQ ID NO: 206992 - RNA, 32 nt, Homo Sapiens
gccccaguucccuccccaggccuccugggcca

SEQ ID NO: 206993 - RNA, 30 nt, Homo Sapiens
uguugcgaucaauuaaauuuuuuuguugua

SEQ ID NO: 206994 - RNA, 32 nt, Homo Sapiens
auuugaaccacguaucucuggguagcuacaaa

SEQ ID NO: 206995 - RNA, 32 nt, Homo Sapiens
cuggguagcuucaggauggggcuggucacugg

SEQ ID NO: 206996 - RNA, 32 nt, Homo Sapiens
cuggcuuuguggguggcuuuuuucauacuacu

SEQ ID NO: 206997 - RNA, 32 nt, Homo Sapiens
uucaauauacuuuuuccaacucucacauuuua

SEQ ID NO: 206998 - RNA, 32 nt, Homo Sapiens
uugguccuauguccuacuuuuauuuucucuaa

SEQ ID NO: 206999 - RNA, 32 nt, Homo Sapiens
auuccacuuacuccaccuuccauuccucgccc

SEQ ID NO: 207000 - RNA, 32 nt, Homo Sapiens
aguuucagcaacacucuauagaugcucaauau

SEQ ID NO: 207001 - RNA, 32 nt, Homo Sapiens
gagccuaagcuggcuccuggggaucucuguuc

SEQ ID NO: 207002 - RNA, 32 nt, Homo Sapiens
ucaccuagacauucggagccuguuaaaagagu

SEQ ID NO: 207003 - RNA, 32 nt, Homo Sapiens
auucuuuuuauauaucucugucagguaugaca

SEQ ID NO: 207004 - RNA, 32 nt, Homo Sapiens
cucacagaauuucaagagcuugucgguugggu

SEQ ID NO: 207005 - RNA, 32 nt, Homo Sapiens
acugcacuaaauuuuucuuaacauuccaagau

SEQ ID NO: 207006 - RNA, 31 nt, Homo Sapiens
ccaagacgcuauuguaacggaaugguugcaa

SEQ ID NO: 207007 - RNA, 32 nt, Homo Sapiens
uguaaaaagagaaaucauaguuuuauauuuua

SEQ ID NO: 207008 - RNA, 32 nt, Homo Sapiens
cggagcggauucugcccgccguccccggagcc

SEQ ID NO: 207009 - RNA, 32 nt, Homo Sapiens
cugaggcccagcugugcagaauuguuugcuag

SEQ ID NO: 207010 - RNA, 31 nt, Homo Sapiens
auguaguuugguaauuaucauuuuagaagac

SEQ ID NO: 207011 - RNA, 32 nt, Homo Sapiens
ucagcuauugcuuccugaaccgagggcaggau

SEQ ID NO: 207012 - RNA, 32 nt, Homo Sapiens
gaauuuucuagugcuauauaaagaaaugauga

SEQ ID NO: 207013 - RNA, 32 nt, Homo Sapiens
ucauggcuggcgccuguuuucucauucuuacc

SEQ ID NO: 207014 - RNA, 32 nt, Homo Sapiens
agcaucuggcccagccuguccauccucaucuc

SEQ ID NO: 207015 - RNA, 32 nt, Homo Sapiens
cgaauuuccgccuggggaguguuggauccaca

SEQ ID NO: 207016 - RNA, 32 nt, Homo Sapiens
aaacuguuuacuacuuugguuuuagcagcuca

SEQ ID NO: 207017 - RNA, 32 nt, Homo Sapiens
uuugccaaguccaauuaucuucuaggauugaa

SEQ ID NO: 207018 - RNA, 32 nt, Homo Sapiens
gaucauuaaccacuguauacuuuguguauaua

SEQ ID NO: 207019 - RNA, 32 nt, Homo Sapiens
cuugaauguacaaagauacuugaugcacuuau

SEQ ID NO: 207020 - RNA, 32 nt, Homo Sapiens
cuggaggcagacagggugggcugggggccagc

SEQ ID NO: 207021 - RNA, 32 nt, Homo Sapiens
uuucaucauugcaaacaaaaaucauugaaaau

SEQ ID NO: 207022 - RNA, 32 nt, Homo Sapiens
ucuauguggaaaauauuagaaacuacagaguu

SEQ ID NO: 207023 - RNA, 32 nt, Homo Sapiens
ucugcugccccgaggccauguaggccgugcuu

SEQ ID NO: 207024 - RNA, 32 nt, Homo Sapiens
uauuaaacuaaaucaggcucauuugaagauga

SEQ ID NO: 207025 - RNA, 32 nt, Homo Sapiens
uuguauccagcaugcuggagaccaaagcugcc

SEQ ID NO: 207026 - RNA, 32 nt, Homo Sapiens
gguggccucuguggccguccaggcuagcggcg

SEQ ID NO: 207027 - RNA, 32 nt, Homo Sapiens
ggcaggccuuggaguuccaugacaaaaucacu

SEQ ID NO: 207028 - RNA, 32 nt, Homo Sapiens
caagcagaauaagcugacccuccccaaccugc

SEQ ID NO: 207029 - RNA, 32 nt, Homo Sapiens
cuugaugucaugauuuuaugugacgauuccua

SEQ ID NO: 207030 - RNA, 32 nt, Homo Sapiens
guucgaucaaaauaaaaguucuauucugugag

SEQ ID NO: 207031 - RNA, 32 nt, Homo Sapiens
caggggagaagcugaguugggaauggucacau

SEQ ID NO: 207032 - RNA, 32 nt, Homo Sapiens
ccggcucagucgcggcggcugccugguccuca

SEQ ID NO: 207033 - RNA, 32 nt, Homo Sapiens
uuccugaccucugccccaaacacacgcugcaa

SEQ ID NO: 207034 - RNA, 32 nt, Homo Sapiens
aaaugaacacuggcuuuuguucacuuugcccc

SEQ ID NO: 207035 - RNA, 32 nt, Homo Sapiens
acucgcccaucgcuccgcggaccucuuuaucc

SEQ ID NO: 207036 - RNA, 32 nt, Homo Sapiens
ccauccuugauugaggaccccugguuagcuuu

SEQ ID NO: 207037 - RNA, 32 nt, Homo Sapiens
gagaccaggaggaaagggcagguuaugccaga

SEQ ID NO: 207038 - RNA, 32 nt, Homo Sapiens
aggcaggcggugccgcggcgccgggacccgac

SEQ ID NO: 207039 - RNA, 32 nt, Homo Sapiens
aacuuaggguaccuggcaaaagaaauuucuga

SEQ ID NO: 207040 - RNA, 32 nt, Homo Sapiens
ggguuuuacugauaugguucuuauucacugag

SEQ ID NO: 207041 - RNA, 32 nt, Homo Sapiens
ugcaccccuucucuccuccccaaaucaauaca

SEQ ID NO: 207042 - RNA, 32 nt, Homo Sapiens
ucuacaaaaaauacagaaauuagccaggcgug

SEQ ID NO: 207043 - RNA, 32 nt, Homo Sapiens
ucucugagggggugggggugccgcucucucug

SEQ ID NO: 207044 - RNA, 32 nt, Homo Sapiens
guccggcccuugcucuuugauugugggcagcc

SEQ ID NO: 207045 - RNA, 32 nt, Homo Sapiens
cgcugguugcgcgcucccaggcgccgagcggc

SEQ ID NO: 207046 - RNA, 32 nt, Homo Sapiens
gaaucccgaccgccgcgccggacgcgccgucu

SEQ ID NO: 207047 - RNA, 32 nt, Homo Sapiens
cacuguacaauuuucccaguuuacaggucuau

SEQ ID NO: 207048 - RNA, 32 nt, Homo Sapiens
ggcggucgagcccgcggcgccauggcucacgu

SEQ ID NO: 207049 - RNA, 32 nt, Homo Sapiens
aggagggcacguucgcgccgcgccgcggaggg

SEQ ID NO: 207050 - RNA, 32 nt, Homo Sapiens
aaaauaccaaaauuagcugggcaugguggcgc

SEQ ID NO: 207051 - RNA, 32 nt, Homo Sapiens
gcuaagcccucccgcgcccccaccccagaccc

SEQ ID NO: 207052 - RNA, 32 nt, Homo Sapiens
caucuuuuucuuuugcacaucuuccugaguug

SEQ ID NO: 207053 - RNA, 32 nt, Homo Sapiens
auucuccaugugaaacuuuaugcugaaaauuu

SEQ ID NO: 207054 - RNA, 32 nt, Homo Sapiens
cuuuucuuauuaugauaauaagcuuauauaug

SEQ ID NO: 207055 - RNA, 32 nt, Homo Sapiens
ucuacaaaaaauacaaaaauuagccaggcgua

SEQ ID NO: 207056 - RNA, 32 nt, Homo Sapiens
ccugcccugggcgggggcgagcgcguccgguu

SEQ ID NO: 207057 - RNA, 32 nt, Homo Sapiens
agagauuuuucuguuuuugaaaauaguucgug

SEQ ID NO: 207058 - RNA, 32 nt, Homo Sapiens
cguccagcugucuguccguccagguggccgac

SEQ ID NO: 207059 - RNA, 32 nt, Homo Sapiens
uccgaacaucagaagaaacaaacuccagacgc

SEQ ID NO: 207060 - RNA, 29 nt, Homo Sapiens
uaaauaaaaguauuauauuuucuacguca

SEQ ID NO: 207061 - RNA, 32 nt, Homo Sapiens
uuucuuaaaaugguuuuaaaucuugaccuuaa

SEQ ID NO: 207062 - RNA, 32 nt, Homo Sapiens
cgugaucucggcucgcugcagccucugccucc

SEQ ID NO: 207063 - RNA, 32 nt, Homo Sapiens
cauacagugucuggacgcugccacaucugggc

SEQ ID NO: 207064 - RNA, 32 nt, Homo Sapiens
cgcgccugaaacaccccgcgggccucccguug

SEQ ID NO: 207065 - RNA, 32 nt, Homo Sapiens
gaugggacagcggcccggcccacgcagagccc

SEQ ID NO: 207066 - RNA, 32 nt, Homo Sapiens
uucuuaaacagaaaaguauuugugaaauauua

SEQ ID NO: 207067 - RNA, 32 nt, Homo Sapiens
aucacuuguggagcgccagcucugcccaagac

SEQ ID NO: 207068 - RNA, 32 nt, Homo Sapiens
agaaauaaaaauuaguuuaagauggaauaaag

SEQ ID NO: 207069 - RNA, 32 nt, Homo Sapiens
gucugaaacagaauucagcaucaguuccucac

SEQ ID NO: 207070 - RNA, 32 nt, Homo Sapiens
ggggggugaggguggggagguggggcagggca

SEQ ID NO: 207071 - RNA, 32 nt, Homo Sapiens
gguacccgcgccccacaguccacccgcuccuc

SEQ ID NO: 207072 - RNA, 32 nt, Homo Sapiens
aggagaaggaugccugggugccaggcaagaca

SEQ ID NO: 207073 - RNA, 32 nt, Homo Sapiens
cgggagcaccaugucuuggaagggcaggaggu

SEQ ID NO: 207074 - RNA, 32 nt, Homo Sapiens
ccucguagucaauaaggucuugccacauuuua

SEQ ID NO: 207075 - RNA, 32 nt, Homo Sapiens
guaaagaugugcuugugggugguggguguguc

SEQ ID NO: 207076 - RNA, 32 nt, Homo Sapiens
gcccuggacuuccagacuucuaucacaugaga

SEQ ID NO: 207077 - RNA, 31 nt, Homo Sapiens
uaauuuacaaauugugaucuuaguguauaua

SEQ ID NO: 207078 - RNA, 32 nt, Homo Sapiens
ggguagaauuaaauauauaauuuuauagcuca

SEQ ID NO: 207079 - RNA, 32 nt, Homo Sapiens
gguaaucgagaugaggauauuaacucaaaaga

SEQ ID NO: 207080 - RNA, 32 nt, Homo Sapiens
acaaagacccaagcauacaauuugagcaugcu

SEQ ID NO: 207081 - RNA, 27 nt, Homo Sapiens
uauccaucucauuucugguauaguuca

SEQ ID NO: 207082 - RNA, 32 nt, Homo Sapiens
aauccuuacugauauuuauagaacaguugauu

SEQ ID NO: 207083 - RNA, 32 nt, Homo Sapiens
ccauggcuucagccaguccccccguuuggggu

SEQ ID NO: 207084 - RNA, 32 nt, Homo Sapiens
auucuguucaaguauuuuuuuacaagcuugug

SEQ ID NO: 207085 - RNA, 32 nt, Homo Sapiens
auugaaugauguuacuuugauuuuauauauaa

SEQ ID NO: 207086 - RNA, 32 nt, Homo Sapiens
cacguggggugcccugggccauggggaccccc

SEQ ID NO: 207087 - RNA, 32 nt, Homo Sapiens
ccuaucuaaaauucacagcccuuuuauucucc

SEQ ID NO: 207088 - RNA, 32 nt, Homo Sapiens
agagaucugaagaugcugcacugcuggcuuug

SEQ ID NO: 207089 - RNA, 32 nt, Homo Sapiens
ugucuuccguggauguuucaguuacaacugua

SEQ ID NO: 207090 - RNA, 32 nt, Homo Sapiens
cuccaucugcuguguuuggacgcguuccugcc

SEQ ID NO: 207091 - RNA, 28 nt, Homo Sapiens
uuauucuuuacaggaacugguggugguu

SEQ ID NO: 207092 - RNA, 32 nt, Homo Sapiens
auguucuaggauaguugaugcauguuacuaaa

SEQ ID NO: 207093 - RNA, 32 nt, Homo Sapiens
ugcaggaaggggaaccggcacagcagcacacg

SEQ ID NO: 207094 - RNA, 32 nt, Homo Sapiens
caggccgaaccccauuucuccuccucuuaggu

SEQ ID NO: 207095 - RNA, 32 nt, Homo Sapiens
cgcuccacagaaacccggacugagaggcagcg

SEQ ID NO: 207096 - RNA, 32 nt, Homo Sapiens
aguuugaaggaaugcaaggagaaggauuucug

SEQ ID NO: 207097 - RNA, 32 nt, Homo Sapiens
gcggcguuugucuucuuuuucuuagucagauc

SEQ ID NO: 207098 - RNA, 32 nt, Homo Sapiens
gucuucaaugugcccccauacugcacagagca

SEQ ID NO: 207099 - RNA, 32 nt, Homo Sapiens
ggaauuguuuuccaagaggaaauaaauucagu

SEQ ID NO: 207100 - RNA, 32 nt, Homo Sapiens
auuuauuugaaaugugcuggguaguguucuca

SEQ ID NO: 207101 - RNA, 32 nt, Homo Sapiens
ugggugggagacgcagccuugccacauggaag

SEQ ID NO: 207102 - RNA, 32 nt, Homo Sapiens
uuggccugauuccugcagauacugggaucuga

SEQ ID NO: 207103 - RNA, 32 nt, Homo Sapiens
cagggggaagccugcacagacggcggcauccu

SEQ ID NO: 207104 - RNA, 32 nt, Homo Sapiens
ccuuugcuccuggccugggcucugauuucacu

SEQ ID NO: 207105 - RNA, 32 nt, Homo Sapiens
guguaacuuacuuaucuguuuauuuucaauuu

SEQ ID NO: 207106 - RNA, 32 nt, Homo Sapiens
ucacuaaacugaaaggcuggggcuugcccuua

SEQ ID NO: 207107 - RNA, 31 nt, Homo Sapiens
aagugcugaaaaugggaugugcuguuuucug

SEQ ID NO: 207108 - RNA, 30 nt, Homo Sapiens
ggagccaauaucccuuacuuuaacccuuuc

SEQ ID NO: 207109 - RNA, 32 nt, Homo Sapiens
cuggcauguccaugucacuggauggacagucg

SEQ ID NO: 207110 - RNA, 32 nt, Homo Sapiens
cuggccguggcccagugaagccugcagagccc

SEQ ID NO: 207111 - RNA, 32 nt, Homo Sapiens
acggcaggaaagggcgguccugcgcuguggcc

SEQ ID NO: 207112 - RNA, 32 nt, Homo Sapiens
cagcgcccgccggcugcuccgcgcugacagcg

SEQ ID NO: 207113 - RNA, 32 nt, Homo Sapiens
cuuauugaacaaaguaauucauacuggagaga

SEQ ID NO: 207114 - RNA, 31 nt, Homo Sapiens
cacccgcaccgcugccugcuugcgguuggag

SEQ ID NO: 207115 - RNA, 32 nt, Homo Sapiens
guuaguauaaucugaauaaauaaaauguugcc

SEQ ID NO: 207116 - RNA, 32 nt, Homo Sapiens
gacgccggccgcgggcugcuuucgucggcucc

SEQ ID NO: 207117 - RNA, 32 nt, Homo Sapiens
uuagcuaauaauaguauuuucuuuuaguugag

SEQ ID NO: 207118 - RNA, 32 nt, Homo Sapiens
aaaggcucucucagccgagacuugcuggcacg

SEQ ID NO: 207119 - RNA, 32 nt, Homo Sapiens
acuuaguccuggaaacaacccuaugugguugg

SEQ ID NO: 207120 - RNA, 32 nt, Homo Sapiens
cccagggaggaggcuggaccgagggacccugg

SEQ ID NO: 207121 - RNA, 32 nt, Homo Sapiens
acgccgccgggcgcugggcuggagcugggggc

SEQ ID NO: 207122 - RNA, 32 nt, Homo Sapiens
uguccuggcucgagaagaaggcagcacaggau

SEQ ID NO: 207123 - RNA, 32 nt, Homo Sapiens
ucccggucuuguuucagcauaaaaguucagac

SEQ ID NO: 207124 - RNA, 31 nt, Homo Sapiens
cuccuggugagaggaguccacuccgugcgug

SEQ ID NO: 207125 - RNA, 32 nt, Homo Sapiens
uaaaaauguaacaauuuaacccacaggaaaaa

SEQ ID NO: 207126 - RNA, 32 nt, Homo Sapiens
aggagagcgaugcugcgccucugccccucucc

SEQ ID NO: 207127 - RNA, 32 nt, Homo Sapiens
caaauuucaugcuguugguuugccaugaauga

SEQ ID NO: 207128 - RNA, 32 nt, Homo Sapiens
ccaguucugugagauagcacauaaaaauagag

SEQ ID NO: 207129 - RNA, 32 nt, Homo Sapiens
uaguugauuaggaugaagaagauucuucaaau

SEQ ID NO: 207130 - RNA, 32 nt, Homo Sapiens
uuuggacuuaaagaucacuagugucuaaauuc

SEQ ID NO: 207131 - RNA, 32 nt, Homo Sapiens
aauggucuccggucggugggcuccuccacgcc

SEQ ID NO: 207132 - RNA, 32 nt, Homo Sapiens
uccacugugcggugccaaaaaagaggcggagg

SEQ ID NO: 207133 - RNA, 32 nt, Homo Sapiens
agcaccaugcugucaugugagcuggaggggga

SEQ ID NO: 207134 - RNA, 32 nt, Homo Sapiens
ggaugcaugucucuccuucucuagcugucaaa

SEQ ID NO: 207135 - RNA, 32 nt, Homo Sapiens
cugcaguguucgcuuggcuccaugcuccucac

SEQ ID NO: 207136 - RNA, 32 nt, Homo Sapiens
ccucagcucaggcuaccacgccaggcuccacu

SEQ ID NO: 207137 - RNA, 32 nt, Homo Sapiens
acuuuucugcaccccccugcuccucuucaccc

SEQ ID NO: 207138 - RNA, 32 nt, Homo Sapiens
ggcuuaggacuugguuuguuauaucagggaaa

SEQ ID NO: 207139 - RNA, 32 nt, Homo Sapiens
cagagagucccggacgccgccggucggugccc

SEQ ID NO: 207140 - RNA, 30 nt, Homo Sapiens
gccgggcgugguggcaugcgccuauaaucu

SEQ ID NO: 207141 - RNA, 32 nt, Homo Sapiens
uucuugacuuagcuaccaggagcuagagaugc

SEQ ID NO: 207142 - RNA, 32 nt, Homo Sapiens
aucuucagauauccguccauuuucaucucuua

SEQ ID NO: 207143 - RNA, 32 nt, Homo Sapiens
ugugaucaaugaucuuugauguuacuauggua

SEQ ID NO: 207144 - RNA, 32 nt, Homo Sapiens
ggaugcauguguguguaacaaacacuuugacc

SEQ ID NO: 207145 - RNA, 32 nt, Homo Sapiens
guugcuccugucaugugucaccaucuucccuc

SEQ ID NO: 207146 - RNA, 32 nt, Homo Sapiens
ggccgccauggagcagccgccggcgccuaaga

SEQ ID NO: 207147 - RNA, 32 nt, Homo Sapiens
ugucaucucugguccacaggugucacaggugg

SEQ ID NO: 207148 - RNA, 32 nt, Homo Sapiens
acugcuguauauauauuauuauauuuguacuu

SEQ ID NO: 207149 - RNA, 32 nt, Homo Sapiens
aaaagccaaaauuuaugcaguaaagaaaaaau

SEQ ID NO: 207150 - RNA, 32 nt, Homo Sapiens
auuuucucaugugcccugaaauccauguaacu

SEQ ID NO: 207151 - RNA, 32 nt, Homo Sapiens
gcuaugcacgggggcggcggcgucuccuccug

SEQ ID NO: 207152 - RNA, 32 nt, Homo Sapiens
caggcuccgggcggcgugcgccgcggugccua

SEQ ID NO: 207153 - RNA, 32 nt, Homo Sapiens
ucucaccugagccccaggugaaggggcccgga

SEQ ID NO: 207154 - RNA, 32 nt, Homo Sapiens
cuugcaaagggcugaggcccagcucugucugg

SEQ ID NO: 207155 - RNA, 32 nt, Homo Sapiens
agccgcccaugccgccccggcgcccagccgcg

SEQ ID NO: 207156 - RNA, 32 nt, Homo Sapiens
acugcgcgccccagcuccgauccccguuccgc

SEQ ID NO: 207157 - RNA, 32 nt, Homo Sapiens
cgggaggcgucccaggcagcauugcucuuugu

SEQ ID NO: 207158 - RNA, 32 nt, Homo Sapiens
uagacuggagugauguuagaaaacacaaauau

SEQ ID NO: 207159 - RNA, 32 nt, Homo Sapiens
ugccuguaauuccagcacuuugggaggccaag

SEQ ID NO: 207160 - RNA, 32 nt, Homo Sapiens
uuagcuguaaguaagcacaaaauacauuuaaa

SEQ ID NO: 207161 - RNA, 32 nt, Homo Sapiens
cagggagacaagcagcauguuauuaaauuggg

SEQ ID NO: 207162 - RNA, 32 nt, Homo Sapiens
acuuaucucggggagaaaugcaaccaacugcu

SEQ ID NO: 207163 - RNA, 32 nt, Homo Sapiens
aagacauuacaccaugguuuuuagacauuucu

SEQ ID NO: 207164 - RNA, 32 nt, Homo Sapiens
acuagaucugaaaugagacugauaagacauuc

SEQ ID NO: 207165 - RNA, 32 nt, Homo Sapiens
gcucaugauccuccucccucccccgcccuccu

SEQ ID NO: 207166 - RNA, 32 nt, Homo Sapiens
ccagacaggauucagaauaaggagagaaugac

SEQ ID NO: 207167 - RNA, 32 nt, Homo Sapiens
ugucuguaaucccagcacuuugggaggccaag

SEQ ID NO: 207168 - RNA, 32 nt, Homo Sapiens
cguggugugggaagaagccagggguaagaaga

SEQ ID NO: 207169 - RNA, 32 nt, Homo Sapiens
uggacgugcugcagcccuccugucccuucccc

SEQ ID NO: 207170 - RNA, 32 nt, Homo Sapiens
cuugcccccacuuucauaaaagaaacuucaaa

SEQ ID NO: 207171 - RNA, 32 nt, Homo Sapiens
uauugauauguuucaauucuuaaugaaaauuu

SEQ ID NO: 207172 - RNA, 32 nt, Homo Sapiens
cacuugcucccucugucauuuacuccccagcc

SEQ ID NO: 207173 - RNA, 32 nt, Homo Sapiens
ccagagcucugucucuguacagcccucuccuc

SEQ ID NO: 207174 - RNA, 32 nt, Homo Sapiens
aaugagccuuuggagauacugauauaaggcaa

SEQ ID NO: 207175 - RNA, 32 nt, Homo Sapiens
gccauuucugccacuuucccccuagagagccg

SEQ ID NO: 207176 - RNA, 32 nt, Homo Sapiens
aauuagccgggcgugguggcuggugccuguag

SEQ ID NO: 207177 - RNA, 32 nt, Homo Sapiens
guaacacauuucuauacucuccuuccauaaca

SEQ ID NO: 207178 - RNA, 32 nt, Homo Sapiens
ccacagguacagagccacggaccccaagaaug

SEQ ID NO: 207179 - RNA, 32 nt, Homo Sapiens
aguaagauauuacaauugguuaaaagaaaauc

SEQ ID NO: 207180 - RNA, 32 nt, Homo Sapiens
gccucccagcucccucggggcccccagcuacc

SEQ ID NO: 207181 - RNA, 32 nt, Homo Sapiens
cuuccccagcaugcaccacgggcccggguugg

SEQ ID NO: 207182 - RNA, 31 nt, Homo Sapiens
aagucucgccacagcaaucaggcaagagaaa

SEQ ID NO: 207183 - RNA, 32 nt, Homo Sapiens
gauucugcccucaaugaggaccaaauaaagau

SEQ ID NO: 207184 - RNA, 32 nt, Homo Sapiens
cauuauggcugcuggggugcugcugacccagc

SEQ ID NO: 207185 - RNA, 32 nt, Homo Sapiens
uugggugggggagagggccgaggcccgggggc

SEQ ID NO: 207186 - RNA, 32 nt, Homo Sapiens
uggcucugccagcguccccggccacgucugug

SEQ ID NO: 207187 - RNA, 32 nt, Homo Sapiens
agggacuagaaauuauuugaaguuuucuuuau

SEQ ID NO: 207188 - RNA, 32 nt, Homo Sapiens
cugguuuuaggaucccggagccaggcaucucg

SEQ ID NO: 207189 - RNA, 32 nt, Homo Sapiens
ccgcgacaguacaugcugcugcugcccgagca

SEQ ID NO: 207190 - RNA, 32 nt, Homo Sapiens
ccuggcggcuccugaagcgcacgcgggcgggc

SEQ ID NO: 207191 - RNA, 32 nt, Homo Sapiens
caaucccuccaguuccuccccagccccuucac

SEQ ID NO: 207192 - RNA, 32 nt, Homo Sapiens
aguucuuaaagguggcaugucuggaguuuguu

SEQ ID NO: 207193 - RNA, 32 nt, Homo Sapiens
aaauauauagucuuucuguaugucucugugug

SEQ ID NO: 207194 - RNA, 32 nt, Homo Sapiens
cuccccaacacgcuccucccacaguccuaucu

SEQ ID NO: 207195 - RNA, 32 nt, Homo Sapiens
aauuauaaaucuacucuagagacauauaauca

SEQ ID NO: 207196 - RNA, 32 nt, Homo Sapiens
aggcuccaguuugagaggcaugugucgggggg

SEQ ID NO: 207197 - RNA, 32 nt, Homo Sapiens
acggggcacgcguuaggaaaccacugagaaaa

SEQ ID NO: 207198 - RNA, 32 nt, Homo Sapiens
ucacaccagcccugguggccaagccugccccg

SEQ ID NO: 207199 - RNA, 32 nt, Homo Sapiens
cuuucuaggcaccuagcagagaaagauaagau

SEQ ID NO: 207200 - RNA, 31 nt, Homo Sapiens
gggaggagcacacagaaccauaucaaggcuu

SEQ ID NO: 207201 - RNA, 32 nt, Homo Sapiens
uaaaaaugcaccacuuuuuuuuuuuuuuugac

SEQ ID NO: 207202 - RNA, 32 nt, Homo Sapiens
acuuguaaaugucaacaauagaauuaaaauau

SEQ ID NO: 207203 - RNA, 32 nt, Homo Sapiens
aagcacgugggggaccugugccugcaggcagg

SEQ ID NO: 207204 - RNA, 32 nt, Homo Sapiens
gcagaaucuucagaacagguucuccuucccca

SEQ ID NO: 207205 - RNA, 29 nt, Homo Sapiens
aguccucugggacagagaccugucuccac

SEQ ID NO: 207206 - RNA, 32 nt, Homo Sapiens
gagacagagucuugcucuuucgcccaggaugg

SEQ ID NO: 207207 - RNA, 32 nt, Homo Sapiens
gauguuggagggcacuuagugggguugaagua

SEQ ID NO: 207208 - RNA, 32 nt, Homo Sapiens
gugacccacccccguuugcgcgcucgcagucu

SEQ ID NO: 207209 - RNA, 32 nt, Homo Sapiens
gaaaauacccagcgcagcaucuacacauucaa

SEQ ID NO: 207210 - RNA, 32 nt, Homo Sapiens
agcuuugaguuaggaagauuaggauccaaguc

SEQ ID NO: 207211 - RNA, 32 nt, Homo Sapiens
gucgagggauggauauaugaaguaaggugaga

SEQ ID NO: 207212 - RNA, 32 nt, Homo Sapiens
ccaagugaagaaucuaaugaaugugcaaccua

SEQ ID NO: 207213 - RNA, 32 nt, Homo Sapiens
aaggguuaucuaguauccuucaucuuauuuag

SEQ ID NO: 207214 - RNA, 28 nt, Homo Sapiens
ugcuugguguuuugcaggaugauggugg

SEQ ID NO: 207215 - RNA, 32 nt, Homo Sapiens
uacccagacauuaacuucaaucgauuguuuga

SEQ ID NO: 207216 - RNA, 32 nt, Homo Sapiens
cuagguacacagcucuagacacugccacacag

SEQ ID NO: 207217 - RNA, 32 nt, Homo Sapiens
agaaagaauguguagcaaaugaaaauaccaga

SEQ ID NO: 207218 - RNA, 32 nt, Homo Sapiens
ggagggaacugauauguugcaaugcaaaguaa

SEQ ID NO: 207219 - RNA, 32 nt, Homo Sapiens
ugaauacaugauuuaaacaagagauuuccaca

SEQ ID NO: 207220 - RNA, 32 nt, Homo Sapiens
gccccacggacagucagccugccggccucccu

SEQ ID NO: 207221 - RNA, 32 nt, Homo Sapiens
agggcugugugagcagacugcuauagaaugcu

SEQ ID NO: 207222 - RNA, 32 nt, Homo Sapiens
augaaauacugaucucuuuccucacauaaguc

SEQ ID NO: 207223 - RNA, 32 nt, Homo Sapiens
cuguuucuggcugggcacgaugacucaugccu

SEQ ID NO: 207224 - RNA, 32 nt, Homo Sapiens
uuccucuaggggaaacaauaacguuccacuga

SEQ ID NO: 207225 - RNA, 32 nt, Homo Sapiens
ugccccuugugcuucugguaugcaugagaaau

SEQ ID NO: 207226 - RNA, 32 nt, Homo Sapiens
uccaaaaacaauuuaauuucaaacaacgaucc

SEQ ID NO: 207227 - RNA, 30 nt, Homo Sapiens
ccggugccccccgugccggagcgcaggagc

SEQ ID NO: 207228 - RNA, 32 nt, Homo Sapiens
gggggguugaccgcggggcacugaguugggua

SEQ ID NO: 207229 - RNA, 32 nt, Homo Sapiens
gaggguagcaagccuccagcgugcuugggucu

SEQ ID NO: 207230 - RNA, 32 nt, Homo Sapiens
caaauaaaaaauacuguaauaaaaguacuuau

SEQ ID NO: 207231 - RNA, 32 nt, Homo Sapiens
ggcgagggcgagggcgaggcggugcucaugga

SEQ ID NO: 207232 - RNA, 32 nt, Homo Sapiens
uagaggggguggcaacccccaccugaggccuu

SEQ ID NO: 207233 - RNA, 32 nt, Homo Sapiens
ucuucgugcgccccggggcugcagagauccag

SEQ ID NO: 207234 - RNA, 32 nt, Homo Sapiens
ugggcccacaguguuuauguacucuuaacaac

SEQ ID NO: 207235 - RNA, 32 nt, Homo Sapiens
gcuaggcuuuucucuuuuguccuuccuguugg

SEQ ID NO: 207236 - RNA, 32 nt, Homo Sapiens
uuaaauccaagagccuucuuagcccaguuucu

SEQ ID NO: 207237 - RNA, 32 nt, Homo Sapiens
guuggagacggagggagcgcgcggggcgggcc

SEQ ID NO: 207238 - RNA, 32 nt, Homo Sapiens
cugucgcgggcggcgcccggccuugcucaacg

SEQ ID NO: 207239 - RNA, 30 nt, Homo Sapiens
caaccaccaaggcuuucccaucuuggggcc

SEQ ID NO: 207240 - RNA, 32 nt, Homo Sapiens
ggguuauugggauaagaaaaaauauauauugc

SEQ ID NO: 207241 - RNA, 32 nt, Homo Sapiens
uuaaaaagcaaggguuuuuggccaggcguggu

SEQ ID NO: 207242 - RNA, 32 nt, Homo Sapiens
ccucagaaccucagccagaaaggcaaggagga

SEQ ID NO: 207243 - RNA, 32 nt, Homo Sapiens
aaaaauacaucauuuaauuuuuguuacauaug

SEQ ID NO: 207244 - RNA, 32 nt, Homo Sapiens
agcguaguauugacaauucuucauguaggaaa

SEQ ID NO: 207245 - RNA, 31 nt, Homo Sapiens
gaggggugaaacacuucagaagcaccguguc

SEQ ID NO: 207246 - RNA, 32 nt, Homo Sapiens
uuuucaauguauugaauauauuagacuacuau

SEQ ID NO: 207247 - RNA, 32 nt, Homo Sapiens
cuggcuuugccuuuccuggagcccuuaaacag

SEQ ID NO: 207248 - RNA, 32 nt, Homo Sapiens
uuagaaauguaaaauucaguauaguuugaaag

SEQ ID NO: 207249 - RNA, 32 nt, Homo Sapiens
agcagggguuugcaugugcuaccaacacauga

SEQ ID NO: 207250 - RNA, 32 nt, Homo Sapiens
ucaucuuccacuuuuucacauugcuguuucag

SEQ ID NO: 207251 - RNA, 32 nt, Homo Sapiens
aguugcuucagcgucccgguguggcugugccg

SEQ ID NO: 207252 - RNA, 32 nt, Homo Sapiens
uccaggugcaggggcuucuguuuggcaggccc

SEQ ID NO: 207253 - RNA, 32 nt, Homo Sapiens
gucucagaauucaguuaaugucuuaaucaugu

SEQ ID NO: 207254 - RNA, 32 nt, Homo Sapiens
aaguucaaggccagcuggaggugcguggcugu

SEQ ID NO: 207255 - RNA, 32 nt, Homo Sapiens
auguccacagaaaaacuuguacauggauguuc

SEQ ID NO: 207256 - RNA, 32 nt, Homo Sapiens
uuagaaacacaagcuggaggccggaugcggug

SEQ ID NO: 207257 - RNA, 32 nt, Homo Sapiens
ucugggcuccguuuggcaauagcaaucuuggc

SEQ ID NO: 207258 - RNA, 32 nt, Homo Sapiens
cguguucugccagcaccgcccuucacccggcc

SEQ ID NO: 207259 - RNA, 31 nt, Homo Sapiens
cggaggcugccgguuucguaaccgucgcucc

SEQ ID NO: 207260 - RNA, 32 nt, Homo Sapiens
ccaggaaggaggagaggaaccauuugugcaga

SEQ ID NO: 207261 - RNA, 32 nt, Homo Sapiens
cagacuugcgugggucaguucuuucugaguag

SEQ ID NO: 207262 - RNA, 32 nt, Homo Sapiens
ugggguuccgcggaagguucuggaggggucuu

SEQ ID NO: 207263 - RNA, 32 nt, Homo Sapiens
ugcacuagauauauaaauuaaaacuuuuuucu

SEQ ID NO: 207264 - RNA, 32 nt, Homo Sapiens
ccuacuguucuucuuagucccagcuucugccc

SEQ ID NO: 207265 - RNA, 30 nt, Homo Sapiens
ggccgccggaggagcgcgggugaccuggcg

SEQ ID NO: 207266 - RNA, 32 nt, Homo Sapiens
gccugccuacauuugcagacagacacaguggc

SEQ ID NO: 207267 - RNA, 32 nt, Homo Sapiens
ccagagaggggagggacucagauuuauauggc

SEQ ID NO: 207268 - RNA, 32 nt, Homo Sapiens
gccccguuuccccgagucccgccccgugugca

SEQ ID NO: 207269 - RNA, 32 nt, Homo Sapiens
agccugaccaacaugaugaaaccccguugcua

SEQ ID NO: 207270 - RNA, 32 nt, Homo Sapiens
agagagagaauuaaauuuucuaaugggaauua

SEQ ID NO: 207271 - RNA, 32 nt, Homo Sapiens
gcugccccgcggcccccaaggagccccacccc

SEQ ID NO: 207272 - RNA, 32 nt, Homo Sapiens
ugggcccaguucuccuuuucuccggguuucag

SEQ ID NO: 207273 - RNA, 32 nt, Homo Sapiens
ggaggagacagagggauccauccaaggucaca

SEQ ID NO: 207274 - RNA, 26 nt, Homo Sapiens
caugcugaggagcugcgccgcgcgcc

SEQ ID NO: 207275 - RNA, 32 nt, Homo Sapiens
ugagccgcgccgggagcugggacauggacggg

SEQ ID NO: 207276 - RNA, 32 nt, Homo Sapiens
aagaucucacaagcuauuuucuugaagcacuu

SEQ ID NO: 207277 - RNA, 31 nt, Homo Sapiens
aaugauuagguuuuguucugaguuauuucua

SEQ ID NO: 207278 - RNA, 32 nt, Homo Sapiens
aacaccugccccagccccaccaugcucauggc

SEQ ID NO: 207279 - RNA, 32 nt, Homo Sapiens
caggacuuguuuacaaagaugucuucauuccc

SEQ ID NO: 207280 - RNA, 32 nt, Homo Sapiens
ugucuuuauguucauuuggagagucagggcga

SEQ ID NO: 207281 - RNA, 31 nt, Homo Sapiens
gggaagauggcggagcugcgcgugcucguag

SEQ ID NO: 207282 - RNA, 32 nt, Homo Sapiens
aacaggucccugccuuuuuagaagcagccuca

SEQ ID NO: 207283 - RNA, 32 nt, Homo Sapiens
gugccguggcuccagccaccccgggacauugc

SEQ ID NO: 207284 - RNA, 32 nt, Homo Sapiens
aucugacuuccuguuuuuaaaacgggggucug

SEQ ID NO: 207285 - RNA, 32 nt, Homo Sapiens
gccugugugaccagaaggcuuauuugcaaguu

SEQ ID NO: 207286 - RNA, 32 nt, Homo Sapiens
ucucucuuuccuccccgacgaagggcagcccc

SEQ ID NO: 207287 - RNA, 32 nt, Homo Sapiens
gcuguuauuugaggcguagauacaucuagcau

SEQ ID NO: 207288 - RNA, 32 nt, Homo Sapiens
uccauuccuguuuuguugaagcagccacuggu

SEQ ID NO: 207289 - RNA, 32 nt, Homo Sapiens
gaacccuugaccucaggucauccacccgccuc

SEQ ID NO: 207290 - RNA, 32 nt, Homo Sapiens
auucuuggcucccuacuaucuauaaacagcug

SEQ ID NO: 207291 - RNA, 32 nt, Homo Sapiens
cuggagagucgggaccaccugcaccgcgaaca

SEQ ID NO: 207292 - RNA, 32 nt, Homo Sapiens
ugacucccuaaaauauauacacuuugcagaag

SEQ ID NO: 207293 - RNA, 32 nt, Homo Sapiens
auuucuagcauuacuagauauuaaaaguuaag

SEQ ID NO: 207294 - RNA, 32 nt, Homo Sapiens
ugauuuaauucucauggcaaccccgggaggga

SEQ ID NO: 207295 - RNA, 32 nt, Homo Sapiens
uccaccagucuguuaggccuccugcuucuagg

SEQ ID NO: 207296 - RNA, 32 nt, Homo Sapiens
agcagcgccaacucccugccagcgggcgagca

SEQ ID NO: 207297 - RNA, 32 nt, Homo Sapiens
aacugcaucugacaaagaucuaauccagaauc

SEQ ID NO: 207298 - RNA, 31 nt, Homo Sapiens
ggcuguggccaaccccugccccuugccccac

SEQ ID NO: 207299 - RNA, 32 nt, Homo Sapiens
ugcgaaacuuuuacacugaaaacuauaaaaca

SEQ ID NO: 207300 - RNA, 32 nt, Homo Sapiens
aguggguuacaauccaaaauacucuggagcau

SEQ ID NO: 207301 - RNA, 32 nt, Homo Sapiens
auacuugcuccagccggacgcgguggcucacg

SEQ ID NO: 207302 - RNA, 32 nt, Homo Sapiens
uucccaguguuuuuuauuccuguggggcucac

SEQ ID NO: 207303 - RNA, 32 nt, Homo Sapiens
aucgcaguucuuccuaucagcuucagugaccc

SEQ ID NO: 207304 - RNA, 32 nt, Homo Sapiens
accugaauuaucuauuucaucaaaaaaaaaaa

SEQ ID NO: 207305 - RNA, 32 nt, Homo Sapiens
gccugccgcucugucagacucaccuuugucuu

SEQ ID NO: 207306 - RNA, 32 nt, Homo Sapiens
uuuuaguagagacaggguuuugccauguuggc

SEQ ID NO: 207307 - RNA, 32 nt, Homo Sapiens
gcaccgugacaggcugcccuccccucacaguu

SEQ ID NO: 207308 - RNA, 32 nt, Homo Sapiens
ccccagaggaggagugcaggccugcucccagc

SEQ ID NO: 207309 - RNA, 32 nt, Homo Sapiens
ucaaggugagaauaagaaauagccaacuaguu

SEQ ID NO: 207310 - RNA, 32 nt, Homo Sapiens
cuacaauacuaaccuuuuuuucugaaucugcu

SEQ ID NO: 207311 - RNA, 32 nt, Homo Sapiens
aauagcauauauaugaccaugucugaaauguc

SEQ ID NO: 207312 - RNA, 31 nt, Homo Sapiens
ccaagaacaaagaaguauccauauuaaguuu

SEQ ID NO: 207313 - RNA, 32 nt, Homo Sapiens
cccucagaagugaucauagaucaugaauaaac

SEQ ID NO: 207314 - RNA, 32 nt, Homo Sapiens
cagcuuuucugcaguguggcuugcugaucuac

SEQ ID NO: 207315 - RNA, 32 nt, Homo Sapiens
agacauauugguuagggcccaaacccugaggc

SEQ ID NO: 207316 - RNA, 32 nt, Homo Sapiens
uccugcaugggggcuccuguugcuuugggggc

SEQ ID NO: 207317 - RNA, 32 nt, Homo Sapiens
gagcgcagggagagccggagcggcgagcucca

SEQ ID NO: 207318 - RNA, 32 nt, Homo Sapiens
acugcugaccccccagcuuccacuugaagggg

SEQ ID NO: 207319 - RNA, 32 nt, Homo Sapiens
ccuuuuaauguugugauguugcugagggcaga

SEQ ID NO: 207320 - RNA, 31 nt, Homo Sapiens
ggcacgagggcggggcgcgcggugacagcgc

SEQ ID NO: 207321 - RNA, 32 nt, Homo Sapiens
aacagucuugggcuggauggguuauagagcug

SEQ ID NO: 207322 - RNA, 32 nt, Homo Sapiens
auaaucucgggauacacacacacacacacaua

SEQ ID NO: 207323 - RNA, 32 nt, Homo Sapiens
guccccggagccccggccucauccuccucagc

SEQ ID NO: 207324 - RNA, 32 nt, Homo Sapiens
ggugugugccagcagaugcggaugccaggaag

SEQ ID NO: 207325 - RNA, 32 nt, Homo Sapiens
ugaggcaaagcacuuauugauuagauucccau

SEQ ID NO: 207326 - RNA, 32 nt, Homo Sapiens
agcuaccacuguugaguuuuccugcuuggaaa

SEQ ID NO: 207327 - RNA, 30 nt, Homo Sapiens
ggaaguacugagggcgagggucccgaugag

SEQ ID NO: 207328 - RNA, 32 nt, Homo Sapiens
aggauccggggguggggagggacaagcuaguu

SEQ ID NO: 207329 - RNA, 27 nt, Homo Sapiens
uggggcccuaucuucagcccccucaaa

SEQ ID NO: 207330 - RNA, 32 nt, Homo Sapiens
cugccacacaagcagccguggacacaacgccc

SEQ ID NO: 207331 - RNA, 32 nt, Homo Sapiens
agcccguguucgcuucaaggugccggcgugcu

SEQ ID NO: 207332 - RNA, 32 nt, Homo Sapiens
cccuaccccuggauccuggacugagccauuuc

SEQ ID NO: 207333 - RNA, 32 nt, Homo Sapiens
gucaauccgggugaagacauguacugaugaca

SEQ ID NO: 207334 - RNA, 32 nt, Homo Sapiens
guccagcuaauuuuuguauuuucaguagagac

SEQ ID NO: 207335 - RNA, 32 nt, Homo Sapiens
aagugcccaucccaugggcucggccucacugg

SEQ ID NO: 207336 - RNA, 32 nt, Homo Sapiens
aaacaugcccccgaggcucugugcaguuuggg

SEQ ID NO: 207337 - RNA, 29 nt, Homo Sapiens
uggggccggggacaagcgggccucgcugg

SEQ ID NO: 207338 - RNA, 32 nt, Homo Sapiens
uacuuugauaucaguauuuucuuaaccuuugu

SEQ ID NO: 207339 - RNA, 32 nt, Homo Sapiens
cuuuggagauaaagcaugcucugguccuaaau

SEQ ID NO: 207340 - RNA, 32 nt, Homo Sapiens
agucauuaaaucauuacuuuuacauauauugc

SEQ ID NO: 207341 - RNA, 32 nt, Homo Sapiens
agguugcagugagccgagauuaugccacugua

SEQ ID NO: 207342 - RNA, 32 nt, Homo Sapiens
aggaggagaaaacugcaucauaucuuuccaga

SEQ ID NO: 207343 - RNA, 32 nt, Homo Sapiens
accaacuccccacuccucccuuccccccagcc

SEQ ID NO: 207344 - RNA, 32 nt, Homo Sapiens
gguccauugaguaacacccccaucaccuucuc

SEQ ID NO: 207345 - RNA, 32 nt, Homo Sapiens
ucugucccaucgcuugaauacaguacuccuag

SEQ ID NO: 207346 - RNA, 32 nt, Homo Sapiens
gguggccuuagguccugcaagcaacuguggcc

SEQ ID NO: 207347 - RNA, 32 nt, Homo Sapiens
acagccccugucagguggccucucccaaagug

SEQ ID NO: 207348 - RNA, 32 nt, Homo Sapiens
uuuugaccuugaugauuuuuuguuuccacugu

SEQ ID NO: 207349 - RNA, 32 nt, Homo Sapiens
ggucgggauuugcccugggggaggaagagagg

SEQ ID NO: 207350 - RNA, 32 nt, Homo Sapiens
cagucggugacagauuucauucccaauaacag

SEQ ID NO: 207351 - RNA, 32 nt, Homo Sapiens
cagaaacuggacucuuaauaaaaugucucuua

SEQ ID NO: 207352 - RNA, 32 nt, Homo Sapiens
acaagugagauaagguauuuuuaucaauauga

SEQ ID NO: 207353 - RNA, 32 nt, Homo Sapiens
aagagggauucugguuacguucaguuaagcag

SEQ ID NO: 207354 - RNA, 32 nt, Homo Sapiens
gggggccaaacacauggaugguggaguacggc

SEQ ID NO: 207355 - RNA, 32 nt, Homo Sapiens
uggccaaggccugaaggccccggagugcacca

SEQ ID NO: 207356 - RNA, 32 nt, Homo Sapiens
gcaccagugaaaggcuuugagaaggacguggg

SEQ ID NO: 207357 - RNA, 32 nt, Homo Sapiens
cgggaagucagggaccccggagggaccagcug

SEQ ID NO: 207358 - RNA, 32 nt, Homo Sapiens
gacauuugaagaaguggccauguauuuuuccc

SEQ ID NO: 207359 - RNA, 32 nt, Homo Sapiens
cacacugagcuccuuuguuccucccccuccag

SEQ ID NO: 207360 - RNA, 32 nt, Homo Sapiens
acuagugccuaaauguaguaaaggcugcuuca

SEQ ID NO: 207361 - RNA, 32 nt, Homo Sapiens
gcucuccgcccggggccggcccggggacagug

SEQ ID NO: 207362 - RNA, 31 nt, Homo Sapiens
ccagccaugcuuugggcacucuggccaaggu

SEQ ID NO: 207363 - RNA, 32 nt, Homo Sapiens
ccccacgcgucgugucgccgggaagccgggcg

SEQ ID NO: 207364 - RNA, 32 nt, Homo Sapiens
cagcuccucuuccagagcugccucugccuuua

SEQ ID NO: 207365 - RNA, 32 nt, Homo Sapiens
ccagggagucggagauugcagugagcugagau

SEQ ID NO: 207366 - RNA, 32 nt, Homo Sapiens
uguacaucaauggcagaaucauccagcgaauc

SEQ ID NO: 207367 - RNA, 32 nt, Homo Sapiens
gagcgcaagaugcgggagcagcagaaggagca

SEQ ID NO: 207368 - RNA, 32 nt, Homo Sapiens
auguagaauuguauggaacucaaauuuaaacc

SEQ ID NO: 207369 - RNA, 28 nt, Homo Sapiens
aaaaagagcugguugaggaugacacagu

SEQ ID NO: 207370 - RNA, 32 nt, Homo Sapiens
gcagcuaccccagagaauaguguuaugagugu

SEQ ID NO: 207371 - RNA, 32 nt, Homo Sapiens
agaucuggggggaguugguacagcucuguucu

SEQ ID NO: 207372 - RNA, 32 nt, Homo Sapiens
aggggaagcacuuuaaagucugagccuuuaga

SEQ ID NO: 207373 - RNA, 32 nt, Homo Sapiens
aagacagacucuggacagcugcacggcuugug

SEQ ID NO: 207374 - RNA, 32 nt, Homo Sapiens
uccgggggcgcacggcagcugcagcgguggcg

SEQ ID NO: 207375 - RNA, 32 nt, Homo Sapiens
aggcgcggugacucacaccuguaauccgagua

SEQ ID NO: 207376 - RNA, 32 nt, Homo Sapiens
gcgcugggcgguguggagcgggcccgccaccc

SEQ ID NO: 207377 - RNA, 32 nt, Homo Sapiens
gguuccuuaagcauagggaacuuuguacuuua

SEQ ID NO: 207378 - RNA, 32 nt, Homo Sapiens
uacaucguagcuagaagaaaaauguaccuuaa

SEQ ID NO: 207379 - RNA, 32 nt, Homo Sapiens
cccagggucuaaaauuacauauuagaggggaa

SEQ ID NO: 207380 - RNA, 32 nt, Homo Sapiens
ucgccgccccgcugucuccgccgcccgccaug

SEQ ID NO: 207381 - RNA, 32 nt, Homo Sapiens
uugcagguuaguaggucuucaaggacaaaucu

SEQ ID NO: 207382 - RNA, 32 nt, Homo Sapiens
acaccuugagccuuaaaacggugcugcuggga

SEQ ID NO: 207383 - RNA, 32 nt, Homo Sapiens
ucaccugaccucugaagagcugaguacucagg

SEQ ID NO: 207384 - RNA, 32 nt, Homo Sapiens
gaaggaaaacaauauguagaaaguauuuuaga

SEQ ID NO: 207385 - RNA, 32 nt, Homo Sapiens
cauggaaaaugugggaauuaagcaaaaucaag

SEQ ID NO: 207386 - RNA, 32 nt, Homo Sapiens
ggacagcauccugccuuuuggccauccccuuc

SEQ ID NO: 207387 - RNA, 32 nt, Homo Sapiens
gccccugaugggagcccuccuggccucacuga

SEQ ID NO: 207388 - RNA, 32 nt, Homo Sapiens
guggccaaaguacccuccaggugugaagaguu

SEQ ID NO: 207389 - RNA, 32 nt, Homo Sapiens
ggaacuggucuaagaacacugucugcacauga

SEQ ID NO: 207390 - RNA, 32 nt, Homo Sapiens
acguaggucggcggcccagcucggcgcugcgg

SEQ ID NO: 207391 - RNA, 30 nt, Homo Sapiens
uguggaggaggugguggugguauggugagg

SEQ ID NO: 207392 - RNA, 32 nt, Homo Sapiens
ccauuucaaguacagaaauuauagagacuaca

SEQ ID NO: 207393 - RNA, 32 nt, Homo Sapiens
ccaccgagcugccugccauggggcuggggcug

SEQ ID NO: 207394 - RNA, 32 nt, Homo Sapiens
aggggaccucgcgagcagacgcgcgccagcga

SEQ ID NO: 207395 - RNA, 32 nt, Homo Sapiens
guccaagucugugcccuaagcugggaccccgc

SEQ ID NO: 207396 - RNA, 32 nt, Homo Sapiens
ggggcgcuucucgggcgggugaucccuaacag

SEQ ID NO: 207397 - RNA, 32 nt, Homo Sapiens
aggaggcucuuugggaaggagugucgcccggu

SEQ ID NO: 207398 - RNA, 32 nt, Homo Sapiens
cagcagaagaaggaugugcggaugcugcgcuu

SEQ ID NO: 207399 - RNA, 32 nt, Homo Sapiens
aguuuaagugauuugcagaaauauguaguauu

SEQ ID NO: 207400 - RNA, 32 nt, Homo Sapiens
agccuucccuccccaaaauucuugauccaaga

SEQ ID NO: 207401 - RNA, 32 nt, Homo Sapiens
ucuagcucacauaaagagaguguuauauaaaa

SEQ ID NO: 207402 - RNA, 32 nt, Homo Sapiens
ccauugagcuaaaaaugcucaacuucugcuuu

SEQ ID NO: 207403 - RNA, 32 nt, Homo Sapiens
gcagguguugguccucaggagcuccaaccccg

SEQ ID NO: 207404 - RNA, 32 nt, Homo Sapiens
cccagagcuagcgccuguggcucccgggcugg

SEQ ID NO: 207405 - RNA, 32 nt, Homo Sapiens
aauaguuguaaaucuacuugacacuguaauaa

SEQ ID NO: 207406 - RNA, 32 nt, Homo Sapiens
cgcccuggaagccggcggcccaagcccgacuu

SEQ ID NO: 207407 - RNA, 32 nt, Homo Sapiens
accuuuuauuauuuuuuuuuuacacgacuuuu

SEQ ID NO: 207408 - RNA, 32 nt, Homo Sapiens
gcccggaaugucugggucuagcggguauugcu

SEQ ID NO: 207409 - RNA, 32 nt, Homo Sapiens
gagguugcagugagccgagaucgagccacugc

SEQ ID NO: 207410 - RNA, 32 nt, Homo Sapiens
ucccuuuucaggacuagggcuuucucauggag

SEQ ID NO: 207411 - RNA, 32 nt, Homo Sapiens
uagauggagcuguccggccccggagaggggga

SEQ ID NO: 207412 - RNA, 29 nt, Homo Sapiens
gcuuuuaugaagauuaaaucgagcaucgu

SEQ ID NO: 207413 - RNA, 32 nt, Homo Sapiens
cugaauuuaugagguggauuccauucaagcau

SEQ ID NO: 207414 - RNA, 32 nt, Homo Sapiens
ccuucgggacaaagaucgcgagauuuaauggc

SEQ ID NO: 207415 - RNA, 32 nt, Homo Sapiens
cccugcaggaacgcgccgaggucucccucacc

SEQ ID NO: 207416 - RNA, 32 nt, Homo Sapiens
aacuuugaguccauaauaaaucuuggaaauuu

SEQ ID NO: 207417 - RNA, 32 nt, Homo Sapiens
uccuucuccguuauuuuccccacccccagauu

SEQ ID NO: 207418 - RNA, 32 nt, Homo Sapiens
cggaaaggggagaggaaggcaggcccucccga

SEQ ID NO: 207419 - RNA, 32 nt, Homo Sapiens
gaccccgcccuuuuuuguuccccuccaggaug

SEQ ID NO: 207420 - RNA, 32 nt, Homo Sapiens
gccaggaguggauggagcugccuuucagaccc

SEQ ID NO: 207421 - RNA, 32 nt, Homo Sapiens
agagcgucucgugugugcuagacgcaccccua

SEQ ID NO: 207422 - RNA, 32 nt, Homo Sapiens
cggcccagagggugggcgcggggcugccucua

SEQ ID NO: 207423 - RNA, 32 nt, Homo Sapiens
ccugccugggggauugggucgugaccugugug

SEQ ID NO: 207424 - RNA, 32 nt, Homo Sapiens
uucuuuucuaauagaacaaccaaaaaaggcuu

SEQ ID NO: 207425 - RNA, 32 nt, Homo Sapiens
ccuagaaaacagcccugacaaaaaccacuuuu

SEQ ID NO: 207426 - RNA, 32 nt, Homo Sapiens
ggcuucggcgggggcgggaggagcugcccgag

SEQ ID NO: 207427 - RNA, 32 nt, Homo Sapiens
cauggugccagaggcucuggcuguccucacag

SEQ ID NO: 207428 - RNA, 32 nt, Homo Sapiens
cuacaggaaguacccugggggcucagcugaga

SEQ ID NO: 207429 - RNA, 32 nt, Homo Sapiens
cuuuaauuuuaacugugauauaggcacugaau

SEQ ID NO: 207430 - RNA, 32 nt, Homo Sapiens
uaguuuguagguaucauuuguuuucuaugagg

SEQ ID NO: 207431 - RNA, 32 nt, Homo Sapiens
ugccggggcaggggcggaggcggaggcagagg

SEQ ID NO: 207432 - RNA, 32 nt, Homo Sapiens
cccaagacagagacagugagccagguggcugg

SEQ ID NO: 207433 - RNA, 32 nt, Homo Sapiens
uguggcugucagcaggaagcaacgaagggaaa

SEQ ID NO: 207434 - RNA, 32 nt, Homo Sapiens
cuaccuaucucuucuuuuuuauccaucugccc

SEQ ID NO: 207435 - RNA, 32 nt, Homo Sapiens
gcugccuggcugccuccuggaguggggggagu

SEQ ID NO: 207436 - RNA, 32 nt, Homo Sapiens
cgcccccucccucucccuugagaagcugaguc

SEQ ID NO: 207437 - RNA, 32 nt, Homo Sapiens
uauuauuauuuuuucuguuugaauuccuuuaa

SEQ ID NO: 207438 - RNA, 32 nt, Homo Sapiens
cacccccaagcgugcagcucugucccagccuu

SEQ ID NO: 207439 - RNA, 32 nt, Homo Sapiens
gcuacccggggaggaggaggcgcaggagugag

SEQ ID NO: 207440 - RNA, 32 nt, Homo Sapiens
gacgcuuccuucccuccccgcaaccaccccag

SEQ ID NO: 207441 - RNA, 32 nt, Homo Sapiens
gcagaggccccauuggagacacgugaauggcg

SEQ ID NO: 207442 - RNA, 32 nt, Homo Sapiens
guagaaucagcggcgagccuguugaaagaacc

SEQ ID NO: 207443 - RNA, 32 nt, Homo Sapiens
accugcucauugauuuauugaagauuuuauuc

SEQ ID NO: 207444 - RNA, 32 nt, Homo Sapiens
uccucucgucccaaggcaaaggugaugcccug

SEQ ID NO: 207445 - RNA, 32 nt, Homo Sapiens
cuaaaaccaauuuuuccaacaacaacgauuuc

SEQ ID NO: 207446 - RNA, 32 nt, Homo Sapiens
cccagucuguugaguuaguuaaguuggguuaa

SEQ ID NO: 207447 - RNA, 32 nt, Homo Sapiens
ccuucucugaagagaucuugauuccuuuggga

SEQ ID NO: 207448 - RNA, 32 nt, Homo Sapiens
ccuggcuacuagagagguugaggugggaggau

SEQ ID NO: 207449 - RNA, 32 nt, Homo Sapiens
ucauggguuuuuuuuucuucuuuuuagcugau

SEQ ID NO: 207450 - RNA, 32 nt, Homo Sapiens
ugaggugaaugagugaggaagagcagaguaug

SEQ ID NO: 207451 - RNA, 32 nt, Homo Sapiens
ggaaggaucugugccuggacaguggcagaacc

SEQ ID NO: 207452 - RNA, 32 nt, Homo Sapiens
cuguaacaaaaaugcaauggccugggugguuu

SEQ ID NO: 207453 - RNA, 32 nt, Homo Sapiens
auuuagaaaaggaaaaguuuaccugcaaagag

SEQ ID NO: 207454 - RNA, 32 nt, Homo Sapiens
caaggauguccacgguaccuuccuccugaaac

SEQ ID NO: 207455 - RNA, 32 nt, Homo Sapiens
ggcggggccggcaugacgggcuucucgggggc

SEQ ID NO: 207456 - RNA, 32 nt, Homo Sapiens
guuuuuauuuuuguuuuuugagaugaagucuc

SEQ ID NO: 207457 - RNA, 32 nt, Homo Sapiens
gagaguuagaucugguuucaaaacccaagacu

SEQ ID NO: 207458 - RNA, 30 nt, Homo Sapiens
caauaccugcuaauggugugaugucauuuu

SEQ ID NO: 207459 - RNA, 32 nt, Homo Sapiens
ccccggaagaaccuuugggguauuaagaguac

SEQ ID NO: 207460 - RNA, 32 nt, Homo Sapiens
uacccaacaaaguggcugccaggccuucucag

SEQ ID NO: 207461 - RNA, 32 nt, Homo Sapiens
cuuacagauuguggagagcugcagccaacucc

SEQ ID NO: 207462 - RNA, 32 nt, Homo Sapiens
gcaccaccagaauaaacuugccgaguuuaccu

SEQ ID NO: 207463 - RNA, 32 nt, Homo Sapiens
aagcacagccucggggauggggagggaaagac

SEQ ID NO: 207464 - RNA, 32 nt, Homo Sapiens
aagagguauguggcccauaguacacaugucac

SEQ ID NO: 207465 - RNA, 32 nt, Homo Sapiens
gccaggaggaggaggagacaccuagagccugc

SEQ ID NO: 207466 - RNA, 30 nt, Homo Sapiens
gccgugcccugcucagccgugcccugcucc

SEQ ID NO: 207467 - RNA, 32 nt, Homo Sapiens
caggaaagugaauaaacuuaauugagaauguc

SEQ ID NO: 207468 - RNA, 32 nt, Homo Sapiens
auucuguaacuaaaaaaguaccauuagcagac

SEQ ID NO: 207469 - RNA, 32 nt, Homo Sapiens
cucuuccuuccaagauuaccuccggagaacac

SEQ ID NO: 207470 - RNA, 28 nt, Homo Sapiens
auguagaugguauaacauuugaaaauau

SEQ ID NO: 207471 - RNA, 32 nt, Homo Sapiens
ggagccgcgccgcgcgcagugucugcagugcc

SEQ ID NO: 207472 - RNA, 32 nt, Homo Sapiens
ccacuuugacauuuugcuuaggaugucaguag

SEQ ID NO: 207473 - RNA, 32 nt, Homo Sapiens
aucauggaaaauuuuuguuguccaggcaaaua

SEQ ID NO: 207474 - RNA, 32 nt, Homo Sapiens
cgcuguuuucuuuuacaaagggaaaucuaagu

SEQ ID NO: 207475 - RNA, 29 nt, Homo Sapiens
gcuuuuaaugaaaauauucaaucucagau

SEQ ID NO: 207476 - RNA, 32 nt, Homo Sapiens
acggcccuaggagcgcggggcccacucgacgg

SEQ ID NO: 207477 - RNA, 32 nt, Homo Sapiens
cacuuuccaccaagcgcccacccaggcugagg

SEQ ID NO: 207478 - RNA, 32 nt, Homo Sapiens
guggccccaagcaucgcggagccuggguggag

SEQ ID NO: 207479 - RNA, 32 nt, Homo Sapiens
ucuaacagcaauaaagagguguccuuguaaaa

SEQ ID NO: 207480 - RNA, 32 nt, Homo Sapiens
aaaguaugccccaccuaucuuugguauaugau

SEQ ID NO: 207481 - RNA, 32 nt, Homo Sapiens
augggacgggccagcccugcuccugagccagc

SEQ ID NO: 207482 - RNA, 32 nt, Homo Sapiens
cucugcaggagcuucuccugccgccagccagg

SEQ ID NO: 207483 - RNA, 32 nt, Homo Sapiens
augugguauguaugguccccuauauuagauag

SEQ ID NO: 207484 - RNA, 31 nt, Homo Sapiens
ggggcucaagccacaucgucauuugugguua

SEQ ID NO: 207485 - RNA, 32 nt, Homo Sapiens
acucacuaauuaucaacuuaugugcuaucaga

SEQ ID NO: 207486 - RNA, 32 nt, Homo Sapiens
agaaggaagccauagugucacuuccacacaau

SEQ ID NO: 207487 - RNA, 32 nt, Homo Sapiens
ucaaaaacagaagcuuccccgacuugugaguc

SEQ ID NO: 207488 - RNA, 32 nt, Homo Sapiens
acgcgcgccugccuccucuccccaggccugag

SEQ ID NO: 207489 - RNA, 32 nt, Homo Sapiens
aagccuccaaggagugggcggcugggagaggu

SEQ ID NO: 207490 - RNA, 32 nt, Homo Sapiens
cccucccauuuucuccucaguucacuccaacc

SEQ ID NO: 207491 - RNA, 29 nt, Homo Sapiens
ugcccuuuaacuuucagaggcaauaggua

SEQ ID NO: 207492 - RNA, 32 nt, Homo Sapiens
augaucucagcucacugcaaucuccaccuccu

SEQ ID NO: 207493 - RNA, 32 nt, Homo Sapiens
uuacggauccugaaccguggucuugggcaccu

SEQ ID NO: 207494 - RNA, 32 nt, Homo Sapiens
cuuguuuagccugcuuuacauuguagguggcc

SEQ ID NO: 207495 - RNA, 32 nt, Homo Sapiens
cuauguauuuaguaguaucuuauauuuguaua

SEQ ID NO: 207496 - RNA, 32 nt, Homo Sapiens
caauggaauuaacgugauauaaaauguuugau

SEQ ID NO: 207497 - RNA, 32 nt, Homo Sapiens
uucgagaccagccugcccaaaaaggugaaacc

SEQ ID NO: 207498 - RNA, 32 nt, Homo Sapiens
guccugcggcgcccaagccuggguucucccca

SEQ ID NO: 207499 - RNA, 32 nt, Homo Sapiens
uaacaucuuggcaugcagaaaauaauuuuggc

SEQ ID NO: 207500 - RNA, 32 nt, Homo Sapiens
cgagcuacucugcucucuauaccuguucucua

SEQ ID NO: 207501 - RNA, 32 nt, Homo Sapiens
gcccugccaagcuuccuccccucccuuccuag

SEQ ID NO: 207502 - RNA, 32 nt, Homo Sapiens
uugugcacagagagacccaguuccugcccucu

SEQ ID NO: 207503 - RNA, 32 nt, Homo Sapiens
auucauaauacuuaucucugaaaaugucuuug

SEQ ID NO: 207504 - RNA, 32 nt, Homo Sapiens
caauacucacccuguuaugucuugcuaauuua

SEQ ID NO: 207505 - RNA, 32 nt, Homo Sapiens
cuccgggaacuuccccugcuccuuccaggaac

SEQ ID NO: 207506 - RNA, 32 nt, Homo Sapiens
augcugccgcgagcugccccagcaguccgggc

SEQ ID NO: 207507 - RNA, 32 nt, Homo Sapiens
caaaguagcugauguauuggacguucuaaaug

SEQ ID NO: 207508 - RNA, 32 nt, Homo Sapiens
ccugugguugauggaaauucacaaagugaggc

SEQ ID NO: 207509 - RNA, 32 nt, Homo Sapiens
augggcggcuccugcgcccuggaccggcccgc

SEQ ID NO: 207510 - RNA, 32 nt, Homo Sapiens
uauuuuaugucaccuagaucuaauucugaaaa

SEQ ID NO: 207511 - RNA, 32 nt, Homo Sapiens
gcucugaugggaggaauugcucugccauccuu

SEQ ID NO: 207512 - RNA, 32 nt, Homo Sapiens
uggcucagggggccaccugugcuccccccgcu

SEQ ID NO: 207513 - RNA, 32 nt, Homo Sapiens
uuguuuuuuacuacuuugaucacuuaacuuau

SEQ ID NO: 207514 - RNA, 32 nt, Homo Sapiens
gguuuccccuuggagacaauccugcguuugcc

SEQ ID NO: 207515 - RNA, 32 nt, Homo Sapiens
augaggcaacauuucuuaggcuuguuugcuac

SEQ ID NO: 207516 - RNA, 32 nt, Homo Sapiens
uaguccccgcccuccgcccggcccggagcuua

SEQ ID NO: 207517 - RNA, 32 nt, Homo Sapiens
acucccccugugucagugcucugcucucaccc

SEQ ID NO: 207518 - RNA, 32 nt, Homo Sapiens
gccgcugccugccauugacaauguugcuggga

SEQ ID NO: 207519 - RNA, 32 nt, Homo Sapiens
uucccucagguuuuccucuuccccacugcggc

SEQ ID NO: 207520 - RNA, 32 nt, Homo Sapiens
gccugccccucccccagcuguuuuuaaugaaa

SEQ ID NO: 207521 - RNA, 32 nt, Homo Sapiens
uuacugaaaaggaagagucugaugauuaguua

SEQ ID NO: 207522 - RNA, 32 nt, Homo Sapiens
ugguacuagcuaagaaauaauucuauaauuga

SEQ ID NO: 207523 - RNA, 32 nt, Homo Sapiens
gugcacccaagcauuaugggaacaggaacuca

SEQ ID NO: 207524 - RNA, 32 nt, Homo Sapiens
aauaaaucaagaugaaguacugcccaaguuaa

SEQ ID NO: 207525 - RNA, 32 nt, Homo Sapiens
gauuucgccauguuggccaggcuggucucgaa

SEQ ID NO: 207526 - RNA, 32 nt, Homo Sapiens
gugagauaucugggucucuucuuuggaaucug

SEQ ID NO: 207527 - RNA, 32 nt, Homo Sapiens
agcaguuccagaaggaccauucucaccugugu

SEQ ID NO: 207528 - RNA, 32 nt, Homo Sapiens
aaggccccacugauaagguaacauuugagcaa

SEQ ID NO: 207529 - RNA, 32 nt, Homo Sapiens
guaugauauauucauauauacaugcagucugc

SEQ ID NO: 207530 - RNA, 32 nt, Homo Sapiens
gaagugccgcgucuuggugggucuggagcugg

SEQ ID NO: 207531 - RNA, 32 nt, Homo Sapiens
ggggucuccaaguuuggagauugagcagauga

SEQ ID NO: 207532 - RNA, 32 nt, Homo Sapiens
uccugagccugaggguguauguguguccagcu

SEQ ID NO: 207533 - RNA, 32 nt, Homo Sapiens
accugcauaaaaauggaccccugcacaggugg

SEQ ID NO: 207534 - RNA, 32 nt, Homo Sapiens
cucccugcccuucuccuccuuccuggcuggga

SEQ ID NO: 207535 - RNA, 32 nt, Homo Sapiens
gauguuacagacuuacguauacccuuguauac

SEQ ID NO: 207536 - RNA, 32 nt, Homo Sapiens
guccacggccccacagucccaacgacugccuc

SEQ ID NO: 207537 - RNA, 28 nt, Homo Sapiens
caacauauauaaaaacaaaacaacuggu

SEQ ID NO: 207538 - RNA, 32 nt, Homo Sapiens
ugcuuuuaauuguauuuuauccaauuacauuu

SEQ ID NO: 207539 - RNA, 32 nt, Homo Sapiens
uggcucccucaauaaacugugugggaaccugg

SEQ ID NO: 207540 - RNA, 32 nt, Homo Sapiens
uggggaaaaaauauuuacuggaaaagacuagc

SEQ ID NO: 207541 - RNA, 32 nt, Homo Sapiens
uugccaagggacugaggccauuggcaggcuua

SEQ ID NO: 207542 - RNA, 32 nt, Homo Sapiens
gacagaucuugacaccaauacaggggcuggau

SEQ ID NO: 207543 - RNA, 32 nt, Homo Sapiens
auagguaagggggacaucaugucuuuacuuag

SEQ ID NO: 207544 - RNA, 32 nt, Homo Sapiens
uacacaacugucuacauagcaugacaguagca

SEQ ID NO: 207545 - RNA, 32 nt, Homo Sapiens
aucacagaauaaacuuuuuuauuuuuuaacaa

SEQ ID NO: 207546 - RNA, 32 nt, Homo Sapiens
cagacuggaauuuuccucugcuaccucuugug

SEQ ID NO: 207547 - RNA, 32 nt, Homo Sapiens
gggcaguucaggaugaucugucuuaagaucga

SEQ ID NO: 207548 - RNA, 32 nt, Homo Sapiens
gugaacaccaaaagaagcauuuucucaacaaa

SEQ ID NO: 207549 - RNA, 32 nt, Homo Sapiens
uggcagguggaggugucaggcugcuggcgccu

SEQ ID NO: 207550 - RNA, 32 nt, Homo Sapiens
guuccaaguaaaugucuuaauacaguuucaau

SEQ ID NO: 207551 - RNA, 32 nt, Homo Sapiens
gaaacagaauccauccugucuguuggguaacc

SEQ ID NO: 207552 - RNA, 32 nt, Homo Sapiens
ccuugggcucucagcccuccugcuucuucugu

SEQ ID NO: 207553 - RNA, 32 nt, Homo Sapiens
ucuggccacagugaguuaggggcgucggagcg

SEQ ID NO: 207554 - RNA, 32 nt, Homo Sapiens
ccaaagugcugggauuacaggggagccacugc

SEQ ID NO: 207555 - RNA, 32 nt, Homo Sapiens
agaggggccuggggccugugucugagacccgg

SEQ ID NO: 207556 - RNA, 32 nt, Homo Sapiens
cauuaauugccagcucguuuccuucuuugaca

SEQ ID NO: 207557 - RNA, 32 nt, Homo Sapiens
cagcguagcauuaagggacguagcaggucuuc

SEQ ID NO: 207558 - RNA, 32 nt, Homo Sapiens
gugagggcgggugggcgccggccggccuggaa

SEQ ID NO: 207559 - RNA, 32 nt, Homo Sapiens
cauguucauuuucucuacagauuuauguaucg

SEQ ID NO: 207560 - RNA, 32 nt, Homo Sapiens
cuauggacagauguaaaagaaacuauacauca

SEQ ID NO: 207561 - RNA, 32 nt, Homo Sapiens
uuuuauauauaugauacuauagauaaaauccu

SEQ ID NO: 207562 - RNA, 32 nt, Homo Sapiens
gggagcccggcggcucugggaagcucacuccu

SEQ ID NO: 207563 - RNA, 32 nt, Homo Sapiens
gggguguccggccucuggcccgccccggagca

SEQ ID NO: 207564 - RNA, 32 nt, Homo Sapiens
aacuagaaaaggaaguuuccagaaaagaaguu

SEQ ID NO: 207565 - RNA, 32 nt, Homo Sapiens
auuaaaguauuuccuuuuuuuaauucaagaaa

SEQ ID NO: 207566 - RNA, 32 nt, Homo Sapiens
ccuucuccauucucccaaccucuugggccugg

SEQ ID NO: 207567 - RNA, 32 nt, Homo Sapiens
acaauacauuuuaaagucagaguucauguucc

SEQ ID NO: 207568 - RNA, 32 nt, Homo Sapiens
ugccuaauauuuuuaucuaccuccgacuuuuu

SEQ ID NO: 207569 - RNA, 32 nt, Homo Sapiens
uaguaaaaaauauucauuaugugaaauucaaa

SEQ ID NO: 207570 - RNA, 32 nt, Homo Sapiens
gacgcgucaggagaagggagcacuggcuuugc

SEQ ID NO: 207571 - RNA, 32 nt, Homo Sapiens
caguucugugaaaggcggacgcagcaggacag

SEQ ID NO: 207572 - RNA, 32 nt, Homo Sapiens
gcagccucggccucuucuggguuccaggaggg

SEQ ID NO: 207573 - RNA, 32 nt, Homo Sapiens
ugcucuuguaacacugagauucuuggugguau

SEQ ID NO: 207574 - RNA, 32 nt, Homo Sapiens
cagacuuuaagugauaguugcaauauccuugu

SEQ ID NO: 207575 - RNA, 32 nt, Homo Sapiens
ugugugugcgcgcgcguguacguguggcccca

SEQ ID NO: 207576 - RNA, 32 nt, Homo Sapiens
aagcugcaucgugcaaccucuuuggugccagu

SEQ ID NO: 207577 - RNA, 32 nt, Homo Sapiens
auuuuuauuguuaaagacagcuuuuuuauucc

SEQ ID NO: 207578 - RNA, 32 nt, Homo Sapiens
accaggcuuuuauaaacuuuucuagaagaaaa

SEQ ID NO: 207579 - RNA, 32 nt, Homo Sapiens
uuacaguagcucucagaaauuauacgcugagu

SEQ ID NO: 207580 - RNA, 32 nt, Homo Sapiens
aauagaaaggggaggaggagcuuaaugccgug

SEQ ID NO: 207581 - RNA, 29 nt, Homo Sapiens
aagcauggagcaacaggaucagagcauga

SEQ ID NO: 207582 - RNA, 32 nt, Homo Sapiens
agugaccuugccuccuucuccuugccaacuuu

SEQ ID NO: 207583 - RNA, 32 nt, Homo Sapiens
auugguuuucuuucuuuuuccuuggauuaaau

SEQ ID NO: 207584 - RNA, 32 nt, Homo Sapiens
cgccccauccucaccgcgaacgccacugugac

SEQ ID NO: 207585 - RNA, 32 nt, Homo Sapiens
agucccuuuuugcuuucuuuuacgaccacaug

SEQ ID NO: 207586 - RNA, 32 nt, Homo Sapiens
cgaaaucgccgccgcucucacaauggcuuggg

SEQ ID NO: 207587 - RNA, 32 nt, Homo Sapiens
uggcccgaagcagucguauuccucgaccaagu

SEQ ID NO: 207588 - RNA, 32 nt, Homo Sapiens
cucacauacaggcaagaggcacugccgggucc

SEQ ID NO: 207589 - RNA, 32 nt, Homo Sapiens
gaccucaugggaccagacuccucaggaauguc

SEQ ID NO: 207590 - RNA, 32 nt, Homo Sapiens
acggguggcaggaagacaagcuaugucugcuc

SEQ ID NO: 207591 - RNA, 32 nt, Homo Sapiens
uaacaaaagcuacagcuccaggagcccagcgc

SEQ ID NO: 207592 - RNA, 31 nt, Homo Sapiens
aggccgggcccgggcaccugagggcuucucc

SEQ ID NO: 207593 - RNA, 32 nt, Homo Sapiens
caccccggcuccugggcuuugauggucuggug

SEQ ID NO: 207594 - RNA, 32 nt, Homo Sapiens
agcgagaaggaagauucaaacaaccaacccug

SEQ ID NO: 207595 - RNA, 32 nt, Homo Sapiens
uggcgcgcggugaggagagcgcggcgcccccu

SEQ ID NO: 207596 - RNA, 32 nt, Homo Sapiens
uuauuuugacccaaaucagggauuuccccagu

SEQ ID NO: 207597 - RNA, 32 nt, Homo Sapiens
caguauuuugacuuauuuauccugcuugaaag

SEQ ID NO: 207598 - RNA, 32 nt, Homo Sapiens
auccaaagcugcucucgauaauagucaacauu

SEQ ID NO: 207599 - RNA, 32 nt, Homo Sapiens
cuuuacucccauuuggaauauagaauuaggau

SEQ ID NO: 207600 - RNA, 32 nt, Homo Sapiens
auucuuuccuuccugauuugcccuaggagcag

SEQ ID NO: 207601 - RNA, 32 nt, Homo Sapiens
uaccagugucggccuccacugaugcuggugcu

SEQ ID NO: 207602 - RNA, 32 nt, Homo Sapiens
cuccacaucuauggguucugcaucuguggauu

SEQ ID NO: 207603 - RNA, 32 nt, Homo Sapiens
uccacgaccugccagcuguuuccaggaucuuc

SEQ ID NO: 207604 - RNA, 32 nt, Homo Sapiens
gcugaugacgcagucggcgcggcggcccuagc

SEQ ID NO: 207605 - RNA, 32 nt, Homo Sapiens
auuuugugguuaaaacuggauuuuaaauuuaa

SEQ ID NO: 207606 - RNA, 32 nt, Homo Sapiens
uggcgggggcucuggagauggcgggggcugcg

SEQ ID NO: 207607 - RNA, 32 nt, Homo Sapiens
agagaggccaacagccuuccccugccuuggau

SEQ ID NO: 207608 - RNA, 32 nt, Homo Sapiens
ggauacaaaaucacacuguguaccaaagcauc

SEQ ID NO: 207609 - RNA, 32 nt, Homo Sapiens
ggccuccuggcugcaccugccgcagugcacag

SEQ ID NO: 207610 - RNA, 32 nt, Homo Sapiens
ccuccaggccacgugggugcugcgggccaagc

SEQ ID NO: 207611 - RNA, 32 nt, Homo Sapiens
accccagaugcaaugcgaucacagggucauua

SEQ ID NO: 207612 - RNA, 32 nt, Homo Sapiens
uguaaauagaaagugcguacaguuagaacguc

SEQ ID NO: 207613 - RNA, 32 nt, Homo Sapiens
gccauccgcugucaggaccauuagguaaaaac

SEQ ID NO: 207614 - RNA, 32 nt, Homo Sapiens
agugguaaugaaacauuaacuguaacagaaau

SEQ ID NO: 207615 - RNA, 32 nt, Homo Sapiens
uuacggggugggggcgggggugaggguaggug

SEQ ID NO: 207616 - RNA, 32 nt, Homo Sapiens
gauggcaguggccugauccgggcccguuggcg

SEQ ID NO: 207617 - RNA, 32 nt, Homo Sapiens
agcaccguggccugggauuccaucuggagcug

SEQ ID NO: 207618 - RNA, 32 nt, Homo Sapiens
aacuucauaaaacuaaaauacuguaguaaauu

SEQ ID NO: 207619 - RNA, 32 nt, Homo Sapiens
ugugaagaaaauuuuagccagagcucagccca

SEQ ID NO: 207620 - RNA, 32 nt, Homo Sapiens
aacugcuuggaucauguaugguaaauucuguc

SEQ ID NO: 207621 - RNA, 32 nt, Homo Sapiens
ggcuuccugccugguuuuucucuucucacauu

SEQ ID NO: 207622 - RNA, 32 nt, Homo Sapiens
uuuaacucauuucuccuuagccccgagauuac

SEQ ID NO: 207623 - RNA, 32 nt, Homo Sapiens
ucgaugagggggccccaggcagaccuuauaug

SEQ ID NO: 207624 - RNA, 32 nt, Homo Sapiens
uauaaagcugaauacaaauugguuugggggga

SEQ ID NO: 207625 - RNA, 32 nt, Homo Sapiens
gauggcaaaaugcugaaaguuuuuacacuguc

SEQ ID NO: 207626 - RNA, 32 nt, Homo Sapiens
uucugauuccuaacaaccaacaauaaucauaa

SEQ ID NO: 207627 - RNA, 32 nt, Homo Sapiens
aaccaaaaucauauuucauauuuuacgcucga

SEQ ID NO: 207628 - RNA, 32 nt, Homo Sapiens
cccagccucucaccggccccagcugaccucgu

SEQ ID NO: 207629 - RNA, 32 nt, Homo Sapiens
ccuccacccaccccugacuccuccuuaugaag

SEQ ID NO: 207630 - RNA, 32 nt, Homo Sapiens
ggucgggccccgggguucugcggcuguuaggg

SEQ ID NO: 207631 - RNA, 32 nt, Homo Sapiens
auccccacgugucaagggugggaccaggugga

SEQ ID NO: 207632 - RNA, 32 nt, Homo Sapiens
ggcaaccagaaguuaaggagguaaaguucuuc

SEQ ID NO: 207633 - RNA, 32 nt, Homo Sapiens
uguuuuuaucccaaauucauguuuuaaggccu

SEQ ID NO: 207634 - RNA, 32 nt, Homo Sapiens
ucccucccuaaaauggcuuuaguuuccacaaa

SEQ ID NO: 207635 - RNA, 32 nt, Homo Sapiens
accuuugaaaauauuauaacuggauauuucuu

SEQ ID NO: 207636 - RNA, 32 nt, Homo Sapiens
cuuuuuuuuuuuuuuuuuuuuagcccagaugc

SEQ ID NO: 207637 - RNA, 32 nt, Homo Sapiens
cgugacggggacgaggagccccgcggagggau

SEQ ID NO: 207638 - RNA, 32 nt, Homo Sapiens
ucucacuggcggugcccaggacggacgccaga

SEQ ID NO: 207639 - RNA, 32 nt, Homo Sapiens
ucaaauauauugcauuuuacccagcauuucca

SEQ ID NO: 207640 - RNA, 32 nt, Homo Sapiens
uuugcaaaaggccuugucaucaccuuccaaga

SEQ ID NO: 207641 - RNA, 32 nt, Homo Sapiens
acaauuaaaugaaacuggaggacccgugcuug

SEQ ID NO: 207642 - RNA, 32 nt, Homo Sapiens
caaagggaaaauaauuagguuuaaucggugga

SEQ ID NO: 207643 - RNA, 32 nt, Homo Sapiens
uaauuuuuauuacugaaaaacauggaaaucac

SEQ ID NO: 207644 - RNA, 32 nt, Homo Sapiens
ugcgugcuuuuuuuuuuuuuuacacugaauac

SEQ ID NO: 207645 - RNA, 32 nt, Homo Sapiens
guugcuuucacacucuauccacaggauagauu

SEQ ID NO: 207646 - RNA, 32 nt, Homo Sapiens
gaaaaacuggcuuuuucccagcccuuuccagg

SEQ ID NO: 207647 - RNA, 32 nt, Homo Sapiens
gaacaaacccucaucucaugaaggacggggug

SEQ ID NO: 207648 - RNA, 32 nt, Homo Sapiens
ccgcgcgguccgggcucuguucauucaugauu

SEQ ID NO: 207649 - RNA, 32 nt, Homo Sapiens
gaagucaggaccagugccugugaucuccauua

SEQ ID NO: 207650 - RNA, 32 nt, Homo Sapiens
uucaaagagcagcccgcuuugugugacuaaaa

SEQ ID NO: 207651 - RNA, 32 nt, Homo Sapiens
gacucucaccugggcuuuggcccugcgaaauc

SEQ ID NO: 207652 - RNA, 32 nt, Homo Sapiens
cgcagcccucaucgcaacugggcccgcgcgca

SEQ ID NO: 207653 - RNA, 32 nt, Homo Sapiens
ccacccucaucuccagagauuuugugucuaug

SEQ ID NO: 207654 - RNA, 31 nt, Homo Sapiens
gauccaaggccaguuaaccaggcaagacaca

SEQ ID NO: 207655 - RNA, 32 nt, Homo Sapiens
ccggcuccugucauccccuacacuuuggccaa

SEQ ID NO: 207656 - RNA, 32 nt, Homo Sapiens
aaggcuauccugcugaaaguccugcuuuccua

SEQ ID NO: 207657 - RNA, 32 nt, Homo Sapiens
gaugguggguuguggcgccggcggcggcugcu

SEQ ID NO: 207658 - RNA, 32 nt, Homo Sapiens
ggcucggagccucggcggaccuugcugccucu

SEQ ID NO: 207659 - RNA, 32 nt, Homo Sapiens
gcugagggcuccucgggaauggaaagggcuuc

SEQ ID NO: 207660 - RNA, 31 nt, Homo Sapiens
ucauguggcaccugccugccauguccacaac

SEQ ID NO: 207661 - RNA, 32 nt, Homo Sapiens
gguggagguugcacugagccgagaucaugcca

SEQ ID NO: 207662 - RNA, 32 nt, Homo Sapiens
cauacgcgcccgcgcgcaguccgccgucgcgc

SEQ ID NO: 207663 - RNA, 32 nt, Homo Sapiens
ugcuacauuuuucuuuuagguaaugauaagca

SEQ ID NO: 207664 - RNA, 32 nt, Homo Sapiens
gauucaacagcauuaccucagcuuauuacaga

SEQ ID NO: 207665 - RNA, 32 nt, Homo Sapiens
uguuaaccuggauacaggugguuuugauacau

SEQ ID NO: 207666 - RNA, 32 nt, Homo Sapiens
uguguguguucaucagauacaguucucccuua

SEQ ID NO: 207667 - RNA, 32 nt, Homo Sapiens
uuguaaaauauaaauuuuugugagauuucaaa

SEQ ID NO: 207668 - RNA, 32 nt, Homo Sapiens
aaagauuaaucuuuaaaccacuaaaauacaua

SEQ ID NO: 207669 - RNA, 32 nt, Homo Sapiens
caaaguguuuuuuauucaggcuugucaggggg

SEQ ID NO: 207670 - RNA, 32 nt, Homo Sapiens
acuaaagcccucgggauaugcagcagccaugc

SEQ ID NO: 207671 - RNA, 32 nt, Homo Sapiens
acaaaagaugacuaaagaucugaaggacucua

SEQ ID NO: 207672 - RNA, 32 nt, Homo Sapiens
ggagguugaaggugggggcgggacagggucuc

SEQ ID NO: 207673 - RNA, 32 nt, Homo Sapiens
acacugguauaguggaaagagcuuuugacuga

SEQ ID NO: 207674 - RNA, 32 nt, Homo Sapiens
gagaugaaccauggcccucccccugcccuuca

SEQ ID NO: 207675 - RNA, 32 nt, Homo Sapiens
ccaucuuggaaugugucuaaaaaagcauagcu

SEQ ID NO: 207676 - RNA, 32 nt, Homo Sapiens
aaauagacuauuuggaucacauuucucauucc

SEQ ID NO: 207677 - RNA, 32 nt, Homo Sapiens
auuaccuuauacuugcuuuugcuggcauucuu

SEQ ID NO: 207678 - RNA, 32 nt, Homo Sapiens
gaugggaggaggagaaaaagcgguacgaugcc

SEQ ID NO: 207679 - RNA, 32 nt, Homo Sapiens
caccuucccacuuucuagcucuggagagguug

SEQ ID NO: 207680 - RNA, 32 nt, Homo Sapiens
acugucuuuuugcugauccaccccccucuuac

SEQ ID NO: 207681 - RNA, 32 nt, Homo Sapiens
cugcagaguauccgaggugcugccggggcagc

SEQ ID NO: 207682 - RNA, 32 nt, Homo Sapiens
gacuuaaagagaaaaaacuuuguuaagaguuu

SEQ ID NO: 207683 - RNA, 32 nt, Homo Sapiens
ccgcugcgauagcggguccuuucccggggcgg

SEQ ID NO: 207684 - RNA, 32 nt, Homo Sapiens
gguaucugucacugaccuuuguuuccuuauuc

SEQ ID NO: 207685 - RNA, 32 nt, Homo Sapiens
guuaagacaauuuuugaguuacagguaugcgu

SEQ ID NO: 207686 - RNA, 32 nt, Homo Sapiens
cucccuccaccuaccacucacaugacacccgu

SEQ ID NO: 207687 - RNA, 32 nt, Homo Sapiens
ugacauccacuaagcaaauuuauuuaaauuca

SEQ ID NO: 207688 - RNA, 32 nt, Homo Sapiens
ucccgcccucacccggaccccuggcccucacg

SEQ ID NO: 207689 - RNA, 32 nt, Homo Sapiens
auauaacaggagacuuaaaauauuuuauuaua

SEQ ID NO: 207690 - RNA, 32 nt, Homo Sapiens
ugcccgcgccucgcgcccacgcggacgcaccg

SEQ ID NO: 207691 - RNA, 32 nt, Homo Sapiens
aaugggauauuguuuaaaaaacagccaccucu

SEQ ID NO: 207692 - RNA, 32 nt, Homo Sapiens
ugugcuuucacagcuucacuuccccgcucuug

SEQ ID NO: 207693 - RNA, 32 nt, Homo Sapiens
gugcauuaaaucaaauacaaaaauugguuuuu

SEQ ID NO: 207694 - RNA, 32 nt, Homo Sapiens
uacagguccccuccccagggcaggggauuugg

SEQ ID NO: 207695 - RNA, 32 nt, Homo Sapiens
gucuuucauaggugauacaacuuuuuaaaaug

SEQ ID NO: 207696 - RNA, 32 nt, Homo Sapiens
uugugucagcaauaaugcuccauuuaauguga

SEQ ID NO: 207697 - RNA, 30 nt, Homo Sapiens
cggccauggacgcaucauaugaugguacug

SEQ ID NO: 207698 - RNA, 32 nt, Homo Sapiens
cccaggauuugugaagaggugacccaaauuuc

SEQ ID NO: 207699 - RNA, 32 nt, Homo Sapiens
gaguauccuguuccgccuccugccaccuggac

SEQ ID NO: 207700 - RNA, 32 nt, Homo Sapiens
ugaaucuucugcucuuguuugugugacaugaa

SEQ ID NO: 207701 - RNA, 32 nt, Homo Sapiens
uauacaguauauggaaggauagauauagugcu

SEQ ID NO: 207702 - RNA, 32 nt, Homo Sapiens
guuuugagucuuuacaaaauagccaguuauaa

SEQ ID NO: 207703 - RNA, 32 nt, Homo Sapiens
uggguggccccuuccccaugggccuccacaag

SEQ ID NO: 207704 - RNA, 32 nt, Homo Sapiens
uuuauuugauaaaauuccaucuuacauucugu

SEQ ID NO: 207705 - RNA, 32 nt, Homo Sapiens
cauguuuuugaucaaaaacuauuugggauaug

SEQ ID NO: 207706 - RNA, 32 nt, Homo Sapiens
aaugagugauuccaguauuucauuuugauuuu

SEQ ID NO: 207707 - RNA, 32 nt, Homo Sapiens
uucuuucucacccacccuguacccucuucugu

SEQ ID NO: 207708 - RNA, 32 nt, Homo Sapiens
uuuuaaacauaaaaacuagaaaauagcauaua

SEQ ID NO: 207709 - RNA, 32 nt, Homo Sapiens
guaaauccugcuacaucauguacugugacaag

SEQ ID NO: 207710 - RNA, 32 nt, Homo Sapiens
uuccucgcggcugguuuagauugugguuguuu

SEQ ID NO: 207711 - RNA, 32 nt, Homo Sapiens
aaacaguaauauuuacagcaucaguaaauauu

SEQ ID NO: 207712 - RNA, 32 nt, Homo Sapiens
gaccaggccgcaccgaguccccggcaccaugu

SEQ ID NO: 207713 - RNA, 32 nt, Homo Sapiens
uuuuaggaaaauucugaagccagcuaucacag

SEQ ID NO: 207714 - RNA, 32 nt, Homo Sapiens
uucagaugcaagagaacaauguuucuucagug

SEQ ID NO: 207715 - RNA, 32 nt, Homo Sapiens
uaauaaaguguguauuuuugcaucaguuaagc

SEQ ID NO: 207716 - RNA, 30 nt, Homo Sapiens
aaagggagcaggcgcagggggacuggaaag

SEQ ID NO: 207717 - RNA, 29 nt, Homo Sapiens
ggaguuaaaguuuuauauuuuccugcuca

SEQ ID NO: 207718 - RNA, 32 nt, Homo Sapiens
ggagccggagcagcugcgggcgccgaguggcc

SEQ ID NO: 207719 - RNA, 30 nt, Homo Sapiens
agacucgccuuugggacccaucuuugcuuc

SEQ ID NO: 207720 - RNA, 32 nt, Homo Sapiens
aggaaagcaagcucaccgccugaacacggaga

SEQ ID NO: 207721 - RNA, 32 nt, Homo Sapiens
cacugaugagagacugggaagggaaaagcaua

SEQ ID NO: 207722 - RNA, 32 nt, Homo Sapiens
ccagguuaaccaaugucucgauuugcuucagg

SEQ ID NO: 207723 - RNA, 32 nt, Homo Sapiens
agcuaaaugcuucauugaaagcuucaaaguuu

SEQ ID NO: 207724 - RNA, 32 nt, Homo Sapiens
caaacacagacccaucuuuaggggucuggauu

SEQ ID NO: 207725 - RNA, 32 nt, Homo Sapiens
cagcagcaaagccccaggagaacaggcuggac

SEQ ID NO: 207726 - RNA, 32 nt, Homo Sapiens
gugggggugugagccuggcagcagccagccag

SEQ ID NO: 207727 - RNA, 32 nt, Homo Sapiens
guagaaauauuuuuaagcuccucugaugcagc

SEQ ID NO: 207728 - RNA, 32 nt, Homo Sapiens
ugguauacauaucugccuauguuucuuuucaa

SEQ ID NO: 207729 - RNA, 31 nt, Homo Sapiens
ugccccuauauuuggcagccaaauaaagaag

SEQ ID NO: 207730 - RNA, 32 nt, Homo Sapiens
uaauuuugauuucuguaauguguuaaugugau

SEQ ID NO: 207731 - RNA, 32 nt, Homo Sapiens
cgcagagaaaaauacuauaauggagacuauuc

SEQ ID NO: 207732 - RNA, 32 nt, Homo Sapiens
caauaaugaggcauuuggggcaaccaauuuug

SEQ ID NO: 207733 - RNA, 32 nt, Homo Sapiens
uccccugccccucccccugcucaaaggagggg

SEQ ID NO: 207734 - RNA, 32 nt, Homo Sapiens
gagggugaaaaacauggcaaagccuuuaacaa

SEQ ID NO: 207735 - RNA, 32 nt, Homo Sapiens
uacuaaucuuacccagaagaaggaaguaaacc

SEQ ID NO: 207736 - RNA, 32 nt, Homo Sapiens
uggugaguggggagccugggggcccuggcgag

SEQ ID NO: 207737 - RNA, 32 nt, Homo Sapiens
gaaaugcaaucauauuguuuauuuuuaagugu

SEQ ID NO: 207738 - RNA, 32 nt, Homo Sapiens
acagggcgugggugggggccgaggcuggcacg

SEQ ID NO: 207739 - RNA, 32 nt, Homo Sapiens
uuucugacucaucuccuucucuccgucuugcc

SEQ ID NO: 207740 - RNA, 32 nt, Homo Sapiens
uaaucuaccucauucuuuuuuaucuucugcau

SEQ ID NO: 207741 - RNA, 32 nt, Homo Sapiens
cucacuugcgguuuccuuauacuccaccccuu

SEQ ID NO: 207742 - RNA, 32 nt, Homo Sapiens
aagagcucuugguuugucaucaggauuauaau

SEQ ID NO: 207743 - RNA, 32 nt, Homo Sapiens
aacuugucugcacuuuagaaacaccuggagag

SEQ ID NO: 207744 - RNA, 32 nt, Homo Sapiens
ccaccgcccaguuccaguggccccacgaagcc

SEQ ID NO: 207745 - RNA, 32 nt, Homo Sapiens
gcauggcuuacuaacuuuccaguguucacugg

SEQ ID NO: 207746 - RNA, 32 nt, Homo Sapiens
ggucuaauauccagaaucuacaaggaacuuaa

SEQ ID NO: 207747 - RNA, 32 nt, Homo Sapiens
cgacucgagauggccugaaacgccacucauuc

SEQ ID NO: 207748 - RNA, 32 nt, Homo Sapiens
ugccaggcugggcacggcuccgagggcggcca

SEQ ID NO: 207749 - RNA, 32 nt, Homo Sapiens
agauccaggagaacaacaucaucuggcaugug

SEQ ID NO: 207750 - RNA, 32 nt, Homo Sapiens
uauaccuacuagguccaaugcccgccagccua

SEQ ID NO: 207751 - RNA, 32 nt, Homo Sapiens
ugugagaacuuccaacaagccucaaagucccu

SEQ ID NO: 207752 - RNA, 32 nt, Homo Sapiens
ucugccugcccccggccccgcgccccuacagc

SEQ ID NO: 207753 - RNA, 32 nt, Homo Sapiens
gauaauuuaaaauuauuuucaacuacuuuauu

SEQ ID NO: 207754 - RNA, 32 nt, Homo Sapiens
uuagauuucaucauuacuauuuugcauacugg

SEQ ID NO: 207755 - RNA, 32 nt, Homo Sapiens
gagucucaaggucuaggaaagccucccucaca

SEQ ID NO: 207756 - RNA, 31 nt, Homo Sapiens
ccaagaaaauaaaaaagcuauuaucaggucu

SEQ ID NO: 207757 - RNA, 32 nt, Homo Sapiens
ccucacacgcugggcuucacggcugccaggag

SEQ ID NO: 207758 - RNA, 32 nt, Homo Sapiens
acucuuaaugaaacuuuaauuuuacuuaauua

SEQ ID NO: 207759 - RNA, 32 nt, Homo Sapiens
cuccagugccauuguuccacaguuguucuaau

SEQ ID NO: 207760 - RNA, 32 nt, Homo Sapiens
gcauugccccucaacagggaugacucagcaga

SEQ ID NO: 207761 - RNA, 32 nt, Homo Sapiens
cuccagaucacacacaugcacacacacauaug

SEQ ID NO: 207762 - RNA, 32 nt, Homo Sapiens
cacauuugaaaaaagcaguuuaaugaauggua

SEQ ID NO: 207763 - RNA, 32 nt, Homo Sapiens
cccauuuacuccuggggcagcugccaggucgu

SEQ ID NO: 207764 - RNA, 32 nt, Homo Sapiens
uuaugcuuugugauugugaaacauugacuuuu

SEQ ID NO: 207765 - RNA, 32 nt, Homo Sapiens
gcaggcgcugggucugcagauggcguccaggu

SEQ ID NO: 207766 - RNA, 32 nt, Homo Sapiens
ccauuuggugucccuggagcucccacuaaagg

SEQ ID NO: 207767 - RNA, 32 nt, Homo Sapiens
cgaccaugagagaaaaaccuggagaacggacg

SEQ ID NO: 207768 - RNA, 32 nt, Homo Sapiens
uccaguguucaauaucaagugauaccacagau

SEQ ID NO: 207769 - RNA, 32 nt, Homo Sapiens
ccaaugaguacccgacccguugccaugauuaa

SEQ ID NO: 207770 - RNA, 32 nt, Homo Sapiens
aacuuuccagguuuauacuauaccucaagacc

SEQ ID NO: 207771 - RNA, 29 nt, Homo Sapiens
agccugaauuauaugugaaagcucaaagg

SEQ ID NO: 207772 - RNA, 32 nt, Homo Sapiens
gugucuuaguucgggcuucucuaacacuguac

SEQ ID NO: 207773 - RNA, 32 nt, Homo Sapiens
ugcuucgcgggcugggaggcccgggguccccg

SEQ ID NO: 207774 - RNA, 32 nt, Homo Sapiens
ccuuccuuguaucugucuucccaggagagaau

SEQ ID NO: 207775 - RNA, 32 nt, Homo Sapiens
ugguguuccccggacucuuccuccucuccaag

SEQ ID NO: 207776 - RNA, 32 nt, Homo Sapiens
uauaccaucuucuauuuccagcuccugauucc

SEQ ID NO: 207777 - RNA, 32 nt, Homo Sapiens
uauugggguacagcucaccaccccccacuccg

SEQ ID NO: 207778 - RNA, 32 nt, Homo Sapiens
aaggaugaguuuaugcccuuuguagggacaug

SEQ ID NO: 207779 - RNA, 32 nt, Homo Sapiens
cucuccuuuccacagccggcgcuccgcgaccc

SEQ ID NO: 207780 - RNA, 32 nt, Homo Sapiens
cuacuaaaauaaggauuaagaauaucccagag

SEQ ID NO: 207781 - RNA, 32 nt, Homo Sapiens
ggcaucauaaucuauuuccuaauuaucguuua

SEQ ID NO: 207782 - RNA, 29 nt, Homo Sapiens
accgaugauguggcgaccaucaguucugc

SEQ ID NO: 207783 - RNA, 32 nt, Homo Sapiens
ucccagauagaaugucaauauuugagcaguag

SEQ ID NO: 207784 - RNA, 32 nt, Homo Sapiens
acacaggagaaaaaccauaggaaagugacaug

SEQ ID NO: 207785 - RNA, 32 nt, Homo Sapiens
agaggaauuggaagagcauuuuauguuuuaag

SEQ ID NO: 207786 - RNA, 32 nt, Homo Sapiens
cacgguaaccaugugcgaccgaaaggccguga

SEQ ID NO: 207787 - RNA, 32 nt, Homo Sapiens
gcuuuuucaguuuccuuggggaggggcgggug

SEQ ID NO: 207788 - RNA, 32 nt, Homo Sapiens
aggcugcgcgcgggccacgcgcggcggcgacu

SEQ ID NO: 207789 - RNA, 32 nt, Homo Sapiens
guagcggugcugggucgggccgacgugccacc

SEQ ID NO: 207790 - RNA, 32 nt, Homo Sapiens
auuuuuauauugccauguuuauuuuguuuggg

SEQ ID NO: 207791 - RNA, 32 nt, Homo Sapiens
uagaguggaucuguaguuacccgcccugccuc

SEQ ID NO: 207792 - RNA, 32 nt, Homo Sapiens
uuuuggcaaaaauuaaauuuauauaccuggcu

SEQ ID NO: 207793 - RNA, 32 nt, Homo Sapiens
gcuaucaucauuccuaacaagacuaacuuaca

SEQ ID NO: 207794 - RNA, 32 nt, Homo Sapiens
ugguccgccucauuuuaaaccaaaaaacugcu

SEQ ID NO: 207795 - RNA, 32 nt, Homo Sapiens
gcggcgcacggugggcagcugcaauggcgcug

SEQ ID NO: 207796 - RNA, 32 nt, Homo Sapiens
cacaaccugccccggccaggccugcagaccca

SEQ ID NO: 207797 - RNA, 32 nt, Homo Sapiens
cugaagacauugaauggugggugcugggccuc

SEQ ID NO: 207798 - RNA, 30 nt, Homo Sapiens
acaaagaaaaagagcuuugagucuguaggg

SEQ ID NO: 207799 - RNA, 32 nt, Homo Sapiens
agcuuuccaagccccaggagcugugccaccca

SEQ ID NO: 207800 - RNA, 32 nt, Homo Sapiens
cacaggccgcuccgcgggcgcuucggauccuc

SEQ ID NO: 207801 - RNA, 32 nt, Homo Sapiens
ccugcuccgaagacaaaccaaccuccguuucu

SEQ ID NO: 207802 - RNA, 32 nt, Homo Sapiens
auccuacuguugaaauguuggguuaauugugu

SEQ ID NO: 207803 - RNA, 32 nt, Homo Sapiens
gccuuuuaauaaaguggaagcuugcuuuuuaa

SEQ ID NO: 207804 - RNA, 30 nt, Homo Sapiens
uuuccugagaagcuugaaugacugaugagc

SEQ ID NO: 207805 - RNA, 32 nt, Homo Sapiens
aaccugaaaaauaaauagucauuuaauguuga

SEQ ID NO: 207806 - RNA, 32 nt, Homo Sapiens
auugucuacucaaauggcauuuagacauuaga

SEQ ID NO: 207807 - RNA, 32 nt, Homo Sapiens
gagaaguucucuaugugucuguauauguacac

SEQ ID NO: 207808 - RNA, 32 nt, Homo Sapiens
cuucuucacaugcuauuucaaaaagccuguuu

SEQ ID NO: 207809 - RNA, 32 nt, Homo Sapiens
cgaggcugcucggcccggccccaccuccgccg

SEQ ID NO: 207810 - RNA, 32 nt, Homo Sapiens
ucgucuuuuauuucuaucaaguauuuuacaua

SEQ ID NO: 207811 - RNA, 32 nt, Homo Sapiens
ucgagcuuucuuuuuuauuuaaauaaaaauuu

SEQ ID NO: 207812 - RNA, 32 nt, Homo Sapiens
guacaugguaaguggcagucacugcuuacaag

SEQ ID NO: 207813 - RNA, 32 nt, Homo Sapiens
cguuuuuauuuuucauuuucucgaaggaagcg

SEQ ID NO: 207814 - RNA, 32 nt, Homo Sapiens
ucugaaagaaaacgcuuugguuuuugaacaca

SEQ ID NO: 207815 - RNA, 32 nt, Homo Sapiens
uuuuuauaacacaagaaaaauuuacaauugau

SEQ ID NO: 207816 - RNA, 32 nt, Homo Sapiens
uuuuaggagaguuuuucuuaaaauuacugacu

SEQ ID NO: 207817 - RNA, 32 nt, Homo Sapiens
caaagguucuccaaggccccagcagagucgau

SEQ ID NO: 207818 - RNA, 32 nt, Homo Sapiens
ccacaccacagcugcgcacacagcugcuugcu

SEQ ID NO: 207819 - RNA, 32 nt, Homo Sapiens
cccagccaggucagagucggcccguaaaucag

SEQ ID NO: 207820 - RNA, 32 nt, Homo Sapiens
cacacccgaugaugaugaugauuugaugccca

SEQ ID NO: 207821 - RNA, 32 nt, Homo Sapiens
gaaaugggagcacaguacugggaaaugggagc

SEQ ID NO: 207822 - RNA, 32 nt, Homo Sapiens
ucacgaaggaugcuuuuucagaucagucucca

SEQ ID NO: 207823 - RNA, 32 nt, Homo Sapiens
gccccgccggcaccucuguguacagccagcag

SEQ ID NO: 207824 - RNA, 32 nt, Homo Sapiens
cagcuccugaggcucuuuggaccuccaggaau

SEQ ID NO: 207825 - RNA, 32 nt, Homo Sapiens
ggcaucucucgggucccugagccccggccacg

SEQ ID NO: 207826 - RNA, 32 nt, Homo Sapiens
cggggucucgccagccccuuccugcagccgcc

SEQ ID NO: 207827 - RNA, 32 nt, Homo Sapiens
gacgguggaagacauuaugagcuguguccaac

SEQ ID NO: 207828 - RNA, 32 nt, Homo Sapiens
uccggacggcgccgaccgccggagcccaagug

SEQ ID NO: 207829 - RNA, 32 nt, Homo Sapiens
acacucacccuccacccuccccacccccucgg

SEQ ID NO: 207830 - RNA, 32 nt, Homo Sapiens
uuuaaguauccuuuaauaccuguaccuuuugu

SEQ ID NO: 207831 - RNA, 32 nt, Homo Sapiens
ggaguaauauuaccaaauuuaaaaauggcugc

SEQ ID NO: 207832 - RNA, 32 nt, Homo Sapiens
aaaaagaaaaagaaaaaagaaauauuucaagc

SEQ ID NO: 207833 - RNA, 32 nt, Homo Sapiens
gcuauuucuccuuccuugucugccuuuacaga

SEQ ID NO: 207834 - RNA, 31 nt, Homo Sapiens
aacacagcugagguuuuuauccugucuuuuc

SEQ ID NO: 207835 - RNA, 32 nt, Homo Sapiens
uugucugucauucaaauuauaacugcaguuau

SEQ ID NO: 207836 - RNA, 32 nt, Homo Sapiens
ggcugggaaugggagcaguaagcugucggcag

SEQ ID NO: 207837 - RNA, 30 nt, Homo Sapiens
uggcucugucaccuuguagaagcucaagug

SEQ ID NO: 207838 - RNA, 27 nt, Homo Sapiens
auuauuuguaauaucugguaugucuaa

SEQ ID NO: 207839 - RNA, 32 nt, Homo Sapiens
gcugaguggaagcucauguucaggcucuaaca

SEQ ID NO: 207840 - RNA, 32 nt, Homo Sapiens
uucccucuagaauguaggagucuugccagcag

SEQ ID NO: 207841 - RNA, 32 nt, Homo Sapiens
cacuguacugggcuuccaagcuuuggcauuca

SEQ ID NO: 207842 - RNA, 32 nt, Homo Sapiens
ggaccccccacccagacugacuggggcuucug

SEQ ID NO: 207843 - RNA, 32 nt, Homo Sapiens
uugugaugaugaugagugagucuccccuuaau

SEQ ID NO: 207844 - RNA, 32 nt, Homo Sapiens
uuaaugguagaaacuuccuugguuucaugauu

SEQ ID NO: 207845 - RNA, 32 nt, Homo Sapiens
uuauagauaaggaaacugaggcucagagacaa

SEQ ID NO: 207846 - RNA, 32 nt, Homo Sapiens
caaggaaaaauauuuuugggggcaaaucaaga

SEQ ID NO: 207847 - RNA, 32 nt, Homo Sapiens
acuuucuacaccuggaggaauguugcagaaag

SEQ ID NO: 207848 - RNA, 30 nt, Homo Sapiens
ugauucggaggaacggguugcuuggggcgg

SEQ ID NO: 207849 - RNA, 32 nt, Homo Sapiens
caggucagagcagacccuccccugccggccug

SEQ ID NO: 207850 - RNA, 32 nt, Homo Sapiens
ugaugcaucuucuucggugaaauauuuauaug

SEQ ID NO: 207851 - RNA, 32 nt, Homo Sapiens
cuggccgucugggugcacacaccgcucccucg

SEQ ID NO: 207852 - RNA, 32 nt, Homo Sapiens
gagccccuccccucggcccgcgcgggaggagu

SEQ ID NO: 207853 - RNA, 32 nt, Homo Sapiens
ugaauaaugcuguuuuauauguagagucuuuu

SEQ ID NO: 207854 - RNA, 28 nt, Homo Sapiens
agcaauaggaaagccagggccagagcga

SEQ ID NO: 207855 - RNA, 32 nt, Homo Sapiens
uuauagagauguaaaaacaaaacuauaaugga

SEQ ID NO: 207856 - RNA, 32 nt, Homo Sapiens
aacaucgggcagcaugagcggcugcgggcucu

SEQ ID NO: 207857 - RNA, 32 nt, Homo Sapiens
augccauacuuuguuauauauguuagugguau

SEQ ID NO: 207858 - RNA, 32 nt, Homo Sapiens
ccucuucuuuugccccgccuccgccccagagg

SEQ ID NO: 207859 - RNA, 32 nt, Homo Sapiens
ugcuaaagaagaagacuguaacaucauugcca

SEQ ID NO: 207860 - RNA, 32 nt, Homo Sapiens
uacgugaggguggaugcuggggugcugaguga

SEQ ID NO: 207861 - RNA, 32 nt, Homo Sapiens
uuguaggcugaauuuuaaucuguauuuauugu

SEQ ID NO: 207862 - RNA, 32 nt, Homo Sapiens
agugagucauuaucaaugguagauaaaauauc

SEQ ID NO: 207863 - RNA, 32 nt, Homo Sapiens
agcgauuaugcuucuguaaucuguaaccagaa

SEQ ID NO: 207864 - RNA, 30 nt, Homo Sapiens
aguugccuuccauggaucuauaggagagca

SEQ ID NO: 207865 - RNA, 32 nt, Homo Sapiens
agucagauacacgggaucuuuucuguggaguc

SEQ ID NO: 207866 - RNA, 30 nt, Homo Sapiens
acugggguggccgugccgguggcugaauga

SEQ ID NO: 207867 - RNA, 32 nt, Homo Sapiens
ccgcacugacuacggcugcugccgccuuucua

SEQ ID NO: 207868 - RNA, 32 nt, Homo Sapiens
ccccucugaauuucugcaucugcaucuuaaca

SEQ ID NO: 207869 - RNA, 32 nt, Homo Sapiens
gcugcagaacuacuggucagaagugcgcuaca

SEQ ID NO: 207870 - RNA, 31 nt, Homo Sapiens
gacaagcugccggagcugcaaugggccgcgg

SEQ ID NO: 207871 - RNA, 32 nt, Homo Sapiens
ccuguguugugauaaauuguuugccagcauuc

SEQ ID NO: 207872 - RNA, 32 nt, Homo Sapiens
ggcugguggagggggagggagcacaacucaga

SEQ ID NO: 207873 - RNA, 27 nt, Homo Sapiens
uuaaauaaacacaaagcauuuggaaaa

SEQ ID NO: 207874 - RNA, 32 nt, Homo Sapiens
uuuugggacaaggguaaucaguucuugacuag

SEQ ID NO: 207875 - RNA, 32 nt, Homo Sapiens
acccugaccccauucagcagaaauugcagguc

SEQ ID NO: 207876 - RNA, 32 nt, Homo Sapiens
ucgaaccaugguuuccuaacccuaauugauga

SEQ ID NO: 207877 - RNA, 32 nt, Homo Sapiens
cuauuaaaaaagacaauuggaaaauguuaugc

SEQ ID NO: 207878 - RNA, 32 nt, Homo Sapiens
auauccauagacagcagagaaaaaauagcaaa

SEQ ID NO: 207879 - RNA, 32 nt, Homo Sapiens
uaggcccaagggugggggaggcaggaggaggc

SEQ ID NO: 207880 - RNA, 32 nt, Homo Sapiens
auuaaagcaccaaauucauguacagcaugcau

SEQ ID NO: 207881 - RNA, 32 nt, Homo Sapiens
acgcaccagcagccgccuccaugcccuagguu

SEQ ID NO: 207882 - RNA, 32 nt, Homo Sapiens
ugugcuuuucgcuuucuuucugcaugacuauu

SEQ ID NO: 207883 - RNA, 32 nt, Homo Sapiens
gauugguaaagcugcguccuggcgauuccagg

SEQ ID NO: 207884 - RNA, 32 nt, Homo Sapiens
gaucuucacucugggcggcuccccauaccccg

SEQ ID NO: 207885 - RNA, 32 nt, Homo Sapiens
ucauguggucugaccauguggagauguuucug

SEQ ID NO: 207886 - RNA, 32 nt, Homo Sapiens
acuguagauuguguauguuauguguuuuuaug

SEQ ID NO: 207887 - RNA, 32 nt, Homo Sapiens
ugcaguucuacauucacugauuauuacagugu

SEQ ID NO: 207888 - RNA, 32 nt, Homo Sapiens
ggugcuccgagccauggccgacaccaucuucg

SEQ ID NO: 207889 - RNA, 32 nt, Homo Sapiens
gccagguuccucaggcagccccggugggaggc

SEQ ID NO: 207890 - RNA, 32 nt, Homo Sapiens
ucaugcuuguuaaauuuuaaugcagcaucuuc

SEQ ID NO: 207891 - RNA, 32 nt, Homo Sapiens
aaaugcauucuucugaauaaaaagaguauuca

SEQ ID NO: 207892 - RNA, 32 nt, Homo Sapiens
ccugaacugcuccucagagccaucuccugaac

SEQ ID NO: 207893 - RNA, 32 nt, Homo Sapiens
agucaucuacuuaauaaauauuacagugaaag

SEQ ID NO: 207894 - RNA, 32 nt, Homo Sapiens
ugaaagcucucaggauaauuaauccuaaauau

SEQ ID NO: 207895 - RNA, 32 nt, Homo Sapiens
gcccauccaucccaugccucccuccuccccac

SEQ ID NO: 207896 - RNA, 32 nt, Homo Sapiens
cccggguggccaguggcucagcagucucggug

SEQ ID NO: 207897 - RNA, 32 nt, Homo Sapiens
uauacagacaaaaccagugucaggccuuugca

SEQ ID NO: 207898 - RNA, 32 nt, Homo Sapiens
ggugggucgccggcccggaggccugcuccucg

SEQ ID NO: 207899 - RNA, 32 nt, Homo Sapiens
guguuuuuagacaccagagaaaacacagucuc

SEQ ID NO: 207900 - RNA, 32 nt, Homo Sapiens
aaccaguuggaucuggaaggggauaaagggcu

SEQ ID NO: 207901 - RNA, 32 nt, Homo Sapiens
ugacagaggagcuucugcaguugggaauuguu

SEQ ID NO: 207902 - RNA, 32 nt, Homo Sapiens
guagaauuuaggaugcccuauugcugucuuuc

SEQ ID NO: 207903 - RNA, 32 nt, Homo Sapiens
gcagguuuuucuucuucaguuuagcucagugg

SEQ ID NO: 207904 - RNA, 32 nt, Homo Sapiens
uguuggcaaguagcaaaaaauaugggaaguau

SEQ ID NO: 207905 - RNA, 32 nt, Homo Sapiens
aacgcagauggaauaagaaaacaaaaagcugc

SEQ ID NO: 207906 - RNA, 32 nt, Homo Sapiens
gccccgugggucccacccuuuaaggaugcuga

SEQ ID NO: 207907 - RNA, 32 nt, Homo Sapiens
ggcgggccgggaugcggacgccgguggugaug

SEQ ID NO: 207908 - RNA, 32 nt, Homo Sapiens
uuugggaaaaagaugcugugagguauacuuca

SEQ ID NO: 207909 - RNA, 32 nt, Homo Sapiens
aaaggagagaucaaugucuuauugugaugagu

SEQ ID NO: 207910 - RNA, 32 nt, Homo Sapiens
ggcgcgaagcccggguggcccgagggcgcgac

SEQ ID NO: 207911 - RNA, 32 nt, Homo Sapiens
agaaugaaauacucuuuuuuuuuuuuuuuuuu

SEQ ID NO: 207912 - RNA, 32 nt, Homo Sapiens
gcugguuuauaacuucagaagaaauaauggaa

SEQ ID NO: 207913 - RNA, 32 nt, Homo Sapiens
uguccgccuccagccgcucuccucugacgggu

SEQ ID NO: 207914 - RNA, 32 nt, Homo Sapiens
gcugggcugugaugaagcugagcagaguggaa

SEQ ID NO: 207915 - RNA, 32 nt, Homo Sapiens
ugagagaguggagagugacaugugcuggacac

SEQ ID NO: 207916 - RNA, 32 nt, Homo Sapiens
ugaacuuucucugagcucccacucuguaccaa

SEQ ID NO: 207917 - RNA, 32 nt, Homo Sapiens
ccccggcgcccgcucccacuccugauuggccg

SEQ ID NO: 207918 - RNA, 32 nt, Homo Sapiens
uaugcccugacaggagaugaaguaaagaagau

SEQ ID NO: 207919 - RNA, 32 nt, Homo Sapiens
gaauuugacauuaaaguaauaugugaaucauu

SEQ ID NO: 207920 - RNA, 32 nt, Homo Sapiens
uggcuccacccgucaugcuggaugcaucuuua

SEQ ID NO: 207921 - RNA, 32 nt, Homo Sapiens
cuguaccaguaauuuuaacauaaaggguugga

SEQ ID NO: 207922 - RNA, 32 nt, Homo Sapiens
ccagcgcugucuuuuuaguaccacaugcgcag

SEQ ID NO: 207923 - RNA, 32 nt, Homo Sapiens
aauagacaaaaauaugagauuaaaaauguuug

SEQ ID NO: 207924 - RNA, 32 nt, Homo Sapiens
cuaguuacugucaaaaaugccucuuggagaag

SEQ ID NO: 207925 - RNA, 32 nt, Homo Sapiens
ugauugaucagcaugggcauauguaaaauguc

SEQ ID NO: 207926 - RNA, 32 nt, Homo Sapiens
agaaaccauuuucugacacuagguuuacaauc

SEQ ID NO: 207927 - RNA, 32 nt, Homo Sapiens
cuccgccugacgcuccucucugucucagccag

SEQ ID NO: 207928 - RNA, 32 nt, Homo Sapiens
agcucagaacagacacgccgcccuccuugugu

SEQ ID NO: 207929 - RNA, 32 nt, Homo Sapiens
auaggacccagccagggcugagcgcacucuug

SEQ ID NO: 207930 - RNA, 32 nt, Homo Sapiens
uugggauuaugauaaggcaacuaaagacauga

SEQ ID NO: 207931 - RNA, 32 nt, Homo Sapiens
auaauuugaggaggguuuaaaaaggaaccauu

SEQ ID NO: 207932 - RNA, 32 nt, Homo Sapiens
caccagaaggauuuugccagcauagugcuccu

SEQ ID NO: 207933 - RNA, 32 nt, Homo Sapiens
cagacaaagucuggcgucuggaucuagucaug

SEQ ID NO: 207934 - RNA, 32 nt, Homo Sapiens
uuucuaaauaucuauuuauauauacauacaaa

SEQ ID NO: 207935 - RNA, 32 nt, Homo Sapiens
ugaccauaaaaagucacaaaauugcuaaaugu

SEQ ID NO: 207936 - RNA, 32 nt, Homo Sapiens
auggcaucgaaaguguuaaaauuuagggauga

SEQ ID NO: 207937 - RNA, 32 nt, Homo Sapiens
gaagccuuucuuuuccauuguuucuggauauu

SEQ ID NO: 207938 - RNA, 32 nt, Homo Sapiens
uaaaaugucagccuacugaagaugaaccaucu

SEQ ID NO: 207939 - RNA, 32 nt, Homo Sapiens
ggcgcgcggggccagcauggagcucuuccaag

SEQ ID NO: 207940 - RNA, 32 nt, Homo Sapiens
gagugaaaggagaaauguuagauucuuuauua

SEQ ID NO: 207941 - RNA, 32 nt, Homo Sapiens
uugugagugcugcuccuucuuccuugacugcu

SEQ ID NO: 207942 - RNA, 32 nt, Homo Sapiens
gugugauuccaggaggagagccaggccugccc

SEQ ID NO: 207943 - RNA, 32 nt, Homo Sapiens
ccugccugccuuguuugauuuggcucuuguuc

SEQ ID NO: 207944 - RNA, 31 nt, Homo Sapiens
uuucugccuuugugggauucaguguuauccc

SEQ ID NO: 207945 - RNA, 32 nt, Homo Sapiens
cuauugcuucuugguuuuaaauggaacauuuc

SEQ ID NO: 207946 - RNA, 32 nt, Homo Sapiens
uuugucgcagcuuugcuuuguuuaaugaaaca

SEQ ID NO: 207947 - RNA, 32 nt, Homo Sapiens
ggcccggcuaaagcggcucaguaguuggaagu

SEQ ID NO: 207948 - RNA, 32 nt, Homo Sapiens
cuugagguggguggcagcgucugguccuccuc

SEQ ID NO: 207949 - RNA, 32 nt, Homo Sapiens
aaagcgaggguggucaggugcucccuucugug

SEQ ID NO: 207950 - RNA, 32 nt, Homo Sapiens
acaggaggaucaagaggaucugcacgggguga

SEQ ID NO: 207951 - RNA, 32 nt, Homo Sapiens
ugcuuugaaagagaggcggaggggagagaggg

SEQ ID NO: 207952 - RNA, 32 nt, Homo Sapiens
gcucggcgccuggcgcuggcgcuggccaaggc

SEQ ID NO: 207953 - RNA, 32 nt, Homo Sapiens
ucuguuccaccucuccugcgauaguccugggu

SEQ ID NO: 207954 - RNA, 32 nt, Homo Sapiens
uacagggacucucuggagcccuugaagaaugc

SEQ ID NO: 207955 - RNA, 32 nt, Homo Sapiens
ugaauacagugaucacguuguccuccaaggag

SEQ ID NO: 207956 - RNA, 32 nt, Homo Sapiens
acucccuacugggaugaugaaggauggcaucc

SEQ ID NO: 207957 - RNA, 32 nt, Homo Sapiens
aguuuaaacaauuuguuaaaaaauuuuccguc

SEQ ID NO: 207958 - RNA, 32 nt, Homo Sapiens
gccuccacgcaugcgcaccgcggcgcgcuggg

SEQ ID NO: 207959 - RNA, 32 nt, Homo Sapiens
cacguucggcuaauuuuuguauuuucaguaga

SEQ ID NO: 207960 - RNA, 32 nt, Homo Sapiens
cacguugcccaggcuggucuccagcuccugag

SEQ ID NO: 207961 - RNA, 32 nt, Homo Sapiens
cuuuacugacuucaauuaucuguuuuuaaaga

SEQ ID NO: 207962 - RNA, 32 nt, Homo Sapiens
uuccucaacuguacaaugaacuauucucauga

SEQ ID NO: 207963 - RNA, 32 nt, Homo Sapiens
ugccugugggucucuacaagugacagaugugu

SEQ ID NO: 207964 - RNA, 32 nt, Homo Sapiens
agcuuggcccuccucaguuucguuucaagccu

SEQ ID NO: 207965 - RNA, 32 nt, Homo Sapiens
uaggagagagggagcgagagccaggcaggacc

SEQ ID NO: 207966 - RNA, 32 nt, Homo Sapiens
aaagugaggucuucuacccaggggagacggua

SEQ ID NO: 207967 - RNA, 32 nt, Homo Sapiens
gcccccgugcaggcugccagcccgccaagcuc

SEQ ID NO: 207968 - RNA, 32 nt, Homo Sapiens
aagagcaccaaaauuagacacugcuaacauac

SEQ ID NO: 207969 - RNA, 32 nt, Homo Sapiens
aagccaauuuaaaugauaagaaaugaauaaau

SEQ ID NO: 207970 - RNA, 25 nt, Homo Sapiens
augguuuaugagagggcgggggaag

SEQ ID NO: 207971 - RNA, 32 nt, Homo Sapiens
gugccugccuucccucccuccuccccaccggg

SEQ ID NO: 207972 - RNA, 32 nt, Homo Sapiens
caggcacagaucugguuuuaaugaugaacucu

SEQ ID NO: 207973 - RNA, 32 nt, Homo Sapiens
cuccuaaggacagguuuuauugacugauacca

SEQ ID NO: 207974 - RNA, 32 nt, Homo Sapiens
gguucuagucuaacaaauuauucaucuaauaa

SEQ ID NO: 207975 - RNA, 32 nt, Homo Sapiens
cgccucgcgccggcugcucuuuccgggauuuu

SEQ ID NO: 207976 - RNA, 32 nt, Homo Sapiens
aagucaccuauucauucauacgaugguuuuuc

SEQ ID NO: 207977 - RNA, 32 nt, Homo Sapiens
guauugagccuugcccucuuugaucuuuaauc

SEQ ID NO: 207978 - RNA, 32 nt, Homo Sapiens
aaaccaacugcacuggaaggugccaaagucug

SEQ ID NO: 207979 - RNA, 32 nt, Homo Sapiens
gcucggaccccggccgcugccgccaucacugu

SEQ ID NO: 207980 - RNA, 32 nt, Homo Sapiens
ggcgucaccaugccacagcuacccacuuguug

SEQ ID NO: 207981 - RNA, 32 nt, Homo Sapiens
auuauuaugcaaaaaugaauguuuuuucaaaa

SEQ ID NO: 207982 - RNA, 32 nt, Homo Sapiens
ggucuacguggccuucgcuguccgcaauugag

SEQ ID NO: 207983 - RNA, 32 nt, Homo Sapiens
auuuuuaaaagcaacuucugagaagggcuuag

SEQ ID NO: 207984 - RNA, 32 nt, Homo Sapiens
aaaauacucccucucuguuccugucuuagcca

SEQ ID NO: 207985 - RNA, 32 nt, Homo Sapiens
uuuauuuucuggugagguggguuugggaggaa

SEQ ID NO: 207986 - RNA, 32 nt, Homo Sapiens
ggcgggugagaggccgcggcggcagguccacc

SEQ ID NO: 207987 - RNA, 32 nt, Homo Sapiens
cugaugcagauggucaggaugguggugacagg

SEQ ID NO: 207988 - RNA, 32 nt, Homo Sapiens
cugccccccagucuccccacuccacccuguua

SEQ ID NO: 207989 - RNA, 32 nt, Homo Sapiens
ccacggaugacaucgugaagguugaagucugg

SEQ ID NO: 207990 - RNA, 32 nt, Homo Sapiens
ugcagguugaguccagaugcuucucaccuucu

SEQ ID NO: 207991 - RNA, 32 nt, Homo Sapiens
auaucuugcucuuuaaaauuuauuaggauuuu

SEQ ID NO: 207992 - RNA, 32 nt, Homo Sapiens
cuuauuuuguaucuuuucacuuaggaagauuu

SEQ ID NO: 207993 - RNA, 32 nt, Homo Sapiens
guuugacuuuuguccaguaaauugcuaaguaa

SEQ ID NO: 207994 - RNA, 32 nt, Homo Sapiens
aguccuuaaaauaguuugacucuuccuguuag

SEQ ID NO: 207995 - RNA, 32 nt, Homo Sapiens
gugagcugcugcguggggcccgagggacggca

SEQ ID NO: 207996 - RNA, 32 nt, Homo Sapiens
uucacaaaauuuggaggaagaagaggcgagaa

SEQ ID NO: 207997 - RNA, 32 nt, Homo Sapiens
ggcaguuggaccuaucuccauaccccgagagc

SEQ ID NO: 207998 - RNA, 32 nt, Homo Sapiens
cccaccacgcucagggcugugcuccuggucuc

SEQ ID NO: 207999 - RNA, 32 nt, Homo Sapiens
caggucgcugucgguccacgccgcccgucgcg

SEQ ID NO: 208000 - RNA, 32 nt, Homo Sapiens
aauugcugaguccgccaggagcgcagccaccu

SEQ ID NO: 208001 - RNA, 32 nt, Homo Sapiens
gacaaagccaugccucagucacaugugugugc

SEQ ID NO: 208002 - RNA, 30 nt, Homo Sapiens
aauuuacugaaugugggggaacuguuacuc

SEQ ID NO: 208003 - RNA, 32 nt, Homo Sapiens
guaaggcugucagucugcuuaagggaagaaaa

SEQ ID NO: 208004 - RNA, 32 nt, Homo Sapiens
cucacuuaaaagacauuuauuauuacuucaua

SEQ ID NO: 208005 - RNA, 32 nt, Homo Sapiens
uugcuuguugggauuccugacccaggccgcag

SEQ ID NO: 208006 - RNA, 32 nt, Homo Sapiens
cccacguuuuuggcagguguggaagugaaacu

SEQ ID NO: 208007 - RNA, 32 nt, Homo Sapiens
uuggauacuuuuuucaggugaaugaaagaaug

SEQ ID NO: 208008 - RNA, 30 nt, Homo Sapiens
caugacaacagcaugggggaaacccaucca

SEQ ID NO: 208009 - RNA, 32 nt, Homo Sapiens
ucgcucucugucuccagcaguucucucgaaua

SEQ ID NO: 208010 - RNA, 32 nt, Homo Sapiens
acaagcugaugauucugaaacuggcccaauuu

SEQ ID NO: 208011 - RNA, 32 nt, Homo Sapiens
uaacuaauuuucuuuuuuccuuuuaguaauua

SEQ ID NO: 208012 - RNA, 32 nt, Homo Sapiens
auggcuuugguuuucauuucucuucuucacug

SEQ ID NO: 208013 - RNA, 32 nt, Homo Sapiens
uuucccagcguagaacaagaagagacgcagcc

SEQ ID NO: 208014 - RNA, 32 nt, Homo Sapiens
ccuguugaaaaaaguuacaaaaauaaaucuua

SEQ ID NO: 208015 - RNA, 32 nt, Homo Sapiens
ccucaguugggagcuuccaaagccgggugauc

SEQ ID NO: 208016 - RNA, 32 nt, Homo Sapiens
ccuugcagcucuucuggaccgaggagcccaaa

SEQ ID NO: 208017 - RNA, 32 nt, Homo Sapiens
cugcuucccaccugcccuccccacccccugcc

SEQ ID NO: 208018 - RNA, 32 nt, Homo Sapiens
ugugcaguauuuuuacuccguuuuugaccaaa

SEQ ID NO: 208019 - RNA, 32 nt, Homo Sapiens
ggaagaggagagcccccugcccugcccugccc

SEQ ID NO: 208020 - RNA, 30 nt, Homo Sapiens
acccgggcgcccgcauuccugaagcaugag

SEQ ID NO: 208021 - RNA, 32 nt, Homo Sapiens
guguuuuccaaauauagauaugaaauaucuau

SEQ ID NO: 208022 - RNA, 32 nt, Homo Sapiens
agugacagggggcuagggaagaacgggaaaug

SEQ ID NO: 208023 - RNA, 32 nt, Homo Sapiens
ccugcccagccuuagcugggccccacaccacu

SEQ ID NO: 208024 - RNA, 32 nt, Homo Sapiens
aaaugaaaaaacaaaaugugccuguuuaaagc

SEQ ID NO: 208025 - RNA, 32 nt, Homo Sapiens
cuccugugggccugagugcugcuguguuuacu

SEQ ID NO: 208026 - RNA, 32 nt, Homo Sapiens
aggaacguuucaguuccuuucauucauuccug

SEQ ID NO: 208027 - RNA, 32 nt, Homo Sapiens
ccucauuugccccuggcuaucaucauccuaca

SEQ ID NO: 208028 - RNA, 32 nt, Homo Sapiens
gcgacggcucugcugccgacuaacugugcaag

SEQ ID NO: 208029 - RNA, 29 nt, Homo Sapiens
ucauaauaaaguuguuuuaucuuuuaagu

SEQ ID NO: 208030 - RNA, 32 nt, Homo Sapiens
acucccucugauuugaaacgggcuccagcaau

SEQ ID NO: 208031 - RNA, 32 nt, Homo Sapiens
ucuuugccuguucccacccccagacuugaaau

SEQ ID NO: 208032 - RNA, 32 nt, Homo Sapiens
acugaggcggccuggagucuuaguuggcuacu

SEQ ID NO: 208033 - RNA, 32 nt, Homo Sapiens
auuuucaucauugcuuugaauugaauuuuuau

SEQ ID NO: 208034 - RNA, 32 nt, Homo Sapiens
cggcugccuuggcguuuucaacacaaagcucc

SEQ ID NO: 208035 - RNA, 32 nt, Homo Sapiens
uuugcccagaaagcugucuguccaucauguau

SEQ ID NO: 208036 - RNA, 31 nt, Homo Sapiens
gccccuggucccagcaugccccgcgccugag

SEQ ID NO: 208037 - RNA, 32 nt, Homo Sapiens
cguguugcaguucaggacuccuugcuucuugg

SEQ ID NO: 208038 - RNA, 32 nt, Homo Sapiens
ugauuucauagcauuuugauaaaaugccacaa

SEQ ID NO: 208039 - RNA, 32 nt, Homo Sapiens
cuccuugguuugauuuuguguaauggauggaa

SEQ ID NO: 208040 - RNA, 32 nt, Homo Sapiens
ggcuccuggcugagcccucccuguggugaucc

SEQ ID NO: 208041 - RNA, 32 nt, Homo Sapiens
gaagaaaaaacgcaaaaagagaacacauguag

SEQ ID NO: 208042 - RNA, 32 nt, Homo Sapiens
cugccucugccuuuucugucucagcgggcagu

SEQ ID NO: 208043 - RNA, 32 nt, Homo Sapiens
cuggugcucauccccacccccagcgacuuccg

SEQ ID NO: 208044 - RNA, 32 nt, Homo Sapiens
cgagaagacauucauggcuuugggcagaagga

SEQ ID NO: 208045 - RNA, 32 nt, Homo Sapiens
auccuagcucucucuuauuccaguacuauauc

SEQ ID NO: 208046 - RNA, 32 nt, Homo Sapiens
guaauauuuauuuuaacuuaugcaagggugug

SEQ ID NO: 208047 - RNA, 32 nt, Homo Sapiens
cuucccuccacuguuuauguacucauguauuu

SEQ ID NO: 208048 - RNA, 32 nt, Homo Sapiens
ccuugcccuccaguccucuaccucuggccugc

SEQ ID NO: 208049 - RNA, 32 nt, Homo Sapiens
uaguccucuguugggugugguuauccugcaag

SEQ ID NO: 208050 - RNA, 32 nt, Homo Sapiens
aaaugaaugggaaaugucgcuggucugugugg

SEQ ID NO: 208051 - RNA, 32 nt, Homo Sapiens
ccacaggugggguggggacgccuggagcacca

SEQ ID NO: 208052 - RNA, 32 nt, Homo Sapiens
agcagggacaacaggaggaaaugaaggcagag

SEQ ID NO: 208053 - RNA, 32 nt, Homo Sapiens
uuggcugccugcccuccaggggagacacuuuc

SEQ ID NO: 208054 - RNA, 32 nt, Homo Sapiens
aauucccgcaacgcaugaguuugugaggggcg

SEQ ID NO: 208055 - RNA, 32 nt, Homo Sapiens
gggggagccuacuggggacugagcccccagga

SEQ ID NO: 208056 - RNA, 32 nt, Homo Sapiens
caccaccaggguugggggcgccacagcugcga

SEQ ID NO: 208057 - RNA, 32 nt, Homo Sapiens
cuucaagaucacacuugugggcaaucuggggg

SEQ ID NO: 208058 - RNA, 32 nt, Homo Sapiens
cccuacccugcaacuucuauccuuucuuccgc

SEQ ID NO: 208059 - RNA, 32 nt, Homo Sapiens
gguuuccuaaccucuucuuccuccccugcccu

SEQ ID NO: 208060 - RNA, 32 nt, Homo Sapiens
aaagauaauuuucuuuucauuuuugagacaau

SEQ ID NO: 208061 - RNA, 31 nt, Homo Sapiens
cggcugagggcggggugcuggcccaaaggca

SEQ ID NO: 208062 - RNA, 32 nt, Homo Sapiens
accugugccuucuccuuucuucagaacauaug

SEQ ID NO: 208063 - RNA, 32 nt, Homo Sapiens
cuucuugugaauguggauuacaaaaugguaua

SEQ ID NO: 208064 - RNA, 32 nt, Homo Sapiens
guuguccuauuuccuuuuuuuuuuuuuuuuuu

SEQ ID NO: 208065 - RNA, 32 nt, Homo Sapiens
ccagaaaugacaaagaaccguuuuuugugaag

SEQ ID NO: 208066 - RNA, 32 nt, Homo Sapiens
ggagucuuugaucaggaugacaugugccauuu

SEQ ID NO: 208067 - RNA, 32 nt, Homo Sapiens
ugcugcugcaggcugaggcugcggcagaggcg

SEQ ID NO: 208068 - RNA, 32 nt, Homo Sapiens
uccgaucaucgucuuuuuccuaguucuuuugu

SEQ ID NO: 208069 - RNA, 32 nt, Homo Sapiens
agagccaucagcugaagacaucugaaaucuca

SEQ ID NO: 208070 - RNA, 32 nt, Homo Sapiens
gaguguuugcggggagggcccgaggucgcugu

SEQ ID NO: 208071 - RNA, 32 nt, Homo Sapiens
acaggucccuccccggcuuccuccggaggccc

SEQ ID NO: 208072 - RNA, 32 nt, Homo Sapiens
aaucuugcguuuuuuacaaauuggagcaggga

SEQ ID NO: 208073 - RNA, 32 nt, Homo Sapiens
aucucugacaaagggccaccgacuuaaggucc

SEQ ID NO: 208074 - RNA, 32 nt, Homo Sapiens
acgcagggagggcagguggacuauguguggac

SEQ ID NO: 208075 - RNA, 32 nt, Homo Sapiens
gugggcgagcugagcgcagagcugcgaagggg

SEQ ID NO: 208076 - RNA, 32 nt, Homo Sapiens
gaacuguaaugauuucaugacaucugccuaac

SEQ ID NO: 208077 - RNA, 32 nt, Homo Sapiens
cugggcgccggcgggagcuagcagcgucugca

SEQ ID NO: 208078 - RNA, 32 nt, Homo Sapiens
aaagauaauggcauuauuauuuccaagccaua

SEQ ID NO: 208079 - RNA, 32 nt, Homo Sapiens
uccaaaaacaauuagguauuuuaaucugaaau

SEQ ID NO: 208080 - RNA, 32 nt, Homo Sapiens
gggccgcugcccgcccugggccggcaccuugu

SEQ ID NO: 208081 - RNA, 32 nt, Homo Sapiens
guauccucuccuagugucagugucucaaauua

SEQ ID NO: 208082 - RNA, 32 nt, Homo Sapiens
gccccaagccccagagacuaccugccggcucc

SEQ ID NO: 208083 - RNA, 31 nt, Homo Sapiens
uccugccagccccagagacagaugugggcac

SEQ ID NO: 208084 - RNA, 32 nt, Homo Sapiens
caacccccaagcccucgccacccaguccucaa

SEQ ID NO: 208085 - RNA, 32 nt, Homo Sapiens
cagcccccugucacaaugaccuccccauccca

SEQ ID NO: 208086 - RNA, 32 nt, Homo Sapiens
ggaggaggcgcccccggggucgcgagaaugga

SEQ ID NO: 208087 - RNA, 28 nt, Homo Sapiens
accacauggcccgucaggaugaugagaa

SEQ ID NO: 208088 - RNA, 32 nt, Homo Sapiens
gccuccugcgccuguaucaugacugggugccu

SEQ ID NO: 208089 - RNA, 32 nt, Homo Sapiens
uaucccuuacuuuaacccuuucugggaugcaa

SEQ ID NO: 208090 - RNA, 32 nt, Homo Sapiens
gaugcauuuacuacaguuggcuucuaaugcuu

SEQ ID NO: 208091 - RNA, 32 nt, Homo Sapiens
guguuaauuaguuuuucuuccuuugauuuuau

SEQ ID NO: 208092 - RNA, 32 nt, Homo Sapiens
aauaaccgcagccccagcccagccugccuguc

SEQ ID NO: 208093 - RNA, 32 nt, Homo Sapiens
agccaaauacucaucuuuugagacugaaauca

SEQ ID NO: 208094 - RNA, 32 nt, Homo Sapiens
ugcggcggcgccggcguccgcggcagcugaua

SEQ ID NO: 208095 - RNA, 32 nt, Homo Sapiens
acacgcuaugccuuaaauugggccaggcugag

SEQ ID NO: 208096 - RNA, 32 nt, Homo Sapiens
guagcuugguuucuuuuuuuuauuaaauagug

SEQ ID NO: 208097 - RNA, 32 nt, Homo Sapiens
cccugaugucauuuuuguauuucaggaagacu

SEQ ID NO: 208098 - RNA, 32 nt, Homo Sapiens
acacauauaauauauauagauauauaaucccu

SEQ ID NO: 208099 - RNA, 32 nt, Homo Sapiens
uugcagaagugcagcucgcccggagcagccca

SEQ ID NO: 208100 - RNA, 32 nt, Homo Sapiens
acagcacccaguguguuccccuggagagucag

SEQ ID NO: 208101 - RNA, 32 nt, Homo Sapiens
cggaagaaagcccaggcggucuguggcccaga

SEQ ID NO: 208102 - RNA, 32 nt, Homo Sapiens
cugaccuccugauccgcccaccucggccaguu

SEQ ID NO: 208103 - RNA, 32 nt, Homo Sapiens
uccugugugggaacuaugggaaaaagaccuga

SEQ ID NO: 208104 - RNA, 32 nt, Homo Sapiens
cugcuggaagggggcgauggcuguggcccugg

SEQ ID NO: 208105 - RNA, 32 nt, Homo Sapiens
ggcggcgcagcggagucugggcggcggcgcgu

SEQ ID NO: 208106 - RNA, 32 nt, Homo Sapiens
acucuguccguucugcgaugacugcugcucug

SEQ ID NO: 208107 - RNA, 32 nt, Homo Sapiens
aaagagauaaaacuuuaugcccagauuccccc

SEQ ID NO: 208108 - RNA, 32 nt, Homo Sapiens
gaauccugcucuauguacaguuuuguauuaua

SEQ ID NO: 208109 - RNA, 32 nt, Homo Sapiens
auaguagauaauggauaaauauguguugcaug

SEQ ID NO: 208110 - RNA, 30 nt, Homo Sapiens
aacagguucgcgggcggcggccugacgacc

SEQ ID NO: 208111 - RNA, 32 nt, Homo Sapiens
caguagaccggcccgcgccccgggaacgcggc

SEQ ID NO: 208112 - RNA, 32 nt, Homo Sapiens
gcaacccgucagucugucuccauccuuucacc

SEQ ID NO: 208113 - RNA, 32 nt, Homo Sapiens
ccggggcccagcuggcccggccaugcugcugg

SEQ ID NO: 208114 - RNA, 32 nt, Homo Sapiens
uuaauucuaagucauuuuuuuauuuuguuacc

SEQ ID NO: 208115 - RNA, 32 nt, Homo Sapiens
guagugaaaauugaaaaggauauuuuacaacc

SEQ ID NO: 208116 - RNA, 32 nt, Homo Sapiens
aaagagagcugaggggcgggggcgcugcggca

SEQ ID NO: 208117 - RNA, 32 nt, Homo Sapiens
cugucugaggggugggggugccgcucucucug

SEQ ID NO: 208118 - RNA, 32 nt, Homo Sapiens
aucucggcaggaucuccuggcuccuugagugc

SEQ ID NO: 208119 - RNA, 31 nt, Homo Sapiens
gcaaaaugggcugcuuuuaaucuggucacgu

SEQ ID NO: 208120 - RNA, 32 nt, Homo Sapiens
accgcugccaccugcucagagugaaauaauga

SEQ ID NO: 208121 - RNA, 32 nt, Homo Sapiens
cccacauaaaagaaaaagaaacaaagauaagg

SEQ ID NO: 208122 - RNA, 32 nt, Homo Sapiens
gggcucugucuccucccugcugugcuuccuga

SEQ ID NO: 208123 - RNA, 32 nt, Homo Sapiens
cgugcgucaccauggcgaccgccgccggcagc

SEQ ID NO: 208124 - RNA, 32 nt, Homo Sapiens
cccugacgaccuagagagaucccggcucccag

SEQ ID NO: 208125 - RNA, 32 nt, Homo Sapiens
cccgcccagcagcaccacggaccccagccacu

SEQ ID NO: 208126 - RNA, 32 nt, Homo Sapiens
uaguuuuuaaagaucucggugcugaacgacag

SEQ ID NO: 208127 - RNA, 28 nt, Homo Sapiens
gguaugccaccuuuuccaauuaucauuc

SEQ ID NO: 208128 - RNA, 32 nt, Homo Sapiens
cagccauccccuauagaaaggcacagcuuuug

SEQ ID NO: 208129 - RNA, 32 nt, Homo Sapiens
gaauuucaaaagacauggagaaaguugggaag

SEQ ID NO: 208130 - RNA, 32 nt, Homo Sapiens
ggcuucucuuuuuguuuuuuuaccuagaaauu

SEQ ID NO: 208131 - RNA, 32 nt, Homo Sapiens
ccuuauugauaaaacaagauaaucgaugagaa

SEQ ID NO: 208132 - RNA, 32 nt, Homo Sapiens
gagccuguuguccauugcacucagcccuguac

SEQ ID NO: 208133 - RNA, 32 nt, Homo Sapiens
ucucuccuuaaauggaccuuaacaaaguagaa

SEQ ID NO: 208134 - RNA, 32 nt, Homo Sapiens
agagccggcccggcugccggacggugcggccc

SEQ ID NO: 208135 - RNA, 32 nt, Homo Sapiens
gcagcccagucucuggcaguuuuuacggcugc

SEQ ID NO: 208136 - RNA, 32 nt, Homo Sapiens
agcccuagcuccugggaggcuccucagaguuu

SEQ ID NO: 208137 - RNA, 32 nt, Homo Sapiens
ccacucggggaggccaggcaccccccuccuuc

SEQ ID NO: 208138 - RNA, 32 nt, Homo Sapiens
acccaucacaccauggaaucugcacaacagca

SEQ ID NO: 208139 - RNA, 32 nt, Homo Sapiens
cuuggcuucccucccaugggaagugcuggaau

SEQ ID NO: 208140 - RNA, 32 nt, Homo Sapiens
cgcuccacuuccuucacauccuccuccgccuc

SEQ ID NO: 208141 - RNA, 32 nt, Homo Sapiens
ggagccuuaggaccauggacgcucucaauagg

SEQ ID NO: 208142 - RNA, 32 nt, Homo Sapiens
aaauguggaccaugggcuuagaguagggacug

SEQ ID NO: 208143 - RNA, 32 nt, Homo Sapiens
acucccccacccaggacggcugugaugaggug

SEQ ID NO: 208144 - RNA, 32 nt, Homo Sapiens
ucacuuacaccugacugacccuccugaacugc

SEQ ID NO: 208145 - RNA, 29 nt, Homo Sapiens
acaaaauaaaguuuguacuuuguuuuuua

SEQ ID NO: 208146 - RNA, 32 nt, Homo Sapiens
gccgugaacaggugggugucugcgugcgucca

SEQ ID NO: 208147 - RNA, 32 nt, Homo Sapiens
aagccggugccgggcgcccagggguugccgcg

SEQ ID NO: 208148 - RNA, 32 nt, Homo Sapiens
gugggcuucgggagggcggggggagguugauu

SEQ ID NO: 208149 - RNA, 32 nt, Homo Sapiens
aguuugcucauacuuugugacuugcggucaca

SEQ ID NO: 208150 - RNA, 32 nt, Homo Sapiens
cugaguuugacagagaaaauaaacagauguca

SEQ ID NO: 208151 - RNA, 32 nt, Homo Sapiens
aucaaaaaauaaagcuccuuguccucauuaaa

SEQ ID NO: 208152 - RNA, 32 nt, Homo Sapiens
uuuggguuugauauacagagaauggugacacc

SEQ ID NO: 208153 - RNA, 32 nt, Homo Sapiens
cacugauacuugggacccacuccagagauucu

SEQ ID NO: 208154 - RNA, 32 nt, Homo Sapiens
gaaaggaaggagaggagaaaacugcacuggau

SEQ ID NO: 208155 - RNA, 32 nt, Homo Sapiens
acgugugccgccuuccuucucccaggcccugg

SEQ ID NO: 208156 - RNA, 32 nt, Homo Sapiens
ucaggcuccgcggcgcagcucgaaaaggaaua

SEQ ID NO: 208157 - RNA, 32 nt, Homo Sapiens
cuccuccaguguuuccuugaugggccaccuca

SEQ ID NO: 208158 - RNA, 32 nt, Homo Sapiens
aucauuguaagaacuuuauuugaaagacugaa

SEQ ID NO: 208159 - RNA, 32 nt, Homo Sapiens
uaguacuauuuguuuuaccacugauugcacua

SEQ ID NO: 208160 - RNA, 32 nt, Homo Sapiens
caaucuuaguugcugggccaguucuucugaau

SEQ ID NO: 208161 - RNA, 32 nt, Homo Sapiens
ggugauggcagccacaccucccggcccugcuc

SEQ ID NO: 208162 - RNA, 32 nt, Homo Sapiens
auccuagcaacagauuucucugguugucaguu

SEQ ID NO: 208163 - RNA, 32 nt, Homo Sapiens
cuggacuucuuuucuuuuuuuuuucuuuuuuu

SEQ ID NO: 208164 - RNA, 32 nt, Homo Sapiens
cacccugaucucuagcuucucagccuccagaa

SEQ ID NO: 208165 - RNA, 32 nt, Homo Sapiens
ggcuguguggacaagaaauugguuucaucuca

SEQ ID NO: 208166 - RNA, 32 nt, Homo Sapiens
accuaggacccccugcgccuuuuuuagcuuca

SEQ ID NO: 208167 - RNA, 32 nt, Homo Sapiens
ccucaaugaucgucuguuucuaauuaaggaau

SEQ ID NO: 208168 - RNA, 32 nt, Homo Sapiens
uccccuggcagcagccacguggcaugaagaga

SEQ ID NO: 208169 - RNA, 32 nt, Homo Sapiens
aggcccuuuuuauacaaaaauucucaguucuc

SEQ ID NO: 208170 - RNA, 32 nt, Homo Sapiens
ggccccugucucugguccccagccucagugcc

SEQ ID NO: 208171 - RNA, 32 nt, Homo Sapiens
cgggccgagcggggcggccuuuguuaagcagc

SEQ ID NO: 208172 - RNA, 32 nt, Homo Sapiens
ggcaugucaggagaguuagaggugcaucacac

SEQ ID NO: 208173 - RNA, 32 nt, Homo Sapiens
gaccccaagaacucggggugucagagggcaaa

SEQ ID NO: 208174 - RNA, 27 nt, Homo Sapiens
auaauccucuucuucauccucauauga

SEQ ID NO: 208175 - RNA, 27 nt, Homo Sapiens
guacuuccuguugucagccccucaagc

SEQ ID NO: 208176 - RNA, 31 nt, Homo Sapiens
gcgugcaugccccugcugcccgcggcgcuca

SEQ ID NO: 208177 - RNA, 32 nt, Homo Sapiens
uugauuuaaucuccagggacagaaauaauuca

SEQ ID NO: 208178 - RNA, 32 nt, Homo Sapiens
ggugcccagcaucacguaaaacaucgauaugc

SEQ ID NO: 208179 - RNA, 32 nt, Homo Sapiens
uacuguauggcuucuuuuucauguuucaucua

SEQ ID NO: 208180 - RNA, 32 nt, Homo Sapiens
acugcccucacaggacagcgccaauaacaaua

SEQ ID NO: 208181 - RNA, 32 nt, Homo Sapiens
gaaaugacccuucaauuuccucuucuuuuucc

SEQ ID NO: 208182 - RNA, 32 nt, Homo Sapiens
acaccaguggccucgugguuauaagcaaggcu

SEQ ID NO: 208183 - RNA, 32 nt, Homo Sapiens
acuccauguagauaagagcaaguguaggcaaa

SEQ ID NO: 208184 - RNA, 32 nt, Homo Sapiens
gccuggugcggcagcggcggccaaaucuuccg

SEQ ID NO: 208185 - RNA, 32 nt, Homo Sapiens
ucuacaaaaaauacaaaaauuagccaggcaug

SEQ ID NO: 208186 - RNA, 32 nt, Homo Sapiens
accguggaguccuaacauccacagugucugcu

SEQ ID NO: 208187 - RNA, 31 nt, Homo Sapiens
ucaguugagccccagaguucaagaccagccu

SEQ ID NO: 208188 - RNA, 32 nt, Homo Sapiens
aaccauacauuuauuuuccaaaacagaaauug

SEQ ID NO: 208189 - RNA, 32 nt, Homo Sapiens
cuauuccuuuuuucuuuuuuugaccgcaauga

SEQ ID NO: 208190 - RNA, 32 nt, Homo Sapiens
gagccgcacgguccccucuccuuccccauccu

SEQ ID NO: 208191 - RNA, 31 nt, Homo Sapiens
ugccucacaaagaaauuaagaaguuguccgu

SEQ ID NO: 208192 - RNA, 32 nt, Homo Sapiens
ugcguauucaaaugaggccuggcucccguugc

SEQ ID NO: 208193 - RNA, 32 nt, Homo Sapiens
ugaugccuugagggguguuucagacuggcggc

SEQ ID NO: 208194 - RNA, 32 nt, Homo Sapiens
caguuauagguggaugugccaagaugcuggug

SEQ ID NO: 208195 - RNA, 32 nt, Homo Sapiens
acuugcaguggaagauacuuggaccgaguaga

SEQ ID NO: 208196 - RNA, 32 nt, Homo Sapiens
gccgucccucaguuugcccccggaggaggcag

SEQ ID NO: 208197 - RNA, 32 nt, Homo Sapiens
aaacauuuuuauuuccccuuuuaucagcucca

SEQ ID NO: 208198 - RNA, 32 nt, Homo Sapiens
ccgcucucgccucggcgcccgcagccacgaug

SEQ ID NO: 208199 - RNA, 32 nt, Homo Sapiens
gacacgagagcagaaagaaguagaucucauuc

SEQ ID NO: 208200 - RNA, 32 nt, Homo Sapiens
gcacucuguccucaugaggagggacagcgauu

SEQ ID NO: 208201 - RNA, 32 nt, Homo Sapiens
ugagggagccugugcccucccugcccagucgc

SEQ ID NO: 208202 - RNA, 32 nt, Homo Sapiens
ccccguguccacucacugaagucccuucccuc

SEQ ID NO: 208203 - RNA, 32 nt, Homo Sapiens
auugaaauagcccaaaccucuaccacagagcg

SEQ ID NO: 208204 - RNA, 32 nt, Homo Sapiens
gcuguuccaggcucacugcccauggugugcuc

SEQ ID NO: 208205 - RNA, 32 nt, Homo Sapiens
accaugcccguauaauuuuuuguauuuuuagu

SEQ ID NO: 208206 - RNA, 32 nt, Homo Sapiens
gggguucaggacuuuggaggugguggaacaga

SEQ ID NO: 208207 - RNA, 32 nt, Homo Sapiens
agugauugugguggggugugucuggauguccg

SEQ ID NO: 208208 - RNA, 32 nt, Homo Sapiens
ucuagucguggauauaauuaaaacacuaaaga

SEQ ID NO: 208209 - RNA, 32 nt, Homo Sapiens
cugguacccaggccaccucucagacacacacu

SEQ ID NO: 208210 - RNA, 32 nt, Homo Sapiens
ccagaaggucuuuaaugagcugcugguccugc

SEQ ID NO: 208211 - RNA, 32 nt, Homo Sapiens
uaugaggcuuugcuuuuuguuugcuuuuaagu

SEQ ID NO: 208212 - RNA, 32 nt, Homo Sapiens
uucuaucaaauaaaugacuuucauauugcaac

SEQ ID NO: 208213 - RNA, 32 nt, Homo Sapiens
ccucucuccagaucaggugucucuagcacagg

SEQ ID NO: 208214 - RNA, 32 nt, Homo Sapiens
ugggaggaaggggacaguugcagucucacuug

SEQ ID NO: 208215 - RNA, 32 nt, Homo Sapiens
auccuuugucuucuaaauugcaauagcuauaa

SEQ ID NO: 208216 - RNA, 32 nt, Homo Sapiens
ccuggcaugggcagggagcccacaaaacucua

SEQ ID NO: 208217 - RNA, 32 nt, Homo Sapiens
ugggcgcgcucgccagcccaggggucgccaug

SEQ ID NO: 208218 - RNA, 32 nt, Homo Sapiens
gacgucaguggcuuaaauucuuugaauucuuu

SEQ ID NO: 208219 - RNA, 32 nt, Homo Sapiens
uagaugcccagcugcccuaccccagaccacug

SEQ ID NO: 208220 - RNA, 32 nt, Homo Sapiens
cggagggagcccggccggcucggacugggcgg

SEQ ID NO: 208221 - RNA, 32 nt, Homo Sapiens
cgguccaucccccacaccaugcccagcaccag

SEQ ID NO: 208222 - RNA, 32 nt, Homo Sapiens
uugaaacaaaaauuuuuauuuagaaauuuagc

SEQ ID NO: 208223 - RNA, 32 nt, Homo Sapiens
ggaaccacaucaccugcccuucugccuacacu

SEQ ID NO: 208224 - RNA, 32 nt, Homo Sapiens
ucccguuggcaaacagaaguucaggaugagac

SEQ ID NO: 208225 - RNA, 32 nt, Homo Sapiens
uuccaugucuuugaaauugugaauugugcugu

SEQ ID NO: 208226 - RNA, 30 nt, Homo Sapiens
ucuggugggcagcuugauggcugauggagg

SEQ ID NO: 208227 - RNA, 32 nt, Homo Sapiens
ccccaggguccucccucggcuucacugggugc

SEQ ID NO: 208228 - RNA, 32 nt, Homo Sapiens
gugugugugcgcgcgcacgcacgccuugagca

SEQ ID NO: 208229 - RNA, 32 nt, Homo Sapiens
uguauauguauauaucucuauauuuacauaua

SEQ ID NO: 208230 - RNA, 32 nt, Homo Sapiens
uaauacugaaagauuuucuaaaugucacugcu

SEQ ID NO: 208231 - RNA, 32 nt, Homo Sapiens
ucagggcccaggcuccuucucaggucucaguc

SEQ ID NO: 208232 - RNA, 32 nt, Homo Sapiens
auccgcggcuggagacccagcggcgaguagcc

SEQ ID NO: 208233 - RNA, 32 nt, Homo Sapiens
aaucaccgagucugcggggcuggacgcugacc

SEQ ID NO: 208234 - RNA, 32 nt, Homo Sapiens
cgagaucuaagcuucuucuaacuccugcuguc

SEQ ID NO: 208235 - RNA, 32 nt, Homo Sapiens
cgaccgcgcaccuguccgcccggagcugggac

SEQ ID NO: 208236 - RNA, 32 nt, Homo Sapiens
cacucucagaggucagaaccuuggagaucaga

SEQ ID NO: 208237 - RNA, 32 nt, Homo Sapiens
cggucaauccugugggugaagagagagggaaa

SEQ ID NO: 208238 - RNA, 32 nt, Homo Sapiens
ccugcagcggcugcccucuggggccacuuggu

SEQ ID NO: 208239 - RNA, 32 nt, Homo Sapiens
gacugggggccaucaagugcugccuggaugaa

SEQ ID NO: 208240 - RNA, 32 nt, Homo Sapiens
ggaggauguaccuugugucucuuucaagugcc

SEQ ID NO: 208241 - RNA, 32 nt, Homo Sapiens
gcaagugaacacacucuaugucaacucuccuu

SEQ ID NO: 208242 - RNA, 32 nt, Homo Sapiens
uuagugugauccaguuugauauuuuuagguug

SEQ ID NO: 208243 - RNA, 32 nt, Homo Sapiens
uucagauaccaaucaaugggcauuuggcuccu

SEQ ID NO: 208244 - RNA, 32 nt, Homo Sapiens
gguaaucaaauuaugugugaaauguaggaaaa

SEQ ID NO: 208245 - RNA, 32 nt, Homo Sapiens
ugggccgggaugcagcccuacugagccccuuu

SEQ ID NO: 208246 - RNA, 32 nt, Homo Sapiens
acccugccaguucuaggagccacugggcagag

SEQ ID NO: 208247 - RNA, 32 nt, Homo Sapiens
cuuucuuggugcccuuacugcuccuugauuuu

SEQ ID NO: 208248 - RNA, 32 nt, Homo Sapiens
ucuaggagccgcgcgggaaggaugcugguccg

SEQ ID NO: 208249 - RNA, 32 nt, Homo Sapiens
ccccugaugugagccgucccagggccauguug

SEQ ID NO: 208250 - RNA, 32 nt, Homo Sapiens
aggucagguguguucuccugcucugaacccug

SEQ ID NO: 208251 - RNA, 32 nt, Homo Sapiens
gcagacuuauaaaaauaaaaaggcuauuuuau

SEQ ID NO: 208252 - RNA, 32 nt, Homo Sapiens
caggccuguggugcugcagacaaccgucuccu

SEQ ID NO: 208253 - RNA, 32 nt, Homo Sapiens
ugcugccucucccucccuguuugaaucugcag

SEQ ID NO: 208254 - RNA, 31 nt, Homo Sapiens
uucacccacccgggccugcccugugcagggu

SEQ ID NO: 208255 - RNA, 32 nt, Homo Sapiens
aucuaccucacagacuuguuaugaggauaaag

SEQ ID NO: 208256 - RNA, 32 nt, Homo Sapiens
cagcuggggccccuuccuggggaauggagugc

SEQ ID NO: 208257 - RNA, 32 nt, Homo Sapiens
gaguccguugcggcugccgccccgacgcccgc

SEQ ID NO: 208258 - RNA, 32 nt, Homo Sapiens
aguauagagaugaacagaaaacuuuuucuuua

SEQ ID NO: 208259 - RNA, 32 nt, Homo Sapiens
caaucgcuuuugcuaaacacacacccucacac

SEQ ID NO: 208260 - RNA, 32 nt, Homo Sapiens
uaacuccauuugguuuccaagaucucacuucu

SEQ ID NO: 208261 - RNA, 32 nt, Homo Sapiens
cuugugcuuuauuuuucuuagucauuugugga

SEQ ID NO: 208262 - RNA, 32 nt, Homo Sapiens
uuucagaaaaagacaaaacgauggugcugacu

SEQ ID NO: 208263 - RNA, 32 nt, Homo Sapiens
ccucuaaauaaucaauaguuucuacuauagag

SEQ ID NO: 208264 - RNA, 32 nt, Homo Sapiens
auuacguaaaauaaauuggaggucuccacaaa

SEQ ID NO: 208265 - RNA, 32 nt, Homo Sapiens
accacuccaucccagaugccugagccacugca

SEQ ID NO: 208266 - RNA, 32 nt, Homo Sapiens
uggugcagaguagguauuugguaaauguugaa

SEQ ID NO: 208267 - RNA, 32 nt, Homo Sapiens
cucugagaauaaagcauuggaauagaaguaau

SEQ ID NO: 208268 - RNA, 32 nt, Homo Sapiens
acucccaccaggcucuuucucccuuuuccucu

SEQ ID NO: 208269 - RNA, 32 nt, Homo Sapiens
gaggucccugccuuaaauuuucccugggggug

SEQ ID NO: 208270 - RNA, 32 nt, Homo Sapiens
caacccaaggcaaugauauggcaugucaucuu

SEQ ID NO: 208271 - RNA, 32 nt, Homo Sapiens
ugugaaaugaagacuauauauauggaauggag

SEQ ID NO: 208272 - RNA, 32 nt, Homo Sapiens
uguuccacugaaguggcagucuacgacaagga

SEQ ID NO: 208273 - RNA, 32 nt, Homo Sapiens
ucuggaugucauugacgauaauguuuauggag

SEQ ID NO: 208274 - RNA, 32 nt, Homo Sapiens
uagaacaguuuuauuuuuauuaaaacuugacu

SEQ ID NO: 208275 - RNA, 32 nt, Homo Sapiens
gugcgacagacaccaagcgccuuccccacgcc

SEQ ID NO: 208276 - RNA, 32 nt, Homo Sapiens
guuggcucuucaguaauggaaacuauaaagug

SEQ ID NO: 208277 - RNA, 32 nt, Homo Sapiens
aauccagggcuuuuggggagaugaagagccaa

SEQ ID NO: 208278 - RNA, 32 nt, Homo Sapiens
aagacucacugacauccugacaucucaggauc

SEQ ID NO: 208279 - RNA, 32 nt, Homo Sapiens
ucaggaggcagacacgcgcugcuggguaauga

SEQ ID NO: 208280 - RNA, 32 nt, Homo Sapiens
uuucuuaauauguuuguaacauuauugagaua

SEQ ID NO: 208281 - RNA, 32 nt, Homo Sapiens
aagcuuccuggccacugggcuuggaugcuucg

SEQ ID NO: 208282 - RNA, 32 nt, Homo Sapiens
guuuuaauuugcauuucuuugacuacagaaau

SEQ ID NO: 208283 - RNA, 32 nt, Homo Sapiens
gcccgccggaagccugcccccguacccucccu

SEQ ID NO: 208284 - RNA, 32 nt, Homo Sapiens
cagaugcuuggccccuggcccaggcugugucu

SEQ ID NO: 208285 - RNA, 32 nt, Homo Sapiens
aucaagaaaaaggaaaaggaaauucaccgauc

SEQ ID NO: 208286 - RNA, 32 nt, Homo Sapiens
gcuuuccuggaaagcgcugccccucgccgcgg

SEQ ID NO: 208287 - RNA, 32 nt, Homo Sapiens
cucagaaauggccaauuuaacuuuacaguaac

SEQ ID NO: 208288 - RNA, 32 nt, Homo Sapiens
cacccucacugguuccuccccccaacgcaagg

SEQ ID NO: 208289 - RNA, 32 nt, Homo Sapiens
aggcaucacaauguuaagauuuuuacagggua

SEQ ID NO: 208290 - RNA, 30 nt, Homo Sapiens
aagaaugugcggaucgaagaccucucccgg

SEQ ID NO: 208291 - RNA, 32 nt, Homo Sapiens
auacauuauauucauguacauaaaauuaaaga

SEQ ID NO: 208292 - RNA, 32 nt, Homo Sapiens
augggacacaugagacgcuacugcagcuuuug

SEQ ID NO: 208293 - RNA, 32 nt, Homo Sapiens
uauacuuuaaggaaacaagauuacaacaauua

SEQ ID NO: 208294 - RNA, 32 nt, Homo Sapiens
aagacugcugauaacuaucugugauugauagg

SEQ ID NO: 208295 - RNA, 32 nt, Homo Sapiens
uaaaaugaucauuguggacuauuggcuacaaa

SEQ ID NO: 208296 - RNA, 32 nt, Homo Sapiens
ccuuaguauaaucaauguauacucccuuacug

SEQ ID NO: 208297 - RNA, 32 nt, Homo Sapiens
cccaauuuaagugguucuguaccacaaagaau

SEQ ID NO: 208298 - RNA, 32 nt, Homo Sapiens
cuccccugugucugcugguggcugcugaggcc

SEQ ID NO: 208299 - RNA, 32 nt, Homo Sapiens
uccugaccuuggccaaaguguugggauuacag

SEQ ID NO: 208300 - RNA, 32 nt, Homo Sapiens
cucuggaucuucugaugcucacagcaaagagc

SEQ ID NO: 208301 - RNA, 32 nt, Homo Sapiens
agaggagaaaugcagaugaacgcuacuauauu

SEQ ID NO: 208302 - RNA, 32 nt, Homo Sapiens
gcgcgguagugggacccgacccugucuccagu

SEQ ID NO: 208303 - RNA, 32 nt, Homo Sapiens
cuugggggaggacuggggagggggccguggga

SEQ ID NO: 208304 - RNA, 32 nt, Homo Sapiens
gucacuacaccugcagcaccacgcucggagga

SEQ ID NO: 208305 - RNA, 32 nt, Homo Sapiens
auuuuggguuauguaguaaaucaaauaugcau

SEQ ID NO: 208306 - RNA, 32 nt, Homo Sapiens
uguucauagucagaauuguauuuuggauuuuu

SEQ ID NO: 208307 - RNA, 32 nt, Homo Sapiens
ggcaaggagcagagauggaaagaaauucauag

SEQ ID NO: 208308 - RNA, 32 nt, Homo Sapiens
cuaaauuguauuucuuuauagagaaaguaccu

SEQ ID NO: 208309 - RNA, 32 nt, Homo Sapiens
uaugaaagcugugauaaaaauguuucagaugu

SEQ ID NO: 208310 - RNA, 32 nt, Homo Sapiens
cuaauugcaucuuuucccggcgucucgucugc

SEQ ID NO: 208311 - RNA, 32 nt, Homo Sapiens
gggugagggucuuagcucccacugcuuggggc

SEQ ID NO: 208312 - RNA, 32 nt, Homo Sapiens
uguauuccuagguuugcuaagagcuuucauca

SEQ ID NO: 208313 - RNA, 32 nt, Homo Sapiens
agcccaauuaaaccucugaaaagugugaggaa

SEQ ID NO: 208314 - RNA, 32 nt, Homo Sapiens
cuuauguggcgccacccuccccauccucucag

SEQ ID NO: 208315 - RNA, 32 nt, Homo Sapiens
ucagaaggccucgggagcugcgcuguguauuc

SEQ ID NO: 208316 - RNA, 32 nt, Homo Sapiens
ccgcugccgcacuucggucccucccgagcccc

SEQ ID NO: 208317 - RNA, 32 nt, Homo Sapiens
aaauagauuuuaacucuucauccagugcuaug

SEQ ID NO: 208318 - RNA, 32 nt, Homo Sapiens
ugcuugucacugcuuuuuccucccugccagga

SEQ ID NO: 208319 - RNA, 32 nt, Homo Sapiens
uuaaagaaggaggugggaaaagaggacuuauu

SEQ ID NO: 208320 - RNA, 25 nt, Homo Sapiens
aguuaauaaaagacaugaacuaaca

SEQ ID NO: 208321 - RNA, 32 nt, Homo Sapiens
acugaaacuugcugccuauuggguaugcugag

SEQ ID NO: 208322 - RNA, 32 nt, Homo Sapiens
caugcauuccuccuuuugucaucuuguugggg

SEQ ID NO: 208323 - RNA, 32 nt, Homo Sapiens
ucuuuguuuaaaugaaagcauacuguugaaac

SEQ ID NO: 208324 - RNA, 32 nt, Homo Sapiens
auuccggaauggaauaaaaacaauaugaguag

SEQ ID NO: 208325 - RNA, 32 nt, Homo Sapiens
uuuuuuaaaaagacaaaaacaaaacaacaaca

SEQ ID NO: 208326 - RNA, 32 nt, Homo Sapiens
ggauugcaauaccaccuguggagaaaauggua

SEQ ID NO: 208327 - RNA, 32 nt, Homo Sapiens
gguagagcuggaggauaagagaugcagaccau

SEQ ID NO: 208328 - RNA, 32 nt, Homo Sapiens
aagauccucccgccuuggucucccagaguguu

SEQ ID NO: 208329 - RNA, 32 nt, Homo Sapiens
uacucuccaaauauuguaaugcaaaaagucuc

SEQ ID NO: 208330 - RNA, 32 nt, Homo Sapiens
accagccuguuuuguccuggucucucuggggu

SEQ ID NO: 208331 - RNA, 32 nt, Homo Sapiens
auuucuugucuauuuuaacccgucugcuucua

SEQ ID NO: 208332 - RNA, 32 nt, Homo Sapiens
ugccccaucacacccggcaucuacacaagauc

SEQ ID NO: 208333 - RNA, 32 nt, Homo Sapiens
ccgcgccgcuggcgccagcacugggaggaggc

SEQ ID NO: 208334 - RNA, 32 nt, Homo Sapiens
uuuauuuauuuuuuauaugggguaaagaaauc

SEQ ID NO: 208335 - RNA, 32 nt, Homo Sapiens
uggcucuguuggugcccagcgugcgggggugu

SEQ ID NO: 208336 - RNA, 32 nt, Homo Sapiens
uuuucuuuuuaaaauuuaauugaucaggauug

SEQ ID NO: 208337 - RNA, 32 nt, Homo Sapiens
gacagcaucuucucuauuggccucucagggaa

SEQ ID NO: 208338 - RNA, 32 nt, Homo Sapiens
aagugaaggaugcuggcggggaggcccggaac

SEQ ID NO: 208339 - RNA, 32 nt, Homo Sapiens
gggagcacagcuuuccugggucuggauucccg

SEQ ID NO: 208340 - RNA, 32 nt, Homo Sapiens
aggccucccagaagcaauuucuaucugucccc

SEQ ID NO: 208341 - RNA, 32 nt, Homo Sapiens
uuuuaagucuaauucaugcagaugauugauug

SEQ ID NO: 208342 - RNA, 32 nt, Homo Sapiens
ucgcaguggguuccggagagugcaggugauuu

SEQ ID NO: 208343 - RNA, 32 nt, Homo Sapiens
ucccaggcuccuuccaccuggagucccccucc

SEQ ID NO: 208344 - RNA, 32 nt, Homo Sapiens
ccaaauccaguggcucaaacaccuggaaauag

SEQ ID NO: 208345 - RNA, 32 nt, Homo Sapiens
gcugaauuuacuaugaccauuuauaagcagug

SEQ ID NO: 208346 - RNA, 32 nt, Homo Sapiens
aacuagaggcauuugagaacgaaggccucuug

SEQ ID NO: 208347 - RNA, 32 nt, Homo Sapiens
uucaaguaaaaauuauuuuuuauauauuacag

SEQ ID NO: 208348 - RNA, 32 nt, Homo Sapiens
gcgcggaaagccgacgcgcguccauuggucgg

SEQ ID NO: 208349 - RNA, 32 nt, Homo Sapiens
acaccccucauuauagcagcucagauguguca

SEQ ID NO: 208350 - RNA, 32 nt, Homo Sapiens
agacaccugcucacucaccaccagcugggcuc

SEQ ID NO: 208351 - RNA, 32 nt, Homo Sapiens
gcuggccgaaguuaggcggagccccgaggcgg

SEQ ID NO: 208352 - RNA, 32 nt, Homo Sapiens
cgccgagaugaccugggcaccucugcguugaa

SEQ ID NO: 208353 - RNA, 32 nt, Homo Sapiens
aagcagcggcgcccuggugccucucguccaug

SEQ ID NO: 208354 - RNA, 32 nt, Homo Sapiens
aagcaugcagaaaaagaagcagacguuuuaca

SEQ ID NO: 208355 - RNA, 32 nt, Homo Sapiens
agaacugaaaucaaugugauucauugauguaa

SEQ ID NO: 208356 - RNA, 32 nt, Homo Sapiens
uuucagccaaaauaaagaccgccuguaauaau

SEQ ID NO: 208357 - RNA, 32 nt, Homo Sapiens
cgcuguccuaggcgggauggugccgcugugcc

SEQ ID NO: 208358 - RNA, 32 nt, Homo Sapiens
aaagccggagcccgcggggccggcgcucucag

SEQ ID NO: 208359 - RNA, 32 nt, Homo Sapiens
gaauuuccagcaaauuaugaaguaaaaaaggc

SEQ ID NO: 208360 - RNA, 31 nt, Homo Sapiens
ccaaggauaggaaagaggauaugauggguuu

SEQ ID NO: 208361 - RNA, 32 nt, Homo Sapiens
uuuuuaccuuguuuucucuauaggucaugauu

SEQ ID NO: 208362 - RNA, 32 nt, Homo Sapiens
uauguggggcugagagucaaaagggaaagccu

SEQ ID NO: 208363 - RNA, 32 nt, Homo Sapiens
aaguuggggugucugcuuugggaccagaggaa

SEQ ID NO: 208364 - RNA, 32 nt, Homo Sapiens
gaacaccagaacuuauuccuccuaaauguaac

SEQ ID NO: 208365 - RNA, 32 nt, Homo Sapiens
acagccccggcagccccuggcuccuuggucuc

SEQ ID NO: 208366 - RNA, 32 nt, Homo Sapiens
auggcacaagaccagcagcaucagcagccuuu

SEQ ID NO: 208367 - RNA, 32 nt, Homo Sapiens
cgcagggcccugccgcgccgccuucagagccc

SEQ ID NO: 208368 - RNA, 32 nt, Homo Sapiens
ggcaggaagaacucagagcuccauccuguggc

SEQ ID NO: 208369 - RNA, 32 nt, Homo Sapiens
ccucgcccuccagccccccgccccuuagggug

SEQ ID NO: 208370 - RNA, 32 nt, Homo Sapiens
cugcucuugccaaaugcucuccagcauuguug

SEQ ID NO: 208371 - RNA, 32 nt, Homo Sapiens
auccgaacgcguugcgggugguugugaggagg

SEQ ID NO: 208372 - RNA, 32 nt, Homo Sapiens
ccaguucauacuaagcagagccaggcagaggc

SEQ ID NO: 208373 - RNA, 32 nt, Homo Sapiens
uccccagugucuauuguuccugucuugauguc

SEQ ID NO: 208374 - RNA, 32 nt, Homo Sapiens
gggccucccuuggucugcccagcccucgguua

SEQ ID NO: 208375 - RNA, 32 nt, Homo Sapiens
cgccugcgccccccaguggacucgcgagaggg

SEQ ID NO: 208376 - RNA, 32 nt, Homo Sapiens
uccacauaaccugguguucacgagaacacacu

SEQ ID NO: 208377 - RNA, 32 nt, Homo Sapiens
gagccaccgcgcccggcccgagcaccuaagcu

SEQ ID NO: 208378 - RNA, 32 nt, Homo Sapiens
uucacgccauucuccugccucagcuacucagg

SEQ ID NO: 208379 - RNA, 32 nt, Homo Sapiens
gagaaggagugucaagagaggugaaagccaag

SEQ ID NO: 208380 - RNA, 32 nt, Homo Sapiens
ugaggcuggugcuacaauugauguaaaagcag

SEQ ID NO: 208381 - RNA, 32 nt, Homo Sapiens
cagguucuuuaaaaugccaagcaagggacaga

SEQ ID NO: 208382 - RNA, 32 nt, Homo Sapiens
aauauucagguuuauuugauaccuagaaaaua

SEQ ID NO: 208383 - RNA, 32 nt, Homo Sapiens
gguuugcugccagcggcgugagcuucggccgc

SEQ ID NO: 208384 - RNA, 32 nt, Homo Sapiens
aucacauuuaauucucagaaaaucuuaugaga

SEQ ID NO: 208385 - RNA, 32 nt, Homo Sapiens
guguguugggggugggggauugcauggucaau

SEQ ID NO: 208386 - RNA, 32 nt, Homo Sapiens
acgucacgcggccguuacggcgcucaggcguc

SEQ ID NO: 208387 - RNA, 32 nt, Homo Sapiens
cagccugggugacagggcgagacucugucuca

SEQ ID NO: 208388 - RNA, 32 nt, Homo Sapiens
guagaccggccgcgacaccauguagcugcagc

SEQ ID NO: 208389 - RNA, 32 nt, Homo Sapiens
ugauggucugaaugcagauaugcuaccugaac

SEQ ID NO: 208390 - RNA, 32 nt, Homo Sapiens
uggagcagcuggagcagcuggacgcgcugcuc

SEQ ID NO: 208391 - RNA, 32 nt, Homo Sapiens
agcugggagcaaaucccccacccccuaccugg

SEQ ID NO: 208392 - RNA, 32 nt, Homo Sapiens
aggagcggccugcgccgccgcgcgagaggaag

SEQ ID NO: 208393 - RNA, 32 nt, Homo Sapiens
cuaaucagauguauucuguuuauauuauacau

SEQ ID NO: 208394 - RNA, 32 nt, Homo Sapiens
agcuauuuucuuuuuugugcauauagauauuu

SEQ ID NO: 208395 - RNA, 32 nt, Homo Sapiens
cagucuuccaucaugcugaauuuugucuucca

SEQ ID NO: 208396 - RNA, 32 nt, Homo Sapiens
cuuuugaauguucuuagugauacugaccugug

SEQ ID NO: 208397 - RNA, 32 nt, Homo Sapiens
ggaauucauugccuuaggucuuuuuaaauagu

SEQ ID NO: 208398 - RNA, 32 nt, Homo Sapiens
gggagcaguguugggagagggcuccccaaccc

SEQ ID NO: 208399 - RNA, 30 nt, Homo Sapiens
aaaugcguuuauggcuacaagagugccucu

SEQ ID NO: 208400 - RNA, 32 nt, Homo Sapiens
cauuuaaggagauaaaggauguacauaugaau

SEQ ID NO: 208401 - RNA, 32 nt, Homo Sapiens
aauccucccaauguauguaucccuuuacucac

SEQ ID NO: 208402 - RNA, 32 nt, Homo Sapiens
gcagagucaaccaagcacagguuagaguccca

SEQ ID NO: 208403 - RNA, 32 nt, Homo Sapiens
uagagcaauuuaauuggagaaguggccauucu

SEQ ID NO: 208404 - RNA, 32 nt, Homo Sapiens
aauauacuggaguuacuuauuaucccccauuc

SEQ ID NO: 208405 - RNA, 32 nt, Homo Sapiens
ccaggaguggaaggugcacacccagaaguauu

SEQ ID NO: 208406 - RNA, 32 nt, Homo Sapiens
cgcgugucagcccuccaguucuccuucaguug

SEQ ID NO: 208407 - RNA, 32 nt, Homo Sapiens
uagaauaauaauaaaaagacuauuaagagcaa

SEQ ID NO: 208408 - RNA, 32 nt, Homo Sapiens
ucccucugucuccuccagaauccagaaaagaa

SEQ ID NO: 208409 - RNA, 32 nt, Homo Sapiens
ccugucuugcugucaugaaaucagcaagagag

SEQ ID NO: 208410 - RNA, 32 nt, Homo Sapiens
uagggagucaacaugcccaagucauuugcacc

SEQ ID NO: 208411 - RNA, 32 nt, Homo Sapiens
caagccuuuccacauaacauccguagaguaaa

SEQ ID NO: 208412 - RNA, 32 nt, Homo Sapiens
gacuuuggguauguucagccaaugaaaguuac

SEQ ID NO: 208413 - RNA, 28 nt, Homo Sapiens
caauuaguuaagaaacauuugagccagg

SEQ ID NO: 208414 - RNA, 32 nt, Homo Sapiens
acagaaauauucccuuagaauaaaauaguaua

SEQ ID NO: 208415 - RNA, 32 nt, Homo Sapiens
uuucucgggacgggagaggccguguagcgucg

SEQ ID NO: 208416 - RNA, 32 nt, Homo Sapiens
uagacuugauucauugccuccaguaaucaaau

SEQ ID NO: 208417 - RNA, 32 nt, Homo Sapiens
cagggccccccuccucuauguagcuuagggac

SEQ ID NO: 208418 - RNA, 32 nt, Homo Sapiens
caucuugagagcacaagggaaaaaauaagaac

SEQ ID NO: 208419 - RNA, 32 nt, Homo Sapiens
aaaaggagaaaguugaggccuaauaaagucuu

SEQ ID NO: 208420 - RNA, 32 nt, Homo Sapiens
uucuacagcaauaaaggagacacacacugggc

SEQ ID NO: 208421 - RNA, 32 nt, Homo Sapiens
auuguggguguguaucuucuuaucucauuuca

SEQ ID NO: 208422 - RNA, 32 nt, Homo Sapiens
uugggaacgacuccagaggggugcuggugggc

SEQ ID NO: 208423 - RNA, 32 nt, Homo Sapiens
uacccuggccccagcgcgccccgacacacaug

SEQ ID NO: 208424 - RNA, 32 nt, Homo Sapiens
uguguuuguauuggaagcaguuguuuggccuu

SEQ ID NO: 208425 - RNA, 32 nt, Homo Sapiens
agcccgugcgccccgcgcccucgagcgccaug

SEQ ID NO: 208426 - RNA, 32 nt, Homo Sapiens
ucuuguacuuuucaguauauuuucauaaugag

SEQ ID NO: 208427 - RNA, 32 nt, Homo Sapiens
aacacaccuucaaacuucaacuucuuuaaaag

SEQ ID NO: 208428 - RNA, 32 nt, Homo Sapiens
auucagguauugggacaucccuguuccuuucu

SEQ ID NO: 208429 - RNA, 32 nt, Homo Sapiens
uacuaucuguugugucagaaucggcgagugca

SEQ ID NO: 208430 - RNA, 32 nt, Homo Sapiens
cauucuuagaaagccaggcuaaaucagaguag

SEQ ID NO: 208431 - RNA, 26 nt, Homo Sapiens
gaugucagugaacauuucuacugcag

SEQ ID NO: 208432 - RNA, 32 nt, Homo Sapiens
ggaauuggagguuucgauaugaacuagcagag

SEQ ID NO: 208433 - RNA, 32 nt, Homo Sapiens
cagacaggcuuuuguaugugaucuuguuuaag

SEQ ID NO: 208434 - RNA, 32 nt, Homo Sapiens
cccaauuccuuucuggucuccauccucucugu

SEQ ID NO: 208435 - RNA, 32 nt, Homo Sapiens
ugagaucccaccuccuucuguaauucauugua

SEQ ID NO: 208436 - RNA, 32 nt, Homo Sapiens
aaagagacaaacucagccaaaaacacuuggaa

SEQ ID NO: 208437 - RNA, 32 nt, Homo Sapiens
cccuuuccgagcccacguguggguuggaugca

SEQ ID NO: 208438 - RNA, 32 nt, Homo Sapiens
aaguguauuauuucuggcuuuuugaauuaauc

SEQ ID NO: 208439 - RNA, 29 nt, Homo Sapiens
auucaagugacuuuuauucugagugcaau

SEQ ID NO: 208440 - RNA, 32 nt, Homo Sapiens
cccagacccagcuguccgggccacagaccccc

SEQ ID NO: 208441 - RNA, 32 nt, Homo Sapiens
uggggucacgcgaggcuguuugcaggggacac

SEQ ID NO: 208442 - RNA, 32 nt, Homo Sapiens
ggggccgcuggaaugggugaauuuaaggucca

SEQ ID NO: 208443 - RNA, 32 nt, Homo Sapiens
aggagggaguauuagauuauaaauccucuuua

SEQ ID NO: 208444 - RNA, 32 nt, Homo Sapiens
ugcugcugccccagcgucuugacgggagcauu

SEQ ID NO: 208445 - RNA, 32 nt, Homo Sapiens
cgcgcagcccagaccguucccgggccggccag

SEQ ID NO: 208446 - RNA, 32 nt, Homo Sapiens
aagccaguuaaaccucuuuucuuuauaaauua

SEQ ID NO: 208447 - RNA, 29 nt, Homo Sapiens
acaagauacauaaagcacuuugcauggug

SEQ ID NO: 208448 - RNA, 31 nt, Homo Sapiens
uucccgcggcacuucuggauacccccagguc

SEQ ID NO: 208449 - RNA, 32 nt, Homo Sapiens
auuuacaaaaggaagaaauucuugccaucaga

SEQ ID NO: 208450 - RNA, 32 nt, Homo Sapiens
acagcugaaauacugucacuagugguagugac

SEQ ID NO: 208451 - RNA, 32 nt, Homo Sapiens
agauaacugagaaaaugaaagcucacucugga

SEQ ID NO: 208452 - RNA, 32 nt, Homo Sapiens
gauggcugucuccuggcauagaccucugcacc

SEQ ID NO: 208453 - RNA, 32 nt, Homo Sapiens
gggaggccucaggaaacuuauagucauggugg

SEQ ID NO: 208454 - RNA, 32 nt, Homo Sapiens
cuuaaaaaugucccuuuuuuucauuucuuuga

SEQ ID NO: 208455 - RNA, 32 nt, Homo Sapiens
auaguacuauguuugguuuucuucccauuuca

SEQ ID NO: 208456 - RNA, 32 nt, Homo Sapiens
cccagacucugucuucaauaaaaacugagcuu

SEQ ID NO: 208457 - RNA, 32 nt, Homo Sapiens
gcgauccgccccagcuggggccucggagccgc

SEQ ID NO: 208458 - RNA, 30 nt, Homo Sapiens
auggggugggucauugaugaguucuuaaag

SEQ ID NO: 208459 - RNA, 32 nt, Homo Sapiens
ucaguggcagaucugguggccuuggaguggcu

SEQ ID NO: 208460 - RNA, 32 nt, Homo Sapiens
gcccggcuaauuuuuguauuuucaguagagau

SEQ ID NO: 208461 - RNA, 31 nt, Homo Sapiens
gaagccauaaagaaaaaaguauauaaauggc

SEQ ID NO: 208462 - RNA, 32 nt, Homo Sapiens
uggaccccauucugagcuccccaucaccaugg

SEQ ID NO: 208463 - RNA, 32 nt, Homo Sapiens
cagcgcaccugcaugcacacacaccaccucac

SEQ ID NO: 208464 - RNA, 32 nt, Homo Sapiens
uccuuggugcuaaagauuguuaaauucaaugc

SEQ ID NO: 208465 - RNA, 32 nt, Homo Sapiens
agaaguuccaaauauccgaugcccuagagguu

SEQ ID NO: 208466 - RNA, 32 nt, Homo Sapiens
gauauuucaauacaugugugcuaagaguaaug

SEQ ID NO: 208467 - RNA, 32 nt, Homo Sapiens
ugcgcuuccguggagccuccaggccgaccccc

SEQ ID NO: 208468 - RNA, 32 nt, Homo Sapiens
agacaaaacccagaaagcacaaagcaugaggu

SEQ ID NO: 208469 - RNA, 32 nt, Homo Sapiens
ccuucaaggcccggccuguccgggccaccauu

SEQ ID NO: 208470 - RNA, 32 nt, Homo Sapiens
aaggaaggcugguuauggauauucauaagguu

SEQ ID NO: 208471 - RNA, 32 nt, Homo Sapiens
agagguguugaguugcaggauaucuagcaauu

SEQ ID NO: 208472 - RNA, 32 nt, Homo Sapiens
ccagccuccgcucaguguggcuccucagccca

SEQ ID NO: 208473 - RNA, 32 nt, Homo Sapiens
ccccucuugcccaggguccccauccuguacca

SEQ ID NO: 208474 - RNA, 32 nt, Homo Sapiens
gaggaguguuugucuuaagaccuguucacacu

SEQ ID NO: 208475 - RNA, 32 nt, Homo Sapiens
gggacuggugaagcuaggcaucuggaagacuu

SEQ ID NO: 208476 - RNA, 32 nt, Homo Sapiens
aaaaagaauugcuggaggagggaagugagggg

SEQ ID NO: 208477 - RNA, 30 nt, Homo Sapiens
ggaggagcuacggcgccgccggcgggagcg

SEQ ID NO: 208478 - RNA, 32 nt, Homo Sapiens
cacagggaaggggaacaaauaucuucacuuca

SEQ ID NO: 208479 - RNA, 32 nt, Homo Sapiens
aagagcugggccuggaacccagcccugaggac

SEQ ID NO: 208480 - RNA, 32 nt, Homo Sapiens
gagagaauuggaauggguggcgguaauuggug

SEQ ID NO: 208481 - RNA, 32 nt, Homo Sapiens
guggauuuuuguguuuuguaaguugucuauuu

SEQ ID NO: 208482 - RNA, 32 nt, Homo Sapiens
aauaugaaauauauuuuauaaggaauaaaaug

SEQ ID NO: 208483 - RNA, 32 nt, Homo Sapiens
gaugaaaauauuuguaagcagaucaucuuuau

SEQ ID NO: 208484 - RNA, 32 nt, Homo Sapiens
uuccagccccuccaggaccccuggacccacug

SEQ ID NO: 208485 - RNA, 32 nt, Homo Sapiens
gacuucuccggggccagcagccgcccgaccag

SEQ ID NO: 208486 - RNA, 32 nt, Homo Sapiens
guagcuggaaacaaaaaugagcguguuuucuc

SEQ ID NO: 208487 - RNA, 32 nt, Homo Sapiens
ucauagcaagcuucaguuuuuacuuuuucccc

SEQ ID NO: 208488 - RNA, 32 nt, Homo Sapiens
uugcauuuuucagaucuuucucuuucuuuuuc

SEQ ID NO: 208489 - RNA, 32 nt, Homo Sapiens
gccaggugcgcaugcuggccgaccugagccug

SEQ ID NO: 208490 - RNA, 32 nt, Homo Sapiens
ucucccauguaugucgauuguaucgcugcuac

SEQ ID NO: 208491 - RNA, 32 nt, Homo Sapiens
cagccgccgccucccaggaucguccgccgguc

SEQ ID NO: 208492 - RNA, 32 nt, Homo Sapiens
gggaucccgagcucggcagcagcgcagcgggc

SEQ ID NO: 208493 - RNA, 32 nt, Homo Sapiens
gaaaggaacaaaauuaucagggauggcucuuu

SEQ ID NO: 208494 - RNA, 32 nt, Homo Sapiens
acuggguucuuuguuuuaucuaccggcuucug

SEQ ID NO: 208495 - RNA, 32 nt, Homo Sapiens
guuuauuucugcaggcuuccuguccuuuugug

SEQ ID NO: 208496 - RNA, 32 nt, Homo Sapiens
acaggcagccaccagcagaugucagcaagucc

SEQ ID NO: 208497 - RNA, 32 nt, Homo Sapiens
aaggacagccuugcaaaccaacuacguccucc

SEQ ID NO: 208498 - RNA, 32 nt, Homo Sapiens
auacugcccgcugcuccugggacuccugagcc

SEQ ID NO: 208499 - RNA, 32 nt, Homo Sapiens
uuuucaagggaaggggaugaaaaaauggcaug

SEQ ID NO: 208500 - RNA, 32 nt, Homo Sapiens
uggaagccaagagcucccggcucaugauaccu

SEQ ID NO: 208501 - RNA, 32 nt, Homo Sapiens
guccaagggcucaagacuuucuaacugggaug

SEQ ID NO: 208502 - RNA, 32 nt, Homo Sapiens
ucucccuguggaugaaacugcugcugaaaugg

SEQ ID NO: 208503 - RNA, 32 nt, Homo Sapiens
caagggcccucccgcuuccccuccgagggcag

SEQ ID NO: 208504 - RNA, 32 nt, Homo Sapiens
gaguuagaccucuggagacuucucagauagcu

SEQ ID NO: 208505 - RNA, 32 nt, Homo Sapiens
uagcagcugggaccacagacgucugccaccaa

SEQ ID NO: 208506 - RNA, 32 nt, Homo Sapiens
gagagaagaagcugcguaaggagucugagaug

SEQ ID NO: 208507 - RNA, 32 nt, Homo Sapiens
uuccugcggugauucggaaauucgcgaauucc

SEQ ID NO: 208508 - RNA, 32 nt, Homo Sapiens
cauaggaccgcccacaugggaccgcccacaua

SEQ ID NO: 208509 - RNA, 32 nt, Homo Sapiens
gccuggucucagcagcggcugcggcuguggca

SEQ ID NO: 208510 - RNA, 32 nt, Homo Sapiens
cgccgcgcccuccugacccgcggccgcggagu

SEQ ID NO: 208511 - RNA, 32 nt, Homo Sapiens
uuaagaccuccauggggucgugauccauagac

SEQ ID NO: 208512 - RNA, 32 nt, Homo Sapiens
caguuuaaaaauuuauauuaaauuuauuaaaa

SEQ ID NO: 208513 - RNA, 31 nt, Homo Sapiens
uaaaggacuuggggaaaguccuuccacugcu

SEQ ID NO: 208514 - RNA, 32 nt, Homo Sapiens
acagaauggucaccccacuuugguucaauccu

SEQ ID NO: 208515 - RNA, 32 nt, Homo Sapiens
cuuuaagcuacuuuuccaguaguuugccacuu

SEQ ID NO: 208516 - RNA, 32 nt, Homo Sapiens
gacaaaggaugaagaacacagcaugugccaag

SEQ ID NO: 208517 - RNA, 32 nt, Homo Sapiens
gaaaacaagaaaucauucuucuguggaaggag

SEQ ID NO: 208518 - RNA, 32 nt, Homo Sapiens
gcgggcugugagcagagccccguccuugagca

SEQ ID NO: 208519 - RNA, 32 nt, Homo Sapiens
cugcggccuccacuuggaaaguucucaguucc

SEQ ID NO: 208520 - RNA, 32 nt, Homo Sapiens
cccgcucuccacggcacccccacugcaggcug

SEQ ID NO: 208521 - RNA, 32 nt, Homo Sapiens
ccucgggcaggcccagagagccagaguggaag

SEQ ID NO: 208522 - RNA, 32 nt, Homo Sapiens
uugcccauuacuuuauaagauagcaaagugug

SEQ ID NO: 208523 - RNA, 32 nt, Homo Sapiens
cgagacggagggcagccggggggccgugaagg

SEQ ID NO: 208524 - RNA, 32 nt, Homo Sapiens
cuucaugggaaggcccuugggaaucugagaug

SEQ ID NO: 208525 - RNA, 32 nt, Homo Sapiens
cagccagagaugcacauuccucggccagucuc

SEQ ID NO: 208526 - RNA, 32 nt, Homo Sapiens
ugaugaugaugaugagaagcucuucuuccugg

SEQ ID NO: 208527 - RNA, 32 nt, Homo Sapiens
ccucccucaccucgggacaguagcccuccacu

SEQ ID NO: 208528 - RNA, 32 nt, Homo Sapiens
gaaaaaccauuugguuccugugggcaggugaa

SEQ ID NO: 208529 - RNA, 32 nt, Homo Sapiens
cagacgucaggagagugaugugagggagcugu

SEQ ID NO: 208530 - RNA, 32 nt, Homo Sapiens
uagcugcccgaggaccggccgccccgccaaag

SEQ ID NO: 208531 - RNA, 32 nt, Homo Sapiens
gcuggggcuggaauuugacaccggacggcugc

SEQ ID NO: 208532 - RNA, 32 nt, Homo Sapiens
agaccuagagggaaagccugcuaugcaggggg

SEQ ID NO: 208533 - RNA, 32 nt, Homo Sapiens
caugggaccgcggcgaggggaucgagggcggc

SEQ ID NO: 208534 - RNA, 32 nt, Homo Sapiens
gacaccagaagacaagcagagagacuccucca

SEQ ID NO: 208535 - RNA, 32 nt, Homo Sapiens
cacucauuccuguguaccugauggaaguugca

SEQ ID NO: 208536 - RNA, 28 nt, Homo Sapiens
gaaggcugucuucuaauguguuuucuua

SEQ ID NO: 208537 - RNA, 32 nt, Homo Sapiens
cguucgcgccgcgccgcggagggaggcugaga

SEQ ID NO: 208538 - RNA, 32 nt, Homo Sapiens
ucugacguguccauuccacacuggauccauag

SEQ ID NO: 208539 - RNA, 32 nt, Homo Sapiens
guccgcugcucgccggcggccgcccggucaug

SEQ ID NO: 208540 - RNA, 32 nt, Homo Sapiens
ccaggguuaugaauaugaaaaaauagagauga

SEQ ID NO: 208541 - RNA, 32 nt, Homo Sapiens
ccccgggcgggcccccggagacgcgcaggaug

SEQ ID NO: 208542 - RNA, 32 nt, Homo Sapiens
ucgcaaaaauauuggugagauuaggcaauauu

SEQ ID NO: 208543 - RNA, 32 nt, Homo Sapiens
uaucccacccccacccgaucauaccuuccccc

SEQ ID NO: 208544 - RNA, 32 nt, Homo Sapiens
gugaagacaggcagaugcugcacagugaauug

SEQ ID NO: 208545 - RNA, 32 nt, Homo Sapiens
ugaggacgucaucggaggcugggccccuggga

SEQ ID NO: 208546 - RNA, 30 nt, Homo Sapiens
acgccaugaagaucaaagaugccaagaaac

SEQ ID NO: 208547 - RNA, 32 nt, Homo Sapiens
uuuaugauacaaaagaagaugaaaauggaagu

SEQ ID NO: 208548 - RNA, 32 nt, Homo Sapiens
agauaggaaacaaaaaauagaaggugcugcau

SEQ ID NO: 208549 - RNA, 32 nt, Homo Sapiens
ggcauuucagggcaucagcuccaggucaggca

SEQ ID NO: 208550 - RNA, 32 nt, Homo Sapiens
aaaauaguuugugaaaugaugagggcauuuua

SEQ ID NO: 208551 - RNA, 32 nt, Homo Sapiens
cagggguuaccagaaaauuuaaaguuacgcca

SEQ ID NO: 208552 - RNA, 32 nt, Homo Sapiens
aaauucugagcuuaauucaaauuuaugccaau

SEQ ID NO: 208553 - RNA, 32 nt, Homo Sapiens
gcccagaagcugccgcuggcugagagaccaug

SEQ ID NO: 208554 - RNA, 32 nt, Homo Sapiens
gcaggugcccacaguggcugcagaucugcccg

SEQ ID NO: 208555 - RNA, 32 nt, Homo Sapiens
aaagccaugucugaccagaaauucugugcugg

SEQ ID NO: 208556 - RNA, 32 nt, Homo Sapiens
ccccaucugugccucgaccaucaaagccggag

SEQ ID NO: 208557 - RNA, 32 nt, Homo Sapiens
acaguaaguugacaccacuuagauuuaaaggc

SEQ ID NO: 208558 - RNA, 32 nt, Homo Sapiens
cggcuccuccucucgcgaccgcccuccgcagc

SEQ ID NO: 208559 - RNA, 32 nt, Homo Sapiens
cucgcgggcccggcagcagcuccggcggcgau

SEQ ID NO: 208560 - RNA, 32 nt, Homo Sapiens
gaagcuggugcuuuuugugacccaggcaggag

SEQ ID NO: 208561 - RNA, 32 nt, Homo Sapiens
cucugcuucuaaaaacuucuaugucuagucuu

SEQ ID NO: 208562 - RNA, 32 nt, Homo Sapiens
cugagcagccaccuaugugaucuuuaaaucca

SEQ ID NO: 208563 - RNA, 32 nt, Homo Sapiens
ugauggacugguuuggucuuaauaccagucaa

SEQ ID NO: 208564 - RNA, 32 nt, Homo Sapiens
aaaacaaaacaaaaggaacaauccaugaacuu

SEQ ID NO: 208565 - RNA, 32 nt, Homo Sapiens
ccacacguugccuccaggaucaucgccgucag

SEQ ID NO: 208566 - RNA, 32 nt, Homo Sapiens
cuuaauuacuaaaauguaauucuugacacucu

SEQ ID NO: 208567 - RNA, 32 nt, Homo Sapiens
gggcugcaccacccggcccgaggcuuuugaag

SEQ ID NO: 208568 - RNA, 32 nt, Homo Sapiens
gguagccaggauuauagccgcccgccaccacu

SEQ ID NO: 208569 - RNA, 32 nt, Homo Sapiens
gucuuuuucuucauuauguuuucugacauauc

SEQ ID NO: 208570 - RNA, 32 nt, Homo Sapiens
ggagaggggaugcacacguucugagaugucac

SEQ ID NO: 208571 - RNA, 32 nt, Homo Sapiens
acgccaugagggcggcggggucggccuucacc

SEQ ID NO: 208572 - RNA, 30 nt, Homo Sapiens
cacccacuccccgugccgcccacgccacau

SEQ ID NO: 208573 - RNA, 32 nt, Homo Sapiens
uccuggaaacgaauuuaaauggugucaaacug

SEQ ID NO: 208574 - RNA, 32 nt, Homo Sapiens
aaaggggagaaugucaaggaagacuuuugguu

SEQ ID NO: 208575 - RNA, 32 nt, Homo Sapiens
acugcugccucgggcaagcaggggcucggauc

SEQ ID NO: 208576 - RNA, 32 nt, Homo Sapiens
ggcaucaccugggugcaaaaccauugucucca

SEQ ID NO: 208577 - RNA, 32 nt, Homo Sapiens
gcuggggcccgggucagggacacgcggagguc

SEQ ID NO: 208578 - RNA, 32 nt, Homo Sapiens
ggaaaauucaguauuucuuuuagugcuagcua

SEQ ID NO: 208579 - RNA, 32 nt, Homo Sapiens
aauagaaaucauccugauccuauuuuaccugg

SEQ ID NO: 208580 - RNA, 32 nt, Homo Sapiens
ugaacguaauguaaucuuaauacuguagccuu

SEQ ID NO: 208581 - RNA, 32 nt, Homo Sapiens
cugcuguguucccucccuuugccaacuagaaa

SEQ ID NO: 208582 - RNA, 32 nt, Homo Sapiens
cacaaucagggugagacugcucccagugccau

SEQ ID NO: 208583 - RNA, 32 nt, Homo Sapiens
cccuggacuucuaagccuuguuucuuugucau

SEQ ID NO: 208584 - RNA, 32 nt, Homo Sapiens
ggugauaugagcauuuaugauuaccaagucuu

SEQ ID NO: 208585 - RNA, 32 nt, Homo Sapiens
gagaggaacccagaugcucuccccuccucgga

SEQ ID NO: 208586 - RNA, 32 nt, Homo Sapiens
cccaggaaauuugaaaggaagcaagugcugaa

SEQ ID NO: 208587 - RNA, 32 nt, Homo Sapiens
cacagaaagauauuuuuuacaguaccauuuug

SEQ ID NO: 208588 - RNA, 32 nt, Homo Sapiens
auauuuuccuuguagaaaauaguuuuccagac

SEQ ID NO: 208589 - RNA, 32 nt, Homo Sapiens
gaaauggagacggagaaauggcacuaauggcc

SEQ ID NO: 208590 - RNA, 32 nt, Homo Sapiens
gacaacagcaucuggucuacuagacuuucuua

SEQ ID NO: 208591 - RNA, 32 nt, Homo Sapiens
agugguaaaaaggacagaggcuacagauggag

SEQ ID NO: 208592 - RNA, 32 nt, Homo Sapiens
gcaaugcuugugaaucuuuucuuaagaaaucc

SEQ ID NO: 208593 - RNA, 32 nt, Homo Sapiens
ccccagcccaucugcuggcaucaguaccuggu

SEQ ID NO: 208594 - RNA, 32 nt, Homo Sapiens
cgccugucaucccagcacuuugggaggccgag

SEQ ID NO: 208595 - RNA, 32 nt, Homo Sapiens
caucuucccauauaaugacuccagaagaaaaa

SEQ ID NO: 208596 - RNA, 32 nt, Homo Sapiens
uuuccuucccucccucggucuuccuucgcacg

SEQ ID NO: 208597 - RNA, 32 nt, Homo Sapiens
ugugucugcagacaaugguggcugcaucugua

SEQ ID NO: 208598 - RNA, 32 nt, Homo Sapiens
caucgaccucaucgagcggccggccaaccccc

SEQ ID NO: 208599 - RNA, 32 nt, Homo Sapiens
cagagcccggugggcgggaggaaggcggcaug

SEQ ID NO: 208600 - RNA, 32 nt, Homo Sapiens
aucuguccaucccacagcucagccuggaugcc

SEQ ID NO: 208601 - RNA, 32 nt, Homo Sapiens
accaagagaaacaaaaggaagccugcaccauu

SEQ ID NO: 208602 - RNA, 32 nt, Homo Sapiens
auuuaaucucuuauguauagggugauaaccuu

SEQ ID NO: 208603 - RNA, 32 nt, Homo Sapiens
uuauucuaaauguauuugaugugaauuaaaau

SEQ ID NO: 208604 - RNA, 32 nt, Homo Sapiens
ccgguucaucugauugggacugguuagacagu

SEQ ID NO: 208605 - RNA, 32 nt, Homo Sapiens
guucugaagucucuugggaaaagcgaaacaau

SEQ ID NO: 208606 - RNA, 32 nt, Homo Sapiens
ugaaaaacaaaguuaacuauaaaaaauguuag

SEQ ID NO: 208607 - RNA, 32 nt, Homo Sapiens
cugcagccauggagaggcucucugccgccgcu

SEQ ID NO: 208608 - RNA, 32 nt, Homo Sapiens
accggaaauggcaggcacugucagauuuccac

SEQ ID NO: 208609 - RNA, 32 nt, Homo Sapiens
uuucaguaaaaccaucuuucuggccaaaucuc

SEQ ID NO: 208610 - RNA, 32 nt, Homo Sapiens
uuuaagaccccauugaguuacuguaaugcaau

SEQ ID NO: 208611 - RNA, 32 nt, Homo Sapiens
gaagacuuugguuuuuggggguuuuuugggca

SEQ ID NO: 208612 - RNA, 32 nt, Homo Sapiens
uaacuggaaaccucuuuuuuuaccuguuguuc

SEQ ID NO: 208613 - RNA, 32 nt, Homo Sapiens
cguugaaaacaguaauguggcuacacaguuuu

SEQ ID NO: 208614 - RNA, 32 nt, Homo Sapiens
gaauuauguaaaauauauuuuacaguauaucu

SEQ ID NO: 208615 - RNA, 32 nt, Homo Sapiens
gccuuucuucccuccgcgacccgggccgugcg

SEQ ID NO: 208616 - RNA, 32 nt, Homo Sapiens
ccccauggcuggcuggguggccaggcaggaag

SEQ ID NO: 208617 - RNA, 32 nt, Homo Sapiens
ccuugguaugacuuaaaauuggaaaugucauc

SEQ ID NO: 208618 - RNA, 32 nt, Homo Sapiens
uucugauaagacuggaaaauaguccuccaaaa

SEQ ID NO: 208619 - RNA, 32 nt, Homo Sapiens
ggacccuccaacuuauggcaucaggggcaaaa

SEQ ID NO: 208620 - RNA, 32 nt, Homo Sapiens
guguuuugacccccagcaccgugucuugugaa

SEQ ID NO: 208621 - RNA, 32 nt, Homo Sapiens
cacugcugcaacaugcaacugguguaggugag

SEQ ID NO: 208622 - RNA, 32 nt, Homo Sapiens
gagcuggcuggcggccggcucugcauguucuu

SEQ ID NO: 208623 - RNA, 32 nt, Homo Sapiens
uuuacuaccuggggaccccccuugcccaugcc

SEQ ID NO: 208624 - RNA, 32 nt, Homo Sapiens
gugagacugaugcacaaacugucacuugguua

SEQ ID NO: 208625 - RNA, 32 nt, Homo Sapiens
acgucucuuugcccuuguuuacauaucuacug

SEQ ID NO: 208626 - RNA, 32 nt, Homo Sapiens
gauggaaaugacuucaaggaagacuccgcagc

SEQ ID NO: 208627 - RNA, 32 nt, Homo Sapiens
cugaaggaauaaaaugauuuguggaaaugcuu

SEQ ID NO: 208628 - RNA, 32 nt, Homo Sapiens
agcgagcagggcccagggcucugggccugaag

SEQ ID NO: 208629 - RNA, 32 nt, Homo Sapiens
ucagagguucuauguacugugauucaacuuuu

SEQ ID NO: 208630 - RNA, 32 nt, Homo Sapiens
gacagcuggacggcugccucccaggggcauuu

SEQ ID NO: 208631 - RNA, 32 nt, Homo Sapiens
aaagagaaggaaacuuuuuaaauucaauuuag

SEQ ID NO: 208632 - RNA, 32 nt, Homo Sapiens
ggagccagccuguggcccccagccuccuggaa

SEQ ID NO: 208633 - RNA, 32 nt, Homo Sapiens
uugcguggaagacgacgugagagcugaauugu

SEQ ID NO: 208634 - RNA, 32 nt, Homo Sapiens
uucaaaaguuugucuuuuuuugcuucuaccuu

SEQ ID NO: 208635 - RNA, 32 nt, Homo Sapiens
aguggacugggagaggcacacccacccucaau

SEQ ID NO: 208636 - RNA, 32 nt, Homo Sapiens
uugccugcguguaaucuuugagguuccaagau

SEQ ID NO: 208637 - RNA, 32 nt, Homo Sapiens
aggggguugucaccacccaucacagaacuggg

SEQ ID NO: 208638 - RNA, 32 nt, Homo Sapiens
gaggcuaaucccacaagaaggguagcaucaga

SEQ ID NO: 208639 - RNA, 32 nt, Homo Sapiens
acucccacccucaauauccucaguagcugcaa

SEQ ID NO: 208640 - RNA, 32 nt, Homo Sapiens
ugcuacuuacacugucauuaugcguuuuagcc

SEQ ID NO: 208641 - RNA, 31 nt, Homo Sapiens
acuggccccccuugccugcccgcugcccccg

SEQ ID NO: 208642 - RNA, 32 nt, Homo Sapiens
gacaggugugggccccggcggcggcggcgugg

SEQ ID NO: 208643 - RNA, 32 nt, Homo Sapiens
ucuucugccuuuccuuuccccgugagugugaa

SEQ ID NO: 208644 - RNA, 32 nt, Homo Sapiens
ccaccgacucaucuuuccuucucuaagcacaa

SEQ ID NO: 208645 - RNA, 32 nt, Homo Sapiens
uucccgcccuguauggcugguuuagccaugga

SEQ ID NO: 208646 - RNA, 32 nt, Homo Sapiens
acuagaaugcuguucuuaauuuuaauaguguu

SEQ ID NO: 208647 - RNA, 32 nt, Homo Sapiens
gaggagccgcggggcguccgggucugagccuc

SEQ ID NO: 208648 - RNA, 32 nt, Homo Sapiens
acaguuugugaguaaagcugucuggaauuaag

SEQ ID NO: 208649 - RNA, 32 nt, Homo Sapiens
ggcagaagcucccagagccccugucucgggcu

SEQ ID NO: 208650 - RNA, 32 nt, Homo Sapiens
gcuucccugcccucgccuucaccucugucagc

SEQ ID NO: 208651 - RNA, 29 nt, Homo Sapiens
aauaggugcaguuuuaguuuaacaugcaa

SEQ ID NO: 208652 - RNA, 32 nt, Homo Sapiens
agagucuguguggacaaccguccccagccagu

SEQ ID NO: 208653 - RNA, 32 nt, Homo Sapiens
ugugucuuugaacauccggcgccacugggguu

SEQ ID NO: 208654 - RNA, 32 nt, Homo Sapiens
ucuagagaacagauucauuugcuuaauuuuca

SEQ ID NO: 208655 - RNA, 32 nt, Homo Sapiens
guuugugugggugucucuagccugcagagugc

SEQ ID NO: 208656 - RNA, 32 nt, Homo Sapiens
agccuggcgacuggggaccccggcacaugagg

SEQ ID NO: 208657 - RNA, 32 nt, Homo Sapiens
cgucucucugucccccuccccuccccccggca

SEQ ID NO: 208658 - RNA, 32 nt, Homo Sapiens
gaccuugugguccgcccgccccggccucccag

SEQ ID NO: 208659 - RNA, 32 nt, Homo Sapiens
aacacugucuuuccuuuuuuuuuccucuucgc

SEQ ID NO: 208660 - RNA, 32 nt, Homo Sapiens
accagagcugucuguggagcuguuuuccagac

SEQ ID NO: 208661 - RNA, 32 nt, Homo Sapiens
uagaauuuggaauaugauacaaguggcaucag

SEQ ID NO: 208662 - RNA, 32 nt, Homo Sapiens
uuccgcuucgccgagauccucucaggugcucu

SEQ ID NO: 208663 - RNA, 32 nt, Homo Sapiens
agggagcccugcuguaccccagccuucccagg

SEQ ID NO: 208664 - RNA, 32 nt, Homo Sapiens
ccugauucuggccacaccccccuucagccgcc

SEQ ID NO: 208665 - RNA, 32 nt, Homo Sapiens
cugaauguccagcagagcuauuuccuuccaca

SEQ ID NO: 208666 - RNA, 32 nt, Homo Sapiens
cuguucccaagagcuccaugcaggugccacag

SEQ ID NO: 208667 - RNA, 32 nt, Homo Sapiens
cagggagaaaauaugaaagaaucuucacuuua

SEQ ID NO: 208668 - RNA, 32 nt, Homo Sapiens
uguuuaauccuaauaaacuaaucuauaaggug

SEQ ID NO: 208669 - RNA, 32 nt, Homo Sapiens
guuucacgcgucuggccaaccugccgugcacc

SEQ ID NO: 208670 - RNA, 30 nt, Homo Sapiens
aauggggaaggggggucgauaugcauuaua

SEQ ID NO: 208671 - RNA, 32 nt, Homo Sapiens
ucuccuuccagaacgaaagggcugauaauuuu

SEQ ID NO: 208672 - RNA, 32 nt, Homo Sapiens
guuugcugguggaccuaggacuccgcguaucc

SEQ ID NO: 208673 - RNA, 32 nt, Homo Sapiens
gauggcagauccaggaaugaugagucuuuuug

SEQ ID NO: 208674 - RNA, 32 nt, Homo Sapiens
ccgcugcgcgcccucgcgccucugccugagaa

SEQ ID NO: 208675 - RNA, 32 nt, Homo Sapiens
aacaucaggguguggcauuuuguucccuuuuc

SEQ ID NO: 208676 - RNA, 32 nt, Homo Sapiens
gaaucagagguuauauaaaaauacugcaaaua

SEQ ID NO: 208677 - RNA, 32 nt, Homo Sapiens
gggugggugguagaaaguguguucaggcugac

SEQ ID NO: 208678 - RNA, 32 nt, Homo Sapiens
uauucagccacaaaaaggaacaaaauaauggc

SEQ ID NO: 208679 - RNA, 32 nt, Homo Sapiens
ugcucuggugauucuuguaccuaaucuggugu

SEQ ID NO: 208680 - RNA, 32 nt, Homo Sapiens
uuuuugucaggagguagcagucugggacucaa

SEQ ID NO: 208681 - RNA, 32 nt, Homo Sapiens
uuuagauuaacaguuuuguacuuuacauuuuu

SEQ ID NO: 208682 - RNA, 32 nt, Homo Sapiens
agaugcagauaaagugggauguuguaaaugua

SEQ ID NO: 208683 - RNA, 32 nt, Homo Sapiens
ucugauucaaauauuaaucucauccagaaaua

SEQ ID NO: 208684 - RNA, 32 nt, Homo Sapiens
ccuuauguauaaauaaaccaaaggaaguaagc

SEQ ID NO: 208685 - RNA, 32 nt, Homo Sapiens
ucccugagaaugagcuccuccuggaagaaauc

SEQ ID NO: 208686 - RNA, 29 nt, Homo Sapiens
cauaauuggggacagugggggcucucuua

SEQ ID NO: 208687 - RNA, 32 nt, Homo Sapiens
ggcgcaugccacggagcgccccucgggccgcc

SEQ ID NO: 208688 - RNA, 32 nt, Homo Sapiens
ugcuacaucagggcccuugcugcuguauuacc

SEQ ID NO: 208689 - RNA, 32 nt, Homo Sapiens
cacccaagaaaagagggaagagacgcgugcac

SEQ ID NO: 208690 - RNA, 32 nt, Homo Sapiens
aguggcgggcagagaccuccuccguauccccc

SEQ ID NO: 208691 - RNA, 32 nt, Homo Sapiens
uguggaguucagaagagcacuggccauuggcg

SEQ ID NO: 208692 - RNA, 32 nt, Homo Sapiens
auguuuacucuuucuuuuuauguugucuuaau

SEQ ID NO: 208693 - RNA, 32 nt, Homo Sapiens
aaggccuuuuucauuacaguuuucuccuucuu

SEQ ID NO: 208694 - RNA, 32 nt, Homo Sapiens
gauggcaguuguggaugcucagagcacaaaag

SEQ ID NO: 208695 - RNA, 32 nt, Homo Sapiens
uuuuaauguuuaacauuuucuagcauauuugu

SEQ ID NO: 208696 - RNA, 32 nt, Homo Sapiens
gcagugugcaagauaauagguaaauuugaucc

SEQ ID NO: 208697 - RNA, 32 nt, Homo Sapiens
uuuaaacuaaagaguuucugcacagcaaaaga

SEQ ID NO: 208698 - RNA, 32 nt, Homo Sapiens
uuauaacuguaauauauagauucagaaauaca

SEQ ID NO: 208699 - RNA, 32 nt, Homo Sapiens
ggagaugaaggccgggacccccugcccaaccu

SEQ ID NO: 208700 - RNA, 32 nt, Homo Sapiens
ggaauagacauuauuggcaaaauugcucaucc

SEQ ID NO: 208701 - RNA, 32 nt, Homo Sapiens
cacuuucucagagacacuuuaaucauugagua

SEQ ID NO: 208702 - RNA, 32 nt, Homo Sapiens
ccggggucuggcugggucuggcgcucgggagc

SEQ ID NO: 208703 - RNA, 32 nt, Homo Sapiens
uccagguuggggaugccucagacuugugaugg

SEQ ID NO: 208704 - RNA, 32 nt, Homo Sapiens
uauauacacacacacagacacacacacacaca

SEQ ID NO: 208705 - RNA, 32 nt, Homo Sapiens
uugaacaguuugggggggugagguuucauuua

SEQ ID NO: 208706 - RNA, 32 nt, Homo Sapiens
cccugccuucuccuccuucucuccccagagcc

SEQ ID NO: 208707 - RNA, 32 nt, Homo Sapiens
cagugcugaggucaaggcagcuucguuguucc

SEQ ID NO: 208708 - RNA, 32 nt, Homo Sapiens
ccaugugcauauaaagguuaugaaacauauca

SEQ ID NO: 208709 - RNA, 32 nt, Homo Sapiens
ccuuaauaugcugcaacaaaauguagaauauu

SEQ ID NO: 208710 - RNA, 32 nt, Homo Sapiens
guuaaaaaaugaaagggcauauguaaguugca

SEQ ID NO: 208711 - RNA, 30 nt, Homo Sapiens
ugugagggaggugggagugggaagucaaga

SEQ ID NO: 208712 - RNA, 32 nt, Homo Sapiens
ccucucccugccucagccuccucccucagccg

SEQ ID NO: 208713 - RNA, 32 nt, Homo Sapiens
aaacaugccauugugaagaaggguacacugaa

SEQ ID NO: 208714 - RNA, 32 nt, Homo Sapiens
cccucugcuucuuuggaaucucugaaguauua

SEQ ID NO: 208715 - RNA, 32 nt, Homo Sapiens
gcgcgcacggcaacuuuggagaggcgagcagc

SEQ ID NO: 208716 - RNA, 32 nt, Homo Sapiens
uccccaccuccucauuuuaguaaaaaacaaac

SEQ ID NO: 208717 - RNA, 32 nt, Homo Sapiens
auuaaauuauuguaaacugaaguaaaacccgg

SEQ ID NO: 208718 - RNA, 32 nt, Homo Sapiens
auggccgccuggugacucagccaccgggccug

SEQ ID NO: 208719 - RNA, 32 nt, Homo Sapiens
uuuggauauuaaaauauuuuuuaagucuugaa

SEQ ID NO: 208720 - RNA, 32 nt, Homo Sapiens
acacugcuuugaaaagacauuuucauggagug

SEQ ID NO: 208721 - RNA, 32 nt, Homo Sapiens
cuuauacucucuacuucagaugaugaacacug

SEQ ID NO: 208722 - RNA, 32 nt, Homo Sapiens
gcuuucaaauguaccgaugauacuguuucuug

SEQ ID NO: 208723 - RNA, 32 nt, Homo Sapiens
aagaaguacgccauccuggcagcagccaagug

SEQ ID NO: 208724 - RNA, 32 nt, Homo Sapiens
acccggcggcuaggcgcgggagaagugcggag

SEQ ID NO: 208725 - RNA, 32 nt, Homo Sapiens
cuguuuucacuuucuuuuguugacucccgugu

SEQ ID NO: 208726 - RNA, 32 nt, Homo Sapiens
gacaacagucugguccucccccugggagcucu

SEQ ID NO: 208727 - RNA, 32 nt, Homo Sapiens
ggaagaaaaaucauaguguuaaugaauuauug

SEQ ID NO: 208728 - RNA, 32 nt, Homo Sapiens
caauccacacacguccucuuguccuugucucc

SEQ ID NO: 208729 - RNA, 32 nt, Homo Sapiens
gagccaggacuaugggucagugcuccgccgca

SEQ ID NO: 208730 - RNA, 32 nt, Homo Sapiens
guggacuccaggaccccaguccuuccacgccc

SEQ ID NO: 208731 - RNA, 32 nt, Homo Sapiens
guccccguccccguaccucgcgcggacccggg

SEQ ID NO: 208732 - RNA, 32 nt, Homo Sapiens
uucagucuuauugggaauaaaagggaacuuaa

SEQ ID NO: 208733 - RNA, 32 nt, Homo Sapiens
gggggugagcgcgggugucgaggucugugugu

SEQ ID NO: 208734 - RNA, 32 nt, Homo Sapiens
uauuauaaaucaauacauaaguuuaaaccugu

SEQ ID NO: 208735 - RNA, 32 nt, Homo Sapiens
uuguuacaaaagacaggaggaggaaauaggua

SEQ ID NO: 208736 - RNA, 32 nt, Homo Sapiens
ccccuccccucgcgccccggauggaugugccc

SEQ ID NO: 208737 - RNA, 32 nt, Homo Sapiens
agguuuuggggaugcagucaacaacacagagu

SEQ ID NO: 208738 - RNA, 32 nt, Homo Sapiens
auaaucagcagaucuggugucuggggagacgg

SEQ ID NO: 208739 - RNA, 32 nt, Homo Sapiens
acacacacacacacacgcacaaacacacaugc

SEQ ID NO: 208740 - RNA, 32 nt, Homo Sapiens
cugggcgcuggaaccaucaaggugagguucau

SEQ ID NO: 208741 - RNA, 32 nt, Homo Sapiens
caucuguggccaacaauccuauggaaaaaagc

SEQ ID NO: 208742 - RNA, 32 nt, Homo Sapiens
cuguuuacuugaguagggaccacaaagaggga

SEQ ID NO: 208743 - RNA, 32 nt, Homo Sapiens
agagaaguuuuuccuuacaacaaugagaaaac

SEQ ID NO: 208744 - RNA, 32 nt, Homo Sapiens
auggaaauagggaacaacaacaacaacaaaaa

SEQ ID NO: 208745 - RNA, 32 nt, Homo Sapiens
ccagcacccuccccacugggaccacuccucau

SEQ ID NO: 208746 - RNA, 32 nt, Homo Sapiens
cauagagauaucuauaugaucaagagaguuaa

SEQ ID NO: 208747 - RNA, 32 nt, Homo Sapiens
gcacugcgccugcugcccuuuccuggcagggc

SEQ ID NO: 208748 - RNA, 30 nt, Homo Sapiens
gccgccuucgcugugccgccggcggagggg

SEQ ID NO: 208749 - RNA, 32 nt, Homo Sapiens
uaaaugaugcugaggaaugaaaaaagauucuc

SEQ ID NO: 208750 - RNA, 32 nt, Homo Sapiens
guguuugguuccucuuucuacuccacugcaga

SEQ ID NO: 208751 - RNA, 32 nt, Homo Sapiens
augcugaaauuccaaaaugucugaguuuugaa

SEQ ID NO: 208752 - RNA, 32 nt, Homo Sapiens
gggucccaacaaggagagaacaauaugucaac

SEQ ID NO: 208753 - RNA, 32 nt, Homo Sapiens
ggcagccugugguuucuguuauggaaaugguu

SEQ ID NO: 208754 - RNA, 32 nt, Homo Sapiens
cucucuccugccccagcuuccacucagccacc

SEQ ID NO: 208755 - RNA, 32 nt, Homo Sapiens
gacagagucucucucugucacccaggcuggag

SEQ ID NO: 208756 - RNA, 32 nt, Homo Sapiens
ggauguggaggggcccggggcgccgggguccc

SEQ ID NO: 208757 - RNA, 32 nt, Homo Sapiens
aaaccaggcuccaugacuaugaaguuggaccc

SEQ ID NO: 208758 - RNA, 32 nt, Homo Sapiens
aaucucaucuugauaaaauaugaccuagaagu

SEQ ID NO: 208759 - RNA, 32 nt, Homo Sapiens
auccuccucgcagcaccgcgccgcgcggggcc

SEQ ID NO: 208760 - RNA, 32 nt, Homo Sapiens
cuuaaaaagcuacuuuugugggaguauuucua

SEQ ID NO: 208761 - RNA, 29 nt, Homo Sapiens
ggacuuaggaagguggccuuccugcuguu

SEQ ID NO: 208762 - RNA, 32 nt, Homo Sapiens
aauaagcaccauauuuuagaucuuguauaaaa

SEQ ID NO: 208763 - RNA, 32 nt, Homo Sapiens
gaaagcacauaaacccaaagggcaaacaauuu

SEQ ID NO: 208764 - RNA, 32 nt, Homo Sapiens
uccagaaaaguguucuaagugaacucuuaaga

SEQ ID NO: 208765 - RNA, 30 nt, Homo Sapiens
accugguuauguuguuauucucggacugug

SEQ ID NO: 208766 - RNA, 32 nt, Homo Sapiens
ugcaaauguaaacacauguccaucuuguuaau

SEQ ID NO: 208767 - RNA, 32 nt, Homo Sapiens
ucaugugcuucuucugggcuuguaacaccuuc

SEQ ID NO: 208768 - RNA, 32 nt, Homo Sapiens
ucgcccggcccggccgcgcccgcggaaccaga

SEQ ID NO: 208769 - RNA, 32 nt, Homo Sapiens
aauaggcuugcucccugagcgccccgcaccga

SEQ ID NO: 208770 - RNA, 32 nt, Homo Sapiens
acagcaaggaggcuggcuggggccuaucagug

SEQ ID NO: 208771 - RNA, 32 nt, Homo Sapiens
gggcagguugcggaagaaagcccaggcggucu

SEQ ID NO: 208772 - RNA, 32 nt, Homo Sapiens
ccguggcuaggcgaguggggcggggcggccgg

SEQ ID NO: 208773 - RNA, 32 nt, Homo Sapiens
gcaucgccgcccggcucggcccggcccaugcc

SEQ ID NO: 208774 - RNA, 32 nt, Homo Sapiens
acuucaaagaucugcuagugcaccuggauucu

SEQ ID NO: 208775 - RNA, 32 nt, Homo Sapiens
ggucgucuugaugucaccgaugaugcugggcg

SEQ ID NO: 208776 - RNA, 32 nt, Homo Sapiens
aaaaaaaaaaacaaaacaaaaccuaggcagca

SEQ ID NO: 208777 - RNA, 32 nt, Homo Sapiens
uuuaaaaguugcaacaugguuaugacacacuu

SEQ ID NO: 208778 - RNA, 32 nt, Homo Sapiens
ccagcuuuugugacuauaacugcuaugaacau

SEQ ID NO: 208779 - RNA, 32 nt, Homo Sapiens
ugagcacuaugaaaguguuagcuguucuuuac

SEQ ID NO: 208780 - RNA, 32 nt, Homo Sapiens
uuaggggcugaaaauaaauguuaaaaauguuu

SEQ ID NO: 208781 - RNA, 29 nt, Homo Sapiens
gaccauccccgauagaggacgaucggucu

SEQ ID NO: 208782 - RNA, 32 nt, Homo Sapiens
ugcggggcccaaguccuuggcugcugaguggu

SEQ ID NO: 208783 - RNA, 32 nt, Homo Sapiens
acugcaaguauuugauaauaucccugucucca

SEQ ID NO: 208784 - RNA, 32 nt, Homo Sapiens
cacacacgcagacacacacacacacacacaca

SEQ ID NO: 208785 - RNA, 32 nt, Homo Sapiens
ucuuucugcugugcugcuucccucccaaacuc

SEQ ID NO: 208786 - RNA, 32 nt, Homo Sapiens
ucacuuucuggugauaaacuugauggucauug

SEQ ID NO: 208787 - RNA, 32 nt, Homo Sapiens
cacgcacgcaggcacacacacacacacacaca

SEQ ID NO: 208788 - RNA, 32 nt, Homo Sapiens
uccugcuccucacugucccccauccccaccgc

SEQ ID NO: 208789 - RNA, 32 nt, Homo Sapiens
gccgcacuagccucccucuccucuguccccau

SEQ ID NO: 208790 - RNA, 31 nt, Homo Sapiens
cgaccucuccuccgccugccccgcgcgcccu

SEQ ID NO: 208791 - RNA, 32 nt, Homo Sapiens
gcgggaucaaucagggacucccagaaaggaag

SEQ ID NO: 208792 - RNA, 32 nt, Homo Sapiens
ucaccauagaaaguuuguaggaauuccugaca

SEQ ID NO: 208793 - RNA, 32 nt, Homo Sapiens
gagccgccgguggaggugcccgggcaggugca

SEQ ID NO: 208794 - RNA, 32 nt, Homo Sapiens
aauucuuuuuaacugcacaucuacuguucaua

SEQ ID NO: 208795 - RNA, 32 nt, Homo Sapiens
cugccuacugucacccgccucucccgcgcgca

SEQ ID NO: 208796 - RNA, 32 nt, Homo Sapiens
gccuuuugcuccagcccugcggcuuccccaga

SEQ ID NO: 208797 - RNA, 32 nt, Homo Sapiens
auauggccaggguggguguguggcuaaguggg

SEQ ID NO: 208798 - RNA, 32 nt, Homo Sapiens
uugcucaacaaaucaauacugaagaugguaaa

SEQ ID NO: 208799 - RNA, 32 nt, Homo Sapiens
ggauguguucuuuuccuccauauguucccuuu

SEQ ID NO: 208800 - RNA, 32 nt, Homo Sapiens
ggagccuucagaugagaauccaaagauacaag

SEQ ID NO: 208801 - RNA, 32 nt, Homo Sapiens
aggaaggggcaugugcuggacgcggacacaug

SEQ ID NO: 208802 - RNA, 32 nt, Homo Sapiens
uuacagucacaugagggugucaauggccugau

SEQ ID NO: 208803 - RNA, 32 nt, Homo Sapiens
uuauaagauccauugauguccaaauaauacca

SEQ ID NO: 208804 - RNA, 32 nt, Homo Sapiens
cagggggcacuugagcugggcuggggcucagg

SEQ ID NO: 208805 - RNA, 32 nt, Homo Sapiens
aagagugaaaauagagggaagugucaugcaag
